United States Patent Application Publication US 2007/0042381 A1 - sequence listing, part 56

SEQ ID NO: 2533451 - RNA, 15 nt, Human
aaccuugagacagcu

SEQ ID NO: 2533452 - RNA, 17 nt, Human
aaccuucuggccuccca

SEQ ID NO: 2533453 - RNA, 22 nt, Human
aaccugugaccagucugacccu

SEQ ID NO: 2533454 - RNA, 18 nt, Human
aaccuugaaaacuuuaug

SEQ ID NO: 2533455 - RNA, 12 nt, Human
aaccugugucuc

SEQ ID NO: 2533456 - RNA, 11 nt, Human
aaccuguccuu

SEQ ID NO: 2533457 - RNA, 22 nt, Human
aacuacaugagaacaaacagau

SEQ ID NO: 2533458 - RNA, 23 nt, Human
aaccuugccuuucucgauuuuau

SEQ ID NO: 2533459 - RNA, 18 nt, Human
aaccuugguguaguugaa

SEQ ID NO: 2533460 - RNA, 20 nt, Human
aaccuugguguaguugaacu

SEQ ID NO: 2533461 - RNA, 19 nt, Human
aacuacuccggagacaggg

SEQ ID NO: 2533462 - RNA, 17 nt, Human
aacuacucagggaauga

SEQ ID NO: 2533463 - RNA, 19 nt, Human
aacuacgcuugcucauuuu

SEQ ID NO: 2533464 - RNA, 21 nt, Human
aaccuugguguaguugaacug

SEQ ID NO: 2533465 - RNA, 18 nt, Human
aacuaucuuggugaauuu

SEQ ID NO: 2533466 - RNA, 11 nt, Human
aacuaucuugg

SEQ ID NO: 2533467 - RNA, 17 nt, Human
aacuaugaacuacaaag

SEQ ID NO: 2533468 - RNA, 18 nt, Human
aacuaugauaugguaaaa

SEQ ID NO: 2533469 - RNA, 17 nt, Human
aacuaugcauggugccc

SEQ ID NO: 2533470 - RNA, 22 nt, Human
aacuaugcauggugccccagga

SEQ ID NO: 2533471 - RNA, 21 nt, Human
aacuaugauuuggaaaauaaa

SEQ ID NO: 2533472 - RNA, 16 nt, Human
aacuaugauuuggaaa

SEQ ID NO: 2533473 - RNA, 21 nt, Human
aacuagaguuuagcuggaaaa

SEQ ID NO: 2533474 - RNA, 23 nt, Human
aacuagagcagcccuggagucau

SEQ ID NO: 2533475 - RNA, 22 nt, Human
aacuagagcagcccuggaguca

SEQ ID NO: 2533476 - RNA, 20 nt, Human
aacuagagaugacugagucc

SEQ ID NO: 2533477 - RNA, 16 nt, Human
aacuagagcagcccug

SEQ ID NO: 2533478 - RNA, 20 nt, Human
aacuagacucccaagcugga

SEQ ID NO: 2533479 - RNA, 23 nt, Human
aacuagacucccaagcuggacua

SEQ ID NO: 2533480 - RNA, 13 nt, Human
aacuacuguguuc

SEQ ID NO: 2533481 - RNA, 14 nt, Human
aacuacuguguucc

SEQ ID NO: 2533482 - RNA, 23 nt, Human
guaacagaaagggcaacaauaaa

SEQ ID NO: 2533483 - RNA, 22 nt, Human
guaacagaaagggcaacaauaa

SEQ ID NO: 2533484 - RNA, 21 nt, Human
guaacagaaagggcaacaaua

SEQ ID NO: 2533485 - RNA, 16 nt, Human
guaacagaaagggcaa

SEQ ID NO: 2533486 - RNA, 15 nt, Human
guaacagaaagggca

SEQ ID NO: 2533487 - RNA, 12 nt, Human
guaacagaaagg

SEQ ID NO: 2533488 - RNA, 11 nt, Human
guaacagaaag

SEQ ID NO: 2533489 - RNA, 17 nt, Human
guaacacuuuacaaugu

SEQ ID NO: 2533490 - RNA, 16 nt, Human
guaacacuuuacaaug

SEQ ID NO: 2533491 - RNA, 19 nt, Human
guaacaauuuuaaugcuau

SEQ ID NO: 2533492 - RNA, 19 nt, Human
guaaauuuccccaacagug

SEQ ID NO: 2533493 - RNA, 18 nt, Human
guaaauuuccccaacagu

SEQ ID NO: 2533494 - RNA, 19 nt, Human
guaaauuuagcauaucaau

SEQ ID NO: 2533495 - RNA, 20 nt, Human
guaacacaagccacagaagc

SEQ ID NO: 2533496 - RNA, 19 nt, Human
guaacacaagccacagaag

SEQ ID NO: 2533497 - RNA, 17 nt, Human
guaacacaagccacaga

SEQ ID NO: 2533498 - RNA, 23 nt, Human
guaacacagugccuucaauaaau

SEQ ID NO: 2533499 - RNA, 22 nt, Human
guaacacagugccuucaauaaa

SEQ ID NO: 2533500 - RNA, 22 nt, Human
guaacacagcugagagacuuuu

SEQ ID NO: 2533501 - RNA, 19 nt, Human
aaaugggggugcauuugag

SEQ ID NO: 2533502 - RNA, 17 nt, Human
guaacaguucauguuug

SEQ ID NO: 2533503 - RNA, 18 nt, Human
guaacagucugaucguga

SEQ ID NO: 2533504 - RNA, 20 nt, Human
guaacaggucuccucuuaaa

SEQ ID NO: 2533505 - RNA, 21 nt, Human
guaacaggucuccucuuaaaa

SEQ ID NO: 2533506 - RNA, 14 nt, Human
guaacagaacagcu

SEQ ID NO: 2533507 - RNA, 14 nt, Human
guaacaggucuccu

SEQ ID NO: 2533508 - RNA, 16 nt, Human
guaacaggucuccucu

SEQ ID NO: 2533509 - RNA, 12 nt, Human
guaacaggcaga

SEQ ID NO: 2533510 - RNA, 22 nt, Human
guaacaggaaaauuuuaaaaau

SEQ ID NO: 2533511 - RNA, 19 nt, Human
aaaugguaggcauuuccua

SEQ ID NO: 2533512 - RNA, 14 nt, Human
aaaugguccaggag

SEQ ID NO: 2533513 - RNA, 16 nt, Human
aaauggucgcccagga

SEQ ID NO: 2533514 - RNA, 17 nt, Human
aaauggucgcccaggag

SEQ ID NO: 2533515 - RNA, 22 nt, Human
aaauggguuggugcuucuaacc

SEQ ID NO: 2533516 - RNA, 20 nt, Human
guaacaguucauguuugcuu

SEQ ID NO: 2533517 - RNA, 18 nt, Human
guaacaguucauguuugc

SEQ ID NO: 2533518 - RNA, 20 nt, Human
aaauggguuggugcuucuaa

SEQ ID NO: 2533519 - RNA, 19 nt, Human
aaauggguagagaaacacu

SEQ ID NO: 2533520 - RNA, 13 nt, Human
aaaugguuaaaag

SEQ ID NO: 2533521 - RNA, 19 nt, Human
aaaugguuaaaagagguuu

SEQ ID NO: 2533522 - RNA, 16 nt, Human
aaaugguguacauaau

SEQ ID NO: 2533523 - RNA, 13 nt, Human
aaaugguuguauu

SEQ ID NO: 2533524 - RNA, 11 nt, Human
aaaugguuaaa

SEQ ID NO: 2533525 - RNA, 14 nt, Human
aaaugguguuuuuu

SEQ ID NO: 2533526 - RNA, 14 nt, Human
aaaugguguacaua

SEQ ID NO: 2533527 - RNA, 20 nt, Human
aaaugguguacauaauguau

SEQ ID NO: 2533528 - RNA, 14 nt, Human
aaauggugccuuca

SEQ ID NO: 2533529 - RNA, 18 nt, Human
aaauggucgcccaggaga

SEQ ID NO: 2533530 - RNA, 11 nt, Human
aaauggugccu

SEQ ID NO: 2533531 - RNA, 23 nt, Human
aaauggugaaaauaaaauaaagc

SEQ ID NO: 2533532 - RNA, 18 nt, Human
guaguugcaauagaacag

SEQ ID NO: 2533533 - RNA, 15 nt, Human
guaguuaggaaauaa

SEQ ID NO: 2533534 - RNA, 16 nt, Human
guaguuaggaaauaaa

SEQ ID NO: 2533535 - RNA, 20 nt, Human
guaguuaggaaauaaaaccu

SEQ ID NO: 2533536 - RNA, 22 nt, Human
guaguuaggaaauaaaaccuuu

SEQ ID NO: 2533537 - RNA, 20 nt, Human
guaguguuggagaagaacug

SEQ ID NO: 2533538 - RNA, 11 nt, Human
guaguuaggaa

SEQ ID NO: 2533539 - RNA, 13 nt, Human
guaguuaggaaau

SEQ ID NO: 2533540 - RNA, 14 nt, Human
guaguuaggaaaua

SEQ ID NO: 2533541 - RNA, 19 nt, Human
guauaaaacuuuccucgcc

SEQ ID NO: 2533542 - RNA, 18 nt, Human
guauaaaacuuuccucgc

SEQ ID NO: 2533543 - RNA, 16 nt, Human
guauaaaacuuuccuc

SEQ ID NO: 2533544 - RNA, 15 nt, Human
guauaaaacuuuccu

SEQ ID NO: 2533545 - RNA, 19 nt, Human
guauaaaagggacugagaa

SEQ ID NO: 2533546 - RNA, 12 nt, Human
guauaaaaacaa

SEQ ID NO: 2533547 - RNA, 15 nt, Human
guauaaaaaaaauag

SEQ ID NO: 2533548 - RNA, 16 nt, Human
guaguugucuuuccug

SEQ ID NO: 2533549 - RNA, 12 nt, Human
guaguugucuuu

SEQ ID NO: 2533550 - RNA, 21 nt, Human
guaguuuuaucacauguaugu

SEQ ID NO: 2533551 - RNA, 17 nt, Human
guaguuuuucuucaaca

SEQ ID NO: 2533552 - RNA, 19 nt, Human
aaaugguuguauuagaugu

SEQ ID NO: 2533553 - RNA, 17 nt, Human
aaaugguuguauuagau

SEQ ID NO: 2533554 - RNA, 16 nt, Human
aaaugguuguauuaga

SEQ ID NO: 2533555 - RNA, 14 nt, Human
aaaugguuguauua

SEQ ID NO: 2533556 - RNA, 22 nt, Human
aaaugguuguauuagauguucu

SEQ ID NO: 2533557 - RNA, 20 nt, Human
aaaugguuguauuagauguu

SEQ ID NO: 2533558 - RNA, 17 nt, Human
aaauguaacagucugau

SEQ ID NO: 2533559 - RNA, 16 nt, Human
aaauguaacagucuga

SEQ ID NO: 2533560 - RNA, 13 nt, Human
aaauguaacaguc

SEQ ID NO: 2533561 - RNA, 17 nt, Human
aaauguaaauauucuau

SEQ ID NO: 2533562 - RNA, 22 nt, Human
aaauguaaagauauuuuuaucu

SEQ ID NO: 2533563 - RNA, 15 nt, Human
aaauguaaauauucu

SEQ ID NO: 2533564 - RNA, 17 nt, Human
aaauguaacuuuuguaa

SEQ ID NO: 2533565 - RNA, 16 nt, Human
aaauguaagggaaacu

SEQ ID NO: 2533566 - RNA, 17 nt, Human
guaguguuggagaagaa

SEQ ID NO: 2533567 - RNA, 18 nt, Human
aaauguaacuuuuguaag

SEQ ID NO: 2533568 - RNA, 22 nt, Human
aaauguaagaucguucucugcc

SEQ ID NO: 2533569 - RNA, 14 nt, Human
aaauguaagaucgu

SEQ ID NO: 2533570 - RNA, 15 nt, Human
guaucaaauaaaauu

SEQ ID NO: 2533571 - RNA, 21 nt, Human
guauauuuugggaaucuuuuc

SEQ ID NO: 2533572 - RNA, 18 nt, Human
guaucaggugcugccauc

SEQ ID NO: 2533573 - RNA, 16 nt, Human
guaucaggugcugcca

SEQ ID NO: 2533574 - RNA, 15 nt, Human
guauauuuguacaaa

SEQ ID NO: 2533575 - RNA, 13 nt, Human
guauauuuguaca

SEQ ID NO: 2533576 - RNA, 22 nt, Human
guauauuuauagucacaagagc

SEQ ID NO: 2533577 - RNA, 13 nt, Human
guauauuuauagu

SEQ ID NO: 2533578 - RNA, 17 nt, Human
guauauuuaaaagaaag

SEQ ID NO: 2533579 - RNA, 16 nt, Human
guauauuuuauaucaa

SEQ ID NO: 2533580 - RNA, 14 nt, Human
guauauuuguacaa

SEQ ID NO: 2533581 - RNA, 20 nt, Human
guauauuugugauagcacuu

SEQ ID NO: 2533582 - RNA, 21 nt, Human
guauauuugugauagcacuuu

SEQ ID NO: 2533583 - RNA, 23 nt, Human
guauauuugugauagcacuuucu

SEQ ID NO: 2533584 - RNA, 21 nt, Human
guauaaaauaauuuuuauauu

SEQ ID NO: 2533585 - RNA, 15 nt, Human
guauaaaauaauuuu

SEQ ID NO: 2533586 - RNA, 18 nt, Human
guauaaguaagaaaauau

SEQ ID NO: 2533587 - RNA, 21 nt, Human
guauaaaacuuuccucgccug

SEQ ID NO: 2533588 - RNA, 18 nt, Human
guauaaaagggacugaga

SEQ ID NO: 2533589 - RNA, 15 nt, Human
guauaaguggugugu

SEQ ID NO: 2533590 - RNA, 19 nt, Human
guauaaguggaggcacuuu

SEQ ID NO: 2533591 - RNA, 20 nt, Human
guauaaguggaggcacuuua

SEQ ID NO: 2533592 - RNA, 23 nt, Human
guauaaguccuugcaagaaucag

SEQ ID NO: 2533593 - RNA, 19 nt, Human
guauauuguguuuguguau

SEQ ID NO: 2533594 - RNA, 20 nt, Human
guauauuguguuuguguauu

SEQ ID NO: 2533595 - RNA, 13 nt, Human
guauauuguguuu

SEQ ID NO: 2533596 - RNA, 17 nt, Human
guauaaguaagaaaaua

SEQ ID NO: 2533597 - RNA, 23 nt, Human
guauaaugguugacuggguuucu

SEQ ID NO: 2533598 - RNA, 21 nt, Human
guauaaguggaggcacuuuag

SEQ ID NO: 2533599 - RNA, 19 nt, Human
guauaaugguugacugggu

SEQ ID NO: 2533600 - RNA, 21 nt, Human
guauaaugguugacuggguuu

SEQ ID NO: 2533601 - RNA, 15 nt, Human
guauaauauuuuuaa

SEQ ID NO: 2533602 - RNA, 12 nt, Human
guauaauauuuu

SEQ ID NO: 2533603 - RNA, 21 nt, Human
guaugcuucauacagggaugg

SEQ ID NO: 2533604 - RNA, 14 nt, Human
guaugguggcuggg

SEQ ID NO: 2533605 - RNA, 16 nt, Human
guaugguggcuggguu

SEQ ID NO: 2533606 - RNA, 15 nt, Human
guaugguggcugggu

SEQ ID NO: 2533607 - RNA, 12 nt, Human
guaugcuucaua

SEQ ID NO: 2533608 - RNA, 13 nt, Human
guaugcuucauac

SEQ ID NO: 2533609 - RNA, 14 nt, Human
guaugcuucauaca

SEQ ID NO: 2533610 - RNA, 15 nt, Human
guaugcuucauacag

SEQ ID NO: 2533611 - RNA, 15 nt, Human
guaugcgugugugug

SEQ ID NO: 2533612 - RNA, 17 nt, Human
guaugcaugugaagaaa

SEQ ID NO: 2533613 - RNA, 16 nt, Human
guaugcaugugaagaa

SEQ ID NO: 2533614 - RNA, 18 nt, Human
guaugcaugugaagaaag

SEQ ID NO: 2533615 - RNA, 21 nt, Human
guaucccaugagccucagcau

SEQ ID NO: 2533616 - RNA, 19 nt, Human
guaucccaugagccucagc

SEQ ID NO: 2533617 - RNA, 17 nt, Human
guauccauuaucaugug

SEQ ID NO: 2533618 - RNA, 16 nt, Human
guauccauuaucaugu

SEQ ID NO: 2533619 - RNA, 18 nt, Human
guauccaugggggcaggg

SEQ ID NO: 2533620 - RNA, 20 nt, Human
guauccaugggggcagggca

SEQ ID NO: 2533621 - RNA, 19 nt, Human
guauccauuaucaugugua

SEQ ID NO: 2533622 - RNA, 18 nt, Human
guauccauuaucaugugu

SEQ ID NO: 2533623 - RNA, 21 nt, Human
guauccauuaucauguguaau

SEQ ID NO: 2533624 - RNA, 19 nt, Human
guaucccaacuccuauaau

SEQ ID NO: 2533625 - RNA, 16 nt, Human
guauccaugggggcag

SEQ ID NO: 2533626 - RNA, 14 nt, Human
guauccacuuugca

SEQ ID NO: 2533627 - RNA, 19 nt, Human
guauccacuuugcacagcu

SEQ ID NO: 2533628 - RNA, 18 nt, Human
guaucaugcccugugcaa

SEQ ID NO: 2533629 - RNA, 22 nt, Human
guaucauuguuguuugauuucu

SEQ ID NO: 2533630 - RNA, 11 nt, Human
guaucaugcau

SEQ ID NO: 2533631 - RNA, 24 nt, Human
guaucaucuggauaggagccugcu

SEQ ID NO: 2533632 - RNA, 17 nt, Human
guaucaugcccugugca

SEQ ID NO: 2533633 - RNA, 14 nt, Human
guaucaucuggaua

SEQ ID NO: 2533634 - RNA, 14 nt, Human
guaucaugaagccu

SEQ ID NO: 2533635 - RNA, 17 nt, Human
guaucaguugcaauaau

SEQ ID NO: 2533636 - RNA, 15 nt, Human
guaucaggucuccca

SEQ ID NO: 2533637 - RNA, 12 nt, Human
guaucauagaaa

SEQ ID NO: 2533638 - RNA, 15 nt, Human
guaucauagaaaugu

SEQ ID NO: 2533639 - RNA, 22 nt, Human
guaucaggugcugccauccagg

SEQ ID NO: 2533640 - RNA, 17 nt, Human
guaucaggacgagaaug

SEQ ID NO: 2533641 - RNA, 18 nt, Human
guaucaggccugccagac

SEQ ID NO: 2533642 - RNA, 22 nt, Human
guaucaggccugccagacggca

SEQ ID NO: 2533643 - RNA, 16 nt, Human
gucaaacaugaagugu

SEQ ID NO: 2533644 - RNA, 15 nt, Human
gucaaacaugaagug

SEQ ID NO: 2533645 - RNA, 16 nt, Human
gucaaacaaagccaga

SEQ ID NO: 2533646 - RNA, 17 nt, Human
gucaaacaaagccagaa

SEQ ID NO: 2533647 - RNA, 21 nt, Human
gucaaaccgcacucacccaug

SEQ ID NO: 2533648 - RNA, 13 nt, Human
gucaaaccgcacu

SEQ ID NO: 2533649 - RNA, 16 nt, Human
gucaaaccauaaacuu

SEQ ID NO: 2533650 - RNA, 14 nt, Human
gucaaacgugaaaa

SEQ ID NO: 2533651 - RNA, 17 nt, Human
gucaaacgugaaaaugc

SEQ ID NO: 2533652 - RNA, 15 nt, Human
gucaaacgugaaaau

SEQ ID NO: 2533653 - RNA, 12 nt, Human
gucaaagaaaug

SEQ ID NO: 2533654 - RNA, 22 nt, Human
gucaaaccgcacucacccaugu

SEQ ID NO: 2533655 - RNA, 16 nt, Human
gucaaacuguagaaau

SEQ ID NO: 2533656 - RNA, 20 nt, Human
gucaaacuguagaaaugaug

SEQ ID NO: 2533657 - RNA, 17 nt, Human
gucaacacuaacaugau

SEQ ID NO: 2533658 - RNA, 21 nt, Human
gucaacaaguaugaauaaaga

SEQ ID NO: 2533659 - RNA, 22 nt, Human
gucaacacuuaaggguuuuaga

SEQ ID NO: 2533660 - RNA, 16 nt, Human
gucaaagaaaugcuga

SEQ ID NO: 2533661 - RNA, 23 nt, Human
gucaaagcaggggaguaugcaaa

SEQ ID NO: 2533662 - RNA, 18 nt, Human
gucaacaaacuauuucuu

SEQ ID NO: 2533663 - RNA, 11 nt, Human
gucaaagaagg

SEQ ID NO: 2533664 - RNA, 13 nt, Human
gucaaaguaaaac

SEQ ID NO: 2533665 - RNA, 16 nt, Human
gucaaauugugugaaa

SEQ ID NO: 2533666 - RNA, 14 nt, Human
guauuuuuaauggg

SEQ ID NO: 2533667 - RNA, 20 nt, Human
aaauuuauuuccuaguucug

SEQ ID NO: 2533668 - RNA, 21 nt, Human
guauuuuucaauaaagcauuu

SEQ ID NO: 2533669 - RNA, 22 nt, Human
guauuuuuaauggggguagcag

SEQ ID NO: 2533670 - RNA, 18 nt, Human
guauuuuuaaugggggua

SEQ ID NO: 2533671 - RNA, 13 nt, Human
aaauuuauuuccu

SEQ ID NO: 2533672 - RNA, 21 nt, Human
aaauuuauuuacugcuagucu

SEQ ID NO: 2533673 - RNA, 22 nt, Human
guauuuuguuuuugucuuaaaa

SEQ ID NO: 2533674 - RNA, 18 nt, Human
guauuuuucaauaaagca

SEQ ID NO: 2533675 - RNA, 15 nt, Human
gucaaaaggugccug

SEQ ID NO: 2533676 - RNA, 16 nt, Human
gucaaaaggugccugu

SEQ ID NO: 2533677 - RNA, 16 nt, Human
gucaaaacucaaaugc

SEQ ID NO: 2533678 - RNA, 15 nt, Human
gucaaaagcuggauu

SEQ ID NO: 2533679 - RNA, 14 nt, Human
gucaaaaggugccu

SEQ ID NO: 2533680 - RNA, 15 nt, Human
gucaaacaaagccag

SEQ ID NO: 2533681 - RNA, 20 nt, Human
gucaaacaaacucucugaac

SEQ ID NO: 2533682 - RNA, 20 nt, Human
aaauuguaagcaugcacaaa

SEQ ID NO: 2533683 - RNA, 18 nt, Human
aaauucugucucuggauu

SEQ ID NO: 2533684 - RNA, 19 nt, Human
aaauuguaagcaugcacaa

SEQ ID NO: 2533685 - RNA, 16 nt, Human
aaauucugucucugga

SEQ ID NO: 2533686 - RNA, 21 nt, Human
aaauuauuuguguaauagaaa

SEQ ID NO: 2533687 - RNA, 16 nt, Human
aaauuauuuguguaau

SEQ ID NO: 2533688 - RNA, 13 nt, Human
aaauuauuugugu

SEQ ID NO: 2533689 - RNA, 15 nt, Human
aaauuauuuauuauu

SEQ ID NO: 2533690 - RNA, 13 nt, Human
aaauuauuugaaa

SEQ ID NO: 2533691 - RNA, 13 nt, Human
aaauuauuugcau

SEQ ID NO: 2533692 - RNA, 13 nt, Human
aaauuauuucaga

SEQ ID NO: 2533693 - RNA, 15 nt, Human
aaauuguacauauuu

SEQ ID NO: 2533694 - RNA, 15 nt, Human
aaauuguauauucac

SEQ ID NO: 2533695 - RNA, 22 nt, Human
aaauuguacauauuuguggaau

SEQ ID NO: 2533696 - RNA, 14 nt, Human
aaauuguauauuca

SEQ ID NO: 2533697 - RNA, 12 nt, Human
aaauuguacaua

SEQ ID NO: 2533698 - RNA, 12 nt, Human
aaauugugaugu

SEQ ID NO: 2533699 - RNA, 15 nt, Human
aaauugugauguguc

SEQ ID NO: 2533700 - RNA, 19 nt, Human
aaauugugggucuauuucu

SEQ ID NO: 2533701 - RNA, 14 nt, Human
aaauuuauuuacug

SEQ ID NO: 2533702 - RNA, 19 nt, Human
aaauuuauuuacugcuagu

SEQ ID NO: 2533703 - RNA, 15 nt, Human
aaauuuaugugaugg

SEQ ID NO: 2533704 - RNA, 22 nt, Human
aaauuguuuccaagauagagag

SEQ ID NO: 2533705 - RNA, 21 nt, Human
aaauuguuucaaaauaaaaac

SEQ ID NO: 2533706 - RNA, 12 nt, Human
aaauuuauguga

SEQ ID NO: 2533707 - RNA, 22 nt, Human
aaauuguuuaaguguuguaaau

SEQ ID NO: 2533708 - RNA, 13 nt, Human
aaaugugaugaau

SEQ ID NO: 2533709 - RNA, 22 nt, Human
aaaugucuuuuuuuuaaugugc

SEQ ID NO: 2533710 - RNA, 20 nt, Human
aaaugucuuuuuuuuaaugu

SEQ ID NO: 2533711 - RNA, 19 nt, Human
aaaugugaaugggaaaaga

SEQ ID NO: 2533712 - RNA, 21 nt, Human
aaaugugaauaaaauuauuuu

SEQ ID NO: 2533713 - RNA, 22 nt, Human
aaaugucuaauguauuuuauug

SEQ ID NO: 2533714 - RNA, 20 nt, Human
aaaugucuaauguauuuuau

SEQ ID NO: 2533715 - RNA, 19 nt, Human
aaaugucuaauguauuuua

SEQ ID NO: 2533716 - RNA, 18 nt, Human
aaaugucuaauguauuuu

SEQ ID NO: 2533717 - RNA, 24 nt, Human
aaaugucuaguuguaacaccauga

SEQ ID NO: 2533718 - RNA, 13 nt, Human
aaaugucuugugu

SEQ ID NO: 2533719 - RNA, 22 nt, Human
aaaugucuuuccuuuugcucuu

SEQ ID NO: 2533720 - RNA, 20 nt, Human
aaaugucagauacaauguau

SEQ ID NO: 2533721 - RNA, 15 nt, Human
aaaugucagauacaa

SEQ ID NO: 2533722 - RNA, 22 nt, Human
aaaugucagauacaauguauuu

SEQ ID NO: 2533723 - RNA, 22 nt, Human
aaaugucaguggaagaagcaga

SEQ ID NO: 2533724 - RNA, 16 nt, Human
aaaugucuaauguauu

SEQ ID NO: 2533725 - RNA, 11 nt, Human
aaaugucuaau

SEQ ID NO: 2533726 - RNA, 22 nt, Human
aaauguccuccagaagccucug

SEQ ID NO: 2533727 - RNA, 19 nt, Human
aaaugucuaguuguaacac

SEQ ID NO: 2533728 - RNA, 18 nt, Human
guauguacuucaugcugu

SEQ ID NO: 2533729 - RNA, 11 nt, Human
guauguauaau

SEQ ID NO: 2533730 - RNA, 15 nt, Human
guauguauaauucaa

SEQ ID NO: 2533731 - RNA, 13 nt, Human
guauguaaaugug

SEQ ID NO: 2533732 - RNA, 15 nt, Human
guauguaaauguaua

SEQ ID NO: 2533733 - RNA, 12 nt, Human
guauguaaaugu

SEQ ID NO: 2533734 - RNA, 11 nt, Human
guauguaaaug

SEQ ID NO: 2533735 - RNA, 15 nt, Human
guauguaaaugugca

SEQ ID NO: 2533736 - RNA, 14 nt, Human
guauguaaaugugc

SEQ ID NO: 2533737 - RNA, 15 nt, Human
guaugguugacacua

SEQ ID NO: 2533738 - RNA, 22 nt, Human
guaugccuuuaaaucugugaug

SEQ ID NO: 2533739 - RNA, 16 nt, Human
guaugcuuauuuuaaa

SEQ ID NO: 2533740 - RNA, 14 nt, Human
guauguaaacagga

SEQ ID NO: 2533741 - RNA, 17 nt, Human
guaugucauuuccuuca

SEQ ID NO: 2533742 - RNA, 14 nt, Human
guaugucauuuccu

SEQ ID NO: 2533743 - RNA, 18 nt, Human
aaauguaugauuacauca

SEQ ID NO: 2533744 - RNA, 12 nt, Human
aaauguguacau

SEQ ID NO: 2533745 - RNA, 12 nt, Human
aaaugugugugu

SEQ ID NO: 2533746 - RNA, 16 nt, Human
aaauguguuuaaaaca

SEQ ID NO: 2533747 - RNA, 21 nt, Human
aaaugugaugaauacuguauu

SEQ ID NO: 2533748 - RNA, 13 nt, Human
aaaugugauuuuu

SEQ ID NO: 2533749 - RNA, 10 nt, Human
aaauguguaa

SEQ ID NO: 2533750 - RNA, 20 nt, Human
aaauguguaucggaugcuuu

SEQ ID NO: 2533751 - RNA, 13 nt, Human
aaauguguauuuu

SEQ ID NO: 2533752 - RNA, 14 nt, Human
aaauuaagaaagga

SEQ ID NO: 2533753 - RNA, 13 nt, Human
aaauguguuucug

SEQ ID NO: 2533754 - RNA, 14 nt, Human
aaauguguuucugu

SEQ ID NO: 2533755 - RNA, 13 nt, Human
aaauuaagaagaa

SEQ ID NO: 2533756 - RNA, 14 nt, Human
aaauuaagaagaaa

SEQ ID NO: 2533757 - RNA, 15 nt, Human
aaauuaagaagaaac

SEQ ID NO: 2533758 - RNA, 16 nt, Human
aaauuaagaagaaacu

SEQ ID NO: 2533759 - RNA, 14 nt, Human
aaauuaagaaggca

SEQ ID NO: 2533760 - RNA, 15 nt, Human
aaauuaagaaggcaa

SEQ ID NO: 2533761 - RNA, 12 nt, Human
aaauuaagacau

SEQ ID NO: 2533762 - RNA, 19 nt, Human
aaauuauaacuuaaaauau

SEQ ID NO: 2533763 - RNA, 22 nt, Human
aaauuauaacuuaaaauauuuu

SEQ ID NO: 2533764 - RNA, 17 nt, Human
aaauuauagaugggaau

SEQ ID NO: 2533765 - RNA, 24 nt, Human
aaauuauguuuauauaaaugcuuu

SEQ ID NO: 2533766 - RNA, 15 nt, Human
aaauuauuuaauaaa

SEQ ID NO: 2533767 - RNA, 23 nt, Human
aaauuauuaguuuacaucauuuu

SEQ ID NO: 2533768 - RNA, 14 nt, Human
aaauuauuaaugaa

SEQ ID NO: 2533769 - RNA, 19 nt, Human
aaauuauuaguuuacauca

SEQ ID NO: 2533770 - RNA, 18 nt, Human
aaauuagguauuuugucc

SEQ ID NO: 2533771 - RNA, 13 nt, Human
aaauuaauaaucu

SEQ ID NO: 2533772 - RNA, 17 nt, Human
aaauuaaggguuaagaa

SEQ ID NO: 2533773 - RNA, 17 nt, Human
aaauuagguuuuguaca

SEQ ID NO: 2533774 - RNA, 19 nt, Human
aaauuagguuuuguacaau

SEQ ID NO: 2533775 - RNA, 23 nt, Human
aaauuagguuuuguacaauugaa

SEQ ID NO: 2533776 - RNA, 21 nt, Human
aaauuaguuagccaauauuuu

SEQ ID NO: 2533777 - RNA, 16 nt, Human
aaauuauaacuuaaaa

SEQ ID NO: 2533778 - RNA, 17 nt, Human
aaauuauaacuuaaaau

SEQ ID NO: 2533779 - RNA, 16 nt, Human
gucaguaucaggccug

SEQ ID NO: 2533780 - RNA, 23 nt, Human
gucaguaucaggccugccagacg

SEQ ID NO: 2533781 - RNA, 22 nt, Human
gucaguaccuucaaacuagggc

SEQ ID NO: 2533782 - RNA, 16 nt, Human
gucaguaccuucaaac

SEQ ID NO: 2533783 - RNA, 20 nt, Human
gucaggcugcuggcgccucu

SEQ ID NO: 2533784 - RNA, 17 nt, Human
gucaggcugcuggcgcc

SEQ ID NO: 2533785 - RNA, 22 nt, Human
gucaggcugcuggcgccucugc

SEQ ID NO: 2533786 - RNA, 13 nt, Human
gucagggaccaag

SEQ ID NO: 2533787 - RNA, 14 nt, Human
gucagggaccaagg

SEQ ID NO: 2533788 - RNA, 16 nt, Human
gucagggaccaaggac

SEQ ID NO: 2533789 - RNA, 21 nt, Human
gucagggaccaaggaccccuc

SEQ ID NO: 2533790 - RNA, 14 nt, Human
gucagggaccccug

SEQ ID NO: 2533791 - RNA, 16 nt, Human
gucaguauuguuuugg

SEQ ID NO: 2533792 - RNA, 14 nt, Human
gucaguauuguuuu

SEQ ID NO: 2533793 - RNA, 13 nt, Human
gucagucacagcc

SEQ ID NO: 2533794 - RNA, 21 nt, Human
gucaguauguggaaguguggg

SEQ ID NO: 2533795 - RNA, 17 nt, Human
gucaguauguggaagug

SEQ ID NO: 2533796 - RNA, 21 nt, Human
gucaguaucuguaucucucuc

SEQ ID NO: 2533797 - RNA, 20 nt, Human
gucaguaucuguaucucucu

SEQ ID NO: 2533798 - RNA, 14 nt, Human
gucaguaugacauu

SEQ ID NO: 2533799 - RNA, 14 nt, Human
gucagucacagcca

SEQ ID NO: 2533800 - RNA, 16 nt, Human
gucagucacagccacc

SEQ ID NO: 2533801 - RNA, 15 nt, Human
gucagugugacugau

SEQ ID NO: 2533802 - RNA, 13 nt, Human
gucaguuguauca

SEQ ID NO: 2533803 - RNA, 19 nt, Human
gucagucaugauggcacca

SEQ ID NO: 2533804 - RNA, 18 nt, Human
gucauaacuaaauaaagc

SEQ ID NO: 2533805 - RNA, 14 nt, Human
aaauuugauugauu

SEQ ID NO: 2533806 - RNA, 13 nt, Human
aaauuuguugcau

SEQ ID NO: 2533807 - RNA, 18 nt, Human
aaauuuguugaaauuaug

SEQ ID NO: 2533808 - RNA, 14 nt, Human
aaauuuguugcaua

SEQ ID NO: 2533809 - RNA, 22 nt, Human
aaauuuguuuugacggaugauu

SEQ ID NO: 2533810 - RNA, 18 nt, Human
aaauuuguuugaaaucuu

SEQ ID NO: 2533811 - RNA, 14 nt, Human
aaauuuguuugaaa

SEQ ID NO: 2533812 - RNA, 22 nt, Human
aaauuuuaauauggguucuuuu

SEQ ID NO: 2533813 - RNA, 23 nt, Human
aaauuugucuugccuuauuaaag

SEQ ID NO: 2533814 - RNA, 19 nt, Human
aaauuuguuauuuugcaac

SEQ ID NO: 2533815 - RNA, 18 nt, Human
aaauuuguuauaaugaau

SEQ ID NO: 2533816 - RNA, 20 nt, Human
aaauuuguaaguuucaggug

SEQ ID NO: 2533817 - RNA, 19 nt, Human
aaauuuguaaguuucaggu

SEQ ID NO: 2533818 - RNA, 17 nt, Human
aaauuuguaaguuucag

SEQ ID NO: 2533819 - RNA, 16 nt, Human
aaauuuguaaguuuca

SEQ ID NO: 2533820 - RNA, 15 nt, Human
aaauuuguaaguuuc

SEQ ID NO: 2533821 - RNA, 14 nt, Human
aaauuuguaaguuu

SEQ ID NO: 2533822 - RNA, 13 nt, Human
aaauuuguaaguu

SEQ ID NO: 2533823 - RNA, 12 nt, Human
aaauuuguaagu

SEQ ID NO: 2533824 - RNA, 22 nt, Human
aaauuuguaaguuucaggugac

SEQ ID NO: 2533825 - RNA, 15 nt, Human
aaauuugauugauuu

SEQ ID NO: 2533826 - RNA, 17 nt, Human
aaauuugauugauuuga

SEQ ID NO: 2533827 - RNA, 14 nt, Human
aaauuugauuucua

SEQ ID NO: 2533828 - RNA, 16 nt, Human
aaauuugguucuaaua

SEQ ID NO: 2533829 - RNA, 15 nt, Human
aaauuugguucuaau

SEQ ID NO: 2533830 - RNA, 19 nt, Human
gucaggcguagaucaccag

SEQ ID NO: 2533831 - RNA, 23 nt, Human
gucaggccugugugugaaaggaa

SEQ ID NO: 2533832 - RNA, 15 nt, Human
gucaggccugugugu

SEQ ID NO: 2533833 - RNA, 13 nt, Human
gucaggccugugu

SEQ ID NO: 2533834 - RNA, 12 nt, Human
gucaggcuccau

SEQ ID NO: 2533835 - RNA, 17 nt, Human
gucaggcuccauuagga

SEQ ID NO: 2533836 - RNA, 16 nt, Human
gucaggcugcuggcgc

SEQ ID NO: 2533837 - RNA, 15 nt, Human
gucaggcugcuggcg

SEQ ID NO: 2533838 - RNA, 14 nt, Human
gucaggcugcuggc

SEQ ID NO: 2533839 - RNA, 13 nt, Human
gucaggcugcugg

SEQ ID NO: 2533840 - RNA, 22 nt, Human
gucaggcccuuauuuucaagaa

SEQ ID NO: 2533841 - RNA, 21 nt, Human
gucaggcccuuauuuucaaga

SEQ ID NO: 2533842 - RNA, 18 nt, Human
gucaggccacggcagccu

SEQ ID NO: 2533843 - RNA, 16 nt, Human
gucaggccacggcagc

SEQ ID NO: 2533844 - RNA, 15 nt, Human
gucaggccacggcag

SEQ ID NO: 2533845 - RNA, 14 nt, Human
gucaggccacggca

SEQ ID NO: 2533846 - RNA, 13 nt, Human
gucaggcagggug

SEQ ID NO: 2533847 - RNA, 12 nt, Human
gucaggccacgg

SEQ ID NO: 2533848 - RNA, 20 nt, Human
gucagacauccauguuugua

SEQ ID NO: 2533849 - RNA, 18 nt, Human
gucagacauccauguuug

SEQ ID NO: 2533850 - RNA, 19 nt, Human
gucaggaguuagaggccag

SEQ ID NO: 2533851 - RNA, 13 nt, Human
gucaggaguuccu

SEQ ID NO: 2533852 - RNA, 22 nt, Human
gucaggaguuagaggccagccu

SEQ ID NO: 2533853 - RNA, 12 nt, Human
gucaggaugacg

SEQ ID NO: 2533854 - RNA, 23 nt, Human
gucaggaguuagaggccagccug

SEQ ID NO: 2533855 - RNA, 23 nt, Human
gucaggaguucgagaccagccug

SEQ ID NO: 2533856 - RNA, 13 nt, Human
gucagaauagaaa

SEQ ID NO: 2533857 - RNA, 16 nt, Human
gucacagccuccucug

SEQ ID NO: 2533858 - RNA, 14 nt, Human
gucacagccuccuc

SEQ ID NO: 2533859 - RNA, 12 nt, Human
gucacagccuca

SEQ ID NO: 2533860 - RNA, 23 nt, Human
gucagaaguuucugccgcagccc

SEQ ID NO: 2533861 - RNA, 17 nt, Human
gucagaauagaaauuag

SEQ ID NO: 2533862 - RNA, 23 nt, Human
gucacagccuccucugucugccc

SEQ ID NO: 2533863 - RNA, 21 nt, Human
gucacagccuccucugucugc

SEQ ID NO: 2533864 - RNA, 20 nt, Human
gucagaauaauaagaggugc

SEQ ID NO: 2533865 - RNA, 22 nt, Human
gucacacaguauuacuucugcu

SEQ ID NO: 2533866 - RNA, 13 nt, Human
gucacaccagcca

SEQ ID NO: 2533867 - RNA, 12 nt, Human
gucacagccacc

SEQ ID NO: 2533868 - RNA, 21 nt, Human
gucacacaguauuacuucugc

SEQ ID NO: 2533869 - RNA, 23 nt, Human
gucaacagagaaggcaggaaugu

SEQ ID NO: 2533870 - RNA, 19 nt, Human
gucaacagagaaggcagga

SEQ ID NO: 2533871 - RNA, 22 nt, Human
gucaacagagaaggcaggaaug

SEQ ID NO: 2533872 - RNA, 19 nt, Human
gucaacacuuaaggguuuu

SEQ ID NO: 2533873 - RNA, 18 nt, Human
gucaacagagaaggcagg

SEQ ID NO: 2533874 - RNA, 15 nt, Human
aaauuuuuuuagaaa

SEQ ID NO: 2533875 - RNA, 13 nt, Human
aaauuuuuuuaga

SEQ ID NO: 2533876 - RNA, 21 nt, Human
aaauuuuuuuagaaagcauuu

SEQ ID NO: 2533877 - RNA, 23 nt, Human
aacaagaccucagugccuuccug

SEQ ID NO: 2533878 - RNA, 22 nt, Human
aacaagaccucagugccuuccu

SEQ ID NO: 2533879 - RNA, 19 nt, Human
aacaagaccccgucucaaa

SEQ ID NO: 2533880 - RNA, 16 nt, Human
aacaaggcaaggcugu

SEQ ID NO: 2533881 - RNA, 15 nt, Human
aacaaggcaaggcug

SEQ ID NO: 2533882 - RNA, 20 nt, Human
aacaagauuuuaaagacaug

SEQ ID NO: 2533883 - RNA, 22 nt, Human
aacaagaugcuggaugucugcc

SEQ ID NO: 2533884 - RNA, 19 nt, Human
aacaagagcacuacauuca

SEQ ID NO: 2533885 - RNA, 17 nt, Human
aacaagaucuuucagga

SEQ ID NO: 2533886 - RNA, 19 nt, Human
aacaagagcgaaacuccgu

SEQ ID NO: 2533887 - RNA, 19 nt, Human
aacaagaucuuucaggaaa

SEQ ID NO: 2533888 - RNA, 20 nt, Human
aaauuuucuagacuuucugu

SEQ ID NO: 2533889 - RNA, 19 nt, Human
aaauuuucuagacuuucug

SEQ ID NO: 2533890 - RNA, 18 nt, Human
aaauuuucuagacuuucu

SEQ ID NO: 2533891 - RNA, 14 nt, Human
aaauuuucuagacu

SEQ ID NO: 2533892 - RNA, 18 nt, Human
aaauuuuauuuccuggac

SEQ ID NO: 2533893 - RNA, 18 nt, Human
aaauuuucacauaaaaua

SEQ ID NO: 2533894 - RNA, 21 nt, Human
aaauuuuauaaaauuaagcaa

SEQ ID NO: 2533895 - RNA, 14 nt, Human
aaauuuuaauuuau

SEQ ID NO: 2533896 - RNA, 12 nt, Human
aaauuuuauucc

SEQ ID NO: 2533897 - RNA, 13 nt, Human
aaauuuuauuccu

SEQ ID NO: 2533898 - RNA, 12 nt, Human
aaauuuuauaug

SEQ ID NO: 2533899 - RNA, 17 nt, Human
aaauuuuaucucuuauu

SEQ ID NO: 2533900 - RNA, 18 nt, Human
aaauuuugauguuuuaag

SEQ ID NO: 2533901 - RNA, 23 nt, Human
aaauuuugauguuuuaaggaugc

SEQ ID NO: 2533902 - RNA, 20 nt, Human
aaauuuuuucucuaggaaau

SEQ ID NO: 2533903 - RNA, 12 nt, Human
aaauuuuggcca

SEQ ID NO: 2533904 - RNA, 18 nt, Human
aaauuuuggccaaagugu

SEQ ID NO: 2533905 - RNA, 15 nt, Human
aacaaugcuguauuu

SEQ ID NO: 2533906 - RNA, 14 nt, Human
aacaaugcuguauu

SEQ ID NO: 2533907 - RNA, 12 nt, Human
aacaauaaaaga

SEQ ID NO: 2533908 - RNA, 21 nt, Human
aacaaggcaaggcugucaauu

SEQ ID NO: 2533909 - RNA, 18 nt, Human
aacaaggcaaggcuguca

SEQ ID NO: 2533910 - RNA, 19 nt, Human
aacaagucgaugaacuauu

SEQ ID NO: 2533911 - RNA, 19 nt, Human
aacaagcaagcucccaagg

SEQ ID NO: 2533912 - RNA, 15 nt, Human
aacaagugcuggcac

SEQ ID NO: 2533913 - RNA, 14 nt, Human
aacaagugcuggca

SEQ ID NO: 2533914 - RNA, 22 nt, Human
aacaaugcuguauuuuaaaaga

SEQ ID NO: 2533915 - RNA, 17 nt, Human
aacaaugcuguauuuua

SEQ ID NO: 2533916 - RNA, 17 nt, Human
aacaaguuuuucuguca

SEQ ID NO: 2533917 - RNA, 14 nt, Human
aacaauaaagagau

SEQ ID NO: 2533918 - RNA, 23 nt, Human
aacaauaaaauuuuuuuucaugu

SEQ ID NO: 2533919 - RNA, 16 nt, Human
aacaauggaaacugaa

SEQ ID NO: 2533920 - RNA, 18 nt, Human
aacaauggaaacugaaug

SEQ ID NO: 2533921 - RNA, 17 nt, Human
aacaauggaaacugaau

SEQ ID NO: 2533922 - RNA, 11 nt, Human
aacaauguuaa

SEQ ID NO: 2533923 - RNA, 12 nt, Human
aacaauguuaag

SEQ ID NO: 2533924 - RNA, 16 nt, Human
aacacaacuauauugu

SEQ ID NO: 2533925 - RNA, 15 nt, Human
aacacaacuauauug

SEQ ID NO: 2533926 - RNA, 22 nt, Human
aacaauguuaaggaaacucuua

SEQ ID NO: 2533927 - RNA, 21 nt, Human
aacaauguuaaggaaacucuu

SEQ ID NO: 2533928 - RNA, 18 nt, Human
aacaauguuaaggaaacu

SEQ ID NO: 2533929 - RNA, 13 nt, Human
aacaauguuaagg

SEQ ID NO: 2533930 - RNA, 16 nt, Human
gucccaccuuggcugc

SEQ ID NO: 2533931 - RNA, 15 nt, Human
gucccaccuuggcug

SEQ ID NO: 2533932 - RNA, 21 nt, Human
gucccaccucuucucuuccug

SEQ ID NO: 2533933 - RNA, 19 nt, Human
gucccaccucuucucuucc

SEQ ID NO: 2533934 - RNA, 14 nt, Human
gucccaccucuucu

SEQ ID NO: 2533935 - RNA, 13 nt, Human
gucccaccucuuc

SEQ ID NO: 2533936 - RNA, 12 nt, Human
gucccaccucuu

SEQ ID NO: 2533937 - RNA, 23 nt, Human
gucccacccccacccccagcuca

SEQ ID NO: 2533938 - RNA, 14 nt, Human
gucccaccuuggcu

SEQ ID NO: 2533939 - RNA, 20 nt, Human
gucccccaaccccagccgcu

SEQ ID NO: 2533940 - RNA, 17 nt, Human
gucccccaaccccagcc

SEQ ID NO: 2533941 - RNA, 19 nt, Human
guccccauggcacccugcu

SEQ ID NO: 2533942 - RNA, 13 nt, Human
gucccccagcucu

SEQ ID NO: 2533943 - RNA, 12 nt, Human
gucccccagcuc

SEQ ID NO: 2533944 - RNA, 22 nt, Human
gucccccauccccauccuccag

SEQ ID NO: 2533945 - RNA, 16 nt, Human
gucccccagcucuggu

SEQ ID NO: 2533946 - RNA, 15 nt, Human
gucccccagcucugg

SEQ ID NO: 2533947 - RNA, 14 nt, Human
gucccccagcucug

SEQ ID NO: 2533948 - RNA, 11 nt, Human
guccccccacc

SEQ ID NO: 2533949 - RNA, 12 nt, Human
guccccccaccc

SEQ ID NO: 2533950 - RNA, 23 nt, Human
gucccaccucuucucuuccugua

SEQ ID NO: 2533951 - RNA, 22 nt, Human
gucccaccucuucucuuccugu

SEQ ID NO: 2533952 - RNA, 19 nt, Human
guccccaggccccaggaag

SEQ ID NO: 2533953 - RNA, 21 nt, Human
guccccaggccccaggaagcc

SEQ ID NO: 2533954 - RNA, 20 nt, Human
guccccaggccccaggaagc

SEQ ID NO: 2533955 - RNA, 18 nt, Human
guccccaguuugcagaaa

SEQ ID NO: 2533956 - RNA, 20 nt, Human
guccccaucaucccagcugc

SEQ ID NO: 2533957 - RNA, 19 nt, Human
guccccaucaucccagcug

SEQ ID NO: 2533958 - RNA, 17 nt, Human
guccccaucaucccagc

SEQ ID NO: 2533959 - RNA, 15 nt, Human
guccccaucauccca

SEQ ID NO: 2533960 - RNA, 19 nt, Human
guccccaguuugcagaaaa

SEQ ID NO: 2533961 - RNA, 17 nt, Human
guccagugaccugcugg

SEQ ID NO: 2533962 - RNA, 12 nt, Human
guccagugccca

SEQ ID NO: 2533963 - RNA, 16 nt, Human
guccagucucuucugc

SEQ ID NO: 2533964 - RNA, 14 nt, Human
guccagugcccauu

SEQ ID NO: 2533965 - RNA, 13 nt, Human
guccagugcccau

SEQ ID NO: 2533966 - RNA, 19 nt, Human
guccaguucccagaaggca

SEQ ID NO: 2533967 - RNA, 14 nt, Human
guccaguucccaga

SEQ ID NO: 2533968 - RNA, 14 nt, Human
guccauagagagca

SEQ ID NO: 2533969 - RNA, 13 nt, Human
guccauagagagc

SEQ ID NO: 2533970 - RNA, 21 nt, Human
gucccaccccacacacgccag

SEQ ID NO: 2533971 - RNA, 19 nt, Human
gucccacccccacccccag

SEQ ID NO: 2533972 - RNA, 15 nt, Human
gucccacccccaccc

SEQ ID NO: 2533973 - RNA, 14 nt, Human
gucccacccccacc

SEQ ID NO: 2533974 - RNA, 22 nt, Human
gucccacccccacccccagcuc

SEQ ID NO: 2533975 - RNA, 21 nt, Human
gucccacccccacccccagcu

SEQ ID NO: 2533976 - RNA, 18 nt, Human
guccaagaagcccaggaa

SEQ ID NO: 2533977 - RNA, 17 nt, Human
guccaagaagcccagga

SEQ ID NO: 2533978 - RNA, 20 nt, Human
guccaagaagcccaggaaag

SEQ ID NO: 2533979 - RNA, 21 nt, Human
guccaacguggggcagcacag

SEQ ID NO: 2533980 - RNA, 20 nt, Human
guccaacguggggcagcaca

SEQ ID NO: 2533981 - RNA, 16 nt, Human
guccaagaagcccagg

SEQ ID NO: 2533982 - RNA, 15 nt, Human
guccaagaagcccag

SEQ ID NO: 2533983 - RNA, 13 nt, Human
guccaagaagccc

SEQ ID NO: 2533984 - RNA, 18 nt, Human
guccaacguggggcagca

SEQ ID NO: 2533985 - RNA, 23 nt, Human
aacacaccaggcugugggccuca

SEQ ID NO: 2533986 - RNA, 20 nt, Human
aacacaaaugcagggauugc

SEQ ID NO: 2533987 - RNA, 13 nt, Human
aacacaaaugcag

SEQ ID NO: 2533988 - RNA, 17 nt, Human
aacacaacuauauuguu

SEQ ID NO: 2533989 - RNA, 18 nt, Human
aacacacugaggcaggga

SEQ ID NO: 2533990 - RNA, 19 nt, Human
aacacacugaggcagggaa

SEQ ID NO: 2533991 - RNA, 20 nt, Human
aacacacugaggcagggaag

SEQ ID NO: 2533992 - RNA, 15 nt, Human
aacacagcaagggug

SEQ ID NO: 2533993 - RNA, 22 nt, Human
aacacagaaagccuaucaaaga

SEQ ID NO: 2533994 - RNA, 21 nt, Human
aacacacuguguccuggugcu

SEQ ID NO: 2533995 - RNA, 19 nt, Human
aacacagaaaccuuuuuaa

SEQ ID NO: 2533996 - RNA, 19 nt, Human
aacacacuguguccuggug

SEQ ID NO: 2533997 - RNA, 16 nt, Human
aacacacuguguccug

SEQ ID NO: 2533998 - RNA, 13 nt, Human
aacacacuguguc

SEQ ID NO: 2533999 - RNA, 21 nt, Human
aacacacugaggcagggaagu

SEQ ID NO: 2534000 - RNA, 19 nt, Human
gucauuuuuuuuaagaaaa

SEQ ID NO: 2534001 - RNA, 21 nt, Human
gucauuuuuuuuaagaaaaag

SEQ ID NO: 2534002 - RNA, 19 nt, Human
aacacagacauucugccag

SEQ ID NO: 2534003 - RNA, 20 nt, Human
aacacagacauucugccagg

SEQ ID NO: 2534004 - RNA, 12 nt, Human
aacagaaaugua

SEQ ID NO: 2534005 - RNA, 13 nt, Human
aacagaaauguac

SEQ ID NO: 2534006 - RNA, 14 nt, Human
aacagaaauguaca

SEQ ID NO: 2534007 - RNA, 15 nt, Human
aacagaaauguacag

SEQ ID NO: 2534008 - RNA, 12 nt, Human
guccuacucugu

SEQ ID NO: 2534009 - RNA, 14 nt, Human
guccuacccauccc

SEQ ID NO: 2534010 - RNA, 16 nt, Human
guccuacccauccccg

SEQ ID NO: 2534011 - RNA, 18 nt, Human
guccuacccauccccgca

SEQ ID NO: 2534012 - RNA, 15 nt, Human
gucccuuucuuggcc

SEQ ID NO: 2534013 - RNA, 15 nt, Human
guccuacccacccuc

SEQ ID NO: 2534014 - RNA, 16 nt, Human
guccuacccacccucc

SEQ ID NO: 2534015 - RNA, 18 nt, Human
gucccccuuccauggacu

SEQ ID NO: 2534016 - RNA, 16 nt, Human
gucccccuuccaugga

SEQ ID NO: 2534017 - RNA, 13 nt, Human
guccccccacccu

SEQ ID NO: 2534018 - RNA, 18 nt, Human
gucccccugacaacacuc

SEQ ID NO: 2534019 - RNA, 14 nt, Human
gucccccuuccaug

SEQ ID NO: 2534020 - RNA, 19 nt, Human
gucccuugccucaaugcca

SEQ ID NO: 2534021 - RNA, 14 nt, Human
gucccuugccucaa

SEQ ID NO: 2534022 - RNA, 13 nt, Human
gucccuugccuca

SEQ ID NO: 2534023 - RNA, 17 nt, Human
gucccuuguuuccagcu

SEQ ID NO: 2534024 - RNA, 20 nt, Human
gucccuuguuuccagcuaga

SEQ ID NO: 2534025 - RNA, 23 nt, Human
gucccuuucgacuugcauuuuug

SEQ ID NO: 2534026 - RNA, 21 nt, Human
gucccuugagaccucagccau

SEQ ID NO: 2534027 - RNA, 19 nt, Human
gucccuugagaccucagcc

SEQ ID NO: 2534028 - RNA, 20 nt, Human
gucccuugagaccucagcca

SEQ ID NO: 2534029 - RNA, 13 nt, Human
gucccuugcagcu

SEQ ID NO: 2534030 - RNA, 22 nt, Human
gucccccuggggcuucuccuga

SEQ ID NO: 2534031 - RNA, 16 nt, Human
gucccuugagaccuca

SEQ ID NO: 2534032 - RNA, 17 nt, Human
gucccuugagaccucag

SEQ ID NO: 2534033 - RNA, 18 nt, Human
gucccuugagaccucagc

SEQ ID NO: 2534034 - RNA, 22 nt, Human
gucccuugagaccucagccaug

SEQ ID NO: 2534035 - RNA, 16 nt, Human
aacagauaaauaguuu

SEQ ID NO: 2534036 - RNA, 13 nt, Human
aacagauaaucag

SEQ ID NO: 2534037 - RNA, 18 nt, Human
aacagauaagcaagagag

SEQ ID NO: 2534038 - RNA, 19 nt, Human
aacagauaagcaagagaga

SEQ ID NO: 2534039 - RNA, 22 nt, Human
aacagaucuggaaccucagccu

SEQ ID NO: 2534040 - RNA, 16 nt, Human
aacagaucaauuugua

SEQ ID NO: 2534041 - RNA, 21 nt, Human
aacagaucuggaaccucagcc

SEQ ID NO: 2534042 - RNA, 13 nt, Human
aacagaucuggaa

SEQ ID NO: 2534043 - RNA, 20 nt, Human
aacagauauaaauggcuggu

SEQ ID NO: 2534044 - RNA, 20 nt, Human
aacagauaguuguguuuuua

SEQ ID NO: 2534045 - RNA, 23 nt, Human
aacagauacuggaaguuuugcau

SEQ ID NO: 2534046 - RNA, 16 nt, Human
aacagaagcuuccauu

SEQ ID NO: 2534047 - RNA, 14 nt, Human
aacagaagcuucca

SEQ ID NO: 2534048 - RNA, 13 nt, Human
aacagaaggauga

SEQ ID NO: 2534049 - RNA, 14 nt, Human
aacagaauguuuua

SEQ ID NO: 2534050 - RNA, 13 nt, Human
aacagaagugguu

SEQ ID NO: 2534051 - RNA, 23 nt, Human
aacagaauacuguuaaaggaaaa

SEQ ID NO: 2534052 - RNA, 13 nt, Human
aacagaauuuuaa

SEQ ID NO: 2534053 - RNA, 18 nt, Human
aacagacaaaaacagccu

SEQ ID NO: 2534054 - RNA, 21 nt, Human
aacagacaaaaacagccucac

SEQ ID NO: 2534055 - RNA, 16 nt, Human
aacagacaacagaagu

SEQ ID NO: 2534056 - RNA, 18 nt, Human
aacagacaacagaaguca

SEQ ID NO: 2534057 - RNA, 15 nt, Human
aacagugauuaccag

SEQ ID NO: 2534058 - RNA, 22 nt, Human
aacagugauuaccagggacuga

SEQ ID NO: 2534059 - RNA, 15 nt, Human
aacagugcauauucc

SEQ ID NO: 2534060 - RNA, 18 nt, Human
aacagguaauauaaaaag

SEQ ID NO: 2534061 - RNA, 12 nt, Human
aacagugccugc

SEQ ID NO: 2534062 - RNA, 22 nt, Human
aacagugcauauuccuuucuau

SEQ ID NO: 2534063 - RNA, 13 nt, Human
aacagugccugcu

SEQ ID NO: 2534064 - RNA, 14 nt, Human
aacagugccugcug

SEQ ID NO: 2534065 - RNA, 19 nt, Human
aacaguguuucccauaauu

SEQ ID NO: 2534066 - RNA, 21 nt, Human
aacaguguuucccauaauuuu

SEQ ID NO: 2534067 - RNA, 15 nt, Human
aacagguaauauaaa

SEQ ID NO: 2534068 - RNA, 23 nt, Human
aacagggucucuagugcugugaa

SEQ ID NO: 2534069 - RNA, 20 nt, Human
aacagggucucuagugcugu

SEQ ID NO: 2534070 - RNA, 22 nt, Human
aacagggucucuagugcuguga

SEQ ID NO: 2534071 - RNA, 13 nt, Human
aacagggucucua

SEQ ID NO: 2534072 - RNA, 18 nt, Human
aacagggucucuagugcu

SEQ ID NO: 2534073 - RNA, 18 nt, Human
aacagggcaucuccagga

SEQ ID NO: 2534074 - RNA, 17 nt, Human
aacagggcaucuccagg

SEQ ID NO: 2534075 - RNA, 11 nt, Human
aacagggaggg

SEQ ID NO: 2534076 - RNA, 19 nt, Human
aaggcucuucuccccagag

SEQ ID NO: 2534077 - RNA, 17 nt, Human
aaggcucuucuccccag

SEQ ID NO: 2534078 - RNA, 23 nt, Human
aaggcucugagcaaauguggcuc

SEQ ID NO: 2534079 - RNA, 23 nt, Human
aaggcucgauuuuguaucugcag

SEQ ID NO: 2534080 - RNA, 17 nt, Human
aaggcucugaaagccag

SEQ ID NO: 2534081 - RNA, 18 nt, Human
aaggcucugaaagccagc

SEQ ID NO: 2534082 - RNA, 22 nt, Human
aaggggcccaaauucuuucagu

SEQ ID NO: 2534083 - RNA, 17 nt, Human
aaggggccagaggcucg

SEQ ID NO: 2534084 - RNA, 16 nt, Human
aaggcucuucugacua

SEQ ID NO: 2534085 - RNA, 15 nt, Human
aaggcugaccaagag

SEQ ID NO: 2534086 - RNA, 13 nt, Human
aaggggccauccu

SEQ ID NO: 2534087 - RNA, 16 nt, Human
aaggcugaccaagaga

SEQ ID NO: 2534088 - RNA, 13 nt, Human
aaggggcccuggu

SEQ ID NO: 2534089 - RNA, 19 nt, Human
aaggguccuucccucuccc

SEQ ID NO: 2534090 - RNA, 18 nt, Human
aaggggcgucuguucccc

SEQ ID NO: 2534091 - RNA, 21 nt, Human
aaggggccuuugucuugucaa

SEQ ID NO: 2534092 - RNA, 15 nt, Human
aaggggcccguggga

SEQ ID NO: 2534093 - RNA, 23 nt, Human
aaggggccucaccgagugggggc

SEQ ID NO: 2534094 - RNA, 14 nt, Human
aaggggcccugguc

SEQ ID NO: 2534095 - RNA, 21 nt, Human
aaggggcccugguccuuccag

SEQ ID NO: 2534096 - RNA, 19 nt, Human
aagggugaugggaaagcau

SEQ ID NO: 2534097 - RNA, 20 nt, Human
aagggucuagggagagaccc

SEQ ID NO: 2534098 - RNA, 22 nt, Human
aagggucuagggagagacccuu

SEQ ID NO: 2534099 - RNA, 16 nt, Human
aaggggcugaaagaac

SEQ ID NO: 2534100 - RNA, 16 nt, Human
aagggucuagggagag

SEQ ID NO: 2534101 - RNA, 17 nt, Human
aagggucuagggagaga

SEQ ID NO: 2534102 - RNA, 18 nt, Human
aagggucuagggagagac

SEQ ID NO: 2534103 - RNA, 14 nt, Human
aagguacuucaaau

SEQ ID NO: 2534104 - RNA, 16 nt, Human
aagggucuugggaaau

SEQ ID NO: 2534105 - RNA, 15 nt, Human
aagggucuugggaaa

SEQ ID NO: 2534106 - RNA, 19 nt, Human
aagggucuugggaaauaug

SEQ ID NO: 2534107 - RNA, 18 nt, Human
aagguauuccuuuugugu

SEQ ID NO: 2534108 - RNA, 22 nt, Human
aagguauuccuuuuguguacag

SEQ ID NO: 2534109 - RNA, 20 nt, Human
aagguagaaauaucugaaaa

SEQ ID NO: 2534110 - RNA, 12 nt, Human
aaggucauuuuu

SEQ ID NO: 2534111 - RNA, 21 nt, Human
aaguaagaaagugaagcaaau

SEQ ID NO: 2534112 - RNA, 20 nt, Human
aaguaagaaagugaagcaaa

SEQ ID NO: 2534113 - RNA, 19 nt, Human
aaggucaccagcaccaaca

SEQ ID NO: 2534114 - RNA, 13 nt, Human
aaggucaucaucg

SEQ ID NO: 2534115 - RNA, 16 nt, Human
aaguaaggaauuuuau

SEQ ID NO: 2534116 - RNA, 13 nt, Human
aaguaagcaaaga

SEQ ID NO: 2534117 - RNA, 13 nt, Human
aaguaagaagaca

SEQ ID NO: 2534118 - RNA, 14 nt, Human
aaguaagaagacau

SEQ ID NO: 2534119 - RNA, 20 nt, Human
aaguaagaagacaugaacca

SEQ ID NO: 2534120 - RNA, 15 nt, Human
aaguaaggugcaguu

SEQ ID NO: 2534121 - RNA, 18 nt, Human
aaguaaguaccacucagg

SEQ ID NO: 2534122 - RNA, 17 nt, Human
aaguaagcaacagcaua

SEQ ID NO: 2534123 - RNA, 15 nt, Human
aaguaagaagacaug

SEQ ID NO: 2534124 - RNA, 19 nt, Human
aaguaagcaacagcauaac

SEQ ID NO: 2534125 - RNA, 23 nt, Human
aaguaagcccuugaagauaucuu

SEQ ID NO: 2534126 - RNA, 22 nt, Human
guuucuaugacacaugcaaggu

SEQ ID NO: 2534127 - RNA, 20 nt, Human
aaguaaguaccacucaggcc

SEQ ID NO: 2534128 - RNA, 21 nt, Human
aaguaaguaccacucaggcca

SEQ ID NO: 2534129 - RNA, 14 nt, Human
guuucucagauccu

SEQ ID NO: 2534130 - RNA, 15 nt, Human
guuucucugcuguug

SEQ ID NO: 2534131 - RNA, 19 nt, Human
guuucuauguguagggcgg

SEQ ID NO: 2534132 - RNA, 18 nt, Human
aaguaaggugcaguuccc

SEQ ID NO: 2534133 - RNA, 18 nt, Human
guuucugaaagggacgcu

SEQ ID NO: 2534134 - RNA, 21 nt, Human
guuucucuuuccuuggcuccc

SEQ ID NO: 2534135 - RNA, 17 nt, Human
guuucugacucugagcu

SEQ ID NO: 2534136 - RNA, 13 nt, Human
guuucugacucug

SEQ ID NO: 2534137 - RNA, 14 nt, Human
guuucucuuuccuu

SEQ ID NO: 2534138 - RNA, 20 nt, Human
guuucugaaaauuaacacug

SEQ ID NO: 2534139 - RNA, 12 nt, Human
guuucugacucu

SEQ ID NO: 2534140 - RNA, 21 nt, Human
guuucugaaaauuaacacugc

SEQ ID NO: 2534141 - RNA, 15 nt, Human
guugggcugguguca

SEQ ID NO: 2534142 - RNA, 15 nt, Human
guugggcccagaucu

SEQ ID NO: 2534143 - RNA, 16 nt, Human
guugggcccagaucug

SEQ ID NO: 2534144 - RNA, 17 nt, Human
guugggcccagaucugg

SEQ ID NO: 2534145 - RNA, 17 nt, Human
guuuaauauuuaaacag

SEQ ID NO: 2534146 - RNA, 21 nt, Human
guuuaauccccaguaaaauug

SEQ ID NO: 2534147 - RNA, 19 nt, Human
guuuaauccccaguaaaau

SEQ ID NO: 2534148 - RNA, 15 nt, Human
guuuaauauugagaa

SEQ ID NO: 2534149 - RNA, 17 nt, Human
guuuaauauugagaaag

SEQ ID NO: 2534150 - RNA, 15 nt, Human
guuuaauauuuaaac

SEQ ID NO: 2534151 - RNA, 12 nt, Human
guuuaauauuua

SEQ ID NO: 2534152 - RNA, 19 nt, Human
guuuaauauugagaaagaa

SEQ ID NO: 2534153 - RNA, 17 nt, Human
guugggccaggagccuc

SEQ ID NO: 2534154 - RNA, 15 nt, Human
guugggccaggagcc

SEQ ID NO: 2534155 - RNA, 13 nt, Human
guugggcuggugu

SEQ ID NO: 2534156 - RNA, 19 nt, Human
guugggccauacuggccuc

SEQ ID NO: 2534157 - RNA, 18 nt, Human
guugggccauacuggccu

SEQ ID NO: 2534158 - RNA, 22 nt, Human
guugggcagggugacccugaag

SEQ ID NO: 2534159 - RNA, 21 nt, Human
guugggccauacuggccucgc

SEQ ID NO: 2534160 - RNA, 20 nt, Human
guugggccauacuggccucg

SEQ ID NO: 2534161 - RNA, 13 nt, Human
guugggcccagau

SEQ ID NO: 2534162 - RNA, 13 nt, Human
guuuacaguguuc

SEQ ID NO: 2534163 - RNA, 15 nt, Human
guuuacaguguuccg

SEQ ID NO: 2534164 - RNA, 13 nt, Human
guuuauugucaaa

SEQ ID NO: 2534165 - RNA, 11 nt, Human
guuuacaugua

SEQ ID NO: 2534166 - RNA, 14 nt, Human
guuuauuuaucagu

SEQ ID NO: 2534167 - RNA, 21 nt, Human
guuuauuuccaaauaaaauga

SEQ ID NO: 2534168 - RNA, 12 nt, Human
guuuauuuccaa

SEQ ID NO: 2534169 - RNA, 17 nt, Human
guuuauuuauucugcau

SEQ ID NO: 2534170 - RNA, 16 nt, Human
guuuauuuaucaguga

SEQ ID NO: 2534171 - RNA, 19 nt, Human
guuuauuuaucagugacag

SEQ ID NO: 2534172 - RNA, 23 nt, Human
guuuacagcacuacucugugcca

SEQ ID NO: 2534173 - RNA, 16 nt, Human
guuuacacucuuugua

SEQ ID NO: 2534174 - RNA, 18 nt, Human
guuuacagggagccuccu

SEQ ID NO: 2534175 - RNA, 17 nt, Human
guuuacagggagccucc

SEQ ID NO: 2534176 - RNA, 16 nt, Human
guuuacagggagccuc

SEQ ID NO: 2534177 - RNA, 20 nt, Human
guuuacagggagccuccugc

SEQ ID NO: 2534178 - RNA, 19 nt, Human
guuuacagggagccuccug

SEQ ID NO: 2534179 - RNA, 17 nt, Human
guuuacagguggacaca

SEQ ID NO: 2534180 - RNA, 19 nt, Human
guuuacaguaaauaaauug

SEQ ID NO: 2534181 - RNA, 15 nt, Human
guuuacaguaaauaa

SEQ ID NO: 2534182 - RNA, 13 nt, Human
guuuacaguaaau

SEQ ID NO: 2534183 - RNA, 23 nt, Human
guuuacagggagccuccugccca

SEQ ID NO: 2534184 - RNA, 18 nt, Human
aaggcucgagcaugccug

SEQ ID NO: 2534185 - RNA, 16 nt, Human
aaggcucgagcaugcc

SEQ ID NO: 2534186 - RNA, 22 nt, Human
aaggcuccaggagcagccacau

SEQ ID NO: 2534187 - RNA, 19 nt, Human
aaggcuccaggagcagcca

SEQ ID NO: 2534188 - RNA, 20 nt, Human
aaggcucgagcaugccugga

SEQ ID NO: 2534189 - RNA, 19 nt, Human
aaggcucgagcaugccugg

SEQ ID NO: 2534190 - RNA, 22 nt, Human
aaggcucgagcaugccuggaug

SEQ ID NO: 2534191 - RNA, 14 nt, Human
guuuauuuuauauu

SEQ ID NO: 2534192 - RNA, 19 nt, Human
guuuauuuucaagaauaau

SEQ ID NO: 2534193 - RNA, 22 nt, Human
aaggcucgauuuuguaucugca

SEQ ID NO: 2534194 - RNA, 17 nt, Human
aaggcucgauuuuguau

SEQ ID NO: 2534195 - RNA, 15 nt, Human
aaggcucgauuuugu

SEQ ID NO: 2534196 - RNA, 15 nt, Human
aaggcuccaggagca

SEQ ID NO: 2534197 - RNA, 18 nt, Human
aaggcuccaggagcagcc

SEQ ID NO: 2534198 - RNA, 16 nt, Human
aaggcuccaggagcag

SEQ ID NO: 2534199 - RNA, 14 nt, Human
guuucaaacuuuac

SEQ ID NO: 2534200 - RNA, 16 nt, Human
guuucaaacuuuacua

SEQ ID NO: 2534201 - RNA, 13 nt, Human
guuucaaacuuua

SEQ ID NO: 2534202 - RNA, 14 nt, Human
guuuauuucuuaaa

SEQ ID NO: 2534203 - RNA, 13 nt, Human
guuuauuuuaaga

SEQ ID NO: 2534204 - RNA, 21 nt, Human
aagcuccacugucacccucca

SEQ ID NO: 2534205 - RNA, 19 nt, Human
aagcuccacugucacccuc

SEQ ID NO: 2534206 - RNA, 16 nt, Human
aagcuccacugucacc

SEQ ID NO: 2534207 - RNA, 15 nt, Human
aagcuccacugucac

SEQ ID NO: 2534208 - RNA, 13 nt, Human
aagcuccaagccc

SEQ ID NO: 2534209 - RNA, 14 nt, Human
aagcuccaucucca

SEQ ID NO: 2534210 - RNA, 15 nt, Human
aaggaaagagggagg

SEQ ID NO: 2534211 - RNA, 13 nt, Human
aaggaaagcaaua

SEQ ID NO: 2534212 - RNA, 16 nt, Human
aaggaaagcaauaaau

SEQ ID NO: 2534213 - RNA, 20 nt, Human
aaggaaagcaauaaaugaau

SEQ ID NO: 2534214 - RNA, 22 nt, Human
aaggaaccaaagcgaauuuuaa

SEQ ID NO: 2534215 - RNA, 23 nt, Human
aaggaaccaaagcgaauuuuaaa

SEQ ID NO: 2534216 - RNA, 22 nt, Human
aaggaaauaccaguucugggca

SEQ ID NO: 2534217 - RNA, 22 nt, Human
aaggaaagggggucccaguggg

SEQ ID NO: 2534218 - RNA, 14 nt, Human
aaggaaaggccuga

SEQ ID NO: 2534219 - RNA, 13 nt, Human
aaggaaaggcaaa

SEQ ID NO: 2534220 - RNA, 21 nt, Human
aaggaaaugauugaggaguga

SEQ ID NO: 2534221 - RNA, 14 nt, Human
aaggaaaugauuga

SEQ ID NO: 2534222 - RNA, 16 nt, Human
aaggaaaucucacccc

SEQ ID NO: 2534223 - RNA, 22 nt, Human
aaggaaaucucaccccauccca

SEQ ID NO: 2534224 - RNA, 13 nt, Human
aaggaagcacaug

SEQ ID NO: 2534225 - RNA, 15 nt, Human
aaggaagacuucauc

SEQ ID NO: 2534226 - RNA, 14 nt, Human
aaggaagacuucau

SEQ ID NO: 2534227 - RNA, 22 nt, Human
aaggaacucuggcuuccaggua

SEQ ID NO: 2534228 - RNA, 20 nt, Human
aaggaacucuggcuuccagg

SEQ ID NO: 2534229 - RNA, 18 nt, Human
aaggaacucuggcuucca

SEQ ID NO: 2534230 - RNA, 17 nt, Human
aaggaauaccugucccc

SEQ ID NO: 2534231 - RNA, 21 nt, Human
aaggaauaaauugcuccuuga

SEQ ID NO: 2534232 - RNA, 16 nt, Human
aaggaagcuccacugu

SEQ ID NO: 2534233 - RNA, 21 nt, Human
aaggaagucaaagcaaggaaa

SEQ ID NO: 2534234 - RNA, 14 nt, Human
aaggaagucuagga

SEQ ID NO: 2534235 - RNA, 16 nt, Human
aaggaagcacaugccu

SEQ ID NO: 2534236 - RNA, 13 nt, Human
aaggaagacuaga

SEQ ID NO: 2534237 - RNA, 22 nt, Human
aaggaagccacagcugguggua

SEQ ID NO: 2534238 - RNA, 18 nt, Human
aaggaggaagagaaaaaa

SEQ ID NO: 2534239 - RNA, 12 nt, Human
aaggagcugcua

SEQ ID NO: 2534240 - RNA, 14 nt, Human
aaggagcugcuaua

SEQ ID NO: 2534241 - RNA, 18 nt, Human
aaggagcugcuauagccu

SEQ ID NO: 2534242 - RNA, 20 nt, Human
aaggagcugcuauagccugg

SEQ ID NO: 2534243 - RNA, 11 nt, Human
aaggaggaaaa

SEQ ID NO: 2534244 - RNA, 21 nt, Human
aaggagcugcuauagccuggg

SEQ ID NO: 2534245 - RNA, 23 nt, Human
aaggaggcgcacuuuccuccugg

SEQ ID NO: 2534246 - RNA, 18 nt, Human
aaggaggcuggcuggggc

SEQ ID NO: 2534247 - RNA, 15 nt, Human
aaggaggcuggcugg

SEQ ID NO: 2534248 - RNA, 13 nt, Human
aaggaggcuggcu

SEQ ID NO: 2534249 - RNA, 14 nt, Human
aaggaggcuggcag

SEQ ID NO: 2534250 - RNA, 20 nt, Human
aaggaggggauagagagaga

SEQ ID NO: 2534251 - RNA, 13 nt, Human
aaggaggggaacc

SEQ ID NO: 2534252 - RNA, 17 nt, Human
aaggaggggcuguaaaa

SEQ ID NO: 2534253 - RNA, 15 nt, Human
aaggagggagaugga

SEQ ID NO: 2534254 - RNA, 18 nt, Human
aaggaguaaucuguguac

SEQ ID NO: 2534255 - RNA, 15 nt, Human
aaggaguaagaaccu

SEQ ID NO: 2534256 - RNA, 19 nt, Human
aaggaggugagggauguga

SEQ ID NO: 2534257 - RNA, 15 nt, Human
aaggaggugagggau

SEQ ID NO: 2534258 - RNA, 17 nt, Human
aaggagucaaaacuaca

SEQ ID NO: 2534259 - RNA, 13 nt, Human
aaggaguagaaaa

SEQ ID NO: 2534260 - RNA, 18 nt, Human
aaggaggguuagggaggg

SEQ ID NO: 2534261 - RNA, 19 nt, Human
aaggaggguuagggagggg

SEQ ID NO: 2534262 - RNA, 17 nt, Human
aaggagggucaggaagg

SEQ ID NO: 2534263 - RNA, 21 nt, Human
aaggaggguggaucaccugag

SEQ ID NO: 2534264 - RNA, 12 nt, Human
aaggagggugag

SEQ ID NO: 2534265 - RNA, 22 nt, Human
aaggagcucacuguggugucug

SEQ ID NO: 2534266 - RNA, 14 nt, Human
aaggagauuuacaa

SEQ ID NO: 2534267 - RNA, 14 nt, Human
aaggagaggaggca

SEQ ID NO: 2534268 - RNA, 18 nt, Human
aaggaauaccuguccccc

SEQ ID NO: 2534269 - RNA, 16 nt, Human
aaggaauauauggcag

SEQ ID NO: 2534270 - RNA, 15 nt, Human
aaggaauauauggca

SEQ ID NO: 2534271 - RNA, 13 nt, Human
aaggaauauaugg

SEQ ID NO: 2534272 - RNA, 14 nt, Human
aaggaagugaagag

SEQ ID NO: 2534273 - RNA, 22 nt, Human
aaggaaguuacuguuauagagg

SEQ ID NO: 2534274 - RNA, 11 nt, Human
aaggagagcua

SEQ ID NO: 2534275 - RNA, 13 nt, Human
aaggagaggaggc

SEQ ID NO: 2534276 - RNA, 17 nt, Human
aaggagaggaaagaacu

SEQ ID NO: 2534277 - RNA, 20 nt, Human
aaggagaggcaacauccaaa

SEQ ID NO: 2534278 - RNA, 15 nt, Human
aaggagaugaagcaa

SEQ ID NO: 2534279 - RNA, 20 nt, Human
aaggagucagacauuuuaag

SEQ ID NO: 2534280 - RNA, 19 nt, Human
aaggaguaaucuguguaca

SEQ ID NO: 2534281 - RNA, 19 nt, Human
aaggagugagaucauuuuc

SEQ ID NO: 2534282 - RNA, 13 nt, Human
aaggaguuaagag

SEQ ID NO: 2534283 - RNA, 20 nt, Human
aaggaguuccaugaagacca

SEQ ID NO: 2534284 - RNA, 13 nt, Human
aaggauacaaaag

SEQ ID NO: 2534285 - RNA, 21 nt, Human
aaggauacaaaagcaugugag

SEQ ID NO: 2534286 - RNA, 20 nt, Human
aaggcaucagucccuaugua

SEQ ID NO: 2534287 - RNA, 12 nt, Human
aaggcaugaagg

SEQ ID NO: 2534288 - RNA, 12 nt, Human
aaggcauucucu

SEQ ID NO: 2534289 - RNA, 16 nt, Human
aaggcauguuccucug

SEQ ID NO: 2534290 - RNA, 21 nt, Human
aaggcaugauguuaaccagaa

SEQ ID NO: 2534291 - RNA, 19 nt, Human
aaggauacuguaacacuuu

SEQ ID NO: 2534292 - RNA, 20 nt, Human
aaggcauaucagucucugag

SEQ ID NO: 2534293 - RNA, 15 nt, Human
aaggauagaugcugg

SEQ ID NO: 2534294 - RNA, 23 nt, Human
aaggauacuguaacacuuuacaa

SEQ ID NO: 2534295 - RNA, 22 nt, Human
aaggcccuaucuguuuacagug

SEQ ID NO: 2534296 - RNA, 22 nt, Human
aaggccgaagaaggguccuucc

SEQ ID NO: 2534297 - RNA, 20 nt, Human
aaggccgaagcucuggcuga

SEQ ID NO: 2534298 - RNA, 19 nt, Human
aaggccgaagcucuggcug

SEQ ID NO: 2534299 - RNA, 18 nt, Human
aaggccgaagcucuggcu

SEQ ID NO: 2534300 - RNA, 16 nt, Human
aaggccgaagcucugg

SEQ ID NO: 2534301 - RNA, 14 nt, Human
aaggccgagaagca

SEQ ID NO: 2534302 - RNA, 17 nt, Human
aaggccgagaagcaaga

SEQ ID NO: 2534303 - RNA, 18 nt, Human
aaggccgagaagcaagaa

SEQ ID NO: 2534304 - RNA, 22 nt, Human
aaggccgcuguucacccacagg

SEQ ID NO: 2534305 - RNA, 22 nt, Human
aaggccauggagagcuggagcc

SEQ ID NO: 2534306 - RNA, 18 nt, Human
aaggccauggagagcugg

SEQ ID NO: 2534307 - RNA, 14 nt, Human
aaggccaucagagc

SEQ ID NO: 2534308 - RNA, 21 nt, Human
aaggccauggagagcuggagc

SEQ ID NO: 2534309 - RNA, 21 nt, Human
aaggcccacgagcuuguucuu

SEQ ID NO: 2534310 - RNA, 13 nt, Human
aaggcauuuuauu

SEQ ID NO: 2534311 - RNA, 16 nt, Human
aaggccaaaccucugu

SEQ ID NO: 2534312 - RNA, 15 nt, Human
aaggcauuguuugag

SEQ ID NO: 2534313 - RNA, 14 nt, Human
aaggcauucucuga

SEQ ID NO: 2534314 - RNA, 17 nt, Human
aaggcauucucugaaga

SEQ ID NO: 2534315 - RNA, 16 nt, Human
aaggccaaaggaagca

SEQ ID NO: 2534316 - RNA, 17 nt, Human
aaggccaaaccucuguu

SEQ ID NO: 2534317 - RNA, 14 nt, Human
aaggccagcuggca

SEQ ID NO: 2534318 - RNA, 14 nt, Human
aaggccauaaaaca

SEQ ID NO: 2534319 - RNA, 17 nt, Human
aaggccauaaaacaggu

SEQ ID NO: 2534320 - RNA, 17 nt, Human
aaggccagcuggcagca

SEQ ID NO: 2534321 - RNA, 19 nt, Human
aaggccagcuggcagcaga

SEQ ID NO: 2534322 - RNA, 18 nt, Human
aaggccauaaaacaggua

SEQ ID NO: 2534323 - RNA, 24 nt, Human
aaggccauaaaacagguaauauaa

SEQ ID NO: 2534324 - RNA, 22 nt, Human
aaggccaucugggcuccuccag

SEQ ID NO: 2534325 - RNA, 22 nt, Human
aaggccauccuucccugucugc

SEQ ID NO: 2534326 - RNA, 19 nt, Human
aaggccucccuagccagca

SEQ ID NO: 2534327 - RNA, 17 nt, Human
aaggccucccacaguga

SEQ ID NO: 2534328 - RNA, 16 nt, Human
aaggccucccacagug

SEQ ID NO: 2534329 - RNA, 19 nt, Human
aaggccucccacagugacu

SEQ ID NO: 2534330 - RNA, 16 nt, Human
guugccuaauaaacau

SEQ ID NO: 2534331 - RNA, 19 nt, Human
guugccuugaaccacuucc

SEQ ID NO: 2534332 - RNA, 18 nt, Human
guugccuuaaagaaaguc

SEQ ID NO: 2534333 - RNA, 21 nt, Human
guugccuugaaccacuucccu

SEQ ID NO: 2534334 - RNA, 13 nt, Human
guugcccaggcug

SEQ ID NO: 2534335 - RNA, 12 nt, Human
guugcccaggcu

SEQ ID NO: 2534336 - RNA, 15 nt, Human
aaggccucccacagu

SEQ ID NO: 2534337 - RNA, 14 nt, Human
aaggccucccacag

SEQ ID NO: 2534338 - RNA, 13 nt, Human
aaggccucccaca

SEQ ID NO: 2534339 - RNA, 23 nt, Human
guugcccaggcaggucuugaacu

SEQ ID NO: 2534340 - RNA, 22 nt, Human
guuggaaugaauuaaauaaacc

SEQ ID NO: 2534341 - RNA, 23 nt, Human
guuggaaauagaaauuuccagag

SEQ ID NO: 2534342 - RNA, 18 nt, Human
guuggaaauauucaugcu

SEQ ID NO: 2534343 - RNA, 16 nt, Human
guuggaaagcaggugg

SEQ ID NO: 2534344 - RNA, 22 nt, Human
guuggaagcuagcuccccuccu

SEQ ID NO: 2534345 - RNA, 14 nt, Human
guugggagcacugg

SEQ ID NO: 2534346 - RNA, 15 nt, Human
guugggagcacugga

SEQ ID NO: 2534347 - RNA, 16 nt, Human
guugggagcacuggag

SEQ ID NO: 2534348 - RNA, 23 nt, Human
guugggauuccugacccaggccg

SEQ ID NO: 2534349 - RNA, 22 nt, Human
guugggauuccugacccaggcc

SEQ ID NO: 2534350 - RNA, 21 nt, Human
guugggauuccugacccaggc

SEQ ID NO: 2534351 - RNA, 20 nt, Human
guugggauuccugacccagg

SEQ ID NO: 2534352 - RNA, 22 nt, Human
guugggauugggggcuggugcc

SEQ ID NO: 2534353 - RNA, 21 nt, Human
guugggauugggggcuggugc

SEQ ID NO: 2534354 - RNA, 19 nt, Human
guugggauuccugacccag

SEQ ID NO: 2534355 - RNA, 18 nt, Human
guugggauuccugaccca

SEQ ID NO: 2534356 - RNA, 16 nt, Human
guugggauuccugacc

SEQ ID NO: 2534357 - RNA, 21 nt, Human
guugggauacugcagggccag

SEQ ID NO: 2534358 - RNA, 18 nt, Human
guugggauacugcagggc

SEQ ID NO: 2534359 - RNA, 14 nt, Human
guugggaggauucu

SEQ ID NO: 2534360 - RNA, 15 nt, Human
guugcuuugcccugg

SEQ ID NO: 2534361 - RNA, 15 nt, Human
guuggaaaagaauac

SEQ ID NO: 2534362 - RNA, 15 nt, Human
guugcuuacaauuuu

SEQ ID NO: 2534363 - RNA, 20 nt, Human
guuggaaaagaauacagaaa

SEQ ID NO: 2534364 - RNA, 22 nt, Human
guuggaaaagaauacagaaaga

SEQ ID NO: 2534365 - RNA, 18 nt, Human
guugcguaacuggcugug

SEQ ID NO: 2534366 - RNA, 15 nt, Human
guugcggggggaggg

SEQ ID NO: 2534367 - RNA, 13 nt, Human
guugcggggggag

SEQ ID NO: 2534368 - RNA, 23 nt, Human
guugcuuaggaugugugcaugug

SEQ ID NO: 2534369 - RNA, 16 nt, Human
guugcuuacaauuuuu

SEQ ID NO: 2534370 - RNA, 23 nt, Human
guugcguggacucugcacauguc

SEQ ID NO: 2534371 - RNA, 21 nt, Human
guugcuugccugauauaaaug

SEQ ID NO: 2534372 - RNA, 13 nt, Human
aaguauuagaaua

SEQ ID NO: 2534373 - RNA, 18 nt, Human
aaguauuuaauuagugcu

SEQ ID NO: 2534374 - RNA, 17 nt, Human
aaguauuuaauuagugc

SEQ ID NO: 2534375 - RNA, 16 nt, Human
aaguauuuaauuagug

SEQ ID NO: 2534376 - RNA, 22 nt, Human
aaguauuagggguaauauauug

SEQ ID NO: 2534377 - RNA, 20 nt, Human
aaguauuagggguaauauau

SEQ ID NO: 2534378 - RNA, 11 nt, Human
aaguauuuagg

SEQ ID NO: 2534379 - RNA, 16 nt, Human
aaguauuuagguuuuu

SEQ ID NO: 2534380 - RNA, 10 nt, Human
aaguauuuag

SEQ ID NO: 2534381 - RNA, 23 nt, Human
aaguauuuaauuagugcuaagug

SEQ ID NO: 2534382 - RNA, 22 nt, Human
aaguauuuaauuagugcuaagu

SEQ ID NO: 2534383 - RNA, 21 nt, Human
aaguauuuaauuagugcuaag

SEQ ID NO: 2534384 - RNA, 20 nt, Human
aaguauuuaauuagugcuaa

SEQ ID NO: 2534385 - RNA, 19 nt, Human
aaguauuuaauuagugcua

SEQ ID NO: 2534386 - RNA, 12 nt, Human
aaguauuuauau

SEQ ID NO: 2534387 - RNA, 13 nt, Human
aaguauuuauaua

SEQ ID NO: 2534388 - RNA, 14 nt, Human
aaguauuuauauau

SEQ ID NO: 2534389 - RNA, 15 nt, Human
aaguauuuauauauu

SEQ ID NO: 2534390 - RNA, 16 nt, Human
aaguauuuauauauuu

SEQ ID NO: 2534391 - RNA, 17 nt, Human
aaguauuuauauauuua

SEQ ID NO: 2534392 - RNA, 18 nt, Human
aaguauuuauauauuuau

SEQ ID NO: 2534393 - RNA, 13 nt, Human
aaguacauuuaau

SEQ ID NO: 2534394 - RNA, 12 nt, Human
aaguacauuuaa

SEQ ID NO: 2534395 - RNA, 20 nt, Human
aaguacauauuaggaaaaua

SEQ ID NO: 2534396 - RNA, 18 nt, Human
aaguacccguucacauuu

SEQ ID NO: 2534397 - RNA, 17 nt, Human
aaguaccacucaggcca

SEQ ID NO: 2534398 - RNA, 19 nt, Human
aaguacacuguuucaaacu

SEQ ID NO: 2534399 - RNA, 20 nt, Human
aaguacacuguuucaaacuu

SEQ ID NO: 2534400 - RNA, 23 nt, Human
aaguacacuguuucaaacuuuac

SEQ ID NO: 2534401 - RNA, 16 nt, Human
aaguaauccuagggaa

SEQ ID NO: 2534402 - RNA, 18 nt, Human
aaguaaucccgccaccua

SEQ ID NO: 2534403 - RNA, 21 nt, Human
aaguaaugaauuuuuaugaua

SEQ ID NO: 2534404 - RNA, 22 nt, Human
guuuugccauguuggccaggcu

SEQ ID NO: 2534405 - RNA, 21 nt, Human
guuuugccauguuggccaggc

SEQ ID NO: 2534406 - RNA, 20 nt, Human
guuuugccauguuggccagg

SEQ ID NO: 2534407 - RNA, 16 nt, Human
guuuugccauguuggc

SEQ ID NO: 2534408 - RNA, 14 nt, Human
guuucugccgcagc

SEQ ID NO: 2534409 - RNA, 22 nt, Human
guuucugcaguagucucugugc

SEQ ID NO: 2534410 - RNA, 20 nt, Human
guuucugcaguagucucugu

SEQ ID NO: 2534411 - RNA, 14 nt, Human
guuucugcaguagu

SEQ ID NO: 2534412 - RNA, 20 nt, Human
guuucugaguuccugcaugc

SEQ ID NO: 2534413 - RNA, 15 nt, Human
guuucugccgcagcc

SEQ ID NO: 2534414 - RNA, 21 nt, Human
guuucugcccacauuggaccc

SEQ ID NO: 2534415 - RNA, 19 nt, Human
aaguaaugauaacuggaaa

SEQ ID NO: 2534416 - RNA, 14 nt, Human
aaguaaugauaacu

SEQ ID NO: 2534417 - RNA, 13 nt, Human
aaguacacuguuu

SEQ ID NO: 2534418 - RNA, 18 nt, Human
aaguacacuguuucaaac

SEQ ID NO: 2534419 - RNA, 18 nt, Human
guuuugcuuuuucugacu

SEQ ID NO: 2534420 - RNA, 16 nt, Human
guuuuggaagcucuga

SEQ ID NO: 2534421 - RNA, 16 nt, Human
guuuugccaacauugc

SEQ ID NO: 2534422 - RNA, 14 nt, Human
guuuugccaacauu

SEQ ID NO: 2534423 - RNA, 13 nt, Human
guuuugcacuuuu

SEQ ID NO: 2534424 - RNA, 19 nt, Human
guuuugcuauuagacugua

SEQ ID NO: 2534425 - RNA, 16 nt, Human
guuuugcuguuuccuu

SEQ ID NO: 2534426 - RNA, 22 nt, Human
guuuuggcugaaauucuccugg

SEQ ID NO: 2534427 - RNA, 20 nt, Human
guuuuggcugaaauucuccu

SEQ ID NO: 2534428 - RNA, 23 nt, Human
guuuuggcugaaauucuccugga

SEQ ID NO: 2534429 - RNA, 16 nt, Human
guuuuggggacucauu

SEQ ID NO: 2534430 - RNA, 20 nt, Human
guuuuggcaaacgcuaaaga

SEQ ID NO: 2534431 - RNA, 21 nt, Human
aaguaauccaccugccucggc

SEQ ID NO: 2534432 - RNA, 16 nt, Human
aagugaaaucaaaggu

SEQ ID NO: 2534433 - RNA, 16 nt, Human
aagucuuuuuugauca

SEQ ID NO: 2534434 - RNA, 18 nt, Human
aagucuuuuguucgcaug

SEQ ID NO: 2534435 - RNA, 21 nt, Human
aagugaaaaaggaggaagaga

SEQ ID NO: 2534436 - RNA, 17 nt, Human
aagugaagacaaugacu

SEQ ID NO: 2534437 - RNA, 19 nt, Human
aagugaagacaaugacuua

SEQ ID NO: 2534438 - RNA, 13 nt, Human
aagugaagacugg

SEQ ID NO: 2534439 - RNA, 16 nt, Human
aagugaagacuggaag

SEQ ID NO: 2534440 - RNA, 16 nt, Human
aagugaagaaaaguga

SEQ ID NO: 2534441 - RNA, 16 nt, Human
aagugaacacuagcca

SEQ ID NO: 2534442 - RNA, 15 nt, Human
aagugagacagucca

SEQ ID NO: 2534443 - RNA, 17 nt, Human
aagugaagguuuacaau

SEQ ID NO: 2534444 - RNA, 10 nt, Human
aagugaaggu

SEQ ID NO: 2534445 - RNA, 12 nt, Human
aagugagagagg

SEQ ID NO: 2534446 - RNA, 14 nt, Human
aagugagagcuggg

SEQ ID NO: 2534447 - RNA, 15 nt, Human
guuuuucauaaagca

SEQ ID NO: 2534448 - RNA, 15 nt, Human
aagugagagcugggu

SEQ ID NO: 2534449 - RNA, 15 nt, Human
guuuuuccacuacug

SEQ ID NO: 2534450 - RNA, 16 nt, Human
guuuuuccacuacugc

SEQ ID NO: 2534451 - RNA, 17 nt, Human
guuuuuccacuacugcu

SEQ ID NO: 2534452 - RNA, 18 nt, Human
guuuuuccacuacugcua

SEQ ID NO: 2534453 - RNA, 20 nt, Human
aagugagacaguccagccug

SEQ ID NO: 2534454 - RNA, 18 nt, Human
aagugaagguuuacaauu

SEQ ID NO: 2534455 - RNA, 14 nt, Human
guuuuucaguuuuc

SEQ ID NO: 2534456 - RNA, 15 nt, Human
guuuuuccuuuaaaa

SEQ ID NO: 2534457 - RNA, 14 nt, Human
guuuuuccuuuaaa

SEQ ID NO: 2534458 - RNA, 20 nt, Human
guuuuucuuaaauaauaaag

SEQ ID NO: 2534459 - RNA, 19 nt, Human
guuuuuccuuguauuuaaa

SEQ ID NO: 2534460 - RNA, 22 nt, Human
aagugagacaguccagccugga

SEQ ID NO: 2534461 - RNA, 19 nt, Human
guuuuuccuguucuuaaga

SEQ ID NO: 2534462 - RNA, 12 nt, Human
aagucuucaggg

SEQ ID NO: 2534463 - RNA, 18 nt, Human
aagucauuuuaacuuuau

SEQ ID NO: 2534464 - RNA, 20 nt, Human
aagucauuuuaacuuuauca

SEQ ID NO: 2534465 - RNA, 21 nt, Human
aaguccaaauguuuacaggga

SEQ ID NO: 2534466 - RNA, 22 nt, Human
aagucauuuuaacuuuaucaca

SEQ ID NO: 2534467 - RNA, 17 nt, Human
aagucuuaucaagcagc

SEQ ID NO: 2534468 - RNA, 16 nt, Human
aagucuuaucaagcag

SEQ ID NO: 2534469 - RNA, 20 nt, Human
aagucuucacucucugaaga

SEQ ID NO: 2534470 - RNA, 18 nt, Human
aagucuucccugaucaag

SEQ ID NO: 2534471 - RNA, 22 nt, Human
aagucuucccugaucaagucac

SEQ ID NO: 2534472 - RNA, 16 nt, Human
aagucuuucacauuua

SEQ ID NO: 2534473 - RNA, 14 nt, Human
aagucuuuuguucg

SEQ ID NO: 2534474 - RNA, 22 nt, Human
aagucuuauauauuguagauaa

SEQ ID NO: 2534475 - RNA, 13 nt, Human
aagucauuggcuu

SEQ ID NO: 2534476 - RNA, 20 nt, Human
aagucauuggcuuuauccuc

SEQ ID NO: 2534477 - RNA, 16 nt, Human
aagucauuuuaacuuu

SEQ ID NO: 2534478 - RNA, 15 nt, Human
aagucauggcugugc

SEQ ID NO: 2534479 - RNA, 20 nt, Human
aagucaugcaaaggcuggga

SEQ ID NO: 2534480 - RNA, 12 nt, Human
aagucauguucc

SEQ ID NO: 2534481 - RNA, 15 nt, Human
aagucaugugcauuu

SEQ ID NO: 2534482 - RNA, 14 nt, Human
aagucaugugcauu

SEQ ID NO: 2534483 - RNA, 13 nt, Human
aaguauuucaaau

SEQ ID NO: 2534484 - RNA, 21 nt, Human
aaguauuucaaauuggagcuu

SEQ ID NO: 2534485 - RNA, 22 nt, Human
aaguauuucaaauuggagcuuc

SEQ ID NO: 2534486 - RNA, 13 nt, Human
aaguauuugggaa

SEQ ID NO: 2534487 - RNA, 20 nt, Human
aaguauuuauauauuuauaa

SEQ ID NO: 2534488 - RNA, 21 nt, Human
aaguauuuauauauuuauaac

SEQ ID NO: 2534489 - RNA, 22 nt, Human
aaguauuuauauauuuauaacu

SEQ ID NO: 2534490 - RNA, 23 nt, Human
aaguauuuauauauuuauaacuc

SEQ ID NO: 2534491 - RNA, 18 nt, Human
aaguauuuuccuguaaaa

SEQ ID NO: 2534492 - RNA, 15 nt, Human
aaguauuuuccugua

SEQ ID NO: 2534493 - RNA, 14 nt, Human
aaguauuuuccugu

SEQ ID NO: 2534494 - RNA, 21 nt, Human
aagucaugcguuuaaucacau

SEQ ID NO: 2534495 - RNA, 17 nt, Human
aaguauuuucauaagua

SEQ ID NO: 2534496 - RNA, 22 nt, Human
aaguauuuucauaaguauuuca

SEQ ID NO: 2534497 - RNA, 14 nt, Human
aaguauuucccagc

SEQ ID NO: 2534498 - RNA, 16 nt, Human
uaaaaaucucaaauuu

SEQ ID NO: 2534499 - RNA, 17 nt, Human
uaaaaaucucaaauuuc

SEQ ID NO: 2534500 - RNA, 15 nt, Human
uaaaaaucucaaauu

SEQ ID NO: 2534501 - RNA, 11 nt, Human
uaaaaaucaua

SEQ ID NO: 2534502 - RNA, 17 nt, Human
uaaaaaucauaaacugu

SEQ ID NO: 2534503 - RNA, 21 nt, Human
uaaaaauaaaaaacacuggga

SEQ ID NO: 2534504 - RNA, 20 nt, Human
uaaaaaguuuuaguuuugau

SEQ ID NO: 2534505 - RNA, 17 nt, Human
uaaaaaguuaaaaaguu

SEQ ID NO: 2534506 - RNA, 14 nt, Human
uaaaaauaaauuca

SEQ ID NO: 2534507 - RNA, 17 nt, Human
uaaaaauaaauuugguu

SEQ ID NO: 2534508 - RNA, 19 nt, Human
uaaaaauaaaaaacacugg

SEQ ID NO: 2534509 - RNA, 18 nt, Human
uaaaaauaaaaaacacug

SEQ ID NO: 2534510 - RNA, 11 nt, Human
uaaaaaguuaa

SEQ ID NO: 2534511 - RNA, 12 nt, Human
uaaaaaguuaaa

SEQ ID NO: 2534512 - RNA, 13 nt, Human
uaaaaaguuaaaa

SEQ ID NO: 2534513 - RNA, 15 nt, Human
uaaaaaguuaaaaag

SEQ ID NO: 2534514 - RNA, 9 nt, Human
uaaaaaguu

SEQ ID NO: 2534515 - RNA, 20 nt, Human
guuuuugaaggcagaaagca

SEQ ID NO: 2534516 - RNA, 17 nt, Human
guuuuugaaacagaacc

SEQ ID NO: 2534517 - RNA, 14 nt, Human
guuuuugaaacaga

SEQ ID NO: 2534518 - RNA, 19 nt, Human
guuuuugaaggcagaaagc

SEQ ID NO: 2534519 - RNA, 15 nt, Human
uaaaaaguggaaaaa

SEQ ID NO: 2534520 - RNA, 21 nt, Human
guuuuucuuaaauaauaaaga

SEQ ID NO: 2534521 - RNA, 12 nt, Human
guuuuucuucaa

SEQ ID NO: 2534522 - RNA, 22 nt, Human
guuuuucuucaacaucaauguu

SEQ ID NO: 2534523 - RNA, 23 nt, Human
guuuuucuucaacaucaauguuc

SEQ ID NO: 2534524 - RNA, 15 nt, Human
guuuuucuucucccu

SEQ ID NO: 2534525 - RNA, 19 nt, Human
uaaaaaucucaaauuucua

SEQ ID NO: 2534526 - RNA, 20 nt, Human
uaaaaaucucaaauuucuaa

SEQ ID NO: 2534527 - RNA, 21 nt, Human
uaaaaaucucaaauuucuaaa

SEQ ID NO: 2534528 - RNA, 19 nt, Human
uaaaacccauuuaaauuuu

SEQ ID NO: 2534529 - RNA, 19 nt, Human
uaaaaaucuaccuucugua

SEQ ID NO: 2534530 - RNA, 20 nt, Human
uaaaaaucauaaacugugug

SEQ ID NO: 2534531 - RNA, 15 nt, Human
uaaaaaucauaguac

SEQ ID NO: 2534532 - RNA, 17 nt, Human
uaaaaaucauugauugu

SEQ ID NO: 2534533 - RNA, 16 nt, Human
uaaaaccugucaauga

SEQ ID NO: 2534534 - RNA, 18 nt, Human
uaaaaccugagcuagaag

SEQ ID NO: 2534535 - RNA, 10 nt, Human
uaaaaccuuu

SEQ ID NO: 2534536 - RNA, 11 nt, Human
uaaaaccuuuc

SEQ ID NO: 2534537 - RNA, 13 nt, Human
uaaaaccuuucaa

SEQ ID NO: 2534538 - RNA, 15 nt, Human
uaaaaccugucaaug

SEQ ID NO: 2534539 - RNA, 21 nt, Human
uaaaaccccagccaacucauu

SEQ ID NO: 2534540 - RNA, 20 nt, Human
uaaaaaucuaccuucuguag

SEQ ID NO: 2534541 - RNA, 19 nt, Human
uaaaaccccaucucuacua

SEQ ID NO: 2534542 - RNA, 15 nt, Human
uaaaacuaaauagca

SEQ ID NO: 2534543 - RNA, 10 nt, Human
uaaaacuaaa

SEQ ID NO: 2534544 - RNA, 14 nt, Human
uaaaaccuuucaaa

SEQ ID NO: 2534545 - RNA, 16 nt, Human
uaaaaccuuucaaauu

SEQ ID NO: 2534546 - RNA, 20 nt, Human
uaaaaccuuucaaauuucac

SEQ ID NO: 2534547 - RNA, 21 nt, Human
uaaaaccuuucaaauuucaca

SEQ ID NO: 2534548 - RNA, 23 nt, Human
uaaaagaauauuuuaacuuccuu

SEQ ID NO: 2534549 - RNA, 12 nt, Human
uaaaagaaugau

SEQ ID NO: 2534550 - RNA, 12 nt, Human
uaaaagacaaau

SEQ ID NO: 2534551 - RNA, 11 nt, Human
uaaaagacaaa

SEQ ID NO: 2534552 - RNA, 21 nt, Human
uaaaagaaugggcaguuacau

SEQ ID NO: 2534553 - RNA, 12 nt, Human
uaaaagaauugu

SEQ ID NO: 2534554 - RNA, 17 nt, Human
uaaaacuuuccucgccu

SEQ ID NO: 2534555 - RNA, 15 nt, Human
uaaaacuuuccucgc

SEQ ID NO: 2534556 - RNA, 20 nt, Human
uaaaagaaugggcaguuaca

SEQ ID NO: 2534557 - RNA, 20 nt, Human
uaaaacuugauguguuaucu

SEQ ID NO: 2534558 - RNA, 22 nt, Human
uaaaacuugauguguuaucucu

SEQ ID NO: 2534559 - RNA, 20 nt, Human
uaaaacuaaauagcauguau

SEQ ID NO: 2534560 - RNA, 18 nt, Human
uaaaacuaaauagcaugu

SEQ ID NO: 2534561 - RNA, 13 nt, Human
uaaaacuugcugc

SEQ ID NO: 2534562 - RNA, 13 nt, Human
uaaaacuuuccuc

SEQ ID NO: 2534563 - RNA, 13 nt, Human
uaaaacuuuaauc

SEQ ID NO: 2534564 - RNA, 12 nt, Human
uaaaauauuuau

SEQ ID NO: 2534565 - RNA, 18 nt, Human
uaaaauauggcuauaaau

SEQ ID NO: 2534566 - RNA, 15 nt, Human
uaaaauauuuaucug

SEQ ID NO: 2534567 - RNA, 22 nt, Human
uaaaauauuccugcauuuguga

SEQ ID NO: 2534568 - RNA, 13 nt, Human
uaaaauauuccug

SEQ ID NO: 2534569 - RNA, 14 nt, Human
uaaaauauggcuau

SEQ ID NO: 2534570 - RNA, 20 nt, Human
uaaaauaugaagacauaaac

SEQ ID NO: 2534571 - RNA, 20 nt, Human
aagugauucucaugccucag

SEQ ID NO: 2534572 - RNA, 15 nt, Human
aagugauaauuucug

SEQ ID NO: 2534573 - RNA, 22 nt, Human
aagugagggccgagugagagcg

SEQ ID NO: 2534574 - RNA, 11 nt, Human
aagugaggaag

SEQ ID NO: 2534575 - RNA, 18 nt, Human
aagugagggucagagagg

SEQ ID NO: 2534576 - RNA, 16 nt, Human
aagugaggaugaaaaa

SEQ ID NO: 2534577 - RNA, 21 nt, Human
aagugagcuuugcugcuacag

SEQ ID NO: 2534578 - RNA, 18 nt, Human
aagugagcuuugcugcua

SEQ ID NO: 2534579 - RNA, 17 nt, Human
aagugagcuuugcugcu

SEQ ID NO: 2534580 - RNA, 18 nt, Human
aagugauucuccugccuc

SEQ ID NO: 2534581 - RNA, 17 nt, Human
aagugauucuccugccu

SEQ ID NO: 2534582 - RNA, 16 nt, Human
aagugauucuccugcc

SEQ ID NO: 2534583 - RNA, 15 nt, Human
aagugauucuccugc

SEQ ID NO: 2534584 - RNA, 19 nt, Human
aagugauucuccugccuca

SEQ ID NO: 2534585 - RNA, 21 nt, Human
aagugauucucaugccucagc

SEQ ID NO: 2534586 - RNA, 13 nt, Human
aagugccccugcu

SEQ ID NO: 2534587 - RNA, 22 nt, Human
aagugccccugcugccucccca

SEQ ID NO: 2534588 - RNA, 23 nt, Human
aagugccccugcugccuccccaa

SEQ ID NO: 2534589 - RNA, 19 nt, Human
aagugauucucaugccuca

SEQ ID NO: 2534590 - RNA, 14 nt, Human
aagugaucaauaaa

SEQ ID NO: 2534591 - RNA, 19 nt, Human
aagugccccugcugccucc

SEQ ID NO: 2534592 - RNA, 12 nt, Human
aagugccuuaau

SEQ ID NO: 2534593 - RNA, 17 nt, Human
uaaaauaaaauaaaaau

SEQ ID NO: 2534594 - RNA, 19 nt, Human
uaaaaguuucaaugugauu

SEQ ID NO: 2534595 - RNA, 15 nt, Human
uaaaauaauucuaaa

SEQ ID NO: 2534596 - RNA, 15 nt, Human
uaaaauaaugggauu

SEQ ID NO: 2534597 - RNA, 21 nt, Human
uaaaauaaaaauucugaaugu

SEQ ID NO: 2534598 - RNA, 18 nt, Human
uaaaaguuucaaugugau

SEQ ID NO: 2534599 - RNA, 15 nt, Human
uaaaaguuucaaugu

SEQ ID NO: 2534600 - RNA, 13 nt, Human
uaaaaguuucaau

SEQ ID NO: 2534601 - RNA, 21 nt, Human
uaaaaguugugauuccagaua

SEQ ID NO: 2534602 - RNA, 15 nt, Human
uaaaaguugugauuc

SEQ ID NO: 2534603 - RNA, 14 nt, Human
uaaaaguugugauu

SEQ ID NO: 2534604 - RNA, 14 nt, Human
uaaaagugugagca

SEQ ID NO: 2534605 - RNA, 23 nt, Human
uaaaagugggcuugauucugcag

SEQ ID NO: 2534606 - RNA, 18 nt, Human
uaaaagugugagcaguga

SEQ ID NO: 2534607 - RNA, 12 nt, Human
uaaaaguuacuu

SEQ ID NO: 2534608 - RNA, 17 nt, Human
uaaaaguuauuaauauu

SEQ ID NO: 2534609 - RNA, 20 nt, Human
uaaaagacagugaaagaaaa

SEQ ID NO: 2534610 - RNA, 22 nt, Human
uaaaagacaaaucaaagcagau

SEQ ID NO: 2534611 - RNA, 20 nt, Human
uaaaagacaaaucaaagcag

SEQ ID NO: 2534612 - RNA, 15 nt, Human
uaaaagacaagacuu

SEQ ID NO: 2534613 - RNA, 23 nt, Human
uaaaagacacuguuuacaagaaa

SEQ ID NO: 2534614 - RNA, 22 nt, Human
uaaaagugggcuugauucugca

SEQ ID NO: 2534615 - RNA, 13 nt, Human
uaaaagacuuuuu

SEQ ID NO: 2534616 - RNA, 22 nt, Human
uaaaauaccagccaguaaaugg

SEQ ID NO: 2534617 - RNA, 20 nt, Human
uaaaauaauuuuuauauuug

SEQ ID NO: 2534618 - RNA, 17 nt, Human
uaaaauaauucuaaagg

SEQ ID NO: 2534619 - RNA, 16 nt, Human
uaaaauaauucuaaag

SEQ ID NO: 2534620 - RNA, 19 nt, Human
uaaaauaugaagacauaaa

SEQ ID NO: 2534621 - RNA, 18 nt, Human
uaaaauaucuuuugaccu

SEQ ID NO: 2534622 - RNA, 20 nt, Human
uaaaauagauaaauaaauau

SEQ ID NO: 2534623 - RNA, 17 nt, Human
uaaaauagaaauaagug

SEQ ID NO: 2534624 - RNA, 21 nt, Human
uaaaauacuauuuuuacugcc

SEQ ID NO: 2534625 - RNA, 20 nt, Human
uaaaauacuauuuuuacugc

SEQ ID NO: 2534626 - RNA, 15 nt, Human
uaaaauacuauuuuu

SEQ ID NO: 2534627 - RNA, 12 nt, Human
uaaaauacuauu

SEQ ID NO: 2534628 - RNA, 22 nt, Human
guggggucacucuggcagcuca

SEQ ID NO: 2534629 - RNA, 21 nt, Human
guggggucacucuggcagcuc

SEQ ID NO: 2534630 - RNA, 20 nt, Human
guggggucacucuggcagcu

SEQ ID NO: 2534631 - RNA, 17 nt, Human
guggggucacucuggca

SEQ ID NO: 2534632 - RNA, 19 nt, Human
aagaggcgucuguauauuu

SEQ ID NO: 2534633 - RNA, 21 nt, Human
aagaggcgggccagccaggcg

SEQ ID NO: 2534634 - RNA, 20 nt, Human
aagaggcgggccagccaggc

SEQ ID NO: 2534635 - RNA, 18 nt, Human
aagaggcgggccagccag

SEQ ID NO: 2534636 - RNA, 17 nt, Human
aagaggcgggccagcca

SEQ ID NO: 2534637 - RNA, 15 nt, Human
aagaggcgggccagc

SEQ ID NO: 2534638 - RNA, 16 nt, Human
aagaggcugaaagagg

SEQ ID NO: 2534639 - RNA, 18 nt, Human
aagaggcugaaagaggcc

SEQ ID NO: 2534640 - RNA, 15 nt, Human
aagaggcugaggccu

SEQ ID NO: 2534641 - RNA, 22 nt, Human
aagaggcgggccagccaggcgg

SEQ ID NO: 2534642 - RNA, 13 nt, Human
aagaggcugaggc

SEQ ID NO: 2534643 - RNA, 19 nt, Human
gugggguagguugggagaa

SEQ ID NO: 2534644 - RNA, 20 nt, Human
guggggguggaggcuuccug

SEQ ID NO: 2534645 - RNA, 15 nt, Human
guggggucaugcccu

SEQ ID NO: 2534646 - RNA, 21 nt, Human
guggggucaugcccuccucuc

SEQ ID NO: 2534647 - RNA, 19 nt, Human
guggggucaugcccuccuc

SEQ ID NO: 2534648 - RNA, 14 nt, Human
guggggucucccuc

SEQ ID NO: 2534649 - RNA, 17 nt, Human
guggggucucccucucc

SEQ ID NO: 2534650 - RNA, 19 nt, Human
guggggucucccucuccug

SEQ ID NO: 2534651 - RNA, 21 nt, Human
guggggucucccucuccugcc

SEQ ID NO: 2534652 - RNA, 22 nt, Human
guggggucucccucuccugccu

SEQ ID NO: 2534653 - RNA, 14 nt, Human
aagagggguggaga

SEQ ID NO: 2534654 - RNA, 13 nt, Human
aagagggggugga

SEQ ID NO: 2534655 - RNA, 20 nt, Human
aagaguagaaacugcaggga

SEQ ID NO: 2534656 - RNA, 13 nt, Human
aagaguagacauu

SEQ ID NO: 2534657 - RNA, 15 nt, Human
aagagggguggagac

SEQ ID NO: 2534658 - RNA, 15 nt, Human
aagaguagaauugca

SEQ ID NO: 2534659 - RNA, 12 nt, Human
aagaguaggaag

SEQ ID NO: 2534660 - RNA, 16 nt, Human
aagaggggguggaggg

SEQ ID NO: 2534661 - RNA, 16 nt, Human
aagaggggcagcccuu

SEQ ID NO: 2534662 - RNA, 15 nt, Human
aagaggggcugggcu

SEQ ID NO: 2534663 - RNA, 13 nt, Human
aagaggggacagg

SEQ ID NO: 2534664 - RNA, 19 nt, Human
aagagggccugugggagcc

SEQ ID NO: 2534665 - RNA, 14 nt, Human
aagagggccugugg

SEQ ID NO: 2534666 - RNA, 12 nt, Human
aagagggccugu

SEQ ID NO: 2534667 - RNA, 15 nt, Human
aagaggggcagcccu

SEQ ID NO: 2534668 - RNA, 13 nt, Human
aagaggggcagcc

SEQ ID NO: 2534669 - RNA, 11 nt, Human
aagaggggcag

SEQ ID NO: 2534670 - RNA, 19 nt, Human
aagaggggaccagaagcca

SEQ ID NO: 2534671 - RNA, 17 nt, Human
aagagggcacacacugu

SEQ ID NO: 2534672 - RNA, 16 nt, Human
aagagggcacacacug

SEQ ID NO: 2534673 - RNA, 23 nt, Human
aagagggagggagggcuccagac

SEQ ID NO: 2534674 - RNA, 14 nt, Human
aagaggcugcagcc

SEQ ID NO: 2534675 - RNA, 20 nt, Human
aagaggcugaggccuggacu

SEQ ID NO: 2534676 - RNA, 18 nt, Human
aagaggcugaggccugga

SEQ ID NO: 2534677 - RNA, 22 nt, Human
aagaggcugaggcuggcacagg

SEQ ID NO: 2534678 - RNA, 21 nt, Human
aagaggcugauaauuccagug

SEQ ID NO: 2534679 - RNA, 14 nt, Human
aagaggcugaggca

SEQ ID NO: 2534680 - RNA, 17 nt, Human
aagaguagcauuucauu

SEQ ID NO: 2534681 - RNA, 14 nt, Human
aagaguagcauuuc

SEQ ID NO: 2534682 - RNA, 23 nt, Human
aagaguagcaaguucuagagaag

SEQ ID NO: 2534683 - RNA, 21 nt, Human
aagaguagcaaguucuagaga

SEQ ID NO: 2534684 - RNA, 14 nt, Human
aagaguaggaagac

SEQ ID NO: 2534685 - RNA, 13 nt, Human
aagaguaggaaga

SEQ ID NO: 2534686 - RNA, 16 nt, Human
aagaucgaauuuuuca

SEQ ID NO: 2534687 - RNA, 19 nt, Human
aagaguagcauuucauucu

SEQ ID NO: 2534688 - RNA, 18 nt, Human
aagaguagcauuucauuc

SEQ ID NO: 2534689 - RNA, 20 nt, Human
aagaucgcgccacugcacuc

SEQ ID NO: 2534690 - RNA, 16 nt, Human
aagaucgcccccaccu

SEQ ID NO: 2534691 - RNA, 17 nt, Human
aagaucguucucugccu

SEQ ID NO: 2534692 - RNA, 16 nt, Human
aagaucguucucugcc

SEQ ID NO: 2534693 - RNA, 13 nt, Human
aagaugaaaauau

SEQ ID NO: 2534694 - RNA, 14 nt, Human
aagaugaaaauauu

SEQ ID NO: 2534695 - RNA, 18 nt, Human
aagaucucagugguuaag

SEQ ID NO: 2534696 - RNA, 14 nt, Human
aagaucguuaguau

SEQ ID NO: 2534697 - RNA, 17 nt, Human
aagaucuguccucagcc

SEQ ID NO: 2534698 - RNA, 23 nt, Human
aagaucugcagggggugugucug

SEQ ID NO: 2534699 - RNA, 23 nt, Human
aagauggcugugccucugccugu

SEQ ID NO: 2534700 - RNA, 18 nt, Human
aagaugggcagcuaguuc

SEQ ID NO: 2534701 - RNA, 21 nt, Human
aagaugggaacgcagaugauc

SEQ ID NO: 2534702 - RNA, 21 nt, Human
aagauggcugugccucugccu

SEQ ID NO: 2534703 - RNA, 20 nt, Human
aagauggcugugccucugcc

SEQ ID NO: 2534704 - RNA, 18 nt, Human
aagauggcugugccucug

SEQ ID NO: 2534705 - RNA, 19 nt, Human
aagaugcuucucacugcca

SEQ ID NO: 2534706 - RNA, 17 nt, Human
aagaugcuucucacugc

SEQ ID NO: 2534707 - RNA, 16 nt, Human
aagaugcuucucacug

SEQ ID NO: 2534708 - RNA, 14 nt, Human
aagaugaagaggau

SEQ ID NO: 2534709 - RNA, 13 nt, Human
aagaugacacaag

SEQ ID NO: 2534710 - RNA, 15 nt, Human
aagaugaaucaaugg

SEQ ID NO: 2534711 - RNA, 23 nt, Human
aagaugaaggagaggcaacaucc

SEQ ID NO: 2534712 - RNA, 21 nt, Human
gugugaccacugcagaagaca

SEQ ID NO: 2534713 - RNA, 15 nt, Human
gugugacaucagugg

SEQ ID NO: 2534714 - RNA, 15 nt, Human
gugugaaugaacacu

SEQ ID NO: 2534715 - RNA, 20 nt, Human
gugugacaucaguggcaugg

SEQ ID NO: 2534716 - RNA, 22 nt, Human
gugugacaaggauugcuacugu

SEQ ID NO: 2534717 - RNA, 14 nt, Human
gugugaaugaacac

SEQ ID NO: 2534718 - RNA, 13 nt, Human
gugugaaugaaca

SEQ ID NO: 2534719 - RNA, 19 nt, Human
guguccaaaggaagacgug

SEQ ID NO: 2534720 - RNA, 17 nt, Human
guguccaagugugugug

SEQ ID NO: 2534721 - RNA, 19 nt, Human
gugucaggcugcuggcgcc

SEQ ID NO: 2534722 - RNA, 16 nt, Human
gugucaggcugcuggc

SEQ ID NO: 2534723 - RNA, 22 nt, Human
gugucaggcugcuggcgccucu

SEQ ID NO: 2534724 - RNA, 23 nt, Human
gugucauauauggggggccaaca

SEQ ID NO: 2534725 - RNA, 18 nt, Human
gugucauaccaggccgcc

SEQ ID NO: 2534726 - RNA, 15 nt, Human
gugucaggcugcugg

SEQ ID NO: 2534727 - RNA, 14 nt, Human
gugucaggcugcug

SEQ ID NO: 2534728 - RNA, 20 nt, Human
gugucagguggggcagcuug

SEQ ID NO: 2534729 - RNA, 16 nt, Human
gugucaucagaagaua

SEQ ID NO: 2534730 - RNA, 21 nt, Human
gugucaugauucacccccaaa

SEQ ID NO: 2534731 - RNA, 18 nt, Human
gugucauuuaugaaaaga

SEQ ID NO: 2534732 - RNA, 13 nt, Human
guguccaaagcag

SEQ ID NO: 2534733 - RNA, 20 nt, Human
gugugucacccuuaggccag

SEQ ID NO: 2534734 - RNA, 18 nt, Human
guguguccaaaacugccu

SEQ ID NO: 2534735 - RNA, 20 nt, Human
gugugugaaaaugugugugu

SEQ ID NO: 2534736 - RNA, 13 nt, Human
guguguauguggg

SEQ ID NO: 2534737 - RNA, 15 nt, Human
guguguauguggggg

SEQ ID NO: 2534738 - RNA, 13 nt, Human
guguguaugugua

SEQ ID NO: 2534739 - RNA, 11 nt, Human
guguguauuaa

SEQ ID NO: 2534740 - RNA, 20 nt, Human
guguguauuaaaaaaaacaa

SEQ ID NO: 2534741 - RNA, 14 nt, Human
guguguauuaaaaa

SEQ ID NO: 2534742 - RNA, 15 nt, Human
guguguauuguuccc

SEQ ID NO: 2534743 - RNA, 16 nt, Human
gugugguagagugugc

SEQ ID NO: 2534744 - RNA, 16 nt, Human
guguggguaccuguau

SEQ ID NO: 2534745 - RNA, 14 nt, Human
gugugggucugugu

SEQ ID NO: 2534746 - RNA, 16 nt, Human
gugugggggcugcagc

SEQ ID NO: 2534747 - RNA, 17 nt, Human
guguggguaccuguauu

SEQ ID NO: 2534748 - RNA, 17 nt, Human
guguauuuuuuuacuaa

SEQ ID NO: 2534749 - RNA, 23 nt, Human
guguauuuuuuuacuaauagaca

SEQ ID NO: 2534750 - RNA, 20 nt, Human
gugucaagagggucugagga

SEQ ID NO: 2534751 - RNA, 19 nt, Human
gugucaaauaaacacugug

SEQ ID NO: 2534752 - RNA, 16 nt, Human
gugucaaauaaacacu

SEQ ID NO: 2534753 - RNA, 23 nt, Human
guguauuuuucaauaaagcauuu

SEQ ID NO: 2534754 - RNA, 23 nt, Human
guguauuuguauuuuuuugcaag

SEQ ID NO: 2534755 - RNA, 19 nt, Human
gugucacuggcugccucca

SEQ ID NO: 2534756 - RNA, 18 nt, Human
gugucacuggcugccucc

SEQ ID NO: 2534757 - RNA, 17 nt, Human
gugucacuggcugccuc

SEQ ID NO: 2534758 - RNA, 16 nt, Human
gugucacuggcugccu

SEQ ID NO: 2534759 - RNA, 15 nt, Human
gugucacuggcugcc

SEQ ID NO: 2534760 - RNA, 14 nt, Human
gugucacuggcugc

SEQ ID NO: 2534761 - RNA, 13 nt, Human
gugucacuggcug

SEQ ID NO: 2534762 - RNA, 15 nt, Human
gugucaacuucaaca

SEQ ID NO: 2534763 - RNA, 17 nt, Human
gugucaaauaaacacug

SEQ ID NO: 2534764 - RNA, 16 nt, Human
gugucagcauagaagu

SEQ ID NO: 2534765 - RNA, 19 nt, Human
gugucacuuacuguuucug

SEQ ID NO: 2534766 - RNA, 17 nt, Human
gugucacuuacuguuuc

SEQ ID NO: 2534767 - RNA, 23 nt, Human
gugucacuggcugccuccacucc

SEQ ID NO: 2534768 - RNA, 19 nt, Human
guguauuuauuuuccuccc

SEQ ID NO: 2534769 - RNA, 21 nt, Human
guguauuuauuuuccucccca

SEQ ID NO: 2534770 - RNA, 19 nt, Human
guguauuuccagugcaauu

SEQ ID NO: 2534771 - RNA, 14 nt, Human
guguauuugcuuuu

SEQ ID NO: 2534772 - RNA, 22 nt, Human
guguauuuauuuuccuccccag

SEQ ID NO: 2534773 - RNA, 14 nt, Human
aagaugggugggga

SEQ ID NO: 2534774 - RNA, 16 nt, Human
aagaugguauauuugg

SEQ ID NO: 2534775 - RNA, 21 nt, Human
guguauuuacgcuuugauuca

SEQ ID NO: 2534776 - RNA, 17 nt, Human
guguauuuacgcuuuga

SEQ ID NO: 2534777 - RNA, 19 nt, Human
aagauggggucuguaaaau

SEQ ID NO: 2534778 - RNA, 18 nt, Human
aagauggggucuguaaaa

SEQ ID NO: 2534779 - RNA, 17 nt, Human
aagauggggucuguaaa

SEQ ID NO: 2534780 - RNA, 15 nt, Human
aagauggggucugua

SEQ ID NO: 2534781 - RNA, 17 nt, Human
aagaugggggcaagaag

SEQ ID NO: 2534782 - RNA, 13 nt, Human
aagauguagagga

SEQ ID NO: 2534783 - RNA, 21 nt, Human
aagauggggucuguaaaaucu

SEQ ID NO: 2534784 - RNA, 20 nt, Human
aagauggggucuguaaaauc

SEQ ID NO: 2534785 - RNA, 22 nt, Human
aagauggggucuguaaaaucuu

SEQ ID NO: 2534786 - RNA, 15 nt, Human
aagacgccugagcuc

SEQ ID NO: 2534787 - RNA, 14 nt, Human
aagacgccugagcu

SEQ ID NO: 2534788 - RNA, 22 nt, Human
aagacgugauuuugcuguagaa

SEQ ID NO: 2534789 - RNA, 16 nt, Human
aagacgugauuuugcu

SEQ ID NO: 2534790 - RNA, 23 nt, Human
aagacgugauuuugcuguagaag

SEQ ID NO: 2534791 - RNA, 16 nt, Human
aagacguguuuguguu

SEQ ID NO: 2534792 - RNA, 15 nt, Human
aagacguguuugugu

SEQ ID NO: 2534793 - RNA, 19 nt, Human
aagacuaauuuaaaaaaua

SEQ ID NO: 2534794 - RNA, 16 nt, Human
aagacuaauuuaaaaa

SEQ ID NO: 2534795 - RNA, 18 nt, Human
aagacgucccuuuuuucu

SEQ ID NO: 2534796 - RNA, 23 nt, Human
aagacguguuuguguuugugugu

SEQ ID NO: 2534797 - RNA, 17 nt, Human
aagacugcauuauauuu

SEQ ID NO: 2534798 - RNA, 16 nt, Human
aagacugcacaucaaa

SEQ ID NO: 2534799 - RNA, 23 nt, Human
aagacugaguacguugugcauuu

SEQ ID NO: 2534800 - RNA, 20 nt, Human
aagacuagaggcuugcauaa

SEQ ID NO: 2534801 - RNA, 22 nt, Human
aagacugaguacguugugcauu

SEQ ID NO: 2534802 - RNA, 19 nt, Human
aagacuuggcaacagaagc

SEQ ID NO: 2534803 - RNA, 18 nt, Human
aagacuuggcaacagaag

SEQ ID NO: 2534804 - RNA, 20 nt, Human
aagacuuggcaacagaagca

SEQ ID NO: 2534805 - RNA, 17 nt, Human
aagacuuggcaacagaa

SEQ ID NO: 2534806 - RNA, 16 nt, Human
aagacuuuggaaagac

SEQ ID NO: 2534807 - RNA, 22 nt, Human
aagacuucaguauguugucaaa

SEQ ID NO: 2534808 - RNA, 21 nt, Human
aagacuucaguauguugucaa

SEQ ID NO: 2534809 - RNA, 16 nt, Human
aagacuuggcaacaga

SEQ ID NO: 2534810 - RNA, 19 nt, Human
aagagcagccuguggcauc

SEQ ID NO: 2534811 - RNA, 17 nt, Human
aagagcagccuguggca

SEQ ID NO: 2534812 - RNA, 18 nt, Human
aagagcagccuguggcau

SEQ ID NO: 2534813 - RNA, 13 nt, Human
aagagcagccugu

SEQ ID NO: 2534814 - RNA, 12 nt, Human
aagacuuguuuu

SEQ ID NO: 2534815 - RNA, 14 nt, Human
aagagcagccugug

SEQ ID NO: 2534816 - RNA, 16 nt, Human
aagagcagccuguggc

SEQ ID NO: 2534817 - RNA, 23 nt, Human
aagagcaggcacauggaggagcu

SEQ ID NO: 2534818 - RNA, 20 nt, Human
aagacuucaguauguuguca

SEQ ID NO: 2534819 - RNA, 19 nt, Human
aagaccuucuccuucaccu

SEQ ID NO: 2534820 - RNA, 18 nt, Human
aagaccuucuccuucacc

SEQ ID NO: 2534821 - RNA, 15 nt, Human
aagaccuucuccuuc

SEQ ID NO: 2534822 - RNA, 20 nt, Human
aacuugcugcaguaugaaaa

SEQ ID NO: 2534823 - RNA, 22 nt, Human
aacuugcugcaguaugaaaaua

SEQ ID NO: 2534824 - RNA, 21 nt, Human
aacuugcauccaacuccagga

SEQ ID NO: 2534825 - RNA, 15 nt, Human
aacuugcauggagca

SEQ ID NO: 2534826 - RNA, 20 nt, Human
aacuugagggcccagagcag

SEQ ID NO: 2534827 - RNA, 14 nt, Human
gugccuuaccuccu

SEQ ID NO: 2534828 - RNA, 15 nt, Human
gugccuuaccuccug

SEQ ID NO: 2534829 - RNA, 17 nt, Human
gugccuuaccuccugcc

SEQ ID NO: 2534830 - RNA, 18 nt, Human
gugccuuaccuccugccc

SEQ ID NO: 2534831 - RNA, 22 nt, Human
aacuugaggguaauaaacuuag

SEQ ID NO: 2534832 - RNA, 19 nt, Human
aacuugaggguaauaaacu

SEQ ID NO: 2534833 - RNA, 16 nt, Human
aacuugaggguaauaa

SEQ ID NO: 2534834 - RNA, 19 nt, Human
gugccuuaccuccugccca

SEQ ID NO: 2534835 - RNA, 20 nt, Human
gugccuuaccuccugcccag

SEQ ID NO: 2534836 - RNA, 22 nt, Human
aacuugagggcccagagcagga

SEQ ID NO: 2534837 - RNA, 21 nt, Human
gugccuuaccuccugcccagg

SEQ ID NO: 2534838 - RNA, 19 nt, Human
aagacgcugugcugcccug

SEQ ID NO: 2534839 - RNA, 18 nt, Human
aagacgcugugcugcccu

SEQ ID NO: 2534840 - RNA, 17 nt, Human
aagacgcugugcugccc

SEQ ID NO: 2534841 - RNA, 15 nt, Human
aagacgcugugcugc

SEQ ID NO: 2534842 - RNA, 23 nt, Human
aagaccuugcuuaugauugcaga

SEQ ID NO: 2534843 - RNA, 21 nt, Human
aagaccuuuggagcaaagcug

SEQ ID NO: 2534844 - RNA, 18 nt, Human
aagaccuuguguguaugu

SEQ ID NO: 2534845 - RNA, 20 nt, Human
aagaccuucuccccauucug

SEQ ID NO: 2534846 - RNA, 13 nt, Human
aagacgcugugcu

SEQ ID NO: 2534847 - RNA, 21 nt, Human
aagacgaggcccucgggccca

SEQ ID NO: 2534848 - RNA, 22 nt, Human
aagaccuuguguguauguguac

SEQ ID NO: 2534849 - RNA, 17 nt, Human
gugggaagggcuacacc

SEQ ID NO: 2534850 - RNA, 14 nt, Human
guggggccagguca

SEQ ID NO: 2534851 - RNA, 17 nt, Human
guggggccgccgccucu

SEQ ID NO: 2534852 - RNA, 14 nt, Human
gugggaagggagag

SEQ ID NO: 2534853 - RNA, 18 nt, Human
gugggagcugccuguuca

SEQ ID NO: 2534854 - RNA, 15 nt, Human
gugggagcugccugu

SEQ ID NO: 2534855 - RNA, 17 nt, Human
guggggcucgccaugcc

SEQ ID NO: 2534856 - RNA, 13 nt, Human
guggggccuuggu

SEQ ID NO: 2534857 - RNA, 15 nt, Human
guggggccuagaucc

SEQ ID NO: 2534858 - RNA, 12 nt, Human
guggggcugcuc

SEQ ID NO: 2534859 - RNA, 14 nt, Human
guggggcugcuccu

SEQ ID NO: 2534860 - RNA, 16 nt, Human
guggggcugcuccucc

SEQ ID NO: 2534861 - RNA, 17 nt, Human
guggggcugcuccucca

SEQ ID NO: 2534862 - RNA, 20 nt, Human
guggggcugguagcucaggu

SEQ ID NO: 2534863 - RNA, 15 nt, Human
guggggucacucugg

SEQ ID NO: 2534864 - RNA, 20 nt, Human
gugggggagagcaggcuggc

SEQ ID NO: 2534865 - RNA, 22 nt, Human
gugggggaagagcacagcccuc

SEQ ID NO: 2534866 - RNA, 21 nt, Human
gugggggaagagcacagcccu

SEQ ID NO: 2534867 - RNA, 19 nt, Human
gugggggaagagcacagcc

SEQ ID NO: 2534868 - RNA, 12 nt, Human
guggggcuuggg

SEQ ID NO: 2534869 - RNA, 17 nt, Human
gugggggaagaccuggc

SEQ ID NO: 2534870 - RNA, 18 nt, Human
guggggcugcuccuccag

SEQ ID NO: 2534871 - RNA, 15 nt, Human
gugggacacccugug

SEQ ID NO: 2534872 - RNA, 14 nt, Human
gugggagcugccug

SEQ ID NO: 2534873 - RNA, 13 nt, Human
gugggacacccug

SEQ ID NO: 2534874 - RNA, 17 nt, Human
gugggaagcgucugucc

SEQ ID NO: 2534875 - RNA, 13 nt, Human
gugggaaggccag

SEQ ID NO: 2534876 - RNA, 14 nt, Human
gugggaaggccagc

SEQ ID NO: 2534877 - RNA, 13 nt, Human
gugggaagggaga

SEQ ID NO: 2534878 - RNA, 20 nt, Human
guggccuuccccagccucuu

SEQ ID NO: 2534879 - RNA, 22 nt, Human
guggcgcagcauauucaggaag

SEQ ID NO: 2534880 - RNA, 20 nt, Human
guggcgacucuauagacucu

SEQ ID NO: 2534881 - RNA, 19 nt, Human
guggccugugucccaugac

SEQ ID NO: 2534882 - RNA, 17 nt, Human
guggccugugucccaug

SEQ ID NO: 2534883 - RNA, 12 nt, Human
guggccuucccc

SEQ ID NO: 2534884 - RNA, 17 nt, Human
guggccuuccccagccu

SEQ ID NO: 2534885 - RNA, 15 nt, Human
guggccuuccccagc

SEQ ID NO: 2534886 - RNA, 19 nt, Human
guggccuuccccagccucu

SEQ ID NO: 2534887 - RNA, 16 nt, Human
guggccuguggccugu

SEQ ID NO: 2534888 - RNA, 15 nt, Human
guggccuguggccug

SEQ ID NO: 2534889 - RNA, 15 nt, Human
guggccugggccucc

SEQ ID NO: 2534890 - RNA, 12 nt, Human
guggccugggcc

SEQ ID NO: 2534891 - RNA, 21 nt, Human
guggccuggccaggagcucuu

SEQ ID NO: 2534892 - RNA, 12 nt, Human
guggccugggca

SEQ ID NO: 2534893 - RNA, 14 nt, Human
guggccugggcaag

SEQ ID NO: 2534894 - RNA, 21 nt, Human
guggccucuugagcaguggcu

SEQ ID NO: 2534895 - RNA, 13 nt, Human
guggccucuuugu

SEQ ID NO: 2534896 - RNA, 16 nt, Human
guggccucuuugucua

SEQ ID NO: 2534897 - RNA, 19 nt, Human
guggccucuuugucuaaaa

SEQ ID NO: 2534898 - RNA, 12 nt, Human
guggccuggcca

SEQ ID NO: 2534899 - RNA, 13 nt, Human
guggccuggccag

SEQ ID NO: 2534900 - RNA, 16 nt, Human
guggccuggccaggag

SEQ ID NO: 2534901 - RNA, 18 nt, Human
guggccuggccaggagcu

SEQ ID NO: 2534902 - RNA, 20 nt, Human
guggccuggccaggagcucu

SEQ ID NO: 2534903 - RNA, 22 nt, Human
guggccucccaacucaccccag

SEQ ID NO: 2534904 - RNA, 21 nt, Human
guggccucccaacucacccca

SEQ ID NO: 2534905 - RNA, 22 nt, Human
guggccucuccuuguggccugg

SEQ ID NO: 2534906 - RNA, 21 nt, Human
guggccucuccuuguggccug

SEQ ID NO: 2534907 - RNA, 22 nt, Human
guggccucgggacaccugcccu

SEQ ID NO: 2534908 - RNA, 19 nt, Human
guggccucaacccucccuc

SEQ ID NO: 2534909 - RNA, 20 nt, Human
guggccucuugagcaguggc

SEQ ID NO: 2534910 - RNA, 17 nt, Human
guggccucuugagcagu

SEQ ID NO: 2534911 - RNA, 23 nt, Human
guggccucuccuuguggccuggg

SEQ ID NO: 2534912 - RNA, 20 nt, Human
guggccucugccccgucuca

SEQ ID NO: 2534913 - RNA, 13 nt, Human
guggccucugugg

SEQ ID NO: 2534914 - RNA, 24 nt, Human
guggccucugccccgucucaugag

SEQ ID NO: 2534915 - RNA, 11 nt, Human
guggcccuugc

SEQ ID NO: 2534916 - RNA, 23 nt, Human
guggcccugucccucccaccucu

SEQ ID NO: 2534917 - RNA, 22 nt, Human
guggcccugucccucccaccuc

SEQ ID NO: 2534918 - RNA, 14 nt, Human
aagaggcaagaggc

SEQ ID NO: 2534919 - RNA, 9 nt, Human
guggccuca

SEQ ID NO: 2534920 - RNA, 17 nt, Human
guggccgcccaaggccc

SEQ ID NO: 2534921 - RNA, 22 nt, Human
aagaggagagaggaagcucucu

SEQ ID NO: 2534922 - RNA, 22 nt, Human
aagaggacauaaugggguccug

SEQ ID NO: 2534923 - RNA, 20 nt, Human
aagaggaguuucgagguaga

SEQ ID NO: 2534924 - RNA, 16 nt, Human
aagaggaucggaggcu

SEQ ID NO: 2534925 - RNA, 21 nt, Human
aagaggaguuucgagguagag

SEQ ID NO: 2534926 - RNA, 23 nt, Human
aagaggaaugaaguacucauaca

SEQ ID NO: 2534927 - RNA, 20 nt, Human
aagagccauauaaguuugaa

SEQ ID NO: 2534928 - RNA, 19 nt, Human
aagagccauauaaguuuga

SEQ ID NO: 2534929 - RNA, 9 nt, Human
aagagccau

SEQ ID NO: 2534930 - RNA, 17 nt, Human
aagccaaaccucuguga

SEQ ID NO: 2534931 - RNA, 14 nt, Human
aagccaaacucugc

SEQ ID NO: 2534932 - RNA, 15 nt, Human
aagccaaacucugcc

SEQ ID NO: 2534933 - RNA, 16 nt, Human
aagccaaacucugcca

SEQ ID NO: 2534934 - RNA, 12 nt, Human
aagccaaagaaa

SEQ ID NO: 2534935 - RNA, 20 nt, Human
aagccaaacucugccagcca

SEQ ID NO: 2534936 - RNA, 13 nt, Human
aagccaaagaaaa

SEQ ID NO: 2534937 - RNA, 11 nt, Human
aagccaaagaa

SEQ ID NO: 2534938 - RNA, 21 nt, Human
aagccaaagaaaaauaacccu

SEQ ID NO: 2534939 - RNA, 22 nt, Human
aagccaaagcuaggccuggcca

SEQ ID NO: 2534940 - RNA, 17 nt, Human
aagcccaggaaaggcuc

SEQ ID NO: 2534941 - RNA, 14 nt, Human
aagcccaggaaagg

SEQ ID NO: 2534942 - RNA, 18 nt, Human
aagccaagaggcugcagc

SEQ ID NO: 2534943 - RNA, 22 nt, Human
aagccaagaggcugcagccagg

SEQ ID NO: 2534944 - RNA, 16 nt, Human
aagccaacacccuguc

SEQ ID NO: 2534945 - RNA, 15 nt, Human
aagccaaagaaaaau

SEQ ID NO: 2534946 - RNA, 16 nt, Human
aagccaacgacaaagc

SEQ ID NO: 2534947 - RNA, 17 nt, Human
aagccaacuuguaaaua

SEQ ID NO: 2534948 - RNA, 16 nt, Human
aagccaacuuguaaau

SEQ ID NO: 2534949 - RNA, 22 nt, Human
aagccaacuuggcuuucccgga

SEQ ID NO: 2534950 - RNA, 17 nt, Human
aagccaacagucaaaac

SEQ ID NO: 2534951 - RNA, 18 nt, Human
aagcccaguucagcuugg

SEQ ID NO: 2534952 - RNA, 19 nt, Human
aagcccaguucagcuuggg

SEQ ID NO: 2534953 - RNA, 19 nt, Human
aagccaacuuguaaauaca

SEQ ID NO: 2534954 - RNA, 22 nt, Human
aagcccaggaaaggcuccagga

SEQ ID NO: 2534955 - RNA, 19 nt, Human
aagcccaggaaaggcucca

SEQ ID NO: 2534956 - RNA, 22 nt, Human
aagcccaugaguccuugaaaau

SEQ ID NO: 2534957 - RNA, 23 nt, Human
aagcccauucauuccauucugga

SEQ ID NO: 2534958 - RNA, 14 nt, Human
aagccccagcaagc

SEQ ID NO: 2534959 - RNA, 12 nt, Human
aagccccaggca

SEQ ID NO: 2534960 - RNA, 14 nt, Human
aagccccaggcagg

SEQ ID NO: 2534961 - RNA, 17 nt, Human
aagccccaggcaggcug

SEQ ID NO: 2534962 - RNA, 21 nt, Human
aagccccaggcaggcugugcg

SEQ ID NO: 2534963 - RNA, 17 nt, Human
aagccccaugcuggagc

SEQ ID NO: 2534964 - RNA, 16 nt, Human
aagccccaugcuggag

SEQ ID NO: 2534965 - RNA, 20 nt, Human
aagcccaugaguccuugaaa

SEQ ID NO: 2534966 - RNA, 19 nt, Human
aagcccaugaguccuugaa

SEQ ID NO: 2534967 - RNA, 16 nt, Human
aagcccauucauucca

SEQ ID NO: 2534968 - RNA, 21 nt, Human
aagcccauucauuccauucug

SEQ ID NO: 2534969 - RNA, 14 nt, Human
aagcccaggccccu

SEQ ID NO: 2534970 - RNA, 22 nt, Human
aagcccaucaauuauagaaagc

SEQ ID NO: 2534971 - RNA, 20 nt, Human
aagcccugucgagacacuug

SEQ ID NO: 2534972 - RNA, 19 nt, Human
aagcccugucgagacacuu

SEQ ID NO: 2534973 - RNA, 18 nt, Human
aagcccugucgagacacu

SEQ ID NO: 2534974 - RNA, 23 nt, Human
aagcccuggagccaacugcugcu

SEQ ID NO: 2534975 - RNA, 22 nt, Human
aagcccuguugacacaggucuu

SEQ ID NO: 2534976 - RNA, 20 nt, Human
aagcccuuccaugucgccuc

SEQ ID NO: 2534977 - RNA, 15 nt, Human
aagcccuuccauguc

SEQ ID NO: 2534978 - RNA, 20 nt, Human
aagccgcuggggccaguugg

SEQ ID NO: 2534979 - RNA, 23 nt, Human
aagcccuuccaugucgccucugc

SEQ ID NO: 2534980 - RNA, 13 nt, Human
aagccgcugcugg

SEQ ID NO: 2534981 - RNA, 21 nt, Human
guuaagaagcuguuguacauu

SEQ ID NO: 2534982 - RNA, 14 nt, Human
guuaagaccuggca

SEQ ID NO: 2534983 - RNA, 16 nt, Human
guuaagaccuggcagc

SEQ ID NO: 2534984 - RNA, 17 nt, Human
guuaagacaugauuucc

SEQ ID NO: 2534985 - RNA, 19 nt, Human
guuaagacaugauuuccuu

SEQ ID NO: 2534986 - RNA, 22 nt, Human
guuaagacaugauuuccuugaa

SEQ ID NO: 2534987 - RNA, 13 nt, Human
guuaagaccuggc

SEQ ID NO: 2534988 - RNA, 17 nt, Human
guuaagaagcuguugua

SEQ ID NO: 2534989 - RNA, 15 nt, Human
guuaagaagcuguug

SEQ ID NO: 2534990 - RNA, 13 nt, Human
guuaagaagcugu

SEQ ID NO: 2534991 - RNA, 20 nt, Human
guuaagaagcuguuguacau

SEQ ID NO: 2534992 - RNA, 19 nt, Human
guuaagaagcuguuguaca

SEQ ID NO: 2534993 - RNA, 18 nt, Human
guuaagacaaacugcaua

SEQ ID NO: 2534994 - RNA, 14 nt, Human
aagccggcggccca

SEQ ID NO: 2534995 - RNA, 13 nt, Human
aagccggcggccc

SEQ ID NO: 2534996 - RNA, 12 nt, Human
aagccggcggcc

SEQ ID NO: 2534997 - RNA, 19 nt, Human
aagccggcggcccaagccc

SEQ ID NO: 2534998 - RNA, 14 nt, Human
aagccgggaacaga

SEQ ID NO: 2534999 - RNA, 21 nt, Human
aagccccaugcuggagccugu

SEQ ID NO: 2535000 - RNA, 20 nt, Human
aagccccaugcuggagccug

SEQ ID NO: 2535001 - RNA, 19 nt, Human
aagccccaugcuggagccu

SEQ ID NO: 2535002 - RNA, 18 nt, Human
aagccccaugcuggagcc

SEQ ID NO: 2535003 - RNA, 23 nt, Human
aagccccaugcuggagccugugu

SEQ ID NO: 2535004 - RNA, 22 nt, Human
aagccccaugcuggagccugug

SEQ ID NO: 2535005 - RNA, 14 nt, Human
aagcccccaccgug

SEQ ID NO: 2535006 - RNA, 20 nt, Human
aagcccccaccgugggcagg

SEQ ID NO: 2535007 - RNA, 16 nt, Human
aagcccccagcuaaga

SEQ ID NO: 2535008 - RNA, 21 nt, Human
aagcccccagcuaagaaccug

SEQ ID NO: 2535009 - RNA, 23 nt, Human
aagcccccagcuaagaaccugga

SEQ ID NO: 2535010 - RNA, 15 nt, Human
aagcccgacuugcug

SEQ ID NO: 2535011 - RNA, 21 nt, Human
aagccccuugcucuccccugc

SEQ ID NO: 2535012 - RNA, 17 nt, Human
aagccccugcccaucug

SEQ ID NO: 2535013 - RNA, 16 nt, Human
aagcccccccuuccac

SEQ ID NO: 2535014 - RNA, 17 nt, Human
aagcccgacuugcuguu

SEQ ID NO: 2535015 - RNA, 9 nt, Human
aagcccucc

SEQ ID NO: 2535016 - RNA, 11 nt, Human
aagcccuccuu

SEQ ID NO: 2535017 - RNA, 12 nt, Human
aagcccuccuuc

SEQ ID NO: 2535018 - RNA, 13 nt, Human
aagcccuccuucc

SEQ ID NO: 2535019 - RNA, 14 nt, Human
aagcccuccuucca

SEQ ID NO: 2535020 - RNA, 16 nt, Human
aagcccucuuccauca

SEQ ID NO: 2535021 - RNA, 14 nt, Human
aagcccucuuccau

SEQ ID NO: 2535022 - RNA, 13 nt, Human
aagcccucuucca

SEQ ID NO: 2535023 - RNA, 15 nt, Human
aagcccuccuuccac

SEQ ID NO: 2535024 - RNA, 19 nt, Human
aagcccugagcuuucugcu

SEQ ID NO: 2535025 - RNA, 21 nt, Human
aagcccucuuccaucaugucc

SEQ ID NO: 2535026 - RNA, 18 nt, Human
aagcccucuuccaucaug

SEQ ID NO: 2535027 - RNA, 23 nt, Human
aagcccugauuguguauauucau

SEQ ID NO: 2535028 - RNA, 19 nt, Human
aagcccuggagccaacugc

SEQ ID NO: 2535029 - RNA, 12 nt, Human
aagcccugaggg

SEQ ID NO: 2535030 - RNA, 19 nt, Human
aagcccugggaucacugug

SEQ ID NO: 2535031 - RNA, 18 nt, Human
aagcaucggagggaauug

SEQ ID NO: 2535032 - RNA, 17 nt, Human
aagcauccaugugugga

SEQ ID NO: 2535033 - RNA, 19 nt, Human
aagcauccauguguggacu

SEQ ID NO: 2535034 - RNA, 20 nt, Human
aagcauccauguguggacuc

SEQ ID NO: 2535035 - RNA, 21 nt, Human
aagcauccauguguggacuca

SEQ ID NO: 2535036 - RNA, 19 nt, Human
aagcauuaccacucaggca

SEQ ID NO: 2535037 - RNA, 18 nt, Human
aagcauuaccacucaggc

SEQ ID NO: 2535038 - RNA, 18 nt, Human
aagcauuacauuuccaaa

SEQ ID NO: 2535039 - RNA, 18 nt, Human
aagcauuaagaacacuuu

SEQ ID NO: 2535040 - RNA, 18 nt, Human
aagcauuaacuucucugg

SEQ ID NO: 2535041 - RNA, 21 nt, Human
aagcauuccuucuuugauaau

SEQ ID NO: 2535042 - RNA, 20 nt, Human
aagcauuccuucuuugauaa

SEQ ID NO: 2535043 - RNA, 18 nt, Human
aagcauuccuucuuugau

SEQ ID NO: 2535044 - RNA, 17 nt, Human
aagcauuccuucuuuga

SEQ ID NO: 2535045 - RNA, 16 nt, Human
aagcauuccuucuuug

SEQ ID NO: 2535046 - RNA, 14 nt, Human
aagcauuccuucuu

SEQ ID NO: 2535047 - RNA, 13 nt, Human
aagcauuccuucu

SEQ ID NO: 2535048 - RNA, 17 nt, Human
aagcauuccaacaaagg

SEQ ID NO: 2535049 - RNA, 23 nt, Human
aagcauuccuucuuugauaaugu

SEQ ID NO: 2535050 - RNA, 22 nt, Human
aagcauuccuucuuugauaaug

SEQ ID NO: 2535051 - RNA, 14 nt, Human
aagcauuccaacaa

SEQ ID NO: 2535052 - RNA, 13 nt, Human
aagcauuccaaca

SEQ ID NO: 2535053 - RNA, 17 nt, Human
aagcauucagagagcag

SEQ ID NO: 2535054 - RNA, 15 nt, Human
aagcauucagagagc

SEQ ID NO: 2535055 - RNA, 13 nt, Human
aagcauucacaac

SEQ ID NO: 2535056 - RNA, 12 nt, Human
aagcauucacaa

SEQ ID NO: 2535057 - RNA, 22 nt, Human
aagcauucaauuuauucaagaa

SEQ ID NO: 2535058 - RNA, 23 nt, Human
aagcauucaauuuauucaagaaa

SEQ ID NO: 2535059 - RNA, 21 nt, Human
aagcauucaauuuauucaaga

SEQ ID NO: 2535060 - RNA, 13 nt, Human
aagcauucugucu

SEQ ID NO: 2535061 - RNA, 13 nt, Human
aagcauuguaaau

SEQ ID NO: 2535062 - RNA, 16 nt, Human
aagcauuuagauguau

SEQ ID NO: 2535063 - RNA, 16 nt, Human
aagcauuuacuuugug

SEQ ID NO: 2535064 - RNA, 16 nt, Human
aagcauuugaaugcau

SEQ ID NO: 2535065 - RNA, 15 nt, Human
aagcauuugaaugca

SEQ ID NO: 2535066 - RNA, 14 nt, Human
aagcauuugaaugc

SEQ ID NO: 2535067 - RNA, 13 nt, Human
aagcauuugaaug

SEQ ID NO: 2535068 - RNA, 12 nt, Human
aagcauuugaau

SEQ ID NO: 2535069 - RNA, 12 nt, Human
aagcauuuauaa

SEQ ID NO: 2535070 - RNA, 22 nt, Human
aagcauuggguggguaaauuca

SEQ ID NO: 2535071 - RNA, 15 nt, Human
aagcaguugugucag

SEQ ID NO: 2535072 - RNA, 17 nt, Human
aagcaguggacaccagg

SEQ ID NO: 2535073 - RNA, 17 nt, Human
aagcagugccuuccaua

SEQ ID NO: 2535074 - RNA, 18 nt, Human
aagcagugccuuccauaa

SEQ ID NO: 2535075 - RNA, 15 nt, Human
aagcagugcuucuca

SEQ ID NO: 2535076 - RNA, 20 nt, Human
aagcagugccuuccauaauu

SEQ ID NO: 2535077 - RNA, 22 nt, Human
aagcaucauuauuugcagagac

SEQ ID NO: 2535078 - RNA, 14 nt, Human
aagcauccaugugu

SEQ ID NO: 2535079 - RNA, 12 nt, Human
aagcauccaugu

SEQ ID NO: 2535080 - RNA, 22 nt, Human
aagcauaaaugcaaacacacaa

SEQ ID NO: 2535081 - RNA, 15 nt, Human
aagcagugcaugcug

SEQ ID NO: 2535082 - RNA, 14 nt, Human
aagcagugcaugcu

SEQ ID NO: 2535083 - RNA, 20 nt, Human
aagcagugcaugcugucccu

SEQ ID NO: 2535084 - RNA, 15 nt, Human
aagcagugccuucca

SEQ ID NO: 2535085 - RNA, 18 nt, Human
aagcagucuacccaccuc

SEQ ID NO: 2535086 - RNA, 19 nt, Human
aagcagucuacccaccuca

SEQ ID NO: 2535087 - RNA, 12 nt, Human
aagcagugcaug

SEQ ID NO: 2535088 - RNA, 19 nt, Human
aagcagucgugccuguguc

SEQ ID NO: 2535089 - RNA, 18 nt, Human
aagcagucgugccugugu

SEQ ID NO: 2535090 - RNA, 17 nt, Human
aagcagucgugccugug

SEQ ID NO: 2535091 - RNA, 22 nt, Human
aagcaguagaaauaauaugcau

SEQ ID NO: 2535092 - RNA, 21 nt, Human
aagcaguagaaauaauaugca

SEQ ID NO: 2535093 - RNA, 14 nt, Human
aagcaguagacaag

SEQ ID NO: 2535094 - RNA, 20 nt, Human
aagcaguagaaauaauaugc

SEQ ID NO: 2535095 - RNA, 13 nt, Human
aagcaguaacuga

SEQ ID NO: 2535096 - RNA, 16 nt, Human
aagcagguuuuucucc

SEQ ID NO: 2535097 - RNA, 14 nt, Human
gugugugaaaggaa

SEQ ID NO: 2535098 - RNA, 17 nt, Human
gugugugaaugaacacu

SEQ ID NO: 2535099 - RNA, 21 nt, Human
gugugugcgccuacaggagug

SEQ ID NO: 2535100 - RNA, 19 nt, Human
aagcagguucccaagcuca

SEQ ID NO: 2535101 - RNA, 10 nt, Human
gugugugcgu

SEQ ID NO: 2535102 - RNA, 22 nt, Human
aagcagguugaggggcuccugg

SEQ ID NO: 2535103 - RNA, 16 nt, Human
gugugugggagugugu

SEQ ID NO: 2535104 - RNA, 14 nt, Human
aagcuaggaaugaa

SEQ ID NO: 2535105 - RNA, 20 nt, Human
aagcuagcuccccuccucuc

SEQ ID NO: 2535106 - RNA, 19 nt, Human
aagcuagcuccccuccucu

SEQ ID NO: 2535107 - RNA, 18 nt, Human
aagcuagcuccccuccuc

SEQ ID NO: 2535108 - RNA, 15 nt, Human
aagcuagcuccccuc

SEQ ID NO: 2535109 - RNA, 13 nt, Human
aagcuagcucccc

SEQ ID NO: 2535110 - RNA, 12 nt, Human
aagcuagcuccc

SEQ ID NO: 2535111 - RNA, 12 nt, Human
aagccugcaacu

SEQ ID NO: 2535112 - RNA, 14 nt, Human
aagcuagagauaug

SEQ ID NO: 2535113 - RNA, 12 nt, Human
aagcuaggccug

SEQ ID NO: 2535114 - RNA, 22 nt, Human
aagccugcaauuucauaugcug

SEQ ID NO: 2535115 - RNA, 17 nt, Human
aagccugcaauuucaua

SEQ ID NO: 2535116 - RNA, 21 nt, Human
aagccugcacaauaaaaaugu

SEQ ID NO: 2535117 - RNA, 15 nt, Human
aagccugaugcugac

SEQ ID NO: 2535118 - RNA, 22 nt, Human
aagcuagacgagcaggcuucuu

SEQ ID NO: 2535119 - RNA, 20 nt, Human
aagccugaguuugcuuucaa

SEQ ID NO: 2535120 - RNA, 24 nt, Human
aagccugaaggggcgucuguuccc

SEQ ID NO: 2535121 - RNA, 15 nt, Human
aagccugaggcuggg

SEQ ID NO: 2535122 - RNA, 14 nt, Human
aagccuaccugcuc

SEQ ID NO: 2535123 - RNA, 14 nt, Human
aagccuaagaaucu

SEQ ID NO: 2535124 - RNA, 22 nt, Human
aagccuagugaaggcuucucuc

SEQ ID NO: 2535125 - RNA, 21 nt, Human
aagccuaucaaagaccuugug

SEQ ID NO: 2535126 - RNA, 19 nt, Human
aagccuaccugcucuccaa

SEQ ID NO: 2535127 - RNA, 16 nt, Human
aagccuaccugcucuc

SEQ ID NO: 2535128 - RNA, 20 nt, Human
aagccuagaagagcuucuga

SEQ ID NO: 2535129 - RNA, 22 nt, Human
aagccucaacuagucauuuuuu

SEQ ID NO: 2535130 - RNA, 13 nt, Human
aagccucagagaa

SEQ ID NO: 2535131 - RNA, 21 nt, Human
aagccugaaggggcgucuguu

SEQ ID NO: 2535132 - RNA, 16 nt, Human
guucagccccuccucu

SEQ ID NO: 2535133 - RNA, 17 nt, Human
guucagccccuccucug

SEQ ID NO: 2535134 - RNA, 18 nt, Human
guucagccccuccucugc

SEQ ID NO: 2535135 - RNA, 19 nt, Human
guucagccccuccucugcc

SEQ ID NO: 2535136 - RNA, 19 nt, Human
guucagcuaagcuaggaau

SEQ ID NO: 2535137 - RNA, 20 nt, Human
guucagccccuccucugcca

SEQ ID NO: 2535138 - RNA, 21 nt, Human
guucagccccuccucugccac

SEQ ID NO: 2535139 - RNA, 22 nt, Human
guucagccccuccucugccacc

SEQ ID NO: 2535140 - RNA, 23 nt, Human
guucagccccuccucugccaccu

SEQ ID NO: 2535141 - RNA, 13 nt, Human
guucagcuccagc

SEQ ID NO: 2535142 - RNA, 13 nt, Human
guucagcuacucc

SEQ ID NO: 2535143 - RNA, 22 nt, Human
guucagcuaagcuaggaaugaa

SEQ ID NO: 2535144 - RNA, 23 nt, Human
aagccuaaaagugggcuugauuc

SEQ ID NO: 2535145 - RNA, 14 nt, Human
aagcuccagguaga

SEQ ID NO: 2535146 - RNA, 13 nt, Human
aagcuccagguag

SEQ ID NO: 2535147 - RNA, 18 nt, Human
aagcuccaagcucccagg

SEQ ID NO: 2535148 - RNA, 17 nt, Human
aagcuccaagcucccag

SEQ ID NO: 2535149 - RNA, 19 nt, Human
aagcucagggccuggcuca

SEQ ID NO: 2535150 - RNA, 18 nt, Human
aagcucagggccuggcuc

SEQ ID NO: 2535151 - RNA, 23 nt, Human
aagcucauauuuuguauauaucu

SEQ ID NO: 2535152 - RNA, 22 nt, Human
aagcucauauuuuguauauauc

SEQ ID NO: 2535153 - RNA, 21 nt, Human
aagcucauauuuuguauauau

SEQ ID NO: 2535154 - RNA, 20 nt, Human
aagcucauauuuuguauaua

SEQ ID NO: 2535155 - RNA, 12 nt, Human
aagcucauauuu

SEQ ID NO: 2535156 - RNA, 17 nt, Human
aagcucaggaccaggca

SEQ ID NO: 2535157 - RNA, 20 nt, Human
aagcucagggccuggcucag

SEQ ID NO: 2535158 - RNA, 17 nt, Human
aagcucagggccuggcu

SEQ ID NO: 2535159 - RNA, 16 nt, Human
aagcucagggccuggc

SEQ ID NO: 2535160 - RNA, 13 nt, Human
aagcucagggccu

SEQ ID NO: 2535161 - RNA, 12 nt, Human
aagcucagggcc

SEQ ID NO: 2535162 - RNA, 20 nt, Human
aagcucacagaccuuugaac

SEQ ID NO: 2535163 - RNA, 11 nt, Human
aagcucacagu

SEQ ID NO: 2535164 - RNA, 15 nt, Human
aagcucagcccaccc

SEQ ID NO: 2535165 - RNA, 16 nt, Human
aagcucagcccacccc

SEQ ID NO: 2535166 - RNA, 17 nt, Human
aagcucagcuacugauu

SEQ ID NO: 2535167 - RNA, 21 nt, Human
aagcucagcccaccccccuca

SEQ ID NO: 2535168 - RNA, 17 nt, Human
aagcuauuuaucuguag

SEQ ID NO: 2535169 - RNA, 20 nt, Human
guuauuuuuacauucugaau

SEQ ID NO: 2535170 - RNA, 19 nt, Human
guuauuuuuacauucugaa

SEQ ID NO: 2535171 - RNA, 13 nt, Human
guuauuuugcaac

SEQ ID NO: 2535172 - RNA, 16 nt, Human
guuauugacaaacucu

SEQ ID NO: 2535173 - RNA, 23 nt, Human
guuauuuuuauaucagccugagu

SEQ ID NO: 2535174 - RNA, 16 nt, Human
guuauuuuuauaucag

SEQ ID NO: 2535175 - RNA, 16 nt, Human
guuauuuuuuaauuau

SEQ ID NO: 2535176 - RNA, 22 nt, Human
guuauuuuuguuucuuccaaag

SEQ ID NO: 2535177 - RNA, 23 nt, Human
guuauuuuuauuuauuuaaauuu

SEQ ID NO: 2535178 - RNA, 13 nt, Human
guuauucuggagu

SEQ ID NO: 2535179 - RNA, 23 nt, Human
guuagggaaaacauuccauccuu

SEQ ID NO: 2535180 - RNA, 13 nt, Human
guuagggaauggc

SEQ ID NO: 2535181 - RNA, 21 nt, Human
guucaaagauauuuugcuuug

SEQ ID NO: 2535182 - RNA, 22 nt, Human
guucaaagauauuuugcuuugu

SEQ ID NO: 2535183 - RNA, 20 nt, Human
guucaaagauauuuugcuuu

SEQ ID NO: 2535184 - RNA, 21 nt, Human
guuauuuuuuaauuauuauuu

SEQ ID NO: 2535185 - RNA, 14 nt, Human
guucaaaaagucua

SEQ ID NO: 2535186 - RNA, 14 nt, Human
guucaaaaugucug

SEQ ID NO: 2535187 - RNA, 13 nt, Human
guucaaaaugucu

SEQ ID NO: 2535188 - RNA, 15 nt, Human
guucaacuuccagaa

SEQ ID NO: 2535189 - RNA, 19 nt, Human
guucaacuuuuccuuugaa

SEQ ID NO: 2535190 - RNA, 18 nt, Human
guucaagcgauucuucug

SEQ ID NO: 2535191 - RNA, 13 nt, Human
guucaaagccagc

SEQ ID NO: 2535192 - RNA, 12 nt, Human
guucaaagccag

SEQ ID NO: 2535193 - RNA, 12 nt, Human
guuaagagaaau

SEQ ID NO: 2535194 - RNA, 11 nt, Human
guuaagagaaa

SEQ ID NO: 2535195 - RNA, 14 nt, Human
guuaagauuccuaa

SEQ ID NO: 2535196 - RNA, 18 nt, Human
guuaagagaaaugagcuu

SEQ ID NO: 2535197 - RNA, 23 nt, Human
guuacuguugugaccugaaguuc

SEQ ID NO: 2535198 - RNA, 16 nt, Human
guuaagcauuaccacu

SEQ ID NO: 2535199 - RNA, 18 nt, Human
guuaagcauuaccacuca

SEQ ID NO: 2535200 - RNA, 22 nt, Human
guuaagagugggggagagcagg

SEQ ID NO: 2535201 - RNA, 15 nt, Human
guuaagauaugaugu

SEQ ID NO: 2535202 - RNA, 14 nt, Human
guuacuucugaggu

SEQ ID NO: 2535203 - RNA, 16 nt, Human
guuacuucacuuuaau

SEQ ID NO: 2535204 - RNA, 17 nt, Human
guuacuuaccuaaacag

SEQ ID NO: 2535205 - RNA, 23 nt, Human
guuacuucacuuuaauucucaug

SEQ ID NO: 2535206 - RNA, 13 nt, Human
guuacuuccuauc

SEQ ID NO: 2535207 - RNA, 19 nt, Human
guuagaaaugcagaauccu

SEQ ID NO: 2535208 - RNA, 19 nt, Human
guuacuugaaauaccagug

SEQ ID NO: 2535209 - RNA, 16 nt, Human
guuacuugaaauacca

SEQ ID NO: 2535210 - RNA, 20 nt, Human
guuagcuccuguggccccac

SEQ ID NO: 2535211 - RNA, 11 nt, Human
guuagcugagc

SEQ ID NO: 2535212 - RNA, 11 nt, Human
guuagcuggag

SEQ ID NO: 2535213 - RNA, 14 nt, Human
guuaggaaauaaaa

SEQ ID NO: 2535214 - RNA, 16 nt, Human
guuagcuccuguggcc

SEQ ID NO: 2535215 - RNA, 15 nt, Human
guuagaaugaggagg

SEQ ID NO: 2535216 - RNA, 16 nt, Human
guuagaaugaggagga

SEQ ID NO: 2535217 - RNA, 14 nt, Human
guuagaaugaggag

SEQ ID NO: 2535218 - RNA, 16 nt, Human
guuaggaaauaaaacc

SEQ ID NO: 2535219 - RNA, 17 nt, Human
guuaggaaauaaaaccu

SEQ ID NO: 2535220 - RNA, 18 nt, Human
guuaggaaauaaaaccuu

SEQ ID NO: 2535221 - RNA, 19 nt, Human
guuaggaaauaaaaccuuu

SEQ ID NO: 2535222 - RNA, 21 nt, Human
guuaggaaauaaaaccuuuca

SEQ ID NO: 2535223 - RNA, 22 nt, Human
guuaggaaauaaaaccuuucaa

SEQ ID NO: 2535224 - RNA, 23 nt, Human
guuaggaaauaaaaccuuucaaa

SEQ ID NO: 2535225 - RNA, 15 nt, Human
guuaggaguucgaga

SEQ ID NO: 2535226 - RNA, 20 nt, Human
guuaggcauugugggaaggg

SEQ ID NO: 2535227 - RNA, 19 nt, Human
guuaggcauugugggaagg

SEQ ID NO: 2535228 - RNA, 15 nt, Human
guuagggaaaacauu

SEQ ID NO: 2535229 - RNA, 20 nt, Human
guuagggaaaacauuccauc

SEQ ID NO: 2535230 - RNA, 15 nt, Human
guuaggccuggcaca

SEQ ID NO: 2535231 - RNA, 13 nt, Human
guuaggccuggca

SEQ ID NO: 2535232 - RNA, 16 nt, Human
guuaggccuggcacag

SEQ ID NO: 2535233 - RNA, 23 nt, Human
guuaggauuuaacagucauuuaa

SEQ ID NO: 2535234 - RNA, 15 nt, Human
guuaggauuuaacag

SEQ ID NO: 2535235 - RNA, 20 nt, Human
aauacagauuuugauagcaa

SEQ ID NO: 2535236 - RNA, 19 nt, Human
aauacagauuuugauagca

SEQ ID NO: 2535237 - RNA, 21 nt, Human
aauacagacacuaaguuauag

SEQ ID NO: 2535238 - RNA, 20 nt, Human
aauacagacacuaaguuaua

SEQ ID NO: 2535239 - RNA, 18 nt, Human
aauacagcaacaauuuau

SEQ ID NO: 2535240 - RNA, 23 nt, Human
aauacagauuuugauagcaaagc

SEQ ID NO: 2535241 - RNA, 21 nt, Human
aauacagauuuugauagcaaa

SEQ ID NO: 2535242 - RNA, 19 nt, Human
aauacagccaaagauaauc

SEQ ID NO: 2535243 - RNA, 24 nt, Human
aauacagccaaagauaaucucuca

SEQ ID NO: 2535244 - RNA, 17 nt, Human
aauacaugacauuuauu

SEQ ID NO: 2535245 - RNA, 23 nt, Human
aauacaugacauuuauuuuucau

SEQ ID NO: 2535246 - RNA, 13 nt, Human
aauacaugcaucu

SEQ ID NO: 2535247 - RNA, 14 nt, Human
aauacaugcugcua

SEQ ID NO: 2535248 - RNA, 15 nt, Human
aauacauucugcuuu

SEQ ID NO: 2535249 - RNA, 23 nt, Human
aauacaucccuuaccugggaaag

SEQ ID NO: 2535250 - RNA, 16 nt, Human
aauacagggcauuuug

SEQ ID NO: 2535251 - RNA, 16 nt, Human
aauacagggcaugcau

SEQ ID NO: 2535252 - RNA, 21 nt, Human
aauacaguaagcugcucuauu

SEQ ID NO: 2535253 - RNA, 19 nt, Human
aauacaguaagcugcucua

SEQ ID NO: 2535254 - RNA, 23 nt, Human
aauacagggcaugcauuuugcag

SEQ ID NO: 2535255 - RNA, 23 nt, Human
aauaccacaggaaccacaagacu

SEQ ID NO: 2535256 - RNA, 12 nt, Human
aauaccaaggaa

SEQ ID NO: 2535257 - RNA, 18 nt, Human
aauacauugaauuagaaa

SEQ ID NO: 2535258 - RNA, 17 nt, Human
aauacauugaauuagaa

SEQ ID NO: 2535259 - RNA, 18 nt, Human
aauaccaugccauuuaaa

SEQ ID NO: 2535260 - RNA, 19 nt, Human
aauaccagccaguaaaugg

SEQ ID NO: 2535261 - RNA, 17 nt, Human
aauaccagccaguaaau

SEQ ID NO: 2535262 - RNA, 12 nt, Human
aauacauuuuau

SEQ ID NO: 2535263 - RNA, 16 nt, Human
aauaccaaguauuuau

SEQ ID NO: 2535264 - RNA, 20 nt, Human
aauaccaaaauuauuucaga

SEQ ID NO: 2535265 - RNA, 23 nt, Human
aauaccauuuuuuaaggaaacaa

SEQ ID NO: 2535266 - RNA, 22 nt, Human
aauaccauuuuuuaaggaaaca

SEQ ID NO: 2535267 - RNA, 20 nt, Human
aauaccauuuuuuaaggaaa

SEQ ID NO: 2535268 - RNA, 13 nt, Human
aauaccaguucug

SEQ ID NO: 2535269 - RNA, 20 nt, Human
aauaccagugaaccaaagag

SEQ ID NO: 2535270 - RNA, 21 nt, Human
aauaccucuuagcugagugga

SEQ ID NO: 2535271 - RNA, 17 nt, Human
aauaccucuuagcugag

SEQ ID NO: 2535272 - RNA, 16 nt, Human
aauaccucuuagcuga

SEQ ID NO: 2535273 - RNA, 14 nt, Human
aauaccucuuagcu

SEQ ID NO: 2535274 - RNA, 16 nt, Human
aauaccucugugugcu

SEQ ID NO: 2535275 - RNA, 15 nt, Human
aauaccucugugugc

SEQ ID NO: 2535276 - RNA, 13 nt, Human
aauaccucugugu

SEQ ID NO: 2535277 - RNA, 14 nt, Human
aauaccucugugug

SEQ ID NO: 2535278 - RNA, 18 nt, Human
aauaccugucccccugac

SEQ ID NO: 2535279 - RNA, 15 nt, Human
aauaccugucccccu

SEQ ID NO: 2535280 - RNA, 19 nt, Human
aauaccugucccccugaca

SEQ ID NO: 2535281 - RNA, 12 nt, Human
aauaccugcccu

SEQ ID NO: 2535282 - RNA, 18 nt, Human
aauagacccacaagaggc

SEQ ID NO: 2535283 - RNA, 18 nt, Human
aauagcauguauuguguc

SEQ ID NO: 2535284 - RNA, 14 nt, Human
aauagcauguauug

SEQ ID NO: 2535285 - RNA, 19 nt, Human
aauagcauguauugugucu

SEQ ID NO: 2535286 - RNA, 17 nt, Human
aauagaguauaugcacu

SEQ ID NO: 2535287 - RNA, 16 nt, Human
aauagaguauaugcac

SEQ ID NO: 2535288 - RNA, 16 nt, Human
aauagagccugaggga

SEQ ID NO: 2535289 - RNA, 15 nt, Human
aauagaguauaugca

SEQ ID NO: 2535290 - RNA, 18 nt, Human
aauagaguauaugcacuu

SEQ ID NO: 2535291 - RNA, 22 nt, Human
aauagagcaaaauugauguguu

SEQ ID NO: 2535292 - RNA, 14 nt, Human
aauagagccugagg

SEQ ID NO: 2535293 - RNA, 20 nt, Human
aauagagcaaaauugaugug

SEQ ID NO: 2535294 - RNA, 16 nt, Human
aauagacuuaaaucuc

SEQ ID NO: 2535295 - RNA, 16 nt, Human
uaaauuauuuauuauu

SEQ ID NO: 2535296 - RNA, 20 nt, Human
uaaauuauguuuauauaaau

SEQ ID NO: 2535297 - RNA, 19 nt, Human
uaaauuauguuuauauaaa

SEQ ID NO: 2535298 - RNA, 19 nt, Human
uaaauuauuaguuuacauc

SEQ ID NO: 2535299 - RNA, 21 nt, Human
uaacaaacaucacucugcugc

SEQ ID NO: 2535300 - RNA, 22 nt, Human
uaacaaacaucacucugcugcu

SEQ ID NO: 2535301 - RNA, 20 nt, Human
uaacaaacuacauguaaucc

SEQ ID NO: 2535302 - RNA, 21 nt, Human
uaaauuaacuuuuauaaacuu

SEQ ID NO: 2535303 - RNA, 17 nt, Human
uaaauuauaacuuaaaa

SEQ ID NO: 2535304 - RNA, 21 nt, Human
uaaauuaugggaaucaagauu

SEQ ID NO: 2535305 - RNA, 20 nt, Human
uaaauuaugggaaucaagau

SEQ ID NO: 2535306 - RNA, 16 nt, Human
uaaauuauacuggaga

SEQ ID NO: 2535307 - RNA, 17 nt, Human
uaaauuauguuuauaua

SEQ ID NO: 2535308 - RNA, 15 nt, Human
uaaauuauguuuaua

SEQ ID NO: 2535309 - RNA, 14 nt, Human
uaaauuauguuuau

SEQ ID NO: 2535310 - RNA, 13 nt, Human
uaaauuauguuua

SEQ ID NO: 2535311 - RNA, 22 nt, Human
uaaauuauaacuuaaaauauuu

SEQ ID NO: 2535312 - RNA, 22 nt, Human
uaacaaugauauauggauaaug

SEQ ID NO: 2535313 - RNA, 19 nt, Human
uaacaaugauauauggaua

SEQ ID NO: 2535314 - RNA, 13 nt, Human
uaacaaugauaua

SEQ ID NO: 2535315 - RNA, 17 nt, Human
uaacaaugaagauaaaa

SEQ ID NO: 2535316 - RNA, 14 nt, Human
uaacaaucagcucc

SEQ ID NO: 2535317 - RNA, 16 nt, Human
uaacaauaacuacugu

SEQ ID NO: 2535318 - RNA, 20 nt, Human
uaacaagucgaugaacuauu

SEQ ID NO: 2535319 - RNA, 17 nt, Human
uaacaauaacuacugug

SEQ ID NO: 2535320 - RNA, 18 nt, Human
uaacaauaacuacugugu

SEQ ID NO: 2535321 - RNA, 23 nt, Human
uaacaauaacuacuguguuccug

SEQ ID NO: 2535322 - RNA, 19 nt, Human
uaacaauaacuacuguguu

SEQ ID NO: 2535323 - RNA, 21 nt, Human
uaacaauaacuacuguguucc

SEQ ID NO: 2535324 - RNA, 13 nt, Human
aauacagaggcaa

SEQ ID NO: 2535325 - RNA, 17 nt, Human
aauacacuaguuguuuc

SEQ ID NO: 2535326 - RNA, 16 nt, Human
aauacacuaguuguuu

SEQ ID NO: 2535327 - RNA, 20 nt, Human
aauacacuaauuccuuucua

SEQ ID NO: 2535328 - RNA, 15 nt, Human
aauacagacacuaag

SEQ ID NO: 2535329 - RNA, 13 nt, Human
aauacagacacua

SEQ ID NO: 2535330 - RNA, 19 nt, Human
aauacagaaauuagccggg

SEQ ID NO: 2535331 - RNA, 13 nt, Human
uaacaaugcugua

SEQ ID NO: 2535332 - RNA, 21 nt, Human
aauacaccacuacauucuguu

SEQ ID NO: 2535333 - RNA, 16 nt, Human
aauacacgagguauga

SEQ ID NO: 2535334 - RNA, 21 nt, Human
aauacaccagguagaacacaa

SEQ ID NO: 2535335 - RNA, 18 nt, Human
aaguguauuuuuuuacua

SEQ ID NO: 2535336 - RNA, 21 nt, Human
aaguguauuuuuuuacuaaua

SEQ ID NO: 2535337 - RNA, 15 nt, Human
uaaaugaaauuguaa

SEQ ID NO: 2535338 - RNA, 14 nt, Human
uaaaugaaauugua

SEQ ID NO: 2535339 - RNA, 16 nt, Human
uaaaugaaauuguaaa

SEQ ID NO: 2535340 - RNA, 18 nt, Human
uaaaugaaaaucgugaca

SEQ ID NO: 2535341 - RNA, 18 nt, Human
aagugcguguguagaguu

SEQ ID NO: 2535342 - RNA, 17 nt, Human
aagugcguguguagagu

SEQ ID NO: 2535343 - RNA, 16 nt, Human
aagugcguguguagag

SEQ ID NO: 2535344 - RNA, 15 nt, Human
aagugcguguguaga

SEQ ID NO: 2535345 - RNA, 22 nt, Human
aagugcguccacgagcuguuua

SEQ ID NO: 2535346 - RNA, 13 nt, Human
aaguguauuuuuc

SEQ ID NO: 2535347 - RNA, 15 nt, Human
aaguguauuuuucaa

SEQ ID NO: 2535348 - RNA, 22 nt, Human
aaguguauuuuucaauaaagca

SEQ ID NO: 2535349 - RNA, 21 nt, Human
aagugcguguguagaguuaag

SEQ ID NO: 2535350 - RNA, 19 nt, Human
aagugcguguguagaguua

SEQ ID NO: 2535351 - RNA, 23 nt, Human
aaguguauaucagaaaagggaag

SEQ ID NO: 2535352 - RNA, 18 nt, Human
aaguguaugcacgugugc

SEQ ID NO: 2535353 - RNA, 23 nt, Human
uaaaugaagcagcuuuaaacaaa

SEQ ID NO: 2535354 - RNA, 22 nt, Human
uaaaugaagcagcuuuaaacaa

SEQ ID NO: 2535355 - RNA, 13 nt, Human
uaaaugugguaaa

SEQ ID NO: 2535356 - RNA, 17 nt, Human
uaaaugaagcagcuuua

SEQ ID NO: 2535357 - RNA, 16 nt, Human
uaaaugaagcagcuuu

SEQ ID NO: 2535358 - RNA, 12 nt, Human
uaaaugaagaaa

SEQ ID NO: 2535359 - RNA, 19 nt, Human
uaaauuaacuuuuauaaac

SEQ ID NO: 2535360 - RNA, 20 nt, Human
uaaauuaacuuuuauaaacu

SEQ ID NO: 2535361 - RNA, 16 nt, Human
aauagucaagaaaaau

SEQ ID NO: 2535362 - RNA, 17 nt, Human
aauagucaagaaaaauu

SEQ ID NO: 2535363 - RNA, 13 nt, Human
aauagucaagaaa

SEQ ID NO: 2535364 - RNA, 14 nt, Human
aauagucuagaugg

SEQ ID NO: 2535365 - RNA, 21 nt, Human
aauagucuagauggcuccucu

SEQ ID NO: 2535366 - RNA, 13 nt, Human
aauagucugugug

SEQ ID NO: 2535367 - RNA, 14 nt, Human
aauagucuguguga

SEQ ID NO: 2535368 - RNA, 19 nt, Human
aauagugcagaaucucaua

SEQ ID NO: 2535369 - RNA, 15 nt, Human
aauagugaaaugaau

SEQ ID NO: 2535370 - RNA, 22 nt, Human
aauagugcucgcuuucuaugua

SEQ ID NO: 2535371 - RNA, 13 nt, Human
aauagugaaauga

SEQ ID NO: 2535372 - RNA, 20 nt, Human
aauagucuagauggcuccuc

SEQ ID NO: 2535373 - RNA, 15 nt, Human
aauagucugugugaa

SEQ ID NO: 2535374 - RNA, 21 nt, Human
aauaguguguucugauuagaa

SEQ ID NO: 2535375 - RNA, 20 nt, Human
aauagugcuuaaaaaucauu

SEQ ID NO: 2535376 - RNA, 16 nt, Human
aauaguguuaaucaau

SEQ ID NO: 2535377 - RNA, 15 nt, Human
aauaguguuaaucaa

SEQ ID NO: 2535378 - RNA, 22 nt, Human
aauaguguguucugauuagaaa

SEQ ID NO: 2535379 - RNA, 23 nt, Human
aauaguguguucugauuagaaau

SEQ ID NO: 2535380 - RNA, 19 nt, Human
aauagucaaauugugugaa

SEQ ID NO: 2535381 - RNA, 15 nt, Human
aauagcuauauccau

SEQ ID NO: 2535382 - RNA, 17 nt, Human
aauagcuauauccaugu

SEQ ID NO: 2535383 - RNA, 18 nt, Human
aauagcuauauccaugua

SEQ ID NO: 2535384 - RNA, 20 nt, Human
aauagcuauauccauguacu

SEQ ID NO: 2535385 - RNA, 14 nt, Human
aauauauuuaauga

SEQ ID NO: 2535386 - RNA, 20 nt, Human
aauauauuuaagauaauuau

SEQ ID NO: 2535387 - RNA, 19 nt, Human
aauauauuuaagauaauua

SEQ ID NO: 2535388 - RNA, 21 nt, Human
aauauauuuuaagacgaaaca

SEQ ID NO: 2535389 - RNA, 15 nt, Human
aauauauuuaagaua

SEQ ID NO: 2535390 - RNA, 21 nt, Human
aauauauugcugcugguaauu

SEQ ID NO: 2535391 - RNA, 22 nt, Human
aauaguucaaagccaaguuuau

SEQ ID NO: 2535392 - RNA, 15 nt, Human
aauaguuacuccagu

SEQ ID NO: 2535393 - RNA, 18 nt, Human
aauaguuacuccagugcc

SEQ ID NO: 2535394 - RNA, 20 nt, Human
aauaguuacuccagugccaa

SEQ ID NO: 2535395 - RNA, 22 nt, Human
aauaguuaagacaugauuuccu

SEQ ID NO: 2535396 - RNA, 23 nt, Human
aauaguuaagacaugauuuccuu

SEQ ID NO: 2535397 - RNA, 22 nt, Human
aauaguguuaaucaauuuaaac

SEQ ID NO: 2535398 - RNA, 19 nt, Human
aauaguguuaaucaauuua

SEQ ID NO: 2535399 - RNA, 18 nt, Human
aauaguguuaaucaauuu

SEQ ID NO: 2535400 - RNA, 17 nt, Human
aauaguguuaaucaauu

SEQ ID NO: 2535401 - RNA, 21 nt, Human
aauaguuaagacaugauuucc

SEQ ID NO: 2535402 - RNA, 21 nt, Human
aauauauucagccuggcuuca

SEQ ID NO: 2535403 - RNA, 21 nt, Human
aauaguucagguaacaggcag

SEQ ID NO: 2535404 - RNA, 21 nt, Human
uaacaugaauauuuaguguuc

SEQ ID NO: 2535405 - RNA, 20 nt, Human
uaacaugaauauuuaguguu

SEQ ID NO: 2535406 - RNA, 21 nt, Human
uaacaguccuaacugguauag

SEQ ID NO: 2535407 - RNA, 18 nt, Human
uaacaugaggggacauuu

SEQ ID NO: 2535408 - RNA, 19 nt, Human
uaacaugaggggacauuuu

SEQ ID NO: 2535409 - RNA, 20 nt, Human
uaacaugaggggacauuuug

SEQ ID NO: 2535410 - RNA, 14 nt, Human
uaacaugaauauuu

SEQ ID NO: 2535411 - RNA, 19 nt, Human
uaacauguaauuaaguacu

SEQ ID NO: 2535412 - RNA, 15 nt, Human
uaacauguaggaagu

SEQ ID NO: 2535413 - RNA, 23 nt, Human
uaacaugaggggacauuuuggug

SEQ ID NO: 2535414 - RNA, 17 nt, Human
uaacauguaauuaagua

SEQ ID NO: 2535415 - RNA, 22 nt, Human
uaacauguguuaaguauuuuca

SEQ ID NO: 2535416 - RNA, 20 nt, Human
uaacgcccuauuuuugcaau

SEQ ID NO: 2535417 - RNA, 17 nt, Human
uaacgcccuauuuuugc

SEQ ID NO: 2535418 - RNA, 15 nt, Human
uaacauguaucccaa

SEQ ID NO: 2535419 - RNA, 20 nt, Human
aauauauuuuuauauuuagu

SEQ ID NO: 2535420 - RNA, 19 nt, Human
aauauauuuuuauauuuag

SEQ ID NO: 2535421 - RNA, 15 nt, Human
aauauauuuuuauau

SEQ ID NO: 2535422 - RNA, 21 nt, Human
aauauauuuucuguuuucuuu

SEQ ID NO: 2535423 - RNA, 15 nt, Human
aauauauuuucuguu

SEQ ID NO: 2535424 - RNA, 18 nt, Human
uaacagucauuuaaaaaa

SEQ ID NO: 2535425 - RNA, 15 nt, Human
uaacagucauuuaaa

SEQ ID NO: 2535426 - RNA, 14 nt, Human
uaacagucauuuaa

SEQ ID NO: 2535427 - RNA, 13 nt, Human
uaacagucauuua

SEQ ID NO: 2535428 - RNA, 23 nt, Human
uaacagguuauuuuaguuucugu

SEQ ID NO: 2535429 - RNA, 22 nt, Human
uaacagguuauuuuaguuucug

SEQ ID NO: 2535430 - RNA, 15 nt, Human
uaacaguaacgcagg

SEQ ID NO: 2535431 - RNA, 19 nt, Human
uaacaugaauauuuagugu

SEQ ID NO: 2535432 - RNA, 23 nt, Human
uaacagggucucuagugcuguga

SEQ ID NO: 2535433 - RNA, 13 nt, Human
uaacaggucuccu

SEQ ID NO: 2535434 - RNA, 14 nt, Human
uaacaggucuccuc

SEQ ID NO: 2535435 - RNA, 15 nt, Human
uaacaggucuccucu

SEQ ID NO: 2535436 - RNA, 16 nt, Human
uaacaggucuccucuu

SEQ ID NO: 2535437 - RNA, 21 nt, Human
uaacagguuauuuuaguuucu

SEQ ID NO: 2535438 - RNA, 16 nt, Human
uaacagguuauuuuag

SEQ ID NO: 2535439 - RNA, 18 nt, Human
uaacaggucuccucuuaa

SEQ ID NO: 2535440 - RNA, 19 nt, Human
uaacaggucuccucuuaaa

SEQ ID NO: 2535441 - RNA, 16 nt, Human
uaagaauuuagggaga

SEQ ID NO: 2535442 - RNA, 22 nt, Human
uaagaauucaaacuggggccuc

SEQ ID NO: 2535443 - RNA, 20 nt, Human
uaagacggauuuauuuuucc

SEQ ID NO: 2535444 - RNA, 18 nt, Human
uaagaccuggcagcucug

SEQ ID NO: 2535445 - RNA, 17 nt, Human
uaagaccuggcagcucu

SEQ ID NO: 2535446 - RNA, 13 nt, Human
uaagaccuggcag

SEQ ID NO: 2535447 - RNA, 20 nt, Human
uaagaagggauggauuccaa

SEQ ID NO: 2535448 - RNA, 19 nt, Human
uaagaagggauggauucca

SEQ ID NO: 2535449 - RNA, 21 nt, Human
uaagaagcuguuguacauuua

SEQ ID NO: 2535450 - RNA, 18 nt, Human
uaagaaggcaaaaaugua

SEQ ID NO: 2535451 - RNA, 17 nt, Human
uaagaauuauuuugaug

SEQ ID NO: 2535452 - RNA, 12 nt, Human
uaagaauuauuu

SEQ ID NO: 2535453 - RNA, 14 nt, Human
uaagaauucaaacu

SEQ ID NO: 2535454 - RNA, 18 nt, Human
uaagaauucaaacugggg

SEQ ID NO: 2535455 - RNA, 22 nt, Human
uaagaagcuguuguacauuuau

SEQ ID NO: 2535456 - RNA, 13 nt, Human
uaagaaggcaaaa

SEQ ID NO: 2535457 - RNA, 17 nt, Human
uaagaaggcaaaaaugu

SEQ ID NO: 2535458 - RNA, 13 nt, Human
uaagaagugaaaa

SEQ ID NO: 2535459 - RNA, 20 nt, Human
uaacuugucuuuggacccug

SEQ ID NO: 2535460 - RNA, 16 nt, Human
uaacuugucuuuggac

SEQ ID NO: 2535461 - RNA, 19 nt, Human
uaagaagcuguuguacauu

SEQ ID NO: 2535462 - RNA, 18 nt, Human
uaagaagcuguuguacau

SEQ ID NO: 2535463 - RNA, 15 nt, Human
uaagaagcuguugua

SEQ ID NO: 2535464 - RNA, 16 nt, Human
uaacuuuaaguuucag

SEQ ID NO: 2535465 - RNA, 15 nt, Human
uaacuuuaaguuuca

SEQ ID NO: 2535466 - RNA, 12 nt, Human
uaacuuuaaguu

SEQ ID NO: 2535467 - RNA, 22 nt, Human
uaacuuuaauucucuuucaaag

SEQ ID NO: 2535468 - RNA, 17 nt, Human
uaacuugucuaaauaag

SEQ ID NO: 2535469 - RNA, 16 nt, Human
uaacuugucuaaauaa

SEQ ID NO: 2535470 - RNA, 17 nt, Human
uaacuuguuuccaaugu

SEQ ID NO: 2535471 - RNA, 21 nt, Human
uaacuuccuuggacucauuuu

SEQ ID NO: 2535472 - RNA, 18 nt, Human
uaacuucuuauggaauug

SEQ ID NO: 2535473 - RNA, 19 nt, Human
uaacuucuuauggaauuga

SEQ ID NO: 2535474 - RNA, 15 nt, Human
uaacuuggcuuucau

SEQ ID NO: 2535475 - RNA, 18 nt, Human
uaacuucuuaaaaguugu

SEQ ID NO: 2535476 - RNA, 17 nt, Human
uaacuucuuauggaauu

SEQ ID NO: 2535477 - RNA, 13 nt, Human
uaacuucugccug

SEQ ID NO: 2535478 - RNA, 16 nt, Human
uaacgcgucuuccuga

SEQ ID NO: 2535479 - RNA, 15 nt, Human
uaacgcgucuuccug

SEQ ID NO: 2535480 - RNA, 17 nt, Human
uaacgcgucuuccugag

SEQ ID NO: 2535481 - RNA, 13 nt, Human
uaacggaucagaa

SEQ ID NO: 2535482 - RNA, 19 nt, Human
uaacggaucagaaauacag

SEQ ID NO: 2535483 - RNA, 14 nt, Human
uaacggaucagaaa

SEQ ID NO: 2535484 - RNA, 12 nt, Human
uaacggcuccag

SEQ ID NO: 2535485 - RNA, 21 nt, Human
uaacggaucagaaauacagau

SEQ ID NO: 2535486 - RNA, 17 nt, Human
uaacguauaaaagccug

SEQ ID NO: 2535487 - RNA, 13 nt, Human
uaacguauaaaag

SEQ ID NO: 2535488 - RNA, 18 nt, Human
uaacguugcugugggaac

SEQ ID NO: 2535489 - RNA, 15 nt, Human
uaacguuuuuccuuu

SEQ ID NO: 2535490 - RNA, 19 nt, Human
uaacguuuuuccuuuaaaa

SEQ ID NO: 2535491 - RNA, 18 nt, Human
uaacguuuuuccuuuaaa

SEQ ID NO: 2535492 - RNA, 20 nt, Human
uaacguuuuuccuuuaaaaa

SEQ ID NO: 2535493 - RNA, 22 nt, Human
uaacuagagcagcccuggaguc

SEQ ID NO: 2535494 - RNA, 16 nt, Human
uaacuagauggugcug

SEQ ID NO: 2535495 - RNA, 18 nt, Human
uaacuagauggugcugag

SEQ ID NO: 2535496 - RNA, 19 nt, Human
uaacuagauggugcugaga

SEQ ID NO: 2535497 - RNA, 20 nt, Human
uaacuagauggugcugagaa

SEQ ID NO: 2535498 - RNA, 21 nt, Human
uaacuagauggugcugagaag

SEQ ID NO: 2535499 - RNA, 17 nt, Human
uaacguugcugugggaa

SEQ ID NO: 2535500 - RNA, 16 nt, Human
uaacguugcuguggga

SEQ ID NO: 2535501 - RNA, 14 nt, Human
uaacguugcugugg

SEQ ID NO: 2535502 - RNA, 22 nt, Human
uaacguuagaccacaaauagug

SEQ ID NO: 2535503 - RNA, 16 nt, Human
uaacguugagccccug

SEQ ID NO: 2535504 - RNA, 15 nt, Human
uaacggcuccaggau

SEQ ID NO: 2535505 - RNA, 13 nt, Human
uaacggcuccagg

SEQ ID NO: 2535506 - RNA, 18 nt, Human
uaacggcuccaggauuuu

SEQ ID NO: 2535507 - RNA, 15 nt, Human
uaacguaaauacaca

SEQ ID NO: 2535508 - RNA, 15 nt, Human
uaacuuaauugcuau

SEQ ID NO: 2535509 - RNA, 18 nt, Human
uaacuuacccuuagggag

SEQ ID NO: 2535510 - RNA, 17 nt, Human
uaacuuacccuuaggga

SEQ ID NO: 2535511 - RNA, 17 nt, Human
uaacuauauuugcuuuu

SEQ ID NO: 2535512 - RNA, 19 nt, Human
uaacuaggcucagagaugu

SEQ ID NO: 2535513 - RNA, 15 nt, Human
uaacuuaaucaauua

SEQ ID NO: 2535514 - RNA, 18 nt, Human
uaacuauauuugcuuuuu

SEQ ID NO: 2535515 - RNA, 23 nt, Human
uaacuauaguccagcuuuguucu

SEQ ID NO: 2535516 - RNA, 17 nt, Human
uaacuaguguugcuugg

SEQ ID NO: 2535517 - RNA, 16 nt, Human
uaacuaggcucagaga

SEQ ID NO: 2535518 - RNA, 15 nt, Human
uaacuagcaccaggg

SEQ ID NO: 2535519 - RNA, 17 nt, Human
uaacuaguccuuuacua

SEQ ID NO: 2535520 - RNA, 15 nt, Human
uaacuaggcucagag

SEQ ID NO: 2535521 - RNA, 15 nt, Human
uaacuagcuuggaaa

SEQ ID NO: 2535522 - RNA, 18 nt, Human
uaacuuauauuguaagaa

SEQ ID NO: 2535523 - RNA, 19 nt, Human
uaacuuauauuguaagaaa

SEQ ID NO: 2535524 - RNA, 20 nt, Human
uaacuuauauuguaagaaau

SEQ ID NO: 2535525 - RNA, 21 nt, Human
uaacuuauauuguaagaaaua

SEQ ID NO: 2535526 - RNA, 23 nt, Human
uaacuuauaucaucagcauaccu

SEQ ID NO: 2535527 - RNA, 17 nt, Human
uaacuuauauuguaaga

SEQ ID NO: 2535528 - RNA, 15 nt, Human
uaacuuagcaugugu

SEQ ID NO: 2535529 - RNA, 15 nt, Human
uaaggacacacuaau

SEQ ID NO: 2535530 - RNA, 14 nt, Human
uaaggacacacuaa

SEQ ID NO: 2535531 - RNA, 18 nt, Human
uaaggacauuucccaggg

SEQ ID NO: 2535532 - RNA, 18 nt, Human
uaaggaauaccugucccc

SEQ ID NO: 2535533 - RNA, 17 nt, Human
uaaggaauaccuguccc

SEQ ID NO: 2535534 - RNA, 22 nt, Human
uaaggaauuuuauuuuuuucug

SEQ ID NO: 2535535 - RNA, 14 nt, Human
uaaggaauauggga

SEQ ID NO: 2535536 - RNA, 20 nt, Human
uaaggaauaugggagaaaua

SEQ ID NO: 2535537 - RNA, 18 nt, Human
uaaggacaaaaaugaacu

SEQ ID NO: 2535538 - RNA, 19 nt, Human
uaaggaauguagcugguuu

SEQ ID NO: 2535539 - RNA, 20 nt, Human
uaaggaaacucuuaucucag

SEQ ID NO: 2535540 - RNA, 19 nt, Human
uaaggaaacuggguuccug

SEQ ID NO: 2535541 - RNA, 16 nt, Human
uaaggaaagcaauaaa

SEQ ID NO: 2535542 - RNA, 18 nt, Human
uaaggaaagcaauaaaug

SEQ ID NO: 2535543 - RNA, 21 nt, Human
uaaggaaagcaauaaaugaau

SEQ ID NO: 2535544 - RNA, 9 nt, Human
uaaggaaua

SEQ ID NO: 2535545 - RNA, 13 nt, Human
uaaggaagacaau

SEQ ID NO: 2535546 - RNA, 11 nt, Human
uaaggaaacaa

SEQ ID NO: 2535547 - RNA, 13 nt, Human
uaagcugaaaaua

SEQ ID NO: 2535548 - RNA, 19 nt, Human
uaaggaaacucuuaucuca

SEQ ID NO: 2535549 - RNA, 17 nt, Human
uaaggaaacucuuaucu

SEQ ID NO: 2535550 - RNA, 15 nt, Human
uaaggaaacucuuau

SEQ ID NO: 2535551 - RNA, 10 nt, Human
uaaggaaacu

SEQ ID NO: 2535552 - RNA, 12 nt, Human
uaaggaaacugg

SEQ ID NO: 2535553 - RNA, 14 nt, Human
uaaggaaacugggu

SEQ ID NO: 2535554 - RNA, 15 nt, Human
uaagcucagaaucca

SEQ ID NO: 2535555 - RNA, 13 nt, Human
uaagcucuggcuu

SEQ ID NO: 2535556 - RNA, 18 nt, Human
uaagauuagaaugaaaau

SEQ ID NO: 2535557 - RNA, 15 nt, Human
uaagauuagaaugaa

SEQ ID NO: 2535558 - RNA, 13 nt, Human
uaagauuagaaug

SEQ ID NO: 2535559 - RNA, 18 nt, Human
aaucaguccccucccauc

SEQ ID NO: 2535560 - RNA, 17 nt, Human
aaucaguccccucccau

SEQ ID NO: 2535561 - RNA, 16 nt, Human
aaucaguccccuccca

SEQ ID NO: 2535562 - RNA, 15 nt, Human
aaucaguccccuccc

SEQ ID NO: 2535563 - RNA, 20 nt, Human
aaucagucuauccacagaga

SEQ ID NO: 2535564 - RNA, 17 nt, Human
aaucagucuauccacag

SEQ ID NO: 2535565 - RNA, 15 nt, Human
uaagcaaaaugugau

SEQ ID NO: 2535566 - RNA, 21 nt, Human
uaagcaaaaugugauauguac

SEQ ID NO: 2535567 - RNA, 14 nt, Human
uaagcaaaauguga

SEQ ID NO: 2535568 - RNA, 14 nt, Human
uaagauucauauuu

SEQ ID NO: 2535569 - RNA, 23 nt, Human
uaagcaggaggaggugccaacag

SEQ ID NO: 2535570 - RNA, 18 nt, Human
uaagcaggaggaggugcc

SEQ ID NO: 2535571 - RNA, 15 nt, Human
uaagcaggaggaggu

SEQ ID NO: 2535572 - RNA, 17 nt, Human
uaagcagcucuugcuaa

SEQ ID NO: 2535573 - RNA, 18 nt, Human
uaagcagcucuugcuaau

SEQ ID NO: 2535574 - RNA, 12 nt, Human
uaagcagcucuu

SEQ ID NO: 2535575 - RNA, 21 nt, Human
uaagcagcauuucugaagugg

SEQ ID NO: 2535576 - RNA, 23 nt, Human
uaagcagcauuucugaaguggac

SEQ ID NO: 2535577 - RNA, 19 nt, Human
uaagcagcauuucugaagu

SEQ ID NO: 2535578 - RNA, 18 nt, Human
uaagcagcauuucugaag

SEQ ID NO: 2535579 - RNA, 16 nt, Human
uaagauuaucugggga

SEQ ID NO: 2535580 - RNA, 21 nt, Human
uaagcagauuuaacaauucca

SEQ ID NO: 2535581 - RNA, 22 nt, Human
uaagcagauggaaugcuguguu

SEQ ID NO: 2535582 - RNA, 21 nt, Human
uaagcuauucaguaauaacuc

SEQ ID NO: 2535583 - RNA, 12 nt, Human
uaagcucagaau

SEQ ID NO: 2535584 - RNA, 20 nt, Human
uaagcucaaggcgugaggau

SEQ ID NO: 2535585 - RNA, 18 nt, Human
aaucaggaauauuuucca

SEQ ID NO: 2535586 - RNA, 20 nt, Human
aaucaggaauauuuuccaaa

SEQ ID NO: 2535587 - RNA, 18 nt, Human
aaucagggaggucauuuu

SEQ ID NO: 2535588 - RNA, 19 nt, Human
aaucagggaggucauuuug

SEQ ID NO: 2535589 - RNA, 14 nt, Human
aaucaguccccucc

SEQ ID NO: 2535590 - RNA, 13 nt, Human
aaucaguccccuc

SEQ ID NO: 2535591 - RNA, 21 nt, Human
aaucagucagugcaaauguca

SEQ ID NO: 2535592 - RNA, 19 nt, Human
aaucagucagugcaaaugu

SEQ ID NO: 2535593 - RNA, 11 nt, Human
aaucaguauau

SEQ ID NO: 2535594 - RNA, 17 nt, Human
aaucaguauaauucugu

SEQ ID NO: 2535595 - RNA, 14 nt, Human
aaucaguauaauuc

SEQ ID NO: 2535596 - RNA, 17 nt, Human
aaucaguauaaacaaag

SEQ ID NO: 2535597 - RNA, 14 nt, Human
aaucaguauaaaca

SEQ ID NO: 2535598 - RNA, 15 nt, Human
aaucaguauaaacaa

SEQ ID NO: 2535599 - RNA, 21 nt, Human
aaucaguaauauuuauauauu

SEQ ID NO: 2535600 - RNA, 20 nt, Human
aaucagcuccuuccuggaga

SEQ ID NO: 2535601 - RNA, 23 nt, Human
aaucagcuauuuacugccaaagg

SEQ ID NO: 2535602 - RNA, 19 nt, Human
aaucagccugcuccagcug

SEQ ID NO: 2535603 - RNA, 13 nt, Human
aaucagccugcuc

SEQ ID NO: 2535604 - RNA, 18 nt, Human
aaucagccugcuccagcu

SEQ ID NO: 2535605 - RNA, 18 nt, Human
aaucacucuuguggaugu

SEQ ID NO: 2535606 - RNA, 16 nt, Human
aaucacucuuguggau

SEQ ID NO: 2535607 - RNA, 12 nt, Human
aaucacucuugu

SEQ ID NO: 2535608 - RNA, 22 nt, Human
aaucacucuuguggauguuuua

SEQ ID NO: 2535609 - RNA, 18 nt, Human
aaucacucuguccuugga

SEQ ID NO: 2535610 - RNA, 12 nt, Human
aaucagcauucu

SEQ ID NO: 2535611 - RNA, 19 nt, Human
aaucagcauucucacuccu

SEQ ID NO: 2535612 - RNA, 18 nt, Human
aaucagcauucucacucc

SEQ ID NO: 2535613 - RNA, 16 nt, Human
aaucagccuaguugau

SEQ ID NO: 2535614 - RNA, 20 nt, Human
aaucagccaauuauguuaaa

SEQ ID NO: 2535615 - RNA, 19 nt, Human
aaucagccaauuauguuaa

SEQ ID NO: 2535616 - RNA, 18 nt, Human
aaucagccaauuauguua

SEQ ID NO: 2535617 - RNA, 14 nt, Human
aaucagccaauuau

SEQ ID NO: 2535618 - RNA, 11 nt, Human
aaucagccugc

SEQ ID NO: 2535619 - RNA, 21 nt, Human
aaucagccaauuauguuaaac

SEQ ID NO: 2535620 - RNA, 23 nt, Human
aaucagccuaggggucagggacc

SEQ ID NO: 2535621 - RNA, 12 nt, Human
aaucagccucuu

SEQ ID NO: 2535622 - RNA, 16 nt, Human
aaucagccucuuaaag

SEQ ID NO: 2535623 - RNA, 15 nt, Human
aauauuuauuuuaau

SEQ ID NO: 2535624 - RNA, 15 nt, Human
aauauuuucuggguu

SEQ ID NO: 2535625 - RNA, 13 nt, Human
aauauuuauuuau

SEQ ID NO: 2535626 - RNA, 18 nt, Human
aauauuuucuuuaaugcu

SEQ ID NO: 2535627 - RNA, 12 nt, Human
aauauuuauugc

SEQ ID NO: 2535628 - RNA, 13 nt, Human
aauauuuauugcu

SEQ ID NO: 2535629 - RNA, 20 nt, Human
aauauuuauuauuuucaccu

SEQ ID NO: 2535630 - RNA, 19 nt, Human
aauauuuauuauuuucacc

SEQ ID NO: 2535631 - RNA, 17 nt, Human
aauauuuauugcuuuau

SEQ ID NO: 2535632 - RNA, 16 nt, Human
aauauuuauugcuuua

SEQ ID NO: 2535633 - RNA, 15 nt, Human
aauauuuauugcuuu

SEQ ID NO: 2535634 - RNA, 14 nt, Human
aauauuuauugcuu

SEQ ID NO: 2535635 - RNA, 23 nt, Human
aauauuuauugcuuuauaaauaa

SEQ ID NO: 2535636 - RNA, 21 nt, Human
aauauuuauugcuuuauaaau

SEQ ID NO: 2535637 - RNA, 11 nt, Human
aauauuuauuu

SEQ ID NO: 2535638 - RNA, 22 nt, Human
aauauuuugaaucaauaauaua

SEQ ID NO: 2535639 - RNA, 18 nt, Human
aauauuuugaaucaauaa

SEQ ID NO: 2535640 - RNA, 16 nt, Human
aauauuuugaaucaau

SEQ ID NO: 2535641 - RNA, 15 nt, Human
aauauuuugaaucaa

SEQ ID NO: 2535642 - RNA, 14 nt, Human
aauauuuugaauca

SEQ ID NO: 2535643 - RNA, 13 nt, Human
aauauuuugaauc

SEQ ID NO: 2535644 - RNA, 19 nt, Human
aauauuuucuuuaaugcuu

SEQ ID NO: 2535645 - RNA, 21 nt, Human
aauauuuucuuuaaugcuuuu

SEQ ID NO: 2535646 - RNA, 20 nt, Human
aauauuuugaaucaauaaua

SEQ ID NO: 2535647 - RNA, 20 nt, Human
aaucacguaaagcuagaaau

SEQ ID NO: 2535648 - RNA, 21 nt, Human
aaucacguaaagcuagaaaug

SEQ ID NO: 2535649 - RNA, 17 nt, Human
aaucacuaaaaaugauc

SEQ ID NO: 2535650 - RNA, 15 nt, Human
aaucacguaaagcua

SEQ ID NO: 2535651 - RNA, 23 nt, Human
aauauuuaugucuauuuaagccu

SEQ ID NO: 2535652 - RNA, 21 nt, Human
aauauuuaugucuauuuaagc

SEQ ID NO: 2535653 - RNA, 19 nt, Human
aauauuuaugucuauuuaa

SEQ ID NO: 2535654 - RNA, 15 nt, Human
aauauuuauguaaac

SEQ ID NO: 2535655 - RNA, 12 nt, Human
aauauuuauuau

SEQ ID NO: 2535656 - RNA, 18 nt, Human
aauauuuauuaccucuga

SEQ ID NO: 2535657 - RNA, 17 nt, Human
aauauuuauuaccucug

SEQ ID NO: 2535658 - RNA, 16 nt, Human
aauauuuauuaccucu

SEQ ID NO: 2535659 - RNA, 15 nt, Human
aauauuuauuaccuc

SEQ ID NO: 2535660 - RNA, 14 nt, Human
aauauuuauuaccu

SEQ ID NO: 2535661 - RNA, 13 nt, Human
aauauuuauuacc

SEQ ID NO: 2535662 - RNA, 12 nt, Human
aauauuuauuac

SEQ ID NO: 2535663 - RNA, 15 nt, Human
aauauuuauagguca

SEQ ID NO: 2535664 - RNA, 19 nt, Human
uaagacuguaaugaaucua

SEQ ID NO: 2535665 - RNA, 15 nt, Human
uaagacuguguauuc

SEQ ID NO: 2535666 - RNA, 14 nt, Human
aauauuuauauauu

SEQ ID NO: 2535667 - RNA, 17 nt, Human
aauauuuauauauuuau

SEQ ID NO: 2535668 - RNA, 14 nt, Human
aauauuuauauuuc

SEQ ID NO: 2535669 - RNA, 17 nt, Human
aauauuuauauuucacu

SEQ ID NO: 2535670 - RNA, 18 nt, Human
aauauuuauauuucacua

SEQ ID NO: 2535671 - RNA, 13 nt, Human
uaagacuccucgg

SEQ ID NO: 2535672 - RNA, 18 nt, Human
uaagacucauucccuaga

SEQ ID NO: 2535673 - RNA, 23 nt, Human
uaagacuccucggccuggcuccu

SEQ ID NO: 2535674 - RNA, 22 nt, Human
uaagacuccucggccuggcucc

SEQ ID NO: 2535675 - RNA, 16 nt, Human
uaagacuguaaugaau

SEQ ID NO: 2535676 - RNA, 14 nt, Human
uaagacgacaagga

SEQ ID NO: 2535677 - RNA, 15 nt, Human
uaagacguguuugug

SEQ ID NO: 2535678 - RNA, 13 nt, Human
uaaguaaaaccac

SEQ ID NO: 2535679 - RNA, 15 nt, Human
uaaguaaaaccacag

SEQ ID NO: 2535680 - RNA, 18 nt, Human
uaagguuaccuuuguucc

SEQ ID NO: 2535681 - RNA, 17 nt, Human
uaaggaugcuaaaccuu

SEQ ID NO: 2535682 - RNA, 16 nt, Human
uaaggaucucucagga

SEQ ID NO: 2535683 - RNA, 21 nt, Human
uaagguuauuuauuuaaaugu

SEQ ID NO: 2535684 - RNA, 19 nt, Human
uaaggagaaaucuauagaa

SEQ ID NO: 2535685 - RNA, 16 nt, Human
uaaggagaugggccuu

SEQ ID NO: 2535686 - RNA, 19 nt, Human
uaaggaguaaucuguguac

SEQ ID NO: 2535687 - RNA, 20 nt, Human
uaaggaguaaucuguguaca

SEQ ID NO: 2535688 - RNA, 19 nt, Human
uaaggaucagaacagcaga

SEQ ID NO: 2535689 - RNA, 17 nt, Human
uaaggauacuuuacaug

SEQ ID NO: 2535690 - RNA, 16 nt, Human
uaaguaaaaccacagc

SEQ ID NO: 2535691 - RNA, 17 nt, Human
uaaguaaaaccacagca

SEQ ID NO: 2535692 - RNA, 18 nt, Human
uaaguaaaaccacagcag

SEQ ID NO: 2535693 - RNA, 19 nt, Human
uaaguaaaaccacagcagu

SEQ ID NO: 2535694 - RNA, 20 nt, Human
uaaguaaugauaacuggaaa

SEQ ID NO: 2535695 - RNA, 22 nt, Human
uaagguuucguuucuguauaca

SEQ ID NO: 2535696 - RNA, 20 nt, Human
uaagguuucguuucuguaua

SEQ ID NO: 2535697 - RNA, 19 nt, Human
uaagguuucguuucuguau

SEQ ID NO: 2535698 - RNA, 16 nt, Human
uaagguucucauagga

SEQ ID NO: 2535699 - RNA, 23 nt, Human
uaaguaauuaucgggaacagugu

SEQ ID NO: 2535700 - RNA, 16 nt, Human
uaaguaauucaagaaa

SEQ ID NO: 2535701 - RNA, 21 nt, Human
uaaguaauuaucgggaacagu

SEQ ID NO: 2535702 - RNA, 17 nt, Human
uaaguaccacucaggcc

SEQ ID NO: 2535703 - RNA, 21 nt, Human
uaaguauucuuauuuaaugaa

SEQ ID NO: 2535704 - RNA, 19 nt, Human
uaaguauugcaucuguaua

SEQ ID NO: 2535705 - RNA, 18 nt, Human
uaaguauugcaucuguau

SEQ ID NO: 2535706 - RNA, 12 nt, Human
uaaguauuuagg

SEQ ID NO: 2535707 - RNA, 17 nt, Human
uaaguauugcaucugua

SEQ ID NO: 2535708 - RNA, 11 nt, Human
uaaguauugca

SEQ ID NO: 2535709 - RNA, 20 nt, Human
uaaguauugcaucuguauaa

SEQ ID NO: 2535710 - RNA, 20 nt, Human
uaaguauuuagguuuuuguu

SEQ ID NO: 2535711 - RNA, 13 nt, Human
uaaguauuuauau

SEQ ID NO: 2535712 - RNA, 14 nt, Human
uaaguauuuauaua

SEQ ID NO: 2535713 - RNA, 15 nt, Human
uaaguauuuauauau

SEQ ID NO: 2535714 - RNA, 17 nt, Human
uaaguauuuauauauuu

SEQ ID NO: 2535715 - RNA, 18 nt, Human
uaaguauuuauauauuua

SEQ ID NO: 2535716 - RNA, 19 nt, Human
uaaguauuuauauauuuau

SEQ ID NO: 2535717 - RNA, 17 nt, Human
uaaguguguguuuuuca

SEQ ID NO: 2535718 - RNA, 13 nt, Human
uaaguauuucaaa

SEQ ID NO: 2535719 - RNA, 23 nt, Human
uaaguauuuauauauuuauaacu

SEQ ID NO: 2535720 - RNA, 19 nt, Human
uaagugugaguaagagcug

SEQ ID NO: 2535721 - RNA, 21 nt, Human
uaagugugaguaagagcuggu

SEQ ID NO: 2535722 - RNA, 14 nt, Human
uaaguguuguaaau

SEQ ID NO: 2535723 - RNA, 14 nt, Human
uaaguuacuucacu

SEQ ID NO: 2535724 - RNA, 14 nt, Human
uaagugugugugug

SEQ ID NO: 2535725 - RNA, 21 nt, Human
uaaguuacacauuuuucagau

SEQ ID NO: 2535726 - RNA, 14 nt, Human
uaaguuucucagcu

SEQ ID NO: 2535727 - RNA, 13 nt, Human
uaaguuucucagc

SEQ ID NO: 2535728 - RNA, 20 nt, Human
uaauaaaaaauggaaagaau

SEQ ID NO: 2535729 - RNA, 19 nt, Human
uaauaaaaaauggaaagaa

SEQ ID NO: 2535730 - RNA, 15 nt, Human
uaauaaaaaauggaa

SEQ ID NO: 2535731 - RNA, 14 nt, Human
uaauaaaaaaugga

SEQ ID NO: 2535732 - RNA, 21 nt, Human
uaauaaaaaauggaaagaauc

SEQ ID NO: 2535733 - RNA, 13 nt, Human
uaauaaaaagauu

SEQ ID NO: 2535734 - RNA, 16 nt, Human
uaauaaaaagauugaa

SEQ ID NO: 2535735 - RNA, 14 nt, Human
uaauaaaaaggcac

SEQ ID NO: 2535736 - RNA, 20 nt, Human
uaaguuucaggugacaugug

SEQ ID NO: 2535737 - RNA, 19 nt, Human
uaaguuucaggugacaugu

SEQ ID NO: 2535738 - RNA, 18 nt, Human
uaaguuucaggugacaug

SEQ ID NO: 2535739 - RNA, 17 nt, Human
uaaguuucaggugacau

SEQ ID NO: 2535740 - RNA, 16 nt, Human
uaaguuucaggugaca

SEQ ID NO: 2535741 - RNA, 20 nt, Human
uaaguuuaugucuaaagagc

SEQ ID NO: 2535742 - RNA, 17 nt, Human
uaaguuuauuucuuaaa

SEQ ID NO: 2535743 - RNA, 18 nt, Human
uaaguuuaugucuaaaga

SEQ ID NO: 2535744 - RNA, 17 nt, Human
uaaguuuaugucuaaag

SEQ ID NO: 2535745 - RNA, 14 nt, Human
uaaguuauaguaua

SEQ ID NO: 2535746 - RNA, 17 nt, Human
uaaguuucaguugauuu

SEQ ID NO: 2535747 - RNA, 22 nt, Human
uaaguuucaggugacaugugaa

SEQ ID NO: 2535748 - RNA, 21 nt, Human
aauccucucaaccaccuuuca

SEQ ID NO: 2535749 - RNA, 14 nt, Human
aaucccuguuuaau

SEQ ID NO: 2535750 - RNA, 17 nt, Human
aauccucuuccucugag

SEQ ID NO: 2535751 - RNA, 15 nt, Human
aauccucuuccucug

SEQ ID NO: 2535752 - RNA, 14 nt, Human
aauccucuuccucu

SEQ ID NO: 2535753 - RNA, 13 nt, Human
aauccucuuccuc

SEQ ID NO: 2535754 - RNA, 18 nt, Human
aauccucucucuguguua

SEQ ID NO: 2535755 - RNA, 11 nt, Human
aauccucuggc

SEQ ID NO: 2535756 - RNA, 11 nt, Human
aauccugcccc

SEQ ID NO: 2535757 - RNA, 12 nt, Human
aauccugccccc

SEQ ID NO: 2535758 - RNA, 10 nt, Human
aauccugccc

SEQ ID NO: 2535759 - RNA, 18 nt, Human
aauccucuuccucugagg

SEQ ID NO: 2535760 - RNA, 20 nt, Human
aauccucuuccucugaggcu

SEQ ID NO: 2535761 - RNA, 23 nt, Human
aaucgcuucucuuuugaaacaau

SEQ ID NO: 2535762 - RNA, 12 nt, Human
aaucgcuucucu

SEQ ID NO: 2535763 - RNA, 21 nt, Human
aaucgcuuaaagauguuccua

SEQ ID NO: 2535764 - RNA, 14 nt, Human
aaucgcuuaaagau

SEQ ID NO: 2535765 - RNA, 22 nt, Human
aaucggaucuggggcucuggga

SEQ ID NO: 2535766 - RNA, 21 nt, Human
aaucggaucuggggcucuggg

SEQ ID NO: 2535767 - RNA, 20 nt, Human
aaucuaugaaguauauaaug

SEQ ID NO: 2535768 - RNA, 19 nt, Human
aaucuaugaaguauauaau

SEQ ID NO: 2535769 - RNA, 17 nt, Human
aaucuaugaaguauaua

SEQ ID NO: 2535770 - RNA, 14 nt, Human
aaucuaugaaguau

SEQ ID NO: 2535771 - RNA, 20 nt, Human
aaucuaucugcuuaugcagu

SEQ ID NO: 2535772 - RNA, 15 nt, Human
aaucgguuuaaacau

SEQ ID NO: 2535773 - RNA, 22 nt, Human
aaucggcccacagcucccaccc

SEQ ID NO: 2535774 - RNA, 18 nt, Human
aaucggcccacagcuccc

SEQ ID NO: 2535775 - RNA, 23 nt, Human
aaucggaucuggggcucugggau

SEQ ID NO: 2535776 - RNA, 15 nt, Human
aaucguuaugugugu

SEQ ID NO: 2535777 - RNA, 16 nt, Human
aaucguuaugugugua

SEQ ID NO: 2535778 - RNA, 17 nt, Human
aaucguuauguguguau

SEQ ID NO: 2535779 - RNA, 18 nt, Human
aaucguuauguguguaua

SEQ ID NO: 2535780 - RNA, 14 nt, Human
aaucuaaagccagu

SEQ ID NO: 2535781 - RNA, 14 nt, Human
aaucuaaaagcuuu

SEQ ID NO: 2535782 - RNA, 20 nt, Human
aaucuaugccaaagaucacu

SEQ ID NO: 2535783 - RNA, 18 nt, Human
aaucuaugccaaagauca

SEQ ID NO: 2535784 - RNA, 17 nt, Human
aaucuaugccaaagauc

SEQ ID NO: 2535785 - RNA, 16 nt, Human
aaucuaugccaaagau

SEQ ID NO: 2535786 - RNA, 12 nt, Human
aaucuauuauac

SEQ ID NO: 2535787 - RNA, 22 nt, Human
aaucuauuaauagcugccuuaa

SEQ ID NO: 2535788 - RNA, 21 nt, Human
aaucuauggucgggagacagc

SEQ ID NO: 2535789 - RNA, 15 nt, Human
aaucuaugauuccag

SEQ ID NO: 2535790 - RNA, 18 nt, Human
aaucuaugauuccaggug

SEQ ID NO: 2535791 - RNA, 19 nt, Human
aaucuauucagacaagcaa

SEQ ID NO: 2535792 - RNA, 18 nt, Human
aaucuauucagacaagca

SEQ ID NO: 2535793 - RNA, 13 nt, Human
aaucuauucagac

SEQ ID NO: 2535794 - RNA, 12 nt, Human
aaucuauucaga

SEQ ID NO: 2535795 - RNA, 18 nt, Human
aaucuauuauacuguauu

SEQ ID NO: 2535796 - RNA, 17 nt, Human
aaucuauuauacuguau

SEQ ID NO: 2535797 - RNA, 16 nt, Human
aaucuauuauacugua

SEQ ID NO: 2535798 - RNA, 15 nt, Human
aaucuauuggguuca

SEQ ID NO: 2535799 - RNA, 16 nt, Human
aaucuauuggguucau

SEQ ID NO: 2535800 - RNA, 17 nt, Human
aaucuauuggguucauu

SEQ ID NO: 2535801 - RNA, 18 nt, Human
aaucuauuggguucauua

SEQ ID NO: 2535802 - RNA, 19 nt, Human
aaucuauuggguucauuau

SEQ ID NO: 2535803 - RNA, 11 nt, Human
aaucuauuuaa

SEQ ID NO: 2535804 - RNA, 11 nt, Human
aaucuguaaac

SEQ ID NO: 2535805 - RNA, 12 nt, Human
aaucuguaaacu

SEQ ID NO: 2535806 - RNA, 18 nt, Human
aaucugggccagaauuuc

SEQ ID NO: 2535807 - RNA, 13 nt, Human
aaucucaaauaac

SEQ ID NO: 2535808 - RNA, 17 nt, Human
aaucuauuuuguaacuu

SEQ ID NO: 2535809 - RNA, 14 nt, Human
aaucuauuuuguaa

SEQ ID NO: 2535810 - RNA, 12 nt, Human
aaucuauuucua

SEQ ID NO: 2535811 - RNA, 12 nt, Human
aaucuauuuaag

SEQ ID NO: 2535812 - RNA, 14 nt, Human
aaucccuggcaaag

SEQ ID NO: 2535813 - RNA, 17 nt, Human
aaucccgccaccuaucu

SEQ ID NO: 2535814 - RNA, 16 nt, Human
aaucccgauucacccu

SEQ ID NO: 2535815 - RNA, 20 nt, Human
aauccucaguuuuugugaaa

SEQ ID NO: 2535816 - RNA, 13 nt, Human
aaucccuguuuaa

SEQ ID NO: 2535817 - RNA, 17 nt, Human
aaucccugggcauugcu

SEQ ID NO: 2535818 - RNA, 19 nt, Human
aaucccugggcauugcuuu

SEQ ID NO: 2535819 - RNA, 23 nt, Human
aaucccugguuuuaaguaucaau

SEQ ID NO: 2535820 - RNA, 21 nt, Human
aaucccugggcauugcuuucc

SEQ ID NO: 2535821 - RNA, 21 nt, Human
aauccccaguaaaauugccau

SEQ ID NO: 2535822 - RNA, 17 nt, Human
aauccccaguaaaauug

SEQ ID NO: 2535823 - RNA, 16 nt, Human
aauccccaguaaaauu

SEQ ID NO: 2535824 - RNA, 15 nt, Human
aauccccaguaaaau

SEQ ID NO: 2535825 - RNA, 18 nt, Human
aaucccauucauaacuuu

SEQ ID NO: 2535826 - RNA, 20 nt, Human
aaucccauucauaacuuuca

SEQ ID NO: 2535827 - RNA, 19 nt, Human
aauccccuccuugggcacu

SEQ ID NO: 2535828 - RNA, 17 nt, Human
aauccccuccuugggca

SEQ ID NO: 2535829 - RNA, 12 nt, Human
aauccccuccuu

SEQ ID NO: 2535830 - RNA, 18 nt, Human
aauccccuucucaucacu

SEQ ID NO: 2535831 - RNA, 18 nt, Human
aauccccuccuugggcac

SEQ ID NO: 2535832 - RNA, 18 nt, Human
aaucccccuugccacccc

SEQ ID NO: 2535833 - RNA, 15 nt, Human
aaucccccuugccac

SEQ ID NO: 2535834 - RNA, 11 nt, Human
aauccccuccu

SEQ ID NO: 2535835 - RNA, 21 nt, Human
aauccccucccugucaaagcu

SEQ ID NO: 2535836 - RNA, 14 nt, Human
aauccccucauuca

SEQ ID NO: 2535837 - RNA, 19 nt, Human
aauccccucauucaggaaa

SEQ ID NO: 2535838 - RNA, 22 nt, Human
aaucagugugucuaaauuugaa

SEQ ID NO: 2535839 - RNA, 18 nt, Human
aaucagugugucuaaauu

SEQ ID NO: 2535840 - RNA, 17 nt, Human
aaucagugugucuaaau

SEQ ID NO: 2535841 - RNA, 14 nt, Human
aaucagugugucua

SEQ ID NO: 2535842 - RNA, 20 nt, Human
aaucauaagauauuuuucau

SEQ ID NO: 2535843 - RNA, 21 nt, Human
aaucccaaauuugauugauuu

SEQ ID NO: 2535844 - RNA, 17 nt, Human
aaucauaaacugugugc

SEQ ID NO: 2535845 - RNA, 18 nt, Human
aaucauaaacugugugca

SEQ ID NO: 2535846 - RNA, 13 nt, Human
uaauaaaaaggca

SEQ ID NO: 2535847 - RNA, 17 nt, Human
aaucccauuuaaaaaaa

SEQ ID NO: 2535848 - RNA, 12 nt, Human
aaucccaggaug

SEQ ID NO: 2535849 - RNA, 20 nt, Human
aaucccagcacuuugggagg

SEQ ID NO: 2535850 - RNA, 18 nt, Human
aaucccagcuacucagga

SEQ ID NO: 2535851 - RNA, 20 nt, Human
aaucccaagaucugugcagc

SEQ ID NO: 2535852 - RNA, 17 nt, Human
aaucccacccacaugug

SEQ ID NO: 2535853 - RNA, 18 nt, Human
aaucccacccacauguga

SEQ ID NO: 2535854 - RNA, 15 nt, Human
aaucccagcacuuug

SEQ ID NO: 2535855 - RNA, 22 nt, Human
aaucuguagggcuggaccuaug

SEQ ID NO: 2535856 - RNA, 19 nt, Human
aaucuguagggcuggaccu

SEQ ID NO: 2535857 - RNA, 16 nt, Human
aaucuguagggcugga

SEQ ID NO: 2535858 - RNA, 20 nt, Human
aaugaccuuucaauaggaaa

SEQ ID NO: 2535859 - RNA, 21 nt, Human
aaugaccuuucaauaggaaaa

SEQ ID NO: 2535860 - RNA, 14 nt, Human
aaucuguaaacugu

SEQ ID NO: 2535861 - RNA, 15 nt, Human
aaucuguaaacugug

SEQ ID NO: 2535862 - RNA, 16 nt, Human
aaucuguaaacugugu

SEQ ID NO: 2535863 - RNA, 21 nt, Human
aaucuguaaacuguguauucc

SEQ ID NO: 2535864 - RNA, 15 nt, Human
aaucuguagggcugg

SEQ ID NO: 2535865 - RNA, 23 nt, Human
aaucuguaaacuguguauuccaa

SEQ ID NO: 2535866 - RNA, 13 nt, Human
aaucuguacaaug

SEQ ID NO: 2535867 - RNA, 20 nt, Human
aaugacucagaauauugcuu

SEQ ID NO: 2535868 - RNA, 20 nt, Human
aaucuguaucuguagugaga

SEQ ID NO: 2535869 - RNA, 17 nt, Human
aaugacuaaaaaacaaa

SEQ ID NO: 2535870 - RNA, 20 nt, Human
aaugacuaaaaaacaaagaa

SEQ ID NO: 2535871 - RNA, 17 nt, Human
aaugacuaaaaauauua

SEQ ID NO: 2535872 - RNA, 24 nt, Human
aaugacuaaaaauauuauaacuua

SEQ ID NO: 2535873 - RNA, 21 nt, Human
aaugagccuacgcugaagaug

SEQ ID NO: 2535874 - RNA, 11 nt, Human
aaugagccugg

SEQ ID NO: 2535875 - RNA, 16 nt, Human
aaugagaucaggcucu

SEQ ID NO: 2535876 - RNA, 23 nt, Human
aaugagagggcaguguuuccuuu

SEQ ID NO: 2535877 - RNA, 16 nt, Human
aaugagauaguagcau

SEQ ID NO: 2535878 - RNA, 17 nt, Human
aaugagagguuccuaag

SEQ ID NO: 2535879 - RNA, 19 nt, Human
aaugagagggcaguguuuc

SEQ ID NO: 2535880 - RNA, 17 nt, Human
aaugagaucccgccucu

SEQ ID NO: 2535881 - RNA, 17 nt, Human
aaugagaucaggcucug

SEQ ID NO: 2535882 - RNA, 22 nt, Human
aaugagaaaucuaaaaaacgaa

SEQ ID NO: 2535883 - RNA, 12 nt, Human
aaugagaaaucu

SEQ ID NO: 2535884 - RNA, 22 nt, Human
aaugagagacacacugaagaag

SEQ ID NO: 2535885 - RNA, 17 nt, Human
aaugagaaggaauuuga

SEQ ID NO: 2535886 - RNA, 14 nt, Human
aaugagaaccaaca

SEQ ID NO: 2535887 - RNA, 18 nt, Human
aaugaggucagagccugc

SEQ ID NO: 2535888 - RNA, 16 nt, Human
aaugaggucagagccu

SEQ ID NO: 2535889 - RNA, 19 nt, Human
aaugaggucagcaugucua

SEQ ID NO: 2535890 - RNA, 15 nt, Human
aaugaggucccaggc

SEQ ID NO: 2535891 - RNA, 16 nt, Human
aaugaggucccaggca

SEQ ID NO: 2535892 - RNA, 14 nt, Human
aaugagggccaaga

SEQ ID NO: 2535893 - RNA, 16 nt, Human
aaugaggucugaaaug

SEQ ID NO: 2535894 - RNA, 21 nt, Human
aaugagggacuggaaccaggg

SEQ ID NO: 2535895 - RNA, 20 nt, Human
aaugagggacuggaaccagg

SEQ ID NO: 2535896 - RNA, 14 nt, Human
aaugagggacugga

SEQ ID NO: 2535897 - RNA, 15 nt, Human
aaugaggucagcaug

SEQ ID NO: 2535898 - RNA, 18 nt, Human
aaugagggccaagaaaga

SEQ ID NO: 2535899 - RNA, 14 nt, Human
aaugagccuggcaa

SEQ ID NO: 2535900 - RNA, 18 nt, Human
aaugaggcuugcugagag

SEQ ID NO: 2535901 - RNA, 15 nt, Human
aaugaggcuugcuga

SEQ ID NO: 2535902 - RNA, 13 nt, Human
aaugaggcuugcu

SEQ ID NO: 2535903 - RNA, 12 nt, Human
aaugaggaggaa

SEQ ID NO: 2535904 - RNA, 18 nt, Human
aaugaggaggaaggagag

SEQ ID NO: 2535905 - RNA, 12 nt, Human
aaugagccuggc

SEQ ID NO: 2535906 - RNA, 13 nt, Human
aaugagccuggca

SEQ ID NO: 2535907 - RNA, 13 nt, Human
aaugauuucaugc

SEQ ID NO: 2535908 - RNA, 22 nt, Human
aaugauuucaugcuaucucugu

SEQ ID NO: 2535909 - RNA, 24 nt, Human
aaugauuucagcucacugcaaccu

SEQ ID NO: 2535910 - RNA, 20 nt, Human
aaugauuguaaaauagcuug

SEQ ID NO: 2535911 - RNA, 14 nt, Human
aaugauuguaaaau

SEQ ID NO: 2535912 - RNA, 13 nt, Human
aaugauuguaaaa

SEQ ID NO: 2535913 - RNA, 21 nt, Human
aaugauucaguguuaaaugug

SEQ ID NO: 2535914 - RNA, 22 nt, Human
aaugauucaguguuaaauguga

SEQ ID NO: 2535915 - RNA, 23 nt, Human
aaugauucaguguuaaaugugau

SEQ ID NO: 2535916 - RNA, 13 nt, Human
aaugauucagugu

SEQ ID NO: 2535917 - RNA, 14 nt, Human
aaugauucaguguu

SEQ ID NO: 2535918 - RNA, 15 nt, Human
aaugauaaacucucu

SEQ ID NO: 2535919 - RNA, 21 nt, Human
aaugaguuuuuauggggcuga

SEQ ID NO: 2535920 - RNA, 23 nt, Human
aaugaggugggagguggaagaag

SEQ ID NO: 2535921 - RNA, 19 nt, Human
aaugaggucugaaauggag

SEQ ID NO: 2535922 - RNA, 19 nt, Human
aaugaguuaccuacauuuu

SEQ ID NO: 2535923 - RNA, 22 nt, Human
uaauuccguagguuauuuucag

SEQ ID NO: 2535924 - RNA, 14 nt, Human
uaauuauuauuugu

SEQ ID NO: 2535925 - RNA, 22 nt, Human
uaauuauuauuuauauauguau

SEQ ID NO: 2535926 - RNA, 17 nt, Human
uaauuauuauuuauaua

SEQ ID NO: 2535927 - RNA, 14 nt, Human
uaauuauuauuuau

SEQ ID NO: 2535928 - RNA, 17 nt, Human
uaauuauuauuuguguu

SEQ ID NO: 2535929 - RNA, 17 nt, Human
uaauucccauuuugcaa

SEQ ID NO: 2535930 - RNA, 18 nt, Human
uaauucccauuuugcaaa

SEQ ID NO: 2535931 - RNA, 19 nt, Human
uaauucccauuuugcaaaa

SEQ ID NO: 2535932 - RNA, 19 nt, Human
uaauuuaaaauugugaugu

SEQ ID NO: 2535933 - RNA, 20 nt, Human
uaauuuaaaauugugaugug

SEQ ID NO: 2535934 - RNA, 20 nt, Human
uaauucccauuuugcaaaau

SEQ ID NO: 2535935 - RNA, 21 nt, Human
uaauucccauuuugcaaaauu

SEQ ID NO: 2535936 - RNA, 23 nt, Human
uaauucccauuuugcaaaauuuc

SEQ ID NO: 2535937 - RNA, 15 nt, Human
uaauucccuaucuuu

SEQ ID NO: 2535938 - RNA, 19 nt, Human
uaauuccuaccucccugca

SEQ ID NO: 2535939 - RNA, 20 nt, Human
uaauucccuaucuuuuaguu

SEQ ID NO: 2535940 - RNA, 19 nt, Human
uaauuuaaacaccuccuca

SEQ ID NO: 2535941 - RNA, 17 nt, Human
uaauuuaaacaccuccu

SEQ ID NO: 2535942 - RNA, 11 nt, Human
uaauuuaaaca

SEQ ID NO: 2535943 - RNA, 19 nt, Human
uaauuccucaacguauugu

SEQ ID NO: 2535944 - RNA, 20 nt, Human
uaauuuaaacaggcccagca

SEQ ID NO: 2535945 - RNA, 17 nt, Human
uaauuuaaacaggccca

SEQ ID NO: 2535946 - RNA, 14 nt, Human
uaauuuaaacaggc

SEQ ID NO: 2535947 - RNA, 19 nt, Human
uaauuuaaacaggcccagc

SEQ ID NO: 2535948 - RNA, 16 nt, Human
uaauuuaguuauugau

SEQ ID NO: 2535949 - RNA, 15 nt, Human
uaauuuaguuauuga

SEQ ID NO: 2535950 - RNA, 21 nt, Human
uaauuuuuauauuugaaauau

SEQ ID NO: 2535951 - RNA, 19 nt, Human
uaauuuuuauauuugaaau

SEQ ID NO: 2535952 - RNA, 18 nt, Human
uaauuuuuauauuugaaa

SEQ ID NO: 2535953 - RNA, 21 nt, Human
uaauuuauaaaagaauaaaau

SEQ ID NO: 2535954 - RNA, 15 nt, Human
aaugcacuuucuauc

SEQ ID NO: 2535955 - RNA, 13 nt, Human
aaugcacuuucua

SEQ ID NO: 2535956 - RNA, 19 nt, Human
aaugcacguagcugaggcc

SEQ ID NO: 2535957 - RNA, 11 nt, Human
aaugcacuuuc

SEQ ID NO: 2535958 - RNA, 13 nt, Human
aaugcaccuggaa

SEQ ID NO: 2535959 - RNA, 22 nt, Human
aaugcacuuucuauccucugua

SEQ ID NO: 2535960 - RNA, 13 nt, Human
uaauuauuauuua

SEQ ID NO: 2535961 - RNA, 12 nt, Human
uaauuauuauuu

SEQ ID NO: 2535962 - RNA, 14 nt, Human
uaauuauuauucuu

SEQ ID NO: 2535963 - RNA, 12 nt, Human
uaauuauuauuc

SEQ ID NO: 2535964 - RNA, 13 nt, Human
uaauuauuauuaa

SEQ ID NO: 2535965 - RNA, 11 nt, Human
aaugcaaacca

SEQ ID NO: 2535966 - RNA, 20 nt, Human
aaugauuuuaucugugaauu

SEQ ID NO: 2535967 - RNA, 20 nt, Human
aaugauuuccaaagagaaaa

SEQ ID NO: 2535968 - RNA, 16 nt, Human
aaugauuucauucaau

SEQ ID NO: 2535969 - RNA, 14 nt, Human
aaugauuuuuagau

SEQ ID NO: 2535970 - RNA, 18 nt, Human
aaugauuuccaaagagaa

SEQ ID NO: 2535971 - RNA, 19 nt, Human
aaugauuuuaucugugaau

SEQ ID NO: 2535972 - RNA, 15 nt, Human
aaugcacacaaaaca

SEQ ID NO: 2535973 - RNA, 20 nt, Human
aaugcaaacacacaaaggua

SEQ ID NO: 2535974 - RNA, 14 nt, Human
aaugcacacaaaac

SEQ ID NO: 2535975 - RNA, 17 nt, Human
aaugcacacaaaacaac

SEQ ID NO: 2535976 - RNA, 13 nt, Human
aaugcacacuagc

SEQ ID NO: 2535977 - RNA, 17 nt, Human
aaugcacacuagccucu

SEQ ID NO: 2535978 - RNA, 12 nt, Human
aaugcaaaccau

SEQ ID NO: 2535979 - RNA, 21 nt, Human
aaugcaaaaauuagccgggcg

SEQ ID NO: 2535980 - RNA, 20 nt, Human
aauguaagggaaacugccag

SEQ ID NO: 2535981 - RNA, 18 nt, Human
aauguaaauauucuauau

SEQ ID NO: 2535982 - RNA, 16 nt, Human
aauguaagcuguuuau

SEQ ID NO: 2535983 - RNA, 15 nt, Human
aauguaagcuguuua

SEQ ID NO: 2535984 - RNA, 12 nt, Human
aauguaaauaaa

SEQ ID NO: 2535985 - RNA, 12 nt, Human
aauguaaauauu

SEQ ID NO: 2535986 - RNA, 16 nt, Human
aaugguuuucuugugu

SEQ ID NO: 2535987 - RNA, 16 nt, Human
aaugguuuucaaaaua

SEQ ID NO: 2535988 - RNA, 20 nt, Human
aauguaaaggagucaaaacu

SEQ ID NO: 2535989 - RNA, 21 nt, Human
aauguaaaggagucaaaacua

SEQ ID NO: 2535990 - RNA, 23 nt, Human
aauguaaaggagucaaaacuaca

SEQ ID NO: 2535991 - RNA, 17 nt, Human
aauguaaaauguugaau

SEQ ID NO: 2535992 - RNA, 16 nt, Human
aauggaagacagcucu

SEQ ID NO: 2535993 - RNA, 17 nt, Human
aauggaggccauugugu

SEQ ID NO: 2535994 - RNA, 18 nt, Human
aauggaagacagcucuua

SEQ ID NO: 2535995 - RNA, 14 nt, Human
aauggaagacacau

SEQ ID NO: 2535996 - RNA, 19 nt, Human
aauggagucaguuugcagu

SEQ ID NO: 2535997 - RNA, 21 nt, Human
aauggauuggauuauuuaaua

SEQ ID NO: 2535998 - RNA, 20 nt, Human
aauggauuggauuauuuaau

SEQ ID NO: 2535999 - RNA, 18 nt, Human
aauggauuggauuauuua

SEQ ID NO: 2536000 - RNA, 16 nt, Human
aauggauuggauuauu

SEQ ID NO: 2536001 - RNA, 14 nt, Human
aaugguuuucaaaa

SEQ ID NO: 2536002 - RNA, 19 nt, Human
aaugguuugcaaggaagcc

SEQ ID NO: 2536003 - RNA, 18 nt, Human
aaugguuugcaaggaagc

SEQ ID NO: 2536004 - RNA, 17 nt, Human
aaugguuugcaaggaag

SEQ ID NO: 2536005 - RNA, 14 nt, Human
uacacccaaagagg

SEQ ID NO: 2536006 - RNA, 15 nt, Human
uacacccuuuuccag

SEQ ID NO: 2536007 - RNA, 16 nt, Human
uacacccuuuuccagc

SEQ ID NO: 2536008 - RNA, 16 nt, Human
aauguaauugaauaaa

SEQ ID NO: 2536009 - RNA, 21 nt, Human
aauguaaugaucauaagucua

SEQ ID NO: 2536010 - RNA, 19 nt, Human
aauguaaucaauguuucuu

SEQ ID NO: 2536011 - RNA, 15 nt, Human
aauguaaugaucaua

SEQ ID NO: 2536012 - RNA, 14 nt, Human
aauguaauugaaua

SEQ ID NO: 2536013 - RNA, 15 nt, Human
uacagacaaagcgug

SEQ ID NO: 2536014 - RNA, 14 nt, Human
uacagacaaagcgu

SEQ ID NO: 2536015 - RNA, 13 nt, Human
uacagacaaagcg

SEQ ID NO: 2536016 - RNA, 17 nt, Human
uacaccgggccuggaga

SEQ ID NO: 2536017 - RNA, 15 nt, Human
uacaccgggccugga

SEQ ID NO: 2536018 - RNA, 14 nt, Human
uacacccuuggacu

SEQ ID NO: 2536019 - RNA, 12 nt, Human
uacaccuaacuc

SEQ ID NO: 2536020 - RNA, 17 nt, Human
uacagagacagaaagca

SEQ ID NO: 2536021 - RNA, 22 nt, Human
uacagagcccacgcccccacug

SEQ ID NO: 2536022 - RNA, 19 nt, Human
uacagagcccacgccccca

SEQ ID NO: 2536023 - RNA, 23 nt, Human
uacagagcagacaguuaagagaa

SEQ ID NO: 2536024 - RNA, 18 nt, Human
uacagagaggagaaacac

SEQ ID NO: 2536025 - RNA, 20 nt, Human
uacagagaggagaaacacau

SEQ ID NO: 2536026 - RNA, 21 nt, Human
uacagagaggagaaacacauc

SEQ ID NO: 2536027 - RNA, 22 nt, Human
uacagagaggagaaacacaucu

SEQ ID NO: 2536028 - RNA, 16 nt, Human
uacagagaggagaaac

SEQ ID NO: 2536029 - RNA, 17 nt, Human
uacagagaggagaaaca

SEQ ID NO: 2536030 - RNA, 18 nt, Human
uaauuuuuuugagacaga

SEQ ID NO: 2536031 - RNA, 22 nt, Human
uaauuuuuuucaauauuuauua

SEQ ID NO: 2536032 - RNA, 21 nt, Human
uacaaaaaaaaaaaaaaauua

SEQ ID NO: 2536033 - RNA, 13 nt, Human
uacaaugacuuua

SEQ ID NO: 2536034 - RNA, 22 nt, Human
uaauuuuuuuuuuccuuuuaaa

SEQ ID NO: 2536035 - RNA, 14 nt, Human
uaauuuuuguaauu

SEQ ID NO: 2536036 - RNA, 15 nt, Human
uaauuuuuguauuuu

SEQ ID NO: 2536037 - RNA, 16 nt, Human
uaauuuuugcucuaga

SEQ ID NO: 2536038 - RNA, 16 nt, Human
uaauuuuuccuauauu

SEQ ID NO: 2536039 - RNA, 23 nt, Human
uaauuuuuauucauaagccaauu

SEQ ID NO: 2536040 - RNA, 13 nt, Human
uaauuuuuauuca

SEQ ID NO: 2536041 - RNA, 22 nt, Human
uacaauguucaucccaugaugu

SEQ ID NO: 2536042 - RNA, 16 nt, Human
uacaauguucauccca

SEQ ID NO: 2536043 - RNA, 18 nt, Human
uacaauuaaaaaaaaaga

SEQ ID NO: 2536044 - RNA, 15 nt, Human
uacaauguucauccc

SEQ ID NO: 2536045 - RNA, 19 nt, Human
uacaauuaaagcuguuauu

SEQ ID NO: 2536046 - RNA, 22 nt, Human
uacaauuaaaaaaaaagaucug

SEQ ID NO: 2536047 - RNA, 15 nt, Human
uacaauuauaucagu

SEQ ID NO: 2536048 - RNA, 19 nt, Human
uacaauuauaucaguccuc

SEQ ID NO: 2536049 - RNA, 18 nt, Human
uacaauucuacauuguca

SEQ ID NO: 2536050 - RNA, 13 nt, Human
uacaauugaaaug

SEQ ID NO: 2536051 - RNA, 14 nt, Human
uacaauugaaauga

SEQ ID NO: 2536052 - RNA, 16 nt, Human
uacaauugaaaugacu

SEQ ID NO: 2536053 - RNA, 19 nt, Human
aaugcauauccugagccau

SEQ ID NO: 2536054 - RNA, 17 nt, Human
uacaauucccugcuguc

SEQ ID NO: 2536055 - RNA, 18 nt, Human
uacaauuauuuuuacagu

SEQ ID NO: 2536056 - RNA, 22 nt, Human
uacaauuauuuuuacaguucuc

SEQ ID NO: 2536057 - RNA, 13 nt, Human
uacaaugcugugc

SEQ ID NO: 2536058 - RNA, 14 nt, Human
uacaaugcugugcc

SEQ ID NO: 2536059 - RNA, 16 nt, Human
uacaaugcugugcccu

SEQ ID NO: 2536060 - RNA, 14 nt, Human
uacaaugacuuuau

SEQ ID NO: 2536061 - RNA, 18 nt, Human
uacaaugacuuuauugca

SEQ ID NO: 2536062 - RNA, 21 nt, Human
uacaaugaacccccaugaugu

SEQ ID NO: 2536063 - RNA, 21 nt, Human
aaugcuguauuuuaaaagaau

SEQ ID NO: 2536064 - RNA, 20 nt, Human
aaugcuguauuuuaaaagaa

SEQ ID NO: 2536065 - RNA, 12 nt, Human
aaugcugggcug

SEQ ID NO: 2536066 - RNA, 15 nt, Human
aaugcugguuuuccu

SEQ ID NO: 2536067 - RNA, 18 nt, Human
aaugcugguuuuccuaaa

SEQ ID NO: 2536068 - RNA, 18 nt, Human
aaugcugggacucagccu

SEQ ID NO: 2536069 - RNA, 18 nt, Human
aaugcauguuaggaaaau

SEQ ID NO: 2536070 - RNA, 22 nt, Human
aaugcuggcuguuggcuggggg

SEQ ID NO: 2536071 - RNA, 16 nt, Human
aaugcaugauuuugua

SEQ ID NO: 2536072 - RNA, 17 nt, Human
aaugcaugauuuuguaa

SEQ ID NO: 2536073 - RNA, 19 nt, Human
aaugcaugauuuuguaacc

SEQ ID NO: 2536074 - RNA, 19 nt, Human
aaugcaugcagccacugug

SEQ ID NO: 2536075 - RNA, 21 nt, Human
aaugcuggcuguuggcugggg

SEQ ID NO: 2536076 - RNA, 15 nt, Human
aaugcaucuguccuc

SEQ ID NO: 2536077 - RNA, 19 nt, Human
aaugcaucuagauuaugga

SEQ ID NO: 2536078 - RNA, 16 nt, Human
aaugcaucuguccuca

SEQ ID NO: 2536079 - RNA, 16 nt, Human
aaugcaucuagauuau

SEQ ID NO: 2536080 - RNA, 23 nt, Human
aaugcauccauuccucagggaca

SEQ ID NO: 2536081 - RNA, 13 nt, Human
aaugcauauugua

SEQ ID NO: 2536082 - RNA, 19 nt, Human
aaugcauccauuccucagg

SEQ ID NO: 2536083 - RNA, 16 nt, Human
aaugcauauuguauua

SEQ ID NO: 2536084 - RNA, 22 nt, Human
aaugcuguauuuuaaaagaaug

SEQ ID NO: 2536085 - RNA, 21 nt, Human
aaugcuuccugacaaucaacu

SEQ ID NO: 2536086 - RNA, 19 nt, Human
aaugcugguuuuccuaaau

SEQ ID NO: 2536087 - RNA, 21 nt, Human
aaugcugguuuuccuaaaugc

SEQ ID NO: 2536088 - RNA, 22 nt, Human
aaugcugguuuuccuaaaugca

SEQ ID NO: 2536089 - RNA, 23 nt, Human
aaugcugguuuuccuaaaugcag

SEQ ID NO: 2536090 - RNA, 13 nt, Human
aaugcuugaaaaa

SEQ ID NO: 2536091 - RNA, 16 nt, Human
aaugcuucuucucagg

SEQ ID NO: 2536092 - RNA, 19 nt, Human
aaugcuugaaaaaugugca

SEQ ID NO: 2536093 - RNA, 17 nt, Human
aaugcuucugacuucau

SEQ ID NO: 2536094 - RNA, 21 nt, Human
aaugcuucugacuucauagau

SEQ ID NO: 2536095 - RNA, 21 nt, Human
aaugcuuggcuucucauacgu

SEQ ID NO: 2536096 - RNA, 16 nt, Human
aaugcuugaaaaaugu

SEQ ID NO: 2536097 - RNA, 17 nt, Human
aaugcuuggcuucucau

SEQ ID NO: 2536098 - RNA, 23 nt, Human
aaugcuuuaaaaacuauuuaacu

SEQ ID NO: 2536099 - RNA, 22 nt, Human
aaugcuuuaaaaacuauuuaac

SEQ ID NO: 2536100 - RNA, 18 nt, Human
aaugcuuuaaaaacuauu

SEQ ID NO: 2536101 - RNA, 20 nt, Human
aaugcuuguggauugagggu

SEQ ID NO: 2536102 - RNA, 13 nt, Human
aauggaagacagc

SEQ ID NO: 2536103 - RNA, 13 nt, Human
aauggaagacaca

SEQ ID NO: 2536104 - RNA, 22 nt, Human
aauggaaccuccuuucucuucu

SEQ ID NO: 2536105 - RNA, 16 nt, Human
aauggaaccuccuuuc

SEQ ID NO: 2536106 - RNA, 18 nt, Human
aauggaaccccaccacug

SEQ ID NO: 2536107 - RNA, 22 nt, Human
aauuauuuauuaaaugcccagc

SEQ ID NO: 2536108 - RNA, 12 nt, Human
aauuauuucaga

SEQ ID NO: 2536109 - RNA, 13 nt, Human
aauuauuucagaa

SEQ ID NO: 2536110 - RNA, 19 nt, Human
aauuauuuauuuaauaaca

SEQ ID NO: 2536111 - RNA, 18 nt, Human
aauuauuuauuauuaaga

SEQ ID NO: 2536112 - RNA, 20 nt, Human
aauuauuuauuuauggagga

SEQ ID NO: 2536113 - RNA, 21 nt, Human
aauuauuuguguaauagaaaa

SEQ ID NO: 2536114 - RNA, 19 nt, Human
aauuauuuguguaauagaa

SEQ ID NO: 2536115 - RNA, 18 nt, Human
aauuauuuguguaauaga

SEQ ID NO: 2536116 - RNA, 15 nt, Human
aauuauuuguguaau

SEQ ID NO: 2536117 - RNA, 12 nt, Human
aauuauuuuaaa

SEQ ID NO: 2536118 - RNA, 14 nt, Human
aauuauuuguguaa

SEQ ID NO: 2536119 - RNA, 12 nt, Human
aauuauuugcau

SEQ ID NO: 2536120 - RNA, 17 nt, Human
aauuauuucagaaaugu

SEQ ID NO: 2536121 - RNA, 17 nt, Human
aauucaauuguaaauug

SEQ ID NO: 2536122 - RNA, 14 nt, Human
aauucaauuguaaa

SEQ ID NO: 2536123 - RNA, 20 nt, Human
aauucaagaaaacaacuuca

SEQ ID NO: 2536124 - RNA, 12 nt, Human
aauucaagaaaa

SEQ ID NO: 2536125 - RNA, 15 nt, Human
aauuauuuuaaaaga

SEQ ID NO: 2536126 - RNA, 18 nt, Human
aauuauuuuaaacaaaau

SEQ ID NO: 2536127 - RNA, 14 nt, Human
aauuauuuuaaaca

SEQ ID NO: 2536128 - RNA, 22 nt, Human
aauucaguuguuagugugucuu

SEQ ID NO: 2536129 - RNA, 17 nt, Human
aauucaguuguuagugu

SEQ ID NO: 2536130 - RNA, 16 nt, Human
aauucagugcuguacu

SEQ ID NO: 2536131 - RNA, 13 nt, Human
aauucauauucug

SEQ ID NO: 2536132 - RNA, 18 nt, Human
aauucaucccaacugucu

SEQ ID NO: 2536133 - RNA, 23 nt, Human
aauucaucaaauggaagacacau

SEQ ID NO: 2536134 - RNA, 11 nt, Human
aauucaguugu

SEQ ID NO: 2536135 - RNA, 23 nt, Human
aauucagcacugauuucacaaca

SEQ ID NO: 2536136 - RNA, 20 nt, Human
aauucagcacugauuucaca

SEQ ID NO: 2536137 - RNA, 15 nt, Human
aauucagcacugauu

SEQ ID NO: 2536138 - RNA, 19 nt, Human
aauucaauuguaaauugaa

SEQ ID NO: 2536139 - RNA, 23 nt, Human
aauucaauuguaaauugaaucag

SEQ ID NO: 2536140 - RNA, 20 nt, Human
aauucagauauauuuuucac

SEQ ID NO: 2536141 - RNA, 20 nt, Human
aauuauuaguuuacaucauu

SEQ ID NO: 2536142 - RNA, 22 nt, Human
aauuauuaaugaaaauaagaau

SEQ ID NO: 2536143 - RNA, 17 nt, Human
aauuauuaaugaaaaua

SEQ ID NO: 2536144 - RNA, 21 nt, Human
aauuauguuuauauaaaugcu

SEQ ID NO: 2536145 - RNA, 21 nt, Human
aauuauuauucuucauaacaa

SEQ ID NO: 2536146 - RNA, 13 nt, Human
aauuauuauucuu

SEQ ID NO: 2536147 - RNA, 16 nt, Human
aauuauuaaugaaaau

SEQ ID NO: 2536148 - RNA, 18 nt, Human
aauuauguuuauauaaau

SEQ ID NO: 2536149 - RNA, 17 nt, Human
aauuauguuuauauaaa

SEQ ID NO: 2536150 - RNA, 22 nt, Human
aauuauguuugccacuuugcaa

SEQ ID NO: 2536151 - RNA, 23 nt, Human
aauuauguuaaacuagcauaucu

SEQ ID NO: 2536152 - RNA, 19 nt, Human
aauuauguuaaacuagcau

SEQ ID NO: 2536153 - RNA, 14 nt, Human
aauuauguuuauau

SEQ ID NO: 2536154 - RNA, 18 nt, Human
aauuauuauuuauauaug

SEQ ID NO: 2536155 - RNA, 16 nt, Human
aauuauuauuuauaua

SEQ ID NO: 2536156 - RNA, 13 nt, Human
aauuauuauuuau

SEQ ID NO: 2536157 - RNA, 11 nt, Human
aauuauuauuu

SEQ ID NO: 2536158 - RNA, 21 nt, Human
aauuauuguacauuuauaguu

SEQ ID NO: 2536159 - RNA, 12 nt, Human
aauuauuguaca

SEQ ID NO: 2536160 - RNA, 21 nt, Human
aauuauuuauuaaaugcccag

SEQ ID NO: 2536161 - RNA, 16 nt, Human
aauuauugugauuucc

SEQ ID NO: 2536162 - RNA, 14 nt, Human
aauuauuuaauaaa

SEQ ID NO: 2536163 - RNA, 13 nt, Human
aauuauugugauu

SEQ ID NO: 2536164 - RNA, 12 nt, Human
aauuauuguaua

SEQ ID NO: 2536165 - RNA, 14 nt, Human
aauuagaagacauu

SEQ ID NO: 2536166 - RNA, 13 nt, Human
aauuagaagacau

SEQ ID NO: 2536167 - RNA, 15 nt, Human
aauuagaagacauuu

SEQ ID NO: 2536168 - RNA, 15 nt, Human
aauuagaauaguguu

SEQ ID NO: 2536169 - RNA, 22 nt, Human
aauuagaaaauguuauuuaaca

SEQ ID NO: 2536170 - RNA, 18 nt, Human
aauuagaaauuggcugga

SEQ ID NO: 2536171 - RNA, 22 nt, Human
aauuacuuaucauccacauugu

SEQ ID NO: 2536172 - RNA, 15 nt, Human
aauuaccaaccuguu

SEQ ID NO: 2536173 - RNA, 13 nt, Human
aauuauguuaaac

SEQ ID NO: 2536174 - RNA, 15 nt, Human
aauuauguuaaacua

SEQ ID NO: 2536175 - RNA, 14 nt, Human
aauuauguuaaacu

SEQ ID NO: 2536176 - RNA, 22 nt, Human
aauuaugugccagauuuaugca

SEQ ID NO: 2536177 - RNA, 22 nt, Human
aauuaugucugcugaauaauaa

SEQ ID NO: 2536178 - RNA, 22 nt, Human
aauuagagcagaugaccccucc

SEQ ID NO: 2536179 - RNA, 12 nt, Human
aauuagagcaga

SEQ ID NO: 2536180 - RNA, 13 nt, Human
uacccccuucugg

SEQ ID NO: 2536181 - RNA, 17 nt, Human
uacccccuccucucugc

SEQ ID NO: 2536182 - RNA, 18 nt, Human
uacccccuccuucagaca

SEQ ID NO: 2536183 - RNA, 23 nt, Human
uacccgggaagggggcugggaca

SEQ ID NO: 2536184 - RNA, 17 nt, Human
uacccguucacauuuuu

SEQ ID NO: 2536185 - RNA, 16 nt, Human
uacccuagccauuccu

SEQ ID NO: 2536186 - RNA, 15 nt, Human
uacccuagccauucc

SEQ ID NO: 2536187 - RNA, 23 nt, Human
uaccucuugagccuugaacuuug

SEQ ID NO: 2536188 - RNA, 13 nt, Human
uaccucuuggcug

SEQ ID NO: 2536189 - RNA, 19 nt, Human
uaccucuuuauuuuuugau

SEQ ID NO: 2536190 - RNA, 23 nt, Human
uacccucaggcauaggccugggu

SEQ ID NO: 2536191 - RNA, 22 nt, Human
uaccucuugagccuugaacuuu

SEQ ID NO: 2536192 - RNA, 16 nt, Human
uacccuauucucucuu

SEQ ID NO: 2536193 - RNA, 22 nt, Human
uacccucaggacaaugucugaa

SEQ ID NO: 2536194 - RNA, 21 nt, Human
uacccucaggcauaggccugg

SEQ ID NO: 2536195 - RNA, 15 nt, Human
uaccugaggggccuc

SEQ ID NO: 2536196 - RNA, 13 nt, Human
uaccugaggggcc

SEQ ID NO: 2536197 - RNA, 16 nt, Human
uaccugaagucuuugu

SEQ ID NO: 2536198 - RNA, 17 nt, Human
uaccugacacucccuug

SEQ ID NO: 2536199 - RNA, 14 nt, Human
uaccugaagucuuu

SEQ ID NO: 2536200 - RNA, 13 nt, Human
uaccugaagucuu

SEQ ID NO: 2536201 - RNA, 23 nt, Human
uaccugaagcuaucguaaaauua

SEQ ID NO: 2536202 - RNA, 13 nt, Human
uaccugaaaacac

SEQ ID NO: 2536203 - RNA, 20 nt, Human
uaccugaaaacacugugcac

SEQ ID NO: 2536204 - RNA, 21 nt, Human
uaccugaaaacacugugcaca

SEQ ID NO: 2536205 - RNA, 20 nt, Human
aauuacaggaaguacuggag

SEQ ID NO: 2536206 - RNA, 19 nt, Human
aauuacaggaaguacugga

SEQ ID NO: 2536207 - RNA, 17 nt, Human
aauuacaggaaguacug

SEQ ID NO: 2536208 - RNA, 13 nt, Human
aauuacauuugua

SEQ ID NO: 2536209 - RNA, 12 nt, Human
uaccuuacugug

SEQ ID NO: 2536210 - RNA, 20 nt, Human
uaccuuacagugagggcuau

SEQ ID NO: 2536211 - RNA, 14 nt, Human
aauuacauaauuuu

SEQ ID NO: 2536212 - RNA, 14 nt, Human
aauuacauuuguau

SEQ ID NO: 2536213 - RNA, 17 nt, Human
aauuacauguaaaacau

SEQ ID NO: 2536214 - RNA, 16 nt, Human
uaccugaggggccucu

SEQ ID NO: 2536215 - RNA, 20 nt, Human
uaccugacacucccuugggc

SEQ ID NO: 2536216 - RNA, 13 nt, Human
uaccugagaccag

SEQ ID NO: 2536217 - RNA, 12 nt, Human
uaccugagacca

SEQ ID NO: 2536218 - RNA, 16 nt, Human
uaccugccaggaagcc

SEQ ID NO: 2536219 - RNA, 19 nt, Human
uaccugaucaaugacagag

SEQ ID NO: 2536220 - RNA, 18 nt, Human
uaccugaucaaugacaga

SEQ ID NO: 2536221 - RNA, 12 nt, Human
uaccugauuuuu

SEQ ID NO: 2536222 - RNA, 22 nt, Human
uaccugccacucacacagccag

SEQ ID NO: 2536223 - RNA, 13 nt, Human
uaccugugaaaua

SEQ ID NO: 2536224 - RNA, 21 nt, Human
uaccugccacucacacagcca

SEQ ID NO: 2536225 - RNA, 20 nt, Human
uaccugccacucacacagcc

SEQ ID NO: 2536226 - RNA, 19 nt, Human
uaccugccacucacacagc

SEQ ID NO: 2536227 - RNA, 16 nt, Human
uaccugccacucacac

SEQ ID NO: 2536228 - RNA, 18 nt, Human
uaccugauuuuuuuuccu

SEQ ID NO: 2536229 - RNA, 12 nt, Human
uaccugugccug

SEQ ID NO: 2536230 - RNA, 16 nt, Human
uaccugugccucggcu

SEQ ID NO: 2536231 - RNA, 20 nt, Human
uaccugugcguuacuaauug

SEQ ID NO: 2536232 - RNA, 13 nt, Human
uaccuguuccuua

SEQ ID NO: 2536233 - RNA, 21 nt, Human
uaccuguucagugucccgggc

SEQ ID NO: 2536234 - RNA, 22 nt, Human
uaccuguuuuguggucagcugu

SEQ ID NO: 2536235 - RNA, 20 nt, Human
uaccuguucagugucccggg

SEQ ID NO: 2536236 - RNA, 16 nt, Human
uaccuguucagugucc

SEQ ID NO: 2536237 - RNA, 12 nt, Human
aauuaacuuuua

SEQ ID NO: 2536238 - RNA, 13 nt, Human
aauuaacuuuuau

SEQ ID NO: 2536239 - RNA, 22 nt, Human
aauguugggacugcuaaauaaa

SEQ ID NO: 2536240 - RNA, 17 nt, Human
aauguuguauucaguga

SEQ ID NO: 2536241 - RNA, 15 nt, Human
aauguuguuauuuaa

SEQ ID NO: 2536242 - RNA, 21 nt, Human
aauguuguucauuauuggagg

SEQ ID NO: 2536243 - RNA, 15 nt, Human
aauuaacuuuuauaa

SEQ ID NO: 2536244 - RNA, 16 nt, Human
aauuaacuuuuauaaa

SEQ ID NO: 2536245 - RNA, 16 nt, Human
aauuaaguacuaugua

SEQ ID NO: 2536246 - RNA, 17 nt, Human
aauuaaguacuauguau

SEQ ID NO: 2536247 - RNA, 21 nt, Human
aauguugggacugcuaaauaa

SEQ ID NO: 2536248 - RNA, 13 nt, Human
aauguugggacug

SEQ ID NO: 2536249 - RNA, 23 nt, Human
aauguuggucauuuuauguuaag

SEQ ID NO: 2536250 - RNA, 19 nt, Human
aauguuggauuuauaaaug

SEQ ID NO: 2536251 - RNA, 22 nt, Human
aauguuggauuuauaaaugcua

SEQ ID NO: 2536252 - RNA, 20 nt, Human
aauguugcuuaggaugugug

SEQ ID NO: 2536253 - RNA, 16 nt, Human
aauguucaucaaugaa

SEQ ID NO: 2536254 - RNA, 20 nt, Human
aauguucaucaaugaaugaa

SEQ ID NO: 2536255 - RNA, 22 nt, Human
aauguucaucccaugauguagu

SEQ ID NO: 2536256 - RNA, 21 nt, Human
aauguucaucccaugauguag

SEQ ID NO: 2536257 - RNA, 12 nt, Human
aauguucaucau

SEQ ID NO: 2536258 - RNA, 21 nt, Human
aauguuauuuuuuaauuauua

SEQ ID NO: 2536259 - RNA, 22 nt, Human
aauguuauuuguuauuuucagu

SEQ ID NO: 2536260 - RNA, 22 nt, Human
aauguucauuguaauguuacug

SEQ ID NO: 2536261 - RNA, 24 nt, Human
aauguucauuguaauguuacugau

SEQ ID NO: 2536262 - RNA, 11 nt, Human
aauguucauug

SEQ ID NO: 2536263 - RNA, 12 nt, Human
aauguucauugu

SEQ ID NO: 2536264 - RNA, 17 nt, Human
aauguucauuguaaugu

SEQ ID NO: 2536265 - RNA, 21 nt, Human
aauguucauuguaauguuacu

SEQ ID NO: 2536266 - RNA, 20 nt, Human
aauguuauuuuuuaauuauu

SEQ ID NO: 2536267 - RNA, 19 nt, Human
aauguuauuuuuuaauuau

SEQ ID NO: 2536268 - RNA, 13 nt, Human
aauguucaucaau

SEQ ID NO: 2536269 - RNA, 23 nt, Human
aauguuauuuguuauuuucagua

SEQ ID NO: 2536270 - RNA, 21 nt, Human
aauguuauuuguuauuuucag

SEQ ID NO: 2536271 - RNA, 14 nt, Human
aauguuauuuaaca

SEQ ID NO: 2536272 - RNA, 22 nt, Human
aauguuauguuguguucuaaua

SEQ ID NO: 2536273 - RNA, 15 nt, Human
aauguuacauuauua

SEQ ID NO: 2536274 - RNA, 17 nt, Human
aauguggccuaaaaaug

SEQ ID NO: 2536275 - RNA, 20 nt, Human
aauguggccuaaaaaugcaa

SEQ ID NO: 2536276 - RNA, 16 nt, Human
aauguuacauuauuau

SEQ ID NO: 2536277 - RNA, 15 nt, Human
aauguuacauuguuu

SEQ ID NO: 2536278 - RNA, 13 nt, Human
aauguuacugauc

SEQ ID NO: 2536279 - RNA, 18 nt, Human
aauguuacugaucaugca

SEQ ID NO: 2536280 - RNA, 19 nt, Human
aauguuacugaucaugcau

SEQ ID NO: 2536281 - RNA, 20 nt, Human
aauguuacugaucaugcauu

SEQ ID NO: 2536282 - RNA, 21 nt, Human
aauguuacugaucaugcauug

SEQ ID NO: 2536283 - RNA, 22 nt, Human
aauguuagagguuuuaaaguga

SEQ ID NO: 2536284 - RNA, 17 nt, Human
aauguuagagguuuuaa

SEQ ID NO: 2536285 - RNA, 22 nt, Human
aauguuacugaucaugcauugu

SEQ ID NO: 2536286 - RNA, 15 nt, Human
aauguuagauaguua

SEQ ID NO: 2536287 - RNA, 19 nt, Human
aaugugcuguguaaaguua

SEQ ID NO: 2536288 - RNA, 18 nt, Human
aaugugcuguguaaaguu

SEQ ID NO: 2536289 - RNA, 17 nt, Human
aaugugcuguguaaagu

SEQ ID NO: 2536290 - RNA, 16 nt, Human
aaugugcuguguaaag

SEQ ID NO: 2536291 - RNA, 15 nt, Human
aaugugcuguguaaa

SEQ ID NO: 2536292 - RNA, 14 nt, Human
aaugugcuguguaa

SEQ ID NO: 2536293 - RNA, 13 nt, Human
aaugugcugugua

SEQ ID NO: 2536294 - RNA, 12 nt, Human
aaugugcugugu

SEQ ID NO: 2536295 - RNA, 21 nt, Human
aaugugcuguguaaaguuagu

SEQ ID NO: 2536296 - RNA, 20 nt, Human
aaugugcuguguaaaguuag

SEQ ID NO: 2536297 - RNA, 21 nt, Human
aauguggccccugaacaagaa

SEQ ID NO: 2536298 - RNA, 22 nt, Human
aauguggcaaggaaaaacaggu

SEQ ID NO: 2536299 - RNA, 21 nt, Human
aaugugcugaaugguuuucaa

SEQ ID NO: 2536300 - RNA, 19 nt, Human
uacaggguagauaaccugu

SEQ ID NO: 2536301 - RNA, 22 nt, Human
uacaggguagcagguaccacug

SEQ ID NO: 2536302 - RNA, 18 nt, Human
uacaggguagcagguacc

SEQ ID NO: 2536303 - RNA, 21 nt, Human
uacagguaaggugagggaaua

SEQ ID NO: 2536304 - RNA, 18 nt, Human
uacagggagccuccugcc

SEQ ID NO: 2536305 - RNA, 17 nt, Human
uacagggagccuccugc

SEQ ID NO: 2536306 - RNA, 16 nt, Human
uacagggagccuccug

SEQ ID NO: 2536307 - RNA, 15 nt, Human
uacagggagccuccu

SEQ ID NO: 2536308 - RNA, 17 nt, Human
uacagggaugguguuca

SEQ ID NO: 2536309 - RNA, 22 nt, Human
uacagagaggucaagcccagga

SEQ ID NO: 2536310 - RNA, 13 nt, Human
uacagggagccuc

SEQ ID NO: 2536311 - RNA, 21 nt, Human
uacagggcaugcauuuugcag

SEQ ID NO: 2536312 - RNA, 21 nt, Human
uacagggagccuccugcccag

SEQ ID NO: 2536313 - RNA, 20 nt, Human
uacagggagccuccugccca

SEQ ID NO: 2536314 - RNA, 16 nt, Human
uacagggagcugggac

SEQ ID NO: 2536315 - RNA, 19 nt, Human
uaccagggacugaggggag

SEQ ID NO: 2536316 - RNA, 16 nt, Human
uaccaggaacuauaaa

SEQ ID NO: 2536317 - RNA, 22 nt, Human
uaccagcugcgcuugcuuuucu

SEQ ID NO: 2536318 - RNA, 21 nt, Human
uaccagcugcgcuugcuuuuc

SEQ ID NO: 2536319 - RNA, 14 nt, Human
uaccagcugcgcuu

SEQ ID NO: 2536320 - RNA, 13 nt, Human
uaccagcugcgcu

SEQ ID NO: 2536321 - RNA, 13 nt, Human
uaccagcgaggag

SEQ ID NO: 2536322 - RNA, 15 nt, Human
uaccagcgaggaggc

SEQ ID NO: 2536323 - RNA, 20 nt, Human
uaccagcgcccgcugggcug

SEQ ID NO: 2536324 - RNA, 19 nt, Human
uaccagcgcccgcugggcu

SEQ ID NO: 2536325 - RNA, 18 nt, Human
uaccagcgcccgcugggc

SEQ ID NO: 2536326 - RNA, 20 nt, Human
uaccagcgaggaggcuccag

SEQ ID NO: 2536327 - RNA, 17 nt, Human
uaccagcgcccgcuggg

SEQ ID NO: 2536328 - RNA, 21 nt, Human
uaccagccuccguauuucaga

SEQ ID NO: 2536329 - RNA, 20 nt, Human
uaccaggccgccccagccuc

SEQ ID NO: 2536330 - RNA, 16 nt, Human
uaccaggucuccucca

SEQ ID NO: 2536331 - RNA, 14 nt, Human
uaccaggucuccuc

SEQ ID NO: 2536332 - RNA, 22 nt, Human
uaccaggccgccccagccucug

SEQ ID NO: 2536333 - RNA, 20 nt, Human
uaccaggucuccuccaccgc

SEQ ID NO: 2536334 - RNA, 18 nt, Human
uaccaggucuccuccacc

SEQ ID NO: 2536335 - RNA, 22 nt, Human
uaccaggucuccuccaccgcca

SEQ ID NO: 2536336 - RNA, 14 nt, Human
uaccagguguucua

SEQ ID NO: 2536337 - RNA, 14 nt, Human
uaccagguugaaag

SEQ ID NO: 2536338 - RNA, 15 nt, Human
uaccagguugaaaga

SEQ ID NO: 2536339 - RNA, 16 nt, Human
uaccagguugaaagac

SEQ ID NO: 2536340 - RNA, 14 nt, Human
uaccauucagugau

SEQ ID NO: 2536341 - RNA, 16 nt, Human
uacccccuaagagcca

SEQ ID NO: 2536342 - RNA, 13 nt, Human
uacccccuccuuc

SEQ ID NO: 2536343 - RNA, 16 nt, Human
uacccccuccuucaga

SEQ ID NO: 2536344 - RNA, 17 nt, Human
uacccccuccuucagac

SEQ ID NO: 2536345 - RNA, 15 nt, Human
uacccccugcaaagc

SEQ ID NO: 2536346 - RNA, 19 nt, Human
uacccccugcaaagcccag

SEQ ID NO: 2536347 - RNA, 23 nt, Human
uacccccugcaaagcccagcuug

SEQ ID NO: 2536348 - RNA, 16 nt, Human
uaccaugccauuuaaa

SEQ ID NO: 2536349 - RNA, 16 nt, Human
uaccagugaaccaaag

SEQ ID NO: 2536350 - RNA, 15 nt, Human
uaccagugaaccaaa

SEQ ID NO: 2536351 - RNA, 11 nt, Human
uaccagugugg

SEQ ID NO: 2536352 - RNA, 15 nt, Human
uaccaugugccugau

SEQ ID NO: 2536353 - RNA, 15 nt, Human
uaccaugucacugug

SEQ ID NO: 2536354 - RNA, 14 nt, Human
uaccaugucacugu

SEQ ID NO: 2536355 - RNA, 18 nt, Human
uaccagugaaccaaagag

SEQ ID NO: 2536356 - RNA, 16 nt, Human
uaccaugugccugauc

SEQ ID NO: 2536357 - RNA, 16 nt, Human
uaccaugucacugugg

SEQ ID NO: 2536358 - RNA, 14 nt, Human
uaccagcagagcac

SEQ ID NO: 2536359 - RNA, 13 nt, Human
uaccagcagagca

SEQ ID NO: 2536360 - RNA, 22 nt, Human
uaccagcagagcaccuuagaca

SEQ ID NO: 2536361 - RNA, 18 nt, Human
uaccagccaguaaauggg

SEQ ID NO: 2536362 - RNA, 15 nt, Human
uaccagauaaaauua

SEQ ID NO: 2536363 - RNA, 19 nt, Human
uaccagaguuguucugucu

SEQ ID NO: 2536364 - RNA, 22 nt, Human
uacauuucuuagacuacauuua

SEQ ID NO: 2536365 - RNA, 18 nt, Human
uaccagaugaugggggag

SEQ ID NO: 2536366 - RNA, 12 nt, Human
uaccagcagagc

SEQ ID NO: 2536367 - RNA, 18 nt, Human
uacauuucuccuuugaua

SEQ ID NO: 2536368 - RNA, 16 nt, Human
uacauuucccugugcu

SEQ ID NO: 2536369 - RNA, 16 nt, Human
uacauuuccaaaugaa

SEQ ID NO: 2536370 - RNA, 21 nt, Human
uacauuuccaaauucacaagu

SEQ ID NO: 2536371 - RNA, 23 nt, Human
uacauuucuccuuugauaaaaua

SEQ ID NO: 2536372 - RNA, 22 nt, Human
uacauuucuccuuugauaaaau

SEQ ID NO: 2536373 - RNA, 14 nt, Human
uacauuucugaaau

SEQ ID NO: 2536374 - RNA, 16 nt, Human
uacauuucugaaauga

SEQ ID NO: 2536375 - RNA, 13 nt, Human
uacauuuccuaaa

SEQ ID NO: 2536376 - RNA, 22 nt, Human
uacauuuaugauuuaauaaaau

SEQ ID NO: 2536377 - RNA, 20 nt, Human
uacauuuaugauuuaauaaa

SEQ ID NO: 2536378 - RNA, 19 nt, Human
uacauuuaugauuuaauaa

SEQ ID NO: 2536379 - RNA, 18 nt, Human
uacauuuaugauuuaaua

SEQ ID NO: 2536380 - RNA, 23 nt, Human
uacauuuaugauuuaauaaaaua

SEQ ID NO: 2536381 - RNA, 15 nt, Human
uacauuuccaaauga

SEQ ID NO: 2536382 - RNA, 12 nt, Human
uacauucuguua

SEQ ID NO: 2536383 - RNA, 17 nt, Human
uacauuuaugauuuaau

SEQ ID NO: 2536384 - RNA, 13 nt, Human
uacauucauuuag

SEQ ID NO: 2536385 - RNA, 15 nt, Human
uacauucauuuagcu

SEQ ID NO: 2536386 - RNA, 15 nt, Human
uacauucaauguuua

SEQ ID NO: 2536387 - RNA, 21 nt, Human
uacauuagucauucaauaaau

SEQ ID NO: 2536388 - RNA, 11 nt, Human
aauuaauaaau

SEQ ID NO: 2536389 - RNA, 13 nt, Human
aauuaaguaucug

SEQ ID NO: 2536390 - RNA, 14 nt, Human
aauuaaguaucuga

SEQ ID NO: 2536391 - RNA, 23 nt, Human
aauuaauaaaaaauggaaagaau

SEQ ID NO: 2536392 - RNA, 14 nt, Human
aauuaaguuaucuu

SEQ ID NO: 2536393 - RNA, 22 nt, Human
aauuaaguuagggaauggcaca

SEQ ID NO: 2536394 - RNA, 22 nt, Human
acaggcccggcuccaggcuccu

SEQ ID NO: 2536395 - RNA, 21 nt, Human
acaggcccggcuccaggcucc

SEQ ID NO: 2536396 - RNA, 20 nt, Human
acaggcccggcuccaggcuc

SEQ ID NO: 2536397 - RNA, 18 nt, Human
acaggcccggcuccaggc

SEQ ID NO: 2536398 - RNA, 22 nt, Human
acaggcccuuccucuccacugc

SEQ ID NO: 2536399 - RNA, 15 nt, Human
acaggcccuuccucu

SEQ ID NO: 2536400 - RNA, 21 nt, Human
acaggcccuuuccucaggcaa

SEQ ID NO: 2536401 - RNA, 20 nt, Human
acaggcccuuuccucaggca

SEQ ID NO: 2536402 - RNA, 19 nt, Human
acaggcccuuuccucaggc

SEQ ID NO: 2536403 - RNA, 18 nt, Human
acaggcccuuuccucagg

SEQ ID NO: 2536404 - RNA, 21 nt, Human
acaggcccucccuguucccca

SEQ ID NO: 2536405 - RNA, 22 nt, Human
acaggcccucccuguuccccag

SEQ ID NO: 2536406 - RNA, 23 nt, Human
acaggcccucccuguuccccaga

SEQ ID NO: 2536407 - RNA, 13 nt, Human
acaggcccuuccu

SEQ ID NO: 2536408 - RNA, 21 nt, Human
acaggccugagauuucaucug

SEQ ID NO: 2536409 - RNA, 17 nt, Human
acaggccugagauuuca

SEQ ID NO: 2536410 - RNA, 16 nt, Human
acaggccucccuguuu

SEQ ID NO: 2536411 - RNA, 15 nt, Human
acaggccugagauuu

SEQ ID NO: 2536412 - RNA, 13 nt, Human
acaggccucccug

SEQ ID NO: 2536413 - RNA, 11 nt, Human
acaggccuccc

SEQ ID NO: 2536414 - RNA, 16 nt, Human
acaggccgcccugcgg

SEQ ID NO: 2536415 - RNA, 23 nt, Human
uauguccacuguguauagaagua

SEQ ID NO: 2536416 - RNA, 17 nt, Human
uauguccacuguguaua

SEQ ID NO: 2536417 - RNA, 13 nt, Human
uauguccuaagga

SEQ ID NO: 2536418 - RNA, 20 nt, Human
uaugucccuucacauaguuu

SEQ ID NO: 2536419 - RNA, 15 nt, Human
uaugucccuucacau

SEQ ID NO: 2536420 - RNA, 15 nt, Human
uaugucccuugcugu

SEQ ID NO: 2536421 - RNA, 10 nt, Human
uaugucuguu

SEQ ID NO: 2536422 - RNA, 16 nt, Human
uaugugauuuuaacuc

SEQ ID NO: 2536423 - RNA, 18 nt, Human
uaugugauuuuaacucug

SEQ ID NO: 2536424 - RNA, 19 nt, Human
uaugugauuuuaacucugu

SEQ ID NO: 2536425 - RNA, 21 nt, Human
uaugugauuuuaacucugucu

SEQ ID NO: 2536426 - RNA, 12 nt, Human
uaugugcacugu

SEQ ID NO: 2536427 - RNA, 15 nt, Human
uaugucuauuuaagc

SEQ ID NO: 2536428 - RNA, 14 nt, Human
uaugucucuucuga

SEQ ID NO: 2536429 - RNA, 19 nt, Human
uaugucucuucugagcuau

SEQ ID NO: 2536430 - RNA, 13 nt, Human
uaugucuauuuaa

SEQ ID NO: 2536431 - RNA, 12 nt, Human
uaugucuauuua

SEQ ID NO: 2536432 - RNA, 16 nt, Human
uaugucuaaagagcuu

SEQ ID NO: 2536433 - RNA, 12 nt, Human
uaugucuaaaga

SEQ ID NO: 2536434 - RNA, 21 nt, Human
uaugucucgugguaggacugu

SEQ ID NO: 2536435 - RNA, 21 nt, Human
acaggcagcuggaugagacuu

SEQ ID NO: 2536436 - RNA, 22 nt, Human
acaggcagcgauggucucagaa

SEQ ID NO: 2536437 - RNA, 22 nt, Human
acaggcagccuggacauagaga

SEQ ID NO: 2536438 - RNA, 20 nt, Human
acaggcagcuuuaaccauua

SEQ ID NO: 2536439 - RNA, 16 nt, Human
acaggaggacaauuca

SEQ ID NO: 2536440 - RNA, 15 nt, Human
acaggaggacaauuc

SEQ ID NO: 2536441 - RNA, 14 nt, Human
acaggagcugggau

SEQ ID NO: 2536442 - RNA, 20 nt, Human
acaggaggacaauucaugaa

SEQ ID NO: 2536443 - RNA, 17 nt, Human
acaggaggacaauucau

SEQ ID NO: 2536444 - RNA, 13 nt, Human
acaggcagcacag

SEQ ID NO: 2536445 - RNA, 17 nt, Human
acaggcagcacagagac

SEQ ID NO: 2536446 - RNA, 16 nt, Human
acaggcagccuggaca

SEQ ID NO: 2536447 - RNA, 13 nt, Human
acaggcagcagag

SEQ ID NO: 2536448 - RNA, 12 nt, Human
acaggcagcaga

SEQ ID NO: 2536449 - RNA, 14 nt, Human
acaggcagcagaga

SEQ ID NO: 2536450 - RNA, 14 nt, Human
acaggcagcauuua

SEQ ID NO: 2536451 - RNA, 17 nt, Human
acaggcccggcuccagg

SEQ ID NO: 2536452 - RNA, 16 nt, Human
acaggcccggcuccag

SEQ ID NO: 2536453 - RNA, 18 nt, Human
acaggcccagcauugcug

SEQ ID NO: 2536454 - RNA, 15 nt, Human
acaggcccagcauug

SEQ ID NO: 2536455 - RNA, 13 nt, Human
acaggcccagcau

SEQ ID NO: 2536456 - RNA, 12 nt, Human
acaggcccagca

SEQ ID NO: 2536457 - RNA, 18 nt, Human
acaggcccaagagaugaa

SEQ ID NO: 2536458 - RNA, 11 nt, Human
acaggcccagc

SEQ ID NO: 2536459 - RNA, 22 nt, Human
acaggcccaagagaugaagagu

SEQ ID NO: 2536460 - RNA, 22 nt, Human
acaggcccagcauugcugguuc

SEQ ID NO: 2536461 - RNA, 20 nt, Human
acaggcccagcauugcuggu

SEQ ID NO: 2536462 - RNA, 12 nt, Human
acaggcccccuu

SEQ ID NO: 2536463 - RNA, 21 nt, Human
acaggcccccuugaguggggu

SEQ ID NO: 2536464 - RNA, 23 nt, Human
acaggcccagcauugcugguucu

SEQ ID NO: 2536465 - RNA, 22 nt, Human
acaggcccggcgcgguggcuca

SEQ ID NO: 2536466 - RNA, 20 nt, Human
acaggaaaauuuuaaaaaua

SEQ ID NO: 2536467 - RNA, 21 nt, Human
acagcuugagccgggccccug

SEQ ID NO: 2536468 - RNA, 16 nt, Human
acagcuugagccgggc

SEQ ID NO: 2536469 - RNA, 23 nt, Human
acagcuugaccugaggcuguggu

SEQ ID NO: 2536470 - RNA, 22 nt, Human
acagcuugagccgggccccugg

SEQ ID NO: 2536471 - RNA, 16 nt, Human
acaggaaaauccucug

SEQ ID NO: 2536472 - RNA, 17 nt, Human
acaggaaaauccucugg

SEQ ID NO: 2536473 - RNA, 18 nt, Human
acaggaaaauccucuggc

SEQ ID NO: 2536474 - RNA, 22 nt, Human
acaggaaccacaagacugcaca

SEQ ID NO: 2536475 - RNA, 23 nt, Human
acaggaaaauccucuggcuggcu

SEQ ID NO: 2536476 - RNA, 16 nt, Human
acaggaaagggaaggc

SEQ ID NO: 2536477 - RNA, 19 nt, Human
acaggaaagggaaggcccc

SEQ ID NO: 2536478 - RNA, 22 nt, Human
acaggaaagggaaggccccaca

SEQ ID NO: 2536479 - RNA, 18 nt, Human
acaggagagaaaggggau

SEQ ID NO: 2536480 - RNA, 19 nt, Human
acaggagagaaaggggaug

SEQ ID NO: 2536481 - RNA, 13 nt, Human
acaggagcuggga

SEQ ID NO: 2536482 - RNA, 15 nt, Human
acaggcagauacagg

SEQ ID NO: 2536483 - RNA, 15 nt, Human
acaggacucugccuc

SEQ ID NO: 2536484 - RNA, 16 nt, Human
acaggacucugccucc

SEQ ID NO: 2536485 - RNA, 14 nt, Human
acaggagaccuggc

SEQ ID NO: 2536486 - RNA, 15 nt, Human
acaggagagaaaggg

SEQ ID NO: 2536487 - RNA, 11 nt, Human
acaggagaaau

SEQ ID NO: 2536488 - RNA, 21 nt, Human
acaggaaaagcugcugacagu

SEQ ID NO: 2536489 - RNA, 20 nt, Human
acaggaaaagcugcugacag

SEQ ID NO: 2536490 - RNA, 19 nt, Human
acaggaaaagcugcugaca

SEQ ID NO: 2536491 - RNA, 18 nt, Human
acaggaaaagcugcugac

SEQ ID NO: 2536492 - RNA, 23 nt, Human
acagcuugaccgugaggccagag

SEQ ID NO: 2536493 - RNA, 22 nt, Human
acagcuugaccgugaggccaga

SEQ ID NO: 2536494 - RNA, 22 nt, Human
acagcuugaccugaggcugugg

SEQ ID NO: 2536495 - RNA, 21 nt, Human
acagcuugaccugaggcugug

SEQ ID NO: 2536496 - RNA, 19 nt, Human
acagcuugaccugaggcug

SEQ ID NO: 2536497 - RNA, 17 nt, Human
acagcuugaccugaggc

SEQ ID NO: 2536498 - RNA, 15 nt, Human
acagcuugaccugag

SEQ ID NO: 2536499 - RNA, 20 nt, Human
acagcuuccccucucuccuc

SEQ ID NO: 2536500 - RNA, 21 nt, Human
acagcuucucauccugcaggc

SEQ ID NO: 2536501 - RNA, 21 nt, Human
acagcuucauuuccugugucu

SEQ ID NO: 2536502 - RNA, 19 nt, Human
acagcuucauuuccugugu

SEQ ID NO: 2536503 - RNA, 17 nt, Human
acagcuucauuuccugu

SEQ ID NO: 2536504 - RNA, 20 nt, Human
acagcuucagguuaucgaaa

SEQ ID NO: 2536505 - RNA, 15 nt, Human
acagcuucagguuau

SEQ ID NO: 2536506 - RNA, 13 nt, Human
acagcuucagguu

SEQ ID NO: 2536507 - RNA, 22 nt, Human
acagcuucagccaggagcuggg

SEQ ID NO: 2536508 - RNA, 21 nt, Human
acagcuucagccaggagcugg

SEQ ID NO: 2536509 - RNA, 21 nt, Human
acagcuugaccgugaggccag

SEQ ID NO: 2536510 - RNA, 20 nt, Human
acagcuugaccgugaggcca

SEQ ID NO: 2536511 - RNA, 17 nt, Human
acagcuugaccgugagg

SEQ ID NO: 2536512 - RNA, 22 nt, Human
acagcuucagguuaucgaaaua

SEQ ID NO: 2536513 - RNA, 22 nt, Human
acagcuuccccucucuccuccu

SEQ ID NO: 2536514 - RNA, 20 nt, Human
acagcuucucauccugcagg

SEQ ID NO: 2536515 - RNA, 23 nt, Human
acagcuguaugauucccagccag

SEQ ID NO: 2536516 - RNA, 20 nt, Human
acagcuguaugauucccagc

SEQ ID NO: 2536517 - RNA, 19 nt, Human
acagcuguaugauucccag

SEQ ID NO: 2536518 - RNA, 14 nt, Human
acagcuguaugauu

SEQ ID NO: 2536519 - RNA, 14 nt, Human
acagcuguuuaaga

SEQ ID NO: 2536520 - RNA, 17 nt, Human
acagcuguuuaagaugg

SEQ ID NO: 2536521 - RNA, 15 nt, Human
acagcuguuuaagau

SEQ ID NO: 2536522 - RNA, 19 nt, Human
acagcuguuuaagaugggc

SEQ ID NO: 2536523 - RNA, 18 nt, Human
acagcuucagccaggagc

SEQ ID NO: 2536524 - RNA, 17 nt, Human
acagcuucagccaggag

SEQ ID NO: 2536525 - RNA, 15 nt, Human
acagcuucagccagg

SEQ ID NO: 2536526 - RNA, 14 nt, Human
acagcugucccugu

SEQ ID NO: 2536527 - RNA, 18 nt, Human
acagcugucccugucacc

SEQ ID NO: 2536528 - RNA, 15 nt, Human
acagcugucccuguc

SEQ ID NO: 2536529 - RNA, 16 nt, Human
acagcugucccuguca

SEQ ID NO: 2536530 - RNA, 19 nt, Human
acagcuaaugggacacuaa

SEQ ID NO: 2536531 - RNA, 17 nt, Human
acagcuaaugggacacu

SEQ ID NO: 2536532 - RNA, 16 nt, Human
acagcuaaugggacac

SEQ ID NO: 2536533 - RNA, 15 nt, Human
acagcuaaugggaca

SEQ ID NO: 2536534 - RNA, 18 nt, Human
acagcucagaaguuucuu

SEQ ID NO: 2536535 - RNA, 20 nt, Human
acagcucaagucuucccuga

SEQ ID NO: 2536536 - RNA, 23 nt, Human
acagcucaagucuucccugauca

SEQ ID NO: 2536537 - RNA, 21 nt, Human
acagcucagcuuuuugucuuu

SEQ ID NO: 2536538 - RNA, 16 nt, Human
acagcuaugggagccc

SEQ ID NO: 2536539 - RNA, 17 nt, Human
acagcuaugggagcccc

SEQ ID NO: 2536540 - RNA, 21 nt, Human
acagcuaugggagccccaggg

SEQ ID NO: 2536541 - RNA, 13 nt, Human
acagcuacacaga

SEQ ID NO: 2536542 - RNA, 14 nt, Human
uaugaggcauuugu

SEQ ID NO: 2536543 - RNA, 15 nt, Human
uaugaggcauuuguu

SEQ ID NO: 2536544 - RNA, 21 nt, Human
uaugaggcauuuguuugaacu

SEQ ID NO: 2536545 - RNA, 15 nt, Human
uaugaaguauauaau

SEQ ID NO: 2536546 - RNA, 14 nt, Human
uaugaaguauauaa

SEQ ID NO: 2536547 - RNA, 16 nt, Human
uaugaggcauuuggca

SEQ ID NO: 2536548 - RNA, 23 nt, Human
uaugaggcauuuguuugaacuga

SEQ ID NO: 2536549 - RNA, 16 nt, Human
uaugaaguauauaaug

SEQ ID NO: 2536550 - RNA, 21 nt, Human
uaugaaggcuguacacugcac

SEQ ID NO: 2536551 - RNA, 23 nt, Human
uaugaagcuuuuaugugaaacau

SEQ ID NO: 2536552 - RNA, 22 nt, Human
uaugaagcuuuuaugugaaaca

SEQ ID NO: 2536553 - RNA, 20 nt, Human
uaugaagcuuuuaugugaaa

SEQ ID NO: 2536554 - RNA, 22 nt, Human
acagcccucccgccccuucccc

SEQ ID NO: 2536555 - RNA, 21 nt, Human
acagcccucccgccccuuccc

SEQ ID NO: 2536556 - RNA, 18 nt, Human
acagcccucccgccccuu

SEQ ID NO: 2536557 - RNA, 15 nt, Human
acagcccucccgccc

SEQ ID NO: 2536558 - RNA, 14 nt, Human
acagcccucccgcc

SEQ ID NO: 2536559 - RNA, 12 nt, Human
acagcccuguca

SEQ ID NO: 2536560 - RNA, 13 nt, Human
acagcccugucag

SEQ ID NO: 2536561 - RNA, 19 nt, Human
acagcccuucuuuccacag

SEQ ID NO: 2536562 - RNA, 20 nt, Human
acagcccugucagugcagcc

SEQ ID NO: 2536563 - RNA, 21 nt, Human
acagcccugucagugcagccc

SEQ ID NO: 2536564 - RNA, 24 nt, Human
uaugaagcucaccuguugcuuaca

SEQ ID NO: 2536565 - RNA, 17 nt, Human
uaugaagcucaccuguu

SEQ ID NO: 2536566 - RNA, 17 nt, Human
uaugaaacuuaggaagg

SEQ ID NO: 2536567 - RNA, 21 nt, Human
uaucuuuuuuuuauuccacau

SEQ ID NO: 2536568 - RNA, 15 nt, Human
uaugaaaacuuauga

SEQ ID NO: 2536569 - RNA, 13 nt, Human
uaugaaaacuuau

SEQ ID NO: 2536570 - RNA, 18 nt, Human
uaugaaaaauaugauauu

SEQ ID NO: 2536571 - RNA, 18 nt, Human
uaugaaaaacaaaaauaa

SEQ ID NO: 2536572 - RNA, 14 nt, Human
uaugaaaaauauga

SEQ ID NO: 2536573 - RNA, 16 nt, Human
acagcccgggcucugc

SEQ ID NO: 2536574 - RNA, 23 nt, Human
acagcccuccaucuaaacugccc

SEQ ID NO: 2536575 - RNA, 15 nt, Human
acagcccgggcucug

SEQ ID NO: 2536576 - RNA, 14 nt, Human
acagccccuccucc

SEQ ID NO: 2536577 - RNA, 16 nt, Human
acagccccuccuccau

SEQ ID NO: 2536578 - RNA, 22 nt, Human
acagcacuggcucucuccagga

SEQ ID NO: 2536579 - RNA, 20 nt, Human
acagcacuggcucucuccag

SEQ ID NO: 2536580 - RNA, 19 nt, Human
acagcacuggcucucucca

SEQ ID NO: 2536581 - RNA, 17 nt, Human
acagcacuacucugugc

SEQ ID NO: 2536582 - RNA, 20 nt, Human
acagcacuacucugugccag

SEQ ID NO: 2536583 - RNA, 15 nt, Human
acagcacuacucugu

SEQ ID NO: 2536584 - RNA, 14 nt, Human
acagcacuacucug

SEQ ID NO: 2536585 - RNA, 13 nt, Human
acagcacuacucu

SEQ ID NO: 2536586 - RNA, 12 nt, Human
acagcacuacuc

SEQ ID NO: 2536587 - RNA, 19 nt, Human
acagcacgggggccaagga

SEQ ID NO: 2536588 - RNA, 15 nt, Human
acagcagagguucuu

SEQ ID NO: 2536589 - RNA, 15 nt, Human
acagcccccucugcc

SEQ ID NO: 2536590 - RNA, 17 nt, Human
acagcagccccugcaca

SEQ ID NO: 2536591 - RNA, 22 nt, Human
acagauuugugaacucagccaa

SEQ ID NO: 2536592 - RNA, 21 nt, Human
acagauuugugaacucagcca

SEQ ID NO: 2536593 - RNA, 15 nt, Human
acagauuugugaacu

SEQ ID NO: 2536594 - RNA, 14 nt, Human
acagauuugugaac

SEQ ID NO: 2536595 - RNA, 13 nt, Human
acagauuugugaa

SEQ ID NO: 2536596 - RNA, 19 nt, Human
uaucuauauguacuuguca

SEQ ID NO: 2536597 - RNA, 22 nt, Human
acagauuuugggguuguguugu

SEQ ID NO: 2536598 - RNA, 20 nt, Human
acagauuuugggguuguguu

SEQ ID NO: 2536599 - RNA, 20 nt, Human
acagauuuugauagcaaagc

SEQ ID NO: 2536600 - RNA, 19 nt, Human
acagauuuugauagcaaag

SEQ ID NO: 2536601 - RNA, 17 nt, Human
acagauuuugauagcaa

SEQ ID NO: 2536602 - RNA, 22 nt, Human
acagauuugagcucagcccugg

SEQ ID NO: 2536603 - RNA, 12 nt, Human
acagauuuguga

SEQ ID NO: 2536604 - RNA, 21 nt, Human
acagcacagagaagacaaaau

SEQ ID NO: 2536605 - RNA, 15 nt, Human
acagcacagagaaga

SEQ ID NO: 2536606 - RNA, 22 nt, Human
acagcacagagaagacaaaauu

SEQ ID NO: 2536607 - RNA, 12 nt, Human
acagcacagcca

SEQ ID NO: 2536608 - RNA, 13 nt, Human
acagcacagagaa

SEQ ID NO: 2536609 - RNA, 14 nt, Human
acagcacagagaag

SEQ ID NO: 2536610 - RNA, 15 nt, Human
acagauuuuuacaaa

SEQ ID NO: 2536611 - RNA, 18 nt, Human
acagcaagggugauggga

SEQ ID NO: 2536612 - RNA, 16 nt, Human
acagcaagucaggguu

SEQ ID NO: 2536613 - RNA, 12 nt, Human
acagcaagucag

SEQ ID NO: 2536614 - RNA, 15 nt, Human
uaugcaugugaagaa

SEQ ID NO: 2536615 - RNA, 16 nt, Human
uaugcaugugaagaaa

SEQ ID NO: 2536616 - RNA, 14 nt, Human
uaugccaaagauca

SEQ ID NO: 2536617 - RNA, 22 nt, Human
uaugcaugguguagaugcccug

SEQ ID NO: 2536618 - RNA, 20 nt, Human
uaugcauggaaaccugaaaa

SEQ ID NO: 2536619 - RNA, 22 nt, Human
uaugcauggugccccaggacca

SEQ ID NO: 2536620 - RNA, 23 nt, Human
uaugcauggugccccaggaccag

SEQ ID NO: 2536621 - RNA, 18 nt, Human
uaugcauggugccccagg

SEQ ID NO: 2536622 - RNA, 20 nt, Human
uaugcauggugccccaggac

SEQ ID NO: 2536623 - RNA, 21 nt, Human
uaugcauggugccccaggacc

SEQ ID NO: 2536624 - RNA, 22 nt, Human
uaugcaugaaguaauaugcaca

SEQ ID NO: 2536625 - RNA, 22 nt, Human
uaugauauuuucugugccugaa

SEQ ID NO: 2536626 - RNA, 15 nt, Human
uaugauauuuucugu

SEQ ID NO: 2536627 - RNA, 17 nt, Human
uaugauacuugaaaauu

SEQ ID NO: 2536628 - RNA, 18 nt, Human
uaugauauugcauaugca

SEQ ID NO: 2536629 - RNA, 14 nt, Human
uauggcagcgaaag

SEQ ID NO: 2536630 - RNA, 18 nt, Human
uaugcccaguuucugccu

SEQ ID NO: 2536631 - RNA, 15 nt, Human
uaugccccauucaac

SEQ ID NO: 2536632 - RNA, 20 nt, Human
uaugcccaguuucugccucu

SEQ ID NO: 2536633 - RNA, 12 nt, Human
uaugcccaguuu

SEQ ID NO: 2536634 - RNA, 17 nt, Human
uaugccaugauggaaau

SEQ ID NO: 2536635 - RNA, 22 nt, Human
uaugccacgggaaguuuagaga

SEQ ID NO: 2536636 - RNA, 17 nt, Human
uaugccaaagaucacuu

SEQ ID NO: 2536637 - RNA, 14 nt, Human
uaugccaugaugga

SEQ ID NO: 2536638 - RNA, 22 nt, Human
uaugccauagcaagauugcuua

SEQ ID NO: 2536639 - RNA, 14 nt, Human
uaugccagcucagu

SEQ ID NO: 2536640 - RNA, 17 nt, Human
uaugccagcucaguccc

SEQ ID NO: 2536641 - RNA, 15 nt, Human
uauggucauagccca

SEQ ID NO: 2536642 - RNA, 20 nt, Human
uauggucaucuuuuucucua

SEQ ID NO: 2536643 - RNA, 14 nt, Human
uaugguauuugagu

SEQ ID NO: 2536644 - RNA, 22 nt, Human
uauggucaacacuuaaggguuu

SEQ ID NO: 2536645 - RNA, 13 nt, Human
uaugguauaaugg

SEQ ID NO: 2536646 - RNA, 20 nt, Human
uaugguauaaugguugacug

SEQ ID NO: 2536647 - RNA, 20 nt, Human
uauggugagaugcagcugga

SEQ ID NO: 2536648 - RNA, 14 nt, Human
uauggugagaugca

SEQ ID NO: 2536649 - RNA, 12 nt, Human
uauggugagaug

SEQ ID NO: 2536650 - RNA, 15 nt, Human
uauggugccaaugga

SEQ ID NO: 2536651 - RNA, 13 nt, Human
uauggugccaaug

SEQ ID NO: 2536652 - RNA, 19 nt, Human
uauggugccaauggaaccu

SEQ ID NO: 2536653 - RNA, 14 nt, Human
acagcgacauagcc

SEQ ID NO: 2536654 - RNA, 20 nt, Human
acagcgacauagcccauccc

SEQ ID NO: 2536655 - RNA, 17 nt, Human
acagcgagacuccgucu

SEQ ID NO: 2536656 - RNA, 18 nt, Human
acagcgagacuccgucuc

SEQ ID NO: 2536657 - RNA, 16 nt, Human
acagcggccccugcau

SEQ ID NO: 2536658 - RNA, 15 nt, Human
acagcggccccugca

SEQ ID NO: 2536659 - RNA, 19 nt, Human
acagcggccccugcauccc

SEQ ID NO: 2536660 - RNA, 22 nt, Human
acagcuaaucagcauucucacu

SEQ ID NO: 2536661 - RNA, 18 nt, Human
acagcggcuggacuugga

SEQ ID NO: 2536662 - RNA, 16 nt, Human
acagcggaggugugga

SEQ ID NO: 2536663 - RNA, 13 nt, Human
acagcggccccug

SEQ ID NO: 2536664 - RNA, 12 nt, Human
acagcgcugggu

SEQ ID NO: 2536665 - RNA, 19 nt, Human
acagcgagaggcagagaaa

SEQ ID NO: 2536666 - RNA, 22 nt, Human
acagcgagaggcagagaaagaa

SEQ ID NO: 2536667 - RNA, 15 nt, Human
acagcgagaggcaga

SEQ ID NO: 2536668 - RNA, 14 nt, Human
acagcgagaggcag

SEQ ID NO: 2536669 - RNA, 15 nt, Human
acagcggaggugugg

SEQ ID NO: 2536670 - RNA, 21 nt, Human
uauggcccuggccuagcauac

SEQ ID NO: 2536671 - RNA, 20 nt, Human
uauggcccuggccuagcaua

SEQ ID NO: 2536672 - RNA, 16 nt, Human
uauggcagugucuuuc

SEQ ID NO: 2536673 - RNA, 19 nt, Human
uaugcucucgcaccuuucc

SEQ ID NO: 2536674 - RNA, 13 nt, Human
uauggcagugucu

SEQ ID NO: 2536675 - RNA, 23 nt, Human
uaugggacucaaugcacugacau

SEQ ID NO: 2536676 - RNA, 16 nt, Human
uaugggacucaaugca

SEQ ID NO: 2536677 - RNA, 21 nt, Human
uaugguaggaacugcugggcu

SEQ ID NO: 2536678 - RNA, 16 nt, Human
uaugggaaucaagauu

SEQ ID NO: 2536679 - RNA, 22 nt, Human
uauggcccagugucaaguugug

SEQ ID NO: 2536680 - RNA, 14 nt, Human
uaugggagaaauag

SEQ ID NO: 2536681 - RNA, 15 nt, Human
acacuuccaccagcc

SEQ ID NO: 2536682 - RNA, 19 nt, Human
acacuucagagagcuggua

SEQ ID NO: 2536683 - RNA, 20 nt, Human
acacuucagagagcugguag

SEQ ID NO: 2536684 - RNA, 16 nt, Human
acacuuccaccagccu

SEQ ID NO: 2536685 - RNA, 17 nt, Human
acacuuccaccagccug

SEQ ID NO: 2536686 - RNA, 21 nt, Human
acacuuccaccagccugcacu

SEQ ID NO: 2536687 - RNA, 14 nt, Human
acacuuccauaauc

SEQ ID NO: 2536688 - RNA, 22 nt, Human
acacuucccucuguuucucuuu

SEQ ID NO: 2536689 - RNA, 15 nt, Human
acacuucccucuguu

SEQ ID NO: 2536690 - RNA, 19 nt, Human
acacuuccaccagccugca

SEQ ID NO: 2536691 - RNA, 22 nt, Human
acacuucaggcucuucuccuuu

SEQ ID NO: 2536692 - RNA, 19 nt, Human
acacuucaggcucuucucc

SEQ ID NO: 2536693 - RNA, 15 nt, Human
acacuucaggcucuu

SEQ ID NO: 2536694 - RNA, 16 nt, Human
acacuucagagagcug

SEQ ID NO: 2536695 - RNA, 17 nt, Human
acacuucagagagcugg

SEQ ID NO: 2536696 - RNA, 18 nt, Human
acacuucagagagcuggu

SEQ ID NO: 2536697 - RNA, 23 nt, Human
acacuuacuguuguccuauggga

SEQ ID NO: 2536698 - RNA, 14 nt, Human
acacuuacuguugu

SEQ ID NO: 2536699 - RNA, 20 nt, Human
acacuuaaggguuuuagaaa

SEQ ID NO: 2536700 - RNA, 20 nt, Human
acacuuauuggaacucugcu

SEQ ID NO: 2536701 - RNA, 13 nt, Human
acacuucagagag

SEQ ID NO: 2536702 - RNA, 18 nt, Human
acacuuacacuuuaugca

SEQ ID NO: 2536703 - RNA, 21 nt, Human
acacuuacacuuuaugcacaa

SEQ ID NO: 2536704 - RNA, 17 nt, Human
acacucauugaccugag

SEQ ID NO: 2536705 - RNA, 16 nt, Human
acacuguuucaaacuu

SEQ ID NO: 2536706 - RNA, 17 nt, Human
acacuguuucaaacuuu

SEQ ID NO: 2536707 - RNA, 18 nt, Human
acacuguuucaaacuuua

SEQ ID NO: 2536708 - RNA, 15 nt, Human
acacucaugcugaaa

SEQ ID NO: 2536709 - RNA, 14 nt, Human
acacuuaacagaug

SEQ ID NO: 2536710 - RNA, 20 nt, Human
acacuguuucaaacuuuacu

SEQ ID NO: 2536711 - RNA, 16 nt, Human
acacuuacacuuuaug

SEQ ID NO: 2536712 - RNA, 14 nt, Human
acacuuaauacuac

SEQ ID NO: 2536713 - RNA, 13 nt, Human
acacucaugcuga

SEQ ID NO: 2536714 - RNA, 17 nt, Human
uauaucuauauguacuu

SEQ ID NO: 2536715 - RNA, 14 nt, Human
acacucaugcugaa

SEQ ID NO: 2536716 - RNA, 16 nt, Human
acacuuaacagaugca

SEQ ID NO: 2536717 - RNA, 18 nt, Human
acagacauacuaaccagc

SEQ ID NO: 2536718 - RNA, 19 nt, Human
acagacauacuaaccagca

SEQ ID NO: 2536719 - RNA, 18 nt, Human
acagaaaguggugcucag

SEQ ID NO: 2536720 - RNA, 17 nt, Human
acagaaaguggugcuca

SEQ ID NO: 2536721 - RNA, 19 nt, Human
acagaaaguggugcucagu

SEQ ID NO: 2536722 - RNA, 15 nt, Human
acagacagcccucca

SEQ ID NO: 2536723 - RNA, 11 nt, Human
acagacaggag

SEQ ID NO: 2536724 - RNA, 13 nt, Human
acagacaggagaa

SEQ ID NO: 2536725 - RNA, 12 nt, Human
acagaaaauaua

SEQ ID NO: 2536726 - RNA, 13 nt, Human
acagaaaauauac

SEQ ID NO: 2536727 - RNA, 14 nt, Human
acagaaaauauacu

SEQ ID NO: 2536728 - RNA, 15 nt, Human
acagaaaauauacug

SEQ ID NO: 2536729 - RNA, 22 nt, Human
acagaaaacauucugauuugga

SEQ ID NO: 2536730 - RNA, 20 nt, Human
acagaaaacgguuaaaacug

SEQ ID NO: 2536731 - RNA, 22 nt, Human
acagaaaguggugcucaguugu

SEQ ID NO: 2536732 - RNA, 14 nt, Human
acagaaaguggugc

SEQ ID NO: 2536733 - RNA, 24 nt, Human
acagaaagggcaacaauaaaauag

SEQ ID NO: 2536734 - RNA, 13 nt, Human
acagaaagcugcc

SEQ ID NO: 2536735 - RNA, 16 nt, Human
acagaaagguuuucuu

SEQ ID NO: 2536736 - RNA, 19 nt, Human
acacuuccuguccagagag

SEQ ID NO: 2536737 - RNA, 14 nt, Human
acacuuccugucca

SEQ ID NO: 2536738 - RNA, 16 nt, Human
acacuuccuguccaga

SEQ ID NO: 2536739 - RNA, 13 nt, Human
acacuuccugccu

SEQ ID NO: 2536740 - RNA, 18 nt, Human
acacuucccucuguuucu

SEQ ID NO: 2536741 - RNA, 14 nt, Human
acacuuccugccua

SEQ ID NO: 2536742 - RNA, 13 nt, Human
acacuuccugucc

SEQ ID NO: 2536743 - RNA, 20 nt, Human
acacuucugugagaccccca

SEQ ID NO: 2536744 - RNA, 21 nt, Human
acacuugagaggaugaaugua

SEQ ID NO: 2536745 - RNA, 16 nt, Human
acacuugagaggauga

SEQ ID NO: 2536746 - RNA, 14 nt, Human
acacuugagaggau

SEQ ID NO: 2536747 - RNA, 23 nt, Human
acacuucugugagacccccacac

SEQ ID NO: 2536748 - RNA, 22 nt, Human
acacuucuucuuggucuuauuu

SEQ ID NO: 2536749 - RNA, 22 nt, Human
acacuuggcccaaguggcagag

SEQ ID NO: 2536750 - RNA, 18 nt, Human
acacuugccuucuucacc

SEQ ID NO: 2536751 - RNA, 18 nt, Human
acacuugagaggaugaau

SEQ ID NO: 2536752 - RNA, 20 nt, Human
acacuuuucaugugugauuu

SEQ ID NO: 2536753 - RNA, 20 nt, Human
acacuugccuucuucaccca

SEQ ID NO: 2536754 - RNA, 17 nt, Human
acacuugguuggguccu

SEQ ID NO: 2536755 - RNA, 20 nt, Human
acacuugguuggguccucac

SEQ ID NO: 2536756 - RNA, 22 nt, Human
acacuugguuggguccucacau

SEQ ID NO: 2536757 - RNA, 13 nt, Human
acacuuuugguua

SEQ ID NO: 2536758 - RNA, 22 nt, Human
acacuuuugguuaagucuguuu

SEQ ID NO: 2536759 - RNA, 23 nt, Human
acacuuuuuuggggauaugcuua

SEQ ID NO: 2536760 - RNA, 22 nt, Human
acacuuuuuuggggauaugcuu

SEQ ID NO: 2536761 - RNA, 21 nt, Human
acagaccuggagccccugggu

SEQ ID NO: 2536762 - RNA, 20 nt, Human
acagaccuggagccccuggg

SEQ ID NO: 2536763 - RNA, 19 nt, Human
acagaccuggagccccugg

SEQ ID NO: 2536764 - RNA, 17 nt, Human
acagaccuggagccccu

SEQ ID NO: 2536765 - RNA, 22 nt, Human
acagaccuggagccccugggug

SEQ ID NO: 2536766 - RNA, 14 nt, Human
acagaccuuugaac

SEQ ID NO: 2536767 - RNA, 16 nt, Human
acagaccuaaugcucc

SEQ ID NO: 2536768 - RNA, 19 nt, Human
acagaccgaacuguuguau

SEQ ID NO: 2536769 - RNA, 18 nt, Human
acagaccgaacuguugua

SEQ ID NO: 2536770 - RNA, 17 nt, Human
acagacauucugccagg

SEQ ID NO: 2536771 - RNA, 13 nt, Human
acagacaggcucu

SEQ ID NO: 2536772 - RNA, 14 nt, Human
acagacaggagaaa

SEQ ID NO: 2536773 - RNA, 15 nt, Human
acagacaggagaaau

SEQ ID NO: 2536774 - RNA, 15 nt, Human
acagacaggcucuua

SEQ ID NO: 2536775 - RNA, 15 nt, Human
acagacaucucugca

SEQ ID NO: 2536776 - RNA, 21 nt, Human
acagacaggagaaaugcaucc

SEQ ID NO: 2536777 - RNA, 21 nt, Human
uaucaaauauuagaugugauu

SEQ ID NO: 2536778 - RNA, 20 nt, Human
uaucaaauauuagaugugau

SEQ ID NO: 2536779 - RNA, 19 nt, Human
uaucaaauauuagauguga

SEQ ID NO: 2536780 - RNA, 18 nt, Human
uaucaaauauuagaugug

SEQ ID NO: 2536781 - RNA, 21 nt, Human
uaucaaagaccuuguguguau

SEQ ID NO: 2536782 - RNA, 20 nt, Human
acagacguaugcuuauuuua

SEQ ID NO: 2536783 - RNA, 21 nt, Human
uaucaaacuucagcuguacuu

SEQ ID NO: 2536784 - RNA, 16 nt, Human
acagacgucccuccac

SEQ ID NO: 2536785 - RNA, 15 nt, Human
acagacguaugcuua

SEQ ID NO: 2536786 - RNA, 15 nt, Human
acagacgucccucca

SEQ ID NO: 2536787 - RNA, 16 nt, Human
uaucacaaaucuuaac

SEQ ID NO: 2536788 - RNA, 20 nt, Human
uaucacaaaucuuaacuuga

SEQ ID NO: 2536789 - RNA, 14 nt, Human
uaucacaaaucuua

SEQ ID NO: 2536790 - RNA, 23 nt, Human
uaucaaauauuagaugugauuua

SEQ ID NO: 2536791 - RNA, 19 nt, Human
uaucacccagaagaaaaua

SEQ ID NO: 2536792 - RNA, 22 nt, Human
uaucacccagaagaaaauagug

SEQ ID NO: 2536793 - RNA, 19 nt, Human
uaucaccgugggcucccug

SEQ ID NO: 2536794 - RNA, 23 nt, Human
uaucaccgugggcucccugacug

SEQ ID NO: 2536795 - RNA, 14 nt, Human
uaucaccucauggc

SEQ ID NO: 2536796 - RNA, 13 nt, Human
uaucaccuccccu

SEQ ID NO: 2536797 - RNA, 17 nt, Human
uaucagaauucucagaa

SEQ ID NO: 2536798 - RNA, 14 nt, Human
uaucaccuccccuc

SEQ ID NO: 2536799 - RNA, 15 nt, Human
uaucaccuccccucc

SEQ ID NO: 2536800 - RNA, 16 nt, Human
uaucaccuccccuccu

SEQ ID NO: 2536801 - RNA, 20 nt, Human
uaucagaggccuauaaugaa

SEQ ID NO: 2536802 - RNA, 17 nt, Human
uaucagaggccuauaau

SEQ ID NO: 2536803 - RNA, 20 nt, Human
uaucagacacucuggcuggu

SEQ ID NO: 2536804 - RNA, 19 nt, Human
uaucagacacucuggcugg

SEQ ID NO: 2536805 - RNA, 18 nt, Human
uaucagacacucuggcug

SEQ ID NO: 2536806 - RNA, 14 nt, Human
uaucagcacgugug

SEQ ID NO: 2536807 - RNA, 22 nt, Human
uauccacagagagucccacugc

SEQ ID NO: 2536808 - RNA, 21 nt, Human
uauccacagaaacauuuucau

SEQ ID NO: 2536809 - RNA, 13 nt, Human
uauccaccaccuc

SEQ ID NO: 2536810 - RNA, 23 nt, Human
uauccacagagagucccacugcc

SEQ ID NO: 2536811 - RNA, 15 nt, Human
uauccaccaccuccc

SEQ ID NO: 2536812 - RNA, 12 nt, Human
uauccacccagc

SEQ ID NO: 2536813 - RNA, 19 nt, Human
uauccaacaucaacaucuu

SEQ ID NO: 2536814 - RNA, 20 nt, Human
uauccccccaucuugcuucc

SEQ ID NO: 2536815 - RNA, 19 nt, Human
uauccccccaucuugcuuc

SEQ ID NO: 2536816 - RNA, 17 nt, Human
uauccccccaucuugcu

SEQ ID NO: 2536817 - RNA, 15 nt, Human
uauccccccaucuug

SEQ ID NO: 2536818 - RNA, 15 nt, Human
uauccccucccaguc

SEQ ID NO: 2536819 - RNA, 21 nt, Human
uauccccccccuguauaguua

SEQ ID NO: 2536820 - RNA, 19 nt, Human
uauccccccccuguauagu

SEQ ID NO: 2536821 - RNA, 17 nt, Human
uaucuaguuuaauuaau

SEQ ID NO: 2536822 - RNA, 16 nt, Human
uauccccauuucuuuu

SEQ ID NO: 2536823 - RNA, 14 nt, Human
uaucccagaaauua

SEQ ID NO: 2536824 - RNA, 13 nt, Human
uauccacccagcc

SEQ ID NO: 2536825 - RNA, 14 nt, Human
uauccacccagccc

SEQ ID NO: 2536826 - RNA, 15 nt, Human
uauccacccagccca

SEQ ID NO: 2536827 - RNA, 16 nt, Human
uaucuauauguacuug

SEQ ID NO: 2536828 - RNA, 22 nt, Human
uaucuauauauguguauguacg

SEQ ID NO: 2536829 - RNA, 17 nt, Human
uaucuauauauguguau

SEQ ID NO: 2536830 - RNA, 16 nt, Human
uaucuauauaugugua

SEQ ID NO: 2536831 - RNA, 15 nt, Human
uaucuauauaugugu

SEQ ID NO: 2536832 - RNA, 13 nt, Human
uaucuauauaugu

SEQ ID NO: 2536833 - RNA, 21 nt, Human
uaucuauauauaauucuguac

SEQ ID NO: 2536834 - RNA, 20 nt, Human
uaucuauauauaauucugua

SEQ ID NO: 2536835 - RNA, 18 nt, Human
uaucuauacauaucuuua

SEQ ID NO: 2536836 - RNA, 20 nt, Human
uaucuauacauaucuuuauu

SEQ ID NO: 2536837 - RNA, 16 nt, Human
uaucuauauauaauuc

SEQ ID NO: 2536838 - RNA, 22 nt, Human
uaucuaguuuaauuaaucugua

SEQ ID NO: 2536839 - RNA, 16 nt, Human
uauccccucccaguca

SEQ ID NO: 2536840 - RNA, 18 nt, Human
uauaauuuaccugaaguc

SEQ ID NO: 2536841 - RNA, 11 nt, Human
uauaauuuaau

SEQ ID NO: 2536842 - RNA, 16 nt, Human
uauaauuuaaugcaug

SEQ ID NO: 2536843 - RNA, 22 nt, Human
uauacacuuacacuuuaugcac

SEQ ID NO: 2536844 - RNA, 21 nt, Human
uauaagugcuguauaaaauca

SEQ ID NO: 2536845 - RNA, 20 nt, Human
uauaagugcuguauaaaauc

SEQ ID NO: 2536846 - RNA, 19 nt, Human
uauaagugcuguauaaaau

SEQ ID NO: 2536847 - RNA, 17 nt, Human
uauaagugcuguauaaa

SEQ ID NO: 2536848 - RNA, 16 nt, Human
uauaagugcuguauaa

SEQ ID NO: 2536849 - RNA, 15 nt, Human
uauaagugcuguaua

SEQ ID NO: 2536850 - RNA, 14 nt, Human
uauaagugcuguau

SEQ ID NO: 2536851 - RNA, 13 nt, Human
uauaagugcugua

SEQ ID NO: 2536852 - RNA, 13 nt, Human
uauaaguguacau

SEQ ID NO: 2536853 - RNA, 18 nt, Human
uauaaguggaggcacuuu

SEQ ID NO: 2536854 - RNA, 14 nt, Human
uauaaguguacaua

SEQ ID NO: 2536855 - RNA, 19 nt, Human
uauaaguggaggcacuuua

SEQ ID NO: 2536856 - RNA, 22 nt, Human
uauaauuuaacuucagagggaa

SEQ ID NO: 2536857 - RNA, 15 nt, Human
uauaauuuaacuuca

SEQ ID NO: 2536858 - RNA, 22 nt, Human
uauacagaauugugucugcagg

SEQ ID NO: 2536859 - RNA, 16 nt, Human
uauacauagcaugaca

SEQ ID NO: 2536860 - RNA, 22 nt, Human
uauacauagcaugacauuucuu

SEQ ID NO: 2536861 - RNA, 18 nt, Human
uauacauguuuaguauua

SEQ ID NO: 2536862 - RNA, 13 nt, Human
uauacaugccagu

SEQ ID NO: 2536863 - RNA, 19 nt, Human
uauagaugggaaugaagcu

SEQ ID NO: 2536864 - RNA, 17 nt, Human
uauagaugggaaugaag

SEQ ID NO: 2536865 - RNA, 16 nt, Human
uauagaugggaaugaa

SEQ ID NO: 2536866 - RNA, 22 nt, Human
uauagaugcaagauauuuauau

SEQ ID NO: 2536867 - RNA, 15 nt, Human
uauagaucccccaga

SEQ ID NO: 2536868 - RNA, 21 nt, Human
uauacauaucuuuauuaauca

SEQ ID NO: 2536869 - RNA, 15 nt, Human
uauacauaucuuuau

SEQ ID NO: 2536870 - RNA, 18 nt, Human
uauacauaucuuuauuaa

SEQ ID NO: 2536871 - RNA, 15 nt, Human
uauacaugccaguga

SEQ ID NO: 2536872 - RNA, 11 nt, Human
uauacaugcca

SEQ ID NO: 2536873 - RNA, 20 nt, Human
uagucacugagacagcccgg

SEQ ID NO: 2536874 - RNA, 17 nt, Human
uagucacugagacagcc

SEQ ID NO: 2536875 - RNA, 23 nt, Human
acacuaaguuauaguauaucugg

SEQ ID NO: 2536876 - RNA, 19 nt, Human
acacuaaguuauaguauau

SEQ ID NO: 2536877 - RNA, 14 nt, Human
acacuaagggugua

SEQ ID NO: 2536878 - RNA, 22 nt, Human
acacuaaugaggaaacugcacu

SEQ ID NO: 2536879 - RNA, 15 nt, Human
acacuaaugaggaaa

SEQ ID NO: 2536880 - RNA, 13 nt, Human
acacucaaaucaa

SEQ ID NO: 2536881 - RNA, 21 nt, Human
acacucaaaagcugggcaggu

SEQ ID NO: 2536882 - RNA, 12 nt, Human
acacuaauuccu

SEQ ID NO: 2536883 - RNA, 18 nt, Human
acacucaaaucaagaaac

SEQ ID NO: 2536884 - RNA, 17 nt, Human
acacucaaaucaagaaa

SEQ ID NO: 2536885 - RNA, 17 nt, Human
acacuaauuccuuucua

SEQ ID NO: 2536886 - RNA, 19 nt, Human
uauaacuauguugauaaaa

SEQ ID NO: 2536887 - RNA, 16 nt, Human
uauaacucaucauaaa

SEQ ID NO: 2536888 - RNA, 17 nt, Human
uauaacucaucauaaaa

SEQ ID NO: 2536889 - RNA, 18 nt, Human
uauaacucaucauaaaau

SEQ ID NO: 2536890 - RNA, 19 nt, Human
uauaacucaucauaaaaua

SEQ ID NO: 2536891 - RNA, 20 nt, Human
uauaacucaucauaaaauaa

SEQ ID NO: 2536892 - RNA, 21 nt, Human
uauaacucaucauaaaauaaa

SEQ ID NO: 2536893 - RNA, 19 nt, Human
uauaagugauugcugguuu

SEQ ID NO: 2536894 - RNA, 20 nt, Human
uauaacuuaaaaauguaaau

SEQ ID NO: 2536895 - RNA, 22 nt, Human
uauaacuuaaaaaaaugacaga

SEQ ID NO: 2536896 - RNA, 22 nt, Human
uauaacuuaaaaauguaaauau

SEQ ID NO: 2536897 - RNA, 23 nt, Human
uauaacucugcacuacuccucug

SEQ ID NO: 2536898 - RNA, 16 nt, Human
uauaacugaaggagaa

SEQ ID NO: 2536899 - RNA, 19 nt, Human
uauaacugccuuaaaacuu

SEQ ID NO: 2536900 - RNA, 18 nt, Human
uauaacuuaaaaaaauga

SEQ ID NO: 2536901 - RNA, 19 nt, Human
uauaacuuaaaaaaaugac

SEQ ID NO: 2536902 - RNA, 20 nt, Human
uauaacugccuuaaaacuuu

SEQ ID NO: 2536903 - RNA, 20 nt, Human
uauauagguuuuguuugcua

SEQ ID NO: 2536904 - RNA, 12 nt, Human
uauauagguuuu

SEQ ID NO: 2536905 - RNA, 17 nt, Human
uauauagguugugcaaa

SEQ ID NO: 2536906 - RNA, 24 nt, Human
uauauagguuuuguuugcuaucuu

SEQ ID NO: 2536907 - RNA, 21 nt, Human
uauauagguuuuguuugcuau

SEQ ID NO: 2536908 - RNA, 18 nt, Human
uauauaggcaucacauuu

SEQ ID NO: 2536909 - RNA, 21 nt, Human
uauauaucugcuucaguggag

SEQ ID NO: 2536910 - RNA, 22 nt, Human
uauauaguuuauugacaauaau

SEQ ID NO: 2536911 - RNA, 17 nt, Human
uauauaguuuacuauuu

SEQ ID NO: 2536912 - RNA, 19 nt, Human
uauauaucugcuucagugg

SEQ ID NO: 2536913 - RNA, 21 nt, Human
uauauaucugcuguccagaca

SEQ ID NO: 2536914 - RNA, 18 nt, Human
uauauaucugcuguccag

SEQ ID NO: 2536915 - RNA, 15 nt, Human
uauauaucuaucuua

SEQ ID NO: 2536916 - RNA, 12 nt, Human
uauauaugugua

SEQ ID NO: 2536917 - RNA, 14 nt, Human
uauauauguguaug

SEQ ID NO: 2536918 - RNA, 18 nt, Human
uauauauguguguuuaaa

SEQ ID NO: 2536919 - RNA, 17 nt, Human
uauauauguguguuuaa

SEQ ID NO: 2536920 - RNA, 16 nt, Human
uauauauguguaugua

SEQ ID NO: 2536921 - RNA, 14 nt, Human
uauauaugugugug

SEQ ID NO: 2536922 - RNA, 22 nt, Human
uauauauguguguuuaaauaaa

SEQ ID NO: 2536923 - RNA, 22 nt, Human
uauauauugguaacauccuuuc

SEQ ID NO: 2536924 - RNA, 13 nt, Human
uauauauuuauaa

SEQ ID NO: 2536925 - RNA, 21 nt, Human
uauaucuauauauaauucugu

SEQ ID NO: 2536926 - RNA, 13 nt, Human
uauaucuauauau

SEQ ID NO: 2536927 - RNA, 18 nt, Human
uauaucuaaauugaauaa

SEQ ID NO: 2536928 - RNA, 17 nt, Human
uauaucuaaauugaaua

SEQ ID NO: 2536929 - RNA, 13 nt, Human
uauaucuaaauug

SEQ ID NO: 2536930 - RNA, 16 nt, Human
uauaucuauauguacu

SEQ ID NO: 2536931 - RNA, 22 nt, Human
uauaucuauauauaauucugua

SEQ ID NO: 2536932 - RNA, 12 nt, Human
acacucaugcug

SEQ ID NO: 2536933 - RNA, 16 nt, Human
acacucaguuguucaa

SEQ ID NO: 2536934 - RNA, 16 nt, Human
acacucauugaccuga

SEQ ID NO: 2536935 - RNA, 20 nt, Human
uauauccuuucuaacaaaaa

SEQ ID NO: 2536936 - RNA, 17 nt, Human
uauauccuuucuaacaa

SEQ ID NO: 2536937 - RNA, 20 nt, Human
uauauauuuuugguugucaa

SEQ ID NO: 2536938 - RNA, 22 nt, Human
uauauauuuuugguugucaaua

SEQ ID NO: 2536939 - RNA, 11 nt, Human
uauauauuucc

SEQ ID NO: 2536940 - RNA, 14 nt, Human
uauauauuuauaac

SEQ ID NO: 2536941 - RNA, 15 nt, Human
uauauauuuauaacu

SEQ ID NO: 2536942 - RNA, 14 nt, Human
uauauauuuuaauu

SEQ ID NO: 2536943 - RNA, 16 nt, Human
uauaggugcuacaaaa

SEQ ID NO: 2536944 - RNA, 14 nt, Human
uauaggcuggagaa

SEQ ID NO: 2536945 - RNA, 15 nt, Human
uauaggcaccuacca

SEQ ID NO: 2536946 - RNA, 14 nt, Human
uauaggucacuccu

SEQ ID NO: 2536947 - RNA, 17 nt, Human
uauaggucacuccuggg

SEQ ID NO: 2536948 - RNA, 21 nt, Human
uauauagauuauaacuugucu

SEQ ID NO: 2536949 - RNA, 12 nt, Human
uauaggaauuga

SEQ ID NO: 2536950 - RNA, 23 nt, Human
uauaggaacuuaaauaaugugaa

SEQ ID NO: 2536951 - RNA, 15 nt, Human
uauaggaucauuugu

SEQ ID NO: 2536952 - RNA, 12 nt, Human
uauaggagagga

SEQ ID NO: 2536953 - RNA, 19 nt, Human
uauaggaacauaugaaaau

SEQ ID NO: 2536954 - RNA, 20 nt, Human
uauagcuguauugaaucaug

SEQ ID NO: 2536955 - RNA, 19 nt, Human
uauagcuguauugaaucau

SEQ ID NO: 2536956 - RNA, 21 nt, Human
uauagcuguauugaaucaugu

SEQ ID NO: 2536957 - RNA, 12 nt, Human
uauagaugucua

SEQ ID NO: 2536958 - RNA, 23 nt, Human
uauagcaauccauguuaguuuuu

SEQ ID NO: 2536959 - RNA, 13 nt, Human
uauagcaauccau

SEQ ID NO: 2536960 - RNA, 18 nt, Human
uauagccuaggugacaga

SEQ ID NO: 2536961 - RNA, 14 nt, Human
uauagcuguauuga

SEQ ID NO: 2536962 - RNA, 13 nt, Human
uauagcuguauug

SEQ ID NO: 2536963 - RNA, 22 nt, Human
uauagcuguacaaauauaagaa

SEQ ID NO: 2536964 - RNA, 18 nt, Human
uauagcuguacaaauaua

SEQ ID NO: 2536965 - RNA, 16 nt, Human
uauagcuguacaaaua

SEQ ID NO: 2536966 - RNA, 13 nt, Human
uauagcccagguc

SEQ ID NO: 2536967 - RNA, 21 nt, Human
uauagccacaucccuuugaaa

SEQ ID NO: 2536968 - RNA, 22 nt, Human
uauagcccagccaggccccagg

SEQ ID NO: 2536969 - RNA, 14 nt, Human
uaggcaucccaggg

SEQ ID NO: 2536970 - RNA, 16 nt, Human
uaggcaucccagggga

SEQ ID NO: 2536971 - RNA, 19 nt, Human
uaggcaucccaggggacca

SEQ ID NO: 2536972 - RNA, 21 nt, Human
uaggcaugagggaucacaggg

SEQ ID NO: 2536973 - RNA, 19 nt, Human
uaggcagggauuugaggag

SEQ ID NO: 2536974 - RNA, 17 nt, Human
uaggcagggauuugagg

SEQ ID NO: 2536975 - RNA, 15 nt, Human
uaggcagggauuuga

SEQ ID NO: 2536976 - RNA, 12 nt, Human
uaggcaggacca

SEQ ID NO: 2536977 - RNA, 15 nt, Human
uaggcaggaccugug

SEQ ID NO: 2536978 - RNA, 22 nt, Human
uaggcaggacaugcugaagcca

SEQ ID NO: 2536979 - RNA, 17 nt, Human
uaggcaggacaugcuga

SEQ ID NO: 2536980 - RNA, 14 nt, Human
uaggcaggaccugu

SEQ ID NO: 2536981 - RNA, 22 nt, Human
uaggauuuaacagucauuuaaa

SEQ ID NO: 2536982 - RNA, 21 nt, Human
uaggauuuaacagucauuuaa

SEQ ID NO: 2536983 - RNA, 12 nt, Human
uaggauuuaaca

SEQ ID NO: 2536984 - RNA, 13 nt, Human
uaggauguugaaa

SEQ ID NO: 2536985 - RNA, 19 nt, Human
uaggauguuuuucaugaaa

SEQ ID NO: 2536986 - RNA, 18 nt, Human
uaggauguuuuucaugaa

SEQ ID NO: 2536987 - RNA, 13 nt, Human
uaggauguuuuuc

SEQ ID NO: 2536988 - RNA, 21 nt, Human
uaggaguucacuucaucuucu

SEQ ID NO: 2536989 - RNA, 17 nt, Human
uaggagugugugauuuu

SEQ ID NO: 2536990 - RNA, 17 nt, Human
uaggaaauaaaaccuuu

SEQ ID NO: 2536991 - RNA, 23 nt, Human
uaggaguucgagaccagccuggc

SEQ ID NO: 2536992 - RNA, 17 nt, Human
uaggaguucgagaccag

SEQ ID NO: 2536993 - RNA, 21 nt, Human
uaggaguucgagaccagccug

SEQ ID NO: 2536994 - RNA, 20 nt, Human
uaggaucauuuguuggaaug

SEQ ID NO: 2536995 - RNA, 21 nt, Human
uaggauccagugauccuuaca

SEQ ID NO: 2536996 - RNA, 19 nt, Human
uaggaucagcccucauuuu

SEQ ID NO: 2536997 - RNA, 22 nt, Human
uaggauaugguggguggacagg

SEQ ID NO: 2536998 - RNA, 23 nt, Human
uaggaguucacuucaucuucuca

SEQ ID NO: 2536999 - RNA, 13 nt, Human
uaggauagcauuu

SEQ ID NO: 2537000 - RNA, 17 nt, Human
uaggaaaaacugauuuu

SEQ ID NO: 2537001 - RNA, 16 nt, Human
uaggaaaaacugauuu

SEQ ID NO: 2537002 - RNA, 19 nt, Human
uaggaaagaccauuuuucc

SEQ ID NO: 2537003 - RNA, 21 nt, Human
uaggaaacaaagcuuagcagg

SEQ ID NO: 2537004 - RNA, 14 nt, Human
uaggaaauaaaacc

SEQ ID NO: 2537005 - RNA, 16 nt, Human
uaggaaauaaaaccuu

SEQ ID NO: 2537006 - RNA, 19 nt, Human
uaggaaaaguacauuuaau

SEQ ID NO: 2537007 - RNA, 17 nt, Human
uaggaaaaguacauuua

SEQ ID NO: 2537008 - RNA, 14 nt, Human
uagggaugaguacc

SEQ ID NO: 2537009 - RNA, 23 nt, Human
uagggaucaaccagcuaagaaaa

SEQ ID NO: 2537010 - RNA, 19 nt, Human
uagggauggggcugugggg

SEQ ID NO: 2537011 - RNA, 15 nt, Human
uagggaacucugggg

SEQ ID NO: 2537012 - RNA, 17 nt, Human
uagggaucccucaucug

SEQ ID NO: 2537013 - RNA, 20 nt, Human
uagggcaccagggguuucuc

SEQ ID NO: 2537014 - RNA, 15 nt, Human
uagggcaccaggggu

SEQ ID NO: 2537015 - RNA, 16 nt, Human
uagggauucaggcugc

SEQ ID NO: 2537016 - RNA, 18 nt, Human
uagggauguucuggcccu

SEQ ID NO: 2537017 - RNA, 15 nt, Human
uagggauucaggcug

SEQ ID NO: 2537018 - RNA, 13 nt, Human
uagggaacucugg

SEQ ID NO: 2537019 - RNA, 18 nt, Human
uagggagggcggcagggg

SEQ ID NO: 2537020 - RNA, 13 nt, Human
uagggaagauaau

SEQ ID NO: 2537021 - RNA, 13 nt, Human
uagggaaaacauu

SEQ ID NO: 2537022 - RNA, 13 nt, Human
uaggcauucugga

SEQ ID NO: 2537023 - RNA, 16 nt, Human
uagggaaaacauucca

SEQ ID NO: 2537024 - RNA, 18 nt, Human
uagggaaaacauuccauc

SEQ ID NO: 2537025 - RNA, 13 nt, Human
uagggaaagaaag

SEQ ID NO: 2537026 - RNA, 16 nt, Human
uagggaaaaguucaua

SEQ ID NO: 2537027 - RNA, 13 nt, Human
uagggaaaugaaa

SEQ ID NO: 2537028 - RNA, 16 nt, Human
uagggaaaugaaagaa

SEQ ID NO: 2537029 - RNA, 23 nt, Human
uaggggagggguugccacaggcc

SEQ ID NO: 2537030 - RNA, 23 nt, Human
uaggggacacuucccucuguuuc

SEQ ID NO: 2537031 - RNA, 13 nt, Human
uaggggagcaggg

SEQ ID NO: 2537032 - RNA, 16 nt, Human
uagggggaacucuagc

SEQ ID NO: 2537033 - RNA, 16 nt, Human
uagggguaauauauug

SEQ ID NO: 2537034 - RNA, 23 nt, Human
uagggguaauauauugcugcugg

SEQ ID NO: 2537035 - RNA, 17 nt, Human
uaggggucaggcuccau

SEQ ID NO: 2537036 - RNA, 14 nt, Human
uaggggucaaagaa

SEQ ID NO: 2537037 - RNA, 13 nt, Human
uagggguugcuaa

SEQ ID NO: 2537038 - RNA, 15 nt, Human
uagggccaggcaggu

SEQ ID NO: 2537039 - RNA, 21 nt, Human
uagggccaggcaggugccugg

SEQ ID NO: 2537040 - RNA, 21 nt, Human
uagggccuggucccugggagg

SEQ ID NO: 2537041 - RNA, 23 nt, Human
uagggcuacaaaaccugauguua

SEQ ID NO: 2537042 - RNA, 14 nt, Human
uagggcuguaaaau

SEQ ID NO: 2537043 - RNA, 14 nt, Human
uagggcuggaccua

SEQ ID NO: 2537044 - RNA, 14 nt, Human
uagggccaggcagg

SEQ ID NO: 2537045 - RNA, 11 nt, Human
uagggccaggc

SEQ ID NO: 2537046 - RNA, 23 nt, Human
uagggccaagcccagcacugcuu

SEQ ID NO: 2537047 - RNA, 16 nt, Human
uagggccaagcccagc

SEQ ID NO: 2537048 - RNA, 18 nt, Human
uagggcauuugagaaaug

SEQ ID NO: 2537049 - RNA, 13 nt, Human
uagggcagcuugc

SEQ ID NO: 2537050 - RNA, 11 nt, Human
uagggcagcuu

SEQ ID NO: 2537051 - RNA, 19 nt, Human
uagggcauaaugaugaugg

SEQ ID NO: 2537052 - RNA, 15 nt, Human
uagggcagcuugccc

SEQ ID NO: 2537053 - RNA, 19 nt, Human
uagggcaguaacauugggu

SEQ ID NO: 2537054 - RNA, 18 nt, Human
uagcuaaacggauuccaa

SEQ ID NO: 2537055 - RNA, 19 nt, Human
uagcuaaacggauuccaaa

SEQ ID NO: 2537056 - RNA, 20 nt, Human
uagcuaaacggauuccaaag

SEQ ID NO: 2537057 - RNA, 23 nt, Human
uagcuaacauuuuaaauaaaaga

SEQ ID NO: 2537058 - RNA, 20 nt, Human
uagcuaacauuuuaaauaaa

SEQ ID NO: 2537059 - RNA, 20 nt, Human
uagcuaagaaauaaaacugu

SEQ ID NO: 2537060 - RNA, 19 nt, Human
uagcuugauaaagggccaa

SEQ ID NO: 2537061 - RNA, 22 nt, Human
uagcuucugcuuuucugcccug

SEQ ID NO: 2537062 - RNA, 19 nt, Human
uagcuugaaggaucuguuu

SEQ ID NO: 2537063 - RNA, 16 nt, Human
uagcuucugcuuuucu

SEQ ID NO: 2537064 - RNA, 15 nt, Human
uagcuucugcuuuuc

SEQ ID NO: 2537065 - RNA, 13 nt, Human
uagcuucugcuuu

SEQ ID NO: 2537066 - RNA, 21 nt, Human
uagcuucuaccaugaacagaa

SEQ ID NO: 2537067 - RNA, 19 nt, Human
uagcuaagcggaccagccu

SEQ ID NO: 2537068 - RNA, 12 nt, Human
uagcuuccauga

SEQ ID NO: 2537069 - RNA, 21 nt, Human
uagcuucaccccaaucccagc

SEQ ID NO: 2537070 - RNA, 14 nt, Human
uagcuuuacccuca

SEQ ID NO: 2537071 - RNA, 15 nt, Human
uagcuuuacccucag

SEQ ID NO: 2537072 - RNA, 19 nt, Human
uagcuuuacuguuuguuau

SEQ ID NO: 2537073 - RNA, 18 nt, Human
uagcuuuagacccugggu

SEQ ID NO: 2537074 - RNA, 17 nt, Human
uagcuuuagacccuggg

SEQ ID NO: 2537075 - RNA, 16 nt, Human
uagcuuuagacccugg

SEQ ID NO: 2537076 - RNA, 14 nt, Human
uagcuuuauucuuc

SEQ ID NO: 2537077 - RNA, 13 nt, Human
uagcuuuauucuu

SEQ ID NO: 2537078 - RNA, 18 nt, Human
uagcuuuauuuuuuaagu

SEQ ID NO: 2537079 - RNA, 15 nt, Human
uagcuuguucccugu

SEQ ID NO: 2537080 - RNA, 19 nt, Human
uagcuuguauaguguaaaa

SEQ ID NO: 2537081 - RNA, 17 nt, Human
uagcuuguauaguguaa

SEQ ID NO: 2537082 - RNA, 13 nt, Human
uagcuuguauagu

SEQ ID NO: 2537083 - RNA, 18 nt, Human
uagcuugggacaaaucaa

SEQ ID NO: 2537084 - RNA, 15 nt, Human
uagcuugggacaaau

SEQ ID NO: 2537085 - RNA, 19 nt, Human
uagcuugggaggcuucccc

SEQ ID NO: 2537086 - RNA, 19 nt, Human
uagcuugcgcauucucaug

SEQ ID NO: 2537087 - RNA, 17 nt, Human
uagcuugcgcauucuca

SEQ ID NO: 2537088 - RNA, 20 nt, Human
uagcuuggaaacuggaugag

SEQ ID NO: 2537089 - RNA, 15 nt, Human
uagcuuggaaacugg

SEQ ID NO: 2537090 - RNA, 16 nt, Human
uagcuuugcucugcca

SEQ ID NO: 2537091 - RNA, 14 nt, Human
uagcuuugcucugc

SEQ ID NO: 2537092 - RNA, 11 nt, Human
uagcuuugcuc

SEQ ID NO: 2537093 - RNA, 17 nt, Human
uagcuuucaauuccgua

SEQ ID NO: 2537094 - RNA, 23 nt, Human
uagcuuucaauuccguagccagc

SEQ ID NO: 2537095 - RNA, 19 nt, Human
uagcuuucccaaauaaacu

SEQ ID NO: 2537096 - RNA, 15 nt, Human
uagcuuuauucuuca

SEQ ID NO: 2537097 - RNA, 15 nt, Human
uagcuuucaauuccg

SEQ ID NO: 2537098 - RNA, 22 nt, Human
uagcuuuauuuuuuaaguauuu

SEQ ID NO: 2537099 - RNA, 19 nt, Human
uagcuuuauuuuuuaagua

SEQ ID NO: 2537100 - RNA, 20 nt, Human
uagcuuuauuuuuuaaguau

SEQ ID NO: 2537101 - RNA, 14 nt, Human
uagcuuuuauugua

SEQ ID NO: 2537102 - RNA, 15 nt, Human
uagcuuugcucuuug

SEQ ID NO: 2537103 - RNA, 18 nt, Human
uagcuuuuauuguauaaa

SEQ ID NO: 2537104 - RNA, 13 nt, Human
uagcuuuucccuu

SEQ ID NO: 2537105 - RNA, 14 nt, Human
uaggaaaaacugau

SEQ ID NO: 2537106 - RNA, 13 nt, Human
uaggaaaaacuga

SEQ ID NO: 2537107 - RNA, 16 nt, Human
uagcuuuuuaauuguu

SEQ ID NO: 2537108 - RNA, 15 nt, Human
uagcuuuuuaauugu

SEQ ID NO: 2537109 - RNA, 14 nt, Human
uagcuuuuuaauug

SEQ ID NO: 2537110 - RNA, 17 nt, Human
uagcgcccaguugggug

SEQ ID NO: 2537111 - RNA, 21 nt, Human
uagcgcugccgcaccccagag

SEQ ID NO: 2537112 - RNA, 22 nt, Human
uagcgcugccgcaccccagagu

SEQ ID NO: 2537113 - RNA, 14 nt, Human
uagcgcccaguugg

SEQ ID NO: 2537114 - RNA, 20 nt, Human
uagccuuauccucugaucuc

SEQ ID NO: 2537115 - RNA, 18 nt, Human
uagccuuauccucugauc

SEQ ID NO: 2537116 - RNA, 17 nt, Human
uagccuuauccucugau

SEQ ID NO: 2537117 - RNA, 16 nt, Human
uagccuuauccucuga

SEQ ID NO: 2537118 - RNA, 20 nt, Human
uagccuuccguaacccaacu

SEQ ID NO: 2537119 - RNA, 21 nt, Human
uagccuuagaagucacacagu

SEQ ID NO: 2537120 - RNA, 15 nt, Human
uagccuuauccucug

SEQ ID NO: 2537121 - RNA, 17 nt, Human
acaauauuuuguggcuu

SEQ ID NO: 2537122 - RNA, 16 nt, Human
acaauauuuaaaauuu

SEQ ID NO: 2537123 - RNA, 14 nt, Human
acaaucaaaggaaa

SEQ ID NO: 2537124 - RNA, 19 nt, Human
acaaucaaaggaaaauagu

SEQ ID NO: 2537125 - RNA, 23 nt, Human
acaaucaacucuaauagugcuua

SEQ ID NO: 2537126 - RNA, 20 nt, Human
uagccuuagaagucacacag

SEQ ID NO: 2537127 - RNA, 22 nt, Human
acaaucagcuccuuccuggaga

SEQ ID NO: 2537128 - RNA, 18 nt, Human
acaaucagcuccuuccug

SEQ ID NO: 2537129 - RNA, 19 nt, Human
acaaucagccacauucuag

SEQ ID NO: 2537130 - RNA, 14 nt, Human
acaauauuguuucu

SEQ ID NO: 2537131 - RNA, 15 nt, Human
acaauauuguuucua

SEQ ID NO: 2537132 - RNA, 10 nt, Human
acaauauuua

SEQ ID NO: 2537133 - RNA, 18 nt, Human
acaauauugacuuugucu

SEQ ID NO: 2537134 - RNA, 13 nt, Human
acaauauuuaaaa

SEQ ID NO: 2537135 - RNA, 14 nt, Human
acaauauuuaaaau

SEQ ID NO: 2537136 - RNA, 18 nt, Human
acaauauuuaaaauuuau

SEQ ID NO: 2537137 - RNA, 21 nt, Human
acaaaucuaugccacucagaa

SEQ ID NO: 2537138 - RNA, 21 nt, Human
acaaaucucaagcaaacagcu

SEQ ID NO: 2537139 - RNA, 15 nt, Human
acaaaucuaugccac

SEQ ID NO: 2537140 - RNA, 14 nt, Human
acaaaucuaugcca

SEQ ID NO: 2537141 - RNA, 18 nt, Human
acaaugcaaaccaucauu

SEQ ID NO: 2537142 - RNA, 17 nt, Human
acaaugcaaaccaucau

SEQ ID NO: 2537143 - RNA, 16 nt, Human
acaaugcaaaccauca

SEQ ID NO: 2537144 - RNA, 11 nt, Human
acaaugcaaac

SEQ ID NO: 2537145 - RNA, 20 nt, Human
acaaugacuuacuguacaug

SEQ ID NO: 2537146 - RNA, 19 nt, Human
acaaugacuuacuguacau

SEQ ID NO: 2537147 - RNA, 22 nt, Human
acaaugacuuacuguacaugaa

SEQ ID NO: 2537148 - RNA, 15 nt, Human
acaaugauauaugga

SEQ ID NO: 2537149 - RNA, 13 nt, Human
acaaugacuuuau

SEQ ID NO: 2537150 - RNA, 14 nt, Human
acaaugacuuuauu

SEQ ID NO: 2537151 - RNA, 15 nt, Human
uagggugggccuuca

SEQ ID NO: 2537152 - RNA, 16 nt, Human
uaggguggagagccac

SEQ ID NO: 2537153 - RNA, 12 nt, Human
uaggguggcccu

SEQ ID NO: 2537154 - RNA, 15 nt, Human
uaggguuauaauaau

SEQ ID NO: 2537155 - RNA, 21 nt, Human
uaggguuuaauccccaguaaa

SEQ ID NO: 2537156 - RNA, 19 nt, Human
uaggguuuaauccccagua

SEQ ID NO: 2537157 - RNA, 12 nt, Human
uaggguuuaauc

SEQ ID NO: 2537158 - RNA, 17 nt, Human
uaggguuauaauaaugu

SEQ ID NO: 2537159 - RNA, 13 nt, Human
uaggguccugggg

SEQ ID NO: 2537160 - RNA, 15 nt, Human
uagggucggaaccca

SEQ ID NO: 2537161 - RNA, 15 nt, Human
uagggucucuucagg

SEQ ID NO: 2537162 - RNA, 19 nt, Human
uaggguaagugagagaggg

SEQ ID NO: 2537163 - RNA, 15 nt, Human
uaggguaaggugccu

SEQ ID NO: 2537164 - RNA, 18 nt, Human
uaggguaaggugccuucu

SEQ ID NO: 2537165 - RNA, 15 nt, Human
acacacacacacagc

SEQ ID NO: 2537166 - RNA, 16 nt, Human
acacacacacacagcc

SEQ ID NO: 2537167 - RNA, 14 nt, Human
acacacacacacau

SEQ ID NO: 2537168 - RNA, 15 nt, Human
acacacacacacaug

SEQ ID NO: 2537169 - RNA, 16 nt, Human
acacacacacacaugc

SEQ ID NO: 2537170 - RNA, 17 nt, Human
acacacacacacaugca

SEQ ID NO: 2537171 - RNA, 12 nt, Human
acacacacacag

SEQ ID NO: 2537172 - RNA, 13 nt, Human
acacacacacagc

SEQ ID NO: 2537173 - RNA, 13 nt, Human
acacacacacaug

SEQ ID NO: 2537174 - RNA, 14 nt, Human
acacacacacaugc

SEQ ID NO: 2537175 - RNA, 14 nt, Human
acacacacacagga

SEQ ID NO: 2537176 - RNA, 14 nt, Human
acacacacacagcc

SEQ ID NO: 2537177 - RNA, 15 nt, Human
acacacacacagcca

SEQ ID NO: 2537178 - RNA, 12 nt, Human
acacacacacau

SEQ ID NO: 2537179 - RNA, 15 nt, Human
acacacacacacagg

SEQ ID NO: 2537180 - RNA, 13 nt, Human
acacacacacagg

SEQ ID NO: 2537181 - RNA, 19 nt, Human
acacaaggauagaugcugg

SEQ ID NO: 2537182 - RNA, 23 nt, Human
acacaaggauagaugcuggccca

SEQ ID NO: 2537183 - RNA, 22 nt, Human
acacaagcuuuuuuacacaaau

SEQ ID NO: 2537184 - RNA, 13 nt, Human
acacaaguaaaca

SEQ ID NO: 2537185 - RNA, 15 nt, Human
acacaagcuggaagc

SEQ ID NO: 2537186 - RNA, 14 nt, Human
acacaagcuggaag

SEQ ID NO: 2537187 - RNA, 19 nt, Human
acacaagccacagaagcca

SEQ ID NO: 2537188 - RNA, 16 nt, Human
acacaagccacagaag

SEQ ID NO: 2537189 - RNA, 15 nt, Human
acacaagccacagaa

SEQ ID NO: 2537190 - RNA, 14 nt, Human
acacaagccacaga

SEQ ID NO: 2537191 - RNA, 16 nt, Human
acacaaguccugugaa

SEQ ID NO: 2537192 - RNA, 15 nt, Human
acacaaguccuguga

SEQ ID NO: 2537193 - RNA, 14 nt, Human
acacaaguaaacau

SEQ ID NO: 2537194 - RNA, 12 nt, Human
acacaauacaau

SEQ ID NO: 2537195 - RNA, 14 nt, Human
acacacacacacag

SEQ ID NO: 2537196 - RNA, 16 nt, Human
acacacacacacacag

SEQ ID NO: 2537197 - RNA, 14 nt, Human
acacaaaugcaggg

SEQ ID NO: 2537198 - RNA, 13 nt, Human
acacaacuauauu

SEQ ID NO: 2537199 - RNA, 13 nt, Human
acacaagccacag

SEQ ID NO: 2537200 - RNA, 13 nt, Human
acacaacacacac

SEQ ID NO: 2537201 - RNA, 21 nt, Human
acaaugcaaaccaucauugaa

SEQ ID NO: 2537202 - RNA, 19 nt, Human
acaaugcaaaccaucauug

SEQ ID NO: 2537203 - RNA, 23 nt, Human
acaaugcaaaccaucauugaaau

SEQ ID NO: 2537204 - RNA, 14 nt, Human
uagucacugagaca

SEQ ID NO: 2537205 - RNA, 23 nt, Human
uagucacauggccuaugcacaua

SEQ ID NO: 2537206 - RNA, 13 nt, Human
uaguagagacggg

SEQ ID NO: 2537207 - RNA, 22 nt, Human
uaguagagacaggguuuugcca

SEQ ID NO: 2537208 - RNA, 15 nt, Human
uaguagagacagggu

SEQ ID NO: 2537209 - RNA, 15 nt, Human
uaguaaucacaguug

SEQ ID NO: 2537210 - RNA, 20 nt, Human
uaguaaugcuacgugugauu

SEQ ID NO: 2537211 - RNA, 12 nt, Human
uaguaaucauau

SEQ ID NO: 2537212 - RNA, 14 nt, Human
uaguagagacaggg

SEQ ID NO: 2537213 - RNA, 15 nt, Human
uaguaauucucaggc

SEQ ID NO: 2537214 - RNA, 14 nt, Human
uaguaauucucagg

SEQ ID NO: 2537215 - RNA, 14 nt, Human
uaguaauugacaug

SEQ ID NO: 2537216 - RNA, 22 nt, Human
uaguaaugcuacgugugauuuu

SEQ ID NO: 2537217 - RNA, 21 nt, Human
uaguaaugcuacgugugauuu

SEQ ID NO: 2537218 - RNA, 15 nt, Human
uaguaauguuuuaua

SEQ ID NO: 2537219 - RNA, 16 nt, Human
acacagguucacgugc

SEQ ID NO: 2537220 - RNA, 14 nt, Human
acacaggucuuucc

SEQ ID NO: 2537221 - RNA, 16 nt, Human
acacaggucuuuccua

SEQ ID NO: 2537222 - RNA, 18 nt, Human
acacagggacuugaaguu

SEQ ID NO: 2537223 - RNA, 15 nt, Human
acacagggacuugaa

SEQ ID NO: 2537224 - RNA, 11 nt, Human
acacagggcag

SEQ ID NO: 2537225 - RNA, 23 nt, Human
uagguuuuguuugcuaucuuaau

SEQ ID NO: 2537226 - RNA, 21 nt, Human
uagguuuuguuugcuaucuua

SEQ ID NO: 2537227 - RNA, 16 nt, Human
uagguuuuguuugcua

SEQ ID NO: 2537228 - RNA, 15 nt, Human
acacaggucuuuccu

SEQ ID NO: 2537229 - RNA, 16 nt, Human
uaguaaaaauaaaauu

SEQ ID NO: 2537230 - RNA, 13 nt, Human
uaguaaaaauaaa

SEQ ID NO: 2537231 - RNA, 15 nt, Human
uagguuuuuguuugu

SEQ ID NO: 2537232 - RNA, 15 nt, Human
uagguuuuuauuagu

SEQ ID NO: 2537233 - RNA, 15 nt, Human
uagguuuuuuuguau

SEQ ID NO: 2537234 - RNA, 19 nt, Human
uagguuuuuuuguauagua

SEQ ID NO: 2537235 - RNA, 14 nt, Human
uaguaaucacaguu

SEQ ID NO: 2537236 - RNA, 16 nt, Human
uaguaaaaauuaaaaa

SEQ ID NO: 2537237 - RNA, 13 nt, Human
uaguaaaaauuaa

SEQ ID NO: 2537238 - RNA, 20 nt, Human
uagguuuuuuuccuucugaa

SEQ ID NO: 2537239 - RNA, 15 nt, Human
uaguaaaaauacaaa

SEQ ID NO: 2537240 - RNA, 18 nt, Human
acacaggcccggcuccag

SEQ ID NO: 2537241 - RNA, 17 nt, Human
acacaggcccggcucca

SEQ ID NO: 2537242 - RNA, 16 nt, Human
acacaggcccggcucc

SEQ ID NO: 2537243 - RNA, 11 nt, Human
acacacagcca

SEQ ID NO: 2537244 - RNA, 12 nt, Human
acacacagccac

SEQ ID NO: 2537245 - RNA, 21 nt, Human
acacaggcaacugaggcagac

SEQ ID NO: 2537246 - RNA, 13 nt, Human
acacacagaaaau

SEQ ID NO: 2537247 - RNA, 14 nt, Human
acacacagaaaaua

SEQ ID NO: 2537248 - RNA, 15 nt, Human
acacacagaaaauau

SEQ ID NO: 2537249 - RNA, 16 nt, Human
acacacagaaaauaua

SEQ ID NO: 2537250 - RNA, 17 nt, Human
acacacagaaaauauac

SEQ ID NO: 2537251 - RNA, 18 nt, Human
acacacagaaaauauacu

SEQ ID NO: 2537252 - RNA, 19 nt, Human
acacacagaaaauauacug

SEQ ID NO: 2537253 - RNA, 20 nt, Human
acacacagaaaauauacugu

SEQ ID NO: 2537254 - RNA, 21 nt, Human
acacacagaaaauauacugua

SEQ ID NO: 2537255 - RNA, 22 nt, Human
acacacagaaaauauacuguaa

SEQ ID NO: 2537256 - RNA, 13 nt, Human
acacacagacaca

SEQ ID NO: 2537257 - RNA, 23 nt, Human
acacacagauuugagcucagccc

SEQ ID NO: 2537258 - RNA, 22 nt, Human
acacacagaggaagagcaggca

SEQ ID NO: 2537259 - RNA, 13 nt, Human
acacacagaggaa

SEQ ID NO: 2537260 - RNA, 22 nt, Human
acacaggcccggcuccaggcuc

SEQ ID NO: 2537261 - RNA, 21 nt, Human
acacaggcccggcuccaggcu

SEQ ID NO: 2537262 - RNA, 20 nt, Human
acacaggcccggcuccaggc

SEQ ID NO: 2537263 - RNA, 19 nt, Human
acacaggcccggcuccagg

SEQ ID NO: 2537264 - RNA, 24 nt, Human
acacaggcccggcuccaggcuccu

SEQ ID NO: 2537265 - RNA, 23 nt, Human
acacaggcccggcuccaggcucc

SEQ ID NO: 2537266 - RNA, 13 nt, Human
acacaggcccucc

SEQ ID NO: 2537267 - RNA, 16 nt, Human
acacaggcccucccug

SEQ ID NO: 2537268 - RNA, 14 nt, Human
acacagggacuuga

SEQ ID NO: 2537269 - RNA, 12 nt, Human
acaaaauaaaca

SEQ ID NO: 2537270 - RNA, 14 nt, Human
acaaaauaaacaaa

SEQ ID NO: 2537271 - RNA, 22 nt, Human
acaaaaguuucauccuuuucau

SEQ ID NO: 2537272 - RNA, 15 nt, Human
acaaaacuacaugag

SEQ ID NO: 2537273 - RNA, 21 nt, Human
acaaaaggguuuaaacugauu

SEQ ID NO: 2537274 - RNA, 23 nt, Human
acaaaacacucggcauuucaaau

SEQ ID NO: 2537275 - RNA, 17 nt, Human
acaaaacaacccuagag

SEQ ID NO: 2537276 - RNA, 12 nt, Human
acaaaacaaaug

SEQ ID NO: 2537277 - RNA, 14 nt, Human
acaaaaauuaggua

SEQ ID NO: 2537278 - RNA, 12 nt, Human
acaaaaauaaca

SEQ ID NO: 2537279 - RNA, 13 nt, Human
acaaaaauauaaa

SEQ ID NO: 2537280 - RNA, 19 nt, Human
acaaaaaugaacugaaguu

SEQ ID NO: 2537281 - RNA, 22 nt, Human
acaaaaaugaaagcaugucuca

SEQ ID NO: 2537282 - RNA, 18 nt, Human
acaaaaaguuuccauaug

SEQ ID NO: 2537283 - RNA, 20 nt, Human
acaaaaagguucucaggugu

SEQ ID NO: 2537284 - RNA, 22 nt, Human
acaaaaagguaaaacuuuuuau

SEQ ID NO: 2537285 - RNA, 21 nt, Human
acaaaaauguaaugaucauaa

SEQ ID NO: 2537286 - RNA, 23 nt, Human
acaaaaaugaacugaaguuucac

SEQ ID NO: 2537287 - RNA, 14 nt, Human
acaaaaauuaaaau

SEQ ID NO: 2537288 - RNA, 19 nt, Human
acaaaaauucucaguucuc

SEQ ID NO: 2537289 - RNA, 15 nt, Human
acaaaaauugacuca

SEQ ID NO: 2537290 - RNA, 16 nt, Human
aauuuuaauauuuuau

SEQ ID NO: 2537291 - RNA, 12 nt, Human
aauuuuacauuu

SEQ ID NO: 2537292 - RNA, 13 nt, Human
acaaaaacacagc

SEQ ID NO: 2537293 - RNA, 21 nt, Human
aauuuuacccuuuagacugua

SEQ ID NO: 2537294 - RNA, 17 nt, Human
aauuuuacccuuuagac

SEQ ID NO: 2537295 - RNA, 15 nt, Human
acaaaaaacuccccu

SEQ ID NO: 2537296 - RNA, 18 nt, Human
aauuuuacccuuuagacu

SEQ ID NO: 2537297 - RNA, 14 nt, Human
acaaaaacacagca

SEQ ID NO: 2537298 - RNA, 15 nt, Human
acaaaaacacagcaa

SEQ ID NO: 2537299 - RNA, 14 nt, Human
acaaaaagcuuccc

SEQ ID NO: 2537300 - RNA, 15 nt, Human
acaaaaagcuucccc

SEQ ID NO: 2537301 - RNA, 14 nt, Human
uagagccugaggga

SEQ ID NO: 2537302 - RNA, 21 nt, Human
uagagccaggcacacacugug

SEQ ID NO: 2537303 - RNA, 14 nt, Human
uagagccagggucu

SEQ ID NO: 2537304 - RNA, 17 nt, Human
acaaauacucaugugua

SEQ ID NO: 2537305 - RNA, 16 nt, Human
acaaauacucaugugu

SEQ ID NO: 2537306 - RNA, 15 nt, Human
acaaauacucaugug

SEQ ID NO: 2537307 - RNA, 14 nt, Human
acaaauacucaugu

SEQ ID NO: 2537308 - RNA, 17 nt, Human
acaaauacucuuaggaa

SEQ ID NO: 2537309 - RNA, 15 nt, Human
acaaauacucuuagg

SEQ ID NO: 2537310 - RNA, 18 nt, Human
acaaauacucauguguau

SEQ ID NO: 2537311 - RNA, 23 nt, Human
acaaauacucuuaggaagagaaa

SEQ ID NO: 2537312 - RNA, 22 nt, Human
uagagcggagaaaggaagggcu

SEQ ID NO: 2537313 - RNA, 16 nt, Human
uagagccugccuggag

SEQ ID NO: 2537314 - RNA, 13 nt, Human
uagagccugccug

SEQ ID NO: 2537315 - RNA, 12 nt, Human
uagagccugccu

SEQ ID NO: 2537316 - RNA, 18 nt, Human
uagagccugccuggagcg

SEQ ID NO: 2537317 - RNA, 17 nt, Human
uagagccugccuggagc

SEQ ID NO: 2537318 - RNA, 16 nt, Human
uagaggcuuccuucau

SEQ ID NO: 2537319 - RNA, 17 nt, Human
uagaggcuuccuucauu

SEQ ID NO: 2537320 - RNA, 18 nt, Human
uagaggcuuccuucauuu

SEQ ID NO: 2537321 - RNA, 19 nt, Human
uagaggcuuccuucauuuc

SEQ ID NO: 2537322 - RNA, 23 nt, Human
uagaggccugaggaugagcugga

SEQ ID NO: 2537323 - RNA, 15 nt, Human
uagaggccugaggau

SEQ ID NO: 2537324 - RNA, 12 nt, Human
uagaggccugag

SEQ ID NO: 2537325 - RNA, 14 nt, Human
acaaaguaauuccu

SEQ ID NO: 2537326 - RNA, 21 nt, Human
acaaagguuuuccucuucuau

SEQ ID NO: 2537327 - RNA, 13 nt, Human
acaaauacucaug

SEQ ID NO: 2537328 - RNA, 16 nt, Human
acaaauaacaaugugc

SEQ ID NO: 2537329 - RNA, 16 nt, Human
acaaauaauaagcaaa

SEQ ID NO: 2537330 - RNA, 20 nt, Human
acaaaauccagcuaugaaua

SEQ ID NO: 2537331 - RNA, 18 nt, Human
acaaaauagaagcuguag

SEQ ID NO: 2537332 - RNA, 15 nt, Human
acaaaauagaagcug

SEQ ID NO: 2537333 - RNA, 12 nt, Human
acaaaauagaag

SEQ ID NO: 2537334 - RNA, 22 nt, Human
acaaaauaaccaauccuggaca

SEQ ID NO: 2537335 - RNA, 14 nt, Human
acaaaaucuccucu

SEQ ID NO: 2537336 - RNA, 19 nt, Human
acaaagguauaauuuuaug

SEQ ID NO: 2537337 - RNA, 24 nt, Human
acaaagguugagauguaaaaggua

SEQ ID NO: 2537338 - RNA, 19 nt, Human
acaaaaucgauuggcuuua

SEQ ID NO: 2537339 - RNA, 22 nt, Human
uagcacagacccugcccugugg

SEQ ID NO: 2537340 - RNA, 24 nt, Human
uagcacagacccugcccugugggc

SEQ ID NO: 2537341 - RNA, 13 nt, Human
uagcaccagggcu

SEQ ID NO: 2537342 - RNA, 13 nt, Human
uagcaccagggac

SEQ ID NO: 2537343 - RNA, 16 nt, Human
uagcacuaccacuccu

SEQ ID NO: 2537344 - RNA, 20 nt, Human
uagcacuaccacuccugcca

SEQ ID NO: 2537345 - RNA, 13 nt, Human
uagcacuggccug

SEQ ID NO: 2537346 - RNA, 13 nt, Human
uagcacugagcaa

SEQ ID NO: 2537347 - RNA, 20 nt, Human
uagccaaaugguuuaacuuc

SEQ ID NO: 2537348 - RNA, 21 nt, Human
uagccaacacccaucuguuuu

SEQ ID NO: 2537349 - RNA, 16 nt, Human
uagccaaacccuuguc

SEQ ID NO: 2537350 - RNA, 12 nt, Human
uagccaaggcca

SEQ ID NO: 2537351 - RNA, 15 nt, Human
uagcacuggccugca

SEQ ID NO: 2537352 - RNA, 18 nt, Human
uagccacccaccacacug

SEQ ID NO: 2537353 - RNA, 18 nt, Human
uagccaccgccuccuaca

SEQ ID NO: 2537354 - RNA, 16 nt, Human
uagccaccaucuuugc

SEQ ID NO: 2537355 - RNA, 14 nt, Human
uagccaccaucuuu

SEQ ID NO: 2537356 - RNA, 13 nt, Human
uagccaccaucuu

SEQ ID NO: 2537357 - RNA, 22 nt, Human
uagccaccaacucuugcagguc

SEQ ID NO: 2537358 - RNA, 21 nt, Human
uagccacauuuggaauacuuu

SEQ ID NO: 2537359 - RNA, 14 nt, Human
uagccaccaacucu

SEQ ID NO: 2537360 - RNA, 13 nt, Human
uagccaaggccaa

SEQ ID NO: 2537361 - RNA, 20 nt, Human
uagccacauuuggaauacuu

SEQ ID NO: 2537362 - RNA, 16 nt, Human
uagccacauuuggaau

SEQ ID NO: 2537363 - RNA, 22 nt, Human
acaaaucaagcuucaguuuccu

SEQ ID NO: 2537364 - RNA, 19 nt, Human
uagccaccgccuccuacag

SEQ ID NO: 2537365 - RNA, 19 nt, Human
uagccaccccagaaauggu

SEQ ID NO: 2537366 - RNA, 13 nt, Human
uagccacucagga

SEQ ID NO: 2537367 - RNA, 14 nt, Human
uagccacucaggag

SEQ ID NO: 2537368 - RNA, 16 nt, Human
uagccacuuaccuuca

SEQ ID NO: 2537369 - RNA, 17 nt, Human
uagccacuuaccuucaa

SEQ ID NO: 2537370 - RNA, 17 nt, Human
uagauuuuguuuugcuu

SEQ ID NO: 2537371 - RNA, 23 nt, Human
uagauuuuguuuugcuuuuucug

SEQ ID NO: 2537372 - RNA, 14 nt, Human
uagagggcccuggu

SEQ ID NO: 2537373 - RNA, 20 nt, Human
uagagggagguguuuaaaga

SEQ ID NO: 2537374 - RNA, 23 nt, Human
uagaggggggauuuccagccagg

SEQ ID NO: 2537375 - RNA, 13 nt, Human
uagaggguuccug

SEQ ID NO: 2537376 - RNA, 17 nt, Human
uagaggguuccuguaga

SEQ ID NO: 2537377 - RNA, 23 nt, Human
uagcaaaacgcauggagugugua

SEQ ID NO: 2537378 - RNA, 22 nt, Human
uagcaaaacgcauggagugugu

SEQ ID NO: 2537379 - RNA, 14 nt, Human
uagaggguguguaa

SEQ ID NO: 2537380 - RNA, 23 nt, Human
uagagggaggagaaugagccucg

SEQ ID NO: 2537381 - RNA, 13 nt, Human
uagagggaggggc

SEQ ID NO: 2537382 - RNA, 14 nt, Human
uagagggaggggcc

SEQ ID NO: 2537383 - RNA, 24 nt, Human
uagaggggaaaagagaugaugaaa

SEQ ID NO: 2537384 - RNA, 23 nt, Human
uagaggcuucuccgccagccucc

SEQ ID NO: 2537385 - RNA, 21 nt, Human
uagaggcuucuccgccagccu

SEQ ID NO: 2537386 - RNA, 20 nt, Human
uagaggcuucuccgccagcc

SEQ ID NO: 2537387 - RNA, 19 nt, Human
uagaggcuucuccgccagc

SEQ ID NO: 2537388 - RNA, 18 nt, Human
uagaggcuucuccgccag

SEQ ID NO: 2537389 - RNA, 14 nt, Human
uagaggcuucuccg

SEQ ID NO: 2537390 - RNA, 13 nt, Human
uagaggcuagcuu

SEQ ID NO: 2537391 - RNA, 15 nt, Human
uagagggaccucucc

SEQ ID NO: 2537392 - RNA, 19 nt, Human
uagagggaccucucccagg

SEQ ID NO: 2537393 - RNA, 22 nt, Human
uagaggcuucuccgccagccuc

SEQ ID NO: 2537394 - RNA, 20 nt, Human
uagagggaccucucccaggg

SEQ ID NO: 2537395 - RNA, 15 nt, Human
uagcaaacagaggaa

SEQ ID NO: 2537396 - RNA, 12 nt, Human
uagcaaacagag

SEQ ID NO: 2537397 - RNA, 21 nt, Human
uagcaaaauucuuaaguaugu

SEQ ID NO: 2537398 - RNA, 14 nt, Human
uagcaaacuuugua

SEQ ID NO: 2537399 - RNA, 18 nt, Human
uagcaaguuacagugaug

SEQ ID NO: 2537400 - RNA, 14 nt, Human
uagcacagacccug

SEQ ID NO: 2537401 - RNA, 21 nt, Human
uagcaaguucuagagaagagg

SEQ ID NO: 2537402 - RNA, 19 nt, Human
uagcaaguucuagagaaga

SEQ ID NO: 2537403 - RNA, 18 nt, Human
uagcaaguucuagagaag

SEQ ID NO: 2537404 - RNA, 17 nt, Human
uagcaaguucuagagaa

SEQ ID NO: 2537405 - RNA, 21 nt, Human
uagcaauccauguuaguuuuu

SEQ ID NO: 2537406 - RNA, 17 nt, Human
uagcaaucacaacacug

SEQ ID NO: 2537407 - RNA, 21 nt, Human
uagcacagacccugcccugug

SEQ ID NO: 2537408 - RNA, 20 nt, Human
uagcacagacccugcccugu

SEQ ID NO: 2537409 - RNA, 15 nt, Human
uagcacagacccugc

SEQ ID NO: 2537410 - RNA, 18 nt, Human
uagcacacacuuuugguu

SEQ ID NO: 2537411 - RNA, 19 nt, Human
uagacacauaugaggggga

SEQ ID NO: 2537412 - RNA, 13 nt, Human
uagacacacauga

SEQ ID NO: 2537413 - RNA, 18 nt, Human
uagacaauuuauuauggc

SEQ ID NO: 2537414 - RNA, 22 nt, Human
uagacacuggcugccagcuauu

SEQ ID NO: 2537415 - RNA, 19 nt, Human
uagacacuggcugccagcu

SEQ ID NO: 2537416 - RNA, 18 nt, Human
uagacacccauuuucaca

SEQ ID NO: 2537417 - RNA, 17 nt, Human
uagacacuggcugccag

SEQ ID NO: 2537418 - RNA, 17 nt, Human
uagacacccauuuucac

SEQ ID NO: 2537419 - RNA, 21 nt, Human
uagacacuccccgaagucuuu

SEQ ID NO: 2537420 - RNA, 16 nt, Human
uagacagucccugcca

SEQ ID NO: 2537421 - RNA, 10 nt, Human
uagacagagu

SEQ ID NO: 2537422 - RNA, 16 nt, Human
uagaagcuguaguagc

SEQ ID NO: 2537423 - RNA, 13 nt, Human
uagaagacauuua

SEQ ID NO: 2537424 - RNA, 17 nt, Human
uagaagcuggaggacua

SEQ ID NO: 2537425 - RNA, 15 nt, Human
uagaaggagacagag

SEQ ID NO: 2537426 - RNA, 17 nt, Human
uagaaggagacagagcu

SEQ ID NO: 2537427 - RNA, 23 nt, Human
uagaaggagacagagcugguugg

SEQ ID NO: 2537428 - RNA, 17 nt, Human
uagaaggauguacauuu

SEQ ID NO: 2537429 - RNA, 19 nt, Human
uagaaggccacaugucacc

SEQ ID NO: 2537430 - RNA, 11 nt, Human
uagaaggccac

SEQ ID NO: 2537431 - RNA, 21 nt, Human
uagaaggauguacauuuccaa

SEQ ID NO: 2537432 - RNA, 21 nt, Human
uagaaggucggaggcuuggga

SEQ ID NO: 2537433 - RNA, 20 nt, Human
uagaaguaggaagugaaaau

SEQ ID NO: 2537434 - RNA, 19 nt, Human
uagaagguucucuccuccc

SEQ ID NO: 2537435 - RNA, 16 nt, Human
uagaaggucggaggcu

SEQ ID NO: 2537436 - RNA, 16 nt, Human
uagaaggguuauauuu

SEQ ID NO: 2537437 - RNA, 19 nt, Human
uagaagggccaguccugcc

SEQ ID NO: 2537438 - RNA, 24 nt, Human
uagaagggcuagaaccuggagagc

SEQ ID NO: 2537439 - RNA, 22 nt, Human
uagaagggcuagaaccuggaga

SEQ ID NO: 2537440 - RNA, 22 nt, Human
uagaagggccaguccugccugg

SEQ ID NO: 2537441 - RNA, 13 nt, Human
uagaauuugauua

SEQ ID NO: 2537442 - RNA, 21 nt, Human
uagacaaauacucauguguau

SEQ ID NO: 2537443 - RNA, 20 nt, Human
uagacaaauacucaugugua

SEQ ID NO: 2537444 - RNA, 19 nt, Human
uagacaaauacucaugugu

SEQ ID NO: 2537445 - RNA, 18 nt, Human
uagacaaauacucaugug

SEQ ID NO: 2537446 - RNA, 17 nt, Human
uagacaaauacucaugu

SEQ ID NO: 2537447 - RNA, 16 nt, Human
uagacaaauacucaug

SEQ ID NO: 2537448 - RNA, 15 nt, Human
uagacaaauacucau

SEQ ID NO: 2537449 - RNA, 14 nt, Human
uagacaaauacuca

SEQ ID NO: 2537450 - RNA, 21 nt, Human
uagaauuuugguauaaagaaa

SEQ ID NO: 2537451 - RNA, 16 nt, Human
uagaauuuuaagugcu

SEQ ID NO: 2537452 - RNA, 21 nt, Human
uagacagucccugccaaugga

SEQ ID NO: 2537453 - RNA, 17 nt, Human
uagacagucccugccaa

SEQ ID NO: 2537454 - RNA, 13 nt, Human
uagacauaacaaa

SEQ ID NO: 2537455 - RNA, 18 nt, Human
uagacagucucacuuugu

SEQ ID NO: 2537456 - RNA, 23 nt, Human
uagacauuucucuuacugcaaau

SEQ ID NO: 2537457 - RNA, 21 nt, Human
uagacauuucucuuacugcaa

SEQ ID NO: 2537458 - RNA, 18 nt, Human
uagacauuucucuuacug

SEQ ID NO: 2537459 - RNA, 13 nt, Human
uagaccaaaauaa

SEQ ID NO: 2537460 - RNA, 14 nt, Human
uagaccaaaauaaa

SEQ ID NO: 2537461 - RNA, 14 nt, Human
uagaccaagcuugu

SEQ ID NO: 2537462 - RNA, 16 nt, Human
uagacauucugucgcc

SEQ ID NO: 2537463 - RNA, 13 nt, Human
uagacauucuguc

SEQ ID NO: 2537464 - RNA, 21 nt, Human
uagacauuugcuaugagcugg

SEQ ID NO: 2537465 - RNA, 19 nt, Human
uagacauuuguaaauguaa

SEQ ID NO: 2537466 - RNA, 14 nt, Human
aauuugugauacaa

SEQ ID NO: 2537467 - RNA, 18 nt, Human
aauuugggggaaaauuua

SEQ ID NO: 2537468 - RNA, 16 nt, Human
aauuuggauugcuaau

SEQ ID NO: 2537469 - RNA, 16 nt, Human
aauuugggagauauau

SEQ ID NO: 2537470 - RNA, 18 nt, Human
aauuuggccugcacuaau

SEQ ID NO: 2537471 - RNA, 17 nt, Human
aauuugugauacaaugc

SEQ ID NO: 2537472 - RNA, 18 nt, Human
aauuugugauacaaugcu

SEQ ID NO: 2537473 - RNA, 13 nt, Human
aauuuuaaugcua

SEQ ID NO: 2537474 - RNA, 16 nt, Human
aauuuuaaugaagaaa

SEQ ID NO: 2537475 - RNA, 13 nt, Human
aauuuuaauuuau

SEQ ID NO: 2537476 - RNA, 15 nt, Human
aauuuuaauuuauuu

SEQ ID NO: 2537477 - RNA, 19 nt, Human
aauuuuaagugcuuuguaa

SEQ ID NO: 2537478 - RNA, 16 nt, Human
aauuugucuugccuua

SEQ ID NO: 2537479 - RNA, 22 nt, Human
aauuuuaagugcuuuguaaugg

SEQ ID NO: 2537480 - RNA, 15 nt, Human
uagaaacacaacuau

SEQ ID NO: 2537481 - RNA, 18 nt, Human
uagaaacauaaauaaaau

SEQ ID NO: 2537482 - RNA, 14 nt, Human
uagaaacauaaaua

SEQ ID NO: 2537483 - RNA, 23 nt, Human
uagaaaauuuguuauuuugcaac

SEQ ID NO: 2537484 - RNA, 22 nt, Human
uagaaaauuuguuauuuugcaa

SEQ ID NO: 2537485 - RNA, 21 nt, Human
uagaaaaggcuagguacacag

SEQ ID NO: 2537486 - RNA, 21 nt, Human
uagaaaagaaaaaaaaaauau

SEQ ID NO: 2537487 - RNA, 21 nt, Human
uagaaaacugaaaaucuaaua

SEQ ID NO: 2537488 - RNA, 20 nt, Human
uagaaaacugaaaaucuaau

SEQ ID NO: 2537489 - RNA, 16 nt, Human
uagaaaacugaaaauc

SEQ ID NO: 2537490 - RNA, 15 nt, Human
uagaaaacugaaaau

SEQ ID NO: 2537491 - RNA, 22 nt, Human
uagaaaacugaaaaucuaauau

SEQ ID NO: 2537492 - RNA, 17 nt, Human
uagaacucccuuucaac

SEQ ID NO: 2537493 - RNA, 18 nt, Human
uagaacucccuuucaaca

SEQ ID NO: 2537494 - RNA, 15 nt, Human
uagaaaccuuaauau

SEQ ID NO: 2537495 - RNA, 14 nt, Human
uagaaaccuuaaua

SEQ ID NO: 2537496 - RNA, 23 nt, Human
uagaaacaugguuuugaaaugcu

SEQ ID NO: 2537497 - RNA, 15 nt, Human
uagaaacauugaaga

SEQ ID NO: 2537498 - RNA, 16 nt, Human
uagaacucccuuucaa

SEQ ID NO: 2537499 - RNA, 19 nt, Human
uagaaacucaccauguaaa

SEQ ID NO: 2537500 - RNA, 18 nt, Human
uagaagaacauccaagga

SEQ ID NO: 2537501 - RNA, 22 nt, Human
uagaagaacauccaaggagaaa

SEQ ID NO: 2537502 - RNA, 21 nt, Human
uagaagaauacaaacauauuu

SEQ ID NO: 2537503 - RNA, 14 nt, Human
uagaagaagugugu

SEQ ID NO: 2537504 - RNA, 12 nt, Human
uagaagaacugc

SEQ ID NO: 2537505 - RNA, 20 nt, Human
uacuuuggaauacauuucuc

SEQ ID NO: 2537506 - RNA, 22 nt, Human
uacuuugccuuuugcaaacuuu

SEQ ID NO: 2537507 - RNA, 20 nt, Human
uacuuugccuuuugcaaacu

SEQ ID NO: 2537508 - RNA, 19 nt, Human
uacuuugccuuuugcaaac

SEQ ID NO: 2537509 - RNA, 21 nt, Human
uacuuugccuuuccauaauca

SEQ ID NO: 2537510 - RNA, 17 nt, Human
uacuuugccuuuugcaa

SEQ ID NO: 2537511 - RNA, 23 nt, Human
aauucaugaacuucgcaucaaaa

SEQ ID NO: 2537512 - RNA, 22 nt, Human
uacuuuguacaaagaccacaca

SEQ ID NO: 2537513 - RNA, 20 nt, Human
aauuccacaccuuuuauuga

SEQ ID NO: 2537514 - RNA, 14 nt, Human
aauuccacagcugc

SEQ ID NO: 2537515 - RNA, 12 nt, Human
aauuccacagcu

SEQ ID NO: 2537516 - RNA, 13 nt, Human
aauuccacagcug

SEQ ID NO: 2537517 - RNA, 16 nt, Human
aauuccacaccuuuua

SEQ ID NO: 2537518 - RNA, 16 nt, Human
aauuccacacccucac

SEQ ID NO: 2537519 - RNA, 17 nt, Human
aauuccaauuauaugag

SEQ ID NO: 2537520 - RNA, 14 nt, Human
aauucaugaacuuc

SEQ ID NO: 2537521 - RNA, 11 nt, Human
aauucaugaac

SEQ ID NO: 2537522 - RNA, 14 nt, Human
aauucauguuucuu

SEQ ID NO: 2537523 - RNA, 16 nt, Human
uagaaaaacccugccc

SEQ ID NO: 2537524 - RNA, 14 nt, Human
uacuuuuuuucaca

SEQ ID NO: 2537525 - RNA, 20 nt, Human
uacuuuuuaaaaucuuuucu

SEQ ID NO: 2537526 - RNA, 16 nt, Human
uacuuuuucauucuuu

SEQ ID NO: 2537527 - RNA, 16 nt, Human
uagaaaacauaaucuu

SEQ ID NO: 2537528 - RNA, 13 nt, Human
uagaaaacugaaa

SEQ ID NO: 2537529 - RNA, 13 nt, Human
uagaaaaagcagu

SEQ ID NO: 2537530 - RNA, 22 nt, Human
uagaaaaacccugcccccaaau

SEQ ID NO: 2537531 - RNA, 17 nt, Human
uacuuuugcaugaaaau

SEQ ID NO: 2537532 - RNA, 15 nt, Human
uacuuuugcccuuug

SEQ ID NO: 2537533 - RNA, 14 nt, Human
uacuuuuuaaaugu

SEQ ID NO: 2537534 - RNA, 16 nt, Human
uacuuuuauaauaaaa

SEQ ID NO: 2537535 - RNA, 21 nt, Human
uacuuuuaaacuguguacaua

SEQ ID NO: 2537536 - RNA, 19 nt, Human
uacuuuuaugauguauauu

SEQ ID NO: 2537537 - RNA, 22 nt, Human
uacuuuuauaauaaaaggaaaa

SEQ ID NO: 2537538 - RNA, 19 nt, Human
acuacuagaugucuuuagg

SEQ ID NO: 2537539 - RNA, 23 nt, Human
acuagaaccuggagggcuagaac

SEQ ID NO: 2537540 - RNA, 15 nt, Human
acuagaaccuggagg

SEQ ID NO: 2537541 - RNA, 14 nt, Human
acuagaaccuggag

SEQ ID NO: 2537542 - RNA, 15 nt, Human
acuagaacacagaaa

SEQ ID NO: 2537543 - RNA, 15 nt, Human
acuagaaaucugcca

SEQ ID NO: 2537544 - RNA, 13 nt, Human
acuagaacucucc

SEQ ID NO: 2537545 - RNA, 15 nt, Human
acuagaacucuccau

SEQ ID NO: 2537546 - RNA, 13 nt, Human
acuaccugucaag

SEQ ID NO: 2537547 - RNA, 18 nt, Human
acuaccuugguuccccca

SEQ ID NO: 2537548 - RNA, 17 nt, Human
acuaccuugaaaauaag

SEQ ID NO: 2537549 - RNA, 18 nt, Human
acuacggaauaguuggcu

SEQ ID NO: 2537550 - RNA, 15 nt, Human
acuacguuaagggaa

SEQ ID NO: 2537551 - RNA, 15 nt, Human
acuacgugacugugg

SEQ ID NO: 2537552 - RNA, 21 nt, Human
acuagaauucuagugcugcug

SEQ ID NO: 2537553 - RNA, 20 nt, Human
acuagaauucuagugcugcu

SEQ ID NO: 2537554 - RNA, 19 nt, Human
acuagaauucuagugcugc

SEQ ID NO: 2537555 - RNA, 18 nt, Human
acuagaauucuagugcug

SEQ ID NO: 2537556 - RNA, 23 nt, Human
acuagaauucuagugcugcugaa

SEQ ID NO: 2537557 - RNA, 22 nt, Human
acuagaauucuagugcugcuga

SEQ ID NO: 2537558 - RNA, 15 nt, Human
acuagaauuuauuca

SEQ ID NO: 2537559 - RNA, 16 nt, Human
acuagaacucuccauc

SEQ ID NO: 2537560 - RNA, 14 nt, Human
acuagaagggccag

SEQ ID NO: 2537561 - RNA, 17 nt, Human
acuagaauucuagugcu

SEQ ID NO: 2537562 - RNA, 18 nt, Human
acuagaagaugaauacaa

SEQ ID NO: 2537563 - RNA, 23 nt, Human
acuagaagggccaguccugccug

SEQ ID NO: 2537564 - RNA, 13 nt, Human
acuagaagaugaa

SEQ ID NO: 2537565 - RNA, 20 nt, Human
acuagagggaccucucccag

SEQ ID NO: 2537566 - RNA, 21 nt, Human
acuagagggaccucucccagg

SEQ ID NO: 2537567 - RNA, 19 nt, Human
acuagagggaccucuccca

SEQ ID NO: 2537568 - RNA, 20 nt, Human
acuagaguuuagcuggaaaa

SEQ ID NO: 2537569 - RNA, 15 nt, Human
acuagagucugaaca

SEQ ID NO: 2537570 - RNA, 22 nt, Human
acuagagggaccucucccaggg

SEQ ID NO: 2537571 - RNA, 13 nt, Human
acguacacauuuu

SEQ ID NO: 2537572 - RNA, 14 nt, Human
acguacacauuuua

SEQ ID NO: 2537573 - RNA, 12 nt, Human
acguacacauuu

SEQ ID NO: 2537574 - RNA, 13 nt, Human
acguacacacaca

SEQ ID NO: 2537575 - RNA, 19 nt, Human
uccccacgcccuccccucc

SEQ ID NO: 2537576 - RNA, 18 nt, Human
uccccacgcccuccccuc

SEQ ID NO: 2537577 - RNA, 16 nt, Human
acggucgccaccuggc

SEQ ID NO: 2537578 - RNA, 21 nt, Human
acggucccacacuggugacug

SEQ ID NO: 2537579 - RNA, 20 nt, Human
acgguauuaugcuucuugga

SEQ ID NO: 2537580 - RNA, 22 nt, Human
uccccacggggccucgggaccu

SEQ ID NO: 2537581 - RNA, 20 nt, Human
uccccacggccgcuccaggg

SEQ ID NO: 2537582 - RNA, 19 nt, Human
uccccacggccgcuccagg

SEQ ID NO: 2537583 - RNA, 18 nt, Human
uccccacggccgcuccag

SEQ ID NO: 2537584 - RNA, 23 nt, Human
uccccacggggccucgggaccuc

SEQ ID NO: 2537585 - RNA, 22 nt, Human
uccccacucccuggcucucaga

SEQ ID NO: 2537586 - RNA, 20 nt, Human
uccccacugccuacugcauc

SEQ ID NO: 2537587 - RNA, 18 nt, Human
uccccacugccuacugca

SEQ ID NO: 2537588 - RNA, 15 nt, Human
uccccacugccuacu

SEQ ID NO: 2537589 - RNA, 16 nt, Human
uccccacugacagccu

SEQ ID NO: 2537590 - RNA, 19 nt, Human
uccccacugacagccuccc

SEQ ID NO: 2537591 - RNA, 14 nt, Human
uccccacugccugc

SEQ ID NO: 2537592 - RNA, 18 nt, Human
uccccacugccugcccac

SEQ ID NO: 2537593 - RNA, 20 nt, Human
uccccacugccugcccaccc

SEQ ID NO: 2537594 - RNA, 22 nt, Human
uccccacugccugcccacccgu

SEQ ID NO: 2537595 - RNA, 14 nt, Human
uccccaguaaaauu

SEQ ID NO: 2537596 - RNA, 22 nt, Human
uccccagguggcugacccaguc

SEQ ID NO: 2537597 - RNA, 15 nt, Human
uccccaguaaaauug

SEQ ID NO: 2537598 - RNA, 17 nt, Human
uccccaguuugcagaaa

SEQ ID NO: 2537599 - RNA, 14 nt, Human
uccccaucauccca

SEQ ID NO: 2537600 - RNA, 16 nt, Human
uccccauccuccagcu

SEQ ID NO: 2537601 - RNA, 15 nt, Human
uccccauccuccagc

SEQ ID NO: 2537602 - RNA, 14 nt, Human
uccccauccuccag

SEQ ID NO: 2537603 - RNA, 18 nt, Human
uccccaucaucuguggaa

SEQ ID NO: 2537604 - RNA, 19 nt, Human
uccccaucaucccagcugc

SEQ ID NO: 2537605 - RNA, 17 nt, Human
uccccaucaucccagcu

SEQ ID NO: 2537606 - RNA, 16 nt, Human
uccccaucaucccagc

SEQ ID NO: 2537607 - RNA, 18 nt, Human
uccccauccuccagcuuc

SEQ ID NO: 2537608 - RNA, 17 nt, Human
uccccauccuccagcuu

SEQ ID NO: 2537609 - RNA, 19 nt, Human
uccccauccuccagcuucu

SEQ ID NO: 2537610 - RNA, 13 nt, Human
ucccccagacuuu

SEQ ID NO: 2537611 - RNA, 14 nt, Human
ucccccacugccau

SEQ ID NO: 2537612 - RNA, 22 nt, Human
ucccccacuccucuuauuugcu

SEQ ID NO: 2537613 - RNA, 19 nt, Human
ucccccacccccuccccgc

SEQ ID NO: 2537614 - RNA, 20 nt, Human
ucccccacccccuccccagg

SEQ ID NO: 2537615 - RNA, 21 nt, Human
ucccccacccccuccccaggg

SEQ ID NO: 2537616 - RNA, 14 nt, Human
uccccaucuggguc

SEQ ID NO: 2537617 - RNA, 22 nt, Human
ucccccaacccccaccccacac

SEQ ID NO: 2537618 - RNA, 17 nt, Human
ucccccaaccucagacu

SEQ ID NO: 2537619 - RNA, 18 nt, Human
ucccccacccccucccca

SEQ ID NO: 2537620 - RNA, 19 nt, Human
ucccccacccccuccccag

SEQ ID NO: 2537621 - RNA, 22 nt, Human
ucccccaccagcuaaggacauu

SEQ ID NO: 2537622 - RNA, 13 nt, Human
acuauucaaacag

SEQ ID NO: 2537623 - RNA, 14 nt, Human
acuauucaaacagu

SEQ ID NO: 2537624 - RNA, 16 nt, Human
acuauucaaacagucu

SEQ ID NO: 2537625 - RNA, 18 nt, Human
acuauucaaacagucuca

SEQ ID NO: 2537626 - RNA, 13 nt, Human
acuauguugauaa

SEQ ID NO: 2537627 - RNA, 12 nt, Human
acuauguaucaa

SEQ ID NO: 2537628 - RNA, 21 nt, Human
acuauggugccaauggaaccu

SEQ ID NO: 2537629 - RNA, 20 nt, Human
acuauggugccaauggaacc

SEQ ID NO: 2537630 - RNA, 14 nt, Human
acuauggugccaau

SEQ ID NO: 2537631 - RNA, 14 nt, Human
acuauguaacaugu

SEQ ID NO: 2537632 - RNA, 21 nt, Human
acuagagucugaacagcugua

SEQ ID NO: 2537633 - RNA, 20 nt, Human
acuagagucugaacagcugu

SEQ ID NO: 2537634 - RNA, 12 nt, Human
acuauaauguaa

SEQ ID NO: 2537635 - RNA, 13 nt, Human
acuauaauguaag

SEQ ID NO: 2537636 - RNA, 14 nt, Human
acuauaauguaagc

SEQ ID NO: 2537637 - RNA, 21 nt, Human
acuaugcauggugccccagga

SEQ ID NO: 2537638 - RNA, 22 nt, Human
acuaugcauggugccccaggac

SEQ ID NO: 2537639 - RNA, 23 nt, Human
acuaugcauggugccccaggacc

SEQ ID NO: 2537640 - RNA, 24 nt, Human
acuaugcauggugccccaggacca

SEQ ID NO: 2537641 - RNA, 16 nt, Human
acuaugauuuggaaaa

SEQ ID NO: 2537642 - RNA, 20 nt, Human
acuaugcauggugccccagg

SEQ ID NO: 2537643 - RNA, 15 nt, Human
acuaugacugcuccc

SEQ ID NO: 2537644 - RNA, 16 nt, Human
acuaugcacaauuuaa

SEQ ID NO: 2537645 - RNA, 15 nt, Human
acuaugauuuggaaa

SEQ ID NO: 2537646 - RNA, 21 nt, Human
acuauaauguaagcucuacug

SEQ ID NO: 2537647 - RNA, 14 nt, Human
uccccucugcugcu

SEQ ID NO: 2537648 - RNA, 13 nt, Human
uccccucugcugc

SEQ ID NO: 2537649 - RNA, 19 nt, Human
uccccucucuugcacccgc

SEQ ID NO: 2537650 - RNA, 17 nt, Human
uccccucucuugcaccc

SEQ ID NO: 2537651 - RNA, 17 nt, Human
uccccucugcugcuguc

SEQ ID NO: 2537652 - RNA, 15 nt, Human
uccccucugcugcug

SEQ ID NO: 2537653 - RNA, 20 nt, Human
uccccucugcugcugucccu

SEQ ID NO: 2537654 - RNA, 14 nt, Human
uccccuccuucucc

SEQ ID NO: 2537655 - RNA, 18 nt, Human
uccccuccuucucccuuu

SEQ ID NO: 2537656 - RNA, 20 nt, Human
uccccgugccccgccucccc

SEQ ID NO: 2537657 - RNA, 12 nt, Human
uccccuccuugc

SEQ ID NO: 2537658 - RNA, 18 nt, Human
uccccuccuugccuccug

SEQ ID NO: 2537659 - RNA, 20 nt, Human
uccccuccuugccuccugug

SEQ ID NO: 2537660 - RNA, 16 nt, Human
uccccucuccuuccug

SEQ ID NO: 2537661 - RNA, 14 nt, Human
uccccucucugcac

SEQ ID NO: 2537662 - RNA, 14 nt, Human
uccccuaaccucau

SEQ ID NO: 2537663 - RNA, 13 nt, Human
uccccggccucag

SEQ ID NO: 2537664 - RNA, 12 nt, Human
uccccggccuca

SEQ ID NO: 2537665 - RNA, 21 nt, Human
uccccggcccuaccagcgccc

SEQ ID NO: 2537666 - RNA, 17 nt, Human
uccccggcccuaccagc

SEQ ID NO: 2537667 - RNA, 13 nt, Human
uccccggcucgag

SEQ ID NO: 2537668 - RNA, 13 nt, Human
uccccguggucuc

SEQ ID NO: 2537669 - RNA, 22 nt, Human
uccccggucccuugagaccuca

SEQ ID NO: 2537670 - RNA, 22 nt, Human
acucaauauuuuccaugaaaau

SEQ ID NO: 2537671 - RNA, 21 nt, Human
acucaauauuuuccaugaaaa

SEQ ID NO: 2537672 - RNA, 18 nt, Human
acucaauauuuuccauga

SEQ ID NO: 2537673 - RNA, 15 nt, Human
acucaauauuuucca

SEQ ID NO: 2537674 - RNA, 15 nt, Human
acucaauaaaaucau

SEQ ID NO: 2537675 - RNA, 18 nt, Human
acucaauaaaaucaugua

SEQ ID NO: 2537676 - RNA, 12 nt, Human
acucaauauuuu

SEQ ID NO: 2537677 - RNA, 23 nt, Human
acucaagugucucaguccaccug

SEQ ID NO: 2537678 - RNA, 14 nt, Human
acucaaugcacuga

SEQ ID NO: 2537679 - RNA, 19 nt, Human
acucacauggcuauguuuu

SEQ ID NO: 2537680 - RNA, 16 nt, Human
acucacauggcuaugu

SEQ ID NO: 2537681 - RNA, 14 nt, Human
acucaaugagcucu

SEQ ID NO: 2537682 - RNA, 23 nt, Human
acucaaucuccccuugcacuaaa

SEQ ID NO: 2537683 - RNA, 23 nt, Human
acucaauauuuuccaugaaaaug

SEQ ID NO: 2537684 - RNA, 20 nt, Human
acucacauuuauucugcuca

SEQ ID NO: 2537685 - RNA, 19 nt, Human
acucacauuuauucugcuc

SEQ ID NO: 2537686 - RNA, 18 nt, Human
uccccgcuucugccugca

SEQ ID NO: 2537687 - RNA, 15 nt, Human
uccccggaguucagu

SEQ ID NO: 2537688 - RNA, 15 nt, Human
uccccggcccuacca

SEQ ID NO: 2537689 - RNA, 20 nt, Human
acucacauggcuauguuuua

SEQ ID NO: 2537690 - RNA, 18 nt, Human
ucccucagucuggcccuu

SEQ ID NO: 2537691 - RNA, 21 nt, Human
uccccucuugccccaaccccc

SEQ ID NO: 2537692 - RNA, 20 nt, Human
uccccucucuugcacccgcc

SEQ ID NO: 2537693 - RNA, 15 nt, Human
uccccucuugcccca

SEQ ID NO: 2537694 - RNA, 22 nt, Human
ucccucaccuuggcaccagaca

SEQ ID NO: 2537695 - RNA, 21 nt, Human
ucccucaccuuggcaccagac

SEQ ID NO: 2537696 - RNA, 12 nt, Human
uccccugaggcu

SEQ ID NO: 2537697 - RNA, 21 nt, Human
uccccugauuacaccagccuc

SEQ ID NO: 2537698 - RNA, 14 nt, Human
uccccugcacugga

SEQ ID NO: 2537699 - RNA, 20 nt, Human
ucccucagucuggcccuucc

SEQ ID NO: 2537700 - RNA, 14 nt, Human
ucccucagccccuc

SEQ ID NO: 2537701 - RNA, 15 nt, Human
ucccucagccccucu

SEQ ID NO: 2537702 - RNA, 16 nt, Human
ucccucagccccucuu

SEQ ID NO: 2537703 - RNA, 17 nt, Human
ucccucagccccucuug

SEQ ID NO: 2537704 - RNA, 11 nt, Human
ucccucuuucc

SEQ ID NO: 2537705 - RNA, 13 nt, Human
ucccucuuucccu

SEQ ID NO: 2537706 - RNA, 22 nt, Human
ucccuccccuggggacagcaag

SEQ ID NO: 2537707 - RNA, 19 nt, Human
ucccucuucucaagugccu

SEQ ID NO: 2537708 - RNA, 14 nt, Human
ucccucuucucaag

SEQ ID NO: 2537709 - RNA, 15 nt, Human
ucccuccccugcccu

SEQ ID NO: 2537710 - RNA, 16 nt, Human
ucccuccccugcccug

SEQ ID NO: 2537711 - RNA, 17 nt, Human
ucccuccccugcccugg

SEQ ID NO: 2537712 - RNA, 19 nt, Human
ucccuccccugcccugguc

SEQ ID NO: 2537713 - RNA, 23 nt, Human
ucccucauuucaggagcagccuc

SEQ ID NO: 2537714 - RNA, 19 nt, Human
ucccucauuucaggagcag

SEQ ID NO: 2537715 - RNA, 15 nt, Human
ucccucauuucagga

SEQ ID NO: 2537716 - RNA, 12 nt, Human
ucccuccccccc

SEQ ID NO: 2537717 - RNA, 14 nt, Human
ucccucccccccau

SEQ ID NO: 2537718 - RNA, 16 nt, Human
ucccucccccccaugc

SEQ ID NO: 2537719 - RNA, 12 nt, Human
ucccucccccuu

SEQ ID NO: 2537720 - RNA, 21 nt, Human
ucccucccccccaugcacugu

SEQ ID NO: 2537721 - RNA, 14 nt, Human
ucccucccccuugu

SEQ ID NO: 2537722 - RNA, 13 nt, Human
ucccuccccugcc

SEQ ID NO: 2537723 - RNA, 16 nt, Human
ucccuccccugccauu

SEQ ID NO: 2537724 - RNA, 14 nt, Human
ucccuccccugccc

SEQ ID NO: 2537725 - RNA, 22 nt, Human
ucccugaaggccccgcccaggc

SEQ ID NO: 2537726 - RNA, 21 nt, Human
ucccugaaggccccgcccagg

SEQ ID NO: 2537727 - RNA, 18 nt, Human
ucccugaaggccccgccc

SEQ ID NO: 2537728 - RNA, 19 nt, Human
ucccugaagccagccuucu

SEQ ID NO: 2537729 - RNA, 18 nt, Human
ucccugaagccagccuuc

SEQ ID NO: 2537730 - RNA, 17 nt, Human
ucccugaagccagccuu

SEQ ID NO: 2537731 - RNA, 16 nt, Human
ucccugaagccagccu

SEQ ID NO: 2537732 - RNA, 17 nt, Human
ucccugaaggccccgcc

SEQ ID NO: 2537733 - RNA, 23 nt, Human
ucccucuuuggcuccccuguacc

SEQ ID NO: 2537734 - RNA, 13 nt, Human
ucccucuuggucu

SEQ ID NO: 2537735 - RNA, 17 nt, Human
ucccucuucucaagugc

SEQ ID NO: 2537736 - RNA, 18 nt, Human
ucccucuuuggcuccccu

SEQ ID NO: 2537737 - RNA, 17 nt, Human
ucccucuuggucuuccc

SEQ ID NO: 2537738 - RNA, 15 nt, Human
ucccugaagccagcc

SEQ ID NO: 2537739 - RNA, 12 nt, Human
ucccugaagcca

SEQ ID NO: 2537740 - RNA, 17 nt, Human
ucccugaacugggaccu

SEQ ID NO: 2537741 - RNA, 16 nt, Human
ucccugaacugggacc

SEQ ID NO: 2537742 - RNA, 15 nt, Human
ucccugaacugggac

SEQ ID NO: 2537743 - RNA, 14 nt, Human
ucccugaacuggga

SEQ ID NO: 2537744 - RNA, 15 nt, Human
ucccugaaccauccc

SEQ ID NO: 2537745 - RNA, 15 nt, Human
ucccugaaaacccag

SEQ ID NO: 2537746 - RNA, 16 nt, Human
ucccugaaaacccaga

SEQ ID NO: 2537747 - RNA, 17 nt, Human
ucccugaaaacccagag

SEQ ID NO: 2537748 - RNA, 18 nt, Human
ucccugaaaacccagaga

SEQ ID NO: 2537749 - RNA, 19 nt, Human
ucccugaaaacccagagag

SEQ ID NO: 2537750 - RNA, 20 nt, Human
ucccugaaaacccagagagg

SEQ ID NO: 2537751 - RNA, 17 nt, Human
ucccugaaaauguuuuu

SEQ ID NO: 2537752 - RNA, 17 nt, Human
acucaccccagccccaa

SEQ ID NO: 2537753 - RNA, 18 nt, Human
acucacccccaaggggca

SEQ ID NO: 2537754 - RNA, 17 nt, Human
acucaccgaagccacuu

SEQ ID NO: 2537755 - RNA, 19 nt, Human
acucaccccggcagacgcc

SEQ ID NO: 2537756 - RNA, 16 nt, Human
acucaccuaauguuua

SEQ ID NO: 2537757 - RNA, 17 nt, Human
acucaccuaauguuuau

SEQ ID NO: 2537758 - RNA, 19 nt, Human
acucaccucccccaucucu

SEQ ID NO: 2537759 - RNA, 20 nt, Human
acucaccucccccaucucuu

SEQ ID NO: 2537760 - RNA, 11 nt, Human
acucaccucug

SEQ ID NO: 2537761 - RNA, 13 nt, Human
acucaccucugcc

SEQ ID NO: 2537762 - RNA, 14 nt, Human
acucaccucugccu

SEQ ID NO: 2537763 - RNA, 15 nt, Human
acucaccucugccuc

SEQ ID NO: 2537764 - RNA, 20 nt, Human
acucaccuaauguuuaugag

SEQ ID NO: 2537765 - RNA, 23 nt, Human
acucaccuaauguuuaugagcca

SEQ ID NO: 2537766 - RNA, 16 nt, Human
acucaccucuaaaaca

SEQ ID NO: 2537767 - RNA, 16 nt, Human
ucccugacucauucug

SEQ ID NO: 2537768 - RNA, 19 nt, Human
ucccugacucauucugaag

SEQ ID NO: 2537769 - RNA, 14 nt, Human
ucccugacucauuc

SEQ ID NO: 2537770 - RNA, 21 nt, Human
ucccugaccucccucuaauuu

SEQ ID NO: 2537771 - RNA, 17 nt, Human
ucccugaccucccucua

SEQ ID NO: 2537772 - RNA, 16 nt, Human
ucccugaccucccucu

SEQ ID NO: 2537773 - RNA, 22 nt, Human
ucccugacccuguauauagccc

SEQ ID NO: 2537774 - RNA, 17 nt, Human
ucccugacccuguauau

SEQ ID NO: 2537775 - RNA, 23 nt, Human
ucccugaaggccccgcccaggcu

SEQ ID NO: 2537776 - RNA, 22 nt, Human
ucccugacacugcggggcuugg

SEQ ID NO: 2537777 - RNA, 16 nt, Human
ucccugacacugcggg

SEQ ID NO: 2537778 - RNA, 21 nt, Human
ucccugaaucccccuugccac

SEQ ID NO: 2537779 - RNA, 14 nt, Human
ucccugacccgucu

SEQ ID NO: 2537780 - RNA, 23 nt, Human
ucccugacacugcggggcuuggc

SEQ ID NO: 2537781 - RNA, 16 nt, Human
ucccugacccuguaua

SEQ ID NO: 2537782 - RNA, 23 nt, Human
acucaucuagguaaauuacaguu

SEQ ID NO: 2537783 - RNA, 17 nt, Human
acucagaucacuacugc

SEQ ID NO: 2537784 - RNA, 16 nt, Human
acucagaucacuacug

SEQ ID NO: 2537785 - RNA, 15 nt, Human
acucagaucacuacu

SEQ ID NO: 2537786 - RNA, 19 nt, Human
acucagaucacuacugcag

SEQ ID NO: 2537787 - RNA, 18 nt, Human
acucagaucacuacugca

SEQ ID NO: 2537788 - RNA, 20 nt, Human
acucagaucacuacugcagu

SEQ ID NO: 2537789 - RNA, 14 nt, Human
acucagagggagga

SEQ ID NO: 2537790 - RNA, 18 nt, Human
acucagacauuggcaccu

SEQ ID NO: 2537791 - RNA, 12 nt, Human
acucagaccuga

SEQ ID NO: 2537792 - RNA, 19 nt, Human
acucagacaggaaagggaa

SEQ ID NO: 2537793 - RNA, 17 nt, Human
acucauugaccugaggc

SEQ ID NO: 2537794 - RNA, 16 nt, Human
acucauugaccugagg

SEQ ID NO: 2537795 - RNA, 21 nt, Human
acucaucuagguaaauuacag

SEQ ID NO: 2537796 - RNA, 12 nt, Human
acucaucuuagg

SEQ ID NO: 2537797 - RNA, 22 nt, Human
acucauugaccugaggcccuuc

SEQ ID NO: 2537798 - RNA, 18 nt, Human
acucauugaccugaggcc

SEQ ID NO: 2537799 - RNA, 21 nt, Human
acucaucuuucauuaaaggcu

SEQ ID NO: 2537800 - RNA, 19 nt, Human
acucaucuuacuguaccug

SEQ ID NO: 2537801 - RNA, 18 nt, Human
acucaucuuagugccuga

SEQ ID NO: 2537802 - RNA, 22 nt, Human
acucaucuuagugccugagagu

SEQ ID NO: 2537803 - RNA, 16 nt, Human
acucauuuuuuuaauu

SEQ ID NO: 2537804 - RNA, 19 nt, Human
acucauuuuuuuaauuuau

SEQ ID NO: 2537805 - RNA, 13 nt, Human
acuccaaaauguu

SEQ ID NO: 2537806 - RNA, 21 nt, Human
acuccaaacugacucuuaaga

SEQ ID NO: 2537807 - RNA, 14 nt, Human
acuccaccaagccu

SEQ ID NO: 2537808 - RNA, 14 nt, Human
acuccaccacccaa

SEQ ID NO: 2537809 - RNA, 15 nt, Human
acuccacccauccua

SEQ ID NO: 2537810 - RNA, 13 nt, Human
acuccaccaccca

SEQ ID NO: 2537811 - RNA, 22 nt, Human
acuccaaaauguuggucauuuu

SEQ ID NO: 2537812 - RNA, 21 nt, Human
acuccaaaccuccuguuagcu

SEQ ID NO: 2537813 - RNA, 17 nt, Human
acuccacaucugccuua

SEQ ID NO: 2537814 - RNA, 15 nt, Human
acuccaccaacccau

SEQ ID NO: 2537815 - RNA, 20 nt, Human
acuccaccaacccaucagaa

SEQ ID NO: 2537816 - RNA, 17 nt, Human
acucagaagacacugau

SEQ ID NO: 2537817 - RNA, 16 nt, Human
acucagaagacacuga

SEQ ID NO: 2537818 - RNA, 15 nt, Human
acucagaagacacug

SEQ ID NO: 2537819 - RNA, 14 nt, Human
acucagaagacacu

SEQ ID NO: 2537820 - RNA, 19 nt, Human
acucaccugccccucaacu

SEQ ID NO: 2537821 - RNA, 14 nt, Human
acucaccugccccu

SEQ ID NO: 2537822 - RNA, 21 nt, Human
acucaccugccccucaacucu

SEQ ID NO: 2537823 - RNA, 16 nt, Human
acucaccucugccuca

SEQ ID NO: 2537824 - RNA, 17 nt, Human
acucaccucugccucaa

SEQ ID NO: 2537825 - RNA, 14 nt, Human
acucagaaauuuuu

SEQ ID NO: 2537826 - RNA, 21 nt, Human
acucagaaauuuaauucaugu

SEQ ID NO: 2537827 - RNA, 12 nt, Human
acucagaagccu

SEQ ID NO: 2537828 - RNA, 15 nt, Human
acucagaagccucug

SEQ ID NO: 2537829 - RNA, 16 nt, Human
acucagaagccucugg

SEQ ID NO: 2537830 - RNA, 20 nt, Human
acucagaagccucuggguca

SEQ ID NO: 2537831 - RNA, 18 nt, Human
acucagaagacacugaug

SEQ ID NO: 2537832 - RNA, 13 nt, Human
acucagaagccug

SEQ ID NO: 2537833 - RNA, 14 nt, Human
acucagaagccuga

SEQ ID NO: 2537834 - RNA, 15 nt, Human
acucagaagccugag

SEQ ID NO: 2537835 - RNA, 16 nt, Human
acucagaagccugagg

SEQ ID NO: 2537836 - RNA, 17 nt, Human
acucagaagccugaggc

SEQ ID NO: 2537837 - RNA, 18 nt, Human
acucagaagccugaggcu

SEQ ID NO: 2537838 - RNA, 21 nt, Human
acucagaauucucuaguuuga

SEQ ID NO: 2537839 - RNA, 22 nt, Human
acucagaauucucuaguuugau

SEQ ID NO: 2537840 - RNA, 14 nt, Human
acucagaauucucu

SEQ ID NO: 2537841 - RNA, 14 nt, Human
acucagaauauugc

SEQ ID NO: 2537842 - RNA, 19 nt, Human
uccucucuuuguucucagc

SEQ ID NO: 2537843 - RNA, 17 nt, Human
uccucucuuuguucuca

SEQ ID NO: 2537844 - RNA, 15 nt, Human
uccucucuuuguucu

SEQ ID NO: 2537845 - RNA, 11 nt, Human
uccucucugcc

SEQ ID NO: 2537846 - RNA, 21 nt, Human
uccucucuuuguucucagcuc

SEQ ID NO: 2537847 - RNA, 20 nt, Human
uccucucuuuguucucagcu

SEQ ID NO: 2537848 - RNA, 15 nt, Human
uccucugacucaggg

SEQ ID NO: 2537849 - RNA, 16 nt, Human
uccucugacucagggc

SEQ ID NO: 2537850 - RNA, 17 nt, Human
uccucugacucagggcu

SEQ ID NO: 2537851 - RNA, 12 nt, Human
uccucugagccu

SEQ ID NO: 2537852 - RNA, 13 nt, Human
uccucugagccuu

SEQ ID NO: 2537853 - RNA, 17 nt, Human
uccucugagccuuggga

SEQ ID NO: 2537854 - RNA, 12 nt, Human
uccucucugccc

SEQ ID NO: 2537855 - RNA, 13 nt, Human
uccucucugcccu

SEQ ID NO: 2537856 - RNA, 14 nt, Human
uccucucugcccua

SEQ ID NO: 2537857 - RNA, 15 nt, Human
uccucucugcccuaa

SEQ ID NO: 2537858 - RNA, 14 nt, Human
uccucucuccagau

SEQ ID NO: 2537859 - RNA, 16 nt, Human
uccucucucuguguua

SEQ ID NO: 2537860 - RNA, 19 nt, Human
uccucucuccagauguuuc

SEQ ID NO: 2537861 - RNA, 16 nt, Human
uccucuccuggaggau

SEQ ID NO: 2537862 - RNA, 15 nt, Human
uccucuccuggagga

SEQ ID NO: 2537863 - RNA, 16 nt, Human
uccucucccauccccc

SEQ ID NO: 2537864 - RNA, 15 nt, Human
uccucucccaucccc

SEQ ID NO: 2537865 - RNA, 14 nt, Human
uccucucccauccc

SEQ ID NO: 2537866 - RNA, 13 nt, Human
uccucucccaucc

SEQ ID NO: 2537867 - RNA, 15 nt, Human
uccucuccaggcacc

SEQ ID NO: 2537868 - RNA, 14 nt, Human
uccucuccaggcac

SEQ ID NO: 2537869 - RNA, 12 nt, Human
uccucuccaggc

SEQ ID NO: 2537870 - RNA, 11 nt, Human
uccucuccagg

SEQ ID NO: 2537871 - RNA, 20 nt, Human
uccucucccaucccccugcc

SEQ ID NO: 2537872 - RNA, 19 nt, Human
uccucucccaucccccugc

SEQ ID NO: 2537873 - RNA, 18 nt, Human
uccucucccaucccccug

SEQ ID NO: 2537874 - RNA, 17 nt, Human
uccucucccaucccccu

SEQ ID NO: 2537875 - RNA, 23 nt, Human
uccucucccaucccccugcccuc

SEQ ID NO: 2537876 - RNA, 22 nt, Human
uccucucccaucccccugcccu

SEQ ID NO: 2537877 - RNA, 18 nt, Human
uccucucccauugucccu

SEQ ID NO: 2537878 - RNA, 19 nt, Human
uccucucccauugucccuc

SEQ ID NO: 2537879 - RNA, 14 nt, Human
uccucccuucugcu

SEQ ID NO: 2537880 - RNA, 15 nt, Human
uccucccuucugcua

SEQ ID NO: 2537881 - RNA, 16 nt, Human
uccucccuucugcuac

SEQ ID NO: 2537882 - RNA, 17 nt, Human
uccucccuucugcuacu

SEQ ID NO: 2537883 - RNA, 20 nt, Human
uccucccuuggguucugaua

SEQ ID NO: 2537884 - RNA, 19 nt, Human
uccucccuuggguucugau

SEQ ID NO: 2537885 - RNA, 18 nt, Human
uccucccuucugcuacug

SEQ ID NO: 2537886 - RNA, 18 nt, Human
uccucuccacugccuucg

SEQ ID NO: 2537887 - RNA, 17 nt, Human
uccucuccacugccuuc

SEQ ID NO: 2537888 - RNA, 17 nt, Human
uccucuccccaugaugu

SEQ ID NO: 2537889 - RNA, 21 nt, Human
uccucuccccagcccagagac

SEQ ID NO: 2537890 - RNA, 23 nt, Human
uccucuccccagcccagagacau

SEQ ID NO: 2537891 - RNA, 20 nt, Human
uccucucccauugucccucu

SEQ ID NO: 2537892 - RNA, 22 nt, Human
uccucucccauugucccucugc

SEQ ID NO: 2537893 - RNA, 20 nt, Human
uccucuccccagcccagaga

SEQ ID NO: 2537894 - RNA, 23 nt, Human
uccucucccauugucccucugcc

SEQ ID NO: 2537895 - RNA, 14 nt, Human
uccucuccuggagg

SEQ ID NO: 2537896 - RNA, 13 nt, Human
uccucuccuggag

SEQ ID NO: 2537897 - RNA, 12 nt, Human
uccucuccugga

SEQ ID NO: 2537898 - RNA, 18 nt, Human
uccucuccccuaccacug

SEQ ID NO: 2537899 - RNA, 17 nt, Human
uccucuccccuaccacu

SEQ ID NO: 2537900 - RNA, 11 nt, Human
uccucuccccu

SEQ ID NO: 2537901 - RNA, 17 nt, Human
uccucuccccucuaagg

SEQ ID NO: 2537902 - RNA, 19 nt, Human
uccucuccccucuaaggcc

SEQ ID NO: 2537903 - RNA, 20 nt, Human
uccucuccgcaguuccuguc

SEQ ID NO: 2537904 - RNA, 19 nt, Human
acucuucuugaaauuuuaa

SEQ ID NO: 2537905 - RNA, 21 nt, Human
uccuccccaaaucaauacacu

SEQ ID NO: 2537906 - RNA, 16 nt, Human
uccuccccaaaucaau

SEQ ID NO: 2537907 - RNA, 21 nt, Human
uccucccaccucagccucccg

SEQ ID NO: 2537908 - RNA, 13 nt, Human
uccucccccugcc

SEQ ID NO: 2537909 - RNA, 16 nt, Human
uccuccccagcaggug

SEQ ID NO: 2537910 - RNA, 14 nt, Human
uccucccccugcca

SEQ ID NO: 2537911 - RNA, 15 nt, Human
uccucccccugccag

SEQ ID NO: 2537912 - RNA, 17 nt, Human
uccucccccugccagug

SEQ ID NO: 2537913 - RNA, 20 nt, Human
uccucccccugccagugccu

SEQ ID NO: 2537914 - RNA, 23 nt, Human
uccucccccugccagugccuuac

SEQ ID NO: 2537915 - RNA, 19 nt, Human
uccuccccaaggagacaca

SEQ ID NO: 2537916 - RNA, 21 nt, Human
uccuccccacuuguccgcugg

SEQ ID NO: 2537917 - RNA, 10 nt, Human
uccuccccag

SEQ ID NO: 2537918 - RNA, 13 nt, Human
uccuccccagcag

SEQ ID NO: 2537919 - RNA, 22 nt, Human
uccuccccauuagagucagccu

SEQ ID NO: 2537920 - RNA, 18 nt, Human
uccucccuuccuuuuccc

SEQ ID NO: 2537921 - RNA, 17 nt, Human
uccucccuuccuuuucc

SEQ ID NO: 2537922 - RNA, 13 nt, Human
uccucccuuccuu

SEQ ID NO: 2537923 - RNA, 21 nt, Human
uccucccuuccuuuucccugc

SEQ ID NO: 2537924 - RNA, 19 nt, Human
uccucccuuccuuuucccu

SEQ ID NO: 2537925 - RNA, 22 nt, Human
uccucccuuccuuuucccugcu

SEQ ID NO: 2537926 - RNA, 13 nt, Human
uccucccuucugc

SEQ ID NO: 2537927 - RNA, 14 nt, Human
uccucccuuagcuc

SEQ ID NO: 2537928 - RNA, 10 nt, Human
uccucccuuc

SEQ ID NO: 2537929 - RNA, 19 nt, Human
uccucccugggcagaaagu

SEQ ID NO: 2537930 - RNA, 22 nt, Human
uccucccuggcugcccuggccc

SEQ ID NO: 2537931 - RNA, 21 nt, Human
uccucccuggcugcccuggcc

SEQ ID NO: 2537932 - RNA, 19 nt, Human
uccucccuggcugcccugg

SEQ ID NO: 2537933 - RNA, 18 nt, Human
uccucccuggcugcccug

SEQ ID NO: 2537934 - RNA, 17 nt, Human
uccucccuggcugcccu

SEQ ID NO: 2537935 - RNA, 12 nt, Human
uccucccuggcu

SEQ ID NO: 2537936 - RNA, 23 nt, Human
uccuccccucacagccucugacc

SEQ ID NO: 2537937 - RNA, 22 nt, Human
uccucccugcaucugaccagca

SEQ ID NO: 2537938 - RNA, 21 nt, Human
uccuccccucacagccucuga

SEQ ID NO: 2537939 - RNA, 19 nt, Human
uccuccccucacagccucu

SEQ ID NO: 2537940 - RNA, 18 nt, Human
uccuccccucacagccuc

SEQ ID NO: 2537941 - RNA, 17 nt, Human
uccuccccucacagccu

SEQ ID NO: 2537942 - RNA, 14 nt, Human
uccuccccucacag

SEQ ID NO: 2537943 - RNA, 16 nt, Human
uccuccccucacagcc

SEQ ID NO: 2537944 - RNA, 24 nt, Human
uccucccccugccagugccuuacc

SEQ ID NO: 2537945 - RNA, 20 nt, Human
uccucccaccucagccuccc

SEQ ID NO: 2537946 - RNA, 18 nt, Human
uccucccaccucagccuc

SEQ ID NO: 2537947 - RNA, 16 nt, Human
uccucccaccucagcc

SEQ ID NO: 2537948 - RNA, 15 nt, Human
uccucccaccucagc

SEQ ID NO: 2537949 - RNA, 19 nt, Human
acucuugaaaaaugcaugu

SEQ ID NO: 2537950 - RNA, 14 nt, Human
acucuugaaaaaug

SEQ ID NO: 2537951 - RNA, 14 nt, Human
uccucccaccucag

SEQ ID NO: 2537952 - RNA, 13 nt, Human
uccucccaccuca

SEQ ID NO: 2537953 - RNA, 17 nt, Human
uccugacccaggccgca

SEQ ID NO: 2537954 - RNA, 16 nt, Human
uccugacccaggccgc

SEQ ID NO: 2537955 - RNA, 15 nt, Human
uccugacccaggccg

SEQ ID NO: 2537956 - RNA, 14 nt, Human
uccugacccaggcc

SEQ ID NO: 2537957 - RNA, 13 nt, Human
uccugacccaggc

SEQ ID NO: 2537958 - RNA, 12 nt, Human
uccugacccagg

SEQ ID NO: 2537959 - RNA, 20 nt, Human
uccugaccacccuccccucu

SEQ ID NO: 2537960 - RNA, 18 nt, Human
uccugaagcugaggcuca

SEQ ID NO: 2537961 - RNA, 13 nt, Human
uccugaagcugag

SEQ ID NO: 2537962 - RNA, 19 nt, Human
uccugaccacccuccccuc

SEQ ID NO: 2537963 - RNA, 23 nt, Human
uccugaagaggcgggccagccag

SEQ ID NO: 2537964 - RNA, 22 nt, Human
uccugaagaggcgggccagcca

SEQ ID NO: 2537965 - RNA, 21 nt, Human
uccugaagaggcgggccagcc

SEQ ID NO: 2537966 - RNA, 20 nt, Human
uccugaagaggcgggccagc

SEQ ID NO: 2537967 - RNA, 19 nt, Human
uccugaagaggcgggccag

SEQ ID NO: 2537968 - RNA, 17 nt, Human
uccugaagaggcgggcc

SEQ ID NO: 2537969 - RNA, 14 nt, Human
uccugaagaggcgg

SEQ ID NO: 2537970 - RNA, 20 nt, Human
uccugaaccugaugcugacu

SEQ ID NO: 2537971 - RNA, 15 nt, Human
uccugaagaauugaa

SEQ ID NO: 2537972 - RNA, 16 nt, Human
uccugacccagucccc

SEQ ID NO: 2537973 - RNA, 15 nt, Human
uccugacccaguccc

SEQ ID NO: 2537974 - RNA, 14 nt, Human
uccugacccagucc

SEQ ID NO: 2537975 - RNA, 19 nt, Human
uccugacccaggccgcagc

SEQ ID NO: 2537976 - RNA, 14 nt, Human
uccugaccugaggc

SEQ ID NO: 2537977 - RNA, 16 nt, Human
uccugaccucagguga

SEQ ID NO: 2537978 - RNA, 16 nt, Human
uccugaccugaggcuc

SEQ ID NO: 2537979 - RNA, 15 nt, Human
uccugaccugucuca

SEQ ID NO: 2537980 - RNA, 20 nt, Human
uccugaccugucucaccaug

SEQ ID NO: 2537981 - RNA, 14 nt, Human
acucuuucuguaua

SEQ ID NO: 2537982 - RNA, 22 nt, Human
acugaaaauucgaaccaggaaa

SEQ ID NO: 2537983 - RNA, 23 nt, Human
acugaaaaucuaauauuaaaaau

SEQ ID NO: 2537984 - RNA, 19 nt, Human
acugaaaaugugcuauacu

SEQ ID NO: 2537985 - RNA, 13 nt, Human
acugaaacuuccc

SEQ ID NO: 2537986 - RNA, 16 nt, Human
acugaaaaucuaauau

SEQ ID NO: 2537987 - RNA, 15 nt, Human
acugaaaaucuaaua

SEQ ID NO: 2537988 - RNA, 15 nt, Human
acugaaaaugugcua

SEQ ID NO: 2537989 - RNA, 20 nt, Human
acugaaaaggaggggucugg

SEQ ID NO: 2537990 - RNA, 19 nt, Human
acugaaaagacucaguguu

SEQ ID NO: 2537991 - RNA, 17 nt, Human
acugaaaaccucuccuc

SEQ ID NO: 2537992 - RNA, 17 nt, Human
acucuuugaaugacaaa

SEQ ID NO: 2537993 - RNA, 13 nt, Human
acucuuugagaaa

SEQ ID NO: 2537994 - RNA, 21 nt, Human
acucuuucuguauauacuuuu

SEQ ID NO: 2537995 - RNA, 22 nt, Human
acucuuucuguauauacuuuuu

SEQ ID NO: 2537996 - RNA, 16 nt, Human
acucuuugagaaacaa

SEQ ID NO: 2537997 - RNA, 18 nt, Human
acucuuugagaaacaaca

SEQ ID NO: 2537998 - RNA, 18 nt, Human
acucuuugaaugacaaag

SEQ ID NO: 2537999 - RNA, 16 nt, Human
acucuuugagauagaa

SEQ ID NO: 2538000 - RNA, 19 nt, Human
acucuuugagauagaagaa

SEQ ID NO: 2538001 - RNA, 22 nt, Human
acucuuugagauagaagaacug

SEQ ID NO: 2538002 - RNA, 23 nt, Human
acucuuugagauagaagaacugc

SEQ ID NO: 2538003 - RNA, 14 nt, Human
acugaaaacaucug

SEQ ID NO: 2538004 - RNA, 18 nt, Human
acugaaaacaucuggaag

SEQ ID NO: 2538005 - RNA, 17 nt, Human
acugaaaacaucuggaa

SEQ ID NO: 2538006 - RNA, 16 nt, Human
acugaaaacaucugga

SEQ ID NO: 2538007 - RNA, 15 nt, Human
acugaaaacaucugg

SEQ ID NO: 2538008 - RNA, 15 nt, Human
acugaaaaccucucc

SEQ ID NO: 2538009 - RNA, 16 nt, Human
acugaaaaccucuccu

SEQ ID NO: 2538010 - RNA, 17 nt, Human
uccucugcagcugaccu

SEQ ID NO: 2538011 - RNA, 16 nt, Human
uccucugcagcugacc

SEQ ID NO: 2538012 - RNA, 17 nt, Human
uccucugaucuccaugg

SEQ ID NO: 2538013 - RNA, 13 nt, Human
uccucugaucucc

SEQ ID NO: 2538014 - RNA, 15 nt, Human
uccucugauacccag

SEQ ID NO: 2538015 - RNA, 23 nt, Human
uccucucuuuguucucagcuccc

SEQ ID NO: 2538016 - RNA, 18 nt, Human
uccucugacucagggcuc

SEQ ID NO: 2538017 - RNA, 14 nt, Human
uccucugaggcuga

SEQ ID NO: 2538018 - RNA, 15 nt, Human
uccucugcagugccu

SEQ ID NO: 2538019 - RNA, 13 nt, Human
uccucugcagugc

SEQ ID NO: 2538020 - RNA, 20 nt, Human
uccucugcagcugaccucug

SEQ ID NO: 2538021 - RNA, 18 nt, Human
uccucugcagcugaccuc

SEQ ID NO: 2538022 - RNA, 18 nt, Human
uccucugcagugccuugg

SEQ ID NO: 2538023 - RNA, 12 nt, Human
uccucugccacc

SEQ ID NO: 2538024 - RNA, 14 nt, Human
uccucugccaccuc

SEQ ID NO: 2538025 - RNA, 15 nt, Human
uccucugccaccucc

SEQ ID NO: 2538026 - RNA, 22 nt, Human
uccucugccugccccgccccca

SEQ ID NO: 2538027 - RNA, 14 nt, Human
uccucugccugccc

SEQ ID NO: 2538028 - RNA, 13 nt, Human
uccucugccugcc

SEQ ID NO: 2538029 - RNA, 12 nt, Human
uccucugccugc

SEQ ID NO: 2538030 - RNA, 11 nt, Human
uccucugccug

SEQ ID NO: 2538031 - RNA, 12 nt, Human
uccucugccuca

SEQ ID NO: 2538032 - RNA, 18 nt, Human
uccucugccaccuccccu

SEQ ID NO: 2538033 - RNA, 22 nt, Human
uccucugccaccuccccuaucc

SEQ ID NO: 2538034 - RNA, 10 nt, Human
uccucugccu

SEQ ID NO: 2538035 - RNA, 23 nt, Human
uccucugccaccuccccuaucca

SEQ ID NO: 2538036 - RNA, 19 nt, Human
uccucuugccacugccucu

SEQ ID NO: 2538037 - RNA, 17 nt, Human
uccucuugccuccugga

SEQ ID NO: 2538038 - RNA, 14 nt, Human
uccucuugcucaaa

SEQ ID NO: 2538039 - RNA, 13 nt, Human
uccucuugcucaa

SEQ ID NO: 2538040 - RNA, 12 nt, Human
uccucuuguaaa

SEQ ID NO: 2538041 - RNA, 22 nt, Human
uccugaaaacccuugccaugug

SEQ ID NO: 2538042 - RNA, 21 nt, Human
uccugaaaacccuugccaugu

SEQ ID NO: 2538043 - RNA, 14 nt, Human
uccugaagaaccag

SEQ ID NO: 2538044 - RNA, 16 nt, Human
uccugaagaaccaguc

SEQ ID NO: 2538045 - RNA, 18 nt, Human
uccugaagaaccaguccc

SEQ ID NO: 2538046 - RNA, 23 nt, Human
uccugaagaaccaguccccccac

SEQ ID NO: 2538047 - RNA, 13 nt, Human
uccugaagaacca

SEQ ID NO: 2538048 - RNA, 16 nt, Human
uccugaaccugaugcu

SEQ ID NO: 2538049 - RNA, 23 nt, Human
uccucuuuggucuacacugugcu

SEQ ID NO: 2538050 - RNA, 21 nt, Human
uccucuuuuaucuuggacuga

SEQ ID NO: 2538051 - RNA, 21 nt, Human
uccucuuguaaauaaagcccu

SEQ ID NO: 2538052 - RNA, 19 nt, Human
uccucuuguaaauaaagcc

SEQ ID NO: 2538053 - RNA, 18 nt, Human
uccucuuguaaauaaagc

SEQ ID NO: 2538054 - RNA, 21 nt, Human
uccucuuuagaguuagacugu

SEQ ID NO: 2538055 - RNA, 20 nt, Human
uccucuuuagaguuagacug

SEQ ID NO: 2538056 - RNA, 15 nt, Human
uccucuuuagaguua

SEQ ID NO: 2538057 - RNA, 20 nt, Human
uccucuuguaaauaaagccc

SEQ ID NO: 2538058 - RNA, 22 nt, Human
acucucaggaccaaagcuuuca

SEQ ID NO: 2538059 - RNA, 14 nt, Human
acucucagucucug

SEQ ID NO: 2538060 - RNA, 16 nt, Human
acucucagucucugag

SEQ ID NO: 2538061 - RNA, 13 nt, Human
acucucagucucu

SEQ ID NO: 2538062 - RNA, 18 nt, Human
acucucaggaucaagaaa

SEQ ID NO: 2538063 - RNA, 19 nt, Human
acucucaggaucaagaaag

SEQ ID NO: 2538064 - RNA, 13 nt, Human
acucugacaacag

SEQ ID NO: 2538065 - RNA, 17 nt, Human
acucugacaacagacuu

SEQ ID NO: 2538066 - RNA, 17 nt, Human
acucucagucucugagc

SEQ ID NO: 2538067 - RNA, 18 nt, Human
acucucagucucugagca

SEQ ID NO: 2538068 - RNA, 22 nt, Human
acucucaggaucaagaaagugu

SEQ ID NO: 2538069 - RNA, 14 nt, Human
acucucauucccca

SEQ ID NO: 2538070 - RNA, 18 nt, Human
acucugacaacagacuuc

SEQ ID NO: 2538071 - RNA, 20 nt, Human
acucugacaacagacuucug

SEQ ID NO: 2538072 - RNA, 22 nt, Human
acucugacaacagacuucugaa

SEQ ID NO: 2538073 - RNA, 23 nt, Human
acucugacaacagacuucugaaa

SEQ ID NO: 2538074 - RNA, 18 nt, Human
acucugcucgccuuagca

SEQ ID NO: 2538075 - RNA, 16 nt, Human
acucugccugcuuaca

SEQ ID NO: 2538076 - RNA, 16 nt, Human
acucugccucugccug

SEQ ID NO: 2538077 - RNA, 15 nt, Human
acucucauuccccag

SEQ ID NO: 2538078 - RNA, 11 nt, Human
acucugccucu

SEQ ID NO: 2538079 - RNA, 12 nt, Human
acucugccucug

SEQ ID NO: 2538080 - RNA, 14 nt, Human
acucugccucugcc

SEQ ID NO: 2538081 - RNA, 16 nt, Human
acucugccuccucuuc

SEQ ID NO: 2538082 - RNA, 16 nt, Human
acucgcgacaaugcaa

SEQ ID NO: 2538083 - RNA, 15 nt, Human
acucgcgacaaugca

SEQ ID NO: 2538084 - RNA, 16 nt, Human
acucgguuucuccaaa

SEQ ID NO: 2538085 - RNA, 14 nt, Human
acucgguuucucca

SEQ ID NO: 2538086 - RNA, 21 nt, Human
acucgcccgcccacuguccug

SEQ ID NO: 2538087 - RNA, 20 nt, Human
acucgcccgcccacuguccu

SEQ ID NO: 2538088 - RNA, 12 nt, Human
acucgguuucuc

SEQ ID NO: 2538089 - RNA, 19 nt, Human
acucgcccgcccacugucc

SEQ ID NO: 2538090 - RNA, 17 nt, Human
acucgcccgcccacugu

SEQ ID NO: 2538091 - RNA, 15 nt, Human
acucgcccgcccacu

SEQ ID NO: 2538092 - RNA, 14 nt, Human
acucgcccgcccac

SEQ ID NO: 2538093 - RNA, 17 nt, Human
acucgcgacaaugcaaa

SEQ ID NO: 2538094 - RNA, 14 nt, Human
acucucacauguuu

SEQ ID NO: 2538095 - RNA, 14 nt, Human
acucguauaugucu

SEQ ID NO: 2538096 - RNA, 16 nt, Human
acucgucugacugugu

SEQ ID NO: 2538097 - RNA, 22 nt, Human
acucgcccgcccacuguccugg

SEQ ID NO: 2538098 - RNA, 17 nt, Human
acucuggcagcucagag

SEQ ID NO: 2538099 - RNA, 16 nt, Human
acucuggcagcucaga

SEQ ID NO: 2538100 - RNA, 15 nt, Human
acucugcugcuuaga

SEQ ID NO: 2538101 - RNA, 14 nt, Human
acucugcugcuuag

SEQ ID NO: 2538102 - RNA, 9 nt, Human
acucugcug

SEQ ID NO: 2538103 - RNA, 23 nt, Human
acucugcugucuaaccugugacc

SEQ ID NO: 2538104 - RNA, 22 nt, Human
acucugcugucuaaccugugac

SEQ ID NO: 2538105 - RNA, 12 nt, Human
acucugcuucuc

SEQ ID NO: 2538106 - RNA, 14 nt, Human
acucugcucugccc

SEQ ID NO: 2538107 - RNA, 20 nt, Human
acucugcucugcccuuguuc

SEQ ID NO: 2538108 - RNA, 20 nt, Human
acucuggcagcucagagagg

SEQ ID NO: 2538109 - RNA, 19 nt, Human
acucuggcagcucagagag

SEQ ID NO: 2538110 - RNA, 15 nt, Human
acucugcuucucuga

SEQ ID NO: 2538111 - RNA, 14 nt, Human
acucugcuucucug

SEQ ID NO: 2538112 - RNA, 21 nt, Human
acucuuauugcccacgcugga

SEQ ID NO: 2538113 - RNA, 17 nt, Human
acucuucacaaaaucug

SEQ ID NO: 2538114 - RNA, 20 nt, Human
acucuucaguuaagccuuug

SEQ ID NO: 2538115 - RNA, 21 nt, Human
acucuucaguuaagccuuugg

SEQ ID NO: 2538116 - RNA, 20 nt, Human
acucuucccccacuccucuu

SEQ ID NO: 2538117 - RNA, 22 nt, Human
acucuuccgaaaaauccucuuc

SEQ ID NO: 2538118 - RNA, 21 nt, Human
acucuuccgaaaaauccucuu

SEQ ID NO: 2538119 - RNA, 20 nt, Human
acucuuccgaaaaauccucu

SEQ ID NO: 2538120 - RNA, 17 nt, Human
acucuuccagaauccca

SEQ ID NO: 2538121 - RNA, 16 nt, Human
acucuuccugcaagga

SEQ ID NO: 2538122 - RNA, 13 nt, Human
acucuugaaaaau

SEQ ID NO: 2538123 - RNA, 15 nt, Human
acucuucuugaaauu

SEQ ID NO: 2538124 - RNA, 16 nt, Human
acucuucuugaaauuu

SEQ ID NO: 2538125 - RNA, 19 nt, Human
acucuucuuaacuuaaauu

SEQ ID NO: 2538126 - RNA, 20 nt, Human
acucuucuuaacuuaaauuu

SEQ ID NO: 2538127 - RNA, 23 nt, Human
acucuucugagcaccuacuuaca

SEQ ID NO: 2538128 - RNA, 15 nt, Human
acucuuccugcaagg

SEQ ID NO: 2538129 - RNA, 18 nt, Human
uccuacucccagacaccc

SEQ ID NO: 2538130 - RNA, 17 nt, Human
uccuacucccagacacc

SEQ ID NO: 2538131 - RNA, 16 nt, Human
uccuacuaggcaaaau

SEQ ID NO: 2538132 - RNA, 20 nt, Human
uccuacgucaaacaugaagu

SEQ ID NO: 2538133 - RNA, 14 nt, Human
uccuaccucagccu

SEQ ID NO: 2538134 - RNA, 16 nt, Human
uccuaccucagccuag

SEQ ID NO: 2538135 - RNA, 13 nt, Human
uccuaccucccug

SEQ ID NO: 2538136 - RNA, 17 nt, Human
uccuaccucagccuaga

SEQ ID NO: 2538137 - RNA, 14 nt, Human
uccuagcagagaga

SEQ ID NO: 2538138 - RNA, 12 nt, Human
uccuagcagaga

SEQ ID NO: 2538139 - RNA, 20 nt, Human
uccuagccacccaccacacu

SEQ ID NO: 2538140 - RNA, 12 nt, Human
uccuacucugug

SEQ ID NO: 2538141 - RNA, 21 nt, Human
uccuagccugugccucuggga

SEQ ID NO: 2538142 - RNA, 21 nt, Human
uccuagccaccgccuccuaca

SEQ ID NO: 2538143 - RNA, 13 nt, Human
uccuagccacuca

SEQ ID NO: 2538144 - RNA, 17 nt, Human
uccuagccacucaggag

SEQ ID NO: 2538145 - RNA, 22 nt, Human
uccuagccuuauccucugaucu

SEQ ID NO: 2538146 - RNA, 17 nt, Human
acuccuggguugagcug

SEQ ID NO: 2538147 - RNA, 21 nt, Human
uccuagccuuauccucugauc

SEQ ID NO: 2538148 - RNA, 20 nt, Human
uccuagccuuauccucugau

SEQ ID NO: 2538149 - RNA, 19 nt, Human
uccuagccuuauccucuga

SEQ ID NO: 2538150 - RNA, 18 nt, Human
uccuagccuuauccucug

SEQ ID NO: 2538151 - RNA, 15 nt, Human
uccuagcagagagac

SEQ ID NO: 2538152 - RNA, 23 nt, Human
acuccuggguugagcuguugccu

SEQ ID NO: 2538153 - RNA, 15 nt, Human
acuccuguaauuccu

SEQ ID NO: 2538154 - RNA, 13 nt, Human
acuccuguacacu

SEQ ID NO: 2538155 - RNA, 15 nt, Human
acuccuguacacuga

SEQ ID NO: 2538156 - RNA, 16 nt, Human
acuccuguacacugaa

SEQ ID NO: 2538157 - RNA, 17 nt, Human
acuccuguacacugaau

SEQ ID NO: 2538158 - RNA, 18 nt, Human
acuccuguacacugaaua

SEQ ID NO: 2538159 - RNA, 16 nt, Human
acuccuguuacuuacc

SEQ ID NO: 2538160 - RNA, 17 nt, Human
acuccuguuacuuaccu

SEQ ID NO: 2538161 - RNA, 12 nt, Human
acuccuuagaga

SEQ ID NO: 2538162 - RNA, 23 nt, Human
acuccuugauuuuagccuucucu

SEQ ID NO: 2538163 - RNA, 20 nt, Human
acuccuguuacuuaccuaaa

SEQ ID NO: 2538164 - RNA, 23 nt, Human
acuccuuccaguguccuuagaac

SEQ ID NO: 2538165 - RNA, 11 nt, Human
acuccuuccug

SEQ ID NO: 2538166 - RNA, 17 nt, Human
acucgagaccuuuucaa

SEQ ID NO: 2538167 - RNA, 16 nt, Human
acucgagaccuuuuca

SEQ ID NO: 2538168 - RNA, 17 nt, Human
acucgagaacuuucauu

SEQ ID NO: 2538169 - RNA, 13 nt, Human
acucgagaacuuu

SEQ ID NO: 2538170 - RNA, 20 nt, Human
acuccuugugguuuauguca

SEQ ID NO: 2538171 - RNA, 19 nt, Human
acuccuugugguuuauguc

SEQ ID NO: 2538172 - RNA, 18 nt, Human
acuccuugugguuuaugu

SEQ ID NO: 2538173 - RNA, 21 nt, Human
acuccuugugguuuaugucau

SEQ ID NO: 2538174 - RNA, 16 nt, Human
acucgaguuacagaca

SEQ ID NO: 2538175 - RNA, 19 nt, Human
acucgaggacuguauuugu

SEQ ID NO: 2538176 - RNA, 23 nt, Human
acucgagaccuuuucaacuuggc

SEQ ID NO: 2538177 - RNA, 21 nt, Human
acucgaggacuguauuuguga

SEQ ID NO: 2538178 - RNA, 19 nt, Human
acucgauucauauugaaua

SEQ ID NO: 2538179 - RNA, 18 nt, Human
acuccagaaagugacaag

SEQ ID NO: 2538180 - RNA, 14 nt, Human
acuccagaaaguga

SEQ ID NO: 2538181 - RNA, 15 nt, Human
acuccacuuucauag

SEQ ID NO: 2538182 - RNA, 17 nt, Human
uccggauuggcuugugu

SEQ ID NO: 2538183 - RNA, 16 nt, Human
uccggauuuaauuuga

SEQ ID NO: 2538184 - RNA, 23 nt, Human
uccggauuggcuuguguguuuca

SEQ ID NO: 2538185 - RNA, 18 nt, Human
uccggcccccagagcgcc

SEQ ID NO: 2538186 - RNA, 14 nt, Human
uccggcccccagag

SEQ ID NO: 2538187 - RNA, 18 nt, Human
uccggcaguucugggugc

SEQ ID NO: 2538188 - RNA, 22 nt, Human
uccggcgucagccuccagccuc

SEQ ID NO: 2538189 - RNA, 21 nt, Human
uccggcgucagccuccagccu

SEQ ID NO: 2538190 - RNA, 19 nt, Human
uccggcgucagccuccagc

SEQ ID NO: 2538191 - RNA, 18 nt, Human
uccggcgucagccuccag

SEQ ID NO: 2538192 - RNA, 17 nt, Human
uccggcgucagccucca

SEQ ID NO: 2538193 - RNA, 16 nt, Human
uccggcgucagccucc

SEQ ID NO: 2538194 - RNA, 15 nt, Human
uccggcgucagccuc

SEQ ID NO: 2538195 - RNA, 21 nt, Human
uccggccugaugacagagcga

SEQ ID NO: 2538196 - RNA, 14 nt, Human
uccggccuccccuc

SEQ ID NO: 2538197 - RNA, 23 nt, Human
uccggcccuccuacccugcgccc

SEQ ID NO: 2538198 - RNA, 21 nt, Human
uccggcccuccuacccugcgc

SEQ ID NO: 2538199 - RNA, 16 nt, Human
uccgugcuuccucagu

SEQ ID NO: 2538200 - RNA, 17 nt, Human
uccgugcugacagcugc

SEQ ID NO: 2538201 - RNA, 18 nt, Human
uccgugcugacagcugcu

SEQ ID NO: 2538202 - RNA, 19 nt, Human
uccgugcugacagcugcuc

SEQ ID NO: 2538203 - RNA, 21 nt, Human
uccgugcugacagcugcuccu

SEQ ID NO: 2538204 - RNA, 13 nt, Human
uccgugcugacag

SEQ ID NO: 2538205 - RNA, 13 nt, Human
uccguuaaaauac

SEQ ID NO: 2538206 - RNA, 23 nt, Human
uccgugggacggugcccaagcca

SEQ ID NO: 2538207 - RNA, 16 nt, Human
uccgugggacggugcc

SEQ ID NO: 2538208 - RNA, 24 nt, Human
uccgugcuuguuugcucaccuggg

SEQ ID NO: 2538209 - RNA, 17 nt, Human
uccgugggacggugccc

SEQ ID NO: 2538210 - RNA, 15 nt, Human
uccguuagcuccugu

SEQ ID NO: 2538211 - RNA, 15 nt, Human
uccguuaaaauacca

SEQ ID NO: 2538212 - RNA, 20 nt, Human
uccuaccgaaaccuugccuu

SEQ ID NO: 2538213 - RNA, 12 nt, Human
uccuaccucagc

SEQ ID NO: 2538214 - RNA, 13 nt, Human
uccuaccucagcc

SEQ ID NO: 2538215 - RNA, 17 nt, Human
uccguuagcuccugugg

SEQ ID NO: 2538216 - RNA, 16 nt, Human
uccguuagcuccugug

SEQ ID NO: 2538217 - RNA, 20 nt, Human
uccuacccugcgcccagucc

SEQ ID NO: 2538218 - RNA, 15 nt, Human
uccuacccugcgccc

SEQ ID NO: 2538219 - RNA, 17 nt, Human
ucccaccaggcugcuca

SEQ ID NO: 2538220 - RNA, 18 nt, Human
ucccaccaaggucuucag

SEQ ID NO: 2538221 - RNA, 15 nt, Human
ucccaccacagcagg

SEQ ID NO: 2538222 - RNA, 15 nt, Human
ucccaccacccugag

SEQ ID NO: 2538223 - RNA, 17 nt, Human
ucccaccacagcaggug

SEQ ID NO: 2538224 - RNA, 19 nt, Human
ucccaccaacccucagagc

SEQ ID NO: 2538225 - RNA, 14 nt, Human
ucccaccccacaca

SEQ ID NO: 2538226 - RNA, 11 nt, Human
ucccaccccac

SEQ ID NO: 2538227 - RNA, 22 nt, Human
ucccacccacaugugacacaua

SEQ ID NO: 2538228 - RNA, 18 nt, Human
ucccacccacaugugaca

SEQ ID NO: 2538229 - RNA, 19 nt, Human
ucccacccaccgccacaau

SEQ ID NO: 2538230 - RNA, 12 nt, Human
ucccacccaccg

SEQ ID NO: 2538231 - RNA, 15 nt, Human
ucccacccacaugug

SEQ ID NO: 2538232 - RNA, 16 nt, Human
ucccacccacauguga

SEQ ID NO: 2538233 - RNA, 22 nt, Human
ucccaccaggcugcucagggcu

SEQ ID NO: 2538234 - RNA, 18 nt, Human
ucccacccgaugcugcuu

SEQ ID NO: 2538235 - RNA, 17 nt, Human
ucccacccgaugcugcu

SEQ ID NO: 2538236 - RNA, 20 nt, Human
ucccacccgaugcugcuuuc

SEQ ID NO: 2538237 - RNA, 20 nt, Human
ucccacccccuucucugcuc

SEQ ID NO: 2538238 - RNA, 21 nt, Human
ucccacccccuucucugcucc

SEQ ID NO: 2538239 - RNA, 16 nt, Human
ucccacccgaugcugc

SEQ ID NO: 2538240 - RNA, 15 nt, Human
ucccacccgaugcug

SEQ ID NO: 2538241 - RNA, 22 nt, Human
ucccacccccuucucugcucca

SEQ ID NO: 2538242 - RNA, 23 nt, Human
ucccacccccacccccagcucaa

SEQ ID NO: 2538243 - RNA, 22 nt, Human
ucccacccccacccccagcuca

SEQ ID NO: 2538244 - RNA, 20 nt, Human
ucccacccccacccccagcu

SEQ ID NO: 2538245 - RNA, 20 nt, Human
ucccacccccaucucucccu

SEQ ID NO: 2538246 - RNA, 17 nt, Human
ucccacccccuucucug

SEQ ID NO: 2538247 - RNA, 19 nt, Human
ucccacccccuucucugcu

SEQ ID NO: 2538248 - RNA, 14 nt, Human
acggggacugggga

SEQ ID NO: 2538249 - RNA, 12 nt, Human
acggggagaaaa

SEQ ID NO: 2538250 - RNA, 18 nt, Human
acggggccggccaggugg

SEQ ID NO: 2538251 - RNA, 15 nt, Human
acggggccggccagg

SEQ ID NO: 2538252 - RNA, 15 nt, Human
acggggcucuucuca

SEQ ID NO: 2538253 - RNA, 23 nt, Human
acggggaggccaagugcaggcug

SEQ ID NO: 2538254 - RNA, 14 nt, Human
acggggccggccag

SEQ ID NO: 2538255 - RNA, 14 nt, Human
acggggaggccaag

SEQ ID NO: 2538256 - RNA, 18 nt, Human
acgggugggcggcuggag

SEQ ID NO: 2538257 - RNA, 23 nt, Human
acggggggccccagucagccucu

SEQ ID NO: 2538258 - RNA, 18 nt, Human
acgguauuaugcuucuug

SEQ ID NO: 2538259 - RNA, 17 nt, Human
acgguauuaugcuucuu

SEQ ID NO: 2538260 - RNA, 14 nt, Human
acgguauuaugcuu

SEQ ID NO: 2538261 - RNA, 15 nt, Human
acggggggccccagu

SEQ ID NO: 2538262 - RNA, 14 nt, Human
acggggggccccag

SEQ ID NO: 2538263 - RNA, 18 nt, Human
acggggcucuucucauuu

SEQ ID NO: 2538264 - RNA, 22 nt, Human
acggggggccccagucagccuc

SEQ ID NO: 2538265 - RNA, 16 nt, Human
acggggggccccaguc

SEQ ID NO: 2538266 - RNA, 14 nt, Human
acgggguccuucaa

SEQ ID NO: 2538267 - RNA, 15 nt, Human
ucccacaggcagcuu

SEQ ID NO: 2538268 - RNA, 14 nt, Human
ucccacaggcagcu

SEQ ID NO: 2538269 - RNA, 17 nt, Human
ucccacaggcagcuuua

SEQ ID NO: 2538270 - RNA, 23 nt, Human
ucccacagugacucgggcuccug

SEQ ID NO: 2538271 - RNA, 22 nt, Human
ucccacaggcccuuccucucca

SEQ ID NO: 2538272 - RNA, 21 nt, Human
ucccacaggcccuuccucucc

SEQ ID NO: 2538273 - RNA, 17 nt, Human
ucccacaggcccuuccu

SEQ ID NO: 2538274 - RNA, 15 nt, Human
ucccacaggcccuuc

SEQ ID NO: 2538275 - RNA, 17 nt, Human
ucccacaggacauuucu

SEQ ID NO: 2538276 - RNA, 18 nt, Human
ucccacaggacauuucuc

SEQ ID NO: 2538277 - RNA, 21 nt, Human
ucccacaggacauuucucuaa

SEQ ID NO: 2538278 - RNA, 13 nt, Human
ucccacaggcagc

SEQ ID NO: 2538279 - RNA, 20 nt, Human
ucccaauuaggaaguguaac

SEQ ID NO: 2538280 - RNA, 14 nt, Human
ucccaauuaggaag

SEQ ID NO: 2538281 - RNA, 15 nt, Human
ucccaauuaggaagu

SEQ ID NO: 2538282 - RNA, 19 nt, Human
ucccaauuaggaaguguaa

SEQ ID NO: 2538283 - RNA, 15 nt, Human
ucccaauucacaucu

SEQ ID NO: 2538284 - RNA, 17 nt, Human
ucccaauuucagacucc

SEQ ID NO: 2538285 - RNA, 18 nt, Human
ucccaauuucagacuccc

SEQ ID NO: 2538286 - RNA, 23 nt, Human
ucccaauuucagacucccauucc

SEQ ID NO: 2538287 - RNA, 14 nt, Human
ucccacaaaggaga

SEQ ID NO: 2538288 - RNA, 12 nt, Human
uccauuugcaag

SEQ ID NO: 2538289 - RNA, 15 nt, Human
uccauuugcaaggga

SEQ ID NO: 2538290 - RNA, 14 nt, Human
uccauuugugugug

SEQ ID NO: 2538291 - RNA, 16 nt, Human
ucccaaagugcuggga

SEQ ID NO: 2538292 - RNA, 20 nt, Human
ucccaaagugcugggauuac

SEQ ID NO: 2538293 - RNA, 15 nt, Human
ucccaaagugcuggg

SEQ ID NO: 2538294 - RNA, 14 nt, Human
uccagugagacagc

SEQ ID NO: 2538295 - RNA, 17 nt, Human
uccagugaggcucugcc

SEQ ID NO: 2538296 - RNA, 19 nt, Human
uccagugaggcucugcccu

SEQ ID NO: 2538297 - RNA, 18 nt, Human
uccagugaggcucugccc

SEQ ID NO: 2538298 - RNA, 20 nt, Human
uccagugaggcucugcccuu

SEQ ID NO: 2538299 - RNA, 22 nt, Human
uccaucccuacccccuaagagc

SEQ ID NO: 2538300 - RNA, 18 nt, Human
uccaucccuacccccuaa

SEQ ID NO: 2538301 - RNA, 21 nt, Human
uccagucuuccugacacuuua

SEQ ID NO: 2538302 - RNA, 22 nt, Human
uccagucuuccugacacuuuaa

SEQ ID NO: 2538303 - RNA, 23 nt, Human
uccagucuuccugacacuuuaau

SEQ ID NO: 2538304 - RNA, 15 nt, Human
uccagucuuccugac

SEQ ID NO: 2538305 - RNA, 19 nt, Human
uccagucuuccugacacuu

SEQ ID NO: 2538306 - RNA, 20 nt, Human
uccagucugcugcccuccau

SEQ ID NO: 2538307 - RNA, 22 nt, Human
uccagucugcugcccuccaucc

SEQ ID NO: 2538308 - RNA, 15 nt, Human
acggcucacugcagc

SEQ ID NO: 2538309 - RNA, 15 nt, Human
uccagucugcugccc

SEQ ID NO: 2538310 - RNA, 16 nt, Human
uccagucugcugcccu

SEQ ID NO: 2538311 - RNA, 18 nt, Human
uccagucugcugcccucc

SEQ ID NO: 2538312 - RNA, 19 nt, Human
uccagucugcugcccucca

SEQ ID NO: 2538313 - RNA, 21 nt, Human
acggccuucaacugaaaagac

SEQ ID NO: 2538314 - RNA, 20 nt, Human
acggccugaugcucccuccc

SEQ ID NO: 2538315 - RNA, 22 nt, Human
acggccugaugcucccuccccu

SEQ ID NO: 2538316 - RNA, 14 nt, Human
acggcucacugcag

SEQ ID NO: 2538317 - RNA, 18 nt, Human
acggccgcuccaggggug

SEQ ID NO: 2538318 - RNA, 15 nt, Human
acggccgcuccaggg

SEQ ID NO: 2538319 - RNA, 15 nt, Human
acggccugaugcucc

SEQ ID NO: 2538320 - RNA, 18 nt, Human
acggccugaugcucccuc

SEQ ID NO: 2538321 - RNA, 19 nt, Human
acggccugaugcucccucc

SEQ ID NO: 2538322 - RNA, 14 nt, Human
acggccgcuccagg

SEQ ID NO: 2538323 - RNA, 17 nt, Human
uccaugaguccccuguu

SEQ ID NO: 2538324 - RNA, 16 nt, Human
uccaugaguccccugu

SEQ ID NO: 2538325 - RNA, 15 nt, Human
uccaugaguccccug

SEQ ID NO: 2538326 - RNA, 20 nt, Human
uccaugaccuaguuuuccau

SEQ ID NO: 2538327 - RNA, 21 nt, Human
uccauugacauguacagagaa

SEQ ID NO: 2538328 - RNA, 20 nt, Human
uccauugacauguacagaga

SEQ ID NO: 2538329 - RNA, 16 nt, Human
uccauuggaucucauu

SEQ ID NO: 2538330 - RNA, 15 nt, Human
uccaugagcacccca

SEQ ID NO: 2538331 - RNA, 13 nt, Human
uccaugagcaccc

SEQ ID NO: 2538332 - RNA, 19 nt, Human
uccaugagcaccccaaggc

SEQ ID NO: 2538333 - RNA, 19 nt, Human
uccauugacauguacagag

SEQ ID NO: 2538334 - RNA, 18 nt, Human
uccaugaguuugcccugg

SEQ ID NO: 2538335 - RNA, 19 nt, Human
uccauuguuuggagacauu

SEQ ID NO: 2538336 - RNA, 23 nt, Human
uccauuguuugaaacaaagaagg

SEQ ID NO: 2538337 - RNA, 23 nt, Human
uccauuguaaaccacaaggcugu

SEQ ID NO: 2538338 - RNA, 22 nt, Human
uccauugguuuaccugugaaau

SEQ ID NO: 2538339 - RNA, 21 nt, Human
uccauuguuugaaacaaagaa

SEQ ID NO: 2538340 - RNA, 20 nt, Human
uccauuguuugaaacaaaga

SEQ ID NO: 2538341 - RNA, 14 nt, Human
uccauuguuugaaa

SEQ ID NO: 2538342 - RNA, 14 nt, Human
uccauugugugagu

SEQ ID NO: 2538343 - RNA, 11 nt, Human
uccauccugag

SEQ ID NO: 2538344 - RNA, 20 nt, Human
uccaucucuuguuuaaauuc

SEQ ID NO: 2538345 - RNA, 15 nt, Human
uccaucuucuuugca

SEQ ID NO: 2538346 - RNA, 23 nt, Human
uccaucuucagcuucuucaucuu

SEQ ID NO: 2538347 - RNA, 16 nt, Human
uccaucuucagcuucu

SEQ ID NO: 2538348 - RNA, 14 nt, Human
uccaucuucagcuu

SEQ ID NO: 2538349 - RNA, 18 nt, Human
uccaucuuuccugauggc

SEQ ID NO: 2538350 - RNA, 16 nt, Human
uccaucuucuuugcag

SEQ ID NO: 2538351 - RNA, 13 nt, Human
uccaucuuuacaa

SEQ ID NO: 2538352 - RNA, 15 nt, Human
uccaucuggcagggu

SEQ ID NO: 2538353 - RNA, 21 nt, Human
uccaugaauguaucaggaaau

SEQ ID NO: 2538354 - RNA, 15 nt, Human
uccaugaauguauca

SEQ ID NO: 2538355 - RNA, 16 nt, Human
uccaugaauguaucag

SEQ ID NO: 2538356 - RNA, 19 nt, Human
uccaugaaucgcuucucuu

SEQ ID NO: 2538357 - RNA, 18 nt, Human
uccaugaaucgcuucucu

SEQ ID NO: 2538358 - RNA, 15 nt, Human
uccaugaaggcagag

SEQ ID NO: 2538359 - RNA, 20 nt, Human
uccaugaaucgcuucucuuu

SEQ ID NO: 2538360 - RNA, 12 nt, Human
uccaugaaugua

SEQ ID NO: 2538361 - RNA, 13 nt, Human
uccaugaauguau

SEQ ID NO: 2538362 - RNA, 14 nt, Human
uccaugaauguauc

SEQ ID NO: 2538363 - RNA, 22 nt, Human
uccaugaagauguagaggagaa

SEQ ID NO: 2538364 - RNA, 11 nt, Human
uccaugaaaac

SEQ ID NO: 2538365 - RNA, 15 nt, Human
uccaugaaaacguuu

SEQ ID NO: 2538366 - RNA, 18 nt, Human
uccaugaaaacguuuuau

SEQ ID NO: 2538367 - RNA, 19 nt, Human
uccaugaaaacguuuuauu

SEQ ID NO: 2538368 - RNA, 21 nt, Human
uccaugaaaacguuuuauugu

SEQ ID NO: 2538369 - RNA, 22 nt, Human
uccaugaaaacguuuuauugug

SEQ ID NO: 2538370 - RNA, 12 nt, Human
uccaugaaaaug

SEQ ID NO: 2538371 - RNA, 22 nt, Human
acggauuagggcauuugagaaa

SEQ ID NO: 2538372 - RNA, 22 nt, Human
acggaugccuuccccugggccc

SEQ ID NO: 2538373 - RNA, 21 nt, Human
acggagucccaccuuggcugc

SEQ ID NO: 2538374 - RNA, 21 nt, Human
acggauuauuuuuucagaccg

SEQ ID NO: 2538375 - RNA, 20 nt, Human
acggauuauuuuuucagacc

SEQ ID NO: 2538376 - RNA, 19 nt, Human
acggauuauuuuuucagac

SEQ ID NO: 2538377 - RNA, 18 nt, Human
acggauuauuuuuucaga

SEQ ID NO: 2538378 - RNA, 17 nt, Human
acggauuauuuuuucag

SEQ ID NO: 2538379 - RNA, 16 nt, Human
acggauuauuuuuuca

SEQ ID NO: 2538380 - RNA, 13 nt, Human
acggauuauuuuu

SEQ ID NO: 2538381 - RNA, 23 nt, Human
acggauuagggcauuugagaaau

SEQ ID NO: 2538382 - RNA, 15 nt, Human
acggauuuauuuuuc

SEQ ID NO: 2538383 - RNA, 12 nt, Human
acggauuccaaa

SEQ ID NO: 2538384 - RNA, 13 nt, Human
acggcacccaccc

SEQ ID NO: 2538385 - RNA, 16 nt, Human
acggccaggccagagg

SEQ ID NO: 2538386 - RNA, 21 nt, Human
acggcaggacaacgaggaagc

SEQ ID NO: 2538387 - RNA, 13 nt, Human
acggccaggccag

SEQ ID NO: 2538388 - RNA, 17 nt, Human
acggccagggagaagcu

SEQ ID NO: 2538389 - RNA, 23 nt, Human
acggccagggagaagcuccucuc

SEQ ID NO: 2538390 - RNA, 18 nt, Human
acggccagggagaagcuc

SEQ ID NO: 2538391 - RNA, 17 nt, Human
acgcucucuggccuucg

SEQ ID NO: 2538392 - RNA, 16 nt, Human
acgcugaauaaauguc

SEQ ID NO: 2538393 - RNA, 15 nt, Human
acgcugaauaaaugu

SEQ ID NO: 2538394 - RNA, 13 nt, Human
acgcugaauaaau

SEQ ID NO: 2538395 - RNA, 12 nt, Human
acgcugaauaaa

SEQ ID NO: 2538396 - RNA, 20 nt, Human
acgcuaaagagcccuugccu

SEQ ID NO: 2538397 - RNA, 18 nt, Human
acgcuaaagagcccuugc

SEQ ID NO: 2538398 - RNA, 21 nt, Human
acgcuaaagagcccuugccuc

SEQ ID NO: 2538399 - RNA, 12 nt, Human
acgcugccugcc

SEQ ID NO: 2538400 - RNA, 13 nt, Human
acgcugccugccc

SEQ ID NO: 2538401 - RNA, 15 nt, Human
acgcugccugcccac

SEQ ID NO: 2538402 - RNA, 14 nt, Human
acgcugccugcccg

SEQ ID NO: 2538403 - RNA, 19 nt, Human
acgcugaauaaaugucuuu

SEQ ID NO: 2538404 - RNA, 18 nt, Human
acgcugaauaaaugucuu

SEQ ID NO: 2538405 - RNA, 21 nt, Human
acggagccacuccucugacuc

SEQ ID NO: 2538406 - RNA, 20 nt, Human
acggagccacuccucugacu

SEQ ID NO: 2538407 - RNA, 15 nt, Human
acggagcccagcccu

SEQ ID NO: 2538408 - RNA, 20 nt, Human
acggagcccagcccucccca

SEQ ID NO: 2538409 - RNA, 21 nt, Human
acggagccccaggccucugug

SEQ ID NO: 2538410 - RNA, 18 nt, Human
acggagccccaggccucu

SEQ ID NO: 2538411 - RNA, 19 nt, Human
acggagucccaccuuggcu

SEQ ID NO: 2538412 - RNA, 17 nt, Human
acgcuacccgggaaggg

SEQ ID NO: 2538413 - RNA, 13 nt, Human
acgcuacccggga

SEQ ID NO: 2538414 - RNA, 15 nt, Human
acgcucucuggccuu

SEQ ID NO: 2538415 - RNA, 16 nt, Human
acgcucucuggccuuc

SEQ ID NO: 2538416 - RNA, 17 nt, Human
acgcuaaagagcccuug

SEQ ID NO: 2538417 - RNA, 16 nt, Human
acgcuaaagagcccuu

SEQ ID NO: 2538418 - RNA, 23 nt, Human
acgcguguguacacgggacugac

SEQ ID NO: 2538419 - RNA, 21 nt, Human
acgcguguguacacgggacug

SEQ ID NO: 2538420 - RNA, 18 nt, Human
acgcuacccgggaagggg

SEQ ID NO: 2538421 - RNA, 19 nt, Human
acgcccguccugccugugg

SEQ ID NO: 2538422 - RNA, 18 nt, Human
acgcccguccugccugug

SEQ ID NO: 2538423 - RNA, 16 nt, Human
acgcccguccugccug

SEQ ID NO: 2538424 - RNA, 14 nt, Human
acgcccccccccac

SEQ ID NO: 2538425 - RNA, 16 nt, Human
acgcccccccccaccc

SEQ ID NO: 2538426 - RNA, 15 nt, Human
acgcccuccccuccc

SEQ ID NO: 2538427 - RNA, 14 nt, Human
acgcccuccccucc

SEQ ID NO: 2538428 - RNA, 13 nt, Human
acgcccuccccuc

SEQ ID NO: 2538429 - RNA, 12 nt, Human
acgcccuccccu

SEQ ID NO: 2538430 - RNA, 20 nt, Human
acgcccguccugccuguggc

SEQ ID NO: 2538431 - RNA, 13 nt, Human
acgcccuauuuuu

SEQ ID NO: 2538432 - RNA, 23 nt, Human
acgcccccccccaccccuggggg

SEQ ID NO: 2538433 - RNA, 14 nt, Human
acgcccccacuggu

SEQ ID NO: 2538434 - RNA, 14 nt, Human
acgcccauguguga

SEQ ID NO: 2538435 - RNA, 21 nt, Human
acgccccagauaccagccccu

SEQ ID NO: 2538436 - RNA, 16 nt, Human
acgcccaugugugagu

SEQ ID NO: 2538437 - RNA, 23 nt, Human
acgccggggacagaggccugccc

SEQ ID NO: 2538438 - RNA, 22 nt, Human
acgccggggacagaggccugcc

SEQ ID NO: 2538439 - RNA, 21 nt, Human
acgccggggacagaggccugc

SEQ ID NO: 2538440 - RNA, 20 nt, Human
acgcgugcacacaccagagc

SEQ ID NO: 2538441 - RNA, 23 nt, Human
acgcgugcacacaccagagccca

SEQ ID NO: 2538442 - RNA, 22 nt, Human
acgcccuccccuccccugcugc

SEQ ID NO: 2538443 - RNA, 21 nt, Human
acgcccuccccuccccugcug

SEQ ID NO: 2538444 - RNA, 19 nt, Human
acgcccuccccuccccugc

SEQ ID NO: 2538445 - RNA, 18 nt, Human
acgcccuccccuccccug

SEQ ID NO: 2538446 - RNA, 20 nt, Human
acgccggggacagaggccug

SEQ ID NO: 2538447 - RNA, 23 nt, Human
acgcccuccccuccccugcugca

SEQ ID NO: 2538448 - RNA, 20 nt, Human
acgccgcccuaaaagcacac

SEQ ID NO: 2538449 - RNA, 13 nt, Human
acgaccuuuaccu

SEQ ID NO: 2538450 - RNA, 17 nt, Human
acgaccacagggucugc

SEQ ID NO: 2538451 - RNA, 12 nt, Human
acgacugucucc

SEQ ID NO: 2538452 - RNA, 14 nt, Human
acgacuucagggca

SEQ ID NO: 2538453 - RNA, 20 nt, Human
acgaggcccucgggcccagc

SEQ ID NO: 2538454 - RNA, 22 nt, Human
acgacuucagggcagggcucug

SEQ ID NO: 2538455 - RNA, 22 nt, Human
acgaggcccucgggcccagccc

SEQ ID NO: 2538456 - RNA, 21 nt, Human
acgaggcccucgggcccagcc

SEQ ID NO: 2538457 - RNA, 23 nt, Human
acgaggcccucgggcccagcccc

SEQ ID NO: 2538458 - RNA, 22 nt, Human
acgacaaagccaaacucugcca

SEQ ID NO: 2538459 - RNA, 19 nt, Human
acgacaaggaaaggcaaau

SEQ ID NO: 2538460 - RNA, 20 nt, Human
acgacaauagcuuuacccuc

SEQ ID NO: 2538461 - RNA, 15 nt, Human
acgacugcccggcag

SEQ ID NO: 2538462 - RNA, 16 nt, Human
acgaguaauuuauugu

SEQ ID NO: 2538463 - RNA, 17 nt, Human
acgagucaauccccuca

SEQ ID NO: 2538464 - RNA, 18 nt, Human
acgccaggggaaaaucag

SEQ ID NO: 2538465 - RNA, 20 nt, Human
acgaggggugucuugggcag

SEQ ID NO: 2538466 - RNA, 18 nt, Human
acgaggggugucuugggc

SEQ ID NO: 2538467 - RNA, 14 nt, Human
acgagguaugaggu

SEQ ID NO: 2538468 - RNA, 21 nt, Human
acgaggggugucuugggcaga

SEQ ID NO: 2538469 - RNA, 18 nt, Human
acgccaucccagccccaa

SEQ ID NO: 2538470 - RNA, 16 nt, Human
acgcccaacccuuccc

SEQ ID NO: 2538471 - RNA, 17 nt, Human
acgccaucccagcccca

SEQ ID NO: 2538472 - RNA, 16 nt, Human
acgccaucccagcccc

SEQ ID NO: 2538473 - RNA, 15 nt, Human
acgccaucccagccc

SEQ ID NO: 2538474 - RNA, 14 nt, Human
acgccaucccagcc

SEQ ID NO: 2538475 - RNA, 11 nt, Human
acgccauccca

SEQ ID NO: 2538476 - RNA, 23 nt, Human
acgccaggggaaaaucagccugc

SEQ ID NO: 2538477 - RNA, 17 nt, Human
uccaggcugggagagcc

SEQ ID NO: 2538478 - RNA, 14 nt, Human
uccaggcugggaga

SEQ ID NO: 2538479 - RNA, 18 nt, Human
uccaggcugggagagccu

SEQ ID NO: 2538480 - RNA, 16 nt, Human
uccaggcugccguggg

SEQ ID NO: 2538481 - RNA, 23 nt, Human
uccaggcucuuuggggucagcca

SEQ ID NO: 2538482 - RNA, 23 nt, Human
uccagggaagcuggccgaggguc

SEQ ID NO: 2538483 - RNA, 14 nt, Human
uccacggagccacu

SEQ ID NO: 2538484 - RNA, 15 nt, Human
uccacggagccacuc

SEQ ID NO: 2538485 - RNA, 20 nt, Human
uccacggagccacuccucug

SEQ ID NO: 2538486 - RNA, 21 nt, Human
uccacggagccacuccucuga

SEQ ID NO: 2538487 - RNA, 20 nt, Human
uccacggcucuagguggggc

SEQ ID NO: 2538488 - RNA, 22 nt, Human
uccaggcucuuuggggucagcc

SEQ ID NO: 2538489 - RNA, 14 nt, Human
uccacggcucuagg

SEQ ID NO: 2538490 - RNA, 22 nt, Human
uccacggagccacuccucugac

SEQ ID NO: 2538491 - RNA, 22 nt, Human
uccacgagcuguuuacuaggga

SEQ ID NO: 2538492 - RNA, 12 nt, Human
uccacgcugucu

SEQ ID NO: 2538493 - RNA, 15 nt, Human
uccacgcugucucca

SEQ ID NO: 2538494 - RNA, 16 nt, Human
uccacgcugucuccag

SEQ ID NO: 2538495 - RNA, 17 nt, Human
uccacgcugucuccaga

SEQ ID NO: 2538496 - RNA, 18 nt, Human
uccacgcugucuccagac

SEQ ID NO: 2538497 - RNA, 19 nt, Human
uccacgcugucuccagacc

SEQ ID NO: 2538498 - RNA, 20 nt, Human
uccacgcugucuccagaccc

SEQ ID NO: 2538499 - RNA, 21 nt, Human
uccacgcugucuccagacccc

SEQ ID NO: 2538500 - RNA, 22 nt, Human
uccacgcugucuccagaccccc

SEQ ID NO: 2538501 - RNA, 23 nt, Human
uccacgcugucuccagaccccca

SEQ ID NO: 2538502 - RNA, 14 nt, Human
acgaacuuccaugg

SEQ ID NO: 2538503 - RNA, 17 nt, Human
uccagggccacgugcca

SEQ ID NO: 2538504 - RNA, 18 nt, Human
uccagggaguccccuccc

SEQ ID NO: 2538505 - RNA, 20 nt, Human
uccagggaugccaucugugg

SEQ ID NO: 2538506 - RNA, 14 nt, Human
uccagggacugaag

SEQ ID NO: 2538507 - RNA, 19 nt, Human
uccagggagcauuuuccuc

SEQ ID NO: 2538508 - RNA, 14 nt, Human
uccagggacagagg

SEQ ID NO: 2538509 - RNA, 15 nt, Human
uccagggacagaggc

SEQ ID NO: 2538510 - RNA, 19 nt, Human
uccagggacagaggcccca

SEQ ID NO: 2538511 - RNA, 21 nt, Human
uccagggacagaggccccagc

SEQ ID NO: 2538512 - RNA, 23 nt, Human
uccagggacagaggccccagccu

SEQ ID NO: 2538513 - RNA, 14 nt, Human
acgaauauugcuga

SEQ ID NO: 2538514 - RNA, 14 nt, Human
acgacaaggaaagg

SEQ ID NO: 2538515 - RNA, 22 nt, Human
acgaauacuuuugcccuuugau

SEQ ID NO: 2538516 - RNA, 14 nt, Human
acgaauacuuuugc

SEQ ID NO: 2538517 - RNA, 14 nt, Human
acgaaguguugcau

SEQ ID NO: 2538518 - RNA, 17 nt, Human
acgaagggaaaugucuu

SEQ ID NO: 2538519 - RNA, 16 nt, Human
accugacacucccuug

SEQ ID NO: 2538520 - RNA, 17 nt, Human
accugacacucccuugg

SEQ ID NO: 2538521 - RNA, 16 nt, Human
accugacaagcacugc

SEQ ID NO: 2538522 - RNA, 23 nt, Human
accugaagaguggucagaacaga

SEQ ID NO: 2538523 - RNA, 22 nt, Human
accugacagaugucagccgagc

SEQ ID NO: 2538524 - RNA, 12 nt, Human
accugacagaug

SEQ ID NO: 2538525 - RNA, 19 nt, Human
accugacacucccuugggc

SEQ ID NO: 2538526 - RNA, 17 nt, Human
accugaccccugacccc

SEQ ID NO: 2538527 - RNA, 15 nt, Human
accugaccccugcuc

SEQ ID NO: 2538528 - RNA, 17 nt, Human
accugaccaacauggag

SEQ ID NO: 2538529 - RNA, 18 nt, Human
accugagcaggaccucug

SEQ ID NO: 2538530 - RNA, 16 nt, Human
accugagccagccugc

SEQ ID NO: 2538531 - RNA, 19 nt, Human
accugaccaacauggagaa

SEQ ID NO: 2538532 - RNA, 12 nt, Human
accugagcccca

SEQ ID NO: 2538533 - RNA, 17 nt, Human
accugagccccaaaagg

SEQ ID NO: 2538534 - RNA, 23 nt, Human
accugaggcccuucucuccagcc

SEQ ID NO: 2538535 - RNA, 21 nt, Human
accugagcccggaugcuucuc

SEQ ID NO: 2538536 - RNA, 23 nt, Human
accugagcccggaugcuucucca

SEQ ID NO: 2538537 - RNA, 19 nt, Human
accugaauuuuggcugugu

SEQ ID NO: 2538538 - RNA, 11 nt, Human
accugaagaau

SEQ ID NO: 2538539 - RNA, 14 nt, Human
accugaagaaucac

SEQ ID NO: 2538540 - RNA, 16 nt, Human
accugaagaaucacaa

SEQ ID NO: 2538541 - RNA, 18 nt, Human
accugaagacucauucuu

SEQ ID NO: 2538542 - RNA, 19 nt, Human
ucauaauaaauaucuguac

SEQ ID NO: 2538543 - RNA, 14 nt, Human
accugaaccuagga

SEQ ID NO: 2538544 - RNA, 16 nt, Human
ucauaauaaguugcau

SEQ ID NO: 2538545 - RNA, 12 nt, Human
ucauaaugacuu

SEQ ID NO: 2538546 - RNA, 14 nt, Human
ucauaaucuuugcu

SEQ ID NO: 2538547 - RNA, 15 nt, Human
ucauaaucuuugcuu

SEQ ID NO: 2538548 - RNA, 17 nt, Human
accugccucggccuccc

SEQ ID NO: 2538549 - RNA, 22 nt, Human
accugccucccuucaugcaugg

SEQ ID NO: 2538550 - RNA, 13 nt, Human
accugccuccugc

SEQ ID NO: 2538551 - RNA, 19 nt, Human
accugcaccuccccccacu

SEQ ID NO: 2538552 - RNA, 23 nt, Human
accugccucccuucaugcaugga

SEQ ID NO: 2538553 - RNA, 21 nt, Human
accugccucccuucaugcaug

SEQ ID NO: 2538554 - RNA, 17 nt, Human
accugcaccucccccca

SEQ ID NO: 2538555 - RNA, 18 nt, Human
accugcaccuccccccac

SEQ ID NO: 2538556 - RNA, 18 nt, Human
accugccaggaagccagc

SEQ ID NO: 2538557 - RNA, 13 nt, Human
accugccucagga

SEQ ID NO: 2538558 - RNA, 20 nt, Human
accugcaccuccccccacug

SEQ ID NO: 2538559 - RNA, 17 nt, Human
accugccaggaagccag

SEQ ID NO: 2538560 - RNA, 16 nt, Human
accugccaggaagcca

SEQ ID NO: 2538561 - RNA, 16 nt, Human
accugcaaagaucugu

SEQ ID NO: 2538562 - RNA, 22 nt, Human
accugcaaagaucuguccucag

SEQ ID NO: 2538563 - RNA, 15 nt, Human
accugcaaagaucug

SEQ ID NO: 2538564 - RNA, 15 nt, Human
accugcaaaaaauag

SEQ ID NO: 2538565 - RNA, 20 nt, Human
accugcaagggcuccccacu

SEQ ID NO: 2538566 - RNA, 18 nt, Human
accugcaagggcucccca

SEQ ID NO: 2538567 - RNA, 14 nt, Human
accugcaccucccc

SEQ ID NO: 2538568 - RNA, 15 nt, Human
accugcaccuccccc

SEQ ID NO: 2538569 - RNA, 16 nt, Human
accugcaccucccccc

SEQ ID NO: 2538570 - RNA, 16 nt, Human
accugaggcuccugug

SEQ ID NO: 2538571 - RNA, 12 nt, Human
accugaggcugu

SEQ ID NO: 2538572 - RNA, 19 nt, Human
accugaggcuccugugcua

SEQ ID NO: 2538573 - RNA, 14 nt, Human
accugaggggccuc

SEQ ID NO: 2538574 - RNA, 22 nt, Human
accugauccuggaggcccaguu

SEQ ID NO: 2538575 - RNA, 13 nt, Human
accugauccugga

SEQ ID NO: 2538576 - RNA, 20 nt, Human
accugauccuggaggcccag

SEQ ID NO: 2538577 - RNA, 23 nt, Human
accugagggcagaaagguucugc

SEQ ID NO: 2538578 - RNA, 14 nt, Human
accugaggcugugg

SEQ ID NO: 2538579 - RNA, 16 nt, Human
accugaggggccucuu

SEQ ID NO: 2538580 - RNA, 16 nt, Human
accugauuuuuuuucc

SEQ ID NO: 2538581 - RNA, 17 nt, Human
accugauuuuuuuuccu

SEQ ID NO: 2538582 - RNA, 13 nt, Human
accugcaaaaaau

SEQ ID NO: 2538583 - RNA, 20 nt, Human
accugauuuuuuuuccuuuu

SEQ ID NO: 2538584 - RNA, 11 nt, Human
accugauuuuu

SEQ ID NO: 2538585 - RNA, 19 nt, Human
accugauucaacuaaaaaa

SEQ ID NO: 2538586 - RNA, 21 nt, Human
accugauggcacuuagcuauc

SEQ ID NO: 2538587 - RNA, 13 nt, Human
accugauguguac

SEQ ID NO: 2538588 - RNA, 11 nt, Human
accugauucaa

SEQ ID NO: 2538589 - RNA, 21 nt, Human
accugauguuaaaauuccauc

SEQ ID NO: 2538590 - RNA, 22 nt, Human
accugauguguacaucccaugu

SEQ ID NO: 2538591 - RNA, 15 nt, Human
accugauguguacau

SEQ ID NO: 2538592 - RNA, 20 nt, Human
accuggagagcuagaaccug

SEQ ID NO: 2538593 - RNA, 21 nt, Human
accuggagagcuagaaccuag

SEQ ID NO: 2538594 - RNA, 13 nt, Human
accuggagagcua

SEQ ID NO: 2538595 - RNA, 23 nt, Human
accuggagagccagaaccuggag

SEQ ID NO: 2538596 - RNA, 22 nt, Human
accuggagagccagaaccugga

SEQ ID NO: 2538597 - RNA, 20 nt, Human
accuggagagccagaaccug

SEQ ID NO: 2538598 - RNA, 13 nt, Human
accuggagaccag

SEQ ID NO: 2538599 - RNA, 23 nt, Human
accuggagaacuagaaccuggag

SEQ ID NO: 2538600 - RNA, 23 nt, Human
accuggagagcuagaaccuggag

SEQ ID NO: 2538601 - RNA, 22 nt, Human
accuggagagcuagaaccugga

SEQ ID NO: 2538602 - RNA, 14 nt, Human
accuggagccccug

SEQ ID NO: 2538603 - RNA, 16 nt, Human
accuggagccccuggg

SEQ ID NO: 2538604 - RNA, 15 nt, Human
accuggagccccugg

SEQ ID NO: 2538605 - RNA, 14 nt, Human
ucauuugucacaca

SEQ ID NO: 2538606 - RNA, 13 nt, Human
ucauuugcuuuuu

SEQ ID NO: 2538607 - RNA, 18 nt, Human
ucauuugguucauuaauu

SEQ ID NO: 2538608 - RNA, 23 nt, Human
ucauuugggguagcuagaggaac

SEQ ID NO: 2538609 - RNA, 14 nt, Human
ucauuuucugcaag

SEQ ID NO: 2538610 - RNA, 13 nt, Human
ucauuuucugcaa

SEQ ID NO: 2538611 - RNA, 21 nt, Human
ucauuuucuuaucuucugcaa

SEQ ID NO: 2538612 - RNA, 18 nt, Human
ucauuuucugcaagccug

SEQ ID NO: 2538613 - RNA, 16 nt, Human
ucauuuucugcaagcc

SEQ ID NO: 2538614 - RNA, 15 nt, Human
ucauuuugagcugaa

SEQ ID NO: 2538615 - RNA, 14 nt, Human
ucauuuugcauuca

SEQ ID NO: 2538616 - RNA, 15 nt, Human
ucauuuucugcauuu

SEQ ID NO: 2538617 - RNA, 20 nt, Human
ucauuugguucauuaauucu

SEQ ID NO: 2538618 - RNA, 16 nt, Human
ucauuugucacacacu

SEQ ID NO: 2538619 - RNA, 19 nt, Human
uccaaaaagauuuucagaa

SEQ ID NO: 2538620 - RNA, 15 nt, Human
ucauuuuuguacagu

SEQ ID NO: 2538621 - RNA, 12 nt, Human
ucauuuuuguac

SEQ ID NO: 2538622 - RNA, 17 nt, Human
ucauuuuuuuuaagaaa

SEQ ID NO: 2538623 - RNA, 18 nt, Human
ucauuuuuuuuaagaaaa

SEQ ID NO: 2538624 - RNA, 14 nt, Human
ucauuuuugaauac

SEQ ID NO: 2538625 - RNA, 22 nt, Human
ucauuuuuccuucccuucucca

SEQ ID NO: 2538626 - RNA, 19 nt, Human
ucauuuuuaaucaugaaau

SEQ ID NO: 2538627 - RNA, 18 nt, Human
ucauuuuuaaucaugaaa

SEQ ID NO: 2538628 - RNA, 19 nt, Human
ucauuuuuaguagagacag

SEQ ID NO: 2538629 - RNA, 17 nt, Human
ucauuuugcauucaaau

SEQ ID NO: 2538630 - RNA, 16 nt, Human
ucauuuugcauucaaa

SEQ ID NO: 2538631 - RNA, 22 nt, Human
ucauuuugguaaaauacuucuu

SEQ ID NO: 2538632 - RNA, 16 nt, Human
ucauuuuuaaucauga

SEQ ID NO: 2538633 - RNA, 21 nt, Human
ucauuuuguugcuuuugugaa

SEQ ID NO: 2538634 - RNA, 12 nt, Human
ucauuuuuaauc

SEQ ID NO: 2538635 - RNA, 21 nt, Human
accugccugacauuuggagug

SEQ ID NO: 2538636 - RNA, 17 nt, Human
accugccuccugccugc

SEQ ID NO: 2538637 - RNA, 14 nt, Human
accugccuccugcc

SEQ ID NO: 2538638 - RNA, 21 nt, Human
accugccucggccucccaaag

SEQ ID NO: 2538639 - RNA, 23 nt, Human
accugccucggccucccaaagug

SEQ ID NO: 2538640 - RNA, 23 nt, Human
accugccuguugggccaggagcc

SEQ ID NO: 2538641 - RNA, 13 nt, Human
accugccuggguu

SEQ ID NO: 2538642 - RNA, 18 nt, Human
accugccuccugccugcc

SEQ ID NO: 2538643 - RNA, 11 nt, Human
accugccugua

SEQ ID NO: 2538644 - RNA, 14 nt, Human
accugccuguagcc

SEQ ID NO: 2538645 - RNA, 17 nt, Human
accugcucccaggccag

SEQ ID NO: 2538646 - RNA, 13 nt, Human
accugcucccagg

SEQ ID NO: 2538647 - RNA, 21 nt, Human
accugcuagacacauuuuuaa

SEQ ID NO: 2538648 - RNA, 22 nt, Human
accugcggcugcugugugccuu

SEQ ID NO: 2538649 - RNA, 16 nt, Human
accugcggcugcugug

SEQ ID NO: 2538650 - RNA, 16 nt, Human
accugcggugcuaucu

SEQ ID NO: 2538651 - RNA, 21 nt, Human
accugcgucucauacucaccu

SEQ ID NO: 2538652 - RNA, 12 nt, Human
accugcucuccu

SEQ ID NO: 2538653 - RNA, 18 nt, Human
accugcugagggaccagc

SEQ ID NO: 2538654 - RNA, 13 nt, Human
accugcuggcccc

SEQ ID NO: 2538655 - RNA, 19 nt, Human
accugcugagggaccagcc

SEQ ID NO: 2538656 - RNA, 20 nt, Human
accugcugagggaccagcca

SEQ ID NO: 2538657 - RNA, 23 nt, Human
accugcugagggaccagccaaga

SEQ ID NO: 2538658 - RNA, 14 nt, Human
accugcuggccccu

SEQ ID NO: 2538659 - RNA, 15 nt, Human
accugcuggccccuc

SEQ ID NO: 2538660 - RNA, 16 nt, Human
accugcuggccccuca

SEQ ID NO: 2538661 - RNA, 17 nt, Human
accugcuggccccucac

SEQ ID NO: 2538662 - RNA, 19 nt, Human
accugcuggccccucaccu

SEQ ID NO: 2538663 - RNA, 17 nt, Human
accugcuggguaaacug

SEQ ID NO: 2538664 - RNA, 21 nt, Human
accugcuggccccucaccugg

SEQ ID NO: 2538665 - RNA, 20 nt, Human
accuggaauauauaaccagu

SEQ ID NO: 2538666 - RNA, 19 nt, Human
accugcuucaugcucagcc

SEQ ID NO: 2538667 - RNA, 23 nt, Human
accugcuucaugcucagcccuga

SEQ ID NO: 2538668 - RNA, 21 nt, Human
accugcuucaugcucagcccu

SEQ ID NO: 2538669 - RNA, 21 nt, Human
accugcuuggguggagaagcc

SEQ ID NO: 2538670 - RNA, 18 nt, Human
accugcuuggguggagaa

SEQ ID NO: 2538671 - RNA, 19 nt, Human
accuggaauuguggggcaa

SEQ ID NO: 2538672 - RNA, 20 nt, Human
accugcuuggguggagaagc

SEQ ID NO: 2538673 - RNA, 23 nt, Human
uccaagggcuucugcacccucca

SEQ ID NO: 2538674 - RNA, 16 nt, Human
uccaauuaaggauuuu

SEQ ID NO: 2538675 - RNA, 17 nt, Human
uccaauuaaggauuuua

SEQ ID NO: 2538676 - RNA, 17 nt, Human
uccaauguuuagcaaau

SEQ ID NO: 2538677 - RNA, 19 nt, Human
uccaauguuuagcaaauac

SEQ ID NO: 2538678 - RNA, 15 nt, Human
uccaauuaaggauuu

SEQ ID NO: 2538679 - RNA, 18 nt, Human
uccaauguggcaaggaaa

SEQ ID NO: 2538680 - RNA, 21 nt, Human
uccaaugucuuuuuaagcuua

SEQ ID NO: 2538681 - RNA, 22 nt, Human
uccacauaaggaaacuggguuc

SEQ ID NO: 2538682 - RNA, 19 nt, Human
uccaauuccuugcacauag

SEQ ID NO: 2538683 - RNA, 14 nt, Human
uccacaucccggga

SEQ ID NO: 2538684 - RNA, 12 nt, Human
uccacauccucc

SEQ ID NO: 2538685 - RNA, 13 nt, Human
uccacauccucca

SEQ ID NO: 2538686 - RNA, 18 nt, Human
uccacaucugccuuaaaa

SEQ ID NO: 2538687 - RNA, 15 nt, Human
uccacaucugccuua

SEQ ID NO: 2538688 - RNA, 14 nt, Human
uccacaucugccuu

SEQ ID NO: 2538689 - RNA, 15 nt, Human
uccacauuguuuuaa

SEQ ID NO: 2538690 - RNA, 14 nt, Human
uccacauuguuuua

SEQ ID NO: 2538691 - RNA, 15 nt, Human
uccacaugggagccg

SEQ ID NO: 2538692 - RNA, 13 nt, Human
uccacaucugccu

SEQ ID NO: 2538693 - RNA, 12 nt, Human
uccacaucugcc

SEQ ID NO: 2538694 - RNA, 21 nt, Human
uccacaucuacguuuuuggug

SEQ ID NO: 2538695 - RNA, 19 nt, Human
uccacaucuacguuuuugg

SEQ ID NO: 2538696 - RNA, 19 nt, Human
uccacauccuccacguucu

SEQ ID NO: 2538697 - RNA, 22 nt, Human
uccacauccuuucuaaacaaga

SEQ ID NO: 2538698 - RNA, 15 nt, Human
uccaaaaaaauacug

SEQ ID NO: 2538699 - RNA, 14 nt, Human
uccaaaaaaauacu

SEQ ID NO: 2538700 - RNA, 13 nt, Human
uccaaaaaaauac

SEQ ID NO: 2538701 - RNA, 18 nt, Human
uccaaauggcgucuggaa

SEQ ID NO: 2538702 - RNA, 20 nt, Human
uccaaauggcgucuggaagu

SEQ ID NO: 2538703 - RNA, 20 nt, Human
uccaaaaagauuuucagaaa

SEQ ID NO: 2538704 - RNA, 19 nt, Human
uccaaaugcagcuuuaaaa

SEQ ID NO: 2538705 - RNA, 13 nt, Human
uccaaauucacaa

SEQ ID NO: 2538706 - RNA, 17 nt, Human
uccaaauguccuccaga

SEQ ID NO: 2538707 - RNA, 19 nt, Human
uccaaauguccuccagaag

SEQ ID NO: 2538708 - RNA, 20 nt, Human
uccaaauguccuccagaagc

SEQ ID NO: 2538709 - RNA, 22 nt, Human
uccaaauguccuccagaagccu

SEQ ID NO: 2538710 - RNA, 23 nt, Human
uccaaggaaaccacagcugcugg

SEQ ID NO: 2538711 - RNA, 22 nt, Human
uccaacaaaggguuuuaaugua

SEQ ID NO: 2538712 - RNA, 18 nt, Human
uccaacaaaggguuuuaa

SEQ ID NO: 2538713 - RNA, 15 nt, Human
uccaaggagaaacag

SEQ ID NO: 2538714 - RNA, 21 nt, Human
uccaaggaaaccacagcugcu

SEQ ID NO: 2538715 - RNA, 16 nt, Human
uccaaggagaaacaga

SEQ ID NO: 2538716 - RNA, 19 nt, Human
uccaaggagaaacagagac

SEQ ID NO: 2538717 - RNA, 20 nt, Human
uccaaggagaaacagagaca

SEQ ID NO: 2538718 - RNA, 22 nt, Human
uccaaggagaaacagagacagg

SEQ ID NO: 2538719 - RNA, 22 nt, Human
uccaagggcuucugcacccucc

SEQ ID NO: 2538720 - RNA, 21 nt, Human
uccaagggcuucugcacccuc

SEQ ID NO: 2538721 - RNA, 21 nt, Human
uccaaggggaaucagaacuca

SEQ ID NO: 2538722 - RNA, 19 nt, Human
uccaagggcuucugcaccc

SEQ ID NO: 2538723 - RNA, 16 nt, Human
uccaagggcuucugca

SEQ ID NO: 2538724 - RNA, 23 nt, Human
uccaaggcagaagcagcagggga

SEQ ID NO: 2538725 - RNA, 20 nt, Human
uccaaggaggggcuguaaaa

SEQ ID NO: 2538726 - RNA, 16 nt, Human
uccaaggcagaagcag

SEQ ID NO: 2538727 - RNA, 21 nt, Human
uccaaggaguuccaugaagac

SEQ ID NO: 2538728 - RNA, 12 nt, Human
uccaaggaguuc

SEQ ID NO: 2538729 - RNA, 23 nt, Human
uccaaggagaaacagagacaggc

SEQ ID NO: 2538730 - RNA, 20 nt, Human
uccacccaggagccccgagg

SEQ ID NO: 2538731 - RNA, 23 nt, Human
uccaccaugggguccuaccaaua

SEQ ID NO: 2538732 - RNA, 17 nt, Human
uccacauuguuuuaaaa

SEQ ID NO: 2538733 - RNA, 16 nt, Human
uccacauuguuuuaaa

SEQ ID NO: 2538734 - RNA, 21 nt, Human
uccaccaugggguccuaccaa

SEQ ID NO: 2538735 - RNA, 22 nt, Human
uccacccauccuaccaaugcau

SEQ ID NO: 2538736 - RNA, 20 nt, Human
uccaccccagugcacccacu

SEQ ID NO: 2538737 - RNA, 23 nt, Human
uccaccccagugcacccacucug

SEQ ID NO: 2538738 - RNA, 20 nt, Human
uccaccccaucccuccccag

SEQ ID NO: 2538739 - RNA, 12 nt, Human
uccaccccaucc

SEQ ID NO: 2538740 - RNA, 22 nt, Human
uccaccccaucccuccccaguu

SEQ ID NO: 2538741 - RNA, 20 nt, Human
accuggccaccugagguggg

SEQ ID NO: 2538742 - RNA, 18 nt, Human
accuggccaccugaggug

SEQ ID NO: 2538743 - RNA, 17 nt, Human
uccacccaggagccccg

SEQ ID NO: 2538744 - RNA, 13 nt, Human
uccacccaccuca

SEQ ID NO: 2538745 - RNA, 18 nt, Human
uccaccaucaagccacca

SEQ ID NO: 2538746 - RNA, 12 nt, Human
uccacccaccuc

SEQ ID NO: 2538747 - RNA, 13 nt, Human
accuggccucugc

SEQ ID NO: 2538748 - RNA, 12 nt, Human
accuggccucug

SEQ ID NO: 2538749 - RNA, 23 nt, Human
accuggccccaugucucucagaa

SEQ ID NO: 2538750 - RNA, 21 nt, Human
accuggccaccugaggugggc

SEQ ID NO: 2538751 - RNA, 21 nt, Human
accuggccccaugucucucag

SEQ ID NO: 2538752 - RNA, 15 nt, Human
accugggcauaucca

SEQ ID NO: 2538753 - RNA, 21 nt, Human
accugggcauacuaauaaagu

SEQ ID NO: 2538754 - RNA, 14 nt, Human
accugggcaccugg

SEQ ID NO: 2538755 - RNA, 18 nt, Human
accugggcaccuggggag

SEQ ID NO: 2538756 - RNA, 19 nt, Human
accugggcaccuggggagu

SEQ ID NO: 2538757 - RNA, 18 nt, Human
accugggauucaggaaug

SEQ ID NO: 2538758 - RNA, 13 nt, Human
accugggcaccug

SEQ ID NO: 2538759 - RNA, 16 nt, Human
accuggcugccauacu

SEQ ID NO: 2538760 - RNA, 23 nt, Human
accuggcugagguuccucugccu

SEQ ID NO: 2538761 - RNA, 20 nt, Human
accuggcuuuucuuucuacc

SEQ ID NO: 2538762 - RNA, 22 nt, Human
accugggaggcggauguugaag

SEQ ID NO: 2538763 - RNA, 13 nt, Human
accugggaagggg

SEQ ID NO: 2538764 - RNA, 14 nt, Human
accuuuuuuauaca

SEQ ID NO: 2538765 - RNA, 16 nt, Human
accuuuguccccaccg

SEQ ID NO: 2538766 - RNA, 15 nt, Human
accuuuguccccacc

SEQ ID NO: 2538767 - RNA, 14 nt, Human
accuuuguccccac

SEQ ID NO: 2538768 - RNA, 16 nt, Human
accuuuuuuauacaua

SEQ ID NO: 2538769 - RNA, 17 nt, Human
accuuuuuuauacauaa

SEQ ID NO: 2538770 - RNA, 18 nt, Human
accuuuuuuauacauaaa

SEQ ID NO: 2538771 - RNA, 21 nt, Human
accuugccugaacauccuucc

SEQ ID NO: 2538772 - RNA, 18 nt, Human
accuugccugaacauccu

SEQ ID NO: 2538773 - RNA, 24 nt, Human
accuugccugaacauccuuccuuc

SEQ ID NO: 2538774 - RNA, 23 nt, Human
accuugccugaacauccuuccuu

SEQ ID NO: 2538775 - RNA, 13 nt, Human
accuuugucccca

SEQ ID NO: 2538776 - RNA, 19 nt, Human
accuugcaucucauugcuc

SEQ ID NO: 2538777 - RNA, 15 nt, Human
accuugcaacuucau

SEQ ID NO: 2538778 - RNA, 17 nt, Human
accuugcaacacacaga

SEQ ID NO: 2538779 - RNA, 19 nt, Human
accuugcaacacacagaca

SEQ ID NO: 2538780 - RNA, 16 nt, Human
accuugacagggcaca

SEQ ID NO: 2538781 - RNA, 11 nt, Human
accuucuguag

SEQ ID NO: 2538782 - RNA, 22 nt, Human
accuugaggaggggcagguaaa

SEQ ID NO: 2538783 - RNA, 15 nt, Human
accuugagacagcuu

SEQ ID NO: 2538784 - RNA, 19 nt, Human
accuugaggagucuugugu

SEQ ID NO: 2538785 - RNA, 11 nt, Human
accuugagguc

SEQ ID NO: 2538786 - RNA, 15 nt, Human
accuugcaacacaca

SEQ ID NO: 2538787 - RNA, 16 nt, Human
accuugcaacacacag

SEQ ID NO: 2538788 - RNA, 22 nt, Human
accuugaggucuuuugacaugu

SEQ ID NO: 2538789 - RNA, 22 nt, Human
accuucuccuucaccuuugucc

SEQ ID NO: 2538790 - RNA, 22 nt, Human
accuucguuuacuaugccugug

SEQ ID NO: 2538791 - RNA, 23 nt, Human
accuucguuuacuaugccugugu

SEQ ID NO: 2538792 - RNA, 14 nt, Human
accuucuccuucac

SEQ ID NO: 2538793 - RNA, 23 nt, Human
accuucucuggagccaaguccag

SEQ ID NO: 2538794 - RNA, 22 nt, Human
accuucucuggagccaagucca

SEQ ID NO: 2538795 - RNA, 17 nt, Human
accuucucuggagccaa

SEQ ID NO: 2538796 - RNA, 15 nt, Human
accuucucuggagcc

SEQ ID NO: 2538797 - RNA, 22 nt, Human
accuucuaggacgccacccagc

SEQ ID NO: 2538798 - RNA, 12 nt, Human
accuucucugga

SEQ ID NO: 2538799 - RNA, 19 nt, Human
accuucuggcuuccuucuc

SEQ ID NO: 2538800 - RNA, 22 nt, Human
accuucuggccucccacagacu

SEQ ID NO: 2538801 - RNA, 18 nt, Human
accuucuggccucccaca

SEQ ID NO: 2538802 - RNA, 21 nt, Human
accuucguuuacuaugccugu

SEQ ID NO: 2538803 - RNA, 18 nt, Human
accuucgggcugugcccg

SEQ ID NO: 2538804 - RNA, 16 nt, Human
accuucgggcugugcc

SEQ ID NO: 2538805 - RNA, 17 nt, Human
accuucgggcugugccc

SEQ ID NO: 2538806 - RNA, 14 nt, Human
accuucgggcugug

SEQ ID NO: 2538807 - RNA, 15 nt, Human
accuucgggcugugc

SEQ ID NO: 2538808 - RNA, 15 nt, Human
accuucgccaccugg

SEQ ID NO: 2538809 - RNA, 17 nt, Human
accuucgccaccugggu

SEQ ID NO: 2538810 - RNA, 11 nt, Human
accuuccugcc

SEQ ID NO: 2538811 - RNA, 16 nt, Human
accuuccucgcagaga

SEQ ID NO: 2538812 - RNA, 17 nt, Human
accuuccucgcagagag

SEQ ID NO: 2538813 - RNA, 17 nt, Human
accuuccucacuuccau

SEQ ID NO: 2538814 - RNA, 16 nt, Human
accuuccucacuucca

SEQ ID NO: 2538815 - RNA, 15 nt, Human
accuuccucgcagag

SEQ ID NO: 2538816 - RNA, 13 nt, Human
accuuccucgcag

SEQ ID NO: 2538817 - RNA, 24 nt, Human
accuuccuucccugggcugugcua

SEQ ID NO: 2538818 - RNA, 18 nt, Human
accuuccugccaccaguc

SEQ ID NO: 2538819 - RNA, 22 nt, Human
accuuccuucccugggcugugc

SEQ ID NO: 2538820 - RNA, 19 nt, Human
accuuccuucccugggcug

SEQ ID NO: 2538821 - RNA, 12 nt, Human
accuuccucacu

SEQ ID NO: 2538822 - RNA, 19 nt, Human
accuucccucucaccaucc

SEQ ID NO: 2538823 - RNA, 17 nt, Human
accuucccaugcccugg

SEQ ID NO: 2538824 - RNA, 16 nt, Human
accuuccaagagccug

SEQ ID NO: 2538825 - RNA, 13 nt, Human
accuucccagcuc

SEQ ID NO: 2538826 - RNA, 17 nt, Human
accuucccagcucuccc

SEQ ID NO: 2538827 - RNA, 18 nt, Human
accuucccagcucucccu

SEQ ID NO: 2538828 - RNA, 19 nt, Human
accuucccagcucucccuc

SEQ ID NO: 2538829 - RNA, 18 nt, Human
accuggggcugcuggccu

SEQ ID NO: 2538830 - RNA, 15 nt, Human
accuggggcugcugg

SEQ ID NO: 2538831 - RNA, 20 nt, Human
accuggggcugcuggccuga

SEQ ID NO: 2538832 - RNA, 13 nt, Human
accuggggagugg

SEQ ID NO: 2538833 - RNA, 15 nt, Human
accuggggaguggga

SEQ ID NO: 2538834 - RNA, 14 nt, Human
accuggggcugcug

SEQ ID NO: 2538835 - RNA, 19 nt, Human
accuggggcagucaccugc

SEQ ID NO: 2538836 - RNA, 14 nt, Human
accuggggagccag

SEQ ID NO: 2538837 - RNA, 24 nt, Human
accuggggagugggacagagucug

SEQ ID NO: 2538838 - RNA, 21 nt, Human
accuggguaacuagggaagau

SEQ ID NO: 2538839 - RNA, 22 nt, Human
accuggggggcaguggugugga

SEQ ID NO: 2538840 - RNA, 18 nt, Human
accuggggugugggaggc

SEQ ID NO: 2538841 - RNA, 21 nt, Human
accuggggugugggaggcccg

SEQ ID NO: 2538842 - RNA, 17 nt, Human
accuucaauuccugggc

SEQ ID NO: 2538843 - RNA, 17 nt, Human
accuucagacuuugcuu

SEQ ID NO: 2538844 - RNA, 18 nt, Human
accuucaauuccugggcc

SEQ ID NO: 2538845 - RNA, 19 nt, Human
accuggguaaaugcagcgu

SEQ ID NO: 2538846 - RNA, 21 nt, Human
accuucauuucaggagggauu

SEQ ID NO: 2538847 - RNA, 15 nt, Human
accuuccaagagccu

SEQ ID NO: 2538848 - RNA, 18 nt, Human
accuucauuucaggaggg

SEQ ID NO: 2538849 - RNA, 19 nt, Human
accuucaguuaugauuuuu

SEQ ID NO: 2538850 - RNA, 22 nt, Human
ucacagaaucauaugauucugc

SEQ ID NO: 2538851 - RNA, 14 nt, Human
ucacagaccuggag

SEQ ID NO: 2538852 - RNA, 15 nt, Human
ucaauuuaaauaacc

SEQ ID NO: 2538853 - RNA, 11 nt, Human
ucacagaagaa

SEQ ID NO: 2538854 - RNA, 23 nt, Human
ucacagaaaugagaucaggcucu

SEQ ID NO: 2538855 - RNA, 12 nt, Human
ucacagaagaau

SEQ ID NO: 2538856 - RNA, 16 nt, Human
ucacagaccuuugaac

SEQ ID NO: 2538857 - RNA, 19 nt, Human
ucacagaccuggagccccu

SEQ ID NO: 2538858 - RNA, 18 nt, Human
ucacagaccuggagcccc

SEQ ID NO: 2538859 - RNA, 17 nt, Human
ucacagaccuggagccc

SEQ ID NO: 2538860 - RNA, 15 nt, Human
ucacagaccuggagc

SEQ ID NO: 2538861 - RNA, 22 nt, Human
ucacagaccuggagccccuggg

SEQ ID NO: 2538862 - RNA, 20 nt, Human
ucacagaccuggagccccug

SEQ ID NO: 2538863 - RNA, 21 nt, Human
ucacagagacauuccuccgag

SEQ ID NO: 2538864 - RNA, 12 nt, Human
ucaauuuaaaaa

SEQ ID NO: 2538865 - RNA, 12 nt, Human
accacacccagc

SEQ ID NO: 2538866 - RNA, 13 nt, Human
accacacccagcc

SEQ ID NO: 2538867 - RNA, 13 nt, Human
ucaauuuaaaaaa

SEQ ID NO: 2538868 - RNA, 23 nt, Human
ucaauuuaaacccauuuuaguca

SEQ ID NO: 2538869 - RNA, 21 nt, Human
ucaauuuaaacccauuuuagu

SEQ ID NO: 2538870 - RNA, 19 nt, Human
ucaauuuaaacccauuuua

SEQ ID NO: 2538871 - RNA, 14 nt, Human
ucaauuuaaaccca

SEQ ID NO: 2538872 - RNA, 21 nt, Human
ucacagaacccuuggagccaa

SEQ ID NO: 2538873 - RNA, 18 nt, Human
ucacagagugugcuggag

SEQ ID NO: 2538874 - RNA, 15 nt, Human
ucacagagugugcug

SEQ ID NO: 2538875 - RNA, 14 nt, Human
ucacagagugugcu

SEQ ID NO: 2538876 - RNA, 23 nt, Human
ucacagagacauuccuccgagcc

SEQ ID NO: 2538877 - RNA, 19 nt, Human
ucacagagugugcuggagg

SEQ ID NO: 2538878 - RNA, 16 nt, Human
ucacagccaccccuga

SEQ ID NO: 2538879 - RNA, 15 nt, Human
ucacagaugggugcu

SEQ ID NO: 2538880 - RNA, 14 nt, Human
ucacagaugggugc

SEQ ID NO: 2538881 - RNA, 22 nt, Human
ucacagagacauuccuccgagc

SEQ ID NO: 2538882 - RNA, 23 nt, Human
ucacagaccuggagccccugggu

SEQ ID NO: 2538883 - RNA, 12 nt, Human
ucacagaggcuu

SEQ ID NO: 2538884 - RNA, 17 nt, Human
ucacagaggcuucuuca

SEQ ID NO: 2538885 - RNA, 17 nt, Human
ucacagccagacuggca

SEQ ID NO: 2538886 - RNA, 23 nt, Human
ucacagccagacuggcacaguuu

SEQ ID NO: 2538887 - RNA, 20 nt, Human
ucacagccucaagucacucc

SEQ ID NO: 2538888 - RNA, 23 nt, Human
ucacagcccugcuuaccagauaa

SEQ ID NO: 2538889 - RNA, 16 nt, Human
ucacagccacuuggga

SEQ ID NO: 2538890 - RNA, 18 nt, Human
ucacauauugauuuccgu

SEQ ID NO: 2538891 - RNA, 20 nt, Human
ucacauauugauuuccguua

SEQ ID NO: 2538892 - RNA, 17 nt, Human
ucacagcuuguauuuug

SEQ ID NO: 2538893 - RNA, 13 nt, Human
ucacagcugcuuu

SEQ ID NO: 2538894 - RNA, 13 nt, Human
ucacaucacagga

SEQ ID NO: 2538895 - RNA, 16 nt, Human
ucacauauugauuucc

SEQ ID NO: 2538896 - RNA, 19 nt, Human
ucacagcuucagccaggag

SEQ ID NO: 2538897 - RNA, 17 nt, Human
ucacagcuucagccagg

SEQ ID NO: 2538898 - RNA, 11 nt, Human
ucacagcugcu

SEQ ID NO: 2538899 - RNA, 16 nt, Human
ucacagcuccucccac

SEQ ID NO: 2538900 - RNA, 14 nt, Human
ucacagcuccuccc

SEQ ID NO: 2538901 - RNA, 11 nt, Human
ucacagcuccu

SEQ ID NO: 2538902 - RNA, 16 nt, Human
ucacagcuucagccag

SEQ ID NO: 2538903 - RNA, 15 nt, Human
ucacagcuucagcca

SEQ ID NO: 2538904 - RNA, 17 nt, Human
ucaccagccccagugcc

SEQ ID NO: 2538905 - RNA, 15 nt, Human
ucacauuauuugcau

SEQ ID NO: 2538906 - RNA, 13 nt, Human
ucacauucaggaa

SEQ ID NO: 2538907 - RNA, 16 nt, Human
ucacauuauuugcaug

SEQ ID NO: 2538908 - RNA, 19 nt, Human
ucacauuaauauuugcuga

SEQ ID NO: 2538909 - RNA, 19 nt, Human
ucacauuacuguauauacu

SEQ ID NO: 2538910 - RNA, 20 nt, Human
ucacauuaauauuugcugac

SEQ ID NO: 2538911 - RNA, 16 nt, Human
ucacauguauguuuug

SEQ ID NO: 2538912 - RNA, 15 nt, Human
ucacauguauguuuu

SEQ ID NO: 2538913 - RNA, 13 nt, Human
ucacauguauguu

SEQ ID NO: 2538914 - RNA, 21 nt, Human
ucacaugucaguaccuucaaa

SEQ ID NO: 2538915 - RNA, 23 nt, Human
ucacauguauguuuugguaucug

SEQ ID NO: 2538916 - RNA, 21 nt, Human
ucacauggccuaugcacauau

SEQ ID NO: 2538917 - RNA, 16 nt, Human
ucacauggccuaugca

SEQ ID NO: 2538918 - RNA, 21 nt, Human
ucacauggugcuacgccugca

SEQ ID NO: 2538919 - RNA, 23 nt, Human
accacacccagcccacuucugcc

SEQ ID NO: 2538920 - RNA, 21 nt, Human
accacacccagcccacuucug

SEQ ID NO: 2538921 - RNA, 20 nt, Human
accacacccagcccacuucu

SEQ ID NO: 2538922 - RNA, 16 nt, Human
accacacccagcccac

SEQ ID NO: 2538923 - RNA, 17 nt, Human
accacaccaaaccucuc

SEQ ID NO: 2538924 - RNA, 15 nt, Human
accacaccaaaccuc

SEQ ID NO: 2538925 - RNA, 15 nt, Human
accacacccagccca

SEQ ID NO: 2538926 - RNA, 21 nt, Human
accacaaggcuguugcauggg

SEQ ID NO: 2538927 - RNA, 17 nt, Human
accacacagaggcugcc

SEQ ID NO: 2538928 - RNA, 17 nt, Human
accaaugcaugcagcca

SEQ ID NO: 2538929 - RNA, 12 nt, Human
accaaugcaugc

SEQ ID NO: 2538930 - RNA, 17 nt, Human
accaaugaaaaaaugua

SEQ ID NO: 2538931 - RNA, 14 nt, Human
accaaugaaaaaau

SEQ ID NO: 2538932 - RNA, 13 nt, Human
accaauccuggac

SEQ ID NO: 2538933 - RNA, 16 nt, Human
accaacccagccgcug

SEQ ID NO: 2538934 - RNA, 15 nt, Human
accaacccagccgcu

SEQ ID NO: 2538935 - RNA, 14 nt, Human
accaacccagccgc

SEQ ID NO: 2538936 - RNA, 13 nt, Human
accaacccagccg

SEQ ID NO: 2538937 - RNA, 15 nt, Human
accaacccucagagc

SEQ ID NO: 2538938 - RNA, 20 nt, Human
accaaucauuuuaauuauua

SEQ ID NO: 2538939 - RNA, 20 nt, Human
accaacccagccgcugcccg

SEQ ID NO: 2538940 - RNA, 19 nt, Human
accaacccagccgcugccc

SEQ ID NO: 2538941 - RNA, 22 nt, Human
accaacccaucagaaggagaag

SEQ ID NO: 2538942 - RNA, 18 nt, Human
accacaaauagugcucgc

SEQ ID NO: 2538943 - RNA, 20 nt, Human
accacaaagcacaguuugaa

SEQ ID NO: 2538944 - RNA, 16 nt, Human
accacaagacugcaca

SEQ ID NO: 2538945 - RNA, 19 nt, Human
accaaugcuuuuaucaaac

SEQ ID NO: 2538946 - RNA, 12 nt, Human
accaaugucuug

SEQ ID NO: 2538947 - RNA, 18 nt, Human
accaaugcuuuuaucaaa

SEQ ID NO: 2538948 - RNA, 22 nt, Human
accaaugcaugcagccacugug

SEQ ID NO: 2538949 - RNA, 20 nt, Human
accaaugcaugcagccacug

SEQ ID NO: 2538950 - RNA, 18 nt, Human
accaaugcaugcagccac

SEQ ID NO: 2538951 - RNA, 21 nt, Human
accaaugccaaaaaaagacag

SEQ ID NO: 2538952 - RNA, 14 nt, Human
accaacacgagcag

SEQ ID NO: 2538953 - RNA, 19 nt, Human
accaacacgagcaggcuac

SEQ ID NO: 2538954 - RNA, 14 nt, Human
accaaauuccuugg

SEQ ID NO: 2538955 - RNA, 20 nt, Human
accaaccacugcgaccacaa

SEQ ID NO: 2538956 - RNA, 22 nt, Human
accaacaucccauugcccuggu

SEQ ID NO: 2538957 - RNA, 15 nt, Human
accaacauggagaaa

SEQ ID NO: 2538958 - RNA, 16 nt, Human
accaacauggagaaac

SEQ ID NO: 2538959 - RNA, 23 nt, Human
accaacauggagaaacccugucu

SEQ ID NO: 2538960 - RNA, 12 nt, Human
accaacccagcc

SEQ ID NO: 2538961 - RNA, 24 nt, Human
accaacauggagaaacccugucuc

SEQ ID NO: 2538962 - RNA, 16 nt, Human
accaacauacucccau

SEQ ID NO: 2538963 - RNA, 21 nt, Human
accaacaucccauugcccugg

SEQ ID NO: 2538964 - RNA, 16 nt, Human
accaacaguuccuuca

SEQ ID NO: 2538965 - RNA, 13 nt, Human
accaaaucuggaa

SEQ ID NO: 2538966 - RNA, 22 nt, Human
accaaaugcuuuaaaaacuauu

SEQ ID NO: 2538967 - RNA, 19 nt, Human
accaaaugcuuuaaaaacu

SEQ ID NO: 2538968 - RNA, 13 nt, Human
accaaaugcuuua

SEQ ID NO: 2538969 - RNA, 15 nt, Human
accaaaucuggaagc

SEQ ID NO: 2538970 - RNA, 11 nt, Human
accaaaugcuu

SEQ ID NO: 2538971 - RNA, 16 nt, Human
accaaaucagcugcua

SEQ ID NO: 2538972 - RNA, 19 nt, Human
accaaaucagcugcuacua

SEQ ID NO: 2538973 - RNA, 18 nt, Human
accaaauaaaaauauugu

SEQ ID NO: 2538974 - RNA, 16 nt, Human
accaaauaaaaauauu

SEQ ID NO: 2538975 - RNA, 17 nt, Human
accaaaaagaccagacu

SEQ ID NO: 2538976 - RNA, 19 nt, Human
accaaaaacugaaagugaa

SEQ ID NO: 2538977 - RNA, 18 nt, Human
ucaaggcgugaggauggg

SEQ ID NO: 2538978 - RNA, 20 nt, Human
ucaagguggccaaauuauuu

SEQ ID NO: 2538979 - RNA, 16 nt, Human
ucaaggcacugccuga

SEQ ID NO: 2538980 - RNA, 15 nt, Human
ucaaggcacugccug

SEQ ID NO: 2538981 - RNA, 14 nt, Human
ucaaggcacugccu

SEQ ID NO: 2538982 - RNA, 13 nt, Human
ucaaggcacugcc

SEQ ID NO: 2538983 - RNA, 16 nt, Human
ucaaggccucccacag

SEQ ID NO: 2538984 - RNA, 15 nt, Human
ucaaggccucccaca

SEQ ID NO: 2538985 - RNA, 17 nt, Human
ucaaggcaucaugcaga

SEQ ID NO: 2538986 - RNA, 14 nt, Human
ucaaggccucccac

SEQ ID NO: 2538987 - RNA, 18 nt, Human
ucaaggccucccacagug

SEQ ID NO: 2538988 - RNA, 17 nt, Human
ucaaggccucccacagu

SEQ ID NO: 2538989 - RNA, 19 nt, Human
ucaaggccucccacaguga

SEQ ID NO: 2538990 - RNA, 23 nt, Human
ucaaggauccugagccagauuuc

SEQ ID NO: 2538991 - RNA, 22 nt, Human
ucaagcagcgaccgcccccucc

SEQ ID NO: 2538992 - RNA, 21 nt, Human
ucaagcagcgaccgcccccuc

SEQ ID NO: 2538993 - RNA, 18 nt, Human
ucaagcagcgaccgcccc

SEQ ID NO: 2538994 - RNA, 12 nt, Human
ucaagcagccaa

SEQ ID NO: 2538995 - RNA, 17 nt, Human
ucaagcagauuggagaa

SEQ ID NO: 2538996 - RNA, 21 nt, Human
ucaagcaaacagcuucacaaa

SEQ ID NO: 2538997 - RNA, 18 nt, Human
ucaagauuuugaaugcuu

SEQ ID NO: 2538998 - RNA, 19 nt, Human
ucaagauuuugaaugcuuc

SEQ ID NO: 2538999 - RNA, 17 nt, Human
ucaagauuucaggauua

SEQ ID NO: 2539000 - RNA, 13 nt, Human
ucaagauuuugaa

SEQ ID NO: 2539001 - RNA, 16 nt, Human
ucaagauuuugaaugc

SEQ ID NO: 2539002 - RNA, 16 nt, Human
ucaagcagauuggaga

SEQ ID NO: 2539003 - RNA, 17 nt, Human
ucaagcaagauuucaga

SEQ ID NO: 2539004 - RNA, 12 nt, Human
ucaagaggcuga

SEQ ID NO: 2539005 - RNA, 14 nt, Human
acauuauuugcaug

SEQ ID NO: 2539006 - RNA, 17 nt, Human
ucaagagcugcccuccu

SEQ ID NO: 2539007 - RNA, 18 nt, Human
acauuauuaucaacaaua

SEQ ID NO: 2539008 - RNA, 16 nt, Human
acauuauuuauucagc

SEQ ID NO: 2539009 - RNA, 13 nt, Human
acauuauuugcau

SEQ ID NO: 2539010 - RNA, 18 nt, Human
acauuaucgggagcagug

SEQ ID NO: 2539011 - RNA, 19 nt, Human
acauuaucgggagcagugu

SEQ ID NO: 2539012 - RNA, 21 nt, Human
acauuaucgggagcagugucu

SEQ ID NO: 2539013 - RNA, 19 nt, Human
acauuaucucacuugugcc

SEQ ID NO: 2539014 - RNA, 22 nt, Human
acauuaucgggagcagugucuu

SEQ ID NO: 2539015 - RNA, 21 nt, Human
ucaagagggcacugguggccc

SEQ ID NO: 2539016 - RNA, 20 nt, Human
ucaagagggcacugguggcc

SEQ ID NO: 2539017 - RNA, 17 nt, Human
ucaagagggucugagga

SEQ ID NO: 2539018 - RNA, 19 nt, Human
ucaauaggaaaaacugauu

SEQ ID NO: 2539019 - RNA, 18 nt, Human
ucaauaggaaaaacugau

SEQ ID NO: 2539020 - RNA, 17 nt, Human
ucaauaggaaaaacuga

SEQ ID NO: 2539021 - RNA, 17 nt, Human
ucaagugauucuccugc

SEQ ID NO: 2539022 - RNA, 21 nt, Human
ucaagugauucucaugccuca

SEQ ID NO: 2539023 - RNA, 22 nt, Human
ucaagugauucucaugccucag

SEQ ID NO: 2539024 - RNA, 16 nt, Human
ucaagugauucuccug

SEQ ID NO: 2539025 - RNA, 18 nt, Human
ucaaguaagaagacauga

SEQ ID NO: 2539026 - RNA, 22 nt, Human
ucaaguaagaagacaugaacca

SEQ ID NO: 2539027 - RNA, 17 nt, Human
ucaaguaauucugcugu

SEQ ID NO: 2539028 - RNA, 23 nt, Human
ucaaguaagaagacaugaaccaa

SEQ ID NO: 2539029 - RNA, 15 nt, Human
ucaaguaauugugaa

SEQ ID NO: 2539030 - RNA, 16 nt, Human
ucaaguaauugugaaa

SEQ ID NO: 2539031 - RNA, 16 nt, Human
ucaaguaagaagacau

SEQ ID NO: 2539032 - RNA, 19 nt, Human
ucaaguaauccaccugccu

SEQ ID NO: 2539033 - RNA, 21 nt, Human
ucaaucaguauaauucuguac

SEQ ID NO: 2539034 - RNA, 16 nt, Human
ucaaucaguauaauuc

SEQ ID NO: 2539035 - RNA, 15 nt, Human
ucaaucaguauaauu

SEQ ID NO: 2539036 - RNA, 14 nt, Human
ucaaucaguauaau

SEQ ID NO: 2539037 - RNA, 20 nt, Human
ucaaucacagcuuguauuuu

SEQ ID NO: 2539038 - RNA, 12 nt, Human
ucaaucacagcu

SEQ ID NO: 2539039 - RNA, 22 nt, Human
ucaaucaguauaauucuguacu

SEQ ID NO: 2539040 - RNA, 15 nt, Human
ucaaucaucugugug

SEQ ID NO: 2539041 - RNA, 20 nt, Human
ucaaucaucugugugaaaau

SEQ ID NO: 2539042 - RNA, 16 nt, Human
ucaaucaucuguguga

SEQ ID NO: 2539043 - RNA, 16 nt, Human
ucaaucauuguacagu

SEQ ID NO: 2539044 - RNA, 15 nt, Human
ucaaucauuguacag

SEQ ID NO: 2539045 - RNA, 14 nt, Human
ucaaucauuguaca

SEQ ID NO: 2539046 - RNA, 19 nt, Human
ucaaucaucugugugaaaa

SEQ ID NO: 2539047 - RNA, 18 nt, Human
ucaaucauuguacaguuu

SEQ ID NO: 2539048 - RNA, 15 nt, Human
ucaauccagcuaugu

SEQ ID NO: 2539049 - RNA, 15 nt, Human
ucaauccccucauuc

SEQ ID NO: 2539050 - RNA, 17 nt, Human
ucaauccccucauucag

SEQ ID NO: 2539051 - RNA, 20 nt, Human
ucaauccccucauucaggaa

SEQ ID NO: 2539052 - RNA, 23 nt, Human
ucaauauuucagauaaucacaau

SEQ ID NO: 2539053 - RNA, 22 nt, Human
ucaauaggaaaaacugauuuuu

SEQ ID NO: 2539054 - RNA, 16 nt, Human
ucaauauuuuuagaua

SEQ ID NO: 2539055 - RNA, 18 nt, Human
ucaauauuuuccaugaaa

SEQ ID NO: 2539056 - RNA, 17 nt, Human
ucaauauuuuccaugaa

SEQ ID NO: 2539057 - RNA, 16 nt, Human
ucaauauuuuccauga

SEQ ID NO: 2539058 - RNA, 15 nt, Human
ucaauauuuuccaug

SEQ ID NO: 2539059 - RNA, 15 nt, Human
acauuuuuaagugcu

SEQ ID NO: 2539060 - RNA, 18 nt, Human
acauuuuuaagugcugca

SEQ ID NO: 2539061 - RNA, 14 nt, Human
acauuuuuacaaua

SEQ ID NO: 2539062 - RNA, 15 nt, Human
acauuuuuacaauaa

SEQ ID NO: 2539063 - RNA, 21 nt, Human
acauuuuucagauauaaaaga

SEQ ID NO: 2539064 - RNA, 13 nt, Human
acauuuuucuuag

SEQ ID NO: 2539065 - RNA, 23 nt, Human
acauuuuucuuagggaaggauac

SEQ ID NO: 2539066 - RNA, 15 nt, Human
accaaaaaaguuaca

SEQ ID NO: 2539067 - RNA, 21 nt, Human
acauuuuguauaauuguaucg

SEQ ID NO: 2539068 - RNA, 19 nt, Human
acauuuuguauaauuguau

SEQ ID NO: 2539069 - RNA, 16 nt, Human
acauuuuguauaauug

SEQ ID NO: 2539070 - RNA, 13 nt, Human
acauuuuguauaa

SEQ ID NO: 2539071 - RNA, 15 nt, Human
acauuuuaguucuuu

SEQ ID NO: 2539072 - RNA, 12 nt, Human
acauuuuguaua

SEQ ID NO: 2539073 - RNA, 18 nt, Human
acauuuuacuuuuuccug

SEQ ID NO: 2539074 - RNA, 23 nt, Human
acauuuaaauuuuacccuuuaga

SEQ ID NO: 2539075 - RNA, 21 nt, Human
acauuguuuugccaacauugc

SEQ ID NO: 2539076 - RNA, 17 nt, Human
acauuuaaacuugucag

SEQ ID NO: 2539077 - RNA, 16 nt, Human
acauuuaauacagcag

SEQ ID NO: 2539078 - RNA, 22 nt, Human
acauuuaacuuguuuccaaugu

SEQ ID NO: 2539079 - RNA, 20 nt, Human
acauuuaagagacagucacc

SEQ ID NO: 2539080 - RNA, 17 nt, Human
acauuuaauacagcagu

SEQ ID NO: 2539081 - RNA, 18 nt, Human
acauuuuaaauggacaga

SEQ ID NO: 2539082 - RNA, 13 nt, Human
acauuuuaauuca

SEQ ID NO: 2539083 - RNA, 15 nt, Human
acauuuuaaugcacc

SEQ ID NO: 2539084 - RNA, 19 nt, Human
acauuuuaaugcaccugaa

SEQ ID NO: 2539085 - RNA, 22 nt, Human
acauugcggacagccacggcca

SEQ ID NO: 2539086 - RNA, 21 nt, Human
acauugcggacagccacggcc

SEQ ID NO: 2539087 - RNA, 15 nt, Human
acauugcguuugacc

SEQ ID NO: 2539088 - RNA, 23 nt, Human
acauugcguuugaccuuuuaugu

SEQ ID NO: 2539089 - RNA, 22 nt, Human
ucaauccuaauuucuccucccu

SEQ ID NO: 2539090 - RNA, 15 nt, Human
ucaauccuaccuguu

SEQ ID NO: 2539091 - RNA, 21 nt, Human
ucaauccuaauuucuccuccc

SEQ ID NO: 2539092 - RNA, 22 nt, Human
ucaauccccucauucaggaaaa

SEQ ID NO: 2539093 - RNA, 23 nt, Human
acauugcuuugaccacucuuccu

SEQ ID NO: 2539094 - RNA, 21 nt, Human
acauugcuuuacugucaaaau

SEQ ID NO: 2539095 - RNA, 18 nt, Human
acauugcuuuacugucaa

SEQ ID NO: 2539096 - RNA, 17 nt, Human
acauugcuaagaugcuc

SEQ ID NO: 2539097 - RNA, 14 nt, Human
acauugcuaagaug

SEQ ID NO: 2539098 - RNA, 22 nt, Human
acauugccuuuucuagcccgaa

SEQ ID NO: 2539099 - RNA, 20 nt, Human
acauugcuugugccacaccc

SEQ ID NO: 2539100 - RNA, 16 nt, Human
acauuggagccugggc

SEQ ID NO: 2539101 - RNA, 21 nt, Human
acauuggcaccuaauccaggc

SEQ ID NO: 2539102 - RNA, 22 nt, Human
acauuggcaccuaauccaggca

SEQ ID NO: 2539103 - RNA, 17 nt, Human
acauugggcagcgcccu

SEQ ID NO: 2539104 - RNA, 17 nt, Human
acauugggaaaucuuau

SEQ ID NO: 2539105 - RNA, 23 nt, Human
acauugggaaggggacccccgcc

SEQ ID NO: 2539106 - RNA, 19 nt, Human
acauugggaaggggacccc

SEQ ID NO: 2539107 - RNA, 15 nt, Human
acauugggaagggga

SEQ ID NO: 2539108 - RNA, 16 nt, Human
acauugguaagaauga

SEQ ID NO: 2539109 - RNA, 22 nt, Human
acauugggcagcgcccuuccuc

SEQ ID NO: 2539110 - RNA, 21 nt, Human
acauugggcagcgcccuuccu

SEQ ID NO: 2539111 - RNA, 20 nt, Human
acauugggcagcgcccuucc

SEQ ID NO: 2539112 - RNA, 23 nt, Human
acauuggguccugggucuuucau

SEQ ID NO: 2539113 - RNA, 14 nt, Human
acauugguucuugu

SEQ ID NO: 2539114 - RNA, 16 nt, Human
acauugguucuuguau

SEQ ID NO: 2539115 - RNA, 18 nt, Human
acauugguucuuguauua

SEQ ID NO: 2539116 - RNA, 21 nt, Human
acauugguucuuguauuaaga

SEQ ID NO: 2539117 - RNA, 21 nt, Human
acauuguaaauaguauuugag

SEQ ID NO: 2539118 - RNA, 19 nt, Human
acauuguaaauaguauuug

SEQ ID NO: 2539119 - RNA, 17 nt, Human
acauuguaaauaguauu

SEQ ID NO: 2539120 - RNA, 22 nt, Human
acauugguucuuguauuaagaa

SEQ ID NO: 2539121 - RNA, 23 nt, Human
acauugguucuuguauuaagaau

SEQ ID NO: 2539122 - RNA, 12 nt, Human
acauuguuuugc

SEQ ID NO: 2539123 - RNA, 18 nt, Human
acauuguuuuaaaaagaa

SEQ ID NO: 2539124 - RNA, 17 nt, Human
acauuguuuuaaaaaga

SEQ ID NO: 2539125 - RNA, 16 nt, Human
acauuguuuuaaaaag

SEQ ID NO: 2539126 - RNA, 15 nt, Human
acauuguuuuaaaaa

SEQ ID NO: 2539127 - RNA, 13 nt, Human
acauuguuuuaaa

SEQ ID NO: 2539128 - RNA, 19 nt, Human
uauuuuaauaauguuucaa

SEQ ID NO: 2539129 - RNA, 17 nt, Human
uauuuuaauaaacacuc

SEQ ID NO: 2539130 - RNA, 14 nt, Human
uauuuuaauaaaca

SEQ ID NO: 2539131 - RNA, 14 nt, Human
uauuuuacaauuuu

SEQ ID NO: 2539132 - RNA, 23 nt, Human
uauuuuacaauuuuuuaucaugc

SEQ ID NO: 2539133 - RNA, 22 nt, Human
uauuuuaauaauguuucaaaca

SEQ ID NO: 2539134 - RNA, 19 nt, Human
uauuuuaauuuaugaguuu

SEQ ID NO: 2539135 - RNA, 14 nt, Human
uauuuuaaguauug

SEQ ID NO: 2539136 - RNA, 16 nt, Human
uauuuuggagaaauua

SEQ ID NO: 2539137 - RNA, 20 nt, Human
uauuuuggauuguauauugu

SEQ ID NO: 2539138 - RNA, 17 nt, Human
uauuuugguacuuuuau

SEQ ID NO: 2539139 - RNA, 14 nt, Human
uauuuugguacuuu

SEQ ID NO: 2539140 - RNA, 23 nt, Human
uauuuuggauuguauauuguguu

SEQ ID NO: 2539141 - RNA, 20 nt, Human
uauuuugcuuugugauuuuu

SEQ ID NO: 2539142 - RNA, 13 nt, Human
uauuuugcuuugu

SEQ ID NO: 2539143 - RNA, 15 nt, Human
uauuuugcuuuguga

SEQ ID NO: 2539144 - RNA, 16 nt, Human
uauuuuacuacugugg

SEQ ID NO: 2539145 - RNA, 18 nt, Human
uauuuuacuucuagagau

SEQ ID NO: 2539146 - RNA, 14 nt, Human
uauuuugcacaguu

SEQ ID NO: 2539147 - RNA, 18 nt, Human
uauuuugauuauuguauu

SEQ ID NO: 2539148 - RNA, 14 nt, Human
uauuuugcuggaau

SEQ ID NO: 2539149 - RNA, 17 nt, Human
uauuuugauuauuguau

SEQ ID NO: 2539150 - RNA, 16 nt, Human
uauuuugauuauugua

SEQ ID NO: 2539151 - RNA, 19 nt, Human
uauuuuucauauugugcca

SEQ ID NO: 2539152 - RNA, 15 nt, Human
uauuuuucauauugu

SEQ ID NO: 2539153 - RNA, 12 nt, Human
uauuuuucauga

SEQ ID NO: 2539154 - RNA, 20 nt, Human
uauuuuucaugauuuugaaa

SEQ ID NO: 2539155 - RNA, 18 nt, Human
uauuuuugguugucaaua

SEQ ID NO: 2539156 - RNA, 20 nt, Human
uauuuuuggcagucugaauu

SEQ ID NO: 2539157 - RNA, 19 nt, Human
uauuuuuggcagucugaau

SEQ ID NO: 2539158 - RNA, 17 nt, Human
uauuuuuguagagccag

SEQ ID NO: 2539159 - RNA, 20 nt, Human
uauuuuuguaauuuuaaaua

SEQ ID NO: 2539160 - RNA, 14 nt, Human
uauuuuucauauug

SEQ ID NO: 2539161 - RNA, 13 nt, Human
uauuuuucauauu

SEQ ID NO: 2539162 - RNA, 11 nt, Human
uauuuuucaua

SEQ ID NO: 2539163 - RNA, 20 nt, Human
uauuuuucaauaaagcauuu

SEQ ID NO: 2539164 - RNA, 15 nt, Human
uauuuuucacaguuu

SEQ ID NO: 2539165 - RNA, 21 nt, Human
uauuuuuaauauauacuauga

SEQ ID NO: 2539166 - RNA, 14 nt, Human
uauuuuuaagauaa

SEQ ID NO: 2539167 - RNA, 18 nt, Human
uauuuuucaauaaagcau

SEQ ID NO: 2539168 - RNA, 12 nt, Human
uauuuuuaaugg

SEQ ID NO: 2539169 - RNA, 13 nt, Human
uauuuuuauuugu

SEQ ID NO: 2539170 - RNA, 17 nt, Human
uauuuuuauuuguuugu

SEQ ID NO: 2539171 - RNA, 20 nt, Human
uauuuuguguuuaggaacua

SEQ ID NO: 2539172 - RNA, 17 nt, Human
uauuuuguguuuaggaa

SEQ ID NO: 2539173 - RNA, 13 nt, Human
uauuuugucuaaa

SEQ ID NO: 2539174 - RNA, 12 nt, Human
uauuuugucuaa

SEQ ID NO: 2539175 - RNA, 13 nt, Human
uauuuugugaaga

SEQ ID NO: 2539176 - RNA, 14 nt, Human
uauuuugucuaaaa

SEQ ID NO: 2539177 - RNA, 21 nt, Human
uauuuugguucuuaguucuca

SEQ ID NO: 2539178 - RNA, 13 nt, Human
uauuuuguaaacu

SEQ ID NO: 2539179 - RNA, 20 nt, Human
uauuuuguaaacucaaaaua

SEQ ID NO: 2539180 - RNA, 15 nt, Human
uauuuuguauauauc

SEQ ID NO: 2539181 - RNA, 16 nt, Human
uauuuuguaauuauug

SEQ ID NO: 2539182 - RNA, 19 nt, Human
uauuuugguucuuaguucu

SEQ ID NO: 2539183 - RNA, 21 nt, Human
uauuuuguaaacucaaaauau

SEQ ID NO: 2539184 - RNA, 14 nt, Human
uauuuuguaauuau

SEQ ID NO: 2539185 - RNA, 22 nt, Human
uaugugcacugucacuuugcuc

SEQ ID NO: 2539186 - RNA, 21 nt, Human
uaugugcacugucacuuugcu

SEQ ID NO: 2539187 - RNA, 20 nt, Human
uaugugcacugucacuuugc

SEQ ID NO: 2539188 - RNA, 17 nt, Human
uaugugcacugucacuu

SEQ ID NO: 2539189 - RNA, 18 nt, Human
uaugugggggucugugug

SEQ ID NO: 2539190 - RNA, 19 nt, Human
uaugugggggucugugugu

SEQ ID NO: 2539191 - RNA, 20 nt, Human
uaugugggggucuguguguu

SEQ ID NO: 2539192 - RNA, 19 nt, Human
uaugugccagauuuaugca

SEQ ID NO: 2539193 - RNA, 14 nt, Human
uaugugccagauuu

SEQ ID NO: 2539194 - RNA, 16 nt, Human
acaucuugcucugcug

SEQ ID NO: 2539195 - RNA, 15 nt, Human
acaucuugcucugcu

SEQ ID NO: 2539196 - RNA, 17 nt, Human
uauguguaaaaugugaa

SEQ ID NO: 2539197 - RNA, 14 nt, Human
uauguguaaaaugu

SEQ ID NO: 2539198 - RNA, 19 nt, Human
uaugugguuuccacgauga

SEQ ID NO: 2539199 - RNA, 17 nt, Human
acaucuugcucugcuga

SEQ ID NO: 2539200 - RNA, 22 nt, Human
acaucuugcucugcugacagac

SEQ ID NO: 2539201 - RNA, 19 nt, Human
acaucuuggucagauuuga

SEQ ID NO: 2539202 - RNA, 14 nt, Human
acaucuugcucugc

SEQ ID NO: 2539203 - RNA, 24 nt, Human
acaucuuggcacauuuaagagaca

SEQ ID NO: 2539204 - RNA, 13 nt, Human
acaucuuggcaca

SEQ ID NO: 2539205 - RNA, 24 nt, Human
acaucuuuucuugccucugucccc

SEQ ID NO: 2539206 - RNA, 23 nt, Human
acaugaaaaaaggacaauuucaa

SEQ ID NO: 2539207 - RNA, 19 nt, Human
acaucuuuuuucacaaauu

SEQ ID NO: 2539208 - RNA, 15 nt, Human
acaucuuuuuucaca

SEQ ID NO: 2539209 - RNA, 14 nt, Human
acaucuuuccuguc

SEQ ID NO: 2539210 - RNA, 20 nt, Human
acaucuuucacacuuccacc

SEQ ID NO: 2539211 - RNA, 17 nt, Human
acaucuuuaucuguucu

SEQ ID NO: 2539212 - RNA, 13 nt, Human
acaucuuuauccg

SEQ ID NO: 2539213 - RNA, 12 nt, Human
acaucuuucaca

SEQ ID NO: 2539214 - RNA, 14 nt, Human
acaucuuucacacu

SEQ ID NO: 2539215 - RNA, 15 nt, Human
acaucuuucacacuu

SEQ ID NO: 2539216 - RNA, 13 nt, Human
acaucuuucacau

SEQ ID NO: 2539217 - RNA, 15 nt, Human
acaucuuucacauug

SEQ ID NO: 2539218 - RNA, 14 nt, Human
uauuuuaaaagaau

SEQ ID NO: 2539219 - RNA, 18 nt, Human
uauuuguuauuuucagua

SEQ ID NO: 2539220 - RNA, 15 nt, Human
uauuuguuugcauag

SEQ ID NO: 2539221 - RNA, 18 nt, Human
uauuuuaaaagaaugauu

SEQ ID NO: 2539222 - RNA, 14 nt, Human
uauuuguuuucaug

SEQ ID NO: 2539223 - RNA, 13 nt, Human
uauuuguuuucau

SEQ ID NO: 2539224 - RNA, 17 nt, Human
uauuuguuauuuucagu

SEQ ID NO: 2539225 - RNA, 21 nt, Human
uauuuuaaaagauaaauauua

SEQ ID NO: 2539226 - RNA, 22 nt, Human
uauuuuaagacgaaacauuugu

SEQ ID NO: 2539227 - RNA, 14 nt, Human
uauuuuaagacgaa

SEQ ID NO: 2539228 - RNA, 19 nt, Human
uauuuuaaacaaaauagaa

SEQ ID NO: 2539229 - RNA, 14 nt, Human
uauuuuaaacaaaa

SEQ ID NO: 2539230 - RNA, 12 nt, Human
uauuuuaaacaa

SEQ ID NO: 2539231 - RNA, 13 nt, Human
uauuuuaaaauga

SEQ ID NO: 2539232 - RNA, 18 nt, Human
uauuuuaaaaucugucac

SEQ ID NO: 2539233 - RNA, 15 nt, Human
uauuugucuuucagg

SEQ ID NO: 2539234 - RNA, 21 nt, Human
uauuuguauuuuuuugcaagu

SEQ ID NO: 2539235 - RNA, 15 nt, Human
uauuuguaucucuga

SEQ ID NO: 2539236 - RNA, 12 nt, Human
uauuuguaucuc

SEQ ID NO: 2539237 - RNA, 23 nt, Human
uauuuguauaguugcuugccuga

SEQ ID NO: 2539238 - RNA, 17 nt, Human
uauuuguauaguugcuu

SEQ ID NO: 2539239 - RNA, 23 nt, Human
uauuuguaucucugaagcauguu

SEQ ID NO: 2539240 - RNA, 22 nt, Human
uauuuguaucucugaagcaugu

SEQ ID NO: 2539241 - RNA, 21 nt, Human
uauuuguguuuuaauuuaaac

SEQ ID NO: 2539242 - RNA, 19 nt, Human
uauuuguguuuuaauuuaa

SEQ ID NO: 2539243 - RNA, 12 nt, Human
uauuuguguuuu

SEQ ID NO: 2539244 - RNA, 14 nt, Human
uauuuguuauuuuc

SEQ ID NO: 2539245 - RNA, 17 nt, Human
uauuuguuaaauauuua

SEQ ID NO: 2539246 - RNA, 22 nt, Human
uauuuguuaaugguuugaauau

SEQ ID NO: 2539247 - RNA, 20 nt, Human
uauuuguuaaugguuugaau

SEQ ID NO: 2539248 - RNA, 15 nt, Human
acaugaaaacacauu

SEQ ID NO: 2539249 - RNA, 12 nt, Human
uauuuguacaaa

SEQ ID NO: 2539250 - RNA, 12 nt, Human
uauuuguacaua

SEQ ID NO: 2539251 - RNA, 19 nt, Human
uauuuguacaguucaguuc

SEQ ID NO: 2539252 - RNA, 14 nt, Human
acaugaacauacug

SEQ ID NO: 2539253 - RNA, 15 nt, Human
ucaaauacuuuaaag

SEQ ID NO: 2539254 - RNA, 13 nt, Human
acaugaaacagaa

SEQ ID NO: 2539255 - RNA, 15 nt, Human
acaugaaacagaaac

SEQ ID NO: 2539256 - RNA, 23 nt, Human
acaugaaaacacauuuuucuuag

SEQ ID NO: 2539257 - RNA, 22 nt, Human
acaugaaaacacauuuuucuua

SEQ ID NO: 2539258 - RNA, 13 nt, Human
acaugagcaucag

SEQ ID NO: 2539259 - RNA, 15 nt, Human
acaugagaacaaaca

SEQ ID NO: 2539260 - RNA, 14 nt, Human
acaugacacagcuu

SEQ ID NO: 2539261 - RNA, 15 nt, Human
acaugacaacuuugc

SEQ ID NO: 2539262 - RNA, 19 nt, Human
acaugacccuaaaucuuga

SEQ ID NO: 2539263 - RNA, 21 nt, Human
acaugacccuaaaucuugacu

SEQ ID NO: 2539264 - RNA, 23 nt, Human
ucaaauacuuuaaaggaaaaaau

SEQ ID NO: 2539265 - RNA, 12 nt, Human
ucaaauacuuua

SEQ ID NO: 2539266 - RNA, 13 nt, Human
ucaaauauauuca

SEQ ID NO: 2539267 - RNA, 21 nt, Human
ucaaagcaccaaaauaagaaa

SEQ ID NO: 2539268 - RNA, 19 nt, Human
ucaaagguagccaucaugg

SEQ ID NO: 2539269 - RNA, 14 nt, Human
ucaaaguaaaacuu

SEQ ID NO: 2539270 - RNA, 18 nt, Human
ucaaaguaggcaggacca

SEQ ID NO: 2539271 - RNA, 19 nt, Human
ucaaaguaaaacuugcugc

SEQ ID NO: 2539272 - RNA, 20 nt, Human
ucaaaguguaaacaccauag

SEQ ID NO: 2539273 - RNA, 13 nt, Human
ucaaagauauuuu

SEQ ID NO: 2539274 - RNA, 20 nt, Human
ucaaagauauuuugcuuugu

SEQ ID NO: 2539275 - RNA, 22 nt, Human
ucaaagauauuuugcuuuguga

SEQ ID NO: 2539276 - RNA, 20 nt, Human
ucaaacaguagguuggcagu

SEQ ID NO: 2539277 - RNA, 15 nt, Human
ucaaacaguagguug

SEQ ID NO: 2539278 - RNA, 22 nt, Human
ucaaacaguacacuaucuuaau

SEQ ID NO: 2539279 - RNA, 16 nt, Human
ucaaacagaauuuuaa

SEQ ID NO: 2539280 - RNA, 15 nt, Human
ucaaagcaaaugucu

SEQ ID NO: 2539281 - RNA, 23 nt, Human
ucaaagcaaaugucuuccuggau

SEQ ID NO: 2539282 - RNA, 15 nt, Human
ucaaagcaaggaaac

SEQ ID NO: 2539283 - RNA, 16 nt, Human
ucaaagcaaggaaacu

SEQ ID NO: 2539284 - RNA, 15 nt, Human
ucaaagcaaugcauu

SEQ ID NO: 2539285 - RNA, 14 nt, Human
ucaaagcaaugcau

SEQ ID NO: 2539286 - RNA, 20 nt, Human
ucaaagcaaggaaacuaugu

SEQ ID NO: 2539287 - RNA, 19 nt, Human
ucaaagcaaugcauuuugg

SEQ ID NO: 2539288 - RNA, 18 nt, Human
ucaaagcaaugcauuuug

SEQ ID NO: 2539289 - RNA, 17 nt, Human
ucaaagcaaugcauuuu

SEQ ID NO: 2539290 - RNA, 16 nt, Human
ucaaagcaaugcauuu

SEQ ID NO: 2539291 - RNA, 18 nt, Human
ucaaagcaccaaaauaag

SEQ ID NO: 2539292 - RNA, 20 nt, Human
ucaaagcaccaaaauaagaa

SEQ ID NO: 2539293 - RNA, 20 nt, Human
ucaaacagucucaggaaauc

SEQ ID NO: 2539294 - RNA, 21 nt, Human
ucaaacagucucaggaaauca

SEQ ID NO: 2539295 - RNA, 13 nt, Human
ucaaacagucuca

SEQ ID NO: 2539296 - RNA, 20 nt, Human
ucaaaaguauuuuccuguaa

SEQ ID NO: 2539297 - RNA, 18 nt, Human
ucaaaaguauuuuccugu

SEQ ID NO: 2539298 - RNA, 17 nt, Human
ucaaaaguauuuuccug

SEQ ID NO: 2539299 - RNA, 16 nt, Human
ucaaaaguauuuuccu

SEQ ID NO: 2539300 - RNA, 15 nt, Human
ucaaaaguauuuucc

SEQ ID NO: 2539301 - RNA, 14 nt, Human
ucaaaaguauuuuc

SEQ ID NO: 2539302 - RNA, 13 nt, Human
ucaaaaggugccu

SEQ ID NO: 2539303 - RNA, 23 nt, Human
ucaaaaggugccugugaggcagg

SEQ ID NO: 2539304 - RNA, 16 nt, Human
ucaaaagcugggcagg

SEQ ID NO: 2539305 - RNA, 20 nt, Human
acauggccuaugcacauaug

SEQ ID NO: 2539306 - RNA, 18 nt, Human
acauggccuaugcacaua

SEQ ID NO: 2539307 - RNA, 17 nt, Human
acauggccuaugcacau

SEQ ID NO: 2539308 - RNA, 19 nt, Human
acauggugccugagaggca

SEQ ID NO: 2539309 - RNA, 20 nt, Human
acauggcucuaaaaaguuuu

SEQ ID NO: 2539310 - RNA, 14 nt, Human
acauggccuuugcu

SEQ ID NO: 2539311 - RNA, 21 nt, Human
acauggccccucccccugcca

SEQ ID NO: 2539312 - RNA, 22 nt, Human
acauggccccucccccugccag

SEQ ID NO: 2539313 - RNA, 14 nt, Human
acauggccagugug

SEQ ID NO: 2539314 - RNA, 15 nt, Human
acauggccaguguga

SEQ ID NO: 2539315 - RNA, 17 nt, Human
acauggagacuccugcc

SEQ ID NO: 2539316 - RNA, 16 nt, Human
acauggagacuccugc

SEQ ID NO: 2539317 - RNA, 15 nt, Human
acauggagacuccug

SEQ ID NO: 2539318 - RNA, 23 nt, Human
acauggacuuguauauuuguaca

SEQ ID NO: 2539319 - RNA, 18 nt, Human
acauggacuuguauauuu

SEQ ID NO: 2539320 - RNA, 17 nt, Human
acauggacuuguauauu

SEQ ID NO: 2539321 - RNA, 15 nt, Human
acauggacuuguaua

SEQ ID NO: 2539322 - RNA, 14 nt, Human
acauggacuuguau

SEQ ID NO: 2539323 - RNA, 22 nt, Human
acauggagacuccugcccuguu

SEQ ID NO: 2539324 - RNA, 21 nt, Human
acauggagacuccugcccugu

SEQ ID NO: 2539325 - RNA, 15 nt, Human
acauggaguauaugu

SEQ ID NO: 2539326 - RNA, 19 nt, Human
acauggaguauaugucaag

SEQ ID NO: 2539327 - RNA, 23 nt, Human
acaugagcaucaggccaggcccu

SEQ ID NO: 2539328 - RNA, 23 nt, Human
acaugagcuauuuccauuccaga

SEQ ID NO: 2539329 - RNA, 14 nt, Human
acaugagauuuaua

SEQ ID NO: 2539330 - RNA, 16 nt, Human
acaugaggggacauuu

SEQ ID NO: 2539331 - RNA, 17 nt, Human
acaugaggggacauuuu

SEQ ID NO: 2539332 - RNA, 22 nt, Human
acaugagcuauuuccauuccag

SEQ ID NO: 2539333 - RNA, 21 nt, Human
acaugaggacaugauggagcg

SEQ ID NO: 2539334 - RNA, 12 nt, Human
acauggacccgg

SEQ ID NO: 2539335 - RNA, 13 nt, Human
acauggacccgga

SEQ ID NO: 2539336 - RNA, 16 nt, Human
acauggacccggagcu

SEQ ID NO: 2539337 - RNA, 22 nt, Human
acauggacccggagcuaacacu

SEQ ID NO: 2539338 - RNA, 13 nt, Human
acauggacuugua

SEQ ID NO: 2539339 - RNA, 19 nt, Human
acauggacccggagcuaac

SEQ ID NO: 2539340 - RNA, 20 nt, Human
acauggaauaacauguaauu

SEQ ID NO: 2539341 - RNA, 14 nt, Human
acauggaaguacua

SEQ ID NO: 2539342 - RNA, 18 nt, Human
acauggaauaacauguaa

SEQ ID NO: 2539343 - RNA, 21 nt, Human
acauguauugcacauuguaaa

SEQ ID NO: 2539344 - RNA, 12 nt, Human
acauguauuugu

SEQ ID NO: 2539345 - RNA, 15 nt, Human
acaugucuuaaugaa

SEQ ID NO: 2539346 - RNA, 19 nt, Human
acauguauugcacauugua

SEQ ID NO: 2539347 - RNA, 18 nt, Human
acauguauugcacauugu

SEQ ID NO: 2539348 - RNA, 15 nt, Human
acauguauuauuuca

SEQ ID NO: 2539349 - RNA, 23 nt, Human
acauguauguuuugguaucuguu

SEQ ID NO: 2539350 - RNA, 22 nt, Human
acauguauguuuugguaucugu

SEQ ID NO: 2539351 - RNA, 15 nt, Human
acauguauguuuugg

SEQ ID NO: 2539352 - RNA, 14 nt, Human
acauguauguuuug

SEQ ID NO: 2539353 - RNA, 11 nt, Human
acauguauguu

SEQ ID NO: 2539354 - RNA, 20 nt, Human
acauguaauaaaaaguauau

SEQ ID NO: 2539355 - RNA, 18 nt, Human
acauguaucuaugcauuu

SEQ ID NO: 2539356 - RNA, 21 nt, Human
acauguaucuaugcauuuucu

SEQ ID NO: 2539357 - RNA, 20 nt, Human
acauguauaauauuuuuaau

SEQ ID NO: 2539358 - RNA, 19 nt, Human
acauguauaauauuuuuaa

SEQ ID NO: 2539359 - RNA, 23 nt, Human
acauggugcuacgccugcaugua

SEQ ID NO: 2539360 - RNA, 23 nt, Human
acauggugccugagaggcaggca

SEQ ID NO: 2539361 - RNA, 20 nt, Human
acauggugccugagaggcag

SEQ ID NO: 2539362 - RNA, 19 nt, Human
acauggugcuacgccugca

SEQ ID NO: 2539363 - RNA, 18 nt, Human
acaugguuacaaucauug

SEQ ID NO: 2539364 - RNA, 23 nt, Human
acauggugucuggauucccagga

SEQ ID NO: 2539365 - RNA, 19 nt, Human
acaugguggguccaugggc

SEQ ID NO: 2539366 - RNA, 18 nt, Human
acaugguggguccauggg

SEQ ID NO: 2539367 - RNA, 23 nt, Human
acaugguuacaaucauugcugaa

SEQ ID NO: 2539368 - RNA, 22 nt, Human
acaugguuacaaucauugcuga

SEQ ID NO: 2539369 - RNA, 18 nt, Human
acaugguugugaccugag

SEQ ID NO: 2539370 - RNA, 20 nt, Human
acaugguugugaccugagga

SEQ ID NO: 2539371 - RNA, 17 nt, Human
acaugguuugacucccg

SEQ ID NO: 2539372 - RNA, 17 nt, Human
acauguaauaaaaagua

SEQ ID NO: 2539373 - RNA, 19 nt, Human
acauguaauaaaaaguaua

SEQ ID NO: 2539374 - RNA, 23 nt, Human
acauguaauaaaaaguauauguu

SEQ ID NO: 2539375 - RNA, 20 nt, Human
acauguaguaguacuugaaa

SEQ ID NO: 2539376 - RNA, 14 nt, Human
acauguauaauauu

SEQ ID NO: 2539377 - RNA, 21 nt, Human
acaugucuuaaugaaguuuga

SEQ ID NO: 2539378 - RNA, 20 nt, Human
acaugucuuaaugaaguuug

SEQ ID NO: 2539379 - RNA, 18 nt, Human
acaugucuuaaugaaguu

SEQ ID NO: 2539380 - RNA, 16 nt, Human
acaugucuuaaugaag

SEQ ID NO: 2539381 - RNA, 23 nt, Human
acaugucuuaaugaaguuugaau

SEQ ID NO: 2539382 - RNA, 22 nt, Human
acaugucuuaaugaaguuugaa

SEQ ID NO: 2539383 - RNA, 14 nt, Human
acaugucuuguaca

SEQ ID NO: 2539384 - RNA, 13 nt, Human
acaugucuuguac

SEQ ID NO: 2539385 - RNA, 19 nt, Human
acaugucuuguacaugugu

SEQ ID NO: 2539386 - RNA, 16 nt, Human
acaugucuuguacaug

SEQ ID NO: 2539387 - RNA, 20 nt, Human
acauuaagauugaggccugc

SEQ ID NO: 2539388 - RNA, 12 nt, Human
acaugucuuaau

SEQ ID NO: 2539389 - RNA, 22 nt, Human
acaugucuuguacauguguagc

SEQ ID NO: 2539390 - RNA, 21 nt, Human
acaugucuuuucuugcaugag

SEQ ID NO: 2539391 - RNA, 19 nt, Human
acauuaccuuacuguggag

SEQ ID NO: 2539392 - RNA, 16 nt, Human
acauuaccuuacugug

SEQ ID NO: 2539393 - RNA, 18 nt, Human
acauuagaacacugcauu

SEQ ID NO: 2539394 - RNA, 15 nt, Human
acauuaccuuacugu

SEQ ID NO: 2539395 - RNA, 21 nt, Human
acauuaauguuaauucagcac

SEQ ID NO: 2539396 - RNA, 15 nt, Human
acauuaauguuaauu

SEQ ID NO: 2539397 - RNA, 22 nt, Human
acauuaauguuaauucagcacu

SEQ ID NO: 2539398 - RNA, 21 nt, Human
acauuaaucaaucaucugugu

SEQ ID NO: 2539399 - RNA, 17 nt, Human
acauuaagccuuccaca

SEQ ID NO: 2539400 - RNA, 19 nt, Human
ucaguauugaagcauuuua

SEQ ID NO: 2539401 - RNA, 12 nt, Human
ucagugcucccu

SEQ ID NO: 2539402 - RNA, 13 nt, Human
ucagugcucccuc

SEQ ID NO: 2539403 - RNA, 19 nt, Human
ucagugcucccucacaugu

SEQ ID NO: 2539404 - RNA, 18 nt, Human
ucagugcucgagacacag

SEQ ID NO: 2539405 - RNA, 13 nt, Human
ucaguggcagcug

SEQ ID NO: 2539406 - RNA, 12 nt, Human
ucagugcugugg

SEQ ID NO: 2539407 - RNA, 14 nt, Human
ucagugcuguggcc

SEQ ID NO: 2539408 - RNA, 15 nt, Human
ucagugcuguggccu

SEQ ID NO: 2539409 - RNA, 16 nt, Human
ucaguggcagcugcuu

SEQ ID NO: 2539410 - RNA, 17 nt, Human
ucagugcuguggccugg

SEQ ID NO: 2539411 - RNA, 19 nt, Human
ucagugcuguggccugggc

SEQ ID NO: 2539412 - RNA, 15 nt, Human
ucaguggcagcugcu

SEQ ID NO: 2539413 - RNA, 14 nt, Human
ucaguggcagcugc

SEQ ID NO: 2539414 - RNA, 23 nt, Human
ucagugccuuauggaacacucug

SEQ ID NO: 2539415 - RNA, 22 nt, Human
ucagugccuuauggaacacucu

SEQ ID NO: 2539416 - RNA, 20 nt, Human
ucagugccuuauggaacacu

SEQ ID NO: 2539417 - RNA, 19 nt, Human
ucagugccuuauggaacac

SEQ ID NO: 2539418 - RNA, 20 nt, Human
ucaguauguugucaaagaga

SEQ ID NO: 2539419 - RNA, 18 nt, Human
ucaguauguugucaaaga

SEQ ID NO: 2539420 - RNA, 17 nt, Human
ucaguauguugucaaag

SEQ ID NO: 2539421 - RNA, 16 nt, Human
ucaguauguugucaaa

SEQ ID NO: 2539422 - RNA, 15 nt, Human
ucaguauguugucaa

SEQ ID NO: 2539423 - RNA, 15 nt, Human
ucaguauugaagcau

SEQ ID NO: 2539424 - RNA, 16 nt, Human
ucaguauugaagcauu

SEQ ID NO: 2539425 - RNA, 17 nt, Human
ucaguauugaagcauuu

SEQ ID NO: 2539426 - RNA, 18 nt, Human
ucaguauugaagcauuuu

SEQ ID NO: 2539427 - RNA, 14 nt, Human
ucaguauugaagca

SEQ ID NO: 2539428 - RNA, 20 nt, Human
ucaguuuaauccuucuaguu

SEQ ID NO: 2539429 - RNA, 19 nt, Human
ucaguuuaauccuucuagu

SEQ ID NO: 2539430 - RNA, 16 nt, Human
ucaguuuaauccuucu

SEQ ID NO: 2539431 - RNA, 15 nt, Human
ucaguuuaauccuuc

SEQ ID NO: 2539432 - RNA, 23 nt, Human
ucaguuuauccaagguguaacuc

SEQ ID NO: 2539433 - RNA, 19 nt, Human
ucaguuguuagugugucuu

SEQ ID NO: 2539434 - RNA, 12 nt, Human
ucaguuguuuuc

SEQ ID NO: 2539435 - RNA, 22 nt, Human
ucagugcuguggccugggcaag

SEQ ID NO: 2539436 - RNA, 15 nt, Human
ucaguuuguauauac

SEQ ID NO: 2539437 - RNA, 16 nt, Human
ucaguuugugugucuu

SEQ ID NO: 2539438 - RNA, 15 nt, Human
ucaguuugugugucu

SEQ ID NO: 2539439 - RNA, 17 nt, Human
ucaguuugugugucuua

SEQ ID NO: 2539440 - RNA, 16 nt, Human
ucauaaaauaaaguau

SEQ ID NO: 2539441 - RNA, 21 nt, Human
ucauaaaauaaaguauauaua

SEQ ID NO: 2539442 - RNA, 16 nt, Human
ucaguuuccuggucug

SEQ ID NO: 2539443 - RNA, 19 nt, Human
ucaguuucaauucagugcu

SEQ ID NO: 2539444 - RNA, 20 nt, Human
ucaguuuccuggucuguaga

SEQ ID NO: 2539445 - RNA, 19 nt, Human
ucaguuugcuagcagaaau

SEQ ID NO: 2539446 - RNA, 20 nt, Human
ucauaaguauuaugucucuu

SEQ ID NO: 2539447 - RNA, 15 nt, Human
ucauaaguauuucaa

SEQ ID NO: 2539448 - RNA, 20 nt, Human
ucauaaguauuucaaauugg

SEQ ID NO: 2539449 - RNA, 23 nt, Human
ucauaagccaauuuuucugcacu

SEQ ID NO: 2539450 - RNA, 22 nt, Human
ucauaagccaauuuuucugcac

SEQ ID NO: 2539451 - RNA, 16 nt, Human
ucauaagcgaucacuu

SEQ ID NO: 2539452 - RNA, 21 nt, Human
ucauaagccaauuuuucugca

SEQ ID NO: 2539453 - RNA, 20 nt, Human
ucauaagccaauuuuucugc

SEQ ID NO: 2539454 - RNA, 18 nt, Human
ucauaagccaauuuuucu

SEQ ID NO: 2539455 - RNA, 15 nt, Human
ucauaagccaauuuu

SEQ ID NO: 2539456 - RNA, 14 nt, Human
ucauaaaugaauuu

SEQ ID NO: 2539457 - RNA, 12 nt, Human
ucauaaaugaag

SEQ ID NO: 2539458 - RNA, 21 nt, Human
ucauaagauauuuuucaugau

SEQ ID NO: 2539459 - RNA, 18 nt, Human
ucauaagauauuuuucau

SEQ ID NO: 2539460 - RNA, 19 nt, Human
ucauaagacuuugggauag

SEQ ID NO: 2539461 - RNA, 17 nt, Human
ucauaacuuucauuaaa

SEQ ID NO: 2539462 - RNA, 18 nt, Human
ucauaaauaaaguuuguu

SEQ ID NO: 2539463 - RNA, 11 nt, Human
ucauaaaugaa

SEQ ID NO: 2539464 - RNA, 24 nt, Human
ucauaaagcaggcagaacucaucu

SEQ ID NO: 2539465 - RNA, 21 nt, Human
ucauaaacaacuuaauguucu

SEQ ID NO: 2539466 - RNA, 18 nt, Human
ucaguuuguccuguagag

SEQ ID NO: 2539467 - RNA, 16 nt, Human
ucauaaaccuuaagua

SEQ ID NO: 2539468 - RNA, 13 nt, Human
ucauaaacugugu

SEQ ID NO: 2539469 - RNA, 14 nt, Human
ucauaaacugugug

SEQ ID NO: 2539470 - RNA, 15 nt, Human
ucauaaacugugugc

SEQ ID NO: 2539471 - RNA, 16 nt, Human
ucauaaacugugugca

SEQ ID NO: 2539472 - RNA, 16 nt, Human
ucagguucuccuugau

SEQ ID NO: 2539473 - RNA, 14 nt, Human
ucagguuccauccc

SEQ ID NO: 2539474 - RNA, 23 nt, Human
ucagguuaucgaaauaacaaugu

SEQ ID NO: 2539475 - RNA, 21 nt, Human
ucagguuaucgaaauaacaau

SEQ ID NO: 2539476 - RNA, 20 nt, Human
ucagguuaucgaaauaacaa

SEQ ID NO: 2539477 - RNA, 19 nt, Human
ucagguuaucgaaauaaca

SEQ ID NO: 2539478 - RNA, 22 nt, Human
ucagguugcugguugcugugug

SEQ ID NO: 2539479 - RNA, 21 nt, Human
ucagguugcugguugcugugu

SEQ ID NO: 2539480 - RNA, 20 nt, Human
ucagguugcugguugcugug

SEQ ID NO: 2539481 - RNA, 19 nt, Human
ucagguugcugguugcugu

SEQ ID NO: 2539482 - RNA, 17 nt, Human
ucagguugcugguugcu

SEQ ID NO: 2539483 - RNA, 15 nt, Human
ucagguugcugguug

SEQ ID NO: 2539484 - RNA, 18 nt, Human
ucagguucuuagugucac

SEQ ID NO: 2539485 - RNA, 17 nt, Human
accgaaacagcgcuggg

SEQ ID NO: 2539486 - RNA, 18 nt, Human
ucagguuaucgaaauaac

SEQ ID NO: 2539487 - RNA, 14 nt, Human
ucagguguugccaa

SEQ ID NO: 2539488 - RNA, 12 nt, Human
accgaaacagcg

SEQ ID NO: 2539489 - RNA, 22 nt, Human
ucaggugucccugcacuugcag

SEQ ID NO: 2539490 - RNA, 14 nt, Human
ucagguuuuguaaa

SEQ ID NO: 2539491 - RNA, 13 nt, Human
ucagguuuuguaa

SEQ ID NO: 2539492 - RNA, 22 nt, Human
ucagguugucugaagucacugc

SEQ ID NO: 2539493 - RNA, 23 nt, Human
ucagguugcugguugcugugugg

SEQ ID NO: 2539494 - RNA, 17 nt, Human
ucagguuguaguaaaga

SEQ ID NO: 2539495 - RNA, 19 nt, Human
ucagguuguaguaaagaaa

SEQ ID NO: 2539496 - RNA, 20 nt, Human
ucagguuguaguaaagaaau

SEQ ID NO: 2539497 - RNA, 17 nt, Human
ucagguuugaguagagg

SEQ ID NO: 2539498 - RNA, 17 nt, Human
ucagguuugccugaggg

SEQ ID NO: 2539499 - RNA, 13 nt, Human
ucagguuuggggu

SEQ ID NO: 2539500 - RNA, 18 nt, Human
ucagguuugccugagggc

SEQ ID NO: 2539501 - RNA, 18 nt, Human
ucaguaccuggaggagga

SEQ ID NO: 2539502 - RNA, 16 nt, Human
ucaguaccuggaggag

SEQ ID NO: 2539503 - RNA, 15 nt, Human
ucaguaccuggagga

SEQ ID NO: 2539504 - RNA, 14 nt, Human
ucaguaccuggagg

SEQ ID NO: 2539505 - RNA, 13 nt, Human
ucaguaccuggag

SEQ ID NO: 2539506 - RNA, 23 nt, Human
ucaguaggugcccagaauaaguu

SEQ ID NO: 2539507 - RNA, 23 nt, Human
ucaguagaaacucuacauaauuu

SEQ ID NO: 2539508 - RNA, 14 nt, Human
ucaguaauuugagg

SEQ ID NO: 2539509 - RNA, 15 nt, Human
ucaguaauuugagga

SEQ ID NO: 2539510 - RNA, 17 nt, Human
ucaguaauuugaggaca

SEQ ID NO: 2539511 - RNA, 18 nt, Human
ucaguaauuugaggacaa

SEQ ID NO: 2539512 - RNA, 19 nt, Human
ucaguacccucucagcucc

SEQ ID NO: 2539513 - RNA, 17 nt, Human
ucaguacccucucagcu

SEQ ID NO: 2539514 - RNA, 16 nt, Human
ucaguacccucucagc

SEQ ID NO: 2539515 - RNA, 13 nt, Human
ucaguaauaacuc

SEQ ID NO: 2539516 - RNA, 14 nt, Human
ucaguaauauuuau

SEQ ID NO: 2539517 - RNA, 19 nt, Human
ucaguaauaaacuguguuu

SEQ ID NO: 2539518 - RNA, 17 nt, Human
ucaguaaguaucuggag

SEQ ID NO: 2539519 - RNA, 22 nt, Human
ucaguaagacgacaaggaaagg

SEQ ID NO: 2539520 - RNA, 21 nt, Human
ucaguaagacgacaaggaaag

SEQ ID NO: 2539521 - RNA, 13 nt, Human
ucaguaagacgac

SEQ ID NO: 2539522 - RNA, 19 nt, Human
ucaguaagaaaaagaagaa

SEQ ID NO: 2539523 - RNA, 17 nt, Human
ucaguaagaaaaagaag

SEQ ID NO: 2539524 - RNA, 21 nt, Human
ucaguaacuuacccuuaggga

SEQ ID NO: 2539525 - RNA, 13 nt, Human
ucaguaagccgug

SEQ ID NO: 2539526 - RNA, 22 nt, Human
accgaaaacguggcugcuucaa

SEQ ID NO: 2539527 - RNA, 21 nt, Human
accgaaaacguggcugcuuca

SEQ ID NO: 2539528 - RNA, 22 nt, Human
ucagguggggucacucuggcag

SEQ ID NO: 2539529 - RNA, 18 nt, Human
ucaggugucccugcacuu

SEQ ID NO: 2539530 - RNA, 17 nt, Human
ucaggugucccugcacu

SEQ ID NO: 2539531 - RNA, 23 nt, Human
ucagguggggucacucuggcagc

SEQ ID NO: 2539532 - RNA, 15 nt, Human
ucaggugucccugca

SEQ ID NO: 2539533 - RNA, 20 nt, Human
accgaaaacguggcugcuuc

SEQ ID NO: 2539534 - RNA, 18 nt, Human
acccuuggacuugaggau

SEQ ID NO: 2539535 - RNA, 21 nt, Human
acccuuggaggcugucuucuc

SEQ ID NO: 2539536 - RNA, 11 nt, Human
acccuuggccu

SEQ ID NO: 2539537 - RNA, 12 nt, Human
acccuuggccug

SEQ ID NO: 2539538 - RNA, 17 nt, Human
acccuuggcuugcccac

SEQ ID NO: 2539539 - RNA, 17 nt, Human
acccuuggcucaauccu

SEQ ID NO: 2539540 - RNA, 13 nt, Human
acccuuggccugu

SEQ ID NO: 2539541 - RNA, 17 nt, Human
acccuuggccugucuca

SEQ ID NO: 2539542 - RNA, 15 nt, Human
acccuuggacuugag

SEQ ID NO: 2539543 - RNA, 13 nt, Human
acccuuggacuug

SEQ ID NO: 2539544 - RNA, 17 nt, Human
acccuggaccagugguc

SEQ ID NO: 2539545 - RNA, 20 nt, Human
acccuggaccaguggucuca

SEQ ID NO: 2539546 - RNA, 20 nt, Human
acccuugccgucuaccugag

SEQ ID NO: 2539547 - RNA, 17 nt, Human
acccugcguggggacag

SEQ ID NO: 2539548 - RNA, 16 nt, Human
acccugcguggggaca

SEQ ID NO: 2539549 - RNA, 15 nt, Human
acccugcguggggac

SEQ ID NO: 2539550 - RNA, 17 nt, Human
acccuggaaaaugaauc

SEQ ID NO: 2539551 - RNA, 19 nt, Human
ucaggguuggccccugccc

SEQ ID NO: 2539552 - RNA, 18 nt, Human
ucaggguuggccccugcc

SEQ ID NO: 2539553 - RNA, 19 nt, Human
ucagguaaucgaccugccu

SEQ ID NO: 2539554 - RNA, 20 nt, Human
ucagguaaucgaccugccuc

SEQ ID NO: 2539555 - RNA, 18 nt, Human
ucagguaaucgaccugcc

SEQ ID NO: 2539556 - RNA, 23 nt, Human
ucaggguuggccccugcccggcu

SEQ ID NO: 2539557 - RNA, 19 nt, Human
acccgcuaagagggaggga

SEQ ID NO: 2539558 - RNA, 23 nt, Human
acccgccucucccgucagggccc

SEQ ID NO: 2539559 - RNA, 21 nt, Human
acccgccucucccgucagggc

SEQ ID NO: 2539560 - RNA, 18 nt, Human
acccgccucucccgucag

SEQ ID NO: 2539561 - RNA, 13 nt, Human
acccgccucuccc

SEQ ID NO: 2539562 - RNA, 21 nt, Human
ucagguaaucgaccugccucg

SEQ ID NO: 2539563 - RNA, 23 nt, Human
ucaggggucgucaccaccucucc

SEQ ID NO: 2539564 - RNA, 15 nt, Human
ucagguauguugccu

SEQ ID NO: 2539565 - RNA, 16 nt, Human
ucagguauguugccuu

SEQ ID NO: 2539566 - RNA, 13 nt, Human
ucagguagcugcc

SEQ ID NO: 2539567 - RNA, 19 nt, Human
ucagguaguugcaauugaa

SEQ ID NO: 2539568 - RNA, 18 nt, Human
ucaggccaggcccucugc

SEQ ID NO: 2539569 - RNA, 17 nt, Human
ucaggccaggcccucug

SEQ ID NO: 2539570 - RNA, 20 nt, Human
ucagggggguugugaggccu

SEQ ID NO: 2539571 - RNA, 19 nt, Human
ucaggccaggcccucugcc

SEQ ID NO: 2539572 - RNA, 12 nt, Human
ucaggggugugc

SEQ ID NO: 2539573 - RNA, 19 nt, Human
ucaggggugugcggccuuu

SEQ ID NO: 2539574 - RNA, 23 nt, Human
ucaggggugugcggccuuuggcu

SEQ ID NO: 2539575 - RNA, 17 nt, Human
ucaggguuggccccugc

SEQ ID NO: 2539576 - RNA, 16 nt, Human
ucaggccaggcccucu

SEQ ID NO: 2539577 - RNA, 15 nt, Human
ucaggccaggcccuc

SEQ ID NO: 2539578 - RNA, 14 nt, Human
ucaggccaggcccu

SEQ ID NO: 2539579 - RNA, 13 nt, Human
ucaggccaggccc

SEQ ID NO: 2539580 - RNA, 14 nt, Human
ucaggccagcugcu

SEQ ID NO: 2539581 - RNA, 12 nt, Human
ucaggccaggcc

SEQ ID NO: 2539582 - RNA, 13 nt, Human
ucaggccagcugc

SEQ ID NO: 2539583 - RNA, 17 nt, Human
ucaggccaccugccccc

SEQ ID NO: 2539584 - RNA, 19 nt, Human
ucaggccaccugcccccuu

SEQ ID NO: 2539585 - RNA, 21 nt, Human
ucaggccaccugcccccuucu

SEQ ID NO: 2539586 - RNA, 16 nt, Human
ucaggccacggcagcc

SEQ ID NO: 2539587 - RNA, 14 nt, Human
ucaggccacggcag

SEQ ID NO: 2539588 - RNA, 13 nt, Human
ucaggccacuuga

SEQ ID NO: 2539589 - RNA, 17 nt, Human
ucaggccacggcagccu

SEQ ID NO: 2539590 - RNA, 17 nt, Human
ucaggcaggugggaugg

SEQ ID NO: 2539591 - RNA, 13 nt, Human
ucaggcagcucaa

SEQ ID NO: 2539592 - RNA, 13 nt, Human
ucaggcaggaagg

SEQ ID NO: 2539593 - RNA, 21 nt, Human
ucaggcaggaagggcaggaag

SEQ ID NO: 2539594 - RNA, 18 nt, Human
ucaggcaggugggaugga

SEQ ID NO: 2539595 - RNA, 22 nt, Human
acccccagcacccgggcucagg

SEQ ID NO: 2539596 - RNA, 15 nt, Human
ucaggcauaggccug

SEQ ID NO: 2539597 - RNA, 16 nt, Human
ucaggcauaggccugg

SEQ ID NO: 2539598 - RNA, 17 nt, Human
ucaggcauaggccuggg

SEQ ID NO: 2539599 - RNA, 21 nt, Human
acccccagcacccgggcucag

SEQ ID NO: 2539600 - RNA, 18 nt, Human
acccccagcacccgggcu

SEQ ID NO: 2539601 - RNA, 13 nt, Human
acccccagccugc

SEQ ID NO: 2539602 - RNA, 12 nt, Human
acccccagccug

SEQ ID NO: 2539603 - RNA, 11 nt, Human
acccccagcaa

SEQ ID NO: 2539604 - RNA, 13 nt, Human
acccccagcaacc

SEQ ID NO: 2539605 - RNA, 13 nt, Human
acccccagcaccc

SEQ ID NO: 2539606 - RNA, 16 nt, Human
acccccagcaacccuc

SEQ ID NO: 2539607 - RNA, 21 nt, Human
acccccacucucauuccccag

SEQ ID NO: 2539608 - RNA, 22 nt, Human
acccccacucucauuccccagg

SEQ ID NO: 2539609 - RNA, 23 nt, Human
acccuccuguugcacccagcccu

SEQ ID NO: 2539610 - RNA, 22 nt, Human
acccuccuguugcacccagccc

SEQ ID NO: 2539611 - RNA, 21 nt, Human
acccuccuguugcacccagcc

SEQ ID NO: 2539612 - RNA, 20 nt, Human
acccuccuguugcacccagc

SEQ ID NO: 2539613 - RNA, 24 nt, Human
acccuccuguugcacccagcccug

SEQ ID NO: 2539614 - RNA, 21 nt, Human
acccuccuuucaccacaugug

SEQ ID NO: 2539615 - RNA, 19 nt, Human
acccuccuguugcacccag

SEQ ID NO: 2539616 - RNA, 11 nt, Human
acccuccuguu

SEQ ID NO: 2539617 - RNA, 23 nt, Human
acccuccugucuucccaggguag

SEQ ID NO: 2539618 - RNA, 21 nt, Human
acccuccugucuucccagggu

SEQ ID NO: 2539619 - RNA, 23 nt, Human
acccucccuccgauccuuccucc

SEQ ID NO: 2539620 - RNA, 22 nt, Human
acccucccuccgauccuuccuc

SEQ ID NO: 2539621 - RNA, 20 nt, Human
acccuccugucuucccaggg

SEQ ID NO: 2539622 - RNA, 16 nt, Human
acccucccuccgaucc

SEQ ID NO: 2539623 - RNA, 18 nt, Human
acccucccucagccccuc

SEQ ID NO: 2539624 - RNA, 19 nt, Human
acccucccucagccccucu

SEQ ID NO: 2539625 - RNA, 20 nt, Human
acccucccucagccccucuu

SEQ ID NO: 2539626 - RNA, 23 nt, Human
acccucccucagccccucuugcc

SEQ ID NO: 2539627 - RNA, 19 nt, Human
acccuccccucucuugcac

SEQ ID NO: 2539628 - RNA, 18 nt, Human
acccuccccucucuugca

SEQ ID NO: 2539629 - RNA, 14 nt, Human
acccuccccucucu

SEQ ID NO: 2539630 - RNA, 13 nt, Human
acccuccccucuc

SEQ ID NO: 2539631 - RNA, 12 nt, Human
acccuccccucu

SEQ ID NO: 2539632 - RNA, 13 nt, Human
acccuccccuccc

SEQ ID NO: 2539633 - RNA, 12 nt, Human
acccuccccucc

SEQ ID NO: 2539634 - RNA, 12 nt, Human
acccucccucag

SEQ ID NO: 2539635 - RNA, 14 nt, Human
acccucccucagcc

SEQ ID NO: 2539636 - RNA, 17 nt, Human
acccucccucagccccu

SEQ ID NO: 2539637 - RNA, 20 nt, Human
acccucaugcugugugacuc

SEQ ID NO: 2539638 - RNA, 17 nt, Human
acccucauucuacugaa

SEQ ID NO: 2539639 - RNA, 15 nt, Human
acccgggaggcagag

SEQ ID NO: 2539640 - RNA, 19 nt, Human
acccggaggccacaugagu

SEQ ID NO: 2539641 - RNA, 10 nt, Human
acccuccccc

SEQ ID NO: 2539642 - RNA, 23 nt, Human
acccuccccgcaccccccaagcu

SEQ ID NO: 2539643 - RNA, 23 nt, Human
acccucccccaggaggucgaccc

SEQ ID NO: 2539644 - RNA, 22 nt, Human
acccgggaagggggcugggaca

SEQ ID NO: 2539645 - RNA, 14 nt, Human
acccucauguucuu

SEQ ID NO: 2539646 - RNA, 15 nt, Human
acccucauguucuua

SEQ ID NO: 2539647 - RNA, 17 nt, Human
acccucauguucuuaau

SEQ ID NO: 2539648 - RNA, 20 nt, Human
acccgggaagggggcuggga

SEQ ID NO: 2539649 - RNA, 19 nt, Human
acccgggaagggggcuggg

SEQ ID NO: 2539650 - RNA, 15 nt, Human
acccggaggccacau

SEQ ID NO: 2539651 - RNA, 12 nt, Human
acccggaggcca

SEQ ID NO: 2539652 - RNA, 22 nt, Human
acccggagcuaacacuggcccc

SEQ ID NO: 2539653 - RNA, 23 nt, Human
acccggagcuaacacuggccccu

SEQ ID NO: 2539654 - RNA, 18 nt, Human
acccgcucaucacuggau

SEQ ID NO: 2539655 - RNA, 19 nt, Human
acccgccuuuuauaaaccu

SEQ ID NO: 2539656 - RNA, 16 nt, Human
acccgccuuuuauaaa

SEQ ID NO: 2539657 - RNA, 24 nt, Human
acccgccucucccgucagggccca

SEQ ID NO: 2539658 - RNA, 13 nt, Human
acccgcucuggac

SEQ ID NO: 2539659 - RNA, 12 nt, Human
acccgcucugga

SEQ ID NO: 2539660 - RNA, 15 nt, Human
acccgcucuggacca

SEQ ID NO: 2539661 - RNA, 16 nt, Human
acccgcuuucuugcug

SEQ ID NO: 2539662 - RNA, 21 nt, Human
acccugaggcccagagggccu

SEQ ID NO: 2539663 - RNA, 19 nt, Human
acccugaggcccagagggc

SEQ ID NO: 2539664 - RNA, 13 nt, Human
acccugaggccca

SEQ ID NO: 2539665 - RNA, 17 nt, Human
acccugaggcccagagg

SEQ ID NO: 2539666 - RNA, 11 nt, Human
acccugaggcc

SEQ ID NO: 2539667 - RNA, 17 nt, Human
acccugagccccuuccu

SEQ ID NO: 2539668 - RNA, 16 nt, Human
acccugagccccuucc

SEQ ID NO: 2539669 - RNA, 11 nt, Human
acccugagccc

SEQ ID NO: 2539670 - RNA, 17 nt, Human
acccugagcugaggcag

SEQ ID NO: 2539671 - RNA, 22 nt, Human
acccugagcugaggcagcagug

SEQ ID NO: 2539672 - RNA, 23 nt, Human
acccugagcugaggcagcagugu

SEQ ID NO: 2539673 - RNA, 21 nt, Human
acccucgaagcgcgccacucg

SEQ ID NO: 2539674 - RNA, 14 nt, Human
acccucgaggcgga

SEQ ID NO: 2539675 - RNA, 16 nt, Human
acccucgaagcgcgcc

SEQ ID NO: 2539676 - RNA, 20 nt, Human
acccucgaagcgcgccacuc

SEQ ID NO: 2539677 - RNA, 12 nt, Human
acccugccccug

SEQ ID NO: 2539678 - RNA, 13 nt, Human
acccugccccugc

SEQ ID NO: 2539679 - RNA, 14 nt, Human
acccugccuuaucu

SEQ ID NO: 2539680 - RNA, 18 nt, Human
acccugccuuaucuugca

SEQ ID NO: 2539681 - RNA, 18 nt, Human
acccugcgaaggggcccu

SEQ ID NO: 2539682 - RNA, 19 nt, Human
acccugcgaaggggcccug

SEQ ID NO: 2539683 - RNA, 20 nt, Human
acccugcgaaggggcccugg

SEQ ID NO: 2539684 - RNA, 22 nt, Human
acccugcgaaggggcccugguc

SEQ ID NO: 2539685 - RNA, 22 nt, Human
acccugcgcccaguccuuccac

SEQ ID NO: 2539686 - RNA, 22 nt, Human
acccugauuuaggagaagccag

SEQ ID NO: 2539687 - RNA, 23 nt, Human
acccugauuuaggagaagccagg

SEQ ID NO: 2539688 - RNA, 20 nt, Human
acccugauuuaggagaagcc

SEQ ID NO: 2539689 - RNA, 18 nt, Human
acccugcaaaggacuguu

SEQ ID NO: 2539690 - RNA, 23 nt, Human
acccugaggcccagagggccugc

SEQ ID NO: 2539691 - RNA, 14 nt, Human
ucaccagcugccuc

SEQ ID NO: 2539692 - RNA, 21 nt, Human
ucacuauguugcccaggcagg

SEQ ID NO: 2539693 - RNA, 15 nt, Human
ucaccagcuccuccc

SEQ ID NO: 2539694 - RNA, 19 nt, Human
ucaccagcccggccugcuc

SEQ ID NO: 2539695 - RNA, 13 nt, Human
ucaccagcuccuc

SEQ ID NO: 2539696 - RNA, 22 nt, Human
ucaccagccccagugcccacag

SEQ ID NO: 2539697 - RNA, 18 nt, Human
ucacuauuuuuauuuaua

SEQ ID NO: 2539698 - RNA, 17 nt, Human
ucacuauuuccuuuaua

SEQ ID NO: 2539699 - RNA, 15 nt, Human
ucacuauuuccuuua

SEQ ID NO: 2539700 - RNA, 13 nt, Human
ucacuauuuccuu

SEQ ID NO: 2539701 - RNA, 18 nt, Human
ucacuauucaaguauuag

SEQ ID NO: 2539702 - RNA, 19 nt, Human
ucacuauuuccuuuauaau

SEQ ID NO: 2539703 - RNA, 18 nt, Human
ucacuauuuccuuuauaa

SEQ ID NO: 2539704 - RNA, 20 nt, Human
ucacuauuuuuauuuauauu

SEQ ID NO: 2539705 - RNA, 17 nt, Human
ucacucauacaucuggc

SEQ ID NO: 2539706 - RNA, 13 nt, Human
ucacucauugcug

SEQ ID NO: 2539707 - RNA, 14 nt, Human
ucacucagauggaa

SEQ ID NO: 2539708 - RNA, 21 nt, Human
ucacugaacuuugcugagccu

SEQ ID NO: 2539709 - RNA, 18 nt, Human
ucacugaaaacaucugga

SEQ ID NO: 2539710 - RNA, 20 nt, Human
ucacugaaaacaucuggaag

SEQ ID NO: 2539711 - RNA, 17 nt, Human
ucacugaaaacaucugg

SEQ ID NO: 2539712 - RNA, 20 nt, Human
ucacucuuguggauguuuua

SEQ ID NO: 2539713 - RNA, 21 nt, Human
ucacucuuguggauguuuuaa

SEQ ID NO: 2539714 - RNA, 14 nt, Human
ucacuccagccugg

SEQ ID NO: 2539715 - RNA, 23 nt, Human
ucacugagacagcccgggcucug

SEQ ID NO: 2539716 - RNA, 16 nt, Human
ucacugaaggccuggc

SEQ ID NO: 2539717 - RNA, 14 nt, Human
ucacucuuggagcc

SEQ ID NO: 2539718 - RNA, 16 nt, Human
ucacucuuggagccug

SEQ ID NO: 2539719 - RNA, 17 nt, Human
ucacucuuggagccugc

SEQ ID NO: 2539720 - RNA, 18 nt, Human
ucacucuuggagccugca

SEQ ID NO: 2539721 - RNA, 15 nt, Human
ucacucauugcugag

SEQ ID NO: 2539722 - RNA, 17 nt, Human
ucacucauugcugagcc

SEQ ID NO: 2539723 - RNA, 18 nt, Human
ucacucauugcugagccu

SEQ ID NO: 2539724 - RNA, 19 nt, Human
ucacucauugcugagccuc

SEQ ID NO: 2539725 - RNA, 20 nt, Human
ucacucauugcugagccucu

SEQ ID NO: 2539726 - RNA, 22 nt, Human
ucacucauugcugagccucugc

SEQ ID NO: 2539727 - RNA, 13 nt, Human
ucacuccaccacc

SEQ ID NO: 2539728 - RNA, 14 nt, Human
ucacuccaccaccc

SEQ ID NO: 2539729 - RNA, 15 nt, Human
ucacuccaccaccca

SEQ ID NO: 2539730 - RNA, 16 nt, Human
ucacuccaccacccaa

SEQ ID NO: 2539731 - RNA, 18 nt, Human
ucacugcaaccucugccu

SEQ ID NO: 2539732 - RNA, 21 nt, Human
ucacugcaaccuucgccaccu

SEQ ID NO: 2539733 - RNA, 18 nt, Human
ucacugcaaccuccgccu

SEQ ID NO: 2539734 - RNA, 18 nt, Human
ucacuguugaaaauuauu

SEQ ID NO: 2539735 - RNA, 15 nt, Human
ucacuguugaaaauu

SEQ ID NO: 2539736 - RNA, 22 nt, Human
ucacuguucuauucaucucaag

SEQ ID NO: 2539737 - RNA, 22 nt, Human
ucacuguucccucugcuccugg

SEQ ID NO: 2539738 - RNA, 21 nt, Human
ucacuguucccucugcuccug

SEQ ID NO: 2539739 - RNA, 20 nt, Human
ucacuguucccucugcuccu

SEQ ID NO: 2539740 - RNA, 19 nt, Human
ucacuguucccucugcucc

SEQ ID NO: 2539741 - RNA, 18 nt, Human
ucacuguucccucugcuc

SEQ ID NO: 2539742 - RNA, 14 nt, Human
ucacuguugcccag

SEQ ID NO: 2539743 - RNA, 17 nt, Human
ucacuguucccucugcu

SEQ ID NO: 2539744 - RNA, 18 nt, Human
ucacugcaagcuccgccu

SEQ ID NO: 2539745 - RNA, 18 nt, Human
ucacugcaacuucugccu

SEQ ID NO: 2539746 - RNA, 17 nt, Human
ucacugcaacuucugcc

SEQ ID NO: 2539747 - RNA, 16 nt, Human
ucacuuaauugcuaca

SEQ ID NO: 2539748 - RNA, 22 nt, Human
ucacuuacuguuucugucagga

SEQ ID NO: 2539749 - RNA, 19 nt, Human
ucacuuacuguuucuguca

SEQ ID NO: 2539750 - RNA, 21 nt, Human
ucacuuaggaaauggcuuugu

SEQ ID NO: 2539751 - RNA, 16 nt, Human
ucacuuacuguuucug

SEQ ID NO: 2539752 - RNA, 15 nt, Human
ucacuuacuguuucu

SEQ ID NO: 2539753 - RNA, 17 nt, Human
ucacuuaccuagauuua

SEQ ID NO: 2539754 - RNA, 15 nt, Human
ucacuguugcccagg

SEQ ID NO: 2539755 - RNA, 20 nt, Human
ucacuguugaaaauuauuuu

SEQ ID NO: 2539756 - RNA, 19 nt, Human
ucacuguugaaaauuauuu

SEQ ID NO: 2539757 - RNA, 20 nt, Human
ucacuguuucucugcuguug

SEQ ID NO: 2539758 - RNA, 19 nt, Human
ucacuuccauacagcucua

SEQ ID NO: 2539759 - RNA, 18 nt, Human
ucacuuccauacagcucu

SEQ ID NO: 2539760 - RNA, 20 nt, Human
ucacuucaucuucucagcuc

SEQ ID NO: 2539761 - RNA, 19 nt, Human
ucacuucaucuucucagcu

SEQ ID NO: 2539762 - RNA, 22 nt, Human
ucacuucgcgugcccucgcugc

SEQ ID NO: 2539763 - RNA, 22 nt, Human
ucacuuccauacagcucuacgu

SEQ ID NO: 2539764 - RNA, 17 nt, Human
ucacuuccuacaagagc

SEQ ID NO: 2539765 - RNA, 23 nt, Human
ucacuucgcgugcccucgcugcu

SEQ ID NO: 2539766 - RNA, 16 nt, Human
ucacuucgugggaucu

SEQ ID NO: 2539767 - RNA, 13 nt, Human
ucacuucuaaaug

SEQ ID NO: 2539768 - RNA, 16 nt, Human
ucacuucuaaaugcau

SEQ ID NO: 2539769 - RNA, 12 nt, Human
ucacuucuccca

SEQ ID NO: 2539770 - RNA, 17 nt, Human
ucacuucugaccacacu

SEQ ID NO: 2539771 - RNA, 15 nt, Human
ucacuucaucuucuc

SEQ ID NO: 2539772 - RNA, 14 nt, Human
ucacuucaucuucu

SEQ ID NO: 2539773 - RNA, 16 nt, Human
ucacuucauaauccag

SEQ ID NO: 2539774 - RNA, 17 nt, Human
ucacuuauauguucuaa

SEQ ID NO: 2539775 - RNA, 19 nt, Human
ucacuuaucccaagagaau

SEQ ID NO: 2539776 - RNA, 15 nt, Human
ucacuucacccugga

SEQ ID NO: 2539777 - RNA, 16 nt, Human
acccaaauguucauca

SEQ ID NO: 2539778 - RNA, 20 nt, Human
acccaaauguucaucaauga

SEQ ID NO: 2539779 - RNA, 17 nt, Human
acccaaauccucuccag

SEQ ID NO: 2539780 - RNA, 15 nt, Human
acccaaauccucucc

SEQ ID NO: 2539781 - RNA, 14 nt, Human
acccaaauccucuc

SEQ ID NO: 2539782 - RNA, 18 nt, Human
acccaaagaccaauauuc

SEQ ID NO: 2539783 - RNA, 18 nt, Human
acccaaagagguauuuau

SEQ ID NO: 2539784 - RNA, 19 nt, Human
accauguuugagcucagac

SEQ ID NO: 2539785 - RNA, 22 nt, Human
acccagaugggggaaagcacag

SEQ ID NO: 2539786 - RNA, 14 nt, Human
acccagauccucac

SEQ ID NO: 2539787 - RNA, 21 nt, Human
acccagauaaagguucaugca

SEQ ID NO: 2539788 - RNA, 16 nt, Human
acccacuucccugggc

SEQ ID NO: 2539789 - RNA, 21 nt, Human
acccacuggacucaccucccc

SEQ ID NO: 2539790 - RNA, 14 nt, Human
acccacuggacuca

SEQ ID NO: 2539791 - RNA, 17 nt, Human
acccacuggacucaccu

SEQ ID NO: 2539792 - RNA, 20 nt, Human
acccacugcuuuuggucugu

SEQ ID NO: 2539793 - RNA, 21 nt, Human
accauucuccaccugccaggg

SEQ ID NO: 2539794 - RNA, 20 nt, Human
accauucuccaccugccagg

SEQ ID NO: 2539795 - RNA, 19 nt, Human
accauucuccaccugccag

SEQ ID NO: 2539796 - RNA, 16 nt, Human
accaugugccugaucc

SEQ ID NO: 2539797 - RNA, 18 nt, Human
accauguuggccaggcug

SEQ ID NO: 2539798 - RNA, 23 nt, Human
accauuuugcugucccuuuuccu

SEQ ID NO: 2539799 - RNA, 21 nt, Human
accauuuugggguacccacug

SEQ ID NO: 2539800 - RNA, 22 nt, Human
accauuuugcugucccuuuucc

SEQ ID NO: 2539801 - RNA, 21 nt, Human
accauucugacucgguuucuc

SEQ ID NO: 2539802 - RNA, 13 nt, Human
accauucugacuc

SEQ ID NO: 2539803 - RNA, 12 nt, Human
accauguuugag

SEQ ID NO: 2539804 - RNA, 16 nt, Human
accauggagacaagaa

SEQ ID NO: 2539805 - RNA, 15 nt, Human
accauggcugaagga

SEQ ID NO: 2539806 - RNA, 15 nt, Human
accauggccagccaa

SEQ ID NO: 2539807 - RNA, 18 nt, Human
accaugucagcaaaaagc

SEQ ID NO: 2539808 - RNA, 15 nt, Human
accaugucagcaaaa

SEQ ID NO: 2539809 - RNA, 15 nt, Human
accaugucacugugg

SEQ ID NO: 2539810 - RNA, 20 nt, Human
accaugggaccaggucuugg

SEQ ID NO: 2539811 - RNA, 12 nt, Human
accaugggacca

SEQ ID NO: 2539812 - RNA, 23 nt, Human
accauggcugaaggaaaccagug

SEQ ID NO: 2539813 - RNA, 13 nt, Human
accaugucacugu

SEQ ID NO: 2539814 - RNA, 21 nt, Human
accaugucagcaaaaagcaaa

SEQ ID NO: 2539815 - RNA, 19 nt, Human
accaugucagcaaaaagca

SEQ ID NO: 2539816 - RNA, 22 nt, Human
accaugucagcaaaaagcaaaa

SEQ ID NO: 2539817 - RNA, 13 nt, Human
accaugugccuga

SEQ ID NO: 2539818 - RNA, 17 nt, Human
accagggguuucucgca

SEQ ID NO: 2539819 - RNA, 16 nt, Human
accagggguuucucgc

SEQ ID NO: 2539820 - RNA, 14 nt, Human
accagggguuucuc

SEQ ID NO: 2539821 - RNA, 17 nt, Human
ucacuucugagaacuca

SEQ ID NO: 2539822 - RNA, 18 nt, Human
ucacuucugaccacacuu

SEQ ID NO: 2539823 - RNA, 20 nt, Human
accaggguugaccccagagg

SEQ ID NO: 2539824 - RNA, 21 nt, Human
accaggguugaccccagagga

SEQ ID NO: 2539825 - RNA, 16 nt, Human
accaggucuuggagcu

SEQ ID NO: 2539826 - RNA, 20 nt, Human
accaggucuccuccaccgcc

SEQ ID NO: 2539827 - RNA, 19 nt, Human
accaggucuccuccaccgc

SEQ ID NO: 2539828 - RNA, 24 nt, Human
accaggggugauuucagagagggc

SEQ ID NO: 2539829 - RNA, 14 nt, Human
accagguugaaaga

SEQ ID NO: 2539830 - RNA, 20 nt, Human
accagguguucuacacucau

SEQ ID NO: 2539831 - RNA, 23 nt, Human
accagguguucuacacucaucuu

SEQ ID NO: 2539832 - RNA, 22 nt, Human
accaggucuuggagcugagccu

SEQ ID NO: 2539833 - RNA, 19 nt, Human
accagguguucuacacuca

SEQ ID NO: 2539834 - RNA, 16 nt, Human
accaugcaaaugcuau

SEQ ID NO: 2539835 - RNA, 14 nt, Human
accaugcagagcgc

SEQ ID NO: 2539836 - RNA, 18 nt, Human
accaguaauugugaaaau

SEQ ID NO: 2539837 - RNA, 20 nt, Human
accaugcucaucugcugguc

SEQ ID NO: 2539838 - RNA, 19 nt, Human
accaugcucaucugcuggu

SEQ ID NO: 2539839 - RNA, 20 nt, Human
accaugcccggcuaauuuuu

SEQ ID NO: 2539840 - RNA, 17 nt, Human
acccagggccugcagga

SEQ ID NO: 2539841 - RNA, 13 nt, Human
acccagggguggg

SEQ ID NO: 2539842 - RNA, 23 nt, Human
acccaggugcuaggaacacuccu

SEQ ID NO: 2539843 - RNA, 11 nt, Human
acccaggugcu

SEQ ID NO: 2539844 - RNA, 22 nt, Human
accccagcuggggccaggcugg

SEQ ID NO: 2539845 - RNA, 19 nt, Human
accccagcuggggccaggc

SEQ ID NO: 2539846 - RNA, 13 nt, Human
accccagcggcug

SEQ ID NO: 2539847 - RNA, 14 nt, Human
accccagcucccua

SEQ ID NO: 2539848 - RNA, 17 nt, Human
accccagcucccuagga

SEQ ID NO: 2539849 - RNA, 10 nt, Human
accccagcug

SEQ ID NO: 2539850 - RNA, 12 nt, Human
accccagcuggg

SEQ ID NO: 2539851 - RNA, 11 nt, Human
accccagcugg

SEQ ID NO: 2539852 - RNA, 23 nt, Human
accccagcucccuaggagaccaa

SEQ ID NO: 2539853 - RNA, 17 nt, Human
accccagcugggaggca

SEQ ID NO: 2539854 - RNA, 15 nt, Human
accccagcugggagg

SEQ ID NO: 2539855 - RNA, 14 nt, Human
accccagcugggag

SEQ ID NO: 2539856 - RNA, 13 nt, Human
accccagcuggga

SEQ ID NO: 2539857 - RNA, 20 nt, Human
accccagcugggaggcaaga

SEQ ID NO: 2539858 - RNA, 11 nt, Human
accccagggcc

SEQ ID NO: 2539859 - RNA, 13 nt, Human
accccagggccug

SEQ ID NO: 2539860 - RNA, 14 nt, Human
accccagggccuga

SEQ ID NO: 2539861 - RNA, 15 nt, Human
accccagggccugag

SEQ ID NO: 2539862 - RNA, 16 nt, Human
accccaguggccacuc

SEQ ID NO: 2539863 - RNA, 17 nt, Human
accccagggccugagcc

SEQ ID NO: 2539864 - RNA, 24 nt, Human
accccagggccugagccuggccag

SEQ ID NO: 2539865 - RNA, 13 nt, Human
accccagguuucu

SEQ ID NO: 2539866 - RNA, 15 nt, Human
acccccacccccagc

SEQ ID NO: 2539867 - RNA, 14 nt, Human
acccccacccccag

SEQ ID NO: 2539868 - RNA, 16 nt, Human
acccccacccccacca

SEQ ID NO: 2539869 - RNA, 16 nt, Human
accccaguucugcucc

SEQ ID NO: 2539870 - RNA, 17 nt, Human
acccccaccccacacuu

SEQ ID NO: 2539871 - RNA, 15 nt, Human
accccaguucugcuc

SEQ ID NO: 2539872 - RNA, 23 nt, Human
accccaguggccacucagcuucc

SEQ ID NO: 2539873 - RNA, 19 nt, Human
accccaguggccacucagc

SEQ ID NO: 2539874 - RNA, 17 nt, Human
accccaguggccacuca

SEQ ID NO: 2539875 - RNA, 15 nt, Human
acccccaccccacac

SEQ ID NO: 2539876 - RNA, 16 nt, Human
acccccaccccacacu

SEQ ID NO: 2539877 - RNA, 19 nt, Human
acccccacccccagcucaa

SEQ ID NO: 2539878 - RNA, 18 nt, Human
acccccacccccagcuca

SEQ ID NO: 2539879 - RNA, 13 nt, Human
acccccaccccuu

SEQ ID NO: 2539880 - RNA, 14 nt, Human
acccccaccccuuc

SEQ ID NO: 2539881 - RNA, 15 nt, Human
acccccaccccuucc

SEQ ID NO: 2539882 - RNA, 20 nt, Human
acccccaccccuuccccacu

SEQ ID NO: 2539883 - RNA, 17 nt, Human
acccccaccccuugcuc

SEQ ID NO: 2539884 - RNA, 16 nt, Human
acccccaccccuugcu

SEQ ID NO: 2539885 - RNA, 11 nt, Human
acccccacccu

SEQ ID NO: 2539886 - RNA, 12 nt, Human
acccccacccuu

SEQ ID NO: 2539887 - RNA, 15 nt, Human
acccccacuccagcu

SEQ ID NO: 2539888 - RNA, 13 nt, Human
acccccacucuca

SEQ ID NO: 2539889 - RNA, 17 nt, Human
acccccacucucauucc

SEQ ID NO: 2539890 - RNA, 18 nt, Human
acccccacucucauuccc

SEQ ID NO: 2539891 - RNA, 17 nt, Human
acccagcgagcccuggu

SEQ ID NO: 2539892 - RNA, 16 nt, Human
acccagcgagcccugg

SEQ ID NO: 2539893 - RNA, 13 nt, Human
acccagcgagccc

SEQ ID NO: 2539894 - RNA, 23 nt, Human
acccagccucaguccuccccuca

SEQ ID NO: 2539895 - RNA, 22 nt, Human
acccagccucaguccuccccuc

SEQ ID NO: 2539896 - RNA, 23 nt, Human
ucagcccuaggguggagagccac

SEQ ID NO: 2539897 - RNA, 15 nt, Human
acccaggagccccga

SEQ ID NO: 2539898 - RNA, 23 nt, Human
acccaggagcauccaccuccuuc

SEQ ID NO: 2539899 - RNA, 22 nt, Human
acccaggagcauccaccuccuu

SEQ ID NO: 2539900 - RNA, 15 nt, Human
acccagggccugcag

SEQ ID NO: 2539901 - RNA, 23 nt, Human
acccaggacuuauuuaaacucug

SEQ ID NO: 2539902 - RNA, 23 nt, Human
acccaggagauggaaguugcagu

SEQ ID NO: 2539903 - RNA, 18 nt, Human
acccaggacgcuucugaa

SEQ ID NO: 2539904 - RNA, 15 nt, Human
acccagccuguuuua

SEQ ID NO: 2539905 - RNA, 13 nt, Human
acccaggagcccc

SEQ ID NO: 2539906 - RNA, 15 nt, Human
ucagauuuccagucu

SEQ ID NO: 2539907 - RNA, 17 nt, Human
ucagauuuccagucucc

SEQ ID NO: 2539908 - RNA, 19 nt, Human
ucagccccuccucugccac

SEQ ID NO: 2539909 - RNA, 20 nt, Human
ucagccccuccucugccacc

SEQ ID NO: 2539910 - RNA, 21 nt, Human
ucagccccuccucugccaccu

SEQ ID NO: 2539911 - RNA, 22 nt, Human
ucagccccuccucugccaccuc

SEQ ID NO: 2539912 - RNA, 23 nt, Human
ucagccccuccucugccaccucc

SEQ ID NO: 2539913 - RNA, 11 nt, Human
ucagccccucu

SEQ ID NO: 2539914 - RNA, 12 nt, Human
ucagccccucuu

SEQ ID NO: 2539915 - RNA, 22 nt, Human
ucagccccugauccugugaagu

SEQ ID NO: 2539916 - RNA, 14 nt, Human
ucagccccugaucc

SEQ ID NO: 2539917 - RNA, 19 nt, Human
ucagcccuaggguggagag

SEQ ID NO: 2539918 - RNA, 20 nt, Human
ucagccccucuugcccccca

SEQ ID NO: 2539919 - RNA, 21 nt, Human
ucagccccucuugccccccac

SEQ ID NO: 2539920 - RNA, 22 nt, Human
ucagccccucuugccccccacc

SEQ ID NO: 2539921 - RNA, 23 nt, Human
ucagccccucuugccccccaccc

SEQ ID NO: 2539922 - RNA, 15 nt, Human
ucagauugcauguga

SEQ ID NO: 2539923 - RNA, 16 nt, Human
ucagauugcaugugac

SEQ ID NO: 2539924 - RNA, 17 nt, Human
ucagauugcaugugacu

SEQ ID NO: 2539925 - RNA, 18 nt, Human
ucagauugcaugugacuc

SEQ ID NO: 2539926 - RNA, 19 nt, Human
ucagauugcaugugacucu

SEQ ID NO: 2539927 - RNA, 21 nt, Human
ucagauugcaugugacucuga

SEQ ID NO: 2539928 - RNA, 22 nt, Human
ucagauugcaugugacucugaa

SEQ ID NO: 2539929 - RNA, 14 nt, Human
ucagauugcaugug

SEQ ID NO: 2539930 - RNA, 23 nt, Human
ucagauggaaccgcaggaagcug

SEQ ID NO: 2539931 - RNA, 21 nt, Human
ucagauucccagagcaaaaua

SEQ ID NO: 2539932 - RNA, 22 nt, Human
ucagauucccagagcaaaauaa

SEQ ID NO: 2539933 - RNA, 19 nt, Human
ucagauucccagagcaaaa

SEQ ID NO: 2539934 - RNA, 21 nt, Human
ucagauggaaccgcaggaagc

SEQ ID NO: 2539935 - RNA, 22 nt, Human
ucagauggaaccgcaggaagcu

SEQ ID NO: 2539936 - RNA, 20 nt, Human
ucagauggaaccgcaggaag

SEQ ID NO: 2539937 - RNA, 20 nt, Human
ucagagccgugguccuuugg

SEQ ID NO: 2539938 - RNA, 15 nt, Human
ucagaucucuaacuu

SEQ ID NO: 2539939 - RNA, 16 nt, Human
ucagaucucuaacuuc

SEQ ID NO: 2539940 - RNA, 23 nt, Human
ucagaucugacaugauuccuucc

SEQ ID NO: 2539941 - RNA, 21 nt, Human
ucagaugcugugcaaauguua

SEQ ID NO: 2539942 - RNA, 13 nt, Human
ucagaugcuucug

SEQ ID NO: 2539943 - RNA, 14 nt, Human
ucagaugcuucugg

SEQ ID NO: 2539944 - RNA, 18 nt, Human
ucagaugcuucugggaga

SEQ ID NO: 2539945 - RNA, 22 nt, Human
ucagaugcccagagggcccagg

SEQ ID NO: 2539946 - RNA, 21 nt, Human
ucagaugcccagagggcccag

SEQ ID NO: 2539947 - RNA, 14 nt, Human
ucagagcagggguc

SEQ ID NO: 2539948 - RNA, 16 nt, Human
ucagagccgugguccu

SEQ ID NO: 2539949 - RNA, 22 nt, Human
ucagagaugcaccaccaagcca

SEQ ID NO: 2539950 - RNA, 17 nt, Human
ucagagaugugcaccca

SEQ ID NO: 2539951 - RNA, 16 nt, Human
ucagagcaaauuuggg

SEQ ID NO: 2539952 - RNA, 21 nt, Human
ucagagcagcagugaaaacaa

SEQ ID NO: 2539953 - RNA, 20 nt, Human
ucagagcagcagugaaaaca

SEQ ID NO: 2539954 - RNA, 17 nt, Human
ucagagcagcagugaaa

SEQ ID NO: 2539955 - RNA, 21 nt, Human
ucagagccaccccuaaagaga

SEQ ID NO: 2539956 - RNA, 23 nt, Human
ucagagacuccugcaggcagcca

SEQ ID NO: 2539957 - RNA, 12 nt, Human
ucagagagcagc

SEQ ID NO: 2539958 - RNA, 15 nt, Human
ucagagacugcugug

SEQ ID NO: 2539959 - RNA, 14 nt, Human
ucagagagaguguu

SEQ ID NO: 2539960 - RNA, 21 nt, Human
ucagagaugcaccaccaagcc

SEQ ID NO: 2539961 - RNA, 16 nt, Human
ucagagaugcaccacc

SEQ ID NO: 2539962 - RNA, 17 nt, Human
ucagagaggagucagag

SEQ ID NO: 2539963 - RNA, 20 nt, Human
ucagagaggagucagagaga

SEQ ID NO: 2539964 - RNA, 22 nt, Human
ucagagagcgagcgcuacccac

SEQ ID NO: 2539965 - RNA, 13 nt, Human
ucagagagcuggu

SEQ ID NO: 2539966 - RNA, 14 nt, Human
ucagagagcuggua

SEQ ID NO: 2539967 - RNA, 16 nt, Human
ucagagagcugguagu

SEQ ID NO: 2539968 - RNA, 22 nt, Human
ucagagacuccugcaggcagcc

SEQ ID NO: 2539969 - RNA, 14 nt, Human
ucagagacucaggg

SEQ ID NO: 2539970 - RNA, 17 nt, Human
ucagagacucagggccc

SEQ ID NO: 2539971 - RNA, 19 nt, Human
ucagagacucagggcccca

SEQ ID NO: 2539972 - RNA, 20 nt, Human
ucagagacucagggccccag

SEQ ID NO: 2539973 - RNA, 15 nt, Human
ucagagaccauugca

SEQ ID NO: 2539974 - RNA, 23 nt, Human
ucagagacaggaagucuucaggg

SEQ ID NO: 2539975 - RNA, 20 nt, Human
ucagagacaggaagucuuca

SEQ ID NO: 2539976 - RNA, 23 nt, Human
ucagagaauuucuaccauuucag

SEQ ID NO: 2539977 - RNA, 13 nt, Human
ucagagaauuucu

SEQ ID NO: 2539978 - RNA, 20 nt, Human
ucagaauucucagaaucuca

SEQ ID NO: 2539979 - RNA, 10 nt, Human
ucagaauucu

SEQ ID NO: 2539980 - RNA, 12 nt, Human
ucagaauucuca

SEQ ID NO: 2539981 - RNA, 23 nt, Human
ucagaaguuucugccgcagcccu

SEQ ID NO: 2539982 - RNA, 15 nt, Human
acccagcccacuucu

SEQ ID NO: 2539983 - RNA, 19 nt, Human
acccagccaucugcccagg

SEQ ID NO: 2539984 - RNA, 18 nt, Human
acccagccaucugcccag

SEQ ID NO: 2539985 - RNA, 15 nt, Human
acccagccaucugcc

SEQ ID NO: 2539986 - RNA, 13 nt, Human
acccagccaucug

SEQ ID NO: 2539987 - RNA, 19 nt, Human
acccagauuuugcuguaua

SEQ ID NO: 2539988 - RNA, 20 nt, Human
acccagauuuugcuguauau

SEQ ID NO: 2539989 - RNA, 17 nt, Human
acccagcaacuccaacu

SEQ ID NO: 2539990 - RNA, 21 nt, Human
acccagccaucugcccagggg

SEQ ID NO: 2539991 - RNA, 20 nt, Human
acccagccaucugcccaggg

SEQ ID NO: 2539992 - RNA, 17 nt, Human
ucagaaguuuggcaaua

SEQ ID NO: 2539993 - RNA, 21 nt, Human
ucagaauagccacauuuggaa

SEQ ID NO: 2539994 - RNA, 16 nt, Human
ucagaauagaaauuag

SEQ ID NO: 2539995 - RNA, 19 nt, Human
ucagaaucacuucugagaa

SEQ ID NO: 2539996 - RNA, 17 nt, Human
ucagaaucacuucugag

SEQ ID NO: 2539997 - RNA, 22 nt, Human
ucagaauagccacauuuggaau

SEQ ID NO: 2539998 - RNA, 23 nt, Human
ucagaauagccacauuuggaaua

SEQ ID NO: 2539999 - RNA, 14 nt, Human
ucagaaucuaccca

SEQ ID NO: 2540000 - RNA, 22 nt, Human
ucagaauccaagugaacacuag

SEQ ID NO: 2540001 - RNA, 19 nt, Human
ucagaaucuacccaaagga

SEQ ID NO: 2540002 - RNA, 21 nt, Human
ucguauagcuguauugaauca

SEQ ID NO: 2540003 - RNA, 17 nt, Human
ucguauagcuguauuga

SEQ ID NO: 2540004 - RNA, 15 nt, Human
ucguacaguucuucg

SEQ ID NO: 2540005 - RNA, 14 nt, Human
ucguacaguucuuc

SEQ ID NO: 2540006 - RNA, 12 nt, Human
ucguagcuuucc

SEQ ID NO: 2540007 - RNA, 22 nt, Human
ucguagcuuucccaaauaaacu

SEQ ID NO: 2540008 - RNA, 21 nt, Human
ucguauaacacaauaugaaua

SEQ ID NO: 2540009 - RNA, 15 nt, Human
ucguacagaaagcug

SEQ ID NO: 2540010 - RNA, 16 nt, Human
ucguacagaaagcugc

SEQ ID NO: 2540011 - RNA, 20 nt, Human
ucguaaccagccagauccuc

SEQ ID NO: 2540012 - RNA, 16 nt, Human
ucggggcaugcugggg

SEQ ID NO: 2540013 - RNA, 17 nt, Human
ucggggcaugcuggggc

SEQ ID NO: 2540014 - RNA, 18 nt, Human
ucggggcaugcuggggca

SEQ ID NO: 2540015 - RNA, 19 nt, Human
ucggggagaggcugaggac

SEQ ID NO: 2540016 - RNA, 13 nt, Human
ucgggcugugccc

SEQ ID NO: 2540017 - RNA, 17 nt, Human
ucgggcuccugugcccu

SEQ ID NO: 2540018 - RNA, 16 nt, Human
ucgggcuccugugccc

SEQ ID NO: 2540019 - RNA, 15 nt, Human
ucggggaacuccugg

SEQ ID NO: 2540020 - RNA, 16 nt, Human
ucggggaacuccugga

SEQ ID NO: 2540021 - RNA, 12 nt, Human
ucgggcugugcc

SEQ ID NO: 2540022 - RNA, 14 nt, Human
ucgggcuccugugc

SEQ ID NO: 2540023 - RNA, 15 nt, Human
ucgggcuccugugcc

SEQ ID NO: 2540024 - RNA, 23 nt, Human
ucgggagcagugucuuccauaau

SEQ ID NO: 2540025 - RNA, 13 nt, Human
ucgggagcagugu

SEQ ID NO: 2540026 - RNA, 14 nt, Human
ucgggagcaguguc

SEQ ID NO: 2540027 - RNA, 15 nt, Human
ucgggagcagugucu

SEQ ID NO: 2540028 - RNA, 16 nt, Human
ucgggagcagugucuu

SEQ ID NO: 2540029 - RNA, 16 nt, Human
ucgggaggcugagaca

SEQ ID NO: 2540030 - RNA, 19 nt, Human
ucgggagcagugucuucca

SEQ ID NO: 2540031 - RNA, 22 nt, Human
ucgggagcagugucuuccauaa

SEQ ID NO: 2540032 - RNA, 22 nt, Human
ucuaaaaugccucaguguauuu

SEQ ID NO: 2540033 - RNA, 21 nt, Human
ucuaaaaugccucaguguauu

SEQ ID NO: 2540034 - RNA, 16 nt, Human
ucguuucaaaaacaca

SEQ ID NO: 2540035 - RNA, 12 nt, Human
ucguuucaaaaa

SEQ ID NO: 2540036 - RNA, 19 nt, Human
ucguuuauuuucaagaaua

SEQ ID NO: 2540037 - RNA, 15 nt, Human
ucguuuacuaugccu

SEQ ID NO: 2540038 - RNA, 14 nt, Human
ucuaaacauuaauc

SEQ ID NO: 2540039 - RNA, 13 nt, Human
ucuaaacauuaau

SEQ ID NO: 2540040 - RNA, 16 nt, Human
ucuaaacccaauccaa

SEQ ID NO: 2540041 - RNA, 19 nt, Human
ucuaaacccaauccaaaug

SEQ ID NO: 2540042 - RNA, 19 nt, Human
ucuaaacaagauuuuaaag

SEQ ID NO: 2540043 - RNA, 18 nt, Human
ucuaaacaagaaucaguc

SEQ ID NO: 2540044 - RNA, 20 nt, Human
ucuaaacaaugcugauuugg

SEQ ID NO: 2540045 - RNA, 12 nt, Human
ucguugugaggg

SEQ ID NO: 2540046 - RNA, 16 nt, Human
ucguugacuuuaggga

SEQ ID NO: 2540047 - RNA, 17 nt, Human
ucguugacuuuagggac

SEQ ID NO: 2540048 - RNA, 21 nt, Human
ucguucuguuuacaucaguuu

SEQ ID NO: 2540049 - RNA, 19 nt, Human
ucguucuguuuacaucagu

SEQ ID NO: 2540050 - RNA, 11 nt, Human
ucguucugugg

SEQ ID NO: 2540051 - RNA, 15 nt, Human
ucguucuguuuacau

SEQ ID NO: 2540052 - RNA, 13 nt, Human
ucguucucugccu

SEQ ID NO: 2540053 - RNA, 23 nt, Human
ucgucacugcuuaacuucacaua

SEQ ID NO: 2540054 - RNA, 15 nt, Human
ucguuauguguguau

SEQ ID NO: 2540055 - RNA, 19 nt, Human
ucguuaguaucuaacaugu

SEQ ID NO: 2540056 - RNA, 16 nt, Human
ucgggacaccugcccu

SEQ ID NO: 2540057 - RNA, 20 nt, Human
ucgggaauacuagggagaag

SEQ ID NO: 2540058 - RNA, 24 nt, Human
ucgggaagagaggaguucaaugau

SEQ ID NO: 2540059 - RNA, 23 nt, Human
ucgggaagagaggaguucaauga

SEQ ID NO: 2540060 - RNA, 22 nt, Human
ucgggaagagaggaguucaaug

SEQ ID NO: 2540061 - RNA, 21 nt, Human
ucgggaagagaggaguucaau

SEQ ID NO: 2540062 - RNA, 20 nt, Human
ucgggaagagaggaguucaa

SEQ ID NO: 2540063 - RNA, 16 nt, Human
ucgggaagagaggagu

SEQ ID NO: 2540064 - RNA, 21 nt, Human
ucgggagacagcaucaggguu

SEQ ID NO: 2540065 - RNA, 16 nt, Human
ucgggagacagcauca

SEQ ID NO: 2540066 - RNA, 20 nt, Human
ucgggacaccugcccugccc

SEQ ID NO: 2540067 - RNA, 19 nt, Human
ucgggacaccugcccugcc

SEQ ID NO: 2540068 - RNA, 15 nt, Human
ucgggaagagaggag

SEQ ID NO: 2540069 - RNA, 12 nt, Human
ucgggaagagag

SEQ ID NO: 2540070 - RNA, 16 nt, Human
ucgggaaccucacucu

SEQ ID NO: 2540071 - RNA, 15 nt, Human
ucgggaaccucacuc

SEQ ID NO: 2540072 - RNA, 15 nt, Human
ucgggaacaguguuu

SEQ ID NO: 2540073 - RNA, 21 nt, Human
acuguuaauaguucagguaac

SEQ ID NO: 2540074 - RNA, 18 nt, Human
acuguguuucaaguucaa

SEQ ID NO: 2540075 - RNA, 20 nt, Human
acuguuaaauugcuguguau

SEQ ID NO: 2540076 - RNA, 16 nt, Human
acuguuaaaggaaaaa

SEQ ID NO: 2540077 - RNA, 17 nt, Human
acuguuaauaguucagg

SEQ ID NO: 2540078 - RNA, 14 nt, Human
acuguguuucaagu

SEQ ID NO: 2540079 - RNA, 15 nt, Human
acuguguuucaaguu

SEQ ID NO: 2540080 - RNA, 15 nt, Human
acuguguuccuggca

SEQ ID NO: 2540081 - RNA, 14 nt, Human
acuguguguugcca

SEQ ID NO: 2540082 - RNA, 19 nt, Human
acuguguguugccacagga

SEQ ID NO: 2540083 - RNA, 20 nt, Human
acuguguguugccacaggac

SEQ ID NO: 2540084 - RNA, 22 nt, Human
acuguguguugccacaggacac

SEQ ID NO: 2540085 - RNA, 14 nt, Human
acuguguucauuag

SEQ ID NO: 2540086 - RNA, 12 nt, Human
acuguguuccug

SEQ ID NO: 2540087 - RNA, 12 nt, Human
acuguccugggc

SEQ ID NO: 2540088 - RNA, 20 nt, Human
acuguccugcuccacagugu

SEQ ID NO: 2540089 - RNA, 19 nt, Human
acuguccugcuccacagug

SEQ ID NO: 2540090 - RNA, 18 nt, Human
acuguccugcuccacagu

SEQ ID NO: 2540091 - RNA, 22 nt, Human
acuguggaggaaggauuguaaa

SEQ ID NO: 2540092 - RNA, 14 nt, Human
acuguccugggccu

SEQ ID NO: 2540093 - RNA, 17 nt, Human
acuguccugcuccacag

SEQ ID NO: 2540094 - RNA, 16 nt, Human
acuguccugcuccaca

SEQ ID NO: 2540095 - RNA, 13 nt, Human
acuguccugcucc

SEQ ID NO: 2540096 - RNA, 12 nt, Human
acuguccugcuc

SEQ ID NO: 2540097 - RNA, 10 nt, Human
acuguccugc

SEQ ID NO: 2540098 - RNA, 17 nt, Human
acuguggccguuaucug

SEQ ID NO: 2540099 - RNA, 23 nt, Human
acuguggaggaaggauuguaaaa

SEQ ID NO: 2540100 - RNA, 15 nt, Human
acuguggcacacgcc

SEQ ID NO: 2540101 - RNA, 12 nt, Human
acuguggcugcu

SEQ ID NO: 2540102 - RNA, 20 nt, Human
acuguggccguuaucuggaa

SEQ ID NO: 2540103 - RNA, 19 nt, Human
acuguggcugcuagcacuu

SEQ ID NO: 2540104 - RNA, 20 nt, Human
acuguguguggaggagucca

SEQ ID NO: 2540105 - RNA, 15 nt, Human
acugugugugugaau

SEQ ID NO: 2540106 - RNA, 16 nt, Human
acugugugugugaaug

SEQ ID NO: 2540107 - RNA, 18 nt, Human
acugugugugugaaugaa

SEQ ID NO: 2540108 - RNA, 22 nt, Human
acugugugugugaaugaacacu

SEQ ID NO: 2540109 - RNA, 13 nt, Human
acuguggguagac

SEQ ID NO: 2540110 - RNA, 20 nt, Human
acugugggaaggccagcugc

SEQ ID NO: 2540111 - RNA, 23 nt, Human
acuguggccguuaucuggaagua

SEQ ID NO: 2540112 - RNA, 22 nt, Human
acuguggggugugcacaucucu

SEQ ID NO: 2540113 - RNA, 17 nt, Human
ucuaccaaaaaucucaa

SEQ ID NO: 2540114 - RNA, 15 nt, Human
ucuacccauauuaca

SEQ ID NO: 2540115 - RNA, 22 nt, Human
ucuacaucuuuuuucacaaauu

SEQ ID NO: 2540116 - RNA, 19 nt, Human
ucuacaucuuuuuucacaa

SEQ ID NO: 2540117 - RNA, 17 nt, Human
ucuacaucuucugccuu

SEQ ID NO: 2540118 - RNA, 16 nt, Human
ucuacaucuucugccu

SEQ ID NO: 2540119 - RNA, 23 nt, Human
ucuacauacuuucauccugacuc

SEQ ID NO: 2540120 - RNA, 15 nt, Human
ucuacauauucuuua

SEQ ID NO: 2540121 - RNA, 15 nt, Human
ucuacaucuucugcc

SEQ ID NO: 2540122 - RNA, 16 nt, Human
ucuacauauucuuuaa

SEQ ID NO: 2540123 - RNA, 15 nt, Human
ucuaccccuuacuua

SEQ ID NO: 2540124 - RNA, 14 nt, Human
ucuacauuucuuag

SEQ ID NO: 2540125 - RNA, 21 nt, Human
ucuacccucuuagaaaaacca

SEQ ID NO: 2540126 - RNA, 18 nt, Human
ucuacccucccacccccu

SEQ ID NO: 2540127 - RNA, 15 nt, Human
ucuacccucccaccc

SEQ ID NO: 2540128 - RNA, 16 nt, Human
ucuacccucccacccc

SEQ ID NO: 2540129 - RNA, 13 nt, Human
ucuaagucuuucc

SEQ ID NO: 2540130 - RNA, 14 nt, Human
ucuaagucuuucca

SEQ ID NO: 2540131 - RNA, 13 nt, Human
ucuaagugauaua

SEQ ID NO: 2540132 - RNA, 16 nt, Human
ucuaaguauuugaaac

SEQ ID NO: 2540133 - RNA, 19 nt, Human
ucuaagucaauccaagagu

SEQ ID NO: 2540134 - RNA, 17 nt, Human
ucuaaguuccacugagc

SEQ ID NO: 2540135 - RNA, 21 nt, Human
ucuaagauucauccauuuauu

SEQ ID NO: 2540136 - RNA, 14 nt, Human
ucuaagcagcauuu

SEQ ID NO: 2540137 - RNA, 14 nt, Human
ucuaagccugaagg

SEQ ID NO: 2540138 - RNA, 15 nt, Human
ucuaagccugaaggg

SEQ ID NO: 2540139 - RNA, 16 nt, Human
ucuaagccugaagggg

SEQ ID NO: 2540140 - RNA, 17 nt, Human
ucuaagccuuuccauaa

SEQ ID NO: 2540141 - RNA, 21 nt, Human
ucuaagauaguaacaaugaag

SEQ ID NO: 2540142 - RNA, 12 nt, Human
ucuaagagaagu

SEQ ID NO: 2540143 - RNA, 20 nt, Human
ucuaagagaacaaugugcua

SEQ ID NO: 2540144 - RNA, 13 nt, Human
ucuaaacugcccc

SEQ ID NO: 2540145 - RNA, 16 nt, Human
ucuaaacugcccccuc

SEQ ID NO: 2540146 - RNA, 22 nt, Human
ucuaaacugcccccucugcccu

SEQ ID NO: 2540147 - RNA, 23 nt, Human
ucuaaacugcccccucugcccug

SEQ ID NO: 2540148 - RNA, 21 nt, Human
ucuaaacuggauucacagcuc

SEQ ID NO: 2540149 - RNA, 14 nt, Human
ucuaaacugcauua

SEQ ID NO: 2540150 - RNA, 17 nt, Human
ucuaaacauuaaucaau

SEQ ID NO: 2540151 - RNA, 17 nt, Human
ucuaaacuuccccaucu

SEQ ID NO: 2540152 - RNA, 20 nt, Human
ucuaaagaguuuauuuuaag

SEQ ID NO: 2540153 - RNA, 13 nt, Human
ucuaaaggcuacc

SEQ ID NO: 2540154 - RNA, 16 nt, Human
ucuaaaggcuaccuuu

SEQ ID NO: 2540155 - RNA, 17 nt, Human
ucuaaagcugccagccg

SEQ ID NO: 2540156 - RNA, 21 nt, Human
ucuaaagaguuuauuuuaaga

SEQ ID NO: 2540157 - RNA, 21 nt, Human
acuggggccuacagcuuugau

SEQ ID NO: 2540158 - RNA, 12 nt, Human
acuggggccucc

SEQ ID NO: 2540159 - RNA, 13 nt, Human
acuggggccucca

SEQ ID NO: 2540160 - RNA, 16 nt, Human
acuggggccuccagaa

SEQ ID NO: 2540161 - RNA, 21 nt, Human
acugggcugaacacuccaauu

SEQ ID NO: 2540162 - RNA, 13 nt, Human
acugggcugaggg

SEQ ID NO: 2540163 - RNA, 14 nt, Human
acugggcugaggga

SEQ ID NO: 2540164 - RNA, 17 nt, Human
acugggcugagggagcc

SEQ ID NO: 2540165 - RNA, 21 nt, Human
acugggcuuggggaccagagc

SEQ ID NO: 2540166 - RNA, 15 nt, Human
acuggguacuugugg

SEQ ID NO: 2540167 - RNA, 19 nt, Human
acuggggugccgccugccc

SEQ ID NO: 2540168 - RNA, 15 nt, Human
acuggggugccgccu

SEQ ID NO: 2540169 - RNA, 19 nt, Human
acuggggguugcgggggga

SEQ ID NO: 2540170 - RNA, 18 nt, Human
acugggguccuggggccu

SEQ ID NO: 2540171 - RNA, 20 nt, Human
acugggguccuggggccucg

SEQ ID NO: 2540172 - RNA, 15 nt, Human
acuggggcuggcaca

SEQ ID NO: 2540173 - RNA, 14 nt, Human
acuggggcugaagg

SEQ ID NO: 2540174 - RNA, 17 nt, Human
acuggggccuccagaac

SEQ ID NO: 2540175 - RNA, 16 nt, Human
acuggggcuggcacaa

SEQ ID NO: 2540176 - RNA, 13 nt, Human
acuggggggcuug

SEQ ID NO: 2540177 - RNA, 13 nt, Human
acugggggagggg

SEQ ID NO: 2540178 - RNA, 19 nt, Human
ucgcugaugcugggcuggg

SEQ ID NO: 2540179 - RNA, 18 nt, Human
ucgcugaugcugggcugg

SEQ ID NO: 2540180 - RNA, 17 nt, Human
ucgcugaugcugggcug

SEQ ID NO: 2540181 - RNA, 16 nt, Human
ucgcugaugcugggcu

SEQ ID NO: 2540182 - RNA, 22 nt, Human
ucgcugaugcugggcugggugc

SEQ ID NO: 2540183 - RNA, 20 nt, Human
ucgcugaugcugggcugggu

SEQ ID NO: 2540184 - RNA, 19 nt, Human
ucgcugccagcucuguauc

SEQ ID NO: 2540185 - RNA, 11 nt, Human
ucgcugcugcg

SEQ ID NO: 2540186 - RNA, 20 nt, Human
ucgcugccagcucuguauca

SEQ ID NO: 2540187 - RNA, 20 nt, Human
ucgcuggacucucagucucu

SEQ ID NO: 2540188 - RNA, 22 nt, Human
ucgcuggacucucagucucuga

SEQ ID NO: 2540189 - RNA, 19 nt, Human
ucgcugauauauguguuuu

SEQ ID NO: 2540190 - RNA, 14 nt, Human
ucgcugaugcuggg

SEQ ID NO: 2540191 - RNA, 22 nt, Human
ucgcugauauauguguuuuuca

SEQ ID NO: 2540192 - RNA, 22 nt, Human
ucgcucugucacccaggcugga

SEQ ID NO: 2540193 - RNA, 18 nt, Human
ucgcucugucacccaggc

SEQ ID NO: 2540194 - RNA, 21 nt, Human
ucgcucuguugcccaggcugg

SEQ ID NO: 2540195 - RNA, 23 nt, Human
ucgcugugucagcauagaaguaa

SEQ ID NO: 2540196 - RNA, 16 nt, Human
ucgcugucacaggcgg

SEQ ID NO: 2540197 - RNA, 23 nt, Human
ucgcuggacucucagucucugag

SEQ ID NO: 2540198 - RNA, 16 nt, Human
acugggcugaacacuc

SEQ ID NO: 2540199 - RNA, 16 nt, Human
acugggcccugccucu

SEQ ID NO: 2540200 - RNA, 13 nt, Human
acugggcccugcc

SEQ ID NO: 2540201 - RNA, 16 nt, Human
ucgcugugguuguuuu

SEQ ID NO: 2540202 - RNA, 15 nt, Human
ucgccuggccugagg

SEQ ID NO: 2540203 - RNA, 14 nt, Human
ucgccuggccugag

SEQ ID NO: 2540204 - RNA, 22 nt, Human
ucgccugacaaccacuggucug

SEQ ID NO: 2540205 - RNA, 21 nt, Human
ucgccugacaaccacuggucu

SEQ ID NO: 2540206 - RNA, 20 nt, Human
ucgccugacaaccacugguc

SEQ ID NO: 2540207 - RNA, 11 nt, Human
ucgccugacaa

SEQ ID NO: 2540208 - RNA, 17 nt, Human
ucgccguugaagaggaa

SEQ ID NO: 2540209 - RNA, 23 nt, Human
ucgcucugcuggccuggccggca

SEQ ID NO: 2540210 - RNA, 21 nt, Human
ucgcucugcuggccuggccgg

SEQ ID NO: 2540211 - RNA, 20 nt, Human
ucgcucugcuggccuggccg

SEQ ID NO: 2540212 - RNA, 17 nt, Human
ucgcucugcuggccugg

SEQ ID NO: 2540213 - RNA, 15 nt, Human
ucgcucugcuggccu

SEQ ID NO: 2540214 - RNA, 12 nt, Human
ucgccuguaauc

SEQ ID NO: 2540215 - RNA, 14 nt, Human
ucgcuccugugucu

SEQ ID NO: 2540216 - RNA, 15 nt, Human
ucgccgucugugaau

SEQ ID NO: 2540217 - RNA, 14 nt, Human
ucgccguggcugcg

SEQ ID NO: 2540218 - RNA, 23 nt, Human
ucgcccgcccacuguccugggcg

SEQ ID NO: 2540219 - RNA, 14 nt, Human
ucgcccucccaggc

SEQ ID NO: 2540220 - RNA, 18 nt, Human
ucgcccuggacugugugc

SEQ ID NO: 2540221 - RNA, 22 nt, Human
ucgcccgcccacuguccugggc

SEQ ID NO: 2540222 - RNA, 21 nt, Human
ucgcccgcccacuguccuggg

SEQ ID NO: 2540223 - RNA, 13 nt, Human
ucgcccucccagg

SEQ ID NO: 2540224 - RNA, 17 nt, Human
ucgcccucccaggcucu

SEQ ID NO: 2540225 - RNA, 20 nt, Human
ucgcccgcccacuguccugg

SEQ ID NO: 2540226 - RNA, 19 nt, Human
ucgcccgcccacuguccug

SEQ ID NO: 2540227 - RNA, 18 nt, Human
ucgcccgcccacuguccu

SEQ ID NO: 2540228 - RNA, 17 nt, Human
ucgcccgcccacugucc

SEQ ID NO: 2540229 - RNA, 15 nt, Human
ucgcccgcccacugu

SEQ ID NO: 2540230 - RNA, 13 nt, Human
ucgcccgcccacu

SEQ ID NO: 2540231 - RNA, 11 nt, Human
ucgcccgccca

SEQ ID NO: 2540232 - RNA, 20 nt, Human
ucgccccagaucaccagccc

SEQ ID NO: 2540233 - RNA, 18 nt, Human
ucgccccagaucaccagc

SEQ ID NO: 2540234 - RNA, 14 nt, Human
ucgccccagcaggu

SEQ ID NO: 2540235 - RNA, 13 nt, Human
ucgcccccaccuc

SEQ ID NO: 2540236 - RNA, 22 nt, Human
ucgccccagaucaccagcccgg

SEQ ID NO: 2540237 - RNA, 20 nt, Human
ucgccccagcaggugcugac

SEQ ID NO: 2540238 - RNA, 12 nt, Human
acugaagccugc

SEQ ID NO: 2540239 - RNA, 14 nt, Human
acugaagccugcag

SEQ ID NO: 2540240 - RNA, 15 nt, Human
acugaagccugcagg

SEQ ID NO: 2540241 - RNA, 15 nt, Human
ucgccccagaucacc

SEQ ID NO: 2540242 - RNA, 16 nt, Human
acugaagccugcagga

SEQ ID NO: 2540243 - RNA, 14 nt, Human
acugaagcagccuc

SEQ ID NO: 2540244 - RNA, 13 nt, Human
acugaagcagccu

SEQ ID NO: 2540245 - RNA, 21 nt, Human
acugaagcagccucuccccag

SEQ ID NO: 2540246 - RNA, 18 nt, Human
acugaagccagaaauaaa

SEQ ID NO: 2540247 - RNA, 22 nt, Human
acugaagaagcaccaaucauga

SEQ ID NO: 2540248 - RNA, 17 nt, Human
acugaaauauacacaca

SEQ ID NO: 2540249 - RNA, 22 nt, Human
acugaacaaacuaucagaggaa

SEQ ID NO: 2540250 - RNA, 13 nt, Human
acugaaagguuac

SEQ ID NO: 2540251 - RNA, 15 nt, Human
acugaaauauacaca

SEQ ID NO: 2540252 - RNA, 16 nt, Human
acugaaauauacacac

SEQ ID NO: 2540253 - RNA, 18 nt, Human
acuggguacuuguggaca

SEQ ID NO: 2540254 - RNA, 17 nt, Human
acuggguacuuguggac

SEQ ID NO: 2540255 - RNA, 16 nt, Human
acuguacaaaguagaa

SEQ ID NO: 2540256 - RNA, 22 nt, Human
acuguacaaaguagaagucuua

SEQ ID NO: 2540257 - RNA, 19 nt, Human
acuguacaugaaaacacau

SEQ ID NO: 2540258 - RNA, 16 nt, Human
acuguacaugaaaaca

SEQ ID NO: 2540259 - RNA, 18 nt, Human
acuguacagacagaaaaa

SEQ ID NO: 2540260 - RNA, 20 nt, Human
acuguacaugaaaacacauu

SEQ ID NO: 2540261 - RNA, 21 nt, Human
acuguacaugaaaacacauuu

SEQ ID NO: 2540262 - RNA, 15 nt, Human
acuguacuugcucuu

SEQ ID NO: 2540263 - RNA, 22 nt, Human
acuguacaaugacuuuauugca

SEQ ID NO: 2540264 - RNA, 15 nt, Human
acuguacuccuccca

SEQ ID NO: 2540265 - RNA, 20 nt, Human
acuguacuccucccaggcgc

SEQ ID NO: 2540266 - RNA, 14 nt, Human
acuguaucaugaca

SEQ ID NO: 2540267 - RNA, 23 nt, Human
acuguacuugcucuugaugccug

SEQ ID NO: 2540268 - RNA, 15 nt, Human
acuguacuucacugu

SEQ ID NO: 2540269 - RNA, 13 nt, Human
acuguacuucacu

SEQ ID NO: 2540270 - RNA, 16 nt, Human
acuguacuucacuguc

SEQ ID NO: 2540271 - RNA, 17 nt, Human
acuguacuuaauaaauu

SEQ ID NO: 2540272 - RNA, 18 nt, Human
acuguacuuaauaaauuc

SEQ ID NO: 2540273 - RNA, 22 nt, Human
acugucagcuccccucggagaa

SEQ ID NO: 2540274 - RNA, 23 nt, Human
acugucagcuccccucggagaag

SEQ ID NO: 2540275 - RNA, 17 nt, Human
acugucacccuccaccu

SEQ ID NO: 2540276 - RNA, 15 nt, Human
acugucacccuccac

SEQ ID NO: 2540277 - RNA, 21 nt, Human
acugucaaggcugcuuagaau

SEQ ID NO: 2540278 - RNA, 22 nt, Human
acugucaaggcugcuuagaauc

SEQ ID NO: 2540279 - RNA, 14 nt, Human
acugucacucauug

SEQ ID NO: 2540280 - RNA, 15 nt, Human
acugucacucauugc

SEQ ID NO: 2540281 - RNA, 19 nt, Human
acugucaaaauaauuuuau

SEQ ID NO: 2540282 - RNA, 20 nt, Human
acugucaaggcugcuuagaa

SEQ ID NO: 2540283 - RNA, 14 nt, Human
acugucacccucca

SEQ ID NO: 2540284 - RNA, 14 nt, Human
acuguccagagagc

SEQ ID NO: 2540285 - RNA, 13 nt, Human
acuguccagagag

SEQ ID NO: 2540286 - RNA, 22 nt, Human
acugucaggaagaaaucacaga

SEQ ID NO: 2540287 - RNA, 14 nt, Human
acugucccucaaau

SEQ ID NO: 2540288 - RNA, 15 nt, Human
acuguccagagagca

SEQ ID NO: 2540289 - RNA, 13 nt, Human
acugucccucaaa

SEQ ID NO: 2540290 - RNA, 16 nt, Human
acugucaggaagaaau

SEQ ID NO: 2540291 - RNA, 12 nt, Human
acugucaggaag

SEQ ID NO: 2540292 - RNA, 13 nt, Human
acugucauagaaa

SEQ ID NO: 2540293 - RNA, 16 nt, Human
acuguccuccaagcca

SEQ ID NO: 2540294 - RNA, 18 nt, Human
acuguccuccaagccagc

SEQ ID NO: 2540295 - RNA, 21 nt, Human
acuguauuaagagugaaaauu

SEQ ID NO: 2540296 - RNA, 13 nt, Human
acuguauuaagag

SEQ ID NO: 2540297 - RNA, 12 nt, Human
acuguauugaug

SEQ ID NO: 2540298 - RNA, 11 nt, Human
acuguauggaa

SEQ ID NO: 2540299 - RNA, 13 nt, Human
acuguaugcugga

SEQ ID NO: 2540300 - RNA, 20 nt, Human
acuguauuugugacuaauug

SEQ ID NO: 2540301 - RNA, 17 nt, Human
acuguauuugugacuaa

SEQ ID NO: 2540302 - RNA, 16 nt, Human
acuguauuugugacua

SEQ ID NO: 2540303 - RNA, 15 nt, Human
acuguauuugugacu

SEQ ID NO: 2540304 - RNA, 14 nt, Human
acuguauuugugac

SEQ ID NO: 2540305 - RNA, 13 nt, Human
acuguauuuguga

SEQ ID NO: 2540306 - RNA, 14 nt, Human
acuguauuuguauc

SEQ ID NO: 2540307 - RNA, 13 nt, Human
acuguauuuguau

SEQ ID NO: 2540308 - RNA, 23 nt, Human
acuguauuugugacuaauuguau

SEQ ID NO: 2540309 - RNA, 22 nt, Human
acuguauuugugacuaauugua

SEQ ID NO: 2540310 - RNA, 21 nt, Human
acuguauuuuguauuguuuca

SEQ ID NO: 2540311 - RNA, 15 nt, Human
acugucaaaauaauu

SEQ ID NO: 2540312 - RNA, 23 nt, Human
acugucaaaaaguuugguucugu

SEQ ID NO: 2540313 - RNA, 20 nt, Human
acuguauuuuuaccuuuuuc

SEQ ID NO: 2540314 - RNA, 16 nt, Human
acuguaucaugacaaa

SEQ ID NO: 2540315 - RNA, 20 nt, Human
acuguaucaugacaaagacu

SEQ ID NO: 2540316 - RNA, 18 nt, Human
acuuagaucuccaggaga

SEQ ID NO: 2540317 - RNA, 21 nt, Human
acuuagaggaaauaagaaaaa

SEQ ID NO: 2540318 - RNA, 13 nt, Human
acuuagaggaaau

SEQ ID NO: 2540319 - RNA, 15 nt, Human
acuuauauuguaaga

SEQ ID NO: 2540320 - RNA, 17 nt, Human
acuuauauuguaagaaa

SEQ ID NO: 2540321 - RNA, 18 nt, Human
acuuauauuguaagaaau

SEQ ID NO: 2540322 - RNA, 19 nt, Human
acuuauauuguaagaaaua

SEQ ID NO: 2540323 - RNA, 20 nt, Human
acuuauauuguaagaaauac

SEQ ID NO: 2540324 - RNA, 21 nt, Human
acuuauauuguaagaaauacu

SEQ ID NO: 2540325 - RNA, 19 nt, Human
acuuaucauccacauuguu

SEQ ID NO: 2540326 - RNA, 22 nt, Human
acuuaucucucugugcugugga

SEQ ID NO: 2540327 - RNA, 17 nt, Human
acuuaucucucugugcu

SEQ ID NO: 2540328 - RNA, 16 nt, Human
acuuaucucucugugc

SEQ ID NO: 2540329 - RNA, 14 nt, Human
acuuaucccucucc

SEQ ID NO: 2540330 - RNA, 16 nt, Human
acuucaggcucuucuc

SEQ ID NO: 2540331 - RNA, 15 nt, Human
acuuaucccucucca

SEQ ID NO: 2540332 - RNA, 22 nt, Human
acuuaucauccacauuguuuua

SEQ ID NO: 2540333 - RNA, 20 nt, Human
acuuaucauccacauuguuu

SEQ ID NO: 2540334 - RNA, 19 nt, Human
acuuauccuaaaacaaaua

SEQ ID NO: 2540335 - RNA, 18 nt, Human
acuuauccuaaaacaaau

SEQ ID NO: 2540336 - RNA, 21 nt, Human
ucuaccugccacucacacagc

SEQ ID NO: 2540337 - RNA, 15 nt, Human
ucuaccugccacuca

SEQ ID NO: 2540338 - RNA, 14 nt, Human
ucuaccugccacuc

SEQ ID NO: 2540339 - RNA, 16 nt, Human
ucuaccugccacucac

SEQ ID NO: 2540340 - RNA, 19 nt, Human
ucuaccucaggcagcucaa

SEQ ID NO: 2540341 - RNA, 12 nt, Human
ucuaccugccac

SEQ ID NO: 2540342 - RNA, 15 nt, Human
ucuaccucuuggcug

SEQ ID NO: 2540343 - RNA, 19 nt, Human
ucuaccugaggggccucuu

SEQ ID NO: 2540344 - RNA, 12 nt, Human
ucuaccugaggg

SEQ ID NO: 2540345 - RNA, 13 nt, Human
acuuacuguacau

SEQ ID NO: 2540346 - RNA, 14 nt, Human
acuuacuguacaug

SEQ ID NO: 2540347 - RNA, 15 nt, Human
acuuacuguacauga

SEQ ID NO: 2540348 - RNA, 20 nt, Human
acuuagagguggggagcaga

SEQ ID NO: 2540349 - RNA, 18 nt, Human
acuuccaauuuacauacu

SEQ ID NO: 2540350 - RNA, 19 nt, Human
acuuccaaauccccuaagc

SEQ ID NO: 2540351 - RNA, 21 nt, Human
acuuccaaauccccuaagcag

SEQ ID NO: 2540352 - RNA, 17 nt, Human
acuuccacugccauccu

SEQ ID NO: 2540353 - RNA, 14 nt, Human
acuuccaccagccu

SEQ ID NO: 2540354 - RNA, 15 nt, Human
acuuccaccagccug

SEQ ID NO: 2540355 - RNA, 16 nt, Human
acuuccaccagccugc

SEQ ID NO: 2540356 - RNA, 18 nt, Human
acuuccaccagccugcac

SEQ ID NO: 2540357 - RNA, 20 nt, Human
acuuccagauccuggaaauc

SEQ ID NO: 2540358 - RNA, 20 nt, Human
acuuccagguguuacuguaa

SEQ ID NO: 2540359 - RNA, 21 nt, Human
acuuccagguguuacuguaau

SEQ ID NO: 2540360 - RNA, 17 nt, Human
acuuccauggcccucau

SEQ ID NO: 2540361 - RNA, 18 nt, Human
acuuccauggcccucauu

SEQ ID NO: 2540362 - RNA, 17 nt, Human
acuuccaugaggccaaa

SEQ ID NO: 2540363 - RNA, 17 nt, Human
acuuccauaaucuggac

SEQ ID NO: 2540364 - RNA, 17 nt, Human
acuuccauacagcucua

SEQ ID NO: 2540365 - RNA, 16 nt, Human
acuuccauacagcucu

SEQ ID NO: 2540366 - RNA, 20 nt, Human
acuuccagugcaacacugaa

SEQ ID NO: 2540367 - RNA, 19 nt, Human
acuucagggcagggcucug

SEQ ID NO: 2540368 - RNA, 20 nt, Human
acuucagggcagggcucuga

SEQ ID NO: 2540369 - RNA, 15 nt, Human
acuucaggggcugcc

SEQ ID NO: 2540370 - RNA, 21 nt, Human
acuucagggcagggcucugau

SEQ ID NO: 2540371 - RNA, 23 nt, Human
acuucagggcagggcucugauau

SEQ ID NO: 2540372 - RNA, 18 nt, Human
acuucaggcucuucuccu

SEQ ID NO: 2540373 - RNA, 17 nt, Human
acuucaggcucuucucc

SEQ ID NO: 2540374 - RNA, 20 nt, Human
acuucaggcucuucuccuuu

SEQ ID NO: 2540375 - RNA, 20 nt, Human
acuuccaaaccugacagaug

SEQ ID NO: 2540376 - RNA, 21 nt, Human
acuucauugagaguuuugucu

SEQ ID NO: 2540377 - RNA, 14 nt, Human
acuucaugucaacu

SEQ ID NO: 2540378 - RNA, 21 nt, Human
acuucauucuugaaagcugug

SEQ ID NO: 2540379 - RNA, 19 nt, Human
acuucauucuugaaagcug

SEQ ID NO: 2540380 - RNA, 17 nt, Human
acuucauuaauaauaaa

SEQ ID NO: 2540381 - RNA, 15 nt, Human
acuucauucuugaaa

SEQ ID NO: 2540382 - RNA, 14 nt, Human
acuucauucuugaa

SEQ ID NO: 2540383 - RNA, 16 nt, Human
acuucaucuucucagc

SEQ ID NO: 2540384 - RNA, 15 nt, Human
acuucaucuucucag

SEQ ID NO: 2540385 - RNA, 19 nt, Human
acuucaucuucucagcucc

SEQ ID NO: 2540386 - RNA, 16 nt, Human
ucuagcacuggccugc

SEQ ID NO: 2540387 - RNA, 15 nt, Human
ucuagcacuggccug

SEQ ID NO: 2540388 - RNA, 14 nt, Human
ucuagcacuggccu

SEQ ID NO: 2540389 - RNA, 17 nt, Human
ucuagcacuggccugca

SEQ ID NO: 2540390 - RNA, 19 nt, Human
ucuagauuuuguuuugcuu

SEQ ID NO: 2540391 - RNA, 15 nt, Human
ucuagcaaauguuau

SEQ ID NO: 2540392 - RNA, 23 nt, Human
ucuagcaaucacaacacuggcug

SEQ ID NO: 2540393 - RNA, 16 nt, Human
ucuagcaaauguuaug

SEQ ID NO: 2540394 - RNA, 15 nt, Human
ucuagauugagagaa

SEQ ID NO: 2540395 - RNA, 23 nt, Human
ucuagauuacccccucauuguuu

SEQ ID NO: 2540396 - RNA, 13 nt, Human
ucuagcccaugga

SEQ ID NO: 2540397 - RNA, 12 nt, Human
ucuagccugggc

SEQ ID NO: 2540398 - RNA, 23 nt, Human
ucuagcuagaaauaugauuuuau

SEQ ID NO: 2540399 - RNA, 21 nt, Human
ucuagcuagaaauaugauuuu

SEQ ID NO: 2540400 - RNA, 16 nt, Human
ucuagcuagaaauaug

SEQ ID NO: 2540401 - RNA, 19 nt, Human
ucuagaugaaguuuuacau

SEQ ID NO: 2540402 - RNA, 20 nt, Human
ucuagaugaaguuuuacauu

SEQ ID NO: 2540403 - RNA, 21 nt, Human
ucuagaugaaguuuuacauug

SEQ ID NO: 2540404 - RNA, 15 nt, Human
ucuagauaucgacuu

SEQ ID NO: 2540405 - RNA, 22 nt, Human
ucuagaugaaguuuuacauugu

SEQ ID NO: 2540406 - RNA, 23 nt, Human
ucuagaugaaguuuuacauuguu

SEQ ID NO: 2540407 - RNA, 18 nt, Human
ucuagauggcuccucuca

SEQ ID NO: 2540408 - RNA, 19 nt, Human
ucuagauggcuccucucag

SEQ ID NO: 2540409 - RNA, 20 nt, Human
ucuagauggcuccucucagu

SEQ ID NO: 2540410 - RNA, 21 nt, Human
ucuagauuacccccucauugu

SEQ ID NO: 2540411 - RNA, 17 nt, Human
acuucccagugaauucu

SEQ ID NO: 2540412 - RNA, 20 nt, Human
acuucccacucuagggcagu

SEQ ID NO: 2540413 - RNA, 20 nt, Human
acuuccauggcccucauuaa

SEQ ID NO: 2540414 - RNA, 22 nt, Human
acuucccaguucaggaguccca

SEQ ID NO: 2540415 - RNA, 23 nt, Human
acuucccaguucaggagucccaa

SEQ ID NO: 2540416 - RNA, 24 nt, Human
acuucccaguucaggagucccaag

SEQ ID NO: 2540417 - RNA, 24 nt, Human
ucuagauacuguaucaugacaaag

SEQ ID NO: 2540418 - RNA, 19 nt, Human
acuucccauuuuggaaguu

SEQ ID NO: 2540419 - RNA, 13 nt, Human
ucuauaauuuaaa

SEQ ID NO: 2540420 - RNA, 20 nt, Human
ucuaguuuucaguuuguaua

SEQ ID NO: 2540421 - RNA, 18 nt, Human
ucuaguuuucaguuugua

SEQ ID NO: 2540422 - RNA, 17 nt, Human
ucuaguuuucaguuugu

SEQ ID NO: 2540423 - RNA, 14 nt, Human
ucuaguuuucaguu

SEQ ID NO: 2540424 - RNA, 12 nt, Human
ucuaguuuucag

SEQ ID NO: 2540425 - RNA, 11 nt, Human
ucuaguuuuca

SEQ ID NO: 2540426 - RNA, 18 nt, Human
ucuaguuugcauuccuga

SEQ ID NO: 2540427 - RNA, 15 nt, Human
ucuaguuugcauucc

SEQ ID NO: 2540428 - RNA, 13 nt, Human
ucuaguuuuguca

SEQ ID NO: 2540429 - RNA, 21 nt, Human
ucuauaaucccagcacuuugg

SEQ ID NO: 2540430 - RNA, 20 nt, Human
ucuauaaucccagcacuuug

SEQ ID NO: 2540431 - RNA, 19 nt, Human
ucuauaaucccagcacuuu

SEQ ID NO: 2540432 - RNA, 22 nt, Human
ucuauaaggccauaaaacaggu

SEQ ID NO: 2540433 - RNA, 18 nt, Human
ucuauacauaucuuuauu

SEQ ID NO: 2540434 - RNA, 15 nt, Human
ucuauacauaucuuu

SEQ ID NO: 2540435 - RNA, 18 nt, Human
ucuauaggaacauaugaa

SEQ ID NO: 2540436 - RNA, 20 nt, Human
ucuauaggaacauaugaaaa

SEQ ID NO: 2540437 - RNA, 21 nt, Human
ucuauaggaacauaugaaaau

SEQ ID NO: 2540438 - RNA, 23 nt, Human
ucuaguuugauuaaauucuugca

SEQ ID NO: 2540439 - RNA, 13 nt, Human
ucuaguuugcauu

SEQ ID NO: 2540440 - RNA, 23 nt, Human
ucuaguggucuuuguaagagugu

SEQ ID NO: 2540441 - RNA, 22 nt, Human
ucuaguggucuuuguaagagug

SEQ ID NO: 2540442 - RNA, 21 nt, Human
ucuaguggucuuuguaagagu

SEQ ID NO: 2540443 - RNA, 21 nt, Human
ucuagcugggggugggccagg

SEQ ID NO: 2540444 - RNA, 11 nt, Human
ucuagcuguug

SEQ ID NO: 2540445 - RNA, 19 nt, Human
ucuagcuguugagcuguuu

SEQ ID NO: 2540446 - RNA, 18 nt, Human
ucuagcuguugagcuguu

SEQ ID NO: 2540447 - RNA, 17 nt, Human
ucuagcuggugguuuca

SEQ ID NO: 2540448 - RNA, 22 nt, Human
ucucacauggugcuacgccugc

SEQ ID NO: 2540449 - RNA, 23 nt, Human
ucucacauggugcuacgccugca

SEQ ID NO: 2540450 - RNA, 15 nt, Human
ucucaccaggaaggg

SEQ ID NO: 2540451 - RNA, 12 nt, Human
ucucaccaggaa

SEQ ID NO: 2540452 - RNA, 12 nt, Human
ucucacuccacc

SEQ ID NO: 2540453 - RNA, 13 nt, Human
ucucacuccacca

SEQ ID NO: 2540454 - RNA, 14 nt, Human
ucucacuccaccac

SEQ ID NO: 2540455 - RNA, 15 nt, Human
ucucacuccaccacc

SEQ ID NO: 2540456 - RNA, 13 nt, Human
ucucacuccuacc

SEQ ID NO: 2540457 - RNA, 18 nt, Human
ucucacuccaccacccaa

SEQ ID NO: 2540458 - RNA, 17 nt, Human
ucucacuccaccaccca

SEQ ID NO: 2540459 - RNA, 17 nt, Human
ucucaaaacugcacugu

SEQ ID NO: 2540460 - RNA, 22 nt, Human
ucucaaaaaaaaaaaaaugcac

SEQ ID NO: 2540461 - RNA, 13 nt, Human
ucucaaaaaauaa

SEQ ID NO: 2540462 - RNA, 13 nt, Human
ucuauuuuugucu

SEQ ID NO: 2540463 - RNA, 14 nt, Human
ucuauuuuuguaga

SEQ ID NO: 2540464 - RNA, 23 nt, Human
ucucacagugggagccagggcug

SEQ ID NO: 2540465 - RNA, 22 nt, Human
ucucacagugggagccagggcu

SEQ ID NO: 2540466 - RNA, 21 nt, Human
ucucacagugggagccagggc

SEQ ID NO: 2540467 - RNA, 19 nt, Human
ucucacagugggagccagg

SEQ ID NO: 2540468 - RNA, 14 nt, Human
ucucaaaaauaaau

SEQ ID NO: 2540469 - RNA, 12 nt, Human
ucucacaguggg

SEQ ID NO: 2540470 - RNA, 16 nt, Human
ucuauuguuuauucuu

SEQ ID NO: 2540471 - RNA, 16 nt, Human
ucuauuguuacucugg

SEQ ID NO: 2540472 - RNA, 23 nt, Human
ucuauuguuguacacagaaauac

SEQ ID NO: 2540473 - RNA, 12 nt, Human
ucuauuguuacu

SEQ ID NO: 2540474 - RNA, 20 nt, Human
ucuauuguagcauuucuuga

SEQ ID NO: 2540475 - RNA, 22 nt, Human
ucuauuguuguacacagaaaua

SEQ ID NO: 2540476 - RNA, 16 nt, Human
ucuauuguuucuuuca

SEQ ID NO: 2540477 - RNA, 17 nt, Human
ucuauuguuuauucuuu

SEQ ID NO: 2540478 - RNA, 12 nt, Human
ucuauuuaagcc

SEQ ID NO: 2540479 - RNA, 16 nt, Human
ucucaaaaaaagaaaa

SEQ ID NO: 2540480 - RNA, 19 nt, Human
ucuauuguagcauuucuug

SEQ ID NO: 2540481 - RNA, 18 nt, Human
ucuauuguagcauuucuu

SEQ ID NO: 2540482 - RNA, 17 nt, Human
ucuauuguagcauuucu

SEQ ID NO: 2540483 - RNA, 15 nt, Human
ucuauuguagcauuu

SEQ ID NO: 2540484 - RNA, 13 nt, Human
ucuauuguacaga

SEQ ID NO: 2540485 - RNA, 14 nt, Human
ucuauuguagcauu

SEQ ID NO: 2540486 - RNA, 22 nt, Human
ucuauuggguucauuauuggaa

SEQ ID NO: 2540487 - RNA, 14 nt, Human
ucuauaugaauuua

SEQ ID NO: 2540488 - RNA, 12 nt, Human
ucuauaugaauu

SEQ ID NO: 2540489 - RNA, 19 nt, Human
ucuauauauguguauguac

SEQ ID NO: 2540490 - RNA, 16 nt, Human
ucuauauauguguaug

SEQ ID NO: 2540491 - RNA, 15 nt, Human
ucuauuggguucauu

SEQ ID NO: 2540492 - RNA, 16 nt, Human
ucuauuggguucauua

SEQ ID NO: 2540493 - RNA, 17 nt, Human
ucuauuggguucauuau

SEQ ID NO: 2540494 - RNA, 18 nt, Human
ucuauuggguucauuauu

SEQ ID NO: 2540495 - RNA, 15 nt, Human
ucuauauauguguau

SEQ ID NO: 2540496 - RNA, 14 nt, Human
ucuauauaugugua

SEQ ID NO: 2540497 - RNA, 23 nt, Human
ucuauauauaauucuguacauag

SEQ ID NO: 2540498 - RNA, 21 nt, Human
ucuauauauaauucuguacau

SEQ ID NO: 2540499 - RNA, 20 nt, Human
ucuauauauaauucuguaca

SEQ ID NO: 2540500 - RNA, 19 nt, Human
ucuauauauaauucuguac

SEQ ID NO: 2540501 - RNA, 18 nt, Human
ucuauauauaauucugua

SEQ ID NO: 2540502 - RNA, 14 nt, Human
ucuauauauaauuc

SEQ ID NO: 2540503 - RNA, 13 nt, Human
ucuauauauaauu

SEQ ID NO: 2540504 - RNA, 12 nt, Human
acuuccugucca

SEQ ID NO: 2540505 - RNA, 13 nt, Human
acuuccuguccag

SEQ ID NO: 2540506 - RNA, 17 nt, Human
acuucgcaucaaaagac

SEQ ID NO: 2540507 - RNA, 16 nt, Human
acuucgcaucaaaaga

SEQ ID NO: 2540508 - RNA, 14 nt, Human
acuucgacugugac

SEQ ID NO: 2540509 - RNA, 12 nt, Human
acuuccugccua

SEQ ID NO: 2540510 - RNA, 17 nt, Human
acuucgggaggucgagg

SEQ ID NO: 2540511 - RNA, 20 nt, Human
acuucgggaggucgaggcag

SEQ ID NO: 2540512 - RNA, 14 nt, Human
acuucccuuucugc

SEQ ID NO: 2540513 - RNA, 18 nt, Human
ucucacuccuaccuggua

SEQ ID NO: 2540514 - RNA, 17 nt, Human
ucucacuccuaccuggu

SEQ ID NO: 2540515 - RNA, 16 nt, Human
ucucacuccuaccugg

SEQ ID NO: 2540516 - RNA, 22 nt, Human
acuucccuuucugcuuguguua

SEQ ID NO: 2540517 - RNA, 17 nt, Human
acuuccuccuccccacu

SEQ ID NO: 2540518 - RNA, 15 nt, Human
acuuccuccucccca

SEQ ID NO: 2540519 - RNA, 18 nt, Human
acuuccuccuccccacuu

SEQ ID NO: 2540520 - RNA, 18 nt, Human
acuucuaaguaaaaccac

SEQ ID NO: 2540521 - RNA, 19 nt, Human
acuucuaaguaaaaccaca

SEQ ID NO: 2540522 - RNA, 13 nt, Human
acuucuaaguaaa

SEQ ID NO: 2540523 - RNA, 24 nt, Human
acuucgcaucaaaagacaauucuu

SEQ ID NO: 2540524 - RNA, 23 nt, Human
acuucgcaucaaaagacaauucu

SEQ ID NO: 2540525 - RNA, 22 nt, Human
acuucgcaucaaaagacaauuc

SEQ ID NO: 2540526 - RNA, 20 nt, Human
acuucgcaucaaaagacaau

SEQ ID NO: 2540527 - RNA, 18 nt, Human
acuucuccacccugcucu

SEQ ID NO: 2540528 - RNA, 21 nt, Human
acuucuaaguaaaaccacagc

SEQ ID NO: 2540529 - RNA, 22 nt, Human
acuucuccagacccaccacacc

SEQ ID NO: 2540530 - RNA, 22 nt, Human
acuucggcagauacugucucuu

SEQ ID NO: 2540531 - RNA, 22 nt, Human
acuucuccauccuuucugccuc

SEQ ID NO: 2540532 - RNA, 16 nt, Human
acuucuccaggucuca

SEQ ID NO: 2540533 - RNA, 15 nt, Human
acuucuccagccuag

SEQ ID NO: 2540534 - RNA, 13 nt, Human
acuucuccagccu

SEQ ID NO: 2540535 - RNA, 10 nt, Human
acuucuccca

SEQ ID NO: 2540536 - RNA, 17 nt, Human
acuucucugaagggagg

SEQ ID NO: 2540537 - RNA, 14 nt, Human
acuucucugaaggg

SEQ ID NO: 2540538 - RNA, 13 nt, Human
acuucucugaagg

SEQ ID NO: 2540539 - RNA, 20 nt, Human
acuucucuggaaagggggga

SEQ ID NO: 2540540 - RNA, 17 nt, Human
acuugaaaauuaacaug

SEQ ID NO: 2540541 - RNA, 18 nt, Human
acuugaaaauuaacauga

SEQ ID NO: 2540542 - RNA, 16 nt, Human
acuugaaaauuaacau

SEQ ID NO: 2540543 - RNA, 13 nt, Human
acuugaaagcauc

SEQ ID NO: 2540544 - RNA, 23 nt, Human
acuugaacccgggaggcagaggu

SEQ ID NO: 2540545 - RNA, 19 nt, Human
acuugaaauaccagugaac

SEQ ID NO: 2540546 - RNA, 18 nt, Human
acuugaaaucuaggauua

SEQ ID NO: 2540547 - RNA, 14 nt, Human
acuugaaagcaucc

SEQ ID NO: 2540548 - RNA, 18 nt, Human
acuugaaagcauccaugu

SEQ ID NO: 2540549 - RNA, 18 nt, Human
acuugaaauaccagugaa

SEQ ID NO: 2540550 - RNA, 20 nt, Human
acuugaaagcauccaugugu

SEQ ID NO: 2540551 - RNA, 15 nt, Human
acuugaggguaauaa

SEQ ID NO: 2540552 - RNA, 21 nt, Human
acuugagggcccagagcagga

SEQ ID NO: 2540553 - RNA, 20 nt, Human
acuugagggcccagagcagg

SEQ ID NO: 2540554 - RNA, 19 nt, Human
acuugagggcccagagcag

SEQ ID NO: 2540555 - RNA, 18 nt, Human
acuugagggcccagagca

SEQ ID NO: 2540556 - RNA, 17 nt, Human
acuugagggcccagagc

SEQ ID NO: 2540557 - RNA, 16 nt, Human
acuugagggcccagag

SEQ ID NO: 2540558 - RNA, 15 nt, Human
acuugagggcccaga

SEQ ID NO: 2540559 - RNA, 19 nt, Human
acuugaggguaauaaacuu

SEQ ID NO: 2540560 - RNA, 18 nt, Human
acuugaggguaauaaacu

SEQ ID NO: 2540561 - RNA, 17 nt, Human
acuugaggguaauaaac

SEQ ID NO: 2540562 - RNA, 19 nt, Human
acuugagaauuacccuuuu

SEQ ID NO: 2540563 - RNA, 12 nt, Human
acuugaggauuu

SEQ ID NO: 2540564 - RNA, 18 nt, Human
acuugaggauuuugagua

SEQ ID NO: 2540565 - RNA, 17 nt, Human
acuugacuuuuaaggcu

SEQ ID NO: 2540566 - RNA, 20 nt, Human
acuugaauuuucccacugca

SEQ ID NO: 2540567 - RNA, 19 nt, Human
acuugacccccuugagggu

SEQ ID NO: 2540568 - RNA, 20 nt, Human
acuugacagaacacugucuu

SEQ ID NO: 2540569 - RNA, 18 nt, Human
acuugacagaacacuguc

SEQ ID NO: 2540570 - RNA, 19 nt, Human
acuugaauuuucccacugc

SEQ ID NO: 2540571 - RNA, 18 nt, Human
acuugaauuuucccacug

SEQ ID NO: 2540572 - RNA, 17 nt, Human
acuugacagaacacugu

SEQ ID NO: 2540573 - RNA, 16 nt, Human
acuugaaugugucacu

SEQ ID NO: 2540574 - RNA, 22 nt, Human
acuugucuaaauaaguuugcaa

SEQ ID NO: 2540575 - RNA, 20 nt, Human
acuugucuaaauaaguuugc

SEQ ID NO: 2540576 - RNA, 19 nt, Human
acuugucuaaauaaguuug

SEQ ID NO: 2540577 - RNA, 15 nt, Human
acuugucuaaauaag

SEQ ID NO: 2540578 - RNA, 16 nt, Human
acuugucuauuaccug

SEQ ID NO: 2540579 - RNA, 14 nt, Human
acuugucuuuggac

SEQ ID NO: 2540580 - RNA, 15 nt, Human
acuuguauuaugugu

SEQ ID NO: 2540581 - RNA, 23 nt, Human
acuuguccuuuuguaccauggug

SEQ ID NO: 2540582 - RNA, 18 nt, Human
acuuguauuaaagacaga

SEQ ID NO: 2540583 - RNA, 14 nt, Human
acuuguauuaugug

SEQ ID NO: 2540584 - RNA, 13 nt, Human
acuuguauuaugu

SEQ ID NO: 2540585 - RNA, 20 nt, Human
acuuguauauuuuaagaaau

SEQ ID NO: 2540586 - RNA, 19 nt, Human
acuuguauauuuguacaaa

SEQ ID NO: 2540587 - RNA, 14 nt, Human
acuuguaugaaaga

SEQ ID NO: 2540588 - RNA, 14 nt, Human
acuuguauauuuua

SEQ ID NO: 2540589 - RNA, 21 nt, Human
acuuggacuuguccucagcag

SEQ ID NO: 2540590 - RNA, 18 nt, Human
acuuguauauuuguacaa

SEQ ID NO: 2540591 - RNA, 14 nt, Human
acuuggagccaagg

SEQ ID NO: 2540592 - RNA, 19 nt, Human
acuuggagccaaggguuca

SEQ ID NO: 2540593 - RNA, 21 nt, Human
acuugcccacaccgagggcga

SEQ ID NO: 2540594 - RNA, 17 nt, Human
acuugcauuuuugcagg

SEQ ID NO: 2540595 - RNA, 18 nt, Human
acuugcauuuuugcagga

SEQ ID NO: 2540596 - RNA, 19 nt, Human
acuugcauuuuugcaggag

SEQ ID NO: 2540597 - RNA, 19 nt, Human
acuugcauugaauauauua

SEQ ID NO: 2540598 - RNA, 15 nt, Human
acuugcauggagcag

SEQ ID NO: 2540599 - RNA, 13 nt, Human
acuugcaucugug

SEQ ID NO: 2540600 - RNA, 14 nt, Human
acuugcauuuuugc

SEQ ID NO: 2540601 - RNA, 11 nt, Human
acuugcauuuc

SEQ ID NO: 2540602 - RNA, 19 nt, Human
acuugcauccaacuccagg

SEQ ID NO: 2540603 - RNA, 21 nt, Human
acuugaguuuuauuuauuuua

SEQ ID NO: 2540604 - RNA, 15 nt, Human
acuugaguuuuauuu

SEQ ID NO: 2540605 - RNA, 21 nt, Human
acuuggaauuuguaaccucag

SEQ ID NO: 2540606 - RNA, 18 nt, Human
acuuggaauuuguaaccu

SEQ ID NO: 2540607 - RNA, 16 nt, Human
acuuggaauuuguaac

SEQ ID NO: 2540608 - RNA, 22 nt, Human
acuuggaaaaauccagaaagaa

SEQ ID NO: 2540609 - RNA, 23 nt, Human
acuuggaauuuguaaccucagcu

SEQ ID NO: 2540610 - RNA, 22 nt, Human
acuuggaauuuguaaccucagc

SEQ ID NO: 2540611 - RNA, 16 nt, Human
acuuggacucuugcuc

SEQ ID NO: 2540612 - RNA, 15 nt, Human
acuuggacucuugcu

SEQ ID NO: 2540613 - RNA, 19 nt, Human
acuuggacucuugcucuuu

SEQ ID NO: 2540614 - RNA, 18 nt, Human
acuuggacucuugcucuu

SEQ ID NO: 2540615 - RNA, 11 nt, Human
acuuggagcca

SEQ ID NO: 2540616 - RNA, 14 nt, Human
acuuggaagcuccg

SEQ ID NO: 2540617 - RNA, 12 nt, Human
acuugccucuuc

SEQ ID NO: 2540618 - RNA, 21 nt, Human
acuuggaaaaauccagaaaga

SEQ ID NO: 2540619 - RNA, 22 nt, Human
acuugccgcgucgcccucccag

SEQ ID NO: 2540620 - RNA, 23 nt, Human
acuugccgcgucgcccucccagg

SEQ ID NO: 2540621 - RNA, 17 nt, Human
acuugugauuauuuauu

SEQ ID NO: 2540622 - RNA, 20 nt, Human
acuugugauuauuuauuauu

SEQ ID NO: 2540623 - RNA, 18 nt, Human
acuugugccaacacucaa

SEQ ID NO: 2540624 - RNA, 13 nt, Human
acuugugccaaca

SEQ ID NO: 2540625 - RNA, 14 nt, Human
acuuguggacacag

SEQ ID NO: 2540626 - RNA, 16 nt, Human
acuugugauuauuuau

SEQ ID NO: 2540627 - RNA, 16 nt, Human
acuuuaaaaggagcca

SEQ ID NO: 2540628 - RNA, 16 nt, Human
acuuguuuucugggaa

SEQ ID NO: 2540629 - RNA, 22 nt, Human
acuugugcugaucgugcuaaau

SEQ ID NO: 2540630 - RNA, 22 nt, Human
acuuuacuaagaugacauugcu

SEQ ID NO: 2540631 - RNA, 18 nt, Human
acuuuacuaagaugacau

SEQ ID NO: 2540632 - RNA, 16 nt, Human
acuuuacuaagaugac

SEQ ID NO: 2540633 - RNA, 15 nt, Human
acuuuacuaagauga

SEQ ID NO: 2540634 - RNA, 15 nt, Human
acuuuagaaugagag

SEQ ID NO: 2540635 - RNA, 15 nt, Human
acuuuagaguagcau

SEQ ID NO: 2540636 - RNA, 19 nt, Human
acuuuagaguagcaugaga

SEQ ID NO: 2540637 - RNA, 21 nt, Human
acuuuagaguagcaugagaga

SEQ ID NO: 2540638 - RNA, 22 nt, Human
acuuuagcugcauccuccaaga

SEQ ID NO: 2540639 - RNA, 13 nt, Human
acuuuagggaagu

SEQ ID NO: 2540640 - RNA, 14 nt, Human
acuuuagaugcuga

SEQ ID NO: 2540641 - RNA, 13 nt, Human
acuuuagaugcug

SEQ ID NO: 2540642 - RNA, 15 nt, Human
acuuuagaugcugau

SEQ ID NO: 2540643 - RNA, 19 nt, Human
acuuucuuuucuggaaugu

SEQ ID NO: 2540644 - RNA, 15 nt, Human
acuuucuuuucugga

SEQ ID NO: 2540645 - RNA, 21 nt, Human
acuuucuuuucgccguggcug

SEQ ID NO: 2540646 - RNA, 20 nt, Human
acuuucuuuucgccguggcu

SEQ ID NO: 2540647 - RNA, 14 nt, Human
acuuuggaaagagu

SEQ ID NO: 2540648 - RNA, 13 nt, Human
acuuuggaaagag

SEQ ID NO: 2540649 - RNA, 23 nt, Human
acuuuggaaagacuuuuccaacc

SEQ ID NO: 2540650 - RNA, 23 nt, Human
acuuuggaaagaguaggaagacu

SEQ ID NO: 2540651 - RNA, 19 nt, Human
acuuuguauaaaagggacu

SEQ ID NO: 2540652 - RNA, 15 nt, Human
acuuuggaaaaugca

SEQ ID NO: 2540653 - RNA, 18 nt, Human
acuuuggaaaaugcauug

SEQ ID NO: 2540654 - RNA, 19 nt, Human
acuuuguaugucauuuccu

SEQ ID NO: 2540655 - RNA, 23 nt, Human
acuuugccagcuuuuccucccuu

SEQ ID NO: 2540656 - RNA, 19 nt, Human
acuuugccagcuuuuccuc

SEQ ID NO: 2540657 - RNA, 23 nt, Human
acuuugcagccggcacagggucu

SEQ ID NO: 2540658 - RNA, 19 nt, Human
acuuugcacugauauauca

SEQ ID NO: 2540659 - RNA, 18 nt, Human
acuuugcacugauauauc

SEQ ID NO: 2540660 - RNA, 21 nt, Human
acuuugcacugauauaucaug

SEQ ID NO: 2540661 - RNA, 20 nt, Human
acuuugccuuuccauaauca

SEQ ID NO: 2540662 - RNA, 14 nt, Human
acuuugcucugggu

SEQ ID NO: 2540663 - RNA, 15 nt, Human
acuuugcucuuucuu

SEQ ID NO: 2540664 - RNA, 14 nt, Human
acuuugcuucccau

SEQ ID NO: 2540665 - RNA, 20 nt, Human
acuuugcuugcaguagauuu

SEQ ID NO: 2540666 - RNA, 17 nt, Human
acuuugcucuuucuuga

SEQ ID NO: 2540667 - RNA, 17 nt, Human
acuuugcacugauauau

SEQ ID NO: 2540668 - RNA, 19 nt, Human
acuuugaaauguguuucug

SEQ ID NO: 2540669 - RNA, 17 nt, Human
acuuugaaauguguuuc

SEQ ID NO: 2540670 - RNA, 23 nt, Human
acuuugaaauguguuucuguaua

SEQ ID NO: 2540671 - RNA, 12 nt, Human
acuuugaaggac

SEQ ID NO: 2540672 - RNA, 19 nt, Human
ucucucaggagcacaggca

SEQ ID NO: 2540673 - RNA, 18 nt, Human
ucucucaggagcacaggc

SEQ ID NO: 2540674 - RNA, 17 nt, Human
ucucucaggagcacagg

SEQ ID NO: 2540675 - RNA, 15 nt, Human
ucucucaggagcaca

SEQ ID NO: 2540676 - RNA, 14 nt, Human
ucucucaggagcac

SEQ ID NO: 2540677 - RNA, 13 nt, Human
ucucucaggagca

SEQ ID NO: 2540678 - RNA, 20 nt, Human
ucucucagaagggaggcugg

SEQ ID NO: 2540679 - RNA, 17 nt, Human
ucucucagaagggaggc

SEQ ID NO: 2540680 - RNA, 12 nt, Human
ucucucaggcca

SEQ ID NO: 2540681 - RNA, 16 nt, Human
ucucucagaagggagg

SEQ ID NO: 2540682 - RNA, 15 nt, Human
ucucggcucacugca

SEQ ID NO: 2540683 - RNA, 19 nt, Human
ucucggaguaucugggaac

SEQ ID NO: 2540684 - RNA, 22 nt, Human
ucucucaggagcacaggcagcu

SEQ ID NO: 2540685 - RNA, 21 nt, Human
ucucucaggagcacaggcagc

SEQ ID NO: 2540686 - RNA, 21 nt, Human
ucucucaggccaaacucaccu

SEQ ID NO: 2540687 - RNA, 13 nt, Human
ucucuccaggauc

SEQ ID NO: 2540688 - RNA, 11 nt, Human
ucucuccagga

SEQ ID NO: 2540689 - RNA, 11 nt, Human
ucucuccaucu

SEQ ID NO: 2540690 - RNA, 17 nt, Human
ucucucccauggagccc

SEQ ID NO: 2540691 - RNA, 15 nt, Human
ucucucccauggagc

SEQ ID NO: 2540692 - RNA, 13 nt, Human
ucucucccaugga

SEQ ID NO: 2540693 - RNA, 23 nt, Human
ucucucccagucuacccagagaa

SEQ ID NO: 2540694 - RNA, 22 nt, Human
ucucucccagucuacccagaga

SEQ ID NO: 2540695 - RNA, 21 nt, Human
ucucucccagucuacccagag

SEQ ID NO: 2540696 - RNA, 19 nt, Human
ucucucccagucuacccag

SEQ ID NO: 2540697 - RNA, 22 nt, Human
ucucucccaggggcuggcuuca

SEQ ID NO: 2540698 - RNA, 20 nt, Human
ucucucccaggggcuggcuu

SEQ ID NO: 2540699 - RNA, 14 nt, Human
ucucucccaggggc

SEQ ID NO: 2540700 - RNA, 17 nt, Human
ucucuccaucuaccuuc

SEQ ID NO: 2540701 - RNA, 14 nt, Human
ucucuccauucccg

SEQ ID NO: 2540702 - RNA, 19 nt, Human
ucuccuuuuccucucuccc

SEQ ID NO: 2540703 - RNA, 17 nt, Human
ucucgaacuccugaccu

SEQ ID NO: 2540704 - RNA, 18 nt, Human
ucuccuugcuacccagaa

SEQ ID NO: 2540705 - RNA, 15 nt, Human
ucuccuugcuaccca

SEQ ID NO: 2540706 - RNA, 14 nt, Human
ucucgaugcaauga

SEQ ID NO: 2540707 - RNA, 17 nt, Human
ucucgaugcaaugaaca

SEQ ID NO: 2540708 - RNA, 14 nt, Human
ucucgauuuuaucu

SEQ ID NO: 2540709 - RNA, 14 nt, Human
ucuccuuguggccu

SEQ ID NO: 2540710 - RNA, 23 nt, Human
ucucgaacauggaacucauuccu

SEQ ID NO: 2540711 - RNA, 15 nt, Human
ucucgcucugucacc

SEQ ID NO: 2540712 - RNA, 20 nt, Human
ucucgcugaugcugggcugg

SEQ ID NO: 2540713 - RNA, 19 nt, Human
ucucgcugaugcugggcug

SEQ ID NO: 2540714 - RNA, 18 nt, Human
ucucgcugaugcugggcu

SEQ ID NO: 2540715 - RNA, 19 nt, Human
ucucggacuaagccuaccu

SEQ ID NO: 2540716 - RNA, 21 nt, Human
ucucggaccuuucagcuguga

SEQ ID NO: 2540717 - RNA, 22 nt, Human
ucucgcugaugcugggcugggu

SEQ ID NO: 2540718 - RNA, 21 nt, Human
ucucggaacugcaugcugcug

SEQ ID NO: 2540719 - RNA, 17 nt, Human
ucucggaaggcuggcug

SEQ ID NO: 2540720 - RNA, 23 nt, Human
ucucgcauaggaccuuuccacca

SEQ ID NO: 2540721 - RNA, 16 nt, Human
ucucgcauaggaccuu

SEQ ID NO: 2540722 - RNA, 20 nt, Human
ucucgcuauugucaccaggg

SEQ ID NO: 2540723 - RNA, 17 nt, Human
ucucgcucuguugccca

SEQ ID NO: 2540724 - RNA, 19 nt, Human
ucuccuguaccucuugagc

SEQ ID NO: 2540725 - RNA, 14 nt, Human
ucuccuguccaacc

SEQ ID NO: 2540726 - RNA, 19 nt, Human
ucuccuguuuuucugggug

SEQ ID NO: 2540727 - RNA, 17 nt, Human
ucuccuguuuuucuggg

SEQ ID NO: 2540728 - RNA, 14 nt, Human
ucuccuguuuuucu

SEQ ID NO: 2540729 - RNA, 17 nt, Human
ucuccugugcccacauc

SEQ ID NO: 2540730 - RNA, 18 nt, Human
ucuccugugcccacaucc

SEQ ID NO: 2540731 - RNA, 16 nt, Human
ucuccugugcccacau

SEQ ID NO: 2540732 - RNA, 15 nt, Human
ucuccugugcccaca

SEQ ID NO: 2540733 - RNA, 17 nt, Human
ucuccugugcaugggug

SEQ ID NO: 2540734 - RNA, 16 nt, Human
ucuccuguccaaccua

SEQ ID NO: 2540735 - RNA, 23 nt, Human
ucuccugugcaugggugaaggga

SEQ ID NO: 2540736 - RNA, 23 nt, Human
ucuccuuggugucgggcaugaca

SEQ ID NO: 2540737 - RNA, 21 nt, Human
ucuccuuggugucgggcauga

SEQ ID NO: 2540738 - RNA, 16 nt, Human
ucuccuuccugugugu

SEQ ID NO: 2540739 - RNA, 14 nt, Human
ucuccuuagucuuc

SEQ ID NO: 2540740 - RNA, 19 nt, Human
agaaaaaaaaagaaaaaag

SEQ ID NO: 2540741 - RNA, 17 nt, Human
agaaaaaaagauuuauu

SEQ ID NO: 2540742 - RNA, 21 nt, Human
agaaaaaaaguuugccagaag

SEQ ID NO: 2540743 - RNA, 21 nt, Human
acuuuguggaugucuuccuug

SEQ ID NO: 2540744 - RNA, 19 nt, Human
acuuuguggaugucuuccu

SEQ ID NO: 2540745 - RNA, 17 nt, Human
acuuuguggaugucuuc

SEQ ID NO: 2540746 - RNA, 16 nt, Human
acuuuguggaugucuu

SEQ ID NO: 2540747 - RNA, 17 nt, Human
agaaaaaaaaagaaaaa

SEQ ID NO: 2540748 - RNA, 18 nt, Human
agaaaaaaaaagaaaaaa

SEQ ID NO: 2540749 - RNA, 18 nt, Human
acuuuguguucaccuugu

SEQ ID NO: 2540750 - RNA, 17 nt, Human
acuuugucugaaaaauu

SEQ ID NO: 2540751 - RNA, 15 nt, Human
acuuugucugaaaaa

SEQ ID NO: 2540752 - RNA, 14 nt, Human
acuuugugaauaga

SEQ ID NO: 2540753 - RNA, 14 nt, Human
acuuugucugaaaa

SEQ ID NO: 2540754 - RNA, 22 nt, Human
acuuuguaugucauuuccuuca

SEQ ID NO: 2540755 - RNA, 20 nt, Human
acuuugucgcccaggcugga

SEQ ID NO: 2540756 - RNA, 15 nt, Human
acuuugucagaggca

SEQ ID NO: 2540757 - RNA, 16 nt, Human
acuuuguguucaccuu

SEQ ID NO: 2540758 - RNA, 10 nt, Human
acuuugugcu

SEQ ID NO: 2540759 - RNA, 19 nt, Human
agaaauagcuccguggagc

SEQ ID NO: 2540760 - RNA, 15 nt, Human
agaaaucuaaaaaac

SEQ ID NO: 2540761 - RNA, 18 nt, Human
agaaauagacaguauauu

SEQ ID NO: 2540762 - RNA, 20 nt, Human
agaaauagccugcgcuguuu

SEQ ID NO: 2540763 - RNA, 13 nt, Human
agaaauacuguac

SEQ ID NO: 2540764 - RNA, 14 nt, Human
agaaauacuguaca

SEQ ID NO: 2540765 - RNA, 16 nt, Human
agaaauacuguacaau

SEQ ID NO: 2540766 - RNA, 21 nt, Human
agaaauacagauuuugauagc

SEQ ID NO: 2540767 - RNA, 16 nt, Human
agaaauacagauuuug

SEQ ID NO: 2540768 - RNA, 23 nt, Human
agaaauaccaaaauuauuucaga

SEQ ID NO: 2540769 - RNA, 18 nt, Human
agaaauaccaaaauuauu

SEQ ID NO: 2540770 - RNA, 12 nt, Human
agaaaugaaaaa

SEQ ID NO: 2540771 - RNA, 22 nt, Human
agaaaucuauagaacugaauga

SEQ ID NO: 2540772 - RNA, 23 nt, Human
agaaaucuaguauuucaugcugg

SEQ ID NO: 2540773 - RNA, 14 nt, Human
agaaaucuagaaga

SEQ ID NO: 2540774 - RNA, 13 nt, Human
agaaaugaaaaaa

SEQ ID NO: 2540775 - RNA, 18 nt, Human
agaaaucucacuuuucuc

SEQ ID NO: 2540776 - RNA, 23 nt, Human
ucugaaggcgucaacgugcauuu

SEQ ID NO: 2540777 - RNA, 18 nt, Human
ucugaaggcuggguucug

SEQ ID NO: 2540778 - RNA, 16 nt, Human
agaaaugguuguauua

SEQ ID NO: 2540779 - RNA, 15 nt, Human
agaaaugguuguauu

SEQ ID NO: 2540780 - RNA, 22 nt, Human
ucugaaggacauugcggacagc

SEQ ID NO: 2540781 - RNA, 20 nt, Human
ucugaaggagccccauuccu

SEQ ID NO: 2540782 - RNA, 12 nt, Human
ucugaaggagau

SEQ ID NO: 2540783 - RNA, 21 nt, Human
ucugaaggagccccauuccug

SEQ ID NO: 2540784 - RNA, 19 nt, Human
ucugaaggagauuuuccuu

SEQ ID NO: 2540785 - RNA, 15 nt, Human
agaaaugccuuaccc

SEQ ID NO: 2540786 - RNA, 22 nt, Human
agaaaugcugccugccugucug

SEQ ID NO: 2540787 - RNA, 15 nt, Human
agaaaugcugccugc

SEQ ID NO: 2540788 - RNA, 14 nt, Human
agaaaugcugccug

SEQ ID NO: 2540789 - RNA, 13 nt, Human
agaaaugcugccu

SEQ ID NO: 2540790 - RNA, 15 nt, Human
agaaaugcugcccau

SEQ ID NO: 2540791 - RNA, 23 nt, Human
agaaaugcugccugccugucugu

SEQ ID NO: 2540792 - RNA, 20 nt, Human
agaaaugggacuuaacuccu

SEQ ID NO: 2540793 - RNA, 21 nt, Human
agaaaugcugguuuuucaguu

SEQ ID NO: 2540794 - RNA, 20 nt, Human
agaaaugcugguuuuucagu

SEQ ID NO: 2540795 - RNA, 16 nt, Human
agaaagcauuacauuu

SEQ ID NO: 2540796 - RNA, 13 nt, Human
agaaagcauuuga

SEQ ID NO: 2540797 - RNA, 20 nt, Human
agaaagcaggggcuacaaga

SEQ ID NO: 2540798 - RNA, 19 nt, Human
agaaauacaauucuacauu

SEQ ID NO: 2540799 - RNA, 20 nt, Human
agaaagcagaacagugauua

SEQ ID NO: 2540800 - RNA, 21 nt, Human
agaaagcagauaccucacccu

SEQ ID NO: 2540801 - RNA, 14 nt, Human
agaaagcaggggcu

SEQ ID NO: 2540802 - RNA, 12 nt, Human
agaaagcagggg

SEQ ID NO: 2540803 - RNA, 14 nt, Human
agaaagcauaaaau

SEQ ID NO: 2540804 - RNA, 17 nt, Human
agaaagcagaacaguga

SEQ ID NO: 2540805 - RNA, 18 nt, Human
agaaagcagaacagugau

SEQ ID NO: 2540806 - RNA, 15 nt, Human
agaaagcaaaauuau

SEQ ID NO: 2540807 - RNA, 17 nt, Human
agaaagcaaaauuaugu

SEQ ID NO: 2540808 - RNA, 21 nt, Human
agaaagcaaaauuauguuugc

SEQ ID NO: 2540809 - RNA, 20 nt, Human
agaaagauuacuuagaggaa

SEQ ID NO: 2540810 - RNA, 17 nt, Human
agaaagaucauugaaau

SEQ ID NO: 2540811 - RNA, 18 nt, Human
agaaagaucauugaaauu

SEQ ID NO: 2540812 - RNA, 19 nt, Human
agaaagauggaugugcuuu

SEQ ID NO: 2540813 - RNA, 12 nt, Human
agaaagagagaa

SEQ ID NO: 2540814 - RNA, 13 nt, Human
agaaagagagaaa

SEQ ID NO: 2540815 - RNA, 14 nt, Human
agaaagagagaaaa

SEQ ID NO: 2540816 - RNA, 15 nt, Human
agaaagagagaaaau

SEQ ID NO: 2540817 - RNA, 10 nt, Human
agaaagagag

SEQ ID NO: 2540818 - RNA, 11 nt, Human
agaaagagaga

SEQ ID NO: 2540819 - RNA, 16 nt, Human
agaaagagagaaaaua

SEQ ID NO: 2540820 - RNA, 17 nt, Human
agaaagagagaaaauaa

SEQ ID NO: 2540821 - RNA, 18 nt, Human
agaaagagagaaaauaaa

SEQ ID NO: 2540822 - RNA, 22 nt, Human
agaaagagagaaaauaaaaagu

SEQ ID NO: 2540823 - RNA, 16 nt, Human
agaaagaggagugcuu

SEQ ID NO: 2540824 - RNA, 19 nt, Human
agaaagagcacuuaagaga

SEQ ID NO: 2540825 - RNA, 22 nt, Human
agaaagagcacuuaagagaaua

SEQ ID NO: 2540826 - RNA, 23 nt, Human
agaaagagagagaauucuuucaa

SEQ ID NO: 2540827 - RNA, 13 nt, Human
agaaagagcacuu

SEQ ID NO: 2540828 - RNA, 20 nt, Human
agaaagacuaucuaaauguu

SEQ ID NO: 2540829 - RNA, 22 nt, Human
agaaagacuaucuaaauguuga

SEQ ID NO: 2540830 - RNA, 16 nt, Human
agaaagacuauucaaa

SEQ ID NO: 2540831 - RNA, 15 nt, Human
agaaagacagagcug

SEQ ID NO: 2540832 - RNA, 12 nt, Human
agaaagacugag

SEQ ID NO: 2540833 - RNA, 18 nt, Human
agaaagacagagcuggga

SEQ ID NO: 2540834 - RNA, 18 nt, Human
ucucuugguccugcugca

SEQ ID NO: 2540835 - RNA, 17 nt, Human
ucucuugguccugcugc

SEQ ID NO: 2540836 - RNA, 16 nt, Human
ucucuugguccugcug

SEQ ID NO: 2540837 - RNA, 22 nt, Human
ucucugcaggucccuaauaaag

SEQ ID NO: 2540838 - RNA, 21 nt, Human
ucucugcaggucccuaauaaa

SEQ ID NO: 2540839 - RNA, 20 nt, Human
ucucugcaggucccuaauaa

SEQ ID NO: 2540840 - RNA, 19 nt, Human
ucucugcaggucccuaaua

SEQ ID NO: 2540841 - RNA, 13 nt, Human
ucucuccccucaa

SEQ ID NO: 2540842 - RNA, 23 nt, Human
ucucucccauggagccccagccc

SEQ ID NO: 2540843 - RNA, 21 nt, Human
ucucucccauggagccccagc

SEQ ID NO: 2540844 - RNA, 20 nt, Human
ucucucccauggagccccag

SEQ ID NO: 2540845 - RNA, 21 nt, Human
ucucuccccucaaagucugca

SEQ ID NO: 2540846 - RNA, 20 nt, Human
ucucuccccucaaagucugc

SEQ ID NO: 2540847 - RNA, 14 nt, Human
ucucucccuccccu

SEQ ID NO: 2540848 - RNA, 19 nt, Human
agaaaaaauauuuucccua

SEQ ID NO: 2540849 - RNA, 22 nt, Human
ucucuccccucaaagucugcaa

SEQ ID NO: 2540850 - RNA, 18 nt, Human
ucucugcaggucccuaau

SEQ ID NO: 2540851 - RNA, 16 nt, Human
ucucuugguuuccuuc

SEQ ID NO: 2540852 - RNA, 17 nt, Human
ucucuugguuuccuucc

SEQ ID NO: 2540853 - RNA, 18 nt, Human
ucucuugguuuccuuccu

SEQ ID NO: 2540854 - RNA, 17 nt, Human
agaaaaaauauuuuccu

SEQ ID NO: 2540855 - RNA, 23 nt, Human
agaaaaaauauuuuccugccagg

SEQ ID NO: 2540856 - RNA, 19 nt, Human
agaaaaauuuacauggcaa

SEQ ID NO: 2540857 - RNA, 15 nt, Human
agaaaaauuauugua

SEQ ID NO: 2540858 - RNA, 20 nt, Human
agaaaacaaaaaaaccucua

SEQ ID NO: 2540859 - RNA, 19 nt, Human
ucucuugguuuccuuccuu

SEQ ID NO: 2540860 - RNA, 18 nt, Human
agaaaaaugagccuggca

SEQ ID NO: 2540861 - RNA, 13 nt, Human
agaaaagcuauaa

SEQ ID NO: 2540862 - RNA, 21 nt, Human
agaaaagcuauaaaaugaaua

SEQ ID NO: 2540863 - RNA, 14 nt, Human
agaaaagcuuugaa

SEQ ID NO: 2540864 - RNA, 17 nt, Human
agaaacaauaaagagau

SEQ ID NO: 2540865 - RNA, 16 nt, Human
agaaacaauaaagaga

SEQ ID NO: 2540866 - RNA, 15 nt, Human
agaaacaauaaagag

SEQ ID NO: 2540867 - RNA, 14 nt, Human
agaaaaggacagaa

SEQ ID NO: 2540868 - RNA, 17 nt, Human
agaaacaacucuuugag

SEQ ID NO: 2540869 - RNA, 14 nt, Human
agaaacaauaaaga

SEQ ID NO: 2540870 - RNA, 20 nt, Human
agaaacaacucuuugagaaa

SEQ ID NO: 2540871 - RNA, 16 nt, Human
agaaacacaacuauau

SEQ ID NO: 2540872 - RNA, 14 nt, Human
agaaacacaauauu

SEQ ID NO: 2540873 - RNA, 15 nt, Human
agaaacacacugagg

SEQ ID NO: 2540874 - RNA, 17 nt, Human
agaaacacacugaggca

SEQ ID NO: 2540875 - RNA, 19 nt, Human
agaaacacacugaggcagg

SEQ ID NO: 2540876 - RNA, 20 nt, Human
agaaacacacugaggcaggg

SEQ ID NO: 2540877 - RNA, 17 nt, Human
agaaaagauaaagauga

SEQ ID NO: 2540878 - RNA, 12 nt, Human
agaaaagauuuu

SEQ ID NO: 2540879 - RNA, 19 nt, Human
agaaaagauguagauuuau

SEQ ID NO: 2540880 - RNA, 15 nt, Human
agaaaagauuuuaau

SEQ ID NO: 2540881 - RNA, 18 nt, Human
agaaaagauuuuaaucaa

SEQ ID NO: 2540882 - RNA, 20 nt, Human
agaaaagauuuuaaucaagu

SEQ ID NO: 2540883 - RNA, 15 nt, Human
agaaaagcaccugcc

SEQ ID NO: 2540884 - RNA, 16 nt, Human
agaaaagcaccugccg

SEQ ID NO: 2540885 - RNA, 18 nt, Human
agaaaagcaccugccgac

SEQ ID NO: 2540886 - RNA, 16 nt, Human
agaaaacaaggaugaa

SEQ ID NO: 2540887 - RNA, 23 nt, Human
agaaaagagauauuuuaaaauga

SEQ ID NO: 2540888 - RNA, 19 nt, Human
agaaaagagauauuuuaaa

SEQ ID NO: 2540889 - RNA, 16 nt, Human
agaaaagauaaagaug

SEQ ID NO: 2540890 - RNA, 15 nt, Human
agaaaagauaaagau

SEQ ID NO: 2540891 - RNA, 20 nt, Human
agaaaagauacgacuuuauu

SEQ ID NO: 2540892 - RNA, 22 nt, Human
agaaacacacugaggcagggaa

SEQ ID NO: 2540893 - RNA, 22 nt, Human
agaaacauaaauaaaaugacca

SEQ ID NO: 2540894 - RNA, 17 nt, Human
agaaacauaaauaaaau

SEQ ID NO: 2540895 - RNA, 16 nt, Human
agaaacauaaauaaaa

SEQ ID NO: 2540896 - RNA, 15 nt, Human
agaaacauaaauaaa

SEQ ID NO: 2540897 - RNA, 14 nt, Human
agaaacaucaguua

SEQ ID NO: 2540898 - RNA, 16 nt, Human
agaaacaucaguuacu

SEQ ID NO: 2540899 - RNA, 15 nt, Human
agaaacauugaagau

SEQ ID NO: 2540900 - RNA, 14 nt, Human
agaaacauugaaga

SEQ ID NO: 2540901 - RNA, 14 nt, Human
agaaacaugguuuu

SEQ ID NO: 2540902 - RNA, 23 nt, Human
agaaacauaaauaaaaugaccag

SEQ ID NO: 2540903 - RNA, 21 nt, Human
agaaacaucaguuacucugaa

SEQ ID NO: 2540904 - RNA, 23 nt, Human
agaaacaucaguuacucugaagg

SEQ ID NO: 2540905 - RNA, 15 nt, Human
agaaacauuugguaa

SEQ ID NO: 2540906 - RNA, 14 nt, Human
agaaacuguagucu

SEQ ID NO: 2540907 - RNA, 20 nt, Human
agaaacuguagucucaggac

SEQ ID NO: 2540908 - RNA, 23 nt, Human
agaaacuuaagguuaccuuuguu

SEQ ID NO: 2540909 - RNA, 22 nt, Human
agaaacuguucccaccugcugg

SEQ ID NO: 2540910 - RNA, 15 nt, Human
agaaacuguucccac

SEQ ID NO: 2540911 - RNA, 21 nt, Human
agaaacuguucccaccugcug

SEQ ID NO: 2540912 - RNA, 23 nt, Human
ucugcaggucccuaauaaagcug

SEQ ID NO: 2540913 - RNA, 22 nt, Human
ucugcaggucccuaauaaagcu

SEQ ID NO: 2540914 - RNA, 19 nt, Human
ucugcaggucccuaauaaa

SEQ ID NO: 2540915 - RNA, 21 nt, Human
ucugcaggucccuaauaaagc

SEQ ID NO: 2540916 - RNA, 18 nt, Human
ucugaagugaaacugcuu

SEQ ID NO: 2540917 - RNA, 22 nt, Human
ucugaagugaaacugcuuguuu

SEQ ID NO: 2540918 - RNA, 13 nt, Human
ucugaagggaggu

SEQ ID NO: 2540919 - RNA, 12 nt, Human
ucugaagggagg

SEQ ID NO: 2540920 - RNA, 16 nt, Human
ucugaagugaaacugc

SEQ ID NO: 2540921 - RNA, 14 nt, Human
ucugaagggaggug

SEQ ID NO: 2540922 - RNA, 16 nt, Human
ucugaauaacauuugu

SEQ ID NO: 2540923 - RNA, 15 nt, Human
ucugaauaauuucuu

SEQ ID NO: 2540924 - RNA, 16 nt, Human
ucugaauaauuucuua

SEQ ID NO: 2540925 - RNA, 14 nt, Human
ucugaauaugcugc

SEQ ID NO: 2540926 - RNA, 13 nt, Human
ucugaauccuaag

SEQ ID NO: 2540927 - RNA, 13 nt, Human
agaaccuggaacu

SEQ ID NO: 2540928 - RNA, 20 nt, Human
agaaccuggaacuuggggag

SEQ ID NO: 2540929 - RNA, 15 nt, Human
agaaccuggaagggc

SEQ ID NO: 2540930 - RNA, 21 nt, Human
agaaccuggaacuuggggagu

SEQ ID NO: 2540931 - RNA, 12 nt, Human
agaaauuaugug

SEQ ID NO: 2540932 - RNA, 18 nt, Human
agaaccuggaguuccuga

SEQ ID NO: 2540933 - RNA, 17 nt, Human
agaaccuggaguuccug

SEQ ID NO: 2540934 - RNA, 17 nt, Human
agaaccuggagggcugg

SEQ ID NO: 2540935 - RNA, 23 nt, Human
agaaccuggagggcuagaacugg

SEQ ID NO: 2540936 - RNA, 12 nt, Human
agaaccuggagg

SEQ ID NO: 2540937 - RNA, 17 nt, Human
agaaccuggagagcuag

SEQ ID NO: 2540938 - RNA, 12 nt, Human
agaaccuggaga

SEQ ID NO: 2540939 - RNA, 16 nt, Human
agaaccuggaagggcu

SEQ ID NO: 2540940 - RNA, 17 nt, Human
agaaccuguagagcuag

SEQ ID NO: 2540941 - RNA, 12 nt, Human
agaaccuguccu

SEQ ID NO: 2540942 - RNA, 13 nt, Human
agaaccuguccuu

SEQ ID NO: 2540943 - RNA, 17 nt, Human
ucugaaugcugcuacuu

SEQ ID NO: 2540944 - RNA, 18 nt, Human
agaaauuacacccaaaga

SEQ ID NO: 2540945 - RNA, 13 nt, Human
agaaauuaaguau

SEQ ID NO: 2540946 - RNA, 17 nt, Human
agaaauuaaguaucuga

SEQ ID NO: 2540947 - RNA, 21 nt, Human
ucugcagguucuucuuccuga

SEQ ID NO: 2540948 - RNA, 15 nt, Human
ucugcaguaaaucuu

SEQ ID NO: 2540949 - RNA, 16 nt, Human
ucugaaugcugcuacu

SEQ ID NO: 2540950 - RNA, 13 nt, Human
ucugaaugcugcu

SEQ ID NO: 2540951 - RNA, 17 nt, Human
agaaauuagcuguguga

SEQ ID NO: 2540952 - RNA, 15 nt, Human
agaaauuagccgggc

SEQ ID NO: 2540953 - RNA, 17 nt, Human
agaaauuagaaaccuua

SEQ ID NO: 2540954 - RNA, 15 nt, Human
agaaauuagcugugu

SEQ ID NO: 2540955 - RNA, 14 nt, Human
agaaauuagccggg

SEQ ID NO: 2540956 - RNA, 23 nt, Human
agaaccuuuugagugccuuacac

SEQ ID NO: 2540957 - RNA, 23 nt, Human
agaaccuugugccuggcucagag

SEQ ID NO: 2540958 - RNA, 22 nt, Human
agaaccuugugccuggcucaga

SEQ ID NO: 2540959 - RNA, 17 nt, Human
agaaccuugugccuggc

SEQ ID NO: 2540960 - RNA, 22 nt, Human
agaacgcagcccuagagccugc

SEQ ID NO: 2540961 - RNA, 13 nt, Human
agaacgcagcccu

SEQ ID NO: 2540962 - RNA, 23 nt, Human
agaacgcagcccuagagccugcc

SEQ ID NO: 2540963 - RNA, 19 nt, Human
agaaccuuuugagugccuu

SEQ ID NO: 2540964 - RNA, 22 nt, Human
agaaccuugccugaacauccuu

SEQ ID NO: 2540965 - RNA, 19 nt, Human
agaaccuugccugaacauc

SEQ ID NO: 2540966 - RNA, 14 nt, Human
agaaccuugccuga

SEQ ID NO: 2540967 - RNA, 14 nt, Human
agaaccuguccuug

SEQ ID NO: 2540968 - RNA, 21 nt, Human
agaaccuguccuugcacacuc

SEQ ID NO: 2540969 - RNA, 17 nt, Human
agaacuagaauuugauu

SEQ ID NO: 2540970 - RNA, 18 nt, Human
agaacuagaaccuggagg

SEQ ID NO: 2540971 - RNA, 17 nt, Human
agaacuagaaccuggag

SEQ ID NO: 2540972 - RNA, 19 nt, Human
agaacuacucagggaauga

SEQ ID NO: 2540973 - RNA, 22 nt, Human
agaacuacucagggaaugaagg

SEQ ID NO: 2540974 - RNA, 19 nt, Human
agaacucaaauggggccag

SEQ ID NO: 2540975 - RNA, 21 nt, Human
agaacuauaugugaauccucu

SEQ ID NO: 2540976 - RNA, 19 nt, Human
agaacuauaugugaauccu

SEQ ID NO: 2540977 - RNA, 16 nt, Human
agaacuauaugugaau

SEQ ID NO: 2540978 - RNA, 15 nt, Human
agaacucccuuucaa

SEQ ID NO: 2540979 - RNA, 16 nt, Human
agaacucccuuucaac

SEQ ID NO: 2540980 - RNA, 17 nt, Human
agaacucccuuucaaca

SEQ ID NO: 2540981 - RNA, 20 nt, Human
agaacucaaauggggccaga

SEQ ID NO: 2540982 - RNA, 14 nt, Human
agaacucacugggg

SEQ ID NO: 2540983 - RNA, 16 nt, Human
agaacucacuggggcc

SEQ ID NO: 2540984 - RNA, 11 nt, Human
agaacuccuag

SEQ ID NO: 2540985 - RNA, 18 nt, Human
agaacugcaggcccuggc

SEQ ID NO: 2540986 - RNA, 16 nt, Human
agaacugcaggcccug

SEQ ID NO: 2540987 - RNA, 20 nt, Human
agaacugcaggcccuggccu

SEQ ID NO: 2540988 - RNA, 15 nt, Human
agaacugcauauguu

SEQ ID NO: 2540989 - RNA, 19 nt, Human
agaacugcauauguuucgc

SEQ ID NO: 2540990 - RNA, 20 nt, Human
agaacugcauauguuucgcu

SEQ ID NO: 2540991 - RNA, 21 nt, Human
agaacugcauauguuucgcug

SEQ ID NO: 2540992 - RNA, 15 nt, Human
agaacugcaggcccu

SEQ ID NO: 2540993 - RNA, 12 nt, Human
agaacugcaggc

SEQ ID NO: 2540994 - RNA, 16 nt, Human
agaacugagcuccucu

SEQ ID NO: 2540995 - RNA, 22 nt, Human
agaacugagcuccucugggcag

SEQ ID NO: 2540996 - RNA, 15 nt, Human
agaacugaaugagaa

SEQ ID NO: 2540997 - RNA, 14 nt, Human
agaacuccuagggu

SEQ ID NO: 2540998 - RNA, 12 nt, Human
agaacugagcuc

SEQ ID NO: 2540999 - RNA, 15 nt, Human
agaacugagcuccuc

SEQ ID NO: 2541000 - RNA, 23 nt, Human
ucugcccuugguuaggcauugug

SEQ ID NO: 2541001 - RNA, 12 nt, Human
ucugcccuuggu

SEQ ID NO: 2541002 - RNA, 21 nt, Human
ucugcccuggcugcugccccc

SEQ ID NO: 2541003 - RNA, 16 nt, Human
ucugcccuggcugcug

SEQ ID NO: 2541004 - RNA, 15 nt, Human
ucugcccuggcugcu

SEQ ID NO: 2541005 - RNA, 14 nt, Human
ucugcccuggcugc

SEQ ID NO: 2541006 - RNA, 13 nt, Human
ucugcccuggcug

SEQ ID NO: 2541007 - RNA, 16 nt, Human
ucugcccccugcuggc

SEQ ID NO: 2541008 - RNA, 14 nt, Human
ucugcccccugcug

SEQ ID NO: 2541009 - RNA, 22 nt, Human
ucugcccugcgggucacaggag

SEQ ID NO: 2541010 - RNA, 23 nt, Human
ucugcccaggggugcccccuccu

SEQ ID NO: 2541011 - RNA, 22 nt, Human
ucugcccaggggugcccccucc

SEQ ID NO: 2541012 - RNA, 21 nt, Human
ucugcccaggggugcccccuc

SEQ ID NO: 2541013 - RNA, 20 nt, Human
ucugcccaggggugcccccu

SEQ ID NO: 2541014 - RNA, 18 nt, Human
ucugccccagaggccucu

SEQ ID NO: 2541015 - RNA, 15 nt, Human
ucugccccagaggcc

SEQ ID NO: 2541016 - RNA, 14 nt, Human
ucugccccagaggc

SEQ ID NO: 2541017 - RNA, 14 nt, Human
ucugccccagcucu

SEQ ID NO: 2541018 - RNA, 15 nt, Human
ucugccccauccucc

SEQ ID NO: 2541019 - RNA, 18 nt, Human
ucugccccauccuccagc

SEQ ID NO: 2541020 - RNA, 19 nt, Human
ucugccccauccuccagca

SEQ ID NO: 2541021 - RNA, 21 nt, Human
ucugccccauccuccagcagg

SEQ ID NO: 2541022 - RNA, 20 nt, Human
ucugccccagcucuggcuuc

SEQ ID NO: 2541023 - RNA, 16 nt, Human
ucugccccagcucugg

SEQ ID NO: 2541024 - RNA, 17 nt, Human
ucugccccagcucuggc

SEQ ID NO: 2541025 - RNA, 21 nt, Human
agaagccccuuccccauggga

SEQ ID NO: 2541026 - RNA, 20 nt, Human
agaagccccuuccccauggg

SEQ ID NO: 2541027 - RNA, 17 nt, Human
agaagcccccagcuaag

SEQ ID NO: 2541028 - RNA, 23 nt, Human
agaagcccccagcuaagaaccug

SEQ ID NO: 2541029 - RNA, 15 nt, Human
agaagccccuucccc

SEQ ID NO: 2541030 - RNA, 20 nt, Human
agaagccauugucuucggaa

SEQ ID NO: 2541031 - RNA, 24 nt, Human
agaagcccccagcuaagaaccugg

SEQ ID NO: 2541032 - RNA, 12 nt, Human
agaagcccccag

SEQ ID NO: 2541033 - RNA, 14 nt, Human
agaagcccccagcu

SEQ ID NO: 2541034 - RNA, 23 nt, Human
agaagcccaggaaaggcuccagg

SEQ ID NO: 2541035 - RNA, 20 nt, Human
ucugcccauccugccccuga

SEQ ID NO: 2541036 - RNA, 19 nt, Human
ucugcccaggggugccccc

SEQ ID NO: 2541037 - RNA, 14 nt, Human
ucugcccaggggug

SEQ ID NO: 2541038 - RNA, 23 nt, Human
ucugcccaggacggggccggcca

SEQ ID NO: 2541039 - RNA, 12 nt, Human
ucugcccaggac

SEQ ID NO: 2541040 - RNA, 23 nt, Human
ucugcccacucccugcaaccuga

SEQ ID NO: 2541041 - RNA, 16 nt, Human
ucugcccagcuugggc

SEQ ID NO: 2541042 - RNA, 19 nt, Human
ucugcccagcuugggccca

SEQ ID NO: 2541043 - RNA, 20 nt, Human
agaagcccgugugagaagug

SEQ ID NO: 2541044 - RNA, 12 nt, Human
ucugcccagcuu

SEQ ID NO: 2541045 - RNA, 12 nt, Human
agaagccaggaa

SEQ ID NO: 2541046 - RNA, 13 nt, Human
agaagccaggaau

SEQ ID NO: 2541047 - RNA, 21 nt, Human
agaagccacaggccugagauu

SEQ ID NO: 2541048 - RNA, 19 nt, Human
agaagccacaggccugaga

SEQ ID NO: 2541049 - RNA, 20 nt, Human
agaagccaggagcaaauguu

SEQ ID NO: 2541050 - RNA, 14 nt, Human
agaagccaggagca

SEQ ID NO: 2541051 - RNA, 12 nt, Human
agaagccaggag

SEQ ID NO: 2541052 - RNA, 22 nt, Human
agaagccaggaauuucccagga

SEQ ID NO: 2541053 - RNA, 12 nt, Human
agaagccauugu

SEQ ID NO: 2541054 - RNA, 11 nt, Human
agaagccauug

SEQ ID NO: 2541055 - RNA, 10 nt, Human
agaagccauu

SEQ ID NO: 2541056 - RNA, 15 nt, Human
agaagccauugucuu

SEQ ID NO: 2541057 - RNA, 14 nt, Human
agaagccauugucu

SEQ ID NO: 2541058 - RNA, 18 nt, Human
agaagcccaauauuauaa

SEQ ID NO: 2541059 - RNA, 14 nt, Human
agaagcagaaauac

SEQ ID NO: 2541060 - RNA, 20 nt, Human
agaagcaauaaagaagagug

SEQ ID NO: 2541061 - RNA, 21 nt, Human
agaagcaauaaagaagagugc

SEQ ID NO: 2541062 - RNA, 12 nt, Human
agaagcagcucu

SEQ ID NO: 2541063 - RNA, 14 nt, Human
agaagcaggcugga

SEQ ID NO: 2541064 - RNA, 18 nt, Human
agaagcaggcuacacuga

SEQ ID NO: 2541065 - RNA, 13 nt, Human
agaagcagaugag

SEQ ID NO: 2541066 - RNA, 15 nt, Human
agaagcagaaauaca

SEQ ID NO: 2541067 - RNA, 13 nt, Human
agaagcagcucuu

SEQ ID NO: 2541068 - RNA, 18 nt, Human
agaagccacaggccugag

SEQ ID NO: 2541069 - RNA, 13 nt, Human
agaagcauuccuu

SEQ ID NO: 2541070 - RNA, 21 nt, Human
agaagcauuaacuucucugga

SEQ ID NO: 2541071 - RNA, 18 nt, Human
agaagcauuaacuucucu

SEQ ID NO: 2541072 - RNA, 13 nt, Human
agaagcaugaaaa

SEQ ID NO: 2541073 - RNA, 15 nt, Human
agaagcaugaaaaag

SEQ ID NO: 2541074 - RNA, 16 nt, Human
agaagcaugaaaaagc

SEQ ID NO: 2541075 - RNA, 13 nt, Human
agaagcagugagc

SEQ ID NO: 2541076 - RNA, 14 nt, Human
agaagcagugagcc

SEQ ID NO: 2541077 - RNA, 17 nt, Human
agaagcagugagccgca

SEQ ID NO: 2541078 - RNA, 23 nt, Human
agaagcagugagccgcaucuucu

SEQ ID NO: 2541079 - RNA, 15 nt, Human
agaagcauacaacuu

SEQ ID NO: 2541080 - RNA, 19 nt, Human
agaagcaacccaaauguuc

SEQ ID NO: 2541081 - RNA, 15 nt, Human
agaagcaagaaagaa

SEQ ID NO: 2541082 - RNA, 19 nt, Human
agaagcaccaaucaugaau

SEQ ID NO: 2541083 - RNA, 16 nt, Human
agaagcagaggaagga

SEQ ID NO: 2541084 - RNA, 18 nt, Human
agaacuuucauuuuuuuc

SEQ ID NO: 2541085 - RNA, 16 nt, Human
agaacuuucauuuuuu

SEQ ID NO: 2541086 - RNA, 15 nt, Human
agaacuuucauuuuu

SEQ ID NO: 2541087 - RNA, 14 nt, Human
agaacuuucauuuu

SEQ ID NO: 2541088 - RNA, 16 nt, Human
agaacuuugaaggaca

SEQ ID NO: 2541089 - RNA, 18 nt, Human
agaacuuggauguaccug

SEQ ID NO: 2541090 - RNA, 23 nt, Human
agaacuuggauguaccugccccc

SEQ ID NO: 2541091 - RNA, 14 nt, Human
ucugccugucuccc

SEQ ID NO: 2541092 - RNA, 12 nt, Human
ucugccugucuc

SEQ ID NO: 2541093 - RNA, 16 nt, Human
ucugcccuucacccca

SEQ ID NO: 2541094 - RNA, 17 nt, Human
ucugcccuggcugcugc

SEQ ID NO: 2541095 - RNA, 18 nt, Human
ucugcccuugccaacgga

SEQ ID NO: 2541096 - RNA, 13 nt, Human
ucugccugucccu

SEQ ID NO: 2541097 - RNA, 17 nt, Human
ucugccugucccucuca

SEQ ID NO: 2541098 - RNA, 18 nt, Human
ucugccugucccucucag

SEQ ID NO: 2541099 - RNA, 21 nt, Human
ucugccugucccucucaggca

SEQ ID NO: 2541100 - RNA, 18 nt, Human
ucugcuuugacugagcag

SEQ ID NO: 2541101 - RNA, 13 nt, Human
ucugccuuccuug

SEQ ID NO: 2541102 - RNA, 19 nt, Human
ucugccuuagucucaguuu

SEQ ID NO: 2541103 - RNA, 20 nt, Human
ucugccuuaaaaccaaagag

SEQ ID NO: 2541104 - RNA, 15 nt, Human
ucugccuuagucuca

SEQ ID NO: 2541105 - RNA, 17 nt, Human
ucugccuuaaaaccaaa

SEQ ID NO: 2541106 - RNA, 16 nt, Human
ucugccuuaaaaccaa

SEQ ID NO: 2541107 - RNA, 22 nt, Human
ucugccuguuauaacucugcac

SEQ ID NO: 2541108 - RNA, 21 nt, Human
ucugccuguuauaacucugca

SEQ ID NO: 2541109 - RNA, 19 nt, Human
ucugccuguuauaacucug

SEQ ID NO: 2541110 - RNA, 15 nt, Human
ucugccuguuauaac

SEQ ID NO: 2541111 - RNA, 16 nt, Human
ucugccuguggaacug

SEQ ID NO: 2541112 - RNA, 20 nt, Human
ucugcuuuucugcccuggcu

SEQ ID NO: 2541113 - RNA, 19 nt, Human
ucugcuuuucugcccuggc

SEQ ID NO: 2541114 - RNA, 18 nt, Human
ucugcuuuucugcccugg

SEQ ID NO: 2541115 - RNA, 17 nt, Human
ucugcuuuucugcccug

SEQ ID NO: 2541116 - RNA, 16 nt, Human
ucugcuuuucugcccu

SEQ ID NO: 2541117 - RNA, 15 nt, Human
ucugcuuuucugccc

SEQ ID NO: 2541118 - RNA, 13 nt, Human
ucugcuuuuacca

SEQ ID NO: 2541119 - RNA, 12 nt, Human
ucugccuguccc

SEQ ID NO: 2541120 - RNA, 22 nt, Human
ucugcuuuucugcccuggcugc

SEQ ID NO: 2541121 - RNA, 21 nt, Human
ucugcuuuucugcccuggcug

SEQ ID NO: 2541122 - RNA, 17 nt, Human
ucuggaaccucagccug

SEQ ID NO: 2541123 - RNA, 16 nt, Human
ucuggaaccucagccu

SEQ ID NO: 2541124 - RNA, 18 nt, Human
ucugcuuuuaccaugccc

SEQ ID NO: 2541125 - RNA, 20 nt, Human
ucugcuuugcucuucaagaa

SEQ ID NO: 2541126 - RNA, 21 nt, Human
ucugcuuugacugagcagacu

SEQ ID NO: 2541127 - RNA, 22 nt, Human
ucugcuuugggguuuaucagaa

SEQ ID NO: 2541128 - RNA, 21 nt, Human
ucuggcaaagcuuuuagaaau

SEQ ID NO: 2541129 - RNA, 22 nt, Human
ucuggcacacaguaggugcuca

SEQ ID NO: 2541130 - RNA, 22 nt, Human
ucuggauucccaggaugagcau

SEQ ID NO: 2541131 - RNA, 21 nt, Human
ucuggauucccaggaugagca

SEQ ID NO: 2541132 - RNA, 17 nt, Human
ucuggauucccaggaug

SEQ ID NO: 2541133 - RNA, 14 nt, Human
ucuggauucccagg

SEQ ID NO: 2541134 - RNA, 13 nt, Human
ucuggauucccag

SEQ ID NO: 2541135 - RNA, 15 nt, Human
ucuggcaacaucuuu

SEQ ID NO: 2541136 - RNA, 16 nt, Human
ucuggcaacaucuuua

SEQ ID NO: 2541137 - RNA, 15 nt, Human
ucuggauucuuggcc

SEQ ID NO: 2541138 - RNA, 16 nt, Human
ucuggauucuuggccc

SEQ ID NO: 2541139 - RNA, 14 nt, Human
ucuggauuguggga

SEQ ID NO: 2541140 - RNA, 19 nt, Human
ucuggaagugacuuuggcu

SEQ ID NO: 2541141 - RNA, 22 nt, Human
ucuggaagugacuuuggcugca

SEQ ID NO: 2541142 - RNA, 18 nt, Human
ucuggaagugacuuuggc

SEQ ID NO: 2541143 - RNA, 13 nt, Human
ucuggaaguccaa

SEQ ID NO: 2541144 - RNA, 18 nt, Human
ucuggaaccucagccugg

SEQ ID NO: 2541145 - RNA, 19 nt, Human
ucuggaaccucagccuggc

SEQ ID NO: 2541146 - RNA, 20 nt, Human
ucuggaaccucagccuggcc

SEQ ID NO: 2541147 - RNA, 21 nt, Human
ucuggaaccucagccuggcca

SEQ ID NO: 2541148 - RNA, 23 nt, Human
ucuggaaccucagccuggccaga

SEQ ID NO: 2541149 - RNA, 13 nt, Human
ucuggaagagagg

SEQ ID NO: 2541150 - RNA, 20 nt, Human
ucuggaagagaggaaugccu

SEQ ID NO: 2541151 - RNA, 16 nt, Human
ucuggccucccacccg

SEQ ID NO: 2541152 - RNA, 15 nt, Human
ucuggccucccaccc

SEQ ID NO: 2541153 - RNA, 14 nt, Human
ucuggccucccacc

SEQ ID NO: 2541154 - RNA, 11 nt, Human
ucuggccucca

SEQ ID NO: 2541155 - RNA, 23 nt, Human
ucuggccucccacccgaugcugc

SEQ ID NO: 2541156 - RNA, 10 nt, Human
ucuggccuuc

SEQ ID NO: 2541157 - RNA, 14 nt, Human
agaagccgggaaca

SEQ ID NO: 2541158 - RNA, 16 nt, Human
agaagccgggaacaga

SEQ ID NO: 2541159 - RNA, 18 nt, Human
agaagccgggaacagaca

SEQ ID NO: 2541160 - RNA, 22 nt, Human
agaagccgggaacagacaacag

SEQ ID NO: 2541161 - RNA, 17 nt, Human
agaagcucccaggaaca

SEQ ID NO: 2541162 - RNA, 16 nt, Human
agaagcucccaggaac

SEQ ID NO: 2541163 - RNA, 15 nt, Human
agaagcucccaggaa

SEQ ID NO: 2541164 - RNA, 14 nt, Human
agaagccgugggug

SEQ ID NO: 2541165 - RNA, 17 nt, Human
agaagccugaugcugac

SEQ ID NO: 2541166 - RNA, 17 nt, Human
agaagccugaggcuggg

SEQ ID NO: 2541167 - RNA, 12 nt, Human
agaagccugagg

SEQ ID NO: 2541168 - RNA, 14 nt, Human
agaagccugaggcu

SEQ ID NO: 2541169 - RNA, 22 nt, Human
agaagccucugggucagugguc

SEQ ID NO: 2541170 - RNA, 23 nt, Human
agaagccucugggucaguggucc

SEQ ID NO: 2541171 - RNA, 16 nt, Human
agaagccucuggcuag

SEQ ID NO: 2541172 - RNA, 23 nt, Human
agaagccucuggcuagaggccag

SEQ ID NO: 2541173 - RNA, 15 nt, Human
agaagccuccccagc

SEQ ID NO: 2541174 - RNA, 12 nt, Human
agaagccucugg

SEQ ID NO: 2541175 - RNA, 13 nt, Human
agaagccucuggc

SEQ ID NO: 2541176 - RNA, 14 nt, Human
agaagccucuggcu

SEQ ID NO: 2541177 - RNA, 23 nt, Human
ucuggcagaguugaagacagagc

SEQ ID NO: 2541178 - RNA, 20 nt, Human
ucuggcagaguugaagacag

SEQ ID NO: 2541179 - RNA, 17 nt, Human
ucuggcagcucagagag

SEQ ID NO: 2541180 - RNA, 16 nt, Human
ucuggcagcucagaga

SEQ ID NO: 2541181 - RNA, 21 nt, Human
ucuggcagcucagagagggug

SEQ ID NO: 2541182 - RNA, 18 nt, Human
ucuggcagcucagagagg

SEQ ID NO: 2541183 - RNA, 19 nt, Human
ucuggcagggugggaugga

SEQ ID NO: 2541184 - RNA, 13 nt, Human
ucuggccuagucc

SEQ ID NO: 2541185 - RNA, 20 nt, Human
ucuggcagggugggauggag

SEQ ID NO: 2541186 - RNA, 18 nt, Human
ucuggccucaggugggcc

SEQ ID NO: 2541187 - RNA, 13 nt, Human
ucuggccucaggu

SEQ ID NO: 2541188 - RNA, 20 nt, Human
ucuggccuagucccuuccac

SEQ ID NO: 2541189 - RNA, 18 nt, Human
ucuggccuagucccuucc

SEQ ID NO: 2541190 - RNA, 13 nt, Human
ucuggccucccac

SEQ ID NO: 2541191 - RNA, 14 nt, Human
ucuggccucccaca

SEQ ID NO: 2541192 - RNA, 22 nt, Human
agaauaaagcaauuuuccuuga

SEQ ID NO: 2541193 - RNA, 20 nt, Human
agaauaaagcaauuuuccuu

SEQ ID NO: 2541194 - RNA, 19 nt, Human
agaauaaagcaauuuuccu

SEQ ID NO: 2541195 - RNA, 18 nt, Human
agaauaaagcaauuuucc

SEQ ID NO: 2541196 - RNA, 23 nt, Human
agaauaaagcaauuuuccuugaa

SEQ ID NO: 2541197 - RNA, 21 nt, Human
agaauaaaguucugaguguuu

SEQ ID NO: 2541198 - RNA, 17 nt, Human
agaauaaaguucugagu

SEQ ID NO: 2541199 - RNA, 17 nt, Human
agaauaaucacgcuuuc

SEQ ID NO: 2541200 - RNA, 20 nt, Human
agaauaaucacgcuuuccug

SEQ ID NO: 2541201 - RNA, 21 nt, Human
agaauaaucacgcuuuccuga

SEQ ID NO: 2541202 - RNA, 13 nt, Human
agaauaaucuuug

SEQ ID NO: 2541203 - RNA, 17 nt, Human
agaaguuuuuguacugu

SEQ ID NO: 2541204 - RNA, 16 nt, Human
agaaguuuuuguacug

SEQ ID NO: 2541205 - RNA, 13 nt, Human
agaauaaacuggc

SEQ ID NO: 2541206 - RNA, 17 nt, Human
agaauaaagcaauuuuc

SEQ ID NO: 2541207 - RNA, 16 nt, Human
agaauaaagcaauuuu

SEQ ID NO: 2541208 - RNA, 15 nt, Human
agaauaaagcaauuu

SEQ ID NO: 2541209 - RNA, 14 nt, Human
agaauaaagcaauu

SEQ ID NO: 2541210 - RNA, 13 nt, Human
agaauaaagcaau

SEQ ID NO: 2541211 - RNA, 12 nt, Human
agaauaaagcaa

SEQ ID NO: 2541212 - RNA, 11 nt, Human
agaauaaagca

SEQ ID NO: 2541213 - RNA, 15 nt, Human
agaaguuuuuguacu

SEQ ID NO: 2541214 - RNA, 14 nt, Human
agaaguuuuuguac

SEQ ID NO: 2541215 - RNA, 12 nt, Human
agaaguuuuugu

SEQ ID NO: 2541216 - RNA, 11 nt, Human
agaaguuuuug

SEQ ID NO: 2541217 - RNA, 16 nt, Human
agaaguuuuguacaga

SEQ ID NO: 2541218 - RNA, 20 nt, Human
agaaguuugauauuaaagga

SEQ ID NO: 2541219 - RNA, 15 nt, Human
agaaguuugucaagu

SEQ ID NO: 2541220 - RNA, 15 nt, Human
agaauaaugaaugga

SEQ ID NO: 2541221 - RNA, 23 nt, Human
agaauaauaugcugccaaauuuu

SEQ ID NO: 2541222 - RNA, 16 nt, Human
agaauaaucuuugggu

SEQ ID NO: 2541223 - RNA, 15 nt, Human
agaauacaaacauau

SEQ ID NO: 2541224 - RNA, 16 nt, Human
agaauacaaacauauu

SEQ ID NO: 2541225 - RNA, 12 nt, Human
agaauacagaaa

SEQ ID NO: 2541226 - RNA, 18 nt, Human
agaauacagaaagaugga

SEQ ID NO: 2541227 - RNA, 22 nt, Human
agaauacaguaagcugcucuau

SEQ ID NO: 2541228 - RNA, 21 nt, Human
agaauacagaaagauggaugu

SEQ ID NO: 2541229 - RNA, 21 nt, Human
agaauagccacauuuggaaua

SEQ ID NO: 2541230 - RNA, 20 nt, Human
agaauagccacauuuggaau

SEQ ID NO: 2541231 - RNA, 19 nt, Human
agaauagccacauuuggaa

SEQ ID NO: 2541232 - RNA, 18 nt, Human
agaauacaguaagcugcu

SEQ ID NO: 2541233 - RNA, 23 nt, Human
agaaucaacauuucucaauaauu

SEQ ID NO: 2541234 - RNA, 21 nt, Human
agaaucaacauuucucaauaa

SEQ ID NO: 2541235 - RNA, 21 nt, Human
agaaucaaagcaaugcauuuu

SEQ ID NO: 2541236 - RNA, 19 nt, Human
agaaucaaagcaaugcauu

SEQ ID NO: 2541237 - RNA, 13 nt, Human
agaaucaaagcaa

SEQ ID NO: 2541238 - RNA, 13 nt, Human
agaauauauacau

SEQ ID NO: 2541239 - RNA, 20 nt, Human
agaauauuuuaaguauugca

SEQ ID NO: 2541240 - RNA, 17 nt, Human
agaauauaauuaucgga

SEQ ID NO: 2541241 - RNA, 14 nt, Human
agaaucaaaacucu

SEQ ID NO: 2541242 - RNA, 14 nt, Human
agaauauaauuauc

SEQ ID NO: 2541243 - RNA, 15 nt, Human
agaauauaauuaucg

SEQ ID NO: 2541244 - RNA, 23 nt, Human
agaauauaauuaucggaagcagu

SEQ ID NO: 2541245 - RNA, 13 nt, Human
agaauauaauacu

SEQ ID NO: 2541246 - RNA, 16 nt, Human
agaauauaaaaaacuu

SEQ ID NO: 2541247 - RNA, 13 nt, Human
agaaguugauaug

SEQ ID NO: 2541248 - RNA, 17 nt, Human
agaaguggaccaggaca

SEQ ID NO: 2541249 - RNA, 18 nt, Human
agaaguggaccaggacag

SEQ ID NO: 2541250 - RNA, 19 nt, Human
agaaguggaccaggacagg

SEQ ID NO: 2541251 - RNA, 19 nt, Human
agaagugagcuuugcugcu

SEQ ID NO: 2541252 - RNA, 18 nt, Human
agaagugagaauaggcag

SEQ ID NO: 2541253 - RNA, 21 nt, Human
agaagugagaauaggcagccc

SEQ ID NO: 2541254 - RNA, 23 nt, Human
agaagugagcuuugcugcuacag

SEQ ID NO: 2541255 - RNA, 13 nt, Human
agaagugccccug

SEQ ID NO: 2541256 - RNA, 14 nt, Human
agaagugccccugc

SEQ ID NO: 2541257 - RNA, 16 nt, Human
agaagugccccugcug

SEQ ID NO: 2541258 - RNA, 22 nt, Human
agaagugccccugcugccuccc

SEQ ID NO: 2541259 - RNA, 19 nt, Human
agaagugccccugcugccu

SEQ ID NO: 2541260 - RNA, 15 nt, Human
agaaguggaccagga

SEQ ID NO: 2541261 - RNA, 14 nt, Human
agaaguuguuuguc

SEQ ID NO: 2541262 - RNA, 19 nt, Human
agaaguugauauagaacag

SEQ ID NO: 2541263 - RNA, 18 nt, Human
agaaguugauauagaaca

SEQ ID NO: 2541264 - RNA, 19 nt, Human
agaaguugaaugggcacag

SEQ ID NO: 2541265 - RNA, 15 nt, Human
agaaguuuaaggaau

SEQ ID NO: 2541266 - RNA, 16 nt, Human
agaaguuuaaggaaua

SEQ ID NO: 2541267 - RNA, 17 nt, Human
agaaguuuaaggaauau

SEQ ID NO: 2541268 - RNA, 23 nt, Human
agaaguuucuggcccuggcugac

SEQ ID NO: 2541269 - RNA, 16 nt, Human
agaaguuucuggcccu

SEQ ID NO: 2541270 - RNA, 22 nt, Human
agaaguuugagaucagccuggg

SEQ ID NO: 2541271 - RNA, 23 nt, Human
agaagugacagggaagcuacagg

SEQ ID NO: 2541272 - RNA, 22 nt, Human
agaagugacagggaagcuacag

SEQ ID NO: 2541273 - RNA, 19 nt, Human
agaagugacagggaagcua

SEQ ID NO: 2541274 - RNA, 18 nt, Human
agaagugacagggaagcu

SEQ ID NO: 2541275 - RNA, 11 nt, Human
agaaggcaaaa

SEQ ID NO: 2541276 - RNA, 17 nt, Human
agaaggauguacauuuc

SEQ ID NO: 2541277 - RNA, 19 nt, Human
agaaggagagaaagugggu

SEQ ID NO: 2541278 - RNA, 18 nt, Human
agaaggagagaaaguggg

SEQ ID NO: 2541279 - RNA, 14 nt, Human
agaaggagagaaag

SEQ ID NO: 2541280 - RNA, 20 nt, Human
agaaggagacagagcugguu

SEQ ID NO: 2541281 - RNA, 20 nt, Human
agaaggagucagaaacuguu

SEQ ID NO: 2541282 - RNA, 14 nt, Human
agaaggaugaauga

SEQ ID NO: 2541283 - RNA, 21 nt, Human
agaaggaugaaugagguccca

SEQ ID NO: 2541284 - RNA, 16 nt, Human
agaaggauguacauuu

SEQ ID NO: 2541285 - RNA, 14 nt, Human
agaagcuccucucc

SEQ ID NO: 2541286 - RNA, 17 nt, Human
agaagcuccucucccca

SEQ ID NO: 2541287 - RNA, 18 nt, Human
agaagcuccucuccccag

SEQ ID NO: 2541288 - RNA, 20 nt, Human
agaagcuccucuccccagcc

SEQ ID NO: 2541289 - RNA, 18 nt, Human
agaagcucccaggaacaa

SEQ ID NO: 2541290 - RNA, 23 nt, Human
agaagcucccugaaguaagcaaa

SEQ ID NO: 2541291 - RNA, 22 nt, Human
agaaggaauucuaggcauccca

SEQ ID NO: 2541292 - RNA, 15 nt, Human
agaaggaauuugagu

SEQ ID NO: 2541293 - RNA, 15 nt, Human
agaaggagaaggaag

SEQ ID NO: 2541294 - RNA, 14 nt, Human
agaaggagacagag

SEQ ID NO: 2541295 - RNA, 17 nt, Human
agaaggagacagagcug

SEQ ID NO: 2541296 - RNA, 13 nt, Human
agaaggagagaaa

SEQ ID NO: 2541297 - RNA, 22 nt, Human
agaagcuccucuccccagccca

SEQ ID NO: 2541298 - RNA, 23 nt, Human
agaagcuccucuccccagcccag

SEQ ID NO: 2541299 - RNA, 21 nt, Human
agaagcugaagugcauccaaa

SEQ ID NO: 2541300 - RNA, 20 nt, Human
ugaaaaucuuauaauuuaaa

SEQ ID NO: 2541301 - RNA, 19 nt, Human
ugaaaaucgugacaacacu

SEQ ID NO: 2541302 - RNA, 17 nt, Human
ugaaaauguauguguaa

SEQ ID NO: 2541303 - RNA, 16 nt, Human
ugaaaauguacugaga

SEQ ID NO: 2541304 - RNA, 13 nt, Human
ugaaaauguacug

SEQ ID NO: 2541305 - RNA, 12 nt, Human
ugaaaauguacu

SEQ ID NO: 2541306 - RNA, 21 nt, Human
ugaaaaucuaauauuaaaaau

SEQ ID NO: 2541307 - RNA, 17 nt, Human
ugaaaaucuaauauuaa

SEQ ID NO: 2541308 - RNA, 15 nt, Human
ugaaaaucuaauauu

SEQ ID NO: 2541309 - RNA, 14 nt, Human
ugaaaaucuaauau

SEQ ID NO: 2541310 - RNA, 14 nt, Human
ugaaaaugucuugu

SEQ ID NO: 2541311 - RNA, 15 nt, Human
ugaaaaugucuugug

SEQ ID NO: 2541312 - RNA, 16 nt, Human
ugaaacgcaaccacca

SEQ ID NO: 2541313 - RNA, 13 nt, Human
ugaaaaugucuug

SEQ ID NO: 2541314 - RNA, 21 nt, Human
ugaaaaugucagaaaccaguu

SEQ ID NO: 2541315 - RNA, 14 nt, Human
ugaaaaugucaaag

SEQ ID NO: 2541316 - RNA, 14 nt, Human
ugaaaaugucagaa

SEQ ID NO: 2541317 - RNA, 15 nt, Human
ugaaaaugucagaaa

SEQ ID NO: 2541318 - RNA, 18 nt, Human
ugaaaaugucagaaacca

SEQ ID NO: 2541319 - RNA, 13 nt, Human
ugaaacuccaccu

SEQ ID NO: 2541320 - RNA, 21 nt, Human
ugaaacuccaccuugcgggga

SEQ ID NO: 2541321 - RNA, 19 nt, Human
ugaaacucguuaauuugua

SEQ ID NO: 2541322 - RNA, 22 nt, Human
ugaaacugagaugugaacacau

SEQ ID NO: 2541323 - RNA, 12 nt, Human
ugaaacuuggau

SEQ ID NO: 2541324 - RNA, 12 nt, Human
ugaaacuuauuu

SEQ ID NO: 2541325 - RNA, 16 nt, Human
ugaaacuuacacacaa

SEQ ID NO: 2541326 - RNA, 18 nt, Human
ugaaacuggcacugaauu

SEQ ID NO: 2541327 - RNA, 16 nt, Human
ugaaaaaugugcaaaa

SEQ ID NO: 2541328 - RNA, 18 nt, Human
ugaaaaaucggcuuacca

SEQ ID NO: 2541329 - RNA, 13 nt, Human
ugaaaaauuccua

SEQ ID NO: 2541330 - RNA, 20 nt, Human
ugaaaaaugugcaaaacagc

SEQ ID NO: 2541331 - RNA, 12 nt, Human
ugaaaaauuccu

SEQ ID NO: 2541332 - RNA, 22 nt, Human
ugaaaaauuccuauugugauuu

SEQ ID NO: 2541333 - RNA, 20 nt, Human
ugaaaaauuccuauugugau

SEQ ID NO: 2541334 - RNA, 19 nt, Human
ugaaaaauuccuuuguguu

SEQ ID NO: 2541335 - RNA, 13 nt, Human
ugaaaaauucuca

SEQ ID NO: 2541336 - RNA, 18 nt, Human
ugaaaaauuuaagcauug

SEQ ID NO: 2541337 - RNA, 19 nt, Human
ugaaaaauuuaagcauugu

SEQ ID NO: 2541338 - RNA, 20 nt, Human
ugaaaagcuccauuuuuagu

SEQ ID NO: 2541339 - RNA, 20 nt, Human
ugaaaaaggaggaagagaaa

SEQ ID NO: 2541340 - RNA, 22 nt, Human
ugaaaaaggaggaagagaaaaa

SEQ ID NO: 2541341 - RNA, 22 nt, Human
ugaaaaaguucugcagauaaac

SEQ ID NO: 2541342 - RNA, 22 nt, Human
ugaaaaaguauccugcuucuga

SEQ ID NO: 2541343 - RNA, 20 nt, Human
ugaaaauaugauguuucaca

SEQ ID NO: 2541344 - RNA, 11 nt, Human
ugaaaauauuu

SEQ ID NO: 2541345 - RNA, 12 nt, Human
ugaaaauauuua

SEQ ID NO: 2541346 - RNA, 13 nt, Human
ugaaaauauuuaa

SEQ ID NO: 2541347 - RNA, 14 nt, Human
ugaaaauauuuaaa

SEQ ID NO: 2541348 - RNA, 16 nt, Human
ugaaaaucgugacaac

SEQ ID NO: 2541349 - RNA, 20 nt, Human
ugaaaaguuacuaccuguca

SEQ ID NO: 2541350 - RNA, 14 nt, Human
ugaaaagucaaacu

SEQ ID NO: 2541351 - RNA, 12 nt, Human
ugaaaagucaaa

SEQ ID NO: 2541352 - RNA, 14 nt, Human
ugaaaauauaacca

SEQ ID NO: 2541353 - RNA, 16 nt, Human
ugaaaauauaaccagc

SEQ ID NO: 2541354 - RNA, 23 nt, Human
ugaaaaggugaccuugcaacuuc

SEQ ID NO: 2541355 - RNA, 16 nt, Human
ugaaaaggugaccuug

SEQ ID NO: 2541356 - RNA, 17 nt, Human
ucuuucucugccaguga

SEQ ID NO: 2541357 - RNA, 16 nt, Human
ucuuucucugccagug

SEQ ID NO: 2541358 - RNA, 15 nt, Human
ucuuucucugccagu

SEQ ID NO: 2541359 - RNA, 13 nt, Human
ucuuucucugcca

SEQ ID NO: 2541360 - RNA, 12 nt, Human
ucuuucucugcc

SEQ ID NO: 2541361 - RNA, 11 nt, Human
ucuuucucugc

SEQ ID NO: 2541362 - RNA, 14 nt, Human
ucuuucugauaacu

SEQ ID NO: 2541363 - RNA, 20 nt, Human
ucuuucugauaacuagaugg

SEQ ID NO: 2541364 - RNA, 23 nt, Human
ucuuucugauaacuagauggugc

SEQ ID NO: 2541365 - RNA, 21 nt, Human
ucuuucugagcacacuuuagu

SEQ ID NO: 2541366 - RNA, 19 nt, Human
ucuuucugagcacacuuua

SEQ ID NO: 2541367 - RNA, 18 nt, Human
ucuuucugagcacacuuu

SEQ ID NO: 2541368 - RNA, 20 nt, Human
ucuuucuggcuaugcauuug

SEQ ID NO: 2541369 - RNA, 21 nt, Human
ucuuucuggcuaugcauuuga

SEQ ID NO: 2541370 - RNA, 10 nt, Human
ucuuucugua

SEQ ID NO: 2541371 - RNA, 16 nt, Human
ucuuucugaugucaaa

SEQ ID NO: 2541372 - RNA, 13 nt, Human
ucuuucuuagaaa

SEQ ID NO: 2541373 - RNA, 14 nt, Human
ucuuucugucccuu

SEQ ID NO: 2541374 - RNA, 13 nt, Human
ucuuucugucccu

SEQ ID NO: 2541375 - RNA, 14 nt, Human
ucuuucuguauuga

SEQ ID NO: 2541376 - RNA, 15 nt, Human
agagacaggagggca

SEQ ID NO: 2541377 - RNA, 20 nt, Human
ucuuucuuacaaggaaggug

SEQ ID NO: 2541378 - RNA, 14 nt, Human
agagacaggagggc

SEQ ID NO: 2541379 - RNA, 23 nt, Human
agagacaggaaaauccucuggcu

SEQ ID NO: 2541380 - RNA, 17 nt, Human
agagacauacuugaagg

SEQ ID NO: 2541381 - RNA, 22 nt, Human
agagacauacuugaagggccag

SEQ ID NO: 2541382 - RNA, 23 nt, Human
agagacauacuugaagggccaga

SEQ ID NO: 2541383 - RNA, 23 nt, Human
agagacaguugggugagaacaac

SEQ ID NO: 2541384 - RNA, 12 nt, Human
agagacagucac

SEQ ID NO: 2541385 - RNA, 20 nt, Human
agagacaguugggugagaac

SEQ ID NO: 2541386 - RNA, 22 nt, Human
agagacaguugggugagaacaa

SEQ ID NO: 2541387 - RNA, 20 nt, Human
agagacaggcccaagagaug

SEQ ID NO: 2541388 - RNA, 15 nt, Human
agagacaggcccaag

SEQ ID NO: 2541389 - RNA, 18 nt, Human
agagacaggcccaagaga

SEQ ID NO: 2541390 - RNA, 22 nt, Human
ucuuuggucuacacugugcuga

SEQ ID NO: 2541391 - RNA, 14 nt, Human
agagacauuccucc

SEQ ID NO: 2541392 - RNA, 12 nt, Human
agagacauuccu

SEQ ID NO: 2541393 - RNA, 17 nt, Human
ucuuugguggcuuugca

SEQ ID NO: 2541394 - RNA, 18 nt, Human
ucuuuguaagaguguaga

SEQ ID NO: 2541395 - RNA, 14 nt, Human
ucuuuguaagagug

SEQ ID NO: 2541396 - RNA, 13 nt, Human
ucuuuguaagagu

SEQ ID NO: 2541397 - RNA, 13 nt, Human
ucuuuguguagcu

SEQ ID NO: 2541398 - RNA, 15 nt, Human
ucuuuguguagcuuu

SEQ ID NO: 2541399 - RNA, 18 nt, Human
ucuuuguguagcuuugcu

SEQ ID NO: 2541400 - RNA, 13 nt, Human
ucuuuuaaaagac

SEQ ID NO: 2541401 - RNA, 19 nt, Human
ucuuuuaaaaauucaaaug

SEQ ID NO: 2541402 - RNA, 18 nt, Human
ucuuuuaaaaauucaaau

SEQ ID NO: 2541403 - RNA, 22 nt, Human
ucuuuguucucagcucccccug

SEQ ID NO: 2541404 - RNA, 18 nt, Human
ucuuuguuggaaaagaau

SEQ ID NO: 2541405 - RNA, 20 nt, Human
ucuuuguucucagcuccccc

SEQ ID NO: 2541406 - RNA, 19 nt, Human
ucuuuguucucagcucccc

SEQ ID NO: 2541407 - RNA, 18 nt, Human
ucuuuguucucagcuccc

SEQ ID NO: 2541408 - RNA, 17 nt, Human
ucuuuguucucagcucc

SEQ ID NO: 2541409 - RNA, 16 nt, Human
ucuuuguucucagcuc

SEQ ID NO: 2541410 - RNA, 12 nt, Human
ucuuuguucuca

SEQ ID NO: 2541411 - RNA, 23 nt, Human
ucuuuguucauagcccaguagac

SEQ ID NO: 2541412 - RNA, 16 nt, Human
ucuuuguucauagccc

SEQ ID NO: 2541413 - RNA, 21 nt, Human
ucuuuguuaucaaacuucagc

SEQ ID NO: 2541414 - RNA, 15 nt, Human
ucuuuguuacaggca

SEQ ID NO: 2541415 - RNA, 16 nt, Human
ucuuuuaaaagacaag

SEQ ID NO: 2541416 - RNA, 14 nt, Human
ucuuuuaaaagaca

SEQ ID NO: 2541417 - RNA, 21 nt, Human
ucuuuuaaaagacaagacuuc

SEQ ID NO: 2541418 - RNA, 12 nt, Human
ucuuuuacaacu

SEQ ID NO: 2541419 - RNA, 14 nt, Human
ucuuuuacauucug

SEQ ID NO: 2541420 - RNA, 18 nt, Human
ucuuuuacucaugaucuu

SEQ ID NO: 2541421 - RNA, 14 nt, Human
ugaaaaaaaaguuu

SEQ ID NO: 2541422 - RNA, 16 nt, Human
ugaaaaaaaaguuuca

SEQ ID NO: 2541423 - RNA, 17 nt, Human
ugaaaaaaaguuuacaa

SEQ ID NO: 2541424 - RNA, 16 nt, Human
ugaaaaaaaguuuaca

SEQ ID NO: 2541425 - RNA, 21 nt, Human
ugaaaaaaggacaauuucaaa

SEQ ID NO: 2541426 - RNA, 22 nt, Human
ugaaaaaauagagccugaggga

SEQ ID NO: 2541427 - RNA, 18 nt, Human
ugaaaaaaggacaauuuc

SEQ ID NO: 2541428 - RNA, 23 nt, Human
ugaaaaaauauauaucaaauaua

SEQ ID NO: 2541429 - RNA, 18 nt, Human
ugaaaaaauguauaugca

SEQ ID NO: 2541430 - RNA, 12 nt, Human
ugaaaaacuucc

SEQ ID NO: 2541431 - RNA, 23 nt, Human
ugaaaaagcauguacaguguucu

SEQ ID NO: 2541432 - RNA, 21 nt, Human
ugaaaaagcauguacaguguu

SEQ ID NO: 2541433 - RNA, 20 nt, Human
ugaaaaagcauguacagugu

SEQ ID NO: 2541434 - RNA, 18 nt, Human
ugaaaaagcauguacagu

SEQ ID NO: 2541435 - RNA, 16 nt, Human
ugaaaaaggaggaaga

SEQ ID NO: 2541436 - RNA, 22 nt, Human
ugaaaaagaccuuuggagcaaa

SEQ ID NO: 2541437 - RNA, 17 nt, Human
ugaaaaagcauguacag

SEQ ID NO: 2541438 - RNA, 16 nt, Human
ugaaaaagcauguaca

SEQ ID NO: 2541439 - RNA, 15 nt, Human
ugaaaaagcauguac

SEQ ID NO: 2541440 - RNA, 14 nt, Human
ugaaaaagcaugua

SEQ ID NO: 2541441 - RNA, 21 nt, Human
ugaaaaagcagcuaccaggug

SEQ ID NO: 2541442 - RNA, 13 nt, Human
ugaaaaagcaugu

SEQ ID NO: 2541443 - RNA, 15 nt, Human
agagaucaaauggaa

SEQ ID NO: 2541444 - RNA, 18 nt, Human
agagauauuuuaaaauga

SEQ ID NO: 2541445 - RNA, 22 nt, Human
agagaucaaccccuucgcuccu

SEQ ID NO: 2541446 - RNA, 16 nt, Human
agagagaaagccaggc

SEQ ID NO: 2541447 - RNA, 15 nt, Human
agagagaaagccagg

SEQ ID NO: 2541448 - RNA, 22 nt, Human
agagagaaagccaggcagguag

SEQ ID NO: 2541449 - RNA, 20 nt, Human
agagagaacaacuacuguga

SEQ ID NO: 2541450 - RNA, 20 nt, Human
agagauauuuuaaaaugaga

SEQ ID NO: 2541451 - RNA, 17 nt, Human
agagauauuuuaaaaug

SEQ ID NO: 2541452 - RNA, 13 nt, Human
agagauauuuuaa

SEQ ID NO: 2541453 - RNA, 18 nt, Human
agagagaagacccuucuc

SEQ ID NO: 2541454 - RNA, 17 nt, Human
agagauauggcagcgaa

SEQ ID NO: 2541455 - RNA, 13 nt, Human
agagagaaaauaa

SEQ ID NO: 2541456 - RNA, 14 nt, Human
agagagaaaauaaa

SEQ ID NO: 2541457 - RNA, 23 nt, Human
agagacuccugcaggcagccagg

SEQ ID NO: 2541458 - RNA, 15 nt, Human
agagagaaaauaaaa

SEQ ID NO: 2541459 - RNA, 16 nt, Human
agagagaaaauaaaaa

SEQ ID NO: 2541460 - RNA, 17 nt, Human
agagagaaaauaaaaag

SEQ ID NO: 2541461 - RNA, 18 nt, Human
agagagaaaauaaaaagu

SEQ ID NO: 2541462 - RNA, 20 nt, Human
agagagaaaauaaaaaguua

SEQ ID NO: 2541463 - RNA, 22 nt, Human
agagagaaaauaaaaaguuaaa

SEQ ID NO: 2541464 - RNA, 14 nt, Human
agagagaaagccag

SEQ ID NO: 2541465 - RNA, 12 nt, Human
agagagaaaaua

SEQ ID NO: 2541466 - RNA, 21 nt, Human
agagagaaagaaguaggcaug

SEQ ID NO: 2541467 - RNA, 15 nt, Human
agagaugugcaccca

SEQ ID NO: 2541468 - RNA, 14 nt, Human
agagaugugcaccc

SEQ ID NO: 2541469 - RNA, 17 nt, Human
agagaugugcacccaug

SEQ ID NO: 2541470 - RNA, 24 nt, Human
agagaugggagcuccucuccugga

SEQ ID NO: 2541471 - RNA, 21 nt, Human
agagaugggagcuccucuccu

SEQ ID NO: 2541472 - RNA, 20 nt, Human
agagaugggagcuccucucc

SEQ ID NO: 2541473 - RNA, 19 nt, Human
agagaugggagcuccucuc

SEQ ID NO: 2541474 - RNA, 17 nt, Human
agagaugggagcuccuc

SEQ ID NO: 2541475 - RNA, 15 nt, Human
agagaugggagcucc

SEQ ID NO: 2541476 - RNA, 23 nt, Human
agagaugggacugggagggccca

SEQ ID NO: 2541477 - RNA, 19 nt, Human
agagaugggaaugaggugg

SEQ ID NO: 2541478 - RNA, 16 nt, Human
agagaugggacuggga

SEQ ID NO: 2541479 - RNA, 22 nt, Human
agagaugggacugggagggccc

SEQ ID NO: 2541480 - RNA, 20 nt, Human
agagauggccugagaagaga

SEQ ID NO: 2541481 - RNA, 18 nt, Human
agagauggaggaggaggc

SEQ ID NO: 2541482 - RNA, 21 nt, Human
agagaucauccuuuccagcau

SEQ ID NO: 2541483 - RNA, 15 nt, Human
agagauggaggagga

SEQ ID NO: 2541484 - RNA, 19 nt, Human
agagaucaaauggaaagga

SEQ ID NO: 2541485 - RNA, 23 nt, Human
agagcaagacgcugugcugcccu

SEQ ID NO: 2541486 - RNA, 19 nt, Human
agagcaagacgcugugcug

SEQ ID NO: 2541487 - RNA, 20 nt, Human
agagcaaaauugauguguuu

SEQ ID NO: 2541488 - RNA, 13 nt, Human
ugaaagacuguac

SEQ ID NO: 2541489 - RNA, 15 nt, Human
ugaaagacuguacaa

SEQ ID NO: 2541490 - RNA, 14 nt, Human
agagacguguacau

SEQ ID NO: 2541491 - RNA, 15 nt, Human
agagaccuccugccu

SEQ ID NO: 2541492 - RNA, 19 nt, Human
agagaccucaucaggauga

SEQ ID NO: 2541493 - RNA, 16 nt, Human
agagaccucaucagga

SEQ ID NO: 2541494 - RNA, 19 nt, Human
ugaaagaccuucuccaaau

SEQ ID NO: 2541495 - RNA, 12 nt, Human
ugaaagaccuuc

SEQ ID NO: 2541496 - RNA, 17 nt, Human
ugaaagaccuucuccaa

SEQ ID NO: 2541497 - RNA, 16 nt, Human
ugaaagaaaggacucu

SEQ ID NO: 2541498 - RNA, 20 nt, Human
ugaaagaacauggacuugua

SEQ ID NO: 2541499 - RNA, 22 nt, Human
ugaaacuuauuuuuuucugauu

SEQ ID NO: 2541500 - RNA, 21 nt, Human
ugaaacuuauuuuuuucugau

SEQ ID NO: 2541501 - RNA, 23 nt, Human
ugaaacuuauuuuuuucugauug

SEQ ID NO: 2541502 - RNA, 22 nt, Human
agagacuccugcaggcagccag

SEQ ID NO: 2541503 - RNA, 21 nt, Human
agagacuccugcaggcagcca

SEQ ID NO: 2541504 - RNA, 20 nt, Human
agagacuccugcaggcagcc

SEQ ID NO: 2541505 - RNA, 19 nt, Human
agagacuccugcaggcagc

SEQ ID NO: 2541506 - RNA, 18 nt, Human
agagacuccugcaggcag

SEQ ID NO: 2541507 - RNA, 17 nt, Human
agagacuccugcaggca

SEQ ID NO: 2541508 - RNA, 15 nt, Human
agagacuccugcagg

SEQ ID NO: 2541509 - RNA, 16 nt, Human
agagacuccagcuggg

SEQ ID NO: 2541510 - RNA, 19 nt, Human
agagacucagggccccagc

SEQ ID NO: 2541511 - RNA, 20 nt, Human
agagacucagggccccagca

SEQ ID NO: 2541512 - RNA, 20 nt, Human
agagcaggaagcauucagag

SEQ ID NO: 2541513 - RNA, 18 nt, Human
agagcaggaagcauucag

SEQ ID NO: 2541514 - RNA, 21 nt, Human
agagcagcuuuaaacucaggg

SEQ ID NO: 2541515 - RNA, 20 nt, Human
agagcagcuuuaaacucagg

SEQ ID NO: 2541516 - RNA, 23 nt, Human
agagcaggaagcauucagagagc

SEQ ID NO: 2541517 - RNA, 18 nt, Human
agagcagcuuuaaacuca

SEQ ID NO: 2541518 - RNA, 23 nt, Human
agagcagcuucugccacuuccca

SEQ ID NO: 2541519 - RNA, 20 nt, Human
agagcagcuucugccacuuc

SEQ ID NO: 2541520 - RNA, 13 nt, Human
agagcagcuucug

SEQ ID NO: 2541521 - RNA, 23 nt, Human
agagcagcggggcgaagcccagg

SEQ ID NO: 2541522 - RNA, 19 nt, Human
agagcagccuguggcaucu

SEQ ID NO: 2541523 - RNA, 19 nt, Human
agagcagcagugaaaacaa

SEQ ID NO: 2541524 - RNA, 23 nt, Human
agagcagcagugaaaacaagugc

SEQ ID NO: 2541525 - RNA, 12 nt, Human
agagcagccugu

SEQ ID NO: 2541526 - RNA, 16 nt, Human
agagcagccuguggca

SEQ ID NO: 2541527 - RNA, 17 nt, Human
agagcagccuguggcau

SEQ ID NO: 2541528 - RNA, 21 nt, Human
agagcaccuuagacagucccu

SEQ ID NO: 2541529 - RNA, 22 nt, Human
agagcaccuuagacagucccug

SEQ ID NO: 2541530 - RNA, 23 nt, Human
agagcaccuuagacagucccugc

SEQ ID NO: 2541531 - RNA, 21 nt, Human
agagcaccuuccucacuucca

SEQ ID NO: 2541532 - RNA, 20 nt, Human
agagcaccuuccucacuucc

SEQ ID NO: 2541533 - RNA, 14 nt, Human
agagcaccuuccuc

SEQ ID NO: 2541534 - RNA, 14 nt, Human
agagcaacucugag

SEQ ID NO: 2541535 - RNA, 14 nt, Human
agagcaagacucug

SEQ ID NO: 2541536 - RNA, 23 nt, Human
agagcaguuucuguccugcuggu

SEQ ID NO: 2541537 - RNA, 22 nt, Human
agagcaguuucuguccugcugg

SEQ ID NO: 2541538 - RNA, 13 nt, Human
agagccaggcaca

SEQ ID NO: 2541539 - RNA, 19 nt, Human
agagccaggcacacacugu

SEQ ID NO: 2541540 - RNA, 22 nt, Human
agagccaggggggugaggagcu

SEQ ID NO: 2541541 - RNA, 13 nt, Human
agagccagcuccc

SEQ ID NO: 2541542 - RNA, 22 nt, Human
agagccagcccucccuguccuc

SEQ ID NO: 2541543 - RNA, 21 nt, Human
agagccagagaagugacaggg

SEQ ID NO: 2541544 - RNA, 20 nt, Human
agagccagagaagugacagg

SEQ ID NO: 2541545 - RNA, 17 nt, Human
agagcauuacgugagcc

SEQ ID NO: 2541546 - RNA, 18 nt, Human
agagccagagaagugaca

SEQ ID NO: 2541547 - RNA, 23 nt, Human
agagcauccugcuucuaccaugu

SEQ ID NO: 2541548 - RNA, 13 nt, Human
agagccagcaacu

SEQ ID NO: 2541549 - RNA, 12 nt, Human
agagccagcccu

SEQ ID NO: 2541550 - RNA, 13 nt, Human
agagccagcccuc

SEQ ID NO: 2541551 - RNA, 14 nt, Human
agagccagcccucc

SEQ ID NO: 2541552 - RNA, 16 nt, Human
agagccagcccucccu

SEQ ID NO: 2541553 - RNA, 17 nt, Human
agagccagcccucccug

SEQ ID NO: 2541554 - RNA, 20 nt, Human
agagccagcccucccugucc

SEQ ID NO: 2541555 - RNA, 21 nt, Human
agagccagcccucccuguccu

SEQ ID NO: 2541556 - RNA, 22 nt, Human
agagccuuccaggggugggaca

SEQ ID NO: 2541557 - RNA, 17 nt, Human
agagccuuccaggggug

SEQ ID NO: 2541558 - RNA, 15 nt, Human
agagccuuccagggg

SEQ ID NO: 2541559 - RNA, 13 nt, Human
agagccuuccagg

SEQ ID NO: 2541560 - RNA, 17 nt, Human
agagcuagaacauggag

SEQ ID NO: 2541561 - RNA, 21 nt, Human
agagcuacuugggccauagcu

SEQ ID NO: 2541562 - RNA, 16 nt, Human
agagcuacuugggcca

SEQ ID NO: 2541563 - RNA, 20 nt, Human
agagccaggcacacacugug

SEQ ID NO: 2541564 - RNA, 23 nt, Human
agagccaggggggugaggagcug

SEQ ID NO: 2541565 - RNA, 21 nt, Human
agagcuaacccuuaucuguaa

SEQ ID NO: 2541566 - RNA, 19 nt, Human
agagcuagaaccuggagag

SEQ ID NO: 2541567 - RNA, 22 nt, Human
agagcuagaaccuggagaacua

SEQ ID NO: 2541568 - RNA, 18 nt, Human
agagcuagaaccuggaga

SEQ ID NO: 2541569 - RNA, 16 nt, Human
agagcuagaaccugga

SEQ ID NO: 2541570 - RNA, 23 nt, Human
agagcuagaacccggcaggcuag

SEQ ID NO: 2541571 - RNA, 22 nt, Human
agagcuagaacauggagagcua

SEQ ID NO: 2541572 - RNA, 19 nt, Human
agagcuagaacauggagag

SEQ ID NO: 2541573 - RNA, 18 nt, Human
agagcuagaacauggaga

SEQ ID NO: 2541574 - RNA, 20 nt, Human
agagcuagcagcagggaggg

SEQ ID NO: 2541575 - RNA, 16 nt, Human
agagcuagcgcugccg

SEQ ID NO: 2541576 - RNA, 21 nt, Human
agagcuagcgcugccgcaccc

SEQ ID NO: 2541577 - RNA, 22 nt, Human
agagcuagaaccuggagggcua

SEQ ID NO: 2541578 - RNA, 18 nt, Human
agagcuagaaccuggagg

SEQ ID NO: 2541579 - RNA, 13 nt, Human
agagcuagcgcug

SEQ ID NO: 2541580 - RNA, 14 nt, Human
agagcuagcgcugc

SEQ ID NO: 2541581 - RNA, 23 nt, Human
agagcuauuuaauggccggcugg

SEQ ID NO: 2541582 - RNA, 20 nt, Human
agagcucccggcguggugga

SEQ ID NO: 2541583 - RNA, 14 nt, Human
agagcucuccagcu

SEQ ID NO: 2541584 - RNA, 16 nt, Human
agagcucuccagcucc

SEQ ID NO: 2541585 - RNA, 21 nt, Human
agagcugauccagagcacaga

SEQ ID NO: 2541586 - RNA, 19 nt, Human
agagcugauccagagcaca

SEQ ID NO: 2541587 - RNA, 14 nt, Human
agagcugccaccug

SEQ ID NO: 2541588 - RNA, 22 nt, Human
agagcugacacaaaccugccug

SEQ ID NO: 2541589 - RNA, 20 nt, Human
agagcugacacaaaccugcc

SEQ ID NO: 2541590 - RNA, 18 nt, Human
agagcugacacaaaccug

SEQ ID NO: 2541591 - RNA, 15 nt, Human
agagcucuccagcuc

SEQ ID NO: 2541592 - RNA, 18 nt, Human
agagcugauccagagcac

SEQ ID NO: 2541593 - RNA, 17 nt, Human
agagcugauccagagca

SEQ ID NO: 2541594 - RNA, 14 nt, Human
agagcugauccaga

SEQ ID NO: 2541595 - RNA, 13 nt, Human
agagcugauccag

SEQ ID NO: 2541596 - RNA, 23 nt, Human
agagcugacacaggaugaaggca

SEQ ID NO: 2541597 - RNA, 23 nt, Human
agagcugacacaaaccugccugg

SEQ ID NO: 2541598 - RNA, 11 nt, Human
agagcugaggc

SEQ ID NO: 2541599 - RNA, 14 nt, Human
ucuugguauucuua

SEQ ID NO: 2541600 - RNA, 14 nt, Human
ucuugguagagauu

SEQ ID NO: 2541601 - RNA, 22 nt, Human
ucuugguaaauuuccccaacag

SEQ ID NO: 2541602 - RNA, 19 nt, Human
ucuugguccugcugcaguu

SEQ ID NO: 2541603 - RNA, 17 nt, Human
ucuugguccugcugcag

SEQ ID NO: 2541604 - RNA, 15 nt, Human
ucuugguccugcugc

SEQ ID NO: 2541605 - RNA, 14 nt, Human
ucuuuaagaaagua

SEQ ID NO: 2541606 - RNA, 20 nt, Human
ucuuuaacuuaauugcuaug

SEQ ID NO: 2541607 - RNA, 11 nt, Human
ucuuuauauga

SEQ ID NO: 2541608 - RNA, 15 nt, Human
ucuuuauaugaagaa

SEQ ID NO: 2541609 - RNA, 23 nt, Human
ucuuuaaucauuuugccucuuuu

SEQ ID NO: 2541610 - RNA, 14 nt, Human
ucuuuaaucuucag

SEQ ID NO: 2541611 - RNA, 15 nt, Human
ucuuuaaucuucagu

SEQ ID NO: 2541612 - RNA, 15 nt, Human
ucuuuaacucauaaa

SEQ ID NO: 2541613 - RNA, 15 nt, Human
ucuugguagagauuc

SEQ ID NO: 2541614 - RNA, 18 nt, Human
ucuuucuaaugugugaau

SEQ ID NO: 2541615 - RNA, 17 nt, Human
ucuuucgcacagcaguu

SEQ ID NO: 2541616 - RNA, 21 nt, Human
ucuuucuaacuccagugaagu

SEQ ID NO: 2541617 - RNA, 17 nt, Human
ucuuuccugaggcuggg

SEQ ID NO: 2541618 - RNA, 16 nt, Human
ucuuuccugccuucuu

SEQ ID NO: 2541619 - RNA, 14 nt, Human
ucuuuccugccuuc

SEQ ID NO: 2541620 - RNA, 11 nt, Human
ucuuuccuguc

SEQ ID NO: 2541621 - RNA, 18 nt, Human
ucuuuccuguuguuguua

SEQ ID NO: 2541622 - RNA, 13 nt, Human
ucuuuccuugcuc

SEQ ID NO: 2541623 - RNA, 10 nt, Human
ucuuuccuug

SEQ ID NO: 2541624 - RNA, 15 nt, Human
ucuuuccuucuugcc

SEQ ID NO: 2541625 - RNA, 19 nt, Human
ucuuuauugagaaagagca

SEQ ID NO: 2541626 - RNA, 16 nt, Human
ucuuuauugagaaaga

SEQ ID NO: 2541627 - RNA, 15 nt, Human
ucuuuauugagaaag

SEQ ID NO: 2541628 - RNA, 14 nt, Human
ucuuuauugagaaa

SEQ ID NO: 2541629 - RNA, 13 nt, Human
ucuuuauugagaa

SEQ ID NO: 2541630 - RNA, 16 nt, Human
ucuuuauuaaucacua

SEQ ID NO: 2541631 - RNA, 15 nt, Human
ucuuuaugacuguuu

SEQ ID NO: 2541632 - RNA, 24 nt, Human
ucuugggggacagggcuggcccag

SEQ ID NO: 2541633 - RNA, 23 nt, Human
ucuugggggacagggcuggccca

SEQ ID NO: 2541634 - RNA, 19 nt, Human
ucuuggggggguggccgcu

SEQ ID NO: 2541635 - RNA, 22 nt, Human
ucuugggggacagggcuggccc

SEQ ID NO: 2541636 - RNA, 21 nt, Human
ucuugggggacagggcuggcc

SEQ ID NO: 2541637 - RNA, 20 nt, Human
ucuugggggacagggcuggc

SEQ ID NO: 2541638 - RNA, 20 nt, Human
ucuuggggggguggccgcug

SEQ ID NO: 2541639 - RNA, 16 nt, Human
ucuuggguaggcggga

SEQ ID NO: 2541640 - RNA, 16 nt, Human
ucuugggucuaugccu

SEQ ID NO: 2541641 - RNA, 14 nt, Human
ucuugguaagaagc

SEQ ID NO: 2541642 - RNA, 14 nt, Human
ucuugguccugcug

SEQ ID NO: 2541643 - RNA, 17 nt, Human
ucuuggucagauuugaa

SEQ ID NO: 2541644 - RNA, 13 nt, Human
ucuugggaacuga

SEQ ID NO: 2541645 - RNA, 14 nt, Human
ucuugggaacugaa

SEQ ID NO: 2541646 - RNA, 22 nt, Human
ucuugggacuggguuuggaccc

SEQ ID NO: 2541647 - RNA, 16 nt, Human
ucuugggacuggguuu

SEQ ID NO: 2541648 - RNA, 21 nt, Human
ucuugggcagagcuggcucug

SEQ ID NO: 2541649 - RNA, 20 nt, Human
ucuugggcagagcuggcucu

SEQ ID NO: 2541650 - RNA, 19 nt, Human
ucuugggcagagcuggcuc

SEQ ID NO: 2541651 - RNA, 21 nt, Human
ucuuggggacaucucuuugaa

SEQ ID NO: 2541652 - RNA, 17 nt, Human
ucuuggggacaucucuu

SEQ ID NO: 2541653 - RNA, 23 nt, Human
ucuugggcagagcuggcucugag

SEQ ID NO: 2541654 - RNA, 11 nt, Human
ucuugggcccu

SEQ ID NO: 2541655 - RNA, 13 nt, Human
ucuugggcccucc

SEQ ID NO: 2541656 - RNA, 18 nt, Human
ucuuggcagcaccugucu

SEQ ID NO: 2541657 - RNA, 19 nt, Human
ucuuggcagcaccugucuc

SEQ ID NO: 2541658 - RNA, 22 nt, Human
ucuugcaauggcagccuuggca

SEQ ID NO: 2541659 - RNA, 18 nt, Human
ucuugcaauggcagccuu

SEQ ID NO: 2541660 - RNA, 19 nt, Human
ucuugcaauggcagccuug

SEQ ID NO: 2541661 - RNA, 13 nt, Human
ucuuggcucacug

SEQ ID NO: 2541662 - RNA, 19 nt, Human
ucuuggcggcagcagccau

SEQ ID NO: 2541663 - RNA, 18 nt, Human
ucuuggcggcagcagcca

SEQ ID NO: 2541664 - RNA, 15 nt, Human
ucuuggcggcagcag

SEQ ID NO: 2541665 - RNA, 18 nt, Human
ucuuggcccgcacagagc

SEQ ID NO: 2541666 - RNA, 21 nt, Human
ucuuggcccgcacagagcugg

SEQ ID NO: 2541667 - RNA, 13 nt, Human
ucuuggcagucac

SEQ ID NO: 2541668 - RNA, 20 nt, Human
ucuugggaaauaugaaugcc

SEQ ID NO: 2541669 - RNA, 19 nt, Human
ucuugggaaauaugaaugc

SEQ ID NO: 2541670 - RNA, 14 nt, Human
ucuugggaaauaug

SEQ ID NO: 2541671 - RNA, 12 nt, Human
ucuugggaaaua

SEQ ID NO: 2541672 - RNA, 16 nt, Human
ucuuggcuuucauguu

SEQ ID NO: 2541673 - RNA, 15 nt, Human
ucuuggcuuucaugu

SEQ ID NO: 2541674 - RNA, 11 nt, Human
ucuugggaaau

SEQ ID NO: 2541675 - RNA, 19 nt, Human
ucuuggcuuacugcagccu

SEQ ID NO: 2541676 - RNA, 17 nt, Human
ucuuggcuuggugagga

SEQ ID NO: 2541677 - RNA, 16 nt, Human
ucuugagccuugaacu

SEQ ID NO: 2541678 - RNA, 20 nt, Human
ucuugagccuugaacuuuga

SEQ ID NO: 2541679 - RNA, 14 nt, Human
ucuugagcaguggc

SEQ ID NO: 2541680 - RNA, 17 nt, Human
ucuugagcaaguuccuu

SEQ ID NO: 2541681 - RNA, 16 nt, Human
ucuugagaugucuucu

SEQ ID NO: 2541682 - RNA, 13 nt, Human
ucuugagccuggg

SEQ ID NO: 2541683 - RNA, 16 nt, Human
ucuugagccugggagg

SEQ ID NO: 2541684 - RNA, 16 nt, Human
ucuugacuacagucag

SEQ ID NO: 2541685 - RNA, 21 nt, Human
agacucagggccccagcacua

SEQ ID NO: 2541686 - RNA, 18 nt, Human
agacucagggccccagca

SEQ ID NO: 2541687 - RNA, 20 nt, Human
agacucagggccccagcacu

SEQ ID NO: 2541688 - RNA, 23 nt, Human
agacucaggccaagaaacgucuu

SEQ ID NO: 2541689 - RNA, 12 nt, Human
agacucagggcc

SEQ ID NO: 2541690 - RNA, 16 nt, Human
agacucagggccccag

SEQ ID NO: 2541691 - RNA, 17 nt, Human
agacucagggccccagc

SEQ ID NO: 2541692 - RNA, 16 nt, Human
agacucaccucugccu

SEQ ID NO: 2541693 - RNA, 17 nt, Human
agacucaccucugccuc

SEQ ID NO: 2541694 - RNA, 18 nt, Human
agacucaccucugccuca

SEQ ID NO: 2541695 - RNA, 15 nt, Human
agacucagacuccau

SEQ ID NO: 2541696 - RNA, 19 nt, Human
agacucaggccaagaaacg

SEQ ID NO: 2541697 - RNA, 20 nt, Human
agacucaggccaagaaacgu

SEQ ID NO: 2541698 - RNA, 19 nt, Human
agacucaccucugccucaa

SEQ ID NO: 2541699 - RNA, 18 nt, Human
ucuugauguggugaggca

SEQ ID NO: 2541700 - RNA, 16 nt, Human
ucuugauguugcuuag

SEQ ID NO: 2541701 - RNA, 21 nt, Human
ucuugaugccuggcggggugg

SEQ ID NO: 2541702 - RNA, 14 nt, Human
ucuugauuauccau

SEQ ID NO: 2541703 - RNA, 23 nt, Human
ucuugauuauccauauugaguca

SEQ ID NO: 2541704 - RNA, 13 nt, Human
ucuugauucauaa

SEQ ID NO: 2541705 - RNA, 20 nt, Human
ucuugagguacucugcacau

SEQ ID NO: 2541706 - RNA, 20 nt, Human
ucuugaguuugucgcucaug

SEQ ID NO: 2541707 - RNA, 14 nt, Human
ucuugaguuugucg

SEQ ID NO: 2541708 - RNA, 13 nt, Human
ucuugaguuuguc

SEQ ID NO: 2541709 - RNA, 22 nt, Human
ucuugagcaguggcugguccag

SEQ ID NO: 2541710 - RNA, 15 nt, Human
ucuugaggccaggag

SEQ ID NO: 2541711 - RNA, 16 nt, Human
ucuugaggccaggagu

SEQ ID NO: 2541712 - RNA, 14 nt, Human
ucuugagggagcuu

SEQ ID NO: 2541713 - RNA, 20 nt, Human
ucuucugggagggcagcagg

SEQ ID NO: 2541714 - RNA, 16 nt, Human
agacuauucaaacagu

SEQ ID NO: 2541715 - RNA, 15 nt, Human
agacuauucaaacag

SEQ ID NO: 2541716 - RNA, 12 nt, Human
agacuauucaaa

SEQ ID NO: 2541717 - RNA, 14 nt, Human
agacuauucaaaca

SEQ ID NO: 2541718 - RNA, 23 nt, Human
agaccuucuccuucaccuuuguc

SEQ ID NO: 2541719 - RNA, 21 nt, Human
agaccuucuccuucaccuuug

SEQ ID NO: 2541720 - RNA, 20 nt, Human
agaccuuguucacacucuca

SEQ ID NO: 2541721 - RNA, 16 nt, Human
agaccuuguucacacu

SEQ ID NO: 2541722 - RNA, 22 nt, Human
agaccuuguuacuucugaggua

SEQ ID NO: 2541723 - RNA, 21 nt, Human
agaccuuguuacuucugaggu

SEQ ID NO: 2541724 - RNA, 19 nt, Human
agaccuuguuacuucugag

SEQ ID NO: 2541725 - RNA, 18 nt, Human
agaccuuguguguaugug

SEQ ID NO: 2541726 - RNA, 15 nt, Human
agaccuuguguguau

SEQ ID NO: 2541727 - RNA, 18 nt, Human
agaccuuguuacuucuga

SEQ ID NO: 2541728 - RNA, 16 nt, Human
agaccuucuccaaaug

SEQ ID NO: 2541729 - RNA, 18 nt, Human
agaccuucuccaaaugag

SEQ ID NO: 2541730 - RNA, 23 nt, Human
agaccuuggaucagaugaacucu

SEQ ID NO: 2541731 - RNA, 19 nt, Human
agaccuucuccaaaugaga

SEQ ID NO: 2541732 - RNA, 18 nt, Human
agaccuucuccuucaccu

SEQ ID NO: 2541733 - RNA, 15 nt, Human
agaccuucuccuuca

SEQ ID NO: 2541734 - RNA, 18 nt, Human
agaccuucuaggacgcca

SEQ ID NO: 2541735 - RNA, 23 nt, Human
agaccuuccauaaugcuacuguc

SEQ ID NO: 2541736 - RNA, 22 nt, Human
agaccuuccauaaugcuacugu

SEQ ID NO: 2541737 - RNA, 13 nt, Human
agaccuuccauaa

SEQ ID NO: 2541738 - RNA, 16 nt, Human
agaccuucaccaaaca

SEQ ID NO: 2541739 - RNA, 21 nt, Human
agaccuguugguuccaagccc

SEQ ID NO: 2541740 - RNA, 19 nt, Human
agaccuguuagcagacagg

SEQ ID NO: 2541741 - RNA, 11 nt, Human
agaccuucucc

SEQ ID NO: 2541742 - RNA, 11 nt, Human
agaccuggcag

SEQ ID NO: 2541743 - RNA, 14 nt, Human
agaccuggcagcuc

SEQ ID NO: 2541744 - RNA, 15 nt, Human
agaccuggcagcucu

SEQ ID NO: 2541745 - RNA, 16 nt, Human
agaccuggcagcucug

SEQ ID NO: 2541746 - RNA, 16 nt, Human
agaccccuggccuccg

SEQ ID NO: 2541747 - RNA, 14 nt, Human
agaccccuggccuc

SEQ ID NO: 2541748 - RNA, 13 nt, Human
agaccccuggccu

SEQ ID NO: 2541749 - RNA, 12 nt, Human
agaccccuggcc

SEQ ID NO: 2541750 - RNA, 22 nt, Human
agaccuggcaaggacacagaug

SEQ ID NO: 2541751 - RNA, 22 nt, Human
agaccuggagccccuggguggg

SEQ ID NO: 2541752 - RNA, 13 nt, Human
agaccuguaauca

SEQ ID NO: 2541753 - RNA, 23 nt, Human
agaccuggcagcucuggacagcc

SEQ ID NO: 2541754 - RNA, 17 nt, Human
agaccuggcagcucugg

SEQ ID NO: 2541755 - RNA, 18 nt, Human
agaccuggcagcucugga

SEQ ID NO: 2541756 - RNA, 15 nt, Human
agaccuguccuccug

SEQ ID NO: 2541757 - RNA, 17 nt, Human
agaccuguccuccuggu

SEQ ID NO: 2541758 - RNA, 18 nt, Human
agaccuguuagcagacag

SEQ ID NO: 2541759 - RNA, 18 nt, Human
ucuuccugcaaggacuac

SEQ ID NO: 2541760 - RNA, 18 nt, Human
ucuuccugaguggugcca

SEQ ID NO: 2541761 - RNA, 14 nt, Human
ucuuccugaguggu

SEQ ID NO: 2541762 - RNA, 15 nt, Human
ucuuccugacacuuu

SEQ ID NO: 2541763 - RNA, 16 nt, Human
ucuuccugacacuuua

SEQ ID NO: 2541764 - RNA, 13 nt, Human
ucuuccugacacu

SEQ ID NO: 2541765 - RNA, 20 nt, Human
ucuucucucucaauuuuauc

SEQ ID NO: 2541766 - RNA, 20 nt, Human
ucuucucuagcuggugguuu

SEQ ID NO: 2541767 - RNA, 13 nt, Human
ucuucucuuccug

SEQ ID NO: 2541768 - RNA, 19 nt, Human
agaauauuuuaaguauugc

SEQ ID NO: 2541769 - RNA, 21 nt, Human
ucuucucuggcgacaguuuuc

SEQ ID NO: 2541770 - RNA, 14 nt, Human
ucuuccucugaggc

SEQ ID NO: 2541771 - RNA, 13 nt, Human
ucuuccucugagg

SEQ ID NO: 2541772 - RNA, 16 nt, Human
ucuuccucugaggcug

SEQ ID NO: 2541773 - RNA, 14 nt, Human
ucuuccucugcuga

SEQ ID NO: 2541774 - RNA, 12 nt, Human
ucuuccucugcu

SEQ ID NO: 2541775 - RNA, 11 nt, Human
ucuuccucugc

SEQ ID NO: 2541776 - RNA, 22 nt, Human
ucuuccucccaaguggugccua

SEQ ID NO: 2541777 - RNA, 14 nt, Human
ucuuccucccaagu

SEQ ID NO: 2541778 - RNA, 13 nt, Human
ucuuccucccaag

SEQ ID NO: 2541779 - RNA, 18 nt, Human
ucuuccuccgaggccagu

SEQ ID NO: 2541780 - RNA, 17 nt, Human
ucuuccuccgaggccag

SEQ ID NO: 2541781 - RNA, 15 nt, Human
ucuuccucccucccu

SEQ ID NO: 2541782 - RNA, 18 nt, Human
ucuucccgaaccccaagg

SEQ ID NO: 2541783 - RNA, 19 nt, Human
ucuucccgaaccccaagga

SEQ ID NO: 2541784 - RNA, 14 nt, Human
ucuuccucccuccc

SEQ ID NO: 2541785 - RNA, 19 nt, Human
ucuucccuacaguugaaaa

SEQ ID NO: 2541786 - RNA, 22 nt, Human
ucuucccuacaguugaaaaaca

SEQ ID NO: 2541787 - RNA, 18 nt, Human
ucuucccccacuccucuu

SEQ ID NO: 2541788 - RNA, 15 nt, Human
ucuuccccuugcccu

SEQ ID NO: 2541789 - RNA, 13 nt, Human
ucuuccccuugcc

SEQ ID NO: 2541790 - RNA, 14 nt, Human
ucuuccccucucag

SEQ ID NO: 2541791 - RNA, 22 nt, Human
ucuuccccuugcccuugcccug

SEQ ID NO: 2541792 - RNA, 16 nt, Human
ucuuccccuugcccuu

SEQ ID NO: 2541793 - RNA, 23 nt, Human
ucuuccccuugcccuugcccuga

SEQ ID NO: 2541794 - RNA, 17 nt, Human
ucuucccgaaccccaag

SEQ ID NO: 2541795 - RNA, 20 nt, Human
ucuuccccagaaaggagacu

SEQ ID NO: 2541796 - RNA, 14 nt, Human
ucuuccccacuccc

SEQ ID NO: 2541797 - RNA, 19 nt, Human
ucuuccccacuccccaccu

SEQ ID NO: 2541798 - RNA, 16 nt, Human
ucuucccaucacugga

SEQ ID NO: 2541799 - RNA, 17 nt, Human
ucuucccaucacuggag

SEQ ID NO: 2541800 - RNA, 20 nt, Human
ucuuccaggcugggagagcc

SEQ ID NO: 2541801 - RNA, 17 nt, Human
ucuuccaggcugggaga

SEQ ID NO: 2541802 - RNA, 15 nt, Human
ucuuccaggcuggga

SEQ ID NO: 2541803 - RNA, 20 nt, Human
ucuucagagacuccugcagg

SEQ ID NO: 2541804 - RNA, 16 nt, Human
ucuuccaucccaggac

SEQ ID NO: 2541805 - RNA, 13 nt, Human
ucuuccauuugca

SEQ ID NO: 2541806 - RNA, 21 nt, Human
ucuucccaggguagcccgccu

SEQ ID NO: 2541807 - RNA, 14 nt, Human
ucuucccaggguag

SEQ ID NO: 2541808 - RNA, 12 nt, Human
ucuucccagggu

SEQ ID NO: 2541809 - RNA, 18 nt, Human
ucuucccaggcuggggcu

SEQ ID NO: 2541810 - RNA, 14 nt, Human
ucuuccauuugcaa

SEQ ID NO: 2541811 - RNA, 21 nt, Human
ucuuccaggcugggagagccu

SEQ ID NO: 2541812 - RNA, 14 nt, Human
ucuucaagaaaucu

SEQ ID NO: 2541813 - RNA, 13 nt, Human
ucuucacaaaauc

SEQ ID NO: 2541814 - RNA, 15 nt, Human
ucuuccaucccagga

SEQ ID NO: 2541815 - RNA, 15 nt, Human
ucuucacaacagauu

SEQ ID NO: 2541816 - RNA, 12 nt, Human
ucuucagagacu

SEQ ID NO: 2541817 - RNA, 18 nt, Human
ucuucagagacuccugca

SEQ ID NO: 2541818 - RNA, 17 nt, Human
ucuucagagacuccugc

SEQ ID NO: 2541819 - RNA, 14 nt, Human
agaaucacuugaac

SEQ ID NO: 2541820 - RNA, 22 nt, Human
agaaucacuucugagaacucau

SEQ ID NO: 2541821 - RNA, 19 nt, Human
ucuucaacugaccagccuc

SEQ ID NO: 2541822 - RNA, 16 nt, Human
ucuucaacugaccagc

SEQ ID NO: 2541823 - RNA, 15 nt, Human
ucuucaacucccugc

SEQ ID NO: 2541824 - RNA, 19 nt, Human
ucuucugcuucagccuccc

SEQ ID NO: 2541825 - RNA, 12 nt, Human
ucuucugcuuca

SEQ ID NO: 2541826 - RNA, 18 nt, Human
ucuucugcuuaggagaga

SEQ ID NO: 2541827 - RNA, 22 nt, Human
ucuucugggagggcagcagggc

SEQ ID NO: 2541828 - RNA, 23 nt, Human
ucuucugggagggcagcagggcu

SEQ ID NO: 2541829 - RNA, 22 nt, Human
ucuucugcuccacccuuggccu

SEQ ID NO: 2541830 - RNA, 23 nt, Human
ucuucugcuccacccuuggccug

SEQ ID NO: 2541831 - RNA, 14 nt, Human
ucuucucuuccugu

SEQ ID NO: 2541832 - RNA, 19 nt, Human
ucuucucuuccuuuuauca

SEQ ID NO: 2541833 - RNA, 21 nt, Human
ucuucucuuccuuuuaucagu

SEQ ID NO: 2541834 - RNA, 19 nt, Human
ucuucugaacucaaacuga

SEQ ID NO: 2541835 - RNA, 21 nt, Human
ucuucugaacuuggcgcugcc

SEQ ID NO: 2541836 - RNA, 15 nt, Human
ucuucucuuccugua

SEQ ID NO: 2541837 - RNA, 13 nt, Human
ucuucugcuccac

SEQ ID NO: 2541838 - RNA, 24 nt, Human
ucuucugaacucaaacugaggaau

SEQ ID NO: 2541839 - RNA, 14 nt, Human
ucuucugcuccacc

SEQ ID NO: 2541840 - RNA, 15 nt, Human
ucuucugcuccaccc

SEQ ID NO: 2541841 - RNA, 16 nt, Human
ucuucugcuccacccu

SEQ ID NO: 2541842 - RNA, 17 nt, Human
ucuucugcuccacccuu

SEQ ID NO: 2541843 - RNA, 19 nt, Human
ucuucugcuccacccuugg

SEQ ID NO: 2541844 - RNA, 20 nt, Human
ucuucugcuccacccuuggc

SEQ ID NO: 2541845 - RNA, 18 nt, Human
ucuucuggguuccuuccu

SEQ ID NO: 2541846 - RNA, 19 nt, Human
ucuucuguauacuguggag

SEQ ID NO: 2541847 - RNA, 14 nt, Human
ucuucuguauuuuu

SEQ ID NO: 2541848 - RNA, 23 nt, Human
ucuucugugauucgguggagacu

SEQ ID NO: 2541849 - RNA, 22 nt, Human
ucuucuguauuuuuuuuucuaa

SEQ ID NO: 2541850 - RNA, 15 nt, Human
ucuucuguacgucug

SEQ ID NO: 2541851 - RNA, 22 nt, Human
agacaguuucuuagcuuuuuaa

SEQ ID NO: 2541852 - RNA, 20 nt, Human
agacaguuucuuagcuuuuu

SEQ ID NO: 2541853 - RNA, 18 nt, Human
agacaguuucuuagcuuu

SEQ ID NO: 2541854 - RNA, 21 nt, Human
agacaguuucuuagcuuuuua

SEQ ID NO: 2541855 - RNA, 18 nt, Human
ucuucuuaagacuuuugg

SEQ ID NO: 2541856 - RNA, 18 nt, Human
ucuucuguuuucuguuuc

SEQ ID NO: 2541857 - RNA, 15 nt, Human
agacaguuucuuagc

SEQ ID NO: 2541858 - RNA, 20 nt, Human
ucuucuguggguuucuaaag

SEQ ID NO: 2541859 - RNA, 13 nt, Human
ucuucuguggacc

SEQ ID NO: 2541860 - RNA, 17 nt, Human
ucuucuguuuucuguuu

SEQ ID NO: 2541861 - RNA, 16 nt, Human
ucuucuguuuucuguu

SEQ ID NO: 2541862 - RNA, 13 nt, Human
ucuucuuaacuua

SEQ ID NO: 2541863 - RNA, 17 nt, Human
agacaucaacagauaaa

SEQ ID NO: 2541864 - RNA, 18 nt, Human
agacaucaacagauaaau

SEQ ID NO: 2541865 - RNA, 17 nt, Human
agacauccauguuugua

SEQ ID NO: 2541866 - RNA, 22 nt, Human
agacauccauaaagaagcaaua

SEQ ID NO: 2541867 - RNA, 19 nt, Human
agacauccauaaagaagca

SEQ ID NO: 2541868 - RNA, 18 nt, Human
agacauccauaaagaagc

SEQ ID NO: 2541869 - RNA, 15 nt, Human
agacauccauaaaga

SEQ ID NO: 2541870 - RNA, 19 nt, Human
agacauaggccaugaaaaa

SEQ ID NO: 2541871 - RNA, 17 nt, Human
agacauaacguuuuucc

SEQ ID NO: 2541872 - RNA, 18 nt, Human
agacauaggccaugaaaa

SEQ ID NO: 2541873 - RNA, 17 nt, Human
agacaucaagcacagaa

SEQ ID NO: 2541874 - RNA, 20 nt, Human
agacaucaagcacagaagga

SEQ ID NO: 2541875 - RNA, 21 nt, Human
agacauagaauuaacacauga

SEQ ID NO: 2541876 - RNA, 19 nt, Human
agacauacuaaccagcaga

SEQ ID NO: 2541877 - RNA, 20 nt, Human
agacauaacguuuuuccuuu

SEQ ID NO: 2541878 - RNA, 14 nt, Human
agacauaacguuuu

SEQ ID NO: 2541879 - RNA, 15 nt, Human
agacccccuggagac

SEQ ID NO: 2541880 - RNA, 19 nt, Human
agacccccuggagacuaac

SEQ ID NO: 2541881 - RNA, 14 nt, Human
agaccccucuggcc

SEQ ID NO: 2541882 - RNA, 19 nt, Human
agacccccggaacaagccu

SEQ ID NO: 2541883 - RNA, 17 nt, Human
agaccccucuggccagg

SEQ ID NO: 2541884 - RNA, 19 nt, Human
agaccccucuggccaggau

SEQ ID NO: 2541885 - RNA, 21 nt, Human
agaccccucuggccaggaugg

SEQ ID NO: 2541886 - RNA, 22 nt, Human
agaccccucuggccaggaugga

SEQ ID NO: 2541887 - RNA, 13 nt, Human
agacccccuggag

SEQ ID NO: 2541888 - RNA, 14 nt, Human
agacccccuggaga

SEQ ID NO: 2541889 - RNA, 20 nt, Human
agacccccagcaacccuccu

SEQ ID NO: 2541890 - RNA, 22 nt, Human
agacauuguuuugccaacauug

SEQ ID NO: 2541891 - RNA, 23 nt, Human
agacccccccccccaacagaaca

SEQ ID NO: 2541892 - RNA, 19 nt, Human
agacauuguuuugccaaca

SEQ ID NO: 2541893 - RNA, 17 nt, Human
agacauugucagcaaau

SEQ ID NO: 2541894 - RNA, 13 nt, Human
agacauugucagc

SEQ ID NO: 2541895 - RNA, 16 nt, Human
agacauugucaauaaa

SEQ ID NO: 2541896 - RNA, 14 nt, Human
agacaucucugcac

SEQ ID NO: 2541897 - RNA, 22 nt, Human
agacauccauguuuguaaaacu

SEQ ID NO: 2541898 - RNA, 21 nt, Human
agacauccauguuuguaaaac

SEQ ID NO: 2541899 - RNA, 18 nt, Human
agacauccauguuuguaa

SEQ ID NO: 2541900 - RNA, 18 nt, Human
agacauguuuuccgugaa

SEQ ID NO: 2541901 - RNA, 16 nt, Human
agacaucucugcaccc

SEQ ID NO: 2541902 - RNA, 17 nt, Human
agacauuccugggcaca

SEQ ID NO: 2541903 - RNA, 22 nt, Human
agacauuaaaucuaugaaguau

SEQ ID NO: 2541904 - RNA, 15 nt, Human
agacauuaaaucuau

SEQ ID NO: 2541905 - RNA, 14 nt, Human
agacauuaaaucua

SEQ ID NO: 2541906 - RNA, 12 nt, Human
agacauuaaauc

SEQ ID NO: 2541907 - RNA, 19 nt, Human
agacauucuuccaaaaaga

SEQ ID NO: 2541908 - RNA, 14 nt, Human
agacauucugccag

SEQ ID NO: 2541909 - RNA, 15 nt, Human
agacauucugccagg

SEQ ID NO: 2541910 - RNA, 15 nt, Human
agacauuggcaccua

SEQ ID NO: 2541911 - RNA, 12 nt, Human
agacauucuguc

SEQ ID NO: 2541912 - RNA, 19 nt, Human
agacauucugccaggcccc

SEQ ID NO: 2541913 - RNA, 13 nt, Human
agacauugucaau

SEQ ID NO: 2541914 - RNA, 15 nt, Human
ugacaaagaaaccca

SEQ ID NO: 2541915 - RNA, 18 nt, Human
ugacaaaauuuguugaaa

SEQ ID NO: 2541916 - RNA, 17 nt, Human
ugacaaagaaacccaag

SEQ ID NO: 2541917 - RNA, 17 nt, Human
ugacaaaccucuaaccc

SEQ ID NO: 2541918 - RNA, 15 nt, Human
ugaauuuuucucuaa

SEQ ID NO: 2541919 - RNA, 13 nt, Human
ugaauuuuucucu

SEQ ID NO: 2541920 - RNA, 22 nt, Human
ugaauuuuuaaaacccauuuaa

SEQ ID NO: 2541921 - RNA, 16 nt, Human
ugaauuuuguugcugu

SEQ ID NO: 2541922 - RNA, 18 nt, Human
ugaauuuuguuuggacuu

SEQ ID NO: 2541923 - RNA, 14 nt, Human
ugaauuuuguugcu

SEQ ID NO: 2541924 - RNA, 23 nt, Human
ugaauuugugaagguggaaauaa

SEQ ID NO: 2541925 - RNA, 19 nt, Human
ugaauuugaaugaaaaauu

SEQ ID NO: 2541926 - RNA, 21 nt, Human
ugaauuuggccugcacuaauu

SEQ ID NO: 2541927 - RNA, 23 nt, Human
ugaauuucuuuugccguuauuaa

SEQ ID NO: 2541928 - RNA, 15 nt, Human
agaucaaauacuuua

SEQ ID NO: 2541929 - RNA, 14 nt, Human
agaucaaauacuuu

SEQ ID NO: 2541930 - RNA, 13 nt, Human
agaucaaauacuu

SEQ ID NO: 2541931 - RNA, 16 nt, Human
agaucaaaauaaaaag

SEQ ID NO: 2541932 - RNA, 14 nt, Human
agaucaaaauaaaa

SEQ ID NO: 2541933 - RNA, 17 nt, Human
agaucaaaauaaaaagu

SEQ ID NO: 2541934 - RNA, 16 nt, Human
agaucaaauggaaagg

SEQ ID NO: 2541935 - RNA, 16 nt, Human
agaucaaauacuuuaa

SEQ ID NO: 2541936 - RNA, 20 nt, Human
agaucaaauacuuuaaagga

SEQ ID NO: 2541937 - RNA, 14 nt, Human
agaucaaauuucac

SEQ ID NO: 2541938 - RNA, 23 nt, Human
agaucaaauuucacgucgucuuc

SEQ ID NO: 2541939 - RNA, 21 nt, Human
ugaauuugugaagguggaaau

SEQ ID NO: 2541940 - RNA, 13 nt, Human
ugaauuugugaag

SEQ ID NO: 2541941 - RNA, 13 nt, Human
ugaauuugaauga

SEQ ID NO: 2541942 - RNA, 15 nt, Human
ugaauuugaaugaaa

SEQ ID NO: 2541943 - RNA, 16 nt, Human
ugaauuugaaugaaaa

SEQ ID NO: 2541944 - RNA, 17 nt, Human
ugaauuugaaugaaaaa

SEQ ID NO: 2541945 - RNA, 18 nt, Human
ugaauuugaaugaaaaau

SEQ ID NO: 2541946 - RNA, 14 nt, Human
ugaauuuggagacu

SEQ ID NO: 2541947 - RNA, 15 nt, Human
ugaauuuggagacuc

SEQ ID NO: 2541948 - RNA, 17 nt, Human
ugaauuuggagacucug

SEQ ID NO: 2541949 - RNA, 20 nt, Human
ugaauuuggagacucugugg

SEQ ID NO: 2541950 - RNA, 20 nt, Human
ugaauuuggccugcacuaau

SEQ ID NO: 2541951 - RNA, 22 nt, Human
ugacacuagcccaaugaaauga

SEQ ID NO: 2541952 - RNA, 23 nt, Human
ugacacuagcccaaugaaaugaa

SEQ ID NO: 2541953 - RNA, 19 nt, Human
ugacacuauaucuguauau

SEQ ID NO: 2541954 - RNA, 18 nt, Human
ugacacuauaucuguaua

SEQ ID NO: 2541955 - RNA, 17 nt, Human
ugacacuauaucuguau

SEQ ID NO: 2541956 - RNA, 22 nt, Human
ugacacuauaucuguauauaaa

SEQ ID NO: 2541957 - RNA, 22 nt, Human
ugacacucccuugggcucccug

SEQ ID NO: 2541958 - RNA, 19 nt, Human
ugacacccauguuucucug

SEQ ID NO: 2541959 - RNA, 24 nt, Human
ugacaccagcuguucugucccuug

SEQ ID NO: 2541960 - RNA, 13 nt, Human
ugacacccauguu

SEQ ID NO: 2541961 - RNA, 23 nt, Human
ugacaccagccuuucucccaggc

SEQ ID NO: 2541962 - RNA, 19 nt, Human
ugacacuagcccaaugaaa

SEQ ID NO: 2541963 - RNA, 21 nt, Human
ugacacuagcccaaugaaaug

SEQ ID NO: 2541964 - RNA, 18 nt, Human
ugacacuagcccaaugaa

SEQ ID NO: 2541965 - RNA, 17 nt, Human
ugacacguccaccccag

SEQ ID NO: 2541966 - RNA, 12 nt, Human
ugacacaugcaa

SEQ ID NO: 2541967 - RNA, 20 nt, Human
ugacacaugcaaggucauuu

SEQ ID NO: 2541968 - RNA, 16 nt, Human
ugacacauggccccuc

SEQ ID NO: 2541969 - RNA, 22 nt, Human
ugacacauggccccucccccug

SEQ ID NO: 2541970 - RNA, 22 nt, Human
ugacacauaugcaccuuguguc

SEQ ID NO: 2541971 - RNA, 21 nt, Human
ugacacauaugcaccuugugu

SEQ ID NO: 2541972 - RNA, 18 nt, Human
ugacacaggucuuuccua

SEQ ID NO: 2541973 - RNA, 12 nt, Human
ugacaccagccu

SEQ ID NO: 2541974 - RNA, 13 nt, Human
ugacaccagccuu

SEQ ID NO: 2541975 - RNA, 15 nt, Human
ugacaccagccuuuc

SEQ ID NO: 2541976 - RNA, 16 nt, Human
ugacaccagccuuucu

SEQ ID NO: 2541977 - RNA, 22 nt, Human
ugacaccagccuuucucccagg

SEQ ID NO: 2541978 - RNA, 18 nt, Human
ugacacacagcucugucc

SEQ ID NO: 2541979 - RNA, 16 nt, Human
ugacacacagcucugu

SEQ ID NO: 2541980 - RNA, 19 nt, Human
ugacaaagacugaguacgu

SEQ ID NO: 2541981 - RNA, 21 nt, Human
ugacaaagaguagacauuucu

SEQ ID NO: 2541982 - RNA, 17 nt, Human
ugacaaaggcaagcacu

SEQ ID NO: 2541983 - RNA, 16 nt, Human
ugacaaagcuuggaag

SEQ ID NO: 2541984 - RNA, 19 nt, Human
ugacaaagaaacccaagug

SEQ ID NO: 2541985 - RNA, 23 nt, Human
ugacacagaaaauguugagaauc

SEQ ID NO: 2541986 - RNA, 19 nt, Human
ugacacacagcucuguccu

SEQ ID NO: 2541987 - RNA, 22 nt, Human
ugacacagcagcuucaccagag

SEQ ID NO: 2541988 - RNA, 16 nt, Human
ugacacaggaugaagg

SEQ ID NO: 2541989 - RNA, 16 nt, Human
ugacacagcagcuuca

SEQ ID NO: 2541990 - RNA, 16 nt, Human
ugacacaggucuuucc

SEQ ID NO: 2541991 - RNA, 17 nt, Human
ugacacaggucuuuccu

SEQ ID NO: 2541992 - RNA, 23 nt, Human
ugacacagucuuggcucacugca

SEQ ID NO: 2541993 - RNA, 22 nt, Human
ugacacagucuuggcucacugc

SEQ ID NO: 2541994 - RNA, 11 nt, Human
agauacuguau

SEQ ID NO: 2541995 - RNA, 22 nt, Human
agauacaguuacucagaauucu

SEQ ID NO: 2541996 - RNA, 14 nt, Human
agauaaucagccuc

SEQ ID NO: 2541997 - RNA, 17 nt, Human
agauaauaugagaauca

SEQ ID NO: 2541998 - RNA, 13 nt, Human
agauacaguuacu

SEQ ID NO: 2541999 - RNA, 20 nt, Human
agauacaggaaaagcugcug

SEQ ID NO: 2542000 - RNA, 18 nt, Human
agauaauauuaaggaaga

SEQ ID NO: 2542001 - RNA, 22 nt, Human
agauaauauuaaggaagacaau

SEQ ID NO: 2542002 - RNA, 15 nt, Human
agauacuguaucaug

SEQ ID NO: 2542003 - RNA, 16 nt, Human
agauacuguaucauga

SEQ ID NO: 2542004 - RNA, 18 nt, Human
agauauuuuaaaaugaga

SEQ ID NO: 2542005 - RNA, 15 nt, Human
agauauuuuaaaaug

SEQ ID NO: 2542006 - RNA, 14 nt, Human
agauauuuauauau

SEQ ID NO: 2542007 - RNA, 23 nt, Human
agauauuuauuguuuauuuauca

SEQ ID NO: 2542008 - RNA, 22 nt, Human
agauacauaugaguguggaagc

SEQ ID NO: 2542009 - RNA, 18 nt, Human
agauacauaugagugugg

SEQ ID NO: 2542010 - RNA, 17 nt, Human
agauauuuauauauauu

SEQ ID NO: 2542011 - RNA, 17 nt, Human
agauauuuauauuuuua

SEQ ID NO: 2542012 - RNA, 20 nt, Human
agauauuuauauuuuuauuu

SEQ ID NO: 2542013 - RNA, 23 nt, Human
agauauuuauauuuuuauuuuau

SEQ ID NO: 2542014 - RNA, 20 nt, Human
agauauuuugcuuugugauu

SEQ ID NO: 2542015 - RNA, 21 nt, Human
agauauuuugcuuugugauuu

SEQ ID NO: 2542016 - RNA, 12 nt, Human
agaucaaaauaa

SEQ ID NO: 2542017 - RNA, 13 nt, Human
agauauuuuuucu

SEQ ID NO: 2542018 - RNA, 18 nt, Human
agaucaaaagguuaauaa

SEQ ID NO: 2542019 - RNA, 18 nt, Human
agauaauacaccacuaca

SEQ ID NO: 2542020 - RNA, 13 nt, Human
agauaauaguuua

SEQ ID NO: 2542021 - RNA, 22 nt, Human
agauaagcaagagagauguuuu

SEQ ID NO: 2542022 - RNA, 15 nt, Human
agauaauaugagaau

SEQ ID NO: 2542023 - RNA, 13 nt, Human
agauaagcaagag

SEQ ID NO: 2542024 - RNA, 16 nt, Human
agauaagcaagagaga

SEQ ID NO: 2542025 - RNA, 17 nt, Human
agauaagcaagagagau

SEQ ID NO: 2542026 - RNA, 20 nt, Human
agauaagcaagagagauguu

SEQ ID NO: 2542027 - RNA, 20 nt, Human
agauaacuguuauuuauaau

SEQ ID NO: 2542028 - RNA, 19 nt, Human
agauaacuguuauuuauaa

SEQ ID NO: 2542029 - RNA, 22 nt, Human
agauaagaaugcugguuuuccu

SEQ ID NO: 2542030 - RNA, 14 nt, Human
agauaacugagaau

SEQ ID NO: 2542031 - RNA, 16 nt, Human
agauaacuguuauuua

SEQ ID NO: 2542032 - RNA, 19 nt, Human
agaguuuuggaugcagugc

SEQ ID NO: 2542033 - RNA, 18 nt, Human
agaguuuuggaugcagug

SEQ ID NO: 2542034 - RNA, 17 nt, Human
agaguuuuggaugcagu

SEQ ID NO: 2542035 - RNA, 13 nt, Human
agaguuuuggaug

SEQ ID NO: 2542036 - RNA, 20 nt, Human
agaguuuuggaugcagugcu

SEQ ID NO: 2542037 - RNA, 21 nt, Human
agauaaccagcuguaacacag

SEQ ID NO: 2542038 - RNA, 13 nt, Human
agauaacuaggaa

SEQ ID NO: 2542039 - RNA, 19 nt, Human
agaguuugaaggaggugag

SEQ ID NO: 2542040 - RNA, 13 nt, Human
agaguuugaagga

SEQ ID NO: 2542041 - RNA, 16 nt, Human
agaguuuguguguugu

SEQ ID NO: 2542042 - RNA, 13 nt, Human
agaguuugugugu

SEQ ID NO: 2542043 - RNA, 19 nt, Human
agaguuuguguguugucuu

SEQ ID NO: 2542044 - RNA, 18 nt, Human
agaguuuguguguugucu

SEQ ID NO: 2542045 - RNA, 22 nt, Human
agaguuuguguguugucuugaa

SEQ ID NO: 2542046 - RNA, 15 nt, Human
ugaauguauuuauuu

SEQ ID NO: 2542047 - RNA, 15 nt, Human
agagucacuggaaca

SEQ ID NO: 2542048 - RNA, 22 nt, Human
agagucagaaguuucugccgca

SEQ ID NO: 2542049 - RNA, 16 nt, Human
agaguuguuacauuuu

SEQ ID NO: 2542050 - RNA, 17 nt, Human
agaguuguuacauuuuu

SEQ ID NO: 2542051 - RNA, 19 nt, Human
agaguuguuacauuuuuaa

SEQ ID NO: 2542052 - RNA, 20 nt, Human
agaguuguuacauuuuuaag

SEQ ID NO: 2542053 - RNA, 21 nt, Human
agagucacacgggggcagcug

SEQ ID NO: 2542054 - RNA, 20 nt, Human
agagucacacgggggcagcu

SEQ ID NO: 2542055 - RNA, 23 nt, Human
ugaauguaugugcacugucacuu

SEQ ID NO: 2542056 - RNA, 13 nt, Human
agaguuuccugaa

SEQ ID NO: 2542057 - RNA, 16 nt, Human
agaguuuaguuguagc

SEQ ID NO: 2542058 - RNA, 24 nt, Human
agagggaggagaaugagccucggc

SEQ ID NO: 2542059 - RNA, 16 nt, Human
agagggaggcaagccc

SEQ ID NO: 2542060 - RNA, 17 nt, Human
agagggaggcaagcccu

SEQ ID NO: 2542061 - RNA, 16 nt, Human
agagggagggagggcu

SEQ ID NO: 2542062 - RNA, 22 nt, Human
agagggacuguucuuuuguccc

SEQ ID NO: 2542063 - RNA, 23 nt, Human
agaggcuucuccgccagccuccu

SEQ ID NO: 2542064 - RNA, 14 nt, Human
agaggcuucuucag

SEQ ID NO: 2542065 - RNA, 13 nt, Human
agagggagaagaa

SEQ ID NO: 2542066 - RNA, 15 nt, Human
agagggagaagaagu

SEQ ID NO: 2542067 - RNA, 14 nt, Human
agagggagaagaag

SEQ ID NO: 2542068 - RNA, 16 nt, Human
agagggagaagcauga

SEQ ID NO: 2542069 - RNA, 19 nt, Human
agagggagaagcaugaaaa

SEQ ID NO: 2542070 - RNA, 13 nt, Human
agagggagagaga

SEQ ID NO: 2542071 - RNA, 12 nt, Human
agagggagagag

SEQ ID NO: 2542072 - RNA, 19 nt, Human
agagggagaagggauggag

SEQ ID NO: 2542073 - RNA, 22 nt, Human
agaggcuucuccgccagccucc

SEQ ID NO: 2542074 - RNA, 21 nt, Human
agaggcuucuccgccagccuc

SEQ ID NO: 2542075 - RNA, 20 nt, Human
agaggcuucuccgccagccu

SEQ ID NO: 2542076 - RNA, 19 nt, Human
agaggcuucuccgccagcc

SEQ ID NO: 2542077 - RNA, 17 nt, Human
agaggcuucuccgccag

SEQ ID NO: 2542078 - RNA, 16 nt, Human
agaggcuucuccgcca

SEQ ID NO: 2542079 - RNA, 12 nt, Human
agaggcuucucc

SEQ ID NO: 2542080 - RNA, 22 nt, Human
agaggcuggugcuguggccagg

SEQ ID NO: 2542081 - RNA, 16 nt, Human
agaggcugguuccaga

SEQ ID NO: 2542082 - RNA, 20 nt, Human
agaggcuuccuucauuuccu

SEQ ID NO: 2542083 - RNA, 22 nt, Human
agaggcuguucccaccaggcug

SEQ ID NO: 2542084 - RNA, 14 nt, Human
agaggcccucgcug

SEQ ID NO: 2542085 - RNA, 19 nt, Human
agaggcccucgcugccagc

SEQ ID NO: 2542086 - RNA, 14 nt, Human
agaggcccucugga

SEQ ID NO: 2542087 - RNA, 18 nt, Human
agaggcccucuggagugg

SEQ ID NO: 2542088 - RNA, 17 nt, Human
agaggcuggaggcaggg

SEQ ID NO: 2542089 - RNA, 19 nt, Human
agaggcuggaggcagggcc

SEQ ID NO: 2542090 - RNA, 21 nt, Human
agaggcuggugcuguggccag

SEQ ID NO: 2542091 - RNA, 16 nt, Human
agaggcuggugcugug

SEQ ID NO: 2542092 - RNA, 14 nt, Human
agaggcuggugcug

SEQ ID NO: 2542093 - RNA, 14 nt, Human
agaggcuggguuca

SEQ ID NO: 2542094 - RNA, 20 nt, Human
agaggcuggaggcagggccu

SEQ ID NO: 2542095 - RNA, 22 nt, Human
agaggcuggaggcagggccuug

SEQ ID NO: 2542096 - RNA, 22 nt, Human
agaggcccccagcccagggcuc

SEQ ID NO: 2542097 - RNA, 21 nt, Human
agaggcccccagcccagggcu

SEQ ID NO: 2542098 - RNA, 20 nt, Human
agaggcccccagcccagggc

SEQ ID NO: 2542099 - RNA, 17 nt, Human
agaggcccccagcccag

SEQ ID NO: 2542100 - RNA, 16 nt, Human
agaggcccccagccca

SEQ ID NO: 2542101 - RNA, 14 nt, Human
agaggcccccagcc

SEQ ID NO: 2542102 - RNA, 23 nt, Human
agaggccccagccucccugaagc

SEQ ID NO: 2542103 - RNA, 13 nt, Human
agaggccccagcc

SEQ ID NO: 2542104 - RNA, 14 nt, Human
agaggccccagccu

SEQ ID NO: 2542105 - RNA, 15 nt, Human
agaggccccagccuc

SEQ ID NO: 2542106 - RNA, 16 nt, Human
agaggccccagccucc

SEQ ID NO: 2542107 - RNA, 12 nt, Human
agaggccccagc

SEQ ID NO: 2542108 - RNA, 18 nt, Human
ugaaaguccagaaacugu

SEQ ID NO: 2542109 - RNA, 14 nt, Human
ugaaaguacauuug

SEQ ID NO: 2542110 - RNA, 15 nt, Human
ugaaagguuuacauu

SEQ ID NO: 2542111 - RNA, 23 nt, Human
ugaaaguacauuuggagacacaa

SEQ ID NO: 2542112 - RNA, 15 nt, Human
ugaaaguauaacuga

SEQ ID NO: 2542113 - RNA, 15 nt, Human
ugaaagucagaugcc

SEQ ID NO: 2542114 - RNA, 18 nt, Human
ugaaagucagaugcccag

SEQ ID NO: 2542115 - RNA, 16 nt, Human
ugaaaguccagaaacu

SEQ ID NO: 2542116 - RNA, 21 nt, Human
agaguauggagcucagagagg

SEQ ID NO: 2542117 - RNA, 14 nt, Human
agaguauggagcuc

SEQ ID NO: 2542118 - RNA, 13 nt, Human
agaguauggagcu

SEQ ID NO: 2542119 - RNA, 14 nt, Human
agaguaugaacacc

SEQ ID NO: 2542120 - RNA, 14 nt, Human
ugaagcauuuuaua

SEQ ID NO: 2542121 - RNA, 13 nt, Human
agaguauaugcac

SEQ ID NO: 2542122 - RNA, 18 nt, Human
agaguauauuauguauuu

SEQ ID NO: 2542123 - RNA, 22 nt, Human
agaguagccgagagccugcucc

SEQ ID NO: 2542124 - RNA, 14 nt, Human
agaguaguccaggu

SEQ ID NO: 2542125 - RNA, 23 nt, Human
agaguagccgagagccugcuccc

SEQ ID NO: 2542126 - RNA, 23 nt, Human
agaguagccaggguguggcccug

SEQ ID NO: 2542127 - RNA, 18 nt, Human
agaguagcauuucauucu

SEQ ID NO: 2542128 - RNA, 15 nt, Human
agaguagcauuucau

SEQ ID NO: 2542129 - RNA, 20 nt, Human
agagguuaucugucccaggu

SEQ ID NO: 2542130 - RNA, 13 nt, Human
agaguagccgaga

SEQ ID NO: 2542131 - RNA, 17 nt, Human
agaguagccgagagccu

SEQ ID NO: 2542132 - RNA, 18 nt, Human
agaguagccgagagccug

SEQ ID NO: 2542133 - RNA, 19 nt, Human
agaguagccgagagccugc

SEQ ID NO: 2542134 - RNA, 16 nt, Human
agagguuaaggugcaa

SEQ ID NO: 2542135 - RNA, 24 nt, Human
agaggugggccagucuguggauca

SEQ ID NO: 2542136 - RNA, 14 nt, Human
agaguagcauuuca

SEQ ID NO: 2542137 - RNA, 17 nt, Human
agagguuaucuguccca

SEQ ID NO: 2542138 - RNA, 18 nt, Human
agagggaggcaagcccug

SEQ ID NO: 2542139 - RNA, 15 nt, Human
agagguuaagguggg

SEQ ID NO: 2542140 - RNA, 22 nt, Human
agaggugugcaagagagggaug

SEQ ID NO: 2542141 - RNA, 23 nt, Human
agaggugugcaagagagggaugc

SEQ ID NO: 2542142 - RNA, 16 nt, Human
agagguggggagcaga

SEQ ID NO: 2542143 - RNA, 15 nt, Human
ugaagcauuuuauaa

SEQ ID NO: 2542144 - RNA, 16 nt, Human
ugaagcauuuuauaaa

SEQ ID NO: 2542145 - RNA, 17 nt, Human
ugaagcauuuuauaaau

SEQ ID NO: 2542146 - RNA, 18 nt, Human
ugaagcauuuuauaaauc

SEQ ID NO: 2542147 - RNA, 14 nt, Human
ugaagccaaguggg

SEQ ID NO: 2542148 - RNA, 15 nt, Human
ugaagccaaagccaa

SEQ ID NO: 2542149 - RNA, 14 nt, Human
ugaagccaaagaaa

SEQ ID NO: 2542150 - RNA, 12 nt, Human
ugaagccaaaga

SEQ ID NO: 2542151 - RNA, 11 nt, Human
ugaagccaaag

SEQ ID NO: 2542152 - RNA, 23 nt, Human
agaguauuggucuccucucagcc

SEQ ID NO: 2542153 - RNA, 22 nt, Human
ugaagcauuuuauaaaucgcuu

SEQ ID NO: 2542154 - RNA, 22 nt, Human
ugaagccaaguggggugcuggg

SEQ ID NO: 2542155 - RNA, 21 nt, Human
ugaagccaaguggggugcugg

SEQ ID NO: 2542156 - RNA, 19 nt, Human
ugaagccaauucagacagg

SEQ ID NO: 2542157 - RNA, 13 nt, Human
ugaagccuuucuu

SEQ ID NO: 2542158 - RNA, 23 nt, Human
ugaagccaaguggggugcuggga

SEQ ID NO: 2542159 - RNA, 16 nt, Human
ugaagccacugaagcu

SEQ ID NO: 2542160 - RNA, 12 nt, Human
ugaagccuuugu

SEQ ID NO: 2542161 - RNA, 18 nt, Human
ugaagccuuucuuuugga

SEQ ID NO: 2542162 - RNA, 20 nt, Human
ugaagcuaucguaaaauuaa

SEQ ID NO: 2542163 - RNA, 22 nt, Human
ugaagcuacugugugugugaau

SEQ ID NO: 2542164 - RNA, 15 nt, Human
ugaagcuaagauuua

SEQ ID NO: 2542165 - RNA, 19 nt, Human
ugaagcuauuuaucuguag

SEQ ID NO: 2542166 - RNA, 14 nt, Human
ugaagcuacugugu

SEQ ID NO: 2542167 - RNA, 19 nt, Human
ugaagcucaccuguugcuu

SEQ ID NO: 2542168 - RNA, 18 nt, Human
ugaagcucaccuguugcu

SEQ ID NO: 2542169 - RNA, 16 nt, Human
ugaagcucacuucugg

SEQ ID NO: 2542170 - RNA, 18 nt, Human
ugaagggccagagccagg

SEQ ID NO: 2542171 - RNA, 19 nt, Human
ugaagggccagagccaggg

SEQ ID NO: 2542172 - RNA, 19 nt, Human
ugaagggggauaugaaugg

SEQ ID NO: 2542173 - RNA, 10 nt, Human
ugaaggggcg

SEQ ID NO: 2542174 - RNA, 23 nt, Human
ugaagcucaccuguugcuuacaa

SEQ ID NO: 2542175 - RNA, 22 nt, Human
ugaaggggccaaggagggugag

SEQ ID NO: 2542176 - RNA, 21 nt, Human
ugaauauggacucaguuuucu

SEQ ID NO: 2542177 - RNA, 19 nt, Human
ugaauaugauuaguaaaga

SEQ ID NO: 2542178 - RNA, 17 nt, Human
ugaauaggcgaucacaa

SEQ ID NO: 2542179 - RNA, 16 nt, Human
ugaauacuuuuuacaa

SEQ ID NO: 2542180 - RNA, 19 nt, Human
ugaauaggcgaucacaacg

SEQ ID NO: 2542181 - RNA, 18 nt, Human
ugaauaggcgaucacaac

SEQ ID NO: 2542182 - RNA, 22 nt, Human
ugaauaugaggcauuuggcauu

SEQ ID NO: 2542183 - RNA, 20 nt, Human
ugaauaugaacggugagcau

SEQ ID NO: 2542184 - RNA, 14 nt, Human
ugaauguaugcuuc

SEQ ID NO: 2542185 - RNA, 19 nt, Human
ugaauguaugcuucauaca

SEQ ID NO: 2542186 - RNA, 20 nt, Human
ugaauguaugcuucauacag

SEQ ID NO: 2542187 - RNA, 23 nt, Human
ugaauguaugcuucauacaggga

SEQ ID NO: 2542188 - RNA, 18 nt, Human
ugaauguaugugcacugu

SEQ ID NO: 2542189 - RNA, 15 nt, Human
ugaauguaugugcac

SEQ ID NO: 2542190 - RNA, 11 nt, Human
ugaauguauuu

SEQ ID NO: 2542191 - RNA, 16 nt, Human
ugaauguauugaacuu

SEQ ID NO: 2542192 - RNA, 14 nt, Human
ugaaugggaaaaga

SEQ ID NO: 2542193 - RNA, 22 nt, Human
ugaauauuuacguuuuuguaaa

SEQ ID NO: 2542194 - RNA, 17 nt, Human
ugaauauuuacguuuuu

SEQ ID NO: 2542195 - RNA, 18 nt, Human
ugaauauuguucauauug

SEQ ID NO: 2542196 - RNA, 18 nt, Human
ugaaugggaaaagagaug

SEQ ID NO: 2542197 - RNA, 15 nt, Human
ugaauguaucaggaa

SEQ ID NO: 2542198 - RNA, 16 nt, Human
ugaauguaucaggaaa

SEQ ID NO: 2542199 - RNA, 14 nt, Human
ugaauaaaugucuu

SEQ ID NO: 2542200 - RNA, 13 nt, Human
ugaauaaaugucu

SEQ ID NO: 2542201 - RNA, 19 nt, Human
ugaauaaauaccucuuagc

SEQ ID NO: 2542202 - RNA, 17 nt, Human
ugaauaaauaccucuua

SEQ ID NO: 2542203 - RNA, 15 nt, Human
ugaauaaauaccucu

SEQ ID NO: 2542204 - RNA, 14 nt, Human
ugaauaaauaccuc

SEQ ID NO: 2542205 - RNA, 23 nt, Human
ugaauaaauaccucuuagcugag

SEQ ID NO: 2542206 - RNA, 12 nt, Human
ugaauaaauguc

SEQ ID NO: 2542207 - RNA, 15 nt, Human
ugaauacuuuauaaa

SEQ ID NO: 2542208 - RNA, 16 nt, Human
ugaauacuguauuuug

SEQ ID NO: 2542209 - RNA, 14 nt, Human
ugaagucacugcac

SEQ ID NO: 2542210 - RNA, 22 nt, Human
ugaaggucacucuuccugcaag

SEQ ID NO: 2542211 - RNA, 14 nt, Human
ugaagucacacagu

SEQ ID NO: 2542212 - RNA, 21 nt, Human
ugaagguaaaauugaaaggca

SEQ ID NO: 2542213 - RNA, 16 nt, Human
ugaauaaagacaccua

SEQ ID NO: 2542214 - RNA, 21 nt, Human
ugaagucacugcacagugcau

SEQ ID NO: 2542215 - RNA, 16 nt, Human
ugaagucacugcacag

SEQ ID NO: 2542216 - RNA, 15 nt, Human
ugaagucacugcaca

SEQ ID NO: 2542217 - RNA, 18 nt, Human
ugaauaaagccugcuuuu

SEQ ID NO: 2542218 - RNA, 18 nt, Human
ugaagucacaucacagga

SEQ ID NO: 2542219 - RNA, 20 nt, Human
ugaauaaagccugcuuuuua

SEQ ID NO: 2542220 - RNA, 16 nt, Human
ugaauaaauaaaugua

SEQ ID NO: 2542221 - RNA, 13 nt, Human
ugaauaaauaccu

SEQ ID NO: 2542222 - RNA, 17 nt, Human
ugaauaaaguugaagcu

SEQ ID NO: 2542223 - RNA, 16 nt, Human
agcaagacgcugugcu

SEQ ID NO: 2542224 - RNA, 13 nt, Human
agcaagacgcugu

SEQ ID NO: 2542225 - RNA, 17 nt, Human
agcaacuuguucguggg

SEQ ID NO: 2542226 - RNA, 12 nt, Human
agcaagaaagaa

SEQ ID NO: 2542227 - RNA, 21 nt, Human
agcaagaagauccuaaaacaa

SEQ ID NO: 2542228 - RNA, 15 nt, Human
agcaagaaagaaacc

SEQ ID NO: 2542229 - RNA, 13 nt, Human
agcaacuuucuua

SEQ ID NO: 2542230 - RNA, 20 nt, Human
agcaacuugucuuuuucugg

SEQ ID NO: 2542231 - RNA, 21 nt, Human
agcaacuugucuuuuucugga

SEQ ID NO: 2542232 - RNA, 23 nt, Human
agcaacuugucuuuuucuggacu

SEQ ID NO: 2542233 - RNA, 16 nt, Human
agcaacugucuauuuc

SEQ ID NO: 2542234 - RNA, 13 nt, Human
agcaacugucuau

SEQ ID NO: 2542235 - RNA, 19 nt, Human
agcaacugcuguuggaagg

SEQ ID NO: 2542236 - RNA, 23 nt, Human
agcaacugaauaaauaccucuua

SEQ ID NO: 2542237 - RNA, 22 nt, Human
agcaacugaauaaauaccucuu

SEQ ID NO: 2542238 - RNA, 21 nt, Human
agcaacugaauaaauaccucu

SEQ ID NO: 2542239 - RNA, 19 nt, Human
agcaacugaauaaauaccu

SEQ ID NO: 2542240 - RNA, 15 nt, Human
agcaacugaauaaau

SEQ ID NO: 2542241 - RNA, 14 nt, Human
agcaacugaauaaa

SEQ ID NO: 2542242 - RNA, 13 nt, Human
agcaacugaauaa

SEQ ID NO: 2542243 - RNA, 12 nt, Human
agcaacugaaua

SEQ ID NO: 2542244 - RNA, 23 nt, Human
agcaacucuaagacuacagcaca

SEQ ID NO: 2542245 - RNA, 16 nt, Human
agcaacucuugauuau

SEQ ID NO: 2542246 - RNA, 20 nt, Human
agcaacucuugauuauccau

SEQ ID NO: 2542247 - RNA, 20 nt, Human
agcaacuguuaugaaauaaa

SEQ ID NO: 2542248 - RNA, 18 nt, Human
agcaacuguuaugaaaua

SEQ ID NO: 2542249 - RNA, 17 nt, Human
agcaacuguuaugaaau

SEQ ID NO: 2542250 - RNA, 13 nt, Human
agcaacuguuaug

SEQ ID NO: 2542251 - RNA, 22 nt, Human
agcaacugucuauuucugcuga

SEQ ID NO: 2542252 - RNA, 21 nt, Human
agcaacugucuauuucugcug

SEQ ID NO: 2542253 - RNA, 20 nt, Human
agcaacugucuauuucugcu

SEQ ID NO: 2542254 - RNA, 17 nt, Human
agcaacugucuauuucu

SEQ ID NO: 2542255 - RNA, 21 nt, Human
agcaacuguuaugaaauaaag

SEQ ID NO: 2542256 - RNA, 15 nt, Human
agcaacuugucuuuu

SEQ ID NO: 2542257 - RNA, 23 nt, Human
agcaacgcaggcccccaggugcc

SEQ ID NO: 2542258 - RNA, 23 nt, Human
agcaaaaaaaaaaaaaagcaucu

SEQ ID NO: 2542259 - RNA, 14 nt, Human
agcaacucuugauu

SEQ ID NO: 2542260 - RNA, 20 nt, Human
agcaacguagcuucuaccau

SEQ ID NO: 2542261 - RNA, 22 nt, Human
agauuuuucucaaaguuuugaa

SEQ ID NO: 2542262 - RNA, 13 nt, Human
agauuuuucucaa

SEQ ID NO: 2542263 - RNA, 16 nt, Human
agauuuuuaacgaaug

SEQ ID NO: 2542264 - RNA, 19 nt, Human
ugagaacuacucagggaau

SEQ ID NO: 2542265 - RNA, 17 nt, Human
ugagaacugcauauguu

SEQ ID NO: 2542266 - RNA, 20 nt, Human
ugagaacugcauauguuucg

SEQ ID NO: 2542267 - RNA, 14 nt, Human
ugagaagaaaacau

SEQ ID NO: 2542268 - RNA, 17 nt, Human
ugagaagaaaacaucua

SEQ ID NO: 2542269 - RNA, 17 nt, Human
ugagaagagggccugug

SEQ ID NO: 2542270 - RNA, 16 nt, Human
ugagaagagggccugu

SEQ ID NO: 2542271 - RNA, 15 nt, Human
ugagaagagggccug

SEQ ID NO: 2542272 - RNA, 23 nt, Human
ugagaagaaaacaucuauucucu

SEQ ID NO: 2542273 - RNA, 18 nt, Human
ugagaagagagaucaaau

SEQ ID NO: 2542274 - RNA, 20 nt, Human
ugagaagcagaggaaggaga

SEQ ID NO: 2542275 - RNA, 21 nt, Human
ugagaagagggccugugggag

SEQ ID NO: 2542276 - RNA, 20 nt, Human
ugagaagagggccuguggga

SEQ ID NO: 2542277 - RNA, 23 nt, Human
ugagaagagggccugugggagcc

SEQ ID NO: 2542278 - RNA, 24 nt, Human
ugagaaguuuuguacagagaauua

SEQ ID NO: 2542279 - RNA, 18 nt, Human
ugagaaguuuuguacaga

SEQ ID NO: 2542280 - RNA, 17 nt, Human
ugagaaguuuuguacag

SEQ ID NO: 2542281 - RNA, 19 nt, Human
ugagaaguccccuuccauc

SEQ ID NO: 2542282 - RNA, 22 nt, Human
ugagaagugaaugcugggacuc

SEQ ID NO: 2542283 - RNA, 21 nt, Human
ugagaagugaaugcugggacu

SEQ ID NO: 2542284 - RNA, 16 nt, Human
ugagaaucaaaacucu

SEQ ID NO: 2542285 - RNA, 19 nt, Human
ugagaauaagagagucaua

SEQ ID NO: 2542286 - RNA, 17 nt, Human
ugagaauaagagaguca

SEQ ID NO: 2542287 - RNA, 17 nt, Human
ugagaaucagaucauuu

SEQ ID NO: 2542288 - RNA, 19 nt, Human
ugagaagugaaugcuggga

SEQ ID NO: 2542289 - RNA, 18 nt, Human
ugagaagugaaugcuggg

SEQ ID NO: 2542290 - RNA, 18 nt, Human
ugagaaguccccuuccau

SEQ ID NO: 2542291 - RNA, 20 nt, Human
ugagaaggcagccaccagcg

SEQ ID NO: 2542292 - RNA, 16 nt, Human
ugagaagguccuuaau

SEQ ID NO: 2542293 - RNA, 17 nt, Human
ugagaaggcagccacca

SEQ ID NO: 2542294 - RNA, 16 nt, Human
ugagaaggcagccacc

SEQ ID NO: 2542295 - RNA, 16 nt, Human
ugagaagauugugaau

SEQ ID NO: 2542296 - RNA, 22 nt, Human
agcaagacgcugugcugcccug

SEQ ID NO: 2542297 - RNA, 21 nt, Human
agcaagacgcugugcugcccu

SEQ ID NO: 2542298 - RNA, 20 nt, Human
agcaagacgcugugcugccc

SEQ ID NO: 2542299 - RNA, 17 nt, Human
agcaagacgcugugcug

SEQ ID NO: 2542300 - RNA, 13 nt, Human
agcaagagcuggc

SEQ ID NO: 2542301 - RNA, 15 nt, Human
agcaagagagauguu

SEQ ID NO: 2542302 - RNA, 12 nt, Human
agcaagagagau

SEQ ID NO: 2542303 - RNA, 21 nt, Human
agcaagauccugucuuuaagg

SEQ ID NO: 2542304 - RNA, 23 nt, Human
agcaagagcuggcaaagguggcu

SEQ ID NO: 2542305 - RNA, 17 nt, Human
agcaagagcuggcaaag

SEQ ID NO: 2542306 - RNA, 23 nt, Human
agcaagacgcugugcugcccugc

SEQ ID NO: 2542307 - RNA, 12 nt, Human
agcaagacucug

SEQ ID NO: 2542308 - RNA, 16 nt, Human
agcaagacuguugcuc

SEQ ID NO: 2542309 - RNA, 24 nt, Human
agauuuuguuuugcuuuuucugac

SEQ ID NO: 2542310 - RNA, 23 nt, Human
agauuuuguuuugcuuuuucuga

SEQ ID NO: 2542311 - RNA, 22 nt, Human
agauuuuguuuugcuuuuucug

SEQ ID NO: 2542312 - RNA, 13 nt, Human
agauuuuuacaaa

SEQ ID NO: 2542313 - RNA, 17 nt, Human
agauuuuucaugauuuu

SEQ ID NO: 2542314 - RNA, 14 nt, Human
agauuuuguuuugc

SEQ ID NO: 2542315 - RNA, 21 nt, Human
agauuuuguuuugcuuuuucu

SEQ ID NO: 2542316 - RNA, 17 nt, Human
agauuuuguuuugcuuu

SEQ ID NO: 2542317 - RNA, 16 nt, Human
agauuuuguuuugcuu

SEQ ID NO: 2542318 - RNA, 22 nt, Human
agauuuugggguuguguuguca

SEQ ID NO: 2542319 - RNA, 16 nt, Human
agauuuugcuuuucca

SEQ ID NO: 2542320 - RNA, 19 nt, Human
agauuuugauagcaaagcg

SEQ ID NO: 2542321 - RNA, 18 nt, Human
agauuuugauagcaaagc

SEQ ID NO: 2542322 - RNA, 15 nt, Human
agauuuugauagcaa

SEQ ID NO: 2542323 - RNA, 14 nt, Human
agauuuugaaugcu

SEQ ID NO: 2542324 - RNA, 13 nt, Human
agauuuucuuuaa

SEQ ID NO: 2542325 - RNA, 21 nt, Human
agauuuugaaauuuuuauuaa

SEQ ID NO: 2542326 - RNA, 20 nt, Human
agauuuucuuuaaaagaaug

SEQ ID NO: 2542327 - RNA, 18 nt, Human
agauuuucuuuaaaagaa

SEQ ID NO: 2542328 - RNA, 17 nt, Human
agauuuucuuuaaaaga

SEQ ID NO: 2542329 - RNA, 14 nt, Human
agauuuucuuuaaa

SEQ ID NO: 2542330 - RNA, 15 nt, Human
agauuuuagguguug

SEQ ID NO: 2542331 - RNA, 14 nt, Human
agauuuuagguguu

SEQ ID NO: 2542332 - RNA, 19 nt, Human
agauuucuugaguuuuguu

SEQ ID NO: 2542333 - RNA, 15 nt, Human
agauuuccagucucc

SEQ ID NO: 2542334 - RNA, 19 nt, Human
agauuggcucacacugaga

SEQ ID NO: 2542335 - RNA, 14 nt, Human
agauuggcucacac

SEQ ID NO: 2542336 - RNA, 18 nt, Human
agauuuccauauaaauau

SEQ ID NO: 2542337 - RNA, 23 nt, Human
agauuuccagucuccaccaggaa

SEQ ID NO: 2542338 - RNA, 20 nt, Human
agauuucucauuugccaaua

SEQ ID NO: 2542339 - RNA, 17 nt, Human
agauuugaacucuucaa

SEQ ID NO: 2542340 - RNA, 22 nt, Human
ugacuucuaaguaaaaccacag

SEQ ID NO: 2542341 - RNA, 23 nt, Human
ugacuucuaaguaaaaccacagc

SEQ ID NO: 2542342 - RNA, 15 nt, Human
ugacuucuaaguaaa

SEQ ID NO: 2542343 - RNA, 19 nt, Human
ugacuuacuguacaugaaa

SEQ ID NO: 2542344 - RNA, 20 nt, Human
agauucauuuuuaaucauga

SEQ ID NO: 2542345 - RNA, 17 nt, Human
agauucauuuuuaauca

SEQ ID NO: 2542346 - RNA, 21 nt, Human
agauucauuauuuuuccacuu

SEQ ID NO: 2542347 - RNA, 21 nt, Human
ugacucgggcuccugugcccu

SEQ ID NO: 2542348 - RNA, 18 nt, Human
agauuccagagaguggcu

SEQ ID NO: 2542349 - RNA, 12 nt, Human
agauucauuuuu

SEQ ID NO: 2542350 - RNA, 15 nt, Human
agauucauccauuua

SEQ ID NO: 2542351 - RNA, 24 nt, Human
ugacuucuaaguaaaaccacagca

SEQ ID NO: 2542352 - RNA, 22 nt, Human
agauucauauuuacuucuuaua

SEQ ID NO: 2542353 - RNA, 23 nt, Human
agauugcuuugauuaauccagaa

SEQ ID NO: 2542354 - RNA, 23 nt, Human
agauuggagaaacccuugaaaag

SEQ ID NO: 2542355 - RNA, 15 nt, Human
agauugcuuaaaaua

SEQ ID NO: 2542356 - RNA, 16 nt, Human
agauugcuuaaaauag

SEQ ID NO: 2542357 - RNA, 13 nt, Human
agauuggaaggaa

SEQ ID NO: 2542358 - RNA, 16 nt, Human
agauucgcuuuccaug

SEQ ID NO: 2542359 - RNA, 22 nt, Human
agauugcugaaauuuuauaugc

SEQ ID NO: 2542360 - RNA, 15 nt, Human
agauucccugagcag

SEQ ID NO: 2542361 - RNA, 17 nt, Human
agauucauuuuucuuuc

SEQ ID NO: 2542362 - RNA, 19 nt, Human
agauuccccauugccuccu

SEQ ID NO: 2542363 - RNA, 24 nt, Human
agauuccccauugccuccuccuuc

SEQ ID NO: 2542364 - RNA, 23 nt, Human
agauuccccauugccuccuccuu

SEQ ID NO: 2542365 - RNA, 22 nt, Human
agauuccccauugccuccuccu

SEQ ID NO: 2542366 - RNA, 21 nt, Human
agauuccccauugccuccucc

SEQ ID NO: 2542367 - RNA, 16 nt, Human
ugacccaugcugcccu

SEQ ID NO: 2542368 - RNA, 12 nt, Human
ugacccaugcug

SEQ ID NO: 2542369 - RNA, 21 nt, Human
ugacccaugcugcccugugag

SEQ ID NO: 2542370 - RNA, 21 nt, Human
ugaccccaaacaccuuccagc

SEQ ID NO: 2542371 - RNA, 15 nt, Human
ugacccaugcugccc

SEQ ID NO: 2542372 - RNA, 14 nt, Human
ugacccaugcugcc

SEQ ID NO: 2542373 - RNA, 20 nt, Human
agauguuuuuaaaaguuuca

SEQ ID NO: 2542374 - RNA, 18 nt, Human
agauguuuuuaaaaguuu

SEQ ID NO: 2542375 - RNA, 22 nt, Human
agauguuuuuaaaaguuucaau

SEQ ID NO: 2542376 - RNA, 16 nt, Human
agauguuuuuaaaagu

SEQ ID NO: 2542377 - RNA, 13 nt, Human
agauguuuuuaaa

SEQ ID NO: 2542378 - RNA, 23 nt, Human
agauguuuuagaguuaacaauga

SEQ ID NO: 2542379 - RNA, 11 nt, Human
agauguuuuag

SEQ ID NO: 2542380 - RNA, 17 nt, Human
agauguuuuacgucugg

SEQ ID NO: 2542381 - RNA, 22 nt, Human
agauguuuuaccguaauaauua

SEQ ID NO: 2542382 - RNA, 24 nt, Human
agauguuugucagauaugauaugu

SEQ ID NO: 2542383 - RNA, 21 nt, Human
agauguuuccagacuuccuug

SEQ ID NO: 2542384 - RNA, 23 nt, Human
agauguuuccagacuuccuugag

SEQ ID NO: 2542385 - RNA, 14 nt, Human
agauguuuccagac

SEQ ID NO: 2542386 - RNA, 14 nt, Human
agauguuucacgaa

SEQ ID NO: 2542387 - RNA, 21 nt, Human
agauguuucuuuuguauguaa

SEQ ID NO: 2542388 - RNA, 18 nt, Human
agauguuucuuuuguaug

SEQ ID NO: 2542389 - RNA, 22 nt, Human
agauguuucuuuuguauguaaa

SEQ ID NO: 2542390 - RNA, 15 nt, Human
agauguuugucagau

SEQ ID NO: 2542391 - RNA, 17 nt, Human
agauguuugucagauau

SEQ ID NO: 2542392 - RNA, 19 nt, Human
agauguuugucagauauga

SEQ ID NO: 2542393 - RNA, 15 nt, Human
agauggaaugcugug

SEQ ID NO: 2542394 - RNA, 13 nt, Human
agauggaaugcug

SEQ ID NO: 2542395 - RNA, 23 nt, Human
agauggaaguugcagugagcuga

SEQ ID NO: 2542396 - RNA, 22 nt, Human
agauggaaguugcagugagcug

SEQ ID NO: 2542397 - RNA, 16 nt, Human
agauggaagcuuccag

SEQ ID NO: 2542398 - RNA, 12 nt, Human
agauggaagcuu

SEQ ID NO: 2542399 - RNA, 20 nt, Human
agauggaaccgcaggaagcu

SEQ ID NO: 2542400 - RNA, 21 nt, Human
agauggaaccgcaggaagcug

SEQ ID NO: 2542401 - RNA, 20 nt, Human
agauguucucucccaggggc

SEQ ID NO: 2542402 - RNA, 21 nt, Human
agauguucucuaucauuuaau

SEQ ID NO: 2542403 - RNA, 18 nt, Human
agauggaaugcuguguua

SEQ ID NO: 2542404 - RNA, 20 nt, Human
agauguucucuaucauuuaa

SEQ ID NO: 2542405 - RNA, 12 nt, Human
agauggacacac

SEQ ID NO: 2542406 - RNA, 16 nt, Human
agauggaggaggaggc

SEQ ID NO: 2542407 - RNA, 17 nt, Human
ugacacuuaaaaauggu

SEQ ID NO: 2542408 - RNA, 16 nt, Human
ugacacuuaaaaaugg

SEQ ID NO: 2542409 - RNA, 18 nt, Human
agaugcagagagccauuu

SEQ ID NO: 2542410 - RNA, 23 nt, Human
ugacacuucagagagcugguagu

SEQ ID NO: 2542411 - RNA, 24 nt, Human
ugacacuucagagagcugguaguu

SEQ ID NO: 2542412 - RNA, 17 nt, Human
ugacacuucagagagcu

SEQ ID NO: 2542413 - RNA, 18 nt, Human
ugacacuucagagagcug

SEQ ID NO: 2542414 - RNA, 19 nt, Human
ugacacuucagagagcugg

SEQ ID NO: 2542415 - RNA, 20 nt, Human
ugacacuucagagagcuggu

SEQ ID NO: 2542416 - RNA, 14 nt, Human
ugacacucccuugg

SEQ ID NO: 2542417 - RNA, 16 nt, Human
ugacacuucagagagc

SEQ ID NO: 2542418 - RNA, 15 nt, Human
agaugcagcuggaaa

SEQ ID NO: 2542419 - RNA, 13 nt, Human
agaugcagcugga

SEQ ID NO: 2542420 - RNA, 13 nt, Human
agaugcagggcag

SEQ ID NO: 2542421 - RNA, 12 nt, Human
agaugcagcugg

SEQ ID NO: 2542422 - RNA, 14 nt, Human
agaugcagcaaaau

SEQ ID NO: 2542423 - RNA, 20 nt, Human
agaugcagagagccauuuug

SEQ ID NO: 2542424 - RNA, 19 nt, Human
agaugcagagagccauuuu

SEQ ID NO: 2542425 - RNA, 14 nt, Human
ugacacuuccaguc

SEQ ID NO: 2542426 - RNA, 21 nt, Human
agaugcagcaaaaugugaaug

SEQ ID NO: 2542427 - RNA, 19 nt, Human
agaugcagcaaaaugugaa

SEQ ID NO: 2542428 - RNA, 16 nt, Human
agaugcaguucugaag

SEQ ID NO: 2542429 - RNA, 16 nt, Human
agaugccgcauuugga

SEQ ID NO: 2542430 - RNA, 16 nt, Human
agaugcagggcaguca

SEQ ID NO: 2542431 - RNA, 21 nt, Human
agaugcccagagggcccaggc

SEQ ID NO: 2542432 - RNA, 22 nt, Human
agaugcccagagggcccaggca

SEQ ID NO: 2542433 - RNA, 12 nt, Human
agaugccccaga

SEQ ID NO: 2542434 - RNA, 11 nt, Human
agaugcccuga

SEQ ID NO: 2542435 - RNA, 17 nt, Human
agaugccccagagcugu

SEQ ID NO: 2542436 - RNA, 12 nt, Human
agaugccuccac

SEQ ID NO: 2542437 - RNA, 13 nt, Human
agaugccuccacc

SEQ ID NO: 2542438 - RNA, 21 nt, Human
agaugccuccaccccccagaa

SEQ ID NO: 2542439 - RNA, 22 nt, Human
agaugccuccaccccccagaac

SEQ ID NO: 2542440 - RNA, 14 nt, Human
agaugccuccaccg

SEQ ID NO: 2542441 - RNA, 15 nt, Human
agaugccuccaccgc

SEQ ID NO: 2542442 - RNA, 16 nt, Human
agaugccuccaccgcu

SEQ ID NO: 2542443 - RNA, 17 nt, Human
agaugccuccaccgcug

SEQ ID NO: 2542444 - RNA, 21 nt, Human
agaugccuccaccgcugccua

SEQ ID NO: 2542445 - RNA, 23 nt, Human
agaugcucuaucuugcucuguaa

SEQ ID NO: 2542446 - RNA, 21 nt, Human
agaugcucuaucuugcucugu

SEQ ID NO: 2542447 - RNA, 18 nt, Human
agaugcucuaucuugcuc

SEQ ID NO: 2542448 - RNA, 17 nt, Human
agaugcucuaucuugcu

SEQ ID NO: 2542449 - RNA, 15 nt, Human
agaugcuccuugggc

SEQ ID NO: 2542450 - RNA, 20 nt, Human
agaugcuccuugggcccuuu

SEQ ID NO: 2542451 - RNA, 20 nt, Human
agaugcugacuguacuccuc

SEQ ID NO: 2542452 - RNA, 18 nt, Human
agaugcugaaacaggaga

SEQ ID NO: 2542453 - RNA, 13 nt, Human
agaugcucuuuua

SEQ ID NO: 2542454 - RNA, 23 nt, Human
agaugcugacuguacuccuccca

SEQ ID NO: 2542455 - RNA, 15 nt, Human
agaugcucuucugug

SEQ ID NO: 2542456 - RNA, 21 nt, Human
agaugcugaaacaggagagaa

SEQ ID NO: 2542457 - RNA, 11 nt, Human
agaugcugaug

SEQ ID NO: 2542458 - RNA, 22 nt, Human
agaugcugaaacaggagagaaa

SEQ ID NO: 2542459 - RNA, 15 nt, Human
agaugcugauguuca

SEQ ID NO: 2542460 - RNA, 14 nt, Human
agaugcugauguuc

SEQ ID NO: 2542461 - RNA, 13 nt, Human
agaugcugauguu

SEQ ID NO: 2542462 - RNA, 17 nt, Human
agauggaaccgcaggaa

SEQ ID NO: 2542463 - RNA, 18 nt, Human
agauggaaccgcaggaag

SEQ ID NO: 2542464 - RNA, 22 nt, Human
agauggaacccuuuuggccccc

SEQ ID NO: 2542465 - RNA, 19 nt, Human
ugaccugaggcccuucucu

SEQ ID NO: 2542466 - RNA, 18 nt, Human
ugaccugaggcccuucuc

SEQ ID NO: 2542467 - RNA, 20 nt, Human
ugacccggaggccacaugag

SEQ ID NO: 2542468 - RNA, 17 nt, Human
ugacccggaggccacau

SEQ ID NO: 2542469 - RNA, 21 nt, Human
ugacccggaggccacaugagu

SEQ ID NO: 2542470 - RNA, 14 nt, Human
ugacccggaggcca

SEQ ID NO: 2542471 - RNA, 22 nt, Human
ugaccccuuuucagcuucugcu

SEQ ID NO: 2542472 - RNA, 21 nt, Human
ugaccccuuuucagcuucugc

SEQ ID NO: 2542473 - RNA, 22 nt, Human
ugaccccaaagagccuggagaa

SEQ ID NO: 2542474 - RNA, 19 nt, Human
ugaccccaaagagccugga

SEQ ID NO: 2542475 - RNA, 22 nt, Human
ugaccccaaacaccuuccagcu

SEQ ID NO: 2542476 - RNA, 13 nt, Human
ugaccccagagga

SEQ ID NO: 2542477 - RNA, 20 nt, Human
ugaccccuccucacuggcca

SEQ ID NO: 2542478 - RNA, 15 nt, Human
ugaccccuccucacu

SEQ ID NO: 2542479 - RNA, 13 nt, Human
ugaccccuccuca

SEQ ID NO: 2542480 - RNA, 23 nt, Human
ugaccccucauagcccucacccu

SEQ ID NO: 2542481 - RNA, 22 nt, Human
ugaccccuccucacuggccauc

SEQ ID NO: 2542482 - RNA, 13 nt, Human
ugaccccugcuca

SEQ ID NO: 2542483 - RNA, 21 nt, Human
ugaccccuccucacuggccau

SEQ ID NO: 2542484 - RNA, 23 nt, Human
ugaccuuccucgcagagaggcca

SEQ ID NO: 2542485 - RNA, 21 nt, Human
ugaccuuccucgcagagaggc

SEQ ID NO: 2542486 - RNA, 20 nt, Human
ugaccuuccucgcagagagg

SEQ ID NO: 2542487 - RNA, 18 nt, Human
ugaccuuccucgcagaga

SEQ ID NO: 2542488 - RNA, 22 nt, Human
ugaccuuaguguuucugugcau

SEQ ID NO: 2542489 - RNA, 19 nt, Human
ugaccuuccaagagccuga

SEQ ID NO: 2542490 - RNA, 20 nt, Human
ugaccuuccaagagccugag

SEQ ID NO: 2542491 - RNA, 23 nt, Human
ugaccuuaguguuucugugcaug

SEQ ID NO: 2542492 - RNA, 18 nt, Human
ugaccuuccaagagccug

SEQ ID NO: 2542493 - RNA, 21 nt, Human
ugaccuuaguguuucugugca

SEQ ID NO: 2542494 - RNA, 16 nt, Human
ugaccuuaguguuucu

SEQ ID NO: 2542495 - RNA, 15 nt, Human
ugaccuuaguguuuc

SEQ ID NO: 2542496 - RNA, 13 nt, Human
ugaccuuacauuu

SEQ ID NO: 2542497 - RNA, 20 nt, Human
ugaccugugagcccagcugg

SEQ ID NO: 2542498 - RNA, 18 nt, Human
ugaccugugaccagcacu

SEQ ID NO: 2542499 - RNA, 22 nt, Human
ugaccugugaccagcacugucu

SEQ ID NO: 2542500 - RNA, 21 nt, Human
ugaccugucaugccccccuca

SEQ ID NO: 2542501 - RNA, 20 nt, Human
ugaccugucaugccccccuc

SEQ ID NO: 2542502 - RNA, 13 nt, Human
ugaccugugacca

SEQ ID NO: 2542503 - RNA, 15 nt, Human
ugaccugugaccagc

SEQ ID NO: 2542504 - RNA, 19 nt, Human
ugaccuguggggauuucuc

SEQ ID NO: 2542505 - RNA, 21 nt, Human
ugaccuguggggauuucuccc

SEQ ID NO: 2542506 - RNA, 22 nt, Human
ugaccuguggggauuucuccca

SEQ ID NO: 2542507 - RNA, 23 nt, Human
ugaccuguggggauuucucccag

SEQ ID NO: 2542508 - RNA, 14 nt, Human
ugaccuguggugca

SEQ ID NO: 2542509 - RNA, 14 nt, Human
ugaccugugucacu

SEQ ID NO: 2542510 - RNA, 15 nt, Human
ugaccugugucacua

SEQ ID NO: 2542511 - RNA, 15 nt, Human
ugaccugaggcugug

SEQ ID NO: 2542512 - RNA, 18 nt, Human
ugaccugaggcuccugug

SEQ ID NO: 2542513 - RNA, 12 nt, Human
ugaccugaggcu

SEQ ID NO: 2542514 - RNA, 12 nt, Human
ugaccugagggc

SEQ ID NO: 2542515 - RNA, 20 nt, Human
ugaccugaggcuccugugcu

SEQ ID NO: 2542516 - RNA, 17 nt, Human
ugaccugaggcuguggu

SEQ ID NO: 2542517 - RNA, 11 nt, Human
ugaccugcagg

SEQ ID NO: 2542518 - RNA, 20 nt, Human
ugaccugcaggccaagagca

SEQ ID NO: 2542519 - RNA, 20 nt, Human
ugacucgggcuccugugccc

SEQ ID NO: 2542520 - RNA, 19 nt, Human
ugacucgggcuccugugcc

SEQ ID NO: 2542521 - RNA, 18 nt, Human
ugacucgggcuccugugc

SEQ ID NO: 2542522 - RNA, 17 nt, Human
ugacucgggcuccugug

SEQ ID NO: 2542523 - RNA, 17 nt, Human
ugacucgggggugggga

SEQ ID NO: 2542524 - RNA, 16 nt, Human
ugacucgggggugggg

SEQ ID NO: 2542525 - RNA, 13 nt, Human
ugacuuacuguac

SEQ ID NO: 2542526 - RNA, 15 nt, Human
ugacuuacuguacau

SEQ ID NO: 2542527 - RNA, 16 nt, Human
ugacuuacuguacaug

SEQ ID NO: 2542528 - RNA, 17 nt, Human
ugacuccucuaagccac

SEQ ID NO: 2542529 - RNA, 21 nt, Human
ugacuccgcuggagguggggc

SEQ ID NO: 2542530 - RNA, 16 nt, Human
ugacuccgcuggaggu

SEQ ID NO: 2542531 - RNA, 22 nt, Human
ugacucccuuaaaauagaaaua

SEQ ID NO: 2542532 - RNA, 21 nt, Human
ugacuccuugugguuuauguc

SEQ ID NO: 2542533 - RNA, 14 nt, Human
ugacuccuuguggu

SEQ ID NO: 2542534 - RNA, 20 nt, Human
ugacuccuaugaucucaggu

SEQ ID NO: 2542535 - RNA, 22 nt, Human
ugacuccuuagagacaucaaaa

SEQ ID NO: 2542536 - RNA, 16 nt, Human
ugacucgggcuccugu

SEQ ID NO: 2542537 - RNA, 15 nt, Human
ugacucgggcuccug

SEQ ID NO: 2542538 - RNA, 21 nt, Human
ugacucgaggguuggguucau

SEQ ID NO: 2542539 - RNA, 23 nt, Human
ugacuccaguggggcaagauuuu

SEQ ID NO: 2542540 - RNA, 18 nt, Human
ugacuccaggagaggagc

SEQ ID NO: 2542541 - RNA, 14 nt, Human
ugacucacccaagc

SEQ ID NO: 2542542 - RNA, 14 nt, Human
ugacuccaggagag

SEQ ID NO: 2542543 - RNA, 20 nt, Human
ugacucacaagaagaccaga

SEQ ID NO: 2542544 - RNA, 11 nt, Human
ugacucaccca

SEQ ID NO: 2542545 - RNA, 12 nt, Human
ugacucacccaa

SEQ ID NO: 2542546 - RNA, 13 nt, Human
ugacucacccaag

SEQ ID NO: 2542547 - RNA, 19 nt, Human
ugacuagugaggaaagauu

SEQ ID NO: 2542548 - RNA, 16 nt, Human
ugacucaaaucuccag

SEQ ID NO: 2542549 - RNA, 14 nt, Human
ugacucaacauguu

SEQ ID NO: 2542550 - RNA, 15 nt, Human
ugacucaacauguua

SEQ ID NO: 2542551 - RNA, 22 nt, Human
ugacucaacauguuacugacca

SEQ ID NO: 2542552 - RNA, 20 nt, Human
ugacuagggauucaggcugc

SEQ ID NO: 2542553 - RNA, 21 nt, Human
ugacuagggauucaggcugcu

SEQ ID NO: 2542554 - RNA, 23 nt, Human
ugacuagggauucaggcugcuug

SEQ ID NO: 2542555 - RNA, 23 nt, Human
ugacucaacauguuacugaccag

SEQ ID NO: 2542556 - RNA, 19 nt, Human
ugacucacaagaagaccag

SEQ ID NO: 2542557 - RNA, 20 nt, Human
ugacucaagugucucagucc

SEQ ID NO: 2542558 - RNA, 17 nt, Human
ugacuagggaaaugauc

SEQ ID NO: 2542559 - RNA, 23 nt, Human
ugacuagaugauggaugccaaua

SEQ ID NO: 2542560 - RNA, 17 nt, Human
ugacuagaggcagggag

SEQ ID NO: 2542561 - RNA, 21 nt, Human
ugacuagaggcagggagggga

SEQ ID NO: 2542562 - RNA, 17 nt, Human
ugacuagggauucaggc

SEQ ID NO: 2542563 - RNA, 18 nt, Human
ugacuagggauucaggcu

SEQ ID NO: 2542564 - RNA, 19 nt, Human
ugacuagggauucaggcug

SEQ ID NO: 2542565 - RNA, 21 nt, Human
ugaccuugaggagucuugugu

SEQ ID NO: 2542566 - RNA, 20 nt, Human
ugaccuugaggagucuugug

SEQ ID NO: 2542567 - RNA, 21 nt, Human
ugacuagaagggccaguccug

SEQ ID NO: 2542568 - RNA, 22 nt, Human
ugaccuugaggagucuugugug

SEQ ID NO: 2542569 - RNA, 17 nt, Human
ugaccuugaacuccugg

SEQ ID NO: 2542570 - RNA, 18 nt, Human
ugaccuugaacuccuggg

SEQ ID NO: 2542571 - RNA, 19 nt, Human
ugaccuugaacuccugggc

SEQ ID NO: 2542572 - RNA, 20 nt, Human
ugaccuugaacuccugggcu

SEQ ID NO: 2542573 - RNA, 13 nt, Human
ugaccuucuggga

SEQ ID NO: 2542574 - RNA, 14 nt, Human
ugaccuucugggaa

SEQ ID NO: 2542575 - RNA, 17 nt, Human
ugaccuucuaggaagcu

SEQ ID NO: 2542576 - RNA, 21 nt, Human
ugauagaaggcuauggggaua

SEQ ID NO: 2542577 - RNA, 21 nt, Human
ugauacuuuugacaacaaauu

SEQ ID NO: 2542578 - RNA, 15 nt, Human
ugauacuuuuaagag

SEQ ID NO: 2542579 - RNA, 15 nt, Human
ugauacuuuugacaa

SEQ ID NO: 2542580 - RNA, 12 nt, Human
ugauaugggucu

SEQ ID NO: 2542581 - RNA, 18 nt, Human
ugauauggcagaagacac

SEQ ID NO: 2542582 - RNA, 17 nt, Human
ugauauggcagaagaca

SEQ ID NO: 2542583 - RNA, 20 nt, Human
ugauauggcagaagacacca

SEQ ID NO: 2542584 - RNA, 19 nt, Human
ugauauggcagaagacacc

SEQ ID NO: 2542585 - RNA, 15 nt, Human
ugauauguaaacaua

SEQ ID NO: 2542586 - RNA, 19 nt, Human
ugauauguugguagauucu

SEQ ID NO: 2542587 - RNA, 17 nt, Human
ugauauugcauaugcau

SEQ ID NO: 2542588 - RNA, 21 nt, Human
ugauauuccccccacuuaaga

SEQ ID NO: 2542589 - RNA, 16 nt, Human
ugauauuccaugaaug

SEQ ID NO: 2542590 - RNA, 18 nt, Human
ugauauuccaugaaugua

SEQ ID NO: 2542591 - RNA, 19 nt, Human
ugauauuccaugaauguau

SEQ ID NO: 2542592 - RNA, 20 nt, Human
ugauauuccaugaauguauc

SEQ ID NO: 2542593 - RNA, 22 nt, Human
ugauauuccaugaauguaucag

SEQ ID NO: 2542594 - RNA, 23 nt, Human
ugauauuaaaggaguuaagagua

SEQ ID NO: 2542595 - RNA, 16 nt, Human
ugauauuaaaggaguu

SEQ ID NO: 2542596 - RNA, 20 nt, Human
ugauauucaaauggacaaac

SEQ ID NO: 2542597 - RNA, 13 nt, Human
ugauauuaaagga

SEQ ID NO: 2542598 - RNA, 21 nt, Human
ugauauguaaacauaauucuu

SEQ ID NO: 2542599 - RNA, 23 nt, Human
ugauauuuucaacgcagcccugc

SEQ ID NO: 2542600 - RNA, 22 nt, Human
ugauauuuucaacgcagcccug

SEQ ID NO: 2542601 - RNA, 21 nt, Human
ugauauuuucaacgcagcccu

SEQ ID NO: 2542602 - RNA, 19 nt, Human
ugauauuuucaacgcagcc

SEQ ID NO: 2542603 - RNA, 19 nt, Human
ugauauuuccccaugguuu

SEQ ID NO: 2542604 - RNA, 23 nt, Human
ugauauuucccuccccuggggac

SEQ ID NO: 2542605 - RNA, 12 nt, Human
agcaucaggcca

SEQ ID NO: 2542606 - RNA, 13 nt, Human
agcaucaggccag

SEQ ID NO: 2542607 - RNA, 15 nt, Human
agcaucacaguuuug

SEQ ID NO: 2542608 - RNA, 17 nt, Human
agcaucacaguuuuggu

SEQ ID NO: 2542609 - RNA, 21 nt, Human
ugaucacggcucacugcagcc

SEQ ID NO: 2542610 - RNA, 20 nt, Human
ugaucacggcucacugcagc

SEQ ID NO: 2542611 - RNA, 22 nt, Human
agcauauucaggaagcucaggg

SEQ ID NO: 2542612 - RNA, 20 nt, Human
agcauauuuguauaguugcu

SEQ ID NO: 2542613 - RNA, 18 nt, Human
agcauauuuguauaguug

SEQ ID NO: 2542614 - RNA, 18 nt, Human
ugaucaauaaaaugugau

SEQ ID NO: 2542615 - RNA, 22 nt, Human
agcauauuuguauaguugcuug

SEQ ID NO: 2542616 - RNA, 21 nt, Human
agcauauuuguauaguugcuu

SEQ ID NO: 2542617 - RNA, 13 nt, Human
agcaucaaacucu

SEQ ID NO: 2542618 - RNA, 14 nt, Human
agcaucaaacucuu

SEQ ID NO: 2542619 - RNA, 21 nt, Human
ugaucaacaucuuuucuugcc

SEQ ID NO: 2542620 - RNA, 18 nt, Human
ugaucaacaucuuuucuu

SEQ ID NO: 2542621 - RNA, 17 nt, Human
ugaucaacaucuuuucu

SEQ ID NO: 2542622 - RNA, 14 nt, Human
ugaucaacaucuuu

SEQ ID NO: 2542623 - RNA, 17 nt, Human
ugaucaagggaauguaa

SEQ ID NO: 2542624 - RNA, 20 nt, Human
ugaucaagggaauguaacug

SEQ ID NO: 2542625 - RNA, 23 nt, Human
ugaucaaauucauuuuuuucacu

SEQ ID NO: 2542626 - RNA, 23 nt, Human
ugaucaacaucuuuucuugccuc

SEQ ID NO: 2542627 - RNA, 19 nt, Human
ugaucacggcucacugcag

SEQ ID NO: 2542628 - RNA, 22 nt, Human
ugaucaagggaauguaacugcu

SEQ ID NO: 2542629 - RNA, 13 nt, Human
ugaucaauaaaau

SEQ ID NO: 2542630 - RNA, 15 nt, Human
ugaucaauaaaaugu

SEQ ID NO: 2542631 - RNA, 16 nt, Human
ugaucaauaaaaugug

SEQ ID NO: 2542632 - RNA, 20 nt, Human
ugaucaaaguccgaggggcg

SEQ ID NO: 2542633 - RNA, 15 nt, Human
ugaucaaauucauuu

SEQ ID NO: 2542634 - RNA, 22 nt, Human
ugaucaaauucauuuuuuucac

SEQ ID NO: 2542635 - RNA, 17 nt, Human
ugaucaaauucauuuuu

SEQ ID NO: 2542636 - RNA, 16 nt, Human
ugaucaaauucauuuu

SEQ ID NO: 2542637 - RNA, 19 nt, Human
ugauauuuuaccucuuauu

SEQ ID NO: 2542638 - RNA, 17 nt, Human
ugauauuuucugugccu

SEQ ID NO: 2542639 - RNA, 20 nt, Human
ugauauuuucugugccugaa

SEQ ID NO: 2542640 - RNA, 18 nt, Human
ugaucaaagccacacucu

SEQ ID NO: 2542641 - RNA, 20 nt, Human
agcaucaggccaggcccucu

SEQ ID NO: 2542642 - RNA, 19 nt, Human
agcaucaggccaggcccuc

SEQ ID NO: 2542643 - RNA, 18 nt, Human
agcaucaggccaggcccu

SEQ ID NO: 2542644 - RNA, 17 nt, Human
agcaucaggccaggccc

SEQ ID NO: 2542645 - RNA, 16 nt, Human
agcaucaggccaggcc

SEQ ID NO: 2542646 - RNA, 14 nt, Human
agcaucaggccagg

SEQ ID NO: 2542647 - RNA, 17 nt, Human
agcaugucgucaaagcu

SEQ ID NO: 2542648 - RNA, 20 nt, Human
agcaugucgucaaagcugaa

SEQ ID NO: 2542649 - RNA, 12 nt, Human
agcauggcugcc

SEQ ID NO: 2542650 - RNA, 18 nt, Human
agcauggcucaaagugca

SEQ ID NO: 2542651 - RNA, 16 nt, Human
agcauguacaguguuc

SEQ ID NO: 2542652 - RNA, 19 nt, Human
agcauguacaguguucugu

SEQ ID NO: 2542653 - RNA, 21 nt, Human
agcauguacugagccuuguaa

SEQ ID NO: 2542654 - RNA, 15 nt, Human
agcauguaggagaau

SEQ ID NO: 2542655 - RNA, 23 nt, Human
agcauguauugugucuuuugcau

SEQ ID NO: 2542656 - RNA, 16 nt, Human
agcauguauugugucu

SEQ ID NO: 2542657 - RNA, 14 nt, Human
agcauguauugugu

SEQ ID NO: 2542658 - RNA, 17 nt, Human
agcaugucuauucagcu

SEQ ID NO: 2542659 - RNA, 19 nt, Human
agcaugucuauucagcuuc

SEQ ID NO: 2542660 - RNA, 22 nt, Human
agcauguauugugucuuuugca

SEQ ID NO: 2542661 - RNA, 17 nt, Human
agcauguggcauguuca

SEQ ID NO: 2542662 - RNA, 19 nt, Human
agcauguguauuuccagug

SEQ ID NO: 2542663 - RNA, 16 nt, Human
agcauguugagccagg

SEQ ID NO: 2542664 - RNA, 18 nt, Human
agcauguggcauguucau

SEQ ID NO: 2542665 - RNA, 16 nt, Human
agcauguguugaaaaa

SEQ ID NO: 2542666 - RNA, 17 nt, Human
agcauguuucauguuuu

SEQ ID NO: 2542667 - RNA, 14 nt, Human
agcauguuucaugu

SEQ ID NO: 2542668 - RNA, 18 nt, Human
agcauguugcugaggagu

SEQ ID NO: 2542669 - RNA, 17 nt, Human
agcauguugcugaggag

SEQ ID NO: 2542670 - RNA, 22 nt, Human
agcauguguuugguucuggggc

SEQ ID NO: 2542671 - RNA, 19 nt, Human
agcauguugagccaggccu

SEQ ID NO: 2542672 - RNA, 20 nt, Human
agcauguugagccaggccug

SEQ ID NO: 2542673 - RNA, 21 nt, Human
agcauguugagccaggccugg

SEQ ID NO: 2542674 - RNA, 15 nt, Human
agcauguuugcugaa

SEQ ID NO: 2542675 - RNA, 14 nt, Human
agcauguuugcuga

SEQ ID NO: 2542676 - RNA, 21 nt, Human
agcauguuucauguuuuguga

SEQ ID NO: 2542677 - RNA, 18 nt, Human
agcauguuucauguuuug

SEQ ID NO: 2542678 - RNA, 17 nt, Human
agcauguuugcugaaca

SEQ ID NO: 2542679 - RNA, 16 nt, Human
agcauguuugcugaac

SEQ ID NO: 2542680 - RNA, 20 nt, Human
agcauguuugcugaacaccu

SEQ ID NO: 2542681 - RNA, 14 nt, Human
agcauuaacuaauc

SEQ ID NO: 2542682 - RNA, 17 nt, Human
agcauuaagaacacuuu

SEQ ID NO: 2542683 - RNA, 18 nt, Human
agcauuaacuucucugga

SEQ ID NO: 2542684 - RNA, 17 nt, Human
agcauuaacuucucugg

SEQ ID NO: 2542685 - RNA, 18 nt, Human
agcauuaacuaaucuauu

SEQ ID NO: 2542686 - RNA, 23 nt, Human
agcauugcugguucuauuuaaug

SEQ ID NO: 2542687 - RNA, 16 nt, Human
agcauugcugguucua

SEQ ID NO: 2542688 - RNA, 15 nt, Human
agcauugcugguucu

SEQ ID NO: 2542689 - RNA, 22 nt, Human
agcauugccauucccugccugg

SEQ ID NO: 2542690 - RNA, 14 nt, Human
agcauugccauucc

SEQ ID NO: 2542691 - RNA, 14 nt, Human
agcauugcugguuc

SEQ ID NO: 2542692 - RNA, 13 nt, Human
agcauugccauuc

SEQ ID NO: 2542693 - RNA, 13 nt, Human
agcauugcaugga

SEQ ID NO: 2542694 - RNA, 15 nt, Human
agcauuacaaauugc

SEQ ID NO: 2542695 - RNA, 21 nt, Human
agcauugugaacugacaggca

SEQ ID NO: 2542696 - RNA, 17 nt, Human
agcauugugaacugaca

SEQ ID NO: 2542697 - RNA, 20 nt, Human
agcauuguggcugucagcag

SEQ ID NO: 2542698 - RNA, 21 nt, Human
agcauuguggcugucagcagg

SEQ ID NO: 2542699 - RNA, 13 nt, Human
agcauuucauucu

SEQ ID NO: 2542700 - RNA, 15 nt, Human
agcauuguuugcuua

SEQ ID NO: 2542701 - RNA, 22 nt, Human
agcauuuccaacaccacagaca

SEQ ID NO: 2542702 - RNA, 21 nt, Human
agcauuuccaacaccacagac

SEQ ID NO: 2542703 - RNA, 19 nt, Human
agcauuuccaacaccacag

SEQ ID NO: 2542704 - RNA, 18 nt, Human
agcauuuccaacaccaca

SEQ ID NO: 2542705 - RNA, 17 nt, Human
agcauuuccaacaccac

SEQ ID NO: 2542706 - RNA, 14 nt, Human
agcauuuccaacac

SEQ ID NO: 2542707 - RNA, 21 nt, Human
agcauuucauucuucucuagc

SEQ ID NO: 2542708 - RNA, 20 nt, Human
agcauuucauucuucucuag

SEQ ID NO: 2542709 - RNA, 23 nt, Human
agcauuuccaacaccacagacac

SEQ ID NO: 2542710 - RNA, 20 nt, Human
agcauuucgcgauggacaga

SEQ ID NO: 2542711 - RNA, 17 nt, Human
agcauuguaaaugugcu

SEQ ID NO: 2542712 - RNA, 18 nt, Human
agcauuguaaaugugcuu

SEQ ID NO: 2542713 - RNA, 11 nt, Human
agcauugcuuu

SEQ ID NO: 2542714 - RNA, 12 nt, Human
agcauugcuuuc

SEQ ID NO: 2542715 - RNA, 13 nt, Human
agcauugcuuucu

SEQ ID NO: 2542716 - RNA, 14 nt, Human
agcauugcuuucug

SEQ ID NO: 2542717 - RNA, 15 nt, Human
agcauugcuuucuga

SEQ ID NO: 2542718 - RNA, 16 nt, Human
agcauugcuuucugaa

SEQ ID NO: 2542719 - RNA, 17 nt, Human
agcauugcuuucugaaa

SEQ ID NO: 2542720 - RNA, 23 nt, Human
ugaguacuacaguccucccaucu

SEQ ID NO: 2542721 - RNA, 22 nt, Human
ugaguacuacaguccucccauc

SEQ ID NO: 2542722 - RNA, 21 nt, Human
ugaguacuacaguccucccau

SEQ ID NO: 2542723 - RNA, 17 nt, Human
ugaguacuacaguccuc

SEQ ID NO: 2542724 - RNA, 23 nt, Human
ugaguagaaaggccuuuaaaauu

SEQ ID NO: 2542725 - RNA, 18 nt, Human
ugaguagaaaggccuuua

SEQ ID NO: 2542726 - RNA, 14 nt, Human
ugaguagaggcuua

SEQ ID NO: 2542727 - RNA, 19 nt, Human
ugaguaagaaaugcugccc

SEQ ID NO: 2542728 - RNA, 17 nt, Human
ugaguagaaaggccuuu

SEQ ID NO: 2542729 - RNA, 13 nt, Human
ugaguaagagcug

SEQ ID NO: 2542730 - RNA, 13 nt, Human
ugaguagcuggga

SEQ ID NO: 2542731 - RNA, 13 nt, Human
ugaguagcuggau

SEQ ID NO: 2542732 - RNA, 16 nt, Human
agcauaucugccuuua

SEQ ID NO: 2542733 - RNA, 12 nt, Human
agcauaugagga

SEQ ID NO: 2542734 - RNA, 18 nt, Human
agcauauguguuggcuug

SEQ ID NO: 2542735 - RNA, 16 nt, Human
agcauauguguuggcu

SEQ ID NO: 2542736 - RNA, 21 nt, Human
agcauaugaguuucauagcua

SEQ ID NO: 2542737 - RNA, 20 nt, Human
agcauaugaguuucauagcu

SEQ ID NO: 2542738 - RNA, 16 nt, Human
agcauaugaguuucau

SEQ ID NO: 2542739 - RNA, 16 nt, Human
agcauaugaggaugca

SEQ ID NO: 2542740 - RNA, 23 nt, Human
agcauaugaggaugcagagucag

SEQ ID NO: 2542741 - RNA, 14 nt, Human
agcauauucaggaa

SEQ ID NO: 2542742 - RNA, 15 nt, Human
ugagguuuuuaagcc

SEQ ID NO: 2542743 - RNA, 21 nt, Human
ugaguaaaggaguaagaaccu

SEQ ID NO: 2542744 - RNA, 22 nt, Human
ugaguaacugauuuguaacaag

SEQ ID NO: 2542745 - RNA, 15 nt, Human
ugaguacuacagucc

SEQ ID NO: 2542746 - RNA, 17 nt, Human
ugaguaagaaaugcugc

SEQ ID NO: 2542747 - RNA, 16 nt, Human
agcauacguacacauu

SEQ ID NO: 2542748 - RNA, 17 nt, Human
agcauacguacacauuu

SEQ ID NO: 2542749 - RNA, 18 nt, Human
agcauacguacacauuuu

SEQ ID NO: 2542750 - RNA, 19 nt, Human
agcauacguacacauuuua

SEQ ID NO: 2542751 - RNA, 23 nt, Human
agcauaucugccuuuauuguguu

SEQ ID NO: 2542752 - RNA, 22 nt, Human
agcauaucugccuuuauugugu

SEQ ID NO: 2542753 - RNA, 20 nt, Human
agcauaucugccuuuauugu

SEQ ID NO: 2542754 - RNA, 17 nt, Human
agcauaucugccuuuau

SEQ ID NO: 2542755 - RNA, 19 nt, Human
agcauaccuuuauugugau

SEQ ID NO: 2542756 - RNA, 17 nt, Human
agcauaccuuuauugug

SEQ ID NO: 2542757 - RNA, 16 nt, Human
agcauaccuuuauugu

SEQ ID NO: 2542758 - RNA, 20 nt, Human
agcauacguacacauuuuau

SEQ ID NO: 2542759 - RNA, 21 nt, Human
agcauacguacacauuuuauu

SEQ ID NO: 2542760 - RNA, 12 nt, Human
ugagaauuaccc

SEQ ID NO: 2542761 - RNA, 19 nt, Human
ugagaauuuaaaaauaaga

SEQ ID NO: 2542762 - RNA, 20 nt, Human
ugagaauuugagugcucuga

SEQ ID NO: 2542763 - RNA, 15 nt, Human
ugagaauuccaagga

SEQ ID NO: 2542764 - RNA, 16 nt, Human
ugagaauuccaaggag

SEQ ID NO: 2542765 - RNA, 20 nt, Human
ugagaaucagaucauuucaa

SEQ ID NO: 2542766 - RNA, 18 nt, Human
ugagacaaauggaggccu

SEQ ID NO: 2542767 - RNA, 20 nt, Human
ugagaauugugcucaaaauu

SEQ ID NO: 2542768 - RNA, 13 nt, Human
ugagaauuuuaaa

SEQ ID NO: 2542769 - RNA, 15 nt, Human
ugagaauuuuaaauu

SEQ ID NO: 2542770 - RNA, 23 nt, Human
ugagaauuuuaaauuauaacuua

SEQ ID NO: 2542771 - RNA, 15 nt, Human
agcauacguacacau

SEQ ID NO: 2542772 - RNA, 21 nt, Human
agcauaauacuugcuuuggaa

SEQ ID NO: 2542773 - RNA, 23 nt, Human
agcauaaauguugacaugggaca

SEQ ID NO: 2542774 - RNA, 23 nt, Human
agcauaaguuucugggaccucag

SEQ ID NO: 2542775 - RNA, 17 nt, Human
agcauaaguuucuggga

SEQ ID NO: 2542776 - RNA, 20 nt, Human
agcauaacaagguccaagau

SEQ ID NO: 2542777 - RNA, 14 nt, Human
agcauaaaugcaaa

SEQ ID NO: 2542778 - RNA, 13 nt, Human
agcauaaaugcaa

SEQ ID NO: 2542779 - RNA, 18 nt, Human
ugauaaucaacugggcug

SEQ ID NO: 2542780 - RNA, 24 nt, Human
ugauaaucaacugggcugaacacu

SEQ ID NO: 2542781 - RNA, 14 nt, Human
ugauaaucaacugg

SEQ ID NO: 2542782 - RNA, 12 nt, Human
ugauaaguaaau

SEQ ID NO: 2542783 - RNA, 16 nt, Human
ugauaaggaucagaac

SEQ ID NO: 2542784 - RNA, 20 nt, Human
ugauaaggaucagaacagca

SEQ ID NO: 2542785 - RNA, 14 nt, Human
ugauaauguuaaau

SEQ ID NO: 2542786 - RNA, 13 nt, Human
ugauaauguuaaa

SEQ ID NO: 2542787 - RNA, 18 nt, Human
ugauaauguuaaauuugu

SEQ ID NO: 2542788 - RNA, 17 nt, Human
ugauaauguuaaauuug

SEQ ID NO: 2542789 - RNA, 16 nt, Human
ugauaauguuaaauuu

SEQ ID NO: 2542790 - RNA, 15 nt, Human
ugauaauguuaaauu

SEQ ID NO: 2542791 - RNA, 22 nt, Human
ugauaauguuaaauuuguaagu

SEQ ID NO: 2542792 - RNA, 21 nt, Human
ugauaauguuaaauuuguaag

SEQ ID NO: 2542793 - RNA, 17 nt, Human
ugauaauuccagugguc

SEQ ID NO: 2542794 - RNA, 15 nt, Human
ugauaauuccagugg

SEQ ID NO: 2542795 - RNA, 20 nt, Human
ugauaagaaccuuuugagug

SEQ ID NO: 2542796 - RNA, 17 nt, Human
ugaguucauacccuguu

SEQ ID NO: 2542797 - RNA, 21 nt, Human
ugauaagagggcacacacugu

SEQ ID NO: 2542798 - RNA, 19 nt, Human
ugauaagagggcacacacu

SEQ ID NO: 2542799 - RNA, 24 nt, Human
ugauaagcagucauccucagauca

SEQ ID NO: 2542800 - RNA, 18 nt, Human
ugauaagagaaucaacau

SEQ ID NO: 2542801 - RNA, 17 nt, Human
ugauaagagaaucaaca

SEQ ID NO: 2542802 - RNA, 17 nt, Human
ugaguuauuuuaauuau

SEQ ID NO: 2542803 - RNA, 16 nt, Human
ugaguucagguagcug

SEQ ID NO: 2542804 - RNA, 18 nt, Human
ugauacaaugcugugccc

SEQ ID NO: 2542805 - RNA, 19 nt, Human
ugauaauugcauucaucuu

SEQ ID NO: 2542806 - RNA, 16 nt, Human
ugauaauugcauucau

SEQ ID NO: 2542807 - RNA, 14 nt, Human
ugauaauugcauuc

SEQ ID NO: 2542808 - RNA, 20 nt, Human
ugauacaaugcugugcccua

SEQ ID NO: 2542809 - RNA, 21 nt, Human
ugauacaaugcugugcccuaa

SEQ ID NO: 2542810 - RNA, 14 nt, Human
ugauacuacaguuu

SEQ ID NO: 2542811 - RNA, 17 nt, Human
ugauacuacaguuuguu

SEQ ID NO: 2542812 - RNA, 19 nt, Human
ugauacgcaacauaauuaa

SEQ ID NO: 2542813 - RNA, 17 nt, Human
ugauacuaaaaguucuu

SEQ ID NO: 2542814 - RNA, 23 nt, Human
ugauacacuaugaagauguuuca

SEQ ID NO: 2542815 - RNA, 20 nt, Human
ugagugccuuacacaauggu

SEQ ID NO: 2542816 - RNA, 17 nt, Human
ugagugccuuacacaau

SEQ ID NO: 2542817 - RNA, 17 nt, Human
ugagucaccaagcccag

SEQ ID NO: 2542818 - RNA, 16 nt, Human
ugagucaccaagccca

SEQ ID NO: 2542819 - RNA, 21 nt, Human
ugaguauccuuucaguguuau

SEQ ID NO: 2542820 - RNA, 15 nt, Human
ugaguaucuccucgc

SEQ ID NO: 2542821 - RNA, 21 nt, Human
ugaguaucuccucgcaagcug

SEQ ID NO: 2542822 - RNA, 14 nt, Human
ugagucaccaagcc

SEQ ID NO: 2542823 - RNA, 13 nt, Human
ugagucaaugugc

SEQ ID NO: 2542824 - RNA, 15 nt, Human
ugagucaaaaaaucu

SEQ ID NO: 2542825 - RNA, 15 nt, Human
ugagucaaugugcag

SEQ ID NO: 2542826 - RNA, 18 nt, Human
ugagucaaugugcagugu

SEQ ID NO: 2542827 - RNA, 12 nt, Human
ugagugcucuga

SEQ ID NO: 2542828 - RNA, 13 nt, Human
ugagugcucugau

SEQ ID NO: 2542829 - RNA, 13 nt, Human
ugaguggacugga

SEQ ID NO: 2542830 - RNA, 19 nt, Human
ugagugcucugaucccucu

SEQ ID NO: 2542831 - RNA, 23 nt, Human
ugagugggggaucacagccucug

SEQ ID NO: 2542832 - RNA, 21 nt, Human
ugagugggugaauaauacagu

SEQ ID NO: 2542833 - RNA, 20 nt, Human
ugaguuauauguucacuguc

SEQ ID NO: 2542834 - RNA, 18 nt, Human
ugaguucauaaauuuaug

SEQ ID NO: 2542835 - RNA, 14 nt, Human
ugaguuauuuuaau

SEQ ID NO: 2542836 - RNA, 15 nt, Human
ugaguucagguagcu

SEQ ID NO: 2542837 - RNA, 18 nt, Human
ugagugucuuaauuaaaa

SEQ ID NO: 2542838 - RNA, 15 nt, Human
ugaguguaaguguga

SEQ ID NO: 2542839 - RNA, 11 nt, Human
ugaguguacca

SEQ ID NO: 2542840 - RNA, 22 nt, Human
ugagugggguuaucucuguguu

SEQ ID NO: 2542841 - RNA, 14 nt, Human
ugaguguaagugug

SEQ ID NO: 2542842 - RNA, 21 nt, Human
ugagugggguuaucucugugu

SEQ ID NO: 2542843 - RNA, 20 nt, Human
ugaguggacuggaguggagc

SEQ ID NO: 2542844 - RNA, 17 nt, Human
agcccaggagagagaaa

SEQ ID NO: 2542845 - RNA, 16 nt, Human
agcccaggagagagaa

SEQ ID NO: 2542846 - RNA, 12 nt, Human
ugauucaguguu

SEQ ID NO: 2542847 - RNA, 21 nt, Human
ugauucaguguuaaaugugau

SEQ ID NO: 2542848 - RNA, 20 nt, Human
ugauucauuuuaacaucuga

SEQ ID NO: 2542849 - RNA, 24 nt, Human
ugauucaguguuaaaugugaugaa

SEQ ID NO: 2542850 - RNA, 17 nt, Human
ugauucauuuuaacauc

SEQ ID NO: 2542851 - RNA, 13 nt, Human
ugauucagcucug

SEQ ID NO: 2542852 - RNA, 14 nt, Human
ugauucagcucugc

SEQ ID NO: 2542853 - RNA, 23 nt, Human
agcccaggaaaggcuccaggagc

SEQ ID NO: 2542854 - RNA, 22 nt, Human
agcccaggaaaggcuccaggag

SEQ ID NO: 2542855 - RNA, 24 nt, Human
agcccaggaaaggcuccaggagca

SEQ ID NO: 2542856 - RNA, 18 nt, Human
agcccaggaaaggcucca

SEQ ID NO: 2542857 - RNA, 15 nt, Human
agcccaggagagaga

SEQ ID NO: 2542858 - RNA, 14 nt, Human
agcccaggagagag

SEQ ID NO: 2542859 - RNA, 13 nt, Human
agcccaggagaga

SEQ ID NO: 2542860 - RNA, 18 nt, Human
ugauucccaagcucugcu

SEQ ID NO: 2542861 - RNA, 16 nt, Human
ugauucccaagcucug

SEQ ID NO: 2542862 - RNA, 15 nt, Human
ugauucccaagcucu

SEQ ID NO: 2542863 - RNA, 23 nt, Human
ugauuccacuacaccuggcugag

SEQ ID NO: 2542864 - RNA, 22 nt, Human
ugauuccacuacaccuggcuga

SEQ ID NO: 2542865 - RNA, 21 nt, Human
ugauuccacuacaccuggcug

SEQ ID NO: 2542866 - RNA, 20 nt, Human
ugauuccacuacaccuggcu

SEQ ID NO: 2542867 - RNA, 22 nt, Human
ugauucauuuuaacaucugaga

SEQ ID NO: 2542868 - RNA, 19 nt, Human
ugauuccacuacaccuggc

SEQ ID NO: 2542869 - RNA, 17 nt, Human
ugauucauaauaaauau

SEQ ID NO: 2542870 - RNA, 21 nt, Human
ugauucccaagcucugcuccu

SEQ ID NO: 2542871 - RNA, 19 nt, Human
ugauucccaagcucugcuc

SEQ ID NO: 2542872 - RNA, 21 nt, Human
ugauuccuuugaagaggaaaa

SEQ ID NO: 2542873 - RNA, 20 nt, Human
ugauuccuuugaagaggaaa

SEQ ID NO: 2542874 - RNA, 17 nt, Human
ugauuccuuugaagagg

SEQ ID NO: 2542875 - RNA, 22 nt, Human
ugauuccuugauggagauauuu

SEQ ID NO: 2542876 - RNA, 20 nt, Human
ugauuccuuccuguucugaa

SEQ ID NO: 2542877 - RNA, 15 nt, Human
ugauuccacuuuuau

SEQ ID NO: 2542878 - RNA, 18 nt, Human
ugauuccuuccuguucug

SEQ ID NO: 2542879 - RNA, 19 nt, Human
ugauuccuuccuguucuga

SEQ ID NO: 2542880 - RNA, 21 nt, Human
agcccaggaaaggcuccagga

SEQ ID NO: 2542881 - RNA, 20 nt, Human
agcccaggaaaggcuccagg

SEQ ID NO: 2542882 - RNA, 14 nt, Human
agcccagcucugaa

SEQ ID NO: 2542883 - RNA, 13 nt, Human
agcccagcugggu

SEQ ID NO: 2542884 - RNA, 15 nt, Human
agcccagcuggguca

SEQ ID NO: 2542885 - RNA, 16 nt, Human
agcccagcugggucag

SEQ ID NO: 2542886 - RNA, 19 nt, Human
agcccaggaaaggcuccag

SEQ ID NO: 2542887 - RNA, 15 nt, Human
agcccagaggagggc

SEQ ID NO: 2542888 - RNA, 21 nt, Human
agcccagccauuaccauggag

SEQ ID NO: 2542889 - RNA, 14 nt, Human
agcccagaggaggg

SEQ ID NO: 2542890 - RNA, 12 nt, Human
agcccagaggag

SEQ ID NO: 2542891 - RNA, 15 nt, Human
agcccagcccagcug

SEQ ID NO: 2542892 - RNA, 23 nt, Human
agcccagccauuaccauggagac

SEQ ID NO: 2542893 - RNA, 16 nt, Human
agcccagcccagcugg

SEQ ID NO: 2542894 - RNA, 12 nt, Human
agcccagcucca

SEQ ID NO: 2542895 - RNA, 13 nt, Human
agcccagcccucc

SEQ ID NO: 2542896 - RNA, 23 nt, Human
agccaugugcugcgugccugugg

SEQ ID NO: 2542897 - RNA, 17 nt, Human
agcccagaaaaggacag

SEQ ID NO: 2542898 - RNA, 22 nt, Human
agcccacuucugccauauucug

SEQ ID NO: 2542899 - RNA, 12 nt, Human
agcccagagaca

SEQ ID NO: 2542900 - RNA, 21 nt, Human
agcccagagacauacuugaag

SEQ ID NO: 2542901 - RNA, 15 nt, Human
agcccagacacagaa

SEQ ID NO: 2542902 - RNA, 22 nt, Human
agcccagagacauacuugaagg

SEQ ID NO: 2542903 - RNA, 10 nt, Human
agcccagaga

SEQ ID NO: 2542904 - RNA, 11 nt, Human
agcccagagac

SEQ ID NO: 2542905 - RNA, 12 nt, Human
agcccagacaaa

SEQ ID NO: 2542906 - RNA, 15 nt, Human
agccaugucugcauu

SEQ ID NO: 2542907 - RNA, 13 nt, Human
agccaucaaaaug

SEQ ID NO: 2542908 - RNA, 14 nt, Human
agccaucaaaaugc

SEQ ID NO: 2542909 - RNA, 15 nt, Human
agccaucaaaaugcu

SEQ ID NO: 2542910 - RNA, 16 nt, Human
agccaucaaaaugcuu

SEQ ID NO: 2542911 - RNA, 17 nt, Human
agccaugggaccaaacc

SEQ ID NO: 2542912 - RNA, 22 nt, Human
agccauguagaagcugcaucuu

SEQ ID NO: 2542913 - RNA, 14 nt, Human
agccaugucugcau

SEQ ID NO: 2542914 - RNA, 22 nt, Human
agccagaacguggcucugcugg

SEQ ID NO: 2542915 - RNA, 21 nt, Human
agccagaacguggcucugcug

SEQ ID NO: 2542916 - RNA, 12 nt, Human
agccagaagcug

SEQ ID NO: 2542917 - RNA, 14 nt, Human
agccagaagcugag

SEQ ID NO: 2542918 - RNA, 22 nt, Human
agccagacacucugcucugccc

SEQ ID NO: 2542919 - RNA, 19 nt, Human
agccagacacucugcucug

SEQ ID NO: 2542920 - RNA, 16 nt, Human
agccagacacucugcu

SEQ ID NO: 2542921 - RNA, 20 nt, Human
agccagaagcugagcaccag

SEQ ID NO: 2542922 - RNA, 14 nt, Human
agccagacacucug

SEQ ID NO: 2542923 - RNA, 15 nt, Human
agccagaagcugagc

SEQ ID NO: 2542924 - RNA, 14 nt, Human
agccagacuggcac

SEQ ID NO: 2542925 - RNA, 19 nt, Human
agccagaccuauuccuccu

SEQ ID NO: 2542926 - RNA, 20 nt, Human
agccagacacucugcucugc

SEQ ID NO: 2542927 - RNA, 20 nt, Human
agccagaccuauuccuccug

SEQ ID NO: 2542928 - RNA, 18 nt, Human
agccagaccuauuccucc

SEQ ID NO: 2542929 - RNA, 21 nt, Human
agccagacagcaacggggagg

SEQ ID NO: 2542930 - RNA, 13 nt, Human
agccagcuuuccc

SEQ ID NO: 2542931 - RNA, 14 nt, Human
agccagcuuucccu

SEQ ID NO: 2542932 - RNA, 16 nt, Human
agccagcugcucccca

SEQ ID NO: 2542933 - RNA, 20 nt, Human
agccagcugccgaccagagc

SEQ ID NO: 2542934 - RNA, 16 nt, Human
agccagcugccgacca

SEQ ID NO: 2542935 - RNA, 19 nt, Human
agccagacuggcacaguuu

SEQ ID NO: 2542936 - RNA, 16 nt, Human
agccagacucuggucu

SEQ ID NO: 2542937 - RNA, 14 nt, Human
agccagacucuggu

SEQ ID NO: 2542938 - RNA, 18 nt, Human
agccagacucuggucuuc

SEQ ID NO: 2542939 - RNA, 16 nt, Human
agccagcucugcauua

SEQ ID NO: 2542940 - RNA, 23 nt, Human
agccaggagcaaauguuucugca

SEQ ID NO: 2542941 - RNA, 22 nt, Human
agccaggagcaaauguuucugc

SEQ ID NO: 2542942 - RNA, 13 nt, Human
agccaggagcaaa

SEQ ID NO: 2542943 - RNA, 20 nt, Human
agccaggaauuucccaggac

SEQ ID NO: 2542944 - RNA, 21 nt, Human
agccaggaauuucccaggacc

SEQ ID NO: 2542945 - RNA, 22 nt, Human
agccaggaauuucccaggaccc

SEQ ID NO: 2542946 - RNA, 23 nt, Human
agccaggaauuucccaggacccu

SEQ ID NO: 2542947 - RNA, 16 nt, Human
agccagcuuucccugc

SEQ ID NO: 2542948 - RNA, 18 nt, Human
agccagcuuucccugccu

SEQ ID NO: 2542949 - RNA, 22 nt, Human
agccagcuuucccugccucuca

SEQ ID NO: 2542950 - RNA, 17 nt, Human
agccaggaauuucccag

SEQ ID NO: 2542951 - RNA, 19 nt, Human
agccaggaauuucccagga

SEQ ID NO: 2542952 - RNA, 14 nt, Human
agccaggccacaag

SEQ ID NO: 2542953 - RNA, 12 nt, Human
agccaggccaca

SEQ ID NO: 2542954 - RNA, 11 nt, Human
agccaggcaca

SEQ ID NO: 2542955 - RNA, 22 nt, Human
agccaggaucaugguguaauaa

SEQ ID NO: 2542956 - RNA, 23 nt, Human
agccaggaucaugguguaauaag

SEQ ID NO: 2542957 - RNA, 20 nt, Human
agccaggaucaugguguaau

SEQ ID NO: 2542958 - RNA, 18 nt, Human
agccaggaucauggugua

SEQ ID NO: 2542959 - RNA, 15 nt, Human
agccaggaucauggu

SEQ ID NO: 2542960 - RNA, 14 nt, Human
agccaggaucaugg

SEQ ID NO: 2542961 - RNA, 18 nt, Human
agccaggagcugggcaga

SEQ ID NO: 2542962 - RNA, 14 nt, Human
agccaggagcuggg

SEQ ID NO: 2542963 - RNA, 22 nt, Human
agccagugacuccaggagagga

SEQ ID NO: 2542964 - RNA, 21 nt, Human
agccagugacuccaggagagg

SEQ ID NO: 2542965 - RNA, 19 nt, Human
agccagugacuccaggaga

SEQ ID NO: 2542966 - RNA, 18 nt, Human
agccagugacuccaggag

SEQ ID NO: 2542967 - RNA, 17 nt, Human
agccagugacuccagga

SEQ ID NO: 2542968 - RNA, 16 nt, Human
agccagugacuccagg

SEQ ID NO: 2542969 - RNA, 15 nt, Human
agccagugacuccag

SEQ ID NO: 2542970 - RNA, 13 nt, Human
agccagugacucc

SEQ ID NO: 2542971 - RNA, 19 nt, Human
agccaguucaguaccugga

SEQ ID NO: 2542972 - RNA, 17 nt, Human
agccaguucaguaccug

SEQ ID NO: 2542973 - RNA, 22 nt, Human
agccaguucaguaccuggagga

SEQ ID NO: 2542974 - RNA, 21 nt, Human
agccaguucaguaccuggagg

SEQ ID NO: 2542975 - RNA, 21 nt, Human
agccauauaaguuugaaggaa

SEQ ID NO: 2542976 - RNA, 19 nt, Human
agccauacuuaucucucug

SEQ ID NO: 2542977 - RNA, 16 nt, Human
agccauacuuaucucu

SEQ ID NO: 2542978 - RNA, 22 nt, Human
agccauacuuaucucucugugc

SEQ ID NO: 2542979 - RNA, 23 nt, Human
agccagguaaugagggacuggaa

SEQ ID NO: 2542980 - RNA, 18 nt, Human
agccagguaaugagggac

SEQ ID NO: 2542981 - RNA, 22 nt, Human
agccaggguguggcccugccau

SEQ ID NO: 2542982 - RNA, 21 nt, Human
agccaggguguggcccugcca

SEQ ID NO: 2542983 - RNA, 23 nt, Human
agccaguaaaugggggugcauuu

SEQ ID NO: 2542984 - RNA, 22 nt, Human
agccaguaaaugggggugcauu

SEQ ID NO: 2542985 - RNA, 14 nt, Human
agccagucccaggg

SEQ ID NO: 2542986 - RNA, 13 nt, Human
agccagucuuuac

SEQ ID NO: 2542987 - RNA, 17 nt, Human
agccagugaccugagga

SEQ ID NO: 2542988 - RNA, 18 nt, Human
agccagugaccugaggaa

SEQ ID NO: 2542989 - RNA, 19 nt, Human
agccagugaccugaggaag

SEQ ID NO: 2542990 - RNA, 21 nt, Human
agccagugaccugaggaagcg

SEQ ID NO: 2542991 - RNA, 19 nt, Human
agccaggcgggcucaagga

SEQ ID NO: 2542992 - RNA, 15 nt, Human
agccaggcgggcuca

SEQ ID NO: 2542993 - RNA, 14 nt, Human
agccaggcgggcuc

SEQ ID NO: 2542994 - RNA, 13 nt, Human
agccaggcgggcu

SEQ ID NO: 2542995 - RNA, 22 nt, Human
agccaggccugggucugugucu

SEQ ID NO: 2542996 - RNA, 18 nt, Human
agccagggggacuagccc

SEQ ID NO: 2542997 - RNA, 18 nt, Human
agccaggcgggcucaagg

SEQ ID NO: 2542998 - RNA, 22 nt, Human
agccagggggacuagccccugu

SEQ ID NO: 2542999 - RNA, 21 nt, Human
agccagggggacuagccccug

SEQ ID NO: 2543000 - RNA, 23 nt, Human
agccagggggacuagccccugug

SEQ ID NO: 2543001 - RNA, 12 nt, Human
agccagggucuc

SEQ ID NO: 2543002 - RNA, 22 nt, Human
agccaggccacaagacccuugu

SEQ ID NO: 2543003 - RNA, 21 nt, Human
agccaggccacaagacccuug

SEQ ID NO: 2543004 - RNA, 20 nt, Human
agccaggcacacacugugcu

SEQ ID NO: 2543005 - RNA, 18 nt, Human
agccaggcacacacugug

SEQ ID NO: 2543006 - RNA, 17 nt, Human
agccaggcacacacugu

SEQ ID NO: 2543007 - RNA, 12 nt, Human
agccaggcacac

SEQ ID NO: 2543008 - RNA, 15 nt, Human
agccaggccacuggc

SEQ ID NO: 2543009 - RNA, 12 nt, Human
agccaggccugg

SEQ ID NO: 2543010 - RNA, 15 nt, Human
agccaggccccaggc

SEQ ID NO: 2543011 - RNA, 21 nt, Human
agccaggcagguagccagggg

SEQ ID NO: 2543012 - RNA, 23 nt, Human
agccaggcacacacugugcuuuc

SEQ ID NO: 2543013 - RNA, 14 nt, Human
agccaggccccagg

SEQ ID NO: 2543014 - RNA, 16 nt, Human
ugauguuuguggccuc

SEQ ID NO: 2543015 - RNA, 13 nt, Human
ugauguuuguccu

SEQ ID NO: 2543016 - RNA, 11 nt, Human
ugauguuugug

SEQ ID NO: 2543017 - RNA, 17 nt, Human
ugauguuuguggccuca

SEQ ID NO: 2543018 - RNA, 18 nt, Human
ugauguuuguggccucag

SEQ ID NO: 2543019 - RNA, 19 nt, Human
ugauguuuguggccucaga

SEQ ID NO: 2543020 - RNA, 20 nt, Human
ugauguuuguggccucagaa

SEQ ID NO: 2543021 - RNA, 15 nt, Human
ugauggugcugaccu

SEQ ID NO: 2543022 - RNA, 15 nt, Human
ugaugauacaagauu

SEQ ID NO: 2543023 - RNA, 21 nt, Human
ugaugaucagcuguuugucau

SEQ ID NO: 2543024 - RNA, 17 nt, Human
ugauguuuuaaggaugc

SEQ ID NO: 2543025 - RNA, 18 nt, Human
ugauguuuuaaggaugcu

SEQ ID NO: 2543026 - RNA, 18 nt, Human
ugauguuuuccuauaaua

SEQ ID NO: 2543027 - RNA, 17 nt, Human
ugaugaucuuuaaaaua

SEQ ID NO: 2543028 - RNA, 16 nt, Human
ugauggugcaaugacc

SEQ ID NO: 2543029 - RNA, 23 nt, Human
ugauggugcaaugaccuuucaau

SEQ ID NO: 2543030 - RNA, 17 nt, Human
ugauggugcaaugaccu

SEQ ID NO: 2543031 - RNA, 14 nt, Human
ugaugauccuaggc

SEQ ID NO: 2543032 - RNA, 15 nt, Human
ugaugaggggagggg

SEQ ID NO: 2543033 - RNA, 14 nt, Human
ugaugaggggaggg

SEQ ID NO: 2543034 - RNA, 13 nt, Human
ugaugaguuguga

SEQ ID NO: 2543035 - RNA, 14 nt, Human
ugaugaucuuuaaa

SEQ ID NO: 2543036 - RNA, 20 nt, Human
ugaugauccuaggcauuugc

SEQ ID NO: 2543037 - RNA, 22 nt, Human
agccacugcaccgggccacaga

SEQ ID NO: 2543038 - RNA, 21 nt, Human
agccacugcaccgggccacag

SEQ ID NO: 2543039 - RNA, 13 nt, Human
agccacugcaccg

SEQ ID NO: 2543040 - RNA, 20 nt, Human
agccacugcaccgggccaca

SEQ ID NO: 2543041 - RNA, 23 nt, Human
agccacuuaccuucaauaaagua

SEQ ID NO: 2543042 - RNA, 19 nt, Human
agccagaaauaaaguuggu

SEQ ID NO: 2543043 - RNA, 20 nt, Human
agccagaacguggcucugcu

SEQ ID NO: 2543044 - RNA, 14 nt, Human
agccagaaccugga

SEQ ID NO: 2543045 - RNA, 23 nt, Human
agccagaaauaaaguuggugaca

SEQ ID NO: 2543046 - RNA, 18 nt, Human
agccacugugcugaauuc

SEQ ID NO: 2543047 - RNA, 13 nt, Human
agccacuuaccuu

SEQ ID NO: 2543048 - RNA, 15 nt, Human
agccacuuaccuuca

SEQ ID NO: 2543049 - RNA, 16 nt, Human
agccacuuaccuucaa

SEQ ID NO: 2543050 - RNA, 17 nt, Human
agccacuuaccuucaau

SEQ ID NO: 2543051 - RNA, 18 nt, Human
agccacuuaccuucaaua

SEQ ID NO: 2543052 - RNA, 21 nt, Human
agccacuuaccuucaauaaag

SEQ ID NO: 2543053 - RNA, 22 nt, Human
agccacuuaccuucaauaaagu

SEQ ID NO: 2543054 - RNA, 17 nt, Human
agccacuuaaaauguuc

SEQ ID NO: 2543055 - RNA, 14 nt, Human
agccacugugcuga

SEQ ID NO: 2543056 - RNA, 12 nt, Human
ugauuaaaccaa

SEQ ID NO: 2543057 - RNA, 15 nt, Human
ugauuaauuaaaaca

SEQ ID NO: 2543058 - RNA, 20 nt, Human
ugauuaaacgugcagacuau

SEQ ID NO: 2543059 - RNA, 21 nt, Human
ugauuaauucaccuuccagug

SEQ ID NO: 2543060 - RNA, 18 nt, Human
ugauuacaccagccucgu

SEQ ID NO: 2543061 - RNA, 13 nt, Human
ugauuacacaguu

SEQ ID NO: 2543062 - RNA, 14 nt, Human
ugauuacacaguug

SEQ ID NO: 2543063 - RNA, 17 nt, Human
ugauuacacaaaacaaa

SEQ ID NO: 2543064 - RNA, 15 nt, Human
ugauuacacaaaaca

SEQ ID NO: 2543065 - RNA, 14 nt, Human
ugauuacacaaaac

SEQ ID NO: 2543066 - RNA, 13 nt, Human
agccacuccucug

SEQ ID NO: 2543067 - RNA, 14 nt, Human
agccacuccucuga

SEQ ID NO: 2543068 - RNA, 15 nt, Human
agccacuccucugac

SEQ ID NO: 2543069 - RNA, 14 nt, Human
ugauuaccagggac

SEQ ID NO: 2543070 - RNA, 19 nt, Human
agccacucgggaggcugag

SEQ ID NO: 2543071 - RNA, 15 nt, Human
agccacucgggaggc

SEQ ID NO: 2543072 - RNA, 21 nt, Human
agccacuccucugacucaggg

SEQ ID NO: 2543073 - RNA, 22 nt, Human
agccacuccucugacucagggc

SEQ ID NO: 2543074 - RNA, 12 nt, Human
agccacugaagc

SEQ ID NO: 2543075 - RNA, 13 nt, Human
agccacugaagcu

SEQ ID NO: 2543076 - RNA, 16 nt, Human
agccacugaagcuggg

SEQ ID NO: 2543077 - RNA, 23 nt, Human
agccaccaacauacucccaucug

SEQ ID NO: 2543078 - RNA, 20 nt, Human
agccaccaacauacucccau

SEQ ID NO: 2543079 - RNA, 23 nt, Human
agccacaucccuuugaaacaaga

SEQ ID NO: 2543080 - RNA, 22 nt, Human
agcauuucugaaguggacucuu

SEQ ID NO: 2543081 - RNA, 22 nt, Human
agccacaguuuccucaucuguc

SEQ ID NO: 2543082 - RNA, 15 nt, Human
agccacauuuggaau

SEQ ID NO: 2543083 - RNA, 20 nt, Human
agccacauuuggaauacuuu

SEQ ID NO: 2543084 - RNA, 19 nt, Human
agccaccaacauacuccca

SEQ ID NO: 2543085 - RNA, 11 nt, Human
agccacauccc

SEQ ID NO: 2543086 - RNA, 15 nt, Human
agcauuugaaugcau

SEQ ID NO: 2543087 - RNA, 14 nt, Human
agcauuugaaugca

SEQ ID NO: 2543088 - RNA, 13 nt, Human
agcauuugaaugc

SEQ ID NO: 2543089 - RNA, 12 nt, Human
agcauuugaaug

SEQ ID NO: 2543090 - RNA, 13 nt, Human
agcauuucugaag

SEQ ID NO: 2543091 - RNA, 11 nt, Human
agcauuugaau

SEQ ID NO: 2543092 - RNA, 18 nt, Human
agccacauuccugaugcu

SEQ ID NO: 2543093 - RNA, 14 nt, Human
agccacauuccuga

SEQ ID NO: 2543094 - RNA, 14 nt, Human
agccacggccaggc

SEQ ID NO: 2543095 - RNA, 18 nt, Human
agccaccucucuuuuuca

SEQ ID NO: 2543096 - RNA, 22 nt, Human
agccaccuuuugggaauguuuu

SEQ ID NO: 2543097 - RNA, 22 nt, Human
agccaccgaagccgccugugga

SEQ ID NO: 2543098 - RNA, 18 nt, Human
agccaccgugccuggcca

SEQ ID NO: 2543099 - RNA, 15 nt, Human
agccaccucucccuc

SEQ ID NO: 2543100 - RNA, 14 nt, Human
agccaccucucccu

SEQ ID NO: 2543101 - RNA, 12 nt, Human
agccaccucucc

SEQ ID NO: 2543102 - RNA, 22 nt, Human
agccaccucucccucaacaagg

SEQ ID NO: 2543103 - RNA, 16 nt, Human
agccaccucucccuca

SEQ ID NO: 2543104 - RNA, 14 nt, Human
agccaccucucuuu

SEQ ID NO: 2543105 - RNA, 15 nt, Human
agccaccgaagccgc

SEQ ID NO: 2543106 - RNA, 20 nt, Human
agccaccgaagccgccugug

SEQ ID NO: 2543107 - RNA, 21 nt, Human
agccaccgaagccgccugugg

SEQ ID NO: 2543108 - RNA, 21 nt, Human
agccacauuuggaauacuuuu

SEQ ID NO: 2543109 - RNA, 22 nt, Human
agccacauuuggaauacuuuuu

SEQ ID NO: 2543110 - RNA, 23 nt, Human
agccacauuuggaauacuuuuug

SEQ ID NO: 2543111 - RNA, 13 nt, Human
agccaccaacucu

SEQ ID NO: 2543112 - RNA, 17 nt, Human
agccaccaacucuugca

SEQ ID NO: 2543113 - RNA, 13 nt, Human
agccaccccugag

SEQ ID NO: 2543114 - RNA, 16 nt, Human
agccaccaacucuugc

SEQ ID NO: 2543115 - RNA, 17 nt, Human
ugauccagcccugaguu

SEQ ID NO: 2543116 - RNA, 18 nt, Human
ugauccagcccugaguuc

SEQ ID NO: 2543117 - RNA, 15 nt, Human
ugauccagcccugag

SEQ ID NO: 2543118 - RNA, 23 nt, Human
agccaccuuuugggaauguuuua

SEQ ID NO: 2543119 - RNA, 15 nt, Human
agccacggccaggcc

SEQ ID NO: 2543120 - RNA, 20 nt, Human
ugauccuuuuauguuauuua

SEQ ID NO: 2543121 - RNA, 14 nt, Human
ugauccugugaagu

SEQ ID NO: 2543122 - RNA, 15 nt, Human
ugauccuuacaaguu

SEQ ID NO: 2543123 - RNA, 18 nt, Human
ugauccuuuuggagucag

SEQ ID NO: 2543124 - RNA, 13 nt, Human
ugauccugugaag

SEQ ID NO: 2543125 - RNA, 20 nt, Human
ugauccuggaggcccaguuc

SEQ ID NO: 2543126 - RNA, 19 nt, Human
ugauccagccucuccccug

SEQ ID NO: 2543127 - RNA, 18 nt, Human
ugauccagccucuccccu

SEQ ID NO: 2543128 - RNA, 21 nt, Human
ugauccaugaguuugcccugg

SEQ ID NO: 2543129 - RNA, 17 nt, Human
ugaugaagaaguugaua

SEQ ID NO: 2543130 - RNA, 16 nt, Human
ugaucgugacgcugaa

SEQ ID NO: 2543131 - RNA, 15 nt, Human
ugaucgugacgcuga

SEQ ID NO: 2543132 - RNA, 18 nt, Human
ugaucggagccuccucuc

SEQ ID NO: 2543133 - RNA, 15 nt, Human
ugaucgccuuuccca

SEQ ID NO: 2543134 - RNA, 17 nt, Human
ugaucgccuuucccagg

SEQ ID NO: 2543135 - RNA, 23 nt, Human
ugaucgugacgcugaauaaaugu

SEQ ID NO: 2543136 - RNA, 21 nt, Human
ugaucgugacgcugaauaaau

SEQ ID NO: 2543137 - RNA, 20 nt, Human
ugaucgugacgcugaauaaa

SEQ ID NO: 2543138 - RNA, 19 nt, Human
ugaucgugacgcugaauaa

SEQ ID NO: 2543139 - RNA, 13 nt, Human
ugaugaagaggag

SEQ ID NO: 2543140 - RNA, 14 nt, Human
ugaugaagaggagu

SEQ ID NO: 2543141 - RNA, 22 nt, Human
ugaugaggccucuuggaccucu

SEQ ID NO: 2543142 - RNA, 18 nt, Human
ugaugaggccucuuggac

SEQ ID NO: 2543143 - RNA, 17 nt, Human
ugaugaggccucuugga

SEQ ID NO: 2543144 - RNA, 14 nt, Human
ugaugaauacugua

SEQ ID NO: 2543145 - RNA, 19 nt, Human
ugaugacaacuggaauagu

SEQ ID NO: 2543146 - RNA, 21 nt, Human
ugaugacaacuggaauaguuu

SEQ ID NO: 2543147 - RNA, 16 nt, Human
ugaugagcuccucuuc

SEQ ID NO: 2543148 - RNA, 15 nt, Human
ugaugagcuccucuu

SEQ ID NO: 2543149 - RNA, 18 nt, Human
agcuacuugggaggcuga

SEQ ID NO: 2543150 - RNA, 17 nt, Human
agcuacuugggaggcug

SEQ ID NO: 2543151 - RNA, 13 nt, Human
agcuacuugggcc

SEQ ID NO: 2543152 - RNA, 14 nt, Human
agcuacuugggagg

SEQ ID NO: 2543153 - RNA, 16 nt, Human
agcuacuugggaggcu

SEQ ID NO: 2543154 - RNA, 13 nt, Human
agcuacuaaugau

SEQ ID NO: 2543155 - RNA, 16 nt, Human
agcuacuaaugauguu

SEQ ID NO: 2543156 - RNA, 18 nt, Human
agcuacuaaugauguuuu

SEQ ID NO: 2543157 - RNA, 22 nt, Human
agcuacuugggccauagcuccu

SEQ ID NO: 2543158 - RNA, 15 nt, Human
agcuacuugggccau

SEQ ID NO: 2543159 - RNA, 14 nt, Human
agcuacuugggcca

SEQ ID NO: 2543160 - RNA, 11 nt, Human
agcuagaaaug

SEQ ID NO: 2543161 - RNA, 15 nt, Human
agcuagaaggccaca

SEQ ID NO: 2543162 - RNA, 14 nt, Human
agcuagaaggccac

SEQ ID NO: 2543163 - RNA, 16 nt, Human
agcuagaaggccacau

SEQ ID NO: 2543164 - RNA, 15 nt, Human
agcuagaagugggcc

SEQ ID NO: 2543165 - RNA, 19 nt, Human
agcuagaagugggccagga

SEQ ID NO: 2543166 - RNA, 21 nt, Human
agcuagaagugggccaggaca

SEQ ID NO: 2543167 - RNA, 22 nt, Human
agcuagaagugggccaggacag

SEQ ID NO: 2543168 - RNA, 24 nt, Human
agcuagaagugggccaggacaggc

SEQ ID NO: 2543169 - RNA, 19 nt, Human
agcuagaacuuugaaggac

SEQ ID NO: 2543170 - RNA, 16 nt, Human
agcuagaaccuggagg

SEQ ID NO: 2543171 - RNA, 18 nt, Human
agcuagaaccuggagagc

SEQ ID NO: 2543172 - RNA, 16 nt, Human
agcuagaaccuggaga

SEQ ID NO: 2543173 - RNA, 15 nt, Human
agcuagaaccuggag

SEQ ID NO: 2543174 - RNA, 16 nt, Human
agcuagaacccggcag

SEQ ID NO: 2543175 - RNA, 15 nt, Human
agcuagaaauaugau

SEQ ID NO: 2543176 - RNA, 19 nt, Human
agcuacuugggccauagcu

SEQ ID NO: 2543177 - RNA, 12 nt, Human
agcuagaaauga

SEQ ID NO: 2543178 - RNA, 22 nt, Human
agcuagaauucccucucucuga

SEQ ID NO: 2543179 - RNA, 18 nt, Human
agcuagacgagcaggcuu

SEQ ID NO: 2543180 - RNA, 23 nt, Human
agcuagcuccccuccucuccccu

SEQ ID NO: 2543181 - RNA, 21 nt, Human
agcuagcuccccuccucuccc

SEQ ID NO: 2543182 - RNA, 20 nt, Human
agcuagcuccccuccucucc

SEQ ID NO: 2543183 - RNA, 18 nt, Human
agcuagcuccccuccucu

SEQ ID NO: 2543184 - RNA, 17 nt, Human
agcuagcugcagagcca

SEQ ID NO: 2543185 - RNA, 17 nt, Human
agcuagcuccccuccuc

SEQ ID NO: 2543186 - RNA, 16 nt, Human
agcuagcuccccuccu

SEQ ID NO: 2543187 - RNA, 15 nt, Human
agcuagcuccccucc

SEQ ID NO: 2543188 - RNA, 14 nt, Human
agcuagcuccccuc

SEQ ID NO: 2543189 - RNA, 20 nt, Human
agcuagcgcugccgcacccc

SEQ ID NO: 2543190 - RNA, 21 nt, Human
agcuagcgcugccgcacccca

SEQ ID NO: 2543191 - RNA, 12 nt, Human
agcuagaggaac

SEQ ID NO: 2543192 - RNA, 20 nt, Human
agcuagaggaaccaaccccc

SEQ ID NO: 2543193 - RNA, 14 nt, Human
agcuagcgcugccg

SEQ ID NO: 2543194 - RNA, 16 nt, Human
agcuagcgcugccgca

SEQ ID NO: 2543195 - RNA, 18 nt, Human
agcuagcgcugccgcacc

SEQ ID NO: 2543196 - RNA, 19 nt, Human
ugccacuuugcaaaggagc

SEQ ID NO: 2543197 - RNA, 23 nt, Human
ugccacuuugguacauggccagu

SEQ ID NO: 2543198 - RNA, 23 nt, Human
ugccacacuucaggcucuucucc

SEQ ID NO: 2543199 - RNA, 22 nt, Human
ugccacacuucaggcucuucuc

SEQ ID NO: 2543200 - RNA, 17 nt, Human
ugccagacccccuggag

SEQ ID NO: 2543201 - RNA, 12 nt, Human
ugccagacaugu

SEQ ID NO: 2543202 - RNA, 13 nt, Human
ugccagacaugug

SEQ ID NO: 2543203 - RNA, 12 nt, Human
ugccacuuuuua

SEQ ID NO: 2543204 - RNA, 14 nt, Human
ugccagaacaguuu

SEQ ID NO: 2543205 - RNA, 18 nt, Human
ugccagaacaguuuguac

SEQ ID NO: 2543206 - RNA, 19 nt, Human
ugccagaacaguuuguaca

SEQ ID NO: 2543207 - RNA, 21 nt, Human
ugccagaagauccccucagga

SEQ ID NO: 2543208 - RNA, 18 nt, Human
ugccagaagauccccuca

SEQ ID NO: 2543209 - RNA, 20 nt, Human
ugccagaacaguuuguacag

SEQ ID NO: 2543210 - RNA, 22 nt, Human
ugccagagacggaagccuuuuu

SEQ ID NO: 2543211 - RNA, 21 nt, Human
ugccagagacggaagccuuuu

SEQ ID NO: 2543212 - RNA, 20 nt, Human
ugccagaagauccccucagg

SEQ ID NO: 2543213 - RNA, 21 nt, Human
ugccagacggcacccacccag

SEQ ID NO: 2543214 - RNA, 16 nt, Human
agcgggggccagggaa

SEQ ID NO: 2543215 - RNA, 21 nt, Human
agcgguggcccugucccuccc

SEQ ID NO: 2543216 - RNA, 12 nt, Human
agcgguggcccu

SEQ ID NO: 2543217 - RNA, 23 nt, Human
agcggucucaggcuggugggagg

SEQ ID NO: 2543218 - RNA, 15 nt, Human
agcgguggcccuguc

SEQ ID NO: 2543219 - RNA, 14 nt, Human
agcgguuuggggag

SEQ ID NO: 2543220 - RNA, 22 nt, Human
agcggucucaggcuggugggag

SEQ ID NO: 2543221 - RNA, 13 nt, Human
agcggucucaggc

SEQ ID NO: 2543222 - RNA, 22 nt, Human
agcggugcuguccucagguggc

SEQ ID NO: 2543223 - RNA, 22 nt, Human
agcgugagccacugcaccgggc

SEQ ID NO: 2543224 - RNA, 15 nt, Human
agcgugcauaaguua

SEQ ID NO: 2543225 - RNA, 19 nt, Human
agcgugagccacugcaccg

SEQ ID NO: 2543226 - RNA, 19 nt, Human
agcgguuuggggagcagag

SEQ ID NO: 2543227 - RNA, 14 nt, Human
agcguagccucucc

SEQ ID NO: 2543228 - RNA, 22 nt, Human
agcgguuuggggagcagagaca

SEQ ID NO: 2543229 - RNA, 18 nt, Human
agcguacucaucaucaac

SEQ ID NO: 2543230 - RNA, 19 nt, Human
agcuacuaauuuuaaaaug

SEQ ID NO: 2543231 - RNA, 21 nt, Human
agcuacccuuuuucuccagcu

SEQ ID NO: 2543232 - RNA, 19 nt, Human
agcgugcaccaucccuuuu

SEQ ID NO: 2543233 - RNA, 23 nt, Human
agcguagcuaagugaaaagguca

SEQ ID NO: 2543234 - RNA, 16 nt, Human
agcuaccucaaacuuc

SEQ ID NO: 2543235 - RNA, 14 nt, Human
agcuaccucaacca

SEQ ID NO: 2543236 - RNA, 20 nt, Human
agcuacccuuuuucuccagc

SEQ ID NO: 2543237 - RNA, 23 nt, Human
agcuaccucaaccaaugccaaaa

SEQ ID NO: 2543238 - RNA, 21 nt, Human
agcucaggugucccugcacuu

SEQ ID NO: 2543239 - RNA, 20 nt, Human
agcucaggugucccugcacu

SEQ ID NO: 2543240 - RNA, 22 nt, Human
agcucaggugucccugcacuug

SEQ ID NO: 2543241 - RNA, 22 nt, Human
agcucaguucuagucucucugg

SEQ ID NO: 2543242 - RNA, 21 nt, Human
agcucaguucuagucucucug

SEQ ID NO: 2543243 - RNA, 13 nt, Human
agcucagucccau

SEQ ID NO: 2543244 - RNA, 21 nt, Human
agcucagucccaucagagagc

SEQ ID NO: 2543245 - RNA, 13 nt, Human
agcucaggacaga

SEQ ID NO: 2543246 - RNA, 17 nt, Human
agcucaggacagaugcc

SEQ ID NO: 2543247 - RNA, 18 nt, Human
agcucaggugucccugca

SEQ ID NO: 2543248 - RNA, 20 nt, Human
agcucagcuuuuugucuuuu

SEQ ID NO: 2543249 - RNA, 22 nt, Human
agcucagcuuuuugucuuuucu

SEQ ID NO: 2543250 - RNA, 15 nt, Human
agcuaggccuggcca

SEQ ID NO: 2543251 - RNA, 14 nt, Human
agcuaggccuggcc

SEQ ID NO: 2543252 - RNA, 17 nt, Human
agcucagcgccagccug

SEQ ID NO: 2543253 - RNA, 12 nt, Human
agcucagcgcca

SEQ ID NO: 2543254 - RNA, 21 nt, Human
agcucagcuacugauuuuugu

SEQ ID NO: 2543255 - RNA, 16 nt, Human
agcuaggccuggccag

SEQ ID NO: 2543256 - RNA, 18 nt, Human
agcuaggaauuguguuua

SEQ ID NO: 2543257 - RNA, 12 nt, Human
agcuaggaauga

SEQ ID NO: 2543258 - RNA, 13 nt, Human
agcuaggaaugaa

SEQ ID NO: 2543259 - RNA, 12 nt, Human
agcuaggccugg

SEQ ID NO: 2543260 - RNA, 15 nt, Human
ugcccaagccagagg

SEQ ID NO: 2543261 - RNA, 14 nt, Human
ugcccaagccagag

SEQ ID NO: 2543262 - RNA, 13 nt, Human
ugcccaagccaga

SEQ ID NO: 2543263 - RNA, 11 nt, Human
ugcccaagcca

SEQ ID NO: 2543264 - RNA, 23 nt, Human
ugcccaagaauagaugcugacug

SEQ ID NO: 2543265 - RNA, 22 nt, Human
ugcccaagaauagaugcugacu

SEQ ID NO: 2543266 - RNA, 15 nt, Human
agcucauuucacuuu

SEQ ID NO: 2543267 - RNA, 12 nt, Human
agcucauuucac

SEQ ID NO: 2543268 - RNA, 13 nt, Human
agcuccaaccugc

SEQ ID NO: 2543269 - RNA, 14 nt, Human
agcuccaaccugca

SEQ ID NO: 2543270 - RNA, 15 nt, Human
agcuccaaccugcaa

SEQ ID NO: 2543271 - RNA, 16 nt, Human
agcuccaaccugcaaa

SEQ ID NO: 2543272 - RNA, 18 nt, Human
agcuccaaccugcaaaga

SEQ ID NO: 2543273 - RNA, 21 nt, Human
ugcccaagaauagaugcugac

SEQ ID NO: 2543274 - RNA, 20 nt, Human
agcucauucuccuuguguua

SEQ ID NO: 2543275 - RNA, 21 nt, Human
agcucauucuccuuguguuac

SEQ ID NO: 2543276 - RNA, 18 nt, Human
agcucauauuuuguauau

SEQ ID NO: 2543277 - RNA, 15 nt, Human
agcucauauuuugua

SEQ ID NO: 2543278 - RNA, 14 nt, Human
agcucauauuuugu

SEQ ID NO: 2543279 - RNA, 14 nt, Human
agcucaucucuguc

SEQ ID NO: 2543280 - RNA, 23 nt, Human
agcucaguucuagucucucuggg

SEQ ID NO: 2543281 - RNA, 19 nt, Human
agcucaguuuauccaaggu

SEQ ID NO: 2543282 - RNA, 16 nt, Human
ugcccacaggaucagu

SEQ ID NO: 2543283 - RNA, 19 nt, Human
ugcccacaggaucagucug

SEQ ID NO: 2543284 - RNA, 18 nt, Human
ugcccaagccagaggcug

SEQ ID NO: 2543285 - RNA, 16 nt, Human
ugcccaagccagaggc

SEQ ID NO: 2543286 - RNA, 20 nt, Human
ugcccaagccagaggcuggg

SEQ ID NO: 2543287 - RNA, 12 nt, Human
ugcccacaggcc

SEQ ID NO: 2543288 - RNA, 20 nt, Human
ugcccacaggaucagucuga

SEQ ID NO: 2543289 - RNA, 20 nt, Human
ugcccagccccuucugaccc

SEQ ID NO: 2543290 - RNA, 21 nt, Human
ugcccagccccuucugaccca

SEQ ID NO: 2543291 - RNA, 14 nt, Human
ugcccacaggccgc

SEQ ID NO: 2543292 - RNA, 20 nt, Human
ugcccagcccggaccuuggc

SEQ ID NO: 2543293 - RNA, 11 nt, Human
agccuggugcc

SEQ ID NO: 2543294 - RNA, 20 nt, Human
agccuggucagcccaaacca

SEQ ID NO: 2543295 - RNA, 14 nt, Human
agccuggugcugcu

SEQ ID NO: 2543296 - RNA, 15 nt, Human
agccuggugcugcug

SEQ ID NO: 2543297 - RNA, 16 nt, Human
agccuggugcugcugc

SEQ ID NO: 2543298 - RNA, 21 nt, Human
agccugugccucugggacugg

SEQ ID NO: 2543299 - RNA, 11 nt, Human
agccugguggg

SEQ ID NO: 2543300 - RNA, 14 nt, Human
agccuggugggccu

SEQ ID NO: 2543301 - RNA, 16 nt, Human
agccuggugggccucc

SEQ ID NO: 2543302 - RNA, 18 nt, Human
agccuggugggccuccuc

SEQ ID NO: 2543303 - RNA, 21 nt, Human
agccuggugggccuccucugu

SEQ ID NO: 2543304 - RNA, 22 nt, Human
agccuggugggccuccucuguc

SEQ ID NO: 2543305 - RNA, 11 nt, Human
agccuguggca

SEQ ID NO: 2543306 - RNA, 14 nt, Human
agccuguggcaucu

SEQ ID NO: 2543307 - RNA, 22 nt, Human
agccuguggcaucuuugccuug

SEQ ID NO: 2543308 - RNA, 17 nt, Human
agccuguggcggugccu

SEQ ID NO: 2543309 - RNA, 21 nt, Human
agccuguggcaucuuugccuu

SEQ ID NO: 2543310 - RNA, 22 nt, Human
agccuguggcggugccugggug

SEQ ID NO: 2543311 - RNA, 18 nt, Human
agccuguguaacagcucc

SEQ ID NO: 2543312 - RNA, 17 nt, Human
agccuguguaacagcuc

SEQ ID NO: 2543313 - RNA, 16 nt, Human
agccuguguaacagcu

SEQ ID NO: 2543314 - RNA, 15 nt, Human
agccuguguaacagc

SEQ ID NO: 2543315 - RNA, 18 nt, Human
agccuguggcggugccug

SEQ ID NO: 2543316 - RNA, 19 nt, Human
agccuguggcggugccugg

SEQ ID NO: 2543317 - RNA, 13 nt, Human
agccuguguaaca

SEQ ID NO: 2543318 - RNA, 20 nt, Human
agccuguggcggugccuggg

SEQ ID NO: 2543319 - RNA, 13 nt, Human
agccuguuuaaga

SEQ ID NO: 2543320 - RNA, 22 nt, Human
agccuuagaagucacacaguau

SEQ ID NO: 2543321 - RNA, 18 nt, Human
agccuguuccccucacug

SEQ ID NO: 2543322 - RNA, 17 nt, Human
agccuguuccccucacu

SEQ ID NO: 2543323 - RNA, 14 nt, Human
agccuguuccccuc

SEQ ID NO: 2543324 - RNA, 20 nt, Human
agccuguguaacagcuccuu

SEQ ID NO: 2543325 - RNA, 19 nt, Human
agccuguguaacagcuccu

SEQ ID NO: 2543326 - RNA, 21 nt, Human
agccuguguaacagcuccuug

SEQ ID NO: 2543327 - RNA, 22 nt, Human
agccuguuggacccgcucugga

SEQ ID NO: 2543328 - RNA, 22 nt, Human
agccuguuccccucacuggaug

SEQ ID NO: 2543329 - RNA, 20 nt, Human
agccuguuccccucacugga

SEQ ID NO: 2543330 - RNA, 14 nt, Human
agccuguuggaccc

SEQ ID NO: 2543331 - RNA, 14 nt, Human
agccuuauccucug

SEQ ID NO: 2543332 - RNA, 19 nt, Human
agccuuaucaagugucuuc

SEQ ID NO: 2543333 - RNA, 18 nt, Human
agccuuaucaagugucuu

SEQ ID NO: 2543334 - RNA, 17 nt, Human
agccuuaucaagugucu

SEQ ID NO: 2543335 - RNA, 15 nt, Human
agccuuaucaagugu

SEQ ID NO: 2543336 - RNA, 14 nt, Human
agccuuaucaagug

SEQ ID NO: 2543337 - RNA, 18 nt, Human
agccuuauccucugaucu

SEQ ID NO: 2543338 - RNA, 17 nt, Human
agccuuauccucugauc

SEQ ID NO: 2543339 - RNA, 15 nt, Human
agccuuauccucuga

SEQ ID NO: 2543340 - RNA, 23 nt, Human
agccuucagucuugaauuucuaa

SEQ ID NO: 2543341 - RNA, 21 nt, Human
agccugggugacagagugaga

SEQ ID NO: 2543342 - RNA, 20 nt, Human
agccugggguggggucaugc

SEQ ID NO: 2543343 - RNA, 19 nt, Human
agccugggguggggucaug

SEQ ID NO: 2543344 - RNA, 23 nt, Human
agccugggguggggucaugcccu

SEQ ID NO: 2543345 - RNA, 15 nt, Human
agccuggucagccca

SEQ ID NO: 2543346 - RNA, 16 nt, Human
agccuggucagcccaa

SEQ ID NO: 2543347 - RNA, 15 nt, Human
agccuggggucugga

SEQ ID NO: 2543348 - RNA, 22 nt, Human
agccugggugacagagcaagug

SEQ ID NO: 2543349 - RNA, 22 nt, Human
agccugcuccuucccaggagug

SEQ ID NO: 2543350 - RNA, 20 nt, Human
agccugcuccuucccaggag

SEQ ID NO: 2543351 - RNA, 23 nt, Human
agccugcucccccacccccuccc

SEQ ID NO: 2543352 - RNA, 19 nt, Human
agccugcucccccaccccc

SEQ ID NO: 2543353 - RNA, 21 nt, Human
agccugcucccccacccccuc

SEQ ID NO: 2543354 - RNA, 11 nt, Human
agccugcuccc

SEQ ID NO: 2543355 - RNA, 14 nt, Human
agccugcuccccca

SEQ ID NO: 2543356 - RNA, 15 nt, Human
agccugcucccccac

SEQ ID NO: 2543357 - RNA, 17 nt, Human
agccugcucccccaccc

SEQ ID NO: 2543358 - RNA, 19 nt, Human
agccugcuccagcuguuca

SEQ ID NO: 2543359 - RNA, 22 nt, Human
agccugcuccagcuguucagcu

SEQ ID NO: 2543360 - RNA, 14 nt, Human
agccugcuccagcu

SEQ ID NO: 2543361 - RNA, 15 nt, Human
agccugcuccagcug

SEQ ID NO: 2543362 - RNA, 16 nt, Human
agccugcuccagcugu

SEQ ID NO: 2543363 - RNA, 17 nt, Human
agccugcuccagcuguu

SEQ ID NO: 2543364 - RNA, 21 nt, Human
ugcauacacacacacacacag

SEQ ID NO: 2543365 - RNA, 22 nt, Human
ugcauacacacacacacacagc

SEQ ID NO: 2543366 - RNA, 23 nt, Human
ugcauacacacacacacacagcc

SEQ ID NO: 2543367 - RNA, 15 nt, Human
ugcauacacacacac

SEQ ID NO: 2543368 - RNA, 16 nt, Human
ugcauacacacacaca

SEQ ID NO: 2543369 - RNA, 14 nt, Human
ugcauacacacaca

SEQ ID NO: 2543370 - RNA, 12 nt, Human
ugcauaccacuu

SEQ ID NO: 2543371 - RNA, 12 nt, Human
ugcauaccaacc

SEQ ID NO: 2543372 - RNA, 14 nt, Human
ugcauaccaaccug

SEQ ID NO: 2543373 - RNA, 18 nt, Human
ugcauaccaaccugggca

SEQ ID NO: 2543374 - RNA, 21 nt, Human
ugcauuaucuagauacuguau

SEQ ID NO: 2543375 - RNA, 22 nt, Human
ugcauuaucuagauacuguauc

SEQ ID NO: 2543376 - RNA, 23 nt, Human
ugcauugaacacaaacuguaaau

SEQ ID NO: 2543377 - RNA, 22 nt, Human
ugcauugaacacaaacuguaaa

SEQ ID NO: 2543378 - RNA, 13 nt, Human
ugcauugaauaua

SEQ ID NO: 2543379 - RNA, 14 nt, Human
ugcauugaauauau

SEQ ID NO: 2543380 - RNA, 16 nt, Human
ugcauugaauauauua

SEQ ID NO: 2543381 - RNA, 18 nt, Human
ugcauuaucuagauacug

SEQ ID NO: 2543382 - RNA, 23 nt, Human
agcggagguugcagggagccgag

SEQ ID NO: 2543383 - RNA, 21 nt, Human
ugccaagggcuuuguuuugca

SEQ ID NO: 2543384 - RNA, 18 nt, Human
ugcauuggaagaccccac

SEQ ID NO: 2543385 - RNA, 19 nt, Human
ugcauugcugugaauuagc

SEQ ID NO: 2543386 - RNA, 22 nt, Human
ugcauugaccgcgacuaauuuc

SEQ ID NO: 2543387 - RNA, 20 nt, Human
ugcauugaccgcgacuaauu

SEQ ID NO: 2543388 - RNA, 15 nt, Human
ugcauugaauauauu

SEQ ID NO: 2543389 - RNA, 15 nt, Human
ugcauugagaacugc

SEQ ID NO: 2543390 - RNA, 17 nt, Human
ugcauugagaacugcau

SEQ ID NO: 2543391 - RNA, 21 nt, Human
ugccaauuuuugccuucauua

SEQ ID NO: 2543392 - RNA, 18 nt, Human
ugccaauuuuugccuuca

SEQ ID NO: 2543393 - RNA, 17 nt, Human
ugccaauuuuugccuuc

SEQ ID NO: 2543394 - RNA, 15 nt, Human
ugccacaaggacuuc

SEQ ID NO: 2543395 - RNA, 19 nt, Human
ugccaauuuuugccuucau

SEQ ID NO: 2543396 - RNA, 16 nt, Human
ugccacacuucaggcu

SEQ ID NO: 2543397 - RNA, 15 nt, Human
ugccacacuucaggc

SEQ ID NO: 2543398 - RNA, 14 nt, Human
ugccacacuucagg

SEQ ID NO: 2543399 - RNA, 13 nt, Human
ugccacacuucag

SEQ ID NO: 2543400 - RNA, 15 nt, Human
ugccaaguuguuuga

SEQ ID NO: 2543401 - RNA, 19 nt, Human
ugccaaguuguuugagaaa

SEQ ID NO: 2543402 - RNA, 20 nt, Human
ugccaaguuguuugagaaau

SEQ ID NO: 2543403 - RNA, 21 nt, Human
ugccaauaauaauaccucccu

SEQ ID NO: 2543404 - RNA, 22 nt, Human
ugccaauaauaauaccucccuu

SEQ ID NO: 2543405 - RNA, 13 nt, Human
ugccaauuucaag

SEQ ID NO: 2543406 - RNA, 15 nt, Human
ugccaauuagcaauu

SEQ ID NO: 2543407 - RNA, 18 nt, Human
ugccaaugggagcucaug

SEQ ID NO: 2543408 - RNA, 20 nt, Human
agcggagaaaggaagggcug

SEQ ID NO: 2543409 - RNA, 18 nt, Human
agcggagacggaguccca

SEQ ID NO: 2543410 - RNA, 20 nt, Human
ugcauuaucuagauacugua

SEQ ID NO: 2543411 - RNA, 14 nt, Human
agcggaggugugga

SEQ ID NO: 2543412 - RNA, 17 nt, Human
agcgccuuucccaacuc

SEQ ID NO: 2543413 - RNA, 20 nt, Human
agcgccuuucccaacucuag

SEQ ID NO: 2543414 - RNA, 15 nt, Human
agcgccugccccucc

SEQ ID NO: 2543415 - RNA, 18 nt, Human
agcgccugccccucccag

SEQ ID NO: 2543416 - RNA, 23 nt, Human
agcgccuccauccaaggccaggu

SEQ ID NO: 2543417 - RNA, 20 nt, Human
agcgccuccauccaaggcca

SEQ ID NO: 2543418 - RNA, 18 nt, Human
agcgccuccauccaaggc

SEQ ID NO: 2543419 - RNA, 16 nt, Human
agcggagaaaggaagg

SEQ ID NO: 2543420 - RNA, 22 nt, Human
agcgccuccauccaaggccagg

SEQ ID NO: 2543421 - RNA, 23 nt, Human
agcgccuaguggggucucccucu

SEQ ID NO: 2543422 - RNA, 12 nt, Human
agcgccugcccc

SEQ ID NO: 2543423 - RNA, 19 nt, Human
agcgccugccccucccaga

SEQ ID NO: 2543424 - RNA, 17 nt, Human
agccuuccagggguggg

SEQ ID NO: 2543425 - RNA, 16 nt, Human
agccuuccaggggugg

SEQ ID NO: 2543426 - RNA, 14 nt, Human
agccuuccaggggu

SEQ ID NO: 2543427 - RNA, 11 nt, Human
agccuuccagg

SEQ ID NO: 2543428 - RNA, 22 nt, Human
agcgccuaguggggucucccuc

SEQ ID NO: 2543429 - RNA, 16 nt, Human
agccuugugucuacag

SEQ ID NO: 2543430 - RNA, 18 nt, Human
agccuuguaauucuaaau

SEQ ID NO: 2543431 - RNA, 22 nt, Human
agccuugguguccaccuggccc

SEQ ID NO: 2543432 - RNA, 16 nt, Human
agccuuguaauucuaa

SEQ ID NO: 2543433 - RNA, 19 nt, Human
agccuugguguccaccugg

SEQ ID NO: 2543434 - RNA, 21 nt, Human
agccuugguguccaccuggcc

SEQ ID NO: 2543435 - RNA, 20 nt, Human
agccuuggggcugaugcagu

SEQ ID NO: 2543436 - RNA, 16 nt, Human
agccuugguguccacc

SEQ ID NO: 2543437 - RNA, 17 nt, Human
agccuugguguccaccu

SEQ ID NO: 2543438 - RNA, 18 nt, Human
agccuugguguccaccug

SEQ ID NO: 2543439 - RNA, 16 nt, Human
agccuuccacacucac

SEQ ID NO: 2543440 - RNA, 20 nt, Human
agccugaauuuuguugcugu

SEQ ID NO: 2543441 - RNA, 21 nt, Human
agccugaauuuuguugcuguu

SEQ ID NO: 2543442 - RNA, 20 nt, Human
agccugaccaacauggagaa

SEQ ID NO: 2543443 - RNA, 22 nt, Human
agccugaaagaggaaugaagua

SEQ ID NO: 2543444 - RNA, 22 nt, Human
agccugaaggggcgucuguucc

SEQ ID NO: 2543445 - RNA, 17 nt, Human
ugcagcccccacugccu

SEQ ID NO: 2543446 - RNA, 23 nt, Human
ugcagcccccacugccuuugacc

SEQ ID NO: 2543447 - RNA, 23 nt, Human
ugcagcccaugcccaccugccca

SEQ ID NO: 2543448 - RNA, 14 nt, Human
ugcagcccaugccc

SEQ ID NO: 2543449 - RNA, 18 nt, Human
ugcagcccaugcccaccu

SEQ ID NO: 2543450 - RNA, 19 nt, Human
ugcagcccaugcccaccug

SEQ ID NO: 2543451 - RNA, 21 nt, Human
ugcagcccaugcccaccugcc

SEQ ID NO: 2543452 - RNA, 23 nt, Human
ugcagccucaaccuccugggcua

SEQ ID NO: 2543453 - RNA, 19 nt, Human
ugcagcccguguggccccu

SEQ ID NO: 2543454 - RNA, 21 nt, Human
ugcagcccguguggccccuuc

SEQ ID NO: 2543455 - RNA, 23 nt, Human
ugcagcccguguggccccuucac

SEQ ID NO: 2543456 - RNA, 23 nt, Human
ugcagccccgccuccaggccaca

SEQ ID NO: 2543457 - RNA, 21 nt, Human
ugcagccccgccuccaggcca

SEQ ID NO: 2543458 - RNA, 20 nt, Human
ugcagccccgccuccaggcc

SEQ ID NO: 2543459 - RNA, 13 nt, Human
ugcagcccaugcc

SEQ ID NO: 2543460 - RNA, 22 nt, Human
ugcagcccggcgccaccauccu

SEQ ID NO: 2543461 - RNA, 20 nt, Human
ugcagcccggcgccaccauc

SEQ ID NO: 2543462 - RNA, 21 nt, Human
ugcagccccgcgccuccuucc

SEQ ID NO: 2543463 - RNA, 15 nt, Human
ugcagccucacaguc

SEQ ID NO: 2543464 - RNA, 13 nt, Human
ugcagccucacag

SEQ ID NO: 2543465 - RNA, 16 nt, Human
ugcagccucacagucc

SEQ ID NO: 2543466 - RNA, 11 nt, Human
ugcaggucccu

SEQ ID NO: 2543467 - RNA, 23 nt, Human
ugcagccuuugccuccccggcuc

SEQ ID NO: 2543468 - RNA, 13 nt, Human
ugcagcuaucugg

SEQ ID NO: 2543469 - RNA, 19 nt, Human
ugcagcgaaccaauauuug

SEQ ID NO: 2543470 - RNA, 20 nt, Human
ugcagccuguccugggcugg

SEQ ID NO: 2543471 - RNA, 12 nt, Human
ugcagccugggu

SEQ ID NO: 2543472 - RNA, 14 nt, Human
ugcagccuggaggc

SEQ ID NO: 2543473 - RNA, 15 nt, Human
ugcagccuggaggcc

SEQ ID NO: 2543474 - RNA, 19 nt, Human
ugcagccuccuccugacca

SEQ ID NO: 2543475 - RNA, 14 nt, Human
ugcagccugcgcca

SEQ ID NO: 2543476 - RNA, 17 nt, Human
ugcagccuccuccugac

SEQ ID NO: 2543477 - RNA, 16 nt, Human
ugcagccuccuccuga

SEQ ID NO: 2543478 - RNA, 15 nt, Human
ugcagccuccuccug

SEQ ID NO: 2543479 - RNA, 14 nt, Human
ugcagccuccuccu

SEQ ID NO: 2543480 - RNA, 23 nt, Human
ugcauaacguauaaaagccuguu

SEQ ID NO: 2543481 - RNA, 22 nt, Human
ugcauaacguauaaaagccugu

SEQ ID NO: 2543482 - RNA, 21 nt, Human
ugcagucuggcugagcccugc

SEQ ID NO: 2543483 - RNA, 20 nt, Human
ugcagucuggcugagcccug

SEQ ID NO: 2543484 - RNA, 14 nt, Human
ugcauaaguuaacu

SEQ ID NO: 2543485 - RNA, 17 nt, Human
ugcauaaguuaacuucc

SEQ ID NO: 2543486 - RNA, 14 nt, Human
ugcaguagauuuuc

SEQ ID NO: 2543487 - RNA, 14 nt, Human
ugcaguccugggau

SEQ ID NO: 2543488 - RNA, 19 nt, Human
ugcaguccugaucagagcc

SEQ ID NO: 2543489 - RNA, 22 nt, Human
ugcaguccugaucagagccgug

SEQ ID NO: 2543490 - RNA, 19 nt, Human
ugcagucuggcugagcccu

SEQ ID NO: 2543491 - RNA, 13 nt, Human
ugcaguccuggga

SEQ ID NO: 2543492 - RNA, 14 nt, Human
ugcagucuggcuga

SEQ ID NO: 2543493 - RNA, 16 nt, Human
ugcaggucccuaauaa

SEQ ID NO: 2543494 - RNA, 15 nt, Human
ugcaggucccuaaua

SEQ ID NO: 2543495 - RNA, 14 nt, Human
ugcaggucccuaau

SEQ ID NO: 2543496 - RNA, 12 nt, Human
ugcaggucccua

SEQ ID NO: 2543497 - RNA, 13 nt, Human
ugcaguaaaucuu

SEQ ID NO: 2543498 - RNA, 14 nt, Human
ugcaguaaaucuuu

SEQ ID NO: 2543499 - RNA, 15 nt, Human
ugcaguaaaucuuuu

SEQ ID NO: 2543500 - RNA, 14 nt, Human
ugcagcuaucuggu

SEQ ID NO: 2543501 - RNA, 18 nt, Human
ugcaguaaaucuuuuaca

SEQ ID NO: 2543502 - RNA, 21 nt, Human
ugcaguaaaucuuuuacaacu

SEQ ID NO: 2543503 - RNA, 18 nt, Human
ugcaguacuuuaccuccu

SEQ ID NO: 2543504 - RNA, 16 nt, Human
ugcaguagagucaucu

SEQ ID NO: 2543505 - RNA, 19 nt, Human
ugcaguagagucaucucca

SEQ ID NO: 2543506 - RNA, 22 nt, Human
ugcaguagagucaucuccauca

SEQ ID NO: 2543507 - RNA, 16 nt, Human
agccgaccucagccuu

SEQ ID NO: 2543508 - RNA, 14 nt, Human
agccgaccucagcc

SEQ ID NO: 2543509 - RNA, 15 nt, Human
agccgaccucagccu

SEQ ID NO: 2543510 - RNA, 17 nt, Human
agccgacuccacuuuca

SEQ ID NO: 2543511 - RNA, 23 nt, Human
agccgacugcacagcggccccug

SEQ ID NO: 2543512 - RNA, 13 nt, Human
agccgagagccug

SEQ ID NO: 2543513 - RNA, 14 nt, Human
agccgagagccugc

SEQ ID NO: 2543514 - RNA, 17 nt, Human
agcccuucuuuccacag

SEQ ID NO: 2543515 - RNA, 12 nt, Human
agccgaccucag

SEQ ID NO: 2543516 - RNA, 13 nt, Human
agccgaccucagc

SEQ ID NO: 2543517 - RNA, 13 nt, Human
agccguggcuucc

SEQ ID NO: 2543518 - RNA, 15 nt, Human
agccgagagccugcu

SEQ ID NO: 2543519 - RNA, 16 nt, Human
agccgagagccugcuc

SEQ ID NO: 2543520 - RNA, 17 nt, Human
agccgagagccugcucc

SEQ ID NO: 2543521 - RNA, 18 nt, Human
agccgagagccugcuccc

SEQ ID NO: 2543522 - RNA, 21 nt, Human
agccguggcuucccgcucagc

SEQ ID NO: 2543523 - RNA, 14 nt, Human
agccguggcuuccc

SEQ ID NO: 2543524 - RNA, 23 nt, Human
agccguggcuucccgcucagccc

SEQ ID NO: 2543525 - RNA, 22 nt, Human
agccguggcuucccgcucagcc

SEQ ID NO: 2543526 - RNA, 16 nt, Human
agccgugguccuuugg

SEQ ID NO: 2543527 - RNA, 16 nt, Human
agccuaccugcucucc

SEQ ID NO: 2543528 - RNA, 21 nt, Human
agccgagagccugcuccccca

SEQ ID NO: 2543529 - RNA, 22 nt, Human
agccuaccggcaauuuccggcc

SEQ ID NO: 2543530 - RNA, 23 nt, Human
agcccuucuaccuuccugcaaca

SEQ ID NO: 2543531 - RNA, 15 nt, Human
ugcacguuauggugu

SEQ ID NO: 2543532 - RNA, 17 nt, Human
ugcacguggccucuuga

SEQ ID NO: 2543533 - RNA, 23 nt, Human
ugcacuauagccuaggugacaga

SEQ ID NO: 2543534 - RNA, 15 nt, Human
ugcacuaugaggaau

SEQ ID NO: 2543535 - RNA, 19 nt, Human
ugcacguuaugguguuucu

SEQ ID NO: 2543536 - RNA, 17 nt, Human
ugcacguuaugguguuu

SEQ ID NO: 2543537 - RNA, 15 nt, Human
agccuagagugaggg

SEQ ID NO: 2543538 - RNA, 16 nt, Human
agccuacgcugaagau

SEQ ID NO: 2543539 - RNA, 15 nt, Human
agccuagacccuccu

SEQ ID NO: 2543540 - RNA, 18 nt, Human
agccuagacccuccuccu

SEQ ID NO: 2543541 - RNA, 17 nt, Human
agccuaccugcucucca

SEQ ID NO: 2543542 - RNA, 17 nt, Human
agccuagaagagcuucu

SEQ ID NO: 2543543 - RNA, 19 nt, Human
agccuagaagagcuucuga

SEQ ID NO: 2543544 - RNA, 17 nt, Human
agccuagccgaccucag

SEQ ID NO: 2543545 - RNA, 18 nt, Human
agccuagccgaccucagc

SEQ ID NO: 2543546 - RNA, 19 nt, Human
agccuagccgaccucagcc

SEQ ID NO: 2543547 - RNA, 20 nt, Human
agccuagccgaccucagccu

SEQ ID NO: 2543548 - RNA, 21 nt, Human
agccuagccgaccucagccuu

SEQ ID NO: 2543549 - RNA, 16 nt, Human
agccucagcauccugg

SEQ ID NO: 2543550 - RNA, 21 nt, Human
agccucagcauccuggcaccc

SEQ ID NO: 2543551 - RNA, 20 nt, Human
agccucagcauccuggcacc

SEQ ID NO: 2543552 - RNA, 19 nt, Human
agccucagcauccuggcac

SEQ ID NO: 2543553 - RNA, 17 nt, Human
agccucagcauccuggc

SEQ ID NO: 2543554 - RNA, 16 nt, Human
agccucccaaagugcu

SEQ ID NO: 2543555 - RNA, 20 nt, Human
agccuccauuuaguucuuug

SEQ ID NO: 2543556 - RNA, 21 nt, Human
agccuccauuuaguucuuugu

SEQ ID NO: 2543557 - RNA, 20 nt, Human
agccucauccgaggcagggu

SEQ ID NO: 2543558 - RNA, 15 nt, Human
agccuccauuuaguu

SEQ ID NO: 2543559 - RNA, 17 nt, Human
agccuccauuuaguucu

SEQ ID NO: 2543560 - RNA, 20 nt, Human
agccucauguccacugguuc

SEQ ID NO: 2543561 - RNA, 20 nt, Human
agccuccaugcugccuccag

SEQ ID NO: 2543562 - RNA, 18 nt, Human
agccuccaugcugccucc

SEQ ID NO: 2543563 - RNA, 23 nt, Human
agccucagcauccuggcacccgg

SEQ ID NO: 2543564 - RNA, 22 nt, Human
agccucagcauccuggcacccg

SEQ ID NO: 2543565 - RNA, 15 nt, Human
agccucauguccacu

SEQ ID NO: 2543566 - RNA, 19 nt, Human
agccucauccgaggcaggg

SEQ ID NO: 2543567 - RNA, 18 nt, Human
agccucauccgaggcagg

SEQ ID NO: 2543568 - RNA, 12 nt, Human
agccucaucucu

SEQ ID NO: 2543569 - RNA, 17 nt, Human
agccccuaccccacacc

SEQ ID NO: 2543570 - RNA, 16 nt, Human
agccccgcagaccucc

SEQ ID NO: 2543571 - RNA, 14 nt, Human
agccccgcagaccu

SEQ ID NO: 2543572 - RNA, 19 nt, Human
agccccuagcccaggagag

SEQ ID NO: 2543573 - RNA, 18 nt, Human
agccccuagcccaggaga

SEQ ID NO: 2543574 - RNA, 16 nt, Human
agccccuagcccagga

SEQ ID NO: 2543575 - RNA, 15 nt, Human
agccccuagcccagg

SEQ ID NO: 2543576 - RNA, 14 nt, Human
agccccuagcccag

SEQ ID NO: 2543577 - RNA, 12 nt, Human
agccccuagccc

SEQ ID NO: 2543578 - RNA, 21 nt, Human
agccccuaccccacaccaggc

SEQ ID NO: 2543579 - RNA, 18 nt, Human
agccccgcagaccucccc

SEQ ID NO: 2543580 - RNA, 23 nt, Human
agccccuagcccaggagagagaa

SEQ ID NO: 2543581 - RNA, 22 nt, Human
agccccuagcccaggagagaga

SEQ ID NO: 2543582 - RNA, 21 nt, Human
agccccuagcccaggagagag

SEQ ID NO: 2543583 - RNA, 13 nt, Human
agccccucccacc

SEQ ID NO: 2543584 - RNA, 14 nt, Human
agccccucccacca

SEQ ID NO: 2543585 - RNA, 18 nt, Human
agccccuggaugcagccu

SEQ ID NO: 2543586 - RNA, 17 nt, Human
agccccuggaugcagcc

SEQ ID NO: 2543587 - RNA, 19 nt, Human
agccccuggaugcagccuc

SEQ ID NO: 2543588 - RNA, 22 nt, Human
agccccuggaugcagccucaca

SEQ ID NO: 2543589 - RNA, 16 nt, Human
agccccucccaccaca

SEQ ID NO: 2543590 - RNA, 17 nt, Human
agccccucccaccacag

SEQ ID NO: 2543591 - RNA, 19 nt, Human
agcccccaccgugggcagg

SEQ ID NO: 2543592 - RNA, 12 nt, Human
agcccccagcua

SEQ ID NO: 2543593 - RNA, 19 nt, Human
agcccccacccacuucccu

SEQ ID NO: 2543594 - RNA, 19 nt, Human
agcccccacagugcugucu

SEQ ID NO: 2543595 - RNA, 16 nt, Human
agcccccacagugcug

SEQ ID NO: 2543596 - RNA, 24 nt, Human
agccccaaaacucuccucugcugc

SEQ ID NO: 2543597 - RNA, 19 nt, Human
agcccccagcuaagaaccu

SEQ ID NO: 2543598 - RNA, 20 nt, Human
agcccccagcuaagaaccug

SEQ ID NO: 2543599 - RNA, 22 nt, Human
agcccccagcuaagaaccugga

SEQ ID NO: 2543600 - RNA, 16 nt, Human
agccccgaggccuucu

SEQ ID NO: 2543601 - RNA, 22 nt, Human
agccccgaggccuucucugaag

SEQ ID NO: 2543602 - RNA, 17 nt, Human
agccccgaggccuucuc

SEQ ID NO: 2543603 - RNA, 18 nt, Human
agcccauggcacucuaug

SEQ ID NO: 2543604 - RNA, 20 nt, Human
agccccaaaacucuccucug

SEQ ID NO: 2543605 - RNA, 22 nt, Human
agccccaaaacucuccucugcu

SEQ ID NO: 2543606 - RNA, 21 nt, Human
agccccaaaacucuccucugc

SEQ ID NO: 2543607 - RNA, 18 nt, Human
agcccaucccugccuggu

SEQ ID NO: 2543608 - RNA, 17 nt, Human
agcccaucccugccugg

SEQ ID NO: 2543609 - RNA, 15 nt, Human
agcccaucccugccu

SEQ ID NO: 2543610 - RNA, 13 nt, Human
agcccaucccugc

SEQ ID NO: 2543611 - RNA, 20 nt, Human
agcccaucccugccugguca

SEQ ID NO: 2543612 - RNA, 13 nt, Human
agcccaucaauua

SEQ ID NO: 2543613 - RNA, 17 nt, Human
agcccaugaguccuuga

SEQ ID NO: 2543614 - RNA, 11 nt, Human
agcccaugccc

SEQ ID NO: 2543615 - RNA, 17 nt, Human
agcccauggacuucaca

SEQ ID NO: 2543616 - RNA, 22 nt, Human
agcccaugcccaccugcccauc

SEQ ID NO: 2543617 - RNA, 16 nt, Human
agcccaugcccaccug

SEQ ID NO: 2543618 - RNA, 20 nt, Human
agcccaugcccaccugccca

SEQ ID NO: 2543619 - RNA, 20 nt, Human
ugauucuccugccucagccu

SEQ ID NO: 2543620 - RNA, 19 nt, Human
ugauucucagggucucugc

SEQ ID NO: 2543621 - RNA, 15 nt, Human
ugauucucagggucu

SEQ ID NO: 2543622 - RNA, 16 nt, Human
agcccaggguuccccc

SEQ ID NO: 2543623 - RNA, 17 nt, Human
agcccaggguuccccca

SEQ ID NO: 2543624 - RNA, 18 nt, Human
agcccaguucagcuuggg

SEQ ID NO: 2543625 - RNA, 18 nt, Human
agcccaguagaccuuguu

SEQ ID NO: 2543626 - RNA, 23 nt, Human
agcccaggguucccccagcccug

SEQ ID NO: 2543627 - RNA, 23 nt, Human
agcccagguccucugauacccag

SEQ ID NO: 2543628 - RNA, 15 nt, Human
agcccaguagaccuu

SEQ ID NO: 2543629 - RNA, 18 nt, Human
agcccaggguucccccag

SEQ ID NO: 2543630 - RNA, 19 nt, Human
agcccaggguucccccagc

SEQ ID NO: 2543631 - RNA, 21 nt, Human
agcccaggguucccccagccc

SEQ ID NO: 2543632 - RNA, 22 nt, Human
agcccaggguucccccagcccu

SEQ ID NO: 2543633 - RNA, 19 nt, Human
ugauucuaaugucuucauu

SEQ ID NO: 2543634 - RNA, 17 nt, Human
ugauucuaaugucuuca

SEQ ID NO: 2543635 - RNA, 21 nt, Human
ugauucuauuuauauguacau

SEQ ID NO: 2543636 - RNA, 12 nt, Human
ugauucucaggg

SEQ ID NO: 2543637 - RNA, 11 nt, Human
ugauucucagg

SEQ ID NO: 2543638 - RNA, 22 nt, Human
ugauucuauuuauauguacaug

SEQ ID NO: 2543639 - RNA, 15 nt, Human
ugauucuaaugucuu

SEQ ID NO: 2543640 - RNA, 21 nt, Human
ugauucgcccaaagccagaca

SEQ ID NO: 2543641 - RNA, 22 nt, Human
ugauucgcccaaagccagacag

SEQ ID NO: 2543642 - RNA, 16 nt, Human
ugauucgcccaaagcc

SEQ ID NO: 2543643 - RNA, 15 nt, Human
ugauucuccugccuc

SEQ ID NO: 2543644 - RNA, 19 nt, Human
ugauucuccugccucagcc

SEQ ID NO: 2543645 - RNA, 23 nt, Human
agcccugguggcagugggagcug

SEQ ID NO: 2543646 - RNA, 22 nt, Human
agcccugguggcagugggagcu

SEQ ID NO: 2543647 - RNA, 15 nt, Human
ugcacaagcugcacc

SEQ ID NO: 2543648 - RNA, 15 nt, Human
agcccuguaauuuuu

SEQ ID NO: 2543649 - RNA, 22 nt, Human
agcccuggaggugccagcaaag

SEQ ID NO: 2543650 - RNA, 14 nt, Human
agcccugucagugc

SEQ ID NO: 2543651 - RNA, 12 nt, Human
ugcacacagcac

SEQ ID NO: 2543652 - RNA, 24 nt, Human
ugcacacagcacgggggccaagga

SEQ ID NO: 2543653 - RNA, 22 nt, Human
ugcacacaccagagcccaccuu

SEQ ID NO: 2543654 - RNA, 18 nt, Human
ugcacaagcugcacccuc

SEQ ID NO: 2543655 - RNA, 21 nt, Human
ugcacaagcugcacccucagg

SEQ ID NO: 2543656 - RNA, 22 nt, Human
agcccuggagccaacugcugcu

SEQ ID NO: 2543657 - RNA, 21 nt, Human
agcccuggagccaacugcugc

SEQ ID NO: 2543658 - RNA, 20 nt, Human
agcccuggagccaacugcug

SEQ ID NO: 2543659 - RNA, 19 nt, Human
agcccuggagccaacugcu

SEQ ID NO: 2543660 - RNA, 18 nt, Human
agcccuggagccaacugc

SEQ ID NO: 2543661 - RNA, 23 nt, Human
agccccuugcucuccccugcccu

SEQ ID NO: 2543662 - RNA, 20 nt, Human
agcccugcuuugggcugccc

SEQ ID NO: 2543663 - RNA, 23 nt, Human
agcccugcuuugggcugcccugg

SEQ ID NO: 2543664 - RNA, 22 nt, Human
agcccugcuuugggcugcccug

SEQ ID NO: 2543665 - RNA, 21 nt, Human
agcccuggaggugccagcaaa

SEQ ID NO: 2543666 - RNA, 18 nt, Human
agcccuggaggugccagc

SEQ ID NO: 2543667 - RNA, 17 nt, Human
agcccuggaggugccag

SEQ ID NO: 2543668 - RNA, 16 nt, Human
agcccuggaggugcca

SEQ ID NO: 2543669 - RNA, 15 nt, Human
agcccuggaggugcc

SEQ ID NO: 2543670 - RNA, 12 nt, Human
agcccuggaggu

SEQ ID NO: 2543671 - RNA, 11 nt, Human
agcccuggagg

SEQ ID NO: 2543672 - RNA, 23 nt, Human
agcccuggagccaacugcugcuu

SEQ ID NO: 2543673 - RNA, 21 nt, Human
agcccugguggcagugggagc

SEQ ID NO: 2543674 - RNA, 24 nt, Human
agccccuucugacccaugcugccc

SEQ ID NO: 2543675 - RNA, 20 nt, Human
agccccuucugacccaugcu

SEQ ID NO: 2543676 - RNA, 15 nt, Human
agccccuucugcuca

SEQ ID NO: 2543677 - RNA, 16 nt, Human
agccccuucugcucag

SEQ ID NO: 2543678 - RNA, 19 nt, Human
agccccuucugcucagcuc

SEQ ID NO: 2543679 - RNA, 22 nt, Human
agccccuucugcucagcucugg

SEQ ID NO: 2543680 - RNA, 21 nt, Human
agcccugcuuugggcugcccu

SEQ ID NO: 2543681 - RNA, 17 nt, Human
agccccuugagaaaccu

SEQ ID NO: 2543682 - RNA, 20 nt, Human
agccccuugcucuccccugc

SEQ ID NO: 2543683 - RNA, 15 nt, Human
ugcacgugugugcac

SEQ ID NO: 2543684 - RNA, 14 nt, Human
ugcacgugugugca

SEQ ID NO: 2543685 - RNA, 19 nt, Human
ugcacguggccucuugagc

SEQ ID NO: 2543686 - RNA, 16 nt, Human
ugcacccuccgccuuc

SEQ ID NO: 2543687 - RNA, 22 nt, Human
ugcacguggccucuugagcagu

SEQ ID NO: 2543688 - RNA, 12 nt, Human
ugcacgugugca

SEQ ID NO: 2543689 - RNA, 16 nt, Human
ugcacccuccacccug

SEQ ID NO: 2543690 - RNA, 15 nt, Human
ugcacccuccacccu

SEQ ID NO: 2543691 - RNA, 14 nt, Human
ugcacccuccaccc

SEQ ID NO: 2543692 - RNA, 16 nt, Human
ugcacccgccucuccc

SEQ ID NO: 2543693 - RNA, 18 nt, Human
ugcacccuccacccuguc

SEQ ID NO: 2543694 - RNA, 17 nt, Human
ugcacccuccacccugu

SEQ ID NO: 2543695 - RNA, 14 nt, Human
ugcacccuccgccu

SEQ ID NO: 2543696 - RNA, 14 nt, Human
ugcacccgccucuc

SEQ ID NO: 2543697 - RNA, 20 nt, Human
ugcaccccuucucuccuccc

SEQ ID NO: 2543698 - RNA, 19 nt, Human
ugcaccccuucucuccucc

SEQ ID NO: 2543699 - RNA, 15 nt, Human
ugcaccccuucucuc

SEQ ID NO: 2543700 - RNA, 22 nt, Human
ugcacccaugggcucugacaga

SEQ ID NO: 2543701 - RNA, 21 nt, Human
ugcacccaugggcucugacag

SEQ ID NO: 2543702 - RNA, 20 nt, Human
ugcacccaugggcucugaca

SEQ ID NO: 2543703 - RNA, 18 nt, Human
ugcacccaugggcucuga

SEQ ID NO: 2543704 - RNA, 15 nt, Human
ugcacccaugggcuc

SEQ ID NO: 2543705 - RNA, 15 nt, Human
ugcacccaggggugg

SEQ ID NO: 2543706 - RNA, 17 nt, Human
ugcacccagcccugguc

SEQ ID NO: 2543707 - RNA, 16 nt, Human
ugcacccagcccuggu

SEQ ID NO: 2543708 - RNA, 15 nt, Human
ugcacccagcccugg

SEQ ID NO: 2543709 - RNA, 14 nt, Human
ugcacccagcccug

SEQ ID NO: 2543710 - RNA, 13 nt, Human
ugcacccagcccu

SEQ ID NO: 2543711 - RNA, 16 nt, Human
ugcacccucaggcagg

SEQ ID NO: 2543712 - RNA, 17 nt, Human
ugcacccucaggcaggu

SEQ ID NO: 2543713 - RNA, 10 nt, Human
ugcacacauu

SEQ ID NO: 2543714 - RNA, 20 nt, Human
ugcacacauuuuuuaaaugc

SEQ ID NO: 2543715 - RNA, 18 nt, Human
ugcacacccacucagcuc

SEQ ID NO: 2543716 - RNA, 16 nt, Human
ugcacacccacucagc

SEQ ID NO: 2543717 - RNA, 17 nt, Human
ugcacacccacucagcu

SEQ ID NO: 2543718 - RNA, 14 nt, Human
ugcacacagugcuu

SEQ ID NO: 2543719 - RNA, 14 nt, Human
ugcacacccacuca

SEQ ID NO: 2543720 - RNA, 16 nt, Human
ugcaccaucccuuuuu

SEQ ID NO: 2543721 - RNA, 18 nt, Human
ugcacacuccccugcacu

SEQ ID NO: 2543722 - RNA, 21 nt, Human
ugcacacuagccucuccagga

SEQ ID NO: 2543723 - RNA, 21 nt, Human
ugcacacuccccugcacugga

SEQ ID NO: 2543724 - RNA, 19 nt, Human
ugcacacuagccucuccag

SEQ ID NO: 2543725 - RNA, 17 nt, Human
ugcacccacccaggagu

SEQ ID NO: 2543726 - RNA, 18 nt, Human
ugcacccacccaggagug

SEQ ID NO: 2543727 - RNA, 21 nt, Human
ugcacccacucugcuuugacu

SEQ ID NO: 2543728 - RNA, 22 nt, Human
ugcaccaucccuuuuugaagug

SEQ ID NO: 2543729 - RNA, 21 nt, Human
ugcaccaucccuuuuugaagu

SEQ ID NO: 2543730 - RNA, 23 nt, Human
ugcaccaucccuuuuugaagugu

SEQ ID NO: 2543731 - RNA, 23 nt, Human
ugcaccauugcgcucuagccugg

SEQ ID NO: 2543732 - RNA, 19 nt, Human
uggcacaguuuucugagaa

SEQ ID NO: 2543733 - RNA, 13 nt, Human
uggcagccuuggc

SEQ ID NO: 2543734 - RNA, 18 nt, Human
uggcacaguuuucugaga

SEQ ID NO: 2543735 - RNA, 20 nt, Human
uggcacagugucugggcuga

SEQ ID NO: 2543736 - RNA, 19 nt, Human
uggcacagugucugggcug

SEQ ID NO: 2543737 - RNA, 18 nt, Human
uggcacagugucugggcu

SEQ ID NO: 2543738 - RNA, 16 nt, Human
uggcacagugucuggg

SEQ ID NO: 2543739 - RNA, 19 nt, Human
uggcaaugccaucaucucc

SEQ ID NO: 2543740 - RNA, 14 nt, Human
uggcaauucuuuga

SEQ ID NO: 2543741 - RNA, 16 nt, Human
uggcacagggcagugg

SEQ ID NO: 2543742 - RNA, 23 nt, Human
uggcacaauggcuaauucccaga

SEQ ID NO: 2543743 - RNA, 18 nt, Human
uggcacagggcaguggga

SEQ ID NO: 2543744 - RNA, 14 nt, Human
uggcaauuuuguaa

SEQ ID NO: 2543745 - RNA, 15 nt, Human
uggcaauuuuguaac

SEQ ID NO: 2543746 - RNA, 13 nt, Human
uggcaauuuugua

SEQ ID NO: 2543747 - RNA, 23 nt, Human
uggcaauucuuugaccucaaccu

SEQ ID NO: 2543748 - RNA, 18 nt, Human
aggccacaagacccuugu

SEQ ID NO: 2543749 - RNA, 17 nt, Human
aggccacaagacccuug

SEQ ID NO: 2543750 - RNA, 19 nt, Human
aggccacaagacccuugug

SEQ ID NO: 2543751 - RNA, 14 nt, Human
aggccagagggagu

SEQ ID NO: 2543752 - RNA, 19 nt, Human
uggcagcucaccucucccu

SEQ ID NO: 2543753 - RNA, 16 nt, Human
aggccacaagacccuu

SEQ ID NO: 2543754 - RNA, 15 nt, Human
uggcagcucaccucu

SEQ ID NO: 2543755 - RNA, 17 nt, Human
uggcagccuuggcaaac

SEQ ID NO: 2543756 - RNA, 20 nt, Human
aggccagagggagugacaga

SEQ ID NO: 2543757 - RNA, 22 nt, Human
aggccagaggcccccagcccag

SEQ ID NO: 2543758 - RNA, 16 nt, Human
aggccagaguggccug

SEQ ID NO: 2543759 - RNA, 17 nt, Human
aggccagaguggccugg

SEQ ID NO: 2543760 - RNA, 13 nt, Human
aggccagccagug

SEQ ID NO: 2543761 - RNA, 22 nt, Human
aggccagccagugaccugagga

SEQ ID NO: 2543762 - RNA, 18 nt, Human
aggccagaggcccccagc

SEQ ID NO: 2543763 - RNA, 19 nt, Human
aggccagaguggccuggcc

SEQ ID NO: 2543764 - RNA, 20 nt, Human
aggccagaguggccuggcca

SEQ ID NO: 2543765 - RNA, 21 nt, Human
aggccagaguggccuggccag

SEQ ID NO: 2543766 - RNA, 22 nt, Human
aggccagaguggccuggccagg

SEQ ID NO: 2543767 - RNA, 17 nt, Human
aggccagccuccgagag

SEQ ID NO: 2543768 - RNA, 14 nt, Human
aggccagccuccga

SEQ ID NO: 2543769 - RNA, 13 nt, Human
aggccagccuccg

SEQ ID NO: 2543770 - RNA, 11 nt, Human
aggccagccuc

SEQ ID NO: 2543771 - RNA, 22 nt, Human
aggccagccuccgagagggaga

SEQ ID NO: 2543772 - RNA, 18 nt, Human
aggccagccuccgagagg

SEQ ID NO: 2543773 - RNA, 23 nt, Human
aggccagccuccgagagggagag

SEQ ID NO: 2543774 - RNA, 21 nt, Human
aggcccagagggccugcaagg

SEQ ID NO: 2543775 - RNA, 10 nt, Human
aggccagccu

SEQ ID NO: 2543776 - RNA, 21 nt, Human
aggccagccccacccaggagg

SEQ ID NO: 2543777 - RNA, 17 nt, Human
aggccagccccacccag

SEQ ID NO: 2543778 - RNA, 18 nt, Human
aggccagccccacccagg

SEQ ID NO: 2543779 - RNA, 13 nt, Human
aggccagccccac

SEQ ID NO: 2543780 - RNA, 14 nt, Human
aggccagccccacc

SEQ ID NO: 2543781 - RNA, 15 nt, Human
aggccagccccaccc

SEQ ID NO: 2543782 - RNA, 16 nt, Human
aggccagccccaccca

SEQ ID NO: 2543783 - RNA, 22 nt, Human
aggccccaaaggaaaaagcaca

SEQ ID NO: 2543784 - RNA, 21 nt, Human
aggccccaaaggaaaaagcac

SEQ ID NO: 2543785 - RNA, 13 nt, Human
aggccccaaagga

SEQ ID NO: 2543786 - RNA, 21 nt, Human
aggccccaaaaccacagcccu

SEQ ID NO: 2543787 - RNA, 23 nt, Human
aggccccaaaaccacagcccugu

SEQ ID NO: 2543788 - RNA, 13 nt, Human
aggccccacuggg

SEQ ID NO: 2543789 - RNA, 15 nt, Human
aggccccacugggga

SEQ ID NO: 2543790 - RNA, 17 nt, Human
aggccccacuggggaaa

SEQ ID NO: 2543791 - RNA, 13 nt, Human
aggccccagagac

SEQ ID NO: 2543792 - RNA, 14 nt, Human
aggccccagagacu

SEQ ID NO: 2543793 - RNA, 20 nt, Human
aggccccagagacucagagg

SEQ ID NO: 2543794 - RNA, 16 nt, Human
aggccccgcccaggcu

SEQ ID NO: 2543795 - RNA, 12 nt, Human
aggccccagccu

SEQ ID NO: 2543796 - RNA, 13 nt, Human
aggccccagccuc

SEQ ID NO: 2543797 - RNA, 14 nt, Human
aggccccagccucc

SEQ ID NO: 2543798 - RNA, 22 nt, Human
aggccccagagacucagaggga

SEQ ID NO: 2543799 - RNA, 12 nt, Human
aggccccaggaa

SEQ ID NO: 2543800 - RNA, 22 nt, Human
aggcccagcauugcugguucua

SEQ ID NO: 2543801 - RNA, 21 nt, Human
aggcccagcauugcugguucu

SEQ ID NO: 2543802 - RNA, 20 nt, Human
aggcccagcauugcugguuc

SEQ ID NO: 2543803 - RNA, 19 nt, Human
aggcccagcauugcugguu

SEQ ID NO: 2543804 - RNA, 18 nt, Human
aggcccagcauugcuggu

SEQ ID NO: 2543805 - RNA, 10 nt, Human
aggcccagca

SEQ ID NO: 2543806 - RNA, 13 nt, Human
aggcccagcauug

SEQ ID NO: 2543807 - RNA, 13 nt, Human
aggcccagugaga

SEQ ID NO: 2543808 - RNA, 17 nt, Human
aggcccaguucacccug

SEQ ID NO: 2543809 - RNA, 17 nt, Human
aggcccagugagaugca

SEQ ID NO: 2543810 - RNA, 18 nt, Human
aggcccaugguugagaaa

SEQ ID NO: 2543811 - RNA, 18 nt, Human
aggccccaaaaccacagc

SEQ ID NO: 2543812 - RNA, 18 nt, Human
uggauggccccagcacag

SEQ ID NO: 2543813 - RNA, 17 nt, Human
uggauggccccagcaca

SEQ ID NO: 2543814 - RNA, 16 nt, Human
uggauggccccagcac

SEQ ID NO: 2543815 - RNA, 15 nt, Human
uggauggccccagca

SEQ ID NO: 2543816 - RNA, 14 nt, Human
uggauggccccagc

SEQ ID NO: 2543817 - RNA, 15 nt, Human
uggauggagcccagg

SEQ ID NO: 2543818 - RNA, 15 nt, Human
uggauggaaggggcu

SEQ ID NO: 2543819 - RNA, 18 nt, Human
uggaugggggaacucaga

SEQ ID NO: 2543820 - RNA, 21 nt, Human
uggaugggggaacucagaucc

SEQ ID NO: 2543821 - RNA, 21 nt, Human
uggaugggggaaauggugccu

SEQ ID NO: 2543822 - RNA, 17 nt, Human
uggaugggagugagaca

SEQ ID NO: 2543823 - RNA, 21 nt, Human
uggauggccccagcacagcuu

SEQ ID NO: 2543824 - RNA, 13 nt, Human
uggauggcuucua

SEQ ID NO: 2543825 - RNA, 21 nt, Human
uggagguugcagugagccaag

SEQ ID NO: 2543826 - RNA, 20 nt, Human
uggagguugcagugagcuga

SEQ ID NO: 2543827 - RNA, 15 nt, Human
uggagguuucauacu

SEQ ID NO: 2543828 - RNA, 13 nt, Human
uggauggaagggg

SEQ ID NO: 2543829 - RNA, 16 nt, Human
uggaguauaauauuca

SEQ ID NO: 2543830 - RNA, 14 nt, Human
uggaguauauguca

SEQ ID NO: 2543831 - RNA, 24 nt, Human
uggagguuaaggcugaggaaaggc

SEQ ID NO: 2543832 - RNA, 22 nt, Human
uggagggucccaagcugggccc

SEQ ID NO: 2543833 - RNA, 20 nt, Human
uggagguuaaggcugaggaa

SEQ ID NO: 2543834 - RNA, 21 nt, Human
uggagguuaaggcugaggaaa

SEQ ID NO: 2543835 - RNA, 22 nt, Human
uggagguuaaggcugaggaaag

SEQ ID NO: 2543836 - RNA, 22 nt, Human
uggagguugaagccaagugggg

SEQ ID NO: 2543837 - RNA, 18 nt, Human
uggagguugaagccaagu

SEQ ID NO: 2543838 - RNA, 17 nt, Human
uggagguugaagccaag

SEQ ID NO: 2543839 - RNA, 15 nt, Human
uggagguugaagcca

SEQ ID NO: 2543840 - RNA, 17 nt, Human
uggagguugauaacuuu

SEQ ID NO: 2543841 - RNA, 14 nt, Human
uggagguugauaac

SEQ ID NO: 2543842 - RNA, 20 nt, Human
uggagguugauaacuuugcu

SEQ ID NO: 2543843 - RNA, 14 nt, Human
uggagguugcagug

SEQ ID NO: 2543844 - RNA, 16 nt, Human
uggauuauuuaauaac

SEQ ID NO: 2543845 - RNA, 23 nt, Human
uggauuggagaaguaauccuagg

SEQ ID NO: 2543846 - RNA, 14 nt, Human
uggauuauuuaaua

SEQ ID NO: 2543847 - RNA, 13 nt, Human
uggauuauuuaau

SEQ ID NO: 2543848 - RNA, 20 nt, Human
uggauuauucauuuaaaaug

SEQ ID NO: 2543849 - RNA, 19 nt, Human
uggauuauucauuuaaaau

SEQ ID NO: 2543850 - RNA, 18 nt, Human
uggauuauucauuuaaaa

SEQ ID NO: 2543851 - RNA, 17 nt, Human
uggauuauucauuuaaa

SEQ ID NO: 2543852 - RNA, 16 nt, Human
uggauuauucauuuaa

SEQ ID NO: 2543853 - RNA, 14 nt, Human
uggauuauucauuu

SEQ ID NO: 2543854 - RNA, 13 nt, Human
uggauuauucauu

SEQ ID NO: 2543855 - RNA, 17 nt, Human
uggauuaauuaaaugca

SEQ ID NO: 2543856 - RNA, 17 nt, Human
uggauuauauuaugaag

SEQ ID NO: 2543857 - RNA, 20 nt, Human
uggauuacugccauucacuu

SEQ ID NO: 2543858 - RNA, 13 nt, Human
uggauuguccccg

SEQ ID NO: 2543859 - RNA, 13 nt, Human
uggcaauauagaa

SEQ ID NO: 2543860 - RNA, 21 nt, Human
uggauuguccccgacccuugc

SEQ ID NO: 2543861 - RNA, 21 nt, Human
uggauuggauuauuuaauaac

SEQ ID NO: 2543862 - RNA, 20 nt, Human
uggauuggauuauuuaauaa

SEQ ID NO: 2543863 - RNA, 17 nt, Human
uggauuggauuauuuaa

SEQ ID NO: 2543864 - RNA, 16 nt, Human
uggauuggauuauuua

SEQ ID NO: 2543865 - RNA, 15 nt, Human
uggauuggauuauuu

SEQ ID NO: 2543866 - RNA, 21 nt, Human
uggauuggagauagggaaaga

SEQ ID NO: 2543867 - RNA, 20 nt, Human
uggauuggagauagggaaag

SEQ ID NO: 2543868 - RNA, 15 nt, Human
uggauuauuuaauaa

SEQ ID NO: 2543869 - RNA, 23 nt, Human
uggauuggauuauuuaauaacau

SEQ ID NO: 2543870 - RNA, 14 nt, Human
uggauugggguccc

SEQ ID NO: 2543871 - RNA, 18 nt, Human
uggauuggguuaugaaua

SEQ ID NO: 2543872 - RNA, 17 nt, Human
uggauugguguaaaagg

SEQ ID NO: 2543873 - RNA, 14 nt, Human
aggccaagaaucaa

SEQ ID NO: 2543874 - RNA, 19 nt, Human
aggccaaaggaagcacaug

SEQ ID NO: 2543875 - RNA, 18 nt, Human
aggccaaaggaagcacau

SEQ ID NO: 2543876 - RNA, 16 nt, Human
aggccaaaggaagcac

SEQ ID NO: 2543877 - RNA, 17 nt, Human
aggcagccccauucugc

SEQ ID NO: 2543878 - RNA, 16 nt, Human
aggcagccccauucug

SEQ ID NO: 2543879 - RNA, 18 nt, Human
aggcagccaggccacaag

SEQ ID NO: 2543880 - RNA, 22 nt, Human
aggcaccucacagaaaugagau

SEQ ID NO: 2543881 - RNA, 21 nt, Human
aggcaccuauaaaacagguca

SEQ ID NO: 2543882 - RNA, 21 nt, Human
uggagggucccaagcugggcc

SEQ ID NO: 2543883 - RNA, 19 nt, Human
uggagggucccaagcuggg

SEQ ID NO: 2543884 - RNA, 18 nt, Human
uggagggucccaagcugg

SEQ ID NO: 2543885 - RNA, 17 nt, Human
uggagggucccaagcug

SEQ ID NO: 2543886 - RNA, 16 nt, Human
uggagggucccaagcu

SEQ ID NO: 2543887 - RNA, 15 nt, Human
uggagggucccaagc

SEQ ID NO: 2543888 - RNA, 23 nt, Human
uggagggguguggcuccuuccca

SEQ ID NO: 2543889 - RNA, 20 nt, Human
uggagggugggagagcccag

SEQ ID NO: 2543890 - RNA, 14 nt, Human
uggagguacacucu

SEQ ID NO: 2543891 - RNA, 19 nt, Human
uggagggguguggcagugg

SEQ ID NO: 2543892 - RNA, 18 nt, Human
uggagggguguggcagug

SEQ ID NO: 2543893 - RNA, 17 nt, Human
uggagggguguggcagu

SEQ ID NO: 2543894 - RNA, 11 nt, Human
uggaggggugu

SEQ ID NO: 2543895 - RNA, 14 nt, Human
uggagggguguggc

SEQ ID NO: 2543896 - RNA, 13 nt, Human
uggaggggugugg

SEQ ID NO: 2543897 - RNA, 19 nt, Human
uggaggggugguccugacu

SEQ ID NO: 2543898 - RNA, 20 nt, Human
uggaggggugguccugacuc

SEQ ID NO: 2543899 - RNA, 14 nt, Human
aggccaagaggcug

SEQ ID NO: 2543900 - RNA, 14 nt, Human
aggccaagagcaga

SEQ ID NO: 2543901 - RNA, 17 nt, Human
aggccaagagcagaggc

SEQ ID NO: 2543902 - RNA, 18 nt, Human
aggccaagagcagaggca

SEQ ID NO: 2543903 - RNA, 20 nt, Human
aggccaagagcagaggcagc

SEQ ID NO: 2543904 - RNA, 16 nt, Human
aggccaaggugggagg

SEQ ID NO: 2543905 - RNA, 17 nt, Human
aggccaaggccuucucc

SEQ ID NO: 2543906 - RNA, 18 nt, Human
aggccaaggcggguggau

SEQ ID NO: 2543907 - RNA, 21 nt, Human
uggccggucugcaagucagag

SEQ ID NO: 2543908 - RNA, 20 nt, Human
uggccggucugcaagucaga

SEQ ID NO: 2543909 - RNA, 18 nt, Human
uggccggucugcaaguca

SEQ ID NO: 2543910 - RNA, 15 nt, Human
uggccggucugcaag

SEQ ID NO: 2543911 - RNA, 18 nt, Human
uggccgggugcgguggcu

SEQ ID NO: 2543912 - RNA, 17 nt, Human
uggccgggugcgguggc

SEQ ID NO: 2543913 - RNA, 15 nt, Human
uggcccugucccucc

SEQ ID NO: 2543914 - RNA, 19 nt, Human
uggcccuggggucccacga

SEQ ID NO: 2543915 - RNA, 21 nt, Human
uggccguugauguuggcuggg

SEQ ID NO: 2543916 - RNA, 19 nt, Human
uggccguugauguuggcug

SEQ ID NO: 2543917 - RNA, 14 nt, Human
uggccguuaucugg

SEQ ID NO: 2543918 - RNA, 19 nt, Human
uggccgugggccuggggua

SEQ ID NO: 2543919 - RNA, 22 nt, Human
uggccggucugcaagucagagg

SEQ ID NO: 2543920 - RNA, 14 nt, Human
uggccgugggccug

SEQ ID NO: 2543921 - RNA, 13 nt, Human
uggccucuucaga

SEQ ID NO: 2543922 - RNA, 16 nt, Human
uggccuaaaaaugcaa

SEQ ID NO: 2543923 - RNA, 16 nt, Human
uggcccugccuucuuc

SEQ ID NO: 2543924 - RNA, 11 nt, Human
uggcccugccu

SEQ ID NO: 2543925 - RNA, 12 nt, Human
uggcccugccuu

SEQ ID NO: 2543926 - RNA, 13 nt, Human
uggcccuggccug

SEQ ID NO: 2543927 - RNA, 14 nt, Human
uggcccuggccugc

SEQ ID NO: 2543928 - RNA, 15 nt, Human
uggcccuggccugcu

SEQ ID NO: 2543929 - RNA, 16 nt, Human
uggcccuggccugcug

SEQ ID NO: 2543930 - RNA, 17 nt, Human
uggcccuggccugcugg

SEQ ID NO: 2543931 - RNA, 18 nt, Human
uggcccuggccugcuggg

SEQ ID NO: 2543932 - RNA, 23 nt, Human
uggccgggcgcgguggcucacgc

SEQ ID NO: 2543933 - RNA, 13 nt, Human
uggcccugucccu

SEQ ID NO: 2543934 - RNA, 13 nt, Human
uggcccugggguc

SEQ ID NO: 2543935 - RNA, 12 nt, Human
uggcccuggggu

SEQ ID NO: 2543936 - RNA, 19 nt, Human
uggcccaaaacgucuuauu

SEQ ID NO: 2543937 - RNA, 19 nt, Human
uggccauuuagccaccauc

SEQ ID NO: 2543938 - RNA, 19 nt, Human
uggcccacagcaggugcug

SEQ ID NO: 2543939 - RNA, 21 nt, Human
uggcccaaguggcagagcuug

SEQ ID NO: 2543940 - RNA, 19 nt, Human
uggcccaaguggcagagcu

SEQ ID NO: 2543941 - RNA, 14 nt, Human
uggccauuugcuuu

SEQ ID NO: 2543942 - RNA, 15 nt, Human
uggccauuugcuuuu

SEQ ID NO: 2543943 - RNA, 17 nt, Human
uggccauucuauugugg

SEQ ID NO: 2543944 - RNA, 16 nt, Human
uggccauuuagccacc

SEQ ID NO: 2543945 - RNA, 14 nt, Human
uggcccugcccugg

SEQ ID NO: 2543946 - RNA, 13 nt, Human
uggcccacgcacu

SEQ ID NO: 2543947 - RNA, 22 nt, Human
uggccaugguacccccuucugg

SEQ ID NO: 2543948 - RNA, 18 nt, Human
uggccaugguacccccuu

SEQ ID NO: 2543949 - RNA, 16 nt, Human
uggccaugguaccccc

SEQ ID NO: 2543950 - RNA, 22 nt, Human
uggccaugccacccuguuuuca

SEQ ID NO: 2543951 - RNA, 20 nt, Human
uggccaugccucagcccuga

SEQ ID NO: 2543952 - RNA, 18 nt, Human
uggccaugccucagcccu

SEQ ID NO: 2543953 - RNA, 17 nt, Human
uggccaugccucagccc

SEQ ID NO: 2543954 - RNA, 15 nt, Human
uggccaugccucagc

SEQ ID NO: 2543955 - RNA, 14 nt, Human
uggccaugccucag

SEQ ID NO: 2543956 - RNA, 14 nt, Human
uggccuucggccuc

SEQ ID NO: 2543957 - RNA, 21 nt, Human
aggccugggccgcugccacgu

SEQ ID NO: 2543958 - RNA, 20 nt, Human
aggccugggccgcugccacg

SEQ ID NO: 2543959 - RNA, 16 nt, Human
uggccuuccugcccua

SEQ ID NO: 2543960 - RNA, 19 nt, Human
aggccugggccgcugccac

SEQ ID NO: 2543961 - RNA, 14 nt, Human
uggccuuccugccc

SEQ ID NO: 2543962 - RNA, 18 nt, Human
uggccuuccccagccucu

SEQ ID NO: 2543963 - RNA, 18 nt, Human
uggccuguuucaacacag

SEQ ID NO: 2543964 - RNA, 18 nt, Human
uggccuuccauuuauaug

SEQ ID NO: 2543965 - RNA, 16 nt, Human
uggccuuccccagccu

SEQ ID NO: 2543966 - RNA, 23 nt, Human
uggccuguuuuagaagguucucu

SEQ ID NO: 2543967 - RNA, 17 nt, Human
uggccuuccccagccuc

SEQ ID NO: 2543968 - RNA, 20 nt, Human
aggccugggggcugggcaga

SEQ ID NO: 2543969 - RNA, 23 nt, Human
aggccugugugugaaaggaagcu

SEQ ID NO: 2543970 - RNA, 12 nt, Human
aggccugugugu

SEQ ID NO: 2543971 - RNA, 17 nt, Human
aggccugggggcaggga

SEQ ID NO: 2543972 - RNA, 18 nt, Human
aggccugggggcugggca

SEQ ID NO: 2543973 - RNA, 12 nt, Human
aggccuggggac

SEQ ID NO: 2543974 - RNA, 21 nt, Human
uggccuggccccucagggucc

SEQ ID NO: 2543975 - RNA, 18 nt, Human
uggccuggccccucaggg

SEQ ID NO: 2543976 - RNA, 16 nt, Human
uggccuggccggcaac

SEQ ID NO: 2543977 - RNA, 21 nt, Human
uggccuguucuucuauggguu

SEQ ID NO: 2543978 - RNA, 16 nt, Human
uggccuggcuucuccu

SEQ ID NO: 2543979 - RNA, 13 nt, Human
uggccuggccggc

SEQ ID NO: 2543980 - RNA, 13 nt, Human
uggccugggagag

SEQ ID NO: 2543981 - RNA, 22 nt, Human
uggccucuugagcaguggcugg

SEQ ID NO: 2543982 - RNA, 20 nt, Human
uggccucuugagcaguggcu

SEQ ID NO: 2543983 - RNA, 14 nt, Human
uggccucuuugucu

SEQ ID NO: 2543984 - RNA, 14 nt, Human
uggccucuuuucag

SEQ ID NO: 2543985 - RNA, 22 nt, Human
uggccucuuugucuaaaacaau

SEQ ID NO: 2543986 - RNA, 19 nt, Human
uggccucuugagcaguggc

SEQ ID NO: 2543987 - RNA, 17 nt, Human
uggccucuugagcagug

SEQ ID NO: 2543988 - RNA, 14 nt, Human
uggccguuggccac

SEQ ID NO: 2543989 - RNA, 22 nt, Human
uggccguugauguuggcuggga

SEQ ID NO: 2543990 - RNA, 12 nt, Human
uggccuggcccc

SEQ ID NO: 2543991 - RNA, 14 nt, Human
uggccugagaagag

SEQ ID NO: 2543992 - RNA, 23 nt, Human
uggccucuuuucagaucauggca

SEQ ID NO: 2543993 - RNA, 21 nt, Human
uggccugaagaguccucugaa

SEQ ID NO: 2543994 - RNA, 13 nt, Human
uggcauccuguga

SEQ ID NO: 2543995 - RNA, 19 nt, Human
uggcauagcccagacacag

SEQ ID NO: 2543996 - RNA, 22 nt, Human
uggcauacgccuguaguccuag

SEQ ID NO: 2543997 - RNA, 17 nt, Human
uggcauagcccagacac

SEQ ID NO: 2543998 - RNA, 14 nt, Human
uggcauuggcagca

SEQ ID NO: 2543999 - RNA, 21 nt, Human
uggcaucuuugccuugggcug

SEQ ID NO: 2544000 - RNA, 23 nt, Human
uggcaucuuugccuugggcugcu

SEQ ID NO: 2544001 - RNA, 21 nt, Human
uggcauuggcagcaggugcug

SEQ ID NO: 2544002 - RNA, 20 nt, Human
uggcauuggcagcaggugcu

SEQ ID NO: 2544003 - RNA, 19 nt, Human
uggcauuggcagcaggugc

SEQ ID NO: 2544004 - RNA, 19 nt, Human
uggcauugucccugugccu

SEQ ID NO: 2544005 - RNA, 16 nt, Human
uggcauugucccugug

SEQ ID NO: 2544006 - RNA, 20 nt, Human
uggcauugucccugugccua

SEQ ID NO: 2544007 - RNA, 23 nt, Human
uggcaucgcaccauucugacucg

SEQ ID NO: 2544008 - RNA, 22 nt, Human
uggcaucgcaccauucugacuc

SEQ ID NO: 2544009 - RNA, 16 nt, Human
uggcauccugugaagu

SEQ ID NO: 2544010 - RNA, 15 nt, Human
uggcauccugugaag

SEQ ID NO: 2544011 - RNA, 21 nt, Human
uggcaucgcaccauucugacu

SEQ ID NO: 2544012 - RNA, 17 nt, Human
uggcauccugugaaguc

SEQ ID NO: 2544013 - RNA, 16 nt, Human
uggcaucuuugccuug

SEQ ID NO: 2544014 - RNA, 20 nt, Human
uggcaucuuugccuugggcu

SEQ ID NO: 2544015 - RNA, 18 nt, Human
aggccugagcgcuccugc

SEQ ID NO: 2544016 - RNA, 14 nt, Human
aggccugagcgcuc

SEQ ID NO: 2544017 - RNA, 23 nt, Human
aggccugagauuucaucugcucu

SEQ ID NO: 2544018 - RNA, 22 nt, Human
aggccugagauuucaucugcuc

SEQ ID NO: 2544019 - RNA, 21 nt, Human
aggccugagauuucaucugcu

SEQ ID NO: 2544020 - RNA, 20 nt, Human
aggccugagauuucaucugc

SEQ ID NO: 2544021 - RNA, 19 nt, Human
aggccugagauuucaucug

SEQ ID NO: 2544022 - RNA, 17 nt, Human
aggccugagauuucauc

SEQ ID NO: 2544023 - RNA, 21 nt, Human
aggccugagcgcuccugccgc

SEQ ID NO: 2544024 - RNA, 19 nt, Human
aggccugagcgcuccugcc

SEQ ID NO: 2544025 - RNA, 22 nt, Human
aggccugagcgcuccugccgca

SEQ ID NO: 2544026 - RNA, 14 nt, Human
aggccugaggauga

SEQ ID NO: 2544027 - RNA, 16 nt, Human
aggccugagauuucau

SEQ ID NO: 2544028 - RNA, 12 nt, Human
aggccccugcca

SEQ ID NO: 2544029 - RNA, 17 nt, Human
aggccccgcccaggcuu

SEQ ID NO: 2544030 - RNA, 21 nt, Human
aggccccuauguaguccgugc

SEQ ID NO: 2544031 - RNA, 22 nt, Human
aggccccgcuuguccagcgccu

SEQ ID NO: 2544032 - RNA, 20 nt, Human
aggccccgcuuguccagcgc

SEQ ID NO: 2544033 - RNA, 21 nt, Human
aggccccgcuuguccagcgcc

SEQ ID NO: 2544034 - RNA, 13 nt, Human
aggccccaggaag

SEQ ID NO: 2544035 - RNA, 15 nt, Human
aggccccgcuugucc

SEQ ID NO: 2544036 - RNA, 17 nt, Human
aggccccgcuuguccag

SEQ ID NO: 2544037 - RNA, 18 nt, Human
aggccccgcuuguccagc

SEQ ID NO: 2544038 - RNA, 20 nt, Human
uggccaccaggcuggcgcag

SEQ ID NO: 2544039 - RNA, 19 nt, Human
uggccaccaggcuggcgca

SEQ ID NO: 2544040 - RNA, 18 nt, Human
uggccaccaggcuggcgc

SEQ ID NO: 2544041 - RNA, 17 nt, Human
uggccaccaggcuggcg

SEQ ID NO: 2544042 - RNA, 16 nt, Human
uggccaccaggcuggc

SEQ ID NO: 2544043 - RNA, 15 nt, Human
uggccaccaggcugg

SEQ ID NO: 2544044 - RNA, 14 nt, Human
uggccaccaggcug

SEQ ID NO: 2544045 - RNA, 13 nt, Human
uggccaccaggcu

SEQ ID NO: 2544046 - RNA, 12 nt, Human
uggccaccaggc

SEQ ID NO: 2544047 - RNA, 23 nt, Human
uggccaccaccccccacucugug

SEQ ID NO: 2544048 - RNA, 18 nt, Human
uggccaccaccccccacu

SEQ ID NO: 2544049 - RNA, 15 nt, Human
uggccaccacccccc

SEQ ID NO: 2544050 - RNA, 13 nt, Human
uggccaccacccc

SEQ ID NO: 2544051 - RNA, 17 nt, Human
uggccacaguagucuug

SEQ ID NO: 2544052 - RNA, 15 nt, Human
uggccagguggccac

SEQ ID NO: 2544053 - RNA, 11 nt, Human
uggccaggugg

SEQ ID NO: 2544054 - RNA, 22 nt, Human
uggccaccaggcuggcgcagcc

SEQ ID NO: 2544055 - RNA, 21 nt, Human
uggccaccaggcuggcgcagc

SEQ ID NO: 2544056 - RNA, 19 nt, Human
uggccacccguucugcugg

SEQ ID NO: 2544057 - RNA, 22 nt, Human
uggccacccguucugcuggccu

SEQ ID NO: 2544058 - RNA, 23 nt, Human
uggccaccaggcuggcgcagcca

SEQ ID NO: 2544059 - RNA, 15 nt, Human
uggccaccucucucc

SEQ ID NO: 2544060 - RNA, 23 nt, Human
uggccaaagccaaagcuaggccu

SEQ ID NO: 2544061 - RNA, 21 nt, Human
uggccaaagccaaagcuaggc

SEQ ID NO: 2544062 - RNA, 15 nt, Human
uggccaguccaggcu

SEQ ID NO: 2544063 - RNA, 14 nt, Human
uggccaguccaggc

SEQ ID NO: 2544064 - RNA, 19 nt, Human
uggccagguggccacucca

SEQ ID NO: 2544065 - RNA, 17 nt, Human
uggccagguggccacuc

SEQ ID NO: 2544066 - RNA, 16 nt, Human
uggccagguggccacu

SEQ ID NO: 2544067 - RNA, 23 nt, Human
uggccagugugacaaggauugcu

SEQ ID NO: 2544068 - RNA, 14 nt, Human
uggccagugucugu

SEQ ID NO: 2544069 - RNA, 16 nt, Human
uggccagugugauccc

SEQ ID NO: 2544070 - RNA, 13 nt, Human
uggccaucccaca

SEQ ID NO: 2544071 - RNA, 16 nt, Human
uggccaguuaucccuu

SEQ ID NO: 2544072 - RNA, 16 nt, Human
uggccaucucuggaug

SEQ ID NO: 2544073 - RNA, 16 nt, Human
uggccaucuccacccc

SEQ ID NO: 2544074 - RNA, 17 nt, Human
uggccaucucuggaugc

SEQ ID NO: 2544075 - RNA, 13 nt, Human
uggccaucuccac

SEQ ID NO: 2544076 - RNA, 14 nt, Human
uggccaucucugga

SEQ ID NO: 2544077 - RNA, 14 nt, Human
uggacacagcucuu

SEQ ID NO: 2544078 - RNA, 13 nt, Human
uggacacagcucu

SEQ ID NO: 2544079 - RNA, 22 nt, Human
uggacacagcucuucuccaggc

SEQ ID NO: 2544080 - RNA, 21 nt, Human
uggacacagcucuucuccagg

SEQ ID NO: 2544081 - RNA, 18 nt, Human
uggacaauacccccaggc

SEQ ID NO: 2544082 - RNA, 17 nt, Human
uggacacacaaggugca

SEQ ID NO: 2544083 - RNA, 13 nt, Human
uggaauucuaaca

SEQ ID NO: 2544084 - RNA, 12 nt, Human
uggaauugauuu

SEQ ID NO: 2544085 - RNA, 15 nt, Human
uggaauugauuugca

SEQ ID NO: 2544086 - RNA, 16 nt, Human
uggaauugauuugcau

SEQ ID NO: 2544087 - RNA, 17 nt, Human
uggaauugauuugcauu

SEQ ID NO: 2544088 - RNA, 18 nt, Human
uggaauugauuugcauug

SEQ ID NO: 2544089 - RNA, 19 nt, Human
uggaauugauuugcauuga

SEQ ID NO: 2544090 - RNA, 20 nt, Human
uggaauugauuugcauugaa

SEQ ID NO: 2544091 - RNA, 17 nt, Human
uggacaagccaacuugu

SEQ ID NO: 2544092 - RNA, 22 nt, Human
uggaauugauuugcauugaaca

SEQ ID NO: 2544093 - RNA, 13 nt, Human
uggacaaggaggu

SEQ ID NO: 2544094 - RNA, 16 nt, Human
uggacaaggaggucug

SEQ ID NO: 2544095 - RNA, 14 nt, Human
uggacaaggagguc

SEQ ID NO: 2544096 - RNA, 16 nt, Human
uggacaaucaugaaau

SEQ ID NO: 2544097 - RNA, 12 nt, Human
aggaucucuuga

SEQ ID NO: 2544098 - RNA, 19 nt, Human
aggcaaaauugcaaaucuu

SEQ ID NO: 2544099 - RNA, 20 nt, Human
aggcaaaauugcaaaucuug

SEQ ID NO: 2544100 - RNA, 19 nt, Human
aggaucucuugagccuggg

SEQ ID NO: 2544101 - RNA, 17 nt, Human
aggaucucuugagccug

SEQ ID NO: 2544102 - RNA, 18 nt, Human
aggaucucuugagccugg

SEQ ID NO: 2544103 - RNA, 14 nt, Human
aggcaaaugacuuu

SEQ ID NO: 2544104 - RNA, 15 nt, Human
aggcaaaugacuuug

SEQ ID NO: 2544105 - RNA, 15 nt, Human
aggcaaaugcccaag

SEQ ID NO: 2544106 - RNA, 14 nt, Human
aggcaaaugcccaa

SEQ ID NO: 2544107 - RNA, 18 nt, Human
aggcaaaugacuuuggac

SEQ ID NO: 2544108 - RNA, 13 nt, Human
aggcaaaugugua

SEQ ID NO: 2544109 - RNA, 19 nt, Human
uggaauuauuuuaaaagau

SEQ ID NO: 2544110 - RNA, 20 nt, Human
uggaauuauuuuaaaagaua

SEQ ID NO: 2544111 - RNA, 22 nt, Human
aggcaaacccaucaacaaaaau

SEQ ID NO: 2544112 - RNA, 17 nt, Human
aggcaaaauugcaaauc

SEQ ID NO: 2544113 - RNA, 20 nt, Human
uggaccuugaacuggguacu

SEQ ID NO: 2544114 - RNA, 20 nt, Human
uggaccugccuccugccugc

SEQ ID NO: 2544115 - RNA, 15 nt, Human
uggaccuuaggccuu

SEQ ID NO: 2544116 - RNA, 16 nt, Human
uggaccuuaggccuuc

SEQ ID NO: 2544117 - RNA, 17 nt, Human
uggaccuuaggccuucc

SEQ ID NO: 2544118 - RNA, 19 nt, Human
uggaccuuaggccuuccuc

SEQ ID NO: 2544119 - RNA, 13 nt, Human
uggaccuuccugc

SEQ ID NO: 2544120 - RNA, 12 nt, Human
uggaccuuccug

SEQ ID NO: 2544121 - RNA, 21 nt, Human
uggaccuuaggccuuccucuc

SEQ ID NO: 2544122 - RNA, 14 nt, Human
uggacccuguugcu

SEQ ID NO: 2544123 - RNA, 13 nt, Human
uggacccuguugc

SEQ ID NO: 2544124 - RNA, 15 nt, Human
uggacccugaggccc

SEQ ID NO: 2544125 - RNA, 19 nt, Human
uggaccugccuccugccug

SEQ ID NO: 2544126 - RNA, 18 nt, Human
uggaccugccuccugccu

SEQ ID NO: 2544127 - RNA, 17 nt, Human
uggaccugccuccugcc

SEQ ID NO: 2544128 - RNA, 15 nt, Human
uggacccuguugcua

SEQ ID NO: 2544129 - RNA, 16 nt, Human
uggaccugccuccugc

SEQ ID NO: 2544130 - RNA, 20 nt, Human
uggacccugaggcccagagg

SEQ ID NO: 2544131 - RNA, 19 nt, Human
uggacccugaggcccagag

SEQ ID NO: 2544132 - RNA, 21 nt, Human
uggacccugaggcccagaggg

SEQ ID NO: 2544133 - RNA, 23 nt, Human
uggacccuguggaugauaaaaca

SEQ ID NO: 2544134 - RNA, 18 nt, Human
uggacccugaggcccaga

SEQ ID NO: 2544135 - RNA, 16 nt, Human
uggacccugaggccca

SEQ ID NO: 2544136 - RNA, 23 nt, Human
uggacacagcucuucuccaggcu

SEQ ID NO: 2544137 - RNA, 18 nt, Human
uggacaccaggagucccu

SEQ ID NO: 2544138 - RNA, 13 nt, Human
uggagaagcggcu

SEQ ID NO: 2544139 - RNA, 22 nt, Human
uggagaagcggcuggcagccca

SEQ ID NO: 2544140 - RNA, 14 nt, Human
uggagaagaacuga

SEQ ID NO: 2544141 - RNA, 13 nt, Human
uggagaagccauu

SEQ ID NO: 2544142 - RNA, 12 nt, Human
uggagaagccau

SEQ ID NO: 2544143 - RNA, 23 nt, Human
uggagaagccacaggccugagau

SEQ ID NO: 2544144 - RNA, 22 nt, Human
uggagaagccacaggccugaga

SEQ ID NO: 2544145 - RNA, 17 nt, Human
uggagaacuccuagggu

SEQ ID NO: 2544146 - RNA, 19 nt, Human
uggagaagccauugucuuc

SEQ ID NO: 2544147 - RNA, 18 nt, Human
uggagaagccauugucuu

SEQ ID NO: 2544148 - RNA, 17 nt, Human
uggagaagccauugucu

SEQ ID NO: 2544149 - RNA, 14 nt, Human
uggagaagccauug

SEQ ID NO: 2544150 - RNA, 19 nt, Human
uggagaagcucccaggaac

SEQ ID NO: 2544151 - RNA, 16 nt, Human
uggagaagcucaccca

SEQ ID NO: 2544152 - RNA, 18 nt, Human
uggagcccaggcgggagc

SEQ ID NO: 2544153 - RNA, 16 nt, Human
uggagcccaggcggga

SEQ ID NO: 2544154 - RNA, 14 nt, Human
uggagccccacacu

SEQ ID NO: 2544155 - RNA, 22 nt, Human
uggagcccaggcgggagcggug

SEQ ID NO: 2544156 - RNA, 15 nt, Human
uggagcccagggagc

SEQ ID NO: 2544157 - RNA, 15 nt, Human
uggagccccacacug

SEQ ID NO: 2544158 - RNA, 20 nt, Human
uggagcccagggagcggaaa

SEQ ID NO: 2544159 - RNA, 12 nt, Human
uggagccccagc

SEQ ID NO: 2544160 - RNA, 16 nt, Human
uggagccccagccccc

SEQ ID NO: 2544161 - RNA, 15 nt, Human
uggagccccagcccc

SEQ ID NO: 2544162 - RNA, 14 nt, Human
uggagccccagccc

SEQ ID NO: 2544163 - RNA, 13 nt, Human
uggagccccagcc

SEQ ID NO: 2544164 - RNA, 12 nt, Human
uggagccccugg

SEQ ID NO: 2544165 - RNA, 22 nt, Human
uggagccccagcccccuuuggg

SEQ ID NO: 2544166 - RNA, 14 nt, Human
uggagccccaucag

SEQ ID NO: 2544167 - RNA, 23 nt, Human
uggagccccuggguggguggugg

SEQ ID NO: 2544168 - RNA, 15 nt, Human
uggagccccugggug

SEQ ID NO: 2544169 - RNA, 14 nt, Human
uggagccccugggu

SEQ ID NO: 2544170 - RNA, 13 nt, Human
uggagccccuggg

SEQ ID NO: 2544171 - RNA, 16 nt, Human
uggagcccgcaccccc

SEQ ID NO: 2544172 - RNA, 17 nt, Human
uggagcccgcaccccca

SEQ ID NO: 2544173 - RNA, 18 nt, Human
uggagcccgcacccccac

SEQ ID NO: 2544174 - RNA, 18 nt, Human
uggacuuuccugcaacuc

SEQ ID NO: 2544175 - RNA, 14 nt, Human
uggacuuuccugca

SEQ ID NO: 2544176 - RNA, 21 nt, Human
uggagaaauuauuuaauaaaa

SEQ ID NO: 2544177 - RNA, 18 nt, Human
uggagaacuagaaccugg

SEQ ID NO: 2544178 - RNA, 19 nt, Human
uggacuuuccugcaacuca

SEQ ID NO: 2544179 - RNA, 20 nt, Human
uggacuuuccacccccuccc

SEQ ID NO: 2544180 - RNA, 13 nt, Human
uggagaagaacug

SEQ ID NO: 2544181 - RNA, 14 nt, Human
uggagaacuagaga

SEQ ID NO: 2544182 - RNA, 20 nt, Human
uggagaacuagaaccuggag

SEQ ID NO: 2544183 - RNA, 19 nt, Human
uggagaacuagaaccugga

SEQ ID NO: 2544184 - RNA, 21 nt, Human
uggagaacuagaaccuggagg

SEQ ID NO: 2544185 - RNA, 15 nt, Human
uggagaacuccuagg

SEQ ID NO: 2544186 - RNA, 15 nt, Human
uggacugugugcuca

SEQ ID NO: 2544187 - RNA, 20 nt, Human
uggacuuggucaccagcucc

SEQ ID NO: 2544188 - RNA, 18 nt, Human
uggacuugaggauuuuga

SEQ ID NO: 2544189 - RNA, 18 nt, Human
uggacuuggucaccagcu

SEQ ID NO: 2544190 - RNA, 19 nt, Human
uggaccuuccugccaccag

SEQ ID NO: 2544191 - RNA, 14 nt, Human
uggaccuuccugcc

SEQ ID NO: 2544192 - RNA, 17 nt, Human
uggacuugagcuuggca

SEQ ID NO: 2544193 - RNA, 22 nt, Human
uggacuuguauauuuguacaaa

SEQ ID NO: 2544194 - RNA, 21 nt, Human
uggacuuguauauuuguacaa

SEQ ID NO: 2544195 - RNA, 20 nt, Human
uggacuuguauauuuguaca

SEQ ID NO: 2544196 - RNA, 18 nt, Human
uggacuuguauauuugua

SEQ ID NO: 2544197 - RNA, 17 nt, Human
uggacuuguauauuugu

SEQ ID NO: 2544198 - RNA, 15 nt, Human
uggacuuguauauuu

SEQ ID NO: 2544199 - RNA, 14 nt, Human
uggacuuguauauu

SEQ ID NO: 2544200 - RNA, 13 nt, Human
uggacuuguauau

SEQ ID NO: 2544201 - RNA, 20 nt, Human
uggacuuguccucagcagcu

SEQ ID NO: 2544202 - RNA, 15 nt, Human
uggacuuguccucag

SEQ ID NO: 2544203 - RNA, 16 nt, Human
uggacuuuccaccccc

SEQ ID NO: 2544204 - RNA, 13 nt, Human
uggacuuuccugc

SEQ ID NO: 2544205 - RNA, 18 nt, Human
uggacuuuccacccccuc

SEQ ID NO: 2544206 - RNA, 19 nt, Human
uggacuuuccacccccucc

SEQ ID NO: 2544207 - RNA, 21 nt, Human
uggagcgcaccugcccccugg

SEQ ID NO: 2544208 - RNA, 22 nt, Human
uggagcgcaccugcccccuggu

SEQ ID NO: 2544209 - RNA, 18 nt, Human
uggagcucagagagggca

SEQ ID NO: 2544210 - RNA, 16 nt, Human
uggagccuguguaaca

SEQ ID NO: 2544211 - RNA, 22 nt, Human
uggagcccgcacccccacccuu

SEQ ID NO: 2544212 - RNA, 20 nt, Human
uggagccuguguaacagcuc

SEQ ID NO: 2544213 - RNA, 18 nt, Human
uggagccuguguaacagc

SEQ ID NO: 2544214 - RNA, 17 nt, Human
uggagccuguguaacag

SEQ ID NO: 2544215 - RNA, 19 nt, Human
uggagcccgcacccccacc

SEQ ID NO: 2544216 - RNA, 19 nt, Human
uggagccuuugaauaaaaa

SEQ ID NO: 2544217 - RNA, 22 nt, Human
uggagccuguguaacagcuccu

SEQ ID NO: 2544218 - RNA, 21 nt, Human
uggagccuguguaacagcucc

SEQ ID NO: 2544219 - RNA, 14 nt, Human
uggagcgcaccugc

SEQ ID NO: 2544220 - RNA, 16 nt, Human
uggagcgcaccugccc

SEQ ID NO: 2544221 - RNA, 13 nt, Human
aggcaaucauggu

SEQ ID NO: 2544222 - RNA, 18 nt, Human
aggcaaguuucuagcuag

SEQ ID NO: 2544223 - RNA, 14 nt, Human
aggcaauaaaaauc

SEQ ID NO: 2544224 - RNA, 22 nt, Human
aggcaaugauuguuaauuuaca

SEQ ID NO: 2544225 - RNA, 17 nt, Human
aggcaauaaaaaucaua

SEQ ID NO: 2544226 - RNA, 14 nt, Human
uggagcucguggaa

SEQ ID NO: 2544227 - RNA, 17 nt, Human
aggcaagugaagaaaag

SEQ ID NO: 2544228 - RNA, 15 nt, Human
aggcaaguuucuagc

SEQ ID NO: 2544229 - RNA, 13 nt, Human
aggcaaggucugg

SEQ ID NO: 2544230 - RNA, 13 nt, Human
aggcaagugaaga

SEQ ID NO: 2544231 - RNA, 22 nt, Human
aggcacccaccaucaugucugg

SEQ ID NO: 2544232 - RNA, 21 nt, Human
aggcacccaccaucaugucug

SEQ ID NO: 2544233 - RNA, 20 nt, Human
aggcacccaccaucaugucu

SEQ ID NO: 2544234 - RNA, 14 nt, Human
aggcaaugcuggcu

SEQ ID NO: 2544235 - RNA, 19 nt, Human
aggcacccccuggagagaa

SEQ ID NO: 2544236 - RNA, 17 nt, Human
aggcacccccuggagag

SEQ ID NO: 2544237 - RNA, 20 nt, Human
aggcacccccuggagagaag

SEQ ID NO: 2544238 - RNA, 20 nt, Human
aggcacccuucuuuccucuu

SEQ ID NO: 2544239 - RNA, 15 nt, Human
aggcaccgagaaugu

SEQ ID NO: 2544240 - RNA, 16 nt, Human
aggcaccgagaauguu

SEQ ID NO: 2544241 - RNA, 18 nt, Human
aggcaccgagaauguugu

SEQ ID NO: 2544242 - RNA, 15 nt, Human
aggcacccccuggag

SEQ ID NO: 2544243 - RNA, 16 nt, Human
aggcacccccuggaga

SEQ ID NO: 2544244 - RNA, 20 nt, Human
aggcaccuaccaccacgccc

SEQ ID NO: 2544245 - RNA, 20 nt, Human
aggcaccucacaggccccag

SEQ ID NO: 2544246 - RNA, 19 nt, Human
aggcaccucacagaaauga

SEQ ID NO: 2544247 - RNA, 21 nt, Human
ugcuugaggcaacucaucuua

SEQ ID NO: 2544248 - RNA, 15 nt, Human
aggacauaauggggu

SEQ ID NO: 2544249 - RNA, 14 nt, Human
ugcuugagucaggu

SEQ ID NO: 2544250 - RNA, 20 nt, Human
ugcuugagucagguuugagu

SEQ ID NO: 2544251 - RNA, 13 nt, Human
aggacauaauggg

SEQ ID NO: 2544252 - RNA, 20 nt, Human
aggacauaaauuagaggucu

SEQ ID NO: 2544253 - RNA, 23 nt, Human
ugcuugagucagguuugaguaga

SEQ ID NO: 2544254 - RNA, 17 nt, Human
ugcuugcaguagauuuu

SEQ ID NO: 2544255 - RNA, 16 nt, Human
ugcuugcaguagauuu

SEQ ID NO: 2544256 - RNA, 15 nt, Human
ugcuugcaguagauu

SEQ ID NO: 2544257 - RNA, 22 nt, Human
ugcuugcacuuuguaacauguu

SEQ ID NO: 2544258 - RNA, 12 nt, Human
ugcuugauuuuu

SEQ ID NO: 2544259 - RNA, 12 nt, Human
aggacaguauuu

SEQ ID NO: 2544260 - RNA, 19 nt, Human
aggacaguauuugugggga

SEQ ID NO: 2544261 - RNA, 23 nt, Human
aggacagcccuucuuuccacaga

SEQ ID NO: 2544262 - RNA, 15 nt, Human
aggacagugcuucag

SEQ ID NO: 2544263 - RNA, 16 nt, Human
aggacagugcuucagc

SEQ ID NO: 2544264 - RNA, 17 nt, Human
aggacagugcuucagcc

SEQ ID NO: 2544265 - RNA, 18 nt, Human
aggacagugcuucagccu

SEQ ID NO: 2544266 - RNA, 19 nt, Human
aggacagugcuucagccug

SEQ ID NO: 2544267 - RNA, 20 nt, Human
aggacagugcuucagccuga

SEQ ID NO: 2544268 - RNA, 21 nt, Human
aggacagugcuucagccugag

SEQ ID NO: 2544269 - RNA, 22 nt, Human
aggacagugcuucagccugagg

SEQ ID NO: 2544270 - RNA, 16 nt, Human
ugcuuggaggaaggaa

SEQ ID NO: 2544271 - RNA, 15 nt, Human
ugcuuggaggaagga

SEQ ID NO: 2544272 - RNA, 19 nt, Human
ugcuugcaguagauuuucu

SEQ ID NO: 2544273 - RNA, 14 nt, Human
ugcuuggaggaagg

SEQ ID NO: 2544274 - RNA, 12 nt, Human
ugcuuguacaua

SEQ ID NO: 2544275 - RNA, 13 nt, Human
ugcuuguacauaa

SEQ ID NO: 2544276 - RNA, 21 nt, Human
ugcuuggguggagaagccauu

SEQ ID NO: 2544277 - RNA, 20 nt, Human
ugcuuggguggagaagccau

SEQ ID NO: 2544278 - RNA, 14 nt, Human
ugcuuugugauuuu

SEQ ID NO: 2544279 - RNA, 16 nt, Human
ugcuuugugauuuuug

SEQ ID NO: 2544280 - RNA, 12 nt, Human
ugcuuugugauu

SEQ ID NO: 2544281 - RNA, 22 nt, Human
ugcuuggguggagaagccauug

SEQ ID NO: 2544282 - RNA, 14 nt, Human
ugcuuguacauaau

SEQ ID NO: 2544283 - RNA, 16 nt, Human
ugcuuguacauaaugc

SEQ ID NO: 2544284 - RNA, 22 nt, Human
ugcuuguacauaaugcgugcau

SEQ ID NO: 2544285 - RNA, 15 nt, Human
ugcuuguauagguuu

SEQ ID NO: 2544286 - RNA, 21 nt, Human
ugcuuuuggcaaaacucuacu

SEQ ID NO: 2544287 - RNA, 19 nt, Human
ugcuuuuggcaaaacucua

SEQ ID NO: 2544288 - RNA, 13 nt, Human
ugcuuuucugucu

SEQ ID NO: 2544289 - RNA, 17 nt, Human
ugcuuuucuguauuuua

SEQ ID NO: 2544290 - RNA, 18 nt, Human
ugcuuuucugcccuggcu

SEQ ID NO: 2544291 - RNA, 16 nt, Human
ugcuuuucugcccugg

SEQ ID NO: 2544292 - RNA, 14 nt, Human
ugcuuugugaacaa

SEQ ID NO: 2544293 - RNA, 17 nt, Human
ugcuuuuggucugugug

SEQ ID NO: 2544294 - RNA, 14 nt, Human
ugcuuuuggucugu

SEQ ID NO: 2544295 - RNA, 22 nt, Human
uggaaaggggagagccugcugg

SEQ ID NO: 2544296 - RNA, 21 nt, Human
uggaaaggggagagccugcug

SEQ ID NO: 2544297 - RNA, 19 nt, Human
uggaaaggggagagccugc

SEQ ID NO: 2544298 - RNA, 17 nt, Human
uggaaaggggagagccu

SEQ ID NO: 2544299 - RNA, 15 nt, Human
uggaaaggggagagc

SEQ ID NO: 2544300 - RNA, 14 nt, Human
uggaaaggggagag

SEQ ID NO: 2544301 - RNA, 13 nt, Human
uggaaaggggaga

SEQ ID NO: 2544302 - RNA, 19 nt, Human
uggaaaggggggagcuggg

SEQ ID NO: 2544303 - RNA, 18 nt, Human
uggaaaggggggagcugg

SEQ ID NO: 2544304 - RNA, 17 nt, Human
uggaaaggggggagcug

SEQ ID NO: 2544305 - RNA, 23 nt, Human
uggaaaggggagagccugcuggc

SEQ ID NO: 2544306 - RNA, 23 nt, Human
uggaaagggugcugcuucccucu

SEQ ID NO: 2544307 - RNA, 17 nt, Human
uggaaaggcucagucuc

SEQ ID NO: 2544308 - RNA, 20 nt, Human
uggaaaggcucagucucagg

SEQ ID NO: 2544309 - RNA, 21 nt, Human
uggaaaggcucagucucagga

SEQ ID NO: 2544310 - RNA, 23 nt, Human
uggaaaggcucagucucaggagc

SEQ ID NO: 2544311 - RNA, 13 nt, Human
uggaaaggcucag

SEQ ID NO: 2544312 - RNA, 18 nt, Human
uggaaaugggcagagcag

SEQ ID NO: 2544313 - RNA, 20 nt, Human
uggaaaugcugggcugacgg

SEQ ID NO: 2544314 - RNA, 15 nt, Human
uggaaaugcugggcu

SEQ ID NO: 2544315 - RNA, 17 nt, Human
uggaaaugggcagagca

SEQ ID NO: 2544316 - RNA, 16 nt, Human
uggaagaggggacagg

SEQ ID NO: 2544317 - RNA, 16 nt, Human
uggaaaugcugggcug

SEQ ID NO: 2544318 - RNA, 21 nt, Human
uggaagaggggacaggucccu

SEQ ID NO: 2544319 - RNA, 15 nt, Human
uggaagaggggacag

SEQ ID NO: 2544320 - RNA, 21 nt, Human
uggaagauccugcgggugggg

SEQ ID NO: 2544321 - RNA, 13 nt, Human
uggaagauccugc

SEQ ID NO: 2544322 - RNA, 18 nt, Human
uggaagcaacaggaauca

SEQ ID NO: 2544323 - RNA, 14 nt, Human
uggaagauuuuaaa

SEQ ID NO: 2544324 - RNA, 16 nt, Human
uggaagauuuuaaauu

SEQ ID NO: 2544325 - RNA, 16 nt, Human
uggaagcacagcuuca

SEQ ID NO: 2544326 - RNA, 23 nt, Human
uggaaggggacacgugacagccg

SEQ ID NO: 2544327 - RNA, 19 nt, Human
uggaaggguucuggcugcc

SEQ ID NO: 2544328 - RNA, 18 nt, Human
uggaaggguucuggcugc

SEQ ID NO: 2544329 - RNA, 15 nt, Human
uggaaggguuugugg

SEQ ID NO: 2544330 - RNA, 18 nt, Human
uggaaguacuauaauuua

SEQ ID NO: 2544331 - RNA, 21 nt, Human
uggaaggugcuguuauccaug

SEQ ID NO: 2544332 - RNA, 15 nt, Human
uggaaggugcuguua

SEQ ID NO: 2544333 - RNA, 17 nt, Human
uggaaggguuuguggcu

SEQ ID NO: 2544334 - RNA, 20 nt, Human
uggaagguuuggugugugga

SEQ ID NO: 2544335 - RNA, 13 nt, Human
uggaaggugggga

SEQ ID NO: 2544336 - RNA, 20 nt, Human
uggaaguaaccauuugcacu

SEQ ID NO: 2544337 - RNA, 21 nt, Human
uggaagguuuguauauuguca

SEQ ID NO: 2544338 - RNA, 20 nt, Human
uggaagcuucuggugaccuu

SEQ ID NO: 2544339 - RNA, 22 nt, Human
uggaaggaccacauuuuauauu

SEQ ID NO: 2544340 - RNA, 14 nt, Human
uggaagcuuccagu

SEQ ID NO: 2544341 - RNA, 19 nt, Human
uggaaggaccacauuuuau

SEQ ID NO: 2544342 - RNA, 14 nt, Human
uggaaggaggcgca

SEQ ID NO: 2544343 - RNA, 15 nt, Human
uggaagggacuagga

SEQ ID NO: 2544344 - RNA, 21 nt, Human
aggauacaugugccgaaugug

SEQ ID NO: 2544345 - RNA, 14 nt, Human
aggauacaugugcc

SEQ ID NO: 2544346 - RNA, 15 nt, Human
aggauaccauauaca

SEQ ID NO: 2544347 - RNA, 22 nt, Human
aggauaccauauacagcucaga

SEQ ID NO: 2544348 - RNA, 18 nt, Human
aggauacuauauuuuagg

SEQ ID NO: 2544349 - RNA, 13 nt, Human
aggauacucuguc

SEQ ID NO: 2544350 - RNA, 16 nt, Human
aggauacucugucaga

SEQ ID NO: 2544351 - RNA, 22 nt, Human
aggauacuguaacacuuuacaa

SEQ ID NO: 2544352 - RNA, 18 nt, Human
aggauacuguaacacuuu

SEQ ID NO: 2544353 - RNA, 23 nt, Human
aggauagaaguauaccugauuuu

SEQ ID NO: 2544354 - RNA, 14 nt, Human
aggauccugagcca

SEQ ID NO: 2544355 - RNA, 13 nt, Human
aggauccugagcc

SEQ ID NO: 2544356 - RNA, 22 nt, Human
aggauccuauucucaccaggaa

SEQ ID NO: 2544357 - RNA, 21 nt, Human
aggauccuauucucaccagga

SEQ ID NO: 2544358 - RNA, 20 nt, Human
aggauccuauucucaccagg

SEQ ID NO: 2544359 - RNA, 17 nt, Human
aggaucccucucuggau

SEQ ID NO: 2544360 - RNA, 16 nt, Human
aggaucccucucugga

SEQ ID NO: 2544361 - RNA, 19 nt, Human
aggaucccucucuggauug

SEQ ID NO: 2544362 - RNA, 15 nt, Human
aggaucccucucugg

SEQ ID NO: 2544363 - RNA, 23 nt, Human
aggagcucacuguggugucugug

SEQ ID NO: 2544364 - RNA, 17 nt, Human
aggagcucuucaggccu

SEQ ID NO: 2544365 - RNA, 19 nt, Human
aggagcucuucaggccucc

SEQ ID NO: 2544366 - RNA, 21 nt, Human
aggagcucuucaggccucccu

SEQ ID NO: 2544367 - RNA, 17 nt, Human
aggagcugcuggcuugc

SEQ ID NO: 2544368 - RNA, 12 nt, Human
aggagcugggga

SEQ ID NO: 2544369 - RNA, 20 nt, Human
aggagcuggggaucccuccc

SEQ ID NO: 2544370 - RNA, 18 nt, Human
aggagcugggauccuaag

SEQ ID NO: 2544371 - RNA, 20 nt, Human
aggagcugggcagaaggcca

SEQ ID NO: 2544372 - RNA, 21 nt, Human
aggagcugcuggcuugcagug

SEQ ID NO: 2544373 - RNA, 16 nt, Human
aggagcugggaggaaa

SEQ ID NO: 2544374 - RNA, 17 nt, Human
aggagcugggaggaaaa

SEQ ID NO: 2544375 - RNA, 21 nt, Human
aggagcuggggaucccucccc

SEQ ID NO: 2544376 - RNA, 13 nt, Human
aggagcuucucug

SEQ ID NO: 2544377 - RNA, 18 nt, Human
ugcugcccugcccaccug

SEQ ID NO: 2544378 - RNA, 17 nt, Human
ugcugcccugcccaccu

SEQ ID NO: 2544379 - RNA, 16 nt, Human
ugcugcccugcccacc

SEQ ID NO: 2544380 - RNA, 13 nt, Human
ugcugcccugccc

SEQ ID NO: 2544381 - RNA, 24 nt, Human
aggaaugccuccucccugggcaga

SEQ ID NO: 2544382 - RNA, 12 nt, Human
aggaaugcuccc

SEQ ID NO: 2544383 - RNA, 16 nt, Human
aggaaugccuguguga

SEQ ID NO: 2544384 - RNA, 13 nt, Human
aggaaugcucccc

SEQ ID NO: 2544385 - RNA, 14 nt, Human
aggaaugcuccccc

SEQ ID NO: 2544386 - RNA, 15 nt, Human
aggaaugcuccccca

SEQ ID NO: 2544387 - RNA, 19 nt, Human
aggaaggagacucaccucu

SEQ ID NO: 2544388 - RNA, 14 nt, Human
aggaaggacccuga

SEQ ID NO: 2544389 - RNA, 20 nt, Human
aggaagcucagacugguuga

SEQ ID NO: 2544390 - RNA, 21 nt, Human
aggaaggagacucaccucugc

SEQ ID NO: 2544391 - RNA, 20 nt, Human
aggaauggacagacagagga

SEQ ID NO: 2544392 - RNA, 12 nt, Human
aggaauggacag

SEQ ID NO: 2544393 - RNA, 22 nt, Human
aggaaugcucccccauccuccc

SEQ ID NO: 2544394 - RNA, 20 nt, Human
aggaaugcucccccauccuc

SEQ ID NO: 2544395 - RNA, 21 nt, Human
ugcugcccugcccaccuggcc

SEQ ID NO: 2544396 - RNA, 19 nt, Human
ugcugcccugcccaccugg

SEQ ID NO: 2544397 - RNA, 11 nt, Human
ugcugcccugu

SEQ ID NO: 2544398 - RNA, 20 nt, Human
ugcuggccccucaccugggc

SEQ ID NO: 2544399 - RNA, 22 nt, Human
ugcuggccccucaccugggcac

SEQ ID NO: 2544400 - RNA, 24 nt, Human
ugcuggccccucaccugggcaccu

SEQ ID NO: 2544401 - RNA, 18 nt, Human
ugcuggcacauuucccca

SEQ ID NO: 2544402 - RNA, 20 nt, Human
ugcuggcacauuuccccaga

SEQ ID NO: 2544403 - RNA, 22 nt, Human
ugcuggaugucugccaauuuuu

SEQ ID NO: 2544404 - RNA, 18 nt, Human
ugcuggaugucugccaau

SEQ ID NO: 2544405 - RNA, 20 nt, Human
ugcuggauggagcccaggcg

SEQ ID NO: 2544406 - RNA, 19 nt, Human
ugcuggauggagcccaggc

SEQ ID NO: 2544407 - RNA, 18 nt, Human
ugcuggauggagcccagg

SEQ ID NO: 2544408 - RNA, 23 nt, Human
ugcuggaucacagcugcuuucug

SEQ ID NO: 2544409 - RNA, 17 nt, Human
ugcuggauggagcccag

SEQ ID NO: 2544410 - RNA, 23 nt, Human
ugcuggaggugggagcaggagau

SEQ ID NO: 2544411 - RNA, 22 nt, Human
ugcuggaggugggagcaggaga

SEQ ID NO: 2544412 - RNA, 18 nt, Human
ugcuggaggugggagcag

SEQ ID NO: 2544413 - RNA, 17 nt, Human
ugcuggaggugggagca

SEQ ID NO: 2544414 - RNA, 13 nt, Human
ugcugcccugcgg

SEQ ID NO: 2544415 - RNA, 20 nt, Human
ugcuggaguuucauguacaa

SEQ ID NO: 2544416 - RNA, 15 nt, Human
ugcuggauaaaauga

SEQ ID NO: 2544417 - RNA, 17 nt, Human
ugcuggauaaaaugagg

SEQ ID NO: 2544418 - RNA, 16 nt, Human
ugcuggauauuuucaa

SEQ ID NO: 2544419 - RNA, 17 nt, Human
ugcuggauauuuucaaa

SEQ ID NO: 2544420 - RNA, 22 nt, Human
ugcuggaucacagcugcuuucu

SEQ ID NO: 2544421 - RNA, 22 nt, Human
ugcuggauauuuucaaauugua

SEQ ID NO: 2544422 - RNA, 22 nt, Human
ugcuguauuuuaaaagaaugau

SEQ ID NO: 2544423 - RNA, 21 nt, Human
ugcuguauuuuaaaagaauga

SEQ ID NO: 2544424 - RNA, 13 nt, Human
ugcuguauuuuaa

SEQ ID NO: 2544425 - RNA, 18 nt, Human
ugcuguauaaaaucagcc

SEQ ID NO: 2544426 - RNA, 17 nt, Human
ugcuguauaaaaucagc

SEQ ID NO: 2544427 - RNA, 23 nt, Human
ugcuguauccauccauggggcug

SEQ ID NO: 2544428 - RNA, 16 nt, Human
ugcuguauaaaaucag

SEQ ID NO: 2544429 - RNA, 15 nt, Human
ugcuguauaaaauca

SEQ ID NO: 2544430 - RNA, 14 nt, Human
ugcuguauaaaauc

SEQ ID NO: 2544431 - RNA, 13 nt, Human
ugcuguauaaaau

SEQ ID NO: 2544432 - RNA, 15 nt, Human
ugcuguagacauuug

SEQ ID NO: 2544433 - RNA, 17 nt, Human
ugcugggauuacaggug

SEQ ID NO: 2544434 - RNA, 21 nt, Human
ugcugggauuacaagcgugag

SEQ ID NO: 2544435 - RNA, 13 nt, Human
ugcuggccuggcc

SEQ ID NO: 2544436 - RNA, 18 nt, Human
ugcuggccuggaucuccc

SEQ ID NO: 2544437 - RNA, 16 nt, Human
ugcuggccuggaucuc

SEQ ID NO: 2544438 - RNA, 15 nt, Human
ugcuggccuggaucu

SEQ ID NO: 2544439 - RNA, 14 nt, Human
ugcuggccuggauc

SEQ ID NO: 2544440 - RNA, 12 nt, Human
ugcuggccugga

SEQ ID NO: 2544441 - RNA, 15 nt, Human
ugcuggccgccucac

SEQ ID NO: 2544442 - RNA, 17 nt, Human
ugcuggccgccucaccc

SEQ ID NO: 2544443 - RNA, 13 nt, Human
ugcuggcugccuu

SEQ ID NO: 2544444 - RNA, 15 nt, Human
ugcuggcgccucugc

SEQ ID NO: 2544445 - RNA, 14 nt, Human
ugcuggcgccucug

SEQ ID NO: 2544446 - RNA, 13 nt, Human
ugcuggcucuucu

SEQ ID NO: 2544447 - RNA, 16 nt, Human
ugcuggcgccucugca

SEQ ID NO: 2544448 - RNA, 13 nt, Human
ugcuggcugccca

SEQ ID NO: 2544449 - RNA, 14 nt, Human
ugcuggcugcccag

SEQ ID NO: 2544450 - RNA, 21 nt, Human
ugcuggcugcccagaccccuc

SEQ ID NO: 2544451 - RNA, 21 nt, Human
ugcuggcuguuggcugggggc

SEQ ID NO: 2544452 - RNA, 19 nt, Human
ugcuggcuguuggcugggg

SEQ ID NO: 2544453 - RNA, 23 nt, Human
ugcugggacucagccuucagaca

SEQ ID NO: 2544454 - RNA, 22 nt, Human
ugcugggacucagccuucagac

SEQ ID NO: 2544455 - RNA, 18 nt, Human
ugcugggacucagccuuc

SEQ ID NO: 2544456 - RNA, 16 nt, Human
ugcugggacucagccu

SEQ ID NO: 2544457 - RNA, 19 nt, Human
ugcugggauuacaagcgug

SEQ ID NO: 2544458 - RNA, 19 nt, Human
aggacagauccagggacug

SEQ ID NO: 2544459 - RNA, 17 nt, Human
aggacagccccuccucc

SEQ ID NO: 2544460 - RNA, 16 nt, Human
aggacacuuccugccu

SEQ ID NO: 2544461 - RNA, 15 nt, Human
aggacacuuccugcc

SEQ ID NO: 2544462 - RNA, 17 nt, Human
aggacacugauaugggu

SEQ ID NO: 2544463 - RNA, 14 nt, Human
aggacacuuccugc

SEQ ID NO: 2544464 - RNA, 15 nt, Human
aggacaccacaccca

SEQ ID NO: 2544465 - RNA, 16 nt, Human
ugcuuccagugaggcu

SEQ ID NO: 2544466 - RNA, 23 nt, Human
aggacaccacacccagccucagu

SEQ ID NO: 2544467 - RNA, 22 nt, Human
aggacaccacacccagccucag

SEQ ID NO: 2544468 - RNA, 21 nt, Human
aggacaccacacccagccuca

SEQ ID NO: 2544469 - RNA, 20 nt, Human
aggacaccacacccagccuc

SEQ ID NO: 2544470 - RNA, 19 nt, Human
aggacaccacacccagccu

SEQ ID NO: 2544471 - RNA, 18 nt, Human
aggacaccacacccagcc

SEQ ID NO: 2544472 - RNA, 17 nt, Human
aggacaccacacccagc

SEQ ID NO: 2544473 - RNA, 19 nt, Human
ugcuuccaggaaacuccac

SEQ ID NO: 2544474 - RNA, 18 nt, Human
aggacacuaaccacgcug

SEQ ID NO: 2544475 - RNA, 16 nt, Human
ugcuuccaccucaccc

SEQ ID NO: 2544476 - RNA, 15 nt, Human
ugcuuccaccucacc

SEQ ID NO: 2544477 - RNA, 14 nt, Human
ugcuuccaccucac

SEQ ID NO: 2544478 - RNA, 11 nt, Human
ugcuuccaccu

SEQ ID NO: 2544479 - RNA, 15 nt, Human
ugcuuccaauuuucu

SEQ ID NO: 2544480 - RNA, 20 nt, Human
ugcuuccaccucaccccacu

SEQ ID NO: 2544481 - RNA, 19 nt, Human
ugcuuccaccucaccccac

SEQ ID NO: 2544482 - RNA, 18 nt, Human
ugcuuccaccucacccca

SEQ ID NO: 2544483 - RNA, 17 nt, Human
ugcuuccaccucacccc

SEQ ID NO: 2544484 - RNA, 16 nt, Human
ugcuuccaggaaacuc

SEQ ID NO: 2544485 - RNA, 23 nt, Human
ugcuucaauuaauaaaaaaugga

SEQ ID NO: 2544486 - RNA, 14 nt, Human
ugcuucaucccuuu

SEQ ID NO: 2544487 - RNA, 16 nt, Human
ugcuucaauuaauaaa

SEQ ID NO: 2544488 - RNA, 15 nt, Human
ugcuucaauuaauaa

SEQ ID NO: 2544489 - RNA, 23 nt, Human
ugcuucaauacccaaauccucuc

SEQ ID NO: 2544490 - RNA, 17 nt, Human
ugcuucaugcucagccc

SEQ ID NO: 2544491 - RNA, 23 nt, Human
ugcuucaaggauccugagccaga

SEQ ID NO: 2544492 - RNA, 21 nt, Human
ugcuucaaggauccugagcca

SEQ ID NO: 2544493 - RNA, 20 nt, Human
ugcuucaaggauccugagcc

SEQ ID NO: 2544494 - RNA, 15 nt, Human
ugcuuauuuuaaaau

SEQ ID NO: 2544495 - RNA, 17 nt, Human
ugcuuauuuuaaaauuu

SEQ ID NO: 2544496 - RNA, 19 nt, Human
ugcuucaaauccauccaga

SEQ ID NO: 2544497 - RNA, 17 nt, Human
ugcuucaaauccaucca

SEQ ID NO: 2544498 - RNA, 17 nt, Human
ugcugucccuuuuccuu

SEQ ID NO: 2544499 - RNA, 13 nt, Human
ugcugugcaaaug

SEQ ID NO: 2544500 - RNA, 12 nt, Human
ugcuguggccag

SEQ ID NO: 2544501 - RNA, 14 nt, Human
ugcuguggccaggg

SEQ ID NO: 2544502 - RNA, 13 nt, Human
ugcuguggaagca

SEQ ID NO: 2544503 - RNA, 15 nt, Human
ugcugugccucccaa

SEQ ID NO: 2544504 - RNA, 15 nt, Human
ugcugucccuuuucc

SEQ ID NO: 2544505 - RNA, 19 nt, Human
ugcugucccuuacgugagu

SEQ ID NO: 2544506 - RNA, 23 nt, Human
ugcuguauuuuaaaagaaugauu

SEQ ID NO: 2544507 - RNA, 21 nt, Human
ugcuguauauuugugauagca

SEQ ID NO: 2544508 - RNA, 17 nt, Human
ugcugucccuuacguga

SEQ ID NO: 2544509 - RNA, 18 nt, Human
ugcuuagcucaucuuaga

SEQ ID NO: 2544510 - RNA, 19 nt, Human
ugcuuagccuccugaccug

SEQ ID NO: 2544511 - RNA, 18 nt, Human
ugcuuagccuccugaccu

SEQ ID NO: 2544512 - RNA, 15 nt, Human
ugcuuagccuccuga

SEQ ID NO: 2544513 - RNA, 14 nt, Human
ugcuuagaaaagaa

SEQ ID NO: 2544514 - RNA, 14 nt, Human
ugcuuagccuccug

SEQ ID NO: 2544515 - RNA, 19 nt, Human
ugcuuagaauccaaacuug

SEQ ID NO: 2544516 - RNA, 17 nt, Human
ugcuuagacauaacaaa

SEQ ID NO: 2544517 - RNA, 22 nt, Human
ugcuuacuuuggaauacauuuc

SEQ ID NO: 2544518 - RNA, 18 nt, Human
ugcuuacuuuggaauaca

SEQ ID NO: 2544519 - RNA, 14 nt, Human
ugcuuacuuuggaa

SEQ ID NO: 2544520 - RNA, 14 nt, Human
ugcuuacugauaua

SEQ ID NO: 2544521 - RNA, 22 nt, Human
ugcuuacugauauauuuuacaa

SEQ ID NO: 2544522 - RNA, 23 nt, Human
ugcuuacuaagcuuugccagcug

SEQ ID NO: 2544523 - RNA, 10 nt, Human
ugcuguggga

SEQ ID NO: 2544524 - RNA, 16 nt, Human
ugcuguggccugggca

SEQ ID NO: 2544525 - RNA, 23 nt, Human
ugcuguggccagggugagagcug

SEQ ID NO: 2544526 - RNA, 17 nt, Human
ugcuguggccaggguga

SEQ ID NO: 2544527 - RNA, 12 nt, Human
ugcuguggccug

SEQ ID NO: 2544528 - RNA, 14 nt, Human
ugcuguggccuggg

SEQ ID NO: 2544529 - RNA, 15 nt, Human
ugcuguggccugggc

SEQ ID NO: 2544530 - RNA, 15 nt, Human
ugcuuaguaaugcua

SEQ ID NO: 2544531 - RNA, 14 nt, Human
ugcuuaguaaugcu

SEQ ID NO: 2544532 - RNA, 13 nt, Human
ugcuuaguaaugc

SEQ ID NO: 2544533 - RNA, 14 nt, Human
ugcuuaggauguuu

SEQ ID NO: 2544534 - RNA, 23 nt, Human
ugcuuaggauguuuuucaugaaa

SEQ ID NO: 2544535 - RNA, 16 nt, Human
ugcuuaggaugugugc

SEQ ID NO: 2544536 - RNA, 14 nt, Human
ugcuuaggaugugu

SEQ ID NO: 2544537 - RNA, 16 nt, Human
ugcuuagucacugccu

SEQ ID NO: 2544538 - RNA, 15 nt, Human
ugcuuagucacugcc

SEQ ID NO: 2544539 - RNA, 14 nt, Human
ugcuuagucacugc

SEQ ID NO: 2544540 - RNA, 18 nt, Human
ugcuuaguaaugcuacgu

SEQ ID NO: 2544541 - RNA, 14 nt, Human
ugcuuauuguucca

SEQ ID NO: 2544542 - RNA, 15 nt, Human
ugcuuauuguuccaa

SEQ ID NO: 2544543 - RNA, 16 nt, Human
ugcuuauuguuccaag

SEQ ID NO: 2544544 - RNA, 23 nt, Human
ugcuuauuugacaacguuucagc

SEQ ID NO: 2544545 - RNA, 23 nt, Human
ugcuuauuguuccaagacauugu

SEQ ID NO: 2544546 - RNA, 17 nt, Human
ugcuuauuguuccaaga

SEQ ID NO: 2544547 - RNA, 21 nt, Human
ugcuuauuguuccaagacauu

SEQ ID NO: 2544548 - RNA, 21 nt, Human
ugcuucaaaaacauucuuaca

SEQ ID NO: 2544549 - RNA, 13 nt, Human
ugcuucaaaaaca

SEQ ID NO: 2544550 - RNA, 23 nt, Human
aggaagccagcaggcucucaggc

SEQ ID NO: 2544551 - RNA, 22 nt, Human
aggaagccagcaggcucucagg

SEQ ID NO: 2544552 - RNA, 21 nt, Human
aggaagccagcaggcucucag

SEQ ID NO: 2544553 - RNA, 16 nt, Human
aggaaauauugcuggg

SEQ ID NO: 2544554 - RNA, 19 nt, Human
aggaagcaacgaagggaaa

SEQ ID NO: 2544555 - RNA, 22 nt, Human
aggaagcacaugccucucucag

SEQ ID NO: 2544556 - RNA, 20 nt, Human
aggaagccgcuggggccagu

SEQ ID NO: 2544557 - RNA, 19 nt, Human
aggaagccgcuggggccag

SEQ ID NO: 2544558 - RNA, 18 nt, Human
aggaagccagcaggcucu

SEQ ID NO: 2544559 - RNA, 18 nt, Human
aggaagccgcuggggcca

SEQ ID NO: 2544560 - RNA, 19 nt, Human
aggaagccugcaguccugg

SEQ ID NO: 2544561 - RNA, 12 nt, Human
aggaagcucagg

SEQ ID NO: 2544562 - RNA, 22 nt, Human
aggaagcccccaccgugggcag

SEQ ID NO: 2544563 - RNA, 20 nt, Human
aggaagccgugcccugcccc

SEQ ID NO: 2544564 - RNA, 21 nt, Human
aggaagccgugcccugccccc

SEQ ID NO: 2544565 - RNA, 22 nt, Human
aggaaggaaacccagcucuggu

SEQ ID NO: 2544566 - RNA, 20 nt, Human
aggaaggaaacccagcucug

SEQ ID NO: 2544567 - RNA, 23 nt, Human
aggaaggaaacccagcucugguc

SEQ ID NO: 2544568 - RNA, 20 nt, Human
aggaagccugcaguccugga

SEQ ID NO: 2544569 - RNA, 14 nt, Human
aggaagcucagacu

SEQ ID NO: 2544570 - RNA, 16 nt, Human
aggaagcucagacugg

SEQ ID NO: 2544571 - RNA, 17 nt, Human
aggaagcucagacuggu

SEQ ID NO: 2544572 - RNA, 12 nt, Human
aggaaggaaaga

SEQ ID NO: 2544573 - RNA, 14 nt, Human
aggaaaggcuccag

SEQ ID NO: 2544574 - RNA, 13 nt, Human
aggaaaggcucca

SEQ ID NO: 2544575 - RNA, 22 nt, Human
ugcugacuguacuccucccagg

SEQ ID NO: 2544576 - RNA, 21 nt, Human
ugcugacuguacuccucccag

SEQ ID NO: 2544577 - RNA, 14 nt, Human
ugcucuggaauuug

SEQ ID NO: 2544578 - RNA, 16 nt, Human
ugcugacuguuuucuc

SEQ ID NO: 2544579 - RNA, 22 nt, Human
aggaaaggccagcuggcagcag

SEQ ID NO: 2544580 - RNA, 15 nt, Human
aggaaaggcuccagg

SEQ ID NO: 2544581 - RNA, 16 nt, Human
aggaaaggcuccagga

SEQ ID NO: 2544582 - RNA, 24 nt, Human
aggaaaggccagcuggcagcagag

SEQ ID NO: 2544583 - RNA, 17 nt, Human
aggaaauaaaaccuuuc

SEQ ID NO: 2544584 - RNA, 19 nt, Human
aggaaauaaaaccuuucaa

SEQ ID NO: 2544585 - RNA, 12 nt, Human
aggaaauauuua

SEQ ID NO: 2544586 - RNA, 20 nt, Human
aggaaauaaaaccuuucaaa

SEQ ID NO: 2544587 - RNA, 21 nt, Human
aggaaauaaaaccuuucaaau

SEQ ID NO: 2544588 - RNA, 18 nt, Human
aggaaauaagaaaaauca

SEQ ID NO: 2544589 - RNA, 16 nt, Human
aggaaauaagaaaaau

SEQ ID NO: 2544590 - RNA, 22 nt, Human
aggaaauaaaaccuuucaaauu

SEQ ID NO: 2544591 - RNA, 23 nt, Human
aggaaaucaaauaugcaaagcac

SEQ ID NO: 2544592 - RNA, 13 nt, Human
aggaaauauuuau

SEQ ID NO: 2544593 - RNA, 19 nt, Human
aggaaaucaccgaaaacgu

SEQ ID NO: 2544594 - RNA, 15 nt, Human
aggaaaucaccgaaa

SEQ ID NO: 2544595 - RNA, 17 nt, Human
aggaagcacaugccucu

SEQ ID NO: 2544596 - RNA, 16 nt, Human
aggaagcacaugccuc

SEQ ID NO: 2544597 - RNA, 11 nt, Human
aggaagcacau

SEQ ID NO: 2544598 - RNA, 14 nt, Human
aggaaauccagggu

SEQ ID NO: 2544599 - RNA, 20 nt, Human
aggaaauauauaugugugug

SEQ ID NO: 2544600 - RNA, 20 nt, Human
aggaaauaagaaaaaucaug

SEQ ID NO: 2544601 - RNA, 21 nt, Human
ugcuaucucugugugcacaaa

SEQ ID NO: 2544602 - RNA, 20 nt, Human
ugcuaucucugugugcacaa

SEQ ID NO: 2544603 - RNA, 16 nt, Human
ugcuaucuuaauuuug

SEQ ID NO: 2544604 - RNA, 18 nt, Human
ugcuaucuuaauuuuggu

SEQ ID NO: 2544605 - RNA, 17 nt, Human
ugcuaucuuaauuuugg

SEQ ID NO: 2544606 - RNA, 22 nt, Human
ugcuauggggagaaaagacaug

SEQ ID NO: 2544607 - RNA, 20 nt, Human
ugcuaucucccccagcccca

SEQ ID NO: 2544608 - RNA, 16 nt, Human
ugcuaucucugugugc

SEQ ID NO: 2544609 - RNA, 17 nt, Human
agcuuucaaagaaggaa

SEQ ID NO: 2544610 - RNA, 20 nt, Human
ugcuauguuuugacauuuuu

SEQ ID NO: 2544611 - RNA, 14 nt, Human
ugcuauuagacugu

SEQ ID NO: 2544612 - RNA, 15 nt, Human
ugcuauuguaaauau

SEQ ID NO: 2544613 - RNA, 13 nt, Human
ugcuauuguaaau

SEQ ID NO: 2544614 - RNA, 16 nt, Human
ugcuauugacaaguca

SEQ ID NO: 2544615 - RNA, 19 nt, Human
ugcuaucucccccagcccc

SEQ ID NO: 2544616 - RNA, 14 nt, Human
agcuuuauucuuca

SEQ ID NO: 2544617 - RNA, 16 nt, Human
agcuuuauguaauaau

SEQ ID NO: 2544618 - RNA, 19 nt, Human
agcuuuauuuuuuaaguau

SEQ ID NO: 2544619 - RNA, 22 nt, Human
agcuuuauuuuuuaaguauuua

SEQ ID NO: 2544620 - RNA, 18 nt, Human
agcuuuauacguguagcu

SEQ ID NO: 2544621 - RNA, 22 nt, Human
agcuuuagacccugggugggcu

SEQ ID NO: 2544622 - RNA, 19 nt, Human
agcuuuagacccugggugg

SEQ ID NO: 2544623 - RNA, 23 nt, Human
agcuuuaucaccagagagggacu

SEQ ID NO: 2544624 - RNA, 14 nt, Human
agcuuuauacgugu

SEQ ID NO: 2544625 - RNA, 14 nt, Human
agcuuuauguaaua

SEQ ID NO: 2544626 - RNA, 22 nt, Human
agcuuuauguaauaaugugaau

SEQ ID NO: 2544627 - RNA, 17 nt, Human
agcuuuagacccugggu

SEQ ID NO: 2544628 - RNA, 16 nt, Human
agcuuuagacccuggg

SEQ ID NO: 2544629 - RNA, 13 nt, Human
agcuuuagacccu

SEQ ID NO: 2544630 - RNA, 18 nt, Human
agcuuuacccucaggcau

SEQ ID NO: 2544631 - RNA, 15 nt, Human
agcuuuacuguuugu

SEQ ID NO: 2544632 - RNA, 13 nt, Human
agcuuuacccuca

SEQ ID NO: 2544633 - RNA, 17 nt, Human
agcuuuacccucaggca

SEQ ID NO: 2544634 - RNA, 20 nt, Human
agcuuuacccucaggcauag

SEQ ID NO: 2544635 - RNA, 19 nt, Human
agcuuuacaugcaauuuau

SEQ ID NO: 2544636 - RNA, 15 nt, Human
agcuuuacaugcaau

SEQ ID NO: 2544637 - RNA, 21 nt, Human
agcuuuacaugcaauuuauua

SEQ ID NO: 2544638 - RNA, 22 nt, Human
agcuuuaaccauuaaaacugaa

SEQ ID NO: 2544639 - RNA, 20 nt, Human
agcuuuaaccauuaaaacug

SEQ ID NO: 2544640 - RNA, 21 nt, Human
agcuuuaaacucagggacaga

SEQ ID NO: 2544641 - RNA, 20 nt, Human
agcuuuaaacucagggacag

SEQ ID NO: 2544642 - RNA, 19 nt, Human
agcuuuaaacucagggaca

SEQ ID NO: 2544643 - RNA, 15 nt, Human
agcuuuaaacaaauu

SEQ ID NO: 2544644 - RNA, 21 nt, Human
agcuugggggaugacuagagg

SEQ ID NO: 2544645 - RNA, 13 nt, Human
agcuuuaaaagaa

SEQ ID NO: 2544646 - RNA, 15 nt, Human
agcuuuaaaagaaaa

SEQ ID NO: 2544647 - RNA, 19 nt, Human
ugcugacuguacuccuccc

SEQ ID NO: 2544648 - RNA, 16 nt, Human
ugcugacuguacuccu

SEQ ID NO: 2544649 - RNA, 16 nt, Human
ugcucuggaagagagg

SEQ ID NO: 2544650 - RNA, 23 nt, Human
ugcuccucccuggcugcccuggc

SEQ ID NO: 2544651 - RNA, 19 nt, Human
ugcuccuccuuggugccug

SEQ ID NO: 2544652 - RNA, 14 nt, Human
ugcugacuguacuc

SEQ ID NO: 2544653 - RNA, 16 nt, Human
ugcucuggacaggcau

SEQ ID NO: 2544654 - RNA, 15 nt, Human
ugcucuggacaggca

SEQ ID NO: 2544655 - RNA, 22 nt, Human
ugcuccucccuggcugcccugg

SEQ ID NO: 2544656 - RNA, 20 nt, Human
ugcuccucccuggcugcccu

SEQ ID NO: 2544657 - RNA, 19 nt, Human
ugcuccucccuggcugccc

SEQ ID NO: 2544658 - RNA, 17 nt, Human
ugcuccucccuggcugc

SEQ ID NO: 2544659 - RNA, 15 nt, Human
ugcuccucccuggcu

SEQ ID NO: 2544660 - RNA, 14 nt, Human
ugcuccucccuggc

SEQ ID NO: 2544661 - RNA, 13 nt, Human
ugcuccucccugg

SEQ ID NO: 2544662 - RNA, 12 nt, Human
ugcuccucccug

SEQ ID NO: 2544663 - RNA, 14 nt, Human
ugcucuggacaggc

SEQ ID NO: 2544664 - RNA, 20 nt, Human
ugcuccuagagggaggggcc

SEQ ID NO: 2544665 - RNA, 11 nt, Human
ugcuccuccag

SEQ ID NO: 2544666 - RNA, 12 nt, Human
ugcuccuccagg

SEQ ID NO: 2544667 - RNA, 13 nt, Human
ugcuccuccaggg

SEQ ID NO: 2544668 - RNA, 16 nt, Human
ugcuccuccagggcca

SEQ ID NO: 2544669 - RNA, 21 nt, Human
ugcuccuccagggccacgugc

SEQ ID NO: 2544670 - RNA, 22 nt, Human
ugcuccuccagggccacgugcc

SEQ ID NO: 2544671 - RNA, 20 nt, Human
ugcuccgugccuccaccacc

SEQ ID NO: 2544672 - RNA, 14 nt, Human
ugcuccuagaggga

SEQ ID NO: 2544673 - RNA, 24 nt, Human
ugcuccuagagggaggggccuagg

SEQ ID NO: 2544674 - RNA, 19 nt, Human
ugcuccgugccuccaccac

SEQ ID NO: 2544675 - RNA, 18 nt, Human
ugcuccgugccuccacca

SEQ ID NO: 2544676 - RNA, 13 nt, Human
ugcuccgugcuug

SEQ ID NO: 2544677 - RNA, 22 nt, Human
ugcucccccauccuccccuucc

SEQ ID NO: 2544678 - RNA, 23 nt, Human
ugcucccccauccuccccuuccc

SEQ ID NO: 2544679 - RNA, 14 nt, Human
ugcuccccucccuc

SEQ ID NO: 2544680 - RNA, 16 nt, Human
ugcuccccucccuccu

SEQ ID NO: 2544681 - RNA, 17 nt, Human
ugcuccccucccuccuc

SEQ ID NO: 2544682 - RNA, 15 nt, Human
ugcucccucacaugu

SEQ ID NO: 2544683 - RNA, 16 nt, Human
ugcucccuaccaccuc

SEQ ID NO: 2544684 - RNA, 20 nt, Human
ugcucccuaccaccucccca

SEQ ID NO: 2544685 - RNA, 13 nt, Human
ugcucccuccccu

SEQ ID NO: 2544686 - RNA, 14 nt, Human
ugcucccuccccug

SEQ ID NO: 2544687 - RNA, 15 nt, Human
ugcucccuccccugc

SEQ ID NO: 2544688 - RNA, 17 nt, Human
ugcuccgugccuccacc

SEQ ID NO: 2544689 - RNA, 16 nt, Human
ugcuccgugccuccac

SEQ ID NO: 2544690 - RNA, 15 nt, Human
ugcuccgugccucca

SEQ ID NO: 2544691 - RNA, 17 nt, Human
ugcucccuccccugccc

SEQ ID NO: 2544692 - RNA, 18 nt, Human
ugcucccuccccugcccu

SEQ ID NO: 2544693 - RNA, 14 nt, Human
ugcuccgugccucc

SEQ ID NO: 2544694 - RNA, 14 nt, Human
ugcucauuucagga

SEQ ID NO: 2544695 - RNA, 12 nt, Human
ugcuccacagug

SEQ ID NO: 2544696 - RNA, 13 nt, Human
ugcuccacagugu

SEQ ID NO: 2544697 - RNA, 18 nt, Human
ugcucccccauccucccc

SEQ ID NO: 2544698 - RNA, 19 nt, Human
ugcucccccauccuccccu

SEQ ID NO: 2544699 - RNA, 20 nt, Human
ugcucccccauccuccccuu

SEQ ID NO: 2544700 - RNA, 21 nt, Human
ugcucccccauccuccccuuc

SEQ ID NO: 2544701 - RNA, 14 nt, Human
ugcucauggaauug

SEQ ID NO: 2544702 - RNA, 17 nt, Human
ugcuauuguaaauaugu

SEQ ID NO: 2544703 - RNA, 16 nt, Human
ugcuauuguaaauaug

SEQ ID NO: 2544704 - RNA, 21 nt, Human
ugcggcccagcccggcuccca

SEQ ID NO: 2544705 - RNA, 19 nt, Human
ugcggccgcauucccugag

SEQ ID NO: 2544706 - RNA, 17 nt, Human
ugcggccuuuggcuuca

SEQ ID NO: 2544707 - RNA, 19 nt, Human
ugcggccuuuggcuucacg

SEQ ID NO: 2544708 - RNA, 21 nt, Human
ugcggcugugcagccuguccu

SEQ ID NO: 2544709 - RNA, 20 nt, Human
ugcggcugugcagccugucc

SEQ ID NO: 2544710 - RNA, 13 nt, Human
ugcggcugugcag

SEQ ID NO: 2544711 - RNA, 17 nt, Human
ugcgggaugguccuggg

SEQ ID NO: 2544712 - RNA, 18 nt, Human
ugcgggaugguccugggg

SEQ ID NO: 2544713 - RNA, 19 nt, Human
ugcgggaugguccuggggc

SEQ ID NO: 2544714 - RNA, 20 nt, Human
ugcgggcuuccuccuggugu

SEQ ID NO: 2544715 - RNA, 16 nt, Human
ugcgggcugggcagcu

SEQ ID NO: 2544716 - RNA, 15 nt, Human
ugcgggcugggcagc

SEQ ID NO: 2544717 - RNA, 14 nt, Human
ugcgggcugggcag

SEQ ID NO: 2544718 - RNA, 13 nt, Human
ugcgggcugggca

SEQ ID NO: 2544719 - RNA, 21 nt, Human
ugcggugcuaucucccccagc

SEQ ID NO: 2544720 - RNA, 17 nt, Human
ugcggugcuaucucccc

SEQ ID NO: 2544721 - RNA, 14 nt, Human
ugcggucuagggaa

SEQ ID NO: 2544722 - RNA, 23 nt, Human
ugcggguggggcuuggggcucac

SEQ ID NO: 2544723 - RNA, 22 nt, Human
ugcgggugaacaaagcagccac

SEQ ID NO: 2544724 - RNA, 23 nt, Human
ugcgggugaacaaagcagccacg

SEQ ID NO: 2544725 - RNA, 18 nt, Human
ugcgguccacccaggagc

SEQ ID NO: 2544726 - RNA, 18 nt, Human
ugcgggugaacaaagcag

SEQ ID NO: 2544727 - RNA, 21 nt, Human
ugcgggugaacaaagcagcca

SEQ ID NO: 2544728 - RNA, 17 nt, Human
ugcgggucacaggaggg

SEQ ID NO: 2544729 - RNA, 17 nt, Human
ugcgguccacccaggag

SEQ ID NO: 2544730 - RNA, 14 nt, Human
ugcgggucacagga

SEQ ID NO: 2544731 - RNA, 16 nt, Human
ugcgggucacaggagg

SEQ ID NO: 2544732 - RNA, 21 nt, Human
ugcgggaccgguacagaaagg

SEQ ID NO: 2544733 - RNA, 17 nt, Human
ugcgggcuuuuccccgg

SEQ ID NO: 2544734 - RNA, 17 nt, Human
ugcgggcugggcagcug

SEQ ID NO: 2544735 - RNA, 22 nt, Human
ugccuuuuauagcuauuacugu

SEQ ID NO: 2544736 - RNA, 17 nt, Human
ugccuuuuauagcuauu

SEQ ID NO: 2544737 - RNA, 13 nt, Human
ugccuuuuauagc

SEQ ID NO: 2544738 - RNA, 22 nt, Human
ugcggacagccacggccaggcc

SEQ ID NO: 2544739 - RNA, 23 nt, Human
ugcggacagccacggccaggcca

SEQ ID NO: 2544740 - RNA, 13 nt, Human
ugcggaccccagc

SEQ ID NO: 2544741 - RNA, 22 nt, Human
ugcggaccccagcugugagccu

SEQ ID NO: 2544742 - RNA, 14 nt, Human
ugcggaccccagcu

SEQ ID NO: 2544743 - RNA, 13 nt, Human
ugcggagaacaaa

SEQ ID NO: 2544744 - RNA, 19 nt, Human
ugcggagaaccuugugccu

SEQ ID NO: 2544745 - RNA, 15 nt, Human
ugcggagaacaaaug

SEQ ID NO: 2544746 - RNA, 23 nt, Human
ugcggaccccagcugugagccuu

SEQ ID NO: 2544747 - RNA, 21 nt, Human
ugcggagugaagaggggcagc

SEQ ID NO: 2544748 - RNA, 16 nt, Human
ugcggagugaagaggg

SEQ ID NO: 2544749 - RNA, 15 nt, Human
ugcggagugaagagg

SEQ ID NO: 2544750 - RNA, 15 nt, Human
ugcggaucucuggag

SEQ ID NO: 2544751 - RNA, 14 nt, Human
ugcggaucucugga

SEQ ID NO: 2544752 - RNA, 20 nt, Human
ugcggagugaagaggggcag

SEQ ID NO: 2544753 - RNA, 23 nt, Human
ugcggcagguucacaggcgaggc

SEQ ID NO: 2544754 - RNA, 13 nt, Human
ugcggauggccgg

SEQ ID NO: 2544755 - RNA, 15 nt, Human
ugcggcccagcccgg

SEQ ID NO: 2544756 - RNA, 14 nt, Human
ugcggcccagcccg

SEQ ID NO: 2544757 - RNA, 13 nt, Human
ugcggcccagccc

SEQ ID NO: 2544758 - RNA, 17 nt, Human
ugcggcauuaaagccau

SEQ ID NO: 2544759 - RNA, 18 nt, Human
ugcggcccagcccggcuc

SEQ ID NO: 2544760 - RNA, 16 nt, Human
ugcggcccagcccggc

SEQ ID NO: 2544761 - RNA, 18 nt, Human
ugcggccgcauucccuga

SEQ ID NO: 2544762 - RNA, 17 nt, Human
ugccuuugaccugccuc

SEQ ID NO: 2544763 - RNA, 23 nt, Human
ugccuuugaccugccucccuuca

SEQ ID NO: 2544764 - RNA, 13 nt, Human
ugccuuugaccug

SEQ ID NO: 2544765 - RNA, 20 nt, Human
ugccuuucucgauuuuaucu

SEQ ID NO: 2544766 - RNA, 11 nt, Human
ugccuuucucg

SEQ ID NO: 2544767 - RNA, 14 nt, Human
ugccuuaucuugca

SEQ ID NO: 2544768 - RNA, 20 nt, Human
ugccuuagucucaguuugug

SEQ ID NO: 2544769 - RNA, 16 nt, Human
ugccuuagucucaguu

SEQ ID NO: 2544770 - RNA, 13 nt, Human
ugccuuucuaguc

SEQ ID NO: 2544771 - RNA, 21 nt, Human
ugccuuugagacaguuucuua

SEQ ID NO: 2544772 - RNA, 20 nt, Human
ugccuuugagacaguuucuu

SEQ ID NO: 2544773 - RNA, 19 nt, Human
ugccuuugagacaguuucu

SEQ ID NO: 2544774 - RNA, 18 nt, Human
ugccuuugagacaguuuc

SEQ ID NO: 2544775 - RNA, 17 nt, Human
ugccuuugagacaguuu

SEQ ID NO: 2544776 - RNA, 15 nt, Human
ugccuuugagacagu

SEQ ID NO: 2544777 - RNA, 13 nt, Human
ugccuuugagaca

SEQ ID NO: 2544778 - RNA, 12 nt, Human
ugccuuugagac

SEQ ID NO: 2544779 - RNA, 23 nt, Human
ugccuuugagacaguuucuuagc

SEQ ID NO: 2544780 - RNA, 18 nt, Human
ugccuuugaguuuccuca

SEQ ID NO: 2544781 - RNA, 19 nt, Human
ugccuuugaguuuccucag

SEQ ID NO: 2544782 - RNA, 21 nt, Human
ugccuuugaguuuccucaggc

SEQ ID NO: 2544783 - RNA, 22 nt, Human
ugccuuugaguuuccucaggcu

SEQ ID NO: 2544784 - RNA, 15 nt, Human
ugccuuuguuuugau

SEQ ID NO: 2544785 - RNA, 17 nt, Human
ugccuuuggcagaguuc

SEQ ID NO: 2544786 - RNA, 16 nt, Human
ugcuacaaaaacacag

SEQ ID NO: 2544787 - RNA, 17 nt, Human
ugcuacaaaaacacagc

SEQ ID NO: 2544788 - RNA, 18 nt, Human
ugcuacaaaaacacagca

SEQ ID NO: 2544789 - RNA, 19 nt, Human
ugcuacaaaaacacagcaa

SEQ ID NO: 2544790 - RNA, 20 nt, Human
ugcuaagccccagcaagcaa

SEQ ID NO: 2544791 - RNA, 16 nt, Human
ugcuaaguauuuccca

SEQ ID NO: 2544792 - RNA, 12 nt, Human
ugcuaaguauuu

SEQ ID NO: 2544793 - RNA, 13 nt, Human
ugcuacaacuuca

SEQ ID NO: 2544794 - RNA, 23 nt, Human
ugcuacaaagaagacauguuuua

SEQ ID NO: 2544795 - RNA, 21 nt, Human
ugcuacaaagaagacauguuu

SEQ ID NO: 2544796 - RNA, 20 nt, Human
ugcuacaaagaagacauguu

SEQ ID NO: 2544797 - RNA, 18 nt, Human
ugcuacaaagaagacaug

SEQ ID NO: 2544798 - RNA, 17 nt, Human
ugcuacaaagaagacau

SEQ ID NO: 2544799 - RNA, 16 nt, Human
ugcuacaaagaagaca

SEQ ID NO: 2544800 - RNA, 12 nt, Human
ugcuacaaagaa

SEQ ID NO: 2544801 - RNA, 20 nt, Human
ugcuacaaaaacacagcaag

SEQ ID NO: 2544802 - RNA, 22 nt, Human
agcuguucugucccuuggagcu

SEQ ID NO: 2544803 - RNA, 20 nt, Human
agcuguucugucccuuggag

SEQ ID NO: 2544804 - RNA, 15 nt, Human
agcuguucugucccu

SEQ ID NO: 2544805 - RNA, 19 nt, Human
ugcuacaacuucagcagua

SEQ ID NO: 2544806 - RNA, 14 nt, Human
agcuguugagcugu

SEQ ID NO: 2544807 - RNA, 13 nt, Human
agcuguugagcug

SEQ ID NO: 2544808 - RNA, 19 nt, Human
agcuuacaagccagcugga

SEQ ID NO: 2544809 - RNA, 15 nt, Human
agcuguuguacauuu

SEQ ID NO: 2544810 - RNA, 13 nt, Human
agcuguugccuca

SEQ ID NO: 2544811 - RNA, 22 nt, Human
agcuguuggccucugcaaagga

SEQ ID NO: 2544812 - RNA, 17 nt, Human
agcuguugagcuguuuu

SEQ ID NO: 2544813 - RNA, 16 nt, Human
agcuguugagcuguuu

SEQ ID NO: 2544814 - RNA, 15 nt, Human
agcuguugagcuguu

SEQ ID NO: 2544815 - RNA, 21 nt, Human
agcuugggcccagcugggcuc

SEQ ID NO: 2544816 - RNA, 20 nt, Human
agcuugggcccagcugggcu

SEQ ID NO: 2544817 - RNA, 23 nt, Human
agcuugggcccagcugggcucug

SEQ ID NO: 2544818 - RNA, 23 nt, Human
agcuuggggacaggggcaggagg

SEQ ID NO: 2544819 - RNA, 19 nt, Human
agcuugggcccagcugggc

SEQ ID NO: 2544820 - RNA, 18 nt, Human
agcuugggcccagcuggg

SEQ ID NO: 2544821 - RNA, 17 nt, Human
agcuugggcccagcugg

SEQ ID NO: 2544822 - RNA, 16 nt, Human
agcuugggcccagcug

SEQ ID NO: 2544823 - RNA, 12 nt, Human
agcuugggccca

SEQ ID NO: 2544824 - RNA, 10 nt, Human
agcuugggcc

SEQ ID NO: 2544825 - RNA, 18 nt, Human
agcuuguaaauagcucag

SEQ ID NO: 2544826 - RNA, 18 nt, Human
agcuuggguuuuuguuac

SEQ ID NO: 2544827 - RNA, 18 nt, Human
agcuugggaggcuucccc

SEQ ID NO: 2544828 - RNA, 18 nt, Human
agcuugaggguugggcug

SEQ ID NO: 2544829 - RNA, 14 nt, Human
agcuugaggguugg

SEQ ID NO: 2544830 - RNA, 15 nt, Human
agcuugagccugaaa

SEQ ID NO: 2544831 - RNA, 13 nt, Human
agcuugagccuga

SEQ ID NO: 2544832 - RNA, 24 nt, Human
agcuugagccgggccccugggcuu

SEQ ID NO: 2544833 - RNA, 23 nt, Human
agcuugagccgggccccugggcu

SEQ ID NO: 2544834 - RNA, 20 nt, Human
agcuugaccugaggcugugg

SEQ ID NO: 2544835 - RNA, 21 nt, Human
agcuugagccgggccccuggg

SEQ ID NO: 2544836 - RNA, 19 nt, Human
agcuugaaggaucuguuuu

SEQ ID NO: 2544837 - RNA, 22 nt, Human
agcuuaccagaagcuuccauag

SEQ ID NO: 2544838 - RNA, 16 nt, Human
agcuguuguacauuua

SEQ ID NO: 2544839 - RNA, 20 nt, Human
agcuuaccagaagcuuccau

SEQ ID NO: 2544840 - RNA, 10 nt, Human
agcuuagaac

SEQ ID NO: 2544841 - RNA, 18 nt, Human
ugcuaagccccagcaagc

SEQ ID NO: 2544842 - RNA, 14 nt, Human
agcuuagaccucag

SEQ ID NO: 2544843 - RNA, 15 nt, Human
agcuuagaccucagc

SEQ ID NO: 2544844 - RNA, 12 nt, Human
agcuucuuccag

SEQ ID NO: 2544845 - RNA, 15 nt, Human
agcuuagacuaaggc

SEQ ID NO: 2544846 - RNA, 20 nt, Human
agcuuagaccucagccugug

SEQ ID NO: 2544847 - RNA, 16 nt, Human
agcuuagaccucagcc

SEQ ID NO: 2544848 - RNA, 17 nt, Human
agcuuagaccucagccu

SEQ ID NO: 2544849 - RNA, 18 nt, Human
agcuuagaccucagccug

SEQ ID NO: 2544850 - RNA, 19 nt, Human
agcuuagaccucagccugu

SEQ ID NO: 2544851 - RNA, 19 nt, Human
agcuugaccgugaggccag

SEQ ID NO: 2544852 - RNA, 22 nt, Human
agcuugaagaucguuaguaucu

SEQ ID NO: 2544853 - RNA, 22 nt, Human
agcuugaaaguuuucagaaccu

SEQ ID NO: 2544854 - RNA, 16 nt, Human
agcuugaaaguuuuca

SEQ ID NO: 2544855 - RNA, 17 nt, Human
agcuugaaaguuuucag

SEQ ID NO: 2544856 - RNA, 17 nt, Human
agcuugaaacugagaug

SEQ ID NO: 2544857 - RNA, 20 nt, Human
agcuucuuccaggugcccag

SEQ ID NO: 2544858 - RNA, 22 nt, Human
agcuucuuccaggugcccagcu

SEQ ID NO: 2544859 - RNA, 16 nt, Human
agcuguucacagccag

SEQ ID NO: 2544860 - RNA, 19 nt, Human
agcuguucacagccagacu

SEQ ID NO: 2544861 - RNA, 20 nt, Human
agcugugugcucuccaagcc

SEQ ID NO: 2544862 - RNA, 20 nt, Human
ugccuguucagcuccagcuc

SEQ ID NO: 2544863 - RNA, 18 nt, Human
ugccuguucagcuccagc

SEQ ID NO: 2544864 - RNA, 13 nt, Human
agcuguucagcug

SEQ ID NO: 2544865 - RNA, 14 nt, Human
agcuguucagcugg

SEQ ID NO: 2544866 - RNA, 22 nt, Human
ugccuuaaaaccaaagagggcu

SEQ ID NO: 2544867 - RNA, 20 nt, Human
ugccuuaaaaccaaagaggg

SEQ ID NO: 2544868 - RNA, 18 nt, Human
ugccuuaaaaccaaagag

SEQ ID NO: 2544869 - RNA, 16 nt, Human
ugccuuaaaaccaaag

SEQ ID NO: 2544870 - RNA, 15 nt, Human
ugccuuaaaaccaaa

SEQ ID NO: 2544871 - RNA, 20 nt, Human
ugccuguugggccaggagcc

SEQ ID NO: 2544872 - RNA, 19 nt, Human
ugccuguugggccaggagc

SEQ ID NO: 2544873 - RNA, 21 nt, Human
ugccuguucagcuccagcuca

SEQ ID NO: 2544874 - RNA, 16 nt, Human
ugccuuauggaacacu

SEQ ID NO: 2544875 - RNA, 15 nt, Human
ugccuuauggaacac

SEQ ID NO: 2544876 - RNA, 23 nt, Human
ugccuuagagccaggcacacacu

SEQ ID NO: 2544877 - RNA, 19 nt, Human
ugccuuagagccaggcaca

SEQ ID NO: 2544878 - RNA, 18 nt, Human
ugccuuagagccaggcac

SEQ ID NO: 2544879 - RNA, 15 nt, Human
ugccuuagucucagu

SEQ ID NO: 2544880 - RNA, 17 nt, Human
ugccuuagagccaggca

SEQ ID NO: 2544881 - RNA, 15 nt, Human
ugccuuaaagaaagu

SEQ ID NO: 2544882 - RNA, 13 nt, Human
ugccuuaaagaaa

SEQ ID NO: 2544883 - RNA, 15 nt, Human
ugccuuaaaacuuua

SEQ ID NO: 2544884 - RNA, 20 nt, Human
agcugugcucuggacaggca

SEQ ID NO: 2544885 - RNA, 19 nt, Human
agcugugcucuggacaggc

SEQ ID NO: 2544886 - RNA, 20 nt, Human
agcugucuuguccuugcugg

SEQ ID NO: 2544887 - RNA, 17 nt, Human
agcugucugcucagaca

SEQ ID NO: 2544888 - RNA, 11 nt, Human
agcugucugcu

SEQ ID NO: 2544889 - RNA, 20 nt, Human
agcugucccugucaccaagc

SEQ ID NO: 2544890 - RNA, 16 nt, Human
agcuguguggcagucu

SEQ ID NO: 2544891 - RNA, 14 nt, Human
agcuguguggcagu

SEQ ID NO: 2544892 - RNA, 18 nt, Human
agcugugugcucuccaag

SEQ ID NO: 2544893 - RNA, 23 nt, Human
agcugugcucuggacaggcaugu

SEQ ID NO: 2544894 - RNA, 21 nt, Human
agcugugcucuggacaggcau

SEQ ID NO: 2544895 - RNA, 21 nt, Human
agcugucacuucgcgugcccu

SEQ ID NO: 2544896 - RNA, 14 nt, Human
agcugucccuguca

SEQ ID NO: 2544897 - RNA, 15 nt, Human
agcugucccugucac

SEQ ID NO: 2544898 - RNA, 18 nt, Human
agcugucccugucaccaa

SEQ ID NO: 2544899 - RNA, 22 nt, Human
agcugucccugucaccaagcuc

SEQ ID NO: 2544900 - RNA, 20 nt, Human
agcuggcucugagcgccucc

SEQ ID NO: 2544901 - RNA, 19 nt, Human
agcuggcucugagcgccuc

SEQ ID NO: 2544902 - RNA, 14 nt, Human
agcuggcucugagc

SEQ ID NO: 2544903 - RNA, 13 nt, Human
agcuggcucugag

SEQ ID NO: 2544904 - RNA, 23 nt, Human
agcuggcucugagcgccuccauc

SEQ ID NO: 2544905 - RNA, 18 nt, Human
agcuggcccgugacagac

SEQ ID NO: 2544906 - RNA, 21 nt, Human
agcuggccgaggguccuggcu

SEQ ID NO: 2544907 - RNA, 15 nt, Human
agcuggcccgugaca

SEQ ID NO: 2544908 - RNA, 16 nt, Human
agcuggcagcagagug

SEQ ID NO: 2544909 - RNA, 20 nt, Human
agcuggccgaggguccuggc

SEQ ID NO: 2544910 - RNA, 19 nt, Human
agcuggccccgccgccugg

SEQ ID NO: 2544911 - RNA, 18 nt, Human
agcuggccccgccgccug

SEQ ID NO: 2544912 - RNA, 15 nt, Human
agcuggccccgccgc

SEQ ID NO: 2544913 - RNA, 14 nt, Human
agcuggccccgccg

SEQ ID NO: 2544914 - RNA, 16 nt, Human
ugccugcccaggcccc

SEQ ID NO: 2544915 - RNA, 24 nt, Human
ugccugcccaggccccugccaccc

SEQ ID NO: 2544916 - RNA, 15 nt, Human
ugccugcccaggccc

SEQ ID NO: 2544917 - RNA, 14 nt, Human
ugccugcccaggcc

SEQ ID NO: 2544918 - RNA, 15 nt, Human
ugccugccugucugu

SEQ ID NO: 2544919 - RNA, 14 nt, Human
ugccugccugucug

SEQ ID NO: 2544920 - RNA, 15 nt, Human
ugccugcccuauucu

SEQ ID NO: 2544921 - RNA, 12 nt, Human
ugccugccccgc

SEQ ID NO: 2544922 - RNA, 18 nt, Human
ugccugccccccucaucu

SEQ ID NO: 2544923 - RNA, 17 nt, Human
ugccugccccgccccca

SEQ ID NO: 2544924 - RNA, 20 nt, Human
ugccugccccaaacaaauau

SEQ ID NO: 2544925 - RNA, 18 nt, Human
ugccugccccaaacaaau

SEQ ID NO: 2544926 - RNA, 15 nt, Human
ugccucugccucuga

SEQ ID NO: 2544927 - RNA, 13 nt, Human
ugccugcccaggc

SEQ ID NO: 2544928 - RNA, 14 nt, Human
ugccucugccucug

SEQ ID NO: 2544929 - RNA, 13 nt, Human
ugccucugccucu

SEQ ID NO: 2544930 - RNA, 14 nt, Human
ugcccaggcagguc

SEQ ID NO: 2544931 - RNA, 13 nt, Human
ugcccaggcaggu

SEQ ID NO: 2544932 - RNA, 12 nt, Human
ugcccaggcagg

SEQ ID NO: 2544933 - RNA, 22 nt, Human
ugcccaggagagccagcccucc

SEQ ID NO: 2544934 - RNA, 23 nt, Human
ugcccaggagagccagcccuccc

SEQ ID NO: 2544935 - RNA, 21 nt, Human
ugcccaggagagccagcccuc

SEQ ID NO: 2544936 - RNA, 20 nt, Human
agcugccuguucagcuccag

SEQ ID NO: 2544937 - RNA, 13 nt, Human
agcugccucacuu

SEQ ID NO: 2544938 - RNA, 13 nt, Human
agcugccgaccag

SEQ ID NO: 2544939 - RNA, 17 nt, Human
agcugccgaccagagcc

SEQ ID NO: 2544940 - RNA, 18 nt, Human
agcugccgaccagagccc

SEQ ID NO: 2544941 - RNA, 15 nt, Human
ugccuggauggggcu

SEQ ID NO: 2544942 - RNA, 23 nt, Human
ugccuggaguguaugacugcaca

SEQ ID NO: 2544943 - RNA, 14 nt, Human
ugccuggauggggc

SEQ ID NO: 2544944 - RNA, 20 nt, Human
ugccuggagacuuagggcac

SEQ ID NO: 2544945 - RNA, 22 nt, Human
agcugccuguucagcuccagcu

SEQ ID NO: 2544946 - RNA, 21 nt, Human
agcugccuguucagcuccagc

SEQ ID NO: 2544947 - RNA, 21 nt, Human
agcugcuugggcuucauccuc

SEQ ID NO: 2544948 - RNA, 20 nt, Human
agcugcuugugucccuccug

SEQ ID NO: 2544949 - RNA, 15 nt, Human
agcugcuuguguccc

SEQ ID NO: 2544950 - RNA, 14 nt, Human
agcugcuugugucc

SEQ ID NO: 2544951 - RNA, 19 nt, Human
agcugccuguucagcucca

SEQ ID NO: 2544952 - RNA, 20 nt, Human
agcugcuuucuguugucauu

SEQ ID NO: 2544953 - RNA, 19 nt, Human
agcugcuuucuguugucau

SEQ ID NO: 2544954 - RNA, 21 nt, Human
agcugcuugugucccuccugg

SEQ ID NO: 2544955 - RNA, 21 nt, Human
agcugcuuuugucuaugggac

SEQ ID NO: 2544956 - RNA, 14 nt, Human
agcuggaugagaau

SEQ ID NO: 2544957 - RNA, 20 nt, Human
agcuggaugauggucuucag

SEQ ID NO: 2544958 - RNA, 22 nt, Human
agcuggaucuccauucucucag

SEQ ID NO: 2544959 - RNA, 19 nt, Human
agcuggcaaagguggcucu

SEQ ID NO: 2544960 - RNA, 23 nt, Human
agcuggauuggguuaugaauauu

SEQ ID NO: 2544961 - RNA, 15 nt, Human
agcuggcauuacagc

SEQ ID NO: 2544962 - RNA, 21 nt, Human
agcuggcauuacagcuggaga

SEQ ID NO: 2544963 - RNA, 13 nt, Human
agcuggccccgcc

SEQ ID NO: 2544964 - RNA, 18 nt, Human
aggguguggcccugccau

SEQ ID NO: 2544965 - RNA, 23 nt, Human
aggguggugcugggacugagcca

SEQ ID NO: 2544966 - RNA, 17 nt, Human
aggguggugcugggacu

SEQ ID NO: 2544967 - RNA, 16 nt, Human
aggguggugcugggac

SEQ ID NO: 2544968 - RNA, 14 nt, Human
aggguggugcuggg

SEQ ID NO: 2544969 - RNA, 17 nt, Human
agggugguggagccagu

SEQ ID NO: 2544970 - RNA, 15 nt, Human
agggugguggagcca

SEQ ID NO: 2544971 - RNA, 22 nt, Human
aggguguccggucccuguccca

SEQ ID NO: 2544972 - RNA, 22 nt, Human
uggucuuuguaagaguguagaa

SEQ ID NO: 2544973 - RNA, 21 nt, Human
uggucuuuguaagaguguaga

SEQ ID NO: 2544974 - RNA, 15 nt, Human
uggucuuuguaagag

SEQ ID NO: 2544975 - RNA, 14 nt, Human
uggucuuuguaaga

SEQ ID NO: 2544976 - RNA, 21 nt, Human
aggguggugaccucugccuga

SEQ ID NO: 2544977 - RNA, 13 nt, Human
aggguuaagaaaa

SEQ ID NO: 2544978 - RNA, 14 nt, Human
aggguguuuaugua

SEQ ID NO: 2544979 - RNA, 17 nt, Human
aggguuaagaaaagaga

SEQ ID NO: 2544980 - RNA, 21 nt, Human
aggguguugggauacugcagg

SEQ ID NO: 2544981 - RNA, 22 nt, Human
aggguguggcccugccaucuuc

SEQ ID NO: 2544982 - RNA, 12 nt, Human
agggugugugcu

SEQ ID NO: 2544983 - RNA, 13 nt, Human
aggguuauaauaa

SEQ ID NO: 2544984 - RNA, 17 nt, Human
aggguuaugauuaagua

SEQ ID NO: 2544985 - RNA, 13 nt, Human
aggguuagggagg

SEQ ID NO: 2544986 - RNA, 15 nt, Human
aggguuagggagggg

SEQ ID NO: 2544987 - RNA, 16 nt, Human
aggguuagggaggggu

SEQ ID NO: 2544988 - RNA, 18 nt, Human
aggguuacuaugcacaau

SEQ ID NO: 2544989 - RNA, 15 nt, Human
aggguuauauuuuac

SEQ ID NO: 2544990 - RNA, 20 nt, Human
uggucuuucuuacaaggaag

SEQ ID NO: 2544991 - RNA, 13 nt, Human
uggucuuuguaag

SEQ ID NO: 2544992 - RNA, 14 nt, Human
uggucuuuccucug

SEQ ID NO: 2544993 - RNA, 14 nt, Human
uggucuuucuggag

SEQ ID NO: 2544994 - RNA, 15 nt, Human
uggucuuucuggaga

SEQ ID NO: 2544995 - RNA, 17 nt, Human
uggucuuucuggagagg

SEQ ID NO: 2544996 - RNA, 22 nt, Human
uggucuuuccuaucauggagug

SEQ ID NO: 2544997 - RNA, 14 nt, Human
uggucuuuaaugaa

SEQ ID NO: 2544998 - RNA, 16 nt, Human
uggucuuguggaauug

SEQ ID NO: 2544999 - RNA, 20 nt, Human
uggucuuggcagcaccuguc

SEQ ID NO: 2545000 - RNA, 17 nt, Human
uggucuucccaggcugg

SEQ ID NO: 2545001 - RNA, 14 nt, Human
uggucuucccaggc

SEQ ID NO: 2545002 - RNA, 17 nt, Human
uggucuuggcagcaccu

SEQ ID NO: 2545003 - RNA, 17 nt, Human
uggucuugagaugucuu

SEQ ID NO: 2545004 - RNA, 15 nt, Human
uggucuucagccucu

SEQ ID NO: 2545005 - RNA, 14 nt, Human
uggucuucagccuc

SEQ ID NO: 2545006 - RNA, 18 nt, Human
uggucugaauguucugac

SEQ ID NO: 2545007 - RNA, 19 nt, Human
uggucugaauguucugaca

SEQ ID NO: 2545008 - RNA, 21 nt, Human
uggucugaauguucugacauu

SEQ ID NO: 2545009 - RNA, 22 nt, Human
uggucugaauguucugacauua

SEQ ID NO: 2545010 - RNA, 17 nt, Human
uggucugacccacugcu

SEQ ID NO: 2545011 - RNA, 16 nt, Human
uggucugacccacugc

SEQ ID NO: 2545012 - RNA, 22 nt, Human
uggucuccuuggaaauccgucu

SEQ ID NO: 2545013 - RNA, 23 nt, Human
uggucuccucagccuccucaucu

SEQ ID NO: 2545014 - RNA, 13 nt, Human
uggucugaauguu

SEQ ID NO: 2545015 - RNA, 14 nt, Human
uggucugaauguuc

SEQ ID NO: 2545016 - RNA, 15 nt, Human
uggucugaauguucu

SEQ ID NO: 2545017 - RNA, 16 nt, Human
uggucugaauguucug

SEQ ID NO: 2545018 - RNA, 17 nt, Human
uggucugaauguucuga

SEQ ID NO: 2545019 - RNA, 19 nt, Human
uggucucagcagcgaccac

SEQ ID NO: 2545020 - RNA, 22 nt, Human
uggucucagcagcgaccacccc

SEQ ID NO: 2545021 - RNA, 17 nt, Human
uggucuccucagccucc

SEQ ID NO: 2545022 - RNA, 16 nt, Human
uggucuccuuggaaau

SEQ ID NO: 2545023 - RNA, 16 nt, Human
uggucccaccccacac

SEQ ID NO: 2545024 - RNA, 19 nt, Human
uggucuaucuuugagcgcc

SEQ ID NO: 2545025 - RNA, 21 nt, Human
uggucauagcccagaucagcu

SEQ ID NO: 2545026 - RNA, 16 nt, Human
uggucucaaacucuug

SEQ ID NO: 2545027 - RNA, 23 nt, Human
uggucucaaacucuugaccucag

SEQ ID NO: 2545028 - RNA, 17 nt, Human
uggucucaaacucuuga

SEQ ID NO: 2545029 - RNA, 12 nt, Human
uggucucagaaa

SEQ ID NO: 2545030 - RNA, 14 nt, Human
uggucuccacuggg

SEQ ID NO: 2545031 - RNA, 15 nt, Human
uggucuauugucugu

SEQ ID NO: 2545032 - RNA, 18 nt, Human
uggucucaaacuccugac

SEQ ID NO: 2545033 - RNA, 18 nt, Human
uggucaccaaaucagcug

SEQ ID NO: 2545034 - RNA, 22 nt, Human
uggucagauuugaacucuucaa

SEQ ID NO: 2545035 - RNA, 11 nt, Human
uggucagccca

SEQ ID NO: 2545036 - RNA, 12 nt, Human
uggucagcccaa

SEQ ID NO: 2545037 - RNA, 10 nt, Human
uggucagccc

SEQ ID NO: 2545038 - RNA, 20 nt, Human
uggucaccaaaucagcugcu

SEQ ID NO: 2545039 - RNA, 15 nt, Human
uggucccaccccaca

SEQ ID NO: 2545040 - RNA, 14 nt, Human
uggucccaccccac

SEQ ID NO: 2545041 - RNA, 15 nt, Human
uggucagcccuaggg

SEQ ID NO: 2545042 - RNA, 19 nt, Human
uggucagcccuagggugga

SEQ ID NO: 2545043 - RNA, 17 nt, Human
uggucacagggcaugcc

SEQ ID NO: 2545044 - RNA, 13 nt, Human
uggucacagggca

SEQ ID NO: 2545045 - RNA, 17 nt, Human
uggucagcguugcaugu

SEQ ID NO: 2545046 - RNA, 16 nt, Human
uggucagcguugcaug

SEQ ID NO: 2545047 - RNA, 22 nt, Human
uggucagcccuaggguggagag

SEQ ID NO: 2545048 - RNA, 19 nt, Human
uggucagcucccuucucug

SEQ ID NO: 2545049 - RNA, 13 nt, Human
uggucagcucccu

SEQ ID NO: 2545050 - RNA, 15 nt, Human
aggguugggcccaga

SEQ ID NO: 2545051 - RNA, 17 nt, Human
aggguuggccccugccc

SEQ ID NO: 2545052 - RNA, 23 nt, Human
aggguuggccccugcccggcugc

SEQ ID NO: 2545053 - RNA, 18 nt, Human
aggguuggccccugcccg

SEQ ID NO: 2545054 - RNA, 23 nt, Human
agguacuucaaauccuugaagau

SEQ ID NO: 2545055 - RNA, 17 nt, Human
agguagaaauaucugaa

SEQ ID NO: 2545056 - RNA, 19 nt, Human
agguagaaauaucugaaaa

SEQ ID NO: 2545057 - RNA, 12 nt, Human
agguaggguuua

SEQ ID NO: 2545058 - RNA, 15 nt, Human
agguaggguuuaauc

SEQ ID NO: 2545059 - RNA, 20 nt, Human
agguagguggaucaccugag

SEQ ID NO: 2545060 - RNA, 23 nt, Human
agguagaaauaucugaaaaugua

SEQ ID NO: 2545061 - RNA, 23 nt, Human
agguauaauucacauuguauuca

SEQ ID NO: 2545062 - RNA, 19 nt, Human
agguauaaguggugugugu

SEQ ID NO: 2545063 - RNA, 20 nt, Human
agguauaaguggugugugua

SEQ ID NO: 2545064 - RNA, 11 nt, Human
agguauaauuu

SEQ ID NO: 2545065 - RNA, 15 nt, Human
agguauaauuuuaug

SEQ ID NO: 2545066 - RNA, 21 nt, Human
agguaugcaaucaaaucugcu

SEQ ID NO: 2545067 - RNA, 21 nt, Human
aggucacuggcucuccaagug

SEQ ID NO: 2545068 - RNA, 20 nt, Human
aggucacuggcucuccaagu

SEQ ID NO: 2545069 - RNA, 18 nt, Human
aggucauggaauggaaac

SEQ ID NO: 2545070 - RNA, 19 nt, Human
aggucacuggcucuccaag

SEQ ID NO: 2545071 - RNA, 18 nt, Human
aggucacuggcucuccaa

SEQ ID NO: 2545072 - RNA, 17 nt, Human
aggucacuggcucucca

SEQ ID NO: 2545073 - RNA, 16 nt, Human
aggucacuggcucucc

SEQ ID NO: 2545074 - RNA, 12 nt, Human
aggucagagccu

SEQ ID NO: 2545075 - RNA, 17 nt, Human
aggucauuuuuuuuaag

SEQ ID NO: 2545076 - RNA, 20 nt, Human
aggucauuuuuuuuaagaaa

SEQ ID NO: 2545077 - RNA, 18 nt, Human
agguccagcucuggaggg

SEQ ID NO: 2545078 - RNA, 23 nt, Human
agguccagcucuggaggggaggg

SEQ ID NO: 2545079 - RNA, 11 nt, Human
aggucccaggc

SEQ ID NO: 2545080 - RNA, 12 nt, Human
aggucccaggca

SEQ ID NO: 2545081 - RNA, 13 nt, Human
aggucccaggcag

SEQ ID NO: 2545082 - RNA, 18 nt, Human
aggucaccuuuauucugg

SEQ ID NO: 2545083 - RNA, 19 nt, Human
aggucacauucaggaagau

SEQ ID NO: 2545084 - RNA, 18 nt, Human
aggucacauucaggaaga

SEQ ID NO: 2545085 - RNA, 15 nt, Human
aggucacccuuugcu

SEQ ID NO: 2545086 - RNA, 12 nt, Human
aggucaccagca

SEQ ID NO: 2545087 - RNA, 19 nt, Human
aggucaccuuuauucuggc

SEQ ID NO: 2545088 - RNA, 19 nt, Human
aggucacuagauggcgagc

SEQ ID NO: 2545089 - RNA, 14 nt, Human
aggucacuccuggg

SEQ ID NO: 2545090 - RNA, 15 nt, Human
aggucacuccugggg

SEQ ID NO: 2545091 - RNA, 18 nt, Human
aggucacuccuggggccu

SEQ ID NO: 2545092 - RNA, 15 nt, Human
aggucacuggcucuc

SEQ ID NO: 2545093 - RNA, 14 nt, Human
aggucacuggcucu

SEQ ID NO: 2545094 - RNA, 21 nt, Human
aggucacuggaaaggggagag

SEQ ID NO: 2545095 - RNA, 20 nt, Human
aggucacuggaaaggggaga

SEQ ID NO: 2545096 - RNA, 16 nt, Human
aggucacuggaaaggg

SEQ ID NO: 2545097 - RNA, 23 nt, Human
aggucacucuuccugcaaggacu

SEQ ID NO: 2545098 - RNA, 21 nt, Human
aggucacucuuccugcaagga

SEQ ID NO: 2545099 - RNA, 19 nt, Human
aggucacuccuggggccuc

SEQ ID NO: 2545100 - RNA, 19 nt, Human
aggucaaguaagaagacau

SEQ ID NO: 2545101 - RNA, 22 nt, Human
aggucaaguaagaagacaugaa

SEQ ID NO: 2545102 - RNA, 17 nt, Human
agguauucgugcagcau

SEQ ID NO: 2545103 - RNA, 18 nt, Human
aggucaauacaguacagg

SEQ ID NO: 2545104 - RNA, 15 nt, Human
aggucacauucagga

SEQ ID NO: 2545105 - RNA, 23 nt, Human
aggucacacgaggggccccgugu

SEQ ID NO: 2545106 - RNA, 23 nt, Human
aggucaauacaguacaggcagca

SEQ ID NO: 2545107 - RNA, 21 nt, Human
aggucaaugccagagacggaa

SEQ ID NO: 2545108 - RNA, 21 nt, Human
aggucaauacaguacaggcag

SEQ ID NO: 2545109 - RNA, 22 nt, Human
aggucaauacaguacaggcagc

SEQ ID NO: 2545110 - RNA, 20 nt, Human
agguauguugccuuuauggu

SEQ ID NO: 2545111 - RNA, 14 nt, Human
agguauguugccuu

SEQ ID NO: 2545112 - RNA, 20 nt, Human
agguauggaaggguuugugg

SEQ ID NO: 2545113 - RNA, 22 nt, Human
agguauggaaggguuuguggcu

SEQ ID NO: 2545114 - RNA, 22 nt, Human
agguauuccuuuuguguacagu

SEQ ID NO: 2545115 - RNA, 20 nt, Human
agguauucaauauccuuugc

SEQ ID NO: 2545116 - RNA, 20 nt, Human
agggguugccacaggccucc

SEQ ID NO: 2545117 - RNA, 16 nt, Human
agggucucuagugcug

SEQ ID NO: 2545118 - RNA, 18 nt, Human
agggucucuagugcugug

SEQ ID NO: 2545119 - RNA, 20 nt, Human
agggucucuagugcugugaa

SEQ ID NO: 2545120 - RNA, 15 nt, Human
agggucucugcugcc

SEQ ID NO: 2545121 - RNA, 14 nt, Human
agggucucugcugc

SEQ ID NO: 2545122 - RNA, 13 nt, Human
agggucucugcug

SEQ ID NO: 2545123 - RNA, 21 nt, Human
agggucucuagugcugugaaa

SEQ ID NO: 2545124 - RNA, 22 nt, Human
agggucucuagugcugugaaaa

SEQ ID NO: 2545125 - RNA, 21 nt, Human
agggucucacucugucgccca

SEQ ID NO: 2545126 - RNA, 22 nt, Human
agggucucacucugucgcccag

SEQ ID NO: 2545127 - RNA, 12 nt, Human
aggguggagacu

SEQ ID NO: 2545128 - RNA, 16 nt, Human
agggucucugcugccg

SEQ ID NO: 2545129 - RNA, 14 nt, Human
aggguggcagguga

SEQ ID NO: 2545130 - RNA, 21 nt, Human
aggguggagacuaagcccugu

SEQ ID NO: 2545131 - RNA, 15 nt, Human
aggguggcaucccag

SEQ ID NO: 2545132 - RNA, 21 nt, Human
aggguggcaucccaguggccu

SEQ ID NO: 2545133 - RNA, 21 nt, Human
aggguggcuggguccagggga

SEQ ID NO: 2545134 - RNA, 18 nt, Human
aggguggcccuugcaguu

SEQ ID NO: 2545135 - RNA, 11 nt, Human
aggguggcccu

SEQ ID NO: 2545136 - RNA, 14 nt, Human
aggguggcccuugc

SEQ ID NO: 2545137 - RNA, 16 nt, Human
agggugggagagccca

SEQ ID NO: 2545138 - RNA, 17 nt, Human
agggugggagagcccag

SEQ ID NO: 2545139 - RNA, 18 nt, Human
agggugggagagcccagc

SEQ ID NO: 2545140 - RNA, 19 nt, Human
agggugggagagcccagcc

SEQ ID NO: 2545141 - RNA, 21 nt, Human
ugggucgcccuggacugugug

SEQ ID NO: 2545142 - RNA, 23 nt, Human
ugggucuaagggguugguugagg

SEQ ID NO: 2545143 - RNA, 20 nt, Human
ugggucucgcuuuguugccc

SEQ ID NO: 2545144 - RNA, 17 nt, Human
ugggucuggcugagcug

SEQ ID NO: 2545145 - RNA, 15 nt, Human
ugggucuggcugagc

SEQ ID NO: 2545146 - RNA, 19 nt, Human
ugggucugagucauggccg

SEQ ID NO: 2545147 - RNA, 22 nt, Human
ugggucucgcuuuguugcccag

SEQ ID NO: 2545148 - RNA, 12 nt, Human
ugggucugugug

SEQ ID NO: 2545149 - RNA, 14 nt, Human
ugggucugugucuc

SEQ ID NO: 2545150 - RNA, 19 nt, Human
ugggucugugucucuuuuc

SEQ ID NO: 2545151 - RNA, 20 nt, Human
ugggucugugucucuuuucu

SEQ ID NO: 2545152 - RNA, 19 nt, Human
ugggugcuuggaggaagga

SEQ ID NO: 2545153 - RNA, 15 nt, Human
ugggugcuuggagga

SEQ ID NO: 2545154 - RNA, 22 nt, Human
ugggugcuuggaggaaggaaac

SEQ ID NO: 2545155 - RNA, 22 nt, Human
uggguggcaccagcagccugga

SEQ ID NO: 2545156 - RNA, 13 nt, Human
ugggugcucccua

SEQ ID NO: 2545157 - RNA, 22 nt, Human
ugguaggaccaagcaucuuggg

SEQ ID NO: 2545158 - RNA, 16 nt, Human
ugguaggaccaagcau

SEQ ID NO: 2545159 - RNA, 20 nt, Human
uggucacaggacucugccuc

SEQ ID NO: 2545160 - RNA, 23 nt, Human
uggucacaggacucugccuccuc

SEQ ID NO: 2545161 - RNA, 22 nt, Human
uggucacaggacucugccuccu

SEQ ID NO: 2545162 - RNA, 20 nt, Human
ugguaggaacugcugggcuu

SEQ ID NO: 2545163 - RNA, 17 nt, Human
ugguagcuuuucccuuc

SEQ ID NO: 2545164 - RNA, 19 nt, Human
ugguacuuauuacugcuaa

SEQ ID NO: 2545165 - RNA, 13 nt, Human
ugguaggaacugc

SEQ ID NO: 2545166 - RNA, 21 nt, Human
ugguagcuuuucccuucuuuu

SEQ ID NO: 2545167 - RNA, 17 nt, Human
ugguacucuccuagaga

SEQ ID NO: 2545168 - RNA, 13 nt, Human
ugguacucuccua

SEQ ID NO: 2545169 - RNA, 20 nt, Human
ugguagcuuuucccuucuuu

SEQ ID NO: 2545170 - RNA, 18 nt, Human
ugguacuuauuacugcua

SEQ ID NO: 2545171 - RNA, 17 nt, Human
ugguacuuauuacugcu

SEQ ID NO: 2545172 - RNA, 16 nt, Human
ugguacuaacuuuccu

SEQ ID NO: 2545173 - RNA, 20 nt, Human
ugguacuacuagaugucuuu

SEQ ID NO: 2545174 - RNA, 18 nt, Human
ugguacggagauguuuca

SEQ ID NO: 2545175 - RNA, 17 nt, Human
ugguacucauuaaaaaa

SEQ ID NO: 2545176 - RNA, 15 nt, Human
ugguaaucuugcucu

SEQ ID NO: 2545177 - RNA, 22 nt, Human
ugguaauuauuuugguacuuuu

SEQ ID NO: 2545178 - RNA, 21 nt, Human
ugguaauuaucauuuuagaag

SEQ ID NO: 2545179 - RNA, 14 nt, Human
ugguaauauugacu

SEQ ID NO: 2545180 - RNA, 23 nt, Human
aggggacgcugguagagauggag

SEQ ID NO: 2545181 - RNA, 20 nt, Human
ugguaaggggaauugaggac

SEQ ID NO: 2545182 - RNA, 15 nt, Human
ugguaagcucuggcu

SEQ ID NO: 2545183 - RNA, 14 nt, Human
ugguaagcucuggc

SEQ ID NO: 2545184 - RNA, 13 nt, Human
ugguaagcucugg

SEQ ID NO: 2545185 - RNA, 13 nt, Human
uggguggggcugc

SEQ ID NO: 2545186 - RNA, 12 nt, Human
ugggugggagag

SEQ ID NO: 2545187 - RNA, 16 nt, Human
ugggugggcaggaaaa

SEQ ID NO: 2545188 - RNA, 15 nt, Human
uggguggccucggga

SEQ ID NO: 2545189 - RNA, 21 nt, Human
uggguggcccauccccccuca

SEQ ID NO: 2545190 - RNA, 15 nt, Human
uggguggcccauccc

SEQ ID NO: 2545191 - RNA, 14 nt, Human
uggguggcccaucc

SEQ ID NO: 2545192 - RNA, 14 nt, Human
ugggugcuggcugc

SEQ ID NO: 2545193 - RNA, 15 nt, Human
uggguggcacugcca

SEQ ID NO: 2545194 - RNA, 18 nt, Human
ugggugcuggcugcccag

SEQ ID NO: 2545195 - RNA, 16 nt, Human
uggguggggggcuuca

SEQ ID NO: 2545196 - RNA, 19 nt, Human
ugggugggcucugugcagu

SEQ ID NO: 2545197 - RNA, 16 nt, Human
ugggugggcucugugc

SEQ ID NO: 2545198 - RNA, 15 nt, Human
ugggugggcucugug

SEQ ID NO: 2545199 - RNA, 18 nt, Human
ugggugggcaggaaaagg

SEQ ID NO: 2545200 - RNA, 21 nt, Human
uggguggggcugcuccuccag

SEQ ID NO: 2545201 - RNA, 23 nt, Human
agggucucacuauguugcccagg

SEQ ID NO: 2545202 - RNA, 22 nt, Human
agggucucacuauguugcccag

SEQ ID NO: 2545203 - RNA, 19 nt, Human
agggguugccacaggccuc

SEQ ID NO: 2545204 - RNA, 16 nt, Human
agggguugccacaggc

SEQ ID NO: 2545205 - RNA, 18 nt, Human
agggguugcagugagcgg

SEQ ID NO: 2545206 - RNA, 23 nt, Human
agggguugagcagggauccuggu

SEQ ID NO: 2545207 - RNA, 21 nt, Human
agggucucacuauguugccca

SEQ ID NO: 2545208 - RNA, 20 nt, Human
agggguucgagaccagucug

SEQ ID NO: 2545209 - RNA, 15 nt, Human
agggguucgagacca

SEQ ID NO: 2545210 - RNA, 18 nt, Human
agggguguggcagugguu

SEQ ID NO: 2545211 - RNA, 15 nt, Human
agggguguggcuccu

SEQ ID NO: 2545212 - RNA, 16 nt, Human
agggguguggcagugg

SEQ ID NO: 2545213 - RNA, 18 nt, Human
aggggugguccugacuca

SEQ ID NO: 2545214 - RNA, 24 nt, Human
agggguucccuuuuuuggcugcug

SEQ ID NO: 2545215 - RNA, 24 nt, Human
aggggugucuugggcagagcuggc

SEQ ID NO: 2545216 - RNA, 22 nt, Human
aggggugucuugggcagagcug

SEQ ID NO: 2545217 - RNA, 14 nt, Human
aggggugucuuggg

SEQ ID NO: 2545218 - RNA, 13 nt, Human
aggggugguccug

SEQ ID NO: 2545219 - RNA, 15 nt, Human
aggggugguccugac

SEQ ID NO: 2545220 - RNA, 18 nt, Human
aggggguggccucccaac

SEQ ID NO: 2545221 - RNA, 17 nt, Human
aggggguggccucccaa

SEQ ID NO: 2545222 - RNA, 20 nt, Human
agggggauccgacugcuuug

SEQ ID NO: 2545223 - RNA, 19 nt, Human
agggggauccgacugcuuu

SEQ ID NO: 2545224 - RNA, 15 nt, Human
aggggguggccuccc

SEQ ID NO: 2545225 - RNA, 23 nt, Human
agggggugauuagagggaggaga

SEQ ID NO: 2545226 - RNA, 20 nt, Human
aggggugggacacccuguga

SEQ ID NO: 2545227 - RNA, 22 nt, Human
aggggugggacacccugugaug

SEQ ID NO: 2545228 - RNA, 19 nt, Human
agggguggggguggaggcu

SEQ ID NO: 2545229 - RNA, 15 nt, Human
aggggguggaggggu

SEQ ID NO: 2545230 - RNA, 20 nt, Human
agggguggguuccucuuccc

SEQ ID NO: 2545231 - RNA, 21 nt, Human
agggguggguuccucuucccc

SEQ ID NO: 2545232 - RNA, 20 nt, Human
aggggcuagaaccuagagaa

SEQ ID NO: 2545233 - RNA, 18 nt, Human
aggggcuacaagagggaa

SEQ ID NO: 2545234 - RNA, 15 nt, Human
aggggcucaggaaaa

SEQ ID NO: 2545235 - RNA, 22 nt, Human
agggggaaggugggguccugga

SEQ ID NO: 2545236 - RNA, 15 nt, Human
agggggaaggcaggg

SEQ ID NO: 2545237 - RNA, 21 nt, Human
agggggagccccuucugcuca

SEQ ID NO: 2545238 - RNA, 22 nt, Human
agggggagccccuucugcucag

SEQ ID NO: 2545239 - RNA, 17 nt, Human
agggggauaugaaugga

SEQ ID NO: 2545240 - RNA, 18 nt, Human
aggggcgcuggcccagcc

SEQ ID NO: 2545241 - RNA, 17 nt, Human
aggggcgcuggcccagc

SEQ ID NO: 2545242 - RNA, 16 nt, Human
aggggcgcuggcccag

SEQ ID NO: 2545243 - RNA, 15 nt, Human
aggggcgcuggccca

SEQ ID NO: 2545244 - RNA, 14 nt, Human
aggggcgcuggccc

SEQ ID NO: 2545245 - RNA, 13 nt, Human
aggggcgcuggcc

SEQ ID NO: 2545246 - RNA, 20 nt, Human
aggggcgcucgcuuccgcau

SEQ ID NO: 2545247 - RNA, 16 nt, Human
aggggcgcccaccucc

SEQ ID NO: 2545248 - RNA, 22 nt, Human
aggggcgcuggcccagccggcc

SEQ ID NO: 2545249 - RNA, 21 nt, Human
aggggcgcuggcccagccggc

SEQ ID NO: 2545250 - RNA, 20 nt, Human
aggggcgcuggcccagccgg

SEQ ID NO: 2545251 - RNA, 19 nt, Human
aggggcgcuggcccagccg

SEQ ID NO: 2545252 - RNA, 18 nt, Human
aggggcgggacccaggca

SEQ ID NO: 2545253 - RNA, 23 nt, Human
aggggcgcuggcccagccggccu

SEQ ID NO: 2545254 - RNA, 17 nt, Human
aggggcuacaagaggga

SEQ ID NO: 2545255 - RNA, 15 nt, Human
aggggcuacaagagg

SEQ ID NO: 2545256 - RNA, 14 nt, Human
aggggcguguggcu

SEQ ID NO: 2545257 - RNA, 17 nt, Human
aggggcguguggcucac

SEQ ID NO: 2545258 - RNA, 19 nt, Human
aggggcgggacccaggcac

SEQ ID NO: 2545259 - RNA, 16 nt, Human
aggggcgucuguuccc

SEQ ID NO: 2545260 - RNA, 19 nt, Human
aggggcgucuguucccccu

SEQ ID NO: 2545261 - RNA, 21 nt, Human
aggggcgucuguucccccuuc

SEQ ID NO: 2545262 - RNA, 22 nt, Human
aggggcguggagggcguggagg

SEQ ID NO: 2545263 - RNA, 22 nt, Human
aggggcgucuguucccccuuca

SEQ ID NO: 2545264 - RNA, 20 nt, Human
aggggcgugggaguggccug

SEQ ID NO: 2545265 - RNA, 22 nt, Human
aggggacucagcccugagguga

SEQ ID NO: 2545266 - RNA, 14 nt, Human
aggggacucagccc

SEQ ID NO: 2545267 - RNA, 17 nt, Human
aggggacucagcccuga

SEQ ID NO: 2545268 - RNA, 19 nt, Human
uggggucacucuggcagcu

SEQ ID NO: 2545269 - RNA, 20 nt, Human
uggggucacucuggcagcuc

SEQ ID NO: 2545270 - RNA, 21 nt, Human
ugggguaggaggaugggcucg

SEQ ID NO: 2545271 - RNA, 19 nt, Human
aggggacuauuuaugaagg

SEQ ID NO: 2545272 - RNA, 17 nt, Human
aggggagagccugcugg

SEQ ID NO: 2545273 - RNA, 16 nt, Human
aggggagagccugcug

SEQ ID NO: 2545274 - RNA, 15 nt, Human
aggggagagccugcu

SEQ ID NO: 2545275 - RNA, 15 nt, Human
aggggccuggcagcc

SEQ ID NO: 2545276 - RNA, 23 nt, Human
aggggagcaaaaucgaugcagug

SEQ ID NO: 2545277 - RNA, 23 nt, Human
aggggccuggcagccgugccuuc

SEQ ID NO: 2545278 - RNA, 18 nt, Human
aggggccuggcagccgug

SEQ ID NO: 2545279 - RNA, 22 nt, Human
aggggagagccugcuggcaccc

SEQ ID NO: 2545280 - RNA, 10 nt, Human
aggggagagg

SEQ ID NO: 2545281 - RNA, 14 nt, Human
aggggcgcccaccu

SEQ ID NO: 2545282 - RNA, 17 nt, Human
aggggagagggucugga

SEQ ID NO: 2545283 - RNA, 23 nt, Human
aggggcgccgcaaaccacacugg

SEQ ID NO: 2545284 - RNA, 13 nt, Human
ugggccagacaug

SEQ ID NO: 2545285 - RNA, 18 nt, Human
ugggccagacaugccaca

SEQ ID NO: 2545286 - RNA, 18 nt, Human
ugggccagaauuucaaac

SEQ ID NO: 2545287 - RNA, 19 nt, Human
ugggccagacaugccacaa

SEQ ID NO: 2545288 - RNA, 13 nt, Human
ugggccagccccu

SEQ ID NO: 2545289 - RNA, 14 nt, Human
ugggccagccccuc

SEQ ID NO: 2545290 - RNA, 15 nt, Human
ugggccagccccucc

SEQ ID NO: 2545291 - RNA, 13 nt, Human
ugggccaggagcc

SEQ ID NO: 2545292 - RNA, 16 nt, Human
ugggccagccccuccc

SEQ ID NO: 2545293 - RNA, 18 nt, Human
ugggccagccccucccac

SEQ ID NO: 2545294 - RNA, 20 nt, Human
ugggccagccccucccacca

SEQ ID NO: 2545295 - RNA, 14 nt, Human
ugggccaggacagg

SEQ ID NO: 2545296 - RNA, 22 nt, Human
ugggccagccccucccaccaca

SEQ ID NO: 2545297 - RNA, 23 nt, Human
ugggccagccccucccaccacag

SEQ ID NO: 2545298 - RNA, 16 nt, Human
ugggccaggagccucc

SEQ ID NO: 2545299 - RNA, 14 nt, Human
ugggccaggagccu

SEQ ID NO: 2545300 - RNA, 20 nt, Human
ugggcccaaugcacuuuguu

SEQ ID NO: 2545301 - RNA, 19 nt, Human
ugggccauucuccacagca

SEQ ID NO: 2545302 - RNA, 20 nt, Human
ugggccauucuccacagcaa

SEQ ID NO: 2545303 - RNA, 17 nt, Human
ugggccaggacaggccc

SEQ ID NO: 2545304 - RNA, 18 nt, Human
ugggccaggacaggcccg

SEQ ID NO: 2545305 - RNA, 22 nt, Human
ugggccacuucuggguggggca

SEQ ID NO: 2545306 - RNA, 17 nt, Human
ugggccagaauuucaaa

SEQ ID NO: 2545307 - RNA, 16 nt, Human
ugggcacccacccugg

SEQ ID NO: 2545308 - RNA, 14 nt, Human
ugggcacccacccu

SEQ ID NO: 2545309 - RNA, 16 nt, Human
ugggcaccccacugca

SEQ ID NO: 2545310 - RNA, 21 nt, Human
ugggcacccagccucuaggga

SEQ ID NO: 2545311 - RNA, 20 nt, Human
ugggcacccacccugggacc

SEQ ID NO: 2545312 - RNA, 20 nt, Human
ugggcaacccccagccugcu

SEQ ID NO: 2545313 - RNA, 17 nt, Human
ugggcaacccccagccu

SEQ ID NO: 2545314 - RNA, 14 nt, Human
ugggcacaguuugg

SEQ ID NO: 2545315 - RNA, 22 nt, Human
ugggcacacgccucccacuggg

SEQ ID NO: 2545316 - RNA, 18 nt, Human
ugggaggucaaggcugca

SEQ ID NO: 2545317 - RNA, 19 nt, Human
ugggaggucaaggcugcag

SEQ ID NO: 2545318 - RNA, 20 nt, Human
ugggaggucaaggcugcagu

SEQ ID NO: 2545319 - RNA, 23 nt, Human
ugggaggucaaggcugcagugag

SEQ ID NO: 2545320 - RNA, 16 nt, Human
aggccuuccucucucc

SEQ ID NO: 2545321 - RNA, 18 nt, Human
aggccuuccucucuccag

SEQ ID NO: 2545322 - RNA, 22 nt, Human
aggccuucuccuccccacccgc

SEQ ID NO: 2545323 - RNA, 13 nt, Human
aggccuucuccuc

SEQ ID NO: 2545324 - RNA, 19 nt, Human
aggccuuccucucuccaga

SEQ ID NO: 2545325 - RNA, 17 nt, Human
ugggaggucaaggcugc

SEQ ID NO: 2545326 - RNA, 20 nt, Human
aggccuuaucauucauucuu

SEQ ID NO: 2545327 - RNA, 15 nt, Human
aggccuuccucucuc

SEQ ID NO: 2545328 - RNA, 19 nt, Human
aggccuuaucauucauucu

SEQ ID NO: 2545329 - RNA, 18 nt, Human
aggccuuaucauucauuc

SEQ ID NO: 2545330 - RNA, 17 nt, Human
aggccuuaucuccaaga

SEQ ID NO: 2545331 - RNA, 19 nt, Human
aggccuuaucuccaagacc

SEQ ID NO: 2545332 - RNA, 19 nt, Human
ugggauugugguacaaucu

SEQ ID NO: 2545333 - RNA, 21 nt, Human
ugggauugggggcuggugcca

SEQ ID NO: 2545334 - RNA, 19 nt, Human
ugggauugggggcuggugc

SEQ ID NO: 2545335 - RNA, 16 nt, Human
ugggcaacccccagcc

SEQ ID NO: 2545336 - RNA, 22 nt, Human
ugggauucuacuuuaagcacua

SEQ ID NO: 2545337 - RNA, 17 nt, Human
ugggauucuacuuuaag

SEQ ID NO: 2545338 - RNA, 24 nt, Human
ugggauuccugacccaggccgcag

SEQ ID NO: 2545339 - RNA, 22 nt, Human
ugggauuccugacccaggccgc

SEQ ID NO: 2545340 - RNA, 23 nt, Human
ugggauugacagaagcuucugcc

SEQ ID NO: 2545341 - RNA, 16 nt, Human
ugggauugagucugug

SEQ ID NO: 2545342 - RNA, 19 nt, Human
ugggauugagucugugcca

SEQ ID NO: 2545343 - RNA, 18 nt, Human
ugggauugggggcuggug

SEQ ID NO: 2545344 - RNA, 14 nt, Human
ugggauugggggcu

SEQ ID NO: 2545345 - RNA, 10 nt, Human
ugggauugcu

SEQ ID NO: 2545346 - RNA, 18 nt, Human
ugggagguggaagaaggg

SEQ ID NO: 2545347 - RNA, 19 nt, Human
ugggagguggaagaaggga

SEQ ID NO: 2545348 - RNA, 13 nt, Human
ugggaggucgagg

SEQ ID NO: 2545349 - RNA, 21 nt, Human
ugggauuccugacccaggccg

SEQ ID NO: 2545350 - RNA, 20 nt, Human
ugggauuccugacccaggcc

SEQ ID NO: 2545351 - RNA, 17 nt, Human
ugggauuccugacccag

SEQ ID NO: 2545352 - RNA, 16 nt, Human
ugggauuccugaccca

SEQ ID NO: 2545353 - RNA, 15 nt, Human
ugggauuccugaccc

SEQ ID NO: 2545354 - RNA, 23 nt, Human
ugggauucccaccaaggucuuca

SEQ ID NO: 2545355 - RNA, 20 nt, Human
ugggauucccaccaaggucu

SEQ ID NO: 2545356 - RNA, 17 nt, Human
ugggauucaggaaugug

SEQ ID NO: 2545357 - RNA, 22 nt, Human
ugggagguggaagaagggagaa

SEQ ID NO: 2545358 - RNA, 19 nt, Human
ugggagguugaucagaucu

SEQ ID NO: 2545359 - RNA, 20 nt, Human
ugggagguggagguugcagu

SEQ ID NO: 2545360 - RNA, 17 nt, Human
agggcagggacaggaua

SEQ ID NO: 2545361 - RNA, 16 nt, Human
agggcagcgccaggcu

SEQ ID NO: 2545362 - RNA, 22 nt, Human
agggcagggaccacacccugua

SEQ ID NO: 2545363 - RNA, 12 nt, Human
agggcagggacu

SEQ ID NO: 2545364 - RNA, 13 nt, Human
agggcagggcauc

SEQ ID NO: 2545365 - RNA, 14 nt, Human
agggcagcagggcu

SEQ ID NO: 2545366 - RNA, 15 nt, Human
agggcagcagggcua

SEQ ID NO: 2545367 - RNA, 14 nt, Human
agggcagcgccagg

SEQ ID NO: 2545368 - RNA, 22 nt, Human
agggccaggcaggugccuggac

SEQ ID NO: 2545369 - RNA, 21 nt, Human
agggccaggcaggugccugga

SEQ ID NO: 2545370 - RNA, 14 nt, Human
agggccaggcaggu

SEQ ID NO: 2545371 - RNA, 13 nt, Human
agggccaggcagg

SEQ ID NO: 2545372 - RNA, 12 nt, Human
agggccaggcag

SEQ ID NO: 2545373 - RNA, 10 nt, Human
agggccaggc

SEQ ID NO: 2545374 - RNA, 21 nt, Human
agggccaggacugagccccgc

SEQ ID NO: 2545375 - RNA, 19 nt, Human
agggccaggacugagcccc

SEQ ID NO: 2545376 - RNA, 17 nt, Human
agggccaggacugagcc

SEQ ID NO: 2545377 - RNA, 12 nt, Human
agggccaggacu

SEQ ID NO: 2545378 - RNA, 20 nt, Human
agggcagucauuggcugucu

SEQ ID NO: 2545379 - RNA, 16 nt, Human
agggccagagccaggg

SEQ ID NO: 2545380 - RNA, 16 nt, Human
agggcaggugcuucag

SEQ ID NO: 2545381 - RNA, 17 nt, Human
agggcagggccccaggc

SEQ ID NO: 2545382 - RNA, 15 nt, Human
agggcagggcucuga

SEQ ID NO: 2545383 - RNA, 16 nt, Human
agggcagggcucugau

SEQ ID NO: 2545384 - RNA, 12 nt, Human
agggcagggccc

SEQ ID NO: 2545385 - RNA, 12 nt, Human
agggcagggcca

SEQ ID NO: 2545386 - RNA, 17 nt, Human
agggcagggcaucuccu

SEQ ID NO: 2545387 - RNA, 18 nt, Human
agggcccagagagggugg

SEQ ID NO: 2545388 - RNA, 17 nt, Human
agggccaguccugccug

SEQ ID NO: 2545389 - RNA, 18 nt, Human
agggccaguccugccugg

SEQ ID NO: 2545390 - RNA, 23 nt, Human
agggcccagagaggguggugacc

SEQ ID NO: 2545391 - RNA, 12 nt, Human
agggccagggcc

SEQ ID NO: 2545392 - RNA, 14 nt, Human
agggccagggcccu

SEQ ID NO: 2545393 - RNA, 15 nt, Human
agggccagggcccug

SEQ ID NO: 2545394 - RNA, 19 nt, Human
agggccagggcccugcaga

SEQ ID NO: 2545395 - RNA, 21 nt, Human
agggccaggggucucccugga

SEQ ID NO: 2545396 - RNA, 20 nt, Human
agggccaggggucucccugg

SEQ ID NO: 2545397 - RNA, 22 nt, Human
agggccagggcccugcagaggg

SEQ ID NO: 2545398 - RNA, 13 nt, Human
agggccaguccug

SEQ ID NO: 2545399 - RNA, 16 nt, Human
agggccaguccugccu

SEQ ID NO: 2545400 - RNA, 14 nt, Human
agggcccagagcag

SEQ ID NO: 2545401 - RNA, 13 nt, Human
agggcccagagca

SEQ ID NO: 2545402 - RNA, 12 nt, Human
agggcccagagc

SEQ ID NO: 2545403 - RNA, 17 nt, Human
agggcccagagcaggaa

SEQ ID NO: 2545404 - RNA, 15 nt, Human
agggcccagagcagg

SEQ ID NO: 2545405 - RNA, 13 nt, Human
agggcccagagcc

SEQ ID NO: 2545406 - RNA, 14 nt, Human
agggcccagagccc

SEQ ID NO: 2545407 - RNA, 15 nt, Human
agggcccagagccca

SEQ ID NO: 2545408 - RNA, 15 nt, Human
agggccgagugagag

SEQ ID NO: 2545409 - RNA, 18 nt, Human
agggcccagagcaggaag

SEQ ID NO: 2545410 - RNA, 16 nt, Human
agggccguaccccacc

SEQ ID NO: 2545411 - RNA, 21 nt, Human
agggcagcagaaggggguggu

SEQ ID NO: 2545412 - RNA, 15 nt, Human
agggcagcagaaggg

SEQ ID NO: 2545413 - RNA, 19 nt, Human
agggcagagugagacccag

SEQ ID NO: 2545414 - RNA, 19 nt, Human
agggagugacagaggcagc

SEQ ID NO: 2545415 - RNA, 18 nt, Human
agggagugacagaggcag

SEQ ID NO: 2545416 - RNA, 17 nt, Human
agggagugacagaggca

SEQ ID NO: 2545417 - RNA, 20 nt, Human
agggaggucacuggaaaggg

SEQ ID NO: 2545418 - RNA, 15 nt, Human
agggaggggccuagg

SEQ ID NO: 2545419 - RNA, 19 nt, Human
agggaggggccuaggccuc

SEQ ID NO: 2545420 - RNA, 21 nt, Human
agggaggucacuggaaagggg

SEQ ID NO: 2545421 - RNA, 20 nt, Human
agggaggggccuaggccuca

SEQ ID NO: 2545422 - RNA, 17 nt, Human
agggaggugaccccagg

SEQ ID NO: 2545423 - RNA, 15 nt, Human
agggagggcuucugc

SEQ ID NO: 2545424 - RNA, 14 nt, Human
ugggccccagccca

SEQ ID NO: 2545425 - RNA, 13 nt, Human
ugggccccagccc

SEQ ID NO: 2545426 - RNA, 15 nt, Human
ugggccccagcccac

SEQ ID NO: 2545427 - RNA, 12 nt, Human
agggaggggccu

SEQ ID NO: 2545428 - RNA, 12 nt, Human
agggaggggacu

SEQ ID NO: 2545429 - RNA, 20 nt, Human
ugggcccaggaccagcuggg

SEQ ID NO: 2545430 - RNA, 19 nt, Human
ugggcccaggaccagcugg

SEQ ID NO: 2545431 - RNA, 18 nt, Human
ugggcccaggaccagcug

SEQ ID NO: 2545432 - RNA, 17 nt, Human
ugggcccaggaccagcu

SEQ ID NO: 2545433 - RNA, 22 nt, Human
ugggcccaggaccagcuggggc

SEQ ID NO: 2545434 - RNA, 21 nt, Human
ugggcccaggaccagcugggg

SEQ ID NO: 2545435 - RNA, 12 nt, Human
ugggcccaggga

SEQ ID NO: 2545436 - RNA, 22 nt, Human
ugggcccagggacaccagccag

SEQ ID NO: 2545437 - RNA, 13 nt, Human
ugggcccagggac

SEQ ID NO: 2545438 - RNA, 23 nt, Human
ugggcccaggaccagcuggggcg

SEQ ID NO: 2545439 - RNA, 19 nt, Human
ugggcccagggacaccagc

SEQ ID NO: 2545440 - RNA, 17 nt, Human
ugggccccaccaccuag

SEQ ID NO: 2545441 - RNA, 18 nt, Human
ugggccccaccaccuagg

SEQ ID NO: 2545442 - RNA, 23 nt, Human
ugggccccaccaccuaggccacu

SEQ ID NO: 2545443 - RNA, 15 nt, Human
ugggcccaggaccag

SEQ ID NO: 2545444 - RNA, 14 nt, Human
ugggcccaggacca

SEQ ID NO: 2545445 - RNA, 10 nt, Human
ugggcccagg

SEQ ID NO: 2545446 - RNA, 22 nt, Human
ugggcccagcugggcucugcca

SEQ ID NO: 2545447 - RNA, 20 nt, Human
ugggcccagcugggcucugc

SEQ ID NO: 2545448 - RNA, 19 nt, Human
ugggcccagcugggcucug

SEQ ID NO: 2545449 - RNA, 17 nt, Human
ugggcccagcugggcuc

SEQ ID NO: 2545450 - RNA, 16 nt, Human
ugggcccagcugggcu

SEQ ID NO: 2545451 - RNA, 15 nt, Human
ugggcccagcugggc

SEQ ID NO: 2545452 - RNA, 14 nt, Human
ugggcccagcuggg

SEQ ID NO: 2545453 - RNA, 13 nt, Human
ugggcccagcugg

SEQ ID NO: 2545454 - RNA, 12 nt, Human
ugggcccagcug

SEQ ID NO: 2545455 - RNA, 13 nt, Human
ugggcccagaucu

SEQ ID NO: 2545456 - RNA, 14 nt, Human
ugggcccagaucug

SEQ ID NO: 2545457 - RNA, 18 nt, Human
ugggcccaacccugucug

SEQ ID NO: 2545458 - RNA, 12 nt, Human
ugggcccagaag

SEQ ID NO: 2545459 - RNA, 16 nt, Human
ugggcccaacccuguc

SEQ ID NO: 2545460 - RNA, 14 nt, Human
ugggcccaacccug

SEQ ID NO: 2545461 - RNA, 22 nt, Human
ugggcccaagacagaugcccca

SEQ ID NO: 2545462 - RNA, 23 nt, Human
ugggcccaagacagaugccccag

SEQ ID NO: 2545463 - RNA, 23 nt, Human
ugggggaagagcacagcccuccc

SEQ ID NO: 2545464 - RNA, 22 nt, Human
ugggggaagagcacagcccucc

SEQ ID NO: 2545465 - RNA, 21 nt, Human
ugggggaagagcacagcccuc

SEQ ID NO: 2545466 - RNA, 19 nt, Human
ugggggaagagcacagccc

SEQ ID NO: 2545467 - RNA, 18 nt, Human
ugggggaagagcacagcc

SEQ ID NO: 2545468 - RNA, 17 nt, Human
ugggggaagaccuggca

SEQ ID NO: 2545469 - RNA, 20 nt, Human
ugggggaacucagauccagg

SEQ ID NO: 2545470 - RNA, 14 nt, Human
ugggguacccacug

SEQ ID NO: 2545471 - RNA, 15 nt, Human
ugggggaaagcacag

SEQ ID NO: 2545472 - RNA, 17 nt, Human
ugggggaaauggugccu

SEQ ID NO: 2545473 - RNA, 18 nt, Human
ugggggaacucagaucca

SEQ ID NO: 2545474 - RNA, 18 nt, Human
uggggcuucuccugaccc

SEQ ID NO: 2545475 - RNA, 16 nt, Human
uggggcuucuccugac

SEQ ID NO: 2545476 - RNA, 15 nt, Human
uggggcuucuccuga

SEQ ID NO: 2545477 - RNA, 20 nt, Human
uggggcugcaccggcuggcc

SEQ ID NO: 2545478 - RNA, 17 nt, Human
uggggcucugugcaggg

SEQ ID NO: 2545479 - RNA, 20 nt, Human
uggggcugaagguugaagag

SEQ ID NO: 2545480 - RNA, 11 nt, Human
uggggcugaac

SEQ ID NO: 2545481 - RNA, 23 nt, Human
uggggcugaccuuccucgcagag

SEQ ID NO: 2545482 - RNA, 18 nt, Human
uggggcugaccuuccucg

SEQ ID NO: 2545483 - RNA, 16 nt, Human
uggggcugguucugua

SEQ ID NO: 2545484 - RNA, 19 nt, Human
uggggcugguagcucaggu

SEQ ID NO: 2545485 - RNA, 14 nt, Human
uggggcugauugua

SEQ ID NO: 2545486 - RNA, 20 nt, Human
ugggguacccacugcucugg

SEQ ID NO: 2545487 - RNA, 14 nt, Human
ugggggaagcccug

SEQ ID NO: 2545488 - RNA, 21 nt, Human
ugggguaccaagagacuccuu

SEQ ID NO: 2545489 - RNA, 18 nt, Human
ugggguagcuagaggaac

SEQ ID NO: 2545490 - RNA, 20 nt, Human
ugggguagcuagaggaacca

SEQ ID NO: 2545491 - RNA, 16 nt, Human
ugggguacccacugcu

SEQ ID NO: 2545492 - RNA, 15 nt, Human
ugggguacccacugc

SEQ ID NO: 2545493 - RNA, 18 nt, Human
uggggucacucuggcagc

SEQ ID NO: 2545494 - RNA, 17 nt, Human
uggggucacucuggcag

SEQ ID NO: 2545495 - RNA, 21 nt, Human
ugggguagguugggagaaugu

SEQ ID NO: 2545496 - RNA, 15 nt, Human
ugggguaugggagag

SEQ ID NO: 2545497 - RNA, 15 nt, Human
ugggguagguuggga

SEQ ID NO: 2545498 - RNA, 13 nt, Human
ugggguagggcug

SEQ ID NO: 2545499 - RNA, 16 nt, Human
ugggguagggcugacu

SEQ ID NO: 2545500 - RNA, 14 nt, Human
uggggcguggggag

SEQ ID NO: 2545501 - RNA, 19 nt, Human
uggggcgggaaagccagug

SEQ ID NO: 2545502 - RNA, 17 nt, Human
uggggcgggaaagccag

SEQ ID NO: 2545503 - RNA, 18 nt, Human
uggggcgaggcagaggac

SEQ ID NO: 2545504 - RNA, 19 nt, Human
uggggcgaggcagaggaca

SEQ ID NO: 2545505 - RNA, 17 nt, Human
uggggcgaggcagagga

SEQ ID NO: 2545506 - RNA, 15 nt, Human
uggggcgaggcagag

SEQ ID NO: 2545507 - RNA, 18 nt, Human
uggggcggugagagggga

SEQ ID NO: 2545508 - RNA, 19 nt, Human
uggggcguggggagggccg

SEQ ID NO: 2545509 - RNA, 23 nt, Human
uggggcuaggaaauccagggugg

SEQ ID NO: 2545510 - RNA, 13 nt, Human
uggggcucucagu

SEQ ID NO: 2545511 - RNA, 13 nt, Human
uggggcucuggga

SEQ ID NO: 2545512 - RNA, 15 nt, Human
uggggcucugugcag

SEQ ID NO: 2545513 - RNA, 16 nt, Human
uggggcccugccuccu

SEQ ID NO: 2545514 - RNA, 15 nt, Human
uggggcccugccucc

SEQ ID NO: 2545515 - RNA, 14 nt, Human
uggggccuuggccu

SEQ ID NO: 2545516 - RNA, 18 nt, Human
uggggccuacagcuuuga

SEQ ID NO: 2545517 - RNA, 14 nt, Human
uggggcgaggcaga

SEQ ID NO: 2545518 - RNA, 13 nt, Human
uggggcgaggcag

SEQ ID NO: 2545519 - RNA, 12 nt, Human
uggggccuuggu

SEQ ID NO: 2545520 - RNA, 19 nt, Human
uggggccgccgccucuuuc

SEQ ID NO: 2545521 - RNA, 18 nt, Human
uggggccuagauccacac

SEQ ID NO: 2545522 - RNA, 15 nt, Human
uggggaggggcugug

SEQ ID NO: 2545523 - RNA, 21 nt, Human
uggggacguccugccaccugg

SEQ ID NO: 2545524 - RNA, 12 nt, Human
uggggagaaagu

SEQ ID NO: 2545525 - RNA, 23 nt, Human
uggggaccucaggccugggggcu

SEQ ID NO: 2545526 - RNA, 18 nt, Human
uggggaccugguacccuc

SEQ ID NO: 2545527 - RNA, 20 nt, Human
uggggacggggggccccagu

SEQ ID NO: 2545528 - RNA, 19 nt, Human
uggggacggggggccccag

SEQ ID NO: 2545529 - RNA, 22 nt, Human
uggggacggggggccccaguca

SEQ ID NO: 2545530 - RNA, 20 nt, Human
uggggacguccugccaccug

SEQ ID NO: 2545531 - RNA, 14 nt, Human
uggggcccugccuc

SEQ ID NO: 2545532 - RNA, 17 nt, Human
uggggaguuaagaccug

SEQ ID NO: 2545533 - RNA, 18 nt, Human
uggggaguuaagaccugg

SEQ ID NO: 2545534 - RNA, 19 nt, Human
uggggaguuaagaccuggc

SEQ ID NO: 2545535 - RNA, 20 nt, Human
uggggaguuaagaccuggca

SEQ ID NO: 2545536 - RNA, 16 nt, Human
uggggaguuaagaccu

SEQ ID NO: 2545537 - RNA, 16 nt, Human
uggggagugggacaga

SEQ ID NO: 2545538 - RNA, 19 nt, Human
uggggagugggacagaguc

SEQ ID NO: 2545539 - RNA, 19 nt, Human
uggggaguaggacauacca

SEQ ID NO: 2545540 - RNA, 13 nt, Human
uggggagugggac

SEQ ID NO: 2545541 - RNA, 19 nt, Human
ugggcucccuucccaccuc

SEQ ID NO: 2545542 - RNA, 18 nt, Human
ugggcucccuucccaccu

SEQ ID NO: 2545543 - RNA, 22 nt, Human
agggcuucugcacccuccaccc

SEQ ID NO: 2545544 - RNA, 19 nt, Human
agggcuucugcacccucca

SEQ ID NO: 2545545 - RNA, 18 nt, Human
agggcuucugcacccucc

SEQ ID NO: 2545546 - RNA, 17 nt, Human
agggcuucugcacccuc

SEQ ID NO: 2545547 - RNA, 16 nt, Human
agggcuucugcacccu

SEQ ID NO: 2545548 - RNA, 15 nt, Human
agggcuucugcaccc

SEQ ID NO: 2545549 - RNA, 14 nt, Human
agggcuucugcacc

SEQ ID NO: 2545550 - RNA, 13 nt, Human
agggcuucugcac

SEQ ID NO: 2545551 - RNA, 22 nt, Human
agggcuuccucuagaagccaag

SEQ ID NO: 2545552 - RNA, 21 nt, Human
agggcuuccucuagaagccaa

SEQ ID NO: 2545553 - RNA, 20 nt, Human
agggcuuccucuagaagcca

SEQ ID NO: 2545554 - RNA, 12 nt, Human
agggcuuccucu

SEQ ID NO: 2545555 - RNA, 23 nt, Human
agggcuucugccauuucugagau

SEQ ID NO: 2545556 - RNA, 19 nt, Human
agggccuagcugcuacaaa

SEQ ID NO: 2545557 - RNA, 18 nt, Human
agggccuagcugcuacaa

SEQ ID NO: 2545558 - RNA, 16 nt, Human
agggccuagcugcuac

SEQ ID NO: 2545559 - RNA, 15 nt, Human
agggccuagcugcua

SEQ ID NO: 2545560 - RNA, 20 nt, Human
agggccguaccccacccuca

SEQ ID NO: 2545561 - RNA, 19 nt, Human
agggccguaccccacccuc

SEQ ID NO: 2545562 - RNA, 18 nt, Human
agggccguaccccacccu

SEQ ID NO: 2545563 - RNA, 17 nt, Human
agggccguaccccaccc

SEQ ID NO: 2545564 - RNA, 21 nt, Human
agggccuagcugcuacaaaga

SEQ ID NO: 2545565 - RNA, 20 nt, Human
agggccuagcugcuacaaag

SEQ ID NO: 2545566 - RNA, 20 nt, Human
agggccucaaaggcccgcuc

SEQ ID NO: 2545567 - RNA, 15 nt, Human
agggccugagccugg

SEQ ID NO: 2545568 - RNA, 21 nt, Human
ugggcugcccuggugcugcca

SEQ ID NO: 2545569 - RNA, 16 nt, Human
ugggcugcccuggugc

SEQ ID NO: 2545570 - RNA, 17 nt, Human
ugggcugcuacccagaa

SEQ ID NO: 2545571 - RNA, 20 nt, Human
ugggcugcccuggugcugcc

SEQ ID NO: 2545572 - RNA, 19 nt, Human
ugggcugcccuggugcugc

SEQ ID NO: 2545573 - RNA, 17 nt, Human
ugggcugcccuggugcu

SEQ ID NO: 2545574 - RNA, 17 nt, Human
ugggcugagcccuggca

SEQ ID NO: 2545575 - RNA, 18 nt, Human
ugggcugagcccuggcag

SEQ ID NO: 2545576 - RNA, 19 nt, Human
ugggcugagccccuacccc

SEQ ID NO: 2545577 - RNA, 18 nt, Human
ugggcugagccccuaccc

SEQ ID NO: 2545578 - RNA, 17 nt, Human
ugggcugagccccuacc

SEQ ID NO: 2545579 - RNA, 14 nt, Human
ugggcugagccccu

SEQ ID NO: 2545580 - RNA, 15 nt, Human
ugggcugagcccugg

SEQ ID NO: 2545581 - RNA, 16 nt, Human
ugggcugagcccuggc

SEQ ID NO: 2545582 - RNA, 17 nt, Human
ugggcucugugcaguca

SEQ ID NO: 2545583 - RNA, 12 nt, Human
ugggcucugugc

SEQ ID NO: 2545584 - RNA, 16 nt, Human
ugggcucugggagcag

SEQ ID NO: 2545585 - RNA, 15 nt, Human
ugggcucugggagca

SEQ ID NO: 2545586 - RNA, 20 nt, Human
ugggcucccuucccaccucu

SEQ ID NO: 2545587 - RNA, 17 nt, Human
ugggcucugugggcugc

SEQ ID NO: 2545588 - RNA, 18 nt, Human
ugggcucugugcagucac

SEQ ID NO: 2545589 - RNA, 17 nt, Human
ugggcugaacacuccaa

SEQ ID NO: 2545590 - RNA, 19 nt, Human
ugggcugaacacuccaauu

SEQ ID NO: 2545591 - RNA, 21 nt, Human
ugggcucugugggcugcacuc

SEQ ID NO: 2545592 - RNA, 18 nt, Human
ugggcugacggugcaguc

SEQ ID NO: 2545593 - RNA, 14 nt, Human
ugggcugagacugg

SEQ ID NO: 2545594 - RNA, 15 nt, Human
ugggcugagacugga

SEQ ID NO: 2545595 - RNA, 23 nt, Human
ugggcugagacuggauacugccc

SEQ ID NO: 2545596 - RNA, 12 nt, Human
ugggcugagccc

SEQ ID NO: 2545597 - RNA, 18 nt, Human
uggggaccagagcugcca

SEQ ID NO: 2545598 - RNA, 17 nt, Human
uggggaccagagcugcc

SEQ ID NO: 2545599 - RNA, 13 nt, Human
uggggaccucagg

SEQ ID NO: 2545600 - RNA, 20 nt, Human
uggggacaucucuuugaauu

SEQ ID NO: 2545601 - RNA, 18 nt, Human
uggggacaucucuuugaa

SEQ ID NO: 2545602 - RNA, 15 nt, Human
uggggaccagagcug

SEQ ID NO: 2545603 - RNA, 14 nt, Human
uggggaccagagcu

SEQ ID NO: 2545604 - RNA, 20 nt, Human
uggggacaggggcaggagga

SEQ ID NO: 2545605 - RNA, 22 nt, Human
uggggacaggggcaggaggaag

SEQ ID NO: 2545606 - RNA, 13 nt, Human
uggggacagggcu

SEQ ID NO: 2545607 - RNA, 16 nt, Human
uggggaauuuccucua

SEQ ID NO: 2545608 - RNA, 14 nt, Human
uggggaauuuccuc

SEQ ID NO: 2545609 - RNA, 17 nt, Human
uggggacagagcagaac

SEQ ID NO: 2545610 - RNA, 18 nt, Human
ugggcuggggccugaugg

SEQ ID NO: 2545611 - RNA, 20 nt, Human
ugggcugggugcgaccccau

SEQ ID NO: 2545612 - RNA, 14 nt, Human
uggggaagacugug

SEQ ID NO: 2545613 - RNA, 24 nt, Human
uggggaagacuguggcugcuagca

SEQ ID NO: 2545614 - RNA, 16 nt, Human
uggggaagacuguggc

SEQ ID NO: 2545615 - RNA, 17 nt, Human
uggggaagacuguggcu

SEQ ID NO: 2545616 - RNA, 16 nt, Human
uggggaagugaggaag

SEQ ID NO: 2545617 - RNA, 13 nt, Human
uggggaaggaggc

SEQ ID NO: 2545618 - RNA, 18 nt, Human
uggggaagcuucuuaaau

SEQ ID NO: 2545619 - RNA, 19 nt, Human
ugggcuggguucuacccag

SEQ ID NO: 2545620 - RNA, 18 nt, Human
ugggcuggguucuaccca

SEQ ID NO: 2545621 - RNA, 18 nt, Human
ugggcuggaacagauuca

SEQ ID NO: 2545622 - RNA, 18 nt, Human
ugggcuggaaucaggaau

SEQ ID NO: 2545623 - RNA, 15 nt, Human
ugggcugcuccucau

SEQ ID NO: 2545624 - RNA, 16 nt, Human
ugggcugcuccucaug

SEQ ID NO: 2545625 - RNA, 19 nt, Human
ugggcuggcaguccuggaa

SEQ ID NO: 2545626 - RNA, 19 nt, Human
ugggcuggcucccucuugg

SEQ ID NO: 2545627 - RNA, 16 nt, Human
aguagaaggucggagg

SEQ ID NO: 2545628 - RNA, 20 nt, Human
aguagaagauuugaugcugg

SEQ ID NO: 2545629 - RNA, 12 nt, Human
aguagagacagg

SEQ ID NO: 2545630 - RNA, 19 nt, Human
aguagaacagauaaucagu

SEQ ID NO: 2545631 - RNA, 13 nt, Human
aguagaacagaua

SEQ ID NO: 2545632 - RNA, 18 nt, Human
aguagaaaggccuuuaaa

SEQ ID NO: 2545633 - RNA, 18 nt, Human
aguagaaauaauaugcau

SEQ ID NO: 2545634 - RNA, 19 nt, Human
aguagaaauaauaugcauu

SEQ ID NO: 2545635 - RNA, 14 nt, Human
aguagagucaucuc

SEQ ID NO: 2545636 - RNA, 16 nt, Human
aguagagucaucucca

SEQ ID NO: 2545637 - RNA, 23 nt, Human
aguagagucaucuccaucagcug

SEQ ID NO: 2545638 - RNA, 21 nt, Human
aguagaaggucggaggcuugg

SEQ ID NO: 2545639 - RNA, 15 nt, Human
aguagaggcuuagag

SEQ ID NO: 2545640 - RNA, 17 nt, Human
aguagauggugaaauuu

SEQ ID NO: 2545641 - RNA, 16 nt, Human
aguagauggugaaauu

SEQ ID NO: 2545642 - RNA, 15 nt, Human
aguagauggugaaau

SEQ ID NO: 2545643 - RNA, 18 nt, Human
uguaggaagguuaauguu

SEQ ID NO: 2545644 - RNA, 19 nt, Human
aguagauaggccaugggca

SEQ ID NO: 2545645 - RNA, 17 nt, Human
aguagagucaucuccau

SEQ ID NO: 2545646 - RNA, 20 nt, Human
uguaggaagguuaauguuca

SEQ ID NO: 2545647 - RNA, 21 nt, Human
uguaggaauucuuuuggggaa

SEQ ID NO: 2545648 - RNA, 20 nt, Human
uguaggaauucuuuugggga

SEQ ID NO: 2545649 - RNA, 21 nt, Human
aguagauggugaaauuuauua

SEQ ID NO: 2545650 - RNA, 23 nt, Human
uguaggaauucuuuuggggaagu

SEQ ID NO: 2545651 - RNA, 11 nt, Human
uguaggagaau

SEQ ID NO: 2545652 - RNA, 12 nt, Human
uguaggagcugc

SEQ ID NO: 2545653 - RNA, 15 nt, Human
uguaggagcugccuu

SEQ ID NO: 2545654 - RNA, 20 nt, Human
uguaggugucugcacccagg

SEQ ID NO: 2545655 - RNA, 19 nt, Human
uguaggugucugcacccag

SEQ ID NO: 2545656 - RNA, 22 nt, Human
uguaggagcugccuuggcucag

SEQ ID NO: 2545657 - RNA, 17 nt, Human
uguagguaugaauaagu

SEQ ID NO: 2545658 - RNA, 15 nt, Human
aguaauccaagcaaa

SEQ ID NO: 2545659 - RNA, 21 nt, Human
aguaauccaagcaaaugugaa

SEQ ID NO: 2545660 - RNA, 19 nt, Human
aguaaucccgccaccuauc

SEQ ID NO: 2545661 - RNA, 17 nt, Human
aguaaucccgccaccua

SEQ ID NO: 2545662 - RNA, 14 nt, Human
aguaaucccgccac

SEQ ID NO: 2545663 - RNA, 14 nt, Human
aguaauccaccugc

SEQ ID NO: 2545664 - RNA, 15 nt, Human
aguaauuuguagauu

SEQ ID NO: 2545665 - RNA, 15 nt, Human
aguaauuugaggaca

SEQ ID NO: 2545666 - RNA, 19 nt, Human
aguacaccacaagggucac

SEQ ID NO: 2545667 - RNA, 16 nt, Human
aguacacuguuucaaa

SEQ ID NO: 2545668 - RNA, 20 nt, Human
aguacacuguuucaaacuuu

SEQ ID NO: 2545669 - RNA, 14 nt, Human
aguacacuguuuca

SEQ ID NO: 2545670 - RNA, 22 nt, Human
aguacuuuggaggccccuaugu

SEQ ID NO: 2545671 - RNA, 17 nt, Human
aguacuuuggaggcccc

SEQ ID NO: 2545672 - RNA, 19 nt, Human
aguacuuuggaggccccua

SEQ ID NO: 2545673 - RNA, 19 nt, Human
aguacuuuuggcauuuuac

SEQ ID NO: 2545674 - RNA, 17 nt, Human
aguagaaaggccuuuaa

SEQ ID NO: 2545675 - RNA, 16 nt, Human
aguagaaaggccuuua

SEQ ID NO: 2545676 - RNA, 15 nt, Human
aguagaaaggccuuu

SEQ ID NO: 2545677 - RNA, 14 nt, Human
aguagaaaggccuu

SEQ ID NO: 2545678 - RNA, 21 nt, Human
aguagaaagacagagcuggga

SEQ ID NO: 2545679 - RNA, 20 nt, Human
aguagaaagacagagcuggg

SEQ ID NO: 2545680 - RNA, 11 nt, Human
agguuuuccug

SEQ ID NO: 2545681 - RNA, 22 nt, Human
agguuuuccucuucuauuuugu

SEQ ID NO: 2545682 - RNA, 13 nt, Human
agguuuucuccac

SEQ ID NO: 2545683 - RNA, 14 nt, Human
uguagagggcccug

SEQ ID NO: 2545684 - RNA, 14 nt, Human
agguuuucuccacu

SEQ ID NO: 2545685 - RNA, 23 nt, Human
agguuuuguuugcuaucuuaauu

SEQ ID NO: 2545686 - RNA, 22 nt, Human
agguuuuguuugcuaucuuaau

SEQ ID NO: 2545687 - RNA, 19 nt, Human
agguuuuguuugcuaucuu

SEQ ID NO: 2545688 - RNA, 18 nt, Human
agguuuuguuugcuaucu

SEQ ID NO: 2545689 - RNA, 17 nt, Human
agguuuuguuugcuauc

SEQ ID NO: 2545690 - RNA, 16 nt, Human
agguuuuguuugcuau

SEQ ID NO: 2545691 - RNA, 17 nt, Human
agguuuuguuguuuuau

SEQ ID NO: 2545692 - RNA, 12 nt, Human
agguuuuguugu

SEQ ID NO: 2545693 - RNA, 13 nt, Human
agguuuuguaaag

SEQ ID NO: 2545694 - RNA, 13 nt, Human
agguuuuguacaa

SEQ ID NO: 2545695 - RNA, 15 nt, Human
agguuuuguaaagau

SEQ ID NO: 2545696 - RNA, 15 nt, Human
aguaaaaccacagca

SEQ ID NO: 2545697 - RNA, 20 nt, Human
aguaagccgugauuuucauu

SEQ ID NO: 2545698 - RNA, 12 nt, Human
aguaaaaauaaa

SEQ ID NO: 2545699 - RNA, 15 nt, Human
aguaaaaauaaaauu

SEQ ID NO: 2545700 - RNA, 12 nt, Human
aguaaaaauaca

SEQ ID NO: 2545701 - RNA, 13 nt, Human
aguaaaaauacaa

SEQ ID NO: 2545702 - RNA, 18 nt, Human
aguaauaugcacacauuu

SEQ ID NO: 2545703 - RNA, 19 nt, Human
aguaauaugcacacauuuu

SEQ ID NO: 2545704 - RNA, 20 nt, Human
aguaauaugcacacauuuuu

SEQ ID NO: 2545705 - RNA, 17 nt, Human
aguaauaugcacacauu

SEQ ID NO: 2545706 - RNA, 18 nt, Human
aguaauauuuauauauuu

SEQ ID NO: 2545707 - RNA, 17 nt, Human
aguaaguaccacucagg

SEQ ID NO: 2545708 - RNA, 14 nt, Human
aguaaggugcaguu

SEQ ID NO: 2545709 - RNA, 17 nt, Human
aguaagggaaauagaaa

SEQ ID NO: 2545710 - RNA, 16 nt, Human
aguaagggaaauagaa

SEQ ID NO: 2545711 - RNA, 20 nt, Human
aguaagcugcucuauuguag

SEQ ID NO: 2545712 - RNA, 18 nt, Human
aguaagcugcucuauugu

SEQ ID NO: 2545713 - RNA, 13 nt, Human
aguaaggcugugu

SEQ ID NO: 2545714 - RNA, 12 nt, Human
aguaaggcugug

SEQ ID NO: 2545715 - RNA, 23 nt, Human
aguaaggaauuuuauuuuuuucu

SEQ ID NO: 2545716 - RNA, 15 nt, Human
aguaaaaauuaaaaa

SEQ ID NO: 2545717 - RNA, 19 nt, Human
aguaaaaauacaaaaauua

SEQ ID NO: 2545718 - RNA, 21 nt, Human
uguaauuuaaacaggcccagc

SEQ ID NO: 2545719 - RNA, 20 nt, Human
uguaauuuaaacaggcccag

SEQ ID NO: 2545720 - RNA, 19 nt, Human
uguaauuuaaacaggccca

SEQ ID NO: 2545721 - RNA, 16 nt, Human
uguaauuuaaacaggc

SEQ ID NO: 2545722 - RNA, 15 nt, Human
uguaauuuaaacagg

SEQ ID NO: 2545723 - RNA, 14 nt, Human
uguaauuuaaacag

SEQ ID NO: 2545724 - RNA, 15 nt, Human
uguaauuguuugucu

SEQ ID NO: 2545725 - RNA, 19 nt, Human
uguaauuguuugucuuuaa

SEQ ID NO: 2545726 - RNA, 21 nt, Human
uguaauuuaaaauugugaugu

SEQ ID NO: 2545727 - RNA, 22 nt, Human
uguaauuuaaaauugugaugug

SEQ ID NO: 2545728 - RNA, 14 nt, Human
uguaauuugugaua

SEQ ID NO: 2545729 - RNA, 18 nt, Human
uguaauuucuuugccugu

SEQ ID NO: 2545730 - RNA, 23 nt, Human
uguaauuuaaacaggcccagcau

SEQ ID NO: 2545731 - RNA, 22 nt, Human
uguaauuuaaacaggcccagca

SEQ ID NO: 2545732 - RNA, 21 nt, Human
uguaauuucuuugccuguuca

SEQ ID NO: 2545733 - RNA, 23 nt, Human
uguaauuucuuugccuguucagu

SEQ ID NO: 2545734 - RNA, 17 nt, Human
uguaccagcccagaugu

SEQ ID NO: 2545735 - RNA, 20 nt, Human
uguaccagcccagauguuuu

SEQ ID NO: 2545736 - RNA, 21 nt, Human
uguaccaugaaacaaagcugc

SEQ ID NO: 2545737 - RNA, 15 nt, Human
uguacuuuuuccaga

SEQ ID NO: 2545738 - RNA, 16 nt, Human
uguacuuuuaaggcag

SEQ ID NO: 2545739 - RNA, 17 nt, Human
uguaccauguacaugaa

SEQ ID NO: 2545740 - RNA, 12 nt, Human
uguaccauguac

SEQ ID NO: 2545741 - RNA, 13 nt, Human
uguacuuugugcu

SEQ ID NO: 2545742 - RNA, 13 nt, Human
uguagagugggag

SEQ ID NO: 2545743 - RNA, 14 nt, Human
uguagagugggagc

SEQ ID NO: 2545744 - RNA, 18 nt, Human
uguagaggagaaacugga

SEQ ID NO: 2545745 - RNA, 17 nt, Human
uguaauuuaaaauugug

SEQ ID NO: 2545746 - RNA, 20 nt, Human
uguaauuguuguuuguaugu

SEQ ID NO: 2545747 - RNA, 23 nt, Human
uguaauuguuguuuguauguaua

SEQ ID NO: 2545748 - RNA, 18 nt, Human
uguaauuuaaaauuguga

SEQ ID NO: 2545749 - RNA, 20 nt, Human
uguaauuuaaaauugugaug

SEQ ID NO: 2545750 - RNA, 14 nt, Human
uguaauuauuguga

SEQ ID NO: 2545751 - RNA, 12 nt, Human
uguaauuauugu

SEQ ID NO: 2545752 - RNA, 11 nt, Human
uguaauuauug

SEQ ID NO: 2545753 - RNA, 17 nt, Human
uguaauuguuguuugua

SEQ ID NO: 2545754 - RNA, 19 nt, Human
uguaauuguuguuuguaug

SEQ ID NO: 2545755 - RNA, 13 nt, Human
uguaaguuucagg

SEQ ID NO: 2545756 - RNA, 20 nt, Human
uguaaguuuaugucuaaaga

SEQ ID NO: 2545757 - RNA, 19 nt, Human
uguaaguuuaugucuaaag

SEQ ID NO: 2545758 - RNA, 20 nt, Human
uguaaguuuaccuauguaac

SEQ ID NO: 2545759 - RNA, 23 nt, Human
uguaauuaaguacuauguaucaa

SEQ ID NO: 2545760 - RNA, 15 nt, Human
uguaagugugugugu

SEQ ID NO: 2545761 - RNA, 12 nt, Human
uguaagugugag

SEQ ID NO: 2545762 - RNA, 14 nt, Human
uguaagugugagua

SEQ ID NO: 2545763 - RNA, 17 nt, Human
uguaagugugaguaaga

SEQ ID NO: 2545764 - RNA, 21 nt, Human
uguaagugugaguaagagcug

SEQ ID NO: 2545765 - RNA, 14 nt, Human
uguaaguaauuauc

SEQ ID NO: 2545766 - RNA, 17 nt, Human
uguaagaugcuggguug

SEQ ID NO: 2545767 - RNA, 15 nt, Human
uguaagaugcugggu

SEQ ID NO: 2545768 - RNA, 14 nt, Human
uguaagaugcuggg

SEQ ID NO: 2545769 - RNA, 12 nt, Human
uguaagaugcug

SEQ ID NO: 2545770 - RNA, 21 nt, Human
uguaagaguguagaagcauuc

SEQ ID NO: 2545771 - RNA, 20 nt, Human
uguaagaguguagaagcauu

SEQ ID NO: 2545772 - RNA, 19 nt, Human
uguaagaguguagaagcau

SEQ ID NO: 2545773 - RNA, 18 nt, Human
uguaagaguguagaagca

SEQ ID NO: 2545774 - RNA, 22 nt, Human
uguaagagcaccuuccucacuu

SEQ ID NO: 2545775 - RNA, 19 nt, Human
uguaagagcaccuuccuca

SEQ ID NO: 2545776 - RNA, 15 nt, Human
uguaagaguguagaa

SEQ ID NO: 2545777 - RNA, 20 nt, Human
uguaagaucguucucugccu

SEQ ID NO: 2545778 - RNA, 19 nt, Human
uguaagaucguucucugcc

SEQ ID NO: 2545779 - RNA, 21 nt, Human
agguugacaauaaaugugcuu

SEQ ID NO: 2545780 - RNA, 17 nt, Human
aggugguuauggagagg

SEQ ID NO: 2545781 - RNA, 15 nt, Human
agguugauaacuuug

SEQ ID NO: 2545782 - RNA, 14 nt, Human
agguugauaacuuu

SEQ ID NO: 2545783 - RNA, 12 nt, Human
agguugauaacu

SEQ ID NO: 2545784 - RNA, 11 nt, Human
agguugauaac

SEQ ID NO: 2545785 - RNA, 24 nt, Human
agguugagcucuucuuaaaguauu

SEQ ID NO: 2545786 - RNA, 17 nt, Human
agguugagcucuucuua

SEQ ID NO: 2545787 - RNA, 17 nt, Human
agguugaggggcuccug

SEQ ID NO: 2545788 - RNA, 20 nt, Human
agguugaggggcuccuggaa

SEQ ID NO: 2545789 - RNA, 23 nt, Human
agguugggagaaugucaguaugu

SEQ ID NO: 2545790 - RNA, 21 nt, Human
agguugggccauacuggccuc

SEQ ID NO: 2545791 - RNA, 20 nt, Human
agguugggccauacuggccu

SEQ ID NO: 2545792 - RNA, 22 nt, Human
agguugggccauacuggccucg

SEQ ID NO: 2545793 - RNA, 16 nt, Human
agguugggguguacua

SEQ ID NO: 2545794 - RNA, 20 nt, Human
agguugggaaugaggcuugc

SEQ ID NO: 2545795 - RNA, 22 nt, Human
agguugggaaugaggcuugcug

SEQ ID NO: 2545796 - RNA, 19 nt, Human
agguugauaacuuugcuug

SEQ ID NO: 2545797 - RNA, 18 nt, Human
agguugauaacuuugcuu

SEQ ID NO: 2545798 - RNA, 17 nt, Human
agguugauaacuuugcu

SEQ ID NO: 2545799 - RNA, 16 nt, Human
agguugauaacuuugc

SEQ ID NO: 2545800 - RNA, 20 nt, Human
agguugauaacuuugcuugc

SEQ ID NO: 2545801 - RNA, 16 nt, Human
agguugaucagaucug

SEQ ID NO: 2545802 - RNA, 18 nt, Human
agguugcagggagccgag

SEQ ID NO: 2545803 - RNA, 12 nt, Human
agguugcaggga

SEQ ID NO: 2545804 - RNA, 15 nt, Human
uguaacuuuuguaag

SEQ ID NO: 2545805 - RNA, 16 nt, Human
uguaacuuuuguaaga

SEQ ID NO: 2545806 - RNA, 18 nt, Human
uguaacuuucucuaugaa

SEQ ID NO: 2545807 - RNA, 17 nt, Human
uguaacuuucucuauga

SEQ ID NO: 2545808 - RNA, 20 nt, Human
uguaacuuuuguaagacaaa

SEQ ID NO: 2545809 - RNA, 19 nt, Human
uguaagaacuacaaacaaa

SEQ ID NO: 2545810 - RNA, 18 nt, Human
uguaagaacuacaaacaa

SEQ ID NO: 2545811 - RNA, 18 nt, Human
uguaagagcaccuuccuc

SEQ ID NO: 2545812 - RNA, 21 nt, Human
uguaagacaaagguuuuccuc

SEQ ID NO: 2545813 - RNA, 19 nt, Human
uguaagacaauccauguaa

SEQ ID NO: 2545814 - RNA, 17 nt, Human
uguaagaagagacuggg

SEQ ID NO: 2545815 - RNA, 21 nt, Human
uguaagaagagacugggaaga

SEQ ID NO: 2545816 - RNA, 20 nt, Human
uguaagacaaagguuuuccu

SEQ ID NO: 2545817 - RNA, 19 nt, Human
uguaagaagagacugggaa

SEQ ID NO: 2545818 - RNA, 19 nt, Human
agguugggguguacuaguu

SEQ ID NO: 2545819 - RNA, 14 nt, Human
agguuggugggggc

SEQ ID NO: 2545820 - RNA, 17 nt, Human
uguaacuuucugaaaua

SEQ ID NO: 2545821 - RNA, 17 nt, Human
agguuguaaauguguuu

SEQ ID NO: 2545822 - RNA, 21 nt, Human
aggugcacaagcuccaagcuc

SEQ ID NO: 2545823 - RNA, 22 nt, Human
aggugcacagacgucccuccac

SEQ ID NO: 2545824 - RNA, 23 nt, Human
aggugcacagacgucccuccacg

SEQ ID NO: 2545825 - RNA, 17 nt, Human
aggugcagagugcccag

SEQ ID NO: 2545826 - RNA, 18 nt, Human
aggugcagagugcccaga

SEQ ID NO: 2545827 - RNA, 19 nt, Human
aggugcagagugcccagaa

SEQ ID NO: 2545828 - RNA, 20 nt, Human
aggugcagagugcccagaac

SEQ ID NO: 2545829 - RNA, 23 nt, Human
aggugcaguucccccaaccucag

SEQ ID NO: 2545830 - RNA, 16 nt, Human
aggugcaguuccccca

SEQ ID NO: 2545831 - RNA, 15 nt, Human
agguggcaucucuaa

SEQ ID NO: 2545832 - RNA, 14 nt, Human
agguggccacucca

SEQ ID NO: 2545833 - RNA, 17 nt, Human
agguggccacuccagac

SEQ ID NO: 2545834 - RNA, 12 nt, Human
agguggccaugc

SEQ ID NO: 2545835 - RNA, 11 nt, Human
aggugcagugg

SEQ ID NO: 2545836 - RNA, 16 nt, Human
aggugcaguggcucac

SEQ ID NO: 2545837 - RNA, 16 nt, Human
aggugggcccaggacc

SEQ ID NO: 2545838 - RNA, 14 nt, Human
aggugggcccagga

SEQ ID NO: 2545839 - RNA, 13 nt, Human
aggugggcccagg

SEQ ID NO: 2545840 - RNA, 12 nt, Human
aggugggcccag

SEQ ID NO: 2545841 - RNA, 22 nt, Human
aggugggcccaggaccagcugg

SEQ ID NO: 2545842 - RNA, 18 nt, Human
aggugggcccaggaccag

SEQ ID NO: 2545843 - RNA, 23 nt, Human
aggugggcccaggaccagcuggg

SEQ ID NO: 2545844 - RNA, 14 nt, Human
aggugggccagccc

SEQ ID NO: 2545845 - RNA, 15 nt, Human
aggugggccagcccc

SEQ ID NO: 2545846 - RNA, 16 nt, Human
aggugggccagccccu

SEQ ID NO: 2545847 - RNA, 17 nt, Human
aggugggccagccccuc

SEQ ID NO: 2545848 - RNA, 18 nt, Human
aggugggccagccccucc

SEQ ID NO: 2545849 - RNA, 19 nt, Human
aggugggccagccccuccc

SEQ ID NO: 2545850 - RNA, 21 nt, Human
aggugggccagccccucccac

SEQ ID NO: 2545851 - RNA, 22 nt, Human
aggugggccagccccucccacc

SEQ ID NO: 2545852 - RNA, 20 nt, Human
aggugguggcacugagcccc

SEQ ID NO: 2545853 - RNA, 19 nt, Human
aggugguggcacugagccc

SEQ ID NO: 2545854 - RNA, 15 nt, Human
agguggugcuuacau

SEQ ID NO: 2545855 - RNA, 22 nt, Human
agguggucugcucgggcccagg

SEQ ID NO: 2545856 - RNA, 23 nt, Human
aggugggccgcaggcgggaaaag

SEQ ID NO: 2545857 - RNA, 18 nt, Human
agguggucugaauguucu

SEQ ID NO: 2545858 - RNA, 19 nt, Human
agguggucugaauguucug

SEQ ID NO: 2545859 - RNA, 20 nt, Human
agguggucugaauguucuga

SEQ ID NO: 2545860 - RNA, 21 nt, Human
agguggucugaauguucugac

SEQ ID NO: 2545861 - RNA, 21 nt, Human
agguggucugcucgggcccag

SEQ ID NO: 2545862 - RNA, 20 nt, Human
agguggucugcucgggccca

SEQ ID NO: 2545863 - RNA, 22 nt, Human
agguggucugaauguucugaca

SEQ ID NO: 2545864 - RNA, 23 nt, Human
agguggucugaauguucugacau

SEQ ID NO: 2545865 - RNA, 20 nt, Human
aggugggauccuccaggugc

SEQ ID NO: 2545866 - RNA, 13 nt, Human
aggugggcaggug

SEQ ID NO: 2545867 - RNA, 22 nt, Human
aggugggcaggugguggcacug

SEQ ID NO: 2545868 - RNA, 21 nt, Human
agguggcugacccagucccug

SEQ ID NO: 2545869 - RNA, 17 nt, Human
agguggcucuccaguua

SEQ ID NO: 2545870 - RNA, 15 nt, Human
agguggcucuccagu

SEQ ID NO: 2545871 - RNA, 14 nt, Human
agguggcucuccag

SEQ ID NO: 2545872 - RNA, 17 nt, Human
agguggcuauggccacc

SEQ ID NO: 2545873 - RNA, 19 nt, Human
agguggcugacccaguccc

SEQ ID NO: 2545874 - RNA, 19 nt, Human
agguggcucuccaguuagu

SEQ ID NO: 2545875 - RNA, 20 nt, Human
agguggcugacccagucccu

SEQ ID NO: 2545876 - RNA, 23 nt, Human
agguggccucuccuuguggccug

SEQ ID NO: 2545877 - RNA, 19 nt, Human
agguggccaugccucagcc

SEQ ID NO: 2545878 - RNA, 18 nt, Human
agguggccaugccucagc

SEQ ID NO: 2545879 - RNA, 11 nt, Human
agguccccaga

SEQ ID NO: 2545880 - RNA, 17 nt, Human
agguccccagcuuuggc

SEQ ID NO: 2545881 - RNA, 10 nt, Human
aggucccuaa

SEQ ID NO: 2545882 - RNA, 23 nt, Human
aggucuugaacuccuggccucaa

SEQ ID NO: 2545883 - RNA, 18 nt, Human
agguccccagcuuuggcu

SEQ ID NO: 2545884 - RNA, 14 nt, Human
aggucccaggcaga

SEQ ID NO: 2545885 - RNA, 18 nt, Human
aggucuuugguucagcua

SEQ ID NO: 2545886 - RNA, 11 nt, Human
aggucuuuccu

SEQ ID NO: 2545887 - RNA, 22 nt, Human
aggucuuggagcugagccucuc

SEQ ID NO: 2545888 - RNA, 21 nt, Human
aggucuuggagcugagccucu

SEQ ID NO: 2545889 - RNA, 19 nt, Human
aggucuuggagcugagccu

SEQ ID NO: 2545890 - RNA, 14 nt, Human
aggucuuuugacau

SEQ ID NO: 2545891 - RNA, 15 nt, Human
aggucuuuugacaug

SEQ ID NO: 2545892 - RNA, 16 nt, Human
aggucuuuugacaugu

SEQ ID NO: 2545893 - RNA, 18 nt, Human
aggucuuuugacaugugg

SEQ ID NO: 2545894 - RNA, 20 nt, Human
aggugcacaagcuccaagcu

SEQ ID NO: 2545895 - RNA, 18 nt, Human
aggugcacaagcuccaag

SEQ ID NO: 2545896 - RNA, 17 nt, Human
aggugcacaagcuccaa

SEQ ID NO: 2545897 - RNA, 16 nt, Human
aggugcacaagcucca

SEQ ID NO: 2545898 - RNA, 19 nt, Human
aggucuuuugacaugugga

SEQ ID NO: 2545899 - RNA, 12 nt, Human
uguaaauccuuu

SEQ ID NO: 2545900 - RNA, 19 nt, Human
uguaaauccuuuuucuuua

SEQ ID NO: 2545901 - RNA, 15 nt, Human
aggugcacaagcucc

SEQ ID NO: 2545902 - RNA, 20 nt, Human
uguaaauccuuuuucuuuau

SEQ ID NO: 2545903 - RNA, 22 nt, Human
aggugcaacaagguccucuguc

SEQ ID NO: 2545904 - RNA, 22 nt, Human
uguaaauccuuuuucuuuauaa

SEQ ID NO: 2545905 - RNA, 13 nt, Human
aguauaaaaacaa

SEQ ID NO: 2545906 - RNA, 13 nt, Human
aguauaaacaaag

SEQ ID NO: 2545907 - RNA, 16 nt, Human
aguauaaacaaaguua

SEQ ID NO: 2545908 - RNA, 17 nt, Human
aguauaaacaaaguuac

SEQ ID NO: 2545909 - RNA, 19 nt, Human
aguauaaacaaaguuacua

SEQ ID NO: 2545910 - RNA, 17 nt, Human
aguaguuuguauaacuu

SEQ ID NO: 2545911 - RNA, 12 nt, Human
aguaguuuguau

SEQ ID NO: 2545912 - RNA, 16 nt, Human
aguauguaaaguaugu

SEQ ID NO: 2545913 - RNA, 15 nt, Human
aguauguaaaguaug

SEQ ID NO: 2545914 - RNA, 18 nt, Human
aguauaaaugguugucug

SEQ ID NO: 2545915 - RNA, 15 nt, Human
aguauguggaagugu

SEQ ID NO: 2545916 - RNA, 17 nt, Human
aguauguggaagugugg

SEQ ID NO: 2545917 - RNA, 15 nt, Human
aguauuucuaugaaa

SEQ ID NO: 2545918 - RNA, 13 nt, Human
aguauuucuauga

SEQ ID NO: 2545919 - RNA, 16 nt, Human
aguauuucaugcuggg

SEQ ID NO: 2545920 - RNA, 14 nt, Human
aguauguguaaaau

SEQ ID NO: 2545921 - RNA, 21 nt, Human
aguauguaaaguauguaaaca

SEQ ID NO: 2545922 - RNA, 20 nt, Human
aguauuucaaauuggagcuu

SEQ ID NO: 2545923 - RNA, 23 nt, Human
aguaugugggcagauuuucagca

SEQ ID NO: 2545924 - RNA, 19 nt, Human
aguauguggaagugugggu

SEQ ID NO: 2545925 - RNA, 14 nt, Human
agucaccaagccca

SEQ ID NO: 2545926 - RNA, 13 nt, Human
agucaccaagccc

SEQ ID NO: 2545927 - RNA, 22 nt, Human
aguauuucuaugaaauauuaug

SEQ ID NO: 2545928 - RNA, 13 nt, Human
aguauuucccagc

SEQ ID NO: 2545929 - RNA, 23 nt, Human
aguauuugaaacugaauguuuau

SEQ ID NO: 2545930 - RNA, 16 nt, Human
aguauuugagaguucu

SEQ ID NO: 2545931 - RNA, 17 nt, Human
aguauuugggaagugaa

SEQ ID NO: 2545932 - RNA, 16 nt, Human
aguauuugcauauucu

SEQ ID NO: 2545933 - RNA, 16 nt, Human
ugucaggagagcagcg

SEQ ID NO: 2545934 - RNA, 14 nt, Human
ugucaggagagcag

SEQ ID NO: 2545935 - RNA, 17 nt, Human
ugucaggaagaaaucac

SEQ ID NO: 2545936 - RNA, 18 nt, Human
ugucaggaacagaaggau

SEQ ID NO: 2545937 - RNA, 20 nt, Human
ugucaggaacagaaggauga

SEQ ID NO: 2545938 - RNA, 18 nt, Human
ugucagcuuuugcuucau

SEQ ID NO: 2545939 - RNA, 16 nt, Human
ugucaggaacagaagg

SEQ ID NO: 2545940 - RNA, 17 nt, Human
ugucaggaacagaagga

SEQ ID NO: 2545941 - RNA, 19 nt, Human
ugucagcugaaccugggua

SEQ ID NO: 2545942 - RNA, 11 nt, Human
agucacugccu

SEQ ID NO: 2545943 - RNA, 14 nt, Human
agucacugccucuc

SEQ ID NO: 2545944 - RNA, 17 nt, Human
agucacugccucucccu

SEQ ID NO: 2545945 - RNA, 20 nt, Human
agucacugccucucccuggc

SEQ ID NO: 2545946 - RNA, 18 nt, Human
agucacugagacagcccg

SEQ ID NO: 2545947 - RNA, 19 nt, Human
agucacugagacagcccgg

SEQ ID NO: 2545948 - RNA, 13 nt, Human
agucacugcacag

SEQ ID NO: 2545949 - RNA, 16 nt, Human
ugucagcugaaccugg

SEQ ID NO: 2545950 - RNA, 19 nt, Human
ugucaguauguggaagugu

SEQ ID NO: 2545951 - RNA, 20 nt, Human
ugucaguauguggaagugug

SEQ ID NO: 2545952 - RNA, 18 nt, Human
ugucaguauguggaagug

SEQ ID NO: 2545953 - RNA, 20 nt, Human
ugucaguaccuucaaacuag

SEQ ID NO: 2545954 - RNA, 22 nt, Human
ugucaguauguggaaguguggg

SEQ ID NO: 2545955 - RNA, 20 nt, Human
ugucaguaucuguaucucuc

SEQ ID NO: 2545956 - RNA, 23 nt, Human
ugucauuugcuggagcucugccc

SEQ ID NO: 2545957 - RNA, 19 nt, Human
ugucaggcugcuggcgccu

SEQ ID NO: 2545958 - RNA, 17 nt, Human
ugucaggcugcuggcgc

SEQ ID NO: 2545959 - RNA, 16 nt, Human
ugucaggcugcuggcg

SEQ ID NO: 2545960 - RNA, 15 nt, Human
ugucaggcugcuggc

SEQ ID NO: 2545961 - RNA, 14 nt, Human
ugucaggccugugu

SEQ ID NO: 2545962 - RNA, 21 nt, Human
ugucaggccugacggggagga

SEQ ID NO: 2545963 - RNA, 16 nt, Human
ugucagguggggcagc

SEQ ID NO: 2545964 - RNA, 24 nt, Human
ugucaggcugcuggcgccucugca

SEQ ID NO: 2545965 - RNA, 23 nt, Human
ugucaggcugcuggcgccucugc

SEQ ID NO: 2545966 - RNA, 22 nt, Human
ugucaggcugcuggcgccucug

SEQ ID NO: 2545967 - RNA, 20 nt, Human
ugucaggcugcuggcgccuc

SEQ ID NO: 2545968 - RNA, 22 nt, Human
ugucaggggcggggagggugac

SEQ ID NO: 2545969 - RNA, 22 nt, Human
aguaggaagacuuuggaaagac

SEQ ID NO: 2545970 - RNA, 19 nt, Human
aguaggaagacuuuggaaa

SEQ ID NO: 2545971 - RNA, 18 nt, Human
aguaggaagacuuuggaa

SEQ ID NO: 2545972 - RNA, 17 nt, Human
aguaggaagacuuugga

SEQ ID NO: 2545973 - RNA, 16 nt, Human
aguaggaagacuuugg

SEQ ID NO: 2545974 - RNA, 17 nt, Human
ugucaauauuuaaacau

SEQ ID NO: 2545975 - RNA, 20 nt, Human
ugucaaucagccuaguugau

SEQ ID NO: 2545976 - RNA, 23 nt, Human
ugucaauauuaaauacagacacu

SEQ ID NO: 2545977 - RNA, 21 nt, Human
ugucaauauuaaauacagaca

SEQ ID NO: 2545978 - RNA, 19 nt, Human
ugucaauauuaaauacaga

SEQ ID NO: 2545979 - RNA, 18 nt, Human
ugucaauauuaaauacag

SEQ ID NO: 2545980 - RNA, 17 nt, Human
ugucaauauuaaauaca

SEQ ID NO: 2545981 - RNA, 14 nt, Human
ugucaauauuaaau

SEQ ID NO: 2545982 - RNA, 13 nt, Human
ugucaauauuaaa

SEQ ID NO: 2545983 - RNA, 14 nt, Human
aguaguuccugcua

SEQ ID NO: 2545984 - RNA, 14 nt, Human
aguaguuaauucug

SEQ ID NO: 2545985 - RNA, 15 nt, Human
aguaguuaauucugu

SEQ ID NO: 2545986 - RNA, 13 nt, Human
aguaguccuguga

SEQ ID NO: 2545987 - RNA, 12 nt, Human
aguaguccugug

SEQ ID NO: 2545988 - RNA, 14 nt, Human
aguaguccugugaa

SEQ ID NO: 2545989 - RNA, 13 nt, Human
aguagucucugug

SEQ ID NO: 2545990 - RNA, 13 nt, Human
aguagggggucua

SEQ ID NO: 2545991 - RNA, 14 nt, Human
aguagucauuucau

SEQ ID NO: 2545992 - RNA, 12 nt, Human
aguagucauuuc

SEQ ID NO: 2545993 - RNA, 13 nt, Human
aguagucauuuca

SEQ ID NO: 2545994 - RNA, 13 nt, Human
aguaggagcccag

SEQ ID NO: 2545995 - RNA, 20 nt, Human
aguagcuugggacaaaucaa

SEQ ID NO: 2545996 - RNA, 13 nt, Human
uguauuccaagac

SEQ ID NO: 2545997 - RNA, 15 nt, Human
uguauuccaagacau

SEQ ID NO: 2545998 - RNA, 20 nt, Human
uguauuccaagacaugucug

SEQ ID NO: 2545999 - RNA, 22 nt, Human
uguauucauugaagucagaugu

SEQ ID NO: 2546000 - RNA, 20 nt, Human
uguauuauuucauuauguaa

SEQ ID NO: 2546001 - RNA, 13 nt, Human
uguauuauuucau

SEQ ID NO: 2546002 - RNA, 21 nt, Human
uguauuauuucauuauguaaa

SEQ ID NO: 2546003 - RNA, 21 nt, Human
uguauucacccguccagaccu

SEQ ID NO: 2546004 - RNA, 15 nt, Human
uguagguaucauuuu

SEQ ID NO: 2546005 - RNA, 17 nt, Human
uguauucaucuuuugua

SEQ ID NO: 2546006 - RNA, 14 nt, Human
uguauucagcuuua

SEQ ID NO: 2546007 - RNA, 17 nt, Human
uguauucagugaggguc

SEQ ID NO: 2546008 - RNA, 14 nt, Human
uguaguaauugaca

SEQ ID NO: 2546009 - RNA, 15 nt, Human
uguaguaauugacau

SEQ ID NO: 2546010 - RNA, 16 nt, Human
uguaguaauugacaug

SEQ ID NO: 2546011 - RNA, 16 nt, Human
uguauuauucugcagc

SEQ ID NO: 2546012 - RNA, 22 nt, Human
uguaguaaagccguuguuuacu

SEQ ID NO: 2546013 - RNA, 19 nt, Human
uguaguaaacuauuuaucu

SEQ ID NO: 2546014 - RNA, 20 nt, Human
uguaguaaagccguuguuua

SEQ ID NO: 2546015 - RNA, 19 nt, Human
uguaguaaagccguuguuu

SEQ ID NO: 2546016 - RNA, 13 nt, Human
uguaguaaagaaa

SEQ ID NO: 2546017 - RNA, 15 nt, Human
uguaguaaagaaauu

SEQ ID NO: 2546018 - RNA, 19 nt, Human
ugucaagagggucugagga

SEQ ID NO: 2546019 - RNA, 15 nt, Human
ugucaagccauaauu

SEQ ID NO: 2546020 - RNA, 21 nt, Human
ugucaauaaaauccauacauu

SEQ ID NO: 2546021 - RNA, 19 nt, Human
uguauuuuucaauaaagca

SEQ ID NO: 2546022 - RNA, 14 nt, Human
uguauuuuuaaugg

SEQ ID NO: 2546023 - RNA, 14 nt, Human
uguauuuuuuuacu

SEQ ID NO: 2546024 - RNA, 19 nt, Human
ugucaagaagaugaucaga

SEQ ID NO: 2546025 - RNA, 14 nt, Human
ugucaagaaagagc

SEQ ID NO: 2546026 - RNA, 16 nt, Human
uguauuuuuuuacuaa

SEQ ID NO: 2546027 - RNA, 15 nt, Human
ugucgcccaggcugg

SEQ ID NO: 2546028 - RNA, 16 nt, Human
ugucgcccaggcugga

SEQ ID NO: 2546029 - RNA, 15 nt, Human
ugucgagacacuugc

SEQ ID NO: 2546030 - RNA, 13 nt, Human
ugucgagacacuu

SEQ ID NO: 2546031 - RNA, 22 nt, Human
ugucgauguaggcauucuggag

SEQ ID NO: 2546032 - RNA, 21 nt, Human
ugucgaauuuuuauuauuugu

SEQ ID NO: 2546033 - RNA, 17 nt, Human
uguccuuuuuguuauua

SEQ ID NO: 2546034 - RNA, 23 nt, Human
uguccuuucccuucaguacccuc

SEQ ID NO: 2546035 - RNA, 16 nt, Human
uguccuuuuuguuauu

SEQ ID NO: 2546036 - RNA, 20 nt, Human
uguccuaaggacacacuaau

SEQ ID NO: 2546037 - RNA, 18 nt, Human
uguccuaaggacacacua

SEQ ID NO: 2546038 - RNA, 16 nt, Human
uguccuaaggacacac

SEQ ID NO: 2546039 - RNA, 15 nt, Human
uguccuaaggacaca

SEQ ID NO: 2546040 - RNA, 16 nt, Human
uguccuacccacccuc

SEQ ID NO: 2546041 - RNA, 14 nt, Human
uguccuuucccuuc

SEQ ID NO: 2546042 - RNA, 13 nt, Human
uguccuuucccuu

SEQ ID NO: 2546043 - RNA, 17 nt, Human
uguccuuucccuccacu

SEQ ID NO: 2546044 - RNA, 18 nt, Human
uguccuuucccuccacuc

SEQ ID NO: 2546045 - RNA, 13 nt, Human
uguccgagcuuug

SEQ ID NO: 2546046 - RNA, 14 nt, Human
uguccgagcuuuga

SEQ ID NO: 2546047 - RNA, 23 nt, Human
uguccgcugggugguacccucug

SEQ ID NO: 2546048 - RNA, 22 nt, Human
uguccgcugggugguacccucu

SEQ ID NO: 2546049 - RNA, 22 nt, Human
uguccuaaaacaccugguagga

SEQ ID NO: 2546050 - RNA, 20 nt, Human
uguccgcugggugguacccu

SEQ ID NO: 2546051 - RNA, 15 nt, Human
uguccgcuggguggu

SEQ ID NO: 2546052 - RNA, 15 nt, Human
uguccgacucuucug

SEQ ID NO: 2546053 - RNA, 17 nt, Human
ugucccuuuuccuuuuu

SEQ ID NO: 2546054 - RNA, 12 nt, Human
ugucauuugcuu

SEQ ID NO: 2546055 - RNA, 14 nt, Human
ugucauuuucucca

SEQ ID NO: 2546056 - RNA, 15 nt, Human
ugucauuuuugcagu

SEQ ID NO: 2546057 - RNA, 15 nt, Human
ugucauuuucuccau

SEQ ID NO: 2546058 - RNA, 18 nt, Human
ugucauuuuugcaguaga

SEQ ID NO: 2546059 - RNA, 15 nt, Human
ugucgcccagucugg

SEQ ID NO: 2546060 - RNA, 14 nt, Human
ugucgcccagucug

SEQ ID NO: 2546061 - RNA, 12 nt, Human
ugucgggcauga

SEQ ID NO: 2546062 - RNA, 23 nt, Human
ugucggccucuaaccccaggccc

SEQ ID NO: 2546063 - RNA, 15 nt, Human
ugucgggcaugacac

SEQ ID NO: 2546064 - RNA, 14 nt, Human
ugucgggcaugaca

SEQ ID NO: 2546065 - RNA, 19 nt, Human
ugucggccugguguucugu

SEQ ID NO: 2546066 - RNA, 23 nt, Human
ugucgguuuuuuuuaaauaaaag

SEQ ID NO: 2546067 - RNA, 23 nt, Human
ugucguagccaaggugggcugag

SEQ ID NO: 2546068 - RNA, 21 nt, Human
ugucguggguguguguagcca

SEQ ID NO: 2546069 - RNA, 15 nt, Human
agucaggaaagagaa

SEQ ID NO: 2546070 - RNA, 16 nt, Human
agucaggaaagagaac

SEQ ID NO: 2546071 - RNA, 20 nt, Human
agucagaggauggccagugu

SEQ ID NO: 2546072 - RNA, 19 nt, Human
agucagaggauggccagug

SEQ ID NO: 2546073 - RNA, 18 nt, Human
agucagaggauggccagu

SEQ ID NO: 2546074 - RNA, 17 nt, Human
agucagaggauggccag

SEQ ID NO: 2546075 - RNA, 14 nt, Human
agucagaggauggc

SEQ ID NO: 2546076 - RNA, 17 nt, Human
agucagagagaguguuu

SEQ ID NO: 2546077 - RNA, 14 nt, Human
agucagagagaauc

SEQ ID NO: 2546078 - RNA, 20 nt, Human
ugucuaaacaaugcugauuu

SEQ ID NO: 2546079 - RNA, 21 nt, Human
ugucuaaacaaugcugauuug

SEQ ID NO: 2546080 - RNA, 22 nt, Human
agucagaaguuucugccgcagc

SEQ ID NO: 2546081 - RNA, 16 nt, Human
agucagacagaugugg

SEQ ID NO: 2546082 - RNA, 22 nt, Human
ugucuaaaaugccucaguguau

SEQ ID NO: 2546083 - RNA, 22 nt, Human
ugucuaaacaaugcugauuugg

SEQ ID NO: 2546084 - RNA, 15 nt, Human
agucagacugcuggg

SEQ ID NO: 2546085 - RNA, 22 nt, Human
ugucguugacuuuagggacuca

SEQ ID NO: 2546086 - RNA, 20 nt, Human
ugucguugacuuuagggacu

SEQ ID NO: 2546087 - RNA, 13 nt, Human
ugucuaaaaacac

SEQ ID NO: 2546088 - RNA, 16 nt, Human
ugucuaaacaaugcug

SEQ ID NO: 2546089 - RNA, 17 nt, Human
ugucuaaacaaugcuga

SEQ ID NO: 2546090 - RNA, 15 nt, Human
ugucuaaaacaauaa

SEQ ID NO: 2546091 - RNA, 17 nt, Human
ugucuaaaacaauaaaa

SEQ ID NO: 2546092 - RNA, 13 nt, Human
ugucuaaaacaau

SEQ ID NO: 2546093 - RNA, 18 nt, Human
agucuacucuuaagccau

SEQ ID NO: 2546094 - RNA, 13 nt, Human
agucuacucuuaa

SEQ ID NO: 2546095 - RNA, 20 nt, Human
agucuacgcucuccuuucuu

SEQ ID NO: 2546096 - RNA, 14 nt, Human
agucguugugaggg

SEQ ID NO: 2546097 - RNA, 21 nt, Human
agucguggggugugcugggag

SEQ ID NO: 2546098 - RNA, 20 nt, Human
agucguggggugugcuggga

SEQ ID NO: 2546099 - RNA, 19 nt, Human
agucguggggugugcuggg

SEQ ID NO: 2546100 - RNA, 18 nt, Human
agucguggggugugcugg

SEQ ID NO: 2546101 - RNA, 14 nt, Human
agucuagaaguugu

SEQ ID NO: 2546102 - RNA, 21 nt, Human
agucuacucuuaagccaucuu

SEQ ID NO: 2546103 - RNA, 20 nt, Human
agucuacucuuaagccaucu

SEQ ID NO: 2546104 - RNA, 19 nt, Human
agucuacucuuaagccauc

SEQ ID NO: 2546105 - RNA, 17 nt, Human
agucuagauggcuccuc

SEQ ID NO: 2546106 - RNA, 18 nt, Human
agucuagauggcuccucu

SEQ ID NO: 2546107 - RNA, 19 nt, Human
agucuagauggcuccucuc

SEQ ID NO: 2546108 - RNA, 20 nt, Human
agucuagauggcuccucuca

SEQ ID NO: 2546109 - RNA, 16 nt, Human
agucuaggagcuggga

SEQ ID NO: 2546110 - RNA, 17 nt, Human
agucucacuguugccca

SEQ ID NO: 2546111 - RNA, 16 nt, Human
agucucacuguugccc

SEQ ID NO: 2546112 - RNA, 21 nt, Human
agucguggagaugucuucgua

SEQ ID NO: 2546113 - RNA, 19 nt, Human
agucguggagaugucuucg

SEQ ID NO: 2546114 - RNA, 17 nt, Human
agucguggggugugcug

SEQ ID NO: 2546115 - RNA, 18 nt, Human
agucguggagaugucuuc

SEQ ID NO: 2546116 - RNA, 15 nt, Human
agucgugccuguguc

SEQ ID NO: 2546117 - RNA, 14 nt, Human
agucgugccugugu

SEQ ID NO: 2546118 - RNA, 13 nt, Human
agucgugccugug

SEQ ID NO: 2546119 - RNA, 12 nt, Human
agucgugccugu

SEQ ID NO: 2546120 - RNA, 21 nt, Human
agucgugagcucuugugagga

SEQ ID NO: 2546121 - RNA, 18 nt, Human
agucgucgcacagucucu

SEQ ID NO: 2546122 - RNA, 18 nt, Human
agucgugagcucuuguga

SEQ ID NO: 2546123 - RNA, 22 nt, Human
aguccgugcugacagcugcucc

SEQ ID NO: 2546124 - RNA, 23 nt, Human
aguccgugcugacagcugcuccu

SEQ ID NO: 2546125 - RNA, 21 nt, Human
aguccgugcugacagcugcuc

SEQ ID NO: 2546126 - RNA, 20 nt, Human
aguccgugcugacagcugcu

SEQ ID NO: 2546127 - RNA, 17 nt, Human
aguccgaggggcgggac

SEQ ID NO: 2546128 - RNA, 19 nt, Human
agucccuuccacaccccca

SEQ ID NO: 2546129 - RNA, 23 nt, Human
agucccuuccccucccuggcucc

SEQ ID NO: 2546130 - RNA, 23 nt, Human
aguccgaaagggacuuggaagcu

SEQ ID NO: 2546131 - RNA, 13 nt, Human
agucccuuccccu

SEQ ID NO: 2546132 - RNA, 14 nt, Human
agucccuuccccuc

SEQ ID NO: 2546133 - RNA, 15 nt, Human
agucccuuccccucc

SEQ ID NO: 2546134 - RNA, 17 nt, Human
agucccuuccccucccu

SEQ ID NO: 2546135 - RNA, 19 nt, Human
agucccuuccccucccugg

SEQ ID NO: 2546136 - RNA, 20 nt, Human
agucccuuccccucccuggc

SEQ ID NO: 2546137 - RNA, 21 nt, Human
agucccuuccccucccuggcu

SEQ ID NO: 2546138 - RNA, 22 nt, Human
agucccuuccccucccuggcuc

SEQ ID NO: 2546139 - RNA, 16 nt, Human
agucccuguaauuguu

SEQ ID NO: 2546140 - RNA, 18 nt, Human
agucccuguaauuguugu

SEQ ID NO: 2546141 - RNA, 14 nt, Human
agucccugggggaa

SEQ ID NO: 2546142 - RNA, 17 nt, Human
agucccugggggaagcc

SEQ ID NO: 2546143 - RNA, 20 nt, Human
agucccugggggaagcccug

SEQ ID NO: 2546144 - RNA, 21 nt, Human
agucccugggggaagcccugg

SEQ ID NO: 2546145 - RNA, 20 nt, Human
agucccuguaauuguuguuu

SEQ ID NO: 2546146 - RNA, 23 nt, Human
agucccuguaauuguuguuugua

SEQ ID NO: 2546147 - RNA, 13 nt, Human
agucccuguuuuc

SEQ ID NO: 2546148 - RNA, 15 nt, Human
agucccuuccacacc

SEQ ID NO: 2546149 - RNA, 22 nt, Human
agucccuguuuucugagcccgg

SEQ ID NO: 2546150 - RNA, 21 nt, Human
agucccuguuuucugagcccg

SEQ ID NO: 2546151 - RNA, 20 nt, Human
agucccuguuuucugagccc

SEQ ID NO: 2546152 - RNA, 19 nt, Human
agucccuguuuucugagcc

SEQ ID NO: 2546153 - RNA, 18 nt, Human
agucccuguuuucugagc

SEQ ID NO: 2546154 - RNA, 17 nt, Human
agucccuguuuucugag

SEQ ID NO: 2546155 - RNA, 22 nt, Human
agucccugggggaagcccugga

SEQ ID NO: 2546156 - RNA, 22 nt, Human
agucccugaggcagguccccag

SEQ ID NO: 2546157 - RNA, 23 nt, Human
agucccugaggcagguccccaga

SEQ ID NO: 2546158 - RNA, 12 nt, Human
agucccugccaa

SEQ ID NO: 2546159 - RNA, 21 nt, Human
agucccugacucucugugacc

SEQ ID NO: 2546160 - RNA, 22 nt, Human
aguccaggcuuuuuuaucaugu

SEQ ID NO: 2546161 - RNA, 18 nt, Human
aguccaggcugccguggg

SEQ ID NO: 2546162 - RNA, 17 nt, Human
aguccaggcugccgugg

SEQ ID NO: 2546163 - RNA, 14 nt, Human
aguccaggcugccg

SEQ ID NO: 2546164 - RNA, 13 nt, Human
aguccaggcccca

SEQ ID NO: 2546165 - RNA, 18 nt, Human
aguccaggccccaaaacc

SEQ ID NO: 2546166 - RNA, 19 nt, Human
agucccugaggcagguccc

SEQ ID NO: 2546167 - RNA, 20 nt, Human
agucccugaggcaggucccc

SEQ ID NO: 2546168 - RNA, 20 nt, Human
agucccuauguauuugcagu

SEQ ID NO: 2546169 - RNA, 19 nt, Human
agucccugacucucuguga

SEQ ID NO: 2546170 - RNA, 13 nt, Human
agucccgucagga

SEQ ID NO: 2546171 - RNA, 23 nt, Human
aguccaggccccaaaaccacagc

SEQ ID NO: 2546172 - RNA, 15 nt, Human
agucccuauguauuu

SEQ ID NO: 2546173 - RNA, 15 nt, Human
agucccgucaggacg

SEQ ID NO: 2546174 - RNA, 15 nt, Human
aguccagccuggaga

SEQ ID NO: 2546175 - RNA, 23 nt, Human
aguccagauuuacacugggagag

SEQ ID NO: 2546176 - RNA, 22 nt, Human
aguccagauuuacacugggaga

SEQ ID NO: 2546177 - RNA, 18 nt, Human
aguccagauuuacacugg

SEQ ID NO: 2546178 - RNA, 16 nt, Human
aguccagauuuacacu

SEQ ID NO: 2546179 - RNA, 15 nt, Human
aguccagauuuacac

SEQ ID NO: 2546180 - RNA, 17 nt, Human
agucaggggcagcugac

SEQ ID NO: 2546181 - RNA, 22 nt, Human
aguccaggaugcuaacaucuaa

SEQ ID NO: 2546182 - RNA, 13 nt, Human
aguccagccugga

SEQ ID NO: 2546183 - RNA, 19 nt, Human
aguccaggccauggaggca

SEQ ID NO: 2546184 - RNA, 12 nt, Human
aguccaggcccc

SEQ ID NO: 2546185 - RNA, 22 nt, Human
agucagaggauggccagugucu

SEQ ID NO: 2546186 - RNA, 12 nt, Human
agucaggaaagg

SEQ ID NO: 2546187 - RNA, 11 nt, Human
agucaggauga

SEQ ID NO: 2546188 - RNA, 22 nt, Human
agucaggccuuaauuuucagua

SEQ ID NO: 2546189 - RNA, 19 nt, Human
agucagggaccccugcccu

SEQ ID NO: 2546190 - RNA, 14 nt, Human
agucaggggcagcu

SEQ ID NO: 2546191 - RNA, 16 nt, Human
agucagggaccccugc

SEQ ID NO: 2546192 - RNA, 20 nt, Human
aguccagaaacuguucccac

SEQ ID NO: 2546193 - RNA, 21 nt, Human
agugccuguaaucacagcuac

SEQ ID NO: 2546194 - RNA, 15 nt, Human
agugccuuacacaau

SEQ ID NO: 2546195 - RNA, 17 nt, Human
agugccuuacacaaugg

SEQ ID NO: 2546196 - RNA, 20 nt, Human
agugcugcauuuaaaagaua

SEQ ID NO: 2546197 - RNA, 22 nt, Human
agugccgccgccucgcccaccg

SEQ ID NO: 2546198 - RNA, 20 nt, Human
agugccgccgccucgcccac

SEQ ID NO: 2546199 - RNA, 19 nt, Human
agugccgccgccucgccca

SEQ ID NO: 2546200 - RNA, 17 nt, Human
agugccgccgccucgcc

SEQ ID NO: 2546201 - RNA, 16 nt, Human
agugccgccgccucgc

SEQ ID NO: 2546202 - RNA, 23 nt, Human
agugccgccgccucgcccaccgc

SEQ ID NO: 2546203 - RNA, 14 nt, Human
agugccucuggucu

SEQ ID NO: 2546204 - RNA, 12 nt, Human
agugccucuggu

SEQ ID NO: 2546205 - RNA, 12 nt, Human
agugccugcuga

SEQ ID NO: 2546206 - RNA, 18 nt, Human
agugccucuuucauccac

SEQ ID NO: 2546207 - RNA, 13 nt, Human
agugccugggaau

SEQ ID NO: 2546208 - RNA, 20 nt, Human
agugcugggauuacaagcgu

SEQ ID NO: 2546209 - RNA, 22 nt, Human
agugcugcauuuaaaagauaca

SEQ ID NO: 2546210 - RNA, 15 nt, Human
agugcugcugaagau

SEQ ID NO: 2546211 - RNA, 17 nt, Human
agugccugggaauguau

SEQ ID NO: 2546212 - RNA, 18 nt, Human
agugccugggaauguauu

SEQ ID NO: 2546213 - RNA, 20 nt, Human
agugccuuaauaguagggua

SEQ ID NO: 2546214 - RNA, 22 nt, Human
agugccugggaauguauuauuc

SEQ ID NO: 2546215 - RNA, 22 nt, Human
agugcugggauuacaggcauga

SEQ ID NO: 2546216 - RNA, 19 nt, Human
agugcugggauuacaggcu

SEQ ID NO: 2546217 - RNA, 20 nt, Human
agugcugggauuacaggcau

SEQ ID NO: 2546218 - RNA, 16 nt, Human
agugcuuaaaaaucau

SEQ ID NO: 2546219 - RNA, 17 nt, Human
agugcuuaaaaaucauu

SEQ ID NO: 2546220 - RNA, 19 nt, Human
agugcuuaaaaaucauuga

SEQ ID NO: 2546221 - RNA, 14 nt, Human
agugcuucagccug

SEQ ID NO: 2546222 - RNA, 19 nt, Human
agugcugggauuacaggug

SEQ ID NO: 2546223 - RNA, 20 nt, Human
agugcugggauuacaggcgu

SEQ ID NO: 2546224 - RNA, 17 nt, Human
agugcugggauuacagg

SEQ ID NO: 2546225 - RNA, 16 nt, Human
uguggucccaccccac

SEQ ID NO: 2546226 - RNA, 16 nt, Human
agugcuuccaaggaug

SEQ ID NO: 2546227 - RNA, 15 nt, Human
agugcuucagccuga

SEQ ID NO: 2546228 - RNA, 16 nt, Human
agugcuucagccugag

SEQ ID NO: 2546229 - RNA, 17 nt, Human
agugcuucagccugagg

SEQ ID NO: 2546230 - RNA, 18 nt, Human
agugcuucagccugaggc

SEQ ID NO: 2546231 - RNA, 19 nt, Human
agugcuugccacagagcgg

SEQ ID NO: 2546232 - RNA, 17 nt, Human
agugcuugccacagagc

SEQ ID NO: 2546233 - RNA, 16 nt, Human
agugcuugccacagag

SEQ ID NO: 2546234 - RNA, 15 nt, Human
agugcuugccacaga

SEQ ID NO: 2546235 - RNA, 19 nt, Human
agugcuugaguuuggggaa

SEQ ID NO: 2546236 - RNA, 19 nt, Human
agugcuucagccugaggcu

SEQ ID NO: 2546237 - RNA, 20 nt, Human
agugcuucagccugaggcug

SEQ ID NO: 2546238 - RNA, 17 nt, Human
agugcuuccaaggcaga

SEQ ID NO: 2546239 - RNA, 16 nt, Human
agugcuuccaaggcag

SEQ ID NO: 2546240 - RNA, 14 nt, Human
agugcuucucuaca

SEQ ID NO: 2546241 - RNA, 21 nt, Human
agugcuucuuaaagaguucuu

SEQ ID NO: 2546242 - RNA, 13 nt, Human
uguggucuccacu

SEQ ID NO: 2546243 - RNA, 13 nt, Human
uguggugaugaaa

SEQ ID NO: 2546244 - RNA, 16 nt, Human
uguggugcugacaaag

SEQ ID NO: 2546245 - RNA, 19 nt, Human
uguggugccugaggucugu

SEQ ID NO: 2546246 - RNA, 15 nt, Human
uguggugccugaggu

SEQ ID NO: 2546247 - RNA, 17 nt, Human
uguggucuccuuggaaa

SEQ ID NO: 2546248 - RNA, 16 nt, Human
uguggugcagugugaa

SEQ ID NO: 2546249 - RNA, 17 nt, Human
uguggugcagugugaaa

SEQ ID NO: 2546250 - RNA, 22 nt, Human
ugugguggguucuuuggaagga

SEQ ID NO: 2546251 - RNA, 13 nt, Human
uguggugcugaca

SEQ ID NO: 2546252 - RNA, 14 nt, Human
ugugguuaaugcca

SEQ ID NO: 2546253 - RNA, 19 nt, Human
ugugucagcauagaaguaa

SEQ ID NO: 2546254 - RNA, 12 nt, Human
ugugguuucauu

SEQ ID NO: 2546255 - RNA, 18 nt, Human
ugugguuuacuagcagga

SEQ ID NO: 2546256 - RNA, 17 nt, Human
ugugguuauuucucuga

SEQ ID NO: 2546257 - RNA, 23 nt, Human
ugugguggguucuuuggaaggag

SEQ ID NO: 2546258 - RNA, 15 nt, Human
ugugguuaaugccau

SEQ ID NO: 2546259 - RNA, 20 nt, Human
ugugguuaaugccauggaca

SEQ ID NO: 2546260 - RNA, 13 nt, Human
uguguugccaagc

SEQ ID NO: 2546261 - RNA, 19 nt, Human
uguguuccaacugccccca

SEQ ID NO: 2546262 - RNA, 16 nt, Human
uguguucccauuucag

SEQ ID NO: 2546263 - RNA, 15 nt, Human
uguguuccaaccacu

SEQ ID NO: 2546264 - RNA, 16 nt, Human
uguguuccaaccacug

SEQ ID NO: 2546265 - RNA, 13 nt, Human
uguguuauuuaaa

SEQ ID NO: 2546266 - RNA, 14 nt, Human
uguguuauuuaaau

SEQ ID NO: 2546267 - RNA, 16 nt, Human
uguguuauuuaaauga

SEQ ID NO: 2546268 - RNA, 14 nt, Human
uguguuaugaagca

SEQ ID NO: 2546269 - RNA, 13 nt, Human
uguguguguguau

SEQ ID NO: 2546270 - RNA, 16 nt, Human
uguguguguguaugug

SEQ ID NO: 2546271 - RNA, 23 nt, Human
uguguuaucacccagaagaaaau

SEQ ID NO: 2546272 - RNA, 15 nt, Human
ugugugugugugucc

SEQ ID NO: 2546273 - RNA, 13 nt, Human
ugugugugugugu

SEQ ID NO: 2546274 - RNA, 12 nt, Human
ugugugugugug

SEQ ID NO: 2546275 - RNA, 15 nt, Human
uguguguguguauga

SEQ ID NO: 2546276 - RNA, 14 nt, Human
ugugguuuauguca

SEQ ID NO: 2546277 - RNA, 19 nt, Human
ugugucagguggggcagcu

SEQ ID NO: 2546278 - RNA, 17 nt, Human
ugugucagguggggcag

SEQ ID NO: 2546279 - RNA, 11 nt, Human
ugugugugugc

SEQ ID NO: 2546280 - RNA, 12 nt, Human
ugugugugugca

SEQ ID NO: 2546281 - RNA, 14 nt, Human
ugugugugugcgug

SEQ ID NO: 2546282 - RNA, 11 nt, Human
ugugugugugu

SEQ ID NO: 2546283 - RNA, 16 nt, Human
ugugucucuugguccu

SEQ ID NO: 2546284 - RNA, 20 nt, Human
ugugucuaggcaggaccugu

SEQ ID NO: 2546285 - RNA, 13 nt, Human
ugugucucuuggu

SEQ ID NO: 2546286 - RNA, 21 nt, Human
ugugucuacagagaaccugga

SEQ ID NO: 2546287 - RNA, 14 nt, Human
ugugucuacagaga

SEQ ID NO: 2546288 - RNA, 13 nt, Human
ugugucuacagag

SEQ ID NO: 2546289 - RNA, 19 nt, Human
ugugucuaggcaggaccug

SEQ ID NO: 2546290 - RNA, 11 nt, Human
aguggaaaaau

SEQ ID NO: 2546291 - RNA, 22 nt, Human
agugcuuuccuuuuuuaaaaau

SEQ ID NO: 2546292 - RNA, 19 nt, Human
agugcuuuccuuuuuuaaa

SEQ ID NO: 2546293 - RNA, 20 nt, Human
uguuaauggugcaaauccua

SEQ ID NO: 2546294 - RNA, 13 nt, Human
agugcuuuguaau

SEQ ID NO: 2546295 - RNA, 18 nt, Human
aguggaaaaauagccugc

SEQ ID NO: 2546296 - RNA, 19 nt, Human
aguggaaaaauagccugcc

SEQ ID NO: 2546297 - RNA, 19 nt, Human
uguuaaugauagcuacugu

SEQ ID NO: 2546298 - RNA, 22 nt, Human
uguuaaucaauuuaaacccauu

SEQ ID NO: 2546299 - RNA, 20 nt, Human
uguuaaucaauuuaaaccca

SEQ ID NO: 2546300 - RNA, 17 nt, Human
uguuaaucaauuuaaac

SEQ ID NO: 2546301 - RNA, 14 nt, Human
uguuaaucaauuua

SEQ ID NO: 2546302 - RNA, 23 nt, Human
uguuaaucuuaggggagagcuuu

SEQ ID NO: 2546303 - RNA, 14 nt, Human
uguuaaugaaaaug

SEQ ID NO: 2546304 - RNA, 17 nt, Human
uguuaaugaaaauguca

SEQ ID NO: 2546305 - RNA, 19 nt, Human
uguuaaugaaaaugucaga

SEQ ID NO: 2546306 - RNA, 17 nt, Human
uguuaaugguuugaaua

SEQ ID NO: 2546307 - RNA, 19 nt, Human
agugcuuguccccuaagag

SEQ ID NO: 2546308 - RNA, 14 nt, Human
uguguugucuugaa

SEQ ID NO: 2546309 - RNA, 19 nt, Human
uguguugucucuugaguuu

SEQ ID NO: 2546310 - RNA, 19 nt, Human
uguguuggggccuuggccu

SEQ ID NO: 2546311 - RNA, 13 nt, Human
uguguugucucua

SEQ ID NO: 2546312 - RNA, 13 nt, Human
uguuaacacauuu

SEQ ID NO: 2546313 - RNA, 18 nt, Human
uguguugucuugaaagau

SEQ ID NO: 2546314 - RNA, 13 nt, Human
uguguugugaaug

SEQ ID NO: 2546315 - RNA, 15 nt, Human
uguguugcuauccug

SEQ ID NO: 2546316 - RNA, 22 nt, Human
uguguugggauugagucugugc

SEQ ID NO: 2546317 - RNA, 12 nt, Human
uguguuggcuug

SEQ ID NO: 2546318 - RNA, 16 nt, Human
uguguugccaagcucc

SEQ ID NO: 2546319 - RNA, 18 nt, Human
uguguugccacaggacac

SEQ ID NO: 2546320 - RNA, 23 nt, Human
uguguugccacaggacacaguca

SEQ ID NO: 2546321 - RNA, 18 nt, Human
uguguugccaugugugcu

SEQ ID NO: 2546322 - RNA, 22 nt, Human
uguuaacacauuuuguauaauu

SEQ ID NO: 2546323 - RNA, 21 nt, Human
uguuaacacauuuuguauaau

SEQ ID NO: 2546324 - RNA, 20 nt, Human
uguuaacacauuuuguauaa

SEQ ID NO: 2546325 - RNA, 18 nt, Human
uguuaacacauuuuguau

SEQ ID NO: 2546326 - RNA, 21 nt, Human
uguuaacauggacaugaucuu

SEQ ID NO: 2546327 - RNA, 13 nt, Human
uguuaaucaauuu

SEQ ID NO: 2546328 - RNA, 12 nt, Human
uguuaaucaauu

SEQ ID NO: 2546329 - RNA, 19 nt, Human
uguuaacucuugucuauuu

SEQ ID NO: 2546330 - RNA, 19 nt, Human
uguuaaccucagugucauu

SEQ ID NO: 2546331 - RNA, 17 nt, Human
uguuaacucuugucuau

SEQ ID NO: 2546332 - RNA, 17 nt, Human
uguuaaccucaguguca

SEQ ID NO: 2546333 - RNA, 16 nt, Human
uguuaaccagaauaaa

SEQ ID NO: 2546334 - RNA, 15 nt, Human
uguuaaccucagugu

SEQ ID NO: 2546335 - RNA, 16 nt, Human
agugagucgaggacag

SEQ ID NO: 2546336 - RNA, 17 nt, Human
uguggcccuggccugcu

SEQ ID NO: 2546337 - RNA, 23 nt, Human
uguggcccugccaucuucccagc

SEQ ID NO: 2546338 - RNA, 14 nt, Human
uguggcccuggccu

SEQ ID NO: 2546339 - RNA, 20 nt, Human
uguggcccuggccugcuggg

SEQ ID NO: 2546340 - RNA, 23 nt, Human
uguggccccacccugggcccugg

SEQ ID NO: 2546341 - RNA, 17 nt, Human
uguggccccugaacaag

SEQ ID NO: 2546342 - RNA, 22 nt, Human
uguggccccugaacaagaauug

SEQ ID NO: 2546343 - RNA, 12 nt, Human
uguggccccuuc

SEQ ID NO: 2546344 - RNA, 14 nt, Human
uguggcccugccau

SEQ ID NO: 2546345 - RNA, 13 nt, Human
uguggcccugcca

SEQ ID NO: 2546346 - RNA, 13 nt, Human
uguggccccuuca

SEQ ID NO: 2546347 - RNA, 22 nt, Human
uguggcccugccaucuucccag

SEQ ID NO: 2546348 - RNA, 21 nt, Human
uguggcccugccaucuuccca

SEQ ID NO: 2546349 - RNA, 12 nt, Human
uguggcccuggc

SEQ ID NO: 2546350 - RNA, 13 nt, Human
agugagugagccu

SEQ ID NO: 2546351 - RNA, 15 nt, Human
agugagucugucagc

SEQ ID NO: 2546352 - RNA, 14 nt, Human
agugagucugucag

SEQ ID NO: 2546353 - RNA, 16 nt, Human
agugagucucuucaga

SEQ ID NO: 2546354 - RNA, 16 nt, Human
agugagugagccuggc

SEQ ID NO: 2546355 - RNA, 14 nt, Human
agugagugagccug

SEQ ID NO: 2546356 - RNA, 23 nt, Human
agugagugcaaaaagcugaguau

SEQ ID NO: 2546357 - RNA, 16 nt, Human
agugaguguggcuccc

SEQ ID NO: 2546358 - RNA, 18 nt, Human
agugaguguggcuccccu

SEQ ID NO: 2546359 - RNA, 19 nt, Human
agugaguguggcuccccuc

SEQ ID NO: 2546360 - RNA, 24 nt, Human
agugauucuccugccucagccucc

SEQ ID NO: 2546361 - RNA, 22 nt, Human
agugauucuccugccucagccu

SEQ ID NO: 2546362 - RNA, 21 nt, Human
agugcaaauugucacaggaca

SEQ ID NO: 2546363 - RNA, 18 nt, Human
agugcaaauugucacagg

SEQ ID NO: 2546364 - RNA, 17 nt, Human
agugauugggacagagg

SEQ ID NO: 2546365 - RNA, 15 nt, Human
agugauuguuggcac

SEQ ID NO: 2546366 - RNA, 22 nt, Human
agugaguuacagcgagaggcag

SEQ ID NO: 2546367 - RNA, 16 nt, Human
agugauuguaugaauu

SEQ ID NO: 2546368 - RNA, 21 nt, Human
agugaguguggcuccccucua

SEQ ID NO: 2546369 - RNA, 22 nt, Human
agugcaaauugucacaggacag

SEQ ID NO: 2546370 - RNA, 15 nt, Human
agugauuucuagaaa

SEQ ID NO: 2546371 - RNA, 13 nt, Human
agugauuucuaga

SEQ ID NO: 2546372 - RNA, 16 nt, Human
agugcaaugacacagu

SEQ ID NO: 2546373 - RNA, 22 nt, Human
agugcaaugguauaaauuucaa

SEQ ID NO: 2546374 - RNA, 23 nt, Human
agugcaauggcgugaucucggcu

SEQ ID NO: 2546375 - RNA, 18 nt, Human
agugcaaugacacagucu

SEQ ID NO: 2546376 - RNA, 17 nt, Human
agugcaucucagcccac

SEQ ID NO: 2546377 - RNA, 16 nt, Human
agugcaucucagccca

SEQ ID NO: 2546378 - RNA, 15 nt, Human
agugcaugcucucug

SEQ ID NO: 2546379 - RNA, 16 nt, Human
agugcaugcucucugc

SEQ ID NO: 2546380 - RNA, 17 nt, Human
agugcaugcucucugca

SEQ ID NO: 2546381 - RNA, 20 nt, Human
agugcaugcucucugcagcc

SEQ ID NO: 2546382 - RNA, 22 nt, Human
agugcaugcucucugcagccag

SEQ ID NO: 2546383 - RNA, 14 nt, Human
agugcaucucagcc

SEQ ID NO: 2546384 - RNA, 15 nt, Human
agugcaucucagccc

SEQ ID NO: 2546385 - RNA, 16 nt, Human
agugcaguccugauca

SEQ ID NO: 2546386 - RNA, 22 nt, Human
agugcaguccugaucagagccg

SEQ ID NO: 2546387 - RNA, 11 nt, Human
agugcaggcug

SEQ ID NO: 2546388 - RNA, 13 nt, Human
agugcaggcuggc

SEQ ID NO: 2546389 - RNA, 15 nt, Human
agugcaggcuggcac

SEQ ID NO: 2546390 - RNA, 18 nt, Human
agugcagcugauuuuaac

SEQ ID NO: 2546391 - RNA, 20 nt, Human
agugcagcugauuuuaacaa

SEQ ID NO: 2546392 - RNA, 14 nt, Human
agugcagcugauuu

SEQ ID NO: 2546393 - RNA, 15 nt, Human
agugcagcugauuuu

SEQ ID NO: 2546394 - RNA, 16 nt, Human
agugcagcugauuuua

SEQ ID NO: 2546395 - RNA, 17 nt, Human
agugcagcugauuuuaa

SEQ ID NO: 2546396 - RNA, 17 nt, Human
agugcagccguuugaga

SEQ ID NO: 2546397 - RNA, 18 nt, Human
agugcagccguuugagaa

SEQ ID NO: 2546398 - RNA, 17 nt, Human
agugcacccacucugcu

SEQ ID NO: 2546399 - RNA, 23 nt, Human
agugcagcccguguggccccuuc

SEQ ID NO: 2546400 - RNA, 24 nt, Human
agugcagcccguguggccccuuca

SEQ ID NO: 2546401 - RNA, 13 nt, Human
agugcacccacuc

SEQ ID NO: 2546402 - RNA, 21 nt, Human
agugcagcccguguggccccu

SEQ ID NO: 2546403 - RNA, 16 nt, Human
agugccaacaauccua

SEQ ID NO: 2546404 - RNA, 16 nt, Human
agugccaaaaacaaca

SEQ ID NO: 2546405 - RNA, 15 nt, Human
agugcccaacuguua

SEQ ID NO: 2546406 - RNA, 21 nt, Human
agugccacugcccgagcuggu

SEQ ID NO: 2546407 - RNA, 22 nt, Human
agugccacugcccgagcuggug

SEQ ID NO: 2546408 - RNA, 21 nt, Human
agugccaacaauccuagugcu

SEQ ID NO: 2546409 - RNA, 19 nt, Human
agugccaagcacagugccu

SEQ ID NO: 2546410 - RNA, 14 nt, Human
agugccaagcacag

SEQ ID NO: 2546411 - RNA, 20 nt, Human
agugccacugcccgagcugg

SEQ ID NO: 2546412 - RNA, 19 nt, Human
agugccacucauuccugua

SEQ ID NO: 2546413 - RNA, 14 nt, Human
agugcccacaggau

SEQ ID NO: 2546414 - RNA, 16 nt, Human
agugcccaccaacauc

SEQ ID NO: 2546415 - RNA, 17 nt, Human
agugcccaacuguuaua

SEQ ID NO: 2546416 - RNA, 20 nt, Human
agugcccaccaacaucccau

SEQ ID NO: 2546417 - RNA, 13 nt, Human
agugcccauuccu

SEQ ID NO: 2546418 - RNA, 19 nt, Human
agugcccaccaacauccca

SEQ ID NO: 2546419 - RNA, 23 nt, Human
agugcccagaacuggacucagga

SEQ ID NO: 2546420 - RNA, 19 nt, Human
agugccccauucuuuugua

SEQ ID NO: 2546421 - RNA, 17 nt, Human
agugcccauuccucacc

SEQ ID NO: 2546422 - RNA, 16 nt, Human
agugcccccacugacc

SEQ ID NO: 2546423 - RNA, 14 nt, Human
agugcccccacuga

SEQ ID NO: 2546424 - RNA, 20 nt, Human
agugccccauucuuuuguaa

SEQ ID NO: 2546425 - RNA, 19 nt, Human
uguggccccacccugggcc

SEQ ID NO: 2546426 - RNA, 17 nt, Human
uguggccccacccuggg

SEQ ID NO: 2546427 - RNA, 13 nt, Human
uguggccccaccc

SEQ ID NO: 2546428 - RNA, 12 nt, Human
uguggccccacc

SEQ ID NO: 2546429 - RNA, 19 nt, Human
uguggcaauagugggcccu

SEQ ID NO: 2546430 - RNA, 17 nt, Human
uguggcaaggaaaaaca

SEQ ID NO: 2546431 - RNA, 14 nt, Human
uguggcacauucuu

SEQ ID NO: 2546432 - RNA, 13 nt, Human
uguggagacuggg

SEQ ID NO: 2546433 - RNA, 19 nt, Human
uguggagagugcaacagua

SEQ ID NO: 2546434 - RNA, 19 nt, Human
uguggagccgaggccuacc

SEQ ID NO: 2546435 - RNA, 16 nt, Human
uguggagccgaggccu

SEQ ID NO: 2546436 - RNA, 16 nt, Human
uguggagcccgcaccc

SEQ ID NO: 2546437 - RNA, 18 nt, Human
uguggagcccgcaccccc

SEQ ID NO: 2546438 - RNA, 19 nt, Human
uguggagcccgcaccccca

SEQ ID NO: 2546439 - RNA, 17 nt, Human
uguggaggaaggauugu

SEQ ID NO: 2546440 - RNA, 16 nt, Human
uguggaggaaggauug

SEQ ID NO: 2546441 - RNA, 15 nt, Human
uguggaggaaggauu

SEQ ID NO: 2546442 - RNA, 14 nt, Human
uguggaggaaggau

SEQ ID NO: 2546443 - RNA, 12 nt, Human
uguggaggaagg

SEQ ID NO: 2546444 - RNA, 20 nt, Human
uguggagccgaggccuaccc

SEQ ID NO: 2546445 - RNA, 21 nt, Human
uguggauuuuugugguaguga

SEQ ID NO: 2546446 - RNA, 22 nt, Human
uguggcaaagccuucauugccu

SEQ ID NO: 2546447 - RNA, 18 nt, Human
uguggcaagccccugccc

SEQ ID NO: 2546448 - RNA, 15 nt, Human
ugugcugcccugccc

SEQ ID NO: 2546449 - RNA, 14 nt, Human
ugugcugcccugcc

SEQ ID NO: 2546450 - RNA, 13 nt, Human
ugugcugcccugc

SEQ ID NO: 2546451 - RNA, 18 nt, Human
ugugcucuggacaggcau

SEQ ID NO: 2546452 - RNA, 16 nt, Human
ugugcucuggacaggc

SEQ ID NO: 2546453 - RNA, 19 nt, Human
ugugcucuggacaggcaug

SEQ ID NO: 2546454 - RNA, 12 nt, Human
ugugcugcccug

SEQ ID NO: 2546455 - RNA, 23 nt, Human
ugugccccccauccuggcccauc

SEQ ID NO: 2546456 - RNA, 22 nt, Human
ugugccccccauccuggcccau

SEQ ID NO: 2546457 - RNA, 21 nt, Human
ugugccccccauccuggccca

SEQ ID NO: 2546458 - RNA, 20 nt, Human
ugugccccccauccuggccc

SEQ ID NO: 2546459 - RNA, 19 nt, Human
ugugccccccauccuggcc

SEQ ID NO: 2546460 - RNA, 18 nt, Human
ugugccccccauccuggc

SEQ ID NO: 2546461 - RNA, 16 nt, Human
ugugccccccauccug

SEQ ID NO: 2546462 - RNA, 15 nt, Human
ugugccccccauccu

SEQ ID NO: 2546463 - RNA, 20 nt, Human
ugugcccuaaaguguauuuu

SEQ ID NO: 2546464 - RNA, 14 nt, Human
ugugcccccucuac

SEQ ID NO: 2546465 - RNA, 21 nt, Human
ugugcccuaaaguguauuuuu

SEQ ID NO: 2546466 - RNA, 19 nt, Human
agucucacuguugcccagg

SEQ ID NO: 2546467 - RNA, 18 nt, Human
agucucacuguugcccag

SEQ ID NO: 2546468 - RNA, 20 nt, Human
agucucacuguugcccaggc

SEQ ID NO: 2546469 - RNA, 13 nt, Human
ugugccccccauc

SEQ ID NO: 2546470 - RNA, 21 nt, Human
agucucacuguugcccaggcu

SEQ ID NO: 2546471 - RNA, 15 nt, Human
ugugcucuggacagg

SEQ ID NO: 2546472 - RNA, 23 nt, Human
ugugcucugaucauccacugugc

SEQ ID NO: 2546473 - RNA, 12 nt, Human
ugugcucugauc

SEQ ID NO: 2546474 - RNA, 22 nt, Human
ugugcucugaucauccacugug

SEQ ID NO: 2546475 - RNA, 12 nt, Human
ugugccucggcu

SEQ ID NO: 2546476 - RNA, 21 nt, Human
ugugccucggcuuuucucagc

SEQ ID NO: 2546477 - RNA, 12 nt, Human
ugugccucugcc

SEQ ID NO: 2546478 - RNA, 14 nt, Human
ugugccuccucacc

SEQ ID NO: 2546479 - RNA, 15 nt, Human
ugugccuccucaccc

SEQ ID NO: 2546480 - RNA, 14 nt, Human
ugugccucccaaaa

SEQ ID NO: 2546481 - RNA, 16 nt, Human
ugugccuccucacccc

SEQ ID NO: 2546482 - RNA, 19 nt, Human
aguguuaggccuggcacag

SEQ ID NO: 2546483 - RNA, 17 nt, Human
aguguuaggccuggcac

SEQ ID NO: 2546484 - RNA, 15 nt, Human
aguguuagggaaggg

SEQ ID NO: 2546485 - RNA, 18 nt, Human
aguguuagggaagggccu

SEQ ID NO: 2546486 - RNA, 19 nt, Human
aguguuagggaagggccug

SEQ ID NO: 2546487 - RNA, 23 nt, Human
aguguuagggaagggccugccac

SEQ ID NO: 2546488 - RNA, 20 nt, Human
aguguuaggccuggcacagu

SEQ ID NO: 2546489 - RNA, 23 nt, Human
aguguuaucagucauaacuaaau

SEQ ID NO: 2546490 - RNA, 16 nt, Human
aguguuaucagucaua

SEQ ID NO: 2546491 - RNA, 19 nt, Human
aguguuaugcggucuaggg

SEQ ID NO: 2546492 - RNA, 22 nt, Human
aguguuauuaguguaugcuuug

SEQ ID NO: 2546493 - RNA, 17 nt, Human
aguguugaaaauguuca

SEQ ID NO: 2546494 - RNA, 22 nt, Human
aguguuauuuucuuugaaauug

SEQ ID NO: 2546495 - RNA, 19 nt, Human
aguguguguuuuucauaaa

SEQ ID NO: 2546496 - RNA, 12 nt, Human
aguguguucuga

SEQ ID NO: 2546497 - RNA, 13 nt, Human
aguguguucugau

SEQ ID NO: 2546498 - RNA, 17 nt, Human
aguguguucugauuaga

SEQ ID NO: 2546499 - RNA, 20 nt, Human
aguguguucugauuagaaau

SEQ ID NO: 2546500 - RNA, 15 nt, Human
aguguguuguugcuu

SEQ ID NO: 2546501 - RNA, 21 nt, Human
aguguguucugauuagaaaug

SEQ ID NO: 2546502 - RNA, 19 nt, Human
aguguguuuccuucagugc

SEQ ID NO: 2546503 - RNA, 20 nt, Human
aguguguuuccuucagugca

SEQ ID NO: 2546504 - RNA, 16 nt, Human
aguguuaggccuggca

SEQ ID NO: 2546505 - RNA, 15 nt, Human
aguguuaggccuggc

SEQ ID NO: 2546506 - RNA, 15 nt, Human
aguguuaaucaauuu

SEQ ID NO: 2546507 - RNA, 12 nt, Human
aguguuaaucaa

SEQ ID NO: 2546508 - RNA, 20 nt, Human
aguguuaaucaauuuaaacc

SEQ ID NO: 2546509 - RNA, 20 nt, Human
aguguuaauacuaguuguga

SEQ ID NO: 2546510 - RNA, 19 nt, Human
aguguuaauacuaguugug

SEQ ID NO: 2546511 - RNA, 16 nt, Human
aguguuaauacuaguu

SEQ ID NO: 2546512 - RNA, 15 nt, Human
aguguuaauacuagu

SEQ ID NO: 2546513 - RNA, 15 nt, Human
aguguuaaaugugau

SEQ ID NO: 2546514 - RNA, 22 nt, Human
aguguguuguugcuuuaggcuc

SEQ ID NO: 2546515 - RNA, 22 nt, Human
uguucuugguuuguaaauuaac

SEQ ID NO: 2546516 - RNA, 20 nt, Human
uguucuugaagcaguagccu

SEQ ID NO: 2546517 - RNA, 15 nt, Human
uguucuuuaggagau

SEQ ID NO: 2546518 - RNA, 20 nt, Human
uguucuugguuuguaaauua

SEQ ID NO: 2546519 - RNA, 13 nt, Human
uguucuugaauuu

SEQ ID NO: 2546520 - RNA, 23 nt, Human
uguucuugaauuuaauaaucugu

SEQ ID NO: 2546521 - RNA, 19 nt, Human
uguucuuucacccuuuucu

SEQ ID NO: 2546522 - RNA, 13 nt, Human
uguugcccaggcu

SEQ ID NO: 2546523 - RNA, 21 nt, Human
uguugcccaggcuggagugca

SEQ ID NO: 2546524 - RNA, 14 nt, Human
uguugcccaggcug

SEQ ID NO: 2546525 - RNA, 15 nt, Human
uguugcccaggcugg

SEQ ID NO: 2546526 - RNA, 16 nt, Human
aguguuggagaagaac

SEQ ID NO: 2546527 - RNA, 14 nt, Human
aguguuggagaaga

SEQ ID NO: 2546528 - RNA, 16 nt, Human
aguguugcauggaugu

SEQ ID NO: 2546529 - RNA, 17 nt, Human
aguguugagccuuuucc

SEQ ID NO: 2546530 - RNA, 18 nt, Human
aguguuggagaagaacug

SEQ ID NO: 2546531 - RNA, 17 nt, Human
aguguuggagaagaacu

SEQ ID NO: 2546532 - RNA, 23 nt, Human
aguguuggagaagaacugaaauc

SEQ ID NO: 2546533 - RNA, 21 nt, Human
aguuacucuucaguuaagccu

SEQ ID NO: 2546534 - RNA, 17 nt, Human
aguuacuccagugccaa

SEQ ID NO: 2546535 - RNA, 15 nt, Human
aguuacucugaaggg

SEQ ID NO: 2546536 - RNA, 18 nt, Human
aguuacugauucacugca

SEQ ID NO: 2546537 - RNA, 14 nt, Human
aguuacugaaugca

SEQ ID NO: 2546538 - RNA, 13 nt, Human
aguuacugaaugc

SEQ ID NO: 2546539 - RNA, 12 nt, Human
aguuacugaaug

SEQ ID NO: 2546540 - RNA, 21 nt, Human
aguuacuccagugccaacaau

SEQ ID NO: 2546541 - RNA, 16 nt, Human
aguuacucugaagggc

SEQ ID NO: 2546542 - RNA, 13 nt, Human
aguuacuguugug

SEQ ID NO: 2546543 - RNA, 17 nt, Human
aguuacuguuauagagg

SEQ ID NO: 2546544 - RNA, 22 nt, Human
aguuacuucacuuuaauucuca

SEQ ID NO: 2546545 - RNA, 17 nt, Human
aguuacuguugugaccu

SEQ ID NO: 2546546 - RNA, 14 nt, Human
aguuacuuccuauc

SEQ ID NO: 2546547 - RNA, 15 nt, Human
aguuacuuccuauca

SEQ ID NO: 2546548 - RNA, 19 nt, Human
aguuacuuugucagaggca

SEQ ID NO: 2546549 - RNA, 23 nt, Human
aguuacucagcccugggccccac

SEQ ID NO: 2546550 - RNA, 13 nt, Human
aguuauaguuuca

SEQ ID NO: 2546551 - RNA, 21 nt, Human
aguuagaauuccuucagggug

SEQ ID NO: 2546552 - RNA, 12 nt, Human
aguuagacuguu

SEQ ID NO: 2546553 - RNA, 19 nt, Human
aguuauaguauaucuggac

SEQ ID NO: 2546554 - RNA, 19 nt, Human
aguuagaauuccuucaggg

SEQ ID NO: 2546555 - RNA, 15 nt, Human
aguuagaauuccuuc

SEQ ID NO: 2546556 - RNA, 14 nt, Human
aguuagaauuccuu

SEQ ID NO: 2546557 - RNA, 23 nt, Human
aguggagguuaaggcugaggaaa

SEQ ID NO: 2546558 - RNA, 22 nt, Human
aguggagguuaaggcugaggaa

SEQ ID NO: 2546559 - RNA, 14 nt, Human
aguggaggcacuuu

SEQ ID NO: 2546560 - RNA, 17 nt, Human
aguggaggcacuuuagg

SEQ ID NO: 2546561 - RNA, 16 nt, Human
agugugggucugugug

SEQ ID NO: 2546562 - RNA, 17 nt, Human
agugugggucugugugu

SEQ ID NO: 2546563 - RNA, 15 nt, Human
agugugggucugugu

SEQ ID NO: 2546564 - RNA, 14 nt, Human
aguggaucuccaag

SEQ ID NO: 2546565 - RNA, 15 nt, Human
aguggaaauguucua

SEQ ID NO: 2546566 - RNA, 22 nt, Human
aguggaaagacagcuucucauc

SEQ ID NO: 2546567 - RNA, 17 nt, Human
aguggaagaagagggag

SEQ ID NO: 2546568 - RNA, 16 nt, Human
aguggaagaagaggga

SEQ ID NO: 2546569 - RNA, 17 nt, Human
aguggaagaagcagaug

SEQ ID NO: 2546570 - RNA, 15 nt, Human
aguggacuuuccacc

SEQ ID NO: 2546571 - RNA, 17 nt, Human
aguggacuuuccacccc

SEQ ID NO: 2546572 - RNA, 18 nt, Human
aguggacuuuccaccccc

SEQ ID NO: 2546573 - RNA, 19 nt, Human
aguggacuuuccacccccu

SEQ ID NO: 2546574 - RNA, 20 nt, Human
aguggacuuuccacccccuc

SEQ ID NO: 2546575 - RNA, 22 nt, Human
aguggacuuuccacccccuccc

SEQ ID NO: 2546576 - RNA, 16 nt, Human
aguggagaauuauaua

SEQ ID NO: 2546577 - RNA, 13 nt, Human
uguuaucaaacuu

SEQ ID NO: 2546578 - RNA, 19 nt, Human
uguuaucaccgugggcucc

SEQ ID NO: 2546579 - RNA, 21 nt, Human
uguuaucagucaauauuuuua

SEQ ID NO: 2546580 - RNA, 20 nt, Human
uguuaucaaaacuuucuuuu

SEQ ID NO: 2546581 - RNA, 19 nt, Human
agugugggucugugugugu

SEQ ID NO: 2546582 - RNA, 23 nt, Human
agugugggucuguguguguguau

SEQ ID NO: 2546583 - RNA, 17 nt, Human
aguguggucccaacagg

SEQ ID NO: 2546584 - RNA, 18 nt, Human
aguggaucuccaaggacc

SEQ ID NO: 2546585 - RNA, 21 nt, Human
agugugguagggacuuaaaaa

SEQ ID NO: 2546586 - RNA, 21 nt, Human
uguuauugggcaagugauuga

SEQ ID NO: 2546587 - RNA, 22 nt, Human
uguuauuauuacuuauuuuuga

SEQ ID NO: 2546588 - RNA, 12 nt, Human
uguuauuauaua

SEQ ID NO: 2546589 - RNA, 21 nt, Human
uguuauuagagauuaccuccu

SEQ ID NO: 2546590 - RNA, 23 nt, Human
uguuauuagagauuaccuccuga

SEQ ID NO: 2546591 - RNA, 13 nt, Human
uguuauuucucag

SEQ ID NO: 2546592 - RNA, 22 nt, Human
uguuauuucuauuuuuguagaa

SEQ ID NO: 2546593 - RNA, 21 nt, Human
uguuauuucuauuuuuguaga

SEQ ID NO: 2546594 - RNA, 14 nt, Human
uguuauuuauauau

SEQ ID NO: 2546595 - RNA, 17 nt, Human
uguuauuuagacucauc

SEQ ID NO: 2546596 - RNA, 21 nt, Human
uguuauuuauaaucacuuuuu

SEQ ID NO: 2546597 - RNA, 18 nt, Human
uguuauuuauaaucacuu

SEQ ID NO: 2546598 - RNA, 18 nt, Human
uguuauuuaacagcugaa

SEQ ID NO: 2546599 - RNA, 22 nt, Human
uguuauugggcaagugauugaa

SEQ ID NO: 2546600 - RNA, 14 nt, Human
uguuauuuaaagaa

SEQ ID NO: 2546601 - RNA, 15 nt, Human
uguuauuuaaaugag

SEQ ID NO: 2546602 - RNA, 17 nt, Human
uguuauuucucagacuu

SEQ ID NO: 2546603 - RNA, 12 nt, Human
uguuccccuccu

SEQ ID NO: 2546604 - RNA, 15 nt, Human
uguuccccuccucca

SEQ ID NO: 2546605 - RNA, 13 nt, Human
uguuccccuccuc

SEQ ID NO: 2546606 - RNA, 23 nt, Human
uguuccccuccuccacucucccc

SEQ ID NO: 2546607 - RNA, 14 nt, Human
uguuccccuuccac

SEQ ID NO: 2546608 - RNA, 17 nt, Human
uguuccccuuccacuga

SEQ ID NO: 2546609 - RNA, 19 nt, Human
uguuccccuccuccacucu

SEQ ID NO: 2546610 - RNA, 17 nt, Human
uguuccccuccuccacu

SEQ ID NO: 2546611 - RNA, 20 nt, Human
uguuccccuuccacugaggg

SEQ ID NO: 2546612 - RNA, 21 nt, Human
uguuccccuuccacugagggc

SEQ ID NO: 2546613 - RNA, 23 nt, Human
uguuccccuuccacugagggcag

SEQ ID NO: 2546614 - RNA, 22 nt, Human
uguucuaauuaauaaauuauuu

SEQ ID NO: 2546615 - RNA, 18 nt, Human
uguucuagcauggcugcc

SEQ ID NO: 2546616 - RNA, 17 nt, Human
uguucuaagucuuucca

SEQ ID NO: 2546617 - RNA, 21 nt, Human
uguuccccucacuggaugaaa

SEQ ID NO: 2546618 - RNA, 18 nt, Human
uguucccucucccuguug

SEQ ID NO: 2546619 - RNA, 13 nt, Human
uguucuugaagca

SEQ ID NO: 2546620 - RNA, 18 nt, Human
uguucuuaguuugcaguu

SEQ ID NO: 2546621 - RNA, 15 nt, Human
uguucuaguuuucag

SEQ ID NO: 2546622 - RNA, 18 nt, Human
uguucuacucauauauau

SEQ ID NO: 2546623 - RNA, 12 nt, Human
aguucaaugauc

SEQ ID NO: 2546624 - RNA, 11 nt, Human
aguucaaugau

SEQ ID NO: 2546625 - RNA, 10 nt, Human
aguucaauga

SEQ ID NO: 2546626 - RNA, 22 nt, Human
aguucaaucucccgcugcugcu

SEQ ID NO: 2546627 - RNA, 15 nt, Human
aguucaaucucccgc

SEQ ID NO: 2546628 - RNA, 13 nt, Human
aguucaauccuac

SEQ ID NO: 2546629 - RNA, 21 nt, Human
aguucaauaaaugucuguuga

SEQ ID NO: 2546630 - RNA, 19 nt, Human
aguucaauaaaugucuguu

SEQ ID NO: 2546631 - RNA, 18 nt, Human
aguucaauaaaugucugu

SEQ ID NO: 2546632 - RNA, 23 nt, Human
aguucaaugaucuagguuuaacu

SEQ ID NO: 2546633 - RNA, 22 nt, Human
aguucaaugaucuagguuuaac

SEQ ID NO: 2546634 - RNA, 21 nt, Human
aguucaaugaucuagguuuaa

SEQ ID NO: 2546635 - RNA, 20 nt, Human
aguucaaugaucuagguuua

SEQ ID NO: 2546636 - RNA, 16 nt, Human
aguucaaugaucuagg

SEQ ID NO: 2546637 - RNA, 15 nt, Human
aguucaaugaucuag

SEQ ID NO: 2546638 - RNA, 14 nt, Human
aguucaaugaucua

SEQ ID NO: 2546639 - RNA, 13 nt, Human
aguucaaugaucu

SEQ ID NO: 2546640 - RNA, 16 nt, Human
aguucaauucucauuu

SEQ ID NO: 2546641 - RNA, 23 nt, Human
aguuaucagacacucuggcuggu

SEQ ID NO: 2546642 - RNA, 18 nt, Human
aguuaucaugcauguuau

SEQ ID NO: 2546643 - RNA, 21 nt, Human
aguuaucagacacucuggcug

SEQ ID NO: 2546644 - RNA, 22 nt, Human
aguuauauagguuuuguuugcu

SEQ ID NO: 2546645 - RNA, 23 nt, Human
aguuauauagguuuuguuugcua

SEQ ID NO: 2546646 - RNA, 21 nt, Human
aguuauauagguuuuguuugc

SEQ ID NO: 2546647 - RNA, 18 nt, Human
aguuauaguuucagauau

SEQ ID NO: 2546648 - RNA, 16 nt, Human
aguuauaguuucagau

SEQ ID NO: 2546649 - RNA, 15 nt, Human
aguuauaguuucaga

SEQ ID NO: 2546650 - RNA, 16 nt, Human
aguuaucuaaaagaaa

SEQ ID NO: 2546651 - RNA, 16 nt, Human
aguucccagaaucaaa

SEQ ID NO: 2546652 - RNA, 15 nt, Human
aguucccagaaucaa

SEQ ID NO: 2546653 - RNA, 15 nt, Human
aguucccccaaccuc

SEQ ID NO: 2546654 - RNA, 17 nt, Human
aguuccccaugcagaca

SEQ ID NO: 2546655 - RNA, 18 nt, Human
aguucccccaaccucaga

SEQ ID NO: 2546656 - RNA, 16 nt, Human
aguuccccaugcagac

SEQ ID NO: 2546657 - RNA, 14 nt, Human
aguuccccaugcag

SEQ ID NO: 2546658 - RNA, 15 nt, Human
aguucccauguuaaa

SEQ ID NO: 2546659 - RNA, 23 nt, Human
aguuccucauuagcauuuugcua

SEQ ID NO: 2546660 - RNA, 14 nt, Human
aguucaccauuaaa

SEQ ID NO: 2546661 - RNA, 18 nt, Human
aguucaauggcugcugaa

SEQ ID NO: 2546662 - RNA, 17 nt, Human
aguucaauggcugcuga

SEQ ID NO: 2546663 - RNA, 14 nt, Human
aguucaauggcugc

SEQ ID NO: 2546664 - RNA, 14 nt, Human
aguucccagaauca

SEQ ID NO: 2546665 - RNA, 13 nt, Human
aguucccagaauc

SEQ ID NO: 2546666 - RNA, 12 nt, Human
aguucccagaau

SEQ ID NO: 2546667 - RNA, 22 nt, Human
aguucacuucaucuucucagcu

SEQ ID NO: 2546668 - RNA, 16 nt, Human
aguucacuauaaaugg

SEQ ID NO: 2546669 - RNA, 15 nt, Human
aguucacuucaucuu

SEQ ID NO: 2546670 - RNA, 21 nt, Human
aguucacuauaaaugguguuu

SEQ ID NO: 2546671 - RNA, 14 nt, Human
aguucuagagaaga

SEQ ID NO: 2546672 - RNA, 13 nt, Human
aguucuagagaag

SEQ ID NO: 2546673 - RNA, 23 nt, Human
aguucuaccucaggcagcucaag

SEQ ID NO: 2546674 - RNA, 22 nt, Human
aguucuaccucaggcagcucaa

SEQ ID NO: 2546675 - RNA, 20 nt, Human
aguucuagagaagaggcugg

SEQ ID NO: 2546676 - RNA, 17 nt, Human
aguucuagagaagaggc

SEQ ID NO: 2546677 - RNA, 16 nt, Human
aguucuagagaagagg

SEQ ID NO: 2546678 - RNA, 15 nt, Human
aguucuagagaagag

SEQ ID NO: 2546679 - RNA, 19 nt, Human
aguucuagucucucugggg

SEQ ID NO: 2546680 - RNA, 17 nt, Human
aguucuagucucucugg

SEQ ID NO: 2546681 - RNA, 23 nt, Human
aguucucagggcuccugccuucu

SEQ ID NO: 2546682 - RNA, 19 nt, Human
aguucucagggcuccugcc

SEQ ID NO: 2546683 - RNA, 18 nt, Human
aguucucagggcuccugc

SEQ ID NO: 2546684 - RNA, 17 nt, Human
aguucucagggcuccug

SEQ ID NO: 2546685 - RNA, 15 nt, Human
uguuggggcaguggu

SEQ ID NO: 2546686 - RNA, 20 nt, Human
uguugggguggguauaaaag

SEQ ID NO: 2546687 - RNA, 18 nt, Human
uguugggguggguauaaa

SEQ ID NO: 2546688 - RNA, 17 nt, Human
uguugggguggguauaa

SEQ ID NO: 2546689 - RNA, 16 nt, Human
aguucuaguuugcauu

SEQ ID NO: 2546690 - RNA, 15 nt, Human
aguucuaguuugcau

SEQ ID NO: 2546691 - RNA, 15 nt, Human
aguucuaguugcuug

SEQ ID NO: 2546692 - RNA, 17 nt, Human
aguucuaguuugcauuc

SEQ ID NO: 2546693 - RNA, 15 nt, Human
aguucucagggcucc

SEQ ID NO: 2546694 - RNA, 14 nt, Human
aguucucagggcuc

SEQ ID NO: 2546695 - RNA, 12 nt, Human
aguucucagggc

SEQ ID NO: 2546696 - RNA, 20 nt, Human
aguucucacuguucccucug

SEQ ID NO: 2546697 - RNA, 19 nt, Human
aguucucacuguucccucu

SEQ ID NO: 2546698 - RNA, 18 nt, Human
aguucucacuguucccuc

SEQ ID NO: 2546699 - RNA, 12 nt, Human
aguucucacugu

SEQ ID NO: 2546700 - RNA, 19 nt, Human
aguucggugagcuacaaau

SEQ ID NO: 2546701 - RNA, 12 nt, Human
aguuccucgccc

SEQ ID NO: 2546702 - RNA, 13 nt, Human
aguuccucgcccu

SEQ ID NO: 2546703 - RNA, 14 nt, Human
aguuccucgcccug

SEQ ID NO: 2546704 - RNA, 15 nt, Human
aguuccucgcccugg

SEQ ID NO: 2546705 - RNA, 21 nt, Human
aguuccucuuugcauggaauu

SEQ ID NO: 2546706 - RNA, 15 nt, Human
aguuccucuuugcau

SEQ ID NO: 2546707 - RNA, 18 nt, Human
aguuccucuagugcccuc

SEQ ID NO: 2546708 - RNA, 16 nt, Human
aguuccucgcccuggg

SEQ ID NO: 2546709 - RNA, 17 nt, Human
aguuccucgcccugggu

SEQ ID NO: 2546710 - RNA, 20 nt, Human
aguucggugagcuacaaaug

SEQ ID NO: 2546711 - RNA, 21 nt, Human
aguuccugcggagugaagagg

SEQ ID NO: 2546712 - RNA, 19 nt, Human
aguuccugaaccugaugcu

SEQ ID NO: 2546713 - RNA, 23 nt, Human
aguuccugcuacaacuucagcag

SEQ ID NO: 2546714 - RNA, 18 nt, Human
aguuccugaaccugaugc

SEQ ID NO: 2546715 - RNA, 16 nt, Human
aguuccucuuugcaug

SEQ ID NO: 2546716 - RNA, 20 nt, Human
aguuccugcggagugaagag

SEQ ID NO: 2546717 - RNA, 20 nt, Human
aguucuaccucaggcagcuc

SEQ ID NO: 2546718 - RNA, 15 nt, Human
aguucuacauaagua

SEQ ID NO: 2546719 - RNA, 21 nt, Human
aguucgaugggcccaauucuu

SEQ ID NO: 2546720 - RNA, 17 nt, Human
uguuuaguaaucauauu

SEQ ID NO: 2546721 - RNA, 14 nt, Human
uguuuaguaaucau

SEQ ID NO: 2546722 - RNA, 17 nt, Human
uguuuagcagcagccuu

SEQ ID NO: 2546723 - RNA, 22 nt, Human
uguuuagcagcagccuuuaaug

SEQ ID NO: 2546724 - RNA, 16 nt, Human
uguuuagcaaauacau

SEQ ID NO: 2546725 - RNA, 19 nt, Human
uguuuaguaaacucaauaa

SEQ ID NO: 2546726 - RNA, 13 nt, Human
uguuuaguaauca

SEQ ID NO: 2546727 - RNA, 13 nt, Human
uguuuauuccuga

SEQ ID NO: 2546728 - RNA, 13 nt, Human
uguuuauuccuug

SEQ ID NO: 2546729 - RNA, 18 nt, Human
uguuuauuccugauaaua

SEQ ID NO: 2546730 - RNA, 14 nt, Human
uguuuauugucaaa

SEQ ID NO: 2546731 - RNA, 16 nt, Human
uguuuauuuuauauua

SEQ ID NO: 2546732 - RNA, 13 nt, Human
uguuuauggccuc

SEQ ID NO: 2546733 - RNA, 14 nt, Human
uguuuauggccuca

SEQ ID NO: 2546734 - RNA, 15 nt, Human
uguuuauggccucag

SEQ ID NO: 2546735 - RNA, 23 nt, Human
uguuuauggccucagcugccuca

SEQ ID NO: 2546736 - RNA, 14 nt, Human
uguuuaugagccag

SEQ ID NO: 2546737 - RNA, 16 nt, Human
uguuuaugagccagac

SEQ ID NO: 2546738 - RNA, 21 nt, Human
uguuuaugagccagacaaaug

SEQ ID NO: 2546739 - RNA, 21 nt, Human
uguuuaugcaaggaaggaaag

SEQ ID NO: 2546740 - RNA, 24 nt, Human
uguuuauggccucagcugccucac

SEQ ID NO: 2546741 - RNA, 20 nt, Human
uguugugauguauucuagcu

SEQ ID NO: 2546742 - RNA, 14 nt, Human
uguugugauguauu

SEQ ID NO: 2546743 - RNA, 13 nt, Human
uguugugaauguu

SEQ ID NO: 2546744 - RNA, 12 nt, Human
uguugugaaugu

SEQ ID NO: 2546745 - RNA, 12 nt, Human
uguugucuugaa

SEQ ID NO: 2546746 - RNA, 17 nt, Human
uguugucuguuuguucu

SEQ ID NO: 2546747 - RNA, 16 nt, Human
uguugucuugaaagau

SEQ ID NO: 2546748 - RNA, 19 nt, Human
uguugguuccaagcccugg

SEQ ID NO: 2546749 - RNA, 16 nt, Human
uguugguuccaagccc

SEQ ID NO: 2546750 - RNA, 15 nt, Human
uguugucucuugagu

SEQ ID NO: 2546751 - RNA, 17 nt, Human
uguugguuuugacugga

SEQ ID NO: 2546752 - RNA, 14 nt, Human
uguugguuuugacu

SEQ ID NO: 2546753 - RNA, 23 nt, Human
uguugggguggguauaaaagaug

SEQ ID NO: 2546754 - RNA, 22 nt, Human
uguugggguggguauaaaagau

SEQ ID NO: 2546755 - RNA, 14 nt, Human
uguuggucauuuua

SEQ ID NO: 2546756 - RNA, 21 nt, Human
uguugguaauuauuuugguac

SEQ ID NO: 2546757 - RNA, 14 nt, Human
uguugguuccaagc

SEQ ID NO: 2546758 - RNA, 16 nt, Human
uguugugugugggagu

SEQ ID NO: 2546759 - RNA, 14 nt, Human
uguuguguuucugu

SEQ ID NO: 2546760 - RNA, 20 nt, Human
uguuguuaaugaaaauguca

SEQ ID NO: 2546761 - RNA, 21 nt, Human
uguuguuaaugaaaaugucag

SEQ ID NO: 2546762 - RNA, 14 nt, Human
uguuguuaaauauc

SEQ ID NO: 2546763 - RNA, 17 nt, Human
uguuguuaaugaaaaug

SEQ ID NO: 2546764 - RNA, 18 nt, Human
uguuguuaaugaaaaugu

SEQ ID NO: 2546765 - RNA, 14 nt, Human
uguuguguguggga

SEQ ID NO: 2546766 - RNA, 15 nt, Human
uguugugugugggag

SEQ ID NO: 2546767 - RNA, 13 nt, Human
uguugugaauguc

SEQ ID NO: 2546768 - RNA, 21 nt, Human
uguuguguacguggagaggga

SEQ ID NO: 2546769 - RNA, 20 nt, Human
uguuuagauaauacaccacu

SEQ ID NO: 2546770 - RNA, 13 nt, Human
uguuguuauuuaa

SEQ ID NO: 2546771 - RNA, 11 nt, Human
uguuguuauuu

SEQ ID NO: 2546772 - RNA, 17 nt, Human
aguuuugaaaagcuauu

SEQ ID NO: 2546773 - RNA, 16 nt, Human
aguuuugaaaagcuau

SEQ ID NO: 2546774 - RNA, 15 nt, Human
aguuuugaaaagcua

SEQ ID NO: 2546775 - RNA, 14 nt, Human
aguuuugaaaagcu

SEQ ID NO: 2546776 - RNA, 12 nt, Human
aguuuugaaaag

SEQ ID NO: 2546777 - RNA, 23 nt, Human
aguuuucugagaaagacuauuca

SEQ ID NO: 2546778 - RNA, 14 nt, Human
aguuuucuucugug

SEQ ID NO: 2546779 - RNA, 19 nt, Human
aguuuucuggcuggagccu

SEQ ID NO: 2546780 - RNA, 18 nt, Human
aguuuucuggcuggagcc

SEQ ID NO: 2546781 - RNA, 13 nt, Human
aguuuucuggcug

SEQ ID NO: 2546782 - RNA, 13 nt, Human
aguuuccucaggc

SEQ ID NO: 2546783 - RNA, 16 nt, Human
aguuuccaaaaccaga

SEQ ID NO: 2546784 - RNA, 20 nt, Human
aguuucauucuccugccugu

SEQ ID NO: 2546785 - RNA, 17 nt, Human
aguuucauucuccugcc

SEQ ID NO: 2546786 - RNA, 15 nt, Human
aguuuccaaaaccag

SEQ ID NO: 2546787 - RNA, 19 nt, Human
aguuuucugagaaagacua

SEQ ID NO: 2546788 - RNA, 17 nt, Human
aguuuccucaggcugcu

SEQ ID NO: 2546789 - RNA, 18 nt, Human
aguuuucugagaaagacu

SEQ ID NO: 2546790 - RNA, 15 nt, Human
aguuuugguugcuuu

SEQ ID NO: 2546791 - RNA, 21 nt, Human
aguuuugguugcuuuaauauc

SEQ ID NO: 2546792 - RNA, 22 nt, Human
aguuuugguugcuuuaauauca

SEQ ID NO: 2546793 - RNA, 19 nt, Human
aguuuuggaugcagugcuc

SEQ ID NO: 2546794 - RNA, 18 nt, Human
aguuuuggaugcagugcu

SEQ ID NO: 2546795 - RNA, 17 nt, Human
aguuuuggaugcagugc

SEQ ID NO: 2546796 - RNA, 15 nt, Human
aguuuuggaugcagu

SEQ ID NO: 2546797 - RNA, 19 nt, Human
aguuuugccagaacaguuu

SEQ ID NO: 2546798 - RNA, 16 nt, Human
aguuuugcauuuaugg

SEQ ID NO: 2546799 - RNA, 23 nt, Human
aguuuuuauggcuuuugugcauu

SEQ ID NO: 2546800 - RNA, 17 nt, Human
aguuuuuaccuaccaca

SEQ ID NO: 2546801 - RNA, 21 nt, Human
aguuuuuaccuaccacagugu

SEQ ID NO: 2546802 - RNA, 22 nt, Human
aguuuuuaccuaccacaguguc

SEQ ID NO: 2546803 - RNA, 15 nt, Human
aguuuuuacugaaca

SEQ ID NO: 2546804 - RNA, 23 nt, Human
aguuuuuaccuaccacagugucu

SEQ ID NO: 2546805 - RNA, 16 nt, Human
aguuuuuacuuucugu

SEQ ID NO: 2546806 - RNA, 13 nt, Human
aguuuugucuuga

SEQ ID NO: 2546807 - RNA, 12 nt, Human
aguuuugucuug

SEQ ID NO: 2546808 - RNA, 14 nt, Human
aguuuugucuugaa

SEQ ID NO: 2546809 - RNA, 19 nt, Human
aguuuuuaagguuauuuau

SEQ ID NO: 2546810 - RNA, 14 nt, Human
aguuuuguauucau

SEQ ID NO: 2546811 - RNA, 20 nt, Human
uuaagaaaaaggaugcacag

SEQ ID NO: 2546812 - RNA, 11 nt, Human
auaaaaucagc

SEQ ID NO: 2546813 - RNA, 19 nt, Human
uuaagaaaaaggaugcaca

SEQ ID NO: 2546814 - RNA, 21 nt, Human
uuaagaaaaaggaugcacaga

SEQ ID NO: 2546815 - RNA, 14 nt, Human
uuaagaaaagagau

SEQ ID NO: 2546816 - RNA, 15 nt, Human
auaaaaucagccaau

SEQ ID NO: 2546817 - RNA, 11 nt, Human
uuaagaaaauc

SEQ ID NO: 2546818 - RNA, 19 nt, Human
auaaaauacuauuuuuacu

SEQ ID NO: 2546819 - RNA, 16 nt, Human
auaaaauacuauuuuu

SEQ ID NO: 2546820 - RNA, 18 nt, Human
auaaaauaauucuaaagg

SEQ ID NO: 2546821 - RNA, 17 nt, Human
auaaaauaauucuaaag

SEQ ID NO: 2546822 - RNA, 16 nt, Human
auaaaauaauucuaaa

SEQ ID NO: 2546823 - RNA, 15 nt, Human
auaaaauaauuuuua

SEQ ID NO: 2546824 - RNA, 19 nt, Human
auaaaauauuuucauacag

SEQ ID NO: 2546825 - RNA, 21 nt, Human
auaaaauaugaagacauaaac

SEQ ID NO: 2546826 - RNA, 20 nt, Human
auaaaauagcaauccuaaag

SEQ ID NO: 2546827 - RNA, 18 nt, Human
auaaaagccuguuuaaga

SEQ ID NO: 2546828 - RNA, 13 nt, Human
auaaaauaaauau

SEQ ID NO: 2546829 - RNA, 14 nt, Human
auaaaauaaauaua

SEQ ID NO: 2546830 - RNA, 18 nt, Human
auaaaagcauaaaugcaa

SEQ ID NO: 2546831 - RNA, 20 nt, Human
auaaaagcauaaaugcaaac

SEQ ID NO: 2546832 - RNA, 12 nt, Human
auaaaauaauuu

SEQ ID NO: 2546833 - RNA, 21 nt, Human
auaaaauaaauauauauaaac

SEQ ID NO: 2546834 - RNA, 16 nt, Human
auaaaauaaauauaua

SEQ ID NO: 2546835 - RNA, 15 nt, Human
auaaaauaaauauau

SEQ ID NO: 2546836 - RNA, 23 nt, Human
auaaaauaaugggauuuucuuuu

SEQ ID NO: 2546837 - RNA, 15 nt, Human
auaaaauaauucuaa

SEQ ID NO: 2546838 - RNA, 13 nt, Human
auaaaagccuguu

SEQ ID NO: 2546839 - RNA, 19 nt, Human
auaaaagcaauuccaaccu

SEQ ID NO: 2546840 - RNA, 17 nt, Human
auaaaagcaauuccaac

SEQ ID NO: 2546841 - RNA, 22 nt, Human
auaaaagauggggucuguaaaa

SEQ ID NO: 2546842 - RNA, 20 nt, Human
auaaaagcaauuccaaccuu

SEQ ID NO: 2546843 - RNA, 16 nt, Human
auaaaagcagcaucug

SEQ ID NO: 2546844 - RNA, 20 nt, Human
auaaaagcagcaucugcuaa

SEQ ID NO: 2546845 - RNA, 15 nt, Human
auaaaagcauaaaug

SEQ ID NO: 2546846 - RNA, 21 nt, Human
auaaaagauggggucuguaaa

SEQ ID NO: 2546847 - RNA, 19 nt, Human
auaaaagauggggucugua

SEQ ID NO: 2546848 - RNA, 18 nt, Human
aguuuuuauuccuuguga

SEQ ID NO: 2546849 - RNA, 17 nt, Human
aguuuuuauggggcuga

SEQ ID NO: 2546850 - RNA, 15 nt, Human
aguuuuuauugcuug

SEQ ID NO: 2546851 - RNA, 22 nt, Human
uuaaucauuaggugugacugaa

SEQ ID NO: 2546852 - RNA, 23 nt, Human
uuaaucauuaggugugacugaau

SEQ ID NO: 2546853 - RNA, 21 nt, Human
uuaaucugggccagaauuuca

SEQ ID NO: 2546854 - RNA, 18 nt, Human
uuaaucaugaauguguaa

SEQ ID NO: 2546855 - RNA, 13 nt, Human
uuaaucauugccu

SEQ ID NO: 2546856 - RNA, 17 nt, Human
uuaaucaugaaugugua

SEQ ID NO: 2546857 - RNA, 13 nt, Human
uuaaucaugaaau

SEQ ID NO: 2546858 - RNA, 17 nt, Human
uuaaucaaguugaauug

SEQ ID NO: 2546859 - RNA, 21 nt, Human
uuaaucaucuauaaagaagaa

SEQ ID NO: 2546860 - RNA, 14 nt, Human
uuaaucaaguugaa

SEQ ID NO: 2546861 - RNA, 13 nt, Human
uuaaucauuaggu

SEQ ID NO: 2546862 - RNA, 22 nt, Human
uuaauauuuaaacagcaguguu

SEQ ID NO: 2546863 - RNA, 21 nt, Human
uuaauauuuaaacagcagugu

SEQ ID NO: 2546864 - RNA, 18 nt, Human
uuaauauuuaaacagcag

SEQ ID NO: 2546865 - RNA, 22 nt, Human
uuaauauuuauaggucacuuug

SEQ ID NO: 2546866 - RNA, 12 nt, Human
uuaauauuugcu

SEQ ID NO: 2546867 - RNA, 19 nt, Human
uuaauauuugcugacagcu

SEQ ID NO: 2546868 - RNA, 20 nt, Human
uuaauauuugcugacagcug

SEQ ID NO: 2546869 - RNA, 19 nt, Human
uuaaugaaagacuguacaa

SEQ ID NO: 2546870 - RNA, 15 nt, Human
uuaaugaaaauaaga

SEQ ID NO: 2546871 - RNA, 14 nt, Human
uuaaugaaaauguc

SEQ ID NO: 2546872 - RNA, 15 nt, Human
uuaaugaaaauguca

SEQ ID NO: 2546873 - RNA, 16 nt, Human
uuaaugaaaaugucag

SEQ ID NO: 2546874 - RNA, 22 nt, Human
uuaauugauuauucugauucca

SEQ ID NO: 2546875 - RNA, 12 nt, Human
uuaauugcuuug

SEQ ID NO: 2546876 - RNA, 13 nt, Human
uuaauugcuuuga

SEQ ID NO: 2546877 - RNA, 13 nt, Human
uuaauugaaauuu

SEQ ID NO: 2546878 - RNA, 21 nt, Human
uuaauugacuuauuuauauaa

SEQ ID NO: 2546879 - RNA, 16 nt, Human
uuaaucuguauuuccc

SEQ ID NO: 2546880 - RNA, 22 nt, Human
uuaaucugguuuauuuuuguuc

SEQ ID NO: 2546881 - RNA, 18 nt, Human
uuaaugaaagacuguaca

SEQ ID NO: 2546882 - RNA, 20 nt, Human
uuaaucuuuucacaaauaaa

SEQ ID NO: 2546883 - RNA, 19 nt, Human
uuaaucuuuucacaaauaa

SEQ ID NO: 2546884 - RNA, 18 nt, Human
uuaaucuuuucacaaaua

SEQ ID NO: 2546885 - RNA, 17 nt, Human
uuaaucuuuucacaaau

SEQ ID NO: 2546886 - RNA, 15 nt, Human
uuaagugcugcauuu

SEQ ID NO: 2546887 - RNA, 16 nt, Human
uuaagugcugcauuua

SEQ ID NO: 2546888 - RNA, 17 nt, Human
uuaauauuuaaacagca

SEQ ID NO: 2546889 - RNA, 16 nt, Human
uuaauauuuaaacagc

SEQ ID NO: 2546890 - RNA, 15 nt, Human
uuaauauuuaaacag

SEQ ID NO: 2546891 - RNA, 12 nt, Human
uuaauauuuaaa

SEQ ID NO: 2546892 - RNA, 19 nt, Human
uuaagugcugcauuuaaaa

SEQ ID NO: 2546893 - RNA, 14 nt, Human
uuaagucuguuuua

SEQ ID NO: 2546894 - RNA, 15 nt, Human
uuaagucuguuuuau

SEQ ID NO: 2546895 - RNA, 14 nt, Human
uuaagugcugcauu

SEQ ID NO: 2546896 - RNA, 19 nt, Human
uuaagucuaaauauuuccu

SEQ ID NO: 2546897 - RNA, 17 nt, Human
uuaaguauuuauauauu

SEQ ID NO: 2546898 - RNA, 19 nt, Human
uuaaguauuuauauauuua

SEQ ID NO: 2546899 - RNA, 14 nt, Human
uuaaguauguguaa

SEQ ID NO: 2546900 - RNA, 19 nt, Human
uuaaguaucuuuuuucaaa

SEQ ID NO: 2546901 - RNA, 14 nt, Human
uuaaguaucuuuuu

SEQ ID NO: 2546902 - RNA, 13 nt, Human
uuaaguauugcau

SEQ ID NO: 2546903 - RNA, 21 nt, Human
uuaaguauugcaucuguauaa

SEQ ID NO: 2546904 - RNA, 20 nt, Human
uuaaguauugcaucuguaua

SEQ ID NO: 2546905 - RNA, 19 nt, Human
uuaaguauugcaucuguau

SEQ ID NO: 2546906 - RNA, 15 nt, Human
uuaaguauugcaucu

SEQ ID NO: 2546907 - RNA, 11 nt, Human
uuaaguauuua

SEQ ID NO: 2546908 - RNA, 16 nt, Human
uuaaguauuuauauau

SEQ ID NO: 2546909 - RNA, 20 nt, Human
uuaagaagacugcauuauau

SEQ ID NO: 2546910 - RNA, 13 nt, Human
uuaagaagaaacu

SEQ ID NO: 2546911 - RNA, 14 nt, Human
uuaagaaaaucaua

SEQ ID NO: 2546912 - RNA, 22 nt, Human
uuaagaaaaucauauugcuucu

SEQ ID NO: 2546913 - RNA, 22 nt, Human
uuaagaaagacuaucuaaaugu

SEQ ID NO: 2546914 - RNA, 17 nt, Human
uuaaguaucugacaucu

SEQ ID NO: 2546915 - RNA, 14 nt, Human
uuaagguuauuuau

SEQ ID NO: 2546916 - RNA, 18 nt, Human
uuaaggugauauauuuaa

SEQ ID NO: 2546917 - RNA, 15 nt, Human
uuaaggguuaagaaa

SEQ ID NO: 2546918 - RNA, 9 nt, Human
uuaaggugg

SEQ ID NO: 2546919 - RNA, 21 nt, Human
uuaagggauggaaaaggaaga

SEQ ID NO: 2546920 - RNA, 18 nt, Human
uuaagggaagaauuccag

SEQ ID NO: 2546921 - RNA, 14 nt, Human
aguuggaaauauuc

SEQ ID NO: 2546922 - RNA, 14 nt, Human
aguugcuuguaaaa

SEQ ID NO: 2546923 - RNA, 14 nt, Human
aguugcugucauaa

SEQ ID NO: 2546924 - RNA, 19 nt, Human
aguuggagugaguguggcu

SEQ ID NO: 2546925 - RNA, 13 nt, Human
aguugggcuuccu

SEQ ID NO: 2546926 - RNA, 15 nt, Human
aguugggugagaaca

SEQ ID NO: 2546927 - RNA, 17 nt, Human
aguuggggucuggcagc

SEQ ID NO: 2546928 - RNA, 21 nt, Human
aguuggggucuggcagccucc

SEQ ID NO: 2546929 - RNA, 19 nt, Human
aguugggcuuccucauagu

SEQ ID NO: 2546930 - RNA, 17 nt, Human
aguugcugggagcugaa

SEQ ID NO: 2546931 - RNA, 19 nt, Human
uguuucaaacacaaaugca

SEQ ID NO: 2546932 - RNA, 18 nt, Human
uguuuauuuuucauauug

SEQ ID NO: 2546933 - RNA, 16 nt, Human
uguuuauuuuucauau

SEQ ID NO: 2546934 - RNA, 19 nt, Human
uguuuauuuuucauauugu

SEQ ID NO: 2546935 - RNA, 15 nt, Human
uguuuauuuuucaua

SEQ ID NO: 2546936 - RNA, 14 nt, Human
uguuuauuuuucau

SEQ ID NO: 2546937 - RNA, 12 nt, Human
uguuuauuuuuc

SEQ ID NO: 2546938 - RNA, 13 nt, Human
uguuucaaacaua

SEQ ID NO: 2546939 - RNA, 23 nt, Human
aguugccagucaccccggccacc

SEQ ID NO: 2546940 - RNA, 18 nt, Human
uguuucaaacacaaaugc

SEQ ID NO: 2546941 - RNA, 17 nt, Human
uguuucaaacacaaaug

SEQ ID NO: 2546942 - RNA, 16 nt, Human
uguuucaaaauaaaaa

SEQ ID NO: 2546943 - RNA, 14 nt, Human
aguuuaaauuguaa

SEQ ID NO: 2546944 - RNA, 18 nt, Human
aguuuaaaacagaagccu

SEQ ID NO: 2546945 - RNA, 22 nt, Human
aguuuaauggugccuucauuug

SEQ ID NO: 2546946 - RNA, 21 nt, Human
aguuuaaagcucgaaaacaau

SEQ ID NO: 2546947 - RNA, 12 nt, Human
aguuuaaagcaa

SEQ ID NO: 2546948 - RNA, 13 nt, Human
aguuggucccccu

SEQ ID NO: 2546949 - RNA, 11 nt, Human
aguuggucccc

SEQ ID NO: 2546950 - RNA, 17 nt, Human
aguuggucccccuucca

SEQ ID NO: 2546951 - RNA, 14 nt, Human
aguuuaaaaaaauu

SEQ ID NO: 2546952 - RNA, 15 nt, Human
aguuuaaaaaaauug

SEQ ID NO: 2546953 - RNA, 16 nt, Human
aguuuacaguaaauaa

SEQ ID NO: 2546954 - RNA, 14 nt, Human
aguuuacaguaaau

SEQ ID NO: 2546955 - RNA, 13 nt, Human
aguuuacaguaaa

SEQ ID NO: 2546956 - RNA, 23 nt, Human
aguuuacaaguguauaucagaaa

SEQ ID NO: 2546957 - RNA, 21 nt, Human
aguuuacaaguguauaucaga

SEQ ID NO: 2546958 - RNA, 19 nt, Human
aguuuacaaguguauauca

SEQ ID NO: 2546959 - RNA, 22 nt, Human
aguuuacaucauuuuuguaucu

SEQ ID NO: 2546960 - RNA, 22 nt, Human
aguuuacaguaaauaaauuguu

SEQ ID NO: 2546961 - RNA, 20 nt, Human
aguuuacaguaaauaaauug

SEQ ID NO: 2546962 - RNA, 18 nt, Human
aguuuacaguaaauaaau

SEQ ID NO: 2546963 - RNA, 23 nt, Human
uuaaaaaaaacaaaaagaacaaa

SEQ ID NO: 2546964 - RNA, 15 nt, Human
aguuuaauugacuua

SEQ ID NO: 2546965 - RNA, 14 nt, Human
aguuuaauugacuu

SEQ ID NO: 2546966 - RNA, 17 nt, Human
aguuuacaaguguauau

SEQ ID NO: 2546967 - RNA, 16 nt, Human
aguuuacaaguguaua

SEQ ID NO: 2546968 - RNA, 15 nt, Human
aguuuacaaguguau

SEQ ID NO: 2546969 - RNA, 18 nt, Human
aguuuaauugacuuauuu

SEQ ID NO: 2546970 - RNA, 14 nt, Human
uuaaaaaaaugaca

SEQ ID NO: 2546971 - RNA, 21 nt, Human
uuaaaaaucuaccuucuguag

SEQ ID NO: 2546972 - RNA, 23 nt, Human
uuaaaaaaauaaaacauuuuaaa

SEQ ID NO: 2546973 - RNA, 19 nt, Human
uuaaaaaaauaaaacauuu

SEQ ID NO: 2546974 - RNA, 18 nt, Human
uuaaaaaaauaaaacauu

SEQ ID NO: 2546975 - RNA, 21 nt, Human
uuaaaaaaaggcauuguuuga

SEQ ID NO: 2546976 - RNA, 17 nt, Human
uuaaaaaaauaaaacau

SEQ ID NO: 2546977 - RNA, 19 nt, Human
uuaaaaaaaggcauuguuu

SEQ ID NO: 2546978 - RNA, 13 nt, Human
uuaaaaaaaaucc

SEQ ID NO: 2546979 - RNA, 15 nt, Human
uuaaauacaaaacuu

SEQ ID NO: 2546980 - RNA, 21 nt, Human
uuaaaguguccauugacaugu

SEQ ID NO: 2546981 - RNA, 16 nt, Human
uuaaauacaaaacuuc

SEQ ID NO: 2546982 - RNA, 16 nt, Human
uuaaauacagacacua

SEQ ID NO: 2546983 - RNA, 17 nt, Human
uuaaauacagacacuaa

SEQ ID NO: 2546984 - RNA, 18 nt, Human
uuaaauacaaaacuucca

SEQ ID NO: 2546985 - RNA, 13 nt, Human
uuaaauaauguga

SEQ ID NO: 2546986 - RNA, 16 nt, Human
uuaaauaaugugaaac

SEQ ID NO: 2546987 - RNA, 18 nt, Human
uuaaauaaugugaaacug

SEQ ID NO: 2546988 - RNA, 19 nt, Human
uuaaauacagacacuaagu

SEQ ID NO: 2546989 - RNA, 18 nt, Human
uuaaauacagacacuaag

SEQ ID NO: 2546990 - RNA, 20 nt, Human
uuaaauacagacacuaaguu

SEQ ID NO: 2546991 - RNA, 18 nt, Human
uuaaauagaguuugcuau

SEQ ID NO: 2546992 - RNA, 13 nt, Human
uuaaauacagucu

SEQ ID NO: 2546993 - RNA, 19 nt, Human
uuaacaagcucccaggccg

SEQ ID NO: 2546994 - RNA, 19 nt, Human
uuaaauacgcacuacaugu

SEQ ID NO: 2546995 - RNA, 19 nt, Human
uuaaauagaguauaugcac

SEQ ID NO: 2546996 - RNA, 18 nt, Human
uuaacaauaacuacugug

SEQ ID NO: 2546997 - RNA, 19 nt, Human
uuaacaauaacuacugugu

SEQ ID NO: 2546998 - RNA, 20 nt, Human
uuaacaauaacuacuguguu

SEQ ID NO: 2546999 - RNA, 21 nt, Human
uuaacaauaacuacuguguuc

SEQ ID NO: 2547000 - RNA, 17 nt, Human
uuaacaaugauauaugg

SEQ ID NO: 2547001 - RNA, 23 nt, Human
uuaacaauaacuacuguguuccu

SEQ ID NO: 2547002 - RNA, 20 nt, Human
uuaacagaaauguacagcaa

SEQ ID NO: 2547003 - RNA, 13 nt, Human
uuaacacugagcu

SEQ ID NO: 2547004 - RNA, 18 nt, Human
aguuucauagcuaagaaa

SEQ ID NO: 2547005 - RNA, 15 nt, Human
aguuucauguacaag

SEQ ID NO: 2547006 - RNA, 18 nt, Human
aguuucauguacaagaug

SEQ ID NO: 2547007 - RNA, 21 nt, Human
aguuucauguacaagaugaag

SEQ ID NO: 2547008 - RNA, 14 nt, Human
uuaacagagacaga

SEQ ID NO: 2547009 - RNA, 18 nt, Human
aguuucagguguuuaguu

SEQ ID NO: 2547010 - RNA, 19 nt, Human
uuaacagaaauguacagca

SEQ ID NO: 2547011 - RNA, 18 nt, Human
uuaacaccuuuaaagugu

SEQ ID NO: 2547012 - RNA, 20 nt, Human
uuaacaccugauguguacau

SEQ ID NO: 2547013 - RNA, 19 nt, Human
uuaacaccugauguguaca

SEQ ID NO: 2547014 - RNA, 17 nt, Human
uuaacaccugaugugua

SEQ ID NO: 2547015 - RNA, 16 nt, Human
uuaacaccugaugugu

SEQ ID NO: 2547016 - RNA, 15 nt, Human
uuaacaccugaugug

SEQ ID NO: 2547017 - RNA, 22 nt, Human
uuaacacauuuuguauaauugu

SEQ ID NO: 2547018 - RNA, 17 nt, Human
uuaacacauuuuguaua

SEQ ID NO: 2547019 - RNA, 14 nt, Human
uuaacacauuuugu

SEQ ID NO: 2547020 - RNA, 12 nt, Human
uuaacacauuuu

SEQ ID NO: 2547021 - RNA, 23 nt, Human
uuaacaauuucuguccuucagau

SEQ ID NO: 2547022 - RNA, 15 nt, Human
uuaacaauuucuguc

SEQ ID NO: 2547023 - RNA, 16 nt, Human
uuaacaauuccaaagg

SEQ ID NO: 2547024 - RNA, 11 nt, Human
uuaacacauuu

SEQ ID NO: 2547025 - RNA, 16 nt, Human
uuaacacaaguccugu

SEQ ID NO: 2547026 - RNA, 13 nt, Human
uuaaacauaaaua

SEQ ID NO: 2547027 - RNA, 17 nt, Human
uuaaaggugucuuccuc

SEQ ID NO: 2547028 - RNA, 15 nt, Human
uuaaaggugucuucc

SEQ ID NO: 2547029 - RNA, 13 nt, Human
uuaaaguauauau

SEQ ID NO: 2547030 - RNA, 15 nt, Human
uuaaaguaugaaucu

SEQ ID NO: 2547031 - RNA, 16 nt, Human
uuaaaguauauauuua

SEQ ID NO: 2547032 - RNA, 13 nt, Human
uuaaacauugaag

SEQ ID NO: 2547033 - RNA, 15 nt, Human
uuaaacauugaagua

SEQ ID NO: 2547034 - RNA, 15 nt, Human
uuaaauaaugugaaa

SEQ ID NO: 2547035 - RNA, 22 nt, Human
uuaaaguguccauugacaugua

SEQ ID NO: 2547036 - RNA, 19 nt, Human
uuaaaguguccauugacau

SEQ ID NO: 2547037 - RNA, 19 nt, Human
uuaaagucgagcuuuucua

SEQ ID NO: 2547038 - RNA, 12 nt, Human
uuaaagugauua

SEQ ID NO: 2547039 - RNA, 17 nt, Human
uuaaagugauacugaaa

SEQ ID NO: 2547040 - RNA, 23 nt, Human
uuaaaguauguuauugcauaauu

SEQ ID NO: 2547041 - RNA, 18 nt, Human
uuaaaguauguuauugca

SEQ ID NO: 2547042 - RNA, 18 nt, Human
uuaaaguaugaaucuaug

SEQ ID NO: 2547043 - RNA, 13 nt, Human
uuaaaguauucuu

SEQ ID NO: 2547044 - RNA, 18 nt, Human
uuaaagucagguccaauu

SEQ ID NO: 2547045 - RNA, 14 nt, Human
uuaaaaaucucaaa

SEQ ID NO: 2547046 - RNA, 15 nt, Human
uuaaaaaucucaaau

SEQ ID NO: 2547047 - RNA, 16 nt, Human
uuaaaaaucucaaauu

SEQ ID NO: 2547048 - RNA, 20 nt, Human
uuaaacaaaauagaagcugu

SEQ ID NO: 2547049 - RNA, 18 nt, Human
uuaaaauuuuuuuagaaa

SEQ ID NO: 2547050 - RNA, 21 nt, Human
uuaaacagggcaucuccagga

SEQ ID NO: 2547051 - RNA, 16 nt, Human
uuaaacaggcccagca

SEQ ID NO: 2547052 - RNA, 15 nt, Human
uuaaacaggcccagc

SEQ ID NO: 2547053 - RNA, 18 nt, Human
uuaaacagugagccugaa

SEQ ID NO: 2547054 - RNA, 23 nt, Human
uuaaacagugagccugaauuuug

SEQ ID NO: 2547055 - RNA, 14 nt, Human
uuaaacagcagugu

SEQ ID NO: 2547056 - RNA, 12 nt, Human
uuaaacagcagu

SEQ ID NO: 2547057 - RNA, 16 nt, Human
uuaaacagauuuuuac

SEQ ID NO: 2547058 - RNA, 14 nt, Human
uuaaacaaagguug

SEQ ID NO: 2547059 - RNA, 16 nt, Human
uuaaacaccuccucau

SEQ ID NO: 2547060 - RNA, 13 nt, Human
uuaaacaccuccu

SEQ ID NO: 2547061 - RNA, 22 nt, Human
uuaaacaaauguaugauuacau

SEQ ID NO: 2547062 - RNA, 21 nt, Human
uuagccuucucuguucauuuc

SEQ ID NO: 2547063 - RNA, 14 nt, Human
uuagcggagacgga

SEQ ID NO: 2547064 - RNA, 15 nt, Human
uuagccuucucuguu

SEQ ID NO: 2547065 - RNA, 17 nt, Human
uuagccuucucuguuca

SEQ ID NO: 2547066 - RNA, 16 nt, Human
uuagccuuugucccag

SEQ ID NO: 2547067 - RNA, 12 nt, Human
uuagccuucucu

SEQ ID NO: 2547068 - RNA, 14 nt, Human
uuagccuucucugu

SEQ ID NO: 2547069 - RNA, 21 nt, Human
uuagcaugacaagccccaggc

SEQ ID NO: 2547070 - RNA, 22 nt, Human
uuagcaugacaagccccaggca

SEQ ID NO: 2547071 - RNA, 24 nt, Human
uuagcaugacaagccccaggcagg

SEQ ID NO: 2547072 - RNA, 18 nt, Human
uuagccaagugugguaga

SEQ ID NO: 2547073 - RNA, 17 nt, Human
uuagccaggaucauggu

SEQ ID NO: 2547074 - RNA, 15 nt, Human
uuagccaggaucaug

SEQ ID NO: 2547075 - RNA, 23 nt, Human
uuagccaggaucaugguguaaua

SEQ ID NO: 2547076 - RNA, 19 nt, Human
uuagccagguaaugugaau

SEQ ID NO: 2547077 - RNA, 16 nt, Human
uuagcauguuugcuga

SEQ ID NO: 2547078 - RNA, 17 nt, Human
uuagcauguguugaaaa

SEQ ID NO: 2547079 - RNA, 22 nt, Human
uuagcauuuaguccaaugucuu

SEQ ID NO: 2547080 - RNA, 13 nt, Human
uuagccacaaaau

SEQ ID NO: 2547081 - RNA, 15 nt, Human
auaauuuaaugcaug

SEQ ID NO: 2547082 - RNA, 22 nt, Human
uuagcaaagauaucucaucucu

SEQ ID NO: 2547083 - RNA, 20 nt, Human
uuagcaaagaguuaauauau

SEQ ID NO: 2547084 - RNA, 13 nt, Human
uuagcaaagaguu

SEQ ID NO: 2547085 - RNA, 19 nt, Human
uuagcaaagaguuaauaua

SEQ ID NO: 2547086 - RNA, 15 nt, Human
uuagcaaauacauau

SEQ ID NO: 2547087 - RNA, 14 nt, Human
uuagcaaacuuugu

SEQ ID NO: 2547088 - RNA, 18 nt, Human
uuagcaaauucuguuuuu

SEQ ID NO: 2547089 - RNA, 13 nt, Human
uuagggagaaaau

SEQ ID NO: 2547090 - RNA, 17 nt, Human
uuagggagaaaauucaa

SEQ ID NO: 2547091 - RNA, 18 nt, Human
uuagguuggcaaaaaggc

SEQ ID NO: 2547092 - RNA, 21 nt, Human
uuaggugugacugaauuucuu

SEQ ID NO: 2547093 - RNA, 16 nt, Human
uuaggugaggaagcaa

SEQ ID NO: 2547094 - RNA, 16 nt, Human
uuaggugugacugaau

SEQ ID NO: 2547095 - RNA, 15 nt, Human
uuaggugaggaagca

SEQ ID NO: 2547096 - RNA, 14 nt, Human
uuagggagagaaga

SEQ ID NO: 2547097 - RNA, 14 nt, Human
uuagggaagggccu

SEQ ID NO: 2547098 - RNA, 23 nt, Human
uuagggacucaauuucuccccag

SEQ ID NO: 2547099 - RNA, 20 nt, Human
uuagggaaggauacaaaagc

SEQ ID NO: 2547100 - RNA, 15 nt, Human
uuagggaaaacauuc

SEQ ID NO: 2547101 - RNA, 17 nt, Human
uuagggaaaacauucca

SEQ ID NO: 2547102 - RNA, 15 nt, Human
uuaguuucuccaagc

SEQ ID NO: 2547103 - RNA, 19 nt, Human
uuaguuucuguucugugga

SEQ ID NO: 2547104 - RNA, 15 nt, Human
uuaguuucuguucug

SEQ ID NO: 2547105 - RNA, 21 nt, Human
uuaguuucuguucuguggaaa

SEQ ID NO: 2547106 - RNA, 20 nt, Human
uuaguuucuguucuguggaa

SEQ ID NO: 2547107 - RNA, 14 nt, Human
uuaguuucuuuggg

SEQ ID NO: 2547108 - RNA, 22 nt, Human
uuaguuugcaguuacacuaaaa

SEQ ID NO: 2547109 - RNA, 14 nt, Human
uuaguuuggauucu

SEQ ID NO: 2547110 - RNA, 14 nt, Human
uuagggaaaacauu

SEQ ID NO: 2547111 - RNA, 18 nt, Human
uuaguuuggauucuuaug

SEQ ID NO: 2547112 - RNA, 15 nt, Human
uuaguuuguguguug

SEQ ID NO: 2547113 - RNA, 22 nt, Human
uuaguuuguaugccaagugaga

SEQ ID NO: 2547114 - RNA, 12 nt, Human
uuaguaacaugu

SEQ ID NO: 2547115 - RNA, 24 nt, Human
uuaguaacaugaggggacauuuug

SEQ ID NO: 2547116 - RNA, 15 nt, Human
uuaguaaagaaauga

SEQ ID NO: 2547117 - RNA, 14 nt, Human
uuaguaaagaaaug

SEQ ID NO: 2547118 - RNA, 18 nt, Human
uuagguggcaagcuguga

SEQ ID NO: 2547119 - RNA, 16 nt, Human
uuagguuuuguacaau

SEQ ID NO: 2547120 - RNA, 19 nt, Human
uuagguuuuuuuguauagu

SEQ ID NO: 2547121 - RNA, 14 nt, Human
uuagguuuuguaca

SEQ ID NO: 2547122 - RNA, 22 nt, Human
uuagguuuuguacaauugaacu

SEQ ID NO: 2547123 - RNA, 15 nt, Human
auaaugcgugcauac

SEQ ID NO: 2547124 - RNA, 17 nt, Human
auaaugccggugagaau

SEQ ID NO: 2547125 - RNA, 11 nt, Human
auaauucugua

SEQ ID NO: 2547126 - RNA, 22 nt, Human
auaaugaugaugggaauugugu

SEQ ID NO: 2547127 - RNA, 22 nt, Human
auaaugaggaugauuauuuuca

SEQ ID NO: 2547128 - RNA, 13 nt, Human
auaaucugauuug

SEQ ID NO: 2547129 - RNA, 15 nt, Human
auaaugaaugaaaca

SEQ ID NO: 2547130 - RNA, 22 nt, Human
auaauugacaggauuauuggaa

SEQ ID NO: 2547131 - RNA, 22 nt, Human
auaauucuguacauagccuaua

SEQ ID NO: 2547132 - RNA, 14 nt, Human
auaauucuguacau

SEQ ID NO: 2547133 - RNA, 13 nt, Human
auaauucuguaca

SEQ ID NO: 2547134 - RNA, 14 nt, Human
auaauucuguaaau

SEQ ID NO: 2547135 - RNA, 13 nt, Human
auaauucuguaaa

SEQ ID NO: 2547136 - RNA, 12 nt, Human
auaauucuguaa

SEQ ID NO: 2547137 - RNA, 18 nt, Human
auaaugccggugagaaua

SEQ ID NO: 2547138 - RNA, 17 nt, Human
auaauucuguacugauu

SEQ ID NO: 2547139 - RNA, 15 nt, Human
auaauucuguacuga

SEQ ID NO: 2547140 - RNA, 23 nt, Human
auaauucuguacauagccuauau

SEQ ID NO: 2547141 - RNA, 14 nt, Human
auaauucuuguaua

SEQ ID NO: 2547142 - RNA, 19 nt, Human
auaauucuuguauauuaug

SEQ ID NO: 2547143 - RNA, 18 nt, Human
auaauccuaaacauauga

SEQ ID NO: 2547144 - RNA, 17 nt, Human
auaaucccagcacuuug

SEQ ID NO: 2547145 - RNA, 16 nt, Human
auaaucccagcacuuu

SEQ ID NO: 2547146 - RNA, 20 nt, Human
auaauaguuuacauguagua

SEQ ID NO: 2547147 - RNA, 14 nt, Human
auaauaguuuacau

SEQ ID NO: 2547148 - RNA, 20 nt, Human
auaaucuggacuccucuguc

SEQ ID NO: 2547149 - RNA, 19 nt, Human
auaaucuggacuccucugu

SEQ ID NO: 2547150 - RNA, 18 nt, Human
auaaucuggacuccucug

SEQ ID NO: 2547151 - RNA, 15 nt, Human
auaaucuagaacaca

SEQ ID NO: 2547152 - RNA, 12 nt, Human
auaaucuagaac

SEQ ID NO: 2547153 - RNA, 22 nt, Human
auaaucggcccacagcucccac

SEQ ID NO: 2547154 - RNA, 18 nt, Human
auaaucucuccauucccg

SEQ ID NO: 2547155 - RNA, 21 nt, Human
auaaucuauuucuaugagaaa

SEQ ID NO: 2547156 - RNA, 17 nt, Human
auaaucuauuucuauga

SEQ ID NO: 2547157 - RNA, 14 nt, Human
auaaucuauuucua

SEQ ID NO: 2547158 - RNA, 14 nt, Human
auaauaaaguguuu

SEQ ID NO: 2547159 - RNA, 18 nt, Human
auaagagaaagaaaauga

SEQ ID NO: 2547160 - RNA, 14 nt, Human
auaagagaaagaaa

SEQ ID NO: 2547161 - RNA, 15 nt, Human
auaagagaaucaaca

SEQ ID NO: 2547162 - RNA, 19 nt, Human
auaagagagucauaaaccu

SEQ ID NO: 2547163 - RNA, 20 nt, Human
auaagagagaacaacuacug

SEQ ID NO: 2547164 - RNA, 16 nt, Human
auaagagagucauaaa

SEQ ID NO: 2547165 - RNA, 20 nt, Human
auaauaaaaggaaaagcaaa

SEQ ID NO: 2547166 - RNA, 15 nt, Human
auaauaaaaggaaaa

SEQ ID NO: 2547167 - RNA, 14 nt, Human
auaauaaaaggaaa

SEQ ID NO: 2547168 - RNA, 12 nt, Human
auaauaaacuuu

SEQ ID NO: 2547169 - RNA, 19 nt, Human
auaauaaacuuuuuugaaa

SEQ ID NO: 2547170 - RNA, 22 nt, Human
auaagaccaccaccucagagua

SEQ ID NO: 2547171 - RNA, 17 nt, Human
auaagacauaacguuuu

SEQ ID NO: 2547172 - RNA, 23 nt, Human
auaagacauaacguuuuuccuuu

SEQ ID NO: 2547173 - RNA, 21 nt, Human
auaagacggauuuauuuuucc

SEQ ID NO: 2547174 - RNA, 17 nt, Human
auaagacggauuuauuu

SEQ ID NO: 2547175 - RNA, 17 nt, Human
auaagaauuauuuugau

SEQ ID NO: 2547176 - RNA, 14 nt, Human
auaagacauaacgu

SEQ ID NO: 2547177 - RNA, 16 nt, Human
auaagaaugcugguuu

SEQ ID NO: 2547178 - RNA, 19 nt, Human
auaagaaugcugguuuucc

SEQ ID NO: 2547179 - RNA, 22 nt, Human
auaagaaugcugguuuuccuaa

SEQ ID NO: 2547180 - RNA, 18 nt, Human
auaagaaugguugccuua

SEQ ID NO: 2547181 - RNA, 21 nt, Human
auaagaaugcugguuuuccua

SEQ ID NO: 2547182 - RNA, 21 nt, Human
auaagaauaaaauguugaaaa

SEQ ID NO: 2547183 - RNA, 23 nt, Human
uuagacagucaaggaguggcuua

SEQ ID NO: 2547184 - RNA, 18 nt, Human
auaauacaccacuacauu

SEQ ID NO: 2547185 - RNA, 20 nt, Human
auaauacaccacuacauucu

SEQ ID NO: 2547186 - RNA, 16 nt, Human
auaauaaagcuacuga

SEQ ID NO: 2547187 - RNA, 15 nt, Human
auaauaaauguacau

SEQ ID NO: 2547188 - RNA, 12 nt, Human
auaauacaccac

SEQ ID NO: 2547189 - RNA, 19 nt, Human
auaauacuugcuuuggaaa

SEQ ID NO: 2547190 - RNA, 12 nt, Human
auaauagaagaa

SEQ ID NO: 2547191 - RNA, 13 nt, Human
auaauagaagaac

SEQ ID NO: 2547192 - RNA, 22 nt, Human
auaauacuauauuuauacugua

SEQ ID NO: 2547193 - RNA, 16 nt, Human
uuagaaacauaaauaa

SEQ ID NO: 2547194 - RNA, 13 nt, Human
uuagaaacauaaa

SEQ ID NO: 2547195 - RNA, 14 nt, Human
uuagaaaccuuaau

SEQ ID NO: 2547196 - RNA, 17 nt, Human
uuagaaacaugguuuug

SEQ ID NO: 2547197 - RNA, 18 nt, Human
uuagaaaccuuaauaugu

SEQ ID NO: 2547198 - RNA, 18 nt, Human
uuacugaagguaaaauug

SEQ ID NO: 2547199 - RNA, 19 nt, Human
uuacugaagguaaaauuga

SEQ ID NO: 2547200 - RNA, 12 nt, Human
uuacugaaugca

SEQ ID NO: 2547201 - RNA, 20 nt, Human
uuacugaagguaaaauugaa

SEQ ID NO: 2547202 - RNA, 16 nt, Human
uuagaaagcauuugaa

SEQ ID NO: 2547203 - RNA, 15 nt, Human
uuagaaagcauuuga

SEQ ID NO: 2547204 - RNA, 14 nt, Human
uuagaaagcauuug

SEQ ID NO: 2547205 - RNA, 13 nt, Human
uuagaaagcauuu

SEQ ID NO: 2547206 - RNA, 12 nt, Human
uuagaaagcauu

SEQ ID NO: 2547207 - RNA, 22 nt, Human
uuagaaagaagcccaauauuau

SEQ ID NO: 2547208 - RNA, 16 nt, Human
uuaccuuguauacugu

SEQ ID NO: 2547209 - RNA, 16 nt, Human
uuacucuccaaccugg

SEQ ID NO: 2547210 - RNA, 22 nt, Human
uuacucugaagggcaucaugca

SEQ ID NO: 2547211 - RNA, 19 nt, Human
uuacucuccaaccuggaca

SEQ ID NO: 2547212 - RNA, 13 nt, Human
uuacucugaaggg

SEQ ID NO: 2547213 - RNA, 23 nt, Human
uuacucuucaguuaagccuuugg

SEQ ID NO: 2547214 - RNA, 23 nt, Human
uuacugaacaaucaaagcacuug

SEQ ID NO: 2547215 - RNA, 16 nt, Human
uuacugaagccuuucu

SEQ ID NO: 2547216 - RNA, 17 nt, Human
uuagaaauugcauuucc

SEQ ID NO: 2547217 - RNA, 16 nt, Human
uuagaaaugcagaauc

SEQ ID NO: 2547218 - RNA, 18 nt, Human
uuagaaaugaccaauauu

SEQ ID NO: 2547219 - RNA, 21 nt, Human
uuagaaagcauuugaaugcau

SEQ ID NO: 2547220 - RNA, 19 nt, Human
uuagaaagcauuugaaugc

SEQ ID NO: 2547221 - RNA, 18 nt, Human
uuagaaagcauuugaaug

SEQ ID NO: 2547222 - RNA, 17 nt, Human
uuagaaagcauuugaau

SEQ ID NO: 2547223 - RNA, 21 nt, Human
uuagaaaguagccacguaugg

SEQ ID NO: 2547224 - RNA, 23 nt, Human
uuagaaagcauuugaaugcauuu

SEQ ID NO: 2547225 - RNA, 17 nt, Human
uuagaaaugaccaauau

SEQ ID NO: 2547226 - RNA, 13 nt, Human
uuagacagucccu

SEQ ID NO: 2547227 - RNA, 20 nt, Human
uuagacagagucucacuguu

SEQ ID NO: 2547228 - RNA, 13 nt, Human
uuagacagagucu

SEQ ID NO: 2547229 - RNA, 22 nt, Human
uuagaacaggcaagugaagaaa

SEQ ID NO: 2547230 - RNA, 20 nt, Human
uuagaacaggcaagugaaga

SEQ ID NO: 2547231 - RNA, 18 nt, Human
uuagaacaggcaagugaa

SEQ ID NO: 2547232 - RNA, 17 nt, Human
uuagaaauuuauuuccu

SEQ ID NO: 2547233 - RNA, 15 nt, Human
auaacuuauauugua

SEQ ID NO: 2547234 - RNA, 17 nt, Human
uuacaggcacaaaauga

SEQ ID NO: 2547235 - RNA, 15 nt, Human
uuacaggcaccgaga

SEQ ID NO: 2547236 - RNA, 17 nt, Human
uuacaggcaccgagaau

SEQ ID NO: 2547237 - RNA, 20 nt, Human
auaacuuaaaaauguaaaua

SEQ ID NO: 2547238 - RNA, 19 nt, Human
auaacuuaaaaauguaaau

SEQ ID NO: 2547239 - RNA, 21 nt, Human
auaacuuaaaaauguaaauau

SEQ ID NO: 2547240 - RNA, 12 nt, Human
auaacuuaaaau

SEQ ID NO: 2547241 - RNA, 16 nt, Human
auaacuuaaaauauuu

SEQ ID NO: 2547242 - RNA, 16 nt, Human
uuacaggcuccugcca

SEQ ID NO: 2547243 - RNA, 18 nt, Human
uuacaggcuccugccacc

SEQ ID NO: 2547244 - RNA, 24 nt, Human
uuacaggcgugagccaccgugccu

SEQ ID NO: 2547245 - RNA, 18 nt, Human
uuacaggcaccgagaaug

SEQ ID NO: 2547246 - RNA, 24 nt, Human
uuacaggcaccgagaauguuguau

SEQ ID NO: 2547247 - RNA, 19 nt, Human
uuacccucauguucuuaau

SEQ ID NO: 2547248 - RNA, 20 nt, Human
uuacccauauccccucuccc

SEQ ID NO: 2547249 - RNA, 14 nt, Human
uuaccccuuagccu

SEQ ID NO: 2547250 - RNA, 19 nt, Human
uuacagggagccuccugcc

SEQ ID NO: 2547251 - RNA, 18 nt, Human
uuacagggagccuccugc

SEQ ID NO: 2547252 - RNA, 17 nt, Human
uuacagggagccuccug

SEQ ID NO: 2547253 - RNA, 16 nt, Human
uuacagggagccuccu

SEQ ID NO: 2547254 - RNA, 15 nt, Human
uuacagggagccucc

SEQ ID NO: 2547255 - RNA, 14 nt, Human
uuacagggagccuc

SEQ ID NO: 2547256 - RNA, 18 nt, Human
uuacccauauccccucuc

SEQ ID NO: 2547257 - RNA, 17 nt, Human
uuacccauauccccucu

SEQ ID NO: 2547258 - RNA, 16 nt, Human
uuacccauauccccuc

SEQ ID NO: 2547259 - RNA, 13 nt, Human
uuacccauauccc

SEQ ID NO: 2547260 - RNA, 16 nt, Human
uuacccagaguuuuua

SEQ ID NO: 2547261 - RNA, 22 nt, Human
uuacccagagaauauauacauu

SEQ ID NO: 2547262 - RNA, 21 nt, Human
uuacccagagaauauauacau

SEQ ID NO: 2547263 - RNA, 20 nt, Human
uuaccuuugacaaagguaaa

SEQ ID NO: 2547264 - RNA, 13 nt, Human
uuaccuuugacaa

SEQ ID NO: 2547265 - RNA, 15 nt, Human
uuaccuuauugcacu

SEQ ID NO: 2547266 - RNA, 14 nt, Human
uuaccuucaauaaa

SEQ ID NO: 2547267 - RNA, 15 nt, Human
uuaccuucaauaaag

SEQ ID NO: 2547268 - RNA, 16 nt, Human
uuaccuucaauaaagu

SEQ ID NO: 2547269 - RNA, 17 nt, Human
uuaccuucaauaaagua

SEQ ID NO: 2547270 - RNA, 18 nt, Human
uuaccuucaauaaaguau

SEQ ID NO: 2547271 - RNA, 19 nt, Human
uuaccuucaauaaaguauc

SEQ ID NO: 2547272 - RNA, 22 nt, Human
uuaccuuagauuagcucuggac

SEQ ID NO: 2547273 - RNA, 12 nt, Human
uuaccuccugcc

SEQ ID NO: 2547274 - RNA, 13 nt, Human
uuaccuccugccc

SEQ ID NO: 2547275 - RNA, 14 nt, Human
uuaccuccugccca

SEQ ID NO: 2547276 - RNA, 15 nt, Human
uuaccuccugcccag

SEQ ID NO: 2547277 - RNA, 11 nt, Human
uuaccuccuga

SEQ ID NO: 2547278 - RNA, 19 nt, Human
uuaccuccugagaaaaaag

SEQ ID NO: 2547279 - RNA, 20 nt, Human
uuaccuaguagucauuucau

SEQ ID NO: 2547280 - RNA, 13 nt, Human
uuaccuacuuuga

SEQ ID NO: 2547281 - RNA, 23 nt, Human
uuaccuacuuugacuuuuugcau

SEQ ID NO: 2547282 - RNA, 17 nt, Human
uuaccuaccacaguguc

SEQ ID NO: 2547283 - RNA, 18 nt, Human
uuaccuaccacagugucu

SEQ ID NO: 2547284 - RNA, 19 nt, Human
uuaccuaccacaugccaag

SEQ ID NO: 2547285 - RNA, 21 nt, Human
uuaccuaccacagugucugua

SEQ ID NO: 2547286 - RNA, 22 nt, Human
uuacccucaggcauaggccugg

SEQ ID NO: 2547287 - RNA, 16 nt, Human
uuaccccuuagccucc

SEQ ID NO: 2547288 - RNA, 16 nt, Human
uuaccuaccacagugu

SEQ ID NO: 2547289 - RNA, 16 nt, Human
uuacccuccuguaaau

SEQ ID NO: 2547290 - RNA, 22 nt, Human
auaacgauaaaagacagugaaa

SEQ ID NO: 2547291 - RNA, 14 nt, Human
auaacguauaaaag

SEQ ID NO: 2547292 - RNA, 21 nt, Human
auaacgccccagauaccagcc

SEQ ID NO: 2547293 - RNA, 13 nt, Human
auaacgccccaga

SEQ ID NO: 2547294 - RNA, 23 nt, Human
auaaccuauuuugaaaaauuccu

SEQ ID NO: 2547295 - RNA, 21 nt, Human
auaacggaucagaaauacaga

SEQ ID NO: 2547296 - RNA, 20 nt, Human
auaacggaucagaaauacag

SEQ ID NO: 2547297 - RNA, 19 nt, Human
auaaaggccccaaauacca

SEQ ID NO: 2547298 - RNA, 13 nt, Human
auaacguuuuucc

SEQ ID NO: 2547299 - RNA, 15 nt, Human
auaacguuuuuccuu

SEQ ID NO: 2547300 - RNA, 18 nt, Human
auaacguuuuuccuuuaa

SEQ ID NO: 2547301 - RNA, 17 nt, Human
auaacguuuuuccuuua

SEQ ID NO: 2547302 - RNA, 13 nt, Human
auaacugugaagu

SEQ ID NO: 2547303 - RNA, 18 nt, Human
auaacuguuauuuauaau

SEQ ID NO: 2547304 - RNA, 20 nt, Human
auaacuguuauuuauaauca

SEQ ID NO: 2547305 - RNA, 22 nt, Human
auaacuguuauuuauaaucacu

SEQ ID NO: 2547306 - RNA, 12 nt, Human
auaacuuaaaaa

SEQ ID NO: 2547307 - RNA, 16 nt, Human
auaacuuaaaaaaaug

SEQ ID NO: 2547308 - RNA, 19 nt, Human
auaacuuaaaaaaaugaca

SEQ ID NO: 2547309 - RNA, 15 nt, Human
auaaaucaaugucac

SEQ ID NO: 2547310 - RNA, 19 nt, Human
auaaauucaccuagucuaa

SEQ ID NO: 2547311 - RNA, 15 nt, Human
auaaauucaccuagu

SEQ ID NO: 2547312 - RNA, 14 nt, Human
auaaauuauuuauu

SEQ ID NO: 2547313 - RNA, 11 nt, Human
auaaauuauuu

SEQ ID NO: 2547314 - RNA, 20 nt, Human
auaaauuccucuuugcuuug

SEQ ID NO: 2547315 - RNA, 22 nt, Human
auaaauucccuggccuuucaua

SEQ ID NO: 2547316 - RNA, 13 nt, Human
auaaauuccucuu

SEQ ID NO: 2547317 - RNA, 22 nt, Human
auaaauucagauauauuuuuca

SEQ ID NO: 2547318 - RNA, 12 nt, Human
auaaauucagau

SEQ ID NO: 2547319 - RNA, 13 nt, Human
auaaauucagaua

SEQ ID NO: 2547320 - RNA, 16 nt, Human
auaaauucagauauau

SEQ ID NO: 2547321 - RNA, 21 nt, Human
auaaauucccuggccuuucau

SEQ ID NO: 2547322 - RNA, 15 nt, Human
auaaauuccacugga

SEQ ID NO: 2547323 - RNA, 23 nt, Human
auaaccguuuccuuucauuuacu

SEQ ID NO: 2547324 - RNA, 18 nt, Human
auaaccuauaugauuuau

SEQ ID NO: 2547325 - RNA, 13 nt, Human
auaaccuauauga

SEQ ID NO: 2547326 - RNA, 12 nt, Human
auaaccccaccc

SEQ ID NO: 2547327 - RNA, 20 nt, Human
auaaccccagcucccuagga

SEQ ID NO: 2547328 - RNA, 13 nt, Human
auaaauaaaaaua

SEQ ID NO: 2547329 - RNA, 17 nt, Human
auaaagguucaugcaaa

SEQ ID NO: 2547330 - RNA, 17 nt, Human
auaaaguaaagcuaaaa

SEQ ID NO: 2547331 - RNA, 13 nt, Human
auaaaguaguaaa

SEQ ID NO: 2547332 - RNA, 16 nt, Human
auaaagguugacaaua

SEQ ID NO: 2547333 - RNA, 21 nt, Human
auaaagguugacaauaaaugu

SEQ ID NO: 2547334 - RNA, 14 nt, Human
auaaaguaaagcua

SEQ ID NO: 2547335 - RNA, 22 nt, Human
auaaagguugacaauaaaugug

SEQ ID NO: 2547336 - RNA, 19 nt, Human
uuaauuggcagcagauuuu

SEQ ID NO: 2547337 - RNA, 18 nt, Human
uuaauuggcagcagauuu

SEQ ID NO: 2547338 - RNA, 16 nt, Human
uuaauuggcagcagau

SEQ ID NO: 2547339 - RNA, 15 nt, Human
auaaagguucaugca

SEQ ID NO: 2547340 - RNA, 20 nt, Human
auaaaggugguaugugugug

SEQ ID NO: 2547341 - RNA, 21 nt, Human
auaaaggugguaugugugugu

SEQ ID NO: 2547342 - RNA, 14 nt, Human
auaaaggccuuuuu

SEQ ID NO: 2547343 - RNA, 19 nt, Human
auaaaggugguaugugugu

SEQ ID NO: 2547344 - RNA, 14 nt, Human
auaaauaaaaauaa

SEQ ID NO: 2547345 - RNA, 16 nt, Human
auaaaguaguaaaaau

SEQ ID NO: 2547346 - RNA, 14 nt, Human
auaaauagcuauau

SEQ ID NO: 2547347 - RNA, 15 nt, Human
auaaauagcuauauc

SEQ ID NO: 2547348 - RNA, 21 nt, Human
auaaauagcuauauccaugua

SEQ ID NO: 2547349 - RNA, 15 nt, Human
auaaauaguuuauga

SEQ ID NO: 2547350 - RNA, 21 nt, Human
auaaauauauauaaaccuaaa

SEQ ID NO: 2547351 - RNA, 16 nt, Human
auaaauauauauaaac

SEQ ID NO: 2547352 - RNA, 15 nt, Human
auaaauauauauaaa

SEQ ID NO: 2547353 - RNA, 12 nt, Human
auaaauauauau

SEQ ID NO: 2547354 - RNA, 23 nt, Human
auaaauauauaaaaagaaaagau

SEQ ID NO: 2547355 - RNA, 16 nt, Human
auaaauaggagaggau

SEQ ID NO: 2547356 - RNA, 18 nt, Human
auaaauauuuuugccaua

SEQ ID NO: 2547357 - RNA, 20 nt, Human
auaaauauuuauguagaugu

SEQ ID NO: 2547358 - RNA, 14 nt, Human
auaaauauuuaugu

SEQ ID NO: 2547359 - RNA, 14 nt, Human
auaaaucaauguca

SEQ ID NO: 2547360 - RNA, 22 nt, Human
auaaauauauauaaaccuaaaa

SEQ ID NO: 2547361 - RNA, 15 nt, Human
auggcuauaaauaua

SEQ ID NO: 2547362 - RNA, 14 nt, Human
auggcuauaaauau

SEQ ID NO: 2547363 - RNA, 13 nt, Human
auggcuauaaaua

SEQ ID NO: 2547364 - RNA, 22 nt, Human
auggcuagaauauccuacuucu

SEQ ID NO: 2547365 - RNA, 21 nt, Human
auggcuauaaauauauaaaaa

SEQ ID NO: 2547366 - RNA, 16 nt, Human
auggcuauaaauauau

SEQ ID NO: 2547367 - RNA, 17 nt, Human
uuugcaagucauggcug

SEQ ID NO: 2547368 - RNA, 15 nt, Human
auggcuauaggugcu

SEQ ID NO: 2547369 - RNA, 22 nt, Human
uuugcaagugaagguuuacaau

SEQ ID NO: 2547370 - RNA, 21 nt, Human
uuugcaagugaagguuuacaa

SEQ ID NO: 2547371 - RNA, 16 nt, Human
uuugcaagugaagguu

SEQ ID NO: 2547372 - RNA, 15 nt, Human
uuugcaagugaaggu

SEQ ID NO: 2547373 - RNA, 13 nt, Human
uuugcaagugaag

SEQ ID NO: 2547374 - RNA, 21 nt, Human
uuugcaagucauggcugugcc

SEQ ID NO: 2547375 - RNA, 18 nt, Human
uuugcaagucauggcugu

SEQ ID NO: 2547376 - RNA, 19 nt, Human
uuugcaauggcuauauggc

SEQ ID NO: 2547377 - RNA, 19 nt, Human
uuugcacauguuuccucua

SEQ ID NO: 2547378 - RNA, 12 nt, Human
uuugcacagcuc

SEQ ID NO: 2547379 - RNA, 16 nt, Human
uuugcacagcucuccg

SEQ ID NO: 2547380 - RNA, 22 nt, Human
uuugccauguuggccaggcugg

SEQ ID NO: 2547381 - RNA, 21 nt, Human
uuugcccaacaccagccccug

SEQ ID NO: 2547382 - RNA, 18 nt, Human
uuugcccaacaccagccc

SEQ ID NO: 2547383 - RNA, 16 nt, Human
uuugcccaacaccagc

SEQ ID NO: 2547384 - RNA, 14 nt, Human
uuugcccaacacca

SEQ ID NO: 2547385 - RNA, 18 nt, Human
uuugcccagaaagaagau

SEQ ID NO: 2547386 - RNA, 23 nt, Human
uuugcccaacaccagccccugcc

SEQ ID NO: 2547387 - RNA, 18 nt, Human
uuugcuaucuuaauuuug

SEQ ID NO: 2547388 - RNA, 13 nt, Human
uuugcuaguuuuu

SEQ ID NO: 2547389 - RNA, 13 nt, Human
uuugcccucccau

SEQ ID NO: 2547390 - RNA, 15 nt, Human
uuugcccuuaaggac

SEQ ID NO: 2547391 - RNA, 21 nt, Human
uuugcccugguagggcaguaa

SEQ ID NO: 2547392 - RNA, 19 nt, Human
uuugcccugguagggcagu

SEQ ID NO: 2547393 - RNA, 19 nt, Human
uuugcccugguuucacugg

SEQ ID NO: 2547394 - RNA, 12 nt, Human
uuugcucaugga

SEQ ID NO: 2547395 - RNA, 11 nt, Human
uuugcucaugg

SEQ ID NO: 2547396 - RNA, 19 nt, Human
uuugcuaugagcuggggau

SEQ ID NO: 2547397 - RNA, 19 nt, Human
uuugcuaucuuaauuuugg

SEQ ID NO: 2547398 - RNA, 13 nt, Human
uuugcuauugaca

SEQ ID NO: 2547399 - RNA, 20 nt, Human
uuugcuauugacaagucauu

SEQ ID NO: 2547400 - RNA, 23 nt, Human
uuugcuauugacaagucauuuua

SEQ ID NO: 2547401 - RNA, 23 nt, Human
uuugcucagugucuggcugcaga

SEQ ID NO: 2547402 - RNA, 23 nt, Human
uuugcucacacgggguauuuuag

SEQ ID NO: 2547403 - RNA, 16 nt, Human
uuugcuauuguaaaua

SEQ ID NO: 2547404 - RNA, 16 nt, Human
uuugcucaccuggggu

SEQ ID NO: 2547405 - RNA, 13 nt, Human
uuugcucauggaa

SEQ ID NO: 2547406 - RNA, 21 nt, Human
uuugcuguagaagauggcacu

SEQ ID NO: 2547407 - RNA, 21 nt, Human
uuugcugugaggcuguccugu

SEQ ID NO: 2547408 - RNA, 19 nt, Human
uuugcugugaggcuguccu

SEQ ID NO: 2547409 - RNA, 12 nt, Human
uuugcuuagaaa

SEQ ID NO: 2547410 - RNA, 16 nt, Human
uuugcuuagaaaagaa

SEQ ID NO: 2547411 - RNA, 17 nt, Human
uuugcugugaggcuguc

SEQ ID NO: 2547412 - RNA, 18 nt, Human
uuugcuguauauuuguga

SEQ ID NO: 2547413 - RNA, 13 nt, Human
uuugcuguagaag

SEQ ID NO: 2547414 - RNA, 23 nt, Human
uuuggccaucucuggaugccuga

SEQ ID NO: 2547415 - RNA, 13 nt, Human
uuuggccaucucu

SEQ ID NO: 2547416 - RNA, 12 nt, Human
uuuggcccccga

SEQ ID NO: 2547417 - RNA, 20 nt, Human
uuuggcccccgagcuggggg

SEQ ID NO: 2547418 - RNA, 21 nt, Human
uuuggcccuucuccuuuugaa

SEQ ID NO: 2547419 - RNA, 21 nt, Human
uuuggcccccgagcugggggc

SEQ ID NO: 2547420 - RNA, 13 nt, Human
uuugcuucauaaa

SEQ ID NO: 2547421 - RNA, 20 nt, Human
uuugcuucauaaaugaagca

SEQ ID NO: 2547422 - RNA, 20 nt, Human
uuuggcaucuguuuaaagua

SEQ ID NO: 2547423 - RNA, 15 nt, Human
uuugcuuauuguucc

SEQ ID NO: 2547424 - RNA, 16 nt, Human
uuugcuuauuguucca

SEQ ID NO: 2547425 - RNA, 17 nt, Human
uuugcuuauuguuccaa

SEQ ID NO: 2547426 - RNA, 19 nt, Human
uuugcuuauuguuccaaga

SEQ ID NO: 2547427 - RNA, 15 nt, Human
uuugcuucaaaaaca

SEQ ID NO: 2547428 - RNA, 14 nt, Human
uuuggggauauuuu

SEQ ID NO: 2547429 - RNA, 19 nt, Human
uuuggggcgaggcagagga

SEQ ID NO: 2547430 - RNA, 18 nt, Human
uuuggggcgaggcagagg

SEQ ID NO: 2547431 - RNA, 14 nt, Human
uuuggggcgaggca

SEQ ID NO: 2547432 - RNA, 13 nt, Human
uuuggggccggga

SEQ ID NO: 2547433 - RNA, 22 nt, Human
uuugggaggccaaggugggagg

SEQ ID NO: 2547434 - RNA, 16 nt, Human
uuuggggauaugcuua

SEQ ID NO: 2547435 - RNA, 20 nt, Human
uuuggggagcagagacacua

SEQ ID NO: 2547436 - RNA, 18 nt, Human
uuugggagacaugugaca

SEQ ID NO: 2547437 - RNA, 16 nt, Human
uuugggagacauguga

SEQ ID NO: 2547438 - RNA, 21 nt, Human
uuugggagacaugugacauuu

SEQ ID NO: 2547439 - RNA, 17 nt, Human
uuugggaauguuugucu

SEQ ID NO: 2547440 - RNA, 17 nt, Human
uuugggaauauuugaau

SEQ ID NO: 2547441 - RNA, 16 nt, Human
uuugggaauauuugaa

SEQ ID NO: 2547442 - RNA, 18 nt, Human
uuuggccucauuacuuua

SEQ ID NO: 2547443 - RNA, 17 nt, Human
uuuggccugcacuaauu

SEQ ID NO: 2547444 - RNA, 14 nt, Human
uuuggcgggccaag

SEQ ID NO: 2547445 - RNA, 17 nt, Human
uuuggcgggccaaggac

SEQ ID NO: 2547446 - RNA, 20 nt, Human
uuugggaagugaagacugga

SEQ ID NO: 2547447 - RNA, 22 nt, Human
uuugggaagugaagacuggaag

SEQ ID NO: 2547448 - RNA, 12 nt, Human
uuugggaagggg

SEQ ID NO: 2547449 - RNA, 19 nt, Human
uuuggcgggccaaggacug

SEQ ID NO: 2547450 - RNA, 18 nt, Human
auguccccaaaccugcaa

SEQ ID NO: 2547451 - RNA, 16 nt, Human
auguccccaaaccugc

SEQ ID NO: 2547452 - RNA, 19 nt, Human
auguccccaaaccugcaag

SEQ ID NO: 2547453 - RNA, 21 nt, Human
augucccuacaccccuccccu

SEQ ID NO: 2547454 - RNA, 24 nt, Human
augucccuaccgagucucuucucc

SEQ ID NO: 2547455 - RNA, 18 nt, Human
augucccaccucucugag

SEQ ID NO: 2547456 - RNA, 20 nt, Human
augucccaacuuguaaaaau

SEQ ID NO: 2547457 - RNA, 21 nt, Human
augucuaauguauuuuauugu

SEQ ID NO: 2547458 - RNA, 19 nt, Human
augucuaauguauuuuauu

SEQ ID NO: 2547459 - RNA, 18 nt, Human
augucuaauguauuuuau

SEQ ID NO: 2547460 - RNA, 17 nt, Human
augucuaauguauuuua

SEQ ID NO: 2547461 - RNA, 21 nt, Human
augucccuucacauaguuuuu

SEQ ID NO: 2547462 - RNA, 14 nt, Human
augucccuucucau

SEQ ID NO: 2547463 - RNA, 19 nt, Human
augucuaaaugcugaaaaa

SEQ ID NO: 2547464 - RNA, 22 nt, Human
augucuauaaucccagcacuuu

SEQ ID NO: 2547465 - RNA, 14 nt, Human
augucuauucagcu

SEQ ID NO: 2547466 - RNA, 15 nt, Human
augucuauucagcuu

SEQ ID NO: 2547467 - RNA, 16 nt, Human
augucuauucagcuuc

SEQ ID NO: 2547468 - RNA, 14 nt, Human
augucuauuuaagc

SEQ ID NO: 2547469 - RNA, 13 nt, Human
augucuauuuaag

SEQ ID NO: 2547470 - RNA, 12 nt, Human
augucuauuuaa

SEQ ID NO: 2547471 - RNA, 17 nt, Human
augucuauuaaggugau

SEQ ID NO: 2547472 - RNA, 20 nt, Human
augucucaauaguaaaagau

SEQ ID NO: 2547473 - RNA, 16 nt, Human
augucagugugacuga

SEQ ID NO: 2547474 - RNA, 15 nt, Human
augucagugugacug

SEQ ID NO: 2547475 - RNA, 17 nt, Human
augucaguaccuucaaa

SEQ ID NO: 2547476 - RNA, 14 nt, Human
augucaguaugugg

SEQ ID NO: 2547477 - RNA, 21 nt, Human
augucagugugacugaucucu

SEQ ID NO: 2547478 - RNA, 18 nt, Human
auguccaagaagcccagg

SEQ ID NO: 2547479 - RNA, 19 nt, Human
auguccaagaagcccagga

SEQ ID NO: 2547480 - RNA, 23 nt, Human
auguccaagaagcccaggaaagg

SEQ ID NO: 2547481 - RNA, 16 nt, Human
auguccacagaugccu

SEQ ID NO: 2547482 - RNA, 20 nt, Human
auguccacagaugccuccac

SEQ ID NO: 2547483 - RNA, 17 nt, Human
auguaugcuucauacag

SEQ ID NO: 2547484 - RNA, 15 nt, Human
auguaucuaccucac

SEQ ID NO: 2547485 - RNA, 15 nt, Human
auguaucugagcagg

SEQ ID NO: 2547486 - RNA, 20 nt, Human
auguaugcuucauacaggga

SEQ ID NO: 2547487 - RNA, 18 nt, Human
auguauggaauacagugu

SEQ ID NO: 2547488 - RNA, 20 nt, Human
auguauggaauacaguguua

SEQ ID NO: 2547489 - RNA, 21 nt, Human
auguauggaauacaguguuau

SEQ ID NO: 2547490 - RNA, 17 nt, Human
auguaugugcacuguca

SEQ ID NO: 2547491 - RNA, 16 nt, Human
auguaugugcacuguc

SEQ ID NO: 2547492 - RNA, 15 nt, Human
auguaugugcacugu

SEQ ID NO: 2547493 - RNA, 20 nt, Human
auguaugugcacugucacuu

SEQ ID NO: 2547494 - RNA, 23 nt, Human
augucagccgagccgggccuggg

SEQ ID NO: 2547495 - RNA, 19 nt, Human
augucagccgagccgggcc

SEQ ID NO: 2547496 - RNA, 12 nt, Human
auguauguguaa

SEQ ID NO: 2547497 - RNA, 15 nt, Human
augucaggaacagaa

SEQ ID NO: 2547498 - RNA, 17 nt, Human
augucaggaacagaagg

SEQ ID NO: 2547499 - RNA, 19 nt, Human
augucaggaacagaaggau

SEQ ID NO: 2547500 - RNA, 20 nt, Human
augucaggaacagaaggaug

SEQ ID NO: 2547501 - RNA, 13 nt, Human
augucaguaugug

SEQ ID NO: 2547502 - RNA, 16 nt, Human
augucaggccugugug

SEQ ID NO: 2547503 - RNA, 12 nt, Human
augucaggccug

SEQ ID NO: 2547504 - RNA, 23 nt, Human
augucaggggcggggagggugac

SEQ ID NO: 2547505 - RNA, 15 nt, Human
auguaucaaugagua

SEQ ID NO: 2547506 - RNA, 22 nt, Human
auguauaaagcaacuguuauga

SEQ ID NO: 2547507 - RNA, 21 nt, Human
auguauaaagcaacuguuaug

SEQ ID NO: 2547508 - RNA, 17 nt, Human
auguauaaagaacaagg

SEQ ID NO: 2547509 - RNA, 17 nt, Human
auguaucauagaaaugu

SEQ ID NO: 2547510 - RNA, 12 nt, Human
auguaucaucug

SEQ ID NO: 2547511 - RNA, 20 nt, Human
auguauccaugggggcaggg

SEQ ID NO: 2547512 - RNA, 16 nt, Human
auguaucauagaaaug

SEQ ID NO: 2547513 - RNA, 21 nt, Human
auguaucaggaaauauauaug

SEQ ID NO: 2547514 - RNA, 13 nt, Human
auguaucaggaaa

SEQ ID NO: 2547515 - RNA, 22 nt, Human
uuugggggaaaauuuagaaaua

SEQ ID NO: 2547516 - RNA, 16 nt, Human
auguagugccucuuuc

SEQ ID NO: 2547517 - RNA, 14 nt, Human
auguagugccucuu

SEQ ID NO: 2547518 - RNA, 13 nt, Human
uuuguuugaacug

SEQ ID NO: 2547519 - RNA, 14 nt, Human
uuuguuugaacuga

SEQ ID NO: 2547520 - RNA, 12 nt, Human
uuuguuugaacu

SEQ ID NO: 2547521 - RNA, 16 nt, Human
uuuguuucuuccaaag

SEQ ID NO: 2547522 - RNA, 19 nt, Human
uuugugaggaagccgcugg

SEQ ID NO: 2547523 - RNA, 18 nt, Human
uuugugaggaagccgcug

SEQ ID NO: 2547524 - RNA, 23 nt, Human
uuugugacuauauagagauguuu

SEQ ID NO: 2547525 - RNA, 15 nt, Human
uuugucuaaaaugcc

SEQ ID NO: 2547526 - RNA, 19 nt, Human
uuugucucaucccauucug

SEQ ID NO: 2547527 - RNA, 14 nt, Human
uuugucucauccca

SEQ ID NO: 2547528 - RNA, 14 nt, Human
uuugucugaaaaau

SEQ ID NO: 2547529 - RNA, 16 nt, Human
uuugugagcaggcugu

SEQ ID NO: 2547530 - RNA, 22 nt, Human
uuugugacuauauagagauguu

SEQ ID NO: 2547531 - RNA, 20 nt, Human
uuugugacuauauagagaug

SEQ ID NO: 2547532 - RNA, 17 nt, Human
uuugucugucuucauag

SEQ ID NO: 2547533 - RNA, 11 nt, Human
uuugucuaaaa

SEQ ID NO: 2547534 - RNA, 14 nt, Human
uuugucuaaaacaa

SEQ ID NO: 2547535 - RNA, 16 nt, Human
uuugucuaaaacaaua

SEQ ID NO: 2547536 - RNA, 19 nt, Human
uuugucuaaaacaauaaaa

SEQ ID NO: 2547537 - RNA, 19 nt, Human
uuugucgcucaugugugca

SEQ ID NO: 2547538 - RNA, 20 nt, Human
uuugucgaauuuuuauuauu

SEQ ID NO: 2547539 - RNA, 16 nt, Human
uuugucgaauuuuuau

SEQ ID NO: 2547540 - RNA, 23 nt, Human
uuuguaggggucaaagaaaugcu

SEQ ID NO: 2547541 - RNA, 21 nt, Human
uuuguaggggucaaagaaaug

SEQ ID NO: 2547542 - RNA, 20 nt, Human
uuuguaggggucaaagaaau

SEQ ID NO: 2547543 - RNA, 19 nt, Human
uuuguaggggucaaagaaa

SEQ ID NO: 2547544 - RNA, 17 nt, Human
uuuguagccuuccucca

SEQ ID NO: 2547545 - RNA, 20 nt, Human
uuuguaccccccaaccccug

SEQ ID NO: 2547546 - RNA, 19 nt, Human
uuuguaccccccaaccccu

SEQ ID NO: 2547547 - RNA, 14 nt, Human
uuuguacugaaaaa

SEQ ID NO: 2547548 - RNA, 15 nt, Human
uuuguacugaaaaau

SEQ ID NO: 2547549 - RNA, 18 nt, Human
uuuguaccccccaacccc

SEQ ID NO: 2547550 - RNA, 17 nt, Human
uuuguaccaugguguga

SEQ ID NO: 2547551 - RNA, 20 nt, Human
uuuguacuguaaagagaccu

SEQ ID NO: 2547552 - RNA, 15 nt, Human
uuuguacuguaaaga

SEQ ID NO: 2547553 - RNA, 13 nt, Human
uuuguacuguaaa

SEQ ID NO: 2547554 - RNA, 16 nt, Human
uuuguacuguaaagag

SEQ ID NO: 2547555 - RNA, 13 nt, Human
uuuguagagccag

SEQ ID NO: 2547556 - RNA, 17 nt, Human
uuuguaaauuuauguga

SEQ ID NO: 2547557 - RNA, 20 nt, Human
uuuguaacccagauuuugcu

SEQ ID NO: 2547558 - RNA, 13 nt, Human
uuuguaaauuguc

SEQ ID NO: 2547559 - RNA, 16 nt, Human
uuuguaaccucagcuc

SEQ ID NO: 2547560 - RNA, 15 nt, Human
uuuguaaccucagcu

SEQ ID NO: 2547561 - RNA, 21 nt, Human
uuuguaacccagauuuugcug

SEQ ID NO: 2547562 - RNA, 19 nt, Human
uuuguaaccucagcucugg

SEQ ID NO: 2547563 - RNA, 18 nt, Human
uuuguaaccucagcucug

SEQ ID NO: 2547564 - RNA, 19 nt, Human
uuuguacauauguaaaaua

SEQ ID NO: 2547565 - RNA, 14 nt, Human
uuuguaccauggug

SEQ ID NO: 2547566 - RNA, 21 nt, Human
augucugccaauuuuugccuu

SEQ ID NO: 2547567 - RNA, 16 nt, Human
augucugccaauuuuu

SEQ ID NO: 2547568 - RNA, 14 nt, Human
augucugccaauuu

SEQ ID NO: 2547569 - RNA, 13 nt, Human
augucugccaauu

SEQ ID NO: 2547570 - RNA, 14 nt, Human
augucugcauuucg

SEQ ID NO: 2547571 - RNA, 15 nt, Human
augucugagugaacc

SEQ ID NO: 2547572 - RNA, 16 nt, Human
augucugagugaaccu

SEQ ID NO: 2547573 - RNA, 17 nt, Human
augucugaacucuccag

SEQ ID NO: 2547574 - RNA, 23 nt, Human
augucuauuuaagccucauauuu

SEQ ID NO: 2547575 - RNA, 15 nt, Human
augucuauuuaagcc

SEQ ID NO: 2547576 - RNA, 22 nt, Human
augucugagugaaccuguauaa

SEQ ID NO: 2547577 - RNA, 15 nt, Human
augucugccacacaa

SEQ ID NO: 2547578 - RNA, 23 nt, Human
augucugccaauuuuugccuuca

SEQ ID NO: 2547579 - RNA, 20 nt, Human
augucugcugaauaauaaac

SEQ ID NO: 2547580 - RNA, 18 nt, Human
augucuuaaugaaguuug

SEQ ID NO: 2547581 - RNA, 16 nt, Human
augucuuaaugaaguu

SEQ ID NO: 2547582 - RNA, 13 nt, Human
augucuuaaugaa

SEQ ID NO: 2547583 - RNA, 16 nt, Human
augucuguucuacaua

SEQ ID NO: 2547584 - RNA, 12 nt, Human
augucuuaauga

SEQ ID NO: 2547585 - RNA, 16 nt, Human
augucuguugaugacu

SEQ ID NO: 2547586 - RNA, 23 nt, Human
augucuguuaccaugucacugug

SEQ ID NO: 2547587 - RNA, 20 nt, Human
augucuguuaccaugucacu

SEQ ID NO: 2547588 - RNA, 14 nt, Human
augucuguucuaca

SEQ ID NO: 2547589 - RNA, 20 nt, Human
augucugugcuagggaaacu

SEQ ID NO: 2547590 - RNA, 12 nt, Human
augucugugcua

SEQ ID NO: 2547591 - RNA, 13 nt, Human
augucuguuacca

SEQ ID NO: 2547592 - RNA, 16 nt, Human
augucuguagcuccuc

SEQ ID NO: 2547593 - RNA, 18 nt, Human
augucuguagcuccucaa

SEQ ID NO: 2547594 - RNA, 19 nt, Human
augucuguagcuccucaac

SEQ ID NO: 2547595 - RNA, 11 nt, Human
augucugugcu

SEQ ID NO: 2547596 - RNA, 21 nt, Human
uuuuaagauuuuucucaaagu

SEQ ID NO: 2547597 - RNA, 23 nt, Human
uuuuaagcccaucaauuauagaa

SEQ ID NO: 2547598 - RNA, 15 nt, Human
uuuuaagcaaaauau

SEQ ID NO: 2547599 - RNA, 19 nt, Human
uuuuaagauuuuucucaaa

SEQ ID NO: 2547600 - RNA, 18 nt, Human
uuuuaagauuuuucucaa

SEQ ID NO: 2547601 - RNA, 17 nt, Human
uuuuaagauuuuucuca

SEQ ID NO: 2547602 - RNA, 21 nt, Human
uuuuaagauaauaauauaugu

SEQ ID NO: 2547603 - RNA, 12 nt, Human
uuuuaagauuuu

SEQ ID NO: 2547604 - RNA, 20 nt, Human
uuuuaaggguuuguggaaaa

SEQ ID NO: 2547605 - RNA, 22 nt, Human
uuuuaagcuguaaaaagagaga

SEQ ID NO: 2547606 - RNA, 21 nt, Human
uuuuaagcguaauuuugccaa

SEQ ID NO: 2547607 - RNA, 12 nt, Human
uuuuaaggaaac

SEQ ID NO: 2547608 - RNA, 12 nt, Human
uuuuaagcuguu

SEQ ID NO: 2547609 - RNA, 16 nt, Human
uuuuaaguaaggaauu

SEQ ID NO: 2547610 - RNA, 23 nt, Human
uuuuaaggguuuguggaaaauga

SEQ ID NO: 2547611 - RNA, 15 nt, Human
uuuuaagugcugcau

SEQ ID NO: 2547612 - RNA, 21 nt, Human
uuuuaaguauugcaucuguau

SEQ ID NO: 2547613 - RNA, 15 nt, Human
uuuuaaguauuuagg

SEQ ID NO: 2547614 - RNA, 17 nt, Human
uuuuaaguauuuauaua

SEQ ID NO: 2547615 - RNA, 18 nt, Human
uuuuaaguauuuauauau

SEQ ID NO: 2547616 - RNA, 19 nt, Human
uuuuaacuuuaaguuucag

SEQ ID NO: 2547617 - RNA, 16 nt, Human
uuuuaacuuuaaguuu

SEQ ID NO: 2547618 - RNA, 14 nt, Human
uuuuaacucugucu

SEQ ID NO: 2547619 - RNA, 12 nt, Human
uuuuaacucacc

SEQ ID NO: 2547620 - RNA, 16 nt, Human
uuuuaacuagaauuua

SEQ ID NO: 2547621 - RNA, 13 nt, Human
uuuuaacucaaua

SEQ ID NO: 2547622 - RNA, 12 nt, Human
uuuuaacuagaa

SEQ ID NO: 2547623 - RNA, 21 nt, Human
uuuuaaccaaaggugaaggaa

SEQ ID NO: 2547624 - RNA, 16 nt, Human
uuuuaaccaaagguga

SEQ ID NO: 2547625 - RNA, 15 nt, Human
uuuuaaccaaaggug

SEQ ID NO: 2547626 - RNA, 14 nt, Human
uuuuaaccaaaggu

SEQ ID NO: 2547627 - RNA, 21 nt, Human
uuuuaaccauugucuuguucu

SEQ ID NO: 2547628 - RNA, 11 nt, Human
uuuuaagaaau

SEQ ID NO: 2547629 - RNA, 15 nt, Human
uuuuaagaggcaggg

SEQ ID NO: 2547630 - RNA, 16 nt, Human
uuuuaagaggcagggu

SEQ ID NO: 2547631 - RNA, 22 nt, Human
uuuuaagauaaauuauaaguua

SEQ ID NO: 2547632 - RNA, 19 nt, Human
uuuuaagacguguuugugu

SEQ ID NO: 2547633 - RNA, 15 nt, Human
uuuuaaaagaaugau

SEQ ID NO: 2547634 - RNA, 14 nt, Human
uuuuaaaagaauga

SEQ ID NO: 2547635 - RNA, 21 nt, Human
uuuuaacaauaacuacugugu

SEQ ID NO: 2547636 - RNA, 22 nt, Human
uuuuaacaauaacuacuguguu

SEQ ID NO: 2547637 - RNA, 19 nt, Human
uuuuaacaauaacuacugu

SEQ ID NO: 2547638 - RNA, 12 nt, Human
uuuuaaccaaag

SEQ ID NO: 2547639 - RNA, 20 nt, Human
uuuuaacaccugauguguac

SEQ ID NO: 2547640 - RNA, 19 nt, Human
uuuuaacaccugaugugua

SEQ ID NO: 2547641 - RNA, 17 nt, Human
uuuuaacaccugaugug

SEQ ID NO: 2547642 - RNA, 13 nt, Human
uuuuaaaacccag

SEQ ID NO: 2547643 - RNA, 22 nt, Human
uuuuaaaacacuuccauaaucu

SEQ ID NO: 2547644 - RNA, 16 nt, Human
uuuuaaaacacuucca

SEQ ID NO: 2547645 - RNA, 15 nt, Human
uuuuaaaaaugaauc

SEQ ID NO: 2547646 - RNA, 20 nt, Human
uuuuaaaaauuguuaauuuu

SEQ ID NO: 2547647 - RNA, 22 nt, Human
uuuuaaaaauuaaaucaaccuu

SEQ ID NO: 2547648 - RNA, 14 nt, Human
uuuuaaaaaugaau

SEQ ID NO: 2547649 - RNA, 16 nt, Human
uuuuaaaaaugaaauu

SEQ ID NO: 2547650 - RNA, 14 nt, Human
uuuuaaaaaugcaa

SEQ ID NO: 2547651 - RNA, 17 nt, Human
uuuuaaaaauagacacu

SEQ ID NO: 2547652 - RNA, 15 nt, Human
uuuuaaaaaucauaa

SEQ ID NO: 2547653 - RNA, 22 nt, Human
uuuuaaaaaucauaaacugugu

SEQ ID NO: 2547654 - RNA, 12 nt, Human
uuuuaaaaauga

SEQ ID NO: 2547655 - RNA, 22 nt, Human
uuuuaaaaaucuaccuucugua

SEQ ID NO: 2547656 - RNA, 23 nt, Human
uuuuaaaaaucauaaacugugug

SEQ ID NO: 2547657 - RNA, 22 nt, Human
uuuuaaaaagaaacaagaugcu

SEQ ID NO: 2547658 - RNA, 21 nt, Human
uuuuaaaaaacugcugacugu

SEQ ID NO: 2547659 - RNA, 18 nt, Human
uuuguuugguauuguauu

SEQ ID NO: 2547660 - RNA, 16 nt, Human
uuuguuugguauugua

SEQ ID NO: 2547661 - RNA, 13 nt, Human
uuuguuugcuauc

SEQ ID NO: 2547662 - RNA, 15 nt, Human
uuuguuugguauugu

SEQ ID NO: 2547663 - RNA, 18 nt, Human
uuuguuugaacugauaaa

SEQ ID NO: 2547664 - RNA, 13 nt, Human
uuuuaaaaaagaa

SEQ ID NO: 2547665 - RNA, 16 nt, Human
uuuguuugugcuucua

SEQ ID NO: 2547666 - RNA, 15 nt, Human
uuuguuugugcuucu

SEQ ID NO: 2547667 - RNA, 12 nt, Human
uuuguuugugcu

SEQ ID NO: 2547668 - RNA, 15 nt, Human
uuuguuugcuaucuu

SEQ ID NO: 2547669 - RNA, 13 nt, Human
uuuguuugugcau

SEQ ID NO: 2547670 - RNA, 17 nt, Human
auguuauauauuuuuug

SEQ ID NO: 2547671 - RNA, 13 nt, Human
auguuauauauuu

SEQ ID NO: 2547672 - RNA, 19 nt, Human
auguucaucaaugaaugaa

SEQ ID NO: 2547673 - RNA, 21 nt, Human
auguucaucauccuaagcuau

SEQ ID NO: 2547674 - RNA, 15 nt, Human
auguugacaugggac

SEQ ID NO: 2547675 - RNA, 18 nt, Human
auguuccaauaaacagga

SEQ ID NO: 2547676 - RNA, 16 nt, Human
auguuccaauaaacag

SEQ ID NO: 2547677 - RNA, 14 nt, Human
auguugaauacuuu

SEQ ID NO: 2547678 - RNA, 15 nt, Human
auguugaauacuuuu

SEQ ID NO: 2547679 - RNA, 19 nt, Human
auguugaauacuuuuuaca

SEQ ID NO: 2547680 - RNA, 16 nt, Human
auguugaagccuuugu

SEQ ID NO: 2547681 - RNA, 15 nt, Human
auguugaagccuuug

SEQ ID NO: 2547682 - RNA, 19 nt, Human
auguucaucccaugaugua

SEQ ID NO: 2547683 - RNA, 14 nt, Human
auguucauuguaau

SEQ ID NO: 2547684 - RNA, 21 nt, Human
auguucauuguaauguuacug

SEQ ID NO: 2547685 - RNA, 22 nt, Human
auguucauuguaauguuacuga

SEQ ID NO: 2547686 - RNA, 11 nt, Human
auguucauuua

SEQ ID NO: 2547687 - RNA, 15 nt, Human
auguuccaauaaaca

SEQ ID NO: 2547688 - RNA, 23 nt, Human
auguucauuguaauguuacugau

SEQ ID NO: 2547689 - RNA, 16 nt, Human
uuuuaagugcugcauu

SEQ ID NO: 2547690 - RNA, 17 nt, Human
uuuuaagugcugcauuu

SEQ ID NO: 2547691 - RNA, 21 nt, Human
uuuuaagugcugcauuuaaaa

SEQ ID NO: 2547692 - RNA, 17 nt, Human
uuuuaagugcuuuguaa

SEQ ID NO: 2547693 - RNA, 19 nt, Human
uuuuaagugcuuuguaaug

SEQ ID NO: 2547694 - RNA, 19 nt, Human
uuuuaaguauuuauauauu

SEQ ID NO: 2547695 - RNA, 22 nt, Human
uuuuaaguuacacauuuuucag

SEQ ID NO: 2547696 - RNA, 21 nt, Human
uuuuaaguuacacauuuuuca

SEQ ID NO: 2547697 - RNA, 14 nt, Human
auguuggccaggcu

SEQ ID NO: 2547698 - RNA, 13 nt, Human
auguuggccaggc

SEQ ID NO: 2547699 - RNA, 21 nt, Human
auguugcacacccacucagcu

SEQ ID NO: 2547700 - RNA, 22 nt, Human
auguugcacacccacucagcuc

SEQ ID NO: 2547701 - RNA, 16 nt, Human
auguuggccaggcugc

SEQ ID NO: 2547702 - RNA, 16 nt, Human
auguuggccaggcugg

SEQ ID NO: 2547703 - RNA, 22 nt, Human
auguugaaugcccacaggcaaa

SEQ ID NO: 2547704 - RNA, 16 nt, Human
auguugagaaucccaa

SEQ ID NO: 2547705 - RNA, 22 nt, Human
auguugagaaucccaaauuuga

SEQ ID NO: 2547706 - RNA, 18 nt, Human
auguugagccaggccugg

SEQ ID NO: 2547707 - RNA, 14 nt, Human
auguugagggaaca

SEQ ID NO: 2547708 - RNA, 20 nt, Human
auguugagggaacagacagg

SEQ ID NO: 2547709 - RNA, 12 nt, Human
uuuuauaaacuu

SEQ ID NO: 2547710 - RNA, 13 nt, Human
uuuuauaaacuuu

SEQ ID NO: 2547711 - RNA, 19 nt, Human
uuuuaguuucuguucugug

SEQ ID NO: 2547712 - RNA, 18 nt, Human
uuuuaguuucuguucugu

SEQ ID NO: 2547713 - RNA, 20 nt, Human
uuuuaguuuaaaaaccuugu

SEQ ID NO: 2547714 - RNA, 19 nt, Human
uuuuaguugcaacuuugua

SEQ ID NO: 2547715 - RNA, 21 nt, Human
uuuuaguuucuguucugugga

SEQ ID NO: 2547716 - RNA, 20 nt, Human
uuuuaguuucuguucugugg

SEQ ID NO: 2547717 - RNA, 22 nt, Human
uuuuaguuucuguucuguggaa

SEQ ID NO: 2547718 - RNA, 13 nt, Human
uuuuaguuuuagu

SEQ ID NO: 2547719 - RNA, 11 nt, Human
uuuuagcaugu

SEQ ID NO: 2547720 - RNA, 23 nt, Human
uuuuagcaaagauaucucaucuc

SEQ ID NO: 2547721 - RNA, 21 nt, Human
uuuuagcaauuuauacaauau

SEQ ID NO: 2547722 - RNA, 20 nt, Human
uuuuagcugaugaacuuauu

SEQ ID NO: 2547723 - RNA, 19 nt, Human
uuuuagcuccuugacuccu

SEQ ID NO: 2547724 - RNA, 23 nt, Human
uuuuagccuucucuguucauuuc

SEQ ID NO: 2547725 - RNA, 16 nt, Human
uuuuagccuucucugu

SEQ ID NO: 2547726 - RNA, 22 nt, Human
uuuuagcauguguuugguucug

SEQ ID NO: 2547727 - RNA, 19 nt, Human
uuuuagccuaguucaucca

SEQ ID NO: 2547728 - RNA, 19 nt, Human
uuuuagaugagauuguuuu

SEQ ID NO: 2547729 - RNA, 19 nt, Human
uuuuagaucaaauacuuua

SEQ ID NO: 2547730 - RNA, 17 nt, Human
uuuuagaucaaauacuu

SEQ ID NO: 2547731 - RNA, 20 nt, Human
uuuuagaugagauuguuuua

SEQ ID NO: 2547732 - RNA, 23 nt, Human
uuuuagaguugauacuacaguuu

SEQ ID NO: 2547733 - RNA, 16 nt, Human
uuuuagaucaaauacu

SEQ ID NO: 2547734 - RNA, 16 nt, Human
uuuuauuauuacuguu

SEQ ID NO: 2547735 - RNA, 21 nt, Human
uuuuauucagcucauggacuu

SEQ ID NO: 2547736 - RNA, 18 nt, Human
uuuuauucauaagccaau

SEQ ID NO: 2547737 - RNA, 13 nt, Human
uuuuauuauuugu

SEQ ID NO: 2547738 - RNA, 14 nt, Human
uuuuauucaaguua

SEQ ID NO: 2547739 - RNA, 17 nt, Human
uuuucagauauaaaaga

SEQ ID NO: 2547740 - RNA, 21 nt, Human
uuuucagauauaaaagacuga

SEQ ID NO: 2547741 - RNA, 19 nt, Human
uuuucagauauaaaagacu

SEQ ID NO: 2547742 - RNA, 22 nt, Human
uuuucagauauaaaagacugac

SEQ ID NO: 2547743 - RNA, 18 nt, Human
uuuucagcaaacucuuuu

SEQ ID NO: 2547744 - RNA, 18 nt, Human
uuuucagcgauguaugca

SEQ ID NO: 2547745 - RNA, 18 nt, Human
uuuucauggugaaaaugu

SEQ ID NO: 2547746 - RNA, 19 nt, Human
uuuucagcaaacucuuuuc

SEQ ID NO: 2547747 - RNA, 19 nt, Human
uuuucagcccauauuucau

SEQ ID NO: 2547748 - RNA, 19 nt, Human
uuuucauguuuuaacaaaa

SEQ ID NO: 2547749 - RNA, 20 nt, Human
uuuucauguuuuaacaaaaa

SEQ ID NO: 2547750 - RNA, 12 nt, Human
uuuucauguuuu

SEQ ID NO: 2547751 - RNA, 16 nt, Human
uuuucauguuuuaaca

SEQ ID NO: 2547752 - RNA, 21 nt, Human
uuuucauggugaaaauguacu

SEQ ID NO: 2547753 - RNA, 14 nt, Human
uuuucaugugugau

SEQ ID NO: 2547754 - RNA, 21 nt, Human
uuuucauucagguauuuguaa

SEQ ID NO: 2547755 - RNA, 13 nt, Human
uuuuccaggcugg

SEQ ID NO: 2547756 - RNA, 19 nt, Human
uuuuccagguuuaagcugu

SEQ ID NO: 2547757 - RNA, 14 nt, Human
uuuuccauaaagaa

SEQ ID NO: 2547758 - RNA, 11 nt, Human
uuuuccaugaa

SEQ ID NO: 2547759 - RNA, 14 nt, Human
uuuuccaugaaaac

SEQ ID NO: 2547760 - RNA, 16 nt, Human
uuuuccaugaaaacgu

SEQ ID NO: 2547761 - RNA, 19 nt, Human
uuuuccaugaaaaugcaac

SEQ ID NO: 2547762 - RNA, 18 nt, Human
uuuuccaugaaaaugcaa

SEQ ID NO: 2547763 - RNA, 22 nt, Human
uuuuauguugcauagaauaaaa

SEQ ID NO: 2547764 - RNA, 19 nt, Human
uuuuaugugaaacauguuu

SEQ ID NO: 2547765 - RNA, 19 nt, Human
uuuuauguaguaauugaca

SEQ ID NO: 2547766 - RNA, 18 nt, Human
uuuuaugugagagaaagu

SEQ ID NO: 2547767 - RNA, 23 nt, Human
uuuuauggaggcuuugcauagau

SEQ ID NO: 2547768 - RNA, 19 nt, Human
uuuuauggcacuaguauuu

SEQ ID NO: 2547769 - RNA, 18 nt, Human
uuuuaugugaaacauguu

SEQ ID NO: 2547770 - RNA, 23 nt, Human
uuuuauaauaaaaggaaaagcaa

SEQ ID NO: 2547771 - RNA, 14 nt, Human
uuuuauaaacuuua

SEQ ID NO: 2547772 - RNA, 17 nt, Human
uuuuauaaacuuuaccu

SEQ ID NO: 2547773 - RNA, 19 nt, Human
uuuuauaaacuuuaccuuu

SEQ ID NO: 2547774 - RNA, 16 nt, Human
uuuuauaaaaaauggu

SEQ ID NO: 2547775 - RNA, 20 nt, Human
uuuuauaacuaguccuuuac

SEQ ID NO: 2547776 - RNA, 19 nt, Human
uuuuauaaaccucuaauuu

SEQ ID NO: 2547777 - RNA, 12 nt, Human
uuuuauaaaucg

SEQ ID NO: 2547778 - RNA, 20 nt, Human
uuuuauaaaucgcuuuugau

SEQ ID NO: 2547779 - RNA, 14 nt, Human
uuuuauaauuuugu

SEQ ID NO: 2547780 - RNA, 18 nt, Human
uuuuaugcuuuaaacauu

SEQ ID NO: 2547781 - RNA, 19 nt, Human
uuuuaugccuuuuauuucu

SEQ ID NO: 2547782 - RNA, 13 nt, Human
auuaaccucugca

SEQ ID NO: 2547783 - RNA, 13 nt, Human
auuaaccucucac

SEQ ID NO: 2547784 - RNA, 19 nt, Human
auuaaccaaaaaaguuaca

SEQ ID NO: 2547785 - RNA, 17 nt, Human
auuaaccaaaaaaguua

SEQ ID NO: 2547786 - RNA, 22 nt, Human
auuaacauugggaaaucuuaua

SEQ ID NO: 2547787 - RNA, 18 nt, Human
auuaaccagaaauccagu

SEQ ID NO: 2547788 - RNA, 15 nt, Human
auuaaccauagaugu

SEQ ID NO: 2547789 - RNA, 18 nt, Human
auuaaccacuucagcuga

SEQ ID NO: 2547790 - RNA, 20 nt, Human
auuaaccacuucagcugacu

SEQ ID NO: 2547791 - RNA, 17 nt, Human
auuaaccacuucagcug

SEQ ID NO: 2547792 - RNA, 19 nt, Human
auuaaaggcuucucucuca

SEQ ID NO: 2547793 - RNA, 19 nt, Human
auuaacauugggaaaucuu

SEQ ID NO: 2547794 - RNA, 21 nt, Human
auuaacauugggaaaucuuau

SEQ ID NO: 2547795 - RNA, 17 nt, Human
auuaaacuuaaucuaaa

SEQ ID NO: 2547796 - RNA, 16 nt, Human
auuaaacuuaaucuaa

SEQ ID NO: 2547797 - RNA, 19 nt, Human
auuaaacuuaaucuaaaug

SEQ ID NO: 2547798 - RNA, 21 nt, Human
auuaaacuuaaucuaaaugga

SEQ ID NO: 2547799 - RNA, 18 nt, Human
auuaaagugauacugaaa

SEQ ID NO: 2547800 - RNA, 20 nt, Human
auuaaaggcuucucucucac

SEQ ID NO: 2547801 - RNA, 16 nt, Human
auuaaaggcuucucuc

SEQ ID NO: 2547802 - RNA, 17 nt, Human
auuaaagcuaaaguauc

SEQ ID NO: 2547803 - RNA, 14 nt, Human
auuaaaggaauaaa

SEQ ID NO: 2547804 - RNA, 18 nt, Human
auuaaagcuaaaguaucu

SEQ ID NO: 2547805 - RNA, 16 nt, Human
auuaacuuuuauaaac

SEQ ID NO: 2547806 - RNA, 17 nt, Human
auuaacuuuuauaaacu

SEQ ID NO: 2547807 - RNA, 19 nt, Human
auuaacuuuuauaaacuuu

SEQ ID NO: 2547808 - RNA, 20 nt, Human
auuaacuuuuauaaacuuua

SEQ ID NO: 2547809 - RNA, 16 nt, Human
auuaaccuggugcugg

SEQ ID NO: 2547810 - RNA, 17 nt, Human
auuaacuaaucuauugg

SEQ ID NO: 2547811 - RNA, 14 nt, Human
auuaaccucugcac

SEQ ID NO: 2547812 - RNA, 22 nt, Human
auuaaccugccagggagacaga

SEQ ID NO: 2547813 - RNA, 14 nt, Human
auuaaccuggugcu

SEQ ID NO: 2547814 - RNA, 17 nt, Human
auuaaccuggugcugga

SEQ ID NO: 2547815 - RNA, 12 nt, Human
auuaacuuuuau

SEQ ID NO: 2547816 - RNA, 15 nt, Human
auuaacuuagcaugu

SEQ ID NO: 2547817 - RNA, 16 nt, Human
auuaagaaugaaauac

SEQ ID NO: 2547818 - RNA, 20 nt, Human
auuaagaaugaaauacuguu

SEQ ID NO: 2547819 - RNA, 21 nt, Human
auuaagaaugaaauacuguuu

SEQ ID NO: 2547820 - RNA, 22 nt, Human
auuaagaaugaaauacuguuug

SEQ ID NO: 2547821 - RNA, 15 nt, Human
auuaagaaggcaaaa

SEQ ID NO: 2547822 - RNA, 19 nt, Human
auuaagaaggcaaaaaugu

SEQ ID NO: 2547823 - RNA, 22 nt, Human
auuaagaaggcaaaaauguaaa

SEQ ID NO: 2547824 - RNA, 20 nt, Human
auuaagaaaaucauauugcu

SEQ ID NO: 2547825 - RNA, 16 nt, Human
auuaagaaaaucauau

SEQ ID NO: 2547826 - RNA, 15 nt, Human
auuaagaaaaucaua

SEQ ID NO: 2547827 - RNA, 15 nt, Human
auuaagaaaaucuau

SEQ ID NO: 2547828 - RNA, 20 nt, Human
auuaagaacacuuuuaauaa

SEQ ID NO: 2547829 - RNA, 14 nt, Human
auuaagaagaaacu

SEQ ID NO: 2547830 - RNA, 23 nt, Human
auuaacuuuuauaaacuuuaccu

SEQ ID NO: 2547831 - RNA, 14 nt, Human
auuaagaaaaucau

SEQ ID NO: 2547832 - RNA, 13 nt, Human
auuaagaaaauca

SEQ ID NO: 2547833 - RNA, 12 nt, Human
auuaagaaaauc

SEQ ID NO: 2547834 - RNA, 18 nt, Human
auuaacuucucuggaaag

SEQ ID NO: 2547835 - RNA, 13 nt, Human
auuaagaaagacu

SEQ ID NO: 2547836 - RNA, 14 nt, Human
auuaagaaagacua

SEQ ID NO: 2547837 - RNA, 17 nt, Human
auuaaaaauauaaaacu

SEQ ID NO: 2547838 - RNA, 16 nt, Human
auuaaaaauauaaaac

SEQ ID NO: 2547839 - RNA, 14 nt, Human
auuaaaaauaugga

SEQ ID NO: 2547840 - RNA, 15 nt, Human
auuaaaaauauaaaa

SEQ ID NO: 2547841 - RNA, 13 nt, Human
auuaaaaauauaa

SEQ ID NO: 2547842 - RNA, 12 nt, Human
auuaaaaauaua

SEQ ID NO: 2547843 - RNA, 17 nt, Human
auuaaaaaauuuccagu

SEQ ID NO: 2547844 - RNA, 12 nt, Human
auuaaaaaauuu

SEQ ID NO: 2547845 - RNA, 16 nt, Human
auuaaaagaauauuuu

SEQ ID NO: 2547846 - RNA, 14 nt, Human
auuaaaagaauuuu

SEQ ID NO: 2547847 - RNA, 21 nt, Human
auuaaaaauauggaacuucua

SEQ ID NO: 2547848 - RNA, 22 nt, Human
auuaaaagggauuacccaagca

SEQ ID NO: 2547849 - RNA, 19 nt, Human
auuaaaauaaauaaaugca

SEQ ID NO: 2547850 - RNA, 21 nt, Human
auguuuucugaaaauauaacc

SEQ ID NO: 2547851 - RNA, 20 nt, Human
auguuuucugaaaauauaac

SEQ ID NO: 2547852 - RNA, 18 nt, Human
auguuuucugaaaauaua

SEQ ID NO: 2547853 - RNA, 20 nt, Human
auguuuuccauuguuugaaa

SEQ ID NO: 2547854 - RNA, 16 nt, Human
auguuuuccauuguuu

SEQ ID NO: 2547855 - RNA, 19 nt, Human
auguuuuccagcuccucau

SEQ ID NO: 2547856 - RNA, 18 nt, Human
auguuuuccagcuccuca

SEQ ID NO: 2547857 - RNA, 23 nt, Human
auguuuuccuuugucaucauugu

SEQ ID NO: 2547858 - RNA, 17 nt, Human
auguuuuucuucucccu

SEQ ID NO: 2547859 - RNA, 16 nt, Human
auguuuugacauuuuu

SEQ ID NO: 2547860 - RNA, 14 nt, Human
auguuuugacauuu

SEQ ID NO: 2547861 - RNA, 12 nt, Human
auguuuugacau

SEQ ID NO: 2547862 - RNA, 18 nt, Human
auguuuucuuugcuuuaa

SEQ ID NO: 2547863 - RNA, 17 nt, Human
auguuuuugaaacagaa

SEQ ID NO: 2547864 - RNA, 20 nt, Human
auguuuugauaaaguaguaa

SEQ ID NO: 2547865 - RNA, 18 nt, Human
auguuuugauaaaguagu

SEQ ID NO: 2547866 - RNA, 12 nt, Human
auguuuugauaa

SEQ ID NO: 2547867 - RNA, 12 nt, Human
auguuuuugaag

SEQ ID NO: 2547868 - RNA, 14 nt, Human
auguuuuugaaggc

SEQ ID NO: 2547869 - RNA, 18 nt, Human
auguuuuucuucucccuc

SEQ ID NO: 2547870 - RNA, 21 nt, Human
auguuuuugaaggcagaaagc

SEQ ID NO: 2547871 - RNA, 15 nt, Human
auguuuuugaaggca

SEQ ID NO: 2547872 - RNA, 19 nt, Human
auguuuuugaaggcagaaa

SEQ ID NO: 2547873 - RNA, 19 nt, Human
auguuuuuguucaaagcca

SEQ ID NO: 2547874 - RNA, 17 nt, Human
auguuuuuguguauuug

SEQ ID NO: 2547875 - RNA, 23 nt, Human
uuuucuauuguuacucugguucu

SEQ ID NO: 2547876 - RNA, 23 nt, Human
uuuucucaaaguuuugaaaagcu

SEQ ID NO: 2547877 - RNA, 15 nt, Human
uuuucucaaaguuuu

SEQ ID NO: 2547878 - RNA, 20 nt, Human
uuuucucaaaguuuugaaaa

SEQ ID NO: 2547879 - RNA, 19 nt, Human
uuuucucaaaguuuugaaa

SEQ ID NO: 2547880 - RNA, 12 nt, Human
uuuucucagcug

SEQ ID NO: 2547881 - RNA, 21 nt, Human
uuuucuccaauaucagugcuc

SEQ ID NO: 2547882 - RNA, 20 nt, Human
uuuucuccaauaucagugcu

SEQ ID NO: 2547883 - RNA, 13 nt, Human
auguugucaaaga

SEQ ID NO: 2547884 - RNA, 15 nt, Human
auguugucaaagaga

SEQ ID NO: 2547885 - RNA, 14 nt, Human
auguugucaaagag

SEQ ID NO: 2547886 - RNA, 22 nt, Human
auguuguccaauuguugacagu

SEQ ID NO: 2547887 - RNA, 18 nt, Human
auguuguaaacaggaagc

SEQ ID NO: 2547888 - RNA, 15 nt, Human
auguugugauguauu

SEQ ID NO: 2547889 - RNA, 16 nt, Human
auguuguguucuaaua

SEQ ID NO: 2547890 - RNA, 21 nt, Human
auguuguguuucuguucaccu

SEQ ID NO: 2547891 - RNA, 15 nt, Human
auguuuaccuuuuaa

SEQ ID NO: 2547892 - RNA, 20 nt, Human
auguuuacauaucaccucau

SEQ ID NO: 2547893 - RNA, 13 nt, Human
auguuuacauauc

SEQ ID NO: 2547894 - RNA, 21 nt, Human
auguuuacagggagccuccug

SEQ ID NO: 2547895 - RNA, 19 nt, Human
auguuuaccuuuuaauuaa

SEQ ID NO: 2547896 - RNA, 18 nt, Human
auguuuaccuuuuaauua

SEQ ID NO: 2547897 - RNA, 14 nt, Human
auguuuaguaaacu

SEQ ID NO: 2547898 - RNA, 15 nt, Human
auguuuacagaggac

SEQ ID NO: 2547899 - RNA, 17 nt, Human
auguuuacagaggacag

SEQ ID NO: 2547900 - RNA, 19 nt, Human
auguuuacagaggacagua

SEQ ID NO: 2547901 - RNA, 22 nt, Human
auguuuacacucuuuguaagag

SEQ ID NO: 2547902 - RNA, 22 nt, Human
auguuuacagguggacacacaa

SEQ ID NO: 2547903 - RNA, 21 nt, Human
auguuucaaacauauauaaca

SEQ ID NO: 2547904 - RNA, 14 nt, Human
auguuuuccaugag

SEQ ID NO: 2547905 - RNA, 18 nt, Human
auguuucaaacauauaua

SEQ ID NO: 2547906 - RNA, 17 nt, Human
auguuuauuuacuaauu

SEQ ID NO: 2547907 - RNA, 21 nt, Human
auguuuauuuauucugcauuu

SEQ ID NO: 2547908 - RNA, 13 nt, Human
auguuuauuuaua

SEQ ID NO: 2547909 - RNA, 20 nt, Human
auuauuaccuuacagaaguu

SEQ ID NO: 2547910 - RNA, 22 nt, Human
auuauuaaugaaaauaagaauu

SEQ ID NO: 2547911 - RNA, 19 nt, Human
auuauucauuuaaaaugau

SEQ ID NO: 2547912 - RNA, 18 nt, Human
auuauucauuuaaaauga

SEQ ID NO: 2547913 - RNA, 16 nt, Human
auuauucauuuaaaau

SEQ ID NO: 2547914 - RNA, 15 nt, Human
auuauucauuuaaaa

SEQ ID NO: 2547915 - RNA, 14 nt, Human
auuauucauuuaaa

SEQ ID NO: 2547916 - RNA, 13 nt, Human
auuauucauuuaa

SEQ ID NO: 2547917 - RNA, 15 nt, Human
auuauuccagaucug

SEQ ID NO: 2547918 - RNA, 20 nt, Human
auuauucauuuaaaaugauu

SEQ ID NO: 2547919 - RNA, 21 nt, Human
auuauucauuuaaaaugauua

SEQ ID NO: 2547920 - RNA, 12 nt, Human
auuauucccucu

SEQ ID NO: 2547921 - RNA, 17 nt, Human
auuauucccuguacaau

SEQ ID NO: 2547922 - RNA, 21 nt, Human
auuauucccuguacaauauuu

SEQ ID NO: 2547923 - RNA, 22 nt, Human
auuauucccuguacaauauuua

SEQ ID NO: 2547924 - RNA, 22 nt, Human
auuauuuaauaacauuaccuua

SEQ ID NO: 2547925 - RNA, 21 nt, Human
auuauuuaauaacauuaccuu

SEQ ID NO: 2547926 - RNA, 16 nt, Human
auuauuuauauaugua

SEQ ID NO: 2547927 - RNA, 18 nt, Human
auuauuuaauaacauuac

SEQ ID NO: 2547928 - RNA, 15 nt, Human
auuauuuaauaacau

SEQ ID NO: 2547929 - RNA, 14 nt, Human
auuauuuaauaaca

SEQ ID NO: 2547930 - RNA, 13 nt, Human
auuauuuaauaac

SEQ ID NO: 2547931 - RNA, 21 nt, Human
auuauuuaauaaaaaaacaau

SEQ ID NO: 2547932 - RNA, 12 nt, Human
auuauugaaauu

SEQ ID NO: 2547933 - RNA, 13 nt, Human
auuauucuuguag

SEQ ID NO: 2547934 - RNA, 12 nt, Human
auuauucuugua

SEQ ID NO: 2547935 - RNA, 16 nt, Human
auuauucugauuccac

SEQ ID NO: 2547936 - RNA, 13 nt, Human
auuauucugcagc

SEQ ID NO: 2547937 - RNA, 23 nt, Human
auuauuuauuaaaugcccagccc

SEQ ID NO: 2547938 - RNA, 22 nt, Human
auuauuuguguuuuaauuuaaa

SEQ ID NO: 2547939 - RNA, 15 nt, Human
auuauuuguguuuua

SEQ ID NO: 2547940 - RNA, 13 nt, Human
auuauuuuaaaag

SEQ ID NO: 2547941 - RNA, 23 nt, Human
auuauuuguguaauagaaaacug

SEQ ID NO: 2547942 - RNA, 20 nt, Human
auuauuuguguaauagaaaa

SEQ ID NO: 2547943 - RNA, 12 nt, Human
auuauuuguguu

SEQ ID NO: 2547944 - RNA, 13 nt, Human
auuauuuauuauu

SEQ ID NO: 2547945 - RNA, 18 nt, Human
auuauuuguguaauagaa

SEQ ID NO: 2547946 - RNA, 14 nt, Human
auuauuuuaaacaa

SEQ ID NO: 2547947 - RNA, 13 nt, Human
auuauuuuaaaca

SEQ ID NO: 2547948 - RNA, 14 nt, Human
auuauuuguuuucc

SEQ ID NO: 2547949 - RNA, 22 nt, Human
auuauuuguuauuuguacaguu

SEQ ID NO: 2547950 - RNA, 14 nt, Human
auuauuuuaaaaga

SEQ ID NO: 2547951 - RNA, 16 nt, Human
auuauuuuauguugca

SEQ ID NO: 2547952 - RNA, 18 nt, Human
auuauuuuauguugcaua

SEQ ID NO: 2547953 - RNA, 14 nt, Human
auuauuaaugaaaa

SEQ ID NO: 2547954 - RNA, 20 nt, Human
auuauguuuuuuaaaauauu

SEQ ID NO: 2547955 - RNA, 16 nt, Human
auuauguuuuuuaaaa

SEQ ID NO: 2547956 - RNA, 20 nt, Human
auuauguuuauauaaaugcu

SEQ ID NO: 2547957 - RNA, 16 nt, Human
auuauguuuauauaaa

SEQ ID NO: 2547958 - RNA, 12 nt, Human
auuauguuuaua

SEQ ID NO: 2547959 - RNA, 17 nt, Human
auuaucucacuugugcc

SEQ ID NO: 2547960 - RNA, 18 nt, Human
auuaucuuggaaagaaac

SEQ ID NO: 2547961 - RNA, 18 nt, Human
auuaucucaaaacugcac

SEQ ID NO: 2547962 - RNA, 23 nt, Human
auuaucucaaaacugcacuguca

SEQ ID NO: 2547963 - RNA, 22 nt, Human
auuaucuauacauaucuuuauu

SEQ ID NO: 2547964 - RNA, 20 nt, Human
auuaucgggagcagugucuu

SEQ ID NO: 2547965 - RNA, 21 nt, Human
auuaucgggagcagugucuuc

SEQ ID NO: 2547966 - RNA, 22 nt, Human
auuaucgggaacaguguuuccc

SEQ ID NO: 2547967 - RNA, 16 nt, Human
auuaucgggagcagug

SEQ ID NO: 2547968 - RNA, 17 nt, Human
auuaucgggagcagugu

SEQ ID NO: 2547969 - RNA, 19 nt, Human
auuaucgggagcagugucu

SEQ ID NO: 2547970 - RNA, 17 nt, Human
auuaucggaagcagugc

SEQ ID NO: 2547971 - RNA, 19 nt, Human
auuaucggaagcagugccu

SEQ ID NO: 2547972 - RNA, 21 nt, Human
auuaucggaagcagugccuuc

SEQ ID NO: 2547973 - RNA, 16 nt, Human
auuaucgggaacagug

SEQ ID NO: 2547974 - RNA, 17 nt, Human
auuaucgggaacagugu

SEQ ID NO: 2547975 - RNA, 18 nt, Human
auuaucgggaacaguguu

SEQ ID NO: 2547976 - RNA, 19 nt, Human
auuaucgggaacaguguuu

SEQ ID NO: 2547977 - RNA, 20 nt, Human
auuaucgggaacaguguuuc

SEQ ID NO: 2547978 - RNA, 17 nt, Human
auuauauuuacaaaugg

SEQ ID NO: 2547979 - RNA, 22 nt, Human
auuaucauguguaaucaauaaa

SEQ ID NO: 2547980 - RNA, 21 nt, Human
auuaucauguguaaucaauaa

SEQ ID NO: 2547981 - RNA, 17 nt, Human
auuauccagguaaucca

SEQ ID NO: 2547982 - RNA, 14 nt, Human
auuauccauauuga

SEQ ID NO: 2547983 - RNA, 17 nt, Human
auuauccauauugaguc

SEQ ID NO: 2547984 - RNA, 12 nt, Human
auuaucccugaa

SEQ ID NO: 2547985 - RNA, 16 nt, Human
auuauccuugcuauga

SEQ ID NO: 2547986 - RNA, 23 nt, Human
auuaucauuuuagaagacucuac

SEQ ID NO: 2547987 - RNA, 16 nt, Human
auuaucggaagcagug

SEQ ID NO: 2547988 - RNA, 12 nt, Human
auuaucagaugc

SEQ ID NO: 2547989 - RNA, 15 nt, Human
auuaucaugcaaaug

SEQ ID NO: 2547990 - RNA, 19 nt, Human
auuaucauguguaaucaau

SEQ ID NO: 2547991 - RNA, 17 nt, Human
auuaucauguguaauca

SEQ ID NO: 2547992 - RNA, 16 nt, Human
auuaucauguguaauc

SEQ ID NO: 2547993 - RNA, 14 nt, Human
auuaucauguguaa

SEQ ID NO: 2547994 - RNA, 13 nt, Human
auuaucaugugua

SEQ ID NO: 2547995 - RNA, 12 nt, Human
auuaucaugugu

SEQ ID NO: 2547996 - RNA, 17 nt, Human
auuaucaugcaaaugcu

SEQ ID NO: 2547997 - RNA, 21 nt, Human
auuauagaugggaaugaagcu

SEQ ID NO: 2547998 - RNA, 15 nt, Human
auuauaauuuaaugc

SEQ ID NO: 2547999 - RNA, 23 nt, Human
auuauaauuguaucagaggccua

SEQ ID NO: 2548000 - RNA, 15 nt, Human
auuauaauuguauca

SEQ ID NO: 2548001 - RNA, 13 nt, Human
auuauaauuguau

SEQ ID NO: 2548002 - RNA, 13 nt, Human
auuauaaugaauu

SEQ ID NO: 2548003 - RNA, 16 nt, Human
auuauauuuacaaaug

SEQ ID NO: 2548004 - RNA, 17 nt, Human
auuauaggaucauuugu

SEQ ID NO: 2548005 - RNA, 16 nt, Human
auuauaggccaaacug

SEQ ID NO: 2548006 - RNA, 23 nt, Human
auuacuuuaccacccccacaccu

SEQ ID NO: 2548007 - RNA, 12 nt, Human
auuacuuuacca

SEQ ID NO: 2548008 - RNA, 14 nt, Human
auuacuuugugaau

SEQ ID NO: 2548009 - RNA, 21 nt, Human
auuacuuuuccacaaaucagu

SEQ ID NO: 2548010 - RNA, 23 nt, Human
auuacugcuaaguauuucccagc

SEQ ID NO: 2548011 - RNA, 21 nt, Human
auuacugcuaaguauuuccca

SEQ ID NO: 2548012 - RNA, 19 nt, Human
auuacugcuaaguauuucc

SEQ ID NO: 2548013 - RNA, 13 nt, Human
auuagaagacauu

SEQ ID NO: 2548014 - RNA, 19 nt, Human
auuagaacaggcaagugaa

SEQ ID NO: 2548015 - RNA, 18 nt, Human
auuagaacaggcaaguga

SEQ ID NO: 2548016 - RNA, 23 nt, Human
auuagaacaggcaagugaagaaa

SEQ ID NO: 2548017 - RNA, 15 nt, Human
auuagaaauuagcug

SEQ ID NO: 2548018 - RNA, 20 nt, Human
auuagaaauuagcuguguga

SEQ ID NO: 2548019 - RNA, 23 nt, Human
auuagaaauuagcugugugaaau

SEQ ID NO: 2548020 - RNA, 17 nt, Human
auuagaaauuggcugga

SEQ ID NO: 2548021 - RNA, 13 nt, Human
auuagaaaauguu

SEQ ID NO: 2548022 - RNA, 18 nt, Human
auuagaaaauguuauuua

SEQ ID NO: 2548023 - RNA, 19 nt, Human
auuagaaaauguuauuuaa

SEQ ID NO: 2548024 - RNA, 22 nt, Human
auuagaaaauguuauuuaacag

SEQ ID NO: 2548025 - RNA, 16 nt, Human
auuagaaauagacagu

SEQ ID NO: 2548026 - RNA, 17 nt, Human
auuagaaacauaaauaa

SEQ ID NO: 2548027 - RNA, 22 nt, Human
auuagaaauagacaguauauuu

SEQ ID NO: 2548028 - RNA, 11 nt, Human
auuagaaauga

SEQ ID NO: 2548029 - RNA, 14 nt, Human
auuagaaugaaaau

SEQ ID NO: 2548030 - RNA, 13 nt, Human
auuagaauagugu

SEQ ID NO: 2548031 - RNA, 22 nt, Human
auuagaauaguguucugcaaaa

SEQ ID NO: 2548032 - RNA, 21 nt, Human
auuagaagauauuagucuugg

SEQ ID NO: 2548033 - RNA, 14 nt, Human
auuagaaguguuaa

SEQ ID NO: 2548034 - RNA, 18 nt, Human
auuagaaguguuaacuua

SEQ ID NO: 2548035 - RNA, 20 nt, Human
auuagaaguguuaacuuagc

SEQ ID NO: 2548036 - RNA, 22 nt, Human
auuauaauauacuauauuuaug

SEQ ID NO: 2548037 - RNA, 20 nt, Human
auuauaagaggcugauaauu

SEQ ID NO: 2548038 - RNA, 22 nt, Human
auuauaacuugucuaaauaagu

SEQ ID NO: 2548039 - RNA, 20 nt, Human
auuauaacuuaaaauauuuu

SEQ ID NO: 2548040 - RNA, 13 nt, Human
auuagaauuauuu

SEQ ID NO: 2548041 - RNA, 20 nt, Human
auuagagauuaccuccugag

SEQ ID NO: 2548042 - RNA, 16 nt, Human
auuauaacuuaaaaua

SEQ ID NO: 2548043 - RNA, 14 nt, Human
auuagagcauugaa

SEQ ID NO: 2548044 - RNA, 13 nt, Human
auuagagcaggcg

SEQ ID NO: 2548045 - RNA, 21 nt, Human
auuagagcagaugaccccucc

SEQ ID NO: 2548046 - RNA, 16 nt, Human
auuacauuuguauaaa

SEQ ID NO: 2548047 - RNA, 15 nt, Human
auuacauuuguauaa

SEQ ID NO: 2548048 - RNA, 19 nt, Human
auuaccacagacauacuaa

SEQ ID NO: 2548049 - RNA, 16 nt, Human
auuaccaaccuguuac

SEQ ID NO: 2548050 - RNA, 18 nt, Human
auuaccaaaaaucuuggg

SEQ ID NO: 2548051 - RNA, 13 nt, Human
auuacauuuguau

SEQ ID NO: 2548052 - RNA, 22 nt, Human
auuacauuuccaaaugaaugac

SEQ ID NO: 2548053 - RNA, 18 nt, Human
auuacauuuccaaaugaa

SEQ ID NO: 2548054 - RNA, 11 nt, Human
auuaaugcacu

SEQ ID NO: 2548055 - RNA, 12 nt, Human
auuaaugaaaua

SEQ ID NO: 2548056 - RNA, 17 nt, Human
auuaaucuuuuauauug

SEQ ID NO: 2548057 - RNA, 19 nt, Human
auuaaugaaaauaagaauu

SEQ ID NO: 2548058 - RNA, 23 nt, Human
auuaaucuuucuuuaccugagac

SEQ ID NO: 2548059 - RNA, 18 nt, Human
auuaaucuuucuuuaccu

SEQ ID NO: 2548060 - RNA, 17 nt, Human
auuaaugaaaauaagaa

SEQ ID NO: 2548061 - RNA, 18 nt, Human
auuaaugaaauaucugua

SEQ ID NO: 2548062 - RNA, 17 nt, Human
auuaaugaaauaucugu

SEQ ID NO: 2548063 - RNA, 15 nt, Human
auuaaugaaauaucu

SEQ ID NO: 2548064 - RNA, 13 nt, Human
auuaaugaaauau

SEQ ID NO: 2548065 - RNA, 19 nt, Human
auuaaugaaauaucuguau

SEQ ID NO: 2548066 - RNA, 16 nt, Human
auuaaugacacuuguc

SEQ ID NO: 2548067 - RNA, 20 nt, Human
auuaaugacacuugucccca

SEQ ID NO: 2548068 - RNA, 16 nt, Human
auuaaugacagagcca

SEQ ID NO: 2548069 - RNA, 21 nt, Human
auuaccgcguuguaaaauaua

SEQ ID NO: 2548070 - RNA, 12 nt, Human
auuaccuccuga

SEQ ID NO: 2548071 - RNA, 13 nt, Human
auuaccuccugag

SEQ ID NO: 2548072 - RNA, 17 nt, Human
auuaccuccugagaaaa

SEQ ID NO: 2548073 - RNA, 22 nt, Human
auuaccugaauuuuggcugugu

SEQ ID NO: 2548074 - RNA, 14 nt, Human
auuaccaaccuguu

SEQ ID NO: 2548075 - RNA, 20 nt, Human
auuaccagacgguucaccag

SEQ ID NO: 2548076 - RNA, 20 nt, Human
auuaccgcguuguaaaauau

SEQ ID NO: 2548077 - RNA, 19 nt, Human
auuaccgcguuguaaaaua

SEQ ID NO: 2548078 - RNA, 17 nt, Human
auuaccagaguuguucu

SEQ ID NO: 2548079 - RNA, 23 nt, Human
auuaccagacgguucaccagccu

SEQ ID NO: 2548080 - RNA, 18 nt, Human
auuaccgcguuguaaaau

SEQ ID NO: 2548081 - RNA, 21 nt, Human
auuaccuaguagucauuucau

SEQ ID NO: 2548082 - RNA, 13 nt, Human
auuaccucugaua

SEQ ID NO: 2548083 - RNA, 21 nt, Human
auuaccuuagauuagcucugg

SEQ ID NO: 2548084 - RNA, 13 nt, Human
auuaccuuacugu

SEQ ID NO: 2548085 - RNA, 12 nt, Human
auuaccuucucc

SEQ ID NO: 2548086 - RNA, 14 nt, Human
auuacugcaugcac

SEQ ID NO: 2548087 - RNA, 17 nt, Human
auuacugcaugcacuuc

SEQ ID NO: 2548088 - RNA, 13 nt, Human
auuacugccauuc

SEQ ID NO: 2548089 - RNA, 20 nt, Human
auuacugccauucacuucau

SEQ ID NO: 2548090 - RNA, 17 nt, Human
auuacugcuaaguauuu

SEQ ID NO: 2548091 - RNA, 16 nt, Human
auuacugcuaaguauu

SEQ ID NO: 2548092 - RNA, 12 nt, Human
auuacugcuaag

SEQ ID NO: 2548093 - RNA, 15 nt, Human
auuaaguaaugauaa

SEQ ID NO: 2548094 - RNA, 13 nt, Human
auuaaguaaugau

SEQ ID NO: 2548095 - RNA, 23 nt, Human
auuaauagcuuuuauuguauaaa

SEQ ID NO: 2548096 - RNA, 19 nt, Human
auuaauagcuuuuauugua

SEQ ID NO: 2548097 - RNA, 18 nt, Human
auuaauagcuuuuauugu

SEQ ID NO: 2548098 - RNA, 14 nt, Human
auuaauccagaaua

SEQ ID NO: 2548099 - RNA, 20 nt, Human
auuaauaucccuacauguau

SEQ ID NO: 2548100 - RNA, 19 nt, Human
auuaauaucccuacaugua

SEQ ID NO: 2548101 - RNA, 18 nt, Human
auuaauaucccuacaugu

SEQ ID NO: 2548102 - RNA, 12 nt, Human
auuaauaugaaa

SEQ ID NO: 2548103 - RNA, 14 nt, Human
auuaauaugaaaac

SEQ ID NO: 2548104 - RNA, 15 nt, Human
auuaauaugaaaacu

SEQ ID NO: 2548105 - RNA, 19 nt, Human
auuaaucaugaauguguaa

SEQ ID NO: 2548106 - RNA, 20 nt, Human
auuaauauggggaugcagca

SEQ ID NO: 2548107 - RNA, 22 nt, Human
uuuuuguuccacaaguuaaaua

SEQ ID NO: 2548108 - RNA, 16 nt, Human
auuaagaucucagugg

SEQ ID NO: 2548109 - RNA, 15 nt, Human
auuaagauggauucu

SEQ ID NO: 2548110 - RNA, 20 nt, Human
auuaagauggauucucagau

SEQ ID NO: 2548111 - RNA, 23 nt, Human
auuaagauggauucucagauauu

SEQ ID NO: 2548112 - RNA, 21 nt, Human
auuaagauaugggacauuuuu

SEQ ID NO: 2548113 - RNA, 17 nt, Human
auuaagaggcagaaaau

SEQ ID NO: 2548114 - RNA, 23 nt, Human
uuuuuuaaaaaagaaacauuugg

SEQ ID NO: 2548115 - RNA, 20 nt, Human
uuuuuguucuuaauugcacu

SEQ ID NO: 2548116 - RNA, 22 nt, Human
uuuuuguucuuaauugcacucu

SEQ ID NO: 2548117 - RNA, 14 nt, Human
auucaaacagucuc

SEQ ID NO: 2548118 - RNA, 15 nt, Human
auucaaacagucuca

SEQ ID NO: 2548119 - RNA, 14 nt, Human
auucagcucaugga

SEQ ID NO: 2548120 - RNA, 22 nt, Human
auucaaaauugacauugcuuua

SEQ ID NO: 2548121 - RNA, 17 nt, Human
auucagcggaauauuga

SEQ ID NO: 2548122 - RNA, 13 nt, Human
auuauuuucaagg

SEQ ID NO: 2548123 - RNA, 21 nt, Human
auuauuuuaaacaaaauagaa

SEQ ID NO: 2548124 - RNA, 15 nt, Human
auuauuuuaaacaaa

SEQ ID NO: 2548125 - RNA, 13 nt, Human
auuauuuuccaaa

SEQ ID NO: 2548126 - RNA, 21 nt, Human
auucaaaauugacauugcuuu

SEQ ID NO: 2548127 - RNA, 19 nt, Human
auucaaaauugacauugcu

SEQ ID NO: 2548128 - RNA, 16 nt, Human
auucaaaaugauguau

SEQ ID NO: 2548129 - RNA, 14 nt, Human
auuauuuuccaaaa

SEQ ID NO: 2548130 - RNA, 16 nt, Human
auucaaaaguugaaau

SEQ ID NO: 2548131 - RNA, 16 nt, Human
auucaguuguuagugu

SEQ ID NO: 2548132 - RNA, 23 nt, Human
auucaggaagcucagggccuggc

SEQ ID NO: 2548133 - RNA, 22 nt, Human
auucagcuagaacuuugaagga

SEQ ID NO: 2548134 - RNA, 21 nt, Human
auucaggaauguguggccugc

SEQ ID NO: 2548135 - RNA, 21 nt, Human
auucaguuguuagugugucuu

SEQ ID NO: 2548136 - RNA, 22 nt, Human
auucaggaagcucagggccugg

SEQ ID NO: 2548137 - RNA, 21 nt, Human
auucaggaagcucagggccug

SEQ ID NO: 2548138 - RNA, 14 nt, Human
auucagcucugcaa

SEQ ID NO: 2548139 - RNA, 18 nt, Human
auucagcucugcaagaau

SEQ ID NO: 2548140 - RNA, 23 nt, Human
auuccaugaauguaucaggaaau

SEQ ID NO: 2548141 - RNA, 17 nt, Human
auuccaugaauguauca

SEQ ID NO: 2548142 - RNA, 18 nt, Human
auuccaugaauguaucag

SEQ ID NO: 2548143 - RNA, 13 nt, Human
auuccaugaaugu

SEQ ID NO: 2548144 - RNA, 18 nt, Human
auuccacugcguugucca

SEQ ID NO: 2548145 - RNA, 15 nt, Human
auuccaugaauguau

SEQ ID NO: 2548146 - RNA, 16 nt, Human
auuccaugaauguauc

SEQ ID NO: 2548147 - RNA, 22 nt, Human
auuccacuacaccuggcugagg

SEQ ID NO: 2548148 - RNA, 19 nt, Human
auuccacuacaccuggcug

SEQ ID NO: 2548149 - RNA, 18 nt, Human
auuccacuacaccuggcu

SEQ ID NO: 2548150 - RNA, 17 nt, Human
auuccacuacaccuggc

SEQ ID NO: 2548151 - RNA, 12 nt, Human
auuccacuggac

SEQ ID NO: 2548152 - RNA, 16 nt, Human
auuccauucuggauuu

SEQ ID NO: 2548153 - RNA, 21 nt, Human
auuccauucuggaagugacuu

SEQ ID NO: 2548154 - RNA, 13 nt, Human
auucaguuuucau

SEQ ID NO: 2548155 - RNA, 15 nt, Human
auucaguuuucauuu

SEQ ID NO: 2548156 - RNA, 12 nt, Human
auucauaaaucu

SEQ ID NO: 2548157 - RNA, 14 nt, Human
auucaguuuucauu

SEQ ID NO: 2548158 - RNA, 23 nt, Human
auucauaagccaauuuuucugca

SEQ ID NO: 2548159 - RNA, 21 nt, Human
auucauaagccaauuuuucug

SEQ ID NO: 2548160 - RNA, 13 nt, Human
auuccacagcugc

SEQ ID NO: 2548161 - RNA, 20 nt, Human
auuccacuuauaggaauuga

SEQ ID NO: 2548162 - RNA, 16 nt, Human
auuccaccugcaauca

SEQ ID NO: 2548163 - RNA, 12 nt, Human
auuccacaucua

SEQ ID NO: 2548164 - RNA, 11 nt, Human
auucauaauaa

SEQ ID NO: 2548165 - RNA, 16 nt, Human
auuccacuacaccugg

SEQ ID NO: 2548166 - RNA, 22 nt, Human
auuccccacccugaaagcccug

SEQ ID NO: 2548167 - RNA, 20 nt, Human
auuccccagauugcaacagg

SEQ ID NO: 2548168 - RNA, 16 nt, Human
auuccccaggaggcca

SEQ ID NO: 2548169 - RNA, 15 nt, Human
auuccauuuaucuuu

SEQ ID NO: 2548170 - RNA, 15 nt, Human
auuccauugugugag

SEQ ID NO: 2548171 - RNA, 16 nt, Human
auuccauugugugagu

SEQ ID NO: 2548172 - RNA, 18 nt, Human
auuccauuuaucuuucua

SEQ ID NO: 2548173 - RNA, 17 nt, Human
auuccauuuaucuuucu

SEQ ID NO: 2548174 - RNA, 16 nt, Human
auuccguagccagcug

SEQ ID NO: 2548175 - RNA, 23 nt, Human
auuccguagccagcugcucccca

SEQ ID NO: 2548176 - RNA, 21 nt, Human
auuccgacaaccgaugcucca

SEQ ID NO: 2548177 - RNA, 19 nt, Human
auuccccaggaggccagcc

SEQ ID NO: 2548178 - RNA, 21 nt, Human
auucccuggccuuucauauuu

SEQ ID NO: 2548179 - RNA, 19 nt, Human
auucccuguacaauauuua

SEQ ID NO: 2548180 - RNA, 21 nt, Human
auucccuguacaauauuuaaa

SEQ ID NO: 2548181 - RNA, 16 nt, Human
auucccuucaucugga

SEQ ID NO: 2548182 - RNA, 19 nt, Human
auucccuucaucuggaacc

SEQ ID NO: 2548183 - RNA, 14 nt, Human
auuuacaaagugug

SEQ ID NO: 2548184 - RNA, 13 nt, Human
auuuacaaagugu

SEQ ID NO: 2548185 - RNA, 23 nt, Human
auuuacaaaaauauaaaauauga

SEQ ID NO: 2548186 - RNA, 20 nt, Human
auuuacaaaaauauaaaaua

SEQ ID NO: 2548187 - RNA, 18 nt, Human
auuuaauuuugacacuau

SEQ ID NO: 2548188 - RNA, 16 nt, Human
auuuaauuuugacacu

SEQ ID NO: 2548189 - RNA, 14 nt, Human
auuuaauuuugaca

SEQ ID NO: 2548190 - RNA, 22 nt, Human
auuuaauuugauaucacagucu

SEQ ID NO: 2548191 - RNA, 19 nt, Human
auuuaauuuugacacuaua

SEQ ID NO: 2548192 - RNA, 19 nt, Human
auuuacaaaaauauaaaau

SEQ ID NO: 2548193 - RNA, 16 nt, Human
auuuacaaaugggaaa

SEQ ID NO: 2548194 - RNA, 18 nt, Human
auuuacaaaguguguauu

SEQ ID NO: 2548195 - RNA, 17 nt, Human
auuuacaaaguguguau

SEQ ID NO: 2548196 - RNA, 16 nt, Human
auuuacaaagugugua

SEQ ID NO: 2548197 - RNA, 15 nt, Human
auuuacaaagugugu

SEQ ID NO: 2548198 - RNA, 20 nt, Human
auuuacaaaguguguauuaa

SEQ ID NO: 2548199 - RNA, 19 nt, Human
auuuacaaaguguguauua

SEQ ID NO: 2548200 - RNA, 22 nt, Human
auuuacaacugggggaggguga

SEQ ID NO: 2548201 - RNA, 23 nt, Human
auuuaccagccuccguauuucag

SEQ ID NO: 2548202 - RNA, 19 nt, Human
auuuacccuucuuuucuga

SEQ ID NO: 2548203 - RNA, 23 nt, Human
auuuaauuuuuuugagacagagu

SEQ ID NO: 2548204 - RNA, 19 nt, Human
auuuaauuuuuuugagaca

SEQ ID NO: 2548205 - RNA, 13 nt, Human
auuuaacugccuu

SEQ ID NO: 2548206 - RNA, 20 nt, Human
auuuaacuuaacauucugua

SEQ ID NO: 2548207 - RNA, 13 nt, Human
auuuaacuggcuu

SEQ ID NO: 2548208 - RNA, 13 nt, Human
auuuaacuugagc

SEQ ID NO: 2548209 - RNA, 17 nt, Human
auuuaacuugagcuuua

SEQ ID NO: 2548210 - RNA, 21 nt, Human
auuuaacuuaacauucuguaa

SEQ ID NO: 2548211 - RNA, 18 nt, Human
auuuaauuugauaucaca

SEQ ID NO: 2548212 - RNA, 13 nt, Human
auuuaauuuugac

SEQ ID NO: 2548213 - RNA, 18 nt, Human
auuuaacagucauuuaaa

SEQ ID NO: 2548214 - RNA, 17 nt, Human
auuuaacagucauuuaa

SEQ ID NO: 2548215 - RNA, 16 nt, Human
auuuaacagucauuua

SEQ ID NO: 2548216 - RNA, 15 nt, Human
auuuaacagucauuu

SEQ ID NO: 2548217 - RNA, 22 nt, Human
auuuaacagcugaauuaucuau

SEQ ID NO: 2548218 - RNA, 22 nt, Human
auuuaacagggucucuagugcu

SEQ ID NO: 2548219 - RNA, 17 nt, Human
auuuaacagggagggga

SEQ ID NO: 2548220 - RNA, 15 nt, Human
auuuaacagcugaau

SEQ ID NO: 2548221 - RNA, 21 nt, Human
auuuaacagcugaauuaucua

SEQ ID NO: 2548222 - RNA, 20 nt, Human
auuuaacagaaauguacagc

SEQ ID NO: 2548223 - RNA, 17 nt, Human
auuuaacagaaauguac

SEQ ID NO: 2548224 - RNA, 19 nt, Human
auuuaacagaaauguacag

SEQ ID NO: 2548225 - RNA, 15 nt, Human
auuuaacagaaaugu

SEQ ID NO: 2548226 - RNA, 16 nt, Human
auuuaacagaaaugua

SEQ ID NO: 2548227 - RNA, 18 nt, Human
auuuaaaggcccuaucug

SEQ ID NO: 2548228 - RNA, 20 nt, Human
auuuaaaggcccuaucuguu

SEQ ID NO: 2548229 - RNA, 21 nt, Human
auuuaaaggcccuaucuguuu

SEQ ID NO: 2548230 - RNA, 20 nt, Human
auuuaaaggguguacuuaua

SEQ ID NO: 2548231 - RNA, 11 nt, Human
auuuaaaacuu

SEQ ID NO: 2548232 - RNA, 15 nt, Human
auuuaaaacauguaa

SEQ ID NO: 2548233 - RNA, 14 nt, Human
auuuaaaacaugua

SEQ ID NO: 2548234 - RNA, 13 nt, Human
auuuaaaacaugu

SEQ ID NO: 2548235 - RNA, 20 nt, Human
auuuaaaauugugauguguc

SEQ ID NO: 2548236 - RNA, 19 nt, Human
auuuaaacaauaaaugugc

SEQ ID NO: 2548237 - RNA, 19 nt, Human
auuuaaaauugugaugugu

SEQ ID NO: 2548238 - RNA, 15 nt, Human
auuuaaaagacacug

SEQ ID NO: 2548239 - RNA, 15 nt, Human
auuuaaagccuccuc

SEQ ID NO: 2548240 - RNA, 19 nt, Human
auuuaaagcuuauuaaaac

SEQ ID NO: 2548241 - RNA, 15 nt, Human
auuuaaacaggccca

SEQ ID NO: 2548242 - RNA, 20 nt, Human
auuuaaacagcaguguuccc

SEQ ID NO: 2548243 - RNA, 16 nt, Human
auuuaaacagcagugu

SEQ ID NO: 2548244 - RNA, 15 nt, Human
auuuaaacagcagug

SEQ ID NO: 2548245 - RNA, 18 nt, Human
auuuaaacaggcccagca

SEQ ID NO: 2548246 - RNA, 17 nt, Human
auuuaaacaggcccagc

SEQ ID NO: 2548247 - RNA, 19 nt, Human
auuuaaacaggcccagcau

SEQ ID NO: 2548248 - RNA, 14 nt, Human
auuuaaacagcagu

SEQ ID NO: 2548249 - RNA, 17 nt, Human
auuggcuuguguguuuc

SEQ ID NO: 2548250 - RNA, 14 nt, Human
auuggcugagagac

SEQ ID NO: 2548251 - RNA, 22 nt, Human
auuggcugaacucaugagaagu

SEQ ID NO: 2548252 - RNA, 21 nt, Human
auuggcucacccaagcaaggc

SEQ ID NO: 2548253 - RNA, 17 nt, Human
auuggcugggaguggug

SEQ ID NO: 2548254 - RNA, 21 nt, Human
auuggcuuuauccucuuuaga

SEQ ID NO: 2548255 - RNA, 17 nt, Human
auuggcuuuauccucuu

SEQ ID NO: 2548256 - RNA, 22 nt, Human
auuggcuuguguguuucacuuu

SEQ ID NO: 2548257 - RNA, 18 nt, Human
auuggcuuguguguuuca

SEQ ID NO: 2548258 - RNA, 14 nt, Human
auuggcuuuauccu

SEQ ID NO: 2548259 - RNA, 23 nt, Human
auuggcuuuggguugcaggaccu

SEQ ID NO: 2548260 - RNA, 22 nt, Human
auuguauaaacuaucaguuugu

SEQ ID NO: 2548261 - RNA, 21 nt, Human
auuguauaaacuaucaguuug

SEQ ID NO: 2548262 - RNA, 17 nt, Human
auuguauaaacuaucag

SEQ ID NO: 2548263 - RNA, 13 nt, Human
auuguauaaacua

SEQ ID NO: 2548264 - RNA, 21 nt, Human
auuguauaaaaauagaagaau

SEQ ID NO: 2548265 - RNA, 23 nt, Human
auuggcuuuaaacacccuucaca

SEQ ID NO: 2548266 - RNA, 21 nt, Human
auugcuaaucaccaaaggcuc

SEQ ID NO: 2548267 - RNA, 21 nt, Human
auugcuacuacuuaccuacca

SEQ ID NO: 2548268 - RNA, 15 nt, Human
auugcuaagaugcuc

SEQ ID NO: 2548269 - RNA, 21 nt, Human
auuggcucacacugagaaugu

SEQ ID NO: 2548270 - RNA, 21 nt, Human
auuggcucuugaacugagcuu

SEQ ID NO: 2548271 - RNA, 18 nt, Human
auugcuaaauguaacagu

SEQ ID NO: 2548272 - RNA, 17 nt, Human
auugcuaaauguaacag

SEQ ID NO: 2548273 - RNA, 16 nt, Human
auugcuaaauguaaca

SEQ ID NO: 2548274 - RNA, 14 nt, Human
auugcuaaauguaa

SEQ ID NO: 2548275 - RNA, 13 nt, Human
auugcuaaaugua

SEQ ID NO: 2548276 - RNA, 21 nt, Human
auugcguuugaccuuuuaugu

SEQ ID NO: 2548277 - RNA, 20 nt, Human
auugcguuugaccuuuuaug

SEQ ID NO: 2548278 - RNA, 19 nt, Human
auugcgccauugcacucca

SEQ ID NO: 2548279 - RNA, 22 nt, Human
auuguauaagauuagaaugaaa

SEQ ID NO: 2548280 - RNA, 21 nt, Human
auuguauaagauuagaaugaa

SEQ ID NO: 2548281 - RNA, 18 nt, Human
auuguauaacagguuauu

SEQ ID NO: 2548282 - RNA, 17 nt, Human
auuguauaacagguuau

SEQ ID NO: 2548283 - RNA, 16 nt, Human
auuguauaacagguua

SEQ ID NO: 2548284 - RNA, 15 nt, Human
auuguauaacagguu

SEQ ID NO: 2548285 - RNA, 14 nt, Human
auuguauaacaggu

SEQ ID NO: 2548286 - RNA, 13 nt, Human
auuguauaacagg

SEQ ID NO: 2548287 - RNA, 11 nt, Human
auuguauauau

SEQ ID NO: 2548288 - RNA, 22 nt, Human
auuguauagagauaugcagaag

SEQ ID NO: 2548289 - RNA, 21 nt, Human
auuguauagagauaugcagaa

SEQ ID NO: 2548290 - RNA, 15 nt, Human
auuguauagagauau

SEQ ID NO: 2548291 - RNA, 15 nt, Human
auuguauauaugugu

SEQ ID NO: 2548292 - RNA, 13 nt, Human
auuguauauaugu

SEQ ID NO: 2548293 - RNA, 14 nt, Human
auuguauauucacu

SEQ ID NO: 2548294 - RNA, 13 nt, Human
auuguauauucac

SEQ ID NO: 2548295 - RNA, 22 nt, Human
auuguauauauguguguuuaaa

SEQ ID NO: 2548296 - RNA, 15 nt, Human
auuguauauucacuu

SEQ ID NO: 2548297 - RNA, 21 nt, Human
auuguaucagaggccuauaau

SEQ ID NO: 2548298 - RNA, 20 nt, Human
auuguaucagaggccuauaa

SEQ ID NO: 2548299 - RNA, 19 nt, Human
auuguaucagaggccuaua

SEQ ID NO: 2548300 - RNA, 17 nt, Human
auuguaucagaggccua

SEQ ID NO: 2548301 - RNA, 17 nt, Human
auuguaucguauagcug

SEQ ID NO: 2548302 - RNA, 16 nt, Human
auuguaucguauagcu

SEQ ID NO: 2548303 - RNA, 14 nt, Human
auuguauccugagg

SEQ ID NO: 2548304 - RNA, 15 nt, Human
auuguaucgauguua

SEQ ID NO: 2548305 - RNA, 15 nt, Human
auuguaucagaggcc

SEQ ID NO: 2548306 - RNA, 14 nt, Human
auuguaucagaggc

SEQ ID NO: 2548307 - RNA, 17 nt, Human
auuguauauuguguuug

SEQ ID NO: 2548308 - RNA, 15 nt, Human
auuguaugauguguu

SEQ ID NO: 2548309 - RNA, 14 nt, Human
auuguaugaugugu

SEQ ID NO: 2548310 - RNA, 21 nt, Human
auuguaugauguguugugaua

SEQ ID NO: 2548311 - RNA, 12 nt, Human
auuguaugaugu

SEQ ID NO: 2548312 - RNA, 13 nt, Human
auuguaugaugug

SEQ ID NO: 2548313 - RNA, 24 nt, Human
auuguaucguauagcuguauugaa

SEQ ID NO: 2548314 - RNA, 14 nt, Human
auuguaucuagugc

SEQ ID NO: 2548315 - RNA, 15 nt, Human
auuguaucuagugca

SEQ ID NO: 2548316 - RNA, 16 nt, Human
auuguaucuagugcag

SEQ ID NO: 2548317 - RNA, 18 nt, Human
auuguaucuagugcagcu

SEQ ID NO: 2548318 - RNA, 19 nt, Human
auuguaucuagugcagcug

SEQ ID NO: 2548319 - RNA, 21 nt, Human
auuguaucuagugcagcugau

SEQ ID NO: 2548320 - RNA, 23 nt, Human
auugugaaauaaaacuggcuuug

SEQ ID NO: 2548321 - RNA, 19 nt, Human
auugugccaauauguauug

SEQ ID NO: 2548322 - RNA, 15 nt, Human
auugugcuucuuucu

SEQ ID NO: 2548323 - RNA, 22 nt, Human
auuguuucaauugcaucuccca

SEQ ID NO: 2548324 - RNA, 13 nt, Human
auuguuucaauug

SEQ ID NO: 2548325 - RNA, 22 nt, Human
auuguuucauugcgaaucuuuu

SEQ ID NO: 2548326 - RNA, 16 nt, Human
auuuaaaacagacacu

SEQ ID NO: 2548327 - RNA, 17 nt, Human
auuuaaaacagacacug

SEQ ID NO: 2548328 - RNA, 18 nt, Human
auuuaaaacagacacugg

SEQ ID NO: 2548329 - RNA, 23 nt, Human
auuuaaaacagacacuggcaugg

SEQ ID NO: 2548330 - RNA, 19 nt, Human
auuguuugcuuauuguucc

SEQ ID NO: 2548331 - RNA, 21 nt, Human
auuguuugcuuauuguuccaa

SEQ ID NO: 2548332 - RNA, 23 nt, Human
auuguuugcuuauuguuccaaga

SEQ ID NO: 2548333 - RNA, 15 nt, Human
auuuaaaacagacac

SEQ ID NO: 2548334 - RNA, 22 nt, Human
auuguuugcuuauuguuccaag

SEQ ID NO: 2548335 - RNA, 19 nt, Human
auuguuugaaacaaagaag

SEQ ID NO: 2548336 - RNA, 18 nt, Human
auuguuugaaacaaagaa

SEQ ID NO: 2548337 - RNA, 17 nt, Human
auuguuugaaacaaaga

SEQ ID NO: 2548338 - RNA, 13 nt, Human
auuguuugaaaca

SEQ ID NO: 2548339 - RNA, 20 nt, Human
auuguuucuuuaagaaagua

SEQ ID NO: 2548340 - RNA, 19 nt, Human
auuguuucuuuaagaaagu

SEQ ID NO: 2548341 - RNA, 14 nt, Human
auuguuugcuuauu

SEQ ID NO: 2548342 - RNA, 15 nt, Human
auuguuugcuuauug

SEQ ID NO: 2548343 - RNA, 16 nt, Human
auuguuugcuuauugu

SEQ ID NO: 2548344 - RNA, 18 nt, Human
auuguuugcuuauuguuc

SEQ ID NO: 2548345 - RNA, 20 nt, Human
auuguuugaaacaaagaagg

SEQ ID NO: 2548346 - RNA, 13 nt, Human
auuguuugcuuau

SEQ ID NO: 2548347 - RNA, 14 nt, Human
auuguauuacaaau

SEQ ID NO: 2548348 - RNA, 18 nt, Human
auugucucuaaauugugg

SEQ ID NO: 2548349 - RNA, 15 nt, Human
auugucuccuugagu

SEQ ID NO: 2548350 - RNA, 15 nt, Human
auuguauuacaaauc

SEQ ID NO: 2548351 - RNA, 13 nt, Human
auugugccccugc

SEQ ID NO: 2548352 - RNA, 15 nt, Human
auugugaaauuauuc

SEQ ID NO: 2548353 - RNA, 14 nt, Human
auugucuuguucug

SEQ ID NO: 2548354 - RNA, 20 nt, Human
auugucuucggaaaccuugg

SEQ ID NO: 2548355 - RNA, 18 nt, Human
auugucuucggaaaccuu

SEQ ID NO: 2548356 - RNA, 23 nt, Human
auugucuucggaaaccuuggugu

SEQ ID NO: 2548357 - RNA, 14 nt, Human
auugcuacuguccu

SEQ ID NO: 2548358 - RNA, 19 nt, Human
auugcaguuuaucauucaa

SEQ ID NO: 2548359 - RNA, 18 nt, Human
auugcaguuuaucauuca

SEQ ID NO: 2548360 - RNA, 17 nt, Human
auugcaguuuaucauuc

SEQ ID NO: 2548361 - RNA, 14 nt, Human
auugcaguuuauca

SEQ ID NO: 2548362 - RNA, 17 nt, Human
auugcauuuccugacag

SEQ ID NO: 2548363 - RNA, 23 nt, Human
auugcaguuuaucauucaagugu

SEQ ID NO: 2548364 - RNA, 16 nt, Human
auugcauuuccugaca

SEQ ID NO: 2548365 - RNA, 17 nt, Human
auugccauauugcacau

SEQ ID NO: 2548366 - RNA, 16 nt, Human
auugccauauugcaca

SEQ ID NO: 2548367 - RNA, 15 nt, Human
auugccauauugcac

SEQ ID NO: 2548368 - RNA, 12 nt, Human
auugccauauug

SEQ ID NO: 2548369 - RNA, 23 nt, Human
auugccauuucuuccacaagagc

SEQ ID NO: 2548370 - RNA, 14 nt, Human
auugccaagggcuu

SEQ ID NO: 2548371 - RNA, 14 nt, Human
auugccaccaggag

SEQ ID NO: 2548372 - RNA, 15 nt, Human
auugccaccaggaga

SEQ ID NO: 2548373 - RNA, 22 nt, Human
auugccaagcucaggaccaggc

SEQ ID NO: 2548374 - RNA, 21 nt, Human
auugccaccaggagaaccacu

SEQ ID NO: 2548375 - RNA, 15 nt, Human
auugcccccagggca

SEQ ID NO: 2548376 - RNA, 18 nt, Human
auugccauucccugccug

SEQ ID NO: 2548377 - RNA, 18 nt, Human
auugcccauccaucugcu

SEQ ID NO: 2548378 - RNA, 22 nt, Human
auugcccccagggcacuucaca

SEQ ID NO: 2548379 - RNA, 16 nt, Human
auugcccccagggcac

SEQ ID NO: 2548380 - RNA, 13 nt, Human
auugccuauuuca

SEQ ID NO: 2548381 - RNA, 22 nt, Human
auugccauauugcacaugucuu

SEQ ID NO: 2548382 - RNA, 19 nt, Human
auugccauauugcacaugu

SEQ ID NO: 2548383 - RNA, 18 nt, Human
auugccauauugcacaug

SEQ ID NO: 2548384 - RNA, 21 nt, Human
auugcccacgcuggagugcag

SEQ ID NO: 2548385 - RNA, 17 nt, Human
auugcccacgcuggagu

SEQ ID NO: 2548386 - RNA, 19 nt, Human
auugcggacagccacggcc

SEQ ID NO: 2548387 - RNA, 18 nt, Human
auugcggacagccacggc

SEQ ID NO: 2548388 - RNA, 16 nt, Human
auugcggacagccacg

SEQ ID NO: 2548389 - RNA, 18 nt, Human
auugccuauuucaguggc

SEQ ID NO: 2548390 - RNA, 14 nt, Human
auugccugcagaga

SEQ ID NO: 2548391 - RNA, 13 nt, Human
auugccuccuccu

SEQ ID NO: 2548392 - RNA, 14 nt, Human
auugccuauuucag

SEQ ID NO: 2548393 - RNA, 11 nt, Human
auugcccuggu

SEQ ID NO: 2548394 - RNA, 13 nt, Human
auugaccugaggc

SEQ ID NO: 2548395 - RNA, 23 nt, Human
auugcaaagguuccaacuguaua

SEQ ID NO: 2548396 - RNA, 19 nt, Human
auugcaaaauagcauuugu

SEQ ID NO: 2548397 - RNA, 12 nt, Human
auugcaaaucuu

SEQ ID NO: 2548398 - RNA, 16 nt, Human
auugcaaaucuugaaa

SEQ ID NO: 2548399 - RNA, 17 nt, Human
auugcaaaucuugaaau

SEQ ID NO: 2548400 - RNA, 19 nt, Human
auugcaaaucuugaaauua

SEQ ID NO: 2548401 - RNA, 15 nt, Human
auugcaacaggcugg

SEQ ID NO: 2548402 - RNA, 17 nt, Human
auugaccgcgacuaauu

SEQ ID NO: 2548403 - RNA, 20 nt, Human
auugaccgcgacuaauuuca

SEQ ID NO: 2548404 - RNA, 23 nt, Human
auugaccgcgacuaauuucaaaa

SEQ ID NO: 2548405 - RNA, 21 nt, Human
auugacccacaagaaaugaaa

SEQ ID NO: 2548406 - RNA, 18 nt, Human
auugacagaucaagcugu

SEQ ID NO: 2548407 - RNA, 16 nt, Human
auucuccacagcaacc

SEQ ID NO: 2548408 - RNA, 13 nt, Human
auugacagcuuug

SEQ ID NO: 2548409 - RNA, 14 nt, Human
auugacagcuuugc

SEQ ID NO: 2548410 - RNA, 15 nt, Human
auugacagcuuugcu

SEQ ID NO: 2548411 - RNA, 16 nt, Human
auugacagcuuugcug

SEQ ID NO: 2548412 - RNA, 18 nt, Human
auugacagcuuugcugcu

SEQ ID NO: 2548413 - RNA, 19 nt, Human
auugacagcuuugcugcug

SEQ ID NO: 2548414 - RNA, 18 nt, Human
auugacaggauuauugga

SEQ ID NO: 2548415 - RNA, 20 nt, Human
auugcacaugucuuaaugaa

SEQ ID NO: 2548416 - RNA, 18 nt, Human
auugcacaugucuuaaug

SEQ ID NO: 2548417 - RNA, 22 nt, Human
auugcacaauauugaacuuuuu

SEQ ID NO: 2548418 - RNA, 16 nt, Human
auugcacaugucuuaa

SEQ ID NO: 2548419 - RNA, 13 nt, Human
auugcacuuuuaa

SEQ ID NO: 2548420 - RNA, 14 nt, Human
auugcacagggaga

SEQ ID NO: 2548421 - RNA, 23 nt, Human
auugcacucuaaaagguucaggg

SEQ ID NO: 2548422 - RNA, 20 nt, Human
auugcagaacuaaacucauu

SEQ ID NO: 2548423 - RNA, 22 nt, Human
auugcagaacuaaacucauuua

SEQ ID NO: 2548424 - RNA, 23 nt, Human
auugcaggagucccugccaucau

SEQ ID NO: 2548425 - RNA, 17 nt, Human
auugcagguggaacuca

SEQ ID NO: 2548426 - RNA, 16 nt, Human
auugcagguggaacuc

SEQ ID NO: 2548427 - RNA, 21 nt, Human
auugcaacaggcugggcuuca

SEQ ID NO: 2548428 - RNA, 16 nt, Human
auugcaacaggcuggg

SEQ ID NO: 2548429 - RNA, 11 nt, Human
auugcacaaua

SEQ ID NO: 2548430 - RNA, 13 nt, Human
auugcacaauauu

SEQ ID NO: 2548431 - RNA, 18 nt, Human
auucuccaccugccaggg

SEQ ID NO: 2548432 - RNA, 17 nt, Human
auucuccaccugccagg

SEQ ID NO: 2548433 - RNA, 16 nt, Human
auucuccaccugccag

SEQ ID NO: 2548434 - RNA, 21 nt, Human
auugacagaucaagcugugag

SEQ ID NO: 2548435 - RNA, 13 nt, Human
auugacagaagcu

SEQ ID NO: 2548436 - RNA, 20 nt, Human
auugacacuuaaaaaugguu

SEQ ID NO: 2548437 - RNA, 18 nt, Human
auucucagaaucucaaau

SEQ ID NO: 2548438 - RNA, 20 nt, Human
auucucagaaucucaaauaa

SEQ ID NO: 2548439 - RNA, 13 nt, Human
auucuccaccugc

SEQ ID NO: 2548440 - RNA, 23 nt, Human
auucucagauauuuauauuuuua

SEQ ID NO: 2548441 - RNA, 17 nt, Human
auucucacuccaccacc

SEQ ID NO: 2548442 - RNA, 16 nt, Human
auucucagauauuuau

SEQ ID NO: 2548443 - RNA, 13 nt, Human
auucuacuuugag

SEQ ID NO: 2548444 - RNA, 16 nt, Human
auucuacuuugagugc

SEQ ID NO: 2548445 - RNA, 13 nt, Human
auucuacacagag

SEQ ID NO: 2548446 - RNA, 18 nt, Human
auucuaaugucuucauuu

SEQ ID NO: 2548447 - RNA, 17 nt, Human
auucuacuuuaagcacu

SEQ ID NO: 2548448 - RNA, 14 nt, Human
auucucaccaggaa

SEQ ID NO: 2548449 - RNA, 13 nt, Human
auucucaccagga

SEQ ID NO: 2548450 - RNA, 16 nt, Human
auucucaccaggaagg

SEQ ID NO: 2548451 - RNA, 14 nt, Human
auucucacuccacc

SEQ ID NO: 2548452 - RNA, 15 nt, Human
auucucacuccacca

SEQ ID NO: 2548453 - RNA, 16 nt, Human
auucucacuccaccac

SEQ ID NO: 2548454 - RNA, 14 nt, Human
auucucagaaucuc

SEQ ID NO: 2548455 - RNA, 23 nt, Human
auuucuuuugccguuauuaaaaa

SEQ ID NO: 2548456 - RNA, 13 nt, Human
auuuuacaauuga

SEQ ID NO: 2548457 - RNA, 18 nt, Human
auuuuaauuuuaaccaaa

SEQ ID NO: 2548458 - RNA, 21 nt, Human
auuuguaucugaaggagauuu

SEQ ID NO: 2548459 - RNA, 18 nt, Human
auuuuaauuuaugaguuu

SEQ ID NO: 2548460 - RNA, 12 nt, Human
auuuuacaauuu

SEQ ID NO: 2548461 - RNA, 17 nt, Human
auuuuacaauugaaaug

SEQ ID NO: 2548462 - RNA, 21 nt, Human
auuuuacaauugaaaugacua

SEQ ID NO: 2548463 - RNA, 17 nt, Human
auuuuaccuuugacaaa

SEQ ID NO: 2548464 - RNA, 20 nt, Human
auuuuacuguacagacagaa

SEQ ID NO: 2548465 - RNA, 22 nt, Human
auuuuacuguacagacagaaaa

SEQ ID NO: 2548466 - RNA, 17 nt, Human
auuuuacuacuguggaa

SEQ ID NO: 2548467 - RNA, 22 nt, Human
auuuuacuacuguggaaaaaua

SEQ ID NO: 2548468 - RNA, 18 nt, Human
auuuuacuucuagagaua

SEQ ID NO: 2548469 - RNA, 16 nt, Human
auuuuaauaauguuuc

SEQ ID NO: 2548470 - RNA, 15 nt, Human
auuuuaauaauguuu

SEQ ID NO: 2548471 - RNA, 17 nt, Human
auuuguaucugaaggag

SEQ ID NO: 2548472 - RNA, 14 nt, Human
auuuguaucugaag

SEQ ID NO: 2548473 - RNA, 23 nt, Human
auuuguaucucugaagcauguuu

SEQ ID NO: 2548474 - RNA, 22 nt, Human
auuuguaucucugaagcauguu

SEQ ID NO: 2548475 - RNA, 14 nt, Human
auuuuaauaauguu

SEQ ID NO: 2548476 - RNA, 15 nt, Human
auuuguaucacaaau

SEQ ID NO: 2548477 - RNA, 21 nt, Human
auuuguauaguugcuugccug

SEQ ID NO: 2548478 - RNA, 18 nt, Human
auuuguauaguugcuugc

SEQ ID NO: 2548479 - RNA, 21 nt, Human
auuuguaucucugaagcaugu

SEQ ID NO: 2548480 - RNA, 20 nt, Human
auuuguaucucugaagcaug

SEQ ID NO: 2548481 - RNA, 19 nt, Human
auuuguaucucugaagcau

SEQ ID NO: 2548482 - RNA, 21 nt, Human
auuuguauaaaauaauuuuua

SEQ ID NO: 2548483 - RNA, 16 nt, Human
auuuguauaguugcuu

SEQ ID NO: 2548484 - RNA, 20 nt, Human
auuuguagaaggguuauauu

SEQ ID NO: 2548485 - RNA, 13 nt, Human
auuuuauuaugca

SEQ ID NO: 2548486 - RNA, 18 nt, Human
auuuuauguugcauagaa

SEQ ID NO: 2548487 - RNA, 21 nt, Human
auuuuacuuuaaaaggagcca

SEQ ID NO: 2548488 - RNA, 21 nt, Human
auuuuauguugcauagaauaa

SEQ ID NO: 2548489 - RNA, 14 nt, Human
auuuuauguugcau

SEQ ID NO: 2548490 - RNA, 18 nt, Human
auuuuacuacuguggaaa

SEQ ID NO: 2548491 - RNA, 20 nt, Human
auuuuauuacaucuuucaca

SEQ ID NO: 2548492 - RNA, 17 nt, Human
auuuuauuaugcaugaa

SEQ ID NO: 2548493 - RNA, 14 nt, Human
auuuuauuaugcau

SEQ ID NO: 2548494 - RNA, 15 nt, Human
auuuuauuaugcaug

SEQ ID NO: 2548495 - RNA, 18 nt, Human
auuuuauuguaacagaca

SEQ ID NO: 2548496 - RNA, 16 nt, Human
auuuuauuguaacaga

SEQ ID NO: 2548497 - RNA, 15 nt, Human
auuuuauuguaacag

SEQ ID NO: 2548498 - RNA, 14 nt, Human
auuuuauuguaaca

SEQ ID NO: 2548499 - RNA, 14 nt, Human
auuuuauugcuuga

SEQ ID NO: 2548500 - RNA, 22 nt, Human
auuuuauuuagacaagagaugg

SEQ ID NO: 2548501 - RNA, 21 nt, Human
auuuuauuguaacagacauug

SEQ ID NO: 2548502 - RNA, 20 nt, Human
auuuuauuguaacagacauu

SEQ ID NO: 2548503 - RNA, 17 nt, Human
auuuuauuuagacaaga

SEQ ID NO: 2548504 - RNA, 23 nt, Human
auuuuauuuccuggacauccucu

SEQ ID NO: 2548505 - RNA, 19 nt, Human
auuuuauuuagacaagaga

SEQ ID NO: 2548506 - RNA, 22 nt, Human
auuuuauuguaacagacauugu

SEQ ID NO: 2548507 - RNA, 14 nt, Human
auuuuauuugacaa

SEQ ID NO: 2548508 - RNA, 16 nt, Human
auuuauuauggcacau

SEQ ID NO: 2548509 - RNA, 23 nt, Human
auuuccuguuggauuuguuuaaa

SEQ ID NO: 2548510 - RNA, 22 nt, Human
auuuccuguuggauuuguuuaa

SEQ ID NO: 2548511 - RNA, 21 nt, Human
auuuccuguuggauuuguuua

SEQ ID NO: 2548512 - RNA, 16 nt, Human
auuuccuguuggauuu

SEQ ID NO: 2548513 - RNA, 21 nt, Human
auuuccuggugugaagguccu

SEQ ID NO: 2548514 - RNA, 17 nt, Human
auuuccuggugugaagg

SEQ ID NO: 2548515 - RNA, 12 nt, Human
auuuauuauuga

SEQ ID NO: 2548516 - RNA, 14 nt, Human
auuuccugugucuu

SEQ ID NO: 2548517 - RNA, 12 nt, Human
auuucuaaaucu

SEQ ID NO: 2548518 - RNA, 13 nt, Human
auuucuaaaucuc

SEQ ID NO: 2548519 - RNA, 21 nt, Human
auuucuaaaucuccaaaauaa

SEQ ID NO: 2548520 - RNA, 14 nt, Human
auuuccuugaaugu

SEQ ID NO: 2548521 - RNA, 18 nt, Human
auuuccuuaaacugugug

SEQ ID NO: 2548522 - RNA, 23 nt, Human
auuuauuaaacagauuuuuacaa

SEQ ID NO: 2548523 - RNA, 22 nt, Human
auuuauuaaacagauuuuuaca

SEQ ID NO: 2548524 - RNA, 23 nt, Human
auuuauuaaaaugauuguaaaau

SEQ ID NO: 2548525 - RNA, 21 nt, Human
auuuauuaaaaugauuguaaa

SEQ ID NO: 2548526 - RNA, 19 nt, Human
auuuauuaaaaugauugua

SEQ ID NO: 2548527 - RNA, 22 nt, Human
auuuauguuugcacuugugauu

SEQ ID NO: 2548528 - RNA, 23 nt, Human
auuuagguuuuuguuuguuuccu

SEQ ID NO: 2548529 - RNA, 18 nt, Human
auuuagguuuuuauuagu

SEQ ID NO: 2548530 - RNA, 19 nt, Human
auuuagguuuuuauuagua

SEQ ID NO: 2548531 - RNA, 23 nt, Human
auuuagguuucugaguuccugca

SEQ ID NO: 2548532 - RNA, 17 nt, Human
auuuagguuuuuauuag

SEQ ID NO: 2548533 - RNA, 22 nt, Human
auuuauuacuguaagaaaauau

SEQ ID NO: 2548534 - RNA, 20 nt, Human
auuuauuaaaugcccagccc

SEQ ID NO: 2548535 - RNA, 16 nt, Human
auuuauuaguuaauau

SEQ ID NO: 2548536 - RNA, 13 nt, Human
auuuauuauggca

SEQ ID NO: 2548537 - RNA, 17 nt, Human
auuuagccaaugcuuac

SEQ ID NO: 2548538 - RNA, 18 nt, Human
auuuagccaccaucuuug

SEQ ID NO: 2548539 - RNA, 21 nt, Human
auuuagcuaaacggauuccaa

SEQ ID NO: 2548540 - RNA, 22 nt, Human
auuuagcuaaacggauuccaaa

SEQ ID NO: 2548541 - RNA, 18 nt, Human
auuuagcguagcuaagug

SEQ ID NO: 2548542 - RNA, 16 nt, Human
auuuacguuuuuguaa

SEQ ID NO: 2548543 - RNA, 19 nt, Human
auuuacgcuuugauucaua

SEQ ID NO: 2548544 - RNA, 15 nt, Human
auuuacgcuuugauu

SEQ ID NO: 2548545 - RNA, 17 nt, Human
auuuacgcuuugauuca

SEQ ID NO: 2548546 - RNA, 22 nt, Human
auuuagggagaaauguuguuca

SEQ ID NO: 2548547 - RNA, 20 nt, Human
auuuagggagaaauguuguu

SEQ ID NO: 2548548 - RNA, 18 nt, Human
auuuagggaacugcuuga

SEQ ID NO: 2548549 - RNA, 17 nt, Human
auuuagguuucugaguu

SEQ ID NO: 2548550 - RNA, 21 nt, Human
auuuagguuucugaguuccug

SEQ ID NO: 2548551 - RNA, 14 nt, Human
auuuagguuucuga

SEQ ID NO: 2548552 - RNA, 15 nt, Human
auuuagggcaaggag

SEQ ID NO: 2548553 - RNA, 14 nt, Human
auuuaggagaagcc

SEQ ID NO: 2548554 - RNA, 17 nt, Human
auuuaggagaagccagg

SEQ ID NO: 2548555 - RNA, 21 nt, Human
auuuagggaaagguaguguau

SEQ ID NO: 2548556 - RNA, 22 nt, Human
auuuaggcagauugaaaaggac

SEQ ID NO: 2548557 - RNA, 16 nt, Human
auuuagggaacugcuu

SEQ ID NO: 2548558 - RNA, 23 nt, Human
auuuagcuaaacggauuccaaag

SEQ ID NO: 2548559 - RNA, 18 nt, Human
auuugagguuaagacaaa

SEQ ID NO: 2548560 - RNA, 18 nt, Human
auuugagugauuauuugu

SEQ ID NO: 2548561 - RNA, 22 nt, Human
auuugaggucuguucuuuccaa

SEQ ID NO: 2548562 - RNA, 19 nt, Human
auuugaguguuuuaagaua

SEQ ID NO: 2548563 - RNA, 14 nt, Human
auuugagugcucug

SEQ ID NO: 2548564 - RNA, 16 nt, Human
auuugagugcucugau

SEQ ID NO: 2548565 - RNA, 12 nt, Human
auuugaguguuu

SEQ ID NO: 2548566 - RNA, 23 nt, Human
auuugaggagcagcuucaguugu

SEQ ID NO: 2548567 - RNA, 22 nt, Human
auuugaggagcagcuucaguug

SEQ ID NO: 2548568 - RNA, 19 nt, Human
auuugaggagcagcuucag

SEQ ID NO: 2548569 - RNA, 22 nt, Human
auuugaggacaaccauuccaga

SEQ ID NO: 2548570 - RNA, 17 nt, Human
auuugagcagggcucag

SEQ ID NO: 2548571 - RNA, 23 nt, Human
auuugaggucuguucuuuccaaa

SEQ ID NO: 2548572 - RNA, 15 nt, Human
auuugaggucuguuc

SEQ ID NO: 2548573 - RNA, 22 nt, Human
auuugaggggaaaacaccauaa

SEQ ID NO: 2548574 - RNA, 17 nt, Human
auuugaggggaaaacac

SEQ ID NO: 2548575 - RNA, 13 nt, Human
auuugaggucaag

SEQ ID NO: 2548576 - RNA, 22 nt, Human
auuugaggucaaguaagaagac

SEQ ID NO: 2548577 - RNA, 21 nt, Human
auuucuuugccuguucaguua

SEQ ID NO: 2548578 - RNA, 20 nt, Human
auuucuuugccuguucaguu

SEQ ID NO: 2548579 - RNA, 19 nt, Human
auuucuuugccuguucagu

SEQ ID NO: 2548580 - RNA, 17 nt, Human
auuucuuugccuguuca

SEQ ID NO: 2548581 - RNA, 23 nt, Human
auuucuuuguuaucaaacuucag

SEQ ID NO: 2548582 - RNA, 22 nt, Human
auuucuuuguuaucaaacuuca

SEQ ID NO: 2548583 - RNA, 23 nt, Human
auuucuuugccuguucaguuaca

SEQ ID NO: 2548584 - RNA, 21 nt, Human
auuucuuuguuaucaaacuuc

SEQ ID NO: 2548585 - RNA, 19 nt, Human
auuucuuugugcuuuggcu

SEQ ID NO: 2548586 - RNA, 20 nt, Human
auuucuuuugccguuauuaa

SEQ ID NO: 2548587 - RNA, 14 nt, Human
auuugaaugcauuu

SEQ ID NO: 2548588 - RNA, 12 nt, Human
auuugaaugcau

SEQ ID NO: 2548589 - RNA, 19 nt, Human
auuugaaugaaaaauuuaa

SEQ ID NO: 2548590 - RNA, 20 nt, Human
auuugaauguaugcuucaua

SEQ ID NO: 2548591 - RNA, 21 nt, Human
auuugaauguaugcuucauac

SEQ ID NO: 2548592 - RNA, 22 nt, Human
auuugaauguaugcuucauaca

SEQ ID NO: 2548593 - RNA, 17 nt, Human
auuugaauguaugcuuc

SEQ ID NO: 2548594 - RNA, 18 nt, Human
auuugaauguaugcuuca

SEQ ID NO: 2548595 - RNA, 16 nt, Human
auuugaaugcauuuug

SEQ ID NO: 2548596 - RNA, 15 nt, Human
auuugaaugcauuuu

SEQ ID NO: 2548597 - RNA, 18 nt, Human
auuugaaugcauuuuguu

SEQ ID NO: 2548598 - RNA, 17 nt, Human
auuugaauggguccauu

SEQ ID NO: 2548599 - RNA, 18 nt, Human
auuugaauggguccauuu

SEQ ID NO: 2548600 - RNA, 17 nt, Human
auuuggugguuucagaa

SEQ ID NO: 2548601 - RNA, 23 nt, Human
auuuggucaagauuuugaaugcu

SEQ ID NO: 2548602 - RNA, 17 nt, Human
auuuggguucugccugc

SEQ ID NO: 2548603 - RNA, 21 nt, Human
auuugguaaauuaguauuuau

SEQ ID NO: 2548604 - RNA, 23 nt, Human
auuugguaaggggaauugaggac

SEQ ID NO: 2548605 - RNA, 21 nt, Human
auuuggagacacaacuauuuu

SEQ ID NO: 2548606 - RNA, 12 nt, Human
auuuggggugga

SEQ ID NO: 2548607 - RNA, 23 nt, Human
auuugggguagcuagaggaacca

SEQ ID NO: 2548608 - RNA, 21 nt, Human
auuuggggcuugcaugccaaa

SEQ ID NO: 2548609 - RNA, 16 nt, Human
auuuggggcuuauuuu

SEQ ID NO: 2548610 - RNA, 21 nt, Human
auuugggguagcuagaggaac

SEQ ID NO: 2548611 - RNA, 14 nt, Human
auuuggaauacuuu

SEQ ID NO: 2548612 - RNA, 15 nt, Human
auuuggaauacuuuu

SEQ ID NO: 2548613 - RNA, 13 nt, Human
auuuggaauacuu

SEQ ID NO: 2548614 - RNA, 20 nt, Human
auuuggagacacaacuauuu

SEQ ID NO: 2548615 - RNA, 18 nt, Human
auuuggaauuuauauaca

SEQ ID NO: 2548616 - RNA, 18 nt, Human
auuuggugguuucagaaa

SEQ ID NO: 2548617 - RNA, 20 nt, Human
auuuggugguuucagaaaug

SEQ ID NO: 2548618 - RNA, 18 nt, Human
auuuguaguguuggagaa

SEQ ID NO: 2548619 - RNA, 23 nt, Human
auuuguacugaaaaaugguaauu

SEQ ID NO: 2548620 - RNA, 23 nt, Human
auuuguaaaagaacaguaaacau

SEQ ID NO: 2548621 - RNA, 23 nt, Human
auuuguaaaaacagcauugcuuu

SEQ ID NO: 2548622 - RNA, 22 nt, Human
auuuguaaaaacagcauugcuu

SEQ ID NO: 2548623 - RNA, 20 nt, Human
auauauaaguguacauaugu

SEQ ID NO: 2548624 - RNA, 16 nt, Human
auauauaaguguacau

SEQ ID NO: 2548625 - RNA, 15 nt, Human
auauauaaguguaca

SEQ ID NO: 2548626 - RNA, 13 nt, Human
auauauaaccagu

SEQ ID NO: 2548627 - RNA, 18 nt, Human
auauauaaauauauauaa

SEQ ID NO: 2548628 - RNA, 14 nt, Human
auauauaaauauau

SEQ ID NO: 2548629 - RNA, 12 nt, Human
auauauaaccag

SEQ ID NO: 2548630 - RNA, 17 nt, Human
auauauaaauaaauaua

SEQ ID NO: 2548631 - RNA, 16 nt, Human
auauauaaauaaauau

SEQ ID NO: 2548632 - RNA, 13 nt, Human
auauauaaauaua

SEQ ID NO: 2548633 - RNA, 13 nt, Human
auauauaaauaaa

SEQ ID NO: 2548634 - RNA, 12 nt, Human
auauauaaauaa

SEQ ID NO: 2548635 - RNA, 11 nt, Human
auauauaaaua

SEQ ID NO: 2548636 - RNA, 14 nt, Human
auauauaacaaugc

SEQ ID NO: 2548637 - RNA, 21 nt, Human
auauauaaaccuaaaaaagau

SEQ ID NO: 2548638 - RNA, 20 nt, Human
auauauaaaauaaauauaua

SEQ ID NO: 2548639 - RNA, 18 nt, Human
auauauaaaauaaauaua

SEQ ID NO: 2548640 - RNA, 10 nt, Human
auauauaaau

SEQ ID NO: 2548641 - RNA, 16 nt, Human
auauauaaaauaaaua

SEQ ID NO: 2548642 - RNA, 14 nt, Human
auauauaaaauaaa

SEQ ID NO: 2548643 - RNA, 13 nt, Human
auauauaaaauaa

SEQ ID NO: 2548644 - RNA, 21 nt, Human
auauauaaaaagaaaagauaa

SEQ ID NO: 2548645 - RNA, 22 nt, Human
auauaacuuauauuguaagaaa

SEQ ID NO: 2548646 - RNA, 13 nt, Human
auauaaauauaua

SEQ ID NO: 2548647 - RNA, 12 nt, Human
auauaaauauau

SEQ ID NO: 2548648 - RNA, 11 nt, Human
auauaaauaua

SEQ ID NO: 2548649 - RNA, 23 nt, Human
auauaaccacaaagcacaguuug

SEQ ID NO: 2548650 - RNA, 21 nt, Human
auauaacuuaaaaauguaaau

SEQ ID NO: 2548651 - RNA, 16 nt, Human
auauaacuuauauugu

SEQ ID NO: 2548652 - RNA, 20 nt, Human
auauaacuuauauuguaaga

SEQ ID NO: 2548653 - RNA, 21 nt, Human
auauaacuuauauuguaagaa

SEQ ID NO: 2548654 - RNA, 14 nt, Human
auauaaauauauau

SEQ ID NO: 2548655 - RNA, 20 nt, Human
auauaacugccuuaaaacuu

SEQ ID NO: 2548656 - RNA, 18 nt, Human
auauaacuauugcccagg

SEQ ID NO: 2548657 - RNA, 13 nt, Human
auauaacugccuu

SEQ ID NO: 2548658 - RNA, 19 nt, Human
auauaaaguaguccuguga

SEQ ID NO: 2548659 - RNA, 20 nt, Human
auauaaaaggcaaaugugua

SEQ ID NO: 2548660 - RNA, 22 nt, Human
auauaaaacuguacuucacugu

SEQ ID NO: 2548661 - RNA, 13 nt, Human
auauaaaggaaaa

SEQ ID NO: 2548662 - RNA, 14 nt, Human
auauaaagauguua

SEQ ID NO: 2548663 - RNA, 16 nt, Human
auauaaaagacugacc

SEQ ID NO: 2548664 - RNA, 19 nt, Human
auauaaauaaauauauaua

SEQ ID NO: 2548665 - RNA, 17 nt, Human
auauaaauaaauauaua

SEQ ID NO: 2548666 - RNA, 16 nt, Human
auauaaauaaauauau

SEQ ID NO: 2548667 - RNA, 15 nt, Human
auauaaauaaauaua

SEQ ID NO: 2548668 - RNA, 22 nt, Human
auauaaauaaauauauauaucc

SEQ ID NO: 2548669 - RNA, 15 nt, Human
auauaaauaaaacau

SEQ ID NO: 2548670 - RNA, 14 nt, Human
auauaaauaaauau

SEQ ID NO: 2548671 - RNA, 18 nt, Human
auauaaauaaaacauuuu

SEQ ID NO: 2548672 - RNA, 16 nt, Human
auauauauauauauaa

SEQ ID NO: 2548673 - RNA, 15 nt, Human
auauauauauauauu

SEQ ID NO: 2548674 - RNA, 14 nt, Human
auauauauccucug

SEQ ID NO: 2548675 - RNA, 13 nt, Human
auauauauauaaa

SEQ ID NO: 2548676 - RNA, 14 nt, Human
auauauauaaauaa

SEQ ID NO: 2548677 - RNA, 19 nt, Human
auauauaauucuguacaua

SEQ ID NO: 2548678 - RNA, 14 nt, Human
auauauauauauaa

SEQ ID NO: 2548679 - RNA, 15 nt, Human
auauauaauucugua

SEQ ID NO: 2548680 - RNA, 22 nt, Human
auauauaagauggaagcuucca

SEQ ID NO: 2548681 - RNA, 12 nt, Human
auauauauaaau

SEQ ID NO: 2548682 - RNA, 16 nt, Human
auauauaugccaugau

SEQ ID NO: 2548683 - RNA, 21 nt, Human
auauauaucugcuguccagac

SEQ ID NO: 2548684 - RNA, 20 nt, Human
auauauauguguguguaugu

SEQ ID NO: 2548685 - RNA, 20 nt, Human
auauaucauauugguauuca

SEQ ID NO: 2548686 - RNA, 13 nt, Human
auauaucauauug

SEQ ID NO: 2548687 - RNA, 15 nt, Human
auauaucaugaguga

SEQ ID NO: 2548688 - RNA, 10 nt, Human
auauauauuu

SEQ ID NO: 2548689 - RNA, 13 nt, Human
auauauauuuuaa

SEQ ID NO: 2548690 - RNA, 18 nt, Human
auauaucugcuucagugg

SEQ ID NO: 2548691 - RNA, 17 nt, Human
auauaucugcuucagug

SEQ ID NO: 2548692 - RNA, 15 nt, Human
auauaucugcuucag

SEQ ID NO: 2548693 - RNA, 20 nt, Human
auauaucugcuguccagaca

SEQ ID NO: 2548694 - RNA, 19 nt, Human
auauaucugcuguccagac

SEQ ID NO: 2548695 - RNA, 15 nt, Human
auauaucuaucuuau

SEQ ID NO: 2548696 - RNA, 16 nt, Human
auauaucccagaaauu

SEQ ID NO: 2548697 - RNA, 12 nt, Human
auauauccucug

SEQ ID NO: 2548698 - RNA, 19 nt, Human
auauaucuaaauugaauaa

SEQ ID NO: 2548699 - RNA, 18 nt, Human
auauaucuaaauugaaua

SEQ ID NO: 2548700 - RNA, 17 nt, Human
auauaucuaaauuuaga

SEQ ID NO: 2548701 - RNA, 14 nt, Human
auauaucuaucuua

SEQ ID NO: 2548702 - RNA, 21 nt, Human
uucacuguugaaaauuauuuu

SEQ ID NO: 2548703 - RNA, 15 nt, Human
uucacuuacagcacc

SEQ ID NO: 2548704 - RNA, 15 nt, Human
uucacuuauauguuc

SEQ ID NO: 2548705 - RNA, 23 nt, Human
uucacuguauaaauaggagagga

SEQ ID NO: 2548706 - RNA, 22 nt, Human
uucacuguauaaauaggagagg

SEQ ID NO: 2548707 - RNA, 21 nt, Human
uucacugucaggaagaaauca

SEQ ID NO: 2548708 - RNA, 13 nt, Human
auauaugaggacu

SEQ ID NO: 2548709 - RNA, 22 nt, Human
uucacugucaggaagaaaucac

SEQ ID NO: 2548710 - RNA, 22 nt, Human
uucacuguccuccaagccagcg

SEQ ID NO: 2548711 - RNA, 15 nt, Human
auaguuagaaccugg

SEQ ID NO: 2548712 - RNA, 12 nt, Human
auaguuacuguu

SEQ ID NO: 2548713 - RNA, 20 nt, Human
auaguuacuccagugccaac

SEQ ID NO: 2548714 - RNA, 22 nt, Human
auaguuaagcgugcauaaguua

SEQ ID NO: 2548715 - RNA, 23 nt, Human
auaguuaggauagcauuuuugau

SEQ ID NO: 2548716 - RNA, 16 nt, Human
auaguuacuguuguga

SEQ ID NO: 2548717 - RNA, 15 nt, Human
auaguucaaagccaa

SEQ ID NO: 2548718 - RNA, 17 nt, Human
auaguucccauguuaaa

SEQ ID NO: 2548719 - RNA, 22 nt, Human
auaguucccuagucuauucauu

SEQ ID NO: 2548720 - RNA, 18 nt, Human
auaguugagccagcagac

SEQ ID NO: 2548721 - RNA, 17 nt, Human
auaguugagccagcaga

SEQ ID NO: 2548722 - RNA, 14 nt, Human
auaguuuacaugua

SEQ ID NO: 2548723 - RNA, 18 nt, Human
auaguugugggugggaga

SEQ ID NO: 2548724 - RNA, 17 nt, Human
auaguuguggacauuua

SEQ ID NO: 2548725 - RNA, 13 nt, Human
auaguuguaacua

SEQ ID NO: 2548726 - RNA, 20 nt, Human
auaguuguaccgcaauguga

SEQ ID NO: 2548727 - RNA, 22 nt, Human
auaguuggcuaggaccccucca

SEQ ID NO: 2548728 - RNA, 23 nt, Human
auaguugagccagcagacauugu

SEQ ID NO: 2548729 - RNA, 22 nt, Human
auaguugagccagcagacauug

SEQ ID NO: 2548730 - RNA, 21 nt, Human
auaguugagccagcagacauu

SEQ ID NO: 2548731 - RNA, 20 nt, Human
auaguugagccagcagacau

SEQ ID NO: 2548732 - RNA, 13 nt, Human
auaguugagcccc

SEQ ID NO: 2548733 - RNA, 19 nt, Human
auaguugcuccgccucugc

SEQ ID NO: 2548734 - RNA, 18 nt, Human
auaguuuuuaagguuauu

SEQ ID NO: 2548735 - RNA, 14 nt, Human
auaguuuauugaca

SEQ ID NO: 2548736 - RNA, 13 nt, Human
auaguuuauugac

SEQ ID NO: 2548737 - RNA, 17 nt, Human
auaguuuaccugaauaa

SEQ ID NO: 2548738 - RNA, 15 nt, Human
auaguuuacuauuuu

SEQ ID NO: 2548739 - RNA, 16 nt, Human
auaguuuacuauuuua

SEQ ID NO: 2548740 - RNA, 22 nt, Human
auaguuuacuauuuuacuucua

SEQ ID NO: 2548741 - RNA, 17 nt, Human
auauaaaacuguacuuc

SEQ ID NO: 2548742 - RNA, 22 nt, Human
auauaaaacugcguuaaaggcu

SEQ ID NO: 2548743 - RNA, 13 nt, Human
auauaaaacugcg

SEQ ID NO: 2548744 - RNA, 22 nt, Human
auauaaaaagaaaagauaaaga

SEQ ID NO: 2548745 - RNA, 23 nt, Human
auauaaaaagaaaagauaaagau

SEQ ID NO: 2548746 - RNA, 20 nt, Human
auauaaaaagaaaagauaaa

SEQ ID NO: 2548747 - RNA, 18 nt, Human
auauaaaaagaaaagaua

SEQ ID NO: 2548748 - RNA, 17 nt, Human
auauaaaaagaaaagau

SEQ ID NO: 2548749 - RNA, 23 nt, Human
auauaaaaaccccaaacuguuga

SEQ ID NO: 2548750 - RNA, 20 nt, Human
auaguuuuuaagguuauuua

SEQ ID NO: 2548751 - RNA, 19 nt, Human
auaguuuuuaagguuauuu

SEQ ID NO: 2548752 - RNA, 14 nt, Human
auauaaaaaacuuu

SEQ ID NO: 2548753 - RNA, 21 nt, Human
auagugaggcaucgcaaugua

SEQ ID NO: 2548754 - RNA, 20 nt, Human
auagugauguaaucuugaau

SEQ ID NO: 2548755 - RNA, 18 nt, Human
auagugacuaugaacuuc

SEQ ID NO: 2548756 - RNA, 17 nt, Human
auagucuuuugcuuuug

SEQ ID NO: 2548757 - RNA, 16 nt, Human
auagucuuuugcuuuu

SEQ ID NO: 2548758 - RNA, 14 nt, Human
auagucuuuugcuu

SEQ ID NO: 2548759 - RNA, 13 nt, Human
auagucuguguga

SEQ ID NO: 2548760 - RNA, 13 nt, Human
auagucuuucagu

SEQ ID NO: 2548761 - RNA, 20 nt, Human
auagucuagauggcuccucu

SEQ ID NO: 2548762 - RNA, 21 nt, Human
auaggcgaucacaacgugcau

SEQ ID NO: 2548763 - RNA, 11 nt, Human
auaggcucugc

SEQ ID NO: 2548764 - RNA, 12 nt, Human
auaggcucugca

SEQ ID NO: 2548765 - RNA, 13 nt, Human
auaggcucugcac

SEQ ID NO: 2548766 - RNA, 14 nt, Human
auaggcucugcaca

SEQ ID NO: 2548767 - RNA, 15 nt, Human
auaggcucugcacag

SEQ ID NO: 2548768 - RNA, 19 nt, Human
auaggcucugcacagaugg

SEQ ID NO: 2548769 - RNA, 23 nt, Human
auaguguggaaauuaagaagaaa

SEQ ID NO: 2548770 - RNA, 12 nt, Human
auaguguguucu

SEQ ID NO: 2548771 - RNA, 13 nt, Human
auaguguguucug

SEQ ID NO: 2548772 - RNA, 14 nt, Human
auaguguguucuga

SEQ ID NO: 2548773 - RNA, 14 nt, Human
auaguguaaaauaa

SEQ ID NO: 2548774 - RNA, 22 nt, Human
auagugggcccuccgacagccc

SEQ ID NO: 2548775 - RNA, 13 nt, Human
auaguguaaaaua

SEQ ID NO: 2548776 - RNA, 21 nt, Human
auaguguuaaucaauuuaaac

SEQ ID NO: 2548777 - RNA, 20 nt, Human
auaguguuaaucaauuuaaa

SEQ ID NO: 2548778 - RNA, 18 nt, Human
auaguguuaaucaauuua

SEQ ID NO: 2548779 - RNA, 16 nt, Human
auaguguuaaucaauu

SEQ ID NO: 2548780 - RNA, 22 nt, Human
auaguguucugcaaaaauauuu

SEQ ID NO: 2548781 - RNA, 15 nt, Human
auaguguguucugau

SEQ ID NO: 2548782 - RNA, 17 nt, Human
auaguguguucugauua

SEQ ID NO: 2548783 - RNA, 19 nt, Human
auaguguguucugauuaga

SEQ ID NO: 2548784 - RNA, 21 nt, Human
auaguguguucugauuagaaa

SEQ ID NO: 2548785 - RNA, 15 nt, Human
auaguguuaaucaau

SEQ ID NO: 2548786 - RNA, 12 nt, Human
auaguguuaauc

SEQ ID NO: 2548787 - RNA, 23 nt, Human
auaguguguucugauuagaaaug

SEQ ID NO: 2548788 - RNA, 23 nt, Human
auagugcucgcuuucuauguagu

SEQ ID NO: 2548789 - RNA, 20 nt, Human
auagugcucgcuuucuaugu

SEQ ID NO: 2548790 - RNA, 17 nt, Human
auaguggcuuaaaacaa

SEQ ID NO: 2548791 - RNA, 15 nt, Human
auaguggugugauuu

SEQ ID NO: 2548792 - RNA, 17 nt, Human
auagugcuuaaaaauca

SEQ ID NO: 2548793 - RNA, 22 nt, Human
auaguggacauuguuggcagca

SEQ ID NO: 2548794 - RNA, 20 nt, Human
auagugggcaccccacugca

SEQ ID NO: 2548795 - RNA, 16 nt, Human
auaguggggagacuuc

SEQ ID NO: 2548796 - RNA, 22 nt, Human
uuauuuuucuaagguucucaua

SEQ ID NO: 2548797 - RNA, 14 nt, Human
uuauuuuucuaaaa

SEQ ID NO: 2548798 - RNA, 23 nt, Human
uuauuuuugacaguguugaaaau

SEQ ID NO: 2548799 - RNA, 10 nt, Human
uuauuuuucu

SEQ ID NO: 2548800 - RNA, 19 nt, Human
uuauuuuucauauugugcc

SEQ ID NO: 2548801 - RNA, 16 nt, Human
uuauuuuucauauugu

SEQ ID NO: 2548802 - RNA, 14 nt, Human
uuauuuuucauauu

SEQ ID NO: 2548803 - RNA, 16 nt, Human
uuauuuuuuaauuauu

SEQ ID NO: 2548804 - RNA, 14 nt, Human
uuauuuuuuaauua

SEQ ID NO: 2548805 - RNA, 23 nt, Human
uuauuuuuguuucuuccaaagca

SEQ ID NO: 2548806 - RNA, 18 nt, Human
uuauuuuuuaaguauuua

SEQ ID NO: 2548807 - RNA, 18 nt, Human
uuauuuuuuacauuauua

SEQ ID NO: 2548808 - RNA, 14 nt, Human
uuauuuuuuacauu

SEQ ID NO: 2548809 - RNA, 13 nt, Human
uuauuuuuucaga

SEQ ID NO: 2548810 - RNA, 12 nt, Human
uuauuuuuucag

SEQ ID NO: 2548811 - RNA, 13 nt, Human
uuauuuuuuauug

SEQ ID NO: 2548812 - RNA, 20 nt, Human
uuauuuuuuuaagcuguaaa

SEQ ID NO: 2548813 - RNA, 20 nt, Human
uuauuuuuucagaccgaaaa

SEQ ID NO: 2548814 - RNA, 13 nt, Human
uuauuuuuuccca

SEQ ID NO: 2548815 - RNA, 19 nt, Human
uuauuuuuucagaccgaaa

SEQ ID NO: 2548816 - RNA, 16 nt, Human
uuauuuuuucagaccg

SEQ ID NO: 2548817 - RNA, 15 nt, Human
uuauuuuuucagacc

SEQ ID NO: 2548818 - RNA, 14 nt, Human
uuauuuuuucagac

SEQ ID NO: 2548819 - RNA, 13 nt, Human
uuauuuuuuucug

SEQ ID NO: 2548820 - RNA, 17 nt, Human
uuauuuuuuucugaauu

SEQ ID NO: 2548821 - RNA, 17 nt, Human
uucaaaaccuuuugaaa

SEQ ID NO: 2548822 - RNA, 14 nt, Human
uuauuuuuuucuac

SEQ ID NO: 2548823 - RNA, 20 nt, Human
uuaguuuuuaaaauaucuuu

SEQ ID NO: 2548824 - RNA, 12 nt, Human
uuaguuuugauu

SEQ ID NO: 2548825 - RNA, 16 nt, Human
uuaguuuugaugaguu

SEQ ID NO: 2548826 - RNA, 16 nt, Human
uuaguuuguguguugu

SEQ ID NO: 2548827 - RNA, 15 nt, Human
uuaguuuuaguugca

SEQ ID NO: 2548828 - RNA, 17 nt, Human
uuaguuuuaguugcaga

SEQ ID NO: 2548829 - RNA, 17 nt, Human
uuaguuuuuguaauuua

SEQ ID NO: 2548830 - RNA, 18 nt, Human
uuaguuuuuguaauuuau

SEQ ID NO: 2548831 - RNA, 13 nt, Human
uuauuuuuaaaau

SEQ ID NO: 2548832 - RNA, 19 nt, Human
uuaguuuuuguaauuuauu

SEQ ID NO: 2548833 - RNA, 17 nt, Human
uuauuuuuagacagagu

SEQ ID NO: 2548834 - RNA, 18 nt, Human
uuauuuuuacauucugaa

SEQ ID NO: 2548835 - RNA, 20 nt, Human
uuauuuuuauaucagccuga

SEQ ID NO: 2548836 - RNA, 18 nt, Human
uuauuuuuagacagaguc

SEQ ID NO: 2548837 - RNA, 18 nt, Human
uucaagagauuuaauuaa

SEQ ID NO: 2548838 - RNA, 18 nt, Human
uucaagacauuaaaucua

SEQ ID NO: 2548839 - RNA, 18 nt, Human
uucaagaccuucucccca

SEQ ID NO: 2548840 - RNA, 23 nt, Human
uucaagcagucgugccugugucc

SEQ ID NO: 2548841 - RNA, 15 nt, Human
uucaagcauuaagaa

SEQ ID NO: 2548842 - RNA, 22 nt, Human
uucaagcagucgugccuguguc

SEQ ID NO: 2548843 - RNA, 18 nt, Human
uucaagcagucgugccug

SEQ ID NO: 2548844 - RNA, 17 nt, Human
uucaagcagucgugccu

SEQ ID NO: 2548845 - RNA, 17 nt, Human
uucaagcagauuggaga

SEQ ID NO: 2548846 - RNA, 20 nt, Human
uucaagcgauucuucugccu

SEQ ID NO: 2548847 - RNA, 21 nt, Human
uucaagcgauucuucugcuuc

SEQ ID NO: 2548848 - RNA, 19 nt, Human
uucaagguaauuucuugug

SEQ ID NO: 2548849 - RNA, 20 nt, Human
uucaagguggccaaauuauu

SEQ ID NO: 2548850 - RNA, 18 nt, Human
uucaagguggccaaauua

SEQ ID NO: 2548851 - RNA, 22 nt, Human
uucaagguggccaaauuauuug

SEQ ID NO: 2548852 - RNA, 17 nt, Human
uucaagguggccaaauu

SEQ ID NO: 2548853 - RNA, 18 nt, Human
uucaaacagucucaggaa

SEQ ID NO: 2548854 - RNA, 14 nt, Human
uucaaacauauaua

SEQ ID NO: 2548855 - RNA, 23 nt, Human
uucaagaauaaucacgcuuuccu

SEQ ID NO: 2548856 - RNA, 14 nt, Human
uucaaacacaaaug

SEQ ID NO: 2548857 - RNA, 16 nt, Human
uucaaaauuguuacaa

SEQ ID NO: 2548858 - RNA, 17 nt, Human
uucaaacacaaaugcag

SEQ ID NO: 2548859 - RNA, 15 nt, Human
uucaaacacaaaugc

SEQ ID NO: 2548860 - RNA, 21 nt, Human
uucaaaauuguuacaaauugu

SEQ ID NO: 2548861 - RNA, 14 nt, Human
uucaaaauaaaaac

SEQ ID NO: 2548862 - RNA, 20 nt, Human
uucaaaaguauuuuccugua

SEQ ID NO: 2548863 - RNA, 21 nt, Human
uucaaaagaaucagaaacagg

SEQ ID NO: 2548864 - RNA, 21 nt, Human
uucaaaaguauuuuccuguaa

SEQ ID NO: 2548865 - RNA, 16 nt, Human
uucaaaaguugaaauu

SEQ ID NO: 2548866 - RNA, 17 nt, Human
uucaaaaguugaaauua

SEQ ID NO: 2548867 - RNA, 20 nt, Human
uucacaguucucuccuucuu

SEQ ID NO: 2548868 - RNA, 15 nt, Human
uucacaguucucucc

SEQ ID NO: 2548869 - RNA, 20 nt, Human
uucacagaugggugcuugga

SEQ ID NO: 2548870 - RNA, 12 nt, Human
uucacagagugu

SEQ ID NO: 2548871 - RNA, 21 nt, Human
uucacagagugugcuggagga

SEQ ID NO: 2548872 - RNA, 20 nt, Human
uucacacuuccaccagccug

SEQ ID NO: 2548873 - RNA, 18 nt, Human
uucacacuuccaccagcc

SEQ ID NO: 2548874 - RNA, 19 nt, Human
uucacacuuccaccagccu

SEQ ID NO: 2548875 - RNA, 13 nt, Human
uucacaugaacau

SEQ ID NO: 2548876 - RNA, 20 nt, Human
uucacaucuaaccucaucuu

SEQ ID NO: 2548877 - RNA, 19 nt, Human
uucacaugagcuauuucca

SEQ ID NO: 2548878 - RNA, 14 nt, Human
uucacaugaacaua

SEQ ID NO: 2548879 - RNA, 18 nt, Human
uucacaugcaucaaguua

SEQ ID NO: 2548880 - RNA, 18 nt, Human
uucacaucuaaccucauc

SEQ ID NO: 2548881 - RNA, 19 nt, Human
uucacaucuaaccucaucu

SEQ ID NO: 2548882 - RNA, 21 nt, Human
uucacauccuguguuucuagg

SEQ ID NO: 2548883 - RNA, 12 nt, Human
uucacagcuccu

SEQ ID NO: 2548884 - RNA, 20 nt, Human
uucacaguucuuugggccag

SEQ ID NO: 2548885 - RNA, 13 nt, Human
uucacaguucucu

SEQ ID NO: 2548886 - RNA, 23 nt, Human
uucacaguuggcuggaugaaauu

SEQ ID NO: 2548887 - RNA, 21 nt, Human
uucacaguucuuugggccaga

SEQ ID NO: 2548888 - RNA, 19 nt, Human
uucacauccuguguuucua

SEQ ID NO: 2548889 - RNA, 23 nt, Human
uucacaagacccaaaaggcagaa

SEQ ID NO: 2548890 - RNA, 17 nt, Human
uucaagugauucucaug

SEQ ID NO: 2548891 - RNA, 21 nt, Human
uucaaguacuguaacuguguc

SEQ ID NO: 2548892 - RNA, 18 nt, Human
uucaaguaauucugcugu

SEQ ID NO: 2548893 - RNA, 15 nt, Human
uucaaguaauucugc

SEQ ID NO: 2548894 - RNA, 16 nt, Human
uucaaguaauugugaa

SEQ ID NO: 2548895 - RNA, 21 nt, Human
uucaaguauuagggguaauau

SEQ ID NO: 2548896 - RNA, 17 nt, Human
uucaagugaaucuaaaa

SEQ ID NO: 2548897 - RNA, 21 nt, Human
uucacaccugacucugaaauc

SEQ ID NO: 2548898 - RNA, 19 nt, Human
uucacaccugacucugaaa

SEQ ID NO: 2548899 - RNA, 14 nt, Human
uucacaccugacuc

SEQ ID NO: 2548900 - RNA, 22 nt, Human
uucacacucucacauguuuaga

SEQ ID NO: 2548901 - RNA, 14 nt, Human
uucacacucucaca

SEQ ID NO: 2548902 - RNA, 13 nt, Human
uucacacugucug

SEQ ID NO: 2548903 - RNA, 21 nt, Human
uucacacugcaagagccuugg

SEQ ID NO: 2548904 - RNA, 12 nt, Human
uucacacuucca

SEQ ID NO: 2548905 - RNA, 15 nt, Human
uucacacuuccacca

SEQ ID NO: 2548906 - RNA, 16 nt, Human
uucaagucaccuccuu

SEQ ID NO: 2548907 - RNA, 13 nt, Human
uucacaauagaaa

SEQ ID NO: 2548908 - RNA, 20 nt, Human
uucacaaugaaaugcucucc

SEQ ID NO: 2548909 - RNA, 21 nt, Human
uucacacacaggcaacugagg

SEQ ID NO: 2548910 - RNA, 17 nt, Human
auaggaaaaacugauuu

SEQ ID NO: 2548911 - RNA, 16 nt, Human
auaggaaaaacugauu

SEQ ID NO: 2548912 - RNA, 14 nt, Human
auaggaaaaacuga

SEQ ID NO: 2548913 - RNA, 12 nt, Human
auaggaaaaacu

SEQ ID NO: 2548914 - RNA, 15 nt, Human
auagcuuuuauugua

SEQ ID NO: 2548915 - RNA, 19 nt, Human
uucacauucuuauaaauau

SEQ ID NO: 2548916 - RNA, 14 nt, Human
auagcuuuuauugu

SEQ ID NO: 2548917 - RNA, 22 nt, Human
auagcuuuucccuuuuuuuaag

SEQ ID NO: 2548918 - RNA, 20 nt, Human
uucacauucuuauaaauaug

SEQ ID NO: 2548919 - RNA, 16 nt, Human
uucacauucuuauaaa

SEQ ID NO: 2548920 - RNA, 13 nt, Human
uucacauucuuau

SEQ ID NO: 2548921 - RNA, 12 nt, Human
uucacauucuua

SEQ ID NO: 2548922 - RNA, 22 nt, Human
uucacauuaauauuugcugaca

SEQ ID NO: 2548923 - RNA, 17 nt, Human
auaggcguaacuaauuu

SEQ ID NO: 2548924 - RNA, 13 nt, Human
auaggagccugcu

SEQ ID NO: 2548925 - RNA, 12 nt, Human
auaggagccugc

SEQ ID NO: 2548926 - RNA, 24 nt, Human
auaggagaggaugagagcccagag

SEQ ID NO: 2548927 - RNA, 23 nt, Human
auaggagaggaugagagcccaga

SEQ ID NO: 2548928 - RNA, 16 nt, Human
auaggagccugcuggu

SEQ ID NO: 2548929 - RNA, 15 nt, Human
auaggagccugcugg

SEQ ID NO: 2548930 - RNA, 14 nt, Human
auaggccugggugc

SEQ ID NO: 2548931 - RNA, 21 nt, Human
auaggagaggaugagagccca

SEQ ID NO: 2548932 - RNA, 20 nt, Human
auaggagaggaugagagccc

SEQ ID NO: 2548933 - RNA, 19 nt, Human
auaggagaggaugagagcc

SEQ ID NO: 2548934 - RNA, 14 nt, Human
auaggagaggauga

SEQ ID NO: 2548935 - RNA, 20 nt, Human
auaggaccuuuccaccacag

SEQ ID NO: 2548936 - RNA, 14 nt, Human
auaggaccuuucca

SEQ ID NO: 2548937 - RNA, 23 nt, Human
auaggaccuuuccaccacagcca

SEQ ID NO: 2548938 - RNA, 22 nt, Human
auaggacucaaaguuucagaga

SEQ ID NO: 2548939 - RNA, 22 nt, Human
auaggaauugacccacaagaaa

SEQ ID NO: 2548940 - RNA, 15 nt, Human
auaggaacauaugaa

SEQ ID NO: 2548941 - RNA, 16 nt, Human
auaggaacauaugaaa

SEQ ID NO: 2548942 - RNA, 18 nt, Human
auaggaacauaugaaaau

SEQ ID NO: 2548943 - RNA, 21 nt, Human
auaggaacauaugaaaauaca

SEQ ID NO: 2548944 - RNA, 19 nt, Human
auaggaaaaguacauuuaa

SEQ ID NO: 2548945 - RNA, 21 nt, Human
auaggaaaguauuuuuuuaag

SEQ ID NO: 2548946 - RNA, 18 nt, Human
auagcuuuuauuguauaa

SEQ ID NO: 2548947 - RNA, 17 nt, Human
auagcuuuuauuguaua

SEQ ID NO: 2548948 - RNA, 18 nt, Human
auaggaaaaguacauuua

SEQ ID NO: 2548949 - RNA, 16 nt, Human
uucccaagcucugcuc

SEQ ID NO: 2548950 - RNA, 15 nt, Human
uucccaagcucugcu

SEQ ID NO: 2548951 - RNA, 14 nt, Human
uucccaagcucugc

SEQ ID NO: 2548952 - RNA, 13 nt, Human
uucccaagcucug

SEQ ID NO: 2548953 - RNA, 12 nt, Human
uucccaaauuuc

SEQ ID NO: 2548954 - RNA, 18 nt, Human
uucccaacuccagaaagu

SEQ ID NO: 2548955 - RNA, 17 nt, Human
uucccaacucuagcugg

SEQ ID NO: 2548956 - RNA, 18 nt, Human
uucccaacucuagcuggg

SEQ ID NO: 2548957 - RNA, 15 nt, Human
uucccaacucuagcu

SEQ ID NO: 2548958 - RNA, 18 nt, Human
uucccaagcucugcuccu

SEQ ID NO: 2548959 - RNA, 11 nt, Human
uucccaagcuc

SEQ ID NO: 2548960 - RNA, 20 nt, Human
uucccaauagcaacguagcu

SEQ ID NO: 2548961 - RNA, 17 nt, Human
uucccacaccuccacag

SEQ ID NO: 2548962 - RNA, 16 nt, Human
uucccacaccuccaca

SEQ ID NO: 2548963 - RNA, 13 nt, Human
uucccaauugcuu

SEQ ID NO: 2548964 - RNA, 21 nt, Human
uucccacaccuccacaguuca

SEQ ID NO: 2548965 - RNA, 18 nt, Human
uucccacaggacauuucu

SEQ ID NO: 2548966 - RNA, 14 nt, Human
uucccaauucacau

SEQ ID NO: 2548967 - RNA, 23 nt, Human
uucccaauagcaacguagcuucu

SEQ ID NO: 2548968 - RNA, 14 nt, Human
uucccaauuaggaa

SEQ ID NO: 2548969 - RNA, 15 nt, Human
uucccacccaucgcu

SEQ ID NO: 2548970 - RNA, 22 nt, Human
uucccaccucucucacuccuug

SEQ ID NO: 2548971 - RNA, 12 nt, Human
uucccaccucuc

SEQ ID NO: 2548972 - RNA, 15 nt, Human
uucccaccaaggucu

SEQ ID NO: 2548973 - RNA, 18 nt, Human
uucccaccaggcugcuca

SEQ ID NO: 2548974 - RNA, 22 nt, Human
uuccagugaggcucugcccuug

SEQ ID NO: 2548975 - RNA, 21 nt, Human
uuccagugaggcucugcccuu

SEQ ID NO: 2548976 - RNA, 20 nt, Human
uuccagugaggcucugcccu

SEQ ID NO: 2548977 - RNA, 19 nt, Human
uuccagugaggcucugccc

SEQ ID NO: 2548978 - RNA, 19 nt, Human
uuccagggucccucugugu

SEQ ID NO: 2548979 - RNA, 18 nt, Human
uuccagggucccucugug

SEQ ID NO: 2548980 - RNA, 16 nt, Human
uuccagggucccucug

SEQ ID NO: 2548981 - RNA, 21 nt, Human
uuccaggggugggacacccug

SEQ ID NO: 2548982 - RNA, 17 nt, Human
uuccagugaggcucugc

SEQ ID NO: 2548983 - RNA, 20 nt, Human
uuccagggucccucugugua

SEQ ID NO: 2548984 - RNA, 17 nt, Human
uuccagguaucuccagg

SEQ ID NO: 2548985 - RNA, 15 nt, Human
uuccaggugggguga

SEQ ID NO: 2548986 - RNA, 19 nt, Human
uuccagguaucuccaggau

SEQ ID NO: 2548987 - RNA, 18 nt, Human
uuccagguaucuccagga

SEQ ID NO: 2548988 - RNA, 23 nt, Human
uucccaaagcagugcaugcuguc

SEQ ID NO: 2548989 - RNA, 20 nt, Human
uucccaaaggacuccaccca

SEQ ID NO: 2548990 - RNA, 19 nt, Human
uucccaaaggacuccaccc

SEQ ID NO: 2548991 - RNA, 17 nt, Human
uucccaaaggacuccac

SEQ ID NO: 2548992 - RNA, 16 nt, Human
uucccaaaggacucca

SEQ ID NO: 2548993 - RNA, 15 nt, Human
uuccauacagcucua

SEQ ID NO: 2548994 - RNA, 18 nt, Human
uuccauaauuaugacagu

SEQ ID NO: 2548995 - RNA, 22 nt, Human
uuccauaauuaugacaguuaua

SEQ ID NO: 2548996 - RNA, 17 nt, Human
uuccauaaggaauguag

SEQ ID NO: 2548997 - RNA, 19 nt, Human
uuccauaaggaauguagcu

SEQ ID NO: 2548998 - RNA, 16 nt, Human
uuccauaauguauaaa

SEQ ID NO: 2548999 - RNA, 19 nt, Human
uuccauaauguauaaagaa

SEQ ID NO: 2549000 - RNA, 12 nt, Human
uuccauaauuau

SEQ ID NO: 2549001 - RNA, 13 nt, Human
uuccauaauuaug

SEQ ID NO: 2549002 - RNA, 14 nt, Human
uuccauaauuauga

SEQ ID NO: 2549003 - RNA, 16 nt, Human
uuccauaauuaugaca

SEQ ID NO: 2549004 - RNA, 23 nt, Human
uuccauaaucuggacuccucugu

SEQ ID NO: 2549005 - RNA, 22 nt, Human
uuccauaaucuggacuccucug

SEQ ID NO: 2549006 - RNA, 19 nt, Human
uuccauaaucuggacuccu

SEQ ID NO: 2549007 - RNA, 22 nt, Human
uuccauaaagaagauguuuaac

SEQ ID NO: 2549008 - RNA, 18 nt, Human
uuccauaaagaagauguu

SEQ ID NO: 2549009 - RNA, 11 nt, Human
uuccaguuccc

SEQ ID NO: 2549010 - RNA, 15 nt, Human
uuccauaaacaccca

SEQ ID NO: 2549011 - RNA, 18 nt, Human
uuccaguguccuuagaac

SEQ ID NO: 2549012 - RNA, 23 nt, Human
uuccagugguccauggaaugcuu

SEQ ID NO: 2549013 - RNA, 15 nt, Human
uuccagugcaacacu

SEQ ID NO: 2549014 - RNA, 19 nt, Human
uuccagugcaacacugaag

SEQ ID NO: 2549015 - RNA, 21 nt, Human
uuccagugcaacacugaagcu

SEQ ID NO: 2549016 - RNA, 17 nt, Human
uuccaggggugggacac

SEQ ID NO: 2549017 - RNA, 23 nt, Human
uuccaggaaacuccacaucugcc

SEQ ID NO: 2549018 - RNA, 21 nt, Human
uuccaggcuaaacauccaaua

SEQ ID NO: 2549019 - RNA, 14 nt, Human
uuccagcuccugua

SEQ ID NO: 2549020 - RNA, 11 nt, Human
uuccagcuccu

SEQ ID NO: 2549021 - RNA, 18 nt, Human
uuccagcuggaugagaau

SEQ ID NO: 2549022 - RNA, 24 nt, Human
uuccaggaaacuccacaucugccu

SEQ ID NO: 2549023 - RNA, 22 nt, Human
uuccaggaaacuccacaucugc

SEQ ID NO: 2549024 - RNA, 13 nt, Human
uuccagcuccuca

SEQ ID NO: 2549025 - RNA, 21 nt, Human
uuccaggaaacuccacaucug

SEQ ID NO: 2549026 - RNA, 21 nt, Human
uuccacaccuggcacugcugu

SEQ ID NO: 2549027 - RNA, 18 nt, Human
uuccaccaucaagccacc

SEQ ID NO: 2549028 - RNA, 12 nt, Human
uuccacccccuc

SEQ ID NO: 2549029 - RNA, 13 nt, Human
uuccacccccucc

SEQ ID NO: 2549030 - RNA, 12 nt, Human
uuccaccucccu

SEQ ID NO: 2549031 - RNA, 15 nt, Human
uuccaccucacccca

SEQ ID NO: 2549032 - RNA, 13 nt, Human
uuccaccucaccc

SEQ ID NO: 2549033 - RNA, 23 nt, Human
uuccagcucaccccccacacuca

SEQ ID NO: 2549034 - RNA, 20 nt, Human
uuccagcucaccccccacac

SEQ ID NO: 2549035 - RNA, 14 nt, Human
uuccacccccuccc

SEQ ID NO: 2549036 - RNA, 15 nt, Human
uuccacccccucccu

SEQ ID NO: 2549037 - RNA, 18 nt, Human
uuccacccccucccuggc

SEQ ID NO: 2549038 - RNA, 20 nt, Human
uuccacccccucccuggccu

SEQ ID NO: 2549039 - RNA, 11 nt, Human
uuccacccugg

SEQ ID NO: 2549040 - RNA, 13 nt, Human
uuccacccuggaa

SEQ ID NO: 2549041 - RNA, 22 nt, Human
uuccacaagagcccaggccucc

SEQ ID NO: 2549042 - RNA, 21 nt, Human
uuccaauaaaccagguuuaga

SEQ ID NO: 2549043 - RNA, 13 nt, Human
uuccaauaaacca

SEQ ID NO: 2549044 - RNA, 13 nt, Human
uuccaauaaacag

SEQ ID NO: 2549045 - RNA, 22 nt, Human
uuccaagugugcauauuguaca

SEQ ID NO: 2549046 - RNA, 16 nt, Human
uuccaauaugaugacu

SEQ ID NO: 2549047 - RNA, 20 nt, Human
uuccaagugugcauauugua

SEQ ID NO: 2549048 - RNA, 14 nt, Human
uuccaagugugcau

SEQ ID NO: 2549049 - RNA, 16 nt, Human
uuccaaguugcuaaua

SEQ ID NO: 2549050 - RNA, 12 nt, Human
uuccaagugugc

SEQ ID NO: 2549051 - RNA, 20 nt, Human
uuccaagguggucugcucgg

SEQ ID NO: 2549052 - RNA, 13 nt, Human
uuccaaggcuucu

SEQ ID NO: 2549053 - RNA, 16 nt, Human
uuccaaggaguuccau

SEQ ID NO: 2549054 - RNA, 13 nt, Human
uuccaaugucugc

SEQ ID NO: 2549055 - RNA, 19 nt, Human
uuccacaagauucccagag

SEQ ID NO: 2549056 - RNA, 20 nt, Human
uuccacaagauucccagaga

SEQ ID NO: 2549057 - RNA, 21 nt, Human
uuccacaagauucccagagac

SEQ ID NO: 2549058 - RNA, 15 nt, Human
uuccacacccccacc

SEQ ID NO: 2549059 - RNA, 13 nt, Human
uuccacaccccca

SEQ ID NO: 2549060 - RNA, 18 nt, Human
uuccacaccaagcagcaa

SEQ ID NO: 2549061 - RNA, 17 nt, Human
uuccacacccccacccc

SEQ ID NO: 2549062 - RNA, 16 nt, Human
uuccacacccccaccc

SEQ ID NO: 2549063 - RNA, 19 nt, Human
uuccacaccuagcaucuca

SEQ ID NO: 2549064 - RNA, 19 nt, Human
uuccaccaucaagccacca

SEQ ID NO: 2549065 - RNA, 19 nt, Human
uuccacaccuggcacugcu

SEQ ID NO: 2549066 - RNA, 22 nt, Human
uuccacacccccaccccuugcu

SEQ ID NO: 2549067 - RNA, 15 nt, Human
uuccacaccuuuuau

SEQ ID NO: 2549068 - RNA, 22 nt, Human
uuccacaccuuuuauugacaca

SEQ ID NO: 2549069 - RNA, 18 nt, Human
uuccacacucaccucuaa

SEQ ID NO: 2549070 - RNA, 16 nt, Human
uucauuccauucugga

SEQ ID NO: 2549071 - RNA, 22 nt, Human
uucauucaugucauguguacaa

SEQ ID NO: 2549072 - RNA, 18 nt, Human
uucauuccuaacacagca

SEQ ID NO: 2549073 - RNA, 15 nt, Human
uucauucuccugccu

SEQ ID NO: 2549074 - RNA, 13 nt, Human
uucauucuccugc

SEQ ID NO: 2549075 - RNA, 17 nt, Human
uucauuguaauguuacu

SEQ ID NO: 2549076 - RNA, 18 nt, Human
uucauuguaauguuacug

SEQ ID NO: 2549077 - RNA, 20 nt, Human
uucauuguaauguuacugau

SEQ ID NO: 2549078 - RNA, 15 nt, Human
auauguggaguucau

SEQ ID NO: 2549079 - RNA, 21 nt, Human
auaugugaauccucuucuuua

SEQ ID NO: 2549080 - RNA, 18 nt, Human
auaugugcuggaauucua

SEQ ID NO: 2549081 - RNA, 16 nt, Human
auauguggaguucauc

SEQ ID NO: 2549082 - RNA, 9 nt, Human
uucauucag

SEQ ID NO: 2549083 - RNA, 19 nt, Human
auaugugcuggaauucuaa

SEQ ID NO: 2549084 - RNA, 18 nt, Human
auaugugcuugccucagu

SEQ ID NO: 2549085 - RNA, 19 nt, Human
uucauuuacuguggcuucu

SEQ ID NO: 2549086 - RNA, 16 nt, Human
uucauuuacuguggcu

SEQ ID NO: 2549087 - RNA, 18 nt, Human
uucauuuaggugaggaag

SEQ ID NO: 2549088 - RNA, 13 nt, Human
uuccaagagccug

SEQ ID NO: 2549089 - RNA, 21 nt, Human
uucauuuagcuaaacggauuc

SEQ ID NO: 2549090 - RNA, 16 nt, Human
uucauuuaaaaugauu

SEQ ID NO: 2549091 - RNA, 15 nt, Human
uucauuuaaaaugau

SEQ ID NO: 2549092 - RNA, 14 nt, Human
uucauuuaaaauga

SEQ ID NO: 2549093 - RNA, 13 nt, Human
uucauuuaaaaug

SEQ ID NO: 2549094 - RNA, 14 nt, Human
uucauuguaugaug

SEQ ID NO: 2549095 - RNA, 17 nt, Human
uucauuuaaaaugauua

SEQ ID NO: 2549096 - RNA, 13 nt, Human
uucauuuacugug

SEQ ID NO: 2549097 - RNA, 16 nt, Human
uucauuguaugaugug

SEQ ID NO: 2549098 - RNA, 13 nt, Human
uucauuguauaaa

SEQ ID NO: 2549099 - RNA, 17 nt, Human
uucauuguauaaaaaua

SEQ ID NO: 2549100 - RNA, 15 nt, Human
uuccaaggguacuaa

SEQ ID NO: 2549101 - RNA, 17 nt, Human
uuccaaggguacuaagg

SEQ ID NO: 2549102 - RNA, 14 nt, Human
uuccaagagccuga

SEQ ID NO: 2549103 - RNA, 22 nt, Human
uuccaagagccugagagugagg

SEQ ID NO: 2549104 - RNA, 13 nt, Human
uuccaagagcuga

SEQ ID NO: 2549105 - RNA, 12 nt, Human
uuccaagagcug

SEQ ID NO: 2549106 - RNA, 14 nt, Human
auauguacaugaga

SEQ ID NO: 2549107 - RNA, 14 nt, Human
auauguaccaugua

SEQ ID NO: 2549108 - RNA, 19 nt, Human
auauguaccauguacauga

SEQ ID NO: 2549109 - RNA, 19 nt, Human
auaugugaacauuuaucaa

SEQ ID NO: 2549110 - RNA, 11 nt, Human
auaugugaauc

SEQ ID NO: 2549111 - RNA, 20 nt, Human
auauguaaaauaaaauuaug

SEQ ID NO: 2549112 - RNA, 17 nt, Human
auauguaacaagccacc

SEQ ID NO: 2549113 - RNA, 21 nt, Human
auaugauuaguaaagaaauga

SEQ ID NO: 2549114 - RNA, 12 nt, Human
auauguaaaaua

SEQ ID NO: 2549115 - RNA, 16 nt, Human
auauguaacaagccac

SEQ ID NO: 2549116 - RNA, 13 nt, Human
auauguaaaauaa

SEQ ID NO: 2549117 - RNA, 14 nt, Human
auauguaaaauaaa

SEQ ID NO: 2549118 - RNA, 15 nt, Human
auauguaaaauaaaa

SEQ ID NO: 2549119 - RNA, 16 nt, Human
auauguaaaauaaaau

SEQ ID NO: 2549120 - RNA, 15 nt, Human
auaugauauugcaua

SEQ ID NO: 2549121 - RNA, 16 nt, Human
auaugauauugcauau

SEQ ID NO: 2549122 - RNA, 13 nt, Human
auaugcacacauu

SEQ ID NO: 2549123 - RNA, 19 nt, Human
auaugaguuucauagcuaa

SEQ ID NO: 2549124 - RNA, 17 nt, Human
auaugaguuucauagcu

SEQ ID NO: 2549125 - RNA, 23 nt, Human
auaugaguguggaagccggaggg

SEQ ID NO: 2549126 - RNA, 20 nt, Human
auaugaguguggaagccgga

SEQ ID NO: 2549127 - RNA, 14 nt, Human
auaugauauguaaa

SEQ ID NO: 2549128 - RNA, 21 nt, Human
auaugaguuucauagcuaaga

SEQ ID NO: 2549129 - RNA, 16 nt, Human
auaugauauguaaaca

SEQ ID NO: 2549130 - RNA, 20 nt, Human
auaugagcuuuauguaauaa

SEQ ID NO: 2549131 - RNA, 23 nt, Human
auaugaaaauacaacuuaaauaa

SEQ ID NO: 2549132 - RNA, 23 nt, Human
auaugaggaugcagagucagcag

SEQ ID NO: 2549133 - RNA, 14 nt, Human
auaugcacacauuu

SEQ ID NO: 2549134 - RNA, 15 nt, Human
auaugcacacauuuu

SEQ ID NO: 2549135 - RNA, 16 nt, Human
auaugcacacauuuuu

SEQ ID NO: 2549136 - RNA, 22 nt, Human
auauggguugcauuuggucaag

SEQ ID NO: 2549137 - RNA, 12 nt, Human
auaucucaucuc

SEQ ID NO: 2549138 - RNA, 16 nt, Human
auaucugaaaauguau

SEQ ID NO: 2549139 - RNA, 17 nt, Human
auaucugaaaauguaug

SEQ ID NO: 2549140 - RNA, 20 nt, Human
auaucugaaaauguaugugu

SEQ ID NO: 2549141 - RNA, 13 nt, Human
auaucuuuauuaa

SEQ ID NO: 2549142 - RNA, 16 nt, Human
auaucuuuauuaauca

SEQ ID NO: 2549143 - RNA, 16 nt, Human
auaugaaaauacaacu

SEQ ID NO: 2549144 - RNA, 18 nt, Human
auaugaaaaauaugauau

SEQ ID NO: 2549145 - RNA, 19 nt, Human
auaugaaaaauaugauauu

SEQ ID NO: 2549146 - RNA, 20 nt, Human
auaugaaaaaaaugcauuuu

SEQ ID NO: 2549147 - RNA, 14 nt, Human
auaucuuuugaccu

SEQ ID NO: 2549148 - RNA, 13 nt, Human
auaugaaaaauau

SEQ ID NO: 2549149 - RNA, 14 nt, Human
auaugaaaaauaug

SEQ ID NO: 2549150 - RNA, 17 nt, Human
auaugaaaaauaugaua

SEQ ID NO: 2549151 - RNA, 23 nt, Human
auaucuauauauaauucuguaca

SEQ ID NO: 2549152 - RNA, 20 nt, Human
auaucuauauauaauucugu

SEQ ID NO: 2549153 - RNA, 17 nt, Human
auaucuauauauaauuc

SEQ ID NO: 2549154 - RNA, 17 nt, Human
auaucuauauguacuug

SEQ ID NO: 2549155 - RNA, 21 nt, Human
auaucuauauauaauucugua

SEQ ID NO: 2549156 - RNA, 16 nt, Human
auaucuauauauaauu

SEQ ID NO: 2549157 - RNA, 14 nt, Human
auaucuauauauaa

SEQ ID NO: 2549158 - RNA, 14 nt, Human
auauauuuuaagac

SEQ ID NO: 2549159 - RNA, 21 nt, Human
auauauuuguguauuuaacag

SEQ ID NO: 2549160 - RNA, 17 nt, Human
auauauuuguguauuua

SEQ ID NO: 2549161 - RNA, 22 nt, Human
auauauuuguguauuuaacagg

SEQ ID NO: 2549162 - RNA, 15 nt, Human
auauauguguaugua

SEQ ID NO: 2549163 - RNA, 13 nt, Human
auauauguguaug

SEQ ID NO: 2549164 - RNA, 14 nt, Human
auauaugugaugau

SEQ ID NO: 2549165 - RNA, 19 nt, Human
auauauguguguguauguu

SEQ ID NO: 2549166 - RNA, 16 nt, Human
auauauguguguguau

SEQ ID NO: 2549167 - RNA, 21 nt, Human
auauauguguguuuaaauaaa

SEQ ID NO: 2549168 - RNA, 20 nt, Human
auauauguguguuuaaauaa

SEQ ID NO: 2549169 - RNA, 18 nt, Human
auauauguguguuuaaau

SEQ ID NO: 2549170 - RNA, 16 nt, Human
auauauguguguuuaa

SEQ ID NO: 2549171 - RNA, 12 nt, Human
auauauugcugc

SEQ ID NO: 2549172 - RNA, 15 nt, Human
auauauucccaauag

SEQ ID NO: 2549173 - RNA, 14 nt, Human
auauauugaauuaa

SEQ ID NO: 2549174 - RNA, 13 nt, Human
auauauugaauua

SEQ ID NO: 2549175 - RNA, 21 nt, Human
auauauugguaacauccuuuc

SEQ ID NO: 2549176 - RNA, 19 nt, Human
auauauugguaacauccuu

SEQ ID NO: 2549177 - RNA, 12 nt, Human
auauauuuaaaa

SEQ ID NO: 2549178 - RNA, 13 nt, Human
auauauuuuaaga

SEQ ID NO: 2549179 - RNA, 12 nt, Human
auauauuuuaag

SEQ ID NO: 2549180 - RNA, 13 nt, Human
auauauuuaauga

SEQ ID NO: 2549181 - RNA, 15 nt, Human
auauauuuaaugaua

SEQ ID NO: 2549182 - RNA, 13 nt, Human
auauauuugugua

SEQ ID NO: 2549183 - RNA, 14 nt, Human
auauauuucuuugu

SEQ ID NO: 2549184 - RNA, 23 nt, Human
uucauccacucugccugcuuaca

SEQ ID NO: 2549185 - RNA, 20 nt, Human
uucauauuguggcacaagca

SEQ ID NO: 2549186 - RNA, 15 nt, Human
uucauccacuagugc

SEQ ID NO: 2549187 - RNA, 19 nt, Human
uucaucccaacugucuuuu

SEQ ID NO: 2549188 - RNA, 22 nt, Human
uucauauugugccaauauguau

SEQ ID NO: 2549189 - RNA, 16 nt, Human
uucauauugugccaau

SEQ ID NO: 2549190 - RNA, 14 nt, Human
uucauauugugcca

SEQ ID NO: 2549191 - RNA, 12 nt, Human
uucauauugugc

SEQ ID NO: 2549192 - RNA, 17 nt, Human
uucaucccucuggggcu

SEQ ID NO: 2549193 - RNA, 21 nt, Human
uucaucccaugauguagugcc

SEQ ID NO: 2549194 - RNA, 19 nt, Human
uucaucccaugauguagug

SEQ ID NO: 2549195 - RNA, 18 nt, Human
uucaucccaugauguagu

SEQ ID NO: 2549196 - RNA, 16 nt, Human
uucaucccaugaugua

SEQ ID NO: 2549197 - RNA, 12 nt, Human
auauauguguau

SEQ ID NO: 2549198 - RNA, 18 nt, Human
auauaugugaacauuuau

SEQ ID NO: 2549199 - RNA, 12 nt, Human
auauaugugaac

SEQ ID NO: 2549200 - RNA, 12 nt, Human
auauauguauuu

SEQ ID NO: 2549201 - RNA, 21 nt, Human
uucaucccucuggggcuguuc

SEQ ID NO: 2549202 - RNA, 13 nt, Human
uucagugccuuau

SEQ ID NO: 2549203 - RNA, 12 nt, Human
uucagugccuua

SEQ ID NO: 2549204 - RNA, 16 nt, Human
uucagugccaaaaaca

SEQ ID NO: 2549205 - RNA, 21 nt, Human
uucagaaaugcugccugccug

SEQ ID NO: 2549206 - RNA, 20 nt, Human
uucagaaaugcugccugccu

SEQ ID NO: 2549207 - RNA, 19 nt, Human
uucagaaaugcugccugcc

SEQ ID NO: 2549208 - RNA, 18 nt, Human
uucagaaaugcugccugc

SEQ ID NO: 2549209 - RNA, 13 nt, Human
uucagugccaaua

SEQ ID NO: 2549210 - RNA, 22 nt, Human
uucagaaaugcugccugccugu

SEQ ID NO: 2549211 - RNA, 10 nt, Human
uucagugccc

SEQ ID NO: 2549212 - RNA, 14 nt, Human
uucagugcccacca

SEQ ID NO: 2549213 - RNA, 11 nt, Human
uucagaaaugu

SEQ ID NO: 2549214 - RNA, 13 nt, Human
uucagaaaugugu

SEQ ID NO: 2549215 - RNA, 16 nt, Human
uucagaaagugugcuu

SEQ ID NO: 2549216 - RNA, 18 nt, Human
uucagaaagugugcuuua

SEQ ID NO: 2549217 - RNA, 20 nt, Human
uucagaaagcauuacauuuc

SEQ ID NO: 2549218 - RNA, 17 nt, Human
uucagaaaugcugccug

SEQ ID NO: 2549219 - RNA, 16 nt, Human
uucagaaaugcugccu

SEQ ID NO: 2549220 - RNA, 15 nt, Human
uucagaaaugcugcc

SEQ ID NO: 2549221 - RNA, 13 nt, Human
uucagaaauaugu

SEQ ID NO: 2549222 - RNA, 18 nt, Human
uucagugccuuauggaac

SEQ ID NO: 2549223 - RNA, 19 nt, Human
uucauaauuauuauuuggc

SEQ ID NO: 2549224 - RNA, 21 nt, Human
uucauacagggaugguguuca

SEQ ID NO: 2549225 - RNA, 12 nt, Human
uucauacaaggc

SEQ ID NO: 2549226 - RNA, 18 nt, Human
uucauacacagccugggc

SEQ ID NO: 2549227 - RNA, 13 nt, Human
uucauaugcugua

SEQ ID NO: 2549228 - RNA, 13 nt, Human
uucauauguugcu

SEQ ID NO: 2549229 - RNA, 20 nt, Human
uucauauguaccauguacau

SEQ ID NO: 2549230 - RNA, 16 nt, Human
uucauauguugcucag

SEQ ID NO: 2549231 - RNA, 14 nt, Human
uucauauguugcuc

SEQ ID NO: 2549232 - RNA, 18 nt, Human
uucauauguugcucaguc

SEQ ID NO: 2549233 - RNA, 18 nt, Human
uucauauugcugagagaa

SEQ ID NO: 2549234 - RNA, 14 nt, Human
uucauauugaauau

SEQ ID NO: 2549235 - RNA, 19 nt, Human
uugaaauauugacuuuuua

SEQ ID NO: 2549236 - RNA, 20 nt, Human
uugaaauauaggaacuuaaa

SEQ ID NO: 2549237 - RNA, 11 nt, Human
uugaaaucuuu

SEQ ID NO: 2549238 - RNA, 13 nt, Human
uugaaaucuuuua

SEQ ID NO: 2549239 - RNA, 15 nt, Human
uugaaaucuguaucu

SEQ ID NO: 2549240 - RNA, 21 nt, Human
uugaaaugaaaguauaacuga

SEQ ID NO: 2549241 - RNA, 21 nt, Human
uugaaauuuuuauuaaauuau

SEQ ID NO: 2549242 - RNA, 12 nt, Human
uugaaauuuuaa

SEQ ID NO: 2549243 - RNA, 19 nt, Human
uugaaauuguuuaaguguu

SEQ ID NO: 2549244 - RNA, 15 nt, Human
uugaacacaaacugu

SEQ ID NO: 2549245 - RNA, 18 nt, Human
uugaacacaaacuguaaa

SEQ ID NO: 2549246 - RNA, 14 nt, Human
uugaacacaaacug

SEQ ID NO: 2549247 - RNA, 20 nt, Human
uugaacaaguuguuucauug

SEQ ID NO: 2549248 - RNA, 17 nt, Human
uugaaaguuuucagaac

SEQ ID NO: 2549249 - RNA, 15 nt, Human
uugaaauaauaaauc

SEQ ID NO: 2549250 - RNA, 18 nt, Human
uucuuuuucuucuucccu

SEQ ID NO: 2549251 - RNA, 16 nt, Human
uucuuuuuauuuucuu

SEQ ID NO: 2549252 - RNA, 16 nt, Human
uugaaaguuuacagga

SEQ ID NO: 2549253 - RNA, 12 nt, Human
uucuuuuaucac

SEQ ID NO: 2549254 - RNA, 17 nt, Human
uucuuuucacauucuua

SEQ ID NO: 2549255 - RNA, 15 nt, Human
uucuuuucacauucu

SEQ ID NO: 2549256 - RNA, 12 nt, Human
uucuuuucacau

SEQ ID NO: 2549257 - RNA, 19 nt, Human
uucuuuuacucaugaucuu

SEQ ID NO: 2549258 - RNA, 20 nt, Human
uucuuuucacauucuuauaa

SEQ ID NO: 2549259 - RNA, 19 nt, Human
uucuuuucacauucuuaua

SEQ ID NO: 2549260 - RNA, 18 nt, Human
uucuuuuguauguaaaug

SEQ ID NO: 2549261 - RNA, 14 nt, Human
uucuuuuguaugua

SEQ ID NO: 2549262 - RNA, 13 nt, Human
uucuuuuguaauu

SEQ ID NO: 2549263 - RNA, 20 nt, Human
uucuuuuguauguaaaugug

SEQ ID NO: 2549264 - RNA, 15 nt, Human
uucuuuuuauuuucu

SEQ ID NO: 2549265 - RNA, 15 nt, Human
uucuuuuuauugaau

SEQ ID NO: 2549266 - RNA, 19 nt, Human
auccuaauuucuccucccu

SEQ ID NO: 2549267 - RNA, 18 nt, Human
auccuaauuucuccuccc

SEQ ID NO: 2549268 - RNA, 16 nt, Human
auccuaauuucuccuc

SEQ ID NO: 2549269 - RNA, 15 nt, Human
auccuaauuucuccu

SEQ ID NO: 2549270 - RNA, 19 nt, Human
auccuaaugaaugcauaaa

SEQ ID NO: 2549271 - RNA, 21 nt, Human
auccuaaugacuucuaaaaau

SEQ ID NO: 2549272 - RNA, 19 nt, Human
auccuaaucauccaaugcu

SEQ ID NO: 2549273 - RNA, 13 nt, Human
auccuaaugaaug

SEQ ID NO: 2549274 - RNA, 12 nt, Human
auccuaaugaau

SEQ ID NO: 2549275 - RNA, 23 nt, Human
auccuagucucuaucauuaaagu

SEQ ID NO: 2549276 - RNA, 20 nt, Human
auccuagucucuaucauuaa

SEQ ID NO: 2549277 - RNA, 13 nt, Human
auccuaguuccac

SEQ ID NO: 2549278 - RNA, 23 nt, Human
auccuaauuucuccucccuuccu

SEQ ID NO: 2549279 - RNA, 20 nt, Human
auccuaauuucuccucccuu

SEQ ID NO: 2549280 - RNA, 13 nt, Human
auccuagggccug

SEQ ID NO: 2549281 - RNA, 17 nt, Human
auccuagggccuggguu

SEQ ID NO: 2549282 - RNA, 20 nt, Human
auccuagguaggguuuaauc

SEQ ID NO: 2549283 - RNA, 21 nt, Human
auccuaggcauuugcugaaua

SEQ ID NO: 2549284 - RNA, 18 nt, Human
uugaacccgggaggcaga

SEQ ID NO: 2549285 - RNA, 16 nt, Human
uugaaccacuucccuc

SEQ ID NO: 2549286 - RNA, 20 nt, Human
uugaacacucaugcugaaag

SEQ ID NO: 2549287 - RNA, 13 nt, Human
uugaacacugggg

SEQ ID NO: 2549288 - RNA, 20 nt, Human
uugaacacaaacuguaaaua

SEQ ID NO: 2549289 - RNA, 21 nt, Human
uugaacacaaacuguaaauaa

SEQ ID NO: 2549290 - RNA, 19 nt, Human
uugaacacucaugcugaaa

SEQ ID NO: 2549291 - RNA, 18 nt, Human
uugaacacucaugcugaa

SEQ ID NO: 2549292 - RNA, 13 nt, Human
uugaacccaggag

SEQ ID NO: 2549293 - RNA, 21 nt, Human
auccuaagcuauucaguaaua

SEQ ID NO: 2549294 - RNA, 12 nt, Human
uugaacccagga

SEQ ID NO: 2549295 - RNA, 17 nt, Human
uugaacccaggaguuca

SEQ ID NO: 2549296 - RNA, 12 nt, Human
uucuugcaaagu

SEQ ID NO: 2549297 - RNA, 16 nt, Human
uucuugauguugcuua

SEQ ID NO: 2549298 - RNA, 21 nt, Human
uucuugaucaacaucuuuucu

SEQ ID NO: 2549299 - RNA, 21 nt, Human
uucuugaauuuaauaaucugu

SEQ ID NO: 2549300 - RNA, 22 nt, Human
uucuuccuuaauucacucccac

SEQ ID NO: 2549301 - RNA, 18 nt, Human
uucuuggagucuuccaaa

SEQ ID NO: 2549302 - RNA, 14 nt, Human
uucuugcugguugu

SEQ ID NO: 2549303 - RNA, 20 nt, Human
uucuuggggcccuacaccuu

SEQ ID NO: 2549304 - RNA, 14 nt, Human
uucuugggcccucc

SEQ ID NO: 2549305 - RNA, 13 nt, Human
uucuugcaaagua

SEQ ID NO: 2549306 - RNA, 23 nt, Human
uucuugcugguugucauuuuugc

SEQ ID NO: 2549307 - RNA, 18 nt, Human
uucuugguucauaaauga

SEQ ID NO: 2549308 - RNA, 17 nt, Human
uucuugguucauaaaug

SEQ ID NO: 2549309 - RNA, 21 nt, Human
uucuuggugcuuacacaucuc

SEQ ID NO: 2549310 - RNA, 15 nt, Human
uucuugguagagauu

SEQ ID NO: 2549311 - RNA, 16 nt, Human
uucuugguagagauuc

SEQ ID NO: 2549312 - RNA, 14 nt, Human
uucuugguagagau

SEQ ID NO: 2549313 - RNA, 18 nt, Human
uucuuggggcccuacacc

SEQ ID NO: 2549314 - RNA, 22 nt, Human
uucuuucuggcuaugcauuuga

SEQ ID NO: 2549315 - RNA, 15 nt, Human
uucuuucuuagaaau

SEQ ID NO: 2549316 - RNA, 14 nt, Human
uucuuucuuagaaa

SEQ ID NO: 2549317 - RNA, 19 nt, Human
uucuugguucauaaaugaa

SEQ ID NO: 2549318 - RNA, 13 nt, Human
uucuuucuuagaa

SEQ ID NO: 2549319 - RNA, 15 nt, Human
uucuuucuuccucug

SEQ ID NO: 2549320 - RNA, 13 nt, Human
uucuuucuuccuc

SEQ ID NO: 2549321 - RNA, 16 nt, Human
uucuuuguaaugaaaa

SEQ ID NO: 2549322 - RNA, 16 nt, Human
uucuuucuuugggaau

SEQ ID NO: 2549323 - RNA, 20 nt, Human
uucuuucuuagaaauuuauu

SEQ ID NO: 2549324 - RNA, 15 nt, Human
uucuuugaaauuguu

SEQ ID NO: 2549325 - RNA, 21 nt, Human
uucuuuuaaaggggcagaaaa

SEQ ID NO: 2549326 - RNA, 16 nt, Human
uucuuuguuacaggca

SEQ ID NO: 2549327 - RNA, 12 nt, Human
uucuuuguguag

SEQ ID NO: 2549328 - RNA, 19 nt, Human
uucuuuguguagcuuugcu

SEQ ID NO: 2549329 - RNA, 18 nt, Human
uucuguucuuucuggcua

SEQ ID NO: 2549330 - RNA, 15 nt, Human
uucuguugcugccuc

SEQ ID NO: 2549331 - RNA, 16 nt, Human
uucuguugcugccuca

SEQ ID NO: 2549332 - RNA, 23 nt, Human
aucccacccacaugugacacaua

SEQ ID NO: 2549333 - RNA, 20 nt, Human
aucccacccacaugugacac

SEQ ID NO: 2549334 - RNA, 18 nt, Human
aucccacccacaugugac

SEQ ID NO: 2549335 - RNA, 15 nt, Human
aucccacccacaugu

SEQ ID NO: 2549336 - RNA, 18 nt, Human
aucccacgcuucucuuug

SEQ ID NO: 2549337 - RNA, 16 nt, Human
aucccacgcacuccau

SEQ ID NO: 2549338 - RNA, 21 nt, Human
uucuguuuugccugaaguugg

SEQ ID NO: 2549339 - RNA, 18 nt, Human
aucccacgcacuccauga

SEQ ID NO: 2549340 - RNA, 17 nt, Human
aucccacgcacuccaug

SEQ ID NO: 2549341 - RNA, 16 nt, Human
aucccacgcuucucuu

SEQ ID NO: 2549342 - RNA, 17 nt, Human
uucuguuuugccugaag

SEQ ID NO: 2549343 - RNA, 17 nt, Human
uucuguugcugccucau

SEQ ID NO: 2549344 - RNA, 16 nt, Human
uucuguuuugccugaa

SEQ ID NO: 2549345 - RNA, 21 nt, Human
uucuuaaaauauauuucagau

SEQ ID NO: 2549346 - RNA, 20 nt, Human
uucuguuuuucuaggccugg

SEQ ID NO: 2549347 - RNA, 13 nt, Human
uucuuccucugcu

SEQ ID NO: 2549348 - RNA, 12 nt, Human
uucuuccucugc

SEQ ID NO: 2549349 - RNA, 11 nt, Human
uucuuccucug

SEQ ID NO: 2549350 - RNA, 16 nt, Human
uucuuacauaauuuuu

SEQ ID NO: 2549351 - RNA, 13 nt, Human
uucuuacauaauu

SEQ ID NO: 2549352 - RNA, 13 nt, Human
uucuuacagacug

SEQ ID NO: 2549353 - RNA, 14 nt, Human
uucuuaauugcacu

SEQ ID NO: 2549354 - RNA, 12 nt, Human
uucuuacaagga

SEQ ID NO: 2549355 - RNA, 23 nt, Human
uucuuccucccucccucuuuccc

SEQ ID NO: 2549356 - RNA, 23 nt, Human
uucuuaaucuuuucacaaauaaa

SEQ ID NO: 2549357 - RNA, 22 nt, Human
uucuuaaucuuuucacaaauaa

SEQ ID NO: 2549358 - RNA, 17 nt, Human
uucuuaaagucaagauu

SEQ ID NO: 2549359 - RNA, 13 nt, Human
uucuuaaagaguu

SEQ ID NO: 2549360 - RNA, 15 nt, Human
uucuuaaaauauauu

SEQ ID NO: 2549361 - RNA, 17 nt, Human
uucuuaaacaaauguau

SEQ ID NO: 2549362 - RNA, 13 nt, Human
uucuuaauucuua

SEQ ID NO: 2549363 - RNA, 20 nt, Human
uucuuaauugcacucuaaaa

SEQ ID NO: 2549364 - RNA, 15 nt, Human
uucuuacaaacaugu

SEQ ID NO: 2549365 - RNA, 23 nt, Human
auccauuugcguuccaugaugcu

SEQ ID NO: 2549366 - RNA, 14 nt, Human
aucccacccacaug

SEQ ID NO: 2549367 - RNA, 15 nt, Human
aucccaccaacccuc

SEQ ID NO: 2549368 - RNA, 14 nt, Human
aucccacacccugg

SEQ ID NO: 2549369 - RNA, 15 nt, Human
aucccaagugccagu

SEQ ID NO: 2549370 - RNA, 14 nt, Human
auccauacauuugu

SEQ ID NO: 2549371 - RNA, 21 nt, Human
auccauaaagaagcaauaaag

SEQ ID NO: 2549372 - RNA, 17 nt, Human
auccauaaagaagcaau

SEQ ID NO: 2549373 - RNA, 16 nt, Human
auccauaaagaagcaa

SEQ ID NO: 2549374 - RNA, 14 nt, Human
auccauaaagaagc

SEQ ID NO: 2549375 - RNA, 13 nt, Human
auccauaaagaag

SEQ ID NO: 2549376 - RNA, 23 nt, Human
uucucuaaaugaggggccucagg

SEQ ID NO: 2549377 - RNA, 13 nt, Human
auccauucuuucu

SEQ ID NO: 2549378 - RNA, 15 nt, Human
auccauucuuucuga

SEQ ID NO: 2549379 - RNA, 16 nt, Human
auccauucuuucugau

SEQ ID NO: 2549380 - RNA, 18 nt, Human
auccauuucaucuauuuc

SEQ ID NO: 2549381 - RNA, 20 nt, Human
auccauuucaucuauuucug

SEQ ID NO: 2549382 - RNA, 21 nt, Human
auccauuucaucuauuucuga

SEQ ID NO: 2549383 - RNA, 22 nt, Human
auccauuucaucuauuucugag

SEQ ID NO: 2549384 - RNA, 23 nt, Human
auccauuucaucuauuucugaga

SEQ ID NO: 2549385 - RNA, 13 nt, Human
auccaaaagcuuu

SEQ ID NO: 2549386 - RNA, 22 nt, Human
auccaaaagaagcccccagcua

SEQ ID NO: 2549387 - RNA, 18 nt, Human
auccaaaagaagccccca

SEQ ID NO: 2549388 - RNA, 19 nt, Human
auccaaaagaagcccccag

SEQ ID NO: 2549389 - RNA, 13 nt, Human
auccaaaagaagc

SEQ ID NO: 2549390 - RNA, 12 nt, Human
auccaagugaac

SEQ ID NO: 2549391 - RNA, 19 nt, Human
auccaaggagaaacagaga

SEQ ID NO: 2549392 - RNA, 22 nt, Human
auccaaggagaaacagagacag

SEQ ID NO: 2549393 - RNA, 20 nt, Human
auccaaacuuggauuuuuga

SEQ ID NO: 2549394 - RNA, 23 nt, Human
auccaagcuuuuuuaaaguaaaa

SEQ ID NO: 2549395 - RNA, 13 nt, Human
auccaaggagaaa

SEQ ID NO: 2549396 - RNA, 14 nt, Human
auccaaggagaaac

SEQ ID NO: 2549397 - RNA, 24 nt, Human
auccaauauuuucuuuaaugcuuu

SEQ ID NO: 2549398 - RNA, 19 nt, Human
auccaauauuuucuuuaau

SEQ ID NO: 2549399 - RNA, 22 nt, Human
auccaauauuuucuuuaaugcu

SEQ ID NO: 2549400 - RNA, 14 nt, Human
auccaauccucacu

SEQ ID NO: 2549401 - RNA, 17 nt, Human
auccaauccucacuggg

SEQ ID NO: 2549402 - RNA, 18 nt, Human
auccaauccucacugggu

SEQ ID NO: 2549403 - RNA, 19 nt, Human
auccaauccucacugggug

SEQ ID NO: 2549404 - RNA, 20 nt, Human
auccaaucuaaccacaucaa

SEQ ID NO: 2549405 - RNA, 20 nt, Human
auccaauccucacugggugg

SEQ ID NO: 2549406 - RNA, 22 nt, Human
auccaaugcucaagaaacaacu

SEQ ID NO: 2549407 - RNA, 16 nt, Human
aucauuuuuguacagu

SEQ ID NO: 2549408 - RNA, 15 nt, Human
aucauuuuuguacag

SEQ ID NO: 2549409 - RNA, 14 nt, Human
aucauuuuuguaca

SEQ ID NO: 2549410 - RNA, 13 nt, Human
aucauuuuuguac

SEQ ID NO: 2549411 - RNA, 22 nt, Human
aucauuuuuguacaguuugcug

SEQ ID NO: 2549412 - RNA, 20 nt, Human
aucauuuuuguacaguuugc

SEQ ID NO: 2549413 - RNA, 14 nt, Human
aucauuuuuguauc

SEQ ID NO: 2549414 - RNA, 22 nt, Human
uucuguagaaaugguuguauua

SEQ ID NO: 2549415 - RNA, 21 nt, Human
uucuguagaaaugguuguauu

SEQ ID NO: 2549416 - RNA, 20 nt, Human
uucuguagaaaugguuguau

SEQ ID NO: 2549417 - RNA, 18 nt, Human
uucuguagaaaugguugu

SEQ ID NO: 2549418 - RNA, 16 nt, Human
uucuguagguucugug

SEQ ID NO: 2549419 - RNA, 23 nt, Human
uucuguaaacucaaaacuuaaca

SEQ ID NO: 2549420 - RNA, 13 nt, Human
uucuguagauucu

SEQ ID NO: 2549421 - RNA, 21 nt, Human
uucuguauaaagccuguauuc

SEQ ID NO: 2549422 - RNA, 11 nt, Human
uucuguauaaa

SEQ ID NO: 2549423 - RNA, 15 nt, Human
uucuguagaaauggu

SEQ ID NO: 2549424 - RNA, 14 nt, Human
uucuguagaaaugg

SEQ ID NO: 2549425 - RNA, 20 nt, Human
uucuguaaacucaaaacuua

SEQ ID NO: 2549426 - RNA, 19 nt, Human
uucuguaaacucaaaacuu

SEQ ID NO: 2549427 - RNA, 13 nt, Human
uucuguagaaaug

SEQ ID NO: 2549428 - RNA, 17 nt, Human
uucuguaaaaugucugu

SEQ ID NO: 2549429 - RNA, 22 nt, Human
uucugguugaugccugugaacu

SEQ ID NO: 2549430 - RNA, 15 nt, Human
uucugccgcagcccu

SEQ ID NO: 2549431 - RNA, 14 nt, Human
uucugccgcagccc

SEQ ID NO: 2549432 - RNA, 18 nt, Human
uucuggcuaugcauuuga

SEQ ID NO: 2549433 - RNA, 20 nt, Human
uucuggcuaugcauuugaaa

SEQ ID NO: 2549434 - RNA, 17 nt, Human
uucuggcuccucaaaca

SEQ ID NO: 2549435 - RNA, 17 nt, Human
uucuggcucagggaggu

SEQ ID NO: 2549436 - RNA, 16 nt, Human
uucuggcucucccauu

SEQ ID NO: 2549437 - RNA, 20 nt, Human
uucugcccuggcugcugccc

SEQ ID NO: 2549438 - RNA, 10 nt, Human
uucuggcuca

SEQ ID NO: 2549439 - RNA, 21 nt, Human
uucuggugugaacuaaacuuu

SEQ ID NO: 2549440 - RNA, 14 nt, Human
uucuggugugaacu

SEQ ID NO: 2549441 - RNA, 22 nt, Human
uucuggcucucccauuuccuga

SEQ ID NO: 2549442 - RNA, 17 nt, Human
uucugguuccagggucc

SEQ ID NO: 2549443 - RNA, 15 nt, Human
uucugguuccagggu

SEQ ID NO: 2549444 - RNA, 20 nt, Human
uucuggugugaacuaaacuu

SEQ ID NO: 2549445 - RNA, 20 nt, Human
aucaggccaggcccucugcc

SEQ ID NO: 2549446 - RNA, 20 nt, Human
aucauugaaaucuuuuugcu

SEQ ID NO: 2549447 - RNA, 23 nt, Human
aucaggccaggcccucugcccac

SEQ ID NO: 2549448 - RNA, 22 nt, Human
aucaggccaggcccucugccca

SEQ ID NO: 2549449 - RNA, 21 nt, Human
aucaggccaggcccucugccc

SEQ ID NO: 2549450 - RNA, 21 nt, Human
aucauugaaaucuuuuugcuu

SEQ ID NO: 2549451 - RNA, 13 nt, Human
aucauugccuggu

SEQ ID NO: 2549452 - RNA, 22 nt, Human
aucauugcacucuagccugggc

SEQ ID NO: 2549453 - RNA, 21 nt, Human
aucauugcacucuagccuggg

SEQ ID NO: 2549454 - RNA, 18 nt, Human
aucauugauugucagcua

SEQ ID NO: 2549455 - RNA, 21 nt, Human
aucauuggauucugagagcug

SEQ ID NO: 2549456 - RNA, 22 nt, Human
aucauuggauucugagagcugu

SEQ ID NO: 2549457 - RNA, 13 nt, Human
aucauuuaauaau

SEQ ID NO: 2549458 - RNA, 12 nt, Human
aucauuuaauaa

SEQ ID NO: 2549459 - RNA, 23 nt, Human
aucauugcuuugaagcaguugug

SEQ ID NO: 2549460 - RNA, 13 nt, Human
aucauuguacagu

SEQ ID NO: 2549461 - RNA, 20 nt, Human
aucauuucugcaucagcugc

SEQ ID NO: 2549462 - RNA, 13 nt, Human
uucuccucccagg

SEQ ID NO: 2549463 - RNA, 15 nt, Human
aucauuucuauuucu

SEQ ID NO: 2549464 - RNA, 22 nt, Human
aucauuuauuuuuuacauuauu

SEQ ID NO: 2549465 - RNA, 19 nt, Human
aucauuuaauaauauacuu

SEQ ID NO: 2549466 - RNA, 18 nt, Human
aucauuuaauaauauacu

SEQ ID NO: 2549467 - RNA, 17 nt, Human
aucauuuaauaauauac

SEQ ID NO: 2549468 - RNA, 14 nt, Human
aucauuuaauaaua

SEQ ID NO: 2549469 - RNA, 21 nt, Human
aucauuuaauaauauacuugu

SEQ ID NO: 2549470 - RNA, 18 nt, Human
aucauugcuuugaagcag

SEQ ID NO: 2549471 - RNA, 19 nt, Human
aucauuuauuuuuuacauu

SEQ ID NO: 2549472 - RNA, 12 nt, Human
uucuccugccuc

SEQ ID NO: 2549473 - RNA, 13 nt, Human
uucuccugccuca

SEQ ID NO: 2549474 - RNA, 14 nt, Human
uucuccugccucag

SEQ ID NO: 2549475 - RNA, 19 nt, Human
uucucuaagagaacaaugu

SEQ ID NO: 2549476 - RNA, 21 nt, Human
uucucuaacuucaaggcccau

SEQ ID NO: 2549477 - RNA, 19 nt, Human
uucuccucccuuccuuuuc

SEQ ID NO: 2549478 - RNA, 11 nt, Human
uucuccucccc

SEQ ID NO: 2549479 - RNA, 20 nt, Human
uucuccucccuuccuuuucc

SEQ ID NO: 2549480 - RNA, 14 nt, Human
uucuccucuccccu

SEQ ID NO: 2549481 - RNA, 14 nt, Human
uucuccucuuguaa

SEQ ID NO: 2549482 - RNA, 13 nt, Human
uucuccucuugua

SEQ ID NO: 2549483 - RNA, 19 nt, Human
uucuccucuuguaaauaaa

SEQ ID NO: 2549484 - RNA, 17 nt, Human
uucuccucuuguaaaua

SEQ ID NO: 2549485 - RNA, 18 nt, Human
uucuccugacccaguccc

SEQ ID NO: 2549486 - RNA, 22 nt, Human
uucuccucuuguaaauaaagcc

SEQ ID NO: 2549487 - RNA, 15 nt, Human
uucugcacacagcac

SEQ ID NO: 2549488 - RNA, 12 nt, Human
uucugcacccuc

SEQ ID NO: 2549489 - RNA, 15 nt, Human
uucugcaagccugcg

SEQ ID NO: 2549490 - RNA, 13 nt, Human
uucugcaagccug

SEQ ID NO: 2549491 - RNA, 14 nt, Human
uucugaccauuuca

SEQ ID NO: 2549492 - RNA, 22 nt, Human
uucugcaagcacaucugcauuu

SEQ ID NO: 2549493 - RNA, 20 nt, Human
uucugaccacagcaucauuu

SEQ ID NO: 2549494 - RNA, 17 nt, Human
uucugaccacagcauca

SEQ ID NO: 2549495 - RNA, 14 nt, Human
uucugaccacacuu

SEQ ID NO: 2549496 - RNA, 22 nt, Human
uucugaccacacuuccugucca

SEQ ID NO: 2549497 - RNA, 14 nt, Human
uucugacccaugcu

SEQ ID NO: 2549498 - RNA, 23 nt, Human
uucugacaucuuaguauuugcau

SEQ ID NO: 2549499 - RNA, 14 nt, Human
uucugacauuaaca

SEQ ID NO: 2549500 - RNA, 15 nt, Human
uucugacauuaacag

SEQ ID NO: 2549501 - RNA, 20 nt, Human
uucugacauuaacaguuuuc

SEQ ID NO: 2549502 - RNA, 22 nt, Human
uucugacauuaacaguuuucca

SEQ ID NO: 2549503 - RNA, 23 nt, Human
uucugacauuaacaguuuuccau

SEQ ID NO: 2549504 - RNA, 13 nt, Human
uucugaccacacu

SEQ ID NO: 2549505 - RNA, 13 nt, Human
uucugccgcagcc

SEQ ID NO: 2549506 - RNA, 18 nt, Human
uucugcccuggcugcugc

SEQ ID NO: 2549507 - RNA, 21 nt, Human
uucugcagcaugaccugugac

SEQ ID NO: 2549508 - RNA, 22 nt, Human
uucugcagcaugaccugugacc

SEQ ID NO: 2549509 - RNA, 19 nt, Human
uucugcccuggcugcugcc

SEQ ID NO: 2549510 - RNA, 23 nt, Human
uucugcagcaugaccugugacca

SEQ ID NO: 2549511 - RNA, 19 nt, Human
uucugcacccuccacccug

SEQ ID NO: 2549512 - RNA, 17 nt, Human
uucugcacccuccaccc

SEQ ID NO: 2549513 - RNA, 16 nt, Human
uucugcacccuccacc

SEQ ID NO: 2549514 - RNA, 13 nt, Human
uucugcacccucc

SEQ ID NO: 2549515 - RNA, 23 nt, Human
uucugcacccuccacccuguccc

SEQ ID NO: 2549516 - RNA, 22 nt, Human
uucugcacccuccacccugucc

SEQ ID NO: 2549517 - RNA, 23 nt, Human
uucugcagaguuuccaaaaccag

SEQ ID NO: 2549518 - RNA, 20 nt, Human
uucugcagcaugaccuguga

SEQ ID NO: 2549519 - RNA, 20 nt, Human
uucugcacugagcagagucu

SEQ ID NO: 2549520 - RNA, 17 nt, Human
uucugcacugagcagag

SEQ ID NO: 2549521 - RNA, 15 nt, Human
uucugcacugagcag

SEQ ID NO: 2549522 - RNA, 20 nt, Human
uucucuaaguuccacugagc

SEQ ID NO: 2549523 - RNA, 18 nt, Human
uucucuaaguuccacuga

SEQ ID NO: 2549524 - RNA, 24 nt, Human
uucucuaagagaacaaugugcuau

SEQ ID NO: 2549525 - RNA, 23 nt, Human
uucucuaaguuccacugagcucc

SEQ ID NO: 2549526 - RNA, 21 nt, Human
uucucuaaguuccacugagcu

SEQ ID NO: 2549527 - RNA, 17 nt, Human
uucucuacucuagggaa

SEQ ID NO: 2549528 - RNA, 20 nt, Human
uucucuacuuugaggaaacc

SEQ ID NO: 2549529 - RNA, 19 nt, Human
uucucuacuuugaggaaac

SEQ ID NO: 2549530 - RNA, 20 nt, Human
uucucuacagacuucuccag

SEQ ID NO: 2549531 - RNA, 13 nt, Human
uucucuuuccuug

SEQ ID NO: 2549532 - RNA, 19 nt, Human
uucucuagcuggugguuuc

SEQ ID NO: 2549533 - RNA, 13 nt, Human
uucucuuucaaag

SEQ ID NO: 2549534 - RNA, 22 nt, Human
uucugacaaaaaguuuccauau

SEQ ID NO: 2549535 - RNA, 19 nt, Human
uucugacaaaaaguuucca

SEQ ID NO: 2549536 - RNA, 16 nt, Human
uucucuuuucaaaaca

SEQ ID NO: 2549537 - RNA, 14 nt, Human
uucucuuucucucc

SEQ ID NO: 2549538 - RNA, 13 nt, Human
uucucuuucucuc

SEQ ID NO: 2549539 - RNA, 22 nt, Human
uucucuuuccuuggcucccauu

SEQ ID NO: 2549540 - RNA, 16 nt, Human
uucucuuucucuccuu

SEQ ID NO: 2549541 - RNA, 19 nt, Human
aucaggaauauuuuccaaa

SEQ ID NO: 2549542 - RNA, 22 nt, Human
aucaggaauauuuuccaaagag

SEQ ID NO: 2549543 - RNA, 16 nt, Human
aucaggacccagagga

SEQ ID NO: 2549544 - RNA, 12 nt, Human
aucaggaugaac

SEQ ID NO: 2549545 - RNA, 22 nt, Human
aucaggagaaaaagccuccagu

SEQ ID NO: 2549546 - RNA, 13 nt, Human
aucaggagaaaaa

SEQ ID NO: 2549547 - RNA, 18 nt, Human
aucaggacccagaggaag

SEQ ID NO: 2549548 - RNA, 20 nt, Human
aucaggacccagaggaaggg

SEQ ID NO: 2549549 - RNA, 18 nt, Human
aucaggaugaacccagga

SEQ ID NO: 2549550 - RNA, 13 nt, Human
aucaggaugaacc

SEQ ID NO: 2549551 - RNA, 19 nt, Human
aucaggaugaacccaggac

SEQ ID NO: 2549552 - RNA, 13 nt, Human
aucaggccaggcc

SEQ ID NO: 2549553 - RNA, 19 nt, Human
aucagacuaugaaguuuuu

SEQ ID NO: 2549554 - RNA, 22 nt, Human
aucagaccuuggaucagaugaa

SEQ ID NO: 2549555 - RNA, 22 nt, Human
aucagacuagugacaagcuccu

SEQ ID NO: 2549556 - RNA, 18 nt, Human
aucagacuucacacugca

SEQ ID NO: 2549557 - RNA, 19 nt, Human
aucagacacucuggcuggu

SEQ ID NO: 2549558 - RNA, 16 nt, Human
aucagaccauaauguu

SEQ ID NO: 2549559 - RNA, 20 nt, Human
aucagaccauaauguuacau

SEQ ID NO: 2549560 - RNA, 14 nt, Human
aucagacccuaccc

SEQ ID NO: 2549561 - RNA, 15 nt, Human
aucagacccuacccc

SEQ ID NO: 2549562 - RNA, 16 nt, Human
aucagacccuacccca

SEQ ID NO: 2549563 - RNA, 18 nt, Human
aucagacccuaccccacc

SEQ ID NO: 2549564 - RNA, 19 nt, Human
aucagacccuaccccacca

SEQ ID NO: 2549565 - RNA, 20 nt, Human
aucagacccuaccccaccac

SEQ ID NO: 2549566 - RNA, 12 nt, Human
uucucagcuccc

SEQ ID NO: 2549567 - RNA, 13 nt, Human
uucucagcucccc

SEQ ID NO: 2549568 - RNA, 19 nt, Human
uucucagcucccauuucua

SEQ ID NO: 2549569 - RNA, 18 nt, Human
uucucagcucccauuucu

SEQ ID NO: 2549570 - RNA, 14 nt, Human
uucucagcucccau

SEQ ID NO: 2549571 - RNA, 13 nt, Human
uucucagcuccca

SEQ ID NO: 2549572 - RNA, 13 nt, Human
uucucagaaucuc

SEQ ID NO: 2549573 - RNA, 23 nt, Human
uucucagaaucuacccaaaggau

SEQ ID NO: 2549574 - RNA, 19 nt, Human
uucucagaaucuacccaaa

SEQ ID NO: 2549575 - RNA, 13 nt, Human
uucucagauauuu

SEQ ID NO: 2549576 - RNA, 23 nt, Human
uucucagacuuuggaaaaugcau

SEQ ID NO: 2549577 - RNA, 21 nt, Human
uucucagauggauugauaauu

SEQ ID NO: 2549578 - RNA, 19 nt, Human
uucucagauccuuguuuca

SEQ ID NO: 2549579 - RNA, 14 nt, Human
uucucagauauuua

SEQ ID NO: 2549580 - RNA, 15 nt, Human
uucucagauauuuau

SEQ ID NO: 2549581 - RNA, 15 nt, Human
uucucagauccuugu

SEQ ID NO: 2549582 - RNA, 20 nt, Human
uucucagauauuuauauuuu

SEQ ID NO: 2549583 - RNA, 16 nt, Human
aucagaaacacccuca

SEQ ID NO: 2549584 - RNA, 20 nt, Human
aucagaaacacccucacacu

SEQ ID NO: 2549585 - RNA, 14 nt, Human
aucacuuuuuucca

SEQ ID NO: 2549586 - RNA, 15 nt, Human
aucagaaaagggaag

SEQ ID NO: 2549587 - RNA, 13 nt, Human
aucagaaaaggga

SEQ ID NO: 2549588 - RNA, 15 nt, Human
uucucagcucccccu

SEQ ID NO: 2549589 - RNA, 14 nt, Human
uucucagcuccccc

SEQ ID NO: 2549590 - RNA, 18 nt, Human
aucacuuucucaguuuuc

SEQ ID NO: 2549591 - RNA, 21 nt, Human
aucacuuucucaguuuucaua

SEQ ID NO: 2549592 - RNA, 15 nt, Human
aucacuuuucaguga

SEQ ID NO: 2549593 - RNA, 14 nt, Human
aucacuuuucagug

SEQ ID NO: 2549594 - RNA, 13 nt, Human
aucacuuuucagu

SEQ ID NO: 2549595 - RNA, 16 nt, Human
uucucagcucccccug

SEQ ID NO: 2549596 - RNA, 20 nt, Human
aucacuuucucaguuuucau

SEQ ID NO: 2549597 - RNA, 19 nt, Human
uucuaguggucuuuguaag

SEQ ID NO: 2549598 - RNA, 18 nt, Human
uucuaguggucuuuguaa

SEQ ID NO: 2549599 - RNA, 17 nt, Human
uucuaguggucuuugua

SEQ ID NO: 2549600 - RNA, 15 nt, Human
uucuaguggucuuug

SEQ ID NO: 2549601 - RNA, 21 nt, Human
uucuaguggucuuuguaagag

SEQ ID NO: 2549602 - RNA, 20 nt, Human
uucuaguggucuuuguaaga

SEQ ID NO: 2549603 - RNA, 18 nt, Human
uucuagugcugcugaaga

SEQ ID NO: 2549604 - RNA, 16 nt, Human
uucuagugcugcugaa

SEQ ID NO: 2549605 - RNA, 14 nt, Human
uucuagugcugcug

SEQ ID NO: 2549606 - RNA, 13 nt, Human
uucuagugcugcu

SEQ ID NO: 2549607 - RNA, 14 nt, Human
uucuagucucucug

SEQ ID NO: 2549608 - RNA, 23 nt, Human
uucuagucuccuuugcacugagg

SEQ ID NO: 2549609 - RNA, 12 nt, Human
uucuagugcugc

SEQ ID NO: 2549610 - RNA, 22 nt, Human
uucuagucuccuuugcacugag

SEQ ID NO: 2549611 - RNA, 21 nt, Human
uucuagucuccuuugcacuga

SEQ ID NO: 2549612 - RNA, 22 nt, Human
uucuagagaagaggcuggugcu

SEQ ID NO: 2549613 - RNA, 21 nt, Human
uucuaaguaaaaccacagcag

SEQ ID NO: 2549614 - RNA, 14 nt, Human
uucuagagaagagg

SEQ ID NO: 2549615 - RNA, 12 nt, Human
uucuagagaaga

SEQ ID NO: 2549616 - RNA, 15 nt, Human
uucuagacuuucugu

SEQ ID NO: 2549617 - RNA, 21 nt, Human
uucuagaacaucccugccagc

SEQ ID NO: 2549618 - RNA, 23 nt, Human
uucuagaaagccuguuccccuca

SEQ ID NO: 2549619 - RNA, 17 nt, Human
uucuagaaagccuguuc

SEQ ID NO: 2549620 - RNA, 22 nt, Human
uucuagaacaucccugccagcu

SEQ ID NO: 2549621 - RNA, 15 nt, Human
uucuagaauuuauca

SEQ ID NO: 2549622 - RNA, 21 nt, Human
uucuagaauuuaucacacuuc

SEQ ID NO: 2549623 - RNA, 13 nt, Human
uucuauaauuuaa

SEQ ID NO: 2549624 - RNA, 14 nt, Human
uucuauaauuuaaa

SEQ ID NO: 2549625 - RNA, 22 nt, Human
uucuauaaguuuuauguuaaau

SEQ ID NO: 2549626 - RNA, 22 nt, Human
uucuaguggucuuuguaagagu

SEQ ID NO: 2549627 - RNA, 21 nt, Human
uucuauaaguuuuauguuaaa

SEQ ID NO: 2549628 - RNA, 18 nt, Human
uucucacuguucccucug

SEQ ID NO: 2549629 - RNA, 18 nt, Human
uucucagaaggcaaauga

SEQ ID NO: 2549630 - RNA, 19 nt, Human
uucucagaaggcaaaugac

SEQ ID NO: 2549631 - RNA, 21 nt, Human
uucucagaaggcaaaugacuu

SEQ ID NO: 2549632 - RNA, 15 nt, Human
uucucagaaucuacc

SEQ ID NO: 2549633 - RNA, 13 nt, Human
uucucagaaucua

SEQ ID NO: 2549634 - RNA, 22 nt, Human
uucucagaaggcaaaugacuuu

SEQ ID NO: 2549635 - RNA, 21 nt, Human
uucucacugccaugccagcuu

SEQ ID NO: 2549636 - RNA, 21 nt, Human
uucgcaucaaaagacaauucu

SEQ ID NO: 2549637 - RNA, 20 nt, Human
uucgcaucaaaagacaauuc

SEQ ID NO: 2549638 - RNA, 19 nt, Human
uucgcaucaaaagacaauu

SEQ ID NO: 2549639 - RNA, 18 nt, Human
uucgcaucaaaagacaau

SEQ ID NO: 2549640 - RNA, 14 nt, Human
uucgcaucaaaaga

SEQ ID NO: 2549641 - RNA, 14 nt, Human
uucgcauggucaca

SEQ ID NO: 2549642 - RNA, 16 nt, Human
uucgcauggucacaca

SEQ ID NO: 2549643 - RNA, 17 nt, Human
uucgcauggucacacac

SEQ ID NO: 2549644 - RNA, 18 nt, Human
uucgcauggucacacacu

SEQ ID NO: 2549645 - RNA, 19 nt, Human
uucgcauggucacacacug

SEQ ID NO: 2549646 - RNA, 20 nt, Human
uucgcauggucacacacuga

SEQ ID NO: 2549647 - RNA, 21 nt, Human
uucgcauggucacacacugau

SEQ ID NO: 2549648 - RNA, 23 nt, Human
uucgcauggucacacacugaugc

SEQ ID NO: 2549649 - RNA, 21 nt, Human
uucgccguggcugcggcaccc

SEQ ID NO: 2549650 - RNA, 20 nt, Human
uucgccguggcugcggcacc

SEQ ID NO: 2549651 - RNA, 19 nt, Human
uucgcccaaagccagacag

SEQ ID NO: 2549652 - RNA, 14 nt, Human
uucgccguggcugc

SEQ ID NO: 2549653 - RNA, 23 nt, Human
uucgcaccuaccaucagggacag

SEQ ID NO: 2549654 - RNA, 21 nt, Human
uucgcaggauucuuccucccu

SEQ ID NO: 2549655 - RNA, 20 nt, Human
uucgauacaccgggccugga

SEQ ID NO: 2549656 - RNA, 14 nt, Human
uucgcacagcaguu

SEQ ID NO: 2549657 - RNA, 20 nt, Human
uucgaugggcccaauucuua

SEQ ID NO: 2549658 - RNA, 21 nt, Human
uucgaugggcccaauucuuac

SEQ ID NO: 2549659 - RNA, 15 nt, Human
aucaauaaacgauuu

SEQ ID NO: 2549660 - RNA, 14 nt, Human
aucaauaaacgauu

SEQ ID NO: 2549661 - RNA, 19 nt, Human
aucaauaaacgauuuaauu

SEQ ID NO: 2549662 - RNA, 22 nt, Human
uucgaaaccugggauucaggaa

SEQ ID NO: 2549663 - RNA, 14 nt, Human
uucgaagcucagcc

SEQ ID NO: 2549664 - RNA, 16 nt, Human
uucgaagcucagccca

SEQ ID NO: 2549665 - RNA, 15 nt, Human
aucaauaaaauguga

SEQ ID NO: 2549666 - RNA, 16 nt, Human
aucaauaaaaugugau

SEQ ID NO: 2549667 - RNA, 17 nt, Human
aucaauaaaaugugauu

SEQ ID NO: 2549668 - RNA, 22 nt, Human
uucgaagcucagcccacccccc

SEQ ID NO: 2549669 - RNA, 17 nt, Human
uucgacucagccucagg

SEQ ID NO: 2549670 - RNA, 18 nt, Human
uucgaccugauuuacagu

SEQ ID NO: 2549671 - RNA, 19 nt, Human
uucgacugugaccuguggg

SEQ ID NO: 2549672 - RNA, 17 nt, Human
uucgaccugauuuacag

SEQ ID NO: 2549673 - RNA, 15 nt, Human
uucgagaccagccug

SEQ ID NO: 2549674 - RNA, 16 nt, Human
uucgagaccagccugg

SEQ ID NO: 2549675 - RNA, 17 nt, Human
uucgagaccagccuggc

SEQ ID NO: 2549676 - RNA, 19 nt, Human
uucgagaccagccuggcca

SEQ ID NO: 2549677 - RNA, 20 nt, Human
uucgagaagcugcucuggaa

SEQ ID NO: 2549678 - RNA, 15 nt, Human
uucgagaagcugcuc

SEQ ID NO: 2549679 - RNA, 17 nt, Human
uucgacuugcauuuuug

SEQ ID NO: 2549680 - RNA, 21 nt, Human
uucgagaagcugcucuggaau

SEQ ID NO: 2549681 - RNA, 18 nt, Human
uucgagaccaaccugacc

SEQ ID NO: 2549682 - RNA, 14 nt, Human
uucgagaccagccu

SEQ ID NO: 2549683 - RNA, 18 nt, Human
uucuaagagaaguuauuu

SEQ ID NO: 2549684 - RNA, 15 nt, Human
uucuaacuccaguga

SEQ ID NO: 2549685 - RNA, 19 nt, Human
uucuaaguaaaaccacagc

SEQ ID NO: 2549686 - RNA, 20 nt, Human
uucuaaguaaaaccacagca

SEQ ID NO: 2549687 - RNA, 17 nt, Human
uucuaaguaaaaccaca

SEQ ID NO: 2549688 - RNA, 14 nt, Human
uucuaaggaauaug

SEQ ID NO: 2549689 - RNA, 18 nt, Human
uucuaaggaauaugagcu

SEQ ID NO: 2549690 - RNA, 20 nt, Human
uucuaacaaaaaaauauauu

SEQ ID NO: 2549691 - RNA, 19 nt, Human
uucuaacaaaaaaauauau

SEQ ID NO: 2549692 - RNA, 14 nt, Human
uucuaacaagucau

SEQ ID NO: 2549693 - RNA, 19 nt, Human
uucuaaaucuccaaaauaa

SEQ ID NO: 2549694 - RNA, 13 nt, Human
uucuaaauagcaa

SEQ ID NO: 2549695 - RNA, 13 nt, Human
uucuaaaguaaaa

SEQ ID NO: 2549696 - RNA, 15 nt, Human
uucuaaaguaaaaac

SEQ ID NO: 2549697 - RNA, 13 nt, Human
uucgcuccugugu

SEQ ID NO: 2549698 - RNA, 22 nt, Human
uucgcaucaaaagacaauucuu

SEQ ID NO: 2549699 - RNA, 19 nt, Human
uucgcgugcccucgcugcu

SEQ ID NO: 2549700 - RNA, 22 nt, Human
uucgcgauggacagacucacaa

SEQ ID NO: 2549701 - RNA, 18 nt, Human
uuccucucacuaaacuuu

SEQ ID NO: 2549702 - RNA, 17 nt, Human
uuccucucacuaaacuu

SEQ ID NO: 2549703 - RNA, 23 nt, Human
uuccucuauugauguacagucug

SEQ ID NO: 2549704 - RNA, 19 nt, Human
uuccuagaaguuacugaau

SEQ ID NO: 2549705 - RNA, 21 nt, Human
uuccucuauugauguacaguc

SEQ ID NO: 2549706 - RNA, 12 nt, Human
uuccucuccacu

SEQ ID NO: 2549707 - RNA, 12 nt, Human
uuccucuccacc

SEQ ID NO: 2549708 - RNA, 19 nt, Human
uuccucucacuaaacuuua

SEQ ID NO: 2549709 - RNA, 17 nt, Human
uuccucuccacccuccc

SEQ ID NO: 2549710 - RNA, 15 nt, Human
uuccucuccacugcc

SEQ ID NO: 2549711 - RNA, 14 nt, Human
uuccucuccacugc

SEQ ID NO: 2549712 - RNA, 13 nt, Human
uuccucuccacug

SEQ ID NO: 2549713 - RNA, 23 nt, Human
uuccuguaacacaagccacagaa

SEQ ID NO: 2549714 - RNA, 22 nt, Human
uuccuguaacacaagccacaga

SEQ ID NO: 2549715 - RNA, 21 nt, Human
uuccuguaacacaagccacag

SEQ ID NO: 2549716 - RNA, 19 nt, Human
uuccuguaacacaagccac

SEQ ID NO: 2549717 - RNA, 11 nt, Human
uuccuguaaca

SEQ ID NO: 2549718 - RNA, 21 nt, Human
uuccuguaaaaaaaaaaaagu

SEQ ID NO: 2549719 - RNA, 22 nt, Human
uuccuguagccuucuguaggaa

SEQ ID NO: 2549720 - RNA, 18 nt, Human
uuccuguagcaucuucug

SEQ ID NO: 2549721 - RNA, 17 nt, Human
uuccuguagcaucuucu

SEQ ID NO: 2549722 - RNA, 15 nt, Human
uuccuguagcaucuu

SEQ ID NO: 2549723 - RNA, 16 nt, Human
uuccuguauguugucc

SEQ ID NO: 2549724 - RNA, 15 nt, Human
uuccugucccaccuc

SEQ ID NO: 2549725 - RNA, 14 nt, Human
uuccugucccaccu

SEQ ID NO: 2549726 - RNA, 22 nt, Human
uuccuguccagcuccaaccugc

SEQ ID NO: 2549727 - RNA, 16 nt, Human
uuccuguccagcucca

SEQ ID NO: 2549728 - RNA, 17 nt, Human
uuccuguccagcuccaa

SEQ ID NO: 2549729 - RNA, 15 nt, Human
uuccuguccagcucc

SEQ ID NO: 2549730 - RNA, 15 nt, Human
uuccuguccagagag

SEQ ID NO: 2549731 - RNA, 20 nt, Human
uuccuucaaagcaaaugucu

SEQ ID NO: 2549732 - RNA, 17 nt, Human
uuccuucacauccugug

SEQ ID NO: 2549733 - RNA, 21 nt, Human
uuccuuagcuuagaccucagc

SEQ ID NO: 2549734 - RNA, 20 nt, Human
uuccuuagcuuagaccucag

SEQ ID NO: 2549735 - RNA, 22 nt, Human
uuccuuagcuuagaccucagcc

SEQ ID NO: 2549736 - RNA, 23 nt, Human
uuccuuagcuuagaccucagccu

SEQ ID NO: 2549737 - RNA, 23 nt, Human
uuccuuagguuuuuuuccuucug

SEQ ID NO: 2549738 - RNA, 22 nt, Human
uuccuuagguuuuuuuccuucu

SEQ ID NO: 2549739 - RNA, 23 nt, Human
uuccuuauguauauuuaaaagaa

SEQ ID NO: 2549740 - RNA, 12 nt, Human
auauuuucuguu

SEQ ID NO: 2549741 - RNA, 13 nt, Human
auauuuucuguuu

SEQ ID NO: 2549742 - RNA, 23 nt, Human
auauuuucuuccaagcaaaggug

SEQ ID NO: 2549743 - RNA, 16 nt, Human
auauuuuccaugaaaa

SEQ ID NO: 2549744 - RNA, 18 nt, Human
auauuuuccaugaaaaug

SEQ ID NO: 2549745 - RNA, 16 nt, Human
aucaaguauuugggaa

SEQ ID NO: 2549746 - RNA, 14 nt, Human
aucaacauuucuca

SEQ ID NO: 2549747 - RNA, 22 nt, Human
aucaaccccuucgcuccugugu

SEQ ID NO: 2549748 - RNA, 20 nt, Human
aucaaccccuucgcuccugu

SEQ ID NO: 2549749 - RNA, 19 nt, Human
aucaaccccuucgcuccug

SEQ ID NO: 2549750 - RNA, 23 nt, Human
aucaaguuggcuucuaaucaaag

SEQ ID NO: 2549751 - RNA, 22 nt, Human
aucaaguuggcuucuaaucaaa

SEQ ID NO: 2549752 - RNA, 16 nt, Human
aucaagugugcuuuag

SEQ ID NO: 2549753 - RNA, 15 nt, Human
aucaagugugcuuua

SEQ ID NO: 2549754 - RNA, 15 nt, Human
aucaaguugaauuga

SEQ ID NO: 2549755 - RNA, 22 nt, Human
aucaaguuauugacaaacucuc

SEQ ID NO: 2549756 - RNA, 16 nt, Human
aucaagugucuuccau

SEQ ID NO: 2549757 - RNA, 13 nt, Human
aucaagugucuuc

SEQ ID NO: 2549758 - RNA, 21 nt, Human
aucaaguauuugggaagugaa

SEQ ID NO: 2549759 - RNA, 20 nt, Human
aucaaguauuugggaaguga

SEQ ID NO: 2549760 - RNA, 12 nt, Human
aucaagucaccg

SEQ ID NO: 2549761 - RNA, 17 nt, Human
aucaaauggaagacaca

SEQ ID NO: 2549762 - RNA, 22 nt, Human
aucaaauggaaaggagaggaaa

SEQ ID NO: 2549763 - RNA, 21 nt, Human
aucaaauggaagacacauuga

SEQ ID NO: 2549764 - RNA, 21 nt, Human
aucaaauauuagaugugauuu

SEQ ID NO: 2549765 - RNA, 19 nt, Human
aucaaauauuagaugugau

SEQ ID NO: 2549766 - RNA, 20 nt, Human
aucaaauaugcaaagcacug

SEQ ID NO: 2549767 - RNA, 18 nt, Human
aucaaauauuagauguga

SEQ ID NO: 2549768 - RNA, 16 nt, Human
aucaaauauuagaugu

SEQ ID NO: 2549769 - RNA, 15 nt, Human
aucaaauauuagaug

SEQ ID NO: 2549770 - RNA, 14 nt, Human
aucaaauauuagau

SEQ ID NO: 2549771 - RNA, 13 nt, Human
aucaaauauuaga

SEQ ID NO: 2549772 - RNA, 16 nt, Human
auauuuuuauauuuag

SEQ ID NO: 2549773 - RNA, 19 nt, Human
auauuuuuauagacaaaua

SEQ ID NO: 2549774 - RNA, 17 nt, Human
auauuuugucuaaaaug

SEQ ID NO: 2549775 - RNA, 19 nt, Human
auauuuucuuccaagcaaa

SEQ ID NO: 2549776 - RNA, 12 nt, Human
auauuuuuaaga

SEQ ID NO: 2549777 - RNA, 14 nt, Human
auauuuugucuaaa

SEQ ID NO: 2549778 - RNA, 20 nt, Human
auauuuuuaaaauauuuauu

SEQ ID NO: 2549779 - RNA, 16 nt, Human
auauuuuuaagauaau

SEQ ID NO: 2549780 - RNA, 14 nt, Human
auauuuuuaagaua

SEQ ID NO: 2549781 - RNA, 20 nt, Human
auauuuuuaagauaauaaua

SEQ ID NO: 2549782 - RNA, 13 nt, Human
auauuuuuauaga

SEQ ID NO: 2549783 - RNA, 14 nt, Human
auauuuuuauagac

SEQ ID NO: 2549784 - RNA, 13 nt, Human
auauuuuuagaua

SEQ ID NO: 2549785 - RNA, 15 nt, Human
auauuuuuaauuaaa

SEQ ID NO: 2549786 - RNA, 13 nt, Human
uucccuacuuccu

SEQ ID NO: 2549787 - RNA, 23 nt, Human
uuccccuugcccagggcucagcc

SEQ ID NO: 2549788 - RNA, 22 nt, Human
uuccccuugcccagggcucagc

SEQ ID NO: 2549789 - RNA, 16 nt, Human
uucccuacuuccugug

SEQ ID NO: 2549790 - RNA, 14 nt, Human
uucccuacuuccug

SEQ ID NO: 2549791 - RNA, 17 nt, Human
uucccuacuuccuguga

SEQ ID NO: 2549792 - RNA, 22 nt, Human
uucccuagaaacuuccaaaucc

SEQ ID NO: 2549793 - RNA, 19 nt, Human
uucccuaggggacacuucc

SEQ ID NO: 2549794 - RNA, 18 nt, Human
uucccuaggggacacuuc

SEQ ID NO: 2549795 - RNA, 16 nt, Human
uucccuaucuuugcca

SEQ ID NO: 2549796 - RNA, 19 nt, Human
uucccuagucuauucauua

SEQ ID NO: 2549797 - RNA, 21 nt, Human
uucccuaggggacacuucccu

SEQ ID NO: 2549798 - RNA, 14 nt, Human
uuccccuuccacug

SEQ ID NO: 2549799 - RNA, 15 nt, Human
uuccccuuccacuga

SEQ ID NO: 2549800 - RNA, 22 nt, Human
uuccccuuccuaauuccacagc

SEQ ID NO: 2549801 - RNA, 21 nt, Human
uuccccuuccacugagggcag

SEQ ID NO: 2549802 - RNA, 15 nt, Human
uuccccuguggggau

SEQ ID NO: 2549803 - RNA, 13 nt, Human
uuccccuguccug

SEQ ID NO: 2549804 - RNA, 22 nt, Human
uuccccuccuaccccucccagc

SEQ ID NO: 2549805 - RNA, 14 nt, Human
uuccccuguucacu

SEQ ID NO: 2549806 - RNA, 17 nt, Human
uuccccuguucacucua

SEQ ID NO: 2549807 - RNA, 21 nt, Human
uuccuacccacaccucugcca

SEQ ID NO: 2549808 - RNA, 20 nt, Human
uuccuacccacaccucugcc

SEQ ID NO: 2549809 - RNA, 17 nt, Human
uuccuacccaaccacuc

SEQ ID NO: 2549810 - RNA, 16 nt, Human
uuccuacccaaccacu

SEQ ID NO: 2549811 - RNA, 23 nt, Human
uuccuacccacaccucugccaga

SEQ ID NO: 2549812 - RNA, 13 nt, Human
uuccuaccucccu

SEQ ID NO: 2549813 - RNA, 16 nt, Human
uuccuaccucccugca

SEQ ID NO: 2549814 - RNA, 15 nt, Human
uuccuaccucccugc

SEQ ID NO: 2549815 - RNA, 14 nt, Human
uuccuacagccccu

SEQ ID NO: 2549816 - RNA, 12 nt, Human
uuccuacagccc

SEQ ID NO: 2549817 - RNA, 17 nt, Human
uuccuacagauagucaa

SEQ ID NO: 2549818 - RNA, 21 nt, Human
uuccuacacccuuggacuuga

SEQ ID NO: 2549819 - RNA, 18 nt, Human
uuccuacagccccuuuuu

SEQ ID NO: 2549820 - RNA, 18 nt, Human
uuccuacagauagucaaa

SEQ ID NO: 2549821 - RNA, 18 nt, Human
uuccuacacccuuggacu

SEQ ID NO: 2549822 - RNA, 13 nt, Human
uucccuaucuuuu

SEQ ID NO: 2549823 - RNA, 20 nt, Human
uucccuuuuuuggcugcuga

SEQ ID NO: 2549824 - RNA, 19 nt, Human
uucccuuuuuuggcugcug

SEQ ID NO: 2549825 - RNA, 18 nt, Human
uucccuuuuuuggcugcu

SEQ ID NO: 2549826 - RNA, 17 nt, Human
uucccuuuuacauacug

SEQ ID NO: 2549827 - RNA, 18 nt, Human
uucccuuuuacauacugc

SEQ ID NO: 2549828 - RNA, 19 nt, Human
uucccuuuuacauacugcu

SEQ ID NO: 2549829 - RNA, 21 nt, Human
uucccuuuuacauacugcugu

SEQ ID NO: 2549830 - RNA, 22 nt, Human
uucccccugcuuccaccucacc

SEQ ID NO: 2549831 - RNA, 20 nt, Human
uucccccuggccaccacccc

SEQ ID NO: 2549832 - RNA, 23 nt, Human
auauuuuaccucuuauugcaaaa

SEQ ID NO: 2549833 - RNA, 17 nt, Human
auauuuuaccucuuauu

SEQ ID NO: 2549834 - RNA, 23 nt, Human
auauuuuacauucuuggaaaguc

SEQ ID NO: 2549835 - RNA, 19 nt, Human
uucccccuccaaucccacc

SEQ ID NO: 2549836 - RNA, 15 nt, Human
uucccccucccaggg

SEQ ID NO: 2549837 - RNA, 17 nt, Human
uucccccuucacaaagc

SEQ ID NO: 2549838 - RNA, 22 nt, Human
uucccccuggccaccacccccc

SEQ ID NO: 2549839 - RNA, 16 nt, Human
uuccccgagggaugau

SEQ ID NO: 2549840 - RNA, 19 nt, Human
uucccccuuuucugcauuu

SEQ ID NO: 2549841 - RNA, 17 nt, Human
uuccccggucccuugag

SEQ ID NO: 2549842 - RNA, 19 nt, Human
uuccccuaaccucauuccc

SEQ ID NO: 2549843 - RNA, 23 nt, Human
uuccccgagggaugaugccacac

SEQ ID NO: 2549844 - RNA, 22 nt, Human
uuccccgagggaugaugccaca

SEQ ID NO: 2549845 - RNA, 16 nt, Human
uuccccggucccuuga

SEQ ID NO: 2549846 - RNA, 18 nt, Human
uuccccucugcugcuguc

SEQ ID NO: 2549847 - RNA, 15 nt, Human
uuccccucugcugcu

SEQ ID NO: 2549848 - RNA, 14 nt, Human
uuccccucugcugc

SEQ ID NO: 2549849 - RNA, 15 nt, Human
uuccccuccuccacu

SEQ ID NO: 2549850 - RNA, 17 nt, Human
uuccccuccuucucccu

SEQ ID NO: 2549851 - RNA, 12 nt, Human
uuccccucugcu

SEQ ID NO: 2549852 - RNA, 18 nt, Human
uuccccuccuucucccuu

SEQ ID NO: 2549853 - RNA, 21 nt, Human
uuccccuccuaccccucccag

SEQ ID NO: 2549854 - RNA, 20 nt, Human
uuccccuccuaccccuccca

SEQ ID NO: 2549855 - RNA, 19 nt, Human
uuccccuccuaccccuccc

SEQ ID NO: 2549856 - RNA, 17 nt, Human
uuccccuccuaccccuc

SEQ ID NO: 2549857 - RNA, 16 nt, Human
uuccccuccuaccccu

SEQ ID NO: 2549858 - RNA, 13 nt, Human
uuccccuccuacc

SEQ ID NO: 2549859 - RNA, 14 nt, Human
uuccccucccuggg

SEQ ID NO: 2549860 - RNA, 19 nt, Human
uuccccucacuggaugaaa

SEQ ID NO: 2549861 - RNA, 22 nt, Human
uuccccuaguaagugccuucca

SEQ ID NO: 2549862 - RNA, 21 nt, Human
uuccccuacccccuccucucu

SEQ ID NO: 2549863 - RNA, 13 nt, Human
uuccccucccugg

SEQ ID NO: 2549864 - RNA, 16 nt, Human
uuccccucccuggcuc

SEQ ID NO: 2549865 - RNA, 17 nt, Human
uuccccucccuggcucc

SEQ ID NO: 2549866 - RNA, 20 nt, Human
uucccacugcacccccuccu

SEQ ID NO: 2549867 - RNA, 19 nt, Human
uucccacugcacccccucc

SEQ ID NO: 2549868 - RNA, 18 nt, Human
uucccacugcacccccuc

SEQ ID NO: 2549869 - RNA, 13 nt, Human
uucccacugcacc

SEQ ID NO: 2549870 - RNA, 24 nt, Human
uucccacugcacccccuccugcug

SEQ ID NO: 2549871 - RNA, 23 nt, Human
uucccacugcacccccuccugcu

SEQ ID NO: 2549872 - RNA, 15 nt, Human
uucccacuguuuaag

SEQ ID NO: 2549873 - RNA, 18 nt, Human
uucccacucuagggcagu

SEQ ID NO: 2549874 - RNA, 15 nt, Human
uucccacucaccccg

SEQ ID NO: 2549875 - RNA, 11 nt, Human
uucccacugca

SEQ ID NO: 2549876 - RNA, 12 nt, Human
uucccagaauca

SEQ ID NO: 2549877 - RNA, 23 nt, Human
uucccagaaggcauaucagucuc

SEQ ID NO: 2549878 - RNA, 13 nt, Human
uucccagaaggca

SEQ ID NO: 2549879 - RNA, 18 nt, Human
uucccagagcaaaauaau

SEQ ID NO: 2549880 - RNA, 19 nt, Human
uucccagagacaggaaaau

SEQ ID NO: 2549881 - RNA, 22 nt, Human
uucccagagacaggaaaauccu

SEQ ID NO: 2549882 - RNA, 15 nt, Human
uucccagaaucaaag

SEQ ID NO: 2549883 - RNA, 13 nt, Human
uucccagaaucaa

SEQ ID NO: 2549884 - RNA, 23 nt, Human
uucccagaaucaaagcaaugcau

SEQ ID NO: 2549885 - RNA, 15 nt, Human
uucccagagacagga

SEQ ID NO: 2549886 - RNA, 21 nt, Human
uucccagagugugaaacuucc

SEQ ID NO: 2549887 - RNA, 23 nt, Human
uucccagagcaaaauaauuuuaa

SEQ ID NO: 2549888 - RNA, 23 nt, Human
uucccagcagggccacucccggc

SEQ ID NO: 2549889 - RNA, 14 nt, Human
uucccagcacauga

SEQ ID NO: 2549890 - RNA, 14 nt, Human
uucccagauacuuc

SEQ ID NO: 2549891 - RNA, 11 nt, Human
auauuuuaauu

SEQ ID NO: 2549892 - RNA, 12 nt, Human
augauucccagc

SEQ ID NO: 2549893 - RNA, 15 nt, Human
augauuccagguggc

SEQ ID NO: 2549894 - RNA, 16 nt, Human
augauuccagguggca

SEQ ID NO: 2549895 - RNA, 13 nt, Human
augauuccuuccu

SEQ ID NO: 2549896 - RNA, 17 nt, Human
augauuucagcucacug

SEQ ID NO: 2549897 - RNA, 14 nt, Human
augauucagaaauu

SEQ ID NO: 2549898 - RNA, 17 nt, Human
augauucagaaauugga

SEQ ID NO: 2549899 - RNA, 16 nt, Human
augauucaguguuaaa

SEQ ID NO: 2549900 - RNA, 13 nt, Human
augauucauuuua

SEQ ID NO: 2549901 - RNA, 21 nt, Human
augauucaacagguuuuccug

SEQ ID NO: 2549902 - RNA, 14 nt, Human
augauuauuuucaa

SEQ ID NO: 2549903 - RNA, 15 nt, Human
augauuaguaaagaa

SEQ ID NO: 2549904 - RNA, 14 nt, Human
augauuagcaaguu

SEQ ID NO: 2549905 - RNA, 23 nt, Human
augauuagcaaguuacagugaug

SEQ ID NO: 2549906 - RNA, 22 nt, Human
augauuaugaauuacauuugua

SEQ ID NO: 2549907 - RNA, 20 nt, Human
augauuaaccacuucagcug

SEQ ID NO: 2549908 - RNA, 21 nt, Human
augauuaaccacuucagcuga

SEQ ID NO: 2549909 - RNA, 21 nt, Human
uuguugggauuccugacccag

SEQ ID NO: 2549910 - RNA, 20 nt, Human
uuguugggauuccugaccca

SEQ ID NO: 2549911 - RNA, 22 nt, Human
uuguugggauuccugacccagg

SEQ ID NO: 2549912 - RNA, 19 nt, Human
uuguugggauuccugaccc

SEQ ID NO: 2549913 - RNA, 23 nt, Human
uuguuggcuuucccuuaucaaac

SEQ ID NO: 2549914 - RNA, 19 nt, Human
augauuaaccacuucagcu

SEQ ID NO: 2549915 - RNA, 21 nt, Human
augauuuccuugaauguggcu

SEQ ID NO: 2549916 - RNA, 20 nt, Human
augauuucaugcuaucucug

SEQ ID NO: 2549917 - RNA, 21 nt, Human
augauuucaugcuaucucugu

SEQ ID NO: 2549918 - RNA, 20 nt, Human
augauuuccuugaauguggc

SEQ ID NO: 2549919 - RNA, 19 nt, Human
augauuucagcucacugca

SEQ ID NO: 2549920 - RNA, 18 nt, Human
augcaaauauuuuuuugu

SEQ ID NO: 2549921 - RNA, 14 nt, Human
augcaaaggcuggg

SEQ ID NO: 2549922 - RNA, 15 nt, Human
augcaaaggcuggga

SEQ ID NO: 2549923 - RNA, 13 nt, Human
augcaaaggcugg

SEQ ID NO: 2549924 - RNA, 13 nt, Human
augauuuuuagau

SEQ ID NO: 2549925 - RNA, 23 nt, Human
augauuuuauuugacaaaauuug

SEQ ID NO: 2549926 - RNA, 11 nt, Human
augauuuuuag

SEQ ID NO: 2549927 - RNA, 15 nt, Human
augcaaagcacugac

SEQ ID NO: 2549928 - RNA, 18 nt, Human
augauuuuauuugacaaa

SEQ ID NO: 2549929 - RNA, 16 nt, Human
augauuuuauuugaca

SEQ ID NO: 2549930 - RNA, 18 nt, Human
augcaccaccaagccaag

SEQ ID NO: 2549931 - RNA, 15 nt, Human
augcaccaccaagcc

SEQ ID NO: 2549932 - RNA, 21 nt, Human
augcaccaccaagccaaggga

SEQ ID NO: 2549933 - RNA, 19 nt, Human
augcacuuauaauuuuccu

SEQ ID NO: 2549934 - RNA, 14 nt, Human
augcaccagcccuu

SEQ ID NO: 2549935 - RNA, 12 nt, Human
augcacuuuguu

SEQ ID NO: 2549936 - RNA, 22 nt, Human
augcacuuucuauccucuguaa

SEQ ID NO: 2549937 - RNA, 13 nt, Human
augcaccagcccu

SEQ ID NO: 2549938 - RNA, 21 nt, Human
augcacauauggacucugcac

SEQ ID NO: 2549939 - RNA, 14 nt, Human
augcaccaccaagc

SEQ ID NO: 2549940 - RNA, 18 nt, Human
augcaaaucaauuacugg

SEQ ID NO: 2549941 - RNA, 11 nt, Human
augcaaauccu

SEQ ID NO: 2549942 - RNA, 18 nt, Human
augcaaauccuaugugau

SEQ ID NO: 2549943 - RNA, 19 nt, Human
augcaaauccuaugugauu

SEQ ID NO: 2549944 - RNA, 19 nt, Human
augcacauauggacucugc

SEQ ID NO: 2549945 - RNA, 16 nt, Human
augcaacaacauguau

SEQ ID NO: 2549946 - RNA, 14 nt, Human
augcaacaacaugu

SEQ ID NO: 2549947 - RNA, 14 nt, Human
uugugugauuuaag

SEQ ID NO: 2549948 - RNA, 13 nt, Human
uugugugauugaa

SEQ ID NO: 2549949 - RNA, 15 nt, Human
uuguguguuauuuaa

SEQ ID NO: 2549950 - RNA, 16 nt, Human
uuguguguuauuuaaa

SEQ ID NO: 2549951 - RNA, 10 nt, Human
uugugugugu

SEQ ID NO: 2549952 - RNA, 18 nt, Human
uugugucuuuugcaugau

SEQ ID NO: 2549953 - RNA, 15 nt, Human
uugugucuuuugcau

SEQ ID NO: 2549954 - RNA, 23 nt, Human
uugugugaaagguacuucaaauc

SEQ ID NO: 2549955 - RNA, 22 nt, Human
uuguguaacaauuuuaaugcua

SEQ ID NO: 2549956 - RNA, 13 nt, Human
uugugguuaaucu

SEQ ID NO: 2549957 - RNA, 14 nt, Human
uugugguuuauguc

SEQ ID NO: 2549958 - RNA, 17 nt, Human
uuguguguugucucuug

SEQ ID NO: 2549959 - RNA, 15 nt, Human
uuguguguugucucu

SEQ ID NO: 2549960 - RNA, 20 nt, Human
uuguguuaaguauguguaaa

SEQ ID NO: 2549961 - RNA, 19 nt, Human
uuguucuggcucuuccagg

SEQ ID NO: 2549962 - RNA, 17 nt, Human
uuguguguuuauuguca

SEQ ID NO: 2549963 - RNA, 13 nt, Human
uuguguguugucu

SEQ ID NO: 2549964 - RNA, 12 nt, Human
uugugugugugc

SEQ ID NO: 2549965 - RNA, 20 nt, Human
uuguguguuauuuaaaugag

SEQ ID NO: 2549966 - RNA, 21 nt, Human
uuguguguuauuuaaaugagu

SEQ ID NO: 2549967 - RNA, 22 nt, Human
uuguucuggcucuuccaggcug

SEQ ID NO: 2549968 - RNA, 20 nt, Human
uuguucuggcucuuccaggc

SEQ ID NO: 2549969 - RNA, 21 nt, Human
uuguuggccuccggccucccc

SEQ ID NO: 2549970 - RNA, 18 nt, Human
uuguuggccuccggccuc

SEQ ID NO: 2549971 - RNA, 12 nt, Human
uuguuggccucc

SEQ ID NO: 2549972 - RNA, 20 nt, Human
uuguuggcagcauaaaggcc

SEQ ID NO: 2549973 - RNA, 13 nt, Human
uuguguguuucac

SEQ ID NO: 2549974 - RNA, 23 nt, Human
uuguucugugguuuuccccuccc

SEQ ID NO: 2549975 - RNA, 21 nt, Human
augagagacacacugaagaag

SEQ ID NO: 2549976 - RNA, 20 nt, Human
augagagacacacugaagaa

SEQ ID NO: 2549977 - RNA, 23 nt, Human
augagagacacacugaagaagca

SEQ ID NO: 2549978 - RNA, 16 nt, Human
uugugaccuuaguguu

SEQ ID NO: 2549979 - RNA, 20 nt, Human
uugugaccugaaguucacca

SEQ ID NO: 2549980 - RNA, 15 nt, Human
augagacuugcucuc

SEQ ID NO: 2549981 - RNA, 23 nt, Human
augagacuuccaaaccugacaga

SEQ ID NO: 2549982 - RNA, 21 nt, Human
uugugaggaagccgcuggggc

SEQ ID NO: 2549983 - RNA, 22 nt, Human
uugugacuguauauaaaggaaa

SEQ ID NO: 2549984 - RNA, 16 nt, Human
uugugacuguauauaa

SEQ ID NO: 2549985 - RNA, 22 nt, Human
uugugacuauauagagauguuu

SEQ ID NO: 2549986 - RNA, 21 nt, Human
uugugacuauauagagauguu

SEQ ID NO: 2549987 - RNA, 23 nt, Human
uugugacuguauauaaaggaaaa

SEQ ID NO: 2549988 - RNA, 12 nt, Human
uugugagauggg

SEQ ID NO: 2549989 - RNA, 23 nt, Human
uugugacuaauuguauaacaggu

SEQ ID NO: 2549990 - RNA, 22 nt, Human
uugugacuaauuguauaacagg

SEQ ID NO: 2549991 - RNA, 20 nt, Human
uugugacuaauuguauaaca

SEQ ID NO: 2549992 - RNA, 16 nt, Human
uugugacuaauuguau

SEQ ID NO: 2549993 - RNA, 14 nt, Human
uugugacuaauugu

SEQ ID NO: 2549994 - RNA, 20 nt, Human
uugugaccuuaguguuucug

SEQ ID NO: 2549995 - RNA, 19 nt, Human
uugugaccuuaguguuucu

SEQ ID NO: 2549996 - RNA, 17 nt, Human
uugugaccuuaguguuu

SEQ ID NO: 2549997 - RNA, 15 nt, Human
uugugacuauauaga

SEQ ID NO: 2549998 - RNA, 19 nt, Human
uugugacuauauagagaug

SEQ ID NO: 2549999 - RNA, 19 nt, Human
uugugauacaaugcugugc

SEQ ID NO: 2550000 - RNA, 22 nt, Human
uugugauaaguucuaguugcuu

SEQ ID NO: 2550001 - RNA, 18 nt, Human
uuguggccaaggagcugc

SEQ ID NO: 2550002 - RNA, 19 nt, Human
uuguggccaaggagcugcu

SEQ ID NO: 2550003 - RNA, 11 nt, Human
uuguggccuca

SEQ ID NO: 2550004 - RNA, 12 nt, Human
uuguggccucag

SEQ ID NO: 2550005 - RNA, 18 nt, Human
uugugauacaaugcugug

SEQ ID NO: 2550006 - RNA, 22 nt, Human
uugugaguuuaccuuguauacu

SEQ ID NO: 2550007 - RNA, 22 nt, Human
uugugaguuuaguaaggcugug

SEQ ID NO: 2550008 - RNA, 20 nt, Human
uugugaggcccaugguugag

SEQ ID NO: 2550009 - RNA, 17 nt, Human
uuguggggaugaugaaa

SEQ ID NO: 2550010 - RNA, 13 nt, Human
uugugggugggag

SEQ ID NO: 2550011 - RNA, 15 nt, Human
uuguggcugucagca

SEQ ID NO: 2550012 - RNA, 20 nt, Human
uuguggcugucagcaggaag

SEQ ID NO: 2550013 - RNA, 19 nt, Human
uuguggcuccuaucugugu

SEQ ID NO: 2550014 - RNA, 18 nt, Human
uuguggcuccuaucugug

SEQ ID NO: 2550015 - RNA, 14 nt, Human
uuguggcugggggc

SEQ ID NO: 2550016 - RNA, 20 nt, Human
uuguggccaaggagcugcua

SEQ ID NO: 2550017 - RNA, 13 nt, Human
uuguggccuggga

SEQ ID NO: 2550018 - RNA, 13 nt, Human
uuguggccucaga

SEQ ID NO: 2550019 - RNA, 21 nt, Human
uuguggccugggccuccucac

SEQ ID NO: 2550020 - RNA, 19 nt, Human
uuuaaauucacaauagaaa

SEQ ID NO: 2550021 - RNA, 21 nt, Human
uuuaaauucacaauagaaacu

SEQ ID NO: 2550022 - RNA, 20 nt, Human
uuuaaauuauaacuuaaaau

SEQ ID NO: 2550023 - RNA, 18 nt, Human
uuuaaauguuuuucuaug

SEQ ID NO: 2550024 - RNA, 18 nt, Human
uuuaaaugucuaauguau

SEQ ID NO: 2550025 - RNA, 20 nt, Human
uuuaagauaauaguuuacau

SEQ ID NO: 2550026 - RNA, 15 nt, Human
uuuaagauaauaguu

SEQ ID NO: 2550027 - RNA, 23 nt, Human
uuuaagauaauaauauauguuua

SEQ ID NO: 2550028 - RNA, 18 nt, Human
uuuaagauaauaauauau

SEQ ID NO: 2550029 - RNA, 15 nt, Human
uuuaagauaauuaua

SEQ ID NO: 2550030 - RNA, 15 nt, Human
uuuaagauaaauuau

SEQ ID NO: 2550031 - RNA, 23 nt, Human
uuuaagcacuacauaaacugacu

SEQ ID NO: 2550032 - RNA, 17 nt, Human
uuuaagauuuuucucaa

SEQ ID NO: 2550033 - RNA, 13 nt, Human
uuuaagcauuguu

SEQ ID NO: 2550034 - RNA, 20 nt, Human
uuuaagcagcucuugcuaau

SEQ ID NO: 2550035 - RNA, 13 nt, Human
uuuaagcagcucu

SEQ ID NO: 2550036 - RNA, 14 nt, Human
uuuaagcauuguuu

SEQ ID NO: 2550037 - RNA, 21 nt, Human
uuuaagcauuguuugcuuauu

SEQ ID NO: 2550038 - RNA, 20 nt, Human
uuuaagcacuacauaaacug

SEQ ID NO: 2550039 - RNA, 18 nt, Human
uuuaagauuuuucucaaa

SEQ ID NO: 2550040 - RNA, 16 nt, Human
uuuaagauuuuucuca

SEQ ID NO: 2550041 - RNA, 14 nt, Human
uuuaagauuuuucu

SEQ ID NO: 2550042 - RNA, 14 nt, Human
uuuaagauaauuau

SEQ ID NO: 2550043 - RNA, 12 nt, Human
uuuaagauuuuu

SEQ ID NO: 2550044 - RNA, 14 nt, Human
uuuaaauguuuuuu

SEQ ID NO: 2550045 - RNA, 16 nt, Human
uuuaaaugucuaaugu

SEQ ID NO: 2550046 - RNA, 15 nt, Human
uuuaaaugucuaaug

SEQ ID NO: 2550047 - RNA, 19 nt, Human
uuguuuuaucaugacaugu

SEQ ID NO: 2550048 - RNA, 14 nt, Human
uuguuuucauuauc

SEQ ID NO: 2550049 - RNA, 17 nt, Human
uuguuuucccgccaagc

SEQ ID NO: 2550050 - RNA, 15 nt, Human
uuguuuuacugucuu

SEQ ID NO: 2550051 - RNA, 15 nt, Human
augcacuuuguucug

SEQ ID NO: 2550052 - RNA, 13 nt, Human
uuguuuucagugu

SEQ ID NO: 2550053 - RNA, 16 nt, Human
uuguuuucaguguaca

SEQ ID NO: 2550054 - RNA, 22 nt, Human
uuuaauuccaugaaucgcuucu

SEQ ID NO: 2550055 - RNA, 13 nt, Human
uuuaauuccauga

SEQ ID NO: 2550056 - RNA, 11 nt, Human
uuuaauuccau

SEQ ID NO: 2550057 - RNA, 21 nt, Human
uuuaauuccaauaugaugacu

SEQ ID NO: 2550058 - RNA, 11 nt, Human
uuuaauucucu

SEQ ID NO: 2550059 - RNA, 13 nt, Human
uuuaauucucuug

SEQ ID NO: 2550060 - RNA, 14 nt, Human
uuuaauugauuauu

SEQ ID NO: 2550061 - RNA, 12 nt, Human
uuuaauuuuaca

SEQ ID NO: 2550062 - RNA, 21 nt, Human
uuuaauggacaugagauaaug

SEQ ID NO: 2550063 - RNA, 22 nt, Human
uuuaauggggguagcagcugga

SEQ ID NO: 2550064 - RNA, 21 nt, Human
uuuaauggggguagcagcugg

SEQ ID NO: 2550065 - RNA, 20 nt, Human
uuuaauggggguagcagcug

SEQ ID NO: 2550066 - RNA, 22 nt, Human
uuuaauggccggcuggaaaugc

SEQ ID NO: 2550067 - RNA, 23 nt, Human
uuuaaugccgauauacucuagau

SEQ ID NO: 2550068 - RNA, 20 nt, Human
uuuaauggccggcuggaaau

SEQ ID NO: 2550069 - RNA, 16 nt, Human
uuuaauuccaauauga

SEQ ID NO: 2550070 - RNA, 23 nt, Human
uuuaauucaucccaacugucuuu

SEQ ID NO: 2550071 - RNA, 23 nt, Human
uuuaauucauguuucuuaaaugg

SEQ ID NO: 2550072 - RNA, 14 nt, Human
uuuaauucauguuu

SEQ ID NO: 2550073 - RNA, 16 nt, Human
uuuaauucauguuucu

SEQ ID NO: 2550074 - RNA, 14 nt, Human
uuuaauguagccau

SEQ ID NO: 2550075 - RNA, 12 nt, Human
uuuaauucaguu

SEQ ID NO: 2550076 - RNA, 17 nt, Human
uuuaagugcugcauuua

SEQ ID NO: 2550077 - RNA, 19 nt, Human
uuuaagugcugcauuuaaa

SEQ ID NO: 2550078 - RNA, 13 nt, Human
uuuaagcuguaaa

SEQ ID NO: 2550079 - RNA, 14 nt, Human
uuuaaugagauaau

SEQ ID NO: 2550080 - RNA, 15 nt, Human
uuuaagugcugcauu

SEQ ID NO: 2550081 - RNA, 16 nt, Human
uuuaagugcugcauuu

SEQ ID NO: 2550082 - RNA, 19 nt, Human
uuuaagccucauauuuaaa

SEQ ID NO: 2550083 - RNA, 20 nt, Human
uuuaagcccaucaauuauag

SEQ ID NO: 2550084 - RNA, 23 nt, Human
uuuaagcauuguuugcuuauugu

SEQ ID NO: 2550085 - RNA, 15 nt, Human
augccacuaaauuga

SEQ ID NO: 2550086 - RNA, 17 nt, Human
augccacuaaauugaca

SEQ ID NO: 2550087 - RNA, 18 nt, Human
augcccacccccugcccu

SEQ ID NO: 2550088 - RNA, 17 nt, Human
augcccacccccugccc

SEQ ID NO: 2550089 - RNA, 16 nt, Human
augcccacccccugcc

SEQ ID NO: 2550090 - RNA, 15 nt, Human
augcccacccccugc

SEQ ID NO: 2550091 - RNA, 12 nt, Human
augcccaccccc

SEQ ID NO: 2550092 - RNA, 14 nt, Human
augccacugccuuc

SEQ ID NO: 2550093 - RNA, 23 nt, Human
augccaaguuguuugagaaauua

SEQ ID NO: 2550094 - RNA, 19 nt, Human
augccacccuguuuucagc

SEQ ID NO: 2550095 - RNA, 20 nt, Human
augccacccuguuuucagcu

SEQ ID NO: 2550096 - RNA, 17 nt, Human
augccacgggaaguuua

SEQ ID NO: 2550097 - RNA, 19 nt, Human
augcccaguuucugccucu

SEQ ID NO: 2550098 - RNA, 18 nt, Human
augcccaguuucugccuc

SEQ ID NO: 2550099 - RNA, 17 nt, Human
augcccaguuucugccu

SEQ ID NO: 2550100 - RNA, 20 nt, Human
augcccagagggcccaggca

SEQ ID NO: 2550101 - RNA, 21 nt, Human
augcccagagggcccaggcag

SEQ ID NO: 2550102 - RNA, 22 nt, Human
augcccagagggcccaggcagg

SEQ ID NO: 2550103 - RNA, 23 nt, Human
augcccagagggcccaggcaggc

SEQ ID NO: 2550104 - RNA, 20 nt, Human
augcccaccugcccaucaca

SEQ ID NO: 2550105 - RNA, 21 nt, Human
augcccaccugcccaucacag

SEQ ID NO: 2550106 - RNA, 20 nt, Human
augcccacccccugcccugc

SEQ ID NO: 2550107 - RNA, 19 nt, Human
augcccacccccugcccug

SEQ ID NO: 2550108 - RNA, 15 nt, Human
augcccaccugccca

SEQ ID NO: 2550109 - RNA, 16 nt, Human
augcccaccugcccau

SEQ ID NO: 2550110 - RNA, 19 nt, Human
augcccaccugcccaucac

SEQ ID NO: 2550111 - RNA, 14 nt, Human
augccaaguuguuu

SEQ ID NO: 2550112 - RNA, 16 nt, Human
augccaaguuguuuga

SEQ ID NO: 2550113 - RNA, 19 nt, Human
augccaagcacugugcuca

SEQ ID NO: 2550114 - RNA, 18 nt, Human
augccaagcacugugcuc

SEQ ID NO: 2550115 - RNA, 21 nt, Human
augccaagcacugugcucagg

SEQ ID NO: 2550116 - RNA, 17 nt, Human
augccaagcacugugcu

SEQ ID NO: 2550117 - RNA, 16 nt, Human
augccaagcacugugc

SEQ ID NO: 2550118 - RNA, 23 nt, Human
augccaagaaguuuaaggaauau

SEQ ID NO: 2550119 - RNA, 14 nt, Human
augccaacuugucc

SEQ ID NO: 2550120 - RNA, 20 nt, Human
augccaaauuguaguucuug

SEQ ID NO: 2550121 - RNA, 17 nt, Human
augcauaaauaugcagu

SEQ ID NO: 2550122 - RNA, 16 nt, Human
augcauaaauaugcag

SEQ ID NO: 2550123 - RNA, 15 nt, Human
augcauaaauaugca

SEQ ID NO: 2550124 - RNA, 14 nt, Human
augcauaaauaugc

SEQ ID NO: 2550125 - RNA, 21 nt, Human
augcauaaauaugcagugaua

SEQ ID NO: 2550126 - RNA, 18 nt, Human
augccaaagcuagggugg

SEQ ID NO: 2550127 - RNA, 22 nt, Human
augccaaagcuaggguggcccu

SEQ ID NO: 2550128 - RNA, 19 nt, Human
augcaguucugaagaagau

SEQ ID NO: 2550129 - RNA, 18 nt, Human
augcaguucugaagaaga

SEQ ID NO: 2550130 - RNA, 22 nt, Human
augcaguuuuucagaguggaau

SEQ ID NO: 2550131 - RNA, 17 nt, Human
augcaguuuuucagagu

SEQ ID NO: 2550132 - RNA, 15 nt, Human
augcauaaagucagu

SEQ ID NO: 2550133 - RNA, 15 nt, Human
augcaguuuuccuua

SEQ ID NO: 2550134 - RNA, 11 nt, Human
uuuaauuuugu

SEQ ID NO: 2550135 - RNA, 22 nt, Human
uuuaauuuugacacuauaucug

SEQ ID NO: 2550136 - RNA, 21 nt, Human
uuuaauuugauaucacagucu

SEQ ID NO: 2550137 - RNA, 13 nt, Human
augcagccucaca

SEQ ID NO: 2550138 - RNA, 16 nt, Human
uuuaauuuuguauuuu

SEQ ID NO: 2550139 - RNA, 15 nt, Human
uuuaauuuuguauuu

SEQ ID NO: 2550140 - RNA, 21 nt, Human
augcagccgugaucaagggaa

SEQ ID NO: 2550141 - RNA, 15 nt, Human
augcagccucacagu

SEQ ID NO: 2550142 - RNA, 14 nt, Human
augcagccucacag

SEQ ID NO: 2550143 - RNA, 20 nt, Human
augcagggauugcugccacu

SEQ ID NO: 2550144 - RNA, 19 nt, Human
augcagggauugcugccac

SEQ ID NO: 2550145 - RNA, 13 nt, Human
augcagggcaguc

SEQ ID NO: 2550146 - RNA, 17 nt, Human
augcagccucacagucc

SEQ ID NO: 2550147 - RNA, 19 nt, Human
augcagggccucacacggu

SEQ ID NO: 2550148 - RNA, 22 nt, Human
augcagggauugcugccacuuu

SEQ ID NO: 2550149 - RNA, 15 nt, Human
augcagggcagucau

SEQ ID NO: 2550150 - RNA, 17 nt, Human
augcaguucugaagaag

SEQ ID NO: 2550151 - RNA, 15 nt, Human
augcaguucugaaga

SEQ ID NO: 2550152 - RNA, 23 nt, Human
augcagugauauggcagaagaca

SEQ ID NO: 2550153 - RNA, 24 nt, Human
augcagugcucgcuguugcugaau

SEQ ID NO: 2550154 - RNA, 23 nt, Human
augcagugcucgcuguugcugaa

SEQ ID NO: 2550155 - RNA, 21 nt, Human
augcagugcucgcuguugcug

SEQ ID NO: 2550156 - RNA, 20 nt, Human
augcagugcucgcuguugcu

SEQ ID NO: 2550157 - RNA, 19 nt, Human
augcagugcucgcuguugc

SEQ ID NO: 2550158 - RNA, 17 nt, Human
augcagugcucgcuguu

SEQ ID NO: 2550159 - RNA, 13 nt, Human
augcagugcucgc

SEQ ID NO: 2550160 - RNA, 22 nt, Human
augcagugauauggcagaagac

SEQ ID NO: 2550161 - RNA, 21 nt, Human
augcagugauauggcagaaga

SEQ ID NO: 2550162 - RNA, 19 nt, Human
augcagugauauggcagaa

SEQ ID NO: 2550163 - RNA, 18 nt, Human
augcagugauauggcaga

SEQ ID NO: 2550164 - RNA, 18 nt, Human
augcagugccccuagcuu

SEQ ID NO: 2550165 - RNA, 16 nt, Human
augcagugaauuguga

SEQ ID NO: 2550166 - RNA, 15 nt, Human
augcaguauugagca

SEQ ID NO: 2550167 - RNA, 13 nt, Human
augcuucauacag

SEQ ID NO: 2550168 - RNA, 15 nt, Human
augcuucauacaggg

SEQ ID NO: 2550169 - RNA, 16 nt, Human
augcuucauacaggga

SEQ ID NO: 2550170 - RNA, 19 nt, Human
augcuucauacagggaugg

SEQ ID NO: 2550171 - RNA, 11 nt, Human
augcuucauac

SEQ ID NO: 2550172 - RNA, 12 nt, Human
augcuucauaca

SEQ ID NO: 2550173 - RNA, 21 nt, Human
augcuuauuuuaaaauuuuau

SEQ ID NO: 2550174 - RNA, 10 nt, Human
augcuucaua

SEQ ID NO: 2550175 - RNA, 22 nt, Human
augcugucuacacuaagagaga

SEQ ID NO: 2550176 - RNA, 23 nt, Human
augcugucccuuacgugaguccu

SEQ ID NO: 2550177 - RNA, 12 nt, Human
augcuguacauc

SEQ ID NO: 2550178 - RNA, 16 nt, Human
augcuguacaucuauu

SEQ ID NO: 2550179 - RNA, 19 nt, Human
augcugucccuuacgugag

SEQ ID NO: 2550180 - RNA, 15 nt, Human
auggaacacucugag

SEQ ID NO: 2550181 - RNA, 14 nt, Human
auggaacacucuga

SEQ ID NO: 2550182 - RNA, 22 nt, Human
augcuguacaucuauuuuggau

SEQ ID NO: 2550183 - RNA, 22 nt, Human
augcugucaacuaugauauggu

SEQ ID NO: 2550184 - RNA, 23 nt, Human
augcuucauacagggaugguguu

SEQ ID NO: 2550185 - RNA, 11 nt, Human
auggaacacuc

SEQ ID NO: 2550186 - RNA, 15 nt, Human
auggaagacagcucu

SEQ ID NO: 2550187 - RNA, 14 nt, Human
auggaagacacauu

SEQ ID NO: 2550188 - RNA, 13 nt, Human
auggaagacacau

SEQ ID NO: 2550189 - RNA, 19 nt, Human
auggaacuucuaauauauu

SEQ ID NO: 2550190 - RNA, 18 nt, Human
auggaacuucuaauauau

SEQ ID NO: 2550191 - RNA, 22 nt, Human
auggaacucauuccugccuguc

SEQ ID NO: 2550192 - RNA, 16 nt, Human
auggaacacucugaga

SEQ ID NO: 2550193 - RNA, 19 nt, Human
auggaacucauuccugccu

SEQ ID NO: 2550194 - RNA, 22 nt, Human
augcuacuuuauuuauacacug

SEQ ID NO: 2550195 - RNA, 15 nt, Human
augcuccuugggccc

SEQ ID NO: 2550196 - RNA, 23 nt, Human
augcuacugucucacugaaacau

SEQ ID NO: 2550197 - RNA, 16 nt, Human
augcuccuugggcccu

SEQ ID NO: 2550198 - RNA, 15 nt, Human
augcuccuuguuccu

SEQ ID NO: 2550199 - RNA, 18 nt, Human
augcuccuuguuccuaga

SEQ ID NO: 2550200 - RNA, 21 nt, Human
augcucuaucuugcucuguaa

SEQ ID NO: 2550201 - RNA, 19 nt, Human
augcucuaucuugcucugu

SEQ ID NO: 2550202 - RNA, 16 nt, Human
augcucuagugccuuc

SEQ ID NO: 2550203 - RNA, 17 nt, Human
augcucuagugccuucu

SEQ ID NO: 2550204 - RNA, 16 nt, Human
augcuagaacucccuu

SEQ ID NO: 2550205 - RNA, 19 nt, Human
augcuagaacucccuuuca

SEQ ID NO: 2550206 - RNA, 15 nt, Human
augcuagaacucccu

SEQ ID NO: 2550207 - RNA, 13 nt, Human
uuuauuacugauu

SEQ ID NO: 2550208 - RNA, 20 nt, Human
uuuauuaccucugauaccuc

SEQ ID NO: 2550209 - RNA, 14 nt, Human
uuuauuaccucuga

SEQ ID NO: 2550210 - RNA, 12 nt, Human
uuuauuaccccc

SEQ ID NO: 2550211 - RNA, 17 nt, Human
uuuauuacccccuccuu

SEQ ID NO: 2550212 - RNA, 23 nt, Human
uuuauuacccccuccuucagaca

SEQ ID NO: 2550213 - RNA, 13 nt, Human
uuuauuaccucug

SEQ ID NO: 2550214 - RNA, 22 nt, Human
uuuauuaaacagauuuuuacaa

SEQ ID NO: 2550215 - RNA, 16 nt, Human
uuuauuacaucuuuca

SEQ ID NO: 2550216 - RNA, 15 nt, Human
augcucugcauguua

SEQ ID NO: 2550217 - RNA, 23 nt, Human
augcucucugcagccagcccagc

SEQ ID NO: 2550218 - RNA, 19 nt, Human
augcuggaugucugccaau

SEQ ID NO: 2550219 - RNA, 14 nt, Human
augcucuccuuucc

SEQ ID NO: 2550220 - RNA, 13 nt, Human
augcucucugcag

SEQ ID NO: 2550221 - RNA, 19 nt, Human
augcucucugcagccagcc

SEQ ID NO: 2550222 - RNA, 21 nt, Human
augcucucugcagccagccca

SEQ ID NO: 2550223 - RNA, 22 nt, Human
augcucucugcagccagcccag

SEQ ID NO: 2550224 - RNA, 13 nt, Human
augcuggcccagg

SEQ ID NO: 2550225 - RNA, 15 nt, Human
augcuggcccagggc

SEQ ID NO: 2550226 - RNA, 16 nt, Human
augcuggcccagggcc

SEQ ID NO: 2550227 - RNA, 18 nt, Human
augcuggcccagggccca

SEQ ID NO: 2550228 - RNA, 22 nt, Human
augcuggaugucugccaauuuu

SEQ ID NO: 2550229 - RNA, 12 nt, Human
augcuggcccag

SEQ ID NO: 2550230 - RNA, 23 nt, Human
augcuggcauuugcaccuaccuc

SEQ ID NO: 2550231 - RNA, 19 nt, Human
augcuggcccagggcccag

SEQ ID NO: 2550232 - RNA, 20 nt, Human
augcuggcccagggcccaga

SEQ ID NO: 2550233 - RNA, 21 nt, Human
augcuggcccagggcccagag

SEQ ID NO: 2550234 - RNA, 22 nt, Human
augcuggcccagggcccagagc

SEQ ID NO: 2550235 - RNA, 23 nt, Human
augcuggcccagggcccagagcc

SEQ ID NO: 2550236 - RNA, 21 nt, Human
augcugguuuuccuaaaugca

SEQ ID NO: 2550237 - RNA, 22 nt, Human
augcugguuuuccuaaaugcag

SEQ ID NO: 2550238 - RNA, 22 nt, Human
augcuguaacuuucugaaauaa

SEQ ID NO: 2550239 - RNA, 13 nt, Human
augcugguuuuuc

SEQ ID NO: 2550240 - RNA, 23 nt, Human
uuuauguuugcacuugugauuau

SEQ ID NO: 2550241 - RNA, 17 nt, Human
uuuauuaaacagauuuu

SEQ ID NO: 2550242 - RNA, 23 nt, Human
uuuauuaaaaugauuguaaaaua

SEQ ID NO: 2550243 - RNA, 22 nt, Human
uuuauuaaaaugauuguaaaau

SEQ ID NO: 2550244 - RNA, 21 nt, Human
uuuauuaaaaugauuguaaaa

SEQ ID NO: 2550245 - RNA, 13 nt, Human
uuuauuaaaaucu

SEQ ID NO: 2550246 - RNA, 14 nt, Human
uuuauuaaaaucuu

SEQ ID NO: 2550247 - RNA, 15 nt, Human
uuuauuaaaaucuua

SEQ ID NO: 2550248 - RNA, 14 nt, Human
uuuauuaaaaugau

SEQ ID NO: 2550249 - RNA, 16 nt, Human
uuuauuaaaaucuuaa

SEQ ID NO: 2550250 - RNA, 20 nt, Human
uuuauguuacuacaugcacu

SEQ ID NO: 2550251 - RNA, 20 nt, Human
uuuauguuaagggaagaauu

SEQ ID NO: 2550252 - RNA, 13 nt, Human
uuuauguuauuua

SEQ ID NO: 2550253 - RNA, 11 nt, Human
uuuaugugugu

SEQ ID NO: 2550254 - RNA, 13 nt, Human
uuuaugugugugu

SEQ ID NO: 2550255 - RNA, 12 nt, Human
uuuaugugaugg

SEQ ID NO: 2550256 - RNA, 18 nt, Human
uuuaugugugaggagcug

SEQ ID NO: 2550257 - RNA, 22 nt, Human
uuuaugugugaggagcugcugg

SEQ ID NO: 2550258 - RNA, 13 nt, Human
uuuauauaagcuu

SEQ ID NO: 2550259 - RNA, 16 nt, Human
uuuauagcucaguuua

SEQ ID NO: 2550260 - RNA, 20 nt, Human
uuuauggcuuuugugcauua

SEQ ID NO: 2550261 - RNA, 19 nt, Human
uuuauaguuuguacaugca

SEQ ID NO: 2550262 - RNA, 17 nt, Human
uuuauaguuuguacaug

SEQ ID NO: 2550263 - RNA, 22 nt, Human
uuuauggggcugaacggggaga

SEQ ID NO: 2550264 - RNA, 24 nt, Human
uuuauggcuuuugugcauuaucua

SEQ ID NO: 2550265 - RNA, 14 nt, Human
uuuauauaaaugcu

SEQ ID NO: 2550266 - RNA, 22 nt, Human
uuuaugggucagaguuccgacu

SEQ ID NO: 2550267 - RNA, 18 nt, Human
augccccggccaccucug

SEQ ID NO: 2550268 - RNA, 17 nt, Human
augccccggccaccucu

SEQ ID NO: 2550269 - RNA, 16 nt, Human
augccccggccaccuc

SEQ ID NO: 2550270 - RNA, 15 nt, Human
augccccggccaccu

SEQ ID NO: 2550271 - RNA, 21 nt, Human
augcccccuuucagaugucuu

SEQ ID NO: 2550272 - RNA, 19 nt, Human
augcccccuuucagauguc

SEQ ID NO: 2550273 - RNA, 18 nt, Human
augcccccuuucagaugu

SEQ ID NO: 2550274 - RNA, 13 nt, Human
augcccccuuuca

SEQ ID NO: 2550275 - RNA, 20 nt, Human
augccccggccaccucugcg

SEQ ID NO: 2550276 - RNA, 19 nt, Human
augccccggccaccucugc

SEQ ID NO: 2550277 - RNA, 17 nt, Human
augcccccucgugccag

SEQ ID NO: 2550278 - RNA, 18 nt, Human
augcccccucgugccagu

SEQ ID NO: 2550279 - RNA, 22 nt, Human
augccccccucaaaccuccucu

SEQ ID NO: 2550280 - RNA, 21 nt, Human
augccccccucaaaccuccuc

SEQ ID NO: 2550281 - RNA, 15 nt, Human
augcccccucgugcc

SEQ ID NO: 2550282 - RNA, 13 nt, Human
augccccccucaa

SEQ ID NO: 2550283 - RNA, 16 nt, Human
augcccccagcuggcc

SEQ ID NO: 2550284 - RNA, 15 nt, Human
augcccccagcuggc

SEQ ID NO: 2550285 - RNA, 14 nt, Human
augcccccagcugg

SEQ ID NO: 2550286 - RNA, 13 nt, Human
augcccccagcug

SEQ ID NO: 2550287 - RNA, 15 nt, Human
augccccagagcugu

SEQ ID NO: 2550288 - RNA, 22 nt, Human
uuuagauugaaaacuuuucuca

SEQ ID NO: 2550289 - RNA, 13 nt, Human
uuuagaugcugau

SEQ ID NO: 2550290 - RNA, 19 nt, Human
uuuagauugaaaacuuuuc

SEQ ID NO: 2550291 - RNA, 11 nt, Human
uuuagaugcug

SEQ ID NO: 2550292 - RNA, 20 nt, Human
uuuagcuggaaaaguauguu

SEQ ID NO: 2550293 - RNA, 22 nt, Human
uuuagcaauuuaauauuuugca

SEQ ID NO: 2550294 - RNA, 23 nt, Human
uuuagcaauuuaauauuuugcac

SEQ ID NO: 2550295 - RNA, 22 nt, Human
uuuagcagcagccuuuaaugca

SEQ ID NO: 2550296 - RNA, 16 nt, Human
uuuagucugcaaaaug

SEQ ID NO: 2550297 - RNA, 12 nt, Human
uuuagucacuuu

SEQ ID NO: 2550298 - RNA, 15 nt, Human
uuuagucaugugacc

SEQ ID NO: 2550299 - RNA, 20 nt, Human
uuuauagcuauuacugucug

SEQ ID NO: 2550300 - RNA, 18 nt, Human
uuuagucugcaaaaugag

SEQ ID NO: 2550301 - RNA, 17 nt, Human
uuuauagcuauuacugu

SEQ ID NO: 2550302 - RNA, 16 nt, Human
uuuaguaucuuuuuau

SEQ ID NO: 2550303 - RNA, 23 nt, Human
uuuaguagauauuaccaguuuuc

SEQ ID NO: 2550304 - RNA, 21 nt, Human
uuuaguagauauuaccaguuu

SEQ ID NO: 2550305 - RNA, 13 nt, Human
uuuaggagauuuu

SEQ ID NO: 2550306 - RNA, 15 nt, Human
uuuaguagagacagg

SEQ ID NO: 2550307 - RNA, 22 nt, Human
uuuagcuggaaaaguauguuag

SEQ ID NO: 2550308 - RNA, 18 nt, Human
uuuaggaaaugaaugugu

SEQ ID NO: 2550309 - RNA, 23 nt, Human
uuucaugugcggggaucaucugc

SEQ ID NO: 2550310 - RNA, 23 nt, Human
uuucauguugcacacccacucag

SEQ ID NO: 2550311 - RNA, 17 nt, Human
uuucauguuuuaacaaa

SEQ ID NO: 2550312 - RNA, 19 nt, Human
uuucauguuuuaacaaaaa

SEQ ID NO: 2550313 - RNA, 16 nt, Human
uuucauguuuuaacaa

SEQ ID NO: 2550314 - RNA, 23 nt, Human
uuucauuaaaggcuucucucuca

SEQ ID NO: 2550315 - RNA, 16 nt, Human
uuucauuaaaggcuuc

SEQ ID NO: 2550316 - RNA, 17 nt, Human
uuucauguuuugugacu

SEQ ID NO: 2550317 - RNA, 16 nt, Human
uuucauguuuugugac

SEQ ID NO: 2550318 - RNA, 13 nt, Human
uuucauuaaagca

SEQ ID NO: 2550319 - RNA, 18 nt, Human
uuucauguuuugugacua

SEQ ID NO: 2550320 - RNA, 14 nt, Human
uuucauuaaagcau

SEQ ID NO: 2550321 - RNA, 14 nt, Human
uuucauuaaaggcu

SEQ ID NO: 2550322 - RNA, 16 nt, Human
uuucauuaaagcauuu

SEQ ID NO: 2550323 - RNA, 16 nt, Human
uuucaugauuuugaaa

SEQ ID NO: 2550324 - RNA, 16 nt, Human
uuucaugcuaucucug

SEQ ID NO: 2550325 - RNA, 19 nt, Human
uuucaugcuaucucugugu

SEQ ID NO: 2550326 - RNA, 18 nt, Human
uuucaucugggaaagaca

SEQ ID NO: 2550327 - RNA, 16 nt, Human
uuucaucugggaaaga

SEQ ID NO: 2550328 - RNA, 19 nt, Human
uuucaucugggaaagacau

SEQ ID NO: 2550329 - RNA, 21 nt, Human
uuucaugauuagcaaguuaca

SEQ ID NO: 2550330 - RNA, 15 nt, Human
uuuccccaacagugu

SEQ ID NO: 2550331 - RNA, 14 nt, Human
uuuccccaacagug

SEQ ID NO: 2550332 - RNA, 21 nt, Human
uuuccccaaagucuuaaaaua

SEQ ID NO: 2550333 - RNA, 14 nt, Human
uuuccccaaagucu

SEQ ID NO: 2550334 - RNA, 19 nt, Human
uuuccccaacagugugaag

SEQ ID NO: 2550335 - RNA, 18 nt, Human
uuuccccaacagugugaa

SEQ ID NO: 2550336 - RNA, 16 nt, Human
uuucccauggggaggg

SEQ ID NO: 2550337 - RNA, 13 nt, Human
uuuccccagccca

SEQ ID NO: 2550338 - RNA, 11 nt, Human
uuuccccagcc

SEQ ID NO: 2550339 - RNA, 19 nt, Human
uuuccccaggggaaaauga

SEQ ID NO: 2550340 - RNA, 23 nt, Human
uuuccccauuuagguuucugagu

SEQ ID NO: 2550341 - RNA, 21 nt, Human
uuuccccaggggaaaaugaag

SEQ ID NO: 2550342 - RNA, 12 nt, Human
uuuccccccacu

SEQ ID NO: 2550343 - RNA, 13 nt, Human
uuuccccccacuc

SEQ ID NO: 2550344 - RNA, 17 nt, Human
uuuccccccacucuccc

SEQ ID NO: 2550345 - RNA, 19 nt, Human
uuuccccccacucucccca

SEQ ID NO: 2550346 - RNA, 22 nt, Human
auggacggugcuccaggcaggc

SEQ ID NO: 2550347 - RNA, 21 nt, Human
auggacggugcuccaggcagg

SEQ ID NO: 2550348 - RNA, 20 nt, Human
auggacggugcuccaggcag

SEQ ID NO: 2550349 - RNA, 14 nt, Human
auggacaugaucuu

SEQ ID NO: 2550350 - RNA, 18 nt, Human
auggacagggcaugccac

SEQ ID NO: 2550351 - RNA, 19 nt, Human
auggacaggcuggcuccag

SEQ ID NO: 2550352 - RNA, 14 nt, Human
auggacaggcuggc

SEQ ID NO: 2550353 - RNA, 20 nt, Human
auggacagaagaaggcagca

SEQ ID NO: 2550354 - RNA, 19 nt, Human
auggacagaagaaggcagc

SEQ ID NO: 2550355 - RNA, 18 nt, Human
uuucacugcuggcugccu

SEQ ID NO: 2550356 - RNA, 17 nt, Human
uuucacugcuggcugcc

SEQ ID NO: 2550357 - RNA, 13 nt, Human
uuucacugccaua

SEQ ID NO: 2550358 - RNA, 14 nt, Human
uuucacugcuggcu

SEQ ID NO: 2550359 - RNA, 13 nt, Human
uuucagaaaugug

SEQ ID NO: 2550360 - RNA, 22 nt, Human
uuucacugcuggcugccuuaga

SEQ ID NO: 2550361 - RNA, 20 nt, Human
uuucacugcuggcugccuua

SEQ ID NO: 2550362 - RNA, 16 nt, Human
auggaagacagcucuu

SEQ ID NO: 2550363 - RNA, 16 nt, Human
auggaauaacucugug

SEQ ID NO: 2550364 - RNA, 16 nt, Human
auggaagacacauuga

SEQ ID NO: 2550365 - RNA, 15 nt, Human
auggaauacaguguu

SEQ ID NO: 2550366 - RNA, 16 nt, Human
auggaauacaguguua

SEQ ID NO: 2550367 - RNA, 16 nt, Human
auggaaugcuguguua

SEQ ID NO: 2550368 - RNA, 21 nt, Human
auggaaugaugggucaguugu

SEQ ID NO: 2550369 - RNA, 20 nt, Human
auggaaucuaccaacuguuu

SEQ ID NO: 2550370 - RNA, 17 nt, Human
auggaauacaguguuau

SEQ ID NO: 2550371 - RNA, 22 nt, Human
auggaauacaguguuauuuucu

SEQ ID NO: 2550372 - RNA, 21 nt, Human
uuucagaagugagcuuugcug

SEQ ID NO: 2550373 - RNA, 20 nt, Human
uuucacugcugcaaggccuu

SEQ ID NO: 2550374 - RNA, 22 nt, Human
uuucagaagugagcuuugcugc

SEQ ID NO: 2550375 - RNA, 18 nt, Human
uuucagaaccucuucccc

SEQ ID NO: 2550376 - RNA, 19 nt, Human
uuucagaaccucuucccca

SEQ ID NO: 2550377 - RNA, 20 nt, Human
uuucagaaccucuuccccag

SEQ ID NO: 2550378 - RNA, 23 nt, Human
uuucagaaccucuuccccagaaa

SEQ ID NO: 2550379 - RNA, 22 nt, Human
uuucauauguugcucagucucc

SEQ ID NO: 2550380 - RNA, 11 nt, Human
uuucagacucc

SEQ ID NO: 2550381 - RNA, 10 nt, Human
uuucagaccc

SEQ ID NO: 2550382 - RNA, 14 nt, Human
uuucagaccccagc

SEQ ID NO: 2550383 - RNA, 15 nt, Human
uuucaucugggaaag

SEQ ID NO: 2550384 - RNA, 14 nt, Human
uuucaucugggaaa

SEQ ID NO: 2550385 - RNA, 22 nt, Human
uuucaucugcucuccuuccugg

SEQ ID NO: 2550386 - RNA, 21 nt, Human
uuucaucaaucauuguacagu

SEQ ID NO: 2550387 - RNA, 19 nt, Human
uuucaucaaucauuguaca

SEQ ID NO: 2550388 - RNA, 16 nt, Human
uuucaucauauuauac

SEQ ID NO: 2550389 - RNA, 17 nt, Human
uuucaucauauuauaca

SEQ ID NO: 2550390 - RNA, 21 nt, Human
uuucauauuuuagcuacuaua

SEQ ID NO: 2550391 - RNA, 13 nt, Human
uuucauauuuuag

SEQ ID NO: 2550392 - RNA, 15 nt, Human
uuucauauugugcca

SEQ ID NO: 2550393 - RNA, 14 nt, Human
uuucauauugugcc

SEQ ID NO: 2550394 - RNA, 12 nt, Human
uuucauauugug

SEQ ID NO: 2550395 - RNA, 15 nt, Human
uuucauauguugcuc

SEQ ID NO: 2550396 - RNA, 13 nt, Human
uuucauauuucuu

SEQ ID NO: 2550397 - RNA, 20 nt, Human
auggacguguuaugacucca

SEQ ID NO: 2550398 - RNA, 19 nt, Human
auggacguguuaugacucc

SEQ ID NO: 2550399 - RNA, 23 nt, Human
auggacguguuaugacuccagaa

SEQ ID NO: 2550400 - RNA, 18 nt, Human
auggauuuccagccaaag

SEQ ID NO: 2550401 - RNA, 14 nt, Human
auggcaacagaucu

SEQ ID NO: 2550402 - RNA, 15 nt, Human
auggcaacagaucug

SEQ ID NO: 2550403 - RNA, 18 nt, Human
auggcaaaggaaggugga

SEQ ID NO: 2550404 - RNA, 14 nt, Human
auggcaaaaauggc

SEQ ID NO: 2550405 - RNA, 19 nt, Human
auggauuugaugcuguuug

SEQ ID NO: 2550406 - RNA, 17 nt, Human
auggauuugaugcuguu

SEQ ID NO: 2550407 - RNA, 15 nt, Human
auggauuugaagcaa

SEQ ID NO: 2550408 - RNA, 14 nt, Human
auggauuugaagca

SEQ ID NO: 2550409 - RNA, 21 nt, Human
auggauuuucuauuguuacuc

SEQ ID NO: 2550410 - RNA, 20 nt, Human
auggauuuucuauuguuacu

SEQ ID NO: 2550411 - RNA, 21 nt, Human
auggauuugccugugccaccc

SEQ ID NO: 2550412 - RNA, 18 nt, Human
auggauuuucuauuguua

SEQ ID NO: 2550413 - RNA, 14 nt, Human
auggauuugccugu

SEQ ID NO: 2550414 - RNA, 17 nt, Human
auggcacaucagcacga

SEQ ID NO: 2550415 - RNA, 23 nt, Human
auggcacaucagcacgauuucug

SEQ ID NO: 2550416 - RNA, 21 nt, Human
auggcagaagacaccagagca

SEQ ID NO: 2550417 - RNA, 20 nt, Human
auggcagaagacaccagagc

SEQ ID NO: 2550418 - RNA, 19 nt, Human
auggcagaagacaccagag

SEQ ID NO: 2550419 - RNA, 17 nt, Human
auggcagaagacaccag

SEQ ID NO: 2550420 - RNA, 24 nt, Human
auggcagaagacaccagagcagau

SEQ ID NO: 2550421 - RNA, 22 nt, Human
auggcagaagacaccagagcag

SEQ ID NO: 2550422 - RNA, 13 nt, Human
auggcagaaggca

SEQ ID NO: 2550423 - RNA, 13 nt, Human
auggcagaagaca

SEQ ID NO: 2550424 - RNA, 16 nt, Human
auggcagaagacacca

SEQ ID NO: 2550425 - RNA, 19 nt, Human
auggcaccaaagccaccag

SEQ ID NO: 2550426 - RNA, 24 nt, Human
auggcaacagaucuggaaccucag

SEQ ID NO: 2550427 - RNA, 16 nt, Human
auggcaacagaucugg

SEQ ID NO: 2550428 - RNA, 17 nt, Human
auggcaacagaucugga

SEQ ID NO: 2550429 - RNA, 21 nt, Human
auggcaaggcagcccugucug

SEQ ID NO: 2550430 - RNA, 18 nt, Human
auggcaaggcagcccugu

SEQ ID NO: 2550431 - RNA, 23 nt, Human
auggcaagaaagcugguaaacua

SEQ ID NO: 2550432 - RNA, 19 nt, Human
auggcaaggacugcaggga

SEQ ID NO: 2550433 - RNA, 15 nt, Human
auggcaauuuuguaa

SEQ ID NO: 2550434 - RNA, 16 nt, Human
auggcaauuuuguaac

SEQ ID NO: 2550435 - RNA, 22 nt, Human
auggcacaaucucggcucacug

SEQ ID NO: 2550436 - RNA, 23 nt, Human
auggcaauucuuugaccucaacc

SEQ ID NO: 2550437 - RNA, 23 nt, Human
auggcacagcccaaagaaggaaa

SEQ ID NO: 2550438 - RNA, 23 nt, Human
auggcagaguuuguguguugucu

SEQ ID NO: 2550439 - RNA, 22 nt, Human
auggcagaguuuguguguuguc

SEQ ID NO: 2550440 - RNA, 20 nt, Human
auggcagaguuuguguguug

SEQ ID NO: 2550441 - RNA, 19 nt, Human
auggcagaguuuguguguu

SEQ ID NO: 2550442 - RNA, 21 nt, Human
auggcagaguuguaaauauau

SEQ ID NO: 2550443 - RNA, 20 nt, Human
auggcagaguuguaaauaua

SEQ ID NO: 2550444 - RNA, 18 nt, Human
auggcagaguuguaaaua

SEQ ID NO: 2550445 - RNA, 17 nt, Human
auggcagaguuguaaau

SEQ ID NO: 2550446 - RNA, 15 nt, Human
auggcagaaggcaaa

SEQ ID NO: 2550447 - RNA, 20 nt, Human
auggcagaaggcaaacccau

SEQ ID NO: 2550448 - RNA, 15 nt, Human
auggcagaguuguaa

SEQ ID NO: 2550449 - RNA, 19 nt, Human
auggcagaggaauaucaau

SEQ ID NO: 2550450 - RNA, 21 nt, Human
auggcagaaggcaaacccauc

SEQ ID NO: 2550451 - RNA, 17 nt, Human
auggccaccuuuucagc

SEQ ID NO: 2550452 - RNA, 16 nt, Human
auggccaccuuuucag

SEQ ID NO: 2550453 - RNA, 22 nt, Human
auggccacaguagucuugauga

SEQ ID NO: 2550454 - RNA, 16 nt, Human
auggccagguggccac

SEQ ID NO: 2550455 - RNA, 15 nt, Human
auggccagugucugu

SEQ ID NO: 2550456 - RNA, 22 nt, Human
auggccagguggccacuccaga

SEQ ID NO: 2550457 - RNA, 21 nt, Human
auggccgggcgcgguggcuca

SEQ ID NO: 2550458 - RNA, 18 nt, Human
auggcccuucccacugga

SEQ ID NO: 2550459 - RNA, 18 nt, Human
auggccggagaggaccgg

SEQ ID NO: 2550460 - RNA, 13 nt, Human
auggccggccggg

SEQ ID NO: 2550461 - RNA, 20 nt, Human
auggccuuugcuugaaagaa

SEQ ID NO: 2550462 - RNA, 16 nt, Human
auggccugggggaugu

SEQ ID NO: 2550463 - RNA, 19 nt, Human
auggccugccuugaagcca

SEQ ID NO: 2550464 - RNA, 20 nt, Human
auggccugccuugaagccac

SEQ ID NO: 2550465 - RNA, 21 nt, Human
auggccucaagaucaaugaaa

SEQ ID NO: 2550466 - RNA, 13 nt, Human
auggccucagcug

SEQ ID NO: 2550467 - RNA, 14 nt, Human
auggccucagcugc

SEQ ID NO: 2550468 - RNA, 21 nt, Human
auggccuauuauauuaaaaua

SEQ ID NO: 2550469 - RNA, 20 nt, Human
auggccuauuauauuaaaau

SEQ ID NO: 2550470 - RNA, 18 nt, Human
auggccuaugcacauaug

SEQ ID NO: 2550471 - RNA, 15 nt, Human
auggccguuggccac

SEQ ID NO: 2550472 - RNA, 19 nt, Human
auggcgcagugccucuggu

SEQ ID NO: 2550473 - RNA, 17 nt, Human
auggcgcagugccucug

SEQ ID NO: 2550474 - RNA, 16 nt, Human
auggcgcagugccucu

SEQ ID NO: 2550475 - RNA, 14 nt, Human
auggcgcagugccu

SEQ ID NO: 2550476 - RNA, 12 nt, Human
auggccuggcca

SEQ ID NO: 2550477 - RNA, 19 nt, Human
auggccuugcagcacucac

SEQ ID NO: 2550478 - RNA, 20 nt, Human
auggcuaguaucaaaagaaa

SEQ ID NO: 2550479 - RNA, 21 nt, Human
auggcuauaaacaauuacaug

SEQ ID NO: 2550480 - RNA, 16 nt, Human
auggcuaauucccaga

SEQ ID NO: 2550481 - RNA, 18 nt, Human
auggcgcagugccucugg

SEQ ID NO: 2550482 - RNA, 17 nt, Human
auggcuaauucccagag

SEQ ID NO: 2550483 - RNA, 16 nt, Human
augacuuacuguacau

SEQ ID NO: 2550484 - RNA, 17 nt, Human
augacuuacuguacaug

SEQ ID NO: 2550485 - RNA, 16 nt, Human
augacuucauuaauaa

SEQ ID NO: 2550486 - RNA, 11 nt, Human
augacuuugga

SEQ ID NO: 2550487 - RNA, 21 nt, Human
augacuuuauugcaucugggu

SEQ ID NO: 2550488 - RNA, 23 nt, Human
augacuuuauauggaugauucag

SEQ ID NO: 2550489 - RNA, 13 nt, Human
augacuuuauugc

SEQ ID NO: 2550490 - RNA, 16 nt, Human
augacuuuauugcauc

SEQ ID NO: 2550491 - RNA, 20 nt, Human
augacuuuuccauguaucua

SEQ ID NO: 2550492 - RNA, 12 nt, Human
augacuuuggac

SEQ ID NO: 2550493 - RNA, 17 nt, Human
augacuuuuccauguau

SEQ ID NO: 2550494 - RNA, 14 nt, Human
augagaaaagaggc

SEQ ID NO: 2550495 - RNA, 18 nt, Human
augacacgaauauugcug

SEQ ID NO: 2550496 - RNA, 17 nt, Human
augacacauuuggcagu

SEQ ID NO: 2550497 - RNA, 21 nt, Human
augaauuuuuuucaucuucuc

SEQ ID NO: 2550498 - RNA, 23 nt, Human
augacauugcuaagaugcucuau

SEQ ID NO: 2550499 - RNA, 20 nt, Human
augacauugcuaagaugcuc

SEQ ID NO: 2550500 - RNA, 14 nt, Human
augacauugcuaag

SEQ ID NO: 2550501 - RNA, 13 nt, Human
augacauugcuaa

SEQ ID NO: 2550502 - RNA, 18 nt, Human
augacauucaugccuggc

SEQ ID NO: 2550503 - RNA, 17 nt, Human
augacauucaugccugg

SEQ ID NO: 2550504 - RNA, 22 nt, Human
augacuuaagcacacuugacau

SEQ ID NO: 2550505 - RNA, 14 nt, Human
augacuuacuguac

SEQ ID NO: 2550506 - RNA, 15 nt, Human
augaccaaaguccuu

SEQ ID NO: 2550507 - RNA, 17 nt, Human
augacauuuugccaaaa

SEQ ID NO: 2550508 - RNA, 23 nt, Human
augaccaauauuauacuaagaaa

SEQ ID NO: 2550509 - RNA, 22 nt, Human
augacauuuauaucacauguuu

SEQ ID NO: 2550510 - RNA, 18 nt, Human
augacauuuauuuuucau

SEQ ID NO: 2550511 - RNA, 14 nt, Human
augacauuuugcca

SEQ ID NO: 2550512 - RNA, 22 nt, Human
augacauuucuuugugcuuugg

SEQ ID NO: 2550513 - RNA, 21 nt, Human
augacauuucuuugugcuuug

SEQ ID NO: 2550514 - RNA, 18 nt, Human
augagaaaucuaaaaaac

SEQ ID NO: 2550515 - RNA, 15 nt, Human
augagaaaucuaaaa

SEQ ID NO: 2550516 - RNA, 22 nt, Human
augagaaagguugaagcaccaa

SEQ ID NO: 2550517 - RNA, 21 nt, Human
augagaaagguugaagcacca

SEQ ID NO: 2550518 - RNA, 13 nt, Human
augagaacaaaca

SEQ ID NO: 2550519 - RNA, 23 nt, Human
augagaaaucuaaaaaacgaaaa

SEQ ID NO: 2550520 - RNA, 14 nt, Human
augagaacucugag

SEQ ID NO: 2550521 - RNA, 19 nt, Human
augagagacacacugaaga

SEQ ID NO: 2550522 - RNA, 17 nt, Human
augagagacacacugaa

SEQ ID NO: 2550523 - RNA, 14 nt, Human
augagagacacacu

SEQ ID NO: 2550524 - RNA, 13 nt, Human
augagagacacac

SEQ ID NO: 2550525 - RNA, 22 nt, Human
augagacauaggccaugaaaaa

SEQ ID NO: 2550526 - RNA, 20 nt, Human
augagacaggaccuaggaua

SEQ ID NO: 2550527 - RNA, 18 nt, Human
augagaccacuguuauca

SEQ ID NO: 2550528 - RNA, 21 nt, Human
augagacccauuccuauuucu

SEQ ID NO: 2550529 - RNA, 21 nt, Human
augagaauuugagugcucuga

SEQ ID NO: 2550530 - RNA, 18 nt, Human
augagacaggaccuagga

SEQ ID NO: 2550531 - RNA, 11 nt, Human
augagaaucua

SEQ ID NO: 2550532 - RNA, 23 nt, Human
augagaaucuacccccagaucca

SEQ ID NO: 2550533 - RNA, 22 nt, Human
augagaaguugauauagaacag

SEQ ID NO: 2550534 - RNA, 15 nt, Human
augagaaggcagcca

SEQ ID NO: 2550535 - RNA, 21 nt, Human
augagaagagggccuguggga

SEQ ID NO: 2550536 - RNA, 18 nt, Human
augagaaggaauuugagu

SEQ ID NO: 2550537 - RNA, 18 nt, Human
augagaagagggccugug

SEQ ID NO: 2550538 - RNA, 16 nt, Human
augagaagagggccug

SEQ ID NO: 2550539 - RNA, 16 nt, Human
augagaaggaacuucc

SEQ ID NO: 2550540 - RNA, 15 nt, Human
augagaagagggccu

SEQ ID NO: 2550541 - RNA, 14 nt, Human
augacacaugcaag

SEQ ID NO: 2550542 - RNA, 22 nt, Human
augacacaugcaaggucauuuu

SEQ ID NO: 2550543 - RNA, 23 nt, Human
augaauuuaaauauaauucugua

SEQ ID NO: 2550544 - RNA, 23 nt, Human
augaauuuuguuuggacuucuuu

SEQ ID NO: 2550545 - RNA, 22 nt, Human
augaauuuucaaguaauuguga

SEQ ID NO: 2550546 - RNA, 18 nt, Human
augaauuuucaaguaauu

SEQ ID NO: 2550547 - RNA, 16 nt, Human
uuguaucacaaaucuu

SEQ ID NO: 2550548 - RNA, 17 nt, Human
uuguauauuuguacaaa

SEQ ID NO: 2550549 - RNA, 16 nt, Human
uuguauauuuguacaa

SEQ ID NO: 2550550 - RNA, 15 nt, Human
uuguauauuuguaca

SEQ ID NO: 2550551 - RNA, 14 nt, Human
uuguauauuuguac

SEQ ID NO: 2550552 - RNA, 19 nt, Human
uuguauauuguguuugugu

SEQ ID NO: 2550553 - RNA, 13 nt, Human
uuguauauuugua

SEQ ID NO: 2550554 - RNA, 19 nt, Human
uuguauauugucagauauu

SEQ ID NO: 2550555 - RNA, 16 nt, Human
augaauuuaaauauaa

SEQ ID NO: 2550556 - RNA, 14 nt, Human
augaauuuaaauau

SEQ ID NO: 2550557 - RNA, 13 nt, Human
augaauuuaaaua

SEQ ID NO: 2550558 - RNA, 18 nt, Human
uuguauauuuguacaaaa

SEQ ID NO: 2550559 - RNA, 13 nt, Human
augaauugcauuu

SEQ ID NO: 2550560 - RNA, 11 nt, Human
augaauuuaaa

SEQ ID NO: 2550561 - RNA, 15 nt, Human
augaauuuggagacu

SEQ ID NO: 2550562 - RNA, 20 nt, Human
augaauuuggagacucugug

SEQ ID NO: 2550563 - RNA, 21 nt, Human
augaauuuggagacucugugg

SEQ ID NO: 2550564 - RNA, 15 nt, Human
uuguauaauuguauc

SEQ ID NO: 2550565 - RNA, 17 nt, Human
uuguauaaaauaauuuu

SEQ ID NO: 2550566 - RNA, 17 nt, Human
uuguauaauuguaucgu

SEQ ID NO: 2550567 - RNA, 16 nt, Human
uuguauaauuguaucg

SEQ ID NO: 2550568 - RNA, 17 nt, Human
uuguauagagauaugca

SEQ ID NO: 2550569 - RNA, 16 nt, Human
uuguauaguguaaaau

SEQ ID NO: 2550570 - RNA, 15 nt, Human
uuguauaguguaaaa

SEQ ID NO: 2550571 - RNA, 14 nt, Human
uuguauaguguaaa

SEQ ID NO: 2550572 - RNA, 18 nt, Human
uuguauagguagauguuc

SEQ ID NO: 2550573 - RNA, 14 nt, Human
uuguauaguaaagu

SEQ ID NO: 2550574 - RNA, 15 nt, Human
uuguauaguaaagug

SEQ ID NO: 2550575 - RNA, 13 nt, Human
uuguauauugugu

SEQ ID NO: 2550576 - RNA, 15 nt, Human
uuguauauuguguuu

SEQ ID NO: 2550577 - RNA, 16 nt, Human
uuguauauugucagau

SEQ ID NO: 2550578 - RNA, 23 nt, Human
uuguacaaaauaaacaaauaaca

SEQ ID NO: 2550579 - RNA, 20 nt, Human
uuguaggggucaaagaaaug

SEQ ID NO: 2550580 - RNA, 17 nt, Human
uuguaggggucaaagaa

SEQ ID NO: 2550581 - RNA, 16 nt, Human
uuguagggaugccuuu

SEQ ID NO: 2550582 - RNA, 20 nt, Human
uuguaggcgaaucauuuguu

SEQ ID NO: 2550583 - RNA, 15 nt, Human
uuguauaaaauaauu

SEQ ID NO: 2550584 - RNA, 16 nt, Human
uuguauaaaauaauuu

SEQ ID NO: 2550585 - RNA, 20 nt, Human
uuguaguagucucauuacuu

SEQ ID NO: 2550586 - RNA, 15 nt, Human
uuguaguagucucau

SEQ ID NO: 2550587 - RNA, 18 nt, Human
uuguaguaaagaaauuua

SEQ ID NO: 2550588 - RNA, 19 nt, Human
uuguaggggucaaagaaau

SEQ ID NO: 2550589 - RNA, 13 nt, Human
uugguugcuuuaa

SEQ ID NO: 2550590 - RNA, 16 nt, Human
uugguugcuuuaauau

SEQ ID NO: 2550591 - RNA, 22 nt, Human
uugguucuugguagagauucau

SEQ ID NO: 2550592 - RNA, 20 nt, Human
uugguugaaaauaaaaagau

SEQ ID NO: 2550593 - RNA, 13 nt, Human
uugguugaauaaa

SEQ ID NO: 2550594 - RNA, 16 nt, Human
uugguugaauaaacua

SEQ ID NO: 2550595 - RNA, 19 nt, Human
uugguucuaauagaacuca

SEQ ID NO: 2550596 - RNA, 15 nt, Human
uugguucuaauagaa

SEQ ID NO: 2550597 - RNA, 13 nt, Human
uugguucuguguc

SEQ ID NO: 2550598 - RNA, 14 nt, Human
uugguucuggggcc

SEQ ID NO: 2550599 - RNA, 13 nt, Human
uugguucuggggc

SEQ ID NO: 2550600 - RNA, 22 nt, Human
uugguugucaauauuaaauaca

SEQ ID NO: 2550601 - RNA, 12 nt, Human
uugguugucaau

SEQ ID NO: 2550602 - RNA, 16 nt, Human
uugguuguauucuuug

SEQ ID NO: 2550603 - RNA, 13 nt, Human
uugguuguauucu

SEQ ID NO: 2550604 - RNA, 15 nt, Human
uugguuggcuggccu

SEQ ID NO: 2550605 - RNA, 12 nt, Human
uugguuguauuc

SEQ ID NO: 2550606 - RNA, 18 nt, Human
uugguugucaauauuaaa

SEQ ID NO: 2550607 - RNA, 14 nt, Human
uuguacaaaauaaa

SEQ ID NO: 2550608 - RNA, 21 nt, Human
aucuuuaauuuuacauuuccu

SEQ ID NO: 2550609 - RNA, 16 nt, Human
aucuuuaauuuuacau

SEQ ID NO: 2550610 - RNA, 22 nt, Human
aucuuuaauuuuacauuuccua

SEQ ID NO: 2550611 - RNA, 17 nt, Human
aucuuuacaaaacuaca

SEQ ID NO: 2550612 - RNA, 21 nt, Human
aucuuuacaaaacuacaugag

SEQ ID NO: 2550613 - RNA, 14 nt, Human
aucuuugccacccu

SEQ ID NO: 2550614 - RNA, 13 nt, Human
aucuuuauuaauc

SEQ ID NO: 2550615 - RNA, 23 nt, Human
uuggcucuggagacagccccaga

SEQ ID NO: 2550616 - RNA, 18 nt, Human
aucuuugcagacaggcaa

SEQ ID NO: 2550617 - RNA, 22 nt, Human
aucuuuggacagaagcagcucu

SEQ ID NO: 2550618 - RNA, 14 nt, Human
aucuuugccuuggg

SEQ ID NO: 2550619 - RNA, 20 nt, Human
aucuuugccuugggcugcuc

SEQ ID NO: 2550620 - RNA, 16 nt, Human
aucuuugccacccuca

SEQ ID NO: 2550621 - RNA, 15 nt, Human
aucuuugccacccuc

SEQ ID NO: 2550622 - RNA, 13 nt, Human
aucuuugccuugg

SEQ ID NO: 2550623 - RNA, 15 nt, Human
augaaagcagggacu

SEQ ID NO: 2550624 - RNA, 14 nt, Human
aucuuuuucucuaa

SEQ ID NO: 2550625 - RNA, 16 nt, Human
aucuuuuuuagcauaa

SEQ ID NO: 2550626 - RNA, 18 nt, Human
aucuuuuuuagcauaaaa

SEQ ID NO: 2550627 - RNA, 19 nt, Human
aucuuuuuuagcauaaaau

SEQ ID NO: 2550628 - RNA, 23 nt, Human
aucuuuuuuagcauaaaauuuuc

SEQ ID NO: 2550629 - RNA, 22 nt, Human
augaaagcuccucgagggcagg

SEQ ID NO: 2550630 - RNA, 12 nt, Human
augaaagcaugu

SEQ ID NO: 2550631 - RNA, 18 nt, Human
augaaagcauguggcaug

SEQ ID NO: 2550632 - RNA, 13 nt, Human
aucuuuuucuaac

SEQ ID NO: 2550633 - RNA, 13 nt, Human
aucuuuuuauuca

SEQ ID NO: 2550634 - RNA, 23 nt, Human
aucuuuggacagaagcagcucuu

SEQ ID NO: 2550635 - RNA, 22 nt, Human
aucuuugccuugggcugcuccu

SEQ ID NO: 2550636 - RNA, 19 nt, Human
aucuuugcagguugcuuug

SEQ ID NO: 2550637 - RNA, 23 nt, Human
aucuuuugugagauguaauuguu

SEQ ID NO: 2550638 - RNA, 14 nt, Human
aucuuuugugagau

SEQ ID NO: 2550639 - RNA, 22 nt, Human
uuggcucuggagacagccccag

SEQ ID NO: 2550640 - RNA, 20 nt, Human
uuggcucuggagacagcccc

SEQ ID NO: 2550641 - RNA, 19 nt, Human
uuggcugaaauucuccugg

SEQ ID NO: 2550642 - RNA, 19 nt, Human
uuggcucuggagacagccc

SEQ ID NO: 2550643 - RNA, 17 nt, Human
uuggcucuggagacagc

SEQ ID NO: 2550644 - RNA, 14 nt, Human
uuggcucuggagac

SEQ ID NO: 2550645 - RNA, 21 nt, Human
uuggcugaaauucuccuggag

SEQ ID NO: 2550646 - RNA, 20 nt, Human
uuggcugaaauucuccugga

SEQ ID NO: 2550647 - RNA, 22 nt, Human
uuggcugaaauucuccuggagg

SEQ ID NO: 2550648 - RNA, 23 nt, Human
uuggcugagauaugaacauauug

SEQ ID NO: 2550649 - RNA, 22 nt, Human
uuggcucgaaucucugugccuu

SEQ ID NO: 2550650 - RNA, 13 nt, Human
uuggcucuggaga

SEQ ID NO: 2550651 - RNA, 20 nt, Human
uuggcuaacuauauuugcuu

SEQ ID NO: 2550652 - RNA, 23 nt, Human
uuggcgcugccccuggcagcccc

SEQ ID NO: 2550653 - RNA, 23 nt, Human
uuggauuauucauuuaaaaugau

SEQ ID NO: 2550654 - RNA, 20 nt, Human
uuggauuauucauuuaaaau

SEQ ID NO: 2550655 - RNA, 22 nt, Human
uuggcgcugccccuggcagccc

SEQ ID NO: 2550656 - RNA, 18 nt, Human
uuggcuagagguucaaag

SEQ ID NO: 2550657 - RNA, 15 nt, Human
uuggauuauuuaaua

SEQ ID NO: 2550658 - RNA, 14 nt, Human
uuggauuauuuaau

SEQ ID NO: 2550659 - RNA, 17 nt, Human
uuggauuauuuaauaac

SEQ ID NO: 2550660 - RNA, 14 nt, Human
uuggcgggccaagg

SEQ ID NO: 2550661 - RNA, 19 nt, Human
uuggaguguuccccuucca

SEQ ID NO: 2550662 - RNA, 22 nt, Human
uuggaguguuccccuuccacug

SEQ ID NO: 2550663 - RNA, 22 nt, Human
uuggagugaguguggcuccccu

SEQ ID NO: 2550664 - RNA, 23 nt, Human
aucuugcuucccuaaucuauggu

SEQ ID NO: 2550665 - RNA, 22 nt, Human
aucuugcucuguaaucucguuu

SEQ ID NO: 2550666 - RNA, 23 nt, Human
aucuugcuuuuuuucaccaauau

SEQ ID NO: 2550667 - RNA, 19 nt, Human
uuggaucuucaauggcuuu

SEQ ID NO: 2550668 - RNA, 22 nt, Human
uuggauaaugcuguugccucau

SEQ ID NO: 2550669 - RNA, 18 nt, Human
uuggauuauucauuuaaa

SEQ ID NO: 2550670 - RNA, 17 nt, Human
uuggauuauucauuuaa

SEQ ID NO: 2550671 - RNA, 13 nt, Human
uuggauuauucau

SEQ ID NO: 2550672 - RNA, 24 nt, Human
uuggaugcagugcucgcuguugcu

SEQ ID NO: 2550673 - RNA, 23 nt, Human
uuggaugcagugcucgcuguugc

SEQ ID NO: 2550674 - RNA, 21 nt, Human
uuggaugggagugagacagaa

SEQ ID NO: 2550675 - RNA, 21 nt, Human
uuggauggaguccagggaaga

SEQ ID NO: 2550676 - RNA, 20 nt, Human
uuggaugggagugagacaga

SEQ ID NO: 2550677 - RNA, 20 nt, Human
augaaugucagugugacuga

SEQ ID NO: 2550678 - RNA, 21 nt, Human
augaaugcccccagcuggccc

SEQ ID NO: 2550679 - RNA, 20 nt, Human
augaaugcccccagcuggcc

SEQ ID NO: 2550680 - RNA, 18 nt, Human
augaaugcccccagcugg

SEQ ID NO: 2550681 - RNA, 16 nt, Human
augaaugagaaucuac

SEQ ID NO: 2550682 - RNA, 19 nt, Human
augaaugaggucccaggca

SEQ ID NO: 2550683 - RNA, 20 nt, Human
augaaugaggucccaggcag

SEQ ID NO: 2550684 - RNA, 15 nt, Human
augaaugcacacuag

SEQ ID NO: 2550685 - RNA, 18 nt, Human
augaagauguagaggaga

SEQ ID NO: 2550686 - RNA, 13 nt, Human
augaaugaauggc

SEQ ID NO: 2550687 - RNA, 20 nt, Human
augaagaucauauacgugaa

SEQ ID NO: 2550688 - RNA, 22 nt, Human
augaagauauuuuuccauuuuu

SEQ ID NO: 2550689 - RNA, 16 nt, Human
augaacuuauucugua

SEQ ID NO: 2550690 - RNA, 17 nt, Human
augaaauauuauguuaa

SEQ ID NO: 2550691 - RNA, 13 nt, Human
augaaauauuaug

SEQ ID NO: 2550692 - RNA, 18 nt, Human
augaaauauuauguuaaa

SEQ ID NO: 2550693 - RNA, 15 nt, Human
augaaagggcccaga

SEQ ID NO: 2550694 - RNA, 17 nt, Human
augaaccuucuggccuc

SEQ ID NO: 2550695 - RNA, 20 nt, Human
augaacugaaguuucacaug

SEQ ID NO: 2550696 - RNA, 19 nt, Human
augaacugaaguuucacau

SEQ ID NO: 2550697 - RNA, 17 nt, Human
augaacugaaguuucac

SEQ ID NO: 2550698 - RNA, 16 nt, Human
augaacugaaguuuca

SEQ ID NO: 2550699 - RNA, 15 nt, Human
augaacugaaguuuc

SEQ ID NO: 2550700 - RNA, 16 nt, Human
augaacucuuaaucaa

SEQ ID NO: 2550701 - RNA, 14 nt, Human
augaacucaacuuu

SEQ ID NO: 2550702 - RNA, 20 nt, Human
augaacucuuagaaaugaag

SEQ ID NO: 2550703 - RNA, 20 nt, Human
augaacuauuccccagcagg

SEQ ID NO: 2550704 - RNA, 14 nt, Human
augaacugaaguuu

SEQ ID NO: 2550705 - RNA, 15 nt, Human
augaacggugagcau

SEQ ID NO: 2550706 - RNA, 13 nt, Human
augaacuauuccc

SEQ ID NO: 2550707 - RNA, 16 nt, Human
augaacggugagcauu

SEQ ID NO: 2550708 - RNA, 21 nt, Human
augaaccuucuggccucccac

SEQ ID NO: 2550709 - RNA, 24 nt, Human
augaaccuucuggccucccacaga

SEQ ID NO: 2550710 - RNA, 14 nt, Human
augaauuaaagugg

SEQ ID NO: 2550711 - RNA, 14 nt, Human
augaauuaaauaaa

SEQ ID NO: 2550712 - RNA, 22 nt, Human
augaauguuuacacucuuugua

SEQ ID NO: 2550713 - RNA, 11 nt, Human
augaauguuua

SEQ ID NO: 2550714 - RNA, 12 nt, Human
augaauguguaa

SEQ ID NO: 2550715 - RNA, 21 nt, Human
augaaugugugugguuuuuuu

SEQ ID NO: 2550716 - RNA, 14 nt, Human
uugggccagacaug

SEQ ID NO: 2550717 - RNA, 16 nt, Human
augaauuaaauaaacc

SEQ ID NO: 2550718 - RNA, 17 nt, Human
uugggccagacaugcca

SEQ ID NO: 2550719 - RNA, 19 nt, Human
uugggccauacuggccucg

SEQ ID NO: 2550720 - RNA, 18 nt, Human
uugggccauacuggccuc

SEQ ID NO: 2550721 - RNA, 23 nt, Human
uugggccauacuggccucgccug

SEQ ID NO: 2550722 - RNA, 16 nt, Human
uugggccauacuggcc

SEQ ID NO: 2550723 - RNA, 17 nt, Human
uugggccauacuggccu

SEQ ID NO: 2550724 - RNA, 13 nt, Human
augaauuaaauuu

SEQ ID NO: 2550725 - RNA, 16 nt, Human
uugggccugcuccaga

SEQ ID NO: 2550726 - RNA, 17 nt, Human
uugggccugcuccagac

SEQ ID NO: 2550727 - RNA, 14 nt, Human
uuggggauauuuuu

SEQ ID NO: 2550728 - RNA, 11 nt, Human
uugggcccagg

SEQ ID NO: 2550729 - RNA, 22 nt, Human
uugggcccagcugggcucugcc

SEQ ID NO: 2550730 - RNA, 18 nt, Human
uugggcccagcugggcuc

SEQ ID NO: 2550731 - RNA, 17 nt, Human
uugggcccagcugggcu

SEQ ID NO: 2550732 - RNA, 16 nt, Human
uugggcccagcugggc

SEQ ID NO: 2550733 - RNA, 12 nt, Human
uugggcccagcu

SEQ ID NO: 2550734 - RNA, 18 nt, Human
uugggccccagaggcugg

SEQ ID NO: 2550735 - RNA, 14 nt, Human
uugggccccagccu

SEQ ID NO: 2550736 - RNA, 13 nt, Human
uugggcccaggga

SEQ ID NO: 2550737 - RNA, 12 nt, Human
uugggcccuccu

SEQ ID NO: 2550738 - RNA, 19 nt, Human
uugggccugcuccagaccu

SEQ ID NO: 2550739 - RNA, 17 nt, Human
uuggggcgaggcagagg

SEQ ID NO: 2550740 - RNA, 23 nt, Human
uugggggacagggcuggcccagc

SEQ ID NO: 2550741 - RNA, 21 nt, Human
uugggggacagggcuggccca

SEQ ID NO: 2550742 - RNA, 18 nt, Human
uugggggacagggcuggc

SEQ ID NO: 2550743 - RNA, 15 nt, Human
uuggggcuuauuuuu

SEQ ID NO: 2550744 - RNA, 12 nt, Human
uugggggcuggu

SEQ ID NO: 2550745 - RNA, 21 nt, Human
uuggggcgaggcagaggacag

SEQ ID NO: 2550746 - RNA, 16 nt, Human
uuggggcuugacuuuu

SEQ ID NO: 2550747 - RNA, 13 nt, Human
uuggggggguggc

SEQ ID NO: 2550748 - RNA, 18 nt, Human
uugguucccccacugauc

SEQ ID NO: 2550749 - RNA, 20 nt, Human
uuggggggguggccgcugag

SEQ ID NO: 2550750 - RNA, 14 nt, Human
uugguucccuugug

SEQ ID NO: 2550751 - RNA, 22 nt, Human
uuggggggcugaggugggagga

SEQ ID NO: 2550752 - RNA, 16 nt, Human
uugggggcuggugcca

SEQ ID NO: 2550753 - RNA, 14 nt, Human
uugggggcuggugc

SEQ ID NO: 2550754 - RNA, 16 nt, Human
uugggggcugugggga

SEQ ID NO: 2550755 - RNA, 23 nt, Human
uuggggggggcccgccuggcaga

SEQ ID NO: 2550756 - RNA, 19 nt, Human
aucucaggccaccugcccc

SEQ ID NO: 2550757 - RNA, 20 nt, Human
aucucaggccaccugccccc

SEQ ID NO: 2550758 - RNA, 14 nt, Human
aucucaggccaccu

SEQ ID NO: 2550759 - RNA, 15 nt, Human
aucucaggccaccug

SEQ ID NO: 2550760 - RNA, 17 nt, Human
aucucaggccaccugcc

SEQ ID NO: 2550761 - RNA, 22 nt, Human
aucucagucaugcauaaauaug

SEQ ID NO: 2550762 - RNA, 20 nt, Human
aucucagaauuccuuuucua

SEQ ID NO: 2550763 - RNA, 20 nt, Human
aucucagaucaguguaccau

SEQ ID NO: 2550764 - RNA, 11 nt, Human
aucucagccca

SEQ ID NO: 2550765 - RNA, 13 nt, Human
aucucacuugugc

SEQ ID NO: 2550766 - RNA, 22 nt, Human
aucucacuugugccaacacuca

SEQ ID NO: 2550767 - RNA, 18 nt, Human
aucucacuugugccaaca

SEQ ID NO: 2550768 - RNA, 15 nt, Human
aucucacuuuucucc

SEQ ID NO: 2550769 - RNA, 19 nt, Human
aucucacuuuucuccauga

SEQ ID NO: 2550770 - RNA, 13 nt, Human
aucucaauauuuc

SEQ ID NO: 2550771 - RNA, 15 nt, Human
aucucacacaugagc

SEQ ID NO: 2550772 - RNA, 14 nt, Human
aucucaauucuucc

SEQ ID NO: 2550773 - RNA, 16 nt, Human
aucucaauucuucccu

SEQ ID NO: 2550774 - RNA, 16 nt, Human
aucucacacaugagca

SEQ ID NO: 2550775 - RNA, 19 nt, Human
auccuaguuccaccaucaa

SEQ ID NO: 2550776 - RNA, 15 nt, Human
auccuaguuccacca

SEQ ID NO: 2550777 - RNA, 19 nt, Human
auccuaucaacaacaaggu

SEQ ID NO: 2550778 - RNA, 20 nt, Human
auccuaucagccugucucuu

SEQ ID NO: 2550779 - RNA, 13 nt, Human
auccuagugcuuu

SEQ ID NO: 2550780 - RNA, 23 nt, Human
auccuaucagccugucucuucca

SEQ ID NO: 2550781 - RNA, 13 nt, Human
auccuaugcaaua

SEQ ID NO: 2550782 - RNA, 13 nt, Human
aucucccccagcc

SEQ ID NO: 2550783 - RNA, 12 nt, Human
aucucccccagc

SEQ ID NO: 2550784 - RNA, 19 nt, Human
aucucuuagcuccccucca

SEQ ID NO: 2550785 - RNA, 18 nt, Human
aucucuuagcuccccucc

SEQ ID NO: 2550786 - RNA, 16 nt, Human
aucucuuagcuccccu

SEQ ID NO: 2550787 - RNA, 13 nt, Human
aucucuuagcucc

SEQ ID NO: 2550788 - RNA, 13 nt, Human
aucuccccacucu

SEQ ID NO: 2550789 - RNA, 14 nt, Human
aucuccccacucua

SEQ ID NO: 2550790 - RNA, 18 nt, Human
aucucuuagcauuuuaau

SEQ ID NO: 2550791 - RNA, 22 nt, Human
aucuccauggcuuccuccuccc

SEQ ID NO: 2550792 - RNA, 19 nt, Human
aucuccauggcuuccuccu

SEQ ID NO: 2550793 - RNA, 18 nt, Human
aucuccauggcuuccucc

SEQ ID NO: 2550794 - RNA, 17 nt, Human
aucuccauggcuuccuc

SEQ ID NO: 2550795 - RNA, 15 nt, Human
aucuccauggcuucc

SEQ ID NO: 2550796 - RNA, 14 nt, Human
aucuccauggcuuc

SEQ ID NO: 2550797 - RNA, 18 nt, Human
aucuccaguauucuuguc

SEQ ID NO: 2550798 - RNA, 18 nt, Human
aucucccaccuagcagca

SEQ ID NO: 2550799 - RNA, 19 nt, Human
aucucccaccuagcagcac

SEQ ID NO: 2550800 - RNA, 20 nt, Human
aucucccagauaaugugaaa

SEQ ID NO: 2550801 - RNA, 19 nt, Human
aucucccagauaaugugaa

SEQ ID NO: 2550802 - RNA, 20 nt, Human
aucucccaccuagcagcacc

SEQ ID NO: 2550803 - RNA, 16 nt, Human
aucuccccaucauugg

SEQ ID NO: 2550804 - RNA, 23 nt, Human
aucucauuuccaagcaaguauua

SEQ ID NO: 2550805 - RNA, 15 nt, Human
aucucaucuaucuca

SEQ ID NO: 2550806 - RNA, 19 nt, Human
aucucauagguugccaaua

SEQ ID NO: 2550807 - RNA, 15 nt, Human
aucuccaguauucuu

SEQ ID NO: 2550808 - RNA, 21 nt, Human
aucuccagggaguccccuccc

SEQ ID NO: 2550809 - RNA, 20 nt, Human
aucuccagggaguccccucc

SEQ ID NO: 2550810 - RNA, 19 nt, Human
aucuccagggaguccccuc

SEQ ID NO: 2550811 - RNA, 12 nt, Human
aucuccaggauu

SEQ ID NO: 2550812 - RNA, 20 nt, Human
aucuccaggauugaagagca

SEQ ID NO: 2550813 - RNA, 15 nt, Human
aucuccacuccagau

SEQ ID NO: 2550814 - RNA, 23 nt, Human
aucucauagguugccaauaauac

SEQ ID NO: 2550815 - RNA, 17 nt, Human
aucucauagguugccaa

SEQ ID NO: 2550816 - RNA, 21 nt, Human
aucucauuuccaagcaaguau

SEQ ID NO: 2550817 - RNA, 23 nt, Human
aucucagugguuaagauuccuaa

SEQ ID NO: 2550818 - RNA, 17 nt, Human
aucucagugcuguaaaa

SEQ ID NO: 2550819 - RNA, 16 nt, Human
uugcacauguuuccuc

SEQ ID NO: 2550820 - RNA, 21 nt, Human
uugcacaugucuuaaugaagu

SEQ ID NO: 2550821 - RNA, 17 nt, Human
uugcacaugucuuaaug

SEQ ID NO: 2550822 - RNA, 22 nt, Human
uugcacaugucuuaaugaaguu

SEQ ID NO: 2550823 - RNA, 20 nt, Human
uugcaucucccagauaaugu

SEQ ID NO: 2550824 - RNA, 14 nt, Human
uugcaucugaaaau

SEQ ID NO: 2550825 - RNA, 15 nt, Human
uugcauguggaucaa

SEQ ID NO: 2550826 - RNA, 19 nt, Human
uugcauguuccacuaaccc

SEQ ID NO: 2550827 - RNA, 17 nt, Human
uugcauguuccacuaac

SEQ ID NO: 2550828 - RNA, 16 nt, Human
uugcaugugacucuga

SEQ ID NO: 2550829 - RNA, 17 nt, Human
uugcaugugacucugaa

SEQ ID NO: 2550830 - RNA, 14 nt, Human
uugcaugugaaaau

SEQ ID NO: 2550831 - RNA, 20 nt, Human
uugcaugugaaaaucaaaua

SEQ ID NO: 2550832 - RNA, 15 nt, Human
uugcaugugacucug

SEQ ID NO: 2550833 - RNA, 18 nt, Human
uugcauccaacuccagga

SEQ ID NO: 2550834 - RNA, 18 nt, Human
uugcaucuggguagcugu

SEQ ID NO: 2550835 - RNA, 19 nt, Human
uugcaucuggguagcugua

SEQ ID NO: 2550836 - RNA, 20 nt, Human
uugcaucuggguagcuguaa

SEQ ID NO: 2550837 - RNA, 23 nt, Human
uugcaucuguauaaguaagaaaa

SEQ ID NO: 2550838 - RNA, 19 nt, Human
uugcaucuguauaaguaag

SEQ ID NO: 2550839 - RNA, 14 nt, Human
uugcaucuguauaa

SEQ ID NO: 2550840 - RNA, 13 nt, Human
uugcaucuguaua

SEQ ID NO: 2550841 - RNA, 21 nt, Human
uugcaucuggguagcuguaag

SEQ ID NO: 2550842 - RNA, 16 nt, Human
uugcacaguuagcaaa

SEQ ID NO: 2550843 - RNA, 16 nt, Human
uugcacagcuaugaag

SEQ ID NO: 2550844 - RNA, 16 nt, Human
uugcacaugucuuaau

SEQ ID NO: 2550845 - RNA, 15 nt, Human
uugcacaugucuuaa

SEQ ID NO: 2550846 - RNA, 13 nt, Human
uugcacaugucuu

SEQ ID NO: 2550847 - RNA, 19 nt, Human
uugcacacccacucagcuc

SEQ ID NO: 2550848 - RNA, 21 nt, Human
uugcacacccacucagcuccg

SEQ ID NO: 2550849 - RNA, 17 nt, Human
uugcacacuccccugca

SEQ ID NO: 2550850 - RNA, 22 nt, Human
uugcacacuccccugcacugga

SEQ ID NO: 2550851 - RNA, 13 nt, Human
uugcacacuugug

SEQ ID NO: 2550852 - RNA, 16 nt, Human
uugauucagacagcug

SEQ ID NO: 2550853 - RNA, 15 nt, Human
uugauucagacagcu

SEQ ID NO: 2550854 - RNA, 21 nt, Human
uugcacaauauugaacuuuuu

SEQ ID NO: 2550855 - RNA, 20 nt, Human
uugcacaauauugaacuuuu

SEQ ID NO: 2550856 - RNA, 19 nt, Human
uugcacaauauugaacuuu

SEQ ID NO: 2550857 - RNA, 19 nt, Human
uugcacaaaccaauuaaac

SEQ ID NO: 2550858 - RNA, 19 nt, Human
uugauguacagucugucau

SEQ ID NO: 2550859 - RNA, 20 nt, Human
uugauguacagucugucaug

SEQ ID NO: 2550860 - RNA, 19 nt, Human
uugauggugguauguuuuc

SEQ ID NO: 2550861 - RNA, 23 nt, Human
uugauggugaugaaauguaaaua

SEQ ID NO: 2550862 - RNA, 11 nt, Human
uugauguguuu

SEQ ID NO: 2550863 - RNA, 20 nt, Human
uugauguguuuauuuauaga

SEQ ID NO: 2550864 - RNA, 16 nt, Human
uugaugugugucuagg

SEQ ID NO: 2550865 - RNA, 14 nt, Human
uugauucagacagc

SEQ ID NO: 2550866 - RNA, 12 nt, Human
uugaugccuggc

SEQ ID NO: 2550867 - RNA, 19 nt, Human
aucucuucuggguuccuuc

SEQ ID NO: 2550868 - RNA, 23 nt, Human
uugaugcauuaaaagaaaauaaa

SEQ ID NO: 2550869 - RNA, 22 nt, Human
aucucuuccuacccaaccacuc

SEQ ID NO: 2550870 - RNA, 23 nt, Human
aucucuuagcuccccuccaaccu

SEQ ID NO: 2550871 - RNA, 22 nt, Human
aucucuuagcuccccuccaacc

SEQ ID NO: 2550872 - RNA, 16 nt, Human
aucucuuauuuuacaa

SEQ ID NO: 2550873 - RNA, 19 nt, Human
aucucuuauuuuacaauaa

SEQ ID NO: 2550874 - RNA, 18 nt, Human
uugauggugguauguuuu

SEQ ID NO: 2550875 - RNA, 18 nt, Human
uugaugcuggagagguua

SEQ ID NO: 2550876 - RNA, 21 nt, Human
uugaugguaaccauaauggaa

SEQ ID NO: 2550877 - RNA, 13 nt, Human
uugauggguucua

SEQ ID NO: 2550878 - RNA, 14 nt, Human
uugauggggaagga

SEQ ID NO: 2550879 - RNA, 15 nt, Human
uugaugggauuuggu

SEQ ID NO: 2550880 - RNA, 14 nt, Human
uugauggagauauu

SEQ ID NO: 2550881 - RNA, 17 nt, Human
uugaugcuggagagguu

SEQ ID NO: 2550882 - RNA, 15 nt, Human
uugaugccaggacac

SEQ ID NO: 2550883 - RNA, 15 nt, Human
uugaugcuggagagg

SEQ ID NO: 2550884 - RNA, 17 nt, Human
aucugugugaaaauggg

SEQ ID NO: 2550885 - RNA, 15 nt, Human
aucugugugaaaaug

SEQ ID NO: 2550886 - RNA, 13 nt, Human
aucugugugaaaa

SEQ ID NO: 2550887 - RNA, 17 nt, Human
aucugugaauucagauu

SEQ ID NO: 2550888 - RNA, 14 nt, Human
aucugugucuuguu

SEQ ID NO: 2550889 - RNA, 16 nt, Human
aucugugaauucagau

SEQ ID NO: 2550890 - RNA, 15 nt, Human
aucugugucuuguuu

SEQ ID NO: 2550891 - RNA, 12 nt, Human
aucugugaauaa

SEQ ID NO: 2550892 - RNA, 13 nt, Human
aucugugaauaag

SEQ ID NO: 2550893 - RNA, 11 nt, Human
aucugugaaua

SEQ ID NO: 2550894 - RNA, 21 nt, Human
aucugugaaaugcuggcauuu

SEQ ID NO: 2550895 - RNA, 13 nt, Human
aucuguugcaaac

SEQ ID NO: 2550896 - RNA, 19 nt, Human
aucuguucuuuaauuuauu

SEQ ID NO: 2550897 - RNA, 21 nt, Human
aucuguuguguacguggagag

SEQ ID NO: 2550898 - RNA, 16 nt, Human
aucuguguuuuugaaa

SEQ ID NO: 2550899 - RNA, 18 nt, Human
aucuguguuuuugaaaua

SEQ ID NO: 2550900 - RNA, 21 nt, Human
aucuguguuuuugaaauauua

SEQ ID NO: 2550901 - RNA, 13 nt, Human
aucuuacagcugg

SEQ ID NO: 2550902 - RNA, 14 nt, Human
aucuuacugaaggu

SEQ ID NO: 2550903 - RNA, 15 nt, Human
aucuuacugaaggua

SEQ ID NO: 2550904 - RNA, 15 nt, Human
aucuguuguuuuguu

SEQ ID NO: 2550905 - RNA, 12 nt, Human
aucuguuuacag

SEQ ID NO: 2550906 - RNA, 13 nt, Human
aucuuaauuuugg

SEQ ID NO: 2550907 - RNA, 18 nt, Human
aucuguugcaaacucagc

SEQ ID NO: 2550908 - RNA, 23 nt, Human
aucuguuguguacguggagaggg

SEQ ID NO: 2550909 - RNA, 22 nt, Human
aucuuaauuuugguuguauucu

SEQ ID NO: 2550910 - RNA, 19 nt, Human
aucuuaauuuugguuguau

SEQ ID NO: 2550911 - RNA, 18 nt, Human
aucuuaauuuugguugua

SEQ ID NO: 2550912 - RNA, 21 nt, Human
aucuguuuaaaguagauuaga

SEQ ID NO: 2550913 - RNA, 23 nt, Human
aucuuaauuuugguuguauucuu

SEQ ID NO: 2550914 - RNA, 22 nt, Human
aucuugagcaaguuccuucugg

SEQ ID NO: 2550915 - RNA, 17 nt, Human
aucuugacuacagucag

SEQ ID NO: 2550916 - RNA, 17 nt, Human
aucuugacauucaaggc

SEQ ID NO: 2550917 - RNA, 17 nt, Human
aucuugaccaagcagga

SEQ ID NO: 2550918 - RNA, 19 nt, Human
aucuugaccaagcaggaag

SEQ ID NO: 2550919 - RNA, 21 nt, Human
aucuugaccaagcaggaagcu

SEQ ID NO: 2550920 - RNA, 22 nt, Human
aucuugaccaagcaggaagcuc

SEQ ID NO: 2550921 - RNA, 18 nt, Human
aucuugaauuguaaggaa

SEQ ID NO: 2550922 - RNA, 19 nt, Human
aucuugcucugcugacaga

SEQ ID NO: 2550923 - RNA, 17 nt, Human
aucuugcucugcugaca

SEQ ID NO: 2550924 - RNA, 17 nt, Human
aucuugcucuguaaucu

SEQ ID NO: 2550925 - RNA, 16 nt, Human
aucuugcucuguaauc

SEQ ID NO: 2550926 - RNA, 15 nt, Human
aucuugcucuguaau

SEQ ID NO: 2550927 - RNA, 14 nt, Human
aucuugcucuguaa

SEQ ID NO: 2550928 - RNA, 15 nt, Human
aucuugcuucccuaa

SEQ ID NO: 2550929 - RNA, 14 nt, Human
aucuugcuucccua

SEQ ID NO: 2550930 - RNA, 21 nt, Human
aucuugaucugcucagcccug

SEQ ID NO: 2550931 - RNA, 20 nt, Human
aucuugaucugcucagcccu

SEQ ID NO: 2550932 - RNA, 22 nt, Human
aucuugaucugcucagcccugg

SEQ ID NO: 2550933 - RNA, 15 nt, Human
aucuugcucugcuug

SEQ ID NO: 2550934 - RNA, 16 nt, Human
aucuugaucugcucag

SEQ ID NO: 2550935 - RNA, 23 nt, Human
aucuugaccaagcaggaagcuca

SEQ ID NO: 2550936 - RNA, 21 nt, Human
aucuugauaccaccuauauag

SEQ ID NO: 2550937 - RNA, 15 nt, Human
aucuguacaaugaac

SEQ ID NO: 2550938 - RNA, 15 nt, Human
aucugguuuugcuau

SEQ ID NO: 2550939 - RNA, 22 nt, Human
aucuguaaacuguguauuccaa

SEQ ID NO: 2550940 - RNA, 14 nt, Human
aucugguuuugcua

SEQ ID NO: 2550941 - RNA, 14 nt, Human
aucuguaaacugug

SEQ ID NO: 2550942 - RNA, 17 nt, Human
aucuguaaacuguguau

SEQ ID NO: 2550943 - RNA, 13 nt, Human
aucuguaaacugu

SEQ ID NO: 2550944 - RNA, 21 nt, Human
aucugguccuacccauccccg

SEQ ID NO: 2550945 - RNA, 14 nt, Human
aucugguccuaccc

SEQ ID NO: 2550946 - RNA, 17 nt, Human
aucugguccuacccauc

SEQ ID NO: 2550947 - RNA, 18 nt, Human
aucugguccuacccaucc

SEQ ID NO: 2550948 - RNA, 17 nt, Human
aucuggucccuugcagc

SEQ ID NO: 2550949 - RNA, 20 nt, Human
aucugguagggggaaaaugu

SEQ ID NO: 2550950 - RNA, 16 nt, Human
aucuguaccucugccu

SEQ ID NO: 2550951 - RNA, 13 nt, Human
aucuguacaauga

SEQ ID NO: 2550952 - RNA, 17 nt, Human
aucuguacuucuucgau

SEQ ID NO: 2550953 - RNA, 23 nt, Human
aucugugaaaggaaagagggagg

SEQ ID NO: 2550954 - RNA, 15 nt, Human
aucuguacguaagaa

SEQ ID NO: 2550955 - RNA, 22 nt, Human
aucugcauuuucaccccacccu

SEQ ID NO: 2550956 - RNA, 23 nt, Human
aucugcauuuucaccccacccuu

SEQ ID NO: 2550957 - RNA, 16 nt, Human
aucugcagucacuucg

SEQ ID NO: 2550958 - RNA, 13 nt, Human
aucugcagucacu

SEQ ID NO: 2550959 - RNA, 19 nt, Human
aucugcauuuucaccccac

SEQ ID NO: 2550960 - RNA, 17 nt, Human
aucuggguucacugcaa

SEQ ID NO: 2550961 - RNA, 19 nt, Human
aucuggguucacugcaacc

SEQ ID NO: 2550962 - RNA, 17 nt, Human
aucugguagauuuuuaa

SEQ ID NO: 2550963 - RNA, 18 nt, Human
uugccgucuaccugaggg

SEQ ID NO: 2550964 - RNA, 15 nt, Human
uugccgucuaccuga

SEQ ID NO: 2550965 - RNA, 19 nt, Human
uugccgucuaccugagggg

SEQ ID NO: 2550966 - RNA, 14 nt, Human
uugccguuauuaaa

SEQ ID NO: 2550967 - RNA, 19 nt, Human
uugccuaauaaacauccuu

SEQ ID NO: 2550968 - RNA, 22 nt, Human
uugccgcgucgcccucccaggc

SEQ ID NO: 2550969 - RNA, 13 nt, Human
uugcauuaaauuc

SEQ ID NO: 2550970 - RNA, 20 nt, Human
uugcauuaaauucacaaacu

SEQ ID NO: 2550971 - RNA, 21 nt, Human
uugcauuaaauucacaaacuu

SEQ ID NO: 2550972 - RNA, 12 nt, Human
uugcauucaaau

SEQ ID NO: 2550973 - RNA, 22 nt, Human
uugcauuaaauucacaaacuuu

SEQ ID NO: 2550974 - RNA, 13 nt, Human
uugcccuguuaaa

SEQ ID NO: 2550975 - RNA, 11 nt, Human
uugcauucaaa

SEQ ID NO: 2550976 - RNA, 21 nt, Human
uugcccugaccucccagcccu

SEQ ID NO: 2550977 - RNA, 18 nt, Human
uugcccugaccucccagc

SEQ ID NO: 2550978 - RNA, 10 nt, Human
uugcccuggu

SEQ ID NO: 2550979 - RNA, 18 nt, Human
uugcccuugcccugaccu

SEQ ID NO: 2550980 - RNA, 17 nt, Human
uugcccuugcccugacc

SEQ ID NO: 2550981 - RNA, 16 nt, Human
uugcccuugcccugac

SEQ ID NO: 2550982 - RNA, 15 nt, Human
uugcccuugcccuga

SEQ ID NO: 2550983 - RNA, 14 nt, Human
uugcccuugcccug

SEQ ID NO: 2550984 - RNA, 19 nt, Human
uugcccuucccugucccuc

SEQ ID NO: 2550985 - RNA, 17 nt, Human
uugcccuucccuguccc

SEQ ID NO: 2550986 - RNA, 14 nt, Human
uugcccuucccugu

SEQ ID NO: 2550987 - RNA, 23 nt, Human
uugcccugguuucacuggcccaa

SEQ ID NO: 2550988 - RNA, 14 nt, Human
uugcccuucacagu

SEQ ID NO: 2550989 - RNA, 16 nt, Human
uugcccuucacagugu

SEQ ID NO: 2550990 - RNA, 13 nt, Human
uugcccuucccug

SEQ ID NO: 2550991 - RNA, 11 nt, Human
uugcccuuccc

SEQ ID NO: 2550992 - RNA, 17 nt, Human
uugcccuucacaguguu

SEQ ID NO: 2550993 - RNA, 18 nt, Human
uugcccuucacaguguuu

SEQ ID NO: 2550994 - RNA, 13 nt, Human
uugccgucuaccu

SEQ ID NO: 2550995 - RNA, 18 nt, Human
uugccgcgucgcccuccc

SEQ ID NO: 2550996 - RNA, 21 nt, Human
uugccgcgucgcccucccagg

SEQ ID NO: 2550997 - RNA, 21 nt, Human
aucugagggaggaggccaccu

SEQ ID NO: 2550998 - RNA, 20 nt, Human
aucugagggaggaggccacc

SEQ ID NO: 2550999 - RNA, 19 nt, Human
aucugagggaggaggccac

SEQ ID NO: 2551000 - RNA, 16 nt, Human
aucugagggaggaggc

SEQ ID NO: 2551001 - RNA, 23 nt, Human
aucugagggaggaggccaccucu

SEQ ID NO: 2551002 - RNA, 22 nt, Human
aucugagggaggaggccaccuc

SEQ ID NO: 2551003 - RNA, 14 nt, Human
aucugagggaggag

SEQ ID NO: 2551004 - RNA, 24 nt, Human
uugccuauucccacaccuccacag

SEQ ID NO: 2551005 - RNA, 17 nt, Human
uugccuacuaugccaga

SEQ ID NO: 2551006 - RNA, 21 nt, Human
uugccucagucccccaacaga

SEQ ID NO: 2551007 - RNA, 20 nt, Human
uugccuccccauuucccauc

SEQ ID NO: 2551008 - RNA, 17 nt, Human
uugccuccccauuuccc

SEQ ID NO: 2551009 - RNA, 22 nt, Human
aucugagcaagagcuggcaaag

SEQ ID NO: 2551010 - RNA, 17 nt, Human
aucugagcaagagcugg

SEQ ID NO: 2551011 - RNA, 21 nt, Human
uugccuccccauuucccaucu

SEQ ID NO: 2551012 - RNA, 20 nt, Human
aucugagaggccacagugca

SEQ ID NO: 2551013 - RNA, 22 nt, Human
aucugcagaaggaaaaaugugu

SEQ ID NO: 2551014 - RNA, 20 nt, Human
aucugcagaaggaaaaaugu

SEQ ID NO: 2551015 - RNA, 14 nt, Human
aucugcagaaggaa

SEQ ID NO: 2551016 - RNA, 13 nt, Human
aucugcagaagga

SEQ ID NO: 2551017 - RNA, 11 nt, Human
aucugcagaag

SEQ ID NO: 2551018 - RNA, 23 nt, Human
aucugcaccccuucucuccuccc

SEQ ID NO: 2551019 - RNA, 22 nt, Human
aucugcaccccuucucuccucc

SEQ ID NO: 2551020 - RNA, 21 nt, Human
aucugcaccccuucucuccuc

SEQ ID NO: 2551021 - RNA, 16 nt, Human
aucugcaggcagacac

SEQ ID NO: 2551022 - RNA, 15 nt, Human
aucugcaggcagaca

SEQ ID NO: 2551023 - RNA, 14 nt, Human
aucugcaggcagac

SEQ ID NO: 2551024 - RNA, 23 nt, Human
aucugcagaaggaaaaaugugua

SEQ ID NO: 2551025 - RNA, 19 nt, Human
aucugcaggcagacacgga

SEQ ID NO: 2551026 - RNA, 17 nt, Human
aucugcaggcagacacg

SEQ ID NO: 2551027 - RNA, 20 nt, Human
aucugcagggggugugucug

SEQ ID NO: 2551028 - RNA, 10 nt, Human
aucugcaccc

SEQ ID NO: 2551029 - RNA, 15 nt, Human
aucugcaccccccug

SEQ ID NO: 2551030 - RNA, 17 nt, Human
aucugcaccccccuggg

SEQ ID NO: 2551031 - RNA, 18 nt, Human
aucugcaccccccugggc

SEQ ID NO: 2551032 - RNA, 19 nt, Human
aucugcaccccccugggcu

SEQ ID NO: 2551033 - RNA, 20 nt, Human
aucugcaccccuucucuccu

SEQ ID NO: 2551034 - RNA, 18 nt, Human
aucugcaccccuucucuc

SEQ ID NO: 2551035 - RNA, 17 nt, Human
aucugcaccccuucucu

SEQ ID NO: 2551036 - RNA, 21 nt, Human
aucugcaccccccugggcuga

SEQ ID NO: 2551037 - RNA, 21 nt, Human
aucugcacccucgaugaagcc

SEQ ID NO: 2551038 - RNA, 17 nt, Human
aucugauugugauguga

SEQ ID NO: 2551039 - RNA, 19 nt, Human
aucugauuuguuuuccucu

SEQ ID NO: 2551040 - RNA, 17 nt, Human
aucugauggcuucucca

SEQ ID NO: 2551041 - RNA, 14 nt, Human
aucugauggcuucu

SEQ ID NO: 2551042 - RNA, 19 nt, Human
aucugauuggacauuuucu

SEQ ID NO: 2551043 - RNA, 18 nt, Human
aucugauuggacauuuuc

SEQ ID NO: 2551044 - RNA, 18 nt, Human
aucugauggcuucuccag

SEQ ID NO: 2551045 - RNA, 18 nt, Human
aucugaugcaagcaagaa

SEQ ID NO: 2551046 - RNA, 13 nt, Human
caacaggcugggc

SEQ ID NO: 2551047 - RNA, 18 nt, Human
caaaaucgauuggcuuua

SEQ ID NO: 2551048 - RNA, 12 nt, Human
caaaauccccuu

SEQ ID NO: 2551049 - RNA, 20 nt, Human
caaaauccuugcuuaugaca

SEQ ID NO: 2551050 - RNA, 21 nt, Human
caaaaucgaugcagugcuucc

SEQ ID NO: 2551051 - RNA, 22 nt, Human
caaaaucauuuuauaugucaaa

SEQ ID NO: 2551052 - RNA, 23 nt, Human
caaaaucauuuuauaugucaaag

SEQ ID NO: 2551053 - RNA, 16 nt, Human
caaaauccccuucuca

SEQ ID NO: 2551054 - RNA, 16 nt, Human
caaaauccuugcuuau

SEQ ID NO: 2551055 - RNA, 23 nt, Human
caaaaucauggaaugguuauaaa

SEQ ID NO: 2551056 - RNA, 19 nt, Human
caaaaucauuuuauauguc

SEQ ID NO: 2551057 - RNA, 16 nt, Human
caaaaucauuuuaaug

SEQ ID NO: 2551058 - RNA, 12 nt, Human
caaaauauuuuc

SEQ ID NO: 2551059 - RNA, 17 nt, Human
caaaauauuuguacaua

SEQ ID NO: 2551060 - RNA, 17 nt, Human
caaaauauuuuuauaga

SEQ ID NO: 2551061 - RNA, 16 nt, Human
caaaauauuuguacau

SEQ ID NO: 2551062 - RNA, 23 nt, Human
caaaauauuaugcaaacuacugu

SEQ ID NO: 2551063 - RNA, 14 nt, Human
caaaauauguucuu

SEQ ID NO: 2551064 - RNA, 13 nt, Human
caaaauagagaau

SEQ ID NO: 2551065 - RNA, 13 nt, Human
caaaauagaagcu

SEQ ID NO: 2551066 - RNA, 16 nt, Human
caaaauagcauuuguu

SEQ ID NO: 2551067 - RNA, 15 nt, Human
caaaauagcauuugu

SEQ ID NO: 2551068 - RNA, 19 nt, Human
caaaauauguugaugaaaa

SEQ ID NO: 2551069 - RNA, 22 nt, Human
caaaauaagaaaagauguagau

SEQ ID NO: 2551070 - RNA, 22 nt, Human
caaaauaauuuuaagaaaucaa

SEQ ID NO: 2551071 - RNA, 18 nt, Human
caaaauaauuuuaagaaa

SEQ ID NO: 2551072 - RNA, 16 nt, Human
caaaauaagaaaagau

SEQ ID NO: 2551073 - RNA, 18 nt, Human
caaaauaagaaaagaugu

SEQ ID NO: 2551074 - RNA, 20 nt, Human
caaaauaaaacuuuuuaaaa

SEQ ID NO: 2551075 - RNA, 14 nt, Human
caaaauaagaaaag

SEQ ID NO: 2551076 - RNA, 15 nt, Human
caaaauaagaaaaga

SEQ ID NO: 2551077 - RNA, 14 nt, Human
caaaauaaauguug

SEQ ID NO: 2551078 - RNA, 16 nt, Human
caaaauaaaacuuuuu

SEQ ID NO: 2551079 - RNA, 17 nt, Human
caaaaguuuuccugaga

SEQ ID NO: 2551080 - RNA, 15 nt, Human
caaaaguuuuccuga

SEQ ID NO: 2551081 - RNA, 11 nt, Human
caaaauaaaaa

SEQ ID NO: 2551082 - RNA, 15 nt, Human
caaaauaaaaaccaa

SEQ ID NO: 2551083 - RNA, 17 nt, Human
caaaacugcacugucaa

SEQ ID NO: 2551084 - RNA, 18 nt, Human
caaaacugcacugucaag

SEQ ID NO: 2551085 - RNA, 14 nt, Human
caaaacugcacugu

SEQ ID NO: 2551086 - RNA, 19 nt, Human
caaaacucuacuuaaucca

SEQ ID NO: 2551087 - RNA, 11 nt, Human
caaaacucuac

SEQ ID NO: 2551088 - RNA, 19 nt, Human
caaaacucuccucugcugc

SEQ ID NO: 2551089 - RNA, 17 nt, Human
caaaaguuagcugagcg

SEQ ID NO: 2551090 - RNA, 23 nt, Human
caaaacucuccucugcugcuggc

SEQ ID NO: 2551091 - RNA, 18 nt, Human
caaaaguucugacuugac

SEQ ID NO: 2551092 - RNA, 17 nt, Human
caaaaguucugacuuga

SEQ ID NO: 2551093 - RNA, 15 nt, Human
caaaaguucugacuu

SEQ ID NO: 2551094 - RNA, 18 nt, Human
caaaaguuucauccuuuu

SEQ ID NO: 2551095 - RNA, 14 nt, Human
caaaaguuucucuu

SEQ ID NO: 2551096 - RNA, 16 nt, Human
caaaacucuccucugc

SEQ ID NO: 2551097 - RNA, 15 nt, Human
caaaacucuccucug

SEQ ID NO: 2551098 - RNA, 21 nt, Human
caaaacuccugccccuguucu

SEQ ID NO: 2551099 - RNA, 20 nt, Human
caaaacucaaaugcuuggcu

SEQ ID NO: 2551100 - RNA, 16 nt, Human
caaaacuccugucuuu

SEQ ID NO: 2551101 - RNA, 21 nt, Human
caaaacucauuuccuauguaa

SEQ ID NO: 2551102 - RNA, 15 nt, Human
caaaacgucuuauug

SEQ ID NO: 2551103 - RNA, 14 nt, Human
caaaacgucuuauu

SEQ ID NO: 2551104 - RNA, 13 nt, Human
caaaacgucuuau

SEQ ID NO: 2551105 - RNA, 13 nt, Human
caaaacggggcag

SEQ ID NO: 2551106 - RNA, 18 nt, Human
auuuuauuuuauuaugca

SEQ ID NO: 2551107 - RNA, 19 nt, Human
caaaacgcauggagugugu

SEQ ID NO: 2551108 - RNA, 23 nt, Human
caaaacgcauggaguguguauug

SEQ ID NO: 2551109 - RNA, 15 nt, Human
caaaacgguuuuacu

SEQ ID NO: 2551110 - RNA, 21 nt, Human
caaaacgguuuuacugcagcu

SEQ ID NO: 2551111 - RNA, 18 nt, Human
caaacucugcugucuaac

SEQ ID NO: 2551112 - RNA, 13 nt, Human
caaacucugcugu

SEQ ID NO: 2551113 - RNA, 12 nt, Human
caaacucugcug

SEQ ID NO: 2551114 - RNA, 17 nt, Human
caaacugaagcagccuc

SEQ ID NO: 2551115 - RNA, 21 nt, Human
caaacucuugaccucagguga

SEQ ID NO: 2551116 - RNA, 16 nt, Human
caaacugacucuuaag

SEQ ID NO: 2551117 - RNA, 23 nt, Human
caaacugaagcagccucucccca

SEQ ID NO: 2551118 - RNA, 14 nt, Human
caaacugaagccag

SEQ ID NO: 2551119 - RNA, 21 nt, Human
caaacugaaugaaacccccac

SEQ ID NO: 2551120 - RNA, 15 nt, Human
caaacugaagccaga

SEQ ID NO: 2551121 - RNA, 21 nt, Human
caaacugacucuuaagaagac

SEQ ID NO: 2551122 - RNA, 17 nt, Human
caaacugacucuuaaga

SEQ ID NO: 2551123 - RNA, 22 nt, Human
caaacugaaugaaacccccaca

SEQ ID NO: 2551124 - RNA, 15 nt, Human
caaaccugccugggu

SEQ ID NO: 2551125 - RNA, 14 nt, Human
caaaccugccuggg

SEQ ID NO: 2551126 - RNA, 13 nt, Human
caaaccugccugg

SEQ ID NO: 2551127 - RNA, 21 nt, Human
caaaccugcaagggcucccca

SEQ ID NO: 2551128 - RNA, 19 nt, Human
caaaccuguuuaaauauuu

SEQ ID NO: 2551129 - RNA, 16 nt, Human
caaaccugccuggguu

SEQ ID NO: 2551130 - RNA, 19 nt, Human
caaaccugaccccugcuca

SEQ ID NO: 2551131 - RNA, 20 nt, Human
caaaccugaccccugcucag

SEQ ID NO: 2551132 - RNA, 19 nt, Human
caaaccugcaagggcuccc

SEQ ID NO: 2551133 - RNA, 23 nt, Human
caaaccucuguucaguguaaaua

SEQ ID NO: 2551134 - RNA, 12 nt, Human
caaaccugccug

SEQ ID NO: 2551135 - RNA, 18 nt, Human
caaaccuuuauuuuagaa

SEQ ID NO: 2551136 - RNA, 20 nt, Human
caaaccuuuauuuuagaauu

SEQ ID NO: 2551137 - RNA, 22 nt, Human
caaaccuguuuaaauauuucaa

SEQ ID NO: 2551138 - RNA, 21 nt, Human
caaaccuguuuaaauauuuca

SEQ ID NO: 2551139 - RNA, 16 nt, Human
caaaccuugaugugcc

SEQ ID NO: 2551140 - RNA, 20 nt, Human
caaacucuugaccucaggug

SEQ ID NO: 2551141 - RNA, 19 nt, Human
caaacucuugaccucaggu

SEQ ID NO: 2551142 - RNA, 17 nt, Human
caaacucuugaccucag

SEQ ID NO: 2551143 - RNA, 16 nt, Human
caaacucugccagcca

SEQ ID NO: 2551144 - RNA, 14 nt, Human
caaacucucugaac

SEQ ID NO: 2551145 - RNA, 22 nt, Human
caaaaugaaacgcaaccaccac

SEQ ID NO: 2551146 - RNA, 11 nt, Human
caaaaugaaac

SEQ ID NO: 2551147 - RNA, 18 nt, Human
caaaaugaggaauguaua

SEQ ID NO: 2551148 - RNA, 17 nt, Human
caaaaugaggaauguau

SEQ ID NO: 2551149 - RNA, 22 nt, Human
caaaaugagagggcaguguuuc

SEQ ID NO: 2551150 - RNA, 21 nt, Human
caaaaugagcccuguccugcc

SEQ ID NO: 2551151 - RNA, 13 nt, Human
caaaaucugucca

SEQ ID NO: 2551152 - RNA, 21 nt, Human
caaaaucuguccaaaggaggc

SEQ ID NO: 2551153 - RNA, 14 nt, Human
caaaauuucuauua

SEQ ID NO: 2551154 - RNA, 20 nt, Human
caaaauuuccaguaccuuug

SEQ ID NO: 2551155 - RNA, 12 nt, Human
caaaauuugaaa

SEQ ID NO: 2551156 - RNA, 19 nt, Human
caaaauuugaugccaggac

SEQ ID NO: 2551157 - RNA, 11 nt, Human
caaaauuuguu

SEQ ID NO: 2551158 - RNA, 14 nt, Human
caaaauuugaaauu

SEQ ID NO: 2551159 - RNA, 20 nt, Human
caaaaugaggaauguauaug

SEQ ID NO: 2551160 - RNA, 19 nt, Human
caaaaugaggaauguauau

SEQ ID NO: 2551161 - RNA, 14 nt, Human
caaaauuuccagua

SEQ ID NO: 2551162 - RNA, 15 nt, Human
caaaauuuccaguac

SEQ ID NO: 2551163 - RNA, 17 nt, Human
caaaauuuccaguaccu

SEQ ID NO: 2551164 - RNA, 18 nt, Human
caaaauuuccaguaccuu

SEQ ID NO: 2551165 - RNA, 19 nt, Human
caaaauuuccaguaccuuu

SEQ ID NO: 2551166 - RNA, 16 nt, Human
caaacaaaaagguucu

SEQ ID NO: 2551167 - RNA, 23 nt, Human
caaaauuuuauagcucaguuuau

SEQ ID NO: 2551168 - RNA, 18 nt, Human
caaaauuuuauuccuaua

SEQ ID NO: 2551169 - RNA, 13 nt, Human
caaaauuuguuug

SEQ ID NO: 2551170 - RNA, 21 nt, Human
caaaauuuuauagcucaguuu

SEQ ID NO: 2551171 - RNA, 13 nt, Human
caaaauuuuauuc

SEQ ID NO: 2551172 - RNA, 14 nt, Human
caaaauuuuauucc

SEQ ID NO: 2551173 - RNA, 17 nt, Human
caaacaaauaugcaaaa

SEQ ID NO: 2551174 - RNA, 20 nt, Human
caaacaaagccagaagcuga

SEQ ID NO: 2551175 - RNA, 15 nt, Human
caaacaaauaugcaa

SEQ ID NO: 2551176 - RNA, 14 nt, Human
caaacaaauaugca

SEQ ID NO: 2551177 - RNA, 21 nt, Human
caaacaaaaagguucucaggu

SEQ ID NO: 2551178 - RNA, 20 nt, Human
caaacaaaaagguucucagg

SEQ ID NO: 2551179 - RNA, 14 nt, Human
caaacaaaauuucu

SEQ ID NO: 2551180 - RNA, 18 nt, Human
caaacaaaauuucuauua

SEQ ID NO: 2551181 - RNA, 15 nt, Human
caaacaaaauuucua

SEQ ID NO: 2551182 - RNA, 13 nt, Human
caaacaaagccag

SEQ ID NO: 2551183 - RNA, 14 nt, Human
caaacaaagccaga

SEQ ID NO: 2551184 - RNA, 16 nt, Human
caaacaaagccagaag

SEQ ID NO: 2551185 - RNA, 21 nt, Human
caaacaccuuccagcuccugu

SEQ ID NO: 2551186 - RNA, 14 nt, Human
caaacaccuuccag

SEQ ID NO: 2551187 - RNA, 20 nt, Human
caaacacugcaggcaucaca

SEQ ID NO: 2551188 - RNA, 14 nt, Human
caaacaccucccag

SEQ ID NO: 2551189 - RNA, 15 nt, Human
caaacaccucccagg

SEQ ID NO: 2551190 - RNA, 12 nt, Human
caaacaccuucc

SEQ ID NO: 2551191 - RNA, 15 nt, Human
caaacaccuggacuu

SEQ ID NO: 2551192 - RNA, 13 nt, Human
caaacagaggccg

SEQ ID NO: 2551193 - RNA, 15 nt, Human
caaacagaggccgcc

SEQ ID NO: 2551194 - RNA, 20 nt, Human
caaaccucuguucaguguaa

SEQ ID NO: 2551195 - RNA, 15 nt, Human
caagauauggacaca

SEQ ID NO: 2551196 - RNA, 13 nt, Human
caacuaacaagaa

SEQ ID NO: 2551197 - RNA, 17 nt, Human
caagaaaugaaagcagg

SEQ ID NO: 2551198 - RNA, 19 nt, Human
caagaaaugaaagcaggga

SEQ ID NO: 2551199 - RNA, 15 nt, Human
caagaaaugaaagca

SEQ ID NO: 2551200 - RNA, 23 nt, Human
caacuuguauuaaagacagaggc

SEQ ID NO: 2551201 - RNA, 17 nt, Human
caacuugucuuuuucug

SEQ ID NO: 2551202 - RNA, 13 nt, Human
caagaagcccagg

SEQ ID NO: 2551203 - RNA, 20 nt, Human
caagaagcaggcuacacuga

SEQ ID NO: 2551204 - RNA, 14 nt, Human
caagaagcccagga

SEQ ID NO: 2551205 - RNA, 23 nt, Human
caagaagaucacgcuccccgccu

SEQ ID NO: 2551206 - RNA, 20 nt, Human
caagaagaucacgcuccccg

SEQ ID NO: 2551207 - RNA, 19 nt, Human
caagaagaucacgcucccc

SEQ ID NO: 2551208 - RNA, 14 nt, Human
caagaagcaggcua

SEQ ID NO: 2551209 - RNA, 13 nt, Human
caagaagcaggcu

SEQ ID NO: 2551210 - RNA, 21 nt, Human
caagaagaucacgcuccccgc

SEQ ID NO: 2551211 - RNA, 18 nt, Human
caagaagaucacgcuccc

SEQ ID NO: 2551212 - RNA, 21 nt, Human
caagaagaccagacuguggag

SEQ ID NO: 2551213 - RNA, 13 nt, Human
caagaagaccaga

SEQ ID NO: 2551214 - RNA, 19 nt, Human
caacuugucuuuuucugga

SEQ ID NO: 2551215 - RNA, 22 nt, Human
caacuuguaaauacaccaccuc

SEQ ID NO: 2551216 - RNA, 16 nt, Human
caacuuguaaauacac

SEQ ID NO: 2551217 - RNA, 13 nt, Human
caacuuguaaaua

SEQ ID NO: 2551218 - RNA, 16 nt, Human
caacuuguaaaugugg

SEQ ID NO: 2551219 - RNA, 17 nt, Human
caacuuggcuuucccgg

SEQ ID NO: 2551220 - RNA, 13 nt, Human
caacuuggcuuuc

SEQ ID NO: 2551221 - RNA, 12 nt, Human
caacuuggcuuu

SEQ ID NO: 2551222 - RNA, 19 nt, Human
caacuuggcuuccuuucuu

SEQ ID NO: 2551223 - RNA, 12 nt, Human
caacuugggaac

SEQ ID NO: 2551224 - RNA, 18 nt, Human
caacuuggcuuccuuucu

SEQ ID NO: 2551225 - RNA, 18 nt, Human
caacguggggcagcacag

SEQ ID NO: 2551226 - RNA, 13 nt, Human
caacgacaaagcc

SEQ ID NO: 2551227 - RNA, 18 nt, Human
caacgugcauugugcuuc

SEQ ID NO: 2551228 - RNA, 17 nt, Human
caacgugcauugugcuu

SEQ ID NO: 2551229 - RNA, 14 nt, Human
caacguggcccaga

SEQ ID NO: 2551230 - RNA, 13 nt, Human
caacguggcccag

SEQ ID NO: 2551231 - RNA, 21 nt, Human
caacguggcccagagaagcca

SEQ ID NO: 2551232 - RNA, 20 nt, Human
caacguggcccagagaagcc

SEQ ID NO: 2551233 - RNA, 19 nt, Human
caacguggcccagagaagc

SEQ ID NO: 2551234 - RNA, 17 nt, Human
caacguggcccagagaa

SEQ ID NO: 2551235 - RNA, 17 nt, Human
caacguggggcagcaca

SEQ ID NO: 2551236 - RNA, 15 nt, Human
caacguggggcagca

SEQ ID NO: 2551237 - RNA, 12 nt, Human
caacguggggca

SEQ ID NO: 2551238 - RNA, 15 nt, Human
caagacgcugugcug

SEQ ID NO: 2551239 - RNA, 13 nt, Human
caagacgcugugc

SEQ ID NO: 2551240 - RNA, 23 nt, Human
caagaccuucuccuucaccuuug

SEQ ID NO: 2551241 - RNA, 21 nt, Human
caagaccuucuccuucaccuu

SEQ ID NO: 2551242 - RNA, 13 nt, Human
caagagagauguu

SEQ ID NO: 2551243 - RNA, 15 nt, Human
caagagagauguuuu

SEQ ID NO: 2551244 - RNA, 14 nt, Human
caagagagaaagaa

SEQ ID NO: 2551245 - RNA, 17 nt, Human
caagagagaaagaagua

SEQ ID NO: 2551246 - RNA, 16 nt, Human
caagagaugggaauga

SEQ ID NO: 2551247 - RNA, 23 nt, Human
caagagaugaagagugagagggc

SEQ ID NO: 2551248 - RNA, 13 nt, Human
caagagacaugcu

SEQ ID NO: 2551249 - RNA, 22 nt, Human
caagagaauugcuugaacccag

SEQ ID NO: 2551250 - RNA, 12 nt, Human
caagagacucug

SEQ ID NO: 2551251 - RNA, 13 nt, Human
caagagagaaaga

SEQ ID NO: 2551252 - RNA, 20 nt, Human
caagagccauguagaagcug

SEQ ID NO: 2551253 - RNA, 16 nt, Human
caagagcacacuuggc

SEQ ID NO: 2551254 - RNA, 21 nt, Human
caagagcagccuguggcaucu

SEQ ID NO: 2551255 - RNA, 18 nt, Human
caagagcagccuguggca

SEQ ID NO: 2551256 - RNA, 20 nt, Human
caagagcagccuguggcauc

SEQ ID NO: 2551257 - RNA, 14 nt, Human
caagagcacacuug

SEQ ID NO: 2551258 - RNA, 13 nt, Human
caagagcacacuu

SEQ ID NO: 2551259 - RNA, 15 nt, Human
caagagauuuaauua

SEQ ID NO: 2551260 - RNA, 15 nt, Human
caagagcagaggcag

SEQ ID NO: 2551261 - RNA, 16 nt, Human
caagagcagaggcagc

SEQ ID NO: 2551262 - RNA, 14 nt, Human
caagagcagccugu

SEQ ID NO: 2551263 - RNA, 15 nt, Human
caagagcagccugug

SEQ ID NO: 2551264 - RNA, 16 nt, Human
caagagcagccugugg

SEQ ID NO: 2551265 - RNA, 17 nt, Human
caagagcagccuguggc

SEQ ID NO: 2551266 - RNA, 18 nt, Human
caagagcugcccuccuug

SEQ ID NO: 2551267 - RNA, 16 nt, Human
caagagcugcccuccu

SEQ ID NO: 2551268 - RNA, 20 nt, Human
caagagcugcccuccuuguc

SEQ ID NO: 2551269 - RNA, 17 nt, Human
caagagcuuaacagugu

SEQ ID NO: 2551270 - RNA, 22 nt, Human
caagagccuugguguccaccug

SEQ ID NO: 2551271 - RNA, 21 nt, Human
caagagccauguagaagcugc

SEQ ID NO: 2551272 - RNA, 13 nt, Human
caagagcccagca

SEQ ID NO: 2551273 - RNA, 19 nt, Human
caagagcccagcagggccu

SEQ ID NO: 2551274 - RNA, 23 nt, Human
caagagccuugguguccaccugg

SEQ ID NO: 2551275 - RNA, 14 nt, Human
caagagcugcccuc

SEQ ID NO: 2551276 - RNA, 13 nt, Human
caagagcugcccu

SEQ ID NO: 2551277 - RNA, 18 nt, Human
caagagcgaaacuccguc

SEQ ID NO: 2551278 - RNA, 12 nt, Human
caagagcugagg

SEQ ID NO: 2551279 - RNA, 13 nt, Human
caaauaugcaaag

SEQ ID NO: 2551280 - RNA, 20 nt, Human
caaauauuuauuuucuuucu

SEQ ID NO: 2551281 - RNA, 15 nt, Human
caaauauuuuuuugu

SEQ ID NO: 2551282 - RNA, 13 nt, Human
caaauauuuggag

SEQ ID NO: 2551283 - RNA, 15 nt, Human
caaaucaaagcagau

SEQ ID NO: 2551284 - RNA, 14 nt, Human
caaaucaaagcaga

SEQ ID NO: 2551285 - RNA, 17 nt, Human
caaauauuuuuuuguag

SEQ ID NO: 2551286 - RNA, 13 nt, Human
caaaucaaagcag

SEQ ID NO: 2551287 - RNA, 15 nt, Human
caaaucaauacacua

SEQ ID NO: 2551288 - RNA, 14 nt, Human
caaaucaauacacu

SEQ ID NO: 2551289 - RNA, 15 nt, Human
caaaucaagcuucag

SEQ ID NO: 2551290 - RNA, 14 nt, Human
caaaucaagcuuca

SEQ ID NO: 2551291 - RNA, 23 nt, Human
caaauauauucagccuggcuuca

SEQ ID NO: 2551292 - RNA, 17 nt, Human
caaauaaacucuaaaca

SEQ ID NO: 2551293 - RNA, 20 nt, Human
caaauaaacacuguguaagc

SEQ ID NO: 2551294 - RNA, 18 nt, Human
caaauaaacucuaaacau

SEQ ID NO: 2551295 - RNA, 17 nt, Human
caaauaaagucccaggu

SEQ ID NO: 2551296 - RNA, 12 nt, Human
caaauaugcaaa

SEQ ID NO: 2551297 - RNA, 17 nt, Human
caaaucaauacacuagu

SEQ ID NO: 2551298 - RNA, 16 nt, Human
caaaucaauuacuggu

SEQ ID NO: 2551299 - RNA, 23 nt, Human
caaauggaaaugggcagagcaga

SEQ ID NO: 2551300 - RNA, 19 nt, Human
caaauggaagacacauuga

SEQ ID NO: 2551301 - RNA, 15 nt, Human
caaauggaagacaca

SEQ ID NO: 2551302 - RNA, 18 nt, Human
caaauggcgucuggaagu

SEQ ID NO: 2551303 - RNA, 14 nt, Human
caaauggaggaaua

SEQ ID NO: 2551304 - RNA, 14 nt, Human
caaauguucaucaa

SEQ ID NO: 2551305 - RNA, 19 nt, Human
caaauggcgucuggaaguc

SEQ ID NO: 2551306 - RNA, 21 nt, Human
caaauggcgucuggaagucca

SEQ ID NO: 2551307 - RNA, 13 nt, Human
caaauguuaugca

SEQ ID NO: 2551308 - RNA, 18 nt, Human
caaauguucaucaaugaa

SEQ ID NO: 2551309 - RNA, 22 nt, Human
caaauggcgucuggaaguccaa

SEQ ID NO: 2551310 - RNA, 21 nt, Human
caaauguuaugcauaaaguca

SEQ ID NO: 2551311 - RNA, 15 nt, Human
caaauuaauuggcag

SEQ ID NO: 2551312 - RNA, 15 nt, Human
caaaguuaacagauu

SEQ ID NO: 2551313 - RNA, 11 nt, Human
caaaguguuaa

SEQ ID NO: 2551314 - RNA, 17 nt, Human
caaaguguguauuaaaa

SEQ ID NO: 2551315 - RNA, 14 nt, Human
caaaguguguauua

SEQ ID NO: 2551316 - RNA, 13 nt, Human
caaaguguguauu

SEQ ID NO: 2551317 - RNA, 12 nt, Human
caaaguguguau

SEQ ID NO: 2551318 - RNA, 18 nt, Human
caaagugcugggauuaca

SEQ ID NO: 2551319 - RNA, 23 nt, Human
caaagugcugggauuacaagcgu

SEQ ID NO: 2551320 - RNA, 15 nt, Human
caaauaaacacugug

SEQ ID NO: 2551321 - RNA, 14 nt, Human
caaauaaacacugu

SEQ ID NO: 2551322 - RNA, 13 nt, Human
caaauaaacacug

SEQ ID NO: 2551323 - RNA, 12 nt, Human
caaauaaacacu

SEQ ID NO: 2551324 - RNA, 11 nt, Human
caaauaaacac

SEQ ID NO: 2551325 - RNA, 10 nt, Human
caaauaaaau

SEQ ID NO: 2551326 - RNA, 23 nt, Human
caaauaaaauaaaaauaaaaaca

SEQ ID NO: 2551327 - RNA, 18 nt, Human
caaauaaaaauauugugu

SEQ ID NO: 2551328 - RNA, 16 nt, Human
caaauaaaaauauugu

SEQ ID NO: 2551329 - RNA, 16 nt, Human
caaaguuaacagauuu

SEQ ID NO: 2551330 - RNA, 16 nt, Human
caaaguuacuagguaa

SEQ ID NO: 2551331 - RNA, 21 nt, Human
caaaguuacuagguaacuuca

SEQ ID NO: 2551332 - RNA, 20 nt, Human
caaaguucccuacuuccugu

SEQ ID NO: 2551333 - RNA, 15 nt, Human
caaauaaaaauauug

SEQ ID NO: 2551334 - RNA, 19 nt, Human
caaagugcugggauuacaa

SEQ ID NO: 2551335 - RNA, 13 nt, Human
caaagugcuggga

SEQ ID NO: 2551336 - RNA, 18 nt, Human
caaagagccuggagaagc

SEQ ID NO: 2551337 - RNA, 17 nt, Human
caaagagccuggagaag

SEQ ID NO: 2551338 - RNA, 16 nt, Human
caaagagccuggagaa

SEQ ID NO: 2551339 - RNA, 15 nt, Human
caaagagccuggaga

SEQ ID NO: 2551340 - RNA, 13 nt, Human
caaagagccugga

SEQ ID NO: 2551341 - RNA, 18 nt, Human
caaagagacuggagcauc

SEQ ID NO: 2551342 - RNA, 17 nt, Human
caaagagacuggagcau

SEQ ID NO: 2551343 - RNA, 16 nt, Human
caaagagacuggagca

SEQ ID NO: 2551344 - RNA, 19 nt, Human
caaagagagaaaauaaaga

SEQ ID NO: 2551345 - RNA, 15 nt, Human
caaagagaaaacuua

SEQ ID NO: 2551346 - RNA, 14 nt, Human
caaagagacuggag

SEQ ID NO: 2551347 - RNA, 16 nt, Human
caaagagagaaaauaa

SEQ ID NO: 2551348 - RNA, 20 nt, Human
caaagaagacauguuuuaga

SEQ ID NO: 2551349 - RNA, 17 nt, Human
caaagaaggaauucuag

SEQ ID NO: 2551350 - RNA, 13 nt, Human
caaagaagacaug

SEQ ID NO: 2551351 - RNA, 14 nt, Human
caaagaagacaaca

SEQ ID NO: 2551352 - RNA, 16 nt, Human
caaagaagacauguuu

SEQ ID NO: 2551353 - RNA, 14 nt, Human
caaagaagacaugu

SEQ ID NO: 2551354 - RNA, 19 nt, Human
caaagaaggaaaaggcagg

SEQ ID NO: 2551355 - RNA, 11 nt, Human
caaagaagaaa

SEQ ID NO: 2551356 - RNA, 15 nt, Human
caaagaaauuaugug

SEQ ID NO: 2551357 - RNA, 22 nt, Human
caacagcacuggcucucuccag

SEQ ID NO: 2551358 - RNA, 15 nt, Human
caacagcacuggcuc

SEQ ID NO: 2551359 - RNA, 12 nt, Human
caacagcacugg

SEQ ID NO: 2551360 - RNA, 17 nt, Human
caacagcaaaucacgac

SEQ ID NO: 2551361 - RNA, 21 nt, Human
caacagcgacauagcccaucc

SEQ ID NO: 2551362 - RNA, 23 nt, Human
caacagcgacauagcccaucccu

SEQ ID NO: 2551363 - RNA, 15 nt, Human
caacagcucaagucu

SEQ ID NO: 2551364 - RNA, 22 nt, Human
caacagcucaagucuucccuga

SEQ ID NO: 2551365 - RNA, 23 nt, Human
caacagcuccccauuacccucag

SEQ ID NO: 2551366 - RNA, 23 nt, Human
caacaggaaucaagagcugcccu

SEQ ID NO: 2551367 - RNA, 21 nt, Human
caacaggaaucaagagcugcc

SEQ ID NO: 2551368 - RNA, 19 nt, Human
caacaggaaucaagagcug

SEQ ID NO: 2551369 - RNA, 15 nt, Human
caacaggagaauuuu

SEQ ID NO: 2551370 - RNA, 14 nt, Human
caacaggagcuggg

SEQ ID NO: 2551371 - RNA, 15 nt, Human
caacaggagcuggga

SEQ ID NO: 2551372 - RNA, 21 nt, Human
caacaggagcugggauccuaa

SEQ ID NO: 2551373 - RNA, 19 nt, Human
caacauacucccaucugug

SEQ ID NO: 2551374 - RNA, 17 nt, Human
caacauacucccaucug

SEQ ID NO: 2551375 - RNA, 12 nt, Human
caacaggcuggg

SEQ ID NO: 2551376 - RNA, 23 nt, Human
caacaggaggacaauucaugaac

SEQ ID NO: 2551377 - RNA, 22 nt, Human
caacaggaggacaauucaugaa

SEQ ID NO: 2551378 - RNA, 19 nt, Human
caacaggaggacaauucau

SEQ ID NO: 2551379 - RNA, 17 nt, Human
caacaggaggacaauuc

SEQ ID NO: 2551380 - RNA, 16 nt, Human
caacaggaggacaauu

SEQ ID NO: 2551381 - RNA, 15 nt, Human
caacaggaggacaau

SEQ ID NO: 2551382 - RNA, 14 nt, Human
caacaggaggacaa

SEQ ID NO: 2551383 - RNA, 22 nt, Human
caacaggagcugggauccuaag

SEQ ID NO: 2551384 - RNA, 18 nt, Human
caaccugcucuccucuug

SEQ ID NO: 2551385 - RNA, 23 nt, Human
caaccugcucuccucuugccacu

SEQ ID NO: 2551386 - RNA, 21 nt, Human
caaccugcucuccucuugcca

SEQ ID NO: 2551387 - RNA, 20 nt, Human
caacauacucccaucuguga

SEQ ID NO: 2551388 - RNA, 20 nt, Human
caaccuggguccaaauaaaa

SEQ ID NO: 2551389 - RNA, 19 nt, Human
caaccuggguccaaauaaa

SEQ ID NO: 2551390 - RNA, 16 nt, Human
caaccuugagacagcu

SEQ ID NO: 2551391 - RNA, 20 nt, Human
caaccuucuguggcucacag

SEQ ID NO: 2551392 - RNA, 19 nt, Human
caaccuucuguggcucaca

SEQ ID NO: 2551393 - RNA, 17 nt, Human
caaccuucuguggcuca

SEQ ID NO: 2551394 - RNA, 18 nt, Human
caaccuggguccaaauaa

SEQ ID NO: 2551395 - RNA, 17 nt, Human
caaccuggguccaaaua

SEQ ID NO: 2551396 - RNA, 16 nt, Human
caaccuggguccaaau

SEQ ID NO: 2551397 - RNA, 14 nt, Human
caaccuggguccaa

SEQ ID NO: 2551398 - RNA, 13 nt, Human
caaccugggucca

SEQ ID NO: 2551399 - RNA, 11 nt, Human
caaccuggaga

SEQ ID NO: 2551400 - RNA, 20 nt, Human
caaccuggggggcaguggug

SEQ ID NO: 2551401 - RNA, 16 nt, Human
caaccuucuguggcuc

SEQ ID NO: 2551402 - RNA, 16 nt, Human
caaccuggucacagga

SEQ ID NO: 2551403 - RNA, 19 nt, Human
caacagauuugugaacuca

SEQ ID NO: 2551404 - RNA, 17 nt, Human
caacagauuugugaacu

SEQ ID NO: 2551405 - RNA, 16 nt, Human
caacagauuugugaac

SEQ ID NO: 2551406 - RNA, 15 nt, Human
caacagauuugugaa

SEQ ID NO: 2551407 - RNA, 23 nt, Human
caacagauuugugaacucagcca

SEQ ID NO: 2551408 - RNA, 20 nt, Human
caacagauuugugaacucag

SEQ ID NO: 2551409 - RNA, 21 nt, Human
caacagaugcuuuucugucuc

SEQ ID NO: 2551410 - RNA, 15 nt, Human
caacagaugcuuuuc

SEQ ID NO: 2551411 - RNA, 23 nt, Human
caacagaugcuuuucugucucug

SEQ ID NO: 2551412 - RNA, 14 nt, Human
caacagauuuguga

SEQ ID NO: 2551413 - RNA, 13 nt, Human
caacagaucugga

SEQ ID NO: 2551414 - RNA, 14 nt, Human
caacagaucuggaa

SEQ ID NO: 2551415 - RNA, 17 nt, Human
caacagaucuggaaccu

SEQ ID NO: 2551416 - RNA, 23 nt, Human
caacagaucuggaaccucagccu

SEQ ID NO: 2551417 - RNA, 17 nt, Human
caacagaucaauuugua

SEQ ID NO: 2551418 - RNA, 14 nt, Human
caacagauacugga

SEQ ID NO: 2551419 - RNA, 17 nt, Human
caacagauacuggaagu

SEQ ID NO: 2551420 - RNA, 19 nt, Human
caacagagugagacccugu

SEQ ID NO: 2551421 - RNA, 23 nt, Human
caacagagugagacccugucucu

SEQ ID NO: 2551422 - RNA, 15 nt, Human
caacagaagcuucca

SEQ ID NO: 2551423 - RNA, 20 nt, Human
caacagaagucaugaagccc

SEQ ID NO: 2551424 - RNA, 22 nt, Human
caacagaagucaugaagcccaa

SEQ ID NO: 2551425 - RNA, 23 nt, Human
caacagaagucaugaagcccaag

SEQ ID NO: 2551426 - RNA, 12 nt, Human
caacagaagugg

SEQ ID NO: 2551427 - RNA, 18 nt, Human
caacagagaaggcaggaa

SEQ ID NO: 2551428 - RNA, 17 nt, Human
caacagaagcuucagaa

SEQ ID NO: 2551429 - RNA, 17 nt, Human
caacagagaaggcagga

SEQ ID NO: 2551430 - RNA, 23 nt, Human
caacacugugcccugguggagaa

SEQ ID NO: 2551431 - RNA, 19 nt, Human
caacacugugcccuggugg

SEQ ID NO: 2551432 - RNA, 18 nt, Human
caacacugugcccuggug

SEQ ID NO: 2551433 - RNA, 22 nt, Human
caacacugugcccugguggaga

SEQ ID NO: 2551434 - RNA, 12 nt, Human
caacagaagcag

SEQ ID NO: 2551435 - RNA, 16 nt, Human
caacagaagcuucaga

SEQ ID NO: 2551436 - RNA, 15 nt, Human
caacagaagaacugu

SEQ ID NO: 2551437 - RNA, 12 nt, Human
caaauuagaaaa

SEQ ID NO: 2551438 - RNA, 13 nt, Human
caaauuagaaaau

SEQ ID NO: 2551439 - RNA, 18 nt, Human
caaauuagaaaauguuau

SEQ ID NO: 2551440 - RNA, 19 nt, Human
caaauuagaaaauguuauu

SEQ ID NO: 2551441 - RNA, 19 nt, Human
caaauuagaagacauuuau

SEQ ID NO: 2551442 - RNA, 15 nt, Human
caaauuagaagacau

SEQ ID NO: 2551443 - RNA, 22 nt, Human
caaauuagaaaauguuauuuaa

SEQ ID NO: 2551444 - RNA, 21 nt, Human
caaauuagguuuuguacaauu

SEQ ID NO: 2551445 - RNA, 18 nt, Human
caaauuagaagacauuua

SEQ ID NO: 2551446 - RNA, 18 nt, Human
caaauuagguuuuguaca

SEQ ID NO: 2551447 - RNA, 19 nt, Human
caaauuagguuuuguacaa

SEQ ID NO: 2551448 - RNA, 20 nt, Human
caaauuagguuuuguacaau

SEQ ID NO: 2551449 - RNA, 20 nt, Human
caaauuaauuggcagcagau

SEQ ID NO: 2551450 - RNA, 19 nt, Human
caaauuaauuggcagcaga

SEQ ID NO: 2551451 - RNA, 18 nt, Human
caaauuaauuggcagcag

SEQ ID NO: 2551452 - RNA, 21 nt, Human
caaauuacuuugugaauagaa

SEQ ID NO: 2551453 - RNA, 11 nt, Human
caaauuagaaa

SEQ ID NO: 2551454 - RNA, 18 nt, Human
caaauuacuuugugaaua

SEQ ID NO: 2551455 - RNA, 15 nt, Human
caaauuucuaaaucu

SEQ ID NO: 2551456 - RNA, 22 nt, Human
caaauuucuaaaucuccaaaau

SEQ ID NO: 2551457 - RNA, 14 nt, Human
caaauuugauugau

SEQ ID NO: 2551458 - RNA, 19 nt, Human
caaauuugaaaauaauugu

SEQ ID NO: 2551459 - RNA, 17 nt, Human
caaauuugauugauuug

SEQ ID NO: 2551460 - RNA, 22 nt, Human
caaauuugucuugccuuauuaa

SEQ ID NO: 2551461 - RNA, 17 nt, Human
caaauuugucuugccuu

SEQ ID NO: 2551462 - RNA, 19 nt, Human
caaauuuggggguuucuca

SEQ ID NO: 2551463 - RNA, 17 nt, Human
caacacugugcccuggu

SEQ ID NO: 2551464 - RNA, 16 nt, Human
caacacugugcccugg

SEQ ID NO: 2551465 - RNA, 18 nt, Human
caauaggaaaaacugauu

SEQ ID NO: 2551466 - RNA, 22 nt, Human
caauaaaguauuuaauuagugc

SEQ ID NO: 2551467 - RNA, 20 nt, Human
caauaaaguauuuaauuagu

SEQ ID NO: 2551468 - RNA, 23 nt, Human
caagggugaugggaaagcauugu

SEQ ID NO: 2551469 - RNA, 17 nt, Human
caagggucuagggagag

SEQ ID NO: 2551470 - RNA, 16 nt, Human
caaggguggcauccca

SEQ ID NO: 2551471 - RNA, 17 nt, Human
caauaaaguauuuaauu

SEQ ID NO: 2551472 - RNA, 16 nt, Human
caauaaaguauuuaau

SEQ ID NO: 2551473 - RNA, 21 nt, Human
caaggguggcaucccaguggc

SEQ ID NO: 2551474 - RNA, 15 nt, Human
caauaaaugucuguu

SEQ ID NO: 2551475 - RNA, 14 nt, Human
caauaaaugucugu

SEQ ID NO: 2551476 - RNA, 16 nt, Human
caauaaaugucuguug

SEQ ID NO: 2551477 - RNA, 17 nt, Human
caauaaaugugcuuaug

SEQ ID NO: 2551478 - RNA, 18 nt, Human
caauaaaugguauagcaa

SEQ ID NO: 2551479 - RNA, 23 nt, Human
caauaaaugguauagcaaauguu

SEQ ID NO: 2551480 - RNA, 20 nt, Human
caauaaaucugacccagugc

SEQ ID NO: 2551481 - RNA, 12 nt, Human
caauaaaugaau

SEQ ID NO: 2551482 - RNA, 17 nt, Human
caauaaaucugacccag

SEQ ID NO: 2551483 - RNA, 18 nt, Human
caauaaaucugacccagu

SEQ ID NO: 2551484 - RNA, 16 nt, Human
caagggaaccuguguc

SEQ ID NO: 2551485 - RNA, 15 nt, Human
caagggaaccugugu

SEQ ID NO: 2551486 - RNA, 19 nt, Human
caaggguagggugggccuu

SEQ ID NO: 2551487 - RNA, 20 nt, Human
caagggaaaggggugcuuuu

SEQ ID NO: 2551488 - RNA, 16 nt, Human
caagggaaaggggugc

SEQ ID NO: 2551489 - RNA, 14 nt, Human
caagggaaaggggu

SEQ ID NO: 2551490 - RNA, 12 nt, Human
caagggaaaggg

SEQ ID NO: 2551491 - RNA, 16 nt, Human
caagggaaaagucucu

SEQ ID NO: 2551492 - RNA, 21 nt, Human
caagggugaugggaaagcauu

SEQ ID NO: 2551493 - RNA, 16 nt, Human
caagggucuagggaga

SEQ ID NO: 2551494 - RNA, 18 nt, Human
caagggaauguaacugcu

SEQ ID NO: 2551495 - RNA, 21 nt, Human
caagggaaaggggugcuuuua

SEQ ID NO: 2551496 - RNA, 15 nt, Human
caagggaaaagucuc

SEQ ID NO: 2551497 - RNA, 14 nt, Human
caaggcugcgucug

SEQ ID NO: 2551498 - RNA, 18 nt, Human
caaggcugcgguuuguug

SEQ ID NO: 2551499 - RNA, 18 nt, Human
caaggcugcgucuggagg

SEQ ID NO: 2551500 - RNA, 17 nt, Human
caaggcugcgucuggag

SEQ ID NO: 2551501 - RNA, 16 nt, Human
caaggcugcuuagaau

SEQ ID NO: 2551502 - RNA, 18 nt, Human
caaggcugggggaagaag

SEQ ID NO: 2551503 - RNA, 19 nt, Human
caauagucaaauuguguga

SEQ ID NO: 2551504 - RNA, 17 nt, Human
caauagucaaauugugu

SEQ ID NO: 2551505 - RNA, 16 nt, Human
caauagugggcccucc

SEQ ID NO: 2551506 - RNA, 16 nt, Human
caauagucaagaaaaa

SEQ ID NO: 2551507 - RNA, 14 nt, Human
caauaguguguucu

SEQ ID NO: 2551508 - RNA, 15 nt, Human
caauaguguguucug

SEQ ID NO: 2551509 - RNA, 16 nt, Human
caauaguguguucuga

SEQ ID NO: 2551510 - RNA, 17 nt, Human
caauaguguguucugau

SEQ ID NO: 2551511 - RNA, 23 nt, Human
caauaguguguucugauuagaaa

SEQ ID NO: 2551512 - RNA, 17 nt, Human
caauaggaaaaacugau

SEQ ID NO: 2551513 - RNA, 16 nt, Human
caauaggaaaaacuga

SEQ ID NO: 2551514 - RNA, 15 nt, Human
caauaggaaaaacug

SEQ ID NO: 2551515 - RNA, 19 nt, Human
caauagcaacguagcuucu

SEQ ID NO: 2551516 - RNA, 19 nt, Human
caauagcagacaguguuuu

SEQ ID NO: 2551517 - RNA, 15 nt, Human
caauaacacacagcu

SEQ ID NO: 2551518 - RNA, 13 nt, Human
caauaacacuguc

SEQ ID NO: 2551519 - RNA, 14 nt, Human
caauaacuacugug

SEQ ID NO: 2551520 - RNA, 15 nt, Human
caauaacuacugugu

SEQ ID NO: 2551521 - RNA, 16 nt, Human
caauaacuacuguguu

SEQ ID NO: 2551522 - RNA, 17 nt, Human
caauaacuacuguguuc

SEQ ID NO: 2551523 - RNA, 18 nt, Human
caauaacuacuguguucc

SEQ ID NO: 2551524 - RNA, 19 nt, Human
caauaacuacuguguuccu

SEQ ID NO: 2551525 - RNA, 20 nt, Human
caauaacuacuguguuccug

SEQ ID NO: 2551526 - RNA, 21 nt, Human
caauaacuacuguguuccugg

SEQ ID NO: 2551527 - RNA, 20 nt, Human
caauaagaauuuagggagaa

SEQ ID NO: 2551528 - RNA, 18 nt, Human
caauaagcaucaaacucu

SEQ ID NO: 2551529 - RNA, 12 nt, Human
caauaagccuug

SEQ ID NO: 2551530 - RNA, 19 nt, Human
caauaagcaucaaacucuu

SEQ ID NO: 2551531 - RNA, 22 nt, Human
caauaacuacuguguuccuggc

SEQ ID NO: 2551532 - RNA, 18 nt, Human
caauaaggucaaugccag

SEQ ID NO: 2551533 - RNA, 17 nt, Human
caauaaggucaaugcca

SEQ ID NO: 2551534 - RNA, 13 nt, Human
caauaagccuugu

SEQ ID NO: 2551535 - RNA, 19 nt, Human
caauaauaaauauuuuugc

SEQ ID NO: 2551536 - RNA, 20 nt, Human
caauacccaaauccucucca

SEQ ID NO: 2551537 - RNA, 23 nt, Human
caauacccaaauccucuccagcu

SEQ ID NO: 2551538 - RNA, 22 nt, Human
caauacccaaauccucuccagc

SEQ ID NO: 2551539 - RNA, 23 nt, Human
caauacccuuugaauuggacaau

SEQ ID NO: 2551540 - RNA, 17 nt, Human
caauacucauaauguga

SEQ ID NO: 2551541 - RNA, 22 nt, Human
caauacucauaaugugaagugu

SEQ ID NO: 2551542 - RNA, 18 nt, Human
caauacucauaaugugaa

SEQ ID NO: 2551543 - RNA, 23 nt, Human
caauagaaggauguacauuucca

SEQ ID NO: 2551544 - RNA, 23 nt, Human
caauagaaacucaccauguaaaa

SEQ ID NO: 2551545 - RNA, 19 nt, Human
caauagauauuuaccuuuu

SEQ ID NO: 2551546 - RNA, 18 nt, Human
caagcgauucuucugcuu

SEQ ID NO: 2551547 - RNA, 21 nt, Human
caagcugcacccucaggcagg

SEQ ID NO: 2551548 - RNA, 17 nt, Human
caagcgauucuucugcu

SEQ ID NO: 2551549 - RNA, 15 nt, Human
caagcgauucuucug

SEQ ID NO: 2551550 - RNA, 21 nt, Human
caagcuggucccacucagucc

SEQ ID NO: 2551551 - RNA, 13 nt, Human
caagcuggaagca

SEQ ID NO: 2551552 - RNA, 12 nt, Human
caagcuggaagc

SEQ ID NO: 2551553 - RNA, 14 nt, Human
caagcugcaucuag

SEQ ID NO: 2551554 - RNA, 22 nt, Human
caagcugcacccucaggcaggu

SEQ ID NO: 2551555 - RNA, 16 nt, Human
caagauaccuaaaaga

SEQ ID NO: 2551556 - RNA, 16 nt, Human
caagauaacugagaau

SEQ ID NO: 2551557 - RNA, 15 nt, Human
caagauaacugagaa

SEQ ID NO: 2551558 - RNA, 22 nt, Human
caagaguuuauuuccaaauaaa

SEQ ID NO: 2551559 - RNA, 15 nt, Human
caagaggcugaggca

SEQ ID NO: 2551560 - RNA, 15 nt, Human
caagccuggucagcc

SEQ ID NO: 2551561 - RNA, 16 nt, Human
caagccuggucagccc

SEQ ID NO: 2551562 - RNA, 17 nt, Human
caagccuggucagccca

SEQ ID NO: 2551563 - RNA, 18 nt, Human
caagccuggucagcccaa

SEQ ID NO: 2551564 - RNA, 12 nt, Human
caagccugguca

SEQ ID NO: 2551565 - RNA, 18 nt, Human
caagccuguaaucccagc

SEQ ID NO: 2551566 - RNA, 21 nt, Human
caagccuguaaucccagcuac

SEQ ID NO: 2551567 - RNA, 17 nt, Human
caagccuuggcucuacc

SEQ ID NO: 2551568 - RNA, 17 nt, Human
caagcgaggucaacaga

SEQ ID NO: 2551569 - RNA, 20 nt, Human
caagcgaggucaacagagaa

SEQ ID NO: 2551570 - RNA, 20 nt, Human
caaggaaaaaauaacaauga

SEQ ID NO: 2551571 - RNA, 14 nt, Human
caagcugugagaca

SEQ ID NO: 2551572 - RNA, 14 nt, Human
caagcuggaagcac

SEQ ID NO: 2551573 - RNA, 18 nt, Human
caagcugugagacagugg

SEQ ID NO: 2551574 - RNA, 14 nt, Human
caaggagaaacaga

SEQ ID NO: 2551575 - RNA, 16 nt, Human
caaggagaaacagaga

SEQ ID NO: 2551576 - RNA, 18 nt, Human
caaggagaaacagagaca

SEQ ID NO: 2551577 - RNA, 20 nt, Human
caaggagaaacagagacagg

SEQ ID NO: 2551578 - RNA, 20 nt, Human
caaggagacacaacaacucc

SEQ ID NO: 2551579 - RNA, 19 nt, Human
caaggagaaacagagacag

SEQ ID NO: 2551580 - RNA, 18 nt, Human
caaggaaaaaauaacaau

SEQ ID NO: 2551581 - RNA, 23 nt, Human
caagcuggucccacucaguccau

SEQ ID NO: 2551582 - RNA, 22 nt, Human
caagcuggucccacucagucca

SEQ ID NO: 2551583 - RNA, 20 nt, Human
caaggauccugagccagauu

SEQ ID NO: 2551584 - RNA, 17 nt, Human
caaggcugcagugagcc

SEQ ID NO: 2551585 - RNA, 22 nt, Human
caaggcugcagugagccgagau

SEQ ID NO: 2551586 - RNA, 19 nt, Human
caaggauccugagccagau

SEQ ID NO: 2551587 - RNA, 18 nt, Human
caaggauccugagccaga

SEQ ID NO: 2551588 - RNA, 16 nt, Human
caaggagauuuacaac

SEQ ID NO: 2551589 - RNA, 18 nt, Human
caaggagaggaggcaacu

SEQ ID NO: 2551590 - RNA, 15 nt, Human
caaggagaggaggca

SEQ ID NO: 2551591 - RNA, 14 nt, Human
caaggagaggaggc

SEQ ID NO: 2551592 - RNA, 13 nt, Human
caaggagaggagg

SEQ ID NO: 2551593 - RNA, 13 nt, Human
caaggagaugaag

SEQ ID NO: 2551594 - RNA, 23 nt, Human
caaggagaugaagcaaacacauu

SEQ ID NO: 2551595 - RNA, 22 nt, Human
cacaguucaguggcagggcuca

SEQ ID NO: 2551596 - RNA, 15 nt, Human
cacacacgugagaau

SEQ ID NO: 2551597 - RNA, 16 nt, Human
cacacuccaagauaug

SEQ ID NO: 2551598 - RNA, 14 nt, Human
cacacuccagcugg

SEQ ID NO: 2551599 - RNA, 16 nt, Human
cacacucgcccgccca

SEQ ID NO: 2551600 - RNA, 17 nt, Human
cacacuccccugcacug

SEQ ID NO: 2551601 - RNA, 22 nt, Human
cacacuccaagauauggacaca

SEQ ID NO: 2551602 - RNA, 14 nt, Human
cacacuccaucagc

SEQ ID NO: 2551603 - RNA, 15 nt, Human
cacacuccaucagcu

SEQ ID NO: 2551604 - RNA, 17 nt, Human
cacacuccaucagcuua

SEQ ID NO: 2551605 - RNA, 13 nt, Human
cacacugaagaag

SEQ ID NO: 2551606 - RNA, 12 nt, Human
cacagagaaagu

SEQ ID NO: 2551607 - RNA, 17 nt, Human
cacagagcucuccagcu

SEQ ID NO: 2551608 - RNA, 16 nt, Human
cacagagcucuccagc

SEQ ID NO: 2551609 - RNA, 14 nt, Human
cacagagcucucca

SEQ ID NO: 2551610 - RNA, 21 nt, Human
cacagagcucuccagcuccaa

SEQ ID NO: 2551611 - RNA, 18 nt, Human
cacagagcucuccagcuc

SEQ ID NO: 2551612 - RNA, 13 nt, Human
cacagaggaagag

SEQ ID NO: 2551613 - RNA, 21 nt, Human
cacagagaaaguacuucucca

SEQ ID NO: 2551614 - RNA, 20 nt, Human
cacagagaaaguacuucucc

SEQ ID NO: 2551615 - RNA, 19 nt, Human
cacagagaaaguacuucuc

SEQ ID NO: 2551616 - RNA, 23 nt, Human
cacagaugggugcuuggaggaag

SEQ ID NO: 2551617 - RNA, 12 nt, Human
cacagauggauu

SEQ ID NO: 2551618 - RNA, 11 nt, Human
cacagaugccu

SEQ ID NO: 2551619 - RNA, 17 nt, Human
cacagauggauuugccu

SEQ ID NO: 2551620 - RNA, 17 nt, Human
cacagaugaaacacaaa

SEQ ID NO: 2551621 - RNA, 22 nt, Human
cacagaucacagcuucagccag

SEQ ID NO: 2551622 - RNA, 19 nt, Human
cacagaucacagcuucagc

SEQ ID NO: 2551623 - RNA, 14 nt, Human
cacagaucacagcu

SEQ ID NO: 2551624 - RNA, 22 nt, Human
cacagaguuguuacauuuuuaa

SEQ ID NO: 2551625 - RNA, 21 nt, Human
cacagaguuguuacauuuuua

SEQ ID NO: 2551626 - RNA, 18 nt, Human
cacagaggcuucuucaga

SEQ ID NO: 2551627 - RNA, 17 nt, Human
cacagaggaagagcagg

SEQ ID NO: 2551628 - RNA, 15 nt, Human
cacagaggaagagca

SEQ ID NO: 2551629 - RNA, 16 nt, Human
cacagaggaagagcag

SEQ ID NO: 2551630 - RNA, 13 nt, Human
cacagaggcugcc

SEQ ID NO: 2551631 - RNA, 21 nt, Human
cacagcaguugaaaagacucc

SEQ ID NO: 2551632 - RNA, 15 nt, Human
cacagccacacacac

SEQ ID NO: 2551633 - RNA, 17 nt, Human
cacagccacacacacag

SEQ ID NO: 2551634 - RNA, 18 nt, Human
cacagccacacacacaga

SEQ ID NO: 2551635 - RNA, 19 nt, Human
cacagccacacacacagaa

SEQ ID NO: 2551636 - RNA, 20 nt, Human
cacagccacacacacagaaa

SEQ ID NO: 2551637 - RNA, 21 nt, Human
cacagccacacacacagaaaa

SEQ ID NO: 2551638 - RNA, 22 nt, Human
cacagccacacacacagaaaau

SEQ ID NO: 2551639 - RNA, 23 nt, Human
cacagccacacacacagaaaaua

SEQ ID NO: 2551640 - RNA, 13 nt, Human
cacagccaccccu

SEQ ID NO: 2551641 - RNA, 21 nt, Human
cacagcagcuucaccagagca

SEQ ID NO: 2551642 - RNA, 22 nt, Human
cacagcagcuucaccagagcau

SEQ ID NO: 2551643 - RNA, 19 nt, Human
cacagcaguugaaaagacu

SEQ ID NO: 2551644 - RNA, 16 nt, Human
cacagauuugagcuca

SEQ ID NO: 2551645 - RNA, 17 nt, Human
cacagauuugagcucag

SEQ ID NO: 2551646 - RNA, 18 nt, Human
cacagauuugagcucagc

SEQ ID NO: 2551647 - RNA, 22 nt, Human
cacagauuugagcucagcccug

SEQ ID NO: 2551648 - RNA, 17 nt, Human
cacagccagacuggcac

SEQ ID NO: 2551649 - RNA, 18 nt, Human
cacagccagacuggcaca

SEQ ID NO: 2551650 - RNA, 20 nt, Human
cacagcccucccgccccuuc

SEQ ID NO: 2551651 - RNA, 18 nt, Human
cacagcccucccgccccu

SEQ ID NO: 2551652 - RNA, 17 nt, Human
cacagcccucccgcccc

SEQ ID NO: 2551653 - RNA, 15 nt, Human
cacagcccucccgcc

SEQ ID NO: 2551654 - RNA, 13 nt, Human
cacagcccuguca

SEQ ID NO: 2551655 - RNA, 10 nt, Human
cacagcccug

SEQ ID NO: 2551656 - RNA, 11 nt, Human
cacagcccugu

SEQ ID NO: 2551657 - RNA, 14 nt, Human
cacagcccucccgc

SEQ ID NO: 2551658 - RNA, 12 nt, Human
cacagcccuccc

SEQ ID NO: 2551659 - RNA, 11 nt, Human
cacagcccucc

SEQ ID NO: 2551660 - RNA, 20 nt, Human
cacagccgauucaccugagc

SEQ ID NO: 2551661 - RNA, 21 nt, Human
cacagccgauucaccugagca

SEQ ID NO: 2551662 - RNA, 21 nt, Human
cacagcccugucagugcagcc

SEQ ID NO: 2551663 - RNA, 14 nt, Human
cacagcccugucag

SEQ ID NO: 2551664 - RNA, 12 nt, Human
cacagcccuguc

SEQ ID NO: 2551665 - RNA, 18 nt, Human
cacagcccugucagugca

SEQ ID NO: 2551666 - RNA, 21 nt, Human
cacagcucuucuccaggcugu

SEQ ID NO: 2551667 - RNA, 18 nt, Human
cacagcugagagacuuuu

SEQ ID NO: 2551668 - RNA, 23 nt, Human
cacagcccugucagugcagcccg

SEQ ID NO: 2551669 - RNA, 19 nt, Human
cacagcugagagacuuuua

SEQ ID NO: 2551670 - RNA, 19 nt, Human
cacagcugcagagacagag

SEQ ID NO: 2551671 - RNA, 18 nt, Human
cacagcugcagagacaga

SEQ ID NO: 2551672 - RNA, 15 nt, Human
caaugugaacuuuau

SEQ ID NO: 2551673 - RNA, 18 nt, Human
caaugugaacuuuauuaa

SEQ ID NO: 2551674 - RNA, 19 nt, Human
caaugugaacuuuauuaaa

SEQ ID NO: 2551675 - RNA, 21 nt, Human
caaugugaacuuuauuaaaua

SEQ ID NO: 2551676 - RNA, 14 nt, Human
caaugugaacuuua

SEQ ID NO: 2551677 - RNA, 22 nt, Human
caaugugaaaagaaaaaugagc

SEQ ID NO: 2551678 - RNA, 13 nt, Human
caaugugcagugu

SEQ ID NO: 2551679 - RNA, 14 nt, Human
caaugugaaucaga

SEQ ID NO: 2551680 - RNA, 18 nt, Human
caaugugaaucagacccu

SEQ ID NO: 2551681 - RNA, 13 nt, Human
caaugugaccagg

SEQ ID NO: 2551682 - RNA, 19 nt, Human
caaugugaaucagacccua

SEQ ID NO: 2551683 - RNA, 13 nt, Human
caaugugcucucg

SEQ ID NO: 2551684 - RNA, 23 nt, Human
caauguggcaaggaaaaacaggu

SEQ ID NO: 2551685 - RNA, 17 nt, Human
caaugugaccaggggug

SEQ ID NO: 2551686 - RNA, 16 nt, Human
caaugugcuacugauu

SEQ ID NO: 2551687 - RNA, 13 nt, Human
caaugugccccca

SEQ ID NO: 2551688 - RNA, 21 nt, Human
caauaucuuuuuuuuaauaaa

SEQ ID NO: 2551689 - RNA, 16 nt, Human
caauaguuugcauaga

SEQ ID NO: 2551690 - RNA, 12 nt, Human
caauauccuuug

SEQ ID NO: 2551691 - RNA, 20 nt, Human
caauauccuuugccucaagg

SEQ ID NO: 2551692 - RNA, 15 nt, Human
caauauccuuugccu

SEQ ID NO: 2551693 - RNA, 13 nt, Human
caauauccuuugc

SEQ ID NO: 2551694 - RNA, 21 nt, Human
caauguggccuaaaaaugcaa

SEQ ID NO: 2551695 - RNA, 23 nt, Human
caaugugcuacugauuguuucau

SEQ ID NO: 2551696 - RNA, 21 nt, Human
caaugugguugcaaggccgcu

SEQ ID NO: 2551697 - RNA, 17 nt, Human
caauuacaggaaguacu

SEQ ID NO: 2551698 - RNA, 16 nt, Human
caauguuucuuuuauc

SEQ ID NO: 2551699 - RNA, 18 nt, Human
caauguuucuuuuaucac

SEQ ID NO: 2551700 - RNA, 20 nt, Human
caauguuuuccuuugucauc

SEQ ID NO: 2551701 - RNA, 13 nt, Human
caauguuuuccuu

SEQ ID NO: 2551702 - RNA, 22 nt, Human
caauguuuuccuuugucaucau

SEQ ID NO: 2551703 - RNA, 17 nt, Human
caauguuucuucuaggu

SEQ ID NO: 2551704 - RNA, 13 nt, Human
caauguuucuuuu

SEQ ID NO: 2551705 - RNA, 23 nt, Human
caauguuuaugcaaggaaggaaa

SEQ ID NO: 2551706 - RNA, 20 nt, Human
caauguuuaugcaaggaagg

SEQ ID NO: 2551707 - RNA, 13 nt, Human
cacaaacagaggc

SEQ ID NO: 2551708 - RNA, 15 nt, Human
cacaaaaucugucca

SEQ ID NO: 2551709 - RNA, 16 nt, Human
cacaaaauugggaaag

SEQ ID NO: 2551710 - RNA, 14 nt, Human
cacaaacagaggcc

SEQ ID NO: 2551711 - RNA, 18 nt, Human
cacaaagcccuuccaugu

SEQ ID NO: 2551712 - RNA, 22 nt, Human
caauuuuucuuauuucauuucu

SEQ ID NO: 2551713 - RNA, 16 nt, Human
caauuuuugccuucau

SEQ ID NO: 2551714 - RNA, 15 nt, Human
caauuuuugccuuca

SEQ ID NO: 2551715 - RNA, 14 nt, Human
caauuuuugccuuc

SEQ ID NO: 2551716 - RNA, 13 nt, Human
caauuuuugccuu

SEQ ID NO: 2551717 - RNA, 18 nt, Human
caauuuuugguugaauaa

SEQ ID NO: 2551718 - RNA, 19 nt, Human
caauuuuugguugaauaaa

SEQ ID NO: 2551719 - RNA, 17 nt, Human
caauuuuuuuaauuuug

SEQ ID NO: 2551720 - RNA, 21 nt, Human
caauuuuuuaucaugcauguc

SEQ ID NO: 2551721 - RNA, 22 nt, Human
caauuuuuuuaauuuuguauuu

SEQ ID NO: 2551722 - RNA, 21 nt, Human
caauuuuuuuaauuuuguauu

SEQ ID NO: 2551723 - RNA, 22 nt, Human
cacaaaauaaccaauccuggac

SEQ ID NO: 2551724 - RNA, 17 nt, Human
caauuccccucugcugc

SEQ ID NO: 2551725 - RNA, 14 nt, Human
caauuccccucugc

SEQ ID NO: 2551726 - RNA, 21 nt, Human
caauuccguagccagcugcuc

SEQ ID NO: 2551727 - RNA, 15 nt, Human
caauucccugcuguc

SEQ ID NO: 2551728 - RNA, 13 nt, Human
caauuccccucug

SEQ ID NO: 2551729 - RNA, 12 nt, Human
caauuccccucu

SEQ ID NO: 2551730 - RNA, 11 nt, Human
caauuccccuc

SEQ ID NO: 2551731 - RNA, 22 nt, Human
caauuaggaaguguaacagcug

SEQ ID NO: 2551732 - RNA, 14 nt, Human
caauuccucuggga

SEQ ID NO: 2551733 - RNA, 13 nt, Human
caauuccucuggg

SEQ ID NO: 2551734 - RNA, 15 nt, Human
caauuccucugggaa

SEQ ID NO: 2551735 - RNA, 12 nt, Human
caauuccugggc

SEQ ID NO: 2551736 - RNA, 20 nt, Human
caauuccguagccagcugcu

SEQ ID NO: 2551737 - RNA, 13 nt, Human
caauuccugggcc

SEQ ID NO: 2551738 - RNA, 21 nt, Human
caauuagcaauugacugucac

SEQ ID NO: 2551739 - RNA, 15 nt, Human
caauuaggaagugua

SEQ ID NO: 2551740 - RNA, 13 nt, Human
caauuccaccugc

SEQ ID NO: 2551741 - RNA, 16 nt, Human
caauuaggaaguguaa

SEQ ID NO: 2551742 - RNA, 20 nt, Human
caauuaggaaguguaacagc

SEQ ID NO: 2551743 - RNA, 23 nt, Human
caauuaggaaguguaacagcuga

SEQ ID NO: 2551744 - RNA, 18 nt, Human
caauuacaggaaguacug

SEQ ID NO: 2551745 - RNA, 17 nt, Human
caauuacugguccaaaa

SEQ ID NO: 2551746 - RNA, 13 nt, Human
caauuaaacggau

SEQ ID NO: 2551747 - RNA, 23 nt, Human
caauuaaaaaaaaagaucuguuu

SEQ ID NO: 2551748 - RNA, 12 nt, Human
caauuaaacgga

SEQ ID NO: 2551749 - RNA, 17 nt, Human
cacacacgcgugcacac

SEQ ID NO: 2551750 - RNA, 23 nt, Human
cacacacgcacgcacacacacaa

SEQ ID NO: 2551751 - RNA, 18 nt, Human
cacacacgcacgcacaca

SEQ ID NO: 2551752 - RNA, 17 nt, Human
cacacacgcacgcacac

SEQ ID NO: 2551753 - RNA, 19 nt, Human
cacacacgcacgcacacac

SEQ ID NO: 2551754 - RNA, 12 nt, Human
cacacacucacu

SEQ ID NO: 2551755 - RNA, 15 nt, Human
cacacacagccacac

SEQ ID NO: 2551756 - RNA, 16 nt, Human
cacacacagccacaca

SEQ ID NO: 2551757 - RNA, 13 nt, Human
cacacaccuguag

SEQ ID NO: 2551758 - RNA, 11 nt, Human
cacacaccugu

SEQ ID NO: 2551759 - RNA, 23 nt, Human
cacacacagaggaagagcaggca

SEQ ID NO: 2551760 - RNA, 15 nt, Human
cacacaccuguaguc

SEQ ID NO: 2551761 - RNA, 20 nt, Human
cacacaccuguagucccagc

SEQ ID NO: 2551762 - RNA, 16 nt, Human
cacacacgcacgcaca

SEQ ID NO: 2551763 - RNA, 15 nt, Human
cacacacgcacgcac

SEQ ID NO: 2551764 - RNA, 14 nt, Human
cacacacgcacgca

SEQ ID NO: 2551765 - RNA, 19 nt, Human
cacacaccuguagucccag

SEQ ID NO: 2551766 - RNA, 11 nt, Human
cacacacagcc

SEQ ID NO: 2551767 - RNA, 12 nt, Human
cacacacagcca

SEQ ID NO: 2551768 - RNA, 13 nt, Human
cacacacagccac

SEQ ID NO: 2551769 - RNA, 14 nt, Human
cacacacagccaca

SEQ ID NO: 2551770 - RNA, 20 nt, Human
cacacacagaaaauauacug

SEQ ID NO: 2551771 - RNA, 21 nt, Human
cacacacagaaaauauacugu

SEQ ID NO: 2551772 - RNA, 23 nt, Human
cacacacagaaaauauacuguaa

SEQ ID NO: 2551773 - RNA, 12 nt, Human
cacacacagagg

SEQ ID NO: 2551774 - RNA, 14 nt, Human
cacacacagaggaa

SEQ ID NO: 2551775 - RNA, 14 nt, Human
cacacacagaaaau

SEQ ID NO: 2551776 - RNA, 15 nt, Human
cacacacagaaaaua

SEQ ID NO: 2551777 - RNA, 16 nt, Human
cacacacagaaaauau

SEQ ID NO: 2551778 - RNA, 19 nt, Human
cacacacagaaaauauacu

SEQ ID NO: 2551779 - RNA, 11 nt, Human
cacacacagaa

SEQ ID NO: 2551780 - RNA, 13 nt, Human
cacacacagaaaa

SEQ ID NO: 2551781 - RNA, 14 nt, Human
cacacacacucacu

SEQ ID NO: 2551782 - RNA, 14 nt, Human
cacacacacgcacg

SEQ ID NO: 2551783 - RNA, 13 nt, Human
cacacacacucua

SEQ ID NO: 2551784 - RNA, 15 nt, Human
cacacacacacacau

SEQ ID NO: 2551785 - RNA, 16 nt, Human
cacacacacacacagg

SEQ ID NO: 2551786 - RNA, 16 nt, Human
cacacacacacacaug

SEQ ID NO: 2551787 - RNA, 13 nt, Human
cacacacacacag

SEQ ID NO: 2551788 - RNA, 14 nt, Human
cacacacacacagc

SEQ ID NO: 2551789 - RNA, 15 nt, Human
cacacacacacagcc

SEQ ID NO: 2551790 - RNA, 16 nt, Human
cacacacacacagcca

SEQ ID NO: 2551791 - RNA, 14 nt, Human
cacacacacacacu

SEQ ID NO: 2551792 - RNA, 14 nt, Human
cacacacacacagg

SEQ ID NO: 2551793 - RNA, 13 nt, Human
cacacacacacuc

SEQ ID NO: 2551794 - RNA, 16 nt, Human
cacacacacacaugca

SEQ ID NO: 2551795 - RNA, 11 nt, Human
cacacacacag

SEQ ID NO: 2551796 - RNA, 12 nt, Human
cacacacacaga

SEQ ID NO: 2551797 - RNA, 14 nt, Human
cacacacacacaug

SEQ ID NO: 2551798 - RNA, 15 nt, Human
cacacacacacaugc

SEQ ID NO: 2551799 - RNA, 13 nt, Human
cacacacacacau

SEQ ID NO: 2551800 - RNA, 16 nt, Human
cacacacacacaggag

SEQ ID NO: 2551801 - RNA, 13 nt, Human
cacacacacgcac

SEQ ID NO: 2551802 - RNA, 13 nt, Human
cacacacacccac

SEQ ID NO: 2551803 - RNA, 14 nt, Human
cacacacacaugca

SEQ ID NO: 2551804 - RNA, 15 nt, Human
cacacacacaugcau

SEQ ID NO: 2551805 - RNA, 12 nt, Human
cacacacacaug

SEQ ID NO: 2551806 - RNA, 13 nt, Human
cacacacacaugc

SEQ ID NO: 2551807 - RNA, 14 nt, Human
cacacacacaggag

SEQ ID NO: 2551808 - RNA, 13 nt, Human
cacacacacagaa

SEQ ID NO: 2551809 - RNA, 14 nt, Human
cacacacacagaaa

SEQ ID NO: 2551810 - RNA, 15 nt, Human
cacacacacagaaaa

SEQ ID NO: 2551811 - RNA, 12 nt, Human
cacacacacagc

SEQ ID NO: 2551812 - RNA, 13 nt, Human
cacacacacagcc

SEQ ID NO: 2551813 - RNA, 14 nt, Human
cacacacacagcca

SEQ ID NO: 2551814 - RNA, 15 nt, Human
cacacacacagccac

SEQ ID NO: 2551815 - RNA, 12 nt, Human
cacacacacagg

SEQ ID NO: 2551816 - RNA, 13 nt, Human
cacacacacagga

SEQ ID NO: 2551817 - RNA, 21 nt, Human
cacaauggcuaauucccagag

SEQ ID NO: 2551818 - RNA, 13 nt, Human
cacacaaaacaac

SEQ ID NO: 2551819 - RNA, 21 nt, Human
cacacaaaauguacccaguau

SEQ ID NO: 2551820 - RNA, 13 nt, Human
cacacaaagguau

SEQ ID NO: 2551821 - RNA, 18 nt, Human
cacacaaagguauaauuu

SEQ ID NO: 2551822 - RNA, 14 nt, Human
cacacacacacaca

SEQ ID NO: 2551823 - RNA, 13 nt, Human
cacacacacacac

SEQ ID NO: 2551824 - RNA, 15 nt, Human
cacacacacacacac

SEQ ID NO: 2551825 - RNA, 15 nt, Human
cacacacacacacaa

SEQ ID NO: 2551826 - RNA, 16 nt, Human
cacacacacacacagc

SEQ ID NO: 2551827 - RNA, 15 nt, Human
cacacacacacacag

SEQ ID NO: 2551828 - RNA, 18 nt, Human
cacaaucuuaaggggcag

SEQ ID NO: 2551829 - RNA, 19 nt, Human
cacaaucugacauucucag

SEQ ID NO: 2551830 - RNA, 15 nt, Human
cacaauauugaacuu

SEQ ID NO: 2551831 - RNA, 11 nt, Human
cacaauauuuu

SEQ ID NO: 2551832 - RNA, 20 nt, Human
cacaaucuuaaggggcagcu

SEQ ID NO: 2551833 - RNA, 19 nt, Human
cacaaucuuaaggggcagc

SEQ ID NO: 2551834 - RNA, 22 nt, Human
cacaaugaaaugcucuccuuuc

SEQ ID NO: 2551835 - RNA, 20 nt, Human
cacaauggcuaauucccaga

SEQ ID NO: 2551836 - RNA, 21 nt, Human
cacaauaaggucaaugccaga

SEQ ID NO: 2551837 - RNA, 12 nt, Human
cacaauaugaau

SEQ ID NO: 2551838 - RNA, 15 nt, Human
cacaauaauuuucua

SEQ ID NO: 2551839 - RNA, 13 nt, Human
cacaauacaauaa

SEQ ID NO: 2551840 - RNA, 20 nt, Human
cacaagaaaugaaagcaggg

SEQ ID NO: 2551841 - RNA, 21 nt, Human
cacaagaaaugaaagcaggga

SEQ ID NO: 2551842 - RNA, 21 nt, Human
cacaaguggugguaacccugg

SEQ ID NO: 2551843 - RNA, 18 nt, Human
cacaauaaaaauguuuaa

SEQ ID NO: 2551844 - RNA, 14 nt, Human
cacaaguuguguuu

SEQ ID NO: 2551845 - RNA, 14 nt, Human
cacaagugguggua

SEQ ID NO: 2551846 - RNA, 20 nt, Human
cacaaguggugguaacccug

SEQ ID NO: 2551847 - RNA, 13 nt, Human
cacaagugguggu

SEQ ID NO: 2551848 - RNA, 13 nt, Human
cacaaaggagagc

SEQ ID NO: 2551849 - RNA, 13 nt, Human
cacaaagccuuau

SEQ ID NO: 2551850 - RNA, 20 nt, Human
cacaaaauucgaccugauuu

SEQ ID NO: 2551851 - RNA, 18 nt, Human
cacaagaaaugaaagcag

SEQ ID NO: 2551852 - RNA, 18 nt, Human
cacaaaggaccucagcug

SEQ ID NO: 2551853 - RNA, 20 nt, Human
cacaaagccuuaucaagugu

SEQ ID NO: 2551854 - RNA, 21 nt, Human
cacaaaggaccucagcugcuu

SEQ ID NO: 2551855 - RNA, 21 nt, Human
cacaguucaguggcagggcuc

SEQ ID NO: 2551856 - RNA, 23 nt, Human
cacaguguuuuuguaaagugugg

SEQ ID NO: 2551857 - RNA, 20 nt, Human
cacaguucaguggcagggcu

SEQ ID NO: 2551858 - RNA, 12 nt, Human
cacagcugcuca

SEQ ID NO: 2551859 - RNA, 22 nt, Human
cacagcugcucaauaaaguaca

SEQ ID NO: 2551860 - RNA, 16 nt, Human
cacagcuuccccucuc

SEQ ID NO: 2551861 - RNA, 22 nt, Human
cacagcuuccccucucuccucc

SEQ ID NO: 2551862 - RNA, 19 nt, Human
cacagcuugaccugaggcu

SEQ ID NO: 2551863 - RNA, 18 nt, Human
cacagcuugaccugaggc

SEQ ID NO: 2551864 - RNA, 23 nt, Human
cacagcuuccccucucuccuccu

SEQ ID NO: 2551865 - RNA, 21 nt, Human
cacagcuugaccugaggcugu

SEQ ID NO: 2551866 - RNA, 20 nt, Human
cacagcuugaccugaggcug

SEQ ID NO: 2551867 - RNA, 22 nt, Human
cacagcuugaccugaggcugug

SEQ ID NO: 2551868 - RNA, 19 nt, Human
cacaggcccuuccucucca

SEQ ID NO: 2551869 - RNA, 18 nt, Human
cacaggcccuuccucucc

SEQ ID NO: 2551870 - RNA, 17 nt, Human
cacaggcccuuccucuc

SEQ ID NO: 2551871 - RNA, 16 nt, Human
cacaggcccuuccucu

SEQ ID NO: 2551872 - RNA, 13 nt, Human
cacaggaaaccag

SEQ ID NO: 2551873 - RNA, 15 nt, Human
cacaggcccuuccuc

SEQ ID NO: 2551874 - RNA, 20 nt, Human
cacagcuuuaucaccagaga

SEQ ID NO: 2551875 - RNA, 17 nt, Human
cacaguucaauucucau

SEQ ID NO: 2551876 - RNA, 22 nt, Human
cacaguguuuuuguaaagugug

SEQ ID NO: 2551877 - RNA, 19 nt, Human
cacaguguuuuuguaaagu

SEQ ID NO: 2551878 - RNA, 17 nt, Human
cacaguguuuuuguaaa

SEQ ID NO: 2551879 - RNA, 16 nt, Human
cacaguguuuuuguaa

SEQ ID NO: 2551880 - RNA, 17 nt, Human
cacaguguuggcgagag

SEQ ID NO: 2551881 - RNA, 23 nt, Human
cacaguguuaaaugaaauuguaa

SEQ ID NO: 2551882 - RNA, 10 nt, Human
cacaguguuu

SEQ ID NO: 2551883 - RNA, 13 nt, Human
cacaguguguuug

SEQ ID NO: 2551884 - RNA, 16 nt, Human
cacaguguguuuguga

SEQ ID NO: 2551885 - RNA, 14 nt, Human
cacaguguugccca

SEQ ID NO: 2551886 - RNA, 19 nt, Human
cacaguguugcccaggcug

SEQ ID NO: 2551887 - RNA, 19 nt, Human
cacagugcaucucagccca

SEQ ID NO: 2551888 - RNA, 18 nt, Human
cacagugcaucucagccc

SEQ ID NO: 2551889 - RNA, 17 nt, Human
cacagugcaucucagcc

SEQ ID NO: 2551890 - RNA, 21 nt, Human
cacaggcccuuccucuccacu

SEQ ID NO: 2551891 - RNA, 18 nt, Human
cacagugccuucaauaaa

SEQ ID NO: 2551892 - RNA, 17 nt, Human
cacagugccuucaauaa

SEQ ID NO: 2551893 - RNA, 13 nt, Human
cacagugcugucu

SEQ ID NO: 2551894 - RNA, 19 nt, Human
cacagugccuucaauaaau

SEQ ID NO: 2551895 - RNA, 22 nt, Human
cacagugcuuuccguggcacug

SEQ ID NO: 2551896 - RNA, 22 nt, Human
cacaguggaaagacagcuucuc

SEQ ID NO: 2551897 - RNA, 19 nt, Human
cauacucaauguuacuauc

SEQ ID NO: 2551898 - RNA, 20 nt, Human
cauacuaauuauacccccug

SEQ ID NO: 2551899 - RNA, 13 nt, Human
cauacguccacca

SEQ ID NO: 2551900 - RNA, 17 nt, Human
cauacguacacauuuua

SEQ ID NO: 2551901 - RNA, 18 nt, Human
cauacguacacauuuuau

SEQ ID NO: 2551902 - RNA, 14 nt, Human
cauacuaaccagca

SEQ ID NO: 2551903 - RNA, 21 nt, Human
cauacuaaccagcagaaaugc

SEQ ID NO: 2551904 - RNA, 15 nt, Human
cauacguacacauuu

SEQ ID NO: 2551905 - RNA, 16 nt, Human
cauacguacacauuuu

SEQ ID NO: 2551906 - RNA, 13 nt, Human
cauacguacacau

SEQ ID NO: 2551907 - RNA, 19 nt, Human
cauaccuuuauugugaucu

SEQ ID NO: 2551908 - RNA, 18 nt, Human
cauacgcaccacaucucu

SEQ ID NO: 2551909 - RNA, 21 nt, Human
cauacccacccccacccaagg

SEQ ID NO: 2551910 - RNA, 18 nt, Human
cauacccacccccaccca

SEQ ID NO: 2551911 - RNA, 17 nt, Human
cauacccacccccaccc

SEQ ID NO: 2551912 - RNA, 14 nt, Human
cauacccaccccca

SEQ ID NO: 2551913 - RNA, 23 nt, Human
cauaccuuccuucccugggcugu

SEQ ID NO: 2551914 - RNA, 21 nt, Human
cauaccuuccuucccugggcu

SEQ ID NO: 2551915 - RNA, 18 nt, Human
cauaccuuccuucccugg

SEQ ID NO: 2551916 - RNA, 16 nt, Human
cauaccuuccuucccu

SEQ ID NO: 2551917 - RNA, 15 nt, Human
cauaccuuccuuccc

SEQ ID NO: 2551918 - RNA, 14 nt, Human
cauaccuuccuucc

SEQ ID NO: 2551919 - RNA, 13 nt, Human
cauaccuuccuuc

SEQ ID NO: 2551920 - RNA, 18 nt, Human
cauaccugcuggugcaga

SEQ ID NO: 2551921 - RNA, 22 nt, Human
cauacccuggccgcccccugcc

SEQ ID NO: 2551922 - RNA, 15 nt, Human
cauaccuggcccugu

SEQ ID NO: 2551923 - RNA, 15 nt, Human
cauaccuacauguau

SEQ ID NO: 2551924 - RNA, 13 nt, Human
cauacccuccccc

SEQ ID NO: 2551925 - RNA, 22 nt, Human
cauaccaggccgccccagccuc

SEQ ID NO: 2551926 - RNA, 13 nt, Human
cauaccacuuuug

SEQ ID NO: 2551927 - RNA, 14 nt, Human
cauaccacuuuugu

SEQ ID NO: 2551928 - RNA, 15 nt, Human
cauaccacuuuuguu

SEQ ID NO: 2551929 - RNA, 18 nt, Human
cauaccacuuuuguucuu

SEQ ID NO: 2551930 - RNA, 12 nt, Human
cauacccacccc

SEQ ID NO: 2551931 - RNA, 11 nt, Human
cauacccaccc

SEQ ID NO: 2551932 - RNA, 19 nt, Human
cauaccacuuuuguucuug

SEQ ID NO: 2551933 - RNA, 14 nt, Human
cauaccaaugaaaa

SEQ ID NO: 2551934 - RNA, 20 nt, Human
cauaaucuaccaacgaaaga

SEQ ID NO: 2551935 - RNA, 18 nt, Human
cauaaucacaacccuuca

SEQ ID NO: 2551936 - RNA, 15 nt, Human
cauaauacuugcuuu

SEQ ID NO: 2551937 - RNA, 23 nt, Human
cauaauagacuucccacucuagg

SEQ ID NO: 2551938 - RNA, 22 nt, Human
cauaauagacuucccacucuag

SEQ ID NO: 2551939 - RNA, 17 nt, Human
cauaccaacacgagcag

SEQ ID NO: 2551940 - RNA, 17 nt, Human
cauacauuuauaauguu

SEQ ID NO: 2551941 - RNA, 21 nt, Human
cauacauuuauaauguuugcu

SEQ ID NO: 2551942 - RNA, 22 nt, Human
cauacauuuauaauguuugcua

SEQ ID NO: 2551943 - RNA, 23 nt, Human
cauacauuuauaauguuugcuau

SEQ ID NO: 2551944 - RNA, 24 nt, Human
cauacauuuauaauguuugcuauu

SEQ ID NO: 2551945 - RNA, 19 nt, Human
cauaagaaaacuaagaaau

SEQ ID NO: 2551946 - RNA, 12 nt, Human
cauaagaaugaa

SEQ ID NO: 2551947 - RNA, 21 nt, Human
cauaagaaugaauaauaauua

SEQ ID NO: 2551948 - RNA, 11 nt, Human
cauaacugaaa

SEQ ID NO: 2551949 - RNA, 14 nt, Human
cauaacugaaaaug

SEQ ID NO: 2551950 - RNA, 21 nt, Human
cauaacguuuuuccuuuaaaa

SEQ ID NO: 2551951 - RNA, 16 nt, Human
cauaacguuuuuccuu

SEQ ID NO: 2551952 - RNA, 15 nt, Human
cauaacguuuuuccu

SEQ ID NO: 2551953 - RNA, 22 nt, Human
cauaacggaucagaaauacaga

SEQ ID NO: 2551954 - RNA, 18 nt, Human
cauaacguuuuuccuuua

SEQ ID NO: 2551955 - RNA, 17 nt, Human
cauaacguuuuuccuuu

SEQ ID NO: 2551956 - RNA, 20 nt, Human
cauaacguuuuuccuuuaaa

SEQ ID NO: 2551957 - RNA, 17 nt, Human
cauaagauauuuuucau

SEQ ID NO: 2551958 - RNA, 15 nt, Human
cauaagccaauuuuu

SEQ ID NO: 2551959 - RNA, 19 nt, Human
cauaagcggcguaaguuua

SEQ ID NO: 2551960 - RNA, 20 nt, Human
cauaagccaauuuuucugca

SEQ ID NO: 2551961 - RNA, 17 nt, Human
cauaagccaauuuuucu

SEQ ID NO: 2551962 - RNA, 21 nt, Human
cauaagccuccauuuaguucu

SEQ ID NO: 2551963 - RNA, 23 nt, Human
cauaagccuccauuuaguucuuu

SEQ ID NO: 2551964 - RNA, 14 nt, Human
cauaagauaaaugu

SEQ ID NO: 2551965 - RNA, 23 nt, Human
cauaagaccauaacagccaacag

SEQ ID NO: 2551966 - RNA, 21 nt, Human
cauaagaccauaacagccaac

SEQ ID NO: 2551967 - RNA, 20 nt, Human
cauaagaccauaacagccaa

SEQ ID NO: 2551968 - RNA, 11 nt, Human
cauaagaccau

SEQ ID NO: 2551969 - RNA, 20 nt, Human
cauaagacccuaagccuccu

SEQ ID NO: 2551970 - RNA, 16 nt, Human
cauaagacccuaagcc

SEQ ID NO: 2551971 - RNA, 18 nt, Human
cauaagacuuugggauag

SEQ ID NO: 2551972 - RNA, 17 nt, Human
cauaaggaaacuggguu

SEQ ID NO: 2551973 - RNA, 22 nt, Human
cauaaggaauguagcugguuuc

SEQ ID NO: 2551974 - RNA, 16 nt, Human
cauaagcucagaaucc

SEQ ID NO: 2551975 - RNA, 14 nt, Human
cauaagcucagaau

SEQ ID NO: 2551976 - RNA, 22 nt, Human
cauaagcuauagacccgaggaa

SEQ ID NO: 2551977 - RNA, 17 nt, Human
cauaaguaauucaagaa

SEQ ID NO: 2551978 - RNA, 16 nt, Human
cauaaguaauucaaga

SEQ ID NO: 2551979 - RNA, 21 nt, Human
cauaagguuucguuucuguau

SEQ ID NO: 2551980 - RNA, 15 nt, Human
cauaagguuucguuu

SEQ ID NO: 2551981 - RNA, 22 nt, Human
cauaagguuucguuucuguaua

SEQ ID NO: 2551982 - RNA, 22 nt, Human
cauaaguaauucaagaaaacaa

SEQ ID NO: 2551983 - RNA, 18 nt, Human
cauaaguaauucaagaaa

SEQ ID NO: 2551984 - RNA, 15 nt, Human
cauaaguauuucaaa

SEQ ID NO: 2551985 - RNA, 19 nt, Human
cauaaguauuaugucucuu

SEQ ID NO: 2551986 - RNA, 12 nt, Human
cauaaguuucug

SEQ ID NO: 2551987 - RNA, 18 nt, Human
cauaauaaauaucuguac

SEQ ID NO: 2551988 - RNA, 17 nt, Human
cauaauaagcuaaagag

SEQ ID NO: 2551989 - RNA, 22 nt, Human
cauaaacaagaccacguuucua

SEQ ID NO: 2551990 - RNA, 14 nt, Human
cauaaaccuuaagu

SEQ ID NO: 2551991 - RNA, 12 nt, Human
cauaaaccuuaa

SEQ ID NO: 2551992 - RNA, 21 nt, Human
cauaaacccaguugccaucug

SEQ ID NO: 2551993 - RNA, 20 nt, Human
cauaaacaagaccacguuuc

SEQ ID NO: 2551994 - RNA, 21 nt, Human
cauaaacaagaccacguuucu

SEQ ID NO: 2551995 - RNA, 16 nt, Human
cauaaagcaggcagaa

SEQ ID NO: 2551996 - RNA, 14 nt, Human
cauaaagcaggcag

SEQ ID NO: 2551997 - RNA, 11 nt, Human
cauaaagaagc

SEQ ID NO: 2551998 - RNA, 21 nt, Human
cauaaagaagauguuuaacuu

SEQ ID NO: 2551999 - RNA, 19 nt, Human
cauaaagaagauguuuaac

SEQ ID NO: 2552000 - RNA, 18 nt, Human
cauaaagaagauguuuaa

SEQ ID NO: 2552001 - RNA, 21 nt, Human
cauaaagaagcaauaaagaag

SEQ ID NO: 2552002 - RNA, 12 nt, Human
cauaaagaagca

SEQ ID NO: 2552003 - RNA, 17 nt, Human
cauaaacugacuuuauc

SEQ ID NO: 2552004 - RNA, 15 nt, Human
cauaaacugacuuua

SEQ ID NO: 2552005 - RNA, 13 nt, Human
cauaaacugacuu

SEQ ID NO: 2552006 - RNA, 20 nt, Human
cauaaaccuuaaguaagcaa

SEQ ID NO: 2552007 - RNA, 16 nt, Human
cauaaacuucaugguc

SEQ ID NO: 2552008 - RNA, 12 nt, Human
cauaaacuucau

SEQ ID NO: 2552009 - RNA, 14 nt, Human
cauaaacugugugc

SEQ ID NO: 2552010 - RNA, 15 nt, Human
cauaaacugugugca

SEQ ID NO: 2552011 - RNA, 23 nt, Human
cauaaaaagccugcaauuucaua

SEQ ID NO: 2552012 - RNA, 23 nt, Human
cauaaaaagcaaaacaaaaauua

SEQ ID NO: 2552013 - RNA, 22 nt, Human
cauaaaauuuucuacucuuuuu

SEQ ID NO: 2552014 - RNA, 22 nt, Human
cauaaaacauuaagaaaaucau

SEQ ID NO: 2552015 - RNA, 20 nt, Human
cauaaaauaaaguauauaua

SEQ ID NO: 2552016 - RNA, 19 nt, Human
cauaaaacauuaagaaaau

SEQ ID NO: 2552017 - RNA, 18 nt, Human
cauaaaacauuaagaaaa

SEQ ID NO: 2552018 - RNA, 17 nt, Human
cauaaaacauuaagaaa

SEQ ID NO: 2552019 - RNA, 16 nt, Human
cauaaaacauuaagaa

SEQ ID NO: 2552020 - RNA, 23 nt, Human
cauaaaacauuaagaaaaucaua

SEQ ID NO: 2552021 - RNA, 19 nt, Human
cauaaaauaaaguauauau

SEQ ID NO: 2552022 - RNA, 21 nt, Human
cauaaaaauuagccaagugug

SEQ ID NO: 2552023 - RNA, 11 nt, Human
cauaaaacauu

SEQ ID NO: 2552024 - RNA, 12 nt, Human
cauaaaacaggu

SEQ ID NO: 2552025 - RNA, 13 nt, Human
cauaaaaagcuga

SEQ ID NO: 2552026 - RNA, 14 nt, Human
cauaaaugaagcag

SEQ ID NO: 2552027 - RNA, 13 nt, Human
cauaaaugaagca

SEQ ID NO: 2552028 - RNA, 13 nt, Human
cauaaaugaauuu

SEQ ID NO: 2552029 - RNA, 18 nt, Human
cauaaauaugcagugaua

SEQ ID NO: 2552030 - RNA, 14 nt, Human
cauaaaugaggaaa

SEQ ID NO: 2552031 - RNA, 20 nt, Human
cauaaauaugcagugauaug

SEQ ID NO: 2552032 - RNA, 15 nt, Human
cauaaauaugcagug

SEQ ID NO: 2552033 - RNA, 13 nt, Human
cauaaauaugcag

SEQ ID NO: 2552034 - RNA, 14 nt, Human
cauaaauaaaauga

SEQ ID NO: 2552035 - RNA, 23 nt, Human
cauaaaggugguaugugugugua

SEQ ID NO: 2552036 - RNA, 18 nt, Human
cauaaauaaaaugaccag

SEQ ID NO: 2552037 - RNA, 12 nt, Human
cauaaauaugca

SEQ ID NO: 2552038 - RNA, 20 nt, Human
cauaaaggugguaugugugu

SEQ ID NO: 2552039 - RNA, 22 nt, Human
cauaaaggugguaugugugugu

SEQ ID NO: 2552040 - RNA, 15 nt, Human
cauaaagucagugcc

SEQ ID NO: 2552041 - RNA, 21 nt, Human
cauaaagccuuggauguauau

SEQ ID NO: 2552042 - RNA, 15 nt, Human
cauaacaacuucaua

SEQ ID NO: 2552043 - RNA, 14 nt, Human
cauaacaauuccuc

SEQ ID NO: 2552044 - RNA, 15 nt, Human
cauaacaauuccucu

SEQ ID NO: 2552045 - RNA, 16 nt, Human
cauaacaauuccucua

SEQ ID NO: 2552046 - RNA, 17 nt, Human
cauaacaauuccucuac

SEQ ID NO: 2552047 - RNA, 18 nt, Human
cauaaccuuaccagauuu

SEQ ID NO: 2552048 - RNA, 21 nt, Human
cauaacggaucagaaauacag

SEQ ID NO: 2552049 - RNA, 17 nt, Human
cauaacggaucagaaau

SEQ ID NO: 2552050 - RNA, 20 nt, Human
cauaaccccacccuugccca

SEQ ID NO: 2552051 - RNA, 13 nt, Human
cauaaccccaccc

SEQ ID NO: 2552052 - RNA, 12 nt, Human
cauaaccccacc

SEQ ID NO: 2552053 - RNA, 16 nt, Human
cauaaccuagccuuag

SEQ ID NO: 2552054 - RNA, 17 nt, Human
caguugcaauaauacuu

SEQ ID NO: 2552055 - RNA, 20 nt, Human
caguugagucgucaucacuu

SEQ ID NO: 2552056 - RNA, 15 nt, Human
caguugcaauaauac

SEQ ID NO: 2552057 - RNA, 16 nt, Human
caguugcacuuggccu

SEQ ID NO: 2552058 - RNA, 13 nt, Human
caguugcacuugg

SEQ ID NO: 2552059 - RNA, 19 nt, Human
caguugcacuuggccucug

SEQ ID NO: 2552060 - RNA, 20 nt, Human
caguugcacuuggccucugg

SEQ ID NO: 2552061 - RNA, 21 nt, Human
caguugaaaagacuccaaaga

SEQ ID NO: 2552062 - RNA, 22 nt, Human
caguugaaaagacuccaaagaa

SEQ ID NO: 2552063 - RNA, 23 nt, Human
caguugaaaagacuccaaagaaa

SEQ ID NO: 2552064 - RNA, 21 nt, Human
caguugaauuuauggaaucua

SEQ ID NO: 2552065 - RNA, 21 nt, Human
caguugaaugacaacagaagc

SEQ ID NO: 2552066 - RNA, 20 nt, Human
caguugaaugacaacagaag

SEQ ID NO: 2552067 - RNA, 16 nt, Human
caguugacagcaggug

SEQ ID NO: 2552068 - RNA, 14 nt, Human
caguugacagcagg

SEQ ID NO: 2552069 - RNA, 14 nt, Human
caguugaaaagacu

SEQ ID NO: 2552070 - RNA, 18 nt, Human
caguugaaaagacuccaa

SEQ ID NO: 2552071 - RNA, 20 nt, Human
caguucuuugggccagacau

SEQ ID NO: 2552072 - RNA, 21 nt, Human
caguucuuugggccagacaug

SEQ ID NO: 2552073 - RNA, 22 nt, Human
caguucuuugggccagacaugc

SEQ ID NO: 2552074 - RNA, 18 nt, Human
caguuggaaauccaucca

SEQ ID NO: 2552075 - RNA, 16 nt, Human
caguuggccagagagc

SEQ ID NO: 2552076 - RNA, 16 nt, Human
caguuggguggaugcc

SEQ ID NO: 2552077 - RNA, 18 nt, Human
caguugggagcacuggag

SEQ ID NO: 2552078 - RNA, 17 nt, Human
caguugggagcacugga

SEQ ID NO: 2552079 - RNA, 16 nt, Human
caguugggagcacugg

SEQ ID NO: 2552080 - RNA, 15 nt, Human
caguugggagcacug

SEQ ID NO: 2552081 - RNA, 17 nt, Human
caguuggccagagagcc

SEQ ID NO: 2552082 - RNA, 16 nt, Human
caguuggccuucagaa

SEQ ID NO: 2552083 - RNA, 14 nt, Human
caguugggagcacu

SEQ ID NO: 2552084 - RNA, 23 nt, Human
caguugccagucaccccggccac

SEQ ID NO: 2552085 - RNA, 22 nt, Human
caguuggucccccuuccaugga

SEQ ID NO: 2552086 - RNA, 21 nt, Human
caguuggucccccuuccaugg

SEQ ID NO: 2552087 - RNA, 20 nt, Human
caguuggucccccuuccaug

SEQ ID NO: 2552088 - RNA, 19 nt, Human
caguuggucccccuuccau

SEQ ID NO: 2552089 - RNA, 21 nt, Human
caguugggagcacuggagugc

SEQ ID NO: 2552090 - RNA, 20 nt, Human
caguugggagcacuggagug

SEQ ID NO: 2552091 - RNA, 18 nt, Human
caguuggucccccuucca

SEQ ID NO: 2552092 - RNA, 19 nt, Human
caguuggguggaugccugg

SEQ ID NO: 2552093 - RNA, 18 nt, Human
caguuggguggaugccug

SEQ ID NO: 2552094 - RNA, 19 nt, Human
caguuuucugagaaagacu

SEQ ID NO: 2552095 - RNA, 20 nt, Human
caguuuucugagaaagacua

SEQ ID NO: 2552096 - RNA, 18 nt, Human
caguuuugguugcuuuaa

SEQ ID NO: 2552097 - RNA, 19 nt, Human
caguuuugguugcuuuaau

SEQ ID NO: 2552098 - RNA, 20 nt, Human
caguuuucuggcuggagccu

SEQ ID NO: 2552099 - RNA, 17 nt, Human
caguuuugguugcuuua

SEQ ID NO: 2552100 - RNA, 22 nt, Human
caguuuuccuucucaucuguga

SEQ ID NO: 2552101 - RNA, 16 nt, Human
caguuuuuuaugcuaa

SEQ ID NO: 2552102 - RNA, 10 nt, Human
caguuuuucu

SEQ ID NO: 2552103 - RNA, 17 nt, Human
caguuuuucuguauuuu

SEQ ID NO: 2552104 - RNA, 16 nt, Human
caguuuuucuguauuu

SEQ ID NO: 2552105 - RNA, 18 nt, Human
caguuuuucuguauuuua

SEQ ID NO: 2552106 - RNA, 22 nt, Human
caguuuuucagaguggaaugcu

SEQ ID NO: 2552107 - RNA, 15 nt, Human
caguuuuuauugcuu

SEQ ID NO: 2552108 - RNA, 14 nt, Human
caguuuucugagaa

SEQ ID NO: 2552109 - RNA, 15 nt, Human
caguuuucugagaaa

SEQ ID NO: 2552110 - RNA, 17 nt, Human
caguuguuagugugucu

SEQ ID NO: 2552111 - RNA, 21 nt, Human
caguuguagaauguauuguac

SEQ ID NO: 2552112 - RNA, 17 nt, Human
caguugggugagaacaa

SEQ ID NO: 2552113 - RNA, 19 nt, Human
caguuguagaauguauugu

SEQ ID NO: 2552114 - RNA, 18 nt, Human
caguuguagaauguauug

SEQ ID NO: 2552115 - RNA, 17 nt, Human
caguuguagaauguauu

SEQ ID NO: 2552116 - RNA, 15 nt, Human
caguuguagaaugua

SEQ ID NO: 2552117 - RNA, 14 nt, Human
caguuguagaaugu

SEQ ID NO: 2552118 - RNA, 14 nt, Human
cagugucaaugcag

SEQ ID NO: 2552119 - RNA, 20 nt, Human
cagugucaaguugugcuugu

SEQ ID NO: 2552120 - RNA, 19 nt, Human
cagugucaaguugugcuug

SEQ ID NO: 2552121 - RNA, 18 nt, Human
cagugucaaguugugcuu

SEQ ID NO: 2552122 - RNA, 21 nt, Human
cagugucaaauaaacacugug

SEQ ID NO: 2552123 - RNA, 20 nt, Human
cagugucauuuaugaaaaga

SEQ ID NO: 2552124 - RNA, 20 nt, Human
cagugucaaauaaacacugu

SEQ ID NO: 2552125 - RNA, 19 nt, Human
cagugucaaauaaacacug

SEQ ID NO: 2552126 - RNA, 18 nt, Human
cagugucaaauaaacacu

SEQ ID NO: 2552127 - RNA, 17 nt, Human
cagugucaaauaaacac

SEQ ID NO: 2552128 - RNA, 16 nt, Human
cagugucaaauaaaca

SEQ ID NO: 2552129 - RNA, 23 nt, Human
caguguauuuguauuuuuuugca

SEQ ID NO: 2552130 - RNA, 15 nt, Human
caguguauuuguauu

SEQ ID NO: 2552131 - RNA, 22 nt, Human
caguguacccccgcccaggcug

SEQ ID NO: 2552132 - RNA, 17 nt, Human
caguguauggaaauaaa

SEQ ID NO: 2552133 - RNA, 19 nt, Human
caguguagccuugcccgga

SEQ ID NO: 2552134 - RNA, 15 nt, Human
cagugucucacagcc

SEQ ID NO: 2552135 - RNA, 18 nt, Human
cagugucucacacuggcg

SEQ ID NO: 2552136 - RNA, 16 nt, Human
cagugucucacacugg

SEQ ID NO: 2552137 - RNA, 12 nt, Human
cagugucucaca

SEQ ID NO: 2552138 - RNA, 20 nt, Human
caguguccuuagaacauuuu

SEQ ID NO: 2552139 - RNA, 19 nt, Human
caguguccucuugcucaaa

SEQ ID NO: 2552140 - RNA, 16 nt, Human
caguguccuuagaaca

SEQ ID NO: 2552141 - RNA, 17 nt, Human
caguguccaaagcaggg

SEQ ID NO: 2552142 - RNA, 16 nt, Human
caguguccaaagcagg

SEQ ID NO: 2552143 - RNA, 22 nt, Human
caguguccaaagcagggucugg

SEQ ID NO: 2552144 - RNA, 15 nt, Human
caguguccccuccac

SEQ ID NO: 2552145 - RNA, 20 nt, Human
caguguccccuccacuguca

SEQ ID NO: 2552146 - RNA, 19 nt, Human
caguguccccuccacuguc

SEQ ID NO: 2552147 - RNA, 17 nt, Human
caguguccccuccacug

SEQ ID NO: 2552148 - RNA, 16 nt, Human
caguguccccuccacu

SEQ ID NO: 2552149 - RNA, 14 nt, Human
cagugucccgggcc

SEQ ID NO: 2552150 - RNA, 21 nt, Human
caguguccccuccacugucac

SEQ ID NO: 2552151 - RNA, 18 nt, Human
caguguccucuugcucaa

SEQ ID NO: 2552152 - RNA, 23 nt, Human
caguguacccccgcccaggcugg

SEQ ID NO: 2552153 - RNA, 21 nt, Human
caguguacccccgcccaggcu

SEQ ID NO: 2552154 - RNA, 20 nt, Human
caguguacccccgcccaggc

SEQ ID NO: 2552155 - RNA, 19 nt, Human
caguguacccccgcccagg

SEQ ID NO: 2552156 - RNA, 18 nt, Human
caguguacccccgcccag

SEQ ID NO: 2552157 - RNA, 17 nt, Human
caguguacccccgccca

SEQ ID NO: 2552158 - RNA, 16 nt, Human
caguguacccccgccc

SEQ ID NO: 2552159 - RNA, 20 nt, Human
caguguaauuucuuugccug

SEQ ID NO: 2552160 - RNA, 17 nt, Human
caguguaauuucuuugc

SEQ ID NO: 2552161 - RNA, 14 nt, Human
caguguacccccgc

SEQ ID NO: 2552162 - RNA, 20 nt, Human
caguguacauggaauaacau

SEQ ID NO: 2552163 - RNA, 23 nt, Human
caguguacauggaauaacaugua

SEQ ID NO: 2552164 - RNA, 16 nt, Human
caguguaauuucuuug

SEQ ID NO: 2552165 - RNA, 15 nt, Human
caguguaauuucuuu

SEQ ID NO: 2552166 - RNA, 14 nt, Human
caguguaauuucuu

SEQ ID NO: 2552167 - RNA, 12 nt, Human
caguguaauuuc

SEQ ID NO: 2552168 - RNA, 20 nt, Human
cagugguuuuauacugaagg

SEQ ID NO: 2552169 - RNA, 17 nt, Human
caguguaaauaguuacu

SEQ ID NO: 2552170 - RNA, 19 nt, Human
caguguaaauaguuacucc

SEQ ID NO: 2552171 - RNA, 15 nt, Human
caguguacagucuug

SEQ ID NO: 2552172 - RNA, 12 nt, Human
caguguacaguc

SEQ ID NO: 2552173 - RNA, 16 nt, Human
caguguacauggaaua

SEQ ID NO: 2552174 - RNA, 18 nt, Human
caguguacagucuuguau

SEQ ID NO: 2552175 - RNA, 17 nt, Human
caguguacagucuugua

SEQ ID NO: 2552176 - RNA, 12 nt, Human
cagugugacuga

SEQ ID NO: 2552177 - RNA, 14 nt, Human
cagugugacaagga

SEQ ID NO: 2552178 - RNA, 20 nt, Human
cagugugaaguuagaauucc

SEQ ID NO: 2552179 - RNA, 17 nt, Human
cagugugaaguuagaau

SEQ ID NO: 2552180 - RNA, 15 nt, Human
cagugugaaguuaga

SEQ ID NO: 2552181 - RNA, 14 nt, Human
cagugugaaguuag

SEQ ID NO: 2552182 - RNA, 13 nt, Human
cagugugaaguua

SEQ ID NO: 2552183 - RNA, 17 nt, Human
cagugucuuccuguggg

SEQ ID NO: 2552184 - RNA, 16 nt, Human
cagugucuuccugugg

SEQ ID NO: 2552185 - RNA, 15 nt, Human
cagugucuuccugug

SEQ ID NO: 2552186 - RNA, 13 nt, Human
cagugucuuccug

SEQ ID NO: 2552187 - RNA, 17 nt, Human
cagugucuggcugcaga

SEQ ID NO: 2552188 - RNA, 19 nt, Human
cagugucuggcugcagagc

SEQ ID NO: 2552189 - RNA, 13 nt, Human
cagugucugggcu

SEQ ID NO: 2552190 - RNA, 20 nt, Human
cagugucucacagcccugcu

SEQ ID NO: 2552191 - RNA, 14 nt, Human
cagugucucggagg

SEQ ID NO: 2552192 - RNA, 15 nt, Human
cagugucugggcuga

SEQ ID NO: 2552193 - RNA, 14 nt, Human
cagugucugggcug

SEQ ID NO: 2552194 - RNA, 18 nt, Human
cagugucugggcugacug

SEQ ID NO: 2552195 - RNA, 22 nt, Human
cagugucuguaucggagacagu

SEQ ID NO: 2552196 - RNA, 16 nt, Human
cagugucugucccggg

SEQ ID NO: 2552197 - RNA, 13 nt, Human
cagugucuuccau

SEQ ID NO: 2552198 - RNA, 14 nt, Human
cagugucugucccg

SEQ ID NO: 2552199 - RNA, 13 nt, Human
cagugucuguccc

SEQ ID NO: 2552200 - RNA, 23 nt, Human
cagugucuguaucggagacagug

SEQ ID NO: 2552201 - RNA, 24 nt, Human
cagugucuguaucggagacaguga

SEQ ID NO: 2552202 - RNA, 14 nt, Human
cagugucuuccaua

SEQ ID NO: 2552203 - RNA, 15 nt, Human
cagugucuuccauaa

SEQ ID NO: 2552204 - RNA, 16 nt, Human
cagugucuuccauaau

SEQ ID NO: 2552205 - RNA, 17 nt, Human
cagugucuuccauaaug

SEQ ID NO: 2552206 - RNA, 18 nt, Human
cagugucuuccauaaugu

SEQ ID NO: 2552207 - RNA, 20 nt, Human
cagugucuuccauaauguau

SEQ ID NO: 2552208 - RNA, 22 nt, Human
cagugucuuccauaauguauaa

SEQ ID NO: 2552209 - RNA, 23 nt, Human
cagugucuuccauaauguauaaa

SEQ ID NO: 2552210 - RNA, 11 nt, Human
caguguggaac

SEQ ID NO: 2552211 - RNA, 23 nt, Human
cagugugccccccauccuggccc

SEQ ID NO: 2552212 - RNA, 22 nt, Human
cagugugccccccauccuggcc

SEQ ID NO: 2552213 - RNA, 20 nt, Human
cagugugccccccauccugg

SEQ ID NO: 2552214 - RNA, 14 nt, Human
cagugugucuaaau

SEQ ID NO: 2552215 - RNA, 21 nt, Human
cagugugggaaugcggcaaga

SEQ ID NO: 2552216 - RNA, 23 nt, Human
cagugugggaaugcggcaagaag

SEQ ID NO: 2552217 - RNA, 23 nt, Human
cagugugucuaaauuugaauguu

SEQ ID NO: 2552218 - RNA, 19 nt, Human
cagugugccccccauccug

SEQ ID NO: 2552219 - RNA, 17 nt, Human
cagugugccccccaucc

SEQ ID NO: 2552220 - RNA, 15 nt, Human
cagugugccccccau

SEQ ID NO: 2552221 - RNA, 14 nt, Human
cagugugcccccca

SEQ ID NO: 2552222 - RNA, 15 nt, Human
cagugugcacuaagg

SEQ ID NO: 2552223 - RNA, 19 nt, Human
cagugugcacuaaggggcc

SEQ ID NO: 2552224 - RNA, 13 nt, Human
cagugugcccccc

SEQ ID NO: 2552225 - RNA, 23 nt, Human
cagugugcacuaaggggcccggc

SEQ ID NO: 2552226 - RNA, 22 nt, Human
cagugugaucccaagugccagu

SEQ ID NO: 2552227 - RNA, 19 nt, Human
cagugugaggccagggcag

SEQ ID NO: 2552228 - RNA, 18 nt, Human
cagugugaucccaagugc

SEQ ID NO: 2552229 - RNA, 19 nt, Human
cagugugaucccaagugcc

SEQ ID NO: 2552230 - RNA, 17 nt, Human
cagugugaggccagggc

SEQ ID NO: 2552231 - RNA, 18 nt, Human
cagugugaggccagggca

SEQ ID NO: 2552232 - RNA, 16 nt, Human
cagugugaggccaggg

SEQ ID NO: 2552233 - RNA, 21 nt, Human
cagugugaaguuagaauuccu

SEQ ID NO: 2552234 - RNA, 16 nt, Human
caguggcagcugcuuu

SEQ ID NO: 2552235 - RNA, 15 nt, Human
caguggcagcugcuu

SEQ ID NO: 2552236 - RNA, 14 nt, Human
caguggcagcugcu

SEQ ID NO: 2552237 - RNA, 13 nt, Human
caguggcagcugc

SEQ ID NO: 2552238 - RNA, 14 nt, Human
caguggagaauuau

SEQ ID NO: 2552239 - RNA, 21 nt, Human
caguggacuuuccacccccuc

SEQ ID NO: 2552240 - RNA, 22 nt, Human
caguggacuuuccacccccucc

SEQ ID NO: 2552241 - RNA, 13 nt, Human
caguggagaauua

SEQ ID NO: 2552242 - RNA, 23 nt, Human
caguggacuuuccacccccuccc

SEQ ID NO: 2552243 - RNA, 13 nt, Human
caguggaagaagc

SEQ ID NO: 2552244 - RNA, 17 nt, Human
caguggacuuuccaccc

SEQ ID NO: 2552245 - RNA, 18 nt, Human
caguggacuuuccacccc

SEQ ID NO: 2552246 - RNA, 19 nt, Human
caguggacuuuccaccccc

SEQ ID NO: 2552247 - RNA, 20 nt, Human
caguggacuuuccacccccu

SEQ ID NO: 2552248 - RNA, 20 nt, Human
caguggaggaagagggacag

SEQ ID NO: 2552249 - RNA, 15 nt, Human
caguggaggaagagg

SEQ ID NO: 2552250 - RNA, 12 nt, Human
caguggcagcug

SEQ ID NO: 2552251 - RNA, 23 nt, Human
caguggaauauaaggaaagcaau

SEQ ID NO: 2552252 - RNA, 13 nt, Human
caguggacaccag

SEQ ID NO: 2552253 - RNA, 22 nt, Human
caguggacaccaggagucccug

SEQ ID NO: 2552254 - RNA, 11 nt, Human
cagugggaacu

SEQ ID NO: 2552255 - RNA, 11 nt, Human
cagugguuaag

SEQ ID NO: 2552256 - RNA, 22 nt, Human
cagugggaacgugacugcccca

SEQ ID NO: 2552257 - RNA, 14 nt, Human
cagugguuauuuag

SEQ ID NO: 2552258 - RNA, 22 nt, Human
cagugguuccuaauccucuagg

SEQ ID NO: 2552259 - RNA, 21 nt, Human
cagugguuuuauacugaagga

SEQ ID NO: 2552260 - RNA, 15 nt, Human
cagugguuuuauacu

SEQ ID NO: 2552261 - RNA, 22 nt, Human
cagugguuugagacacugguuu

SEQ ID NO: 2552262 - RNA, 18 nt, Human
cagugguuugagacacug

SEQ ID NO: 2552263 - RNA, 14 nt, Human
cagugguugcuguu

SEQ ID NO: 2552264 - RNA, 13 nt, Human
cagugguugcugu

SEQ ID NO: 2552265 - RNA, 18 nt, Human
caguggcugcugcccagg

SEQ ID NO: 2552266 - RNA, 17 nt, Human
caguggcugcugcccag

SEQ ID NO: 2552267 - RNA, 15 nt, Human
caguggcugcugccc

SEQ ID NO: 2552268 - RNA, 14 nt, Human
caguggcugcugcc

SEQ ID NO: 2552269 - RNA, 16 nt, Human
caguggcuggaucugu

SEQ ID NO: 2552270 - RNA, 18 nt, Human
caguggcuggaucuguga

SEQ ID NO: 2552271 - RNA, 20 nt, Human
caguggcuggaucugugagg

SEQ ID NO: 2552272 - RNA, 21 nt, Human
caguggcuucaucugucaagu

SEQ ID NO: 2552273 - RNA, 12 nt, Human
cagugggaaaua

SEQ ID NO: 2552274 - RNA, 14 nt, Human
cagugggaaauauu

SEQ ID NO: 2552275 - RNA, 19 nt, Human
cagugggaacgugacugcc

SEQ ID NO: 2552276 - RNA, 20 nt, Human
cagugggaacgugacugccc

SEQ ID NO: 2552277 - RNA, 21 nt, Human
cagugggaacgugacugcccc

SEQ ID NO: 2552278 - RNA, 19 nt, Human
caguggcugguccagggcu

SEQ ID NO: 2552279 - RNA, 18 nt, Human
caguggcugguccagggc

SEQ ID NO: 2552280 - RNA, 20 nt, Human
caguggcugguccagggcua

SEQ ID NO: 2552281 - RNA, 19 nt, Human
caguggcuucaucugucaa

SEQ ID NO: 2552282 - RNA, 16 nt, Human
caguggccucaacccu

SEQ ID NO: 2552283 - RNA, 19 nt, Human
caguggccucaacccuccc

SEQ ID NO: 2552284 - RNA, 20 nt, Human
caguggccucaacccucccu

SEQ ID NO: 2552285 - RNA, 21 nt, Human
caguggccucaacccucccuc

SEQ ID NO: 2552286 - RNA, 22 nt, Human
caguggccucaacccucccuca

SEQ ID NO: 2552287 - RNA, 13 nt, Human
caguggcugcugc

SEQ ID NO: 2552288 - RNA, 20 nt, Human
caguggcucacgccuaugau

SEQ ID NO: 2552289 - RNA, 23 nt, Human
caguggccucaacccucccucag

SEQ ID NO: 2552290 - RNA, 17 nt, Human
caguggcagggcucagg

SEQ ID NO: 2552291 - RNA, 15 nt, Human
caguggcagggcuca

SEQ ID NO: 2552292 - RNA, 14 nt, Human
caguggcagggcuc

SEQ ID NO: 2552293 - RNA, 15 nt, Human
caguggcauggcucc

SEQ ID NO: 2552294 - RNA, 14 nt, Human
caguggccacucag

SEQ ID NO: 2552295 - RNA, 13 nt, Human
caguggccacuca

SEQ ID NO: 2552296 - RNA, 18 nt, Human
caguggcagggcucagga

SEQ ID NO: 2552297 - RNA, 16 nt, Human
caguggcauggcucca

SEQ ID NO: 2552298 - RNA, 17 nt, Human
caguggcauggcuccag

SEQ ID NO: 2552299 - RNA, 19 nt, Human
caguggcauggcuccaguc

SEQ ID NO: 2552300 - RNA, 16 nt, Human
caguggauugcauuuc

SEQ ID NO: 2552301 - RNA, 19 nt, Human
caguggcacucaacaugag

SEQ ID NO: 2552302 - RNA, 14 nt, Human
caguggauuaauua

SEQ ID NO: 2552303 - RNA, 16 nt, Human
caguucuuugggccag

SEQ ID NO: 2552304 - RNA, 17 nt, Human
caguucuuugggccaga

SEQ ID NO: 2552305 - RNA, 18 nt, Human
caguucuuugggccagac

SEQ ID NO: 2552306 - RNA, 19 nt, Human
caguucuuugggccagaca

SEQ ID NO: 2552307 - RNA, 12 nt, Human
caguugaaaaac

SEQ ID NO: 2552308 - RNA, 18 nt, Human
caguugaaaaacagcuga

SEQ ID NO: 2552309 - RNA, 19 nt, Human
caguugaaaaacagcugag

SEQ ID NO: 2552310 - RNA, 20 nt, Human
caguucugcuccucuccagg

SEQ ID NO: 2552311 - RNA, 19 nt, Human
caguucugcuccucuccag

SEQ ID NO: 2552312 - RNA, 18 nt, Human
caguucugcuccucucca

SEQ ID NO: 2552313 - RNA, 17 nt, Human
caguucugcuccucucc

SEQ ID NO: 2552314 - RNA, 22 nt, Human
caguucugcuccucuccaggca

SEQ ID NO: 2552315 - RNA, 21 nt, Human
caguucugcuccucuccaggc

SEQ ID NO: 2552316 - RNA, 17 nt, Human
caguucugggugcuccc

SEQ ID NO: 2552317 - RNA, 16 nt, Human
caguucugcuccucuc

SEQ ID NO: 2552318 - RNA, 15 nt, Human
caguucugcuccucu

SEQ ID NO: 2552319 - RNA, 14 nt, Human
caguucugcuccuc

SEQ ID NO: 2552320 - RNA, 13 nt, Human
caguucugcuccu

SEQ ID NO: 2552321 - RNA, 13 nt, Human
caguucugcagcu

SEQ ID NO: 2552322 - RNA, 17 nt, Human
caguucuucgggaagag

SEQ ID NO: 2552323 - RNA, 20 nt, Human
caguucugggugcucccuac

SEQ ID NO: 2552324 - RNA, 23 nt, Human
caguucuucgggaagagaggagu

SEQ ID NO: 2552325 - RNA, 22 nt, Human
caguucuucgggaagagaggag

SEQ ID NO: 2552326 - RNA, 20 nt, Human
caguucuucgggaagagagg

SEQ ID NO: 2552327 - RNA, 19 nt, Human
caguucuucgggaagagag

SEQ ID NO: 2552328 - RNA, 16 nt, Human
caguucuugugugguu

SEQ ID NO: 2552329 - RNA, 24 nt, Human
caguucuucgggaagagaggaguu

SEQ ID NO: 2552330 - RNA, 15 nt, Human
caguucuuguguggu

SEQ ID NO: 2552331 - RNA, 16 nt, Human
caguucugaagaagau

SEQ ID NO: 2552332 - RNA, 15 nt, Human
caguucugaagaaga

SEQ ID NO: 2552333 - RNA, 22 nt, Human
caguucugaagaagaugguacc

SEQ ID NO: 2552334 - RNA, 21 nt, Human
caguucugaauaugcugcuca

SEQ ID NO: 2552335 - RNA, 14 nt, Human
caguucugaagaau

SEQ ID NO: 2552336 - RNA, 16 nt, Human
caguucucuucacuca

SEQ ID NO: 2552337 - RNA, 14 nt, Human
caguucugaagaag

SEQ ID NO: 2552338 - RNA, 13 nt, Human
caguucugaagaa

SEQ ID NO: 2552339 - RNA, 12 nt, Human
caguucugaaga

SEQ ID NO: 2552340 - RNA, 22 nt, Human
caguucucuccuucuucccccc

SEQ ID NO: 2552341 - RNA, 15 nt, Human
caguucucuccuucu

SEQ ID NO: 2552342 - RNA, 14 nt, Human
caguucucuccuuc

SEQ ID NO: 2552343 - RNA, 19 nt, Human
caguucuaguuugcauucc

SEQ ID NO: 2552344 - RNA, 18 nt, Human
caguucuaguuugcauuc

SEQ ID NO: 2552345 - RNA, 17 nt, Human
caguucuaguuugcauu

SEQ ID NO: 2552346 - RNA, 17 nt, Human
caguucuagucucucug

SEQ ID NO: 2552347 - RNA, 23 nt, Human
caguucccagaaucaaagcaaug

SEQ ID NO: 2552348 - RNA, 13 nt, Human
caguucucuccuu

SEQ ID NO: 2552349 - RNA, 22 nt, Human
caguucggugagcuacaaaugc

SEQ ID NO: 2552350 - RNA, 15 nt, Human
caguuccuuucaaug

SEQ ID NO: 2552351 - RNA, 21 nt, Human
caguuaccucugccucagaaa

SEQ ID NO: 2552352 - RNA, 17 nt, Human
caguuacagaaaguggu

SEQ ID NO: 2552353 - RNA, 22 nt, Human
caguuacaugcauacuucaaaa

SEQ ID NO: 2552354 - RNA, 19 nt, Human
caguuacuaagaagaaaau

SEQ ID NO: 2552355 - RNA, 14 nt, Human
caguuacucagaau

SEQ ID NO: 2552356 - RNA, 19 nt, Human
caguucccccaaccucaga

SEQ ID NO: 2552357 - RNA, 18 nt, Human
caguucccccaaccucag

SEQ ID NO: 2552358 - RNA, 17 nt, Human
caguucccccaaccuca

SEQ ID NO: 2552359 - RNA, 22 nt, Human
caguuacuaagaagaaaauugc

SEQ ID NO: 2552360 - RNA, 13 nt, Human
caguucccuuggc

SEQ ID NO: 2552361 - RNA, 23 nt, Human
caguuccucuuugcauggaauuu

SEQ ID NO: 2552362 - RNA, 18 nt, Human
caguuccucuuugcaugg

SEQ ID NO: 2552363 - RNA, 17 nt, Human
caguuccucuuugcaug

SEQ ID NO: 2552364 - RNA, 22 nt, Human
caguuccggauuggcuugugug

SEQ ID NO: 2552365 - RNA, 20 nt, Human
caguuccggauuggcuugug

SEQ ID NO: 2552366 - RNA, 13 nt, Human
caguuccucgccc

SEQ ID NO: 2552367 - RNA, 14 nt, Human
caguuccucgcccu

SEQ ID NO: 2552368 - RNA, 17 nt, Human
caguuccucgcccuggg

SEQ ID NO: 2552369 - RNA, 15 nt, Human
caguuccucuuugca

SEQ ID NO: 2552370 - RNA, 18 nt, Human
caguuccucgcccugggu

SEQ ID NO: 2552371 - RNA, 14 nt, Human
caguucccuuggcc

SEQ ID NO: 2552372 - RNA, 15 nt, Human
caguucccuuggccu

SEQ ID NO: 2552373 - RNA, 16 nt, Human
caguucccuuggccuc

SEQ ID NO: 2552374 - RNA, 17 nt, Human
caguucccuuggccuca

SEQ ID NO: 2552375 - RNA, 18 nt, Human
caguucccuuggccucag

SEQ ID NO: 2552376 - RNA, 19 nt, Human
caguucccuuggccucaga

SEQ ID NO: 2552377 - RNA, 18 nt, Human
caguuccgauuucccagg

SEQ ID NO: 2552378 - RNA, 17 nt, Human
caguuccgauuucccag

SEQ ID NO: 2552379 - RNA, 20 nt, Human
caguucccuuggccucagaa

SEQ ID NO: 2552380 - RNA, 14 nt, Human
caguuaagagaaau

SEQ ID NO: 2552381 - RNA, 13 nt, Human
caguuaagagaaa

SEQ ID NO: 2552382 - RNA, 15 nt, Human
caguuaagccuuugg

SEQ ID NO: 2552383 - RNA, 17 nt, Human
caguuaagccuuuggaa

SEQ ID NO: 2552384 - RNA, 14 nt, Human
caguuaagccuuug

SEQ ID NO: 2552385 - RNA, 15 nt, Human
caguuacagaaagug

SEQ ID NO: 2552386 - RNA, 14 nt, Human
caguuacagaaagu

SEQ ID NO: 2552387 - RNA, 13 nt, Human
caguuacagaaag

SEQ ID NO: 2552388 - RNA, 20 nt, Human
caguuaagccuuuggaaaca

SEQ ID NO: 2552389 - RNA, 13 nt, Human
caguuaauuacau

SEQ ID NO: 2552390 - RNA, 21 nt, Human
caguguuccccaucugggucc

SEQ ID NO: 2552391 - RNA, 19 nt, Human
caguguuccccaucugggu

SEQ ID NO: 2552392 - RNA, 16 nt, Human
caguguucuguuuaau

SEQ ID NO: 2552393 - RNA, 13 nt, Human
caguguucuguuu

SEQ ID NO: 2552394 - RNA, 18 nt, Human
caguguugagccuuuucc

SEQ ID NO: 2552395 - RNA, 19 nt, Human
caguguuguggauuuaaca

SEQ ID NO: 2552396 - RNA, 20 nt, Human
caguguuguggauuuaacag

SEQ ID NO: 2552397 - RNA, 22 nt, Human
caguguuguggauuuaacagaa

SEQ ID NO: 2552398 - RNA, 23 nt, Human
caguguuaggccuggcacagugu

SEQ ID NO: 2552399 - RNA, 22 nt, Human
caguguuaggccuggcacagug

SEQ ID NO: 2552400 - RNA, 21 nt, Human
caguguuaggccuggcacagu

SEQ ID NO: 2552401 - RNA, 20 nt, Human
caguguuaggccuggcacag

SEQ ID NO: 2552402 - RNA, 19 nt, Human
caguguuaggccuggcaca

SEQ ID NO: 2552403 - RNA, 18 nt, Human
caguguuaggccuggcac

SEQ ID NO: 2552404 - RNA, 17 nt, Human
caguguuaggccuggca

SEQ ID NO: 2552405 - RNA, 18 nt, Human
caguguuccgugguuaaa

SEQ ID NO: 2552406 - RNA, 19 nt, Human
caguguuagggaagggccu

SEQ ID NO: 2552407 - RNA, 14 nt, Human
caguguuccccauc

SEQ ID NO: 2552408 - RNA, 14 nt, Human
caguguuauuuucu

SEQ ID NO: 2552409 - RNA, 16 nt, Human
caguguuaggccuggc

SEQ ID NO: 2552410 - RNA, 14 nt, Human
caguguuaaaugug

SEQ ID NO: 2552411 - RNA, 19 nt, Human
caguguuaaaugugaugaa

SEQ ID NO: 2552412 - RNA, 17 nt, Human
caguguguuugugauug

SEQ ID NO: 2552413 - RNA, 15 nt, Human
caguguuaaaugaaa

SEQ ID NO: 2552414 - RNA, 18 nt, Human
caguguuaaaugaaauug

SEQ ID NO: 2552415 - RNA, 17 nt, Human
caguguuaaaugaaauu

SEQ ID NO: 2552416 - RNA, 16 nt, Human
caguguuaaaugaaau

SEQ ID NO: 2552417 - RNA, 19 nt, Human
caguguuuuuguaaagugu

SEQ ID NO: 2552418 - RNA, 15 nt, Human
caguguuuuuguaaa

SEQ ID NO: 2552419 - RNA, 14 nt, Human
caguguuuuuguaa

SEQ ID NO: 2552420 - RNA, 22 nt, Human
caguguuuucugggauaaguaa

SEQ ID NO: 2552421 - RNA, 15 nt, Human
caguguuuucuggga

SEQ ID NO: 2552422 - RNA, 21 nt, Human
caguguuuuuguaaagugugg

SEQ ID NO: 2552423 - RNA, 20 nt, Human
caguguuuuuguaaagugug

SEQ ID NO: 2552424 - RNA, 15 nt, Human
caguuaaaaaaaauu

SEQ ID NO: 2552425 - RNA, 16 nt, Human
caguuaaaaaaaauuu

SEQ ID NO: 2552426 - RNA, 19 nt, Human
caguuaaaaaaaauuuuaa

SEQ ID NO: 2552427 - RNA, 19 nt, Human
caguuaacuuuaagacuga

SEQ ID NO: 2552428 - RNA, 16 nt, Human
caguuaacuuucagaa

SEQ ID NO: 2552429 - RNA, 20 nt, Human
caguuaacuuucagaagaga

SEQ ID NO: 2552430 - RNA, 22 nt, Human
caguuaacuuucagaagagaug

SEQ ID NO: 2552431 - RNA, 18 nt, Human
caguguuucccauaauuu

SEQ ID NO: 2552432 - RNA, 20 nt, Human
caguguuucccauaauuuuc

SEQ ID NO: 2552433 - RNA, 14 nt, Human
caguguuuccuuuu

SEQ ID NO: 2552434 - RNA, 21 nt, Human
caguguuucccauaauuuucu

SEQ ID NO: 2552435 - RNA, 14 nt, Human
caguguuucccaua

SEQ ID NO: 2552436 - RNA, 15 nt, Human
caguguuucccauaa

SEQ ID NO: 2552437 - RNA, 17 nt, Human
caguguuucccauaauu

SEQ ID NO: 2552438 - RNA, 22 nt, Human
caguguucuguuuaauacucau

SEQ ID NO: 2552439 - RNA, 14 nt, Human
caucccuccccagu

SEQ ID NO: 2552440 - RNA, 19 nt, Human
caucccucuggggcuguuc

SEQ ID NO: 2552441 - RNA, 13 nt, Human
caucccugaaggc

SEQ ID NO: 2552442 - RNA, 11 nt, Human
caucccugaag

SEQ ID NO: 2552443 - RNA, 13 nt, Human
caucccuccccag

SEQ ID NO: 2552444 - RNA, 15 nt, Human
cauccagguucagcu

SEQ ID NO: 2552445 - RNA, 19 nt, Human
cauccagggcucugaccag

SEQ ID NO: 2552446 - RNA, 22 nt, Human
caucccuacccccuaagagcca

SEQ ID NO: 2552447 - RNA, 14 nt, Human
caucccuacccccu

SEQ ID NO: 2552448 - RNA, 23 nt, Human
cauccaaggagaaacagagacag

SEQ ID NO: 2552449 - RNA, 13 nt, Human
cauccaauccuca

SEQ ID NO: 2552450 - RNA, 14 nt, Human
cauccaauccucac

SEQ ID NO: 2552451 - RNA, 15 nt, Human
cauccaauccucacu

SEQ ID NO: 2552452 - RNA, 16 nt, Human
cauccaauccucacug

SEQ ID NO: 2552453 - RNA, 17 nt, Human
cauccaauccucacugg

SEQ ID NO: 2552454 - RNA, 20 nt, Human
cauccaaucuaaccacauca

SEQ ID NO: 2552455 - RNA, 14 nt, Human
cauccaaugcucaa

SEQ ID NO: 2552456 - RNA, 18 nt, Human
cauccaauccucacuggg

SEQ ID NO: 2552457 - RNA, 19 nt, Human
cauccaauccucacugggu

SEQ ID NO: 2552458 - RNA, 19 nt, Human
cauccaaucuaaccacauc

SEQ ID NO: 2552459 - RNA, 21 nt, Human
cauccaauccucacugggugg

SEQ ID NO: 2552460 - RNA, 21 nt, Human
cauccacauuguuuuaaaaag

SEQ ID NO: 2552461 - RNA, 12 nt, Human
cauccaccccau

SEQ ID NO: 2552462 - RNA, 14 nt, Human
cauccaccccaucc

SEQ ID NO: 2552463 - RNA, 18 nt, Human
cauccacauuguuuuaaa

SEQ ID NO: 2552464 - RNA, 17 nt, Human
cauccacauuguuuuaa

SEQ ID NO: 2552465 - RNA, 17 nt, Human
cauccacaugggagccg

SEQ ID NO: 2552466 - RNA, 18 nt, Human
cauccacacacgcaggaa

SEQ ID NO: 2552467 - RNA, 23 nt, Human
cauccaaugcucaagaaacaacu

SEQ ID NO: 2552468 - RNA, 21 nt, Human
cauccagggcccccaucucau

SEQ ID NO: 2552469 - RNA, 12 nt, Human
cauccaggcagu

SEQ ID NO: 2552470 - RNA, 11 nt, Human
cauccagggcc

SEQ ID NO: 2552471 - RNA, 20 nt, Human
cauccacuagugcaaaucau

SEQ ID NO: 2552472 - RNA, 14 nt, Human
cauccacuagugca

SEQ ID NO: 2552473 - RNA, 16 nt, Human
cauccaccuccuucuc

SEQ ID NO: 2552474 - RNA, 15 nt, Human
cauccaccuccuucu

SEQ ID NO: 2552475 - RNA, 14 nt, Human
cauccaccuccuuc

SEQ ID NO: 2552476 - RNA, 13 nt, Human
cauccaccuccuu

SEQ ID NO: 2552477 - RNA, 12 nt, Human
cauccaccuccu

SEQ ID NO: 2552478 - RNA, 22 nt, Human
cauccacuagugcaaaucauag

SEQ ID NO: 2552479 - RNA, 21 nt, Human
cauccacuagugcaaaucaua

SEQ ID NO: 2552480 - RNA, 14 nt, Human
cauccacucuaccc

SEQ ID NO: 2552481 - RNA, 15 nt, Human
cauccacucuacccu

SEQ ID NO: 2552482 - RNA, 21 nt, Human
caucauugaaaucuuuuugcu

SEQ ID NO: 2552483 - RNA, 20 nt, Human
caucauugaaaucuuuuugc

SEQ ID NO: 2552484 - RNA, 15 nt, Human
caucauugaaaucuu

SEQ ID NO: 2552485 - RNA, 14 nt, Human
caucauugaaaucu

SEQ ID NO: 2552486 - RNA, 13 nt, Human
caucacauuuuug

SEQ ID NO: 2552487 - RNA, 17 nt, Human
caucauucucugucuca

SEQ ID NO: 2552488 - RNA, 21 nt, Human
caucauucucugucucaucca

SEQ ID NO: 2552489 - RNA, 22 nt, Human
caucauucucugucucauccau

SEQ ID NO: 2552490 - RNA, 13 nt, Human
caucauugaaauc

SEQ ID NO: 2552491 - RNA, 15 nt, Human
caucaccaacgucug

SEQ ID NO: 2552492 - RNA, 21 nt, Human
caucacaguuuugguugcuuu

SEQ ID NO: 2552493 - RNA, 22 nt, Human
caucacaguuuugguugcuuua

SEQ ID NO: 2552494 - RNA, 13 nt, Human
caucacaguuuug

SEQ ID NO: 2552495 - RNA, 22 nt, Human
caucacaggguugggcccagau

SEQ ID NO: 2552496 - RNA, 18 nt, Human
caucauuuuuccuucccu

SEQ ID NO: 2552497 - RNA, 22 nt, Human
caucauuuugcauucaaauuaa

SEQ ID NO: 2552498 - RNA, 17 nt, Human
caucauuuuuguaucua

SEQ ID NO: 2552499 - RNA, 20 nt, Human
caucauuuugcauucaaauu

SEQ ID NO: 2552500 - RNA, 18 nt, Human
caucauuuugcauucaaa

SEQ ID NO: 2552501 - RNA, 16 nt, Human
caucauuuugcauuca

SEQ ID NO: 2552502 - RNA, 23 nt, Human
cauccaaaauaguuaagacauga

SEQ ID NO: 2552503 - RNA, 15 nt, Human
cauccaaagcagaca

SEQ ID NO: 2552504 - RNA, 16 nt, Human
cauccaaagcagacag

SEQ ID NO: 2552505 - RNA, 19 nt, Human
caucauuguauauaugugu

SEQ ID NO: 2552506 - RNA, 14 nt, Human
caucauugcacucu

SEQ ID NO: 2552507 - RNA, 24 nt, Human
caucauucucugucucauccauca

SEQ ID NO: 2552508 - RNA, 14 nt, Human
caucauuguauaua

SEQ ID NO: 2552509 - RNA, 13 nt, Human
caucauuguauau

SEQ ID NO: 2552510 - RNA, 15 nt, Human
caucauuguauauau

SEQ ID NO: 2552511 - RNA, 18 nt, Human
cauccaaauaagaaaccu

SEQ ID NO: 2552512 - RNA, 16 nt, Human
cauccaaccuucccaa

SEQ ID NO: 2552513 - RNA, 21 nt, Human
cauccaaggccagguucuccg

SEQ ID NO: 2552514 - RNA, 21 nt, Human
cauccaaggagaaacagagac

SEQ ID NO: 2552515 - RNA, 22 nt, Human
cauccaaggagaaacagagaca

SEQ ID NO: 2552516 - RNA, 15 nt, Human
cauccaacuccagga

SEQ ID NO: 2552517 - RNA, 17 nt, Human
cauccaagagugcgccg

SEQ ID NO: 2552518 - RNA, 14 nt, Human
cauccaaggagaaa

SEQ ID NO: 2552519 - RNA, 14 nt, Human
cauccaaccuuccc

SEQ ID NO: 2552520 - RNA, 21 nt, Human
cauccaaccccccaccugcca

SEQ ID NO: 2552521 - RNA, 16 nt, Human
cauccaaccccccacc

SEQ ID NO: 2552522 - RNA, 19 nt, Human
cauccaaccccccaccugc

SEQ ID NO: 2552523 - RNA, 17 nt, Human
cauccaaagcagacagc

SEQ ID NO: 2552524 - RNA, 18 nt, Human
cauccaaagcagacagcu

SEQ ID NO: 2552525 - RNA, 21 nt, Human
cauccaaagcagacagcucca

SEQ ID NO: 2552526 - RNA, 15 nt, Human
cauccaaccccccac

SEQ ID NO: 2552527 - RNA, 21 nt, Human
caucccugaaggccccgccca

SEQ ID NO: 2552528 - RNA, 19 nt, Human
caucccugaaggccccgcc

SEQ ID NO: 2552529 - RNA, 18 nt, Human
caucccugaaggccccgc

SEQ ID NO: 2552530 - RNA, 17 nt, Human
caucccugaaggccccg

SEQ ID NO: 2552531 - RNA, 21 nt, Human
cauccuaacuccaugucucug

SEQ ID NO: 2552532 - RNA, 14 nt, Human
cauccuaacuccau

SEQ ID NO: 2552533 - RNA, 17 nt, Human
cauccguaguucccuga

SEQ ID NO: 2552534 - RNA, 18 nt, Human
cauccguaguucccugaa

SEQ ID NO: 2552535 - RNA, 21 nt, Human
cauccguaguucccugaaaac

SEQ ID NO: 2552536 - RNA, 16 nt, Human
cauccguaguucccug

SEQ ID NO: 2552537 - RNA, 14 nt, Human
caucuugguaaauu

SEQ ID NO: 2552538 - RNA, 13 nt, Human
caucuugguaaau

SEQ ID NO: 2552539 - RNA, 12 nt, Human
caucuugguaaa

SEQ ID NO: 2552540 - RNA, 11 nt, Human
caucuuggggg

SEQ ID NO: 2552541 - RNA, 20 nt, Human
caucuuggggacaucucuuu

SEQ ID NO: 2552542 - RNA, 18 nt, Human
caucuuggggacaucucu

SEQ ID NO: 2552543 - RNA, 16 nt, Human
caucuuggggacaucu

SEQ ID NO: 2552544 - RNA, 15 nt, Human
caucuuggggacauc

SEQ ID NO: 2552545 - RNA, 16 nt, Human
caucuuggagggacca

SEQ ID NO: 2552546 - RNA, 15 nt, Human
caucuugcuucccua

SEQ ID NO: 2552547 - RNA, 20 nt, Human
caucuugcucugcugacaga

SEQ ID NO: 2552548 - RNA, 14 nt, Human
caucuugcuucccu

SEQ ID NO: 2552549 - RNA, 13 nt, Human
caucuugcuuccc

SEQ ID NO: 2552550 - RNA, 14 nt, Human
caucuugcucugcu

SEQ ID NO: 2552551 - RNA, 13 nt, Human
caucuugcucugc

SEQ ID NO: 2552552 - RNA, 13 nt, Human
caucuucugccuu

SEQ ID NO: 2552553 - RNA, 15 nt, Human
caucuugaccaagca

SEQ ID NO: 2552554 - RNA, 16 nt, Human
caucuugaccaagcag

SEQ ID NO: 2552555 - RNA, 17 nt, Human
caucuugaccaagcagg

SEQ ID NO: 2552556 - RNA, 18 nt, Human
caucuugaccaagcagga

SEQ ID NO: 2552557 - RNA, 20 nt, Human
caucuugaccaagcaggaag

SEQ ID NO: 2552558 - RNA, 21 nt, Human
caucuugaccaagcaggaagc

SEQ ID NO: 2552559 - RNA, 22 nt, Human
caucuugaccaagcaggaagcu

SEQ ID NO: 2552560 - RNA, 20 nt, Human
caucuugaucugcucagccc

SEQ ID NO: 2552561 - RNA, 19 nt, Human
caucuugaucugcucagcc

SEQ ID NO: 2552562 - RNA, 23 nt, Human
caucuugaccaagcaggaagcuc

SEQ ID NO: 2552563 - RNA, 24 nt, Human
caucuugaccaagcaggaagcuca

SEQ ID NO: 2552564 - RNA, 22 nt, Human
caucuugaucugcucagcccug

SEQ ID NO: 2552565 - RNA, 21 nt, Human
caucuugaucugcucagcccu

SEQ ID NO: 2552566 - RNA, 23 nt, Human
caucuugaucugcucagcccugg

SEQ ID NO: 2552567 - RNA, 21 nt, Human
caucuucuaaacccaauccaa

SEQ ID NO: 2552568 - RNA, 12 nt, Human
caucuucucagc

SEQ ID NO: 2552569 - RNA, 22 nt, Human
caucuucccuagaggguuccug

SEQ ID NO: 2552570 - RNA, 18 nt, Human
caucuucucagcucccau

SEQ ID NO: 2552571 - RNA, 17 nt, Human
caucuucucagcuccca

SEQ ID NO: 2552572 - RNA, 14 nt, Human
caucuucucagcuc

SEQ ID NO: 2552573 - RNA, 13 nt, Human
caucuucucagcu

SEQ ID NO: 2552574 - RNA, 21 nt, Human
caucuucucagcucccauuuc

SEQ ID NO: 2552575 - RNA, 14 nt, Human
caucuucuccaucu

SEQ ID NO: 2552576 - RNA, 16 nt, Human
caucuucuccaucugg

SEQ ID NO: 2552577 - RNA, 17 nt, Human
caucuucuccaucuggc

SEQ ID NO: 2552578 - RNA, 10 nt, Human
caucuuccca

SEQ ID NO: 2552579 - RNA, 21 nt, Human
caucuuccagguggggugagg

SEQ ID NO: 2552580 - RNA, 16 nt, Human
caucuuccaggugggg

SEQ ID NO: 2552581 - RNA, 14 nt, Human
caucuuccaggugg

SEQ ID NO: 2552582 - RNA, 21 nt, Human
caucuuccagaagugugauug

SEQ ID NO: 2552583 - RNA, 20 nt, Human
caucuuccagaagugugauu

SEQ ID NO: 2552584 - RNA, 19 nt, Human
caucuuccagaagugugau

SEQ ID NO: 2552585 - RNA, 18 nt, Human
caucuuccagaaguguga

SEQ ID NO: 2552586 - RNA, 14 nt, Human
caucuucccagcag

SEQ ID NO: 2552587 - RNA, 12 nt, Human
caucuucccagc

SEQ ID NO: 2552588 - RNA, 21 nt, Human
caucuucccagcagggccacu

SEQ ID NO: 2552589 - RNA, 13 nt, Human
caucucuguccca

SEQ ID NO: 2552590 - RNA, 22 nt, Human
caucucccagauaaugugaaaa

SEQ ID NO: 2552591 - RNA, 18 nt, Human
caucucuuagcuccccuc

SEQ ID NO: 2552592 - RNA, 17 nt, Human
caucucuuagcuccccu

SEQ ID NO: 2552593 - RNA, 23 nt, Human
caucucuuacgcccaacccuucc

SEQ ID NO: 2552594 - RNA, 16 nt, Human
caucucuuagcucccc

SEQ ID NO: 2552595 - RNA, 21 nt, Human
caucucuuccuccgaggccag

SEQ ID NO: 2552596 - RNA, 23 nt, Human
caucucuuccuacccaaccacuc

SEQ ID NO: 2552597 - RNA, 23 nt, Human
caucucuuagcuccccuccaacc

SEQ ID NO: 2552598 - RNA, 21 nt, Human
caucucuuagcuccccuccaa

SEQ ID NO: 2552599 - RNA, 19 nt, Human
caucucuuagcuccccucc

SEQ ID NO: 2552600 - RNA, 22 nt, Human
caucucuucuggguuccuuccu

SEQ ID NO: 2552601 - RNA, 15 nt, Human
caucucuugaggcca

SEQ ID NO: 2552602 - RNA, 20 nt, Human
caucucuugaggccaggagu

SEQ ID NO: 2552603 - RNA, 20 nt, Human
caucuccaagaaugcugaaa

SEQ ID NO: 2552604 - RNA, 19 nt, Human
caucuccaagaaugcugaa

SEQ ID NO: 2552605 - RNA, 16 nt, Human
caucuccacccccagc

SEQ ID NO: 2552606 - RNA, 18 nt, Human
caucuccaagaaugcuga

SEQ ID NO: 2552607 - RNA, 17 nt, Human
caucuccaagaaugcug

SEQ ID NO: 2552608 - RNA, 16 nt, Human
caucuccaagaaugcu

SEQ ID NO: 2552609 - RNA, 14 nt, Human
caucuccagggagu

SEQ ID NO: 2552610 - RNA, 20 nt, Human
caucuccaccugcucccagg

SEQ ID NO: 2552611 - RNA, 16 nt, Human
caucuccaccugcucc

SEQ ID NO: 2552612 - RNA, 23 nt, Human
caucuccaagaaugcugaaacca

SEQ ID NO: 2552613 - RNA, 14 nt, Human
caucuccacuccag

SEQ ID NO: 2552614 - RNA, 17 nt, Human
caucucccagauaaugu

SEQ ID NO: 2552615 - RNA, 18 nt, Human
caucucccagauaaugug

SEQ ID NO: 2552616 - RNA, 17 nt, Human
caucuccaucuugaagg

SEQ ID NO: 2552617 - RNA, 21 nt, Human
caucucccaccuagcagcacc

SEQ ID NO: 2552618 - RNA, 21 nt, Human
caucuccagggaguccccucc

SEQ ID NO: 2552619 - RNA, 20 nt, Human
caucuccagggaguccccuc

SEQ ID NO: 2552620 - RNA, 19 nt, Human
caucuccagggaguccccu

SEQ ID NO: 2552621 - RNA, 17 nt, Human
caucuccagggaguccc

SEQ ID NO: 2552622 - RNA, 22 nt, Human
caucuccagggaguccccuccc

SEQ ID NO: 2552623 - RNA, 14 nt, Human
caucuccaucagcu

SEQ ID NO: 2552624 - RNA, 15 nt, Human
caucuccaucagcug

SEQ ID NO: 2552625 - RNA, 16 nt, Human
caucuccaucagcugu

SEQ ID NO: 2552626 - RNA, 14 nt, Human
caucugagaaaagc

SEQ ID NO: 2552627 - RNA, 23 nt, Human
caucugagaaaagcuuugaaccc

SEQ ID NO: 2552628 - RNA, 18 nt, Human
caucugagcaagagcugg

SEQ ID NO: 2552629 - RNA, 15 nt, Human
caucugagcaagagc

SEQ ID NO: 2552630 - RNA, 21 nt, Human
caucugcaccccuucucuccu

SEQ ID NO: 2552631 - RNA, 19 nt, Human
caucugcaccccuucucuc

SEQ ID NO: 2552632 - RNA, 17 nt, Human
caucugcaccccuucuc

SEQ ID NO: 2552633 - RNA, 16 nt, Human
caucugcaccccuucu

SEQ ID NO: 2552634 - RNA, 18 nt, Human
caucugcaccccccuggg

SEQ ID NO: 2552635 - RNA, 19 nt, Human
caucugcaccccccugggc

SEQ ID NO: 2552636 - RNA, 22 nt, Human
caucuuccaaggguacuaagga

SEQ ID NO: 2552637 - RNA, 13 nt, Human
caucuuccagaag

SEQ ID NO: 2552638 - RNA, 12 nt, Human
caucuuccagaa

SEQ ID NO: 2552639 - RNA, 20 nt, Human
caucuuauuuucauguauau

SEQ ID NO: 2552640 - RNA, 14 nt, Human
caucuucaaagcuu

SEQ ID NO: 2552641 - RNA, 14 nt, Human
caucuucagcuucu

SEQ ID NO: 2552642 - RNA, 13 nt, Human
caucuucagcuuc

SEQ ID NO: 2552643 - RNA, 14 nt, Human
caucuucacuucua

SEQ ID NO: 2552644 - RNA, 21 nt, Human
caucuucacuucuaaaugcau

SEQ ID NO: 2552645 - RNA, 23 nt, Human
caucugcaccccuucucuccucc

SEQ ID NO: 2552646 - RNA, 22 nt, Human
caucugcaccccuucucuccuc

SEQ ID NO: 2552647 - RNA, 20 nt, Human
caucuuaguauuugcauauu

SEQ ID NO: 2552648 - RNA, 19 nt, Human
caucuuaguauuugcauau

SEQ ID NO: 2552649 - RNA, 14 nt, Human
caucuuagugccug

SEQ ID NO: 2552650 - RNA, 22 nt, Human
cauccucauacccacccccacc

SEQ ID NO: 2552651 - RNA, 21 nt, Human
cauccucauacccacccccac

SEQ ID NO: 2552652 - RNA, 18 nt, Human
cauccucauacccacccc

SEQ ID NO: 2552653 - RNA, 17 nt, Human
cauccucauacccaccc

SEQ ID NO: 2552654 - RNA, 22 nt, Human
cauccucaaacacugcaggcau

SEQ ID NO: 2552655 - RNA, 18 nt, Human
cauccuccacguucugcu

SEQ ID NO: 2552656 - RNA, 20 nt, Human
cauccuccacguucugcuca

SEQ ID NO: 2552657 - RNA, 14 nt, Human
cauccuccaagaau

SEQ ID NO: 2552658 - RNA, 21 nt, Human
cauccuccacguucugcucau

SEQ ID NO: 2552659 - RNA, 16 nt, Human
cauccuccagcaggga

SEQ ID NO: 2552660 - RNA, 13 nt, Human
cauccuccagcag

SEQ ID NO: 2552661 - RNA, 14 nt, Human
cauccuccagcagg

SEQ ID NO: 2552662 - RNA, 17 nt, Human
cauccuccagcuucugg

SEQ ID NO: 2552663 - RNA, 15 nt, Human
cauccuccagcuucu

SEQ ID NO: 2552664 - RNA, 14 nt, Human
cauccuccagcuuc

SEQ ID NO: 2552665 - RNA, 13 nt, Human
cauccuccagcuu

SEQ ID NO: 2552666 - RNA, 12 nt, Human
cauccuccagcu

SEQ ID NO: 2552667 - RNA, 13 nt, Human
cauccucccaagg

SEQ ID NO: 2552668 - RNA, 19 nt, Human
cauccuccucagaucuucu

SEQ ID NO: 2552669 - RNA, 18 nt, Human
cauccuccucagaucuuc

SEQ ID NO: 2552670 - RNA, 16 nt, Human
cauccuccucagaucu

SEQ ID NO: 2552671 - RNA, 15 nt, Human
cauccuccucagauc

SEQ ID NO: 2552672 - RNA, 12 nt, Human
cauccuccucag

SEQ ID NO: 2552673 - RNA, 11 nt, Human
cauccuccuca

SEQ ID NO: 2552674 - RNA, 12 nt, Human
cauccuccccuu

SEQ ID NO: 2552675 - RNA, 13 nt, Human
cauccuccccuuc

SEQ ID NO: 2552676 - RNA, 14 nt, Human
cauccuccccuucc

SEQ ID NO: 2552677 - RNA, 15 nt, Human
cauccuccccuuccc

SEQ ID NO: 2552678 - RNA, 16 nt, Human
cauccuccccuucccu

SEQ ID NO: 2552679 - RNA, 19 nt, Human
cauccuccccuucccugca

SEQ ID NO: 2552680 - RNA, 20 nt, Human
cauccuccgccucccggguu

SEQ ID NO: 2552681 - RNA, 20 nt, Human
cauccuccccuucccugcaa

SEQ ID NO: 2552682 - RNA, 21 nt, Human
cauccuccccuucccugcaaa

SEQ ID NO: 2552683 - RNA, 16 nt, Human
cauccuccguccagcc

SEQ ID NO: 2552684 - RNA, 19 nt, Human
cauccucaaacacugcagg

SEQ ID NO: 2552685 - RNA, 18 nt, Human
cauccucaaacacugcag

SEQ ID NO: 2552686 - RNA, 17 nt, Human
cauccucaaacacugca

SEQ ID NO: 2552687 - RNA, 16 nt, Human
cauccucaaacacugc

SEQ ID NO: 2552688 - RNA, 15 nt, Human
cauccuaugcaauau

SEQ ID NO: 2552689 - RNA, 24 nt, Human
cauccuaucagccugucucuucca

SEQ ID NO: 2552690 - RNA, 16 nt, Human
cauccuaucagccugu

SEQ ID NO: 2552691 - RNA, 20 nt, Human
cauccuagucucuaucauua

SEQ ID NO: 2552692 - RNA, 13 nt, Human
cauccuagucucu

SEQ ID NO: 2552693 - RNA, 21 nt, Human
cauccuacccucgggcccacc

SEQ ID NO: 2552694 - RNA, 16 nt, Human
cauccucauacccacc

SEQ ID NO: 2552695 - RNA, 15 nt, Human
cauccucauacccac

SEQ ID NO: 2552696 - RNA, 16 nt, Human
cauccuacaagacaca

SEQ ID NO: 2552697 - RNA, 23 nt, Human
cauccuacccucgggcccaccug

SEQ ID NO: 2552698 - RNA, 19 nt, Human
cauccuacccucgggccca

SEQ ID NO: 2552699 - RNA, 15 nt, Human
cauccuacccucggg

SEQ ID NO: 2552700 - RNA, 13 nt, Human
cauccuacccucg

SEQ ID NO: 2552701 - RNA, 20 nt, Human
cauccuaaucauccaaugcu

SEQ ID NO: 2552702 - RNA, 20 nt, Human
caucuagaggcuuccuucau

SEQ ID NO: 2552703 - RNA, 21 nt, Human
caucuagaggcuuccuucauu

SEQ ID NO: 2552704 - RNA, 22 nt, Human
caucuagaggcuuccuucauuu

SEQ ID NO: 2552705 - RNA, 23 nt, Human
caucuagaggcuuccuucauuuc

SEQ ID NO: 2552706 - RNA, 12 nt, Human
caucuaggauuu

SEQ ID NO: 2552707 - RNA, 19 nt, Human
caucuagaggcuuccuuca

SEQ ID NO: 2552708 - RNA, 19 nt, Human
caucuacucccaaguaugg

SEQ ID NO: 2552709 - RNA, 16 nt, Human
caucuagagcuugaug

SEQ ID NO: 2552710 - RNA, 14 nt, Human
caucuacucccaag

SEQ ID NO: 2552711 - RNA, 15 nt, Human
caucuacccuccgau

SEQ ID NO: 2552712 - RNA, 14 nt, Human
caucuagugagcag

SEQ ID NO: 2552713 - RNA, 18 nt, Human
caucuagguaaauuacag

SEQ ID NO: 2552714 - RNA, 17 nt, Human
caucuagguaaauuaca

SEQ ID NO: 2552715 - RNA, 19 nt, Human
caucuagagcuugaugcca

SEQ ID NO: 2552716 - RNA, 14 nt, Human
caucuagcaaaugu

SEQ ID NO: 2552717 - RNA, 18 nt, Human
caucuagcaaauguuaug

SEQ ID NO: 2552718 - RNA, 19 nt, Human
cauccucuguacagagccc

SEQ ID NO: 2552719 - RNA, 21 nt, Human
cauccucuguacagagcccac

SEQ ID NO: 2552720 - RNA, 12 nt, Human
caucuaagccug

SEQ ID NO: 2552721 - RNA, 16 nt, Human
caucuaagccugaagg

SEQ ID NO: 2552722 - RNA, 23 nt, Human
caucuaauagcggguuacuuuca

SEQ ID NO: 2552723 - RNA, 14 nt, Human
caucuaauaaaaaa

SEQ ID NO: 2552724 - RNA, 18 nt, Human
cauccucuguacagagcc

SEQ ID NO: 2552725 - RNA, 15 nt, Human
cauccucuguacaga

SEQ ID NO: 2552726 - RNA, 20 nt, Human
cauccuccucccacccggcu

SEQ ID NO: 2552727 - RNA, 16 nt, Human
cauccuccucccaccc

SEQ ID NO: 2552728 - RNA, 13 nt, Human
cauccuccuccca

SEQ ID NO: 2552729 - RNA, 19 nt, Human
cauccuccguccagccgcc

SEQ ID NO: 2552730 - RNA, 20 nt, Human
cauccuccguccagccgcca

SEQ ID NO: 2552731 - RNA, 17 nt, Human
caucucacacaugagca

SEQ ID NO: 2552732 - RNA, 16 nt, Human
caucucacacaugagc

SEQ ID NO: 2552733 - RNA, 14 nt, Human
caucuauuuuggau

SEQ ID NO: 2552734 - RNA, 16 nt, Human
caucuauuuuggauug

SEQ ID NO: 2552735 - RNA, 16 nt, Human
caucuauuucugagaa

SEQ ID NO: 2552736 - RNA, 15 nt, Human
caucuauuucugaga

SEQ ID NO: 2552737 - RNA, 14 nt, Human
caucucaaccaucc

SEQ ID NO: 2552738 - RNA, 16 nt, Human
caucucaaccaucccc

SEQ ID NO: 2552739 - RNA, 22 nt, Human
caucuagugagcagucaggaaa

SEQ ID NO: 2552740 - RNA, 13 nt, Human
caucuaguuuuaa

SEQ ID NO: 2552741 - RNA, 14 nt, Human
caucuauaaagaag

SEQ ID NO: 2552742 - RNA, 20 nt, Human
caucuaucucaucuaucuca

SEQ ID NO: 2552743 - RNA, 15 nt, Human
caucuaucucaaucc

SEQ ID NO: 2552744 - RNA, 14 nt, Human
caucuauaaauugu

SEQ ID NO: 2552745 - RNA, 13 nt, Human
caucuauucucuc

SEQ ID NO: 2552746 - RNA, 20 nt, Human
caucuauucucuccaaaaau

SEQ ID NO: 2552747 - RNA, 13 nt, Human
caucuauuucuga

SEQ ID NO: 2552748 - RNA, 14 nt, Human
caucuauuucugag

SEQ ID NO: 2552749 - RNA, 16 nt, Human
caucuaucucaauccu

SEQ ID NO: 2552750 - RNA, 19 nt, Human
caucuaugucccuugcugu

SEQ ID NO: 2552751 - RNA, 20 nt, Human
caucucacacaugagcauca

SEQ ID NO: 2552752 - RNA, 22 nt, Human
caucucaaggaauaaugggcuu

SEQ ID NO: 2552753 - RNA, 13 nt, Human
caucucagcccac

SEQ ID NO: 2552754 - RNA, 20 nt, Human
caucucagccuaccaugaga

SEQ ID NO: 2552755 - RNA, 18 nt, Human
caucucagacccuuuagc

SEQ ID NO: 2552756 - RNA, 19 nt, Human
caucucacuggaugcaaag

SEQ ID NO: 2552757 - RNA, 14 nt, Human
caucucaggccacc

SEQ ID NO: 2552758 - RNA, 15 nt, Human
caucucaggccaccu

SEQ ID NO: 2552759 - RNA, 20 nt, Human
caucucauguaucaucugga

SEQ ID NO: 2552760 - RNA, 22 nt, Human
caucucaugccccuggcuggga

SEQ ID NO: 2552761 - RNA, 18 nt, Human
caucucagugcuguaaaa

SEQ ID NO: 2552762 - RNA, 14 nt, Human
caucuccaagaaug

SEQ ID NO: 2552763 - RNA, 22 nt, Human
caucucauucaaaccccacccu

SEQ ID NO: 2552764 - RNA, 23 nt, Human
caucucauguaucaucuggauag

SEQ ID NO: 2552765 - RNA, 17 nt, Human
caucucauuccaacuuc

SEQ ID NO: 2552766 - RNA, 18 nt, Human
caucucaggccucccuca

SEQ ID NO: 2552767 - RNA, 17 nt, Human
caucucaggccaccugc

SEQ ID NO: 2552768 - RNA, 20 nt, Human
caucucaggccaccugcccc

SEQ ID NO: 2552769 - RNA, 21 nt, Human
caucucaggccaccugccccc

SEQ ID NO: 2552770 - RNA, 22 nt, Human
caucucaggccaccugcccccu

SEQ ID NO: 2552771 - RNA, 19 nt, Human
caucucaggggccagagga

SEQ ID NO: 2552772 - RNA, 16 nt, Human
caucucaggggccaga

SEQ ID NO: 2552773 - RNA, 15 nt, Human
caucucaggggccag

SEQ ID NO: 2552774 - RNA, 12 nt, Human
caucucaggggc

SEQ ID NO: 2552775 - RNA, 14 nt, Human
cauacuugaagggc

SEQ ID NO: 2552776 - RNA, 17 nt, Human
cauacuugaagggccag

SEQ ID NO: 2552777 - RNA, 18 nt, Human
cauacuugaagggccaga

SEQ ID NO: 2552778 - RNA, 20 nt, Human
cauacuugaagggccagagc

SEQ ID NO: 2552779 - RNA, 21 nt, Human
cauacuugaagggccagagcc

SEQ ID NO: 2552780 - RNA, 22 nt, Human
cauacuugaagggccagagcca

SEQ ID NO: 2552781 - RNA, 14 nt, Human
cauacuuucauccu

SEQ ID NO: 2552782 - RNA, 23 nt, Human
cauacuugaagggccagagccag

SEQ ID NO: 2552783 - RNA, 18 nt, Human
cauacuucaaaaguauuu

SEQ ID NO: 2552784 - RNA, 17 nt, Human
cauacuucaaaaguauu

SEQ ID NO: 2552785 - RNA, 16 nt, Human
cauacuucaaaaguau

SEQ ID NO: 2552786 - RNA, 15 nt, Human
cauacuucaaaagua

SEQ ID NO: 2552787 - RNA, 14 nt, Human
cauacuucaaaagu

SEQ ID NO: 2552788 - RNA, 22 nt, Human
cauacuuaucucucugugcugu

SEQ ID NO: 2552789 - RNA, 20 nt, Human
cauacuuaucucucugugcu

SEQ ID NO: 2552790 - RNA, 18 nt, Human
cauacuuaucucucugug

SEQ ID NO: 2552791 - RNA, 13 nt, Human
cauacuugaaggg

SEQ ID NO: 2552792 - RNA, 22 nt, Human
cauacuucaaaaguauuuuccu

SEQ ID NO: 2552793 - RNA, 19 nt, Human
cauacuucaaaaguauuuu

SEQ ID NO: 2552794 - RNA, 18 nt, Human
cauacuucaugaaauccu

SEQ ID NO: 2552795 - RNA, 18 nt, Human
cauacuuugucugaaaaa

SEQ ID NO: 2552796 - RNA, 16 nt, Human
cauacuuugucugaaa

SEQ ID NO: 2552797 - RNA, 14 nt, Human
cauacuuugucuga

SEQ ID NO: 2552798 - RNA, 13 nt, Human
cauacuuugucug

SEQ ID NO: 2552799 - RNA, 16 nt, Human
cauacuuuuuaaaugu

SEQ ID NO: 2552800 - RNA, 20 nt, Human
cauacuuuuuaaauguaaag

SEQ ID NO: 2552801 - RNA, 12 nt, Human
cauacuuugucu

SEQ ID NO: 2552802 - RNA, 22 nt, Human
cauacuuucauccugacucugc

SEQ ID NO: 2552803 - RNA, 21 nt, Human
cauacuuucauccugacucug

SEQ ID NO: 2552804 - RNA, 17 nt, Human
cauacuuucauccugac

SEQ ID NO: 2552805 - RNA, 14 nt, Human
cauacuuuccugua

SEQ ID NO: 2552806 - RNA, 22 nt, Human
cauacuuuuuaaauguaaagau

SEQ ID NO: 2552807 - RNA, 20 nt, Human
cauagaauaaaauuuuuaau

SEQ ID NO: 2552808 - RNA, 16 nt, Human
cauagaaggcagguga

SEQ ID NO: 2552809 - RNA, 14 nt, Human
cauagaauaaaauu

SEQ ID NO: 2552810 - RNA, 23 nt, Human
cauagaaauguaacuuuuguaag

SEQ ID NO: 2552811 - RNA, 14 nt, Human
cauagaaggcaggu

SEQ ID NO: 2552812 - RNA, 21 nt, Human
cauagagagcaagacgcugug

SEQ ID NO: 2552813 - RNA, 19 nt, Human
cauagagagcaagacgcug

SEQ ID NO: 2552814 - RNA, 23 nt, Human
cauagagagcaagacgcugugcu

SEQ ID NO: 2552815 - RNA, 19 nt, Human
cauagagagggagaagaag

SEQ ID NO: 2552816 - RNA, 18 nt, Human
cauagagagggagaagaa

SEQ ID NO: 2552817 - RNA, 16 nt, Human
cauagacccucucaag

SEQ ID NO: 2552818 - RNA, 15 nt, Human
cauagacccucucaa

SEQ ID NO: 2552819 - RNA, 20 nt, Human
cauacucccaucugugaaag

SEQ ID NO: 2552820 - RNA, 18 nt, Human
cauacucccaucugugaa

SEQ ID NO: 2552821 - RNA, 15 nt, Human
cauacucccaucugu

SEQ ID NO: 2552822 - RNA, 16 nt, Human
cauacucccaucugug

SEQ ID NO: 2552823 - RNA, 11 nt, Human
cauacucugcu

SEQ ID NO: 2552824 - RNA, 22 nt, Human
cauacucuagauuuuguuuugc

SEQ ID NO: 2552825 - RNA, 17 nt, Human
cauacucuagauuuugu

SEQ ID NO: 2552826 - RNA, 15 nt, Human
cauacugagggacca

SEQ ID NO: 2552827 - RNA, 19 nt, Human
cauacugagggaccaacug

SEQ ID NO: 2552828 - RNA, 18 nt, Human
cauacuaucuacucuccu

SEQ ID NO: 2552829 - RNA, 23 nt, Human
cauacuccaucaguuagagcuga

SEQ ID NO: 2552830 - RNA, 20 nt, Human
cauacuccuuccaucaaaua

SEQ ID NO: 2552831 - RNA, 22 nt, Human
cauacuggccucgccuggccug

SEQ ID NO: 2552832 - RNA, 21 nt, Human
cauacuggccucgccuggccu

SEQ ID NO: 2552833 - RNA, 20 nt, Human
cauacuggccucgccuggcc

SEQ ID NO: 2552834 - RNA, 19 nt, Human
cauacuggccucgccuggc

SEQ ID NO: 2552835 - RNA, 18 nt, Human
cauacuggccucgccugg

SEQ ID NO: 2552836 - RNA, 17 nt, Human
cauacuggccucgccug

SEQ ID NO: 2552837 - RNA, 16 nt, Human
cauacuggccucgccu

SEQ ID NO: 2552838 - RNA, 15 nt, Human
cauacuggccucgcc

SEQ ID NO: 2552839 - RNA, 13 nt, Human
cauacuggccucg

SEQ ID NO: 2552840 - RNA, 12 nt, Human
cauacuggccuc

SEQ ID NO: 2552841 - RNA, 23 nt, Human
cauacucuagauuuuguuuugcu

SEQ ID NO: 2552842 - RNA, 20 nt, Human
cauacugagggaccaacugg

SEQ ID NO: 2552843 - RNA, 11 nt, Human
cauacugcugu

SEQ ID NO: 2552844 - RNA, 22 nt, Human
cauacuggccuggacuguuuuc

SEQ ID NO: 2552845 - RNA, 18 nt, Human
cauacuggccuggacugu

SEQ ID NO: 2552846 - RNA, 15 nt, Human
cauacuggccuggac

SEQ ID NO: 2552847 - RNA, 13 nt, Human
cauacuggccugg

SEQ ID NO: 2552848 - RNA, 19 nt, Human
cauacugugcuggagccac

SEQ ID NO: 2552849 - RNA, 18 nt, Human
cauacugugcuggagcca

SEQ ID NO: 2552850 - RNA, 17 nt, Human
cauacugugcuggagcc

SEQ ID NO: 2552851 - RNA, 16 nt, Human
cauacuuaucucucug

SEQ ID NO: 2552852 - RNA, 13 nt, Human
cauacuuaucucu

SEQ ID NO: 2552853 - RNA, 23 nt, Human
cauagaucagcaaaccggggccu

SEQ ID NO: 2552854 - RNA, 18 nt, Human
cauagaguuuaacacaag

SEQ ID NO: 2552855 - RNA, 15 nt, Human
cauagaguuuaacac

SEQ ID NO: 2552856 - RNA, 14 nt, Human
cauagaguuuaaca

SEQ ID NO: 2552857 - RNA, 15 nt, Human
cauagaggcuucucc

SEQ ID NO: 2552858 - RNA, 12 nt, Human
cauagaggcuuc

SEQ ID NO: 2552859 - RNA, 17 nt, Human
cauagagaucauccuuu

SEQ ID NO: 2552860 - RNA, 22 nt, Human
cauagagagggagaagaaguca

SEQ ID NO: 2552861 - RNA, 22 nt, Human
cauagaggcuucuccgccagcc

SEQ ID NO: 2552862 - RNA, 21 nt, Human
cauagaggcuucuccgccagc

SEQ ID NO: 2552863 - RNA, 20 nt, Human
cauagaggcuucuccgccag

SEQ ID NO: 2552864 - RNA, 19 nt, Human
cauagaggcuucuccgcca

SEQ ID NO: 2552865 - RNA, 21 nt, Human
cauagaggugagggaagccug

SEQ ID NO: 2552866 - RNA, 23 nt, Human
cauagaggcuucuccgccagccu

SEQ ID NO: 2552867 - RNA, 17 nt, Human
cauagaggugagggaag

SEQ ID NO: 2552868 - RNA, 22 nt, Human
cauagugaugguuccccuguuc

SEQ ID NO: 2552869 - RNA, 20 nt, Human
cauaguaugguggcuggguu

SEQ ID NO: 2552870 - RNA, 19 nt, Human
cauaguaugguggcugggu

SEQ ID NO: 2552871 - RNA, 18 nt, Human
cauaguaugguggcuggg

SEQ ID NO: 2552872 - RNA, 19 nt, Human
cauauaaacuuuuuaaaga

SEQ ID NO: 2552873 - RNA, 20 nt, Human
cauauaaacaucacacacac

SEQ ID NO: 2552874 - RNA, 21 nt, Human
cauauaaguuugaaggaaaca

SEQ ID NO: 2552875 - RNA, 20 nt, Human
cauauaaguuugaaggaaac

SEQ ID NO: 2552876 - RNA, 15 nt, Human
cauauaaguuugaag

SEQ ID NO: 2552877 - RNA, 17 nt, Human
cauaguuuuuacugaac

SEQ ID NO: 2552878 - RNA, 19 nt, Human
cauauaaacaucacacaca

SEQ ID NO: 2552879 - RNA, 15 nt, Human
cauaguggugcagag

SEQ ID NO: 2552880 - RNA, 23 nt, Human
cauaguggacauuguuggcagca

SEQ ID NO: 2552881 - RNA, 22 nt, Human
cauaguggcuuaaaacaacacu

SEQ ID NO: 2552882 - RNA, 19 nt, Human
cauaguucccauguuaaau

SEQ ID NO: 2552883 - RNA, 18 nt, Human
cauauaauguuguuauuu

SEQ ID NO: 2552884 - RNA, 17 nt, Human
cauauaauguuguuauu

SEQ ID NO: 2552885 - RNA, 23 nt, Human
cauauaaguuugaaggaaacagu

SEQ ID NO: 2552886 - RNA, 22 nt, Human
cauauaaguuugaaggaaacag

SEQ ID NO: 2552887 - RNA, 15 nt, Human
cauauaauguuguua

SEQ ID NO: 2552888 - RNA, 24 nt, Human
cauauaaguuugaaggaaacaguu

SEQ ID NO: 2552889 - RNA, 17 nt, Human
cauauacagcucagaag

SEQ ID NO: 2552890 - RNA, 20 nt, Human
cauauauaacaaugcuguau

SEQ ID NO: 2552891 - RNA, 18 nt, Human
cauauauaacuagcuaga

SEQ ID NO: 2552892 - RNA, 17 nt, Human
cauauauaucuaucuua

SEQ ID NO: 2552893 - RNA, 23 nt, Human
cauaucaaaaaguauuaaaacua

SEQ ID NO: 2552894 - RNA, 19 nt, Human
cauaucaccucauggccua

SEQ ID NO: 2552895 - RNA, 13 nt, Human
cauaucaguugag

SEQ ID NO: 2552896 - RNA, 22 nt, Human
cauauauauguuuuaagaggca

SEQ ID NO: 2552897 - RNA, 17 nt, Human
cauaugauguacaugua

SEQ ID NO: 2552898 - RNA, 15 nt, Human
cauaugauguacaug

SEQ ID NO: 2552899 - RNA, 21 nt, Human
cauaugauguacauguacuga

SEQ ID NO: 2552900 - RNA, 14 nt, Human
cauaugauucugcu

SEQ ID NO: 2552901 - RNA, 23 nt, Human
cauaugaguuucauagcuaagaa

SEQ ID NO: 2552902 - RNA, 15 nt, Human
cauaugauucugcuu

SEQ ID NO: 2552903 - RNA, 23 nt, Human
cauaugauugugcacauacuuga

SEQ ID NO: 2552904 - RNA, 19 nt, Human
cauaugaguguggaagccg

SEQ ID NO: 2552905 - RNA, 17 nt, Human
cauaugaguguggaagc

SEQ ID NO: 2552906 - RNA, 14 nt, Human
cauaugagugugga

SEQ ID NO: 2552907 - RNA, 22 nt, Human
cauaugacucacaugaugcaua

SEQ ID NO: 2552908 - RNA, 15 nt, Human
cauauccugagccau

SEQ ID NO: 2552909 - RNA, 13 nt, Human
cauaugaggaugc

SEQ ID NO: 2552910 - RNA, 20 nt, Human
cauaugacucacaugaugca

SEQ ID NO: 2552911 - RNA, 23 nt, Human
cauauccugagccaucggugaaa

SEQ ID NO: 2552912 - RNA, 18 nt, Human
cauaugaccucaugcauc

SEQ ID NO: 2552913 - RNA, 18 nt, Human
cauauccccucucccccc

SEQ ID NO: 2552914 - RNA, 14 nt, Human
cauauccugagcca

SEQ ID NO: 2552915 - RNA, 16 nt, Human
cauauccaccaccucc

SEQ ID NO: 2552916 - RNA, 18 nt, Human
cauauccaguauuguucc

SEQ ID NO: 2552917 - RNA, 18 nt, Human
cauauccccuauuuaaca

SEQ ID NO: 2552918 - RNA, 16 nt, Human
cauaucagucucugag

SEQ ID NO: 2552919 - RNA, 22 nt, Human
caucaagucuuucacauuuaaa

SEQ ID NO: 2552920 - RNA, 18 nt, Human
caucaaggcacugccuga

SEQ ID NO: 2552921 - RNA, 17 nt, Human
caucaaggcacugccug

SEQ ID NO: 2552922 - RNA, 16 nt, Human
caucaaggcacugccu

SEQ ID NO: 2552923 - RNA, 18 nt, Human
caucaagcacagaaggag

SEQ ID NO: 2552924 - RNA, 21 nt, Human
caucaagcacagaaggaggag

SEQ ID NO: 2552925 - RNA, 23 nt, Human
caucaagcacagaaggaggagga

SEQ ID NO: 2552926 - RNA, 14 nt, Human
caucaagaugugac

SEQ ID NO: 2552927 - RNA, 11 nt, Human
caucaaagagg

SEQ ID NO: 2552928 - RNA, 23 nt, Human
caucaaagaggcugaggcuggca

SEQ ID NO: 2552929 - RNA, 16 nt, Human
caucaagacuggaagg

SEQ ID NO: 2552930 - RNA, 15 nt, Human
caucaagacuggaag

SEQ ID NO: 2552931 - RNA, 22 nt, Human
caucaaaagacaauucuuuaua

SEQ ID NO: 2552932 - RNA, 19 nt, Human
caucaaaagacaauucuuu

SEQ ID NO: 2552933 - RNA, 18 nt, Human
caucaaaagacaauucuu

SEQ ID NO: 2552934 - RNA, 16 nt, Human
caucaaaagacaauuc

SEQ ID NO: 2552935 - RNA, 15 nt, Human
caucaaaagacaauu

SEQ ID NO: 2552936 - RNA, 14 nt, Human
caucaaaagacaau

SEQ ID NO: 2552937 - RNA, 12 nt, Human
caucaaaagaca

SEQ ID NO: 2552938 - RNA, 13 nt, Human
caucaaaaugcuu

SEQ ID NO: 2552939 - RNA, 15 nt, Human
caucaaaaugcuuuu

SEQ ID NO: 2552940 - RNA, 20 nt, Human
caucaaaagacaauucuuua

SEQ ID NO: 2552941 - RNA, 17 nt, Human
caucaaacucuuaguua

SEQ ID NO: 2552942 - RNA, 18 nt, Human
caucaaugaaugaaugaa

SEQ ID NO: 2552943 - RNA, 21 nt, Human
caucaaguuauugacaaacuc

SEQ ID NO: 2552944 - RNA, 22 nt, Human
caucaaguuauugacaaacucu

SEQ ID NO: 2552945 - RNA, 19 nt, Human
caucaauauugucauuccu

SEQ ID NO: 2552946 - RNA, 14 nt, Human
caucaaucauugua

SEQ ID NO: 2552947 - RNA, 23 nt, Human
caucaaguuauugacaaacucuc

SEQ ID NO: 2552948 - RNA, 16 nt, Human
caucaauuauagaaag

SEQ ID NO: 2552949 - RNA, 22 nt, Human
caucaauugaauggucagcguu

SEQ ID NO: 2552950 - RNA, 15 nt, Human
caucaauguucauug

SEQ ID NO: 2552951 - RNA, 16 nt, Human
caucaauguucauugu

SEQ ID NO: 2552952 - RNA, 20 nt, Human
caucaaucauuguacaguuu

SEQ ID NO: 2552953 - RNA, 16 nt, Human
caucaaucauuguaca

SEQ ID NO: 2552954 - RNA, 15 nt, Human
caucaaucauuguac

SEQ ID NO: 2552955 - RNA, 11 nt, Human
caucaauguuc

SEQ ID NO: 2552956 - RNA, 14 nt, Human
caucaauguucauu

SEQ ID NO: 2552957 - RNA, 18 nt, Human
caucaauguucauuguaa

SEQ ID NO: 2552958 - RNA, 11 nt, Human
caucacacaca

SEQ ID NO: 2552959 - RNA, 12 nt, Human
caucacacacac

SEQ ID NO: 2552960 - RNA, 17 nt, Human
caucacagcuaacaauu

SEQ ID NO: 2552961 - RNA, 22 nt, Human
caucacaggacacggggcagug

SEQ ID NO: 2552962 - RNA, 13 nt, Human
caucacagggcag

SEQ ID NO: 2552963 - RNA, 15 nt, Human
caucacagggcagag

SEQ ID NO: 2552964 - RNA, 20 nt, Human
caucacagggcagagccggg

SEQ ID NO: 2552965 - RNA, 19 nt, Human
caucacaggguugggccca

SEQ ID NO: 2552966 - RNA, 20 nt, Human
cauauuuugauuauuguauu

SEQ ID NO: 2552967 - RNA, 18 nt, Human
caucaaaaacuuuggagu

SEQ ID NO: 2552968 - RNA, 17 nt, Human
cauauuuuauagaacuu

SEQ ID NO: 2552969 - RNA, 18 nt, Human
cauauuuucaccauuuga

SEQ ID NO: 2552970 - RNA, 19 nt, Human
cauauuuugauuauuguau

SEQ ID NO: 2552971 - RNA, 17 nt, Human
cauauuuuauucuuuua

SEQ ID NO: 2552972 - RNA, 13 nt, Human
cauauuuuguaua

SEQ ID NO: 2552973 - RNA, 23 nt, Human
cauaugcaccuugugucuguaca

SEQ ID NO: 2552974 - RNA, 21 nt, Human
cauaugcaccuugugucugua

SEQ ID NO: 2552975 - RNA, 20 nt, Human
cauaugcaccuugugucugu

SEQ ID NO: 2552976 - RNA, 19 nt, Human
cauaugcaccuugugucug

SEQ ID NO: 2552977 - RNA, 18 nt, Human
cauaugcaccuugugucu

SEQ ID NO: 2552978 - RNA, 17 nt, Human
cauaugcaccuuguguc

SEQ ID NO: 2552979 - RNA, 16 nt, Human
cauaugcaccuugugu

SEQ ID NO: 2552980 - RNA, 13 nt, Human
cauaugccugggc

SEQ ID NO: 2552981 - RNA, 14 nt, Human
cauauuuacuucuu

SEQ ID NO: 2552982 - RNA, 12 nt, Human
cauauuuauaaa

SEQ ID NO: 2552983 - RNA, 20 nt, Human
cauauuuacuucuuauacau

SEQ ID NO: 2552984 - RNA, 16 nt, Human
cauauuuacuucuuau

SEQ ID NO: 2552985 - RNA, 17 nt, Human
cauauuuacuucuuaua

SEQ ID NO: 2552986 - RNA, 13 nt, Human
cauauuuuagcua

SEQ ID NO: 2552987 - RNA, 16 nt, Human
cauauuuuauagaacu

SEQ ID NO: 2552988 - RNA, 15 nt, Human
cauauuugagacuag

SEQ ID NO: 2552989 - RNA, 17 nt, Human
cauauuuauaaaaauaa

SEQ ID NO: 2552990 - RNA, 22 nt, Human
cauauuuauagcaauccauguu

SEQ ID NO: 2552991 - RNA, 12 nt, Human
cauauuucaauu

SEQ ID NO: 2552992 - RNA, 22 nt, Human
cauugaccugaggcccuucucu

SEQ ID NO: 2552993 - RNA, 13 nt, Human
cauugaccugagg

SEQ ID NO: 2552994 - RNA, 18 nt, Human
cauugacuaucaaacuga

SEQ ID NO: 2552995 - RNA, 19 nt, Human
cauugacuaucaaacugaa

SEQ ID NO: 2552996 - RNA, 22 nt, Human
cauugacuaucaaacugaagcc

SEQ ID NO: 2552997 - RNA, 22 nt, Human
cauugacauguacagagaacua

SEQ ID NO: 2552998 - RNA, 21 nt, Human
cauugacauguacagagaacu

SEQ ID NO: 2552999 - RNA, 19 nt, Human
cauugacauguacagagaa

SEQ ID NO: 2553000 - RNA, 17 nt, Human
cauugacauguacagag

SEQ ID NO: 2553001 - RNA, 16 nt, Human
cauugacauguacaga

SEQ ID NO: 2553002 - RNA, 15 nt, Human
cauugacauguacag

SEQ ID NO: 2553003 - RNA, 14 nt, Human
cauugacauguaca

SEQ ID NO: 2553004 - RNA, 21 nt, Human
cauugaccgcgacuaauuuca

SEQ ID NO: 2553005 - RNA, 22 nt, Human
cauugaccgcgacuaauuucaa

SEQ ID NO: 2553006 - RNA, 16 nt, Human
cauugaacacaaacug

SEQ ID NO: 2553007 - RNA, 17 nt, Human
cauugaacacaaacugu

SEQ ID NO: 2553008 - RNA, 18 nt, Human
cauugaacacaaacugua

SEQ ID NO: 2553009 - RNA, 14 nt, Human
cauugaacacaaac

SEQ ID NO: 2553010 - RNA, 15 nt, Human
cauugaacacaaacu

SEQ ID NO: 2553011 - RNA, 22 nt, Human
cauugaaagagaaccaguuuca

SEQ ID NO: 2553012 - RNA, 18 nt, Human
cauugaaauucugagaaa

SEQ ID NO: 2553013 - RNA, 19 nt, Human
cauugaaagagaaccaguu

SEQ ID NO: 2553014 - RNA, 19 nt, Human
cauugaaaucuuuuugcuu

SEQ ID NO: 2553015 - RNA, 16 nt, Human
cauugaaagagaacca

SEQ ID NO: 2553016 - RNA, 16 nt, Human
cauuuaaaaugauuag

SEQ ID NO: 2553017 - RNA, 15 nt, Human
cauuuaaaaugauua

SEQ ID NO: 2553018 - RNA, 14 nt, Human
cauuuaaaaugauu

SEQ ID NO: 2553019 - RNA, 13 nt, Human
cauuuaaaaugau

SEQ ID NO: 2553020 - RNA, 18 nt, Human
cauuuaaaaugauuagaa

SEQ ID NO: 2553021 - RNA, 17 nt, Human
cauuuaaaaugauuaga

SEQ ID NO: 2553022 - RNA, 21 nt, Human
cauuuaaaagauacaguuacu

SEQ ID NO: 2553023 - RNA, 12 nt, Human
cauuuaaaauga

SEQ ID NO: 2553024 - RNA, 20 nt, Human
cauugcacucuagccugggc

SEQ ID NO: 2553025 - RNA, 18 nt, Human
cauugcacucuagccugg

SEQ ID NO: 2553026 - RNA, 15 nt, Human
cauugcacucuagcc

SEQ ID NO: 2553027 - RNA, 16 nt, Human
cauugcauauaacuua

SEQ ID NO: 2553028 - RNA, 17 nt, Human
cauugcacuccagccug

SEQ ID NO: 2553029 - RNA, 16 nt, Human
cauugcacuccagccu

SEQ ID NO: 2553030 - RNA, 18 nt, Human
cauugcacuccagccugg

SEQ ID NO: 2553031 - RNA, 18 nt, Human
cauugagaguuuugucuu

SEQ ID NO: 2553032 - RNA, 18 nt, Human
cauugagaacugcauaug

SEQ ID NO: 2553033 - RNA, 19 nt, Human
cauugagaacugcauaugu

SEQ ID NO: 2553034 - RNA, 23 nt, Human
cauugagaacugcauauguuucg

SEQ ID NO: 2553035 - RNA, 17 nt, Human
cauugcacagggagacg

SEQ ID NO: 2553036 - RNA, 21 nt, Human
cauuuacuuuguguucaccuu

SEQ ID NO: 2553037 - RNA, 17 nt, Human
cauuuacuuuguguuca

SEQ ID NO: 2553038 - RNA, 19 nt, Human
cauuuaaagcuuauuaaaa

SEQ ID NO: 2553039 - RNA, 17 nt, Human
cauuucccaucugcacc

SEQ ID NO: 2553040 - RNA, 15 nt, Human
cauuucccaucugca

SEQ ID NO: 2553041 - RNA, 14 nt, Human
cauuucccaucugc

SEQ ID NO: 2553042 - RNA, 19 nt, Human
cauuuccacaccaagcagc

SEQ ID NO: 2553043 - RNA, 23 nt, Human
cauuuagagaacuguggccguua

SEQ ID NO: 2553044 - RNA, 21 nt, Human
cauuucucauguuuuccauug

SEQ ID NO: 2553045 - RNA, 15 nt, Human
cauuucucuaagaga

SEQ ID NO: 2553046 - RNA, 13 nt, Human
cauuucucacuga

SEQ ID NO: 2553047 - RNA, 12 nt, Human
cauuucucacug

SEQ ID NO: 2553048 - RNA, 12 nt, Human
cauuucucaugu

SEQ ID NO: 2553049 - RNA, 19 nt, Human
cauuucuauuucuccucca

SEQ ID NO: 2553050 - RNA, 20 nt, Human
cauuucccaucugcaccccu

SEQ ID NO: 2553051 - RNA, 13 nt, Human
cauuuccccagac

SEQ ID NO: 2553052 - RNA, 16 nt, Human
cauuuccccagaccug

SEQ ID NO: 2553053 - RNA, 20 nt, Human
cauuuccccagaccugagcu

SEQ ID NO: 2553054 - RNA, 23 nt, Human
cauuucuauuuauuuacugagcu

SEQ ID NO: 2553055 - RNA, 23 nt, Human
cauuucugcaucagcugcugaaa

SEQ ID NO: 2553056 - RNA, 21 nt, Human
cauuucuuccacaagagccca

SEQ ID NO: 2553057 - RNA, 22 nt, Human
cauuucugaguuucauucuccu

SEQ ID NO: 2553058 - RNA, 14 nt, Human
cauuucugaagugg

SEQ ID NO: 2553059 - RNA, 14 nt, Human
cauuucucuggggu

SEQ ID NO: 2553060 - RNA, 20 nt, Human
cauuucuccuuugauaaaau

SEQ ID NO: 2553061 - RNA, 18 nt, Human
cauuucucuuacugcaaa

SEQ ID NO: 2553062 - RNA, 15 nt, Human
cauuucucuuacugc

SEQ ID NO: 2553063 - RNA, 16 nt, Human
cauuucucugggguau

SEQ ID NO: 2553064 - RNA, 23 nt, Human
cauuucuuccacaagagcccagg

SEQ ID NO: 2553065 - RNA, 23 nt, Human
cauuugaaugcauuuuguuuggu

SEQ ID NO: 2553066 - RNA, 18 nt, Human
cauuugaaugcauuuugu

SEQ ID NO: 2553067 - RNA, 15 nt, Human
cauuugaaugcauuu

SEQ ID NO: 2553068 - RNA, 14 nt, Human
cauuugaaugcauu

SEQ ID NO: 2553069 - RNA, 12 nt, Human
cauuucuuagac

SEQ ID NO: 2553070 - RNA, 13 nt, Human
cauuugaaugcau

SEQ ID NO: 2553071 - RNA, 22 nt, Human
cauuugagaaaugcauauugua

SEQ ID NO: 2553072 - RNA, 18 nt, Human
cauuugagaaaugcauau

SEQ ID NO: 2553073 - RNA, 17 nt, Human
cauuugagaaaugcaua

SEQ ID NO: 2553074 - RNA, 15 nt, Human
cauuugagaaaugca

SEQ ID NO: 2553075 - RNA, 12 nt, Human
cauuugagaaau

SEQ ID NO: 2553076 - RNA, 12 nt, Human
cauuugaaugca

SEQ ID NO: 2553077 - RNA, 23 nt, Human
cauuugacugaagaugcagcuca

SEQ ID NO: 2553078 - RNA, 14 nt, Human
cauuugagcagggc

SEQ ID NO: 2553079 - RNA, 18 nt, Human
cauuugaggucuguucuu

SEQ ID NO: 2553080 - RNA, 19 nt, Human
cauuugaggucuguucuuu

SEQ ID NO: 2553081 - RNA, 17 nt, Human
cauuugaggucuguucu

SEQ ID NO: 2553082 - RNA, 16 nt, Human
cauuugagcagggcuc

SEQ ID NO: 2553083 - RNA, 15 nt, Human
ccaaagagugauagu

SEQ ID NO: 2553084 - RNA, 16 nt, Human
ccaaaauccccuucuc

SEQ ID NO: 2553085 - RNA, 20 nt, Human
ccaaaaucauaagauauuuu

SEQ ID NO: 2553086 - RNA, 18 nt, Human
ccaaaauaagaaaagaug

SEQ ID NO: 2553087 - RNA, 18 nt, Human
ccaaaaguuuuccugaga

SEQ ID NO: 2553088 - RNA, 17 nt, Human
ccaaaaguuuuccugag

SEQ ID NO: 2553089 - RNA, 14 nt, Human
ccaaaauaagaaaa

SEQ ID NO: 2553090 - RNA, 16 nt, Human
ccaaaauaagaaaaga

SEQ ID NO: 2553091 - RNA, 17 nt, Human
ccaaaauaagaaaagau

SEQ ID NO: 2553092 - RNA, 17 nt, Human
ccaaaccucugugagca

SEQ ID NO: 2553093 - RNA, 11 nt, Human
ccaaaccucug

SEQ ID NO: 2553094 - RNA, 12 nt, Human
ccaaaccucugu

SEQ ID NO: 2553095 - RNA, 13 nt, Human
ccaaaccucuguu

SEQ ID NO: 2553096 - RNA, 14 nt, Human
ccaaaccucuguuc

SEQ ID NO: 2553097 - RNA, 17 nt, Human
ccaaaccucuguucagu

SEQ ID NO: 2553098 - RNA, 20 nt, Human
ccaaaccucuguucagugua

SEQ ID NO: 2553099 - RNA, 19 nt, Human
ccaaaccuccaaaacuccu

SEQ ID NO: 2553100 - RNA, 17 nt, Human
ccaaaccgccagcgaac

SEQ ID NO: 2553101 - RNA, 14 nt, Human
ccaaaccuagcccc

SEQ ID NO: 2553102 - RNA, 18 nt, Human
ccaaaauaaaacuuuuua

SEQ ID NO: 2553103 - RNA, 21 nt, Human
ccaaaauaaaacuuuuuaaaa

SEQ ID NO: 2553104 - RNA, 20 nt, Human
cauuuuuaguagagacaggg

SEQ ID NO: 2553105 - RNA, 16 nt, Human
ccaaacuuggauuuuu

SEQ ID NO: 2553106 - RNA, 12 nt, Human
ccaaagagccug

SEQ ID NO: 2553107 - RNA, 20 nt, Human
ccaaagagacuggagcaucu

SEQ ID NO: 2553108 - RNA, 21 nt, Human
ccaaagagacuggagcaucug

SEQ ID NO: 2553109 - RNA, 17 nt, Human
ccaaagagacuggagca

SEQ ID NO: 2553110 - RNA, 17 nt, Human
ccaaagagccuggagaa

SEQ ID NO: 2553111 - RNA, 16 nt, Human
ccaaagagccuggaga

SEQ ID NO: 2553112 - RNA, 15 nt, Human
ccaaagagccuggag

SEQ ID NO: 2553113 - RNA, 14 nt, Human
ccaaagagccugga

SEQ ID NO: 2553114 - RNA, 20 nt, Human
ccaaagagccuggagaagcu

SEQ ID NO: 2553115 - RNA, 18 nt, Human
ccaaagagccuggagaag

SEQ ID NO: 2553116 - RNA, 17 nt, Human
ccaaagaaauguaaggg

SEQ ID NO: 2553117 - RNA, 18 nt, Human
ccaaacuuggauuuuuga

SEQ ID NO: 2553118 - RNA, 19 nt, Human
ccaaacugccuaagcccuc

SEQ ID NO: 2553119 - RNA, 14 nt, Human
ccaaacugccuaag

SEQ ID NO: 2553120 - RNA, 15 nt, Human
ccaaaccugacagau

SEQ ID NO: 2553121 - RNA, 21 nt, Human
ccaaaccucuguucaguguaa

SEQ ID NO: 2553122 - RNA, 22 nt, Human
ccaaaccugcaagggcucccca

SEQ ID NO: 2553123 - RNA, 13 nt, Human
ccaaacgccuccc

SEQ ID NO: 2553124 - RNA, 14 nt, Human
cauuugcucaugga

SEQ ID NO: 2553125 - RNA, 15 nt, Human
cauuugcucauggaa

SEQ ID NO: 2553126 - RNA, 16 nt, Human
cauuugcucauggaau

SEQ ID NO: 2553127 - RNA, 22 nt, Human
cauuugaggucuguucuuucca

SEQ ID NO: 2553128 - RNA, 15 nt, Human
cauuuuaaauggaca

SEQ ID NO: 2553129 - RNA, 14 nt, Human
cauuuuaauucauc

SEQ ID NO: 2553130 - RNA, 23 nt, Human
cauuuuaauuuauuaauugcuuu

SEQ ID NO: 2553131 - RNA, 15 nt, Human
cauuuuauauuagaa

SEQ ID NO: 2553132 - RNA, 12 nt, Human
cauuuuaaaugg

SEQ ID NO: 2553133 - RNA, 18 nt, Human
cauuuuaaauaaaagaaa

SEQ ID NO: 2553134 - RNA, 16 nt, Human
cauuuuaacaucugag

SEQ ID NO: 2553135 - RNA, 17 nt, Human
cauuuuaauuauuauuc

SEQ ID NO: 2553136 - RNA, 16 nt, Human
cauuuuaacuuuauca

SEQ ID NO: 2553137 - RNA, 23 nt, Human
cauuugagaaaugcauauuguau

SEQ ID NO: 2553138 - RNA, 13 nt, Human
cauuuuaaauaaa

SEQ ID NO: 2553139 - RNA, 17 nt, Human
cauuuuaaauggacaga

SEQ ID NO: 2553140 - RNA, 17 nt, Human
cauuuuaaauaaaagaa

SEQ ID NO: 2553141 - RNA, 16 nt, Human
cauuuuaaauaaaaga

SEQ ID NO: 2553142 - RNA, 15 nt, Human
cauuuuaaauaaaag

SEQ ID NO: 2553143 - RNA, 22 nt, Human
cauuuucuucagagagcuaaau

SEQ ID NO: 2553144 - RNA, 23 nt, Human
cauuuugagcugaaaugcugcau

SEQ ID NO: 2553145 - RNA, 22 nt, Human
cauuuugagcugaaaugcugca

SEQ ID NO: 2553146 - RNA, 21 nt, Human
cauuuugagcugaaaugcugc

SEQ ID NO: 2553147 - RNA, 14 nt, Human
cauuuugaccuacu

SEQ ID NO: 2553148 - RNA, 20 nt, Human
cauuuugagugacucgaggg

SEQ ID NO: 2553149 - RNA, 17 nt, Human
cauuuugagugacucga

SEQ ID NO: 2553150 - RNA, 12 nt, Human
cauuuugcaaaa

SEQ ID NO: 2553151 - RNA, 13 nt, Human
cauuuugcaaaau

SEQ ID NO: 2553152 - RNA, 14 nt, Human
cauuuugcaaaauu

SEQ ID NO: 2553153 - RNA, 15 nt, Human
cauuuugcaaaauuu

SEQ ID NO: 2553154 - RNA, 17 nt, Human
cauuuugcaaaauuucc

SEQ ID NO: 2553155 - RNA, 15 nt, Human
cauuuugcagcagug

SEQ ID NO: 2553156 - RNA, 15 nt, Human
cauuuugccaaaauu

SEQ ID NO: 2553157 - RNA, 13 nt, Human
cauuuugccaaaa

SEQ ID NO: 2553158 - RNA, 15 nt, Human
cauuuugcauucaaa

SEQ ID NO: 2553159 - RNA, 13 nt, Human
cauuuugcauuca

SEQ ID NO: 2553160 - RNA, 16 nt, Human
cauuuugcagcaguga

SEQ ID NO: 2553161 - RNA, 18 nt, Human
cauuuugcagcagugagu

SEQ ID NO: 2553162 - RNA, 20 nt, Human
cauuuugcagcagugagucu

SEQ ID NO: 2553163 - RNA, 22 nt, Human
cauuuugcagcagugagucucu

SEQ ID NO: 2553164 - RNA, 13 nt, Human
cauuuuauugcuu

SEQ ID NO: 2553165 - RNA, 19 nt, Human
cauuuuauaugucaaagca

SEQ ID NO: 2553166 - RNA, 16 nt, Human
cauuuuauaugucaaa

SEQ ID NO: 2553167 - RNA, 22 nt, Human
cauuuuaauuuauuaauugcuu

SEQ ID NO: 2553168 - RNA, 19 nt, Human
cauuuuauuuuauuaugca

SEQ ID NO: 2553169 - RNA, 21 nt, Human
cauuuuauuuuauuaugcaug

SEQ ID NO: 2553170 - RNA, 14 nt, Human
cauuuuauugcuug

SEQ ID NO: 2553171 - RNA, 12 nt, Human
cauuuucugugg

SEQ ID NO: 2553172 - RNA, 22 nt, Human
cauuuugggguacccacugcuc

SEQ ID NO: 2553173 - RNA, 21 nt, Human
cauuuugggguacccacugcu

SEQ ID NO: 2553174 - RNA, 20 nt, Human
cauuuugggguacccacugc

SEQ ID NO: 2553175 - RNA, 22 nt, Human
cauuuuggagaguuuccugaaa

SEQ ID NO: 2553176 - RNA, 22 nt, Human
cauuuuggaaguuuucaggacu

SEQ ID NO: 2553177 - RNA, 20 nt, Human
cauuuuggagaguuuccuga

SEQ ID NO: 2553178 - RNA, 18 nt, Human
cauuuuggaaguuuucag

SEQ ID NO: 2553179 - RNA, 20 nt, Human
cauuuuggaaguuuucagga

SEQ ID NO: 2553180 - RNA, 18 nt, Human
cauuuugcuaaaugugaa

SEQ ID NO: 2553181 - RNA, 21 nt, Human
cauuuugcuaaaugugaauga

SEQ ID NO: 2553182 - RNA, 19 nt, Human
cauuuugcuauuguaaaua

SEQ ID NO: 2553183 - RNA, 17 nt, Human
cauuuugcuauuguaaa

SEQ ID NO: 2553184 - RNA, 15 nt, Human
cauuuugcuauugua

SEQ ID NO: 2553185 - RNA, 20 nt, Human
cauuuugccaaaauuauuaa

SEQ ID NO: 2553186 - RNA, 24 nt, Human
cauuuugcuaaaugugaaugauga

SEQ ID NO: 2553187 - RNA, 15 nt, Human
cauuuuuaagugcug

SEQ ID NO: 2553188 - RNA, 20 nt, Human
cauuuuuaagugcugcauuu

SEQ ID NO: 2553189 - RNA, 18 nt, Human
cauuuuuaguagagacag

SEQ ID NO: 2553190 - RNA, 19 nt, Human
cauuuuuaguagagacagg

SEQ ID NO: 2553191 - RNA, 23 nt, Human
cauuuugggguacccacugcucu

SEQ ID NO: 2553192 - RNA, 15 nt, Human
cauuuuggugagaaa

SEQ ID NO: 2553193 - RNA, 23 nt, Human
cauuuuguuugguauuguauuua

SEQ ID NO: 2553194 - RNA, 22 nt, Human
cauuuuguuugguauuguauuu

SEQ ID NO: 2553195 - RNA, 21 nt, Human
cauuuuguuugguauuguauu

SEQ ID NO: 2553196 - RNA, 20 nt, Human
cauuuuguuugguauuguau

SEQ ID NO: 2553197 - RNA, 19 nt, Human
cauuuuguuugguauugua

SEQ ID NO: 2553198 - RNA, 20 nt, Human
ccacaaucuuaaggggcagc

SEQ ID NO: 2553199 - RNA, 23 nt, Human
ccacaauccuauucucgggcuga

SEQ ID NO: 2553200 - RNA, 20 nt, Human
ccacacaaggauagaugcug

SEQ ID NO: 2553201 - RNA, 21 nt, Human
ccacaauaaagaucgccccca

SEQ ID NO: 2553202 - RNA, 22 nt, Human
ccacaaguggugguaacccugg

SEQ ID NO: 2553203 - RNA, 20 nt, Human
ccacaauauaaaacuguacu

SEQ ID NO: 2553204 - RNA, 11 nt, Human
ccacacacaca

SEQ ID NO: 2553205 - RNA, 22 nt, Human
ccacacaaggauagaugcuggc

SEQ ID NO: 2553206 - RNA, 17 nt, Human
ccacacacacacacaug

SEQ ID NO: 2553207 - RNA, 21 nt, Human
ccacacacacacacaugcaua

SEQ ID NO: 2553208 - RNA, 24 nt, Human
ccacacacacacacaugcauacac

SEQ ID NO: 2553209 - RNA, 12 nt, Human
ccacacacacag

SEQ ID NO: 2553210 - RNA, 14 nt, Human
ccacacacacacac

SEQ ID NO: 2553211 - RNA, 15 nt, Human
ccacacacacacaca

SEQ ID NO: 2553212 - RNA, 13 nt, Human
ccacacacacaca

SEQ ID NO: 2553213 - RNA, 15 nt, Human
ccacaagugguggua

SEQ ID NO: 2553214 - RNA, 21 nt, Human
ccacaaguggugguaacccug

SEQ ID NO: 2553215 - RNA, 17 nt, Human
ccacaaggcuguugcau

SEQ ID NO: 2553216 - RNA, 17 nt, Human
ccacaaggacuuccugu

SEQ ID NO: 2553217 - RNA, 21 nt, Human
ccacaaggacuuccuguccag

SEQ ID NO: 2553218 - RNA, 15 nt, Human
ccacaaguuaaauaa

SEQ ID NO: 2553219 - RNA, 20 nt, Human
ccacaaguuaaauaaaucau

SEQ ID NO: 2553220 - RNA, 19 nt, Human
ccacaagagcccaggccuc

SEQ ID NO: 2553221 - RNA, 18 nt, Human
ccacaagagcccaggccu

SEQ ID NO: 2553222 - RNA, 17 nt, Human
ccacaagagcccaggcc

SEQ ID NO: 2553223 - RNA, 16 nt, Human
ccacaagagcccaggc

SEQ ID NO: 2553224 - RNA, 21 nt, Human
ccacaagagcccaggccuccu

SEQ ID NO: 2553225 - RNA, 20 nt, Human
ccacaagagcccaggccucc

SEQ ID NO: 2553226 - RNA, 16 nt, Human
ccacaagaaauuugau

SEQ ID NO: 2553227 - RNA, 15 nt, Human
ccacaagaaauuuga

SEQ ID NO: 2553228 - RNA, 21 nt, Human
ccacaagaaauuugauuucua

SEQ ID NO: 2553229 - RNA, 15 nt, Human
ccacaagauucccag

SEQ ID NO: 2553230 - RNA, 16 nt, Human
ccacaagauucccaga

SEQ ID NO: 2553231 - RNA, 17 nt, Human
ccacaagauucccagag

SEQ ID NO: 2553232 - RNA, 24 nt, Human
ccacaagauucccagagacaggaa

SEQ ID NO: 2553233 - RNA, 18 nt, Human
ccacaagauucccagaga

SEQ ID NO: 2553234 - RNA, 19 nt, Human
ccacaagauucccagagac

SEQ ID NO: 2553235 - RNA, 20 nt, Human
ccacaagauucccagagaca

SEQ ID NO: 2553236 - RNA, 21 nt, Human
ccacaagauucccagagacag

SEQ ID NO: 2553237 - RNA, 18 nt, Human
ccaauauuguacaguuuu

SEQ ID NO: 2553238 - RNA, 16 nt, Human
ccaauauuguacaguu

SEQ ID NO: 2553239 - RNA, 15 nt, Human
ccaauauuguacagu

SEQ ID NO: 2553240 - RNA, 14 nt, Human
ccaauauuguacag

SEQ ID NO: 2553241 - RNA, 20 nt, Human
ccaauuguugacaguucuga

SEQ ID NO: 2553242 - RNA, 13 nt, Human
ccaauuggaggaa

SEQ ID NO: 2553243 - RNA, 22 nt, Human
ccaauuguugacaguucugaag

SEQ ID NO: 2553244 - RNA, 21 nt, Human
ccaauuguugacaguucugaa

SEQ ID NO: 2553245 - RNA, 19 nt, Human
ccaauuucaaguuccaagu

SEQ ID NO: 2553246 - RNA, 22 nt, Human
ccaauauuggagcauaucaaaa

SEQ ID NO: 2553247 - RNA, 17 nt, Human
ccaagugugugugcgug

SEQ ID NO: 2553248 - RNA, 20 nt, Human
ccaaguuauaaaucaauguc

SEQ ID NO: 2553249 - RNA, 19 nt, Human
ccaauucuuacaaacaugu

SEQ ID NO: 2553250 - RNA, 18 nt, Human
ccaauucuuacaaacaug

SEQ ID NO: 2553251 - RNA, 16 nt, Human
ccaauuucagacuccc

SEQ ID NO: 2553252 - RNA, 20 nt, Human
ccaauuuguaaaaacagcau

SEQ ID NO: 2553253 - RNA, 14 nt, Human
ccacaaagccuuau

SEQ ID NO: 2553254 - RNA, 20 nt, Human
ccacaaagcacaguuugaac

SEQ ID NO: 2553255 - RNA, 13 nt, Human
ccacaaaaauuga

SEQ ID NO: 2553256 - RNA, 23 nt, Human
ccacaaaauaaccaauccuggac

SEQ ID NO: 2553257 - RNA, 14 nt, Human
ccaauuuuucugca

SEQ ID NO: 2553258 - RNA, 13 nt, Human
ccaauuuuucugc

SEQ ID NO: 2553259 - RNA, 17 nt, Human
ccaauuuuucugcacug

SEQ ID NO: 2553260 - RNA, 16 nt, Human
ccacaagaaaugaaag

SEQ ID NO: 2553261 - RNA, 22 nt, Human
ccacaagaaaugaaagcaggga

SEQ ID NO: 2553262 - RNA, 13 nt, Human
ccacaagagccca

SEQ ID NO: 2553263 - RNA, 16 nt, Human
ccacaagacccuugug

SEQ ID NO: 2553264 - RNA, 22 nt, Human
ccacaacuccugucuaacugcu

SEQ ID NO: 2553265 - RNA, 13 nt, Human
ccacaacacacag

SEQ ID NO: 2553266 - RNA, 18 nt, Human
ccacaacccuguuuuaua

SEQ ID NO: 2553267 - RNA, 18 nt, Human
ccacaaaggagagcuagc

SEQ ID NO: 2553268 - RNA, 23 nt, Human
ccacaaagccuuaucaagugucu

SEQ ID NO: 2553269 - RNA, 22 nt, Human
ccacaaagccuuaucaaguguc

SEQ ID NO: 2553270 - RNA, 23 nt, Human
ccaagugccagaggugggcaggu

SEQ ID NO: 2553271 - RNA, 20 nt, Human
ccaaguggaccuugagacca

SEQ ID NO: 2553272 - RNA, 16 nt, Human
ccaagugccagucuug

SEQ ID NO: 2553273 - RNA, 22 nt, Human
ccaagugccagucuugugucug

SEQ ID NO: 2553274 - RNA, 15 nt, Human
ccaaguggcagagcu

SEQ ID NO: 2553275 - RNA, 14 nt, Human
ccaaguggcagagc

SEQ ID NO: 2553276 - RNA, 13 nt, Human
ccaaguggcagag

SEQ ID NO: 2553277 - RNA, 13 nt, Human
ccaaguggcuccc

SEQ ID NO: 2553278 - RNA, 18 nt, Human
ccaagugaacacuagcca

SEQ ID NO: 2553279 - RNA, 14 nt, Human
ccaagugcaggcug

SEQ ID NO: 2553280 - RNA, 19 nt, Human
ccaagugcaggcuggcacc

SEQ ID NO: 2553281 - RNA, 22 nt, Human
ccaagugccagaggugggcagg

SEQ ID NO: 2553282 - RNA, 21 nt, Human
ccaagugccagaggugggcag

SEQ ID NO: 2553283 - RNA, 18 nt, Human
ccaagugccagagguggg

SEQ ID NO: 2553284 - RNA, 17 nt, Human
ccaagugccagaggugg

SEQ ID NO: 2553285 - RNA, 16 nt, Human
ccaagugccagaggug

SEQ ID NO: 2553286 - RNA, 15 nt, Human
ccaagugccagaggu

SEQ ID NO: 2553287 - RNA, 14 nt, Human
ccaagugccagagg

SEQ ID NO: 2553288 - RNA, 16 nt, Human
ccaagugcaggcuggc

SEQ ID NO: 2553289 - RNA, 16 nt, Human
ccaaguggcucccaca

SEQ ID NO: 2553290 - RNA, 18 nt, Human
ccaaguggcagagcuugg

SEQ ID NO: 2553291 - RNA, 17 nt, Human
ccaaguggcagagcuug

SEQ ID NO: 2553292 - RNA, 19 nt, Human
ccaaguggcagagcuugga

SEQ ID NO: 2553293 - RNA, 16 nt, Human
ccaagugggggcagag

SEQ ID NO: 2553294 - RNA, 19 nt, Human
ccaagugugcauauuguac

SEQ ID NO: 2553295 - RNA, 10 nt, Human
ccaagugugc

SEQ ID NO: 2553296 - RNA, 14 nt, Human
ccaagugugaacaa

SEQ ID NO: 2553297 - RNA, 14 nt, Human
ccaaguggugccua

SEQ ID NO: 2553298 - RNA, 22 nt, Human
ccaaguggggugcugggaggag

SEQ ID NO: 2553299 - RNA, 16 nt, Human
ccaaguggggugcugg

SEQ ID NO: 2553300 - RNA, 15 nt, Human
ccaaguggggugcug

SEQ ID NO: 2553301 - RNA, 18 nt, Human
ccaagugggggcagaggg

SEQ ID NO: 2553302 - RNA, 20 nt, Human
ccaauauucauagcagcuua

SEQ ID NO: 2553303 - RNA, 15 nt, Human
ccaaguuauaaauca

SEQ ID NO: 2553304 - RNA, 13 nt, Human
ccaagugugugug

SEQ ID NO: 2553305 - RNA, 14 nt, Human
ccaagugugugugc

SEQ ID NO: 2553306 - RNA, 21 nt, Human
ccaagugugcauauuguacac

SEQ ID NO: 2553307 - RNA, 20 nt, Human
ccaagugugcauauuguaca

SEQ ID NO: 2553308 - RNA, 22 nt, Human
ccaagugugcauauuguacacu

SEQ ID NO: 2553309 - RNA, 12 nt, Human
ccaagugugugu

SEQ ID NO: 2553310 - RNA, 21 nt, Human
ccaagguuuaaacuucucuga

SEQ ID NO: 2553311 - RNA, 20 nt, Human
ccaagguuuaaacuucucug

SEQ ID NO: 2553312 - RNA, 23 nt, Human
ccaagguggucugcucgggccca

SEQ ID NO: 2553313 - RNA, 15 nt, Human
ccaagguggucugcu

SEQ ID NO: 2553314 - RNA, 13 nt, Human
ccaagguggucug

SEQ ID NO: 2553315 - RNA, 20 nt, Human
ccaagguggguagaucacga

SEQ ID NO: 2553316 - RNA, 17 nt, Human
ccaaggugggcugagcc

SEQ ID NO: 2553317 - RNA, 18 nt, Human
ccaaggugggcugagccc

SEQ ID NO: 2553318 - RNA, 20 nt, Human
ccaaggugggcugagcccug

SEQ ID NO: 2553319 - RNA, 23 nt, Human
ccaaggugggcugagcccuggca

SEQ ID NO: 2553320 - RNA, 22 nt, Human
ccaaggcuucuccaauucugcc

SEQ ID NO: 2553321 - RNA, 20 nt, Human
ccaaggcugcgucuggaggg

SEQ ID NO: 2553322 - RNA, 19 nt, Human
ccaaggcugcgucuggagg

SEQ ID NO: 2553323 - RNA, 18 nt, Human
ccaaggcugcgucuggag

SEQ ID NO: 2553324 - RNA, 14 nt, Human
ccaaggcuggggga

SEQ ID NO: 2553325 - RNA, 19 nt, Human
ccaaggcugauuaaaccaa

SEQ ID NO: 2553326 - RNA, 16 nt, Human
ccaaggcucugagcaa

SEQ ID NO: 2553327 - RNA, 23 nt, Human
ccaaggcguccgcgcgccagcac

SEQ ID NO: 2553328 - RNA, 16 nt, Human
ccaaggcggccccucc

SEQ ID NO: 2553329 - RNA, 17 nt, Human
ccaaggcugcgucugga

SEQ ID NO: 2553330 - RNA, 13 nt, Human
ccaagcucccagg

SEQ ID NO: 2553331 - RNA, 12 nt, Human
ccaagcucccag

SEQ ID NO: 2553332 - RNA, 17 nt, Human
ccaagcuccaagcccca

SEQ ID NO: 2553333 - RNA, 15 nt, Human
ccaagcuccaagccc

SEQ ID NO: 2553334 - RNA, 20 nt, Human
ccaagcucaggaccaggcaa

SEQ ID NO: 2553335 - RNA, 19 nt, Human
ccaagcucaggaccaggca

SEQ ID NO: 2553336 - RNA, 13 nt, Human
ccaagcuccaagc

SEQ ID NO: 2553337 - RNA, 16 nt, Human
ccaagcucagaaggcu

SEQ ID NO: 2553338 - RNA, 14 nt, Human
ccaagcucagaagg

SEQ ID NO: 2553339 - RNA, 23 nt, Human
ccaagccguggcuucccgcucag

SEQ ID NO: 2553340 - RNA, 21 nt, Human
ccaaggcggccccucccgccc

SEQ ID NO: 2553341 - RNA, 15 nt, Human
ccaaggcggccccuc

SEQ ID NO: 2553342 - RNA, 14 nt, Human
ccaaggcggccccu

SEQ ID NO: 2553343 - RNA, 16 nt, Human
ccaaggccuucuccuc

SEQ ID NO: 2553344 - RNA, 14 nt, Human
ccaaggccuucucc

SEQ ID NO: 2553345 - RNA, 18 nt, Human
ccaaggccgaagcucugg

SEQ ID NO: 2553346 - RNA, 18 nt, Human
ccaaggcuagaaccaccu

SEQ ID NO: 2553347 - RNA, 20 nt, Human
ccaaggccgaagcucuggcu

SEQ ID NO: 2553348 - RNA, 17 nt, Human
ccaaggccgaagcucug

SEQ ID NO: 2553349 - RNA, 16 nt, Human
ccaaggccgaagcucu

SEQ ID NO: 2553350 - RNA, 13 nt, Human
ccaaggccagguu

SEQ ID NO: 2553351 - RNA, 14 nt, Human
ccaagcuccaucuc

SEQ ID NO: 2553352 - RNA, 21 nt, Human
ccaagccguggcuucccgcuc

SEQ ID NO: 2553353 - RNA, 17 nt, Human
ccaagccguggcuuccc

SEQ ID NO: 2553354 - RNA, 16 nt, Human
ccaagccguggcuucc

SEQ ID NO: 2553355 - RNA, 15 nt, Human
ccaagccguggcuuc

SEQ ID NO: 2553356 - RNA, 14 nt, Human
ccaagcaggacaug

SEQ ID NO: 2553357 - RNA, 14 nt, Human
ccaagccguggcuu

SEQ ID NO: 2553358 - RNA, 20 nt, Human
ccaagcaggaagcucagacu

SEQ ID NO: 2553359 - RNA, 23 nt, Human
ccaagcagagguugggaggccau

SEQ ID NO: 2553360 - RNA, 12 nt, Human
ccaagcagccaa

SEQ ID NO: 2553361 - RNA, 16 nt, Human
ccaagcagccaagcuc

SEQ ID NO: 2553362 - RNA, 18 nt, Human
ccaagcaggaaaugaaaa

SEQ ID NO: 2553363 - RNA, 18 nt, Human
ccaagcagccaagcuccu

SEQ ID NO: 2553364 - RNA, 12 nt, Human
ccaagcaggaag

SEQ ID NO: 2553365 - RNA, 13 nt, Human
ccaagcaggaagc

SEQ ID NO: 2553366 - RNA, 14 nt, Human
ccaagcaggaagcu

SEQ ID NO: 2553367 - RNA, 17 nt, Human
ccaagcaggaagcucag

SEQ ID NO: 2553368 - RNA, 18 nt, Human
ccaagcaggaagcucaga

SEQ ID NO: 2553369 - RNA, 12 nt, Human
ccaagaggcugc

SEQ ID NO: 2553370 - RNA, 13 nt, Human
ccaagaggcugca

SEQ ID NO: 2553371 - RNA, 16 nt, Human
ccaagagccugagagu

SEQ ID NO: 2553372 - RNA, 22 nt, Human
ccaagagcugaggcaauucuaa

SEQ ID NO: 2553373 - RNA, 16 nt, Human
ccaaagagggcuuccu

SEQ ID NO: 2553374 - RNA, 22 nt, Human
ccaaagagccuggagaagcuga

SEQ ID NO: 2553375 - RNA, 19 nt, Human
ccaaagagggcuuccucua

SEQ ID NO: 2553376 - RNA, 17 nt, Human
ccaaagagggcuuccuc

SEQ ID NO: 2553377 - RNA, 9 nt, Human
ccaaagagu

SEQ ID NO: 2553378 - RNA, 14 nt, Human
ccaaagaugcagcc

SEQ ID NO: 2553379 - RNA, 13 nt, Human
ccaaagaugcagc

SEQ ID NO: 2553380 - RNA, 17 nt, Human
ccaacaucccauugccc

SEQ ID NO: 2553381 - RNA, 16 nt, Human
ccaacaucaacaucuu

SEQ ID NO: 2553382 - RNA, 14 nt, Human
ccaacauacuccca

SEQ ID NO: 2553383 - RNA, 23 nt, Human
ccaacaguguuaggccuggcaca

SEQ ID NO: 2553384 - RNA, 12 nt, Human
ccaacaguuccu

SEQ ID NO: 2553385 - RNA, 21 nt, Human
ccaacacgagcaggcuacugu

SEQ ID NO: 2553386 - RNA, 16 nt, Human
ccaacacgcaccugcc

SEQ ID NO: 2553387 - RNA, 18 nt, Human
ccaacagguggcaggacc

SEQ ID NO: 2553388 - RNA, 18 nt, Human
ccaacacccaucuguuuu

SEQ ID NO: 2553389 - RNA, 22 nt, Human
ccaacaccagccccugccccag

SEQ ID NO: 2553390 - RNA, 12 nt, Human
ccaacaccaggg

SEQ ID NO: 2553391 - RNA, 21 nt, Human
ccaacaguguuaggccuggca

SEQ ID NO: 2553392 - RNA, 20 nt, Human
ccaacaguguuaggccuggc

SEQ ID NO: 2553393 - RNA, 22 nt, Human
ccaacagugugaaguuagaauu

SEQ ID NO: 2553394 - RNA, 19 nt, Human
ccaacagugugaaguuaga

SEQ ID NO: 2553395 - RNA, 16 nt, Human
ccaacagugugaaguu

SEQ ID NO: 2553396 - RNA, 15 nt, Human
ccaacagugugaagu

SEQ ID NO: 2553397 - RNA, 14 nt, Human
ccaacagugugaag

SEQ ID NO: 2553398 - RNA, 13 nt, Human
ccaacagugugaa

SEQ ID NO: 2553399 - RNA, 12 nt, Human
ccaacaguguga

SEQ ID NO: 2553400 - RNA, 20 nt, Human
ccaacagugagucugucagc

SEQ ID NO: 2553401 - RNA, 12 nt, Human
ccaacagugagu

SEQ ID NO: 2553402 - RNA, 23 nt, Human
ccaacagguggcaggaccaggac

SEQ ID NO: 2553403 - RNA, 19 nt, Human
ccaacagguggcaggacca

SEQ ID NO: 2553404 - RNA, 20 nt, Human
ccaacacccugucuaaaaaa

SEQ ID NO: 2553405 - RNA, 19 nt, Human
ccaacagucaaaacagaga

SEQ ID NO: 2553406 - RNA, 15 nt, Human
ccaacaccagccccu

SEQ ID NO: 2553407 - RNA, 20 nt, Human
ccaaauugcugggauuacag

SEQ ID NO: 2553408 - RNA, 22 nt, Human
ccaaauugcuccuaagcuucaa

SEQ ID NO: 2553409 - RNA, 23 nt, Human
ccaaauuccuuggcaugccuucc

SEQ ID NO: 2553410 - RNA, 20 nt, Human
ccaaauuccuuggcaugccu

SEQ ID NO: 2553411 - RNA, 14 nt, Human
ccaacacgagcagg

SEQ ID NO: 2553412 - RNA, 18 nt, Human
ccaacaccagccccugcc

SEQ ID NO: 2553413 - RNA, 17 nt, Human
ccaacaccagccccugc

SEQ ID NO: 2553414 - RNA, 16 nt, Human
ccaacaccagccccug

SEQ ID NO: 2553415 - RNA, 13 nt, Human
ccaacaccaggga

SEQ ID NO: 2553416 - RNA, 16 nt, Human
ccaaagcagggucugg

SEQ ID NO: 2553417 - RNA, 15 nt, Human
ccaaagcagggucug

SEQ ID NO: 2553418 - RNA, 12 nt, Human
ccaaagcagggu

SEQ ID NO: 2553419 - RNA, 13 nt, Human
ccaaagcagacag

SEQ ID NO: 2553420 - RNA, 14 nt, Human
ccaaagcagacagc

SEQ ID NO: 2553421 - RNA, 21 nt, Human
ccaaagauauauacacaggau

SEQ ID NO: 2553422 - RNA, 22 nt, Human
ccaaagaguagaauugcauuga

SEQ ID NO: 2553423 - RNA, 15 nt, Human
ccaaauucuuucagu

SEQ ID NO: 2553424 - RNA, 22 nt, Human
ccaaauucuuucaguggcuacc

SEQ ID NO: 2553425 - RNA, 15 nt, Human
ccaagaccuucuccu

SEQ ID NO: 2553426 - RNA, 23 nt, Human
ccaagacaugucuguucuacaua

SEQ ID NO: 2553427 - RNA, 11 nt, Human
ccaagacauug

SEQ ID NO: 2553428 - RNA, 22 nt, Human
ccaagacagaugccccagagcu

SEQ ID NO: 2553429 - RNA, 21 nt, Human
ccaagacaugucuguucuaca

SEQ ID NO: 2553430 - RNA, 24 nt, Human
ccaagacagaugccccagagcugu

SEQ ID NO: 2553431 - RNA, 23 nt, Human
ccaaccuuagauguucuaagucu

SEQ ID NO: 2553432 - RNA, 12 nt, Human
ccaaccuuccca

SEQ ID NO: 2553433 - RNA, 22 nt, Human
ccaaccuguaauaaauaugagu

SEQ ID NO: 2553434 - RNA, 23 nt, Human
ccaagacagaugccccagagcug

SEQ ID NO: 2553435 - RNA, 21 nt, Human
ccaaccuguaauaaauaugag

SEQ ID NO: 2553436 - RNA, 20 nt, Human
ccaaccuguaauaaauauga

SEQ ID NO: 2553437 - RNA, 19 nt, Human
ccaaccuguaauaaauaug

SEQ ID NO: 2553438 - RNA, 18 nt, Human
ccaaccuguaauaaauau

SEQ ID NO: 2553439 - RNA, 15 nt, Human
ccaaccuguuaccua

SEQ ID NO: 2553440 - RNA, 13 nt, Human
ccaaccucuggag

SEQ ID NO: 2553441 - RNA, 14 nt, Human
ccaaccucuggagc

SEQ ID NO: 2553442 - RNA, 12 nt, Human
ccaaccugacca

SEQ ID NO: 2553443 - RNA, 18 nt, Human
ccaaccugcaaagaucug

SEQ ID NO: 2553444 - RNA, 19 nt, Human
ccaaccugcaaagaucugu

SEQ ID NO: 2553445 - RNA, 17 nt, Human
ccaaccugcaaagaucu

SEQ ID NO: 2553446 - RNA, 13 nt, Human
ccaaccugaccaa

SEQ ID NO: 2553447 - RNA, 16 nt, Human
ccaaccugaccaacau

SEQ ID NO: 2553448 - RNA, 17 nt, Human
ccaaccuguaauaaaua

SEQ ID NO: 2553449 - RNA, 16 nt, Human
ccaaccuguaauaaau

SEQ ID NO: 2553450 - RNA, 14 nt, Human
ccaaccuggggggc

SEQ ID NO: 2553451 - RNA, 13 nt, Human
ccaaccuggacaa

SEQ ID NO: 2553452 - RNA, 17 nt, Human
ccaaccuggggagccag

SEQ ID NO: 2553453 - RNA, 14 nt, Human
ccaaccuggacaac

SEQ ID NO: 2553454 - RNA, 12 nt, Human
ccaaccugcuga

SEQ ID NO: 2553455 - RNA, 22 nt, Human
ccaaccugaccaacauggagaa

SEQ ID NO: 2553456 - RNA, 13 nt, Human
ccaacccucauca

SEQ ID NO: 2553457 - RNA, 17 nt, Human
ccaacaucgugaaaccc

SEQ ID NO: 2553458 - RNA, 16 nt, Human
ccaacaucucccuccc

SEQ ID NO: 2553459 - RNA, 20 nt, Human
ccaacaucccauugcccugg

SEQ ID NO: 2553460 - RNA, 21 nt, Human
ccaacaucccauugcccuggu

SEQ ID NO: 2553461 - RNA, 15 nt, Human
ccaacccucaucacc

SEQ ID NO: 2553462 - RNA, 15 nt, Human
ccaacauggagaaac

SEQ ID NO: 2553463 - RNA, 22 nt, Human
ccaacauggagaaacccugucu

SEQ ID NO: 2553464 - RNA, 23 nt, Human
ccaacauggagaaacccugucuc

SEQ ID NO: 2553465 - RNA, 15 nt, Human
ccaacauggugaaac

SEQ ID NO: 2553466 - RNA, 14 nt, Human
ccaacccugccccu

SEQ ID NO: 2553467 - RNA, 15 nt, Human
ccaacccugccccug

SEQ ID NO: 2553468 - RNA, 16 nt, Human
ccaacccugccccugc

SEQ ID NO: 2553469 - RNA, 12 nt, Human
ccaacccuuccc

SEQ ID NO: 2553470 - RNA, 18 nt, Human
ccaacccuguuuccugag

SEQ ID NO: 2553471 - RNA, 16 nt, Human
ccaacccuguuuccug

SEQ ID NO: 2553472 - RNA, 14 nt, Human
ccaacccugucugu

SEQ ID NO: 2553473 - RNA, 12 nt, Human
ccaacccugucu

SEQ ID NO: 2553474 - RNA, 13 nt, Human
ccaacccugucug

SEQ ID NO: 2553475 - RNA, 18 nt, Human
ccaacccuggcacccagg

SEQ ID NO: 2553476 - RNA, 17 nt, Human
ccaacccugccccugcc

SEQ ID NO: 2553477 - RNA, 14 nt, Human
ccaaccuccugacc

SEQ ID NO: 2553478 - RNA, 18 nt, Human
ccaaccuaaccccuuucc

SEQ ID NO: 2553479 - RNA, 14 nt, Human
ccaacccuucccca

SEQ ID NO: 2553480 - RNA, 21 nt, Human
ccaacccuucuccucuuguaa

SEQ ID NO: 2553481 - RNA, 13 nt, Human
ccaacccuucucc

SEQ ID NO: 2553482 - RNA, 11 nt, Human
ccaacccuucu

SEQ ID NO: 2553483 - RNA, 12 nt, Human
ccaagagccuga

SEQ ID NO: 2553484 - RNA, 12 nt, Human
ccaagagaugaa

SEQ ID NO: 2553485 - RNA, 19 nt, Human
ccaagagcagaggcagcga

SEQ ID NO: 2553486 - RNA, 23 nt, Human
ccaagacucccucgucgagcugg

SEQ ID NO: 2553487 - RNA, 14 nt, Human
ccaagagaugaaga

SEQ ID NO: 2553488 - RNA, 19 nt, Human
ccaagaccuguugguucca

SEQ ID NO: 2553489 - RNA, 12 nt, Human
ccaagacauugu

SEQ ID NO: 2553490 - RNA, 16 nt, Human
ccaagacauugucaau

SEQ ID NO: 2553491 - RNA, 17 nt, Human
ccaagacauugucaaua

SEQ ID NO: 2553492 - RNA, 16 nt, Human
cauuagacuccuccuc

SEQ ID NO: 2553493 - RNA, 15 nt, Human
cauuagacuccuccu

SEQ ID NO: 2553494 - RNA, 17 nt, Human
cauuagacuccuccucc

SEQ ID NO: 2553495 - RNA, 12 nt, Human
cauuagagcagg

SEQ ID NO: 2553496 - RNA, 11 nt, Human
cauuagagcag

SEQ ID NO: 2553497 - RNA, 19 nt, Human
cauuagagcccauuucaau

SEQ ID NO: 2553498 - RNA, 14 nt, Human
cauuagagcaggcg

SEQ ID NO: 2553499 - RNA, 13 nt, Human
cauuagagcaggc

SEQ ID NO: 2553500 - RNA, 23 nt, Human
cauuagagcaggcguucagcuca

SEQ ID NO: 2553501 - RNA, 22 nt, Human
cauuaccgcguuguaaaauaua

SEQ ID NO: 2553502 - RNA, 18 nt, Human
cauuaccgcguuguaaaa

SEQ ID NO: 2553503 - RNA, 20 nt, Human
cauuaccuuacuguggagga

SEQ ID NO: 2553504 - RNA, 13 nt, Human
cauuaccuuacug

SEQ ID NO: 2553505 - RNA, 17 nt, Human
cauuacgugagccaggu

SEQ ID NO: 2553506 - RNA, 18 nt, Human
cauuagaccaagcuuguc

SEQ ID NO: 2553507 - RNA, 16 nt, Human
cauuacgugagccagg

SEQ ID NO: 2553508 - RNA, 17 nt, Human
cauuaccuuacugugga

SEQ ID NO: 2553509 - RNA, 13 nt, Human
cauuacgugagcc

SEQ ID NO: 2553510 - RNA, 17 nt, Human
cauuagcaguuugcuuu

SEQ ID NO: 2553511 - RNA, 14 nt, Human
cauuauuugcaugu

SEQ ID NO: 2553512 - RNA, 19 nt, Human
cauuauuugcauguuaccu

SEQ ID NO: 2553513 - RNA, 13 nt, Human
cauuauuugcaug

SEQ ID NO: 2553514 - RNA, 22 nt, Human
cauuauuuauucagcuucauuu

SEQ ID NO: 2553515 - RNA, 23 nt, Human
cauuaaucaaucaucugugugaa

SEQ ID NO: 2553516 - RNA, 22 nt, Human
cauuaaucaaucaucuguguga

SEQ ID NO: 2553517 - RNA, 21 nt, Human
cauuaauguuaauucagcacu

SEQ ID NO: 2553518 - RNA, 13 nt, Human
cauuaauguuaau

SEQ ID NO: 2553519 - RNA, 23 nt, Human
cauuaauguuaauucagcacuga

SEQ ID NO: 2553520 - RNA, 19 nt, Human
cauuaauuauuauugcugu

SEQ ID NO: 2553521 - RNA, 21 nt, Human
cauuaauuauuauugcuguug

SEQ ID NO: 2553522 - RNA, 21 nt, Human
cauuaccucagugagaagcca

SEQ ID NO: 2553523 - RNA, 22 nt, Human
cauuaccucagugagaagccag

SEQ ID NO: 2553524 - RNA, 20 nt, Human
cauuaauuauuauugcuguu

SEQ ID NO: 2553525 - RNA, 20 nt, Human
cauuaccagacgguucacca

SEQ ID NO: 2553526 - RNA, 18 nt, Human
cauuaccagacgguucac

SEQ ID NO: 2553527 - RNA, 17 nt, Human
cauuaccgcguuguaaa

SEQ ID NO: 2553528 - RNA, 23 nt, Human
cauuaccagacgguucaccagcc

SEQ ID NO: 2553529 - RNA, 14 nt, Human
cauuaaauucacaa

SEQ ID NO: 2553530 - RNA, 17 nt, Human
cauuaaauucacaaacu

SEQ ID NO: 2553531 - RNA, 18 nt, Human
cauuaaauucacaaacuu

SEQ ID NO: 2553532 - RNA, 21 nt, Human
cauuaaauucacaaacuuuua

SEQ ID NO: 2553533 - RNA, 13 nt, Human
cauuaacaguuuu

SEQ ID NO: 2553534 - RNA, 16 nt, Human
cauuaacaguuuucca

SEQ ID NO: 2553535 - RNA, 17 nt, Human
cauuaacaguuuuccau

SEQ ID NO: 2553536 - RNA, 14 nt, Human
cauuaauaauaaau

SEQ ID NO: 2553537 - RNA, 20 nt, Human
cauuaacaguuuuccaugaa

SEQ ID NO: 2553538 - RNA, 16 nt, Human
cauuaauauuugcuga

SEQ ID NO: 2553539 - RNA, 18 nt, Human
cauuaaucaaucaucugu

SEQ ID NO: 2553540 - RNA, 17 nt, Human
cauuaauauuugcugac

SEQ ID NO: 2553541 - RNA, 23 nt, Human
cauguuuugugacuauauagaga

SEQ ID NO: 2553542 - RNA, 17 nt, Human
cauguuuugugacuaua

SEQ ID NO: 2553543 - RNA, 15 nt, Human
cauguuuugugacua

SEQ ID NO: 2553544 - RNA, 21 nt, Human
cauuaaagccugaguuugcuu

SEQ ID NO: 2553545 - RNA, 15 nt, Human
cauguuuuguuuacg

SEQ ID NO: 2553546 - RNA, 12 nt, Human
cauuaaaguucu

SEQ ID NO: 2553547 - RNA, 21 nt, Human
cauuaaaggcuucucucucac

SEQ ID NO: 2553548 - RNA, 13 nt, Human
cauuaaauucaca

SEQ ID NO: 2553549 - RNA, 21 nt, Human
cauuaaagucgagcuuuucua

SEQ ID NO: 2553550 - RNA, 18 nt, Human
cauuaaaggcuucucucu

SEQ ID NO: 2553551 - RNA, 17 nt, Human
cauuaaaggcuucucuc

SEQ ID NO: 2553552 - RNA, 24 nt, Human
cauuaaaggcuucucucucaccag

SEQ ID NO: 2553553 - RNA, 18 nt, Human
cauuaaagcauuuacuuu

SEQ ID NO: 2553554 - RNA, 12 nt, Human
cauuaaagccau

SEQ ID NO: 2553555 - RNA, 22 nt, Human
cauuaaagcauuuacuuugaau

SEQ ID NO: 2553556 - RNA, 18 nt, Human
cauguuuuucuucucccu

SEQ ID NO: 2553557 - RNA, 21 nt, Human
cauguuucuuuguaaugaaaa

SEQ ID NO: 2553558 - RNA, 20 nt, Human
cauguuucuuuguaaugaaa

SEQ ID NO: 2553559 - RNA, 21 nt, Human
cauguguguccacgacugucu

SEQ ID NO: 2553560 - RNA, 22 nt, Human
cauguguguccacgacugucuc

SEQ ID NO: 2553561 - RNA, 12 nt, Human
caugugugucca

SEQ ID NO: 2553562 - RNA, 14 nt, Human
cauguguggacuca

SEQ ID NO: 2553563 - RNA, 20 nt, Human
caugugugcucuucuucuuu

SEQ ID NO: 2553564 - RNA, 18 nt, Human
caugugugcucuucuucu

SEQ ID NO: 2553565 - RNA, 14 nt, Human
caugugugcugaac

SEQ ID NO: 2553566 - RNA, 23 nt, Human
cauguguguccacgacugucucc

SEQ ID NO: 2553567 - RNA, 15 nt, Human
caugugugugcaagu

SEQ ID NO: 2553568 - RNA, 15 nt, Human
caugugugugcucag

SEQ ID NO: 2553569 - RNA, 18 nt, Human
cauguuuugauaaaguag

SEQ ID NO: 2553570 - RNA, 17 nt, Human
cauguuuugauaaagua

SEQ ID NO: 2553571 - RNA, 14 nt, Human
cauguuuugauaaa

SEQ ID NO: 2553572 - RNA, 13 nt, Human
cauguuuugauaa

SEQ ID NO: 2553573 - RNA, 21 nt, Human
cauguuuucugaaaauauaac

SEQ ID NO: 2553574 - RNA, 14 nt, Human
cauguuuuccguga

SEQ ID NO: 2553575 - RNA, 12 nt, Human
cauguuuuguau

SEQ ID NO: 2553576 - RNA, 14 nt, Human
cauguuuugugacu

SEQ ID NO: 2553577 - RNA, 21 nt, Human
cauguuuuccauuguuugaaa

SEQ ID NO: 2553578 - RNA, 17 nt, Human
cauguuuuccauuguuu

SEQ ID NO: 2553579 - RNA, 15 nt, Human
cauguuuuccauugu

SEQ ID NO: 2553580 - RNA, 18 nt, Human
cauguuuuccagcuccuc

SEQ ID NO: 2553581 - RNA, 16 nt, Human
cauguuuucaacugcc

SEQ ID NO: 2553582 - RNA, 17 nt, Human
cauguuuucaacugcca

SEQ ID NO: 2553583 - RNA, 15 nt, Human
cauguuuucaacugc

SEQ ID NO: 2553584 - RNA, 15 nt, Human
cauguuuuaacaaaa

SEQ ID NO: 2553585 - RNA, 16 nt, Human
cauguuuuaacaaaaa

SEQ ID NO: 2553586 - RNA, 17 nt, Human
cauguuuuaacaaaaac

SEQ ID NO: 2553587 - RNA, 20 nt, Human
cauguuuuaacaaaaaccaa

SEQ ID NO: 2553588 - RNA, 23 nt, Human
cauguuuuagacaaauacucaug

SEQ ID NO: 2553589 - RNA, 15 nt, Human
cauguuugugauuga

SEQ ID NO: 2553590 - RNA, 21 nt, Human
caugugugugcaagugugugc

SEQ ID NO: 2553591 - RNA, 16 nt, Human
cauguuugagcucaga

SEQ ID NO: 2553592 - RNA, 18 nt, Human
cauguuugagcucagacc

SEQ ID NO: 2553593 - RNA, 13 nt, Human
cauguuuuaacaa

SEQ ID NO: 2553594 - RNA, 14 nt, Human
cauguuuuaacaaa

SEQ ID NO: 2553595 - RNA, 12 nt, Human
cauguuuuaaca

SEQ ID NO: 2553596 - RNA, 23 nt, Human
cauguuugagcucagacccccac

SEQ ID NO: 2553597 - RNA, 18 nt, Human
cauguuuuaaagcuugcu

SEQ ID NO: 2553598 - RNA, 19 nt, Human
cauguuugagcucagaccc

SEQ ID NO: 2553599 - RNA, 20 nt, Human
cauguuugagcucagacccc

SEQ ID NO: 2553600 - RNA, 22 nt, Human
cauguuucuuuguaaugaaaac

SEQ ID NO: 2553601 - RNA, 23 nt, Human
cauguuugauguaucugagcagg

SEQ ID NO: 2553602 - RNA, 15 nt, Human
caugugaacccggga

SEQ ID NO: 2553603 - RNA, 24 nt, Human
caugugaaaccuuuuuuaagauuu

SEQ ID NO: 2553604 - RNA, 22 nt, Human
caugugaaaccuuuuuuaagau

SEQ ID NO: 2553605 - RNA, 21 nt, Human
caugugaaaccuuuuuuaaga

SEQ ID NO: 2553606 - RNA, 13 nt, Human
caugugacacaua

SEQ ID NO: 2553607 - RNA, 12 nt, Human
caugugacacau

SEQ ID NO: 2553608 - RNA, 15 nt, Human
caugugacacauaug

SEQ ID NO: 2553609 - RNA, 14 nt, Human
caugugacacauau

SEQ ID NO: 2553610 - RNA, 12 nt, Human
caugugacauuu

SEQ ID NO: 2553611 - RNA, 16 nt, Human
caugugacacauaugc

SEQ ID NO: 2553612 - RNA, 16 nt, Human
caugugaccacucugu

SEQ ID NO: 2553613 - RNA, 16 nt, Human
caugugacauuuauau

SEQ ID NO: 2553614 - RNA, 14 nt, Human
caugugacauuuau

SEQ ID NO: 2553615 - RNA, 13 nt, Human
caugugacauuua

SEQ ID NO: 2553616 - RNA, 15 nt, Human
caugugcacaugcac

SEQ ID NO: 2553617 - RNA, 22 nt, Human
caugugccagggcaaugaugaa

SEQ ID NO: 2553618 - RNA, 17 nt, Human
cauguggaaagugaauu

SEQ ID NO: 2553619 - RNA, 16 nt, Human
cauguggaaagugaau

SEQ ID NO: 2553620 - RNA, 24 nt, Human
caugugccagggcaaugaugaaug

SEQ ID NO: 2553621 - RNA, 21 nt, Human
caugugccagguuuuuggucu

SEQ ID NO: 2553622 - RNA, 18 nt, Human
caugugaccacucugucu

SEQ ID NO: 2553623 - RNA, 21 nt, Human
caugugacuccuaugaucuca

SEQ ID NO: 2553624 - RNA, 13 nt, Human
caugugaagaggg

SEQ ID NO: 2553625 - RNA, 12 nt, Human
cauguggcugga

SEQ ID NO: 2553626 - RNA, 14 nt, Human
cauguggccugugg

SEQ ID NO: 2553627 - RNA, 19 nt, Human
cauguggagaaaggaguga

SEQ ID NO: 2553628 - RNA, 15 nt, Human
cauguggagaaagga

SEQ ID NO: 2553629 - RNA, 18 nt, Human
cauguggaaagugaauuu

SEQ ID NO: 2553630 - RNA, 20 nt, Human
cauguggaaagugaauuuga

SEQ ID NO: 2553631 - RNA, 21 nt, Human
cauguggaaagugaauuugaa

SEQ ID NO: 2553632 - RNA, 22 nt, Human
cauguggaaagugaauuugaau

SEQ ID NO: 2553633 - RNA, 23 nt, Human
cauguggaaagugaauuugaaug

SEQ ID NO: 2553634 - RNA, 17 nt, Human
cauguggaauauaaaga

SEQ ID NO: 2553635 - RNA, 17 nt, Human
cauguggggccagguca

SEQ ID NO: 2553636 - RNA, 15 nt, Human
cauguggggccaggu

SEQ ID NO: 2553637 - RNA, 14 nt, Human
cauguggggccagg

SEQ ID NO: 2553638 - RNA, 15 nt, Human
cauguggcuggaaga

SEQ ID NO: 2553639 - RNA, 13 nt, Human
cauguggcuggaa

SEQ ID NO: 2553640 - RNA, 12 nt, Human
caugugggagcu

SEQ ID NO: 2553641 - RNA, 21 nt, Human
caugugugagugugugcaagu

SEQ ID NO: 2553642 - RNA, 16 nt, Human
cauguguaaucaauaa

SEQ ID NO: 2553643 - RNA, 18 nt, Human
caugugugcaacagggua

SEQ ID NO: 2553644 - RNA, 17 nt, Human
caugugugcgagugugu

SEQ ID NO: 2553645 - RNA, 19 nt, Human
caugugugcgagugugugc

SEQ ID NO: 2553646 - RNA, 17 nt, Human
caugugugcucuucuuc

SEQ ID NO: 2553647 - RNA, 13 nt, Human
caugugugcgugu

SEQ ID NO: 2553648 - RNA, 22 nt, Human
caugugguuaaugccauggaca

SEQ ID NO: 2553649 - RNA, 15 nt, Human
caugugguuuauaga

SEQ ID NO: 2553650 - RNA, 20 nt, Human
caugugguuuauagagggcc

SEQ ID NO: 2553651 - RNA, 22 nt, Human
caugugguggcacaggcccccu

SEQ ID NO: 2553652 - RNA, 18 nt, Human
cauguggggccaggucac

SEQ ID NO: 2553653 - RNA, 23 nt, Human
cauguggggccaggucacccuuu

SEQ ID NO: 2553654 - RNA, 23 nt, Human
caugugguggcacaggcccccuu

SEQ ID NO: 2553655 - RNA, 12 nt, Human
caugugguggga

SEQ ID NO: 2553656 - RNA, 21 nt, Human
cauguggugggacagggaccc

SEQ ID NO: 2553657 - RNA, 17 nt, Human
caugugguuaaugccau

SEQ ID NO: 2553658 - RNA, 17 nt, Human
cauguaacagaaagggc

SEQ ID NO: 2553659 - RNA, 15 nt, Human
cauguaacagaaagg

SEQ ID NO: 2553660 - RNA, 14 nt, Human
cauguaacagaaag

SEQ ID NO: 2553661 - RNA, 13 nt, Human
cauguaacagaaa

SEQ ID NO: 2553662 - RNA, 16 nt, Human
caugguugagaaauga

SEQ ID NO: 2553663 - RNA, 16 nt, Human
cauguaaauuuuguau

SEQ ID NO: 2553664 - RNA, 17 nt, Human
cauguaagcugaaaaua

SEQ ID NO: 2553665 - RNA, 23 nt, Human
cauguaagcugaaaauauggcaa

SEQ ID NO: 2553666 - RNA, 18 nt, Human
cauguaagcugaaaauau

SEQ ID NO: 2553667 - RNA, 14 nt, Human
cauguaauccucaa

SEQ ID NO: 2553668 - RNA, 21 nt, Human
cauguaaugguaucuuaaagu

SEQ ID NO: 2553669 - RNA, 12 nt, Human
cauguaauaaaa

SEQ ID NO: 2553670 - RNA, 21 nt, Human
cauguaauaaaaaguauaugu

SEQ ID NO: 2553671 - RNA, 23 nt, Human
cauguaauauaaagauguuaaaa

SEQ ID NO: 2553672 - RNA, 22 nt, Human
cauguaauaaaaaguauauguu

SEQ ID NO: 2553673 - RNA, 22 nt, Human
caugguguaauaagacauaacg

SEQ ID NO: 2553674 - RNA, 21 nt, Human
caugguuacaaucauugcuga

SEQ ID NO: 2553675 - RNA, 19 nt, Human
caugguuaagguaaaguaa

SEQ ID NO: 2553676 - RNA, 14 nt, Human
caugguugagaaau

SEQ ID NO: 2553677 - RNA, 21 nt, Human
caugguguaauaagacauaac

SEQ ID NO: 2553678 - RNA, 19 nt, Human
caugguguaauaagacaua

SEQ ID NO: 2553679 - RNA, 18 nt, Human
caugguguaauaagacau

SEQ ID NO: 2553680 - RNA, 16 nt, Human
caugguguaauaagac

SEQ ID NO: 2553681 - RNA, 15 nt, Human
caugguguaauaaga

SEQ ID NO: 2553682 - RNA, 17 nt, Human
cauggugccugagaggc

SEQ ID NO: 2553683 - RNA, 16 nt, Human
cauggugccugagagg

SEQ ID NO: 2553684 - RNA, 15 nt, Human
cauggugccugagag

SEQ ID NO: 2553685 - RNA, 18 nt, Human
cauggugugaucgucuga

SEQ ID NO: 2553686 - RNA, 23 nt, Human
cauggugugaaagucagaugccc

SEQ ID NO: 2553687 - RNA, 12 nt, Human
cauggugucugg

SEQ ID NO: 2553688 - RNA, 22 nt, Human
cauggugugaaagucagaugcc

SEQ ID NO: 2553689 - RNA, 16 nt, Human
cauggucggaaaacau

SEQ ID NO: 2553690 - RNA, 20 nt, Human
cauggugacuuuugaaaaga

SEQ ID NO: 2553691 - RNA, 15 nt, Human
cauggugccccagga

SEQ ID NO: 2553692 - RNA, 21 nt, Human
cauggugcaguugacagcagg

SEQ ID NO: 2553693 - RNA, 19 nt, Human
cauggugcaguugacagca

SEQ ID NO: 2553694 - RNA, 17 nt, Human
caugguccgguguccuu

SEQ ID NO: 2553695 - RNA, 16 nt, Human
cauggugaauuaauca

SEQ ID NO: 2553696 - RNA, 20 nt, Human
caugguccgguguccuuuuc

SEQ ID NO: 2553697 - RNA, 21 nt, Human
cauggugaaaauguacugaga

SEQ ID NO: 2553698 - RNA, 16 nt, Human
cauggugccccaggac

SEQ ID NO: 2553699 - RNA, 17 nt, Human
cauggugccccaggacc

SEQ ID NO: 2553700 - RNA, 18 nt, Human
cauggugccccaggacca

SEQ ID NO: 2553701 - RNA, 19 nt, Human
cauggugccccaggaccag

SEQ ID NO: 2553702 - RNA, 20 nt, Human
cauggugccccaggaccagc

SEQ ID NO: 2553703 - RNA, 22 nt, Human
cauggugccccaggaccagcuc

SEQ ID NO: 2553704 - RNA, 13 nt, Human
cauggugccugag

SEQ ID NO: 2553705 - RNA, 14 nt, Human
cauggugccugaga

SEQ ID NO: 2553706 - RNA, 19 nt, Human
cauguccuuguguguuuug

SEQ ID NO: 2553707 - RNA, 15 nt, Human
caugucgccucugca

SEQ ID NO: 2553708 - RNA, 14 nt, Human
caugucgccucugc

SEQ ID NO: 2553709 - RNA, 17 nt, Human
caugucgcgcucagcau

SEQ ID NO: 2553710 - RNA, 21 nt, Human
cauguccuuagcacagggggg

SEQ ID NO: 2553711 - RNA, 22 nt, Human
cauguccuuguguguuuugaga

SEQ ID NO: 2553712 - RNA, 19 nt, Human
caugucgcgcucagcaugc

SEQ ID NO: 2553713 - RNA, 23 nt, Human
caugucuuguacauguguagccu

SEQ ID NO: 2553714 - RNA, 20 nt, Human
caugucgccucugcauucag

SEQ ID NO: 2553715 - RNA, 18 nt, Human
caugucgccucugcauuc

SEQ ID NO: 2553716 - RNA, 22 nt, Human
cauguacaguguucuguuuaau

SEQ ID NO: 2553717 - RNA, 21 nt, Human
cauguacaguguucuguuuaa

SEQ ID NO: 2553718 - RNA, 20 nt, Human
cauguacaguguucuguuua

SEQ ID NO: 2553719 - RNA, 19 nt, Human
cauguacaguguucuguuu

SEQ ID NO: 2553720 - RNA, 15 nt, Human
cauguacaguguucu

SEQ ID NO: 2553721 - RNA, 11 nt, Human
cauguacagug

SEQ ID NO: 2553722 - RNA, 10 nt, Human
cauguacagu

SEQ ID NO: 2553723 - RNA, 22 nt, Human
cauguacagagaacuaacacua

SEQ ID NO: 2553724 - RNA, 13 nt, Human
cauguacagagaa

SEQ ID NO: 2553725 - RNA, 21 nt, Human
cauguacaaaaucgauuggcu

SEQ ID NO: 2553726 - RNA, 23 nt, Human
cauguacaaaaucgauuggcuuu

SEQ ID NO: 2553727 - RNA, 14 nt, Human
cauguaaucaguuu

SEQ ID NO: 2553728 - RNA, 15 nt, Human
cauguacaaaaccau

SEQ ID NO: 2553729 - RNA, 18 nt, Human
cauguaauuaaguacuau

SEQ ID NO: 2553730 - RNA, 21 nt, Human
cauguaauuaaguacuaugua

SEQ ID NO: 2553731 - RNA, 23 nt, Human
caugucuuuucuugcaugaggcu

SEQ ID NO: 2553732 - RNA, 21 nt, Human
caugucuuuucuugcaugagg

SEQ ID NO: 2553733 - RNA, 19 nt, Human
caugucuuuucuugcauga

SEQ ID NO: 2553734 - RNA, 14 nt, Human
caugucuuuucuug

SEQ ID NO: 2553735 - RNA, 17 nt, Human
caugugaaaucauucau

SEQ ID NO: 2553736 - RNA, 16 nt, Human
caugugaaaucauuca

SEQ ID NO: 2553737 - RNA, 15 nt, Human
caugugaaaucauuc

SEQ ID NO: 2553738 - RNA, 18 nt, Human
caugugaaaccuuuuuua

SEQ ID NO: 2553739 - RNA, 14 nt, Human
caugugaaaccuuu

SEQ ID NO: 2553740 - RNA, 13 nt, Human
caugugaaaccuu

SEQ ID NO: 2553741 - RNA, 12 nt, Human
caugugaaaccu

SEQ ID NO: 2553742 - RNA, 19 nt, Human
caugugaaaaucaaauaca

SEQ ID NO: 2553743 - RNA, 17 nt, Human
caugugaaaaucaaaua

SEQ ID NO: 2553744 - RNA, 19 nt, Human
caugccagcuuaucucagg

SEQ ID NO: 2553745 - RNA, 20 nt, Human
caugccagcuuaucucaggg

SEQ ID NO: 2553746 - RNA, 17 nt, Human
caugccacaaggacuuc

SEQ ID NO: 2553747 - RNA, 21 nt, Human
caugccacaaggacuuccugu

SEQ ID NO: 2553748 - RNA, 17 nt, Human
caugcauuugaggucaa

SEQ ID NO: 2553749 - RNA, 14 nt, Human
caugcauuuugcag

SEQ ID NO: 2553750 - RNA, 18 nt, Human
caugccaagcacugugcu

SEQ ID NO: 2553751 - RNA, 21 nt, Human
caugccagcuacuuccuccuc

SEQ ID NO: 2553752 - RNA, 21 nt, Human
caugccaccauggccagccaa

SEQ ID NO: 2553753 - RNA, 19 nt, Human
caugccacuacacuccagc

SEQ ID NO: 2553754 - RNA, 17 nt, Human
caugcauguccuguaaa

SEQ ID NO: 2553755 - RNA, 18 nt, Human
caugcauguccuguaaag

SEQ ID NO: 2553756 - RNA, 18 nt, Human
caugcauguuaugcuuua

SEQ ID NO: 2553757 - RNA, 14 nt, Human
caugcaugugcuug

SEQ ID NO: 2553758 - RNA, 21 nt, Human
caugcauguccuguaaagguu

SEQ ID NO: 2553759 - RNA, 15 nt, Human
caugcauggaaauuc

SEQ ID NO: 2553760 - RNA, 16 nt, Human
caugcauguccuguaa

SEQ ID NO: 2553761 - RNA, 17 nt, Human
caugcauggaaauuccc

SEQ ID NO: 2553762 - RNA, 15 nt, Human
caugcauuacugcau

SEQ ID NO: 2553763 - RNA, 17 nt, Human
caugcauuacugcaugc

SEQ ID NO: 2553764 - RNA, 20 nt, Human
caugcauuacugcaugcacu

SEQ ID NO: 2553765 - RNA, 11 nt, Human
caugcauuguu

SEQ ID NO: 2553766 - RNA, 14 nt, Human
caugcauucauaca

SEQ ID NO: 2553767 - RNA, 17 nt, Human
caugcauuguugaggug

SEQ ID NO: 2553768 - RNA, 20 nt, Human
caugcauuguugaggugguc

SEQ ID NO: 2553769 - RNA, 22 nt, Human
caugcauuguugagguggucug

SEQ ID NO: 2553770 - RNA, 20 nt, Human
caugcauuuugcagcaguga

SEQ ID NO: 2553771 - RNA, 13 nt, Human
caugcccaccccc

SEQ ID NO: 2553772 - RNA, 17 nt, Human
caugccagugacacuuc

SEQ ID NO: 2553773 - RNA, 19 nt, Human
caugcauuuugcagcagug

SEQ ID NO: 2553774 - RNA, 22 nt, Human
caugcccacccccugcccugca

SEQ ID NO: 2553775 - RNA, 21 nt, Human
caugcccacccccugcccugc

SEQ ID NO: 2553776 - RNA, 20 nt, Human
caugcccacccccugcccug

SEQ ID NO: 2553777 - RNA, 19 nt, Human
caugcccacccccugcccu

SEQ ID NO: 2553778 - RNA, 18 nt, Human
caugcccacccccugccc

SEQ ID NO: 2553779 - RNA, 17 nt, Human
caugcccacccccugcc

SEQ ID NO: 2553780 - RNA, 16 nt, Human
caugcccacccccugc

SEQ ID NO: 2553781 - RNA, 15 nt, Human
caugcccacccccug

SEQ ID NO: 2553782 - RNA, 13 nt, Human
caugcccaccugc

SEQ ID NO: 2553783 - RNA, 14 nt, Human
caugcccaccugcc

SEQ ID NO: 2553784 - RNA, 16 nt, Human
caugcccaccugccca

SEQ ID NO: 2553785 - RNA, 17 nt, Human
caugcccaccugcccau

SEQ ID NO: 2553786 - RNA, 18 nt, Human
caugccccggccaccucu

SEQ ID NO: 2553787 - RNA, 17 nt, Human
caugccccggccaccuc

SEQ ID NO: 2553788 - RNA, 16 nt, Human
caugccccggccaccu

SEQ ID NO: 2553789 - RNA, 15 nt, Human
caugcccccuuucag

SEQ ID NO: 2553790 - RNA, 19 nt, Human
caugcccccucgugccagu

SEQ ID NO: 2553791 - RNA, 17 nt, Human
caugcccccucgugcca

SEQ ID NO: 2553792 - RNA, 16 nt, Human
caugcccccucgugcc

SEQ ID NO: 2553793 - RNA, 13 nt, Human
caugccccugaac

SEQ ID NO: 2553794 - RNA, 15 nt, Human
caugcccccucgugc

SEQ ID NO: 2553795 - RNA, 23 nt, Human
caugccccccucaaaccuccucu

SEQ ID NO: 2553796 - RNA, 21 nt, Human
caugccccccucaaaccuccu

SEQ ID NO: 2553797 - RNA, 19 nt, Human
caugccccccucaaaccuc

SEQ ID NO: 2553798 - RNA, 14 nt, Human
caugccccccucaa

SEQ ID NO: 2553799 - RNA, 13 nt, Human
caugccccccuca

SEQ ID NO: 2553800 - RNA, 22 nt, Human
caugcccagucgauaucucacu

SEQ ID NO: 2553801 - RNA, 23 nt, Human
caugcccacccccugcccugcac

SEQ ID NO: 2553802 - RNA, 21 nt, Human
caugcccaccugcccaucaca

SEQ ID NO: 2553803 - RNA, 14 nt, Human
caugcaucuuacug

SEQ ID NO: 2553804 - RNA, 16 nt, Human
caugcaucuuacugaa

SEQ ID NO: 2553805 - RNA, 17 nt, Human
caugcaucuuacugaag

SEQ ID NO: 2553806 - RNA, 21 nt, Human
caugcauacuucaaaaguauu

SEQ ID NO: 2553807 - RNA, 15 nt, Human
caugcaucuccaccu

SEQ ID NO: 2553808 - RNA, 18 nt, Human
caugcaucuccaccugcu

SEQ ID NO: 2553809 - RNA, 17 nt, Human
caugcaucuccaccugc

SEQ ID NO: 2553810 - RNA, 16 nt, Human
caugcaucuccaccug

SEQ ID NO: 2553811 - RNA, 14 nt, Human
caugcaucaaguua

SEQ ID NO: 2553812 - RNA, 15 nt, Human
caugcauacacacac

SEQ ID NO: 2553813 - RNA, 16 nt, Human
caugcauacacacaca

SEQ ID NO: 2553814 - RNA, 23 nt, Human
caugcauacacacacacacacag

SEQ ID NO: 2553815 - RNA, 15 nt, Human
caugcauacuucaaa

SEQ ID NO: 2553816 - RNA, 20 nt, Human
caugcauacuucaaaaguau

SEQ ID NO: 2553817 - RNA, 17 nt, Human
caugcauacuucaaaag

SEQ ID NO: 2553818 - RNA, 16 nt, Human
caugcauacuucaaaa

SEQ ID NO: 2553819 - RNA, 22 nt, Human
caugcauaaauaugcagugaua

SEQ ID NO: 2553820 - RNA, 11 nt, Human
caugcauacac

SEQ ID NO: 2553821 - RNA, 12 nt, Human
caugcauacaca

SEQ ID NO: 2553822 - RNA, 13 nt, Human
caugcauacacac

SEQ ID NO: 2553823 - RNA, 14 nt, Human
caugcauacacaca

SEQ ID NO: 2553824 - RNA, 19 nt, Human
caugcauaaauaugcagug

SEQ ID NO: 2553825 - RNA, 18 nt, Human
caugcauaaauaugcagu

SEQ ID NO: 2553826 - RNA, 17 nt, Human
caugcauaaauaugcag

SEQ ID NO: 2553827 - RNA, 16 nt, Human
caugcauaaauaugca

SEQ ID NO: 2553828 - RNA, 15 nt, Human
caugcauaaauaugc

SEQ ID NO: 2553829 - RNA, 13 nt, Human
caugcauaaauau

SEQ ID NO: 2553830 - RNA, 20 nt, Human
caugcagcugcacccucccu

SEQ ID NO: 2553831 - RNA, 12 nt, Human
caugcauaaaua

SEQ ID NO: 2553832 - RNA, 21 nt, Human
caugcagcugcacccucccuc

SEQ ID NO: 2553833 - RNA, 15 nt, Human
caugcagcugcaccc

SEQ ID NO: 2553834 - RNA, 20 nt, Human
caugcccuccucucccauug

SEQ ID NO: 2553835 - RNA, 13 nt, Human
caugcccuccucu

SEQ ID NO: 2553836 - RNA, 14 nt, Human
caugcccuccucuc

SEQ ID NO: 2553837 - RNA, 15 nt, Human
caugcccuccucucc

SEQ ID NO: 2553838 - RNA, 17 nt, Human
caugcccuccucuccca

SEQ ID NO: 2553839 - RNA, 14 nt, Human
caugcccugugcaa

SEQ ID NO: 2553840 - RNA, 18 nt, Human
caugcccugugcaaccuc

SEQ ID NO: 2553841 - RNA, 19 nt, Human
caugcccugugcaaccucu

SEQ ID NO: 2553842 - RNA, 14 nt, Human
caugccccuggcug

SEQ ID NO: 2553843 - RNA, 21 nt, Human
caugccccggccaccucugcg

SEQ ID NO: 2553844 - RNA, 20 nt, Human
caugccccggccaccucugc

SEQ ID NO: 2553845 - RNA, 19 nt, Human
caugccccggccaccucug

SEQ ID NO: 2553846 - RNA, 15 nt, Human
caugccccuggcugg

SEQ ID NO: 2553847 - RNA, 16 nt, Human
caugccccuggcuggg

SEQ ID NO: 2553848 - RNA, 21 nt, Human
caugcccggcuaauuuuugua

SEQ ID NO: 2553849 - RNA, 15 nt, Human
caugccucucucagg

SEQ ID NO: 2553850 - RNA, 14 nt, Human
caugccucucucag

SEQ ID NO: 2553851 - RNA, 20 nt, Human
caugcccuguucagcuacuc

SEQ ID NO: 2553852 - RNA, 23 nt, Human
caugcccugugcaaccucuuggc

SEQ ID NO: 2553853 - RNA, 14 nt, Human
caugccgggcgcag

SEQ ID NO: 2553854 - RNA, 16 nt, Human
caugccucagcccuga

SEQ ID NO: 2553855 - RNA, 14 nt, Human
caugccucagcccu

SEQ ID NO: 2553856 - RNA, 11 nt, Human
caugccucagc

SEQ ID NO: 2553857 - RNA, 19 nt, Human
caugccucucucaggccaa

SEQ ID NO: 2553858 - RNA, 18 nt, Human
caugccucucucaggcca

SEQ ID NO: 2553859 - RNA, 17 nt, Human
caugccucucucaggcc

SEQ ID NO: 2553860 - RNA, 16 nt, Human
caugccucucucaggc

SEQ ID NO: 2553861 - RNA, 15 nt, Human
caugccugagggugg

SEQ ID NO: 2553862 - RNA, 13 nt, Human
caugccugagggu

SEQ ID NO: 2553863 - RNA, 11 nt, Human
caugccugagg

SEQ ID NO: 2553864 - RNA, 13 nt, Human
caugccuggaugg

SEQ ID NO: 2553865 - RNA, 20 nt, Human
caugccucagcccugacccu

SEQ ID NO: 2553866 - RNA, 19 nt, Human
caugccucagcccugaccc

SEQ ID NO: 2553867 - RNA, 17 nt, Human
caugggacagggaggac

SEQ ID NO: 2553868 - RNA, 22 nt, Human
caugggaaugaaugucagugug

SEQ ID NO: 2553869 - RNA, 15 nt, Human
caugggccuccugug

SEQ ID NO: 2553870 - RNA, 17 nt, Human
caugggcccaggaaugc

SEQ ID NO: 2553871 - RNA, 21 nt, Human
cauggcagaauaaucuuuggg

SEQ ID NO: 2553872 - RNA, 22 nt, Human
cauggcagaauaaucuuugggu

SEQ ID NO: 2553873 - RNA, 17 nt, Human
caugggccuccugugug

SEQ ID NO: 2553874 - RNA, 16 nt, Human
caugggccuccugugu

SEQ ID NO: 2553875 - RNA, 17 nt, Human
cauggggcugggcagcu

SEQ ID NO: 2553876 - RNA, 23 nt, Human
cauggggagggauucugguucca

SEQ ID NO: 2553877 - RNA, 19 nt, Human
cauggggcugauuguauuu

SEQ ID NO: 2553878 - RNA, 20 nt, Human
cauggggagggauucugguu

SEQ ID NO: 2553879 - RNA, 11 nt, Human
cauggggaggg

SEQ ID NO: 2553880 - RNA, 19 nt, Human
cauggcacuugcaucugug

SEQ ID NO: 2553881 - RNA, 15 nt, Human
cauggggugggccuc

SEQ ID NO: 2553882 - RNA, 13 nt, Human
cauggggugggcc

SEQ ID NO: 2553883 - RNA, 19 nt, Human
cauggggugaugcugggcu

SEQ ID NO: 2553884 - RNA, 15 nt, Human
caugggguaggagga

SEQ ID NO: 2553885 - RNA, 13 nt, Human
caugggggcaggg

SEQ ID NO: 2553886 - RNA, 14 nt, Human
caugggggcagggc

SEQ ID NO: 2553887 - RNA, 19 nt, Human
caugggggcagggcaugac

SEQ ID NO: 2553888 - RNA, 19 nt, Human
cauggggugggccucuggu

SEQ ID NO: 2553889 - RNA, 18 nt, Human
cauggggugggccucugg

SEQ ID NO: 2553890 - RNA, 17 nt, Human
cauggggugggccucug

SEQ ID NO: 2553891 - RNA, 16 nt, Human
cauggggugggccucu

SEQ ID NO: 2553892 - RNA, 17 nt, Human
cauggucacacacugau

SEQ ID NO: 2553893 - RNA, 21 nt, Human
cauggucacacacugaugcuu

SEQ ID NO: 2553894 - RNA, 19 nt, Human
cauggucagcccuagggug

SEQ ID NO: 2553895 - RNA, 16 nt, Human
cauggucagcccuagg

SEQ ID NO: 2553896 - RNA, 13 nt, Human
cauggacuuuguu

SEQ ID NO: 2553897 - RNA, 11 nt, Human
cauggacuuug

SEQ ID NO: 2553898 - RNA, 17 nt, Human
cauggacuuguauauuu

SEQ ID NO: 2553899 - RNA, 11 nt, Human
cauggagaaac

SEQ ID NO: 2553900 - RNA, 14 nt, Human
cauggagaaacccu

SEQ ID NO: 2553901 - RNA, 15 nt, Human
cauggagaaacccug

SEQ ID NO: 2553902 - RNA, 16 nt, Human
cauggagaaacccugu

SEQ ID NO: 2553903 - RNA, 17 nt, Human
cauggagaaacccuguc

SEQ ID NO: 2553904 - RNA, 20 nt, Human
cauggagaaacccugucucu

SEQ ID NO: 2553905 - RNA, 10 nt, Human
cauggagcca

SEQ ID NO: 2553906 - RNA, 21 nt, Human
cauggagauagccccacagga

SEQ ID NO: 2553907 - RNA, 17 nt, Human
cauggagguuugaagau

SEQ ID NO: 2553908 - RNA, 17 nt, Human
cauggagagcuggagcc

SEQ ID NO: 2553909 - RNA, 16 nt, Human
cauggagagcuggagc

SEQ ID NO: 2553910 - RNA, 14 nt, Human
cauggagagcugga

SEQ ID NO: 2553911 - RNA, 13 nt, Human
cauggagagcugg

SEQ ID NO: 2553912 - RNA, 14 nt, Human
cauggagagcuaga

SEQ ID NO: 2553913 - RNA, 21 nt, Human
cauggagacuccugcccuguu

SEQ ID NO: 2553914 - RNA, 20 nt, Human
cauggagacuccugcccugu

SEQ ID NO: 2553915 - RNA, 19 nt, Human
cauggagacuccugcccug

SEQ ID NO: 2553916 - RNA, 16 nt, Human
cauggagacuccugcc

SEQ ID NO: 2553917 - RNA, 15 nt, Human
cauggagacuccugc

SEQ ID NO: 2553918 - RNA, 17 nt, Human
cauggagaaguuaucag

SEQ ID NO: 2553919 - RNA, 12 nt, Human
cauggagaaguu

SEQ ID NO: 2553920 - RNA, 15 nt, Human
cauggagaagcagaa

SEQ ID NO: 2553921 - RNA, 21 nt, Human
cauggagagcuggagccuggu

SEQ ID NO: 2553922 - RNA, 20 nt, Human
cauggagagcuggagccugg

SEQ ID NO: 2553923 - RNA, 16 nt, Human
cauggaguauauguca

SEQ ID NO: 2553924 - RNA, 18 nt, Human
cauggauauaguuuuacu

SEQ ID NO: 2553925 - RNA, 15 nt, Human
cauggaugagagucc

SEQ ID NO: 2553926 - RNA, 21 nt, Human
cauggaguguguauuguuccc

SEQ ID NO: 2553927 - RNA, 18 nt, Human
cauggaguguguauuguu

SEQ ID NO: 2553928 - RNA, 20 nt, Human
cauggaguguguauuguucc

SEQ ID NO: 2553929 - RNA, 22 nt, Human
cauggaguguguauuguuccca

SEQ ID NO: 2553930 - RNA, 14 nt, Human
cauggaguguguau

SEQ ID NO: 2553931 - RNA, 17 nt, Human
cauggaguguguauugu

SEQ ID NO: 2553932 - RNA, 23 nt, Human
cauggcaccuucagacuuugcuu

SEQ ID NO: 2553933 - RNA, 18 nt, Human
cauggcacuugcaucugu

SEQ ID NO: 2553934 - RNA, 16 nt, Human
cauggcacuugcaucu

SEQ ID NO: 2553935 - RNA, 13 nt, Human
cauggcagaaggc

SEQ ID NO: 2553936 - RNA, 18 nt, Human
caugggaaugaaugucag

SEQ ID NO: 2553937 - RNA, 19 nt, Human
cauggcaccaaagccacca

SEQ ID NO: 2553938 - RNA, 20 nt, Human
cauggcaccaaagccaccag

SEQ ID NO: 2553939 - RNA, 22 nt, Human
cauggcaccuucagacuuugcu

SEQ ID NO: 2553940 - RNA, 22 nt, Human
cauggauguuuuagccauuguu

SEQ ID NO: 2553941 - RNA, 19 nt, Human
cauggaugggggaacucag

SEQ ID NO: 2553942 - RNA, 12 nt, Human
cauggauguuuu

SEQ ID NO: 2553943 - RNA, 22 nt, Human
cauggaaguacuauaauuuacc

SEQ ID NO: 2553944 - RNA, 20 nt, Human
cauggaaguacuauaauuua

SEQ ID NO: 2553945 - RNA, 16 nt, Human
cauggaacucauuccu

SEQ ID NO: 2553946 - RNA, 19 nt, Human
caugcuuagucacugccug

SEQ ID NO: 2553947 - RNA, 18 nt, Human
caugcuuagucacugccu

SEQ ID NO: 2553948 - RNA, 21 nt, Human
caugcuuagucacugccugca

SEQ ID NO: 2553949 - RNA, 17 nt, Human
caugcuuagucacugcc

SEQ ID NO: 2553950 - RNA, 16 nt, Human
caugcuuagucacugc

SEQ ID NO: 2553951 - RNA, 15 nt, Human
caugcuuagucacug

SEQ ID NO: 2553952 - RNA, 23 nt, Human
caugcuguugauugcuaaaugua

SEQ ID NO: 2553953 - RNA, 22 nt, Human
caugcuguugauugcuaaaugu

SEQ ID NO: 2553954 - RNA, 21 nt, Human
caugcuguugauugcuaaaug

SEQ ID NO: 2553955 - RNA, 20 nt, Human
caugcuguugauugcuaaau

SEQ ID NO: 2553956 - RNA, 19 nt, Human
caugcuguugauugcuaaa

SEQ ID NO: 2553957 - RNA, 18 nt, Human
caugcuguugauugcuaa

SEQ ID NO: 2553958 - RNA, 17 nt, Human
caugcuguugauugcua

SEQ ID NO: 2553959 - RNA, 16 nt, Human
caugcuguugauugcu

SEQ ID NO: 2553960 - RNA, 19 nt, Human
caugcugugauugugccua

SEQ ID NO: 2553961 - RNA, 17 nt, Human
cauggaaugguuauaaa

SEQ ID NO: 2553962 - RNA, 15 nt, Human
cauggaaugguuaua

SEQ ID NO: 2553963 - RNA, 14 nt, Human
cauggaaugguuau

SEQ ID NO: 2553964 - RNA, 20 nt, Human
cauggaaugcuugaaaaaug

SEQ ID NO: 2553965 - RNA, 21 nt, Human
cauggaaugcuugaaaaaugu

SEQ ID NO: 2553966 - RNA, 18 nt, Human
cauggaaugcuugaaaaa

SEQ ID NO: 2553967 - RNA, 15 nt, Human
cauggaaugcuugaa

SEQ ID NO: 2553968 - RNA, 22 nt, Human
cauggaaugguuauaaaaguga

SEQ ID NO: 2553969 - RNA, 21 nt, Human
cauggaaugguuauaaaagug

SEQ ID NO: 2553970 - RNA, 12 nt, Human
cauggacacucc

SEQ ID NO: 2553971 - RNA, 16 nt, Human
cauggaauaacaugua

SEQ ID NO: 2553972 - RNA, 13 nt, Human
cauggaagauuga

SEQ ID NO: 2553973 - RNA, 21 nt, Human
cauggaacucauuccugccug

SEQ ID NO: 2553974 - RNA, 17 nt, Human
cauggaacucauuccug

SEQ ID NO: 2553975 - RNA, 19 nt, Human
cauggaacucauuccugcc

SEQ ID NO: 2553976 - RNA, 22 nt, Human
cauggacuuguauauuuguaca

SEQ ID NO: 2553977 - RNA, 16 nt, Human
cauggacuuguauauu

SEQ ID NO: 2553978 - RNA, 13 nt, Human
cauggacuuguau

SEQ ID NO: 2553979 - RNA, 12 nt, Human
cauggacuugua

SEQ ID NO: 2553980 - RNA, 18 nt, Human
cauggacaugaucuucuu

SEQ ID NO: 2553981 - RNA, 14 nt, Human
cauggacaggcugg

SEQ ID NO: 2553982 - RNA, 15 nt, Human
cauggacaggcuggc

SEQ ID NO: 2553983 - RNA, 16 nt, Human
cauggacaggcuggcu

SEQ ID NO: 2553984 - RNA, 18 nt, Human
cauggacaggcuggcucc

SEQ ID NO: 2553985 - RNA, 19 nt, Human
cauggacacuccagugcca

SEQ ID NO: 2553986 - RNA, 18 nt, Human
cauggacacuccagugcc

SEQ ID NO: 2553987 - RNA, 14 nt, Human
cauggacacuccag

SEQ ID NO: 2553988 - RNA, 21 nt, Human
cauggacagaagaaggcagca

SEQ ID NO: 2553989 - RNA, 15 nt, Human
cauggacagaagaag

SEQ ID NO: 2553990 - RNA, 17 nt, Human
caugcugucccuuacgu

SEQ ID NO: 2553991 - RNA, 23 nt, Human
caugcugucuacacuaagagaga

SEQ ID NO: 2553992 - RNA, 22 nt, Human
caugcugucccuuacgugaguc

SEQ ID NO: 2553993 - RNA, 15 nt, Human
caugcgcucagggcc

SEQ ID NO: 2553994 - RNA, 13 nt, Human
caugcgguagcca

SEQ ID NO: 2553995 - RNA, 17 nt, Human
caugcgggcuuccuccu

SEQ ID NO: 2553996 - RNA, 14 nt, Human
caugcgguagccag

SEQ ID NO: 2553997 - RNA, 15 nt, Human
caugcgguagccagc

SEQ ID NO: 2553998 - RNA, 16 nt, Human
caugcgguagccagca

SEQ ID NO: 2553999 - RNA, 17 nt, Human
caugcgguagccagcac

SEQ ID NO: 2554000 - RNA, 19 nt, Human
caugcgguagccagcacac

SEQ ID NO: 2554001 - RNA, 21 nt, Human
caugcgguagccagcacacag

SEQ ID NO: 2554002 - RNA, 16 nt, Human
caugcguguuucugac

SEQ ID NO: 2554003 - RNA, 13 nt, Human
caugcgcacaagg

SEQ ID NO: 2554004 - RNA, 17 nt, Human
caugcguguuucugacu

SEQ ID NO: 2554005 - RNA, 21 nt, Human
caugccuggauggggcugcac

SEQ ID NO: 2554006 - RNA, 18 nt, Human
caugccuggauggggcug

SEQ ID NO: 2554007 - RNA, 23 nt, Human
caugccuggauggggcugcaccg

SEQ ID NO: 2554008 - RNA, 20 nt, Human
caugccugaggguggagacu

SEQ ID NO: 2554009 - RNA, 16 nt, Human
caugccugagggugga

SEQ ID NO: 2554010 - RNA, 20 nt, Human
caugccugccccaaacaaau

SEQ ID NO: 2554011 - RNA, 13 nt, Human
caugccuggcuuc

SEQ ID NO: 2554012 - RNA, 20 nt, Human
caugccugccccccucaucu

SEQ ID NO: 2554013 - RNA, 16 nt, Human
caugccuguccagccu

SEQ ID NO: 2554014 - RNA, 17 nt, Human
caugccuguccagccug

SEQ ID NO: 2554015 - RNA, 18 nt, Human
caugccuguccagccugg

SEQ ID NO: 2554016 - RNA, 20 nt, Human
caugccuguccagccugggc

SEQ ID NO: 2554017 - RNA, 23 nt, Human
caugccuguccagccugggcagc

SEQ ID NO: 2554018 - RNA, 21 nt, Human
caugccuguccagccugggca

SEQ ID NO: 2554019 - RNA, 14 nt, Human
caugccuggcuucg

SEQ ID NO: 2554020 - RNA, 23 nt, Human
caugccugugugacaucaguggc

SEQ ID NO: 2554021 - RNA, 13 nt, Human
caugccuuccagc

SEQ ID NO: 2554022 - RNA, 15 nt, Human
caugccuuccagcac

SEQ ID NO: 2554023 - RNA, 19 nt, Human
caugccuuccagcacccug

SEQ ID NO: 2554024 - RNA, 21 nt, Human
caugccuuccagcacccugca

SEQ ID NO: 2554025 - RNA, 20 nt, Human
caugccuuccagcacccugc

SEQ ID NO: 2554026 - RNA, 14 nt, Human
caugcgcucagggc

SEQ ID NO: 2554027 - RNA, 23 nt, Human
caugcgcccccuccgcccugcca

SEQ ID NO: 2554028 - RNA, 21 nt, Human
caugcgcccccuccgcccugc

SEQ ID NO: 2554029 - RNA, 23 nt, Human
ccauguuggccaggcuggucuca

SEQ ID NO: 2554030 - RNA, 16 nt, Human
ccauagcuccugcucc

SEQ ID NO: 2554031 - RNA, 18 nt, Human
ccauauucuguuggccag

SEQ ID NO: 2554032 - RNA, 15 nt, Human
ccauauucuguuggc

SEQ ID NO: 2554033 - RNA, 19 nt, Human
ccauauuaccacagacaua

SEQ ID NO: 2554034 - RNA, 15 nt, Human
ccauagcuccugcuc

SEQ ID NO: 2554035 - RNA, 21 nt, Human
ccauagaugggucuggcugag

SEQ ID NO: 2554036 - RNA, 18 nt, Human
ccauagccaccccagaaa

SEQ ID NO: 2554037 - RNA, 23 nt, Human
ccauagagagcaagacgcugugc

SEQ ID NO: 2554038 - RNA, 13 nt, Human
ccaguggucucac

SEQ ID NO: 2554039 - RNA, 15 nt, Human
ccagugguauccugu

SEQ ID NO: 2554040 - RNA, 13 nt, Human
ccauagaguuuaa

SEQ ID NO: 2554041 - RNA, 17 nt, Human
ccaguggucucacaugg

SEQ ID NO: 2554042 - RNA, 17 nt, Human
ccauagaguuuaacaca

SEQ ID NO: 2554043 - RNA, 16 nt, Human
ccauagaguuuaacac

SEQ ID NO: 2554044 - RNA, 18 nt, Human
ccauagcaagauugcuua

SEQ ID NO: 2554045 - RNA, 21 nt, Human
ccauagcaagauugcuuaaaa

SEQ ID NO: 2554046 - RNA, 19 nt, Human
ccaucacgcggccgagaca

SEQ ID NO: 2554047 - RNA, 16 nt, Human
ccaucacgccugugca

SEQ ID NO: 2554048 - RNA, 12 nt, Human
ccaucacccgcu

SEQ ID NO: 2554049 - RNA, 18 nt, Human
ccaucaacaaaaauuguc

SEQ ID NO: 2554050 - RNA, 16 nt, Human
ccaucaaaaugcuuuu

SEQ ID NO: 2554051 - RNA, 19 nt, Human
ccaucaaaaugcuuuuuau

SEQ ID NO: 2554052 - RNA, 17 nt, Human
ccaucaacaaaaauugu

SEQ ID NO: 2554053 - RNA, 15 nt, Human
ccaucaaaaauauuc

SEQ ID NO: 2554054 - RNA, 12 nt, Human
ccauauuuauuc

SEQ ID NO: 2554055 - RNA, 22 nt, Human
ccauauucagugcuguggccug

SEQ ID NO: 2554056 - RNA, 16 nt, Human
ccaucgcugucaucuc

SEQ ID NO: 2554057 - RNA, 12 nt, Human
ccaucgccggga

SEQ ID NO: 2554058 - RNA, 14 nt, Human
ccaucgcugugugu

SEQ ID NO: 2554059 - RNA, 22 nt, Human
ccaucgccgggacuccagaacc

SEQ ID NO: 2554060 - RNA, 17 nt, Human
ccauccugucccaccau

SEQ ID NO: 2554061 - RNA, 16 nt, Human
ccauccugucccacca

SEQ ID NO: 2554062 - RNA, 14 nt, Human
ccauccugucccac

SEQ ID NO: 2554063 - RNA, 17 nt, Human
ccauccuggcccaucag

SEQ ID NO: 2554064 - RNA, 16 nt, Human
ccauccuggcccauca

SEQ ID NO: 2554065 - RNA, 14 nt, Human
ccauccuggcccau

SEQ ID NO: 2554066 - RNA, 17 nt, Human
ccauccuuucugccucu

SEQ ID NO: 2554067 - RNA, 16 nt, Human
ccauccuuucugccuc

SEQ ID NO: 2554068 - RNA, 20 nt, Human
ccauccuuucugccucucaa

SEQ ID NO: 2554069 - RNA, 20 nt, Human
ccauccuucccugucugcca

SEQ ID NO: 2554070 - RNA, 20 nt, Human
ccaucucaugccccuggcug

SEQ ID NO: 2554071 - RNA, 21 nt, Human
ccaucucaugccccuggcugg

SEQ ID NO: 2554072 - RNA, 22 nt, Human
ccaucucaggccaccugccccc

SEQ ID NO: 2554073 - RNA, 23 nt, Human
ccaucucaggccaccugcccccu

SEQ ID NO: 2554074 - RNA, 16 nt, Human
ccaucucaggccaccu

SEQ ID NO: 2554075 - RNA, 17 nt, Human
ccaucucaggccaccug

SEQ ID NO: 2554076 - RNA, 18 nt, Human
ccaucucaggccaccugc

SEQ ID NO: 2554077 - RNA, 20 nt, Human
ccaucucaggccaccugccc

SEQ ID NO: 2554078 - RNA, 21 nt, Human
ccaucucaggccaccugcccc

SEQ ID NO: 2554079 - RNA, 18 nt, Human
ccaucuccacccccagcu

SEQ ID NO: 2554080 - RNA, 13 nt, Human
ccaucuugguaaa

SEQ ID NO: 2554081 - RNA, 21 nt, Human
ccaucuccaagaaugcugaaa

SEQ ID NO: 2554082 - RNA, 19 nt, Human
ccaucuccaagaaugcuga

SEQ ID NO: 2554083 - RNA, 18 nt, Human
ccaucuccaagaaugcug

SEQ ID NO: 2554084 - RNA, 16 nt, Human
ccaucuccaagaaugc

SEQ ID NO: 2554085 - RNA, 20 nt, Human
ccaucucauguaucaucugg

SEQ ID NO: 2554086 - RNA, 17 nt, Human
ccaucuugguaaauuuc

SEQ ID NO: 2554087 - RNA, 14 nt, Human
ccaucuugguaaau

SEQ ID NO: 2554088 - RNA, 22 nt, Human
ccaucuccaagaaugcugaaac

SEQ ID NO: 2554089 - RNA, 18 nt, Human
ccaucuuugcagguugcu

SEQ ID NO: 2554090 - RNA, 16 nt, Human
ccaucaugucuggcua

SEQ ID NO: 2554091 - RNA, 14 nt, Human
ccaucaugucuggc

SEQ ID NO: 2554092 - RNA, 20 nt, Human
ccaucagaaacacccucaca

SEQ ID NO: 2554093 - RNA, 22 nt, Human
ccaucauguuuacagaggacag

SEQ ID NO: 2554094 - RNA, 20 nt, Human
ccaucauguuuacagaggac

SEQ ID NO: 2554095 - RNA, 18 nt, Human
ccaucagaaacacccuca

SEQ ID NO: 2554096 - RNA, 14 nt, Human
ccaucacuggagca

SEQ ID NO: 2554097 - RNA, 18 nt, Human
ccaucacuggagcaccag

SEQ ID NO: 2554098 - RNA, 15 nt, Human
ccauccugaggcucc

SEQ ID NO: 2554099 - RNA, 21 nt, Human
ccauccucuguacagagccca

SEQ ID NO: 2554100 - RNA, 16 nt, Human
ccauccugaggcucca

SEQ ID NO: 2554101 - RNA, 19 nt, Human
ccaggccugaaagaggcug

SEQ ID NO: 2554102 - RNA, 12 nt, Human
ccaggccugccu

SEQ ID NO: 2554103 - RNA, 18 nt, Human
ccaggccucuguguccuu

SEQ ID NO: 2554104 - RNA, 17 nt, Human
ccaggccucuguguccu

SEQ ID NO: 2554105 - RNA, 16 nt, Human
ccaggccucugugucc

SEQ ID NO: 2554106 - RNA, 15 nt, Human
ccaggccucuguguc

SEQ ID NO: 2554107 - RNA, 13 nt, Human
ccaggccucugug

SEQ ID NO: 2554108 - RNA, 19 nt, Human
ccaggccucuuggcaguca

SEQ ID NO: 2554109 - RNA, 18 nt, Human
ccaggccucuuggcaguc

SEQ ID NO: 2554110 - RNA, 16 nt, Human
ccaggccucuuggcag

SEQ ID NO: 2554111 - RNA, 17 nt, Human
ccaggccugggccagag

SEQ ID NO: 2554112 - RNA, 13 nt, Human
ccaggccugggcc

SEQ ID NO: 2554113 - RNA, 16 nt, Human
ccaggccugggucugu

SEQ ID NO: 2554114 - RNA, 17 nt, Human
ccaggccugggucugug

SEQ ID NO: 2554115 - RNA, 18 nt, Human
ccaggccugggucugugu

SEQ ID NO: 2554116 - RNA, 19 nt, Human
ccaggccugggucuguguc

SEQ ID NO: 2554117 - RNA, 20 nt, Human
ccaggccugggucugugucu

SEQ ID NO: 2554118 - RNA, 22 nt, Human
ccaggcgagagacuuguggccu

SEQ ID NO: 2554119 - RNA, 18 nt, Human
ccaggccuuaucuccaag

SEQ ID NO: 2554120 - RNA, 21 nt, Human
ccagugggaggggcaggcuga

SEQ ID NO: 2554121 - RNA, 20 nt, Human
ccagugggaggggcaggcug

SEQ ID NO: 2554122 - RNA, 19 nt, Human
ccagugggaggggcaggcu

SEQ ID NO: 2554123 - RNA, 18 nt, Human
ccagugggaggggcaggc

SEQ ID NO: 2554124 - RNA, 17 nt, Human
ccagugggaggggcagg

SEQ ID NO: 2554125 - RNA, 16 nt, Human
ccagugggaggggcag

SEQ ID NO: 2554126 - RNA, 15 nt, Human
ccagugggaggggca

SEQ ID NO: 2554127 - RNA, 14 nt, Human
ccagugggaggggc

SEQ ID NO: 2554128 - RNA, 23 nt, Human
ccagugggaggggcaggcugaca

SEQ ID NO: 2554129 - RNA, 22 nt, Human
ccagugggaggggcaggcugac

SEQ ID NO: 2554130 - RNA, 15 nt, Human
ccagugcggcagguu

SEQ ID NO: 2554131 - RNA, 19 nt, Human
ccaguggcugcugcccagg

SEQ ID NO: 2554132 - RNA, 13 nt, Human
ccagugggagggg

SEQ ID NO: 2554133 - RNA, 12 nt, Human
ccagugggaggg

SEQ ID NO: 2554134 - RNA, 14 nt, Human
ccagugggaggcgc

SEQ ID NO: 2554135 - RNA, 11 nt, Human
ccagugggagg

SEQ ID NO: 2554136 - RNA, 17 nt, Human
ccaguggcuguucugga

SEQ ID NO: 2554137 - RNA, 21 nt, Human
ccaguggcugcugcccaggcc

SEQ ID NO: 2554138 - RNA, 13 nt, Human
ccagugggaagau

SEQ ID NO: 2554139 - RNA, 14 nt, Human
ccagugcggcaggu

SEQ ID NO: 2554140 - RNA, 16 nt, Human
ccagugcgauucugga

SEQ ID NO: 2554141 - RNA, 21 nt, Human
ccagugccuuaccuccugccc

SEQ ID NO: 2554142 - RNA, 22 nt, Human
ccagugccuuaccuccugccca

SEQ ID NO: 2554143 - RNA, 15 nt, Human
ccagugcgauucugg

SEQ ID NO: 2554144 - RNA, 23 nt, Human
ccagugccuuaccuccugcccag

SEQ ID NO: 2554145 - RNA, 17 nt, Human
ccagugccuuaccuccu

SEQ ID NO: 2554146 - RNA, 18 nt, Human
ccagugccuuaccuccug

SEQ ID NO: 2554147 - RNA, 19 nt, Human
ccagugccuuaccuccugc

SEQ ID NO: 2554148 - RNA, 20 nt, Human
ccagugccuuaccuccugcc

SEQ ID NO: 2554149 - RNA, 13 nt, Human
ccagggagaccga

SEQ ID NO: 2554150 - RNA, 22 nt, Human
ccagggacaccagccaggcucu

SEQ ID NO: 2554151 - RNA, 21 nt, Human
ccagggacaccagccaggcuc

SEQ ID NO: 2554152 - RNA, 20 nt, Human
ccagggacaccagccaggcu

SEQ ID NO: 2554153 - RNA, 18 nt, Human
ccagggacaccagccagg

SEQ ID NO: 2554154 - RNA, 17 nt, Human
ccagggacaccagccag

SEQ ID NO: 2554155 - RNA, 16 nt, Human
ccagggacaccagcca

SEQ ID NO: 2554156 - RNA, 15 nt, Human
ccagggacaccagcc

SEQ ID NO: 2554157 - RNA, 14 nt, Human
ccagggacaccagc

SEQ ID NO: 2554158 - RNA, 18 nt, Human
ccagggaagugcucugau

SEQ ID NO: 2554159 - RNA, 17 nt, Human
ccagggaagugcucuga

SEQ ID NO: 2554160 - RNA, 16 nt, Human
ccagggaaguccccga

SEQ ID NO: 2554161 - RNA, 23 nt, Human
ccagggacaccagccaggcucug

SEQ ID NO: 2554162 - RNA, 13 nt, Human
ccagggacagagg

SEQ ID NO: 2554163 - RNA, 18 nt, Human
ccagggacagaggcccca

SEQ ID NO: 2554164 - RNA, 20 nt, Human
ccagggacagaggccccagc

SEQ ID NO: 2554165 - RNA, 23 nt, Human
ccagggacagaggccccagccuc

SEQ ID NO: 2554166 - RNA, 21 nt, Human
ccagggacagaggccccagcc

SEQ ID NO: 2554167 - RNA, 22 nt, Human
ccagggacagaggccccagccu

SEQ ID NO: 2554168 - RNA, 23 nt, Human
ccagggacagaggggguggccuc

SEQ ID NO: 2554169 - RNA, 21 nt, Human
ccagggagacagagcucacaa

SEQ ID NO: 2554170 - RNA, 15 nt, Human
ccagggagaagcucc

SEQ ID NO: 2554171 - RNA, 13 nt, Human
ccagggagaagcu

SEQ ID NO: 2554172 - RNA, 14 nt, Human
ccagggagaagcuc

SEQ ID NO: 2554173 - RNA, 19 nt, Human
ccaggcccucugcccacuc

SEQ ID NO: 2554174 - RNA, 18 nt, Human
ccaggcccucugcccacu

SEQ ID NO: 2554175 - RNA, 17 nt, Human
ccaggcccucugcccac

SEQ ID NO: 2554176 - RNA, 16 nt, Human
ccaggcccucugccca

SEQ ID NO: 2554177 - RNA, 15 nt, Human
ccaggcccggggcug

SEQ ID NO: 2554178 - RNA, 20 nt, Human
ccaggccagccuccgagagg

SEQ ID NO: 2554179 - RNA, 16 nt, Human
ccaggcccggggcugg

SEQ ID NO: 2554180 - RNA, 19 nt, Human
ccaggccuccuacagcuug

SEQ ID NO: 2554181 - RNA, 18 nt, Human
ccaggccuccuacagcuu

SEQ ID NO: 2554182 - RNA, 13 nt, Human
ccaggccuccuac

SEQ ID NO: 2554183 - RNA, 21 nt, Human
ccaggccucagucucccuucu

SEQ ID NO: 2554184 - RNA, 20 nt, Human
ccaggcccggggcuggcggc

SEQ ID NO: 2554185 - RNA, 19 nt, Human
ccaggccagccuccgagag

SEQ ID NO: 2554186 - RNA, 16 nt, Human
ccaggccagccuccga

SEQ ID NO: 2554187 - RNA, 15 nt, Human
ccaggccagccuccg

SEQ ID NO: 2554188 - RNA, 14 nt, Human
ccaggccagccucc

SEQ ID NO: 2554189 - RNA, 13 nt, Human
ccaggccagccuc

SEQ ID NO: 2554190 - RNA, 12 nt, Human
ccaggccagccu

SEQ ID NO: 2554191 - RNA, 11 nt, Human
ccaggccagcc

SEQ ID NO: 2554192 - RNA, 19 nt, Human
ccaggccccugccacccug

SEQ ID NO: 2554193 - RNA, 23 nt, Human
ccaggccccugccacccugggga

SEQ ID NO: 2554194 - RNA, 21 nt, Human
ccaggccccugccacccuggg

SEQ ID NO: 2554195 - RNA, 14 nt, Human
ccaggagcagccac

SEQ ID NO: 2554196 - RNA, 21 nt, Human
ccaggccagagggagugacag

SEQ ID NO: 2554197 - RNA, 14 nt, Human
ccaggccagaggga

SEQ ID NO: 2554198 - RNA, 23 nt, Human
ccaggaccagucaaccugggcaa

SEQ ID NO: 2554199 - RNA, 18 nt, Human
ccaggaccagcuggggcg

SEQ ID NO: 2554200 - RNA, 15 nt, Human
ccaggaccaucaucc

SEQ ID NO: 2554201 - RNA, 14 nt, Human
ccaggacccugaag

SEQ ID NO: 2554202 - RNA, 16 nt, Human
ccaggacccugaaggg

SEQ ID NO: 2554203 - RNA, 16 nt, Human
ccaggaccagcugggg

SEQ ID NO: 2554204 - RNA, 15 nt, Human
ccaggaccagcuggg

SEQ ID NO: 2554205 - RNA, 14 nt, Human
ccaggaccagcugg

SEQ ID NO: 2554206 - RNA, 17 nt, Human
ccaggaccagcucagga

SEQ ID NO: 2554207 - RNA, 20 nt, Human
ccaggaccagcucaggacag

SEQ ID NO: 2554208 - RNA, 13 nt, Human
ccaggaccagcuc

SEQ ID NO: 2554209 - RNA, 14 nt, Human
ccaggaccagcuca

SEQ ID NO: 2554210 - RNA, 15 nt, Human
ccaggaccagcucag

SEQ ID NO: 2554211 - RNA, 16 nt, Human
ccaggaccagcucagg

SEQ ID NO: 2554212 - RNA, 18 nt, Human
ccaggacgcuucugaaug

SEQ ID NO: 2554213 - RNA, 17 nt, Human
ccaggacgcuucugaau

SEQ ID NO: 2554214 - RNA, 16 nt, Human
ccaggacgcuucugaa

SEQ ID NO: 2554215 - RNA, 15 nt, Human
ccaggacgcuucuga

SEQ ID NO: 2554216 - RNA, 18 nt, Human
ccaggaccuggcugccau

SEQ ID NO: 2554217 - RNA, 15 nt, Human
ccaggaccuggcugc

SEQ ID NO: 2554218 - RNA, 17 nt, Human
ccaggaccuggcugcca

SEQ ID NO: 2554219 - RNA, 18 nt, Human
ccaggacccugaaggggc

SEQ ID NO: 2554220 - RNA, 19 nt, Human
ccaggacccugaaggggcc

SEQ ID NO: 2554221 - RNA, 23 nt, Human
ccaggacccugaaggggccauga

SEQ ID NO: 2554222 - RNA, 19 nt, Human
ccaggaagccagcaggcuc

SEQ ID NO: 2554223 - RNA, 17 nt, Human
ccaggaagccagcaggc

SEQ ID NO: 2554224 - RNA, 15 nt, Human
ccaggaagccagcag

SEQ ID NO: 2554225 - RNA, 14 nt, Human
ccaggaagccagca

SEQ ID NO: 2554226 - RNA, 23 nt, Human
ccagcugugcucuggacaggcau

SEQ ID NO: 2554227 - RNA, 22 nt, Human
ccagcugugcucuggacaggca

SEQ ID NO: 2554228 - RNA, 18 nt, Human
ccagcugugagccuuggc

SEQ ID NO: 2554229 - RNA, 17 nt, Human
ccagcugugagccuugg

SEQ ID NO: 2554230 - RNA, 16 nt, Human
ccagcugugagccuug

SEQ ID NO: 2554231 - RNA, 15 nt, Human
ccagcugugagccuu

SEQ ID NO: 2554232 - RNA, 20 nt, Human
ccagcugugagccuuggcug

SEQ ID NO: 2554233 - RNA, 19 nt, Human
ccagcugugagccuuggcu

SEQ ID NO: 2554234 - RNA, 22 nt, Human
ccagcuguggguacagagaggu

SEQ ID NO: 2554235 - RNA, 23 nt, Human
ccagcuguggguacagagagguc

SEQ ID NO: 2554236 - RNA, 13 nt, Human
ccaggagcagcca

SEQ ID NO: 2554237 - RNA, 12 nt, Human
ccaggagcagcc

SEQ ID NO: 2554238 - RNA, 23 nt, Human
ccaggagcaaauguuucugcagu

SEQ ID NO: 2554239 - RNA, 19 nt, Human
ccaggagcaaauguuucug

SEQ ID NO: 2554240 - RNA, 15 nt, Human
ccaggagcaaauguu

SEQ ID NO: 2554241 - RNA, 12 nt, Human
ccaggagaacug

SEQ ID NO: 2554242 - RNA, 21 nt, Human
ccaggagaaccacuacaugca

SEQ ID NO: 2554243 - RNA, 23 nt, Human
ccaggagaaccacuacaugcagc

SEQ ID NO: 2554244 - RNA, 13 nt, Human
ccaggacugagcc

SEQ ID NO: 2554245 - RNA, 23 nt, Human
ccaggacgcuucugaaugcugcu

SEQ ID NO: 2554246 - RNA, 22 nt, Human
ccaggacgcuucugaaugcugc

SEQ ID NO: 2554247 - RNA, 20 nt, Human
ccaggacgcuucugaaugcu

SEQ ID NO: 2554248 - RNA, 19 nt, Human
ccaggacgcuucugaaugc

SEQ ID NO: 2554249 - RNA, 18 nt, Human
ccaggacggggccggcca

SEQ ID NO: 2554250 - RNA, 16 nt, Human
ccaggacggggccggc

SEQ ID NO: 2554251 - RNA, 19 nt, Human
ccaggacggggccggccag

SEQ ID NO: 2554252 - RNA, 19 nt, Human
ccaggacugagccccgcag

SEQ ID NO: 2554253 - RNA, 16 nt, Human
ccaggacugagccccg

SEQ ID NO: 2554254 - RNA, 15 nt, Human
ccaggacugagcccc

SEQ ID NO: 2554255 - RNA, 14 nt, Human
ccaggacugagccc

SEQ ID NO: 2554256 - RNA, 13 nt, Human
ccaggacugggcc

SEQ ID NO: 2554257 - RNA, 12 nt, Human
ccaggacugggc

SEQ ID NO: 2554258 - RNA, 17 nt, Human
ccaggacugggccacuu

SEQ ID NO: 2554259 - RNA, 14 nt, Human
ccaggacugggcca

SEQ ID NO: 2554260 - RNA, 21 nt, Human
ccaggacuuauuuaaacucug

SEQ ID NO: 2554261 - RNA, 19 nt, Human
ccaggagaaccacuacaug

SEQ ID NO: 2554262 - RNA, 13 nt, Human
ccacacacacaga

SEQ ID NO: 2554263 - RNA, 14 nt, Human
ccacacacacagaa

SEQ ID NO: 2554264 - RNA, 15 nt, Human
ccacacacacagaaa

SEQ ID NO: 2554265 - RNA, 16 nt, Human
ccacacacacagaaaa

SEQ ID NO: 2554266 - RNA, 23 nt, Human
ccagccuccucuggacggcaggc

SEQ ID NO: 2554267 - RNA, 15 nt, Human
ccagccucuagggac

SEQ ID NO: 2554268 - RNA, 16 nt, Human
ccagccucgucuucau

SEQ ID NO: 2554269 - RNA, 15 nt, Human
ccagccucuguuccc

SEQ ID NO: 2554270 - RNA, 11 nt, Human
ccagccucugu

SEQ ID NO: 2554271 - RNA, 15 nt, Human
ccagccucuggcauu

SEQ ID NO: 2554272 - RNA, 22 nt, Human
ccagccucucuugguuuccuuc

SEQ ID NO: 2554273 - RNA, 19 nt, Human
ccagccucugagccccugg

SEQ ID NO: 2554274 - RNA, 21 nt, Human
ccagccucugagccccuggga

SEQ ID NO: 2554275 - RNA, 24 nt, Human
ccagccucugagccccugggacug

SEQ ID NO: 2554276 - RNA, 14 nt, Human
ccagccucuccccu

SEQ ID NO: 2554277 - RNA, 13 nt, Human
ccagccucucccc

SEQ ID NO: 2554278 - RNA, 20 nt, Human
ccagccucuagggaccccuc

SEQ ID NO: 2554279 - RNA, 17 nt, Human
ccagccucuagggaccc

SEQ ID NO: 2554280 - RNA, 22 nt, Human
ccagccucuccccugauuacac

SEQ ID NO: 2554281 - RNA, 15 nt, Human
ccagccucuccccug

SEQ ID NO: 2554282 - RNA, 21 nt, Human
ccagccucucuugguuuccuu

SEQ ID NO: 2554283 - RNA, 21 nt, Human
ccagcugugcucuggacaggc

SEQ ID NO: 2554284 - RNA, 20 nt, Human
ccagcugugcucuggacagg

SEQ ID NO: 2554285 - RNA, 18 nt, Human
ccagcugugcucuggaca

SEQ ID NO: 2554286 - RNA, 21 nt, Human
ccagcuggugagugaugcggc

SEQ ID NO: 2554287 - RNA, 22 nt, Human
ccagcuggggcguggggagggc

SEQ ID NO: 2554288 - RNA, 18 nt, Human
ccagcugggucaggcagg

SEQ ID NO: 2554289 - RNA, 14 nt, Human
ccagcugugagccu

SEQ ID NO: 2554290 - RNA, 21 nt, Human
ccagcuggggcguggggaggg

SEQ ID NO: 2554291 - RNA, 20 nt, Human
ccagcuggggcguggggagg

SEQ ID NO: 2554292 - RNA, 14 nt, Human
ccagcugggcucug

SEQ ID NO: 2554293 - RNA, 16 nt, Human
ccagcugggucaggca

SEQ ID NO: 2554294 - RNA, 17 nt, Human
ccagcugggucaggcag

SEQ ID NO: 2554295 - RNA, 17 nt, Human
ccagcuggguuggaaaa

SEQ ID NO: 2554296 - RNA, 16 nt, Human
ccagcuggguuggaaa

SEQ ID NO: 2554297 - RNA, 12 nt, Human
ccagcugggagg

SEQ ID NO: 2554298 - RNA, 21 nt, Human
ccagcugggaggcaagagggg

SEQ ID NO: 2554299 - RNA, 19 nt, Human
ccagcugggaggcaagagg

SEQ ID NO: 2554300 - RNA, 16 nt, Human
ccagcugggaggcaag

SEQ ID NO: 2554301 - RNA, 14 nt, Human
ccagcugggaggca

SEQ ID NO: 2554302 - RNA, 12 nt, Human
ccagcugggcuc

SEQ ID NO: 2554303 - RNA, 11 nt, Human
ccagcugggcu

SEQ ID NO: 2554304 - RNA, 22 nt, Human
ccagcugggaggcaagaggggu

SEQ ID NO: 2554305 - RNA, 18 nt, Human
ccagcugcuugggcuuca

SEQ ID NO: 2554306 - RNA, 16 nt, Human
ccagcugcuugggcuu

SEQ ID NO: 2554307 - RNA, 19 nt, Human
ccagcuggcccgugacaga

SEQ ID NO: 2554308 - RNA, 13 nt, Human
ccagcugcacuga

SEQ ID NO: 2554309 - RNA, 12 nt, Human
ccagcuggccgg

SEQ ID NO: 2554310 - RNA, 14 nt, Human
ccagcuggccggga

SEQ ID NO: 2554311 - RNA, 20 nt, Human
ccagcuggccgggagccuga

SEQ ID NO: 2554312 - RNA, 15 nt, Human
ccagcugcuugggcu

SEQ ID NO: 2554313 - RNA, 13 nt, Human
ccagcugcuuggg

SEQ ID NO: 2554314 - RNA, 17 nt, Human
ccagcugcaccugccag

SEQ ID NO: 2554315 - RNA, 18 nt, Human
ccagcugcaccugccagc

SEQ ID NO: 2554316 - RNA, 19 nt, Human
ccagcugcaccugccagcc

SEQ ID NO: 2554317 - RNA, 20 nt, Human
ccagcugcaccugccagccu

SEQ ID NO: 2554318 - RNA, 22 nt, Human
ccagcugcaccugccagccugg

SEQ ID NO: 2554319 - RNA, 23 nt, Human
ccagcugcaccugccagccuggc

SEQ ID NO: 2554320 - RNA, 19 nt, Human
ccagcucuucuccccaggu

SEQ ID NO: 2554321 - RNA, 14 nt, Human
ccagcucuuuccuc

SEQ ID NO: 2554322 - RNA, 16 nt, Human
ccagcucuuuccuccu

SEQ ID NO: 2554323 - RNA, 17 nt, Human
ccagcucuuuccuccuu

SEQ ID NO: 2554324 - RNA, 21 nt, Human
ccagcugaaauacugaggggu

SEQ ID NO: 2554325 - RNA, 14 nt, Human
ccagcucuguauca

SEQ ID NO: 2554326 - RNA, 18 nt, Human
ccagcucuguaucaggac

SEQ ID NO: 2554327 - RNA, 21 nt, Human
ccagcucuguaucaggaccca

SEQ ID NO: 2554328 - RNA, 20 nt, Human
ccagcucugaaaccaguguu

SEQ ID NO: 2554329 - RNA, 21 nt, Human
ccagcucugaaaccaguguua

SEQ ID NO: 2554330 - RNA, 22 nt, Human
ccagcugacaguccucuccacc

SEQ ID NO: 2554331 - RNA, 21 nt, Human
ccagcugacaguccucuccac

SEQ ID NO: 2554332 - RNA, 20 nt, Human
ccagcugacaguccucucca

SEQ ID NO: 2554333 - RNA, 15 nt, Human
ccagcugacaguccu

SEQ ID NO: 2554334 - RNA, 23 nt, Human
ccagcugacaguccucuccaccu

SEQ ID NO: 2554335 - RNA, 15 nt, Human
ccagcugagcgccag

SEQ ID NO: 2554336 - RNA, 17 nt, Human
ccagcugagcgccagga

SEQ ID NO: 2554337 - RNA, 20 nt, Human
ccagcugagcgccaggaugg

SEQ ID NO: 2554338 - RNA, 22 nt, Human
ccagcugacccugguucucucu

SEQ ID NO: 2554339 - RNA, 15 nt, Human
ccagcucugaaacca

SEQ ID NO: 2554340 - RNA, 22 nt, Human
ccagcucucccucuggcccugc

SEQ ID NO: 2554341 - RNA, 23 nt, Human
ccagcucucccucuggcccugcc

SEQ ID NO: 2554342 - RNA, 17 nt, Human
ccagcucucccucuggc

SEQ ID NO: 2554343 - RNA, 18 nt, Human
ccagcucucccucuggcc

SEQ ID NO: 2554344 - RNA, 20 nt, Human
ccagcucucccucuggcccu

SEQ ID NO: 2554345 - RNA, 21 nt, Human
ccagcucucccucuggcccug

SEQ ID NO: 2554346 - RNA, 13 nt, Human
ccagcucucagcc

SEQ ID NO: 2554347 - RNA, 14 nt, Human
ccagcucucagcca

SEQ ID NO: 2554348 - RNA, 15 nt, Human
ccagcucucagccaa

SEQ ID NO: 2554349 - RNA, 14 nt, Human
ccagcucucccucu

SEQ ID NO: 2554350 - RNA, 16 nt, Human
ccagcucucccucugg

SEQ ID NO: 2554351 - RNA, 19 nt, Human
ccagccuggcccagcuccc

SEQ ID NO: 2554352 - RNA, 18 nt, Human
ccagccuggcccagcucc

SEQ ID NO: 2554353 - RNA, 17 nt, Human
ccagccuggcccagcuc

SEQ ID NO: 2554354 - RNA, 16 nt, Human
ccagccuggcccagcu

SEQ ID NO: 2554355 - RNA, 20 nt, Human
ccagccuggcccagcucccc

SEQ ID NO: 2554356 - RNA, 12 nt, Human
ccagcucucagc

SEQ ID NO: 2554357 - RNA, 22 nt, Human
ccagcucuagacaacccugcaa

SEQ ID NO: 2554358 - RNA, 13 nt, Human
ccagccuggagau

SEQ ID NO: 2554359 - RNA, 20 nt, Human
ccagccuggagaugaaaucu

SEQ ID NO: 2554360 - RNA, 18 nt, Human
ccagccuggacccccagc

SEQ ID NO: 2554361 - RNA, 19 nt, Human
ccagccuggacccccagcu

SEQ ID NO: 2554362 - RNA, 19 nt, Human
ccagccucuguuccccuag

SEQ ID NO: 2554363 - RNA, 11 nt, Human
ccagccugagc

SEQ ID NO: 2554364 - RNA, 12 nt, Human
ccagccugagca

SEQ ID NO: 2554365 - RNA, 15 nt, Human
ccagccuggcccagc

SEQ ID NO: 2554366 - RNA, 14 nt, Human
ccagccuggcccag

SEQ ID NO: 2554367 - RNA, 13 nt, Human
ccagccuggccca

SEQ ID NO: 2554368 - RNA, 12 nt, Human
ccagccuggccc

SEQ ID NO: 2554369 - RNA, 12 nt, Human
ccagccuggcca

SEQ ID NO: 2554370 - RNA, 10 nt, Human
ccagccuggc

SEQ ID NO: 2554371 - RNA, 11 nt, Human
ccagccuggcc

SEQ ID NO: 2554372 - RNA, 20 nt, Human
cccagagcuguuuauggccu

SEQ ID NO: 2554373 - RNA, 14 nt, Human
ccauggacacucca

SEQ ID NO: 2554374 - RNA, 14 nt, Human
ccauggaaugcuug

SEQ ID NO: 2554375 - RNA, 15 nt, Human
ccauggaaugcuuga

SEQ ID NO: 2554376 - RNA, 12 nt, Human
ccauggaaccug

SEQ ID NO: 2554377 - RNA, 19 nt, Human
ccauggacacuccagugcc

SEQ ID NO: 2554378 - RNA, 17 nt, Human
ccauggacacuccagug

SEQ ID NO: 2554379 - RNA, 15 nt, Human
ccauggacacuccag

SEQ ID NO: 2554380 - RNA, 18 nt, Human
ccauggaaugcuugaaaa

SEQ ID NO: 2554381 - RNA, 14 nt, Human
ccauggacaggcug

SEQ ID NO: 2554382 - RNA, 21 nt, Human
ccauggacacuccagugccag

SEQ ID NO: 2554383 - RNA, 18 nt, Human
ccauggagagcuggagcc

SEQ ID NO: 2554384 - RNA, 15 nt, Human
ccauggagagcugga

SEQ ID NO: 2554385 - RNA, 17 nt, Human
ccauggagacaagaagg

SEQ ID NO: 2554386 - RNA, 22 nt, Human
ccauggagagcuggagccuggu

SEQ ID NO: 2554387 - RNA, 19 nt, Human
ccauggagagcuggagccu

SEQ ID NO: 2554388 - RNA, 14 nt, Human
ccauggagccagcu

SEQ ID NO: 2554389 - RNA, 17 nt, Human
ccauggagccagcuccc

SEQ ID NO: 2554390 - RNA, 18 nt, Human
ccauggagccagcucccu

SEQ ID NO: 2554391 - RNA, 16 nt, Human
ccauggagccccagcc

SEQ ID NO: 2554392 - RNA, 15 nt, Human
ccauggagccccagc

SEQ ID NO: 2554393 - RNA, 14 nt, Human
ccauggagccccag

SEQ ID NO: 2554394 - RNA, 13 nt, Human
ccauggagcccca

SEQ ID NO: 2554395 - RNA, 12 nt, Human
ccauggagcccc

SEQ ID NO: 2554396 - RNA, 22 nt, Human
ccauggagccagcucccucuau

SEQ ID NO: 2554397 - RNA, 20 nt, Human
ccauggaggcacacagcugc

SEQ ID NO: 2554398 - RNA, 17 nt, Human
ccauggaggcacacagc

SEQ ID NO: 2554399 - RNA, 21 nt, Human
ccauggaggcacacagcugca

SEQ ID NO: 2554400 - RNA, 20 nt, Human
ccauggagccccagcccccu

SEQ ID NO: 2554401 - RNA, 19 nt, Human
ccauggagccccagccccc

SEQ ID NO: 2554402 - RNA, 18 nt, Human
ccauggagccccagcccc

SEQ ID NO: 2554403 - RNA, 17 nt, Human
ccauggagccccagccc

SEQ ID NO: 2554404 - RNA, 13 nt, Human
ccauggaggcaca

SEQ ID NO: 2554405 - RNA, 14 nt, Human
ccauguuggccagg

SEQ ID NO: 2554406 - RNA, 13 nt, Human
ccauguuggccag

SEQ ID NO: 2554407 - RNA, 21 nt, Human
ccaugugccugauccagccuc

SEQ ID NO: 2554408 - RNA, 16 nt, Human
ccaugugccugaucca

SEQ ID NO: 2554409 - RNA, 13 nt, Human
ccaugugccaggu

SEQ ID NO: 2554410 - RNA, 23 nt, Human
ccauggcacucuauguucuaaga

SEQ ID NO: 2554411 - RNA, 23 nt, Human
ccauggcaccuucagacuuugcu

SEQ ID NO: 2554412 - RNA, 17 nt, Human
ccaugcugcccugugag

SEQ ID NO: 2554413 - RNA, 16 nt, Human
ccaugcugcccuguga

SEQ ID NO: 2554414 - RNA, 16 nt, Human
ccaugcugaagggacc

SEQ ID NO: 2554415 - RNA, 14 nt, Human
ccaugcugccucca

SEQ ID NO: 2554416 - RNA, 20 nt, Human
ccaugcuuagucacugccug

SEQ ID NO: 2554417 - RNA, 19 nt, Human
ccaugcuuagucacugccu

SEQ ID NO: 2554418 - RNA, 18 nt, Human
ccaugcuuagucacugcc

SEQ ID NO: 2554419 - RNA, 22 nt, Human
ccaugcuuagucacugccugca

SEQ ID NO: 2554420 - RNA, 21 nt, Human
ccaugcuuagucacugccugc

SEQ ID NO: 2554421 - RNA, 15 nt, Human
ccaugcuugggugua

SEQ ID NO: 2554422 - RNA, 17 nt, Human
ccaugcugaggccuggg

SEQ ID NO: 2554423 - RNA, 16 nt, Human
ccaugcugaggccugg

SEQ ID NO: 2554424 - RNA, 13 nt, Human
ccaugcugaaggg

SEQ ID NO: 2554425 - RNA, 22 nt, Human
ccaugccugccccccucaucuc

SEQ ID NO: 2554426 - RNA, 15 nt, Human
ccaugcugaggccug

SEQ ID NO: 2554427 - RNA, 15 nt, Human
ccaugcugcccugug

SEQ ID NO: 2554428 - RNA, 15 nt, Human
ccaugcuccuggccc

SEQ ID NO: 2554429 - RNA, 18 nt, Human
ccaugcuccuggcccacu

SEQ ID NO: 2554430 - RNA, 16 nt, Human
ccaugccugagggugg

SEQ ID NO: 2554431 - RNA, 15 nt, Human
ccaugccugagggug

SEQ ID NO: 2554432 - RNA, 14 nt, Human
ccaugccugagggu

SEQ ID NO: 2554433 - RNA, 13 nt, Human
ccaugccugaggg

SEQ ID NO: 2554434 - RNA, 12 nt, Human
ccaugccugagg

SEQ ID NO: 2554435 - RNA, 22 nt, Human
ccaugaacagaaaacauucuga

SEQ ID NO: 2554436 - RNA, 16 nt, Human
ccaugaacagaaaaca

SEQ ID NO: 2554437 - RNA, 15 nt, Human
ccaugaaccaagacc

SEQ ID NO: 2554438 - RNA, 22 nt, Human
ccaugaacacacuguguccugg

SEQ ID NO: 2554439 - RNA, 21 nt, Human
ccaugaacacacuguguccug

SEQ ID NO: 2554440 - RNA, 17 nt, Human
ccaugaacacacugugu

SEQ ID NO: 2554441 - RNA, 16 nt, Human
ccaugaacacacugug

SEQ ID NO: 2554442 - RNA, 12 nt, Human
ccaugaacacac

SEQ ID NO: 2554443 - RNA, 13 nt, Human
ccaugaaacaaag

SEQ ID NO: 2554444 - RNA, 21 nt, Human
ccaugaaaaaaaugaucccca

SEQ ID NO: 2554445 - RNA, 19 nt, Human
ccaugaaaacguuuuauug

SEQ ID NO: 2554446 - RNA, 20 nt, Human
ccaugaaaacguuuuauugu

SEQ ID NO: 2554447 - RNA, 21 nt, Human
ccaugaaaacguuuuauugug

SEQ ID NO: 2554448 - RNA, 23 nt, Human
ccaugaaaacguuuuauuguguu

SEQ ID NO: 2554449 - RNA, 22 nt, Human
ccaugaaaaugcaacaacaugu

SEQ ID NO: 2554450 - RNA, 18 nt, Human
ccaugccugaggguggag

SEQ ID NO: 2554451 - RNA, 17 nt, Human
ccaugccugagggugga

SEQ ID NO: 2554452 - RNA, 13 nt, Human
ccaugccugucca

SEQ ID NO: 2554453 - RNA, 14 nt, Human
ccaugccuguccag

SEQ ID NO: 2554454 - RNA, 17 nt, Human
ccaugccuguccagccu

SEQ ID NO: 2554455 - RNA, 19 nt, Human
ccaugccuguccagccugg

SEQ ID NO: 2554456 - RNA, 18 nt, Human
ccaugccuguccagccug

SEQ ID NO: 2554457 - RNA, 13 nt, Human
ccaugcuccuggc

SEQ ID NO: 2554458 - RNA, 20 nt, Human
ccaugcgcccccuccgcccu

SEQ ID NO: 2554459 - RNA, 14 nt, Human
ccaugcgcccccuc

SEQ ID NO: 2554460 - RNA, 20 nt, Human
cccaccuuggcugcagggag

SEQ ID NO: 2554461 - RNA, 19 nt, Human
cccaccuuggcugcaggga

SEQ ID NO: 2554462 - RNA, 17 nt, Human
cccaccuuggcugcagg

SEQ ID NO: 2554463 - RNA, 16 nt, Human
cccaccuuggcugcag

SEQ ID NO: 2554464 - RNA, 15 nt, Human
cccaccuggccucug

SEQ ID NO: 2554465 - RNA, 12 nt, Human
cccaccuggccu

SEQ ID NO: 2554466 - RNA, 16 nt, Human
cccaccuggccaccug

SEQ ID NO: 2554467 - RNA, 15 nt, Human
cccaccuggccaccu

SEQ ID NO: 2554468 - RNA, 13 nt, Human
cccaccuggccac

SEQ ID NO: 2554469 - RNA, 12 nt, Human
cccaccuggcca

SEQ ID NO: 2554470 - RNA, 12 nt, Human
cccaccugcuga

SEQ ID NO: 2554471 - RNA, 13 nt, Human
cccaccugcugag

SEQ ID NO: 2554472 - RNA, 19 nt, Human
cccaccugcugagagaccc

SEQ ID NO: 2554473 - RNA, 20 nt, Human
ccauuccugguacccagcca

SEQ ID NO: 2554474 - RNA, 17 nt, Human
ccauuccugguacccag

SEQ ID NO: 2554475 - RNA, 22 nt, Human
ccauuccugggaaauauucccu

SEQ ID NO: 2554476 - RNA, 22 nt, Human
ccauuccuggaaaccacagucc

SEQ ID NO: 2554477 - RNA, 21 nt, Human
ccauguuggccaggcuggucu

SEQ ID NO: 2554478 - RNA, 19 nt, Human
ccauguuggccaggcuggu

SEQ ID NO: 2554479 - RNA, 15 nt, Human
ccauguuggccaggc

SEQ ID NO: 2554480 - RNA, 18 nt, Human
ccauguuggccaggcugg

SEQ ID NO: 2554481 - RNA, 18 nt, Human
ccaugugguggcacaggc

SEQ ID NO: 2554482 - RNA, 17 nt, Human
ccaugugguggcacagg

SEQ ID NO: 2554483 - RNA, 18 nt, Human
ccauucauuccauucugg

SEQ ID NO: 2554484 - RNA, 15 nt, Human
ccauguugcugccaa

SEQ ID NO: 2554485 - RNA, 20 nt, Human
ccauucauuccauucuggaa

SEQ ID NO: 2554486 - RNA, 16 nt, Human
ccauuccagaauaucu

SEQ ID NO: 2554487 - RNA, 13 nt, Human
ccauuccugaaga

SEQ ID NO: 2554488 - RNA, 16 nt, Human
ccauuccugaagaacc

SEQ ID NO: 2554489 - RNA, 22 nt, Human
ccauuccucaccuuuucccggg

SEQ ID NO: 2554490 - RNA, 12 nt, Human
ccauuccucagg

SEQ ID NO: 2554491 - RNA, 13 nt, Human
ccauuccucaggg

SEQ ID NO: 2554492 - RNA, 16 nt, Human
ccauuccucagggaca

SEQ ID NO: 2554493 - RNA, 20 nt, Human
ccauucccugccuggggcgg

SEQ ID NO: 2554494 - RNA, 15 nt, Human
ccauucccugccugg

SEQ ID NO: 2554495 - RNA, 14 nt, Human
ccauucccugccug

SEQ ID NO: 2554496 - RNA, 17 nt, Human
ccauuccauuuaucuuu

SEQ ID NO: 2554497 - RNA, 14 nt, Human
cccacgcccccacu

SEQ ID NO: 2554498 - RNA, 13 nt, Human
cccacgcccccac

SEQ ID NO: 2554499 - RNA, 20 nt, Human
cccaccuggccaccugaggu

SEQ ID NO: 2554500 - RNA, 17 nt, Human
cccaccuggccaccuga

SEQ ID NO: 2554501 - RNA, 16 nt, Human
cccacgagggucagga

SEQ ID NO: 2554502 - RNA, 13 nt, Human
cccagacccagug

SEQ ID NO: 2554503 - RNA, 14 nt, Human
cccagacccagugg

SEQ ID NO: 2554504 - RNA, 18 nt, Human
cccagaccccucuggcca

SEQ ID NO: 2554505 - RNA, 19 nt, Human
cccagaccccucuggccag

SEQ ID NO: 2554506 - RNA, 20 nt, Human
cccagaccccucuggccagg

SEQ ID NO: 2554507 - RNA, 23 nt, Human
cccagacagacaucucugcaccc

SEQ ID NO: 2554508 - RNA, 20 nt, Human
cccagacagacaucucugca

SEQ ID NO: 2554509 - RNA, 12 nt, Human
cccagacagcuc

SEQ ID NO: 2554510 - RNA, 13 nt, Human
cccagacagcucc

SEQ ID NO: 2554511 - RNA, 14 nt, Human
cccagacagcuccc

SEQ ID NO: 2554512 - RNA, 16 nt, Human
cccagacagcucccuc

SEQ ID NO: 2554513 - RNA, 20 nt, Human
cccagacagcucccucugcc

SEQ ID NO: 2554514 - RNA, 21 nt, Human
cccagacagcucccucugccu

SEQ ID NO: 2554515 - RNA, 18 nt, Human
cccagaaugccuccugca

SEQ ID NO: 2554516 - RNA, 15 nt, Human
cccacgcccccacug

SEQ ID NO: 2554517 - RNA, 15 nt, Human
cccagacacagaaga

SEQ ID NO: 2554518 - RNA, 19 nt, Human
cccagacagacaucucugc

SEQ ID NO: 2554519 - RNA, 15 nt, Human
cccagagaggaauca

SEQ ID NO: 2554520 - RNA, 19 nt, Human
cccagagaggaaucagacu

SEQ ID NO: 2554521 - RNA, 21 nt, Human
cccagagaggaaucagacuuc

SEQ ID NO: 2554522 - RNA, 14 nt, Human
cccagagaugccuc

SEQ ID NO: 2554523 - RNA, 16 nt, Human
cccagagaugccucca

SEQ ID NO: 2554524 - RNA, 17 nt, Human
cccagagaugccuccac

SEQ ID NO: 2554525 - RNA, 18 nt, Human
cccagagaugccuccacc

SEQ ID NO: 2554526 - RNA, 19 nt, Human
cccagagaugccuccaccg

SEQ ID NO: 2554527 - RNA, 20 nt, Human
cccagagaugccuccaccgc

SEQ ID NO: 2554528 - RNA, 14 nt, Human
cccagagcagggug

SEQ ID NO: 2554529 - RNA, 23 nt, Human
cccagagcaggaggccccuggcc

SEQ ID NO: 2554530 - RNA, 21 nt, Human
cccagagcaggaggccccugg

SEQ ID NO: 2554531 - RNA, 19 nt, Human
cccagagcaggaggccccu

SEQ ID NO: 2554532 - RNA, 16 nt, Human
cccagagcaggaggcc

SEQ ID NO: 2554533 - RNA, 16 nt, Human
cccagagcaggaagca

SEQ ID NO: 2554534 - RNA, 14 nt, Human
cccagagcaggaag

SEQ ID NO: 2554535 - RNA, 12 nt, Human
cccagagcacug

SEQ ID NO: 2554536 - RNA, 20 nt, Human
cccagagaugggacugggag

SEQ ID NO: 2554537 - RNA, 21 nt, Human
cccagagaugccuccaccgcu

SEQ ID NO: 2554538 - RNA, 23 nt, Human
cccagagaugccuccaccgcugc

SEQ ID NO: 2554539 - RNA, 21 nt, Human
cccagagaugggacugggagg

SEQ ID NO: 2554540 - RNA, 17 nt, Human
cccagacgaugucuuca

SEQ ID NO: 2554541 - RNA, 15 nt, Human
cccagacgaugucuu

SEQ ID NO: 2554542 - RNA, 21 nt, Human
cccagaccuuuuauccacuua

SEQ ID NO: 2554543 - RNA, 21 nt, Human
cccagaccuguuagcagacag

SEQ ID NO: 2554544 - RNA, 22 nt, Human
cccagaccuguuagcagacagg

SEQ ID NO: 2554545 - RNA, 18 nt, Human
cccagaccugccucuucc

SEQ ID NO: 2554546 - RNA, 14 nt, Human
cccagaccugccuc

SEQ ID NO: 2554547 - RNA, 21 nt, Human
cccagaccccucuggccagga

SEQ ID NO: 2554548 - RNA, 12 nt, Human
cccagacucaga

SEQ ID NO: 2554549 - RNA, 13 nt, Human
cccagacucagac

SEQ ID NO: 2554550 - RNA, 16 nt, Human
cccagacucagacauu

SEQ ID NO: 2554551 - RNA, 20 nt, Human
cccagacucagacauuggca

SEQ ID NO: 2554552 - RNA, 18 nt, Human
cccaggaggccagccuug

SEQ ID NO: 2554553 - RNA, 23 nt, Human
cccagauugcaacaggcugggcu

SEQ ID NO: 2554554 - RNA, 15 nt, Human
cccagaggagggcag

SEQ ID NO: 2554555 - RNA, 16 nt, Human
cccagaggauugcugc

SEQ ID NO: 2554556 - RNA, 22 nt, Human
cccagaggaaggggccagaggc

SEQ ID NO: 2554557 - RNA, 23 nt, Human
cccagaggaaggggccagaggcu

SEQ ID NO: 2554558 - RNA, 24 nt, Human
cccagaggaaggggccagaggcuc

SEQ ID NO: 2554559 - RNA, 21 nt, Human
cccagaggaaggggccagagg

SEQ ID NO: 2554560 - RNA, 23 nt, Human
cccagagcuguuuauggccucag

SEQ ID NO: 2554561 - RNA, 21 nt, Human
cccagagcuguuuauggccuc

SEQ ID NO: 2554562 - RNA, 22 nt, Human
cccagagcuguuuauggccuca

SEQ ID NO: 2554563 - RNA, 22 nt, Human
cccagagcauuacgugagccag

SEQ ID NO: 2554564 - RNA, 21 nt, Human
cccagagcauuacgugagcca

SEQ ID NO: 2554565 - RNA, 15 nt, Human
cccagagcagggugu

SEQ ID NO: 2554566 - RNA, 12 nt, Human
cccagagcccag

SEQ ID NO: 2554567 - RNA, 13 nt, Human
cccagagcccagc

SEQ ID NO: 2554568 - RNA, 15 nt, Human
cccagagcccagcuc

SEQ ID NO: 2554569 - RNA, 16 nt, Human
cccagagcccagcucc

SEQ ID NO: 2554570 - RNA, 17 nt, Human
cccagagcccagcucca

SEQ ID NO: 2554571 - RNA, 21 nt, Human
cccagagcuguggacuuuguu

SEQ ID NO: 2554572 - RNA, 13 nt, Human
cccagagcuguuu

SEQ ID NO: 2554573 - RNA, 11 nt, Human
cccagagcugu

SEQ ID NO: 2554574 - RNA, 22 nt, Human
cccagauuggcucacacugaga

SEQ ID NO: 2554575 - RNA, 21 nt, Human
cccagauuggcucacacugag

SEQ ID NO: 2554576 - RNA, 20 nt, Human
cccagauuggcucacacuga

SEQ ID NO: 2554577 - RNA, 19 nt, Human
cccagauuggcucacacug

SEQ ID NO: 2554578 - RNA, 14 nt, Human
cccagaggccucuc

SEQ ID NO: 2554579 - RNA, 17 nt, Human
cccagauuggcucacac

SEQ ID NO: 2554580 - RNA, 16 nt, Human
cccagaggcugcccca

SEQ ID NO: 2554581 - RNA, 13 nt, Human
cccagccccaaug

SEQ ID NO: 2554582 - RNA, 15 nt, Human
cccagcaacacaagc

SEQ ID NO: 2554583 - RNA, 19 nt, Human
cccagauuuugcuguauau

SEQ ID NO: 2554584 - RNA, 21 nt, Human
cccagauuuugcuguauauuu

SEQ ID NO: 2554585 - RNA, 18 nt, Human
cccagauuuugcuguaua

SEQ ID NO: 2554586 - RNA, 12 nt, Human
cccagccccauc

SEQ ID NO: 2554587 - RNA, 11 nt, Human
cccagccccau

SEQ ID NO: 2554588 - RNA, 17 nt, Human
cccagccccaaugaaca

SEQ ID NO: 2554589 - RNA, 16 nt, Human
cccagcaacuccaacu

SEQ ID NO: 2554590 - RNA, 19 nt, Human
cccagcaacccuccuauca

SEQ ID NO: 2554591 - RNA, 21 nt, Human
cccagcaacccuccuaucacc

SEQ ID NO: 2554592 - RNA, 22 nt, Human
cccagcaacacaagcuggaagc

SEQ ID NO: 2554593 - RNA, 20 nt, Human
cccagcaacacaagcuggaa

SEQ ID NO: 2554594 - RNA, 13 nt, Human
cccagcaacccuc

SEQ ID NO: 2554595 - RNA, 17 nt, Human
cccagcaacccuccuau

SEQ ID NO: 2554596 - RNA, 15 nt, Human
cccagccccauccuc

SEQ ID NO: 2554597 - RNA, 14 nt, Human
cccagccccauccu

SEQ ID NO: 2554598 - RNA, 14 nt, Human
cccagccccauccc

SEQ ID NO: 2554599 - RNA, 13 nt, Human
cccagccccaucc

SEQ ID NO: 2554600 - RNA, 22 nt, Human
cccagcccccuuugggcccagg

SEQ ID NO: 2554601 - RNA, 15 nt, Human
cccagcccccuuugg

SEQ ID NO: 2554602 - RNA, 24 nt, Human
cccagcccccacagugcugucuga

SEQ ID NO: 2554603 - RNA, 17 nt, Human
cccagcccccacagugc

SEQ ID NO: 2554604 - RNA, 16 nt, Human
cccagcccccacagug

SEQ ID NO: 2554605 - RNA, 12 nt, Human
cccagcccccac

SEQ ID NO: 2554606 - RNA, 19 nt, Human
cccagccccauccucugua

SEQ ID NO: 2554607 - RNA, 18 nt, Human
cccagccccauccucugu

SEQ ID NO: 2554608 - RNA, 11 nt, Human
cccagccucag

SEQ ID NO: 2554609 - RNA, 12 nt, Human
cccagcccuggc

SEQ ID NO: 2554610 - RNA, 11 nt, Human
cccagcccugg

SEQ ID NO: 2554611 - RNA, 19 nt, Human
cccagcccugcuggccgcc

SEQ ID NO: 2554612 - RNA, 20 nt, Human
cccagcccugcuggccgccu

SEQ ID NO: 2554613 - RNA, 16 nt, Human
cccagcccugcuggcc

SEQ ID NO: 2554614 - RNA, 15 nt, Human
cccagcccugcuggc

SEQ ID NO: 2554615 - RNA, 14 nt, Human
cccagcccugcugg

SEQ ID NO: 2554616 - RNA, 13 nt, Human
cccagcccugcug

SEQ ID NO: 2554617 - RNA, 12 nt, Human
cccagcccugcu

SEQ ID NO: 2554618 - RNA, 11 nt, Human
cccagcccugc

SEQ ID NO: 2554619 - RNA, 10 nt, Human
cccagcccug

SEQ ID NO: 2554620 - RNA, 18 nt, Human
cccagcccuauggaugug

SEQ ID NO: 2554621 - RNA, 19 nt, Human
cccagcccucaucccgagc

SEQ ID NO: 2554622 - RNA, 14 nt, Human
cccagcccggcucc

SEQ ID NO: 2554623 - RNA, 20 nt, Human
cccagcccggaccuuggcag

SEQ ID NO: 2554624 - RNA, 21 nt, Human
cccagcccccuuugggcccag

SEQ ID NO: 2554625 - RNA, 16 nt, Human
cccagcccccuuuggg

SEQ ID NO: 2554626 - RNA, 17 nt, Human
cccagcccuauggaugu

SEQ ID NO: 2554627 - RNA, 16 nt, Human
cccagcccggcuccca

SEQ ID NO: 2554628 - RNA, 14 nt, Human
cccagcccucaucc

SEQ ID NO: 2554629 - RNA, 15 nt, Human
cccagcccucauccc

SEQ ID NO: 2554630 - RNA, 16 nt, Human
cccagcccucaucccg

SEQ ID NO: 2554631 - RNA, 23 nt, Human
cccagcccuccuuaucaaaggac

SEQ ID NO: 2554632 - RNA, 22 nt, Human
cccagccucaguccuccccuca

SEQ ID NO: 2554633 - RNA, 16 nt, Human
cccagccucaguccuc

SEQ ID NO: 2554634 - RNA, 12 nt, Human
cccagccucagu

SEQ ID NO: 2554635 - RNA, 20 nt, Human
cccagccuccaagcuccauc

SEQ ID NO: 2554636 - RNA, 18 nt, Human
cccagccuccaagcucca

SEQ ID NO: 2554637 - RNA, 22 nt, Human
cccagccuggcccagcuccccc

SEQ ID NO: 2554638 - RNA, 20 nt, Human
cccagccuggcccagcuccc

SEQ ID NO: 2554639 - RNA, 19 nt, Human
cccagccuggcccagcucc

SEQ ID NO: 2554640 - RNA, 18 nt, Human
cccagccuggcccagcuc

SEQ ID NO: 2554641 - RNA, 15 nt, Human
cccagccucuggcau

SEQ ID NO: 2554642 - RNA, 17 nt, Human
cccagccuggcccagcu

SEQ ID NO: 2554643 - RNA, 21 nt, Human
cccagccucuucuagagccgu

SEQ ID NO: 2554644 - RNA, 16 nt, Human
cccagccucccugaag

SEQ ID NO: 2554645 - RNA, 17 nt, Human
cccagccucccugaagc

SEQ ID NO: 2554646 - RNA, 18 nt, Human
cccagccucccugaagcc

SEQ ID NO: 2554647 - RNA, 15 nt, Human
cccagccucuaggga

SEQ ID NO: 2554648 - RNA, 12 nt, Human
cccaggaccagc

SEQ ID NO: 2554649 - RNA, 13 nt, Human
cccaggaccagcu

SEQ ID NO: 2554650 - RNA, 14 nt, Human
cccaggaccagcuc

SEQ ID NO: 2554651 - RNA, 15 nt, Human
cccaggaccagcuca

SEQ ID NO: 2554652 - RNA, 16 nt, Human
cccaggaccagcucag

SEQ ID NO: 2554653 - RNA, 17 nt, Human
cccaggaccagcucagg

SEQ ID NO: 2554654 - RNA, 20 nt, Human
cccaggaccagcucaggaca

SEQ ID NO: 2554655 - RNA, 18 nt, Human
cccaggaccagcuggggc

SEQ ID NO: 2554656 - RNA, 17 nt, Human
cccaggaccagcugggg

SEQ ID NO: 2554657 - RNA, 16 nt, Human
cccaggaccagcuggg

SEQ ID NO: 2554658 - RNA, 15 nt, Human
cccaggaccagcugg

SEQ ID NO: 2554659 - RNA, 21 nt, Human
cccaggaccagcucaggacag

SEQ ID NO: 2554660 - RNA, 22 nt, Human
cccaggaccagcucaggacaga

SEQ ID NO: 2554661 - RNA, 18 nt, Human
cccaggaccuggcugcca

SEQ ID NO: 2554662 - RNA, 20 nt, Human
cccaggacgcuucugaaugc

SEQ ID NO: 2554663 - RNA, 19 nt, Human
cccaggacgcuucugaaug

SEQ ID NO: 2554664 - RNA, 18 nt, Human
cccaggacgcuucugaau

SEQ ID NO: 2554665 - RNA, 17 nt, Human
cccaggacgcuucugaa

SEQ ID NO: 2554666 - RNA, 16 nt, Human
cccaggacgcuucuga

SEQ ID NO: 2554667 - RNA, 15 nt, Human
cccaggacgcuucug

SEQ ID NO: 2554668 - RNA, 16 nt, Human
cccaggaccuggcugc

SEQ ID NO: 2554669 - RNA, 11 nt, Human
cccaggacccu

SEQ ID NO: 2554670 - RNA, 12 nt, Human
cccaggacccug

SEQ ID NO: 2554671 - RNA, 13 nt, Human
cccaggacccuga

SEQ ID NO: 2554672 - RNA, 23 nt, Human
cccaggacccugaaggggccaug

SEQ ID NO: 2554673 - RNA, 21 nt, Human
cccaggaccagcuggggcgug

SEQ ID NO: 2554674 - RNA, 19 nt, Human
cccaggaccagcuggggcg

SEQ ID NO: 2554675 - RNA, 22 nt, Human
cccaggaccagcuggggcgugg

SEQ ID NO: 2554676 - RNA, 16 nt, Human
cccaggaccccugagu

SEQ ID NO: 2554677 - RNA, 14 nt, Human
cccaggaggccagc

SEQ ID NO: 2554678 - RNA, 22 nt, Human
cccaggagcauccaccuccuuc

SEQ ID NO: 2554679 - RNA, 18 nt, Human
cccaggagcauccaccuc

SEQ ID NO: 2554680 - RNA, 14 nt, Human
cccaggagccccga

SEQ ID NO: 2554681 - RNA, 13 nt, Human
cccaggagccccg

SEQ ID NO: 2554682 - RNA, 22 nt, Human
cccaggacggggccggccaggu

SEQ ID NO: 2554683 - RNA, 19 nt, Human
cccaggacggggccggcca

SEQ ID NO: 2554684 - RNA, 17 nt, Human
cccaggacggggccggc

SEQ ID NO: 2554685 - RNA, 15 nt, Human
cccaggacggggccg

SEQ ID NO: 2554686 - RNA, 23 nt, Human
cccaggacggggccggccaggug

SEQ ID NO: 2554687 - RNA, 15 nt, Human
cccaggacugggcca

SEQ ID NO: 2554688 - RNA, 14 nt, Human
cccaggacugggcc

SEQ ID NO: 2554689 - RNA, 13 nt, Human
cccaggacugggc

SEQ ID NO: 2554690 - RNA, 12 nt, Human
cccaggacuggg

SEQ ID NO: 2554691 - RNA, 16 nt, Human
cccaggagagagaaag

SEQ ID NO: 2554692 - RNA, 15 nt, Human
cccaggagagagaaa

SEQ ID NO: 2554693 - RNA, 14 nt, Human
cccaggagagagaa

SEQ ID NO: 2554694 - RNA, 13 nt, Human
cccaggagagaga

SEQ ID NO: 2554695 - RNA, 15 nt, Human
cccaggagacaguuc

SEQ ID NO: 2554696 - RNA, 17 nt, Human
cccaggagacaguucaa

SEQ ID NO: 2554697 - RNA, 20 nt, Human
cccaggagagagaaagccag

SEQ ID NO: 2554698 - RNA, 14 nt, Human
cccaggagagccag

SEQ ID NO: 2554699 - RNA, 15 nt, Human
cccaggagagccagc

SEQ ID NO: 2554700 - RNA, 18 nt, Human
cccaggagagccagcccu

SEQ ID NO: 2554701 - RNA, 19 nt, Human
cccaggagagccagcccuc

SEQ ID NO: 2554702 - RNA, 21 nt, Human
cccaggagagccagcccuccc

SEQ ID NO: 2554703 - RNA, 22 nt, Human
cccaggagagccagcccucccu

SEQ ID NO: 2554704 - RNA, 23 nt, Human
cccaggagagccagcccucccug

SEQ ID NO: 2554705 - RNA, 14 nt, Human
cccagcucuggucc

SEQ ID NO: 2554706 - RNA, 13 nt, Human
cccagcucugguc

SEQ ID NO: 2554707 - RNA, 12 nt, Human
cccagcucuggu

SEQ ID NO: 2554708 - RNA, 14 nt, Human
cccagcucugaaac

SEQ ID NO: 2554709 - RNA, 22 nt, Human
cccagcucugaaaccaguguua

SEQ ID NO: 2554710 - RNA, 13 nt, Human
cccagcucuggcu

SEQ ID NO: 2554711 - RNA, 16 nt, Human
cccagcucugguccau

SEQ ID NO: 2554712 - RNA, 15 nt, Human
cccagcucuggucca

SEQ ID NO: 2554713 - RNA, 18 nt, Human
cccagcucugguccauag

SEQ ID NO: 2554714 - RNA, 23 nt, Human
cccaggacaccacacccagccuc

SEQ ID NO: 2554715 - RNA, 22 nt, Human
cccaggacaccacacccagccu

SEQ ID NO: 2554716 - RNA, 21 nt, Human
cccaggacaccacacccagcc

SEQ ID NO: 2554717 - RNA, 14 nt, Human
cccagcgagcccug

SEQ ID NO: 2554718 - RNA, 21 nt, Human
cccagccuuggcaucuagagc

SEQ ID NO: 2554719 - RNA, 23 nt, Human
cccagccuucuuugcuugccucu

SEQ ID NO: 2554720 - RNA, 14 nt, Human
cccagcuacucagg

SEQ ID NO: 2554721 - RNA, 11 nt, Human
cccagcucaau

SEQ ID NO: 2554722 - RNA, 20 nt, Human
cccagcuauaccugugccuc

SEQ ID NO: 2554723 - RNA, 21 nt, Human
cccagcuaugguucucucgca

SEQ ID NO: 2554724 - RNA, 12 nt, Human
cccagcucugaa

SEQ ID NO: 2554725 - RNA, 23 nt, Human
cccagcucucccucuggcccugc

SEQ ID NO: 2554726 - RNA, 21 nt, Human
cccagcucucccucuggcccu

SEQ ID NO: 2554727 - RNA, 12 nt, Human
cccagcucagca

SEQ ID NO: 2554728 - RNA, 14 nt, Human
cccagcucagaggg

SEQ ID NO: 2554729 - RNA, 15 nt, Human
cccagcucagagggu

SEQ ID NO: 2554730 - RNA, 19 nt, Human
cccagcuacuugggaagcu

SEQ ID NO: 2554731 - RNA, 18 nt, Human
cccagcuacuugggaagc

SEQ ID NO: 2554732 - RNA, 17 nt, Human
cccagcuauaccugugc

SEQ ID NO: 2554733 - RNA, 16 nt, Human
cccagcuacuugggaa

SEQ ID NO: 2554734 - RNA, 15 nt, Human
cccagcuacuuggga

SEQ ID NO: 2554735 - RNA, 15 nt, Human
cccagcuacucagga

SEQ ID NO: 2554736 - RNA, 20 nt, Human
cccagcuacucaggaggcug

SEQ ID NO: 2554737 - RNA, 16 nt, Human
cccaggaggccagccu

SEQ ID NO: 2554738 - RNA, 15 nt, Human
cccaggaggccagcc

SEQ ID NO: 2554739 - RNA, 15 nt, Human
cccaggcauucccca

SEQ ID NO: 2554740 - RNA, 23 nt, Human
cccaggcaggucuugaacuccug

SEQ ID NO: 2554741 - RNA, 17 nt, Human
cccaggcauuccccagg

SEQ ID NO: 2554742 - RNA, 19 nt, Human
cccagggugggaagggcua

SEQ ID NO: 2554743 - RNA, 18 nt, Human
cccaggguucaguccuca

SEQ ID NO: 2554744 - RNA, 19 nt, Human
cccaggguuaauagggccu

SEQ ID NO: 2554745 - RNA, 16 nt, Human
cccagguaccagcugc

SEQ ID NO: 2554746 - RNA, 15 nt, Human
cccagguaccagcug

SEQ ID NO: 2554747 - RNA, 14 nt, Human
cccagguaccagcu

SEQ ID NO: 2554748 - RNA, 19 nt, Human
cccagguaagcaggaggag

SEQ ID NO: 2554749 - RNA, 17 nt, Human
cccagguaagcaggagg

SEQ ID NO: 2554750 - RNA, 14 nt, Human
cccagguaagcagg

SEQ ID NO: 2554751 - RNA, 18 nt, Human
cccaggguucccccagcc

SEQ ID NO: 2554752 - RNA, 22 nt, Human
cccagguuucuggucucuaggc

SEQ ID NO: 2554753 - RNA, 19 nt, Human
cccagguuucuggucucua

SEQ ID NO: 2554754 - RNA, 13 nt, Human
cccagguuucugg

SEQ ID NO: 2554755 - RNA, 14 nt, Human
cccagguccagcuc

SEQ ID NO: 2554756 - RNA, 14 nt, Human
cccaggucauggaa

SEQ ID NO: 2554757 - RNA, 17 nt, Human
cccaguaaaauugccau

SEQ ID NO: 2554758 - RNA, 16 nt, Human
cccaguaaaauugcca

SEQ ID NO: 2554759 - RNA, 13 nt, Human
cccaguaaaauug

SEQ ID NO: 2554760 - RNA, 12 nt, Human
cccaguaaaauu

SEQ ID NO: 2554761 - RNA, 19 nt, Human
cccagguaccagcugcgcu

SEQ ID NO: 2554762 - RNA, 17 nt, Human
cccagguaccagcugcg

SEQ ID NO: 2554763 - RNA, 13 nt, Human
cccagguuucuau

SEQ ID NO: 2554764 - RNA, 14 nt, Human
cccaguaccuccug

SEQ ID NO: 2554765 - RNA, 15 nt, Human
cccaguaacucaucu

SEQ ID NO: 2554766 - RNA, 18 nt, Human
cccaguaaaauugccaua

SEQ ID NO: 2554767 - RNA, 14 nt, Human
cccagucccccaac

SEQ ID NO: 2554768 - RNA, 23 nt, Human
cccaguccccaccccugccccca

SEQ ID NO: 2554769 - RNA, 21 nt, Human
cccaguccccaccccugcccc

SEQ ID NO: 2554770 - RNA, 22 nt, Human
cccaguaccuccugucucuggc

SEQ ID NO: 2554771 - RNA, 21 nt, Human
cccaguaccuccugucucugg

SEQ ID NO: 2554772 - RNA, 20 nt, Human
cccaguaccuccugucucug

SEQ ID NO: 2554773 - RNA, 14 nt, Human
cccaguaagccacu

SEQ ID NO: 2554774 - RNA, 23 nt, Human
cccaguccccgugccccgccucc

SEQ ID NO: 2554775 - RNA, 13 nt, Human
cccaguccccgug

SEQ ID NO: 2554776 - RNA, 22 nt, Human
cccagucccccaaccccagccg

SEQ ID NO: 2554777 - RNA, 20 nt, Human
cccagucccccaaccccagc

SEQ ID NO: 2554778 - RNA, 12 nt, Human
cccagucccugg

SEQ ID NO: 2554779 - RNA, 13 nt, Human
cccagucccuggg

SEQ ID NO: 2554780 - RNA, 14 nt, Human
cccagucccugggg

SEQ ID NO: 2554781 - RNA, 16 nt, Human
cccagucccuggggga

SEQ ID NO: 2554782 - RNA, 20 nt, Human
cccaguccuggccuggcuuc

SEQ ID NO: 2554783 - RNA, 17 nt, Human
cccaguccuggccuggc

SEQ ID NO: 2554784 - RNA, 16 nt, Human
cccaguccuggccugg

SEQ ID NO: 2554785 - RNA, 15 nt, Human
cccaguccuggccug

SEQ ID NO: 2554786 - RNA, 14 nt, Human
cccaguccuggccu

SEQ ID NO: 2554787 - RNA, 13 nt, Human
cccaguccuggcc

SEQ ID NO: 2554788 - RNA, 23 nt, Human
cccagucccugggggaagcccug

SEQ ID NO: 2554789 - RNA, 22 nt, Human
cccagugggaggggcaggcuga

SEQ ID NO: 2554790 - RNA, 21 nt, Human
cccagugggaggggcaggcug

SEQ ID NO: 2554791 - RNA, 20 nt, Human
cccagugggaggggcaggcu

SEQ ID NO: 2554792 - RNA, 19 nt, Human
cccagugggaggggcaggc

SEQ ID NO: 2554793 - RNA, 18 nt, Human
cccagugggaggggcagg

SEQ ID NO: 2554794 - RNA, 17 nt, Human
cccagugggaggggcag

SEQ ID NO: 2554795 - RNA, 16 nt, Human
cccagugggaggggca

SEQ ID NO: 2554796 - RNA, 20 nt, Human
cccagugguuccuaauccuc

SEQ ID NO: 2554797 - RNA, 14 nt, Human
cccagugggagggg

SEQ ID NO: 2554798 - RNA, 20 nt, Human
cccagugggaggcgcgagcc

SEQ ID NO: 2554799 - RNA, 16 nt, Human
cccagugggaggcgcg

SEQ ID NO: 2554800 - RNA, 15 nt, Human
cccagugggaggcgc

SEQ ID NO: 2554801 - RNA, 12 nt, Human
cccagugggagg

SEQ ID NO: 2554802 - RNA, 18 nt, Human
cccaguggcuguucugga

SEQ ID NO: 2554803 - RNA, 21 nt, Human
cccaguggcugcugcccaggc

SEQ ID NO: 2554804 - RNA, 18 nt, Human
cccaguggcugcugccca

SEQ ID NO: 2554805 - RNA, 15 nt, Human
cccaguggcugcugc

SEQ ID NO: 2554806 - RNA, 17 nt, Human
cccaguggcugcugccc

SEQ ID NO: 2554807 - RNA, 16 nt, Human
cccaguggcugcugcc

SEQ ID NO: 2554808 - RNA, 14 nt, Human
cccaguuagcucuc

SEQ ID NO: 2554809 - RNA, 14 nt, Human
cccaguucacccug

SEQ ID NO: 2554810 - RNA, 20 nt, Human
cccagugucuuccugugggg

SEQ ID NO: 2554811 - RNA, 19 nt, Human
cccaguucaggagucccaa

SEQ ID NO: 2554812 - RNA, 22 nt, Human
cccaguucaacucauggagaug

SEQ ID NO: 2554813 - RNA, 22 nt, Human
cccaguucaggagucccaagga

SEQ ID NO: 2554814 - RNA, 16 nt, Human
cccagugucuuccugu

SEQ ID NO: 2554815 - RNA, 15 nt, Human
cccagugucuuccug

SEQ ID NO: 2554816 - RNA, 22 nt, Human
cccagugucaaguugugcuugu

SEQ ID NO: 2554817 - RNA, 21 nt, Human
cccagugucaaguugugcuug

SEQ ID NO: 2554818 - RNA, 18 nt, Human
cccagugucuuccugugg

SEQ ID NO: 2554819 - RNA, 17 nt, Human
cccagugucuuccugug

SEQ ID NO: 2554820 - RNA, 17 nt, Human
cccagucuacccagaga

SEQ ID NO: 2554821 - RNA, 15 nt, Human
cccagucuacccaga

SEQ ID NO: 2554822 - RNA, 23 nt, Human
cccaguccuggccuggcuucucc

SEQ ID NO: 2554823 - RNA, 15 nt, Human
cccagucucuggcag

SEQ ID NO: 2554824 - RNA, 16 nt, Human
cccagucuacccagag

SEQ ID NO: 2554825 - RNA, 14 nt, Human
cccagugcccccac

SEQ ID NO: 2554826 - RNA, 21 nt, Human
cccagugcccacaggaucagu

SEQ ID NO: 2554827 - RNA, 19 nt, Human
cccagugcccccacugacc

SEQ ID NO: 2554828 - RNA, 20 nt, Human
cccagugcccccacugacca

SEQ ID NO: 2554829 - RNA, 20 nt, Human
cccagucucuggcaguucug

SEQ ID NO: 2554830 - RNA, 22 nt, Human
cccagugcccccacugaccaga

SEQ ID NO: 2554831 - RNA, 15 nt, Human
cccagugccgagaag

SEQ ID NO: 2554832 - RNA, 19 nt, Human
cccagucuggaaugcagug

SEQ ID NO: 2554833 - RNA, 18 nt, Human
cccagucuggaaugcagu

SEQ ID NO: 2554834 - RNA, 10 nt, Human
cccagucugg

SEQ ID NO: 2554835 - RNA, 17 nt, Human
cccaguccuuccaccuc

SEQ ID NO: 2554836 - RNA, 16 nt, Human
cccaguccuuccaccu

SEQ ID NO: 2554837 - RNA, 22 nt, Human
cccaguccuggccuggcuucuc

SEQ ID NO: 2554838 - RNA, 21 nt, Human
cccaguccuggccuggcuucu

SEQ ID NO: 2554839 - RNA, 14 nt, Human
cccaguccuuccac

SEQ ID NO: 2554840 - RNA, 21 nt, Human
ccccaaauggaaaugggcaga

SEQ ID NO: 2554841 - RNA, 19 nt, Human
ccccaaauccgaaccuccu

SEQ ID NO: 2554842 - RNA, 23 nt, Human
ccccaaauccgaaccuccucugu

SEQ ID NO: 2554843 - RNA, 14 nt, Human
ccccaaccccagcc

SEQ ID NO: 2554844 - RNA, 13 nt, Human
ccccaaccccagc

SEQ ID NO: 2554845 - RNA, 13 nt, Human
ccccaaccccuga

SEQ ID NO: 2554846 - RNA, 23 nt, Human
ccccaacccccagcacccgggcu

SEQ ID NO: 2554847 - RNA, 13 nt, Human
ccccaacccccac

SEQ ID NO: 2554848 - RNA, 21 nt, Human
ccccaaagcuuuccugcccca

SEQ ID NO: 2554849 - RNA, 19 nt, Human
ccccaaagcuuuccugccc

SEQ ID NO: 2554850 - RNA, 18 nt, Human
ccccaaagcuuuccugcc

SEQ ID NO: 2554851 - RNA, 16 nt, Human
ccccaaagcuuuccug

SEQ ID NO: 2554852 - RNA, 19 nt, Human
ccccaaaggaaaaagcaca

SEQ ID NO: 2554853 - RNA, 20 nt, Human
ccccaaagagccuggagaag

SEQ ID NO: 2554854 - RNA, 15 nt, Human
ccccaaaucaauaca

SEQ ID NO: 2554855 - RNA, 11 nt, Human
ccccaaauccg

SEQ ID NO: 2554856 - RNA, 18 nt, Human
ccccaaauaagaagggau

SEQ ID NO: 2554857 - RNA, 17 nt, Human
ccccaaauaagaaggga

SEQ ID NO: 2554858 - RNA, 14 nt, Human
ccccaaccugcuga

SEQ ID NO: 2554859 - RNA, 13 nt, Human
ccccaacuccugg

SEQ ID NO: 2554860 - RNA, 14 nt, Human
ccccaacuccugga

SEQ ID NO: 2554861 - RNA, 13 nt, Human
ccccacacugggg

SEQ ID NO: 2554862 - RNA, 15 nt, Human
ccccaacuccuggaa

SEQ ID NO: 2554863 - RNA, 18 nt, Human
ccccacacuggggugccg

SEQ ID NO: 2554864 - RNA, 22 nt, Human
ccccacacuuguuccagcucuu

SEQ ID NO: 2554865 - RNA, 16 nt, Human
ccccaaccccugagga

SEQ ID NO: 2554866 - RNA, 14 nt, Human
ccccaaccccugag

SEQ ID NO: 2554867 - RNA, 17 nt, Human
ccccaaccccugaggaa

SEQ ID NO: 2554868 - RNA, 13 nt, Human
ccccaacccugcc

SEQ ID NO: 2554869 - RNA, 15 nt, Human
ccccaacccugcccc

SEQ ID NO: 2554870 - RNA, 17 nt, Human
ccccaacccugccccug

SEQ ID NO: 2554871 - RNA, 18 nt, Human
ccccaacccugccccugc

SEQ ID NO: 2554872 - RNA, 23 nt, Human
ccccaacccugccccugccccgu

SEQ ID NO: 2554873 - RNA, 13 nt, Human
cccaugugccaag

SEQ ID NO: 2554874 - RNA, 21 nt, Human
cccauguguccugguucccgu

SEQ ID NO: 2554875 - RNA, 14 nt, Human
cccaugugugagug

SEQ ID NO: 2554876 - RNA, 19 nt, Human
cccaugugugagugugugc

SEQ ID NO: 2554877 - RNA, 20 nt, Human
cccaugugugagugugugca

SEQ ID NO: 2554878 - RNA, 15 nt, Human
cccauguuucucugg

SEQ ID NO: 2554879 - RNA, 18 nt, Human
cccauuagaccaagcuug

SEQ ID NO: 2554880 - RNA, 21 nt, Human
cccauuaggacaaucaguccc

SEQ ID NO: 2554881 - RNA, 16 nt, Human
cccauuagcaaaaauu

SEQ ID NO: 2554882 - RNA, 19 nt, Human
ccccaaagagccuggagaa

SEQ ID NO: 2554883 - RNA, 15 nt, Human
ccccaaagagccugg

SEQ ID NO: 2554884 - RNA, 16 nt, Human
cccauuaggacaauca

SEQ ID NO: 2554885 - RNA, 14 nt, Human
ccccaaagagccug

SEQ ID NO: 2554886 - RNA, 22 nt, Human
ccccaaagagccuggagaagcu

SEQ ID NO: 2554887 - RNA, 12 nt, Human
ccccaaagcccc

SEQ ID NO: 2554888 - RNA, 17 nt, Human
cccauguaacagaaagg

SEQ ID NO: 2554889 - RNA, 14 nt, Human
cccauguagccccc

SEQ ID NO: 2554890 - RNA, 15 nt, Human
cccauguagcccccu

SEQ ID NO: 2554891 - RNA, 21 nt, Human
cccauguagcccccuggccuc

SEQ ID NO: 2554892 - RNA, 22 nt, Human
cccauguagcccccuggccucu

SEQ ID NO: 2554893 - RNA, 23 nt, Human
cccauguagcccccuggccucug

SEQ ID NO: 2554894 - RNA, 18 nt, Human
cccaugucgcgcucagca

SEQ ID NO: 2554895 - RNA, 23 nt, Human
cccauguauuuaucucuauuuaa

SEQ ID NO: 2554896 - RNA, 16 nt, Human
cccaugucucgacuca

SEQ ID NO: 2554897 - RNA, 17 nt, Human
cccaugucucgacucau

SEQ ID NO: 2554898 - RNA, 19 nt, Human
cccaugucgcgcucagcau

SEQ ID NO: 2554899 - RNA, 16 nt, Human
cccaugucucucagaa

SEQ ID NO: 2554900 - RNA, 14 nt, Human
cccaucucaugccc

SEQ ID NO: 2554901 - RNA, 13 nt, Human
cccaucugugaau

SEQ ID NO: 2554902 - RNA, 16 nt, Human
cccaucugugaauaag

SEQ ID NO: 2554903 - RNA, 20 nt, Human
cccaucugugaaaggaaaga

SEQ ID NO: 2554904 - RNA, 22 nt, Human
cccaugaacuuaaaaugaaagu

SEQ ID NO: 2554905 - RNA, 20 nt, Human
cccaugaacacacugugucc

SEQ ID NO: 2554906 - RNA, 12 nt, Human
cccaucuugcuu

SEQ ID NO: 2554907 - RNA, 18 nt, Human
cccaugaagacaggacag

SEQ ID NO: 2554908 - RNA, 19 nt, Human
cccaugaagacaggacagu

SEQ ID NO: 2554909 - RNA, 22 nt, Human
cccaugaagacaggacagugcu

SEQ ID NO: 2554910 - RNA, 18 nt, Human
cccaucucacacaugagc

SEQ ID NO: 2554911 - RNA, 13 nt, Human
cccaucucacaca

SEQ ID NO: 2554912 - RNA, 21 nt, Human
cccaucuaugucccuugcugu

SEQ ID NO: 2554913 - RNA, 13 nt, Human
cccaugcugcccu

SEQ ID NO: 2554914 - RNA, 12 nt, Human
cccaugcugccc

SEQ ID NO: 2554915 - RNA, 14 nt, Human
cccaugcugcccug

SEQ ID NO: 2554916 - RNA, 19 nt, Human
cccauggggagggauucug

SEQ ID NO: 2554917 - RNA, 17 nt, Human
cccaugggcucugacag

SEQ ID NO: 2554918 - RNA, 16 nt, Human
cccaugggcucugaca

SEQ ID NO: 2554919 - RNA, 20 nt, Human
cccaugccuguccagccugg

SEQ ID NO: 2554920 - RNA, 16 nt, Human
cccaugagccucagca

SEQ ID NO: 2554921 - RNA, 15 nt, Human
cccaugagccucagc

SEQ ID NO: 2554922 - RNA, 20 nt, Human
cccaugagccucagcauccu

SEQ ID NO: 2554923 - RNA, 16 nt, Human
cccaugccuguccagc

SEQ ID NO: 2554924 - RNA, 19 nt, Human
cccaugccuguccagccug

SEQ ID NO: 2554925 - RNA, 14 nt, Human
cccaugccugucca

SEQ ID NO: 2554926 - RNA, 16 nt, Human
cccaugaaucaaagac

SEQ ID NO: 2554927 - RNA, 20 nt, Human
ccucccgaauagcugggacu

SEQ ID NO: 2554928 - RNA, 19 nt, Human
ccucccgaauagcugggac

SEQ ID NO: 2554929 - RNA, 21 nt, Human
ccucccgaauagcugggacua

SEQ ID NO: 2554930 - RNA, 14 nt, Human
ccuccccugcugca

SEQ ID NO: 2554931 - RNA, 13 nt, Human
ccuccccugcugc

SEQ ID NO: 2554932 - RNA, 16 nt, Human
ccuccccugcugaagg

SEQ ID NO: 2554933 - RNA, 12 nt, Human
ccuccccugcug

SEQ ID NO: 2554934 - RNA, 16 nt, Human
ccuccccugcccuggu

SEQ ID NO: 2554935 - RNA, 18 nt, Human
ccucccgaguagcuggga

SEQ ID NO: 2554936 - RNA, 17 nt, Human
ccucccgaguagcuggg

SEQ ID NO: 2554937 - RNA, 13 nt, Human
ccucccucuaauu

SEQ ID NO: 2554938 - RNA, 13 nt, Human
ccucccucucucu

SEQ ID NO: 2554939 - RNA, 18 nt, Human
ccucccucucucuucugc

SEQ ID NO: 2554940 - RNA, 12 nt, Human
ccucccuccugc

SEQ ID NO: 2554941 - RNA, 15 nt, Human
ccucccuccugccga

SEQ ID NO: 2554942 - RNA, 21 nt, Human
ccucccuccugccgacuccug

SEQ ID NO: 2554943 - RNA, 13 nt, Human
ccucccucuuucc

SEQ ID NO: 2554944 - RNA, 20 nt, Human
ccucccucucucuucugcuc

SEQ ID NO: 2554945 - RNA, 22 nt, Human
ccucccucucucuucugcucca

SEQ ID NO: 2554946 - RNA, 14 nt, Human
ccucccucugaccu

SEQ ID NO: 2554947 - RNA, 18 nt, Human
ccucccucugaccugcag

SEQ ID NO: 2554948 - RNA, 16 nt, Human
ccuccucaccucaugc

SEQ ID NO: 2554949 - RNA, 21 nt, Human
ccucccucugaggcuguagga

SEQ ID NO: 2554950 - RNA, 19 nt, Human
ccucccucugaggcuguag

SEQ ID NO: 2554951 - RNA, 14 nt, Human
ccucccucugaggc

SEQ ID NO: 2554952 - RNA, 19 nt, Human
ccucccucugaccugcagg

SEQ ID NO: 2554953 - RNA, 19 nt, Human
ccuccucaccucaugccca

SEQ ID NO: 2554954 - RNA, 17 nt, Human
ccuccucaccucaugcc

SEQ ID NO: 2554955 - RNA, 13 nt, Human
ccuccucaccucu

SEQ ID NO: 2554956 - RNA, 14 nt, Human
ccuccucaccucug

SEQ ID NO: 2554957 - RNA, 15 nt, Human
ccuccucaccucugg

SEQ ID NO: 2554958 - RNA, 11 nt, Human
ccuccucagau

SEQ ID NO: 2554959 - RNA, 16 nt, Human
ccuccucaccucugga

SEQ ID NO: 2554960 - RNA, 21 nt, Human
ccuccucaccucuggacuggc

SEQ ID NO: 2554961 - RNA, 22 nt, Human
ccuccucaccucuggacuggcu

SEQ ID NO: 2554962 - RNA, 22 nt, Human
ccuccucaccucaugcccaccc

SEQ ID NO: 2554963 - RNA, 14 nt, Human
ccuccucacucccu

SEQ ID NO: 2554964 - RNA, 19 nt, Human
ccuccucacuggccauccc

SEQ ID NO: 2554965 - RNA, 17 nt, Human
ccuccucacuggccauc

SEQ ID NO: 2554966 - RNA, 15 nt, Human
ccuccucacuggcca

SEQ ID NO: 2554967 - RNA, 14 nt, Human
ccuccucacuggcc

SEQ ID NO: 2554968 - RNA, 20 nt, Human
ccuccucacuggccaucccu

SEQ ID NO: 2554969 - RNA, 16 nt, Human
ccuccuccacucuccc

SEQ ID NO: 2554970 - RNA, 12 nt, Human
ccuccuccagcc

SEQ ID NO: 2554971 - RNA, 15 nt, Human
ccuccccucccgucu

SEQ ID NO: 2554972 - RNA, 13 nt, Human
ccuccccucccgu

SEQ ID NO: 2554973 - RNA, 23 nt, Human
ccuccccucucuugcacccgccu

SEQ ID NO: 2554974 - RNA, 15 nt, Human
ccuccccuccuccug

SEQ ID NO: 2554975 - RNA, 14 nt, Human
ccuccccuccccug

SEQ ID NO: 2554976 - RNA, 19 nt, Human
ccuccccuccccugcugca

SEQ ID NO: 2554977 - RNA, 16 nt, Human
ccuccccuccccugcu

SEQ ID NO: 2554978 - RNA, 15 nt, Human
ccuccccuccccugc

SEQ ID NO: 2554979 - RNA, 19 nt, Human
ccuccccucacagccucug

SEQ ID NO: 2554980 - RNA, 18 nt, Human
ccuccccucacagccucu

SEQ ID NO: 2554981 - RNA, 21 nt, Human
ccuccccucacagccucugac

SEQ ID NO: 2554982 - RNA, 16 nt, Human
ccuccccucacagccu

SEQ ID NO: 2554983 - RNA, 15 nt, Human
ccuccccucacagcc

SEQ ID NO: 2554984 - RNA, 13 nt, Human
ccuccccucacag

SEQ ID NO: 2554985 - RNA, 14 nt, Human
ccuccccugccacc

SEQ ID NO: 2554986 - RNA, 13 nt, Human
ccuccccugccac

SEQ ID NO: 2554987 - RNA, 22 nt, Human
ccuccccugaggcucagggaaa

SEQ ID NO: 2554988 - RNA, 14 nt, Human
ccuccccugaggcu

SEQ ID NO: 2554989 - RNA, 12 nt, Human
ccuccccugcca

SEQ ID NO: 2554990 - RNA, 17 nt, Human
ccuccccugccaccagg

SEQ ID NO: 2554991 - RNA, 13 nt, Human
ccuccccugccag

SEQ ID NO: 2554992 - RNA, 16 nt, Human
ccuccccugccagggc

SEQ ID NO: 2554993 - RNA, 18 nt, Human
ccuccccugccagggcag

SEQ ID NO: 2554994 - RNA, 18 nt, Human
ccucccgaauagcuggga

SEQ ID NO: 2554995 - RNA, 14 nt, Human
ccuccccugccauu

SEQ ID NO: 2554996 - RNA, 13 nt, Human
ccuccccugcccu

SEQ ID NO: 2554997 - RNA, 14 nt, Human
ccuccccugcccua

SEQ ID NO: 2554998 - RNA, 15 nt, Human
ccuccccugcccugg

SEQ ID NO: 2554999 - RNA, 15 nt, Human
ccuccccgcaccccc

SEQ ID NO: 2555000 - RNA, 21 nt, Human
ccuccccgcaccccccaagcu

SEQ ID NO: 2555001 - RNA, 14 nt, Human
ccuccccggcccua

SEQ ID NO: 2555002 - RNA, 22 nt, Human
ccucccccuucucccaccccug

SEQ ID NO: 2555003 - RNA, 16 nt, Human
ccuccccgcccuuuuu

SEQ ID NO: 2555004 - RNA, 23 nt, Human
ccuccccggcucgagcaguccug

SEQ ID NO: 2555005 - RNA, 21 nt, Human
ccuccccggcccuaccagcgc

SEQ ID NO: 2555006 - RNA, 13 nt, Human
ccuccccuaucca

SEQ ID NO: 2555007 - RNA, 15 nt, Human
ccuccccuauccacc

SEQ ID NO: 2555008 - RNA, 17 nt, Human
ccuccccuauccaccca

SEQ ID NO: 2555009 - RNA, 18 nt, Human
ccuccccuauccacccag

SEQ ID NO: 2555010 - RNA, 22 nt, Human
ccuccccuauccacccagccca

SEQ ID NO: 2555011 - RNA, 12 nt, Human
ccucccccuucu

SEQ ID NO: 2555012 - RNA, 15 nt, Human
ccucccccuucuccc

SEQ ID NO: 2555013 - RNA, 20 nt, Human
ccucccccugccagugccuu

SEQ ID NO: 2555014 - RNA, 18 nt, Human
ccucccccugccagugcc

SEQ ID NO: 2555015 - RNA, 19 nt, Human
ccucccccugccagugccu

SEQ ID NO: 2555016 - RNA, 16 nt, Human
ccucccccugccagga

SEQ ID NO: 2555017 - RNA, 15 nt, Human
ccucccccugccagu

SEQ ID NO: 2555018 - RNA, 17 nt, Human
ccucccccugccagugc

SEQ ID NO: 2555019 - RNA, 14 nt, Human
ccucccccugccag

SEQ ID NO: 2555020 - RNA, 13 nt, Human
ccucccccugcca

SEQ ID NO: 2555021 - RNA, 15 nt, Human
ccucccccccaugca

SEQ ID NO: 2555022 - RNA, 16 nt, Human
ccucccccccaugcac

SEQ ID NO: 2555023 - RNA, 17 nt, Human
ccucccccccaugcacu

SEQ ID NO: 2555024 - RNA, 19 nt, Human
ccucccccccaugcacugu

SEQ ID NO: 2555025 - RNA, 17 nt, Human
ccucccccgccacuccu

SEQ ID NO: 2555026 - RNA, 17 nt, Human
ccucccccucccccuuc

SEQ ID NO: 2555027 - RNA, 16 nt, Human
ccucccccgccacucc

SEQ ID NO: 2555028 - RNA, 20 nt, Human
ccuccccccacugcaggccc

SEQ ID NO: 2555029 - RNA, 16 nt, Human
ccuccccccacugcag

SEQ ID NO: 2555030 - RNA, 15 nt, Human
ccucccaacucaccc

SEQ ID NO: 2555031 - RNA, 17 nt, Human
ccuccccccacugcagg

SEQ ID NO: 2555032 - RNA, 18 nt, Human
ccuccccccacugcaggc

SEQ ID NO: 2555033 - RNA, 23 nt, Human
ccucccaaagugcugggauuaca

SEQ ID NO: 2555034 - RNA, 12 nt, Human
ccuccauccuga

SEQ ID NO: 2555035 - RNA, 13 nt, Human
ccuccauccugag

SEQ ID NO: 2555036 - RNA, 16 nt, Human
ccuccaugcugccucc

SEQ ID NO: 2555037 - RNA, 19 nt, Human
ccuccaugcugccuccaga

SEQ ID NO: 2555038 - RNA, 11 nt, Human
ccuccauggga

SEQ ID NO: 2555039 - RNA, 14 nt, Human
ccucccaacucacc

SEQ ID NO: 2555040 - RNA, 17 nt, Human
ccucccaaagugcuggg

SEQ ID NO: 2555041 - RNA, 15 nt, Human
ccuccaugugggcua

SEQ ID NO: 2555042 - RNA, 12 nt, Human
ccuccauguggg

SEQ ID NO: 2555043 - RNA, 12 nt, Human
ccuccaggugca

SEQ ID NO: 2555044 - RNA, 11 nt, Human
ccuccaggugc

SEQ ID NO: 2555045 - RNA, 18 nt, Human
ccuccagguuuuucaauu

SEQ ID NO: 2555046 - RNA, 17 nt, Human
ccuccagguuuuucaau

SEQ ID NO: 2555047 - RNA, 17 nt, Human
ccuccagggugugugcu

SEQ ID NO: 2555048 - RNA, 17 nt, Human
ccuccaggugcacaagc

SEQ ID NO: 2555049 - RNA, 21 nt, Human
ccuccagguuuuucaauuaaa

SEQ ID NO: 2555050 - RNA, 16 nt, Human
ccuccagguuuuucaa

SEQ ID NO: 2555051 - RNA, 23 nt, Human
ccuccaguccaaggaaaccacag

SEQ ID NO: 2555052 - RNA, 22 nt, Human
ccuccagguuuuucaauuaaac

SEQ ID NO: 2555053 - RNA, 20 nt, Human
ccuccagguuuuucaauuaa

SEQ ID NO: 2555054 - RNA, 19 nt, Human
ccuccagguuuuucaauua

SEQ ID NO: 2555055 - RNA, 15 nt, Human
ccuccaucccgacau

SEQ ID NO: 2555056 - RNA, 19 nt, Human
ccuccauauuuucuuuaaa

SEQ ID NO: 2555057 - RNA, 14 nt, Human
ccuccaucccgaca

SEQ ID NO: 2555058 - RNA, 15 nt, Human
ccuccagccucuguu

SEQ ID NO: 2555059 - RNA, 13 nt, Human
ccuccagaagccu

SEQ ID NO: 2555060 - RNA, 21 nt, Human
ccuccagaacucacuggggcc

SEQ ID NO: 2555061 - RNA, 22 nt, Human
ccuccagaacucacuggggccu

SEQ ID NO: 2555062 - RNA, 12 nt, Human
ccuccagaagcc

SEQ ID NO: 2555063 - RNA, 22 nt, Human
ccuccacucucccccacccccu

SEQ ID NO: 2555064 - RNA, 19 nt, Human
ccuccacucucccccaccc

SEQ ID NO: 2555065 - RNA, 13 nt, Human
ccuccacucuccu

SEQ ID NO: 2555066 - RNA, 13 nt, Human
ccuccacugucac

SEQ ID NO: 2555067 - RNA, 12 nt, Human
ccuccacuguca

SEQ ID NO: 2555068 - RNA, 15 nt, Human
ccuccagcucuuucc

SEQ ID NO: 2555069 - RNA, 16 nt, Human
ccuccagcucuuuccu

SEQ ID NO: 2555070 - RNA, 22 nt, Human
ccuccagcucuuuccuccuucc

SEQ ID NO: 2555071 - RNA, 17 nt, Human
ccuccagcucuuuccuc

SEQ ID NO: 2555072 - RNA, 19 nt, Human
ccuccagcucuuuccuccu

SEQ ID NO: 2555073 - RNA, 20 nt, Human
ccuccagcuucaggcaggcc

SEQ ID NO: 2555074 - RNA, 19 nt, Human
ccuccagcuuguggagccc

SEQ ID NO: 2555075 - RNA, 21 nt, Human
ccuccagcuucugguacucuc

SEQ ID NO: 2555076 - RNA, 12 nt, Human
ccuccagcuucu

SEQ ID NO: 2555077 - RNA, 22 nt, Human
ccuccagcuuguggagccccac

SEQ ID NO: 2555078 - RNA, 21 nt, Human
ccuccagcuuguggagcccca

SEQ ID NO: 2555079 - RNA, 22 nt, Human
ccuccaggaaugaucucuucuu

SEQ ID NO: 2555080 - RNA, 15 nt, Human
ccuccaggaaccaca

SEQ ID NO: 2555081 - RNA, 23 nt, Human
ccuccagggcuggacugaggccu

SEQ ID NO: 2555082 - RNA, 22 nt, Human
ccuccagggcuggacugaggcc

SEQ ID NO: 2555083 - RNA, 13 nt, Human
ccuccaggcaaaa

SEQ ID NO: 2555084 - RNA, 17 nt, Human
ccucaggugagaagcag

SEQ ID NO: 2555085 - RNA, 18 nt, Human
ccucaggugagaagcaga

SEQ ID NO: 2555086 - RNA, 20 nt, Human
ccucaggugagaagcagagg

SEQ ID NO: 2555087 - RNA, 21 nt, Human
ccucaguggacuuuccacccc

SEQ ID NO: 2555088 - RNA, 20 nt, Human
ccucaguggacuuuccaccc

SEQ ID NO: 2555089 - RNA, 13 nt, Human
ccucaguguauuu

SEQ ID NO: 2555090 - RNA, 23 nt, Human
ccucaguggacuuuccacccccu

SEQ ID NO: 2555091 - RNA, 11 nt, Human
ccucaguguca

SEQ ID NO: 2555092 - RNA, 12 nt, Human
ccucagugucau

SEQ ID NO: 2555093 - RNA, 15 nt, Human
ccucaguucccuugg

SEQ ID NO: 2555094 - RNA, 16 nt, Human
ccucaguucccuuggc

SEQ ID NO: 2555095 - RNA, 17 nt, Human
ccucaguucccuuggcc

SEQ ID NO: 2555096 - RNA, 18 nt, Human
ccucaguucccuuggccu

SEQ ID NO: 2555097 - RNA, 19 nt, Human
ccucaguucccuuggccuc

SEQ ID NO: 2555098 - RNA, 20 nt, Human
ccucaguucccuuggccuca

SEQ ID NO: 2555099 - RNA, 21 nt, Human
ccucaguucccuuggccucag

SEQ ID NO: 2555100 - RNA, 22 nt, Human
ccucaguucccuuggccucaga

SEQ ID NO: 2555101 - RNA, 17 nt, Human
ccuccacucucccccac

SEQ ID NO: 2555102 - RNA, 14 nt, Human
ccuccacucucccc

SEQ ID NO: 2555103 - RNA, 19 nt, Human
ccucaguuuuaucauuuuc

SEQ ID NO: 2555104 - RNA, 15 nt, Human
ccucaguuucccuau

SEQ ID NO: 2555105 - RNA, 16 nt, Human
ccuccacuccuuccug

SEQ ID NO: 2555106 - RNA, 15 nt, Human
ccuccacuccuuccu

SEQ ID NO: 2555107 - RNA, 23 nt, Human
ccucaguuuaauccuucuaguuu

SEQ ID NO: 2555108 - RNA, 23 nt, Human
ccucagugucauuuaugaaaaga

SEQ ID NO: 2555109 - RNA, 17 nt, Human
ccucuagaaauuuuuca

SEQ ID NO: 2555110 - RNA, 18 nt, Human
ccucugcacuccccugcu

SEQ ID NO: 2555111 - RNA, 23 nt, Human
ccucugcacuccccugcugggug

SEQ ID NO: 2555112 - RNA, 14 nt, Human
ccucugcagcaaua

SEQ ID NO: 2555113 - RNA, 18 nt, Human
ccucugcagcaauaaagc

SEQ ID NO: 2555114 - RNA, 16 nt, Human
ccucugcccacucccu

SEQ ID NO: 2555115 - RNA, 13 nt, Human
ccucugcccacuc

SEQ ID NO: 2555116 - RNA, 19 nt, Human
ccucugcagcaauaaagca

SEQ ID NO: 2555117 - RNA, 12 nt, Human
ccucugccaccu

SEQ ID NO: 2555118 - RNA, 13 nt, Human
ccucugccaccuc

SEQ ID NO: 2555119 - RNA, 14 nt, Human
ccucugccaccucc

SEQ ID NO: 2555120 - RNA, 15 nt, Human
ccucugccaccuccc

SEQ ID NO: 2555121 - RNA, 16 nt, Human
ccucugccaccucccc

SEQ ID NO: 2555122 - RNA, 11 nt, Human
ccucugaggcu

SEQ ID NO: 2555123 - RNA, 21 nt, Human
ccucugagggaaagcccagaa

SEQ ID NO: 2555124 - RNA, 20 nt, Human
ccucugagggaaagcccaga

SEQ ID NO: 2555125 - RNA, 17 nt, Human
ccucugaggcuguagga

SEQ ID NO: 2555126 - RNA, 18 nt, Human
ccucugaggcuggauccu

SEQ ID NO: 2555127 - RNA, 13 nt, Human
ccucugaggcuga

SEQ ID NO: 2555128 - RNA, 11 nt, Human
ccucugagccu

SEQ ID NO: 2555129 - RNA, 12 nt, Human
ccucugagccuu

SEQ ID NO: 2555130 - RNA, 17 nt, Human
ccucugagcuuugcaug

SEQ ID NO: 2555131 - RNA, 15 nt, Human
ccucugagcuuugca

SEQ ID NO: 2555132 - RNA, 14 nt, Human
ccucugagcuuugc

SEQ ID NO: 2555133 - RNA, 19 nt, Human
ccucugagccccugggacu

SEQ ID NO: 2555134 - RNA, 17 nt, Human
ccucugcacuccccugc

SEQ ID NO: 2555135 - RNA, 16 nt, Human
ccucugcacuccccug

SEQ ID NO: 2555136 - RNA, 15 nt, Human
ccucugcacuccccu

SEQ ID NO: 2555137 - RNA, 16 nt, Human
ccucugaucuccaugg

SEQ ID NO: 2555138 - RNA, 15 nt, Human
ccucugauaccucaa

SEQ ID NO: 2555139 - RNA, 18 nt, Human
ccucugauacccagagca

SEQ ID NO: 2555140 - RNA, 15 nt, Human
ccucugauacccaga

SEQ ID NO: 2555141 - RNA, 19 nt, Human
ccucugagucaccaucuua

SEQ ID NO: 2555142 - RNA, 22 nt, Human
ccucugagggaaagcccagaaa

SEQ ID NO: 2555143 - RNA, 20 nt, Human
ccucugauacccagagcauu

SEQ ID NO: 2555144 - RNA, 19 nt, Human
ccucugauacccagagcau

SEQ ID NO: 2555145 - RNA, 14 nt, Human
ccucugauaccuca

SEQ ID NO: 2555146 - RNA, 17 nt, Human
ccucugacucagggcuc

SEQ ID NO: 2555147 - RNA, 19 nt, Human
ccucugacucagggcuccu

SEQ ID NO: 2555148 - RNA, 21 nt, Human
ccucugacucagggcuccugg

SEQ ID NO: 2555149 - RNA, 22 nt, Human
ccucugacucagggcuccuggg

SEQ ID NO: 2555150 - RNA, 19 nt, Human
ccucugagaauuccaagga

SEQ ID NO: 2555151 - RNA, 22 nt, Human
ccucugacuuaagcugccucaa

SEQ ID NO: 2555152 - RNA, 12 nt, Human
ccucugacucag

SEQ ID NO: 2555153 - RNA, 16 nt, Human
ccucugacucagggcu

SEQ ID NO: 2555154 - RNA, 19 nt, Human
ccucugaccugcaggccaa

SEQ ID NO: 2555155 - RNA, 20 nt, Human
ccucugaccugcaggccaag

SEQ ID NO: 2555156 - RNA, 17 nt, Human
ccucugaccugcacugg

SEQ ID NO: 2555157 - RNA, 15 nt, Human
ccucugaccugcagg

SEQ ID NO: 2555158 - RNA, 16 nt, Human
ccucugaccugcaggc

SEQ ID NO: 2555159 - RNA, 17 nt, Human
ccucugaccugcaggcc

SEQ ID NO: 2555160 - RNA, 21 nt, Human
ccucugacacacagcucuguc

SEQ ID NO: 2555161 - RNA, 19 nt, Human
ccucugaccccuccucacu

SEQ ID NO: 2555162 - RNA, 18 nt, Human
ccucugaccccuccucac

SEQ ID NO: 2555163 - RNA, 17 nt, Human
ccucugaccccuccuca

SEQ ID NO: 2555164 - RNA, 16 nt, Human
ccucugaccccuccuc

SEQ ID NO: 2555165 - RNA, 15 nt, Human
ccucugaccccuccu

SEQ ID NO: 2555166 - RNA, 14 nt, Human
ccucugaccccucc

SEQ ID NO: 2555167 - RNA, 13 nt, Human
ccucugaccccuc

SEQ ID NO: 2555168 - RNA, 16 nt, Human
ccucugaccugcacug

SEQ ID NO: 2555169 - RNA, 14 nt, Human
ccucugaccugcac

SEQ ID NO: 2555170 - RNA, 22 nt, Human
ccucugaccccuccucacuggc

SEQ ID NO: 2555171 - RNA, 20 nt, Human
ccucugaccccuccucacug

SEQ ID NO: 2555172 - RNA, 12 nt, Human
ccucugaccuau

SEQ ID NO: 2555173 - RNA, 16 nt, Human
ccucugaaacccugga

SEQ ID NO: 2555174 - RNA, 19 nt, Human
ccucugaaacccuggacca

SEQ ID NO: 2555175 - RNA, 11 nt, Human
ccucuccugcc

SEQ ID NO: 2555176 - RNA, 13 nt, Human
ccucugacacaca

SEQ ID NO: 2555177 - RNA, 13 nt, Human
ccucuccgagcug

SEQ ID NO: 2555178 - RNA, 13 nt, Human
ccucucccuguug

SEQ ID NO: 2555179 - RNA, 18 nt, Human
ccucuccucauguucugc

SEQ ID NO: 2555180 - RNA, 20 nt, Human
ccucugacacacagcucugu

SEQ ID NO: 2555181 - RNA, 19 nt, Human
ccucugacacacagcucug

SEQ ID NO: 2555182 - RNA, 14 nt, Human
ccucugacacacag

SEQ ID NO: 2555183 - RNA, 12 nt, Human
ccucuccugccu

SEQ ID NO: 2555184 - RNA, 20 nt, Human
ccucugaaugaaccuucugg

SEQ ID NO: 2555185 - RNA, 20 nt, Human
ccucguccucccccugccag

SEQ ID NO: 2555186 - RNA, 21 nt, Human
ccucguccucccccugccagu

SEQ ID NO: 2555187 - RNA, 14 nt, Human
ccuccuucucuguc

SEQ ID NO: 2555188 - RNA, 15 nt, Human
ccucguccucccccu

SEQ ID NO: 2555189 - RNA, 16 nt, Human
ccucguccucccccug

SEQ ID NO: 2555190 - RNA, 17 nt, Human
ccucguccucccccugc

SEQ ID NO: 2555191 - RNA, 19 nt, Human
ccucguccucccccugcca

SEQ ID NO: 2555192 - RNA, 16 nt, Human
ccuccuuguccaccca

SEQ ID NO: 2555193 - RNA, 15 nt, Human
ccuccuuguccaccc

SEQ ID NO: 2555194 - RNA, 17 nt, Human
ccuccuuggugccuggc

SEQ ID NO: 2555195 - RNA, 20 nt, Human
ccuccuugggcacuuuuuaa

SEQ ID NO: 2555196 - RNA, 12 nt, Human
ccuccuugggca

SEQ ID NO: 2555197 - RNA, 15 nt, Human
ccuccuuggugccug

SEQ ID NO: 2555198 - RNA, 17 nt, Human
ccuccuugccuccugug

SEQ ID NO: 2555199 - RNA, 18 nt, Human
ccuccuugccuccugugu

SEQ ID NO: 2555200 - RNA, 19 nt, Human
ccuccuugccuccugugua

SEQ ID NO: 2555201 - RNA, 22 nt, Human
ccuccuugcucugcaggcaccu

SEQ ID NO: 2555202 - RNA, 18 nt, Human
ccuccuugcucugcaggc

SEQ ID NO: 2555203 - RNA, 15 nt, Human
ccuccuugcucugca

SEQ ID NO: 2555204 - RNA, 20 nt, Human
ccuccuugccuccuguguaa

SEQ ID NO: 2555205 - RNA, 13 nt, Human
ccucgugccaguc

SEQ ID NO: 2555206 - RNA, 12 nt, Human
ccucgugccagu

SEQ ID NO: 2555207 - RNA, 13 nt, Human
ccucguggccagc

SEQ ID NO: 2555208 - RNA, 16 nt, Human
ccucguggccagcccg

SEQ ID NO: 2555209 - RNA, 15 nt, Human
ccucguggccagccc

SEQ ID NO: 2555210 - RNA, 14 nt, Human
ccucguggccagcc

SEQ ID NO: 2555211 - RNA, 14 nt, Human
ccucgugccagucg

SEQ ID NO: 2555212 - RNA, 14 nt, Human
ccucuaagccacuc

SEQ ID NO: 2555213 - RNA, 17 nt, Human
ccucguggccagcccgg

SEQ ID NO: 2555214 - RNA, 19 nt, Human
ccucuaagccacucuucca

SEQ ID NO: 2555215 - RNA, 19 nt, Human
ccucuaagguugggcaggg

SEQ ID NO: 2555216 - RNA, 18 nt, Human
ccucuacagagcuucccu

SEQ ID NO: 2555217 - RNA, 13 nt, Human
ccuccucucugcc

SEQ ID NO: 2555218 - RNA, 15 nt, Human
ccuccucucugcccu

SEQ ID NO: 2555219 - RNA, 16 nt, Human
ccuccucucccauccc

SEQ ID NO: 2555220 - RNA, 15 nt, Human
ccuccucucccaucc

SEQ ID NO: 2555221 - RNA, 14 nt, Human
ccuccucucccauc

SEQ ID NO: 2555222 - RNA, 13 nt, Human
ccuccucucccau

SEQ ID NO: 2555223 - RNA, 22 nt, Human
ccuccuucucugucucaugugu

SEQ ID NO: 2555224 - RNA, 17 nt, Human
ccuccuucucugucuca

SEQ ID NO: 2555225 - RNA, 15 nt, Human
ccuccuucucugucu

SEQ ID NO: 2555226 - RNA, 19 nt, Human
ccuccucucccaucccccu

SEQ ID NO: 2555227 - RNA, 16 nt, Human
ccuccucucugcccua

SEQ ID NO: 2555228 - RNA, 23 nt, Human
ccuccuucucugucucaugugug

SEQ ID NO: 2555229 - RNA, 14 nt, Human
ccuccuugccuccu

SEQ ID NO: 2555230 - RNA, 13 nt, Human
ccuccuccuuccc

SEQ ID NO: 2555231 - RNA, 19 nt, Human
ccuccucccacccggcugc

SEQ ID NO: 2555232 - RNA, 21 nt, Human
ccuccuccuucccaaaggacu

SEQ ID NO: 2555233 - RNA, 19 nt, Human
ccuccucuaagguugggca

SEQ ID NO: 2555234 - RNA, 16 nt, Human
ccuccucccacccggc

SEQ ID NO: 2555235 - RNA, 21 nt, Human
ccuccuccagccgccaugcuc

SEQ ID NO: 2555236 - RNA, 20 nt, Human
ccucuccccagcaagugaga

SEQ ID NO: 2555237 - RNA, 14 nt, Human
ccucuccccagccc

SEQ ID NO: 2555238 - RNA, 16 nt, Human
ccucuccccagcccag

SEQ ID NO: 2555239 - RNA, 12 nt, Human
ccucuccccagc

SEQ ID NO: 2555240 - RNA, 22 nt, Human
ccucuccccaagacuugguguc

SEQ ID NO: 2555241 - RNA, 22 nt, Human
ccucucccgccagacuguuaga

SEQ ID NO: 2555242 - RNA, 17 nt, Human
ccucuccccagcccaga

SEQ ID NO: 2555243 - RNA, 22 nt, Human
ccucucccgucagggcccaagu

SEQ ID NO: 2555244 - RNA, 19 nt, Human
ccucucccgucagggccca

SEQ ID NO: 2555245 - RNA, 17 nt, Human
ccucucccgucagggcc

SEQ ID NO: 2555246 - RNA, 14 nt, Human
ccucuccccaagac

SEQ ID NO: 2555247 - RNA, 22 nt, Human
ccucucccucaacaagggagag

SEQ ID NO: 2555248 - RNA, 17 nt, Human
ccucucccucaacaagg

SEQ ID NO: 2555249 - RNA, 11 nt, Human
ccucucccuca

SEQ ID NO: 2555250 - RNA, 23 nt, Human
ccucucccgucagggcccaaguc

SEQ ID NO: 2555251 - RNA, 10 nt, Human
ccucucccug

SEQ ID NO: 2555252 - RNA, 22 nt, Human
ccucucccuuggauuguccccg

SEQ ID NO: 2555253 - RNA, 13 nt, Human
ccucucccuugga

SEQ ID NO: 2555254 - RNA, 13 nt, Human
ccucucccuggcc

SEQ ID NO: 2555255 - RNA, 15 nt, Human
ccucucccuggcccu

SEQ ID NO: 2555256 - RNA, 15 nt, Human
ccucucccugacccu

SEQ ID NO: 2555257 - RNA, 12 nt, Human
ccucucccugac

SEQ ID NO: 2555258 - RNA, 21 nt, Human
ccucucccugacccuguauau

SEQ ID NO: 2555259 - RNA, 17 nt, Human
ccucuccaggcacccuu

SEQ ID NO: 2555260 - RNA, 14 nt, Human
ccucuccaggcacc

SEQ ID NO: 2555261 - RNA, 13 nt, Human
ccucuccaggcac

SEQ ID NO: 2555262 - RNA, 12 nt, Human
ccucuccaggca

SEQ ID NO: 2555263 - RNA, 11 nt, Human
ccucuccaggc

SEQ ID NO: 2555264 - RNA, 14 nt, Human
ccucuccagcuaua

SEQ ID NO: 2555265 - RNA, 14 nt, Human
ccucuacugggagc

SEQ ID NO: 2555266 - RNA, 20 nt, Human
ccucuacuuaaugagauagu

SEQ ID NO: 2555267 - RNA, 20 nt, Human
ccucuacagagcuucccuga

SEQ ID NO: 2555268 - RNA, 21 nt, Human
ccucuacagagcuucccugac

SEQ ID NO: 2555269 - RNA, 24 nt, Human
ccucuacagagcuucccugacuca

SEQ ID NO: 2555270 - RNA, 17 nt, Human
ccucuacuaaaaagaag

SEQ ID NO: 2555271 - RNA, 19 nt, Human
ccucuccaucuucagcuuc

SEQ ID NO: 2555272 - RNA, 16 nt, Human
ccucuccaucuucagc

SEQ ID NO: 2555273 - RNA, 14 nt, Human
ccucuccaucuuca

SEQ ID NO: 2555274 - RNA, 22 nt, Human
ccucuccauaaccccacccuug

SEQ ID NO: 2555275 - RNA, 19 nt, Human
ccucuccauaaccccaccc

SEQ ID NO: 2555276 - RNA, 18 nt, Human
ccucuccauaaccccacc

SEQ ID NO: 2555277 - RNA, 16 nt, Human
ccucuccauaacccca

SEQ ID NO: 2555278 - RNA, 15 nt, Human
ccucuccccagcaag

SEQ ID NO: 2555279 - RNA, 22 nt, Human
ccucucccauugucccucugcc

SEQ ID NO: 2555280 - RNA, 13 nt, Human
ccucucccaggac

SEQ ID NO: 2555281 - RNA, 14 nt, Human
ccucucccaggacc

SEQ ID NO: 2555282 - RNA, 12 nt, Human
ccucucccagga

SEQ ID NO: 2555283 - RNA, 11 nt, Human
ccucucccagg

SEQ ID NO: 2555284 - RNA, 11 nt, Human
ccgguguccuu

SEQ ID NO: 2555285 - RNA, 15 nt, Human
ccggugugccugcag

SEQ ID NO: 2555286 - RNA, 16 nt, Human
ccggugugccugcagc

SEQ ID NO: 2555287 - RNA, 17 nt, Human
ccggugugccugcagcc

SEQ ID NO: 2555288 - RNA, 16 nt, Human
ccggucugcaagucag

SEQ ID NO: 2555289 - RNA, 23 nt, Human
ccggucccuugagaccucagcca

SEQ ID NO: 2555290 - RNA, 20 nt, Human
ccggucccuugagaccucag

SEQ ID NO: 2555291 - RNA, 22 nt, Human
ccggucccuugagaccucagcc

SEQ ID NO: 2555292 - RNA, 21 nt, Human
ccggucugcaagucagaggau

SEQ ID NO: 2555293 - RNA, 20 nt, Human
ccggucugcaagucagagga

SEQ ID NO: 2555294 - RNA, 19 nt, Human
ccggucugcaagucagagg

SEQ ID NO: 2555295 - RNA, 17 nt, Human
ccggucugcaagucaga

SEQ ID NO: 2555296 - RNA, 23 nt, Human
ccguggaggaggaaggcaagagg

SEQ ID NO: 2555297 - RNA, 17 nt, Human
ccguggaccuuccugcc

SEQ ID NO: 2555298 - RNA, 16 nt, Human
ccguggaccuuccugc

SEQ ID NO: 2555299 - RNA, 15 nt, Human
ccguggaccuuccug

SEQ ID NO: 2555300 - RNA, 14 nt, Human
ccguggaccuuccu

SEQ ID NO: 2555301 - RNA, 22 nt, Human
ccguggaggaggaaggcaagag

SEQ ID NO: 2555302 - RNA, 20 nt, Human
ccguggaggaggaaggcaag

SEQ ID NO: 2555303 - RNA, 16 nt, Human
ccguggaggaggaagg

SEQ ID NO: 2555304 - RNA, 23 nt, Human
ccguggagaugggaugcuugccu

SEQ ID NO: 2555305 - RNA, 23 nt, Human
ccguggauugcacguggccucuu

SEQ ID NO: 2555306 - RNA, 22 nt, Human
ccguggauugcacguggccucu

SEQ ID NO: 2555307 - RNA, 20 nt, Human
ccguggauugcacguggccu

SEQ ID NO: 2555308 - RNA, 19 nt, Human
ccguggauugcacguggcc

SEQ ID NO: 2555309 - RNA, 15 nt, Human
ccguggccccagccu

SEQ ID NO: 2555310 - RNA, 14 nt, Human
ccguggccccagcc

SEQ ID NO: 2555311 - RNA, 13 nt, Human
ccguggccccagc

SEQ ID NO: 2555312 - RNA, 15 nt, Human
ccguggcacugcaua

SEQ ID NO: 2555313 - RNA, 23 nt, Human
ccguggcaucaccuuaggcaggg

SEQ ID NO: 2555314 - RNA, 16 nt, Human
ccgggagccugaucac

SEQ ID NO: 2555315 - RNA, 23 nt, Human
ccgggagccugaucaccugcccu

SEQ ID NO: 2555316 - RNA, 12 nt, Human
ccgggacuccag

SEQ ID NO: 2555317 - RNA, 15 nt, Human
ccgggagcugcugcc

SEQ ID NO: 2555318 - RNA, 12 nt, Human
ccgggagagggg

SEQ ID NO: 2555319 - RNA, 15 nt, Human
ccggggaaaggcaag

SEQ ID NO: 2555320 - RNA, 18 nt, Human
ccggucccuugagaccuc

SEQ ID NO: 2555321 - RNA, 15 nt, Human
ccggggagcgcccgc

SEQ ID NO: 2555322 - RNA, 15 nt, Human
ccggggacccuguga

SEQ ID NO: 2555323 - RNA, 15 nt, Human
ccggggacagaggcc

SEQ ID NO: 2555324 - RNA, 22 nt, Human
ccggggaguuucuuuccugccu

SEQ ID NO: 2555325 - RNA, 15 nt, Human
ccggggaggggcgcu

SEQ ID NO: 2555326 - RNA, 23 nt, Human
ccggggaggagagagcagcuucu

SEQ ID NO: 2555327 - RNA, 18 nt, Human
ccggggcagcugccagag

SEQ ID NO: 2555328 - RNA, 19 nt, Human
ccggggcagcugccagaga

SEQ ID NO: 2555329 - RNA, 20 nt, Human
ccggggcagcugccagagaa

SEQ ID NO: 2555330 - RNA, 17 nt, Human
ccgggaagggggcuggg

SEQ ID NO: 2555331 - RNA, 22 nt, Human
ccgggaaagaagagccggagcc

SEQ ID NO: 2555332 - RNA, 22 nt, Human
ccggcaaccccaguucugcucc

SEQ ID NO: 2555333 - RNA, 21 nt, Human
ccggcaaccccaguucugcuc

SEQ ID NO: 2555334 - RNA, 23 nt, Human
ccggcaaccccaguucugcuccu

SEQ ID NO: 2555335 - RNA, 21 nt, Human
ccggaggggccuggcagccgu

SEQ ID NO: 2555336 - RNA, 16 nt, Human
ccggagccuccagcug

SEQ ID NO: 2555337 - RNA, 14 nt, Human
ccggagccuccagc

SEQ ID NO: 2555338 - RNA, 18 nt, Human
ccggaggguguuuaugua

SEQ ID NO: 2555339 - RNA, 17 nt, Human
ccggagguagagguugu

SEQ ID NO: 2555340 - RNA, 17 nt, Human
ccggaggggccuggcag

SEQ ID NO: 2555341 - RNA, 19 nt, Human
ccggagcaaacucugcugu

SEQ ID NO: 2555342 - RNA, 18 nt, Human
ccggagcaaacucugcug

SEQ ID NO: 2555343 - RNA, 17 nt, Human
ccggagcaaacucugcu

SEQ ID NO: 2555344 - RNA, 18 nt, Human
ccggagauguagcaaaac

SEQ ID NO: 2555345 - RNA, 20 nt, Human
ccggcaaccccaguucugcu

SEQ ID NO: 2555346 - RNA, 17 nt, Human
ccggcaaccccaguucu

SEQ ID NO: 2555347 - RNA, 22 nt, Human
ccggauuggcuuguguguuuca

SEQ ID NO: 2555348 - RNA, 16 nt, Human
ccggauuggcuugugu

SEQ ID NO: 2555349 - RNA, 15 nt, Human
ccggaugugcuuuuc

SEQ ID NO: 2555350 - RNA, 14 nt, Human
ccggaugugcuuuu

SEQ ID NO: 2555351 - RNA, 13 nt, Human
ccggaugugcuuu

SEQ ID NO: 2555352 - RNA, 20 nt, Human
ccggauggcggacaccuggc

SEQ ID NO: 2555353 - RNA, 15 nt, Human
ccggagugagaagcu

SEQ ID NO: 2555354 - RNA, 17 nt, Human
ccggaguccacucccag

SEQ ID NO: 2555355 - RNA, 15 nt, Human
ccggauccugggugg

SEQ ID NO: 2555356 - RNA, 23 nt, Human
ccggacuuucggaguuggggguc

SEQ ID NO: 2555357 - RNA, 16 nt, Human
ccggacuuuucugcaa

SEQ ID NO: 2555358 - RNA, 15 nt, Human
ccggacuuuucugca

SEQ ID NO: 2555359 - RNA, 20 nt, Human
ccggacuuucggaguugggg

SEQ ID NO: 2555360 - RNA, 20 nt, Human
ccggacugcaagcagggcuc

SEQ ID NO: 2555361 - RNA, 16 nt, Human
cccuuggguucugaua

SEQ ID NO: 2555362 - RNA, 14 nt, Human
ccggagaggaccgg

SEQ ID NO: 2555363 - RNA, 14 nt, Human
ccggagauguagca

SEQ ID NO: 2555364 - RNA, 17 nt, Human
ccggagauguagcaaaa

SEQ ID NO: 2555365 - RNA, 17 nt, Human
ccggagauuggacggcc

SEQ ID NO: 2555366 - RNA, 19 nt, Human
ccggagauuggacggccug

SEQ ID NO: 2555367 - RNA, 20 nt, Human
ccggagauuggacggccuga

SEQ ID NO: 2555368 - RNA, 21 nt, Human
ccggagauuggacggccugau

SEQ ID NO: 2555369 - RNA, 13 nt, Human
cccuuccuaauuc

SEQ ID NO: 2555370 - RNA, 14 nt, Human
cccuuccuaauucc

SEQ ID NO: 2555371 - RNA, 19 nt, Human
cccuuccuaauuccacagc

SEQ ID NO: 2555372 - RNA, 20 nt, Human
cccuuccuaauuccacagcu

SEQ ID NO: 2555373 - RNA, 18 nt, Human
cccuucccaucucuuccu

SEQ ID NO: 2555374 - RNA, 21 nt, Human
cccuucccaugacccaggcug

SEQ ID NO: 2555375 - RNA, 12 nt, Human
cccuuccccacu

SEQ ID NO: 2555376 - RNA, 11 nt, Human
cccuuccccau

SEQ ID NO: 2555377 - RNA, 14 nt, Human
cccuuccccauggg

SEQ ID NO: 2555378 - RNA, 21 nt, Human
cccuuccccacugccugccca

SEQ ID NO: 2555379 - RNA, 15 nt, Human
cccuuccccauggga

SEQ ID NO: 2555380 - RNA, 19 nt, Human
cccuucccuugagcccucu

SEQ ID NO: 2555381 - RNA, 14 nt, Human
cccuucccacagga

SEQ ID NO: 2555382 - RNA, 16 nt, Human
cccuucccacuggagg

SEQ ID NO: 2555383 - RNA, 18 nt, Human
cccuucaucuccagggag

SEQ ID NO: 2555384 - RNA, 23 nt, Human
cccuucccacaggacauuucucu

SEQ ID NO: 2555385 - RNA, 13 nt, Human
cccuucccaccuc

SEQ ID NO: 2555386 - RNA, 12 nt, Human
cccuucccaccu

SEQ ID NO: 2555387 - RNA, 16 nt, Human
cccuucaugcauggaa

SEQ ID NO: 2555388 - RNA, 11 nt, Human
cccuucauuug

SEQ ID NO: 2555389 - RNA, 22 nt, Human
cccuguucacucuacuuagcau

SEQ ID NO: 2555390 - RNA, 14 nt, Human
cccuguucacucua

SEQ ID NO: 2555391 - RNA, 19 nt, Human
cccuguucagcuacuccca

SEQ ID NO: 2555392 - RNA, 17 nt, Human
cccuguucagcuacucc

SEQ ID NO: 2555393 - RNA, 23 nt, Human
cccuguguugucucuagagcagg

SEQ ID NO: 2555394 - RNA, 17 nt, Human
cccuucaguacccucuc

SEQ ID NO: 2555395 - RNA, 23 nt, Human
cccuucacuucugaccacacuuc

SEQ ID NO: 2555396 - RNA, 16 nt, Human
cccuucaucuggaacc

SEQ ID NO: 2555397 - RNA, 14 nt, Human
cccuucaucuggaa

SEQ ID NO: 2555398 - RNA, 15 nt, Human
cccuucaucuccagg

SEQ ID NO: 2555399 - RNA, 17 nt, Human
cccuucagugcccacca

SEQ ID NO: 2555400 - RNA, 20 nt, Human
cccuucaguacccucucagc

SEQ ID NO: 2555401 - RNA, 19 nt, Human
cccuucaguacccucucag

SEQ ID NO: 2555402 - RNA, 21 nt, Human
cccuucaguacccucucagcu

SEQ ID NO: 2555403 - RNA, 13 nt, Human
cccuucagugccc

SEQ ID NO: 2555404 - RNA, 22 nt, Human
cccuucacuucugaccacacuu

SEQ ID NO: 2555405 - RNA, 17 nt, Human
cccuguguugucucuag

SEQ ID NO: 2555406 - RNA, 16 nt, Human
cccuguguugucucua

SEQ ID NO: 2555407 - RNA, 15 nt, Human
cccuguguugucucu

SEQ ID NO: 2555408 - RNA, 13 nt, Human
cccuguguugucu

SEQ ID NO: 2555409 - RNA, 21 nt, Human
cccuguguugucucuagagca

SEQ ID NO: 2555410 - RNA, 18 nt, Human
cccuguguugucucuaga

SEQ ID NO: 2555411 - RNA, 13 nt, Human
cccuguucacucu

SEQ ID NO: 2555412 - RNA, 23 nt, Human
cccuggugggccaacaaagaaca

SEQ ID NO: 2555413 - RNA, 12 nt, Human
cccugguguuuc

SEQ ID NO: 2555414 - RNA, 16 nt, Human
cccuggugguugcugu

SEQ ID NO: 2555415 - RNA, 13 nt, Human
cccuggugguuca

SEQ ID NO: 2555416 - RNA, 14 nt, Human
cccugguucucauc

SEQ ID NO: 2555417 - RNA, 19 nt, Human
cccugguuauauucucacg

SEQ ID NO: 2555418 - RNA, 21 nt, Human
cccugguguuucuagcacugg

SEQ ID NO: 2555419 - RNA, 20 nt, Human
cccugguguuucuagcacug

SEQ ID NO: 2555420 - RNA, 22 nt, Human
cccugguguuucuagcacuggc

SEQ ID NO: 2555421 - RNA, 18 nt, Human
cccugguuauauucucac

SEQ ID NO: 2555422 - RNA, 15 nt, Human
cccuugacaccugcu

SEQ ID NO: 2555423 - RNA, 16 nt, Human
cccuuggacuugagga

SEQ ID NO: 2555424 - RNA, 13 nt, Human
cccuuggaggcca

SEQ ID NO: 2555425 - RNA, 15 nt, Human
cccuuggaggccagc

SEQ ID NO: 2555426 - RNA, 17 nt, Human
cccuuggauuguccccg

SEQ ID NO: 2555427 - RNA, 17 nt, Human
cccuuggaggccagcca

SEQ ID NO: 2555428 - RNA, 18 nt, Human
cccuuggaggccagccag

SEQ ID NO: 2555429 - RNA, 17 nt, Human
cccuuggaggcugucuu

SEQ ID NO: 2555430 - RNA, 12 nt, Human
cccuuggccuca

SEQ ID NO: 2555431 - RNA, 13 nt, Human
cccuuggccucag

SEQ ID NO: 2555432 - RNA, 14 nt, Human
cccuucuuuccucu

SEQ ID NO: 2555433 - RNA, 13 nt, Human
cccuucuuuccuc

SEQ ID NO: 2555434 - RNA, 19 nt, Human
cccuucuuuuucuucuuuu

SEQ ID NO: 2555435 - RNA, 15 nt, Human
cccuugacaccgggg

SEQ ID NO: 2555436 - RNA, 17 nt, Human
cccuugaaauuuuaaac

SEQ ID NO: 2555437 - RNA, 21 nt, Human
cccuuccuaauuccacagcug

SEQ ID NO: 2555438 - RNA, 11 nt, Human
cccuucuuuuu

SEQ ID NO: 2555439 - RNA, 23 nt, Human
cccuugguuaggcauugugggaa

SEQ ID NO: 2555440 - RNA, 22 nt, Human
cccuugguuaggcauuguggga

SEQ ID NO: 2555441 - RNA, 17 nt, Human
cccuugguggcaagagc

SEQ ID NO: 2555442 - RNA, 11 nt, Human
cccuuggccag

SEQ ID NO: 2555443 - RNA, 14 nt, Human
cccuuggccucaga

SEQ ID NO: 2555444 - RNA, 12 nt, Human
cccuuggccugu

SEQ ID NO: 2555445 - RNA, 12 nt, Human
cccuugucugag

SEQ ID NO: 2555446 - RNA, 15 nt, Human
cccuugucccacuca

SEQ ID NO: 2555447 - RNA, 22 nt, Human
cccuuguggucccaccccacac

SEQ ID NO: 2555448 - RNA, 14 nt, Human
cccuugucugagau

SEQ ID NO: 2555449 - RNA, 13 nt, Human
cccuugucugaga

SEQ ID NO: 2555450 - RNA, 12 nt, Human
cccuugugugug

SEQ ID NO: 2555451 - RNA, 13 nt, Human
cccuuguucucua

SEQ ID NO: 2555452 - RNA, 23 nt, Human
cccuugucugagaugcugguaau

SEQ ID NO: 2555453 - RNA, 21 nt, Human
cccuuuagccaaacccuuguc

SEQ ID NO: 2555454 - RNA, 20 nt, Human
cccuuucagaugucuucugc

SEQ ID NO: 2555455 - RNA, 19 nt, Human
cccuuucagaugucuucug

SEQ ID NO: 2555456 - RNA, 17 nt, Human
cccuuucagaugucuuc

SEQ ID NO: 2555457 - RNA, 12 nt, Human
ccguuauuaaaa

SEQ ID NO: 2555458 - RNA, 22 nt, Human
ccuacaguuggaaauccaucca

SEQ ID NO: 2555459 - RNA, 19 nt, Human
ccuacaugaaacagaaaca

SEQ ID NO: 2555460 - RNA, 17 nt, Human
ccuacaugcuuugugaa

SEQ ID NO: 2555461 - RNA, 22 nt, Human
ccuacauguauuuguuugcaua

SEQ ID NO: 2555462 - RNA, 18 nt, Human
ccuacaugcuuugugaac

SEQ ID NO: 2555463 - RNA, 18 nt, Human
ccuaccaauagauucccc

SEQ ID NO: 2555464 - RNA, 16 nt, Human
ccuacccacaccucug

SEQ ID NO: 2555465 - RNA, 17 nt, Human
ccuaccaauagauuccc

SEQ ID NO: 2555466 - RNA, 13 nt, Human
ccuacccacccuc

SEQ ID NO: 2555467 - RNA, 11 nt, Human
ccuaccccaca

SEQ ID NO: 2555468 - RNA, 19 nt, Human
ccuaccccaauuccuugua

SEQ ID NO: 2555469 - RNA, 19 nt, Human
ccuacuguaauuugugaua

SEQ ID NO: 2555470 - RNA, 20 nt, Human
ccuacccacaccucugccag

SEQ ID NO: 2555471 - RNA, 19 nt, Human
ccuacccacaccucugcca

SEQ ID NO: 2555472 - RNA, 18 nt, Human
ccuacccacaccucugcc

SEQ ID NO: 2555473 - RNA, 17 nt, Human
ccuacccacaccucugc

SEQ ID NO: 2555474 - RNA, 18 nt, Human
ccuaccccaauuccuugu

SEQ ID NO: 2555475 - RNA, 17 nt, Human
ccuaccccaauuccuug

SEQ ID NO: 2555476 - RNA, 14 nt, Human
ccuacccauccccg

SEQ ID NO: 2555477 - RNA, 19 nt, Human
ccuacccauccccgcagug

SEQ ID NO: 2555478 - RNA, 18 nt, Human
ccuacccacccuccuuuc

SEQ ID NO: 2555479 - RNA, 16 nt, Human
ccuacuuccccuuccu

SEQ ID NO: 2555480 - RNA, 13 nt, Human
ccuacuuccccuu

SEQ ID NO: 2555481 - RNA, 21 nt, Human
ccuagaaauuccccacccuga

SEQ ID NO: 2555482 - RNA, 15 nt, Human
ccuagaaauacaugg

SEQ ID NO: 2555483 - RNA, 22 nt, Human
ccuagaaacguuuggaacaauc

SEQ ID NO: 2555484 - RNA, 22 nt, Human
ccuagguauaauucacauugua

SEQ ID NO: 2555485 - RNA, 13 nt, Human
ccuaggugacaga

SEQ ID NO: 2555486 - RNA, 22 nt, Human
ccuagaagggcuagaaccugga

SEQ ID NO: 2555487 - RNA, 13 nt, Human
ccuagaagggcua

SEQ ID NO: 2555488 - RNA, 21 nt, Human
ccuagaagagugugaaaagga

SEQ ID NO: 2555489 - RNA, 23 nt, Human
ccuagaaguuacugaaugcacca

SEQ ID NO: 2555490 - RNA, 19 nt, Human
ccuagaaguuacugaaugc

SEQ ID NO: 2555491 - RNA, 19 nt, Human
ccuagacuguaaaccucuc

SEQ ID NO: 2555492 - RNA, 16 nt, Human
ccuagacccuccuccu

SEQ ID NO: 2555493 - RNA, 14 nt, Human
ccuacagccccuuu

SEQ ID NO: 2555494 - RNA, 16 nt, Human
ccuacagauagucaaa

SEQ ID NO: 2555495 - RNA, 17 nt, Human
ccuacagcuuugauccc

SEQ ID NO: 2555496 - RNA, 20 nt, Human
ccuacagcuuugaucccuga

SEQ ID NO: 2555497 - RNA, 21 nt, Human
ccuacagcuuugaucccugac

SEQ ID NO: 2555498 - RNA, 22 nt, Human
ccuacaguugaaaaacagcuga

SEQ ID NO: 2555499 - RNA, 19 nt, Human
ccuacagcuugaccgugag

SEQ ID NO: 2555500 - RNA, 15 nt, Human
ccuacagcccaccug

SEQ ID NO: 2555501 - RNA, 18 nt, Human
ccuaaauggccucaugug

SEQ ID NO: 2555502 - RNA, 14 nt, Human
ccuaaauggccuca

SEQ ID NO: 2555503 - RNA, 13 nt, Human
ccuaacaccagcg

SEQ ID NO: 2555504 - RNA, 18 nt, Human
ccuaacacagcaugugua

SEQ ID NO: 2555505 - RNA, 23 nt, Human
ccuacagaggucucugccggcuc

SEQ ID NO: 2555506 - RNA, 17 nt, Human
ccuacagaggucucugc

SEQ ID NO: 2555507 - RNA, 15 nt, Human
ccuacagaggucucu

SEQ ID NO: 2555508 - RNA, 17 nt, Human
ccguggccccagccugg

SEQ ID NO: 2555509 - RNA, 16 nt, Human
ccguggccccagccug

SEQ ID NO: 2555510 - RNA, 21 nt, Human
ccguguguucuccgucccugc

SEQ ID NO: 2555511 - RNA, 13 nt, Human
ccguuacucucca

SEQ ID NO: 2555512 - RNA, 14 nt, Human
ccguuacucuccaa

SEQ ID NO: 2555513 - RNA, 17 nt, Human
ccguuacucuccaaccu

SEQ ID NO: 2555514 - RNA, 17 nt, Human
ccguuagcuccuguggc

SEQ ID NO: 2555515 - RNA, 15 nt, Human
ccguuagcuccugug

SEQ ID NO: 2555516 - RNA, 14 nt, Human
ccguuagcuccugu

SEQ ID NO: 2555517 - RNA, 13 nt, Human
ccguuagcuccug

SEQ ID NO: 2555518 - RNA, 16 nt, Human
ccuaaaauucagugga

SEQ ID NO: 2555519 - RNA, 13 nt, Human
ccuaaacauauga

SEQ ID NO: 2555520 - RNA, 18 nt, Human
ccguuagcuccuguggcc

SEQ ID NO: 2555521 - RNA, 23 nt, Human
ccuaaacagauauaaauggcugg

SEQ ID NO: 2555522 - RNA, 22 nt, Human
ccuaaaauuugcccucccaucc

SEQ ID NO: 2555523 - RNA, 14 nt, Human
ccuaaaauuugccc

SEQ ID NO: 2555524 - RNA, 22 nt, Human
ccguuacucuccaaccuggaca

SEQ ID NO: 2555525 - RNA, 16 nt, Human
ccuaaaccaaaaacug

SEQ ID NO: 2555526 - RNA, 22 nt, Human
ccucaggugagaagcagaggaa

SEQ ID NO: 2555527 - RNA, 21 nt, Human
ccuagucucuaucauuaaagu

SEQ ID NO: 2555528 - RNA, 15 nt, Human
ccuagucucuaucau

SEQ ID NO: 2555529 - RNA, 18 nt, Human
ccuagugaaggcuucucu

SEQ ID NO: 2555530 - RNA, 19 nt, Human
ccuagugaaggcuucucuc

SEQ ID NO: 2555531 - RNA, 21 nt, Human
ccuagugaaggcuucucucug

SEQ ID NO: 2555532 - RNA, 22 nt, Human
ccuagugaaggcuucucucugu

SEQ ID NO: 2555533 - RNA, 18 nt, Human
ccuagugacccggaggcc

SEQ ID NO: 2555534 - RNA, 16 nt, Human
ccuagucucuaucauu

SEQ ID NO: 2555535 - RNA, 23 nt, Human
ccuagugaaggcuucucucugug

SEQ ID NO: 2555536 - RNA, 14 nt, Human
ccuagucucuauca

SEQ ID NO: 2555537 - RNA, 15 nt, Human
ccuaggugacagagu

SEQ ID NO: 2555538 - RNA, 19 nt, Human
ccuauccugguuuuuguag

SEQ ID NO: 2555539 - RNA, 18 nt, Human
ccuaucuaacccucccau

SEQ ID NO: 2555540 - RNA, 18 nt, Human
ccuauccacccagcccau

SEQ ID NO: 2555541 - RNA, 21 nt, Human
ccuauccacccagcccauucu

SEQ ID NO: 2555542 - RNA, 21 nt, Human
ccuaguggcuguccagugccc

SEQ ID NO: 2555543 - RNA, 19 nt, Human
ccuaguggcuguccagugc

SEQ ID NO: 2555544 - RNA, 18 nt, Human
ccuaguggcuguccagug

SEQ ID NO: 2555545 - RNA, 17 nt, Human
ccuaguggcuguccagu

SEQ ID NO: 2555546 - RNA, 16 nt, Human
ccuaguggcuguccag

SEQ ID NO: 2555547 - RNA, 15 nt, Human
ccuaguggcugucca

SEQ ID NO: 2555548 - RNA, 20 nt, Human
ccuagugacccggaggccac

SEQ ID NO: 2555549 - RNA, 19 nt, Human
ccuagugacccggaggcca

SEQ ID NO: 2555550 - RNA, 23 nt, Human
ccuaguggcuguccagugcccau

SEQ ID NO: 2555551 - RNA, 17 nt, Human
ccuaguggggucucccu

SEQ ID NO: 2555552 - RNA, 18 nt, Human
ccuaguggggucucccuc

SEQ ID NO: 2555553 - RNA, 19 nt, Human
ccuaguggggucucccucu

SEQ ID NO: 2555554 - RNA, 20 nt, Human
ccuaguggggucucccucuc

SEQ ID NO: 2555555 - RNA, 16 nt, Human
ccuauccacccagccc

SEQ ID NO: 2555556 - RNA, 17 nt, Human
ccuauccacccagccca

SEQ ID NO: 2555557 - RNA, 16 nt, Human
ccuaucucgugggaga

SEQ ID NO: 2555558 - RNA, 18 nt, Human
ccuaucucgugggagagc

SEQ ID NO: 2555559 - RNA, 17 nt, Human
ccuaucucgugggagag

SEQ ID NO: 2555560 - RNA, 20 nt, Human
ccuaucucgugggagagcca

SEQ ID NO: 2555561 - RNA, 22 nt, Human
ccuaucuguuuacaguguuccg

SEQ ID NO: 2555562 - RNA, 22 nt, Human
ccuaugugauuuuaacucuguc

SEQ ID NO: 2555563 - RNA, 23 nt, Human
ccuaugugauuuuaacucugucu

SEQ ID NO: 2555564 - RNA, 11 nt, Human
ccuauguguaa

SEQ ID NO: 2555565 - RNA, 22 nt, Human
ccuauguuuuuguucaaagcca

SEQ ID NO: 2555566 - RNA, 16 nt, Human
ccuauuagagaagaga

SEQ ID NO: 2555567 - RNA, 21 nt, Human
ccuauucaguucccagaauca

SEQ ID NO: 2555568 - RNA, 15 nt, Human
ccuauucucaccagg

SEQ ID NO: 2555569 - RNA, 13 nt, Human
ccuauucucacca

SEQ ID NO: 2555570 - RNA, 11 nt, Human
ccuauucucac

SEQ ID NO: 2555571 - RNA, 22 nt, Human
ccuauucuauugcaguuauaga

SEQ ID NO: 2555572 - RNA, 15 nt, Human
ccuauuccuccuggg

SEQ ID NO: 2555573 - RNA, 22 nt, Human
ccuauucccacaccuccacagu

SEQ ID NO: 2555574 - RNA, 21 nt, Human
ccuauucccacaccuccacag

SEQ ID NO: 2555575 - RNA, 14 nt, Human
ccuauucccacacc

SEQ ID NO: 2555576 - RNA, 17 nt, Human
ccuauuagagaagagau

SEQ ID NO: 2555577 - RNA, 14 nt, Human
ccuauccacccagc

SEQ ID NO: 2555578 - RNA, 16 nt, Human
ccucacagccucugac

SEQ ID NO: 2555579 - RNA, 15 nt, Human
ccucacagccucuga

SEQ ID NO: 2555580 - RNA, 14 nt, Human
ccucacagccucug

SEQ ID NO: 2555581 - RNA, 13 nt, Human
ccucacagccucu

SEQ ID NO: 2555582 - RNA, 12 nt, Human
ccucacagccuc

SEQ ID NO: 2555583 - RNA, 19 nt, Human
ccucacagcacagagaaga

SEQ ID NO: 2555584 - RNA, 15 nt, Human
ccucacagcacagag

SEQ ID NO: 2555585 - RNA, 23 nt, Human
ccucacaguccuuaccagcagag

SEQ ID NO: 2555586 - RNA, 21 nt, Human
ccucacagccucugaccccuc

SEQ ID NO: 2555587 - RNA, 20 nt, Human
ccucacagccucugaccccu

SEQ ID NO: 2555588 - RNA, 19 nt, Human
ccucacagccucugacccc

SEQ ID NO: 2555589 - RNA, 18 nt, Human
ccucacagccucugaccc

SEQ ID NO: 2555590 - RNA, 23 nt, Human
ccucacagccucugaccccuccu

SEQ ID NO: 2555591 - RNA, 22 nt, Human
ccucacagccucugaccccucc

SEQ ID NO: 2555592 - RNA, 24 nt, Human
ccucacaguccuuaccagcagagc

SEQ ID NO: 2555593 - RNA, 15 nt, Human
ccuauugugauuuga

SEQ ID NO: 2555594 - RNA, 14 nt, Human
ccuauugugauuug

SEQ ID NO: 2555595 - RNA, 13 nt, Human
ccuauugugauuu

SEQ ID NO: 2555596 - RNA, 12 nt, Human
ccuauugugauu

SEQ ID NO: 2555597 - RNA, 15 nt, Human
ccuauugucauuaaa

SEQ ID NO: 2555598 - RNA, 13 nt, Human
ccuauugucauua

SEQ ID NO: 2555599 - RNA, 22 nt, Human
ccuauugcaaagguuccaacug

SEQ ID NO: 2555600 - RNA, 15 nt, Human
ccuauucucgggcug

SEQ ID NO: 2555601 - RNA, 19 nt, Human
ccuauucucaccaggaagg

SEQ ID NO: 2555602 - RNA, 16 nt, Human
ccuauucucaccagga

SEQ ID NO: 2555603 - RNA, 21 nt, Human
ccuauugugauuugacuguuu

SEQ ID NO: 2555604 - RNA, 18 nt, Human
ccuauugugauuugacug

SEQ ID NO: 2555605 - RNA, 17 nt, Human
ccuauugugauuugacu

SEQ ID NO: 2555606 - RNA, 14 nt, Human
ccucacacucaccc

SEQ ID NO: 2555607 - RNA, 13 nt, Human
ccucacacuggga

SEQ ID NO: 2555608 - RNA, 15 nt, Human
ccucacacugggacu

SEQ ID NO: 2555609 - RNA, 12 nt, Human
ccucacacuggg

SEQ ID NO: 2555610 - RNA, 11 nt, Human
ccucacacagc

SEQ ID NO: 2555611 - RNA, 16 nt, Human
ccucagagccaccccu

SEQ ID NO: 2555612 - RNA, 13 nt, Human
ccucagaguccag

SEQ ID NO: 2555613 - RNA, 15 nt, Human
ccucagaguccaggc

SEQ ID NO: 2555614 - RNA, 16 nt, Human
ccucagaguccaggcc

SEQ ID NO: 2555615 - RNA, 17 nt, Human
ccucagaguccaggccc

SEQ ID NO: 2555616 - RNA, 18 nt, Human
ccucagaguccaggcccc

SEQ ID NO: 2555617 - RNA, 16 nt, Human
ccucacuguugaauuu

SEQ ID NO: 2555618 - RNA, 14 nt, Human
ccucacuugaaugu

SEQ ID NO: 2555619 - RNA, 21 nt, Human
ccucacuuccauacagcucua

SEQ ID NO: 2555620 - RNA, 19 nt, Human
ccucacuuccauacagcuc

SEQ ID NO: 2555621 - RNA, 17 nt, Human
ccucagacuuaccagga

SEQ ID NO: 2555622 - RNA, 22 nt, Human
ccucagacuuaccaggaagcag

SEQ ID NO: 2555623 - RNA, 19 nt, Human
ccucagacuuaccaggaag

SEQ ID NO: 2555624 - RNA, 17 nt, Human
ccucacuggccaucccu

SEQ ID NO: 2555625 - RNA, 15 nt, Human
ccucacuggccaucc

SEQ ID NO: 2555626 - RNA, 12 nt, Human
ccucacuggcca

SEQ ID NO: 2555627 - RNA, 14 nt, Human
ccucacuggaugaa

SEQ ID NO: 2555628 - RNA, 21 nt, Human
ccucacugcucccugaagcca

SEQ ID NO: 2555629 - RNA, 19 nt, Human
ccucacugcucccugaagc

SEQ ID NO: 2555630 - RNA, 17 nt, Human
ccucacugcucccugaa

SEQ ID NO: 2555631 - RNA, 16 nt, Human
ccucacugcucccuga

SEQ ID NO: 2555632 - RNA, 17 nt, Human
ccucacugaaugccuca

SEQ ID NO: 2555633 - RNA, 20 nt, Human
ccucacugaaaacaucugga

SEQ ID NO: 2555634 - RNA, 18 nt, Human
ccucacugaaaacaucug

SEQ ID NO: 2555635 - RNA, 17 nt, Human
ccucacucuugccaacc

SEQ ID NO: 2555636 - RNA, 16 nt, Human
ccucacucuugccaac

SEQ ID NO: 2555637 - RNA, 22 nt, Human
ccucacuggccaucccucgugg

SEQ ID NO: 2555638 - RNA, 18 nt, Human
ccucacuggccaucccuc

SEQ ID NO: 2555639 - RNA, 19 nt, Human
ccucacugggguccugggg

SEQ ID NO: 2555640 - RNA, 20 nt, Human
ccucacugggguccuggggc

SEQ ID NO: 2555641 - RNA, 23 nt, Human
ccucacugggguccuggggccuc

SEQ ID NO: 2555642 - RNA, 12 nt, Human
ccucacugggug

SEQ ID NO: 2555643 - RNA, 13 nt, Human
ccucacugggugg

SEQ ID NO: 2555644 - RNA, 14 nt, Human
ccucacuggguggg

SEQ ID NO: 2555645 - RNA, 21 nt, Human
ccucacuggguggggugagga

SEQ ID NO: 2555646 - RNA, 22 nt, Human
ccucacucccuucuaccugcca

SEQ ID NO: 2555647 - RNA, 21 nt, Human
ccucacucccuucuaccugcc

SEQ ID NO: 2555648 - RNA, 20 nt, Human
ccucacucccuucuaccugc

SEQ ID NO: 2555649 - RNA, 19 nt, Human
ccucacucccuucuaccug

SEQ ID NO: 2555650 - RNA, 13 nt, Human
ccucacuccuguu

SEQ ID NO: 2555651 - RNA, 15 nt, Human
ccucacucuugccaa

SEQ ID NO: 2555652 - RNA, 17 nt, Human
ccucacucuggccucag

SEQ ID NO: 2555653 - RNA, 12 nt, Human
ccucacuccugu

SEQ ID NO: 2555654 - RNA, 22 nt, Human
ccucaccucaugcccacccccu

SEQ ID NO: 2555655 - RNA, 19 nt, Human
ccucaccucaugcccaccc

SEQ ID NO: 2555656 - RNA, 17 nt, Human
ccucaccucaugcccac

SEQ ID NO: 2555657 - RNA, 16 nt, Human
ccucaccucaugccca

SEQ ID NO: 2555658 - RNA, 15 nt, Human
ccucaccucaugccc

SEQ ID NO: 2555659 - RNA, 14 nt, Human
ccucaccucaugcc

SEQ ID NO: 2555660 - RNA, 12 nt, Human
ccucaccucaug

SEQ ID NO: 2555661 - RNA, 17 nt, Human
ccucacuauucaaguau

SEQ ID NO: 2555662 - RNA, 23 nt, Human
ccucaccucaugcccacccccug

SEQ ID NO: 2555663 - RNA, 13 nt, Human
ccucaccuccucu

SEQ ID NO: 2555664 - RNA, 14 nt, Human
ccucacucccuucu

SEQ ID NO: 2555665 - RNA, 20 nt, Human
ccucacucccuucccauaag

SEQ ID NO: 2555666 - RNA, 22 nt, Human
ccucacccugccuuaucuugca

SEQ ID NO: 2555667 - RNA, 15 nt, Human
ccucacccugccuua

SEQ ID NO: 2555668 - RNA, 11 nt, Human
ccucacccugc

SEQ ID NO: 2555669 - RNA, 23 nt, Human
ccucacccugagccccuuccuug

SEQ ID NO: 2555670 - RNA, 14 nt, Human
ccucacccugccuu

SEQ ID NO: 2555671 - RNA, 18 nt, Human
ccucaccgagugggggca

SEQ ID NO: 2555672 - RNA, 14 nt, Human
ccucacccuggggc

SEQ ID NO: 2555673 - RNA, 22 nt, Human
ccucaccaggggcaggcacagc

SEQ ID NO: 2555674 - RNA, 20 nt, Human
ccucaccaggggcaggcaca

SEQ ID NO: 2555675 - RNA, 23 nt, Human
ccucaccaggggcaggcacagca

SEQ ID NO: 2555676 - RNA, 21 nt, Human
ccucacccgaggcugcccacu

SEQ ID NO: 2555677 - RNA, 21 nt, Human
ccucacccugagccccuuccu

SEQ ID NO: 2555678 - RNA, 18 nt, Human
ccucacccugagccccuu

SEQ ID NO: 2555679 - RNA, 15 nt, Human
ccucacccugagccc

SEQ ID NO: 2555680 - RNA, 19 nt, Human
ccucaccaggggcaggcac

SEQ ID NO: 2555681 - RNA, 14 nt, Human
ccucaccaggggca

SEQ ID NO: 2555682 - RNA, 13 nt, Human
ccucaccaggggc

SEQ ID NO: 2555683 - RNA, 16 nt, Human
ccucacaucuuucaca

SEQ ID NO: 2555684 - RNA, 17 nt, Human
ccucacagcuggccguc

SEQ ID NO: 2555685 - RNA, 15 nt, Human
ccucacaucuuucac

SEQ ID NO: 2555686 - RNA, 22 nt, Human
ccucagggucccugguggcagc

SEQ ID NO: 2555687 - RNA, 23 nt, Human
ccucagggaucuugcauucccag

SEQ ID NO: 2555688 - RNA, 20 nt, Human
ccucagggucccugguggca

SEQ ID NO: 2555689 - RNA, 17 nt, Human
ccucagggucccuggug

SEQ ID NO: 2555690 - RNA, 16 nt, Human
ccucagggucccuggu

SEQ ID NO: 2555691 - RNA, 24 nt, Human
ccucagggacagagacaccugcac

SEQ ID NO: 2555692 - RNA, 22 nt, Human
ccucagggacagagacaccugc

SEQ ID NO: 2555693 - RNA, 23 nt, Human
ccucagggacagagacaccugca

SEQ ID NO: 2555694 - RNA, 16 nt, Human
ccucaggcuuccuugg

SEQ ID NO: 2555695 - RNA, 17 nt, Human
ccucaggcuuccuuggc

SEQ ID NO: 2555696 - RNA, 18 nt, Human
ccucaggcugcuggagga

SEQ ID NO: 2555697 - RNA, 11 nt, Human
ccucagggaca

SEQ ID NO: 2555698 - RNA, 20 nt, Human
ccucagggacagagacaccu

SEQ ID NO: 2555699 - RNA, 21 nt, Human
ccucagggacagagacaccug

SEQ ID NO: 2555700 - RNA, 14 nt, Human
ccucaggcugcugg

SEQ ID NO: 2555701 - RNA, 15 nt, Human
ccucaggcugcugga

SEQ ID NO: 2555702 - RNA, 16 nt, Human
ccucaggcugcuggag

SEQ ID NO: 2555703 - RNA, 17 nt, Human
ccucaggcugcuggagg

SEQ ID NO: 2555704 - RNA, 19 nt, Human
ccucagcccgccaagguag

SEQ ID NO: 2555705 - RNA, 12 nt, Human
ccucaggcugcu

SEQ ID NO: 2555706 - RNA, 18 nt, Human
ccucagcccugacccugu

SEQ ID NO: 2555707 - RNA, 23 nt, Human
ccucaggccugggggcugggcag

SEQ ID NO: 2555708 - RNA, 17 nt, Human
ccucagcccugacccug

SEQ ID NO: 2555709 - RNA, 16 nt, Human
ccucagcccugacccu

SEQ ID NO: 2555710 - RNA, 18 nt, Human
ccucagcaccccuuccau

SEQ ID NO: 2555711 - RNA, 17 nt, Human
ccucagcaccccuucca

SEQ ID NO: 2555712 - RNA, 16 nt, Human
ccucagcaccccuucc

SEQ ID NO: 2555713 - RNA, 15 nt, Human
ccucagcaccccuuc

SEQ ID NO: 2555714 - RNA, 17 nt, Human
ccucagccagagaagcu

SEQ ID NO: 2555715 - RNA, 22 nt, Human
ccucagcaccccuuccaugugg

SEQ ID NO: 2555716 - RNA, 20 nt, Human
ccucagcaccccuuccaugu

SEQ ID NO: 2555717 - RNA, 16 nt, Human
ccucagccaugaggag

SEQ ID NO: 2555718 - RNA, 16 nt, Human
ccucagccauucacug

SEQ ID NO: 2555719 - RNA, 21 nt, Human
ccucagccaugaggaguugcu

SEQ ID NO: 2555720 - RNA, 23 nt, Human
ccucagccauucacugcccccag

SEQ ID NO: 2555721 - RNA, 13 nt, Human
ccucagccccucu

SEQ ID NO: 2555722 - RNA, 14 nt, Human
ccucagccccucuu

SEQ ID NO: 2555723 - RNA, 16 nt, Human
ccucagccccucuugc

SEQ ID NO: 2555724 - RNA, 18 nt, Human
ccucagccccucuugccc

SEQ ID NO: 2555725 - RNA, 19 nt, Human
ccucagccccucuugcccc

SEQ ID NO: 2555726 - RNA, 20 nt, Human
ccucagccccucuugccccc

SEQ ID NO: 2555727 - RNA, 23 nt, Human
ccucagccccucuugccccccac

SEQ ID NO: 2555728 - RNA, 15 nt, Human
ccucagcccugaccc

SEQ ID NO: 2555729 - RNA, 13 nt, Human
ccucagcccugac

SEQ ID NO: 2555730 - RNA, 19 nt, Human
ccucagaguccaggcccca

SEQ ID NO: 2555731 - RNA, 14 nt, Human
ccucagcaccccuu

SEQ ID NO: 2555732 - RNA, 19 nt, Human
ccucagcaccccugucucu

SEQ ID NO: 2555733 - RNA, 13 nt, Human
ccucagcaccccu

SEQ ID NO: 2555734 - RNA, 16 nt, Human
ccucagaucuucugug

SEQ ID NO: 2555735 - RNA, 14 nt, Human
ccucagagugcaag

SEQ ID NO: 2555736 - RNA, 21 nt, Human
ccucagagugcaagccccugc

SEQ ID NO: 2555737 - RNA, 14 nt, Human
cccugguggcagcu

SEQ ID NO: 2555738 - RNA, 16 nt, Human
cccugggaggcucugg

SEQ ID NO: 2555739 - RNA, 19 nt, Human
cccuggaggcacugaagug

SEQ ID NO: 2555740 - RNA, 15 nt, Human
cccugggaggcucug

SEQ ID NO: 2555741 - RNA, 22 nt, Human
cccuggagccaacugcugcuuu

SEQ ID NO: 2555742 - RNA, 21 nt, Human
cccuggagccaacugcugcuu

SEQ ID NO: 2555743 - RNA, 20 nt, Human
cccuggagccaacugcugcu

SEQ ID NO: 2555744 - RNA, 19 nt, Human
cccuggagccaacugcugc

SEQ ID NO: 2555745 - RNA, 23 nt, Human
cccuggagaguucaauggcugcu

SEQ ID NO: 2555746 - RNA, 22 nt, Human
cccuggagaguucaauggcugc

SEQ ID NO: 2555747 - RNA, 16 nt, Human
cccuggagccaacugc

SEQ ID NO: 2555748 - RNA, 21 nt, Human
cccuggagccagacucugguc

SEQ ID NO: 2555749 - RNA, 20 nt, Human
cccuggagccagacucuggu

SEQ ID NO: 2555750 - RNA, 14 nt, Human
cccuggagccagac

SEQ ID NO: 2555751 - RNA, 13 nt, Human
cccuggagccaga

SEQ ID NO: 2555752 - RNA, 12 nt, Human
cccuggagccca

SEQ ID NO: 2555753 - RNA, 23 nt, Human
cccuggagccagacucuggucuu

SEQ ID NO: 2555754 - RNA, 18 nt, Human
cccugggaggcucuggag

SEQ ID NO: 2555755 - RNA, 17 nt, Human
cccugggaggcucugga

SEQ ID NO: 2555756 - RNA, 15 nt, Human
cccugggauguccac

SEQ ID NO: 2555757 - RNA, 14 nt, Human
cccugggccccacc

SEQ ID NO: 2555758 - RNA, 23 nt, Human
cccugggugggugguggggaggg

SEQ ID NO: 2555759 - RNA, 21 nt, Human
cccugggugggugguggggag

SEQ ID NO: 2555760 - RNA, 16 nt, Human
cccuggguggguggug

SEQ ID NO: 2555761 - RNA, 22 nt, Human
cccugggugggugguggggagg

SEQ ID NO: 2555762 - RNA, 21 nt, Human
cccuggugcugccacacuuca

SEQ ID NO: 2555763 - RNA, 17 nt, Human
cccuggugcugccacac

SEQ ID NO: 2555764 - RNA, 20 nt, Human
cccugggugggcucugugca

SEQ ID NO: 2555765 - RNA, 18 nt, Human
cccugggugggcucugug

SEQ ID NO: 2555766 - RNA, 17 nt, Human
cccugggugggcucugu

SEQ ID NO: 2555767 - RNA, 19 nt, Human
cccugggggaagcccugga

SEQ ID NO: 2555768 - RNA, 20 nt, Human
cccugggggaagcccuggau

SEQ ID NO: 2555769 - RNA, 18 nt, Human
cccuggggcuucuccuga

SEQ ID NO: 2555770 - RNA, 15 nt, Human
cccuggggcuucucc

SEQ ID NO: 2555771 - RNA, 21 nt, Human
cccuggggcuaggcuggagcc

SEQ ID NO: 2555772 - RNA, 21 nt, Human
cccuggggcuucuccugaccc

SEQ ID NO: 2555773 - RNA, 19 nt, Human
cccuggggcuucuccugac

SEQ ID NO: 2555774 - RNA, 17 nt, Human
cccugggggaagcccug

SEQ ID NO: 2555775 - RNA, 18 nt, Human
cccugggggaagcccugg

SEQ ID NO: 2555776 - RNA, 20 nt, Human
cccugguggagaaagcacug

SEQ ID NO: 2555777 - RNA, 23 nt, Human
cccugguggacaguccugggaga

SEQ ID NO: 2555778 - RNA, 20 nt, Human
cccugguggacaguccuggg

SEQ ID NO: 2555779 - RNA, 21 nt, Human
cccugguggacaguccuggga

SEQ ID NO: 2555780 - RNA, 17 nt, Human
cccugguggacaguccu

SEQ ID NO: 2555781 - RNA, 18 nt, Human
cccugguggacaguccug

SEQ ID NO: 2555782 - RNA, 19 nt, Human
cccugguggacaguccugg

SEQ ID NO: 2555783 - RNA, 23 nt, Human
cccugguggagaaagcacugacc

SEQ ID NO: 2555784 - RNA, 16 nt, Human
cccuggugggccaaca

SEQ ID NO: 2555785 - RNA, 22 nt, Human
cccugguggcagugggagcugc

SEQ ID NO: 2555786 - RNA, 15 nt, Human
cccuggaacugucuc

SEQ ID NO: 2555787 - RNA, 18 nt, Human
cccuggaacugucucuca

SEQ ID NO: 2555788 - RNA, 21 nt, Human
cccuggagaguucaauggcug

SEQ ID NO: 2555789 - RNA, 13 nt, Human
cccuggagaguuc

SEQ ID NO: 2555790 - RNA, 13 nt, Human
cccuggagagaag

SEQ ID NO: 2555791 - RNA, 21 nt, Human
cccuggagaggcccucuggag

SEQ ID NO: 2555792 - RNA, 21 nt, Human
cccuggacugugugcucagga

SEQ ID NO: 2555793 - RNA, 22 nt, Human
cccugcuuugggcugcccuggu

SEQ ID NO: 2555794 - RNA, 10 nt, Human
cccugcuguc

SEQ ID NO: 2555795 - RNA, 23 nt, Human
cccugcuuugggcugcccuggug

SEQ ID NO: 2555796 - RNA, 20 nt, Human
cccugcugguucaggguugg

SEQ ID NO: 2555797 - RNA, 19 nt, Human
cccugcugguucaggguug

SEQ ID NO: 2555798 - RNA, 22 nt, Human
cccugccucucugcaggucccu

SEQ ID NO: 2555799 - RNA, 21 nt, Human
cccugccucucugcagguccc

SEQ ID NO: 2555800 - RNA, 13 nt, Human
cccugccugaggg

SEQ ID NO: 2555801 - RNA, 13 nt, Human
cccugccucuguu

SEQ ID NO: 2555802 - RNA, 12 nt, Human
cccugccucuca

SEQ ID NO: 2555803 - RNA, 16 nt, Human
cccugccucucugcag

SEQ ID NO: 2555804 - RNA, 22 nt, Human
cccugccugagggccccucugc

SEQ ID NO: 2555805 - RNA, 21 nt, Human
cccugccugagggccccucug

SEQ ID NO: 2555806 - RNA, 20 nt, Human
cccugccugagggccccucu

SEQ ID NO: 2555807 - RNA, 19 nt, Human
cccugccugagggccccuc

SEQ ID NO: 2555808 - RNA, 23 nt, Human
cccugccugagggccccucugcc

SEQ ID NO: 2555809 - RNA, 13 nt, Human
cccugcugguuca

SEQ ID NO: 2555810 - RNA, 16 nt, Human
cccugcaaccugauug

SEQ ID NO: 2555811 - RNA, 22 nt, Human
cccugcaaccugauugugucuc

SEQ ID NO: 2555812 - RNA, 18 nt, Human
cccugcaaaaggacucuc

SEQ ID NO: 2555813 - RNA, 20 nt, Human
cccugcaaaaggacucucag

SEQ ID NO: 2555814 - RNA, 18 nt, Human
cccugauuugcugggcag

SEQ ID NO: 2555815 - RNA, 12 nt, Human
cccugcagaggg

SEQ ID NO: 2555816 - RNA, 22 nt, Human
cccugcacuugcagacucuaca

SEQ ID NO: 2555817 - RNA, 18 nt, Human
cccugcagagggcacaga

SEQ ID NO: 2555818 - RNA, 20 nt, Human
cccugcagagggcacagaaa

SEQ ID NO: 2555819 - RNA, 21 nt, Human
cccugcaucugaccagcagcg

SEQ ID NO: 2555820 - RNA, 17 nt, Human
cccucuacugggagccu

SEQ ID NO: 2555821 - RNA, 20 nt, Human
cccucuacugggagccuacc

SEQ ID NO: 2555822 - RNA, 18 nt, Human
cccucuacagagcuuccc

SEQ ID NO: 2555823 - RNA, 21 nt, Human
cccucuacagagcuucccuga

SEQ ID NO: 2555824 - RNA, 13 nt, Human
cccuccgcccugc

SEQ ID NO: 2555825 - RNA, 15 nt, Human
cccucuacagagcuu

SEQ ID NO: 2555826 - RNA, 18 nt, Human
cccuccgccaggcgagau

SEQ ID NO: 2555827 - RNA, 13 nt, Human
cccucucagcucc

SEQ ID NO: 2555828 - RNA, 21 nt, Human
cccucucagagcuacuugggc

SEQ ID NO: 2555829 - RNA, 12 nt, Human
cccucucagagc

SEQ ID NO: 2555830 - RNA, 17 nt, Human
cccucucacugucugag

SEQ ID NO: 2555831 - RNA, 15 nt, Human
cccucuauuuagcau

SEQ ID NO: 2555832 - RNA, 19 nt, Human
cccucuagaaauuuuucag

SEQ ID NO: 2555833 - RNA, 19 nt, Human
cccugauuacaccagccuc

SEQ ID NO: 2555834 - RNA, 15 nt, Human
cccugauccugugaa

SEQ ID NO: 2555835 - RNA, 22 nt, Human
cccugaucugacauccccacuc

SEQ ID NO: 2555836 - RNA, 21 nt, Human
cccugaucugacauccccacu

SEQ ID NO: 2555837 - RNA, 21 nt, Human
cccugauuuaggagaagccag

SEQ ID NO: 2555838 - RNA, 23 nt, Human
cccugauuuaggagaagccagga

SEQ ID NO: 2555839 - RNA, 17 nt, Human
cccucucagcuccaggu

SEQ ID NO: 2555840 - RNA, 14 nt, Human
cccucucagcucca

SEQ ID NO: 2555841 - RNA, 21 nt, Human
cccugaguggaucuccaagga

SEQ ID NO: 2555842 - RNA, 22 nt, Human
cccugaguggaucuccaaggac

SEQ ID NO: 2555843 - RNA, 16 nt, Human
cccucucaggcaugcc

SEQ ID NO: 2555844 - RNA, 18 nt, Human
cccugauaacaaccugga

SEQ ID NO: 2555845 - RNA, 23 nt, Human
cccugaguggaucuccaaggacc

SEQ ID NO: 2555846 - RNA, 19 nt, Human
cccugauaacaaccuggag

SEQ ID NO: 2555847 - RNA, 20 nt, Human
cccugaucaagucaccggag

SEQ ID NO: 2555848 - RNA, 15 nt, Human
cccugccacccuggg

SEQ ID NO: 2555849 - RNA, 14 nt, Human
cccugccacccugg

SEQ ID NO: 2555850 - RNA, 14 nt, Human
cccugccaccaggc

SEQ ID NO: 2555851 - RNA, 21 nt, Human
cccugcauucuuucuguauug

SEQ ID NO: 2555852 - RNA, 12 nt, Human
cccugccacccu

SEQ ID NO: 2555853 - RNA, 17 nt, Human
cccugccaccucccuga

SEQ ID NO: 2555854 - RNA, 14 nt, Human
cccugccaccuccc

SEQ ID NO: 2555855 - RNA, 15 nt, Human
cccugccaccaggcc

SEQ ID NO: 2555856 - RNA, 22 nt, Human
cccugccaggagcuuuggaccu

SEQ ID NO: 2555857 - RNA, 13 nt, Human
cccugccagcucu

SEQ ID NO: 2555858 - RNA, 18 nt, Human
cccugccacccuggggag

SEQ ID NO: 2555859 - RNA, 17 nt, Human
cccugccacccugggga

SEQ ID NO: 2555860 - RNA, 23 nt, Human
cccugccuccuuugugaggaagc

SEQ ID NO: 2555861 - RNA, 16 nt, Human
cccugccuccuuugug

SEQ ID NO: 2555862 - RNA, 18 nt, Human
cccugccucucugcaggu

SEQ ID NO: 2555863 - RNA, 11 nt, Human
cccugccucuc

SEQ ID NO: 2555864 - RNA, 14 nt, Human
cccugccuccuuug

SEQ ID NO: 2555865 - RNA, 17 nt, Human
cccugccaucuucccag

SEQ ID NO: 2555866 - RNA, 16 nt, Human
cccugccaucuuccca

SEQ ID NO: 2555867 - RNA, 14 nt, Human
cccugccaucuucc

SEQ ID NO: 2555868 - RNA, 13 nt, Human
cccugccaucuuc

SEQ ID NO: 2555869 - RNA, 19 nt, Human
cccugccaucuucccagca

SEQ ID NO: 2555870 - RNA, 18 nt, Human
cccugccaucuucccagc

SEQ ID NO: 2555871 - RNA, 12 nt, Human
cccugccagggc

SEQ ID NO: 2555872 - RNA, 20 nt, Human
cccugccaucauguuuacag

SEQ ID NO: 2555873 - RNA, 14 nt, Human
cccugccagggcag

SEQ ID NO: 2555874 - RNA, 14 nt, Human
cccugccagugccu

SEQ ID NO: 2555875 - RNA, 15 nt, Human
cccugccagugccuu

SEQ ID NO: 2555876 - RNA, 19 nt, Human
cccgcaccccccaagcugu

SEQ ID NO: 2555877 - RNA, 15 nt, Human
ccccagcugggaggc

SEQ ID NO: 2555878 - RNA, 14 nt, Human
ccccagcugggagg

SEQ ID NO: 2555879 - RNA, 13 nt, Human
ccccagcugggag

SEQ ID NO: 2555880 - RNA, 12 nt, Human
ccccagcuggga

SEQ ID NO: 2555881 - RNA, 11 nt, Human
ccccagcuggg

SEQ ID NO: 2555882 - RNA, 21 nt, Human
ccccagcuggcccgugacaga

SEQ ID NO: 2555883 - RNA, 13 nt, Human
ccccagcuggccc

SEQ ID NO: 2555884 - RNA, 12 nt, Human
ccccagcuggcc

SEQ ID NO: 2555885 - RNA, 11 nt, Human
ccccagcuggc

SEQ ID NO: 2555886 - RNA, 10 nt, Human
ccccagcugg

SEQ ID NO: 2555887 - RNA, 13 nt, Human
ccccagcugcuug

SEQ ID NO: 2555888 - RNA, 16 nt, Human
ccccagcugacaugga

SEQ ID NO: 2555889 - RNA, 10 nt, Human
ccccagcuga

SEQ ID NO: 2555890 - RNA, 22 nt, Human
ccccagcucuggugagucuugg

SEQ ID NO: 2555891 - RNA, 14 nt, Human
ccccagcucuggug

SEQ ID NO: 2555892 - RNA, 22 nt, Human
ccccagcuggggccaggcuggg

SEQ ID NO: 2555893 - RNA, 21 nt, Human
ccccagcuggggccaggcugg

SEQ ID NO: 2555894 - RNA, 13 nt, Human
ccccagccuggcc

SEQ ID NO: 2555895 - RNA, 12 nt, Human
ccccagccuggc

SEQ ID NO: 2555896 - RNA, 11 nt, Human
ccccagccugg

SEQ ID NO: 2555897 - RNA, 13 nt, Human
ccccagccugcua

SEQ ID NO: 2555898 - RNA, 18 nt, Human
ccccagccuggcccagcu

SEQ ID NO: 2555899 - RNA, 17 nt, Human
ccccagccuggcccagc

SEQ ID NO: 2555900 - RNA, 16 nt, Human
ccccagccuggcccag

SEQ ID NO: 2555901 - RNA, 15 nt, Human
ccccagccuggccca

SEQ ID NO: 2555902 - RNA, 21 nt, Human
ccccagccuggcccagcuccc

SEQ ID NO: 2555903 - RNA, 19 nt, Human
ccccagccuggcccagcuc

SEQ ID NO: 2555904 - RNA, 22 nt, Human
ccccagccuggcccagcucccc

SEQ ID NO: 2555905 - RNA, 17 nt, Human
ccccagcucuggcuucc

SEQ ID NO: 2555906 - RNA, 22 nt, Human
ccccagccccuagcccaggaga

SEQ ID NO: 2555907 - RNA, 20 nt, Human
ccccagccccuagcccagga

SEQ ID NO: 2555908 - RNA, 18 nt, Human
ccccagccccuagcccag

SEQ ID NO: 2555909 - RNA, 13 nt, Human
ccccagccccggg

SEQ ID NO: 2555910 - RNA, 15 nt, Human
ccccagccccuagcc

SEQ ID NO: 2555911 - RNA, 15 nt, Human
ccccagccccauccu

SEQ ID NO: 2555912 - RNA, 23 nt, Human
ccccagcccccuuugggcccagg

SEQ ID NO: 2555913 - RNA, 17 nt, Human
ccccagcccccuuuggg

SEQ ID NO: 2555914 - RNA, 17 nt, Human
ccccaccacuucuuuua

SEQ ID NO: 2555915 - RNA, 16 nt, Human
ccccagccccauccca

SEQ ID NO: 2555916 - RNA, 21 nt, Human
ccccaccaagggcgcaagagu

SEQ ID NO: 2555917 - RNA, 19 nt, Human
ccccaccaagggcgcaaga

SEQ ID NO: 2555918 - RNA, 14 nt, Human
ccccaccaccccag

SEQ ID NO: 2555919 - RNA, 12 nt, Human
ccccaccaccua

SEQ ID NO: 2555920 - RNA, 23 nt, Human
ccccaccacgauguggcccuggc

SEQ ID NO: 2555921 - RNA, 21 nt, Human
ccccacagcccacguccuguc

SEQ ID NO: 2555922 - RNA, 22 nt, Human
ccccacagcccacguccuguca

SEQ ID NO: 2555923 - RNA, 23 nt, Human
ccccacaggagguggucugggac

SEQ ID NO: 2555924 - RNA, 19 nt, Human
ccccacagcccacguccug

SEQ ID NO: 2555925 - RNA, 16 nt, Human
ccccacagcccacguc

SEQ ID NO: 2555926 - RNA, 15 nt, Human
ccccacagcccacgu

SEQ ID NO: 2555927 - RNA, 13 nt, Human
ccccacagcccac

SEQ ID NO: 2555928 - RNA, 12 nt, Human
ccccacagccca

SEQ ID NO: 2555929 - RNA, 11 nt, Human
ccccacagccc

SEQ ID NO: 2555930 - RNA, 23 nt, Human
ccccacacuuguuccagcucuuu

SEQ ID NO: 2555931 - RNA, 22 nt, Human
ccccagcugggaggcaagaggg

SEQ ID NO: 2555932 - RNA, 21 nt, Human
ccccagcugggaggcaagagg

SEQ ID NO: 2555933 - RNA, 18 nt, Human
ccccaggaccagcucagg

SEQ ID NO: 2555934 - RNA, 19 nt, Human
ccccaggaccagcucagga

SEQ ID NO: 2555935 - RNA, 21 nt, Human
ccccaggaccagcucaggaca

SEQ ID NO: 2555936 - RNA, 15 nt, Human
ccccaggaccuggcu

SEQ ID NO: 2555937 - RNA, 17 nt, Human
ccccaggaccuggcugc

SEQ ID NO: 2555938 - RNA, 20 nt, Human
ccccaggaccuggcugccau

SEQ ID NO: 2555939 - RNA, 21 nt, Human
ccccaggaccuggcugccaua

SEQ ID NO: 2555940 - RNA, 22 nt, Human
ccccaggacugggccacuucug

SEQ ID NO: 2555941 - RNA, 16 nt, Human
ccccaggacugggcca

SEQ ID NO: 2555942 - RNA, 14 nt, Human
ccccaggacugggc

SEQ ID NO: 2555943 - RNA, 13 nt, Human
ccccaggacuggg

SEQ ID NO: 2555944 - RNA, 12 nt, Human
ccccaggaggcc

SEQ ID NO: 2555945 - RNA, 14 nt, Human
ccccagggccugag

SEQ ID NO: 2555946 - RNA, 15 nt, Human
ccccagggccugagc

SEQ ID NO: 2555947 - RNA, 16 nt, Human
ccccagggccugagcc

SEQ ID NO: 2555948 - RNA, 21 nt, Human
ccccagggcacuucacagagu

SEQ ID NO: 2555949 - RNA, 20 nt, Human
ccccagggcacuucacagag

SEQ ID NO: 2555950 - RNA, 22 nt, Human
ccccagggcacuucacagagug

SEQ ID NO: 2555951 - RNA, 12 nt, Human
ccccagggcacu

SEQ ID NO: 2555952 - RNA, 16 nt, Human
ccccaggaccagcuca

SEQ ID NO: 2555953 - RNA, 18 nt, Human
ccccaggggaaaaugaag

SEQ ID NO: 2555954 - RNA, 17 nt, Human
ccccaggggaaaaugaa

SEQ ID NO: 2555955 - RNA, 16 nt, Human
ccccaggggaaaauga

SEQ ID NO: 2555956 - RNA, 19 nt, Human
ccccagggccugagccugg

SEQ ID NO: 2555957 - RNA, 21 nt, Human
ccccagggccugagccuggcc

SEQ ID NO: 2555958 - RNA, 20 nt, Human
ccccaggggaaagaugagcu

SEQ ID NO: 2555959 - RNA, 19 nt, Human
ccccaggggaaagaugagc

SEQ ID NO: 2555960 - RNA, 17 nt, Human
ccccaggggucccagcc

SEQ ID NO: 2555961 - RNA, 19 nt, Human
ccccaggggucccagccac

SEQ ID NO: 2555962 - RNA, 22 nt, Human
ccccaggggucccagccacccc

SEQ ID NO: 2555963 - RNA, 14 nt, Human
ccccuggcagcccc

SEQ ID NO: 2555964 - RNA, 12 nt, Human
ccccuggcagcc

SEQ ID NO: 2555965 - RNA, 15 nt, Human
ccccuggcagccccu

SEQ ID NO: 2555966 - RNA, 14 nt, Human
ccccuggcccagcg

SEQ ID NO: 2555967 - RNA, 13 nt, Human
ccccuggcccagc

SEQ ID NO: 2555968 - RNA, 11 nt, Human
ccccuggccca

SEQ ID NO: 2555969 - RNA, 13 nt, Human
ccccagguggcug

SEQ ID NO: 2555970 - RNA, 20 nt, Human
ccccagguggcugacccagu

SEQ ID NO: 2555971 - RNA, 21 nt, Human
ccccagguggcugacccaguc

SEQ ID NO: 2555972 - RNA, 23 nt, Human
ccccagguggcugacccaguccc

SEQ ID NO: 2555973 - RNA, 14 nt, Human
ccccaggugccagu

SEQ ID NO: 2555974 - RNA, 22 nt, Human
ccccaggugguuauggagaggg

SEQ ID NO: 2555975 - RNA, 22 nt, Human
ccccagguccagcucuggaggg

SEQ ID NO: 2555976 - RNA, 21 nt, Human
ccccagguccagcucuggagg

SEQ ID NO: 2555977 - RNA, 17 nt, Human
ccccagguccagcucug

SEQ ID NO: 2555978 - RNA, 16 nt, Human
ccccagggucuucccu

SEQ ID NO: 2555979 - RNA, 22 nt, Human
ccccaggguugaggggaccaag

SEQ ID NO: 2555980 - RNA, 19 nt, Human
ccccagggucuucccuacc

SEQ ID NO: 2555981 - RNA, 22 nt, Human
ccccuggcccagcggccccucc

SEQ ID NO: 2555982 - RNA, 16 nt, Human
ccccuggcccagcggc

SEQ ID NO: 2555983 - RNA, 15 nt, Human
ccccuggcccagcgg

SEQ ID NO: 2555984 - RNA, 23 nt, Human
ccccuggcuuuucacugcuggcu

SEQ ID NO: 2555985 - RNA, 22 nt, Human
ccccuggcuuuucacugcuggc

SEQ ID NO: 2555986 - RNA, 11 nt, Human
ccccugggcuc

SEQ ID NO: 2555987 - RNA, 13 nt, Human
ccccugggcucug

SEQ ID NO: 2555988 - RNA, 15 nt, Human
ccccugggcucugcc

SEQ ID NO: 2555989 - RNA, 18 nt, Human
ccccuggggcuucuccug

SEQ ID NO: 2555990 - RNA, 22 nt, Human
ccccugggcuuggccugcugug

SEQ ID NO: 2555991 - RNA, 21 nt, Human
ccccugggcuuggccugcugu

SEQ ID NO: 2555992 - RNA, 20 nt, Human
ccccugggcuuggccugcug

SEQ ID NO: 2555993 - RNA, 23 nt, Human
ccccugggcuuggccugcuguga

SEQ ID NO: 2555994 - RNA, 19 nt, Human
ccccugggcuuggccugcu

SEQ ID NO: 2555995 - RNA, 18 nt, Human
ccccugggcuuggccugc

SEQ ID NO: 2555996 - RNA, 16 nt, Human
ccccugggcuuggccu

SEQ ID NO: 2555997 - RNA, 17 nt, Human
ccccuggcccagcggcc

SEQ ID NO: 2555998 - RNA, 21 nt, Human
ccccugggcucugccccagcu

SEQ ID NO: 2555999 - RNA, 23 nt, Human
ccccugggcucugccccagcucu

SEQ ID NO: 2556000 - RNA, 12 nt, Human
ccccuguccuga

SEQ ID NO: 2556001 - RNA, 16 nt, Human
ccccuguccucacugc

SEQ ID NO: 2556002 - RNA, 15 nt, Human
ccccuguccucacug

SEQ ID NO: 2556003 - RNA, 14 nt, Human
ccccuguccucacu

SEQ ID NO: 2556004 - RNA, 13 nt, Human
ccccuguccucac

SEQ ID NO: 2556005 - RNA, 20 nt, Human
ccccuguccccucagcucca

SEQ ID NO: 2556006 - RNA, 17 nt, Human
ccccuguccccucagcu

SEQ ID NO: 2556007 - RNA, 22 nt, Human
ccccuguccccgcacugggcuu

SEQ ID NO: 2556008 - RNA, 20 nt, Human
ccccuggggcuucuccugac

SEQ ID NO: 2556009 - RNA, 19 nt, Human
ccccuggggcuucuccuga

SEQ ID NO: 2556010 - RNA, 15 nt, Human
ccccugguucucauc

SEQ ID NO: 2556011 - RNA, 23 nt, Human
ccccuggugguucacucuuggag

SEQ ID NO: 2556012 - RNA, 18 nt, Human
ccccugguucucaucuuu

SEQ ID NO: 2556013 - RNA, 19 nt, Human
ccccugggggcucucaugu

SEQ ID NO: 2556014 - RNA, 14 nt, Human
ccccuguacuccag

SEQ ID NO: 2556015 - RNA, 20 nt, Human
ccccuuccuaauuccacagc

SEQ ID NO: 2556016 - RNA, 21 nt, Human
ccccuuccuaauuccacagcu

SEQ ID NO: 2556017 - RNA, 22 nt, Human
ccccuuccuaauuccacagcug

SEQ ID NO: 2556018 - RNA, 19 nt, Human
cccgaggacccagacccag

SEQ ID NO: 2556019 - RNA, 18 nt, Human
cccgaggacccagaccca

SEQ ID NO: 2556020 - RNA, 17 nt, Human
ccccuuccuacucccag

SEQ ID NO: 2556021 - RNA, 13 nt, Human
ccccuucccugca

SEQ ID NO: 2556022 - RNA, 18 nt, Human
ccccuucccugcaaacau

SEQ ID NO: 2556023 - RNA, 14 nt, Human
ccccuucccugcaa

SEQ ID NO: 2556024 - RNA, 12 nt, Human
ccccuucccccu

SEQ ID NO: 2556025 - RNA, 13 nt, Human
ccccuucagugcc

SEQ ID NO: 2556026 - RNA, 16 nt, Human
ccccuuccccauggga

SEQ ID NO: 2556027 - RNA, 23 nt, Human
ccccuuccccacugccugcccac

SEQ ID NO: 2556028 - RNA, 14 nt, Human
ccccugucuagaga

SEQ ID NO: 2556029 - RNA, 14 nt, Human
ccccuuaccacugc

SEQ ID NO: 2556030 - RNA, 20 nt, Human
ccccuguucuggcagaguug

SEQ ID NO: 2556031 - RNA, 14 nt, Human
ccccuucacaaagc

SEQ ID NO: 2556032 - RNA, 17 nt, Human
ccccuucacuucugacc

SEQ ID NO: 2556033 - RNA, 19 nt, Human
ccccuucacuucugaccac

SEQ ID NO: 2556034 - RNA, 22 nt, Human
ccccuucacuucugaccacacu

SEQ ID NO: 2556035 - RNA, 23 nt, Human
ccccuucacuucugaccacacuu

SEQ ID NO: 2556036 - RNA, 16 nt, Human
ccccuuauccaggacu

SEQ ID NO: 2556037 - RNA, 15 nt, Human
ccccuuauccaggac

SEQ ID NO: 2556038 - RNA, 14 nt, Human
ccccuuauccagga

SEQ ID NO: 2556039 - RNA, 15 nt, Human
cccgaggccuucucu

SEQ ID NO: 2556040 - RNA, 15 nt, Human
cccgaggcccgcaug

SEQ ID NO: 2556041 - RNA, 22 nt, Human
cccgaggacgcucccugcucca

SEQ ID NO: 2556042 - RNA, 12 nt, Human
cccgaggcccgc

SEQ ID NO: 2556043 - RNA, 20 nt, Human
cccgaggccuucucugaagg

SEQ ID NO: 2556044 - RNA, 23 nt, Human
cccgagucauucguucuguggag

SEQ ID NO: 2556045 - RNA, 19 nt, Human
cccgaguuuggucccuggg

SEQ ID NO: 2556046 - RNA, 16 nt, Human
cccgaguuuccccaga

SEQ ID NO: 2556047 - RNA, 13 nt, Human
cccgaggcccgca

SEQ ID NO: 2556048 - RNA, 22 nt, Human
cccgaugcugcuuuccccugug

SEQ ID NO: 2556049 - RNA, 20 nt, Human
cccgaugcugcuuuccccug

SEQ ID NO: 2556050 - RNA, 16 nt, Human
cccgaugcugcuuucc

SEQ ID NO: 2556051 - RNA, 15 nt, Human
cccgaugcugcuuuc

SEQ ID NO: 2556052 - RNA, 14 nt, Human
cccgaugcugcuuu

SEQ ID NO: 2556053 - RNA, 13 nt, Human
cccgaucuuucua

SEQ ID NO: 2556054 - RNA, 23 nt, Human
cccgaugcugcuuuccccugugg

SEQ ID NO: 2556055 - RNA, 19 nt, Human
cccgcaaacccccuuugug

SEQ ID NO: 2556056 - RNA, 20 nt, Human
cccgcaaacccccuuugugc

SEQ ID NO: 2556057 - RNA, 18 nt, Human
cccgcaaugugcccccag

SEQ ID NO: 2556058 - RNA, 14 nt, Human
cccgccugcccuca

SEQ ID NO: 2556059 - RNA, 13 nt, Human
cccgccugcccuc

SEQ ID NO: 2556060 - RNA, 13 nt, Human
cccgcacccccac

SEQ ID NO: 2556061 - RNA, 16 nt, Human
cccgcacccccacccu

SEQ ID NO: 2556062 - RNA, 17 nt, Human
cccgcacccccacccuu

SEQ ID NO: 2556063 - RNA, 19 nt, Human
cccgcacagagcuggggcu

SEQ ID NO: 2556064 - RNA, 22 nt, Human
cccgcaaugugcccccagacgc

SEQ ID NO: 2556065 - RNA, 11 nt, Human
cccgcucugga

SEQ ID NO: 2556066 - RNA, 22 nt, Human
cccgcucugcaugcggcccagc

SEQ ID NO: 2556067 - RNA, 14 nt, Human
cccgcucugcaugc

SEQ ID NO: 2556068 - RNA, 13 nt, Human
cccgcucugcaug

SEQ ID NO: 2556069 - RNA, 23 nt, Human
cccgcucccagugucuuccugug

SEQ ID NO: 2556070 - RNA, 15 nt, Human
cccgcucccaguguc

SEQ ID NO: 2556071 - RNA, 21 nt, Human
cccgcucuacaucuucugccu

SEQ ID NO: 2556072 - RNA, 23 nt, Human
cccgcucagcccucccugccccu

SEQ ID NO: 2556073 - RNA, 14 nt, Human
cccgcucccagugu

SEQ ID NO: 2556074 - RNA, 13 nt, Human
cccgcucccagug

SEQ ID NO: 2556075 - RNA, 12 nt, Human
cccgcucccagu

SEQ ID NO: 2556076 - RNA, 23 nt, Human
cccggaagccaaaccucugugag

SEQ ID NO: 2556077 - RNA, 20 nt, Human
cccgcuuucuugcugguugu

SEQ ID NO: 2556078 - RNA, 14 nt, Human
cccggaacaagccu

SEQ ID NO: 2556079 - RNA, 16 nt, Human
cccgcuuggcuucuuc

SEQ ID NO: 2556080 - RNA, 14 nt, Human
cccgcuuguccagc

SEQ ID NO: 2556081 - RNA, 15 nt, Human
cccgcuuguccagcg

SEQ ID NO: 2556082 - RNA, 18 nt, Human
cccgcuuguccagcgccu

SEQ ID NO: 2556083 - RNA, 14 nt, Human
cccgcuuggcuucu

SEQ ID NO: 2556084 - RNA, 15 nt, Human
cccgcugcugcugcu

SEQ ID NO: 2556085 - RNA, 12 nt, Human
cccgcugcugcu

SEQ ID NO: 2556086 - RNA, 22 nt, Human
cccgcugcccaggggagcccuc

SEQ ID NO: 2556087 - RNA, 14 nt, Human
cccgcucuggacca

SEQ ID NO: 2556088 - RNA, 12 nt, Human
cccgcucuggac

SEQ ID NO: 2556089 - RNA, 19 nt, Human
cccgcugaguggacuggag

SEQ ID NO: 2556090 - RNA, 17 nt, Human
cccgcugaguggacugg

SEQ ID NO: 2556091 - RNA, 14 nt, Human
cccgccuguucccc

SEQ ID NO: 2556092 - RNA, 17 nt, Human
cccgccugcccucaugg

SEQ ID NO: 2556093 - RNA, 13 nt, Human
cccgccuguuccc

SEQ ID NO: 2556094 - RNA, 17 nt, Human
cccgccuggcagaacug

SEQ ID NO: 2556095 - RNA, 22 nt, Human
cccgccuggcagaacugagcuc

SEQ ID NO: 2556096 - RNA, 22 nt, Human
cccgcuaagagggagggagggc

SEQ ID NO: 2556097 - RNA, 19 nt, Human
cccgcgcgcgucccccugc

SEQ ID NO: 2556098 - RNA, 17 nt, Human
cccgcgcccgcgcccuc

SEQ ID NO: 2556099 - RNA, 15 nt, Human
cccgcgccuccuucc

SEQ ID NO: 2556100 - RNA, 19 nt, Human
cccgcucagcccucccugc

SEQ ID NO: 2556101 - RNA, 21 nt, Human
cccgcggggacauugggaagg

SEQ ID NO: 2556102 - RNA, 15 nt, Human
cccgcucagcccucc

SEQ ID NO: 2556103 - RNA, 20 nt, Human
cccucauccucauacccacc

SEQ ID NO: 2556104 - RNA, 17 nt, Human
cccucauccucauaccc

SEQ ID NO: 2556105 - RNA, 22 nt, Human
cccucaucaccaacgucugugc

SEQ ID NO: 2556106 - RNA, 17 nt, Human
cccucaucccgagcacc

SEQ ID NO: 2556107 - RNA, 19 nt, Human
cccucauagcccucacccu

SEQ ID NO: 2556108 - RNA, 13 nt, Human
cccucauagcccu

SEQ ID NO: 2556109 - RNA, 15 nt, Human
cccucauagcccuca

SEQ ID NO: 2556110 - RNA, 19 nt, Human
cccucaguuucccuaucuc

SEQ ID NO: 2556111 - RNA, 21 nt, Human
cccucagggucccugguggca

SEQ ID NO: 2556112 - RNA, 20 nt, Human
cccucagucuggcccuuccu

SEQ ID NO: 2556113 - RNA, 17 nt, Human
cccucauggccccucug

SEQ ID NO: 2556114 - RNA, 16 nt, Human
cccucauggccccucu

SEQ ID NO: 2556115 - RNA, 21 nt, Human
cccucauggccccucugaccu

SEQ ID NO: 2556116 - RNA, 21 nt, Human
cccucaucuuucaucaaucau

SEQ ID NO: 2556117 - RNA, 22 nt, Human
cccucauuccaccuucccaugc

SEQ ID NO: 2556118 - RNA, 12 nt, Human
cccucauuaaug

SEQ ID NO: 2556119 - RNA, 15 nt, Human
cccucauucaggaaa

SEQ ID NO: 2556120 - RNA, 16 nt, Human
cccucauucaggaaaa

SEQ ID NO: 2556121 - RNA, 21 nt, Human
cccuccaagaccuucuccuuc

SEQ ID NO: 2556122 - RNA, 19 nt, Human
cccucauuggcucuugaac

SEQ ID NO: 2556123 - RNA, 16 nt, Human
cccucauuucaggagc

SEQ ID NO: 2556124 - RNA, 15 nt, Human
cccuccaaaagcacu

SEQ ID NO: 2556125 - RNA, 17 nt, Human
cccucauucaggaaaac

SEQ ID NO: 2556126 - RNA, 13 nt, Human
cccucaucugucc

SEQ ID NO: 2556127 - RNA, 14 nt, Human
cccucaucuguccc

SEQ ID NO: 2556128 - RNA, 13 nt, Human
cccucaucucucc

SEQ ID NO: 2556129 - RNA, 21 nt, Human
cccucaucgcguccuccuacc

SEQ ID NO: 2556130 - RNA, 17 nt, Human
cccucaucucucugccc

SEQ ID NO: 2556131 - RNA, 22 nt, Human
cccucauccucauacccacccc

SEQ ID NO: 2556132 - RNA, 12 nt, Human
cccucaugcugu

SEQ ID NO: 2556133 - RNA, 14 nt, Human
cccucccuucaacc

SEQ ID NO: 2556134 - RNA, 20 nt, Human
cccucccuguuccccagaga

SEQ ID NO: 2556135 - RNA, 13 nt, Human
cccucccuguccu

SEQ ID NO: 2556136 - RNA, 13 nt, Human
cccucccuggguu

SEQ ID NO: 2556137 - RNA, 12 nt, Human
cccucccugggu

SEQ ID NO: 2556138 - RNA, 13 nt, Human
cccucccuccucu

SEQ ID NO: 2556139 - RNA, 19 nt, Human
cccucccuguuccccagag

SEQ ID NO: 2556140 - RNA, 16 nt, Human
cccucccuggguucag

SEQ ID NO: 2556141 - RNA, 11 nt, Human
cccucccuguc

SEQ ID NO: 2556142 - RNA, 22 nt, Human
cccucccuuggaaaccugcccu

SEQ ID NO: 2556143 - RNA, 21 nt, Human
cccucccuuggaaaccugccc

SEQ ID NO: 2556144 - RNA, 19 nt, Human
cccucccuuggaaaccugc

SEQ ID NO: 2556145 - RNA, 12 nt, Human
cccucccuugga

SEQ ID NO: 2556146 - RNA, 14 nt, Human
cccucccuuucucc

SEQ ID NO: 2556147 - RNA, 13 nt, Human
cccucccuuucuc

SEQ ID NO: 2556148 - RNA, 16 nt, Human
cccucccuuucucccc

SEQ ID NO: 2556149 - RNA, 23 nt, Human
cccucccuuggaaaccugcccug

SEQ ID NO: 2556150 - RNA, 14 nt, Human
cccuccgccauucu

SEQ ID NO: 2556151 - RNA, 20 nt, Human
cccuccgauccuuccuccca

SEQ ID NO: 2556152 - RNA, 16 nt, Human
cccuccgccaggcgag

SEQ ID NO: 2556153 - RNA, 15 nt, Human
cccuccccucucuug

SEQ ID NO: 2556154 - RNA, 14 nt, Human
cccuccccucucuu

SEQ ID NO: 2556155 - RNA, 17 nt, Human
cccuccccuccccugcu

SEQ ID NO: 2556156 - RNA, 16 nt, Human
cccuccccuccccugc

SEQ ID NO: 2556157 - RNA, 22 nt, Human
cccuccccggcccuaccagcgc

SEQ ID NO: 2556158 - RNA, 12 nt, Human
cccuccccuccc

SEQ ID NO: 2556159 - RNA, 23 nt, Human
cccucccucuacugggagccuac

SEQ ID NO: 2556160 - RNA, 13 nt, Human
cccucccucuuuc

SEQ ID NO: 2556161 - RNA, 16 nt, Human
cccuccaauccugccc

SEQ ID NO: 2556162 - RNA, 15 nt, Human
cccuccaauccugcc

SEQ ID NO: 2556163 - RNA, 18 nt, Human
cccuccaaaagcacuuac

SEQ ID NO: 2556164 - RNA, 17 nt, Human
cccuccaaaagcacuua

SEQ ID NO: 2556165 - RNA, 16 nt, Human
cccuccacagccgcag

SEQ ID NO: 2556166 - RNA, 15 nt, Human
cccuccagcuugugg

SEQ ID NO: 2556167 - RNA, 20 nt, Human
cccuccagcuuguggagccc

SEQ ID NO: 2556168 - RNA, 15 nt, Human
cccuccaucccgaca

SEQ ID NO: 2556169 - RNA, 17 nt, Human
cccuccaugugggcuag

SEQ ID NO: 2556170 - RNA, 12 nt, Human
cccucccacaca

SEQ ID NO: 2556171 - RNA, 19 nt, Human
cccuccaucuaaacugccc

SEQ ID NO: 2556172 - RNA, 14 nt, Human
cccucccccugcca

SEQ ID NO: 2556173 - RNA, 13 nt, Human
cccucccacacac

SEQ ID NO: 2556174 - RNA, 12 nt, Human
cccucccccuug

SEQ ID NO: 2556175 - RNA, 17 nt, Human
cccucccccuucuccca

SEQ ID NO: 2556176 - RNA, 13 nt, Human
cccucccccuucu

SEQ ID NO: 2556177 - RNA, 15 nt, Human
cccucccccuugucc

SEQ ID NO: 2556178 - RNA, 13 nt, Human
cccucccccuugu

SEQ ID NO: 2556179 - RNA, 16 nt, Human
cccuccccgcaccccc

SEQ ID NO: 2556180 - RNA, 17 nt, Human
cccuccccgcacccccc

SEQ ID NO: 2556181 - RNA, 17 nt, Human
cccuccccgcccuuuuu

SEQ ID NO: 2556182 - RNA, 16 nt, Human
cccuccccgcccuuuu

SEQ ID NO: 2556183 - RNA, 19 nt, Human
cccuccccggcccuaccag

SEQ ID NO: 2556184 - RNA, 14 nt, Human
cccuccccggcccu

SEQ ID NO: 2556185 - RNA, 21 nt, Human
cccuccccuaaugccugcgga

SEQ ID NO: 2556186 - RNA, 19 nt, Human
cccucagggucccuggugg

SEQ ID NO: 2556187 - RNA, 18 nt, Human
cccucagggucccuggug

SEQ ID NO: 2556188 - RNA, 17 nt, Human
cccucagggucccuggu

SEQ ID NO: 2556189 - RNA, 16 nt, Human
cccucagggucccugg

SEQ ID NO: 2556190 - RNA, 17 nt, Human
cccuagcccaggagaga

SEQ ID NO: 2556191 - RNA, 16 nt, Human
cccuagcccaggagag

SEQ ID NO: 2556192 - RNA, 13 nt, Human
cccuagcccagga

SEQ ID NO: 2556193 - RNA, 18 nt, Human
cccuagccauuccuggua

SEQ ID NO: 2556194 - RNA, 22 nt, Human
cccucagggaucuugcauuccc

SEQ ID NO: 2556195 - RNA, 15 nt, Human
cccucagggucccug

SEQ ID NO: 2556196 - RNA, 21 nt, Human
cccuagagccugccuggagcg

SEQ ID NO: 2556197 - RNA, 20 nt, Human
cccuagagccugccuggagc

SEQ ID NO: 2556198 - RNA, 16 nt, Human
cccuagaguguuguug

SEQ ID NO: 2556199 - RNA, 18 nt, Human
cccuagagccugccugga

SEQ ID NO: 2556200 - RNA, 15 nt, Human
cccuagagccugccu

SEQ ID NO: 2556201 - RNA, 19 nt, Human
cccuagaaucagccuaggg

SEQ ID NO: 2556202 - RNA, 15 nt, Human
cccuagccauuccug

SEQ ID NO: 2556203 - RNA, 13 nt, Human
cccuagccauucc

SEQ ID NO: 2556204 - RNA, 17 nt, Human
cccuagccagcacuugu

SEQ ID NO: 2556205 - RNA, 22 nt, Human
cccuagaucuuucuauuccaaa

SEQ ID NO: 2556206 - RNA, 19 nt, Human
cccuagaggguuccuguag

SEQ ID NO: 2556207 - RNA, 14 nt, Human
cccuaauaaagcug

SEQ ID NO: 2556208 - RNA, 13 nt, Human
cccuaauaaagcu

SEQ ID NO: 2556209 - RNA, 12 nt, Human
cccuaauaaagc

SEQ ID NO: 2556210 - RNA, 19 nt, Human
cccuaagacuccucggccu

SEQ ID NO: 2556211 - RNA, 17 nt, Human
cccuaagccaagggccu

SEQ ID NO: 2556212 - RNA, 18 nt, Human
cccuaauaaagcugugug

SEQ ID NO: 2556213 - RNA, 15 nt, Human
cccuaauaaagcugu

SEQ ID NO: 2556214 - RNA, 19 nt, Human
cccuacuucuuuugcucuu

SEQ ID NO: 2556215 - RNA, 18 nt, Human
cccuacuucuuuugcucu

SEQ ID NO: 2556216 - RNA, 17 nt, Human
cccuagaaacuuccaaa

SEQ ID NO: 2556217 - RNA, 19 nt, Human
cccuaaggaucucucagga

SEQ ID NO: 2556218 - RNA, 21 nt, Human
cccuaaggucauuaccacagg

SEQ ID NO: 2556219 - RNA, 18 nt, Human
cccggaggggccuggcag

SEQ ID NO: 2556220 - RNA, 17 nt, Human
cccggaggggccuggca

SEQ ID NO: 2556221 - RNA, 19 nt, Human
cccggagauuggacggccu

SEQ ID NO: 2556222 - RNA, 21 nt, Human
cccggagcuaacacuggcccc

SEQ ID NO: 2556223 - RNA, 16 nt, Human
cccggauucugggagg

SEQ ID NO: 2556224 - RNA, 18 nt, Human
cccggagguugggugggc

SEQ ID NO: 2556225 - RNA, 20 nt, Human
cccggagcuaacacuggccc

SEQ ID NO: 2556226 - RNA, 14 nt, Human
cccggauucuggga

SEQ ID NO: 2556227 - RNA, 13 nt, Human
cccggcagacgcc

SEQ ID NO: 2556228 - RNA, 16 nt, Human
cccggcaggguccuag

SEQ ID NO: 2556229 - RNA, 13 nt, Human
cccgucuucagcc

SEQ ID NO: 2556230 - RNA, 14 nt, Human
cccgucuucagccu

SEQ ID NO: 2556231 - RNA, 15 nt, Human
cccgucuucagccua

SEQ ID NO: 2556232 - RNA, 16 nt, Human
cccgucuucagccuag

SEQ ID NO: 2556233 - RNA, 17 nt, Human
cccgucuucagccuagc

SEQ ID NO: 2556234 - RNA, 18 nt, Human
cccgugacagacuccuga

SEQ ID NO: 2556235 - RNA, 12 nt, Human
cccgucuucagc

SEQ ID NO: 2556236 - RNA, 18 nt, Human
cccgucuucagccuagcc

SEQ ID NO: 2556237 - RNA, 22 nt, Human
cccgugacagacuccugaggac

SEQ ID NO: 2556238 - RNA, 13 nt, Human
cccgugcagacug

SEQ ID NO: 2556239 - RNA, 21 nt, Human
cccgugaggaugucacucaga

SEQ ID NO: 2556240 - RNA, 15 nt, Human
cccgugcagacugga

SEQ ID NO: 2556241 - RNA, 11 nt, Human
cccguggcccc

SEQ ID NO: 2556242 - RNA, 18 nt, Human
cccgugcagacuggaggg

SEQ ID NO: 2556243 - RNA, 22 nt, Human
cccguugucucccuggcccuca

SEQ ID NO: 2556244 - RNA, 20 nt, Human
cccguugucucccuggcccu

SEQ ID NO: 2556245 - RNA, 19 nt, Human
cccguugucucccuggccc

SEQ ID NO: 2556246 - RNA, 17 nt, Human
cccguugucucccuggc

SEQ ID NO: 2556247 - RNA, 16 nt, Human
cccguugucucccugg

SEQ ID NO: 2556248 - RNA, 14 nt, Human
cccguggccccagc

SEQ ID NO: 2556249 - RNA, 13 nt, Human
cccguggccccag

SEQ ID NO: 2556250 - RNA, 12 nt, Human
cccguggcccca

SEQ ID NO: 2556251 - RNA, 16 nt, Human
cccguuucuccaccua

SEQ ID NO: 2556252 - RNA, 12 nt, Human
cccguuucucca

SEQ ID NO: 2556253 - RNA, 14 nt, Human
cccguuucuggugg

SEQ ID NO: 2556254 - RNA, 22 nt, Human
cccuaaaguguauuuuuuuacu

SEQ ID NO: 2556255 - RNA, 12 nt, Human
cccuaaacugua

SEQ ID NO: 2556256 - RNA, 17 nt, Human
cccuaaaguguauuuuu

SEQ ID NO: 2556257 - RNA, 14 nt, Human
cccuaaaagcacac

SEQ ID NO: 2556258 - RNA, 17 nt, Human
cuaaccacgcuggaccu

SEQ ID NO: 2556259 - RNA, 17 nt, Human
cuaacaugcccuguuca

SEQ ID NO: 2556260 - RNA, 16 nt, Human
cuaaccagcagaaaug

SEQ ID NO: 2556261 - RNA, 15 nt, Human
cuaacauuauuuauu

SEQ ID NO: 2556262 - RNA, 20 nt, Human
cuaaccacgucugucuucac

SEQ ID NO: 2556263 - RNA, 21 nt, Human
cuaaccacgucugucuucaca

SEQ ID NO: 2556264 - RNA, 14 nt, Human
cuaagcaaaaugug

SEQ ID NO: 2556265 - RNA, 17 nt, Human
cuaaccagcagaaaugc

SEQ ID NO: 2556266 - RNA, 21 nt, Human
cuaaccagggaagcugucccu

SEQ ID NO: 2556267 - RNA, 12 nt, Human
cuaagcagagga

SEQ ID NO: 2556268 - RNA, 13 nt, Human
cuaagcagaggag

SEQ ID NO: 2556269 - RNA, 14 nt, Human
cuaagcagaggagg

SEQ ID NO: 2556270 - RNA, 15 nt, Human
cuaagcagaggaggg

SEQ ID NO: 2556271 - RNA, 16 nt, Human
cuaagcagaggagggg

SEQ ID NO: 2556272 - RNA, 18 nt, Human
cuaagcagaggaggggcc

SEQ ID NO: 2556273 - RNA, 19 nt, Human
cuaagcagaggaggggccg

SEQ ID NO: 2556274 - RNA, 20 nt, Human
cuaagcagaggaggggccgc

SEQ ID NO: 2556275 - RNA, 17 nt, Human
cuaagcagcauuucuga

SEQ ID NO: 2556276 - RNA, 23 nt, Human
cuaagcagaggaggggccgcugc

SEQ ID NO: 2556277 - RNA, 19 nt, Human
cuaagcagcauuucugaag

SEQ ID NO: 2556278 - RNA, 21 nt, Human
cuaagcauagcaaacagagga

SEQ ID NO: 2556279 - RNA, 11 nt, Human
cuaagccaagg

SEQ ID NO: 2556280 - RNA, 14 nt, Human
cuaagccaagggcc

SEQ ID NO: 2556281 - RNA, 20 nt, Human
cuaagccacucuuccaaagg

SEQ ID NO: 2556282 - RNA, 18 nt, Human
cuaagccaagggccucuu

SEQ ID NO: 2556283 - RNA, 15 nt, Human
cuaagcaaaauguga

SEQ ID NO: 2556284 - RNA, 18 nt, Human
cuaagcaaaaugugauau

SEQ ID NO: 2556285 - RNA, 23 nt, Human
cuaagcacgggccauaugaauaa

SEQ ID NO: 2556286 - RNA, 20 nt, Human
cuaagcacgggccauaugaa

SEQ ID NO: 2556287 - RNA, 17 nt, Human
cuaagcuaggaaugaaa

SEQ ID NO: 2556288 - RNA, 22 nt, Human
cuaagcuaggaaugaaauccug

SEQ ID NO: 2556289 - RNA, 19 nt, Human
cuaagcuauucaguaauaa

SEQ ID NO: 2556290 - RNA, 21 nt, Human
cuaagcuauucaguaauaacu

SEQ ID NO: 2556291 - RNA, 14 nt, Human
cuaagccuaccugc

SEQ ID NO: 2556292 - RNA, 21 nt, Human
cuaagcccugucgagacacuu

SEQ ID NO: 2556293 - RNA, 20 nt, Human
cuaagcccugucgagacacu

SEQ ID NO: 2556294 - RNA, 12 nt, Human
cuaagcccuguc

SEQ ID NO: 2556295 - RNA, 22 nt, Human
cuaagcccccgcuguaaugaaa

SEQ ID NO: 2556296 - RNA, 18 nt, Human
cuaagcccccgcuguaau

SEQ ID NO: 2556297 - RNA, 14 nt, Human
cuaagcccccgcug

SEQ ID NO: 2556298 - RNA, 19 nt, Human
cuaagccccagcaagcaau

SEQ ID NO: 2556299 - RNA, 17 nt, Human
cuaagccccagcaagca

SEQ ID NO: 2556300 - RNA, 16 nt, Human
cuaagccccagcaagc

SEQ ID NO: 2556301 - RNA, 15 nt, Human
cuaagccccagcaag

SEQ ID NO: 2556302 - RNA, 23 nt, Human
cuaagccuaccugcucuccaagu

SEQ ID NO: 2556303 - RNA, 20 nt, Human
cuaagccuaccugcucucca

SEQ ID NO: 2556304 - RNA, 17 nt, Human
cuaagccuaccugcucu

SEQ ID NO: 2556305 - RNA, 16 nt, Human
cuaagccuaccugcuc

SEQ ID NO: 2556306 - RNA, 14 nt, Human
cuaagccuccuuuu

SEQ ID NO: 2556307 - RNA, 17 nt, Human
cuaagccugaaggggcg

SEQ ID NO: 2556308 - RNA, 20 nt, Human
cuaagccugaaggggcgucu

SEQ ID NO: 2556309 - RNA, 14 nt, Human
cuaagcuaggaaug

SEQ ID NO: 2556310 - RNA, 15 nt, Human
cuaagcuaacccccu

SEQ ID NO: 2556311 - RNA, 22 nt, Human
cuaagcggaccagccucccugu

SEQ ID NO: 2556312 - RNA, 17 nt, Human
cuaagccuuuccauaag

SEQ ID NO: 2556313 - RNA, 14 nt, Human
cuaaggcugaacuu

SEQ ID NO: 2556314 - RNA, 19 nt, Human
cuaaggaugucacagggcc

SEQ ID NO: 2556315 - RNA, 18 nt, Human
cuaaggaugucacagggc

SEQ ID NO: 2556316 - RNA, 20 nt, Human
cuaaggaugucacagggcca

SEQ ID NO: 2556317 - RNA, 20 nt, Human
cuaaggaugcuaaaccuuag

SEQ ID NO: 2556318 - RNA, 18 nt, Human
cuaaggaugcuaaaccuu

SEQ ID NO: 2556319 - RNA, 17 nt, Human
cuaaggaugcuaaaccu

SEQ ID NO: 2556320 - RNA, 23 nt, Human
cuaaggaucucucaggagcacag

SEQ ID NO: 2556321 - RNA, 20 nt, Human
cuaaggaucucucaggagca

SEQ ID NO: 2556322 - RNA, 18 nt, Human
cuaaggaucucucaggag

SEQ ID NO: 2556323 - RNA, 17 nt, Human
cuaaggaucucucagga

SEQ ID NO: 2556324 - RNA, 15 nt, Human
cuaaggaucucucag

SEQ ID NO: 2556325 - RNA, 12 nt, Human
cuaaggaucucu

SEQ ID NO: 2556326 - RNA, 16 nt, Human
cuaagccuuuccauaa

SEQ ID NO: 2556327 - RNA, 22 nt, Human
cuaagggagagugguauuugca

SEQ ID NO: 2556328 - RNA, 17 nt, Human
cuaagggagagugguau

SEQ ID NO: 2556329 - RNA, 23 nt, Human
cuaagggagagugguauuugcag

SEQ ID NO: 2556330 - RNA, 12 nt, Human
cuaaggggcccg

SEQ ID NO: 2556331 - RNA, 13 nt, Human
cuaaggggcccgg

SEQ ID NO: 2556332 - RNA, 18 nt, Human
cuaaggggcccggccagc

SEQ ID NO: 2556333 - RNA, 22 nt, Human
cuaaggggcccggccagccaug

SEQ ID NO: 2556334 - RNA, 15 nt, Human
cuaaggugugcucug

SEQ ID NO: 2556335 - RNA, 18 nt, Human
cuaaggguguaaguaauu

SEQ ID NO: 2556336 - RNA, 19 nt, Human
cuaaggucauuaccacagg

SEQ ID NO: 2556337 - RNA, 22 nt, Human
cuacccacccuccuuucaccac

SEQ ID NO: 2556338 - RNA, 18 nt, Human
cuaccaucagggacagga

SEQ ID NO: 2556339 - RNA, 16 nt, Human
cuaccaucagggacag

SEQ ID NO: 2556340 - RNA, 15 nt, Human
cuaccaucagggaca

SEQ ID NO: 2556341 - RNA, 14 nt, Human
cuaccaucagggac

SEQ ID NO: 2556342 - RNA, 23 nt, Human
cuacccacguucucacacccacc

SEQ ID NO: 2556343 - RNA, 14 nt, Human
cuacccacuucuaa

SEQ ID NO: 2556344 - RNA, 17 nt, Human
cuacccacccuccuuuc

SEQ ID NO: 2556345 - RNA, 18 nt, Human
cuaccacugucuucuuca

SEQ ID NO: 2556346 - RNA, 17 nt, Human
cuaccacuccugccaag

SEQ ID NO: 2556347 - RNA, 20 nt, Human
cuaccagacuguguauucau

SEQ ID NO: 2556348 - RNA, 16 nt, Human
cuaccagacuguguau

SEQ ID NO: 2556349 - RNA, 17 nt, Human
cuaccagcgcccgcugg

SEQ ID NO: 2556350 - RNA, 20 nt, Human
cuacagagcuucccugacuc

SEQ ID NO: 2556351 - RNA, 14 nt, Human
cuaccacuccugcc

SEQ ID NO: 2556352 - RNA, 12 nt, Human
cuaccacuccug

SEQ ID NO: 2556353 - RNA, 22 nt, Human
cuaccagcgcccgcugggcuga

SEQ ID NO: 2556354 - RNA, 21 nt, Human
cuaccagcgcccgcugggcug

SEQ ID NO: 2556355 - RNA, 20 nt, Human
cuaccagcgcccgcugggcu

SEQ ID NO: 2556356 - RNA, 19 nt, Human
cuaccagcgcccgcugggc

SEQ ID NO: 2556357 - RNA, 15 nt, Human
cuaccagguguucua

SEQ ID NO: 2556358 - RNA, 19 nt, Human
cuacccagcgagcccuggu

SEQ ID NO: 2556359 - RNA, 20 nt, Human
cuacccagcgagcccuggug

SEQ ID NO: 2556360 - RNA, 14 nt, Human
cuacccagggccug

SEQ ID NO: 2556361 - RNA, 15 nt, Human
cuacccagggccugc

SEQ ID NO: 2556362 - RNA, 16 nt, Human
cuacccagggccugca

SEQ ID NO: 2556363 - RNA, 19 nt, Human
cuacccagggccugcagga

SEQ ID NO: 2556364 - RNA, 18 nt, Human
cuacccagagaagccccu

SEQ ID NO: 2556365 - RNA, 11 nt, Human
cuacccagggc

SEQ ID NO: 2556366 - RNA, 16 nt, Human
cuacccacuucuaaau

SEQ ID NO: 2556367 - RNA, 22 nt, Human
cuacccacuucuaaauagcaau

SEQ ID NO: 2556368 - RNA, 20 nt, Human
cuaccccgcagacaccuugg

SEQ ID NO: 2556369 - RNA, 15 nt, Human
cuaccccgcagacac

SEQ ID NO: 2556370 - RNA, 12 nt, Human
cuacccaggugc

SEQ ID NO: 2556371 - RNA, 17 nt, Human
cuaccccucccagcuga

SEQ ID NO: 2556372 - RNA, 16 nt, Human
cuaccccucccagcug

SEQ ID NO: 2556373 - RNA, 18 nt, Human
cuaccccucccagcugac

SEQ ID NO: 2556374 - RNA, 15 nt, Human
cuaccccucccagcu

SEQ ID NO: 2556375 - RNA, 13 nt, Human
cuaccccucccag

SEQ ID NO: 2556376 - RNA, 11 nt, Human
cuaccccuccc

SEQ ID NO: 2556377 - RNA, 20 nt, Human
cuaccccugaucugacaucc

SEQ ID NO: 2556378 - RNA, 17 nt, Human
cuacccgcaucuucugu

SEQ ID NO: 2556379 - RNA, 15 nt, Human
cuacccgcagaguuc

SEQ ID NO: 2556380 - RNA, 17 nt, Human
cuacacuccagugagac

SEQ ID NO: 2556381 - RNA, 18 nt, Human
cuacacugugcugagucu

SEQ ID NO: 2556382 - RNA, 16 nt, Human
cuacacuccagugaga

SEQ ID NO: 2556383 - RNA, 17 nt, Human
cuacacuccagccugag

SEQ ID NO: 2556384 - RNA, 18 nt, Human
cuacacuccagccugagc

SEQ ID NO: 2556385 - RNA, 16 nt, Human
cuacacuccagccuga

SEQ ID NO: 2556386 - RNA, 13 nt, Human
cuacacacugcau

SEQ ID NO: 2556387 - RNA, 15 nt, Human
cuacacacugcaugu

SEQ ID NO: 2556388 - RNA, 20 nt, Human
cuacaauuuucucccaggaa

SEQ ID NO: 2556389 - RNA, 16 nt, Human
cuacaauuuucuccca

SEQ ID NO: 2556390 - RNA, 15 nt, Human
cuacaauuuucuccc

SEQ ID NO: 2556391 - RNA, 18 nt, Human
cuacaaugugaacuuuau

SEQ ID NO: 2556392 - RNA, 13 nt, Human
cuacaaugugaac

SEQ ID NO: 2556393 - RNA, 17 nt, Human
cuacaaugugaacuuua

SEQ ID NO: 2556394 - RNA, 19 nt, Human
cuacaaugugaacuuuauu

SEQ ID NO: 2556395 - RNA, 16 nt, Human
cuacaauuuaaagcaa

SEQ ID NO: 2556396 - RNA, 22 nt, Human
cuacagagaaccuggaguuccu

SEQ ID NO: 2556397 - RNA, 16 nt, Human
cuacagagcuucccug

SEQ ID NO: 2556398 - RNA, 17 nt, Human
cuacagagcuucccuga

SEQ ID NO: 2556399 - RNA, 18 nt, Human
cuacagagcuucccugac

SEQ ID NO: 2556400 - RNA, 15 nt, Human
cuacagaggccaugg

SEQ ID NO: 2556401 - RNA, 16 nt, Human
cuacagacuucuccag

SEQ ID NO: 2556402 - RNA, 21 nt, Human
cuacagacuucuccagaccca

SEQ ID NO: 2556403 - RNA, 17 nt, Human
cuacacuccagccuggg

SEQ ID NO: 2556404 - RNA, 23 nt, Human
cuacaauuuucucccaggaagcu

SEQ ID NO: 2556405 - RNA, 21 nt, Human
cuaauaaaauuuaaaagucuu

SEQ ID NO: 2556406 - RNA, 12 nt, Human
cuaauaaagcug

SEQ ID NO: 2556407 - RNA, 20 nt, Human
cuaauaaaauuuaaaagucu

SEQ ID NO: 2556408 - RNA, 17 nt, Human
cuaagguggauuuucau

SEQ ID NO: 2556409 - RNA, 16 nt, Human
cuaaggugugcucuga

SEQ ID NO: 2556410 - RNA, 13 nt, Human
cuaauaaagcugu

SEQ ID NO: 2556411 - RNA, 18 nt, Human
cuaauauuaaaaauaugg

SEQ ID NO: 2556412 - RNA, 16 nt, Human
cuaauauuaaaaauau

SEQ ID NO: 2556413 - RNA, 14 nt, Human
cuaauauuaaaaau

SEQ ID NO: 2556414 - RNA, 13 nt, Human
cuaauauuaaaaa

SEQ ID NO: 2556415 - RNA, 18 nt, Human
cuaauauuuauugcuuua

SEQ ID NO: 2556416 - RNA, 17 nt, Human
cuaauauuuauugcuuu

SEQ ID NO: 2556417 - RNA, 16 nt, Human
cuaauauuuauugcuu

SEQ ID NO: 2556418 - RNA, 14 nt, Human
cuaauauuuuaugu

SEQ ID NO: 2556419 - RNA, 20 nt, Human
cuaaucuauggucgggagac

SEQ ID NO: 2556420 - RNA, 18 nt, Human
cuaaucuauggucgggag

SEQ ID NO: 2556421 - RNA, 19 nt, Human
cuaaucuagauaucgacuu

SEQ ID NO: 2556422 - RNA, 16 nt, Human
cuaauccucuuuuucu

SEQ ID NO: 2556423 - RNA, 21 nt, Human
cuaaucccugggcauugcuuu

SEQ ID NO: 2556424 - RNA, 22 nt, Human
cuaaucccugggcauugcuuuc

SEQ ID NO: 2556425 - RNA, 15 nt, Human
cuaaucgaacuauga

SEQ ID NO: 2556426 - RNA, 23 nt, Human
cuaaucccugggcauugcuuucc

SEQ ID NO: 2556427 - RNA, 18 nt, Human
cuaaucuguagggcugga

SEQ ID NO: 2556428 - RNA, 14 nt, Human
cuaaucuguagggc

SEQ ID NO: 2556429 - RNA, 13 nt, Human
cuaaucuguaggg

SEQ ID NO: 2556430 - RNA, 21 nt, Human
cuaaucuauuggguucauuau

SEQ ID NO: 2556431 - RNA, 19 nt, Human
cuaaucuauuggguucauu

SEQ ID NO: 2556432 - RNA, 20 nt, Human
cuaaucuauuggguucauua

SEQ ID NO: 2556433 - RNA, 14 nt, Human
cuaaucuauugggu

SEQ ID NO: 2556434 - RNA, 17 nt, Human
cuaaucuauuggguuca

SEQ ID NO: 2556435 - RNA, 18 nt, Human
cuaaucuauuggguucau

SEQ ID NO: 2556436 - RNA, 22 nt, Human
cuaaucuauuggguucauuauu

SEQ ID NO: 2556437 - RNA, 17 nt, Human
cuaaucagcauucucac

SEQ ID NO: 2556438 - RNA, 17 nt, Human
cuaauccaggcagaucc

SEQ ID NO: 2556439 - RNA, 19 nt, Human
cuaaucagcauucucacuc

SEQ ID NO: 2556440 - RNA, 18 nt, Human
cuaauccaggcagaucca

SEQ ID NO: 2556441 - RNA, 19 nt, Human
cuaauccaggcagauccag

SEQ ID NO: 2556442 - RNA, 20 nt, Human
cuaauccaggcagauccagg

SEQ ID NO: 2556443 - RNA, 23 nt, Human
cuaauccaggcagauccaggacu

SEQ ID NO: 2556444 - RNA, 18 nt, Human
cuaaucccgauucacccu

SEQ ID NO: 2556445 - RNA, 19 nt, Human
cuaaucccugggcauugcu

SEQ ID NO: 2556446 - RNA, 20 nt, Human
cuaaucccugggcauugcuu

SEQ ID NO: 2556447 - RNA, 22 nt, Human
cuaaucuguagggcuggaccua

SEQ ID NO: 2556448 - RNA, 21 nt, Human
cuaaucuguagggcuggaccu

SEQ ID NO: 2556449 - RNA, 22 nt, Human
cuaaucuucagggcacugcugc

SEQ ID NO: 2556450 - RNA, 15 nt, Human
cuaaucuucagggca

SEQ ID NO: 2556451 - RNA, 22 nt, Human
cuaaugacaucaccacaguuua

SEQ ID NO: 2556452 - RNA, 18 nt, Human
cuaaugaagggaaaggau

SEQ ID NO: 2556453 - RNA, 23 nt, Human
cuaaugaagggaaaggauauuuu

SEQ ID NO: 2556454 - RNA, 22 nt, Human
cuaaugaaugcauaaaauguua

SEQ ID NO: 2556455 - RNA, 19 nt, Human
cuaaugaaugcauaaaaug

SEQ ID NO: 2556456 - RNA, 16 nt, Human
cuaauguacugcauau

SEQ ID NO: 2556457 - RNA, 21 nt, Human
cuaauguauuuuauuguaaca

SEQ ID NO: 2556458 - RNA, 20 nt, Human
cuaauguauuuuauuguaac

SEQ ID NO: 2556459 - RNA, 19 nt, Human
cuaauguauuuuauuguaa

SEQ ID NO: 2556460 - RNA, 18 nt, Human
cuaauguauuuuauugua

SEQ ID NO: 2556461 - RNA, 17 nt, Human
cuaauguauuuuauugu

SEQ ID NO: 2556462 - RNA, 15 nt, Human
cuaauguauuuuauu

SEQ ID NO: 2556463 - RNA, 12 nt, Human
cuaaugauguuu

SEQ ID NO: 2556464 - RNA, 13 nt, Human
cuaaugauguuuu

SEQ ID NO: 2556465 - RNA, 14 nt, Human
cuaauguacugcau

SEQ ID NO: 2556466 - RNA, 19 nt, Human
cuaauguaauaacugugaa

SEQ ID NO: 2556467 - RNA, 15 nt, Human
cuacaagacacagug

SEQ ID NO: 2556468 - RNA, 15 nt, Human
cuacaagagcagccu

SEQ ID NO: 2556469 - RNA, 17 nt, Human
cuacaagagcagccugu

SEQ ID NO: 2556470 - RNA, 18 nt, Human
cuacaagagcagccugug

SEQ ID NO: 2556471 - RNA, 19 nt, Human
cuacaagagcagccugugg

SEQ ID NO: 2556472 - RNA, 20 nt, Human
cuacaagagcagccuguggc

SEQ ID NO: 2556473 - RNA, 19 nt, Human
cuacaagcuaaaauuagau

SEQ ID NO: 2556474 - RNA, 17 nt, Human
cuacaagcuaaaauuag

SEQ ID NO: 2556475 - RNA, 23 nt, Human
cuacaagagcagccuguggcauc

SEQ ID NO: 2556476 - RNA, 21 nt, Human
cuacaagagcagccuguggca

SEQ ID NO: 2556477 - RNA, 22 nt, Human
cuacaagagcagccuguggcau

SEQ ID NO: 2556478 - RNA, 17 nt, Human
cuaauguuuaugagcca

SEQ ID NO: 2556479 - RNA, 18 nt, Human
cuaauguuuaugagccag

SEQ ID NO: 2556480 - RNA, 20 nt, Human
cuaauguuuaugagccagac

SEQ ID NO: 2556481 - RNA, 14 nt, Human
cuaauuaauaaauu

SEQ ID NO: 2556482 - RNA, 19 nt, Human
cuaaugugguuauuucucu

SEQ ID NO: 2556483 - RNA, 19 nt, Human
cuaaugugccuaguucuuu

SEQ ID NO: 2556484 - RNA, 22 nt, Human
cuaaugucuucauuucauugua

SEQ ID NO: 2556485 - RNA, 21 nt, Human
cuaaugucuucauuucauugu

SEQ ID NO: 2556486 - RNA, 19 nt, Human
cuaaugucuucauuucauu

SEQ ID NO: 2556487 - RNA, 22 nt, Human
cuaauguauuuuauuguaacag

SEQ ID NO: 2556488 - RNA, 13 nt, Human
cuaaugucuucau

SEQ ID NO: 2556489 - RNA, 21 nt, Human
cuacccgggaagggggcuggg

SEQ ID NO: 2556490 - RNA, 20 nt, Human
cuacccgggaagggggcugg

SEQ ID NO: 2556491 - RNA, 15 nt, Human
cuacccgggaagggg

SEQ ID NO: 2556492 - RNA, 14 nt, Human
cuacccgggaaggg

SEQ ID NO: 2556493 - RNA, 21 nt, Human
cuacucugugucagguggggc

SEQ ID NO: 2556494 - RNA, 16 nt, Human
cuacucugugucaggu

SEQ ID NO: 2556495 - RNA, 15 nt, Human
cuacucuguuccuuc

SEQ ID NO: 2556496 - RNA, 13 nt, Human
cuacucuguguca

SEQ ID NO: 2556497 - RNA, 16 nt, Human
cuacucuguuccuuca

SEQ ID NO: 2556498 - RNA, 19 nt, Human
cuacucuguuccuucacau

SEQ ID NO: 2556499 - RNA, 15 nt, Human
cuacucuuaagccau

SEQ ID NO: 2556500 - RNA, 22 nt, Human
cuacucuguuccuucacauccu

SEQ ID NO: 2556501 - RNA, 16 nt, Human
cuacuguaauuuguga

SEQ ID NO: 2556502 - RNA, 21 nt, Human
cuacuguaaggcaaucauggu

SEQ ID NO: 2556503 - RNA, 17 nt, Human
cuacuguaauuugugau

SEQ ID NO: 2556504 - RNA, 21 nt, Human
cuacuguaagcaagaaaaaua

SEQ ID NO: 2556505 - RNA, 17 nt, Human
cuacuggucuuguggaa

SEQ ID NO: 2556506 - RNA, 22 nt, Human
cuacuguaauaaagaugauugu

SEQ ID NO: 2556507 - RNA, 13 nt, Human
cuacugugacuga

SEQ ID NO: 2556508 - RNA, 14 nt, Human
cuacuguggaaaaa

SEQ ID NO: 2556509 - RNA, 22 nt, Human
cuacucuuaagccaucuuggua

SEQ ID NO: 2556510 - RNA, 18 nt, Human
cuacucuuaagccaucuu

SEQ ID NO: 2556511 - RNA, 17 nt, Human
cuacucuuaagccaucu

SEQ ID NO: 2556512 - RNA, 16 nt, Human
cuacucuuaagccauc

SEQ ID NO: 2556513 - RNA, 22 nt, Human
cuacucuuaaguuucucagcuc

SEQ ID NO: 2556514 - RNA, 21 nt, Human
cuacucuuaaguuucucagcu

SEQ ID NO: 2556515 - RNA, 14 nt, Human
cuacugaggugcua

SEQ ID NO: 2556516 - RNA, 15 nt, Human
cuacugacauguggg

SEQ ID NO: 2556517 - RNA, 14 nt, Human
cuacugacaugugg

SEQ ID NO: 2556518 - RNA, 20 nt, Human
cuacugacauguggggccag

SEQ ID NO: 2556519 - RNA, 17 nt, Human
cuacugacuuucucagc

SEQ ID NO: 2556520 - RNA, 15 nt, Human
cuacuugggaggcug

SEQ ID NO: 2556521 - RNA, 18 nt, Human
cuacuugggaggcugaga

SEQ ID NO: 2556522 - RNA, 22 nt, Human
cuacuucuuuugcucuuagcug

SEQ ID NO: 2556523 - RNA, 22 nt, Human
cuacuucuuugcuuugcccagc

SEQ ID NO: 2556524 - RNA, 15 nt, Human
cuacuugagaggcug

SEQ ID NO: 2556525 - RNA, 18 nt, Human
cuacuuugacuuuuugca

SEQ ID NO: 2556526 - RNA, 19 nt, Human
cuacuuugacuuuuugcau

SEQ ID NO: 2556527 - RNA, 20 nt, Human
cuacuuugacuuuuugcauu

SEQ ID NO: 2556528 - RNA, 21 nt, Human
cuacuuugacuuuuugcauuu

SEQ ID NO: 2556529 - RNA, 19 nt, Human
cuacuugggaggcugagau

SEQ ID NO: 2556530 - RNA, 12 nt, Human
cuacuugggagg

SEQ ID NO: 2556531 - RNA, 13 nt, Human
cuacuugggccau

SEQ ID NO: 2556532 - RNA, 15 nt, Human
cuacuuuaagcacua

SEQ ID NO: 2556533 - RNA, 14 nt, Human
cuacuuccccuucc

SEQ ID NO: 2556534 - RNA, 15 nt, Human
cuacuuccccuuccu

SEQ ID NO: 2556535 - RNA, 13 nt, Human
cuacuuccuccuc

SEQ ID NO: 2556536 - RNA, 20 nt, Human
cuacuuccccuuccuaauuc

SEQ ID NO: 2556537 - RNA, 16 nt, Human
cuacuucccucaccca

SEQ ID NO: 2556538 - RNA, 20 nt, Human
cuacuuccugugacuucagc

SEQ ID NO: 2556539 - RNA, 19 nt, Human
cuacuuccuccuccccacu

SEQ ID NO: 2556540 - RNA, 17 nt, Human
cuacuuccuccucccca

SEQ ID NO: 2556541 - RNA, 20 nt, Human
cuacuuccuccuccccacuu

SEQ ID NO: 2556542 - RNA, 20 nt, Human
cuacuguguuccuggcaaua

SEQ ID NO: 2556543 - RNA, 15 nt, Human
cuacuguguuccugg

SEQ ID NO: 2556544 - RNA, 19 nt, Human
cuacuguguuccuggcaau

SEQ ID NO: 2556545 - RNA, 12 nt, Human
cuacuguguucc

SEQ ID NO: 2556546 - RNA, 13 nt, Human
cuacuguguuccu

SEQ ID NO: 2556547 - RNA, 14 nt, Human
cuacuguguuccug

SEQ ID NO: 2556548 - RNA, 22 nt, Human
cuacuuagcaugucccuaccga

SEQ ID NO: 2556549 - RNA, 15 nt, Human
cuacuguguguguga

SEQ ID NO: 2556550 - RNA, 21 nt, Human
cuacuguggaaaaauauuuaa

SEQ ID NO: 2556551 - RNA, 22 nt, Human
cuacuguggaaaaauauuuaag

SEQ ID NO: 2556552 - RNA, 15 nt, Human
cuacuguggaaaaau

SEQ ID NO: 2556553 - RNA, 17 nt, Human
cuacuguggaaaaauau

SEQ ID NO: 2556554 - RNA, 18 nt, Human
cuacuguggaaaaauauu

SEQ ID NO: 2556555 - RNA, 20 nt, Human
cuacuguggaaaaauauuua

SEQ ID NO: 2556556 - RNA, 17 nt, Human
cuacugugugugugaau

SEQ ID NO: 2556557 - RNA, 19 nt, Human
cuacugugugugugaauga

SEQ ID NO: 2556558 - RNA, 20 nt, Human
cuacugugugugugaaugaa

SEQ ID NO: 2556559 - RNA, 16 nt, Human
cuagauggcagucacu

SEQ ID NO: 2556560 - RNA, 14 nt, Human
cuagauggcuccuc

SEQ ID NO: 2556561 - RNA, 15 nt, Human
cuagauggcuccucu

SEQ ID NO: 2556562 - RNA, 16 nt, Human
cuagauggcuccucuc

SEQ ID NO: 2556563 - RNA, 18 nt, Human
cuagauggcuccucucag

SEQ ID NO: 2556564 - RNA, 20 nt, Human
cuagaugggcaugggguggg

SEQ ID NO: 2556565 - RNA, 13 nt, Human
cuagauggugcug

SEQ ID NO: 2556566 - RNA, 19 nt, Human
cuagauggugcugagaagc

SEQ ID NO: 2556567 - RNA, 22 nt, Human
cuagauggugcugagaagcuuu

SEQ ID NO: 2556568 - RNA, 14 nt, Human
cuagauggugcuga

SEQ ID NO: 2556569 - RNA, 15 nt, Human
cuagauggugcugag

SEQ ID NO: 2556570 - RNA, 16 nt, Human
cuagauggugcugaga

SEQ ID NO: 2556571 - RNA, 17 nt, Human
cuagauggugcugagaa

SEQ ID NO: 2556572 - RNA, 21 nt, Human
cuagauuacccccucauuguu

SEQ ID NO: 2556573 - RNA, 13 nt, Human
cuagaugucuuua

SEQ ID NO: 2556574 - RNA, 17 nt, Human
cuagaugaaguuuuaca

SEQ ID NO: 2556575 - RNA, 18 nt, Human
cuagaucaugaagaaccu

SEQ ID NO: 2556576 - RNA, 13 nt, Human
cuagauccacaca

SEQ ID NO: 2556577 - RNA, 17 nt, Human
cuagauccacacacaga

SEQ ID NO: 2556578 - RNA, 18 nt, Human
cuagauccacacacagag

SEQ ID NO: 2556579 - RNA, 19 nt, Human
cuagauccacacacagagg

SEQ ID NO: 2556580 - RNA, 21 nt, Human
cuagauccacacacagaggaa

SEQ ID NO: 2556581 - RNA, 13 nt, Human
cuagauuuaugaa

SEQ ID NO: 2556582 - RNA, 17 nt, Human
cuagauuuuguuuugcu

SEQ ID NO: 2556583 - RNA, 13 nt, Human
cuagauuuuguuu

SEQ ID NO: 2556584 - RNA, 12 nt, Human
cuagauuuuguu

SEQ ID NO: 2556585 - RNA, 20 nt, Human
cuagauuuuguuuugcuuuu

SEQ ID NO: 2556586 - RNA, 18 nt, Human
cuagauuuuguuuugcuu

SEQ ID NO: 2556587 - RNA, 21 nt, Human
cuagauuuuguuuugcuuuuu

SEQ ID NO: 2556588 - RNA, 24 nt, Human
cuagauugagagaagagacaaaca

SEQ ID NO: 2556589 - RNA, 20 nt, Human
cuagauucuacauauucuuu

SEQ ID NO: 2556590 - RNA, 18 nt, Human
cuagcaagugagagagau

SEQ ID NO: 2556591 - RNA, 15 nt, Human
cuagcaagugagaga

SEQ ID NO: 2556592 - RNA, 22 nt, Human
cuagcaaucacaacacuggcug

SEQ ID NO: 2556593 - RNA, 20 nt, Human
cuagcaaucacaacacuggc

SEQ ID NO: 2556594 - RNA, 19 nt, Human
cuagcaagugagagagaug

SEQ ID NO: 2556595 - RNA, 17 nt, Human
cuagcacuuugggaggc

SEQ ID NO: 2556596 - RNA, 14 nt, Human
cuagcacuggccug

SEQ ID NO: 2556597 - RNA, 13 nt, Human
cuagcacuggccu

SEQ ID NO: 2556598 - RNA, 15 nt, Human
cuagcaccagggacu

SEQ ID NO: 2556599 - RNA, 17 nt, Human
cuagagugaacuugggc

SEQ ID NO: 2556600 - RNA, 21 nt, Human
cuagagugaacuugggccacu

SEQ ID NO: 2556601 - RNA, 17 nt, Human
cuagaguagaguggagg

SEQ ID NO: 2556602 - RNA, 15 nt, Human
cuagaguccucacuc

SEQ ID NO: 2556603 - RNA, 20 nt, Human
cuagagucugaacagcugua

SEQ ID NO: 2556604 - RNA, 19 nt, Human
cuagagucugaacagcugu

SEQ ID NO: 2556605 - RNA, 16 nt, Human
cuagagucugaacagc

SEQ ID NO: 2556606 - RNA, 19 nt, Human
cuagaguccucacucccag

SEQ ID NO: 2556607 - RNA, 17 nt, Human
cuagagggaccucuccc

SEQ ID NO: 2556608 - RNA, 15 nt, Human
cuagagggaggggcc

SEQ ID NO: 2556609 - RNA, 16 nt, Human
cuagagggaggggccu

SEQ ID NO: 2556610 - RNA, 19 nt, Human
cuagagggaggggccuagg

SEQ ID NO: 2556611 - RNA, 21 nt, Human
cuagagggaggggccuaggcc

SEQ ID NO: 2556612 - RNA, 22 nt, Human
cuagagggaggggccuaggccu

SEQ ID NO: 2556613 - RNA, 22 nt, Human
cuagaggggggauuuccagcca

SEQ ID NO: 2556614 - RNA, 22 nt, Human
cuagagggauacacugaaguua

SEQ ID NO: 2556615 - RNA, 19 nt, Human
cuagaggguuccuguagac

SEQ ID NO: 2556616 - RNA, 15 nt, Human
cuagaggguuccugu

SEQ ID NO: 2556617 - RNA, 16 nt, Human
cuagaggguuccugua

SEQ ID NO: 2556618 - RNA, 18 nt, Human
cuagaggccagccccacc

SEQ ID NO: 2556619 - RNA, 19 nt, Human
cuagaggccagccccaccc

SEQ ID NO: 2556620 - RNA, 20 nt, Human
cuagaggccagccccaccca

SEQ ID NO: 2556621 - RNA, 19 nt, Human
cuagaggcagggaggggac

SEQ ID NO: 2556622 - RNA, 21 nt, Human
cuagaggccagccccacccag

SEQ ID NO: 2556623 - RNA, 18 nt, Human
cuagagggaccucuccca

SEQ ID NO: 2556624 - RNA, 19 nt, Human
cuagagggaccucucccag

SEQ ID NO: 2556625 - RNA, 20 nt, Human
cuagagggaccucucccagg

SEQ ID NO: 2556626 - RNA, 21 nt, Human
cuagagggaccucucccaggg

SEQ ID NO: 2556627 - RNA, 20 nt, Human
cuagacgagcaggcuucuuc

SEQ ID NO: 2556628 - RNA, 14 nt, Human
cuacuuuguccuuu

SEQ ID NO: 2556629 - RNA, 20 nt, Human
cuacuuuguccuuuuuguua

SEQ ID NO: 2556630 - RNA, 21 nt, Human
cuagacgagcaggcuucuucc

SEQ ID NO: 2556631 - RNA, 21 nt, Human
cuagacccacuggacucaccu

SEQ ID NO: 2556632 - RNA, 22 nt, Human
cuacuuuguccuuuuuguuauu

SEQ ID NO: 2556633 - RNA, 19 nt, Human
cuagacgcuucaucccaca

SEQ ID NO: 2556634 - RNA, 23 nt, Human
cuagacucaagguucccagagau

SEQ ID NO: 2556635 - RNA, 22 nt, Human
cuagacucaagguucccagaga

SEQ ID NO: 2556636 - RNA, 15 nt, Human
cuagagccugccugg

SEQ ID NO: 2556637 - RNA, 19 nt, Human
cuagagccugccuggagcg

SEQ ID NO: 2556638 - RNA, 18 nt, Human
cuagagccugccuggagc

SEQ ID NO: 2556639 - RNA, 17 nt, Human
cuagagccugccuggag

SEQ ID NO: 2556640 - RNA, 16 nt, Human
cuagagccugccugga

SEQ ID NO: 2556641 - RNA, 19 nt, Human
cuagaggaaccaaccccca

SEQ ID NO: 2556642 - RNA, 14 nt, Human
cuagaggcagggag

SEQ ID NO: 2556643 - RNA, 15 nt, Human
cuagaggcagggagg

SEQ ID NO: 2556644 - RNA, 18 nt, Human
cuagaggcagggagggga

SEQ ID NO: 2556645 - RNA, 17 nt, Human
cuagaggccagccccac

SEQ ID NO: 2556646 - RNA, 21 nt, Human
cuauauauaauucuguacaua

SEQ ID NO: 2556647 - RNA, 19 nt, Human
cuauauauaauucuguaca

SEQ ID NO: 2556648 - RNA, 18 nt, Human
cuauauauaauucuguac

SEQ ID NO: 2556649 - RNA, 17 nt, Human
cuauauauaauucugua

SEQ ID NO: 2556650 - RNA, 16 nt, Human
cuauauauaauucugu

SEQ ID NO: 2556651 - RNA, 16 nt, Human
cuauauaguuuauuga

SEQ ID NO: 2556652 - RNA, 13 nt, Human
cuauauauaauuc

SEQ ID NO: 2556653 - RNA, 22 nt, Human
cuauauaguuuauugacaauaa

SEQ ID NO: 2556654 - RNA, 18 nt, Human
cuauauaugugaugaucu

SEQ ID NO: 2556655 - RNA, 23 nt, Human
cuauauaugugaugaucuaccag

SEQ ID NO: 2556656 - RNA, 15 nt, Human
cuauauauguguaug

SEQ ID NO: 2556657 - RNA, 13 nt, Human
cuauauaugugua

SEQ ID NO: 2556658 - RNA, 17 nt, Human
cuauauauguguaugua

SEQ ID NO: 2556659 - RNA, 12 nt, Human
cuauauccaugu

SEQ ID NO: 2556660 - RNA, 13 nt, Human
cuauauccaugua

SEQ ID NO: 2556661 - RNA, 14 nt, Human
cuauauccauguac

SEQ ID NO: 2556662 - RNA, 15 nt, Human
cuauauccauguacu

SEQ ID NO: 2556663 - RNA, 16 nt, Human
cuauauccauguacug

SEQ ID NO: 2556664 - RNA, 22 nt, Human
cuaguuauuacccagaguuuuu

SEQ ID NO: 2556665 - RNA, 20 nt, Human
cuaguucauccaauccucac

SEQ ID NO: 2556666 - RNA, 21 nt, Human
cuaguucauccaauccucacu

SEQ ID NO: 2556667 - RNA, 22 nt, Human
cuaguucauccaauccucacug

SEQ ID NO: 2556668 - RNA, 24 nt, Human
cuaguucauccaauccucacuggg

SEQ ID NO: 2556669 - RNA, 12 nt, Human
cuaguucaucca

SEQ ID NO: 2556670 - RNA, 18 nt, Human
cuaguucauccaauccuc

SEQ ID NO: 2556671 - RNA, 19 nt, Human
cuaguucauccaauccuca

SEQ ID NO: 2556672 - RNA, 18 nt, Human
cuauaugauuuauaguuu

SEQ ID NO: 2556673 - RNA, 17 nt, Human
cuauaugauuuauaguu

SEQ ID NO: 2556674 - RNA, 16 nt, Human
cuauaugauuuauagu

SEQ ID NO: 2556675 - RNA, 13 nt, Human
cuauaugauuuau

SEQ ID NO: 2556676 - RNA, 23 nt, Human
cuauaugaauuuaaauauaauuc

SEQ ID NO: 2556677 - RNA, 20 nt, Human
cuauaugaauuuaaauauaa

SEQ ID NO: 2556678 - RNA, 16 nt, Human
cuauaugaauuuaaau

SEQ ID NO: 2556679 - RNA, 15 nt, Human
cuauaugaauuuaaa

SEQ ID NO: 2556680 - RNA, 20 nt, Human
cuauaucuguauauaaaaua

SEQ ID NO: 2556681 - RNA, 19 nt, Human
cuauaucuguauauaaaau

SEQ ID NO: 2556682 - RNA, 16 nt, Human
cuauaucuguauauaa

SEQ ID NO: 2556683 - RNA, 15 nt, Human
cuauaucuguauaua

SEQ ID NO: 2556684 - RNA, 14 nt, Human
cuauaucuauauau

SEQ ID NO: 2556685 - RNA, 13 nt, Human
cuauaucuauaua

SEQ ID NO: 2556686 - RNA, 15 nt, Human
cuauaugaaaaacaa

SEQ ID NO: 2556687 - RNA, 20 nt, Human
cuauauccauguacuguagu

SEQ ID NO: 2556688 - RNA, 18 nt, Human
cuauauccauguacugua

SEQ ID NO: 2556689 - RNA, 19 nt, Human
cuauauccauguacuguag

SEQ ID NO: 2556690 - RNA, 21 nt, Human
cuauauccauguacuguaguu

SEQ ID NO: 2556691 - RNA, 20 nt, Human
cuauauuuuuuguuaaauga

SEQ ID NO: 2556692 - RNA, 23 nt, Human
cuauauuguuuucaguguacaug

SEQ ID NO: 2556693 - RNA, 19 nt, Human
cuauauuguuugcuaagca

SEQ ID NO: 2556694 - RNA, 22 nt, Human
cuauauuguuuucaguguacau

SEQ ID NO: 2556695 - RNA, 14 nt, Human
cuaucacacagugg

SEQ ID NO: 2556696 - RNA, 18 nt, Human
cuaucaauauauaaauuu

SEQ ID NO: 2556697 - RNA, 21 nt, Human
cuaucaauagucaagaaaaau

SEQ ID NO: 2556698 - RNA, 20 nt, Human
cuaucaauagucaagaaaaa

SEQ ID NO: 2556699 - RNA, 16 nt, Human
cuaucaauagucaaga

SEQ ID NO: 2556700 - RNA, 14 nt, Human
cuaucaauagucaa

SEQ ID NO: 2556701 - RNA, 23 nt, Human
cuaucaagugugcuuuagcuuga

SEQ ID NO: 2556702 - RNA, 20 nt, Human
cuaucuguuuacaguguucc

SEQ ID NO: 2556703 - RNA, 17 nt, Human
cuaucuguuuacagugu

SEQ ID NO: 2556704 - RNA, 13 nt, Human
cuaucuuaauuuu

SEQ ID NO: 2556705 - RNA, 21 nt, Human
cuaucuguuuacaguguuccg

SEQ ID NO: 2556706 - RNA, 22 nt, Human
cuauauuuuuuguuaaaugauu

SEQ ID NO: 2556707 - RNA, 13 nt, Human
cuaucaaacugaa

SEQ ID NO: 2556708 - RNA, 20 nt, Human
cuaucaaguauuauaccuuu

SEQ ID NO: 2556709 - RNA, 16 nt, Human
cuaucaaacugaagcc

SEQ ID NO: 2556710 - RNA, 20 nt, Human
cuaucaaacugaagccagaa

SEQ ID NO: 2556711 - RNA, 21 nt, Human
cuaucaaagaccuugugugua

SEQ ID NO: 2556712 - RNA, 21 nt, Human
cuaucaaacugaagccagaaa

SEQ ID NO: 2556713 - RNA, 18 nt, Human
cuaugaaauauuauguua

SEQ ID NO: 2556714 - RNA, 22 nt, Human
cuaugaaugggcaaaacugaau

SEQ ID NO: 2556715 - RNA, 21 nt, Human
cuaucuuugccacccucaugc

SEQ ID NO: 2556716 - RNA, 23 nt, Human
cuaugaaugggcaaaacugaauu

SEQ ID NO: 2556717 - RNA, 14 nt, Human
cuaugaaugggcaa

SEQ ID NO: 2556718 - RNA, 17 nt, Human
cuaugaauucuaaguga

SEQ ID NO: 2556719 - RNA, 14 nt, Human
cuaugacacaugca

SEQ ID NO: 2556720 - RNA, 14 nt, Human
cuaucuuugccacc

SEQ ID NO: 2556721 - RNA, 15 nt, Human
cuaucuuugccaccc

SEQ ID NO: 2556722 - RNA, 18 nt, Human
cuaucuuugccacccuca

SEQ ID NO: 2556723 - RNA, 19 nt, Human
cuaucuuugccacccucau

SEQ ID NO: 2556724 - RNA, 13 nt, Human
cuaugaaauauua

SEQ ID NO: 2556725 - RNA, 23 nt, Human
cuaucuuaauuuugguuguauuc

SEQ ID NO: 2556726 - RNA, 22 nt, Human
cuaucuuaauuuugguuguauu

SEQ ID NO: 2556727 - RNA, 15 nt, Human
cuaucuuaauuuugg

SEQ ID NO: 2556728 - RNA, 14 nt, Human
cuaucuuaauuuug

SEQ ID NO: 2556729 - RNA, 21 nt, Human
cuaucuuagugguuccccacc

SEQ ID NO: 2556730 - RNA, 12 nt, Human
cuaucuuugcca

SEQ ID NO: 2556731 - RNA, 18 nt, Human
cuaucuugcucuguaauc

SEQ ID NO: 2556732 - RNA, 17 nt, Human
cuaucuugcucuguaau

SEQ ID NO: 2556733 - RNA, 21 nt, Human
cuaucuuauauaguuuacuau

SEQ ID NO: 2556734 - RNA, 21 nt, Human
cuaguauuucaugcugggaau

SEQ ID NO: 2556735 - RNA, 20 nt, Human
cuagucccuuccccucccug

SEQ ID NO: 2556736 - RNA, 21 nt, Human
cuagucccuuccccucccugg

SEQ ID NO: 2556737 - RNA, 15 nt, Human
cuaguccuuuacuaa

SEQ ID NO: 2556738 - RNA, 23 nt, Human
cuagucccuuccccucccuggcu

SEQ ID NO: 2556739 - RNA, 14 nt, Human
cuagucucucuggg

SEQ ID NO: 2556740 - RNA, 13 nt, Human
cuagucucucugg

SEQ ID NO: 2556741 - RNA, 22 nt, Human
cuagucucuaucauuaaaguuc

SEQ ID NO: 2556742 - RNA, 21 nt, Human
cuagucucuaucauuaaaguu

SEQ ID NO: 2556743 - RNA, 20 nt, Human
cuagucucuaucauuaaagu

SEQ ID NO: 2556744 - RNA, 23 nt, Human
cuagucuccuuugcacugagggc

SEQ ID NO: 2556745 - RNA, 21 nt, Human
cuagucuccuuugcacugagg

SEQ ID NO: 2556746 - RNA, 20 nt, Human
cuagucuccuuugcacugag

SEQ ID NO: 2556747 - RNA, 19 nt, Human
cuagucuccuuugcacuga

SEQ ID NO: 2556748 - RNA, 15 nt, Human
cuagucuccuuugca

SEQ ID NO: 2556749 - RNA, 21 nt, Human
cuagucguggagaugucuucg

SEQ ID NO: 2556750 - RNA, 20 nt, Human
cuagucguggagaugucuuc

SEQ ID NO: 2556751 - RNA, 18 nt, Human
cuaguccuauucuauugc

SEQ ID NO: 2556752 - RNA, 22 nt, Human
cuagucccuuccccucccuggc

SEQ ID NO: 2556753 - RNA, 14 nt, Human
cuagugcagcugau

SEQ ID NO: 2556754 - RNA, 15 nt, Human
cuagugcagcugauu

SEQ ID NO: 2556755 - RNA, 19 nt, Human
cuagugcagcugauuuuaa

SEQ ID NO: 2556756 - RNA, 16 nt, Human
cuagucucucuggggc

SEQ ID NO: 2556757 - RNA, 13 nt, Human
cuagucuuaagaa

SEQ ID NO: 2556758 - RNA, 17 nt, Human
cuagugccuucuaaagg

SEQ ID NO: 2556759 - RNA, 23 nt, Human
cuagugcccuccacagccgcagc

SEQ ID NO: 2556760 - RNA, 20 nt, Human
cuagugcagcugauuuuaac

SEQ ID NO: 2556761 - RNA, 21 nt, Human
cuagugcagcugauuuuaaca

SEQ ID NO: 2556762 - RNA, 22 nt, Human
cuagugcagcugauuuuaacaa

SEQ ID NO: 2556763 - RNA, 23 nt, Human
cuagugcagcugauuuuaacaau

SEQ ID NO: 2556764 - RNA, 18 nt, Human
cuagugcccuccacagcc

SEQ ID NO: 2556765 - RNA, 19 nt, Human
cuagugcccuccacagccg

SEQ ID NO: 2556766 - RNA, 19 nt, Human
cuagugugguguuuccugg

SEQ ID NO: 2556767 - RNA, 20 nt, Human
cuaguggucuuuguaagagu

SEQ ID NO: 2556768 - RNA, 19 nt, Human
cuaguggucuuuguaagag

SEQ ID NO: 2556769 - RNA, 18 nt, Human
cuaguggucuuuguaaga

SEQ ID NO: 2556770 - RNA, 17 nt, Human
cuaguggucuuuguaag

SEQ ID NO: 2556771 - RNA, 16 nt, Human
cuaguggucuuuguaa

SEQ ID NO: 2556772 - RNA, 15 nt, Human
cuaguggucuuugua

SEQ ID NO: 2556773 - RNA, 14 nt, Human
cuaguggucuuugu

SEQ ID NO: 2556774 - RNA, 23 nt, Human
cuaguggggucucccucuccugc

SEQ ID NO: 2556775 - RNA, 12 nt, Human
cuagugcugcug

SEQ ID NO: 2556776 - RNA, 22 nt, Human
cuagugugguguuuccuggcac

SEQ ID NO: 2556777 - RNA, 21 nt, Human
cuagugugguguuuccuggca

SEQ ID NO: 2556778 - RNA, 23 nt, Human
cuagugugguguuuccuggcacu

SEQ ID NO: 2556779 - RNA, 22 nt, Human
cuaguggucuuuguaagagugu

SEQ ID NO: 2556780 - RNA, 14 nt, Human
cuaguguugcuugg

SEQ ID NO: 2556781 - RNA, 20 nt, Human
cuaguauuucuaugaaauau

SEQ ID NO: 2556782 - RNA, 19 nt, Human
cuaguauuucuaugaaaua

SEQ ID NO: 2556783 - RNA, 22 nt, Human
cuaguauuucuaugaaauauua

SEQ ID NO: 2556784 - RNA, 15 nt, Human
cuaguaucaaaagaa

SEQ ID NO: 2556785 - RNA, 17 nt, Human
cuaguaucaaaagaaag

SEQ ID NO: 2556786 - RNA, 17 nt, Human
cuaguaguuccugcuac

SEQ ID NO: 2556787 - RNA, 23 nt, Human
cuaguauuccagaccugaagaau

SEQ ID NO: 2556788 - RNA, 23 nt, Human
cuaguaucaaaagaaagaaaauc

SEQ ID NO: 2556789 - RNA, 21 nt, Human
cuaggcauuugcugaauacag

SEQ ID NO: 2556790 - RNA, 19 nt, Human
cuaggcaucccaggggacc

SEQ ID NO: 2556791 - RNA, 15 nt, Human
cuaggcaucccaggg

SEQ ID NO: 2556792 - RNA, 18 nt, Human
cuaggcaucccaggggac

SEQ ID NO: 2556793 - RNA, 14 nt, Human
cuaggcaucccagg

SEQ ID NO: 2556794 - RNA, 16 nt, Human
cuaggcaggaccugug

SEQ ID NO: 2556795 - RNA, 15 nt, Human
cuaggcaggaccugu

SEQ ID NO: 2556796 - RNA, 19 nt, Human
cuaggccacaccaucuccu

SEQ ID NO: 2556797 - RNA, 14 nt, Human
cuaggccacuccuc

SEQ ID NO: 2556798 - RNA, 15 nt, Human
cuaggccacuccucc

SEQ ID NO: 2556799 - RNA, 19 nt, Human
cuaggccacuccuccaaag

SEQ ID NO: 2556800 - RNA, 16 nt, Human
cuaggccacuccucca

SEQ ID NO: 2556801 - RNA, 17 nt, Human
cuaggccacuccuccaa

SEQ ID NO: 2556802 - RNA, 22 nt, Human
cuaguacuugggagaccuguaa

SEQ ID NO: 2556803 - RNA, 16 nt, Human
cuaggcccccacuugc

SEQ ID NO: 2556804 - RNA, 15 nt, Human
cuaggcccccacuug

SEQ ID NO: 2556805 - RNA, 13 nt, Human
cuaggcccccacu

SEQ ID NO: 2556806 - RNA, 15 nt, Human
cuaggaacacuccuu

SEQ ID NO: 2556807 - RNA, 13 nt, Human
cuaggaacacucc

SEQ ID NO: 2556808 - RNA, 22 nt, Human
cuagcagcaccguucugugcac

SEQ ID NO: 2556809 - RNA, 11 nt, Human
cuagcagagag

SEQ ID NO: 2556810 - RNA, 21 nt, Human
cuaggaagacuuuggaaagag

SEQ ID NO: 2556811 - RNA, 20 nt, Human
cuagcagcaccguucugugc

SEQ ID NO: 2556812 - RNA, 21 nt, Human
cuagcagcaccguucugugca

SEQ ID NO: 2556813 - RNA, 16 nt, Human
cuaggaaauccagggu

SEQ ID NO: 2556814 - RNA, 17 nt, Human
cuaggaaauccagggug

SEQ ID NO: 2556815 - RNA, 16 nt, Human
cuagcacuggccugca

SEQ ID NO: 2556816 - RNA, 15 nt, Human
cuagcacuggccugc

SEQ ID NO: 2556817 - RNA, 16 nt, Human
cuagcacuuggagcca

SEQ ID NO: 2556818 - RNA, 17 nt, Human
cuagcagaaaucuagaa

SEQ ID NO: 2556819 - RNA, 12 nt, Human
cuagcagcaccg

SEQ ID NO: 2556820 - RNA, 19 nt, Human
cuagcagcaccguucugug

SEQ ID NO: 2556821 - RNA, 19 nt, Human
cuagcagagcaggggcagg

SEQ ID NO: 2556822 - RNA, 23 nt, Human
cuagcagagcaggggcaggguga

SEQ ID NO: 2556823 - RNA, 22 nt, Human
cuaggaccccuccaugugggcu

SEQ ID NO: 2556824 - RNA, 16 nt, Human
cuaggaaugaaauccu

SEQ ID NO: 2556825 - RNA, 17 nt, Human
cuaggaaugaaauccug

SEQ ID NO: 2556826 - RNA, 15 nt, Human
cuaggaauucccagc

SEQ ID NO: 2556827 - RNA, 15 nt, Human
cuaggacucugaggc

SEQ ID NO: 2556828 - RNA, 16 nt, Human
cuaggacucugaggcu

SEQ ID NO: 2556829 - RNA, 22 nt, Human
cuaggacgccacccagcaaaag

SEQ ID NO: 2556830 - RNA, 12 nt, Human
cuaggacucuga

SEQ ID NO: 2556831 - RNA, 14 nt, Human
cuaggacucugagg

SEQ ID NO: 2556832 - RNA, 23 nt, Human
cuaggagaaggaggggaaccaga

SEQ ID NO: 2556833 - RNA, 18 nt, Human
cuaggacgccacccagca

SEQ ID NO: 2556834 - RNA, 23 nt, Human
cuaggagaaccaaaucuggaagc

SEQ ID NO: 2556835 - RNA, 16 nt, Human
cuaggagaccaaggcg

SEQ ID NO: 2556836 - RNA, 20 nt, Human
cuaggagaccaaggcgggag

SEQ ID NO: 2556837 - RNA, 21 nt, Human
cuaggagaaccaaaucuggaa

SEQ ID NO: 2556838 - RNA, 18 nt, Human
cuaggagaaccaaaucug

SEQ ID NO: 2556839 - RNA, 22 nt, Human
cuaggacucugaggcucuuucu

SEQ ID NO: 2556840 - RNA, 22 nt, Human
cuaggagggagacacuggcccc

SEQ ID NO: 2556841 - RNA, 18 nt, Human
cuaggagggagacacugg

SEQ ID NO: 2556842 - RNA, 13 nt, Human
cuaggagggagac

SEQ ID NO: 2556843 - RNA, 17 nt, Human
cuaggaggucucuaaga

SEQ ID NO: 2556844 - RNA, 23 nt, Human
cuaggagauaucugagggaggag

SEQ ID NO: 2556845 - RNA, 21 nt, Human
cuaggagauaucugagggagg

SEQ ID NO: 2556846 - RNA, 19 nt, Human
cuaggagauaucugaggga

SEQ ID NO: 2556847 - RNA, 18 nt, Human
cuaggagauaucugaggg

SEQ ID NO: 2556848 - RNA, 13 nt, Human
cuaggagcacugu

SEQ ID NO: 2556849 - RNA, 15 nt, Human
cuaggagcugggagg

SEQ ID NO: 2556850 - RNA, 16 nt, Human
cuaggagcugggagga

SEQ ID NO: 2556851 - RNA, 19 nt, Human
cuaggagcugggaggaaaa

SEQ ID NO: 2556852 - RNA, 13 nt, Human
cuaggauuucaug

SEQ ID NO: 2556853 - RNA, 22 nt, Human
cuaggcaggacaugcugaagcc

SEQ ID NO: 2556854 - RNA, 13 nt, Human
cuaggcaggacau

SEQ ID NO: 2556855 - RNA, 23 nt, Human
cuaggagggagacacuggccccu

SEQ ID NO: 2556856 - RNA, 17 nt, Human
cuaggauaucuucucca

SEQ ID NO: 2556857 - RNA, 15 nt, Human
cuaggauaucuucuc

SEQ ID NO: 2556858 - RNA, 11 nt, Human
cuaugcauuug

SEQ ID NO: 2556859 - RNA, 12 nt, Human
cuaugcauuuga

SEQ ID NO: 2556860 - RNA, 16 nt, Human
cuaugagaaaagaggc

SEQ ID NO: 2556861 - RNA, 11 nt, Human
cuaugagaaaa

SEQ ID NO: 2556862 - RNA, 17 nt, Human
cuaugacugcuccccag

SEQ ID NO: 2556863 - RNA, 16 nt, Human
cuaugacugcucccca

SEQ ID NO: 2556864 - RNA, 15 nt, Human
cuaugacugcucccc

SEQ ID NO: 2556865 - RNA, 13 nt, Human
cucacaguuccuc

SEQ ID NO: 2556866 - RNA, 16 nt, Human
cucacaguuccucgcc

SEQ ID NO: 2556867 - RNA, 17 nt, Human
cucacaguuccucgccc

SEQ ID NO: 2556868 - RNA, 18 nt, Human
cucacaguuccucgcccu

SEQ ID NO: 2556869 - RNA, 19 nt, Human
cucacaguuccucgcccug

SEQ ID NO: 2556870 - RNA, 20 nt, Human
cucacaguuccucgcccugg

SEQ ID NO: 2556871 - RNA, 22 nt, Human
cucacagugggagccagggcug

SEQ ID NO: 2556872 - RNA, 19 nt, Human
cucacagugggagccaggg

SEQ ID NO: 2556873 - RNA, 17 nt, Human
cucacaguguugcccag

SEQ ID NO: 2556874 - RNA, 21 nt, Human
cucacaguguugcccaggcug

SEQ ID NO: 2556875 - RNA, 23 nt, Human
cucacaguccuuaccagcagagc

SEQ ID NO: 2556876 - RNA, 18 nt, Human
cucaaggccucccacagu

SEQ ID NO: 2556877 - RNA, 19 nt, Human
cucacagucucuuuaaucu

SEQ ID NO: 2556878 - RNA, 18 nt, Human
cucacagugggagccagg

SEQ ID NO: 2556879 - RNA, 20 nt, Human
cucacagucucuuuaaucuu

SEQ ID NO: 2556880 - RNA, 20 nt, Human
cucaagugauucuccugccu

SEQ ID NO: 2556881 - RNA, 19 nt, Human
cucaagugauucuccugcc

SEQ ID NO: 2556882 - RNA, 18 nt, Human
cucaagugauucuccugc

SEQ ID NO: 2556883 - RNA, 22 nt, Human
cucaaggacuuugcagccggca

SEQ ID NO: 2556884 - RNA, 16 nt, Human
cucaaggacuuugcag

SEQ ID NO: 2556885 - RNA, 17 nt, Human
cucaaggccucccacag

SEQ ID NO: 2556886 - RNA, 16 nt, Human
cucaaggccucccaca

SEQ ID NO: 2556887 - RNA, 15 nt, Human
cucaaggccucccac

SEQ ID NO: 2556888 - RNA, 20 nt, Human
cucaaggacuugaaagcauc

SEQ ID NO: 2556889 - RNA, 13 nt, Human
cucacauuuauau

SEQ ID NO: 2556890 - RNA, 19 nt, Human
cucaccagccccagugccc

SEQ ID NO: 2556891 - RNA, 21 nt, Human
cucacauggugcuacgccugc

SEQ ID NO: 2556892 - RNA, 23 nt, Human
cucacaguuccucgcccuggguc

SEQ ID NO: 2556893 - RNA, 20 nt, Human
cucacaucuuucacacuucc

SEQ ID NO: 2556894 - RNA, 21 nt, Human
cucacaguuccucgcccuggg

SEQ ID NO: 2556895 - RNA, 22 nt, Human
cucacaguuccucgcccugggu

SEQ ID NO: 2556896 - RNA, 20 nt, Human
cucacauagcuuacaagcca

SEQ ID NO: 2556897 - RNA, 21 nt, Human
cucaccagccccagugcccac

SEQ ID NO: 2556898 - RNA, 20 nt, Human
cucaccagccccagugccca

SEQ ID NO: 2556899 - RNA, 22 nt, Human
cucacaugucaguaccuucaaa

SEQ ID NO: 2556900 - RNA, 23 nt, Human
cucacauggugcuacgccugcau

SEQ ID NO: 2556901 - RNA, 23 nt, Human
cucacuaggcccccacuugccuc

SEQ ID NO: 2556902 - RNA, 17 nt, Human
cucacuauaccaguaua

SEQ ID NO: 2556903 - RNA, 20 nt, Human
cucacuaggcuucugguuga

SEQ ID NO: 2556904 - RNA, 20 nt, Human
cucacuaucccggcugcccu

SEQ ID NO: 2556905 - RNA, 21 nt, Human
cucacuaucccggcugcccuu

SEQ ID NO: 2556906 - RNA, 17 nt, Human
cucacuauguugcccag

SEQ ID NO: 2556907 - RNA, 16 nt, Human
cucacuauguugccca

SEQ ID NO: 2556908 - RNA, 17 nt, Human
cucaccccuugccauaa

SEQ ID NO: 2556909 - RNA, 13 nt, Human
cucacuaggcuuc

SEQ ID NO: 2556910 - RNA, 16 nt, Human
cucacuaggcuucugg

SEQ ID NO: 2556911 - RNA, 23 nt, Human
cucaccccugguucucaucuuuc

SEQ ID NO: 2556912 - RNA, 21 nt, Human
cucaccccugguucucaucuu

SEQ ID NO: 2556913 - RNA, 20 nt, Human
cucaccccugguucucaucu

SEQ ID NO: 2556914 - RNA, 19 nt, Human
cucaccccugguucucauc

SEQ ID NO: 2556915 - RNA, 22 nt, Human
cucaccccuguccucacugcuc

SEQ ID NO: 2556916 - RNA, 21 nt, Human
cucaccccuguccucacugcu

SEQ ID NO: 2556917 - RNA, 20 nt, Human
cucaccccuguccucacugc

SEQ ID NO: 2556918 - RNA, 19 nt, Human
cucaccccuguccucacug

SEQ ID NO: 2556919 - RNA, 18 nt, Human
cucaccccuguccucacu

SEQ ID NO: 2556920 - RNA, 15 nt, Human
cucaccccuguccuc

SEQ ID NO: 2556921 - RNA, 13 nt, Human
cucaccccugucc

SEQ ID NO: 2556922 - RNA, 18 nt, Human
cucaccccugcccuggga

SEQ ID NO: 2556923 - RNA, 15 nt, Human
cucacccccuucucc

SEQ ID NO: 2556924 - RNA, 14 nt, Human
cucacccccucggg

SEQ ID NO: 2556925 - RNA, 13 nt, Human
cucacccccucgg

SEQ ID NO: 2556926 - RNA, 16 nt, Human
cucacccccuucucca

SEQ ID NO: 2556927 - RNA, 17 nt, Human
cucacccccuucuccau

SEQ ID NO: 2556928 - RNA, 19 nt, Human
cucacccccuucuccaucc

SEQ ID NO: 2556929 - RNA, 20 nt, Human
cucacccccuucuccaucca

SEQ ID NO: 2556930 - RNA, 17 nt, Human
cucaccccugguucuca

SEQ ID NO: 2556931 - RNA, 14 nt, Human
cucaccccugguuc

SEQ ID NO: 2556932 - RNA, 15 nt, Human
cucaccccgucuggg

SEQ ID NO: 2556933 - RNA, 15 nt, Human
cucaccccugcccug

SEQ ID NO: 2556934 - RNA, 16 nt, Human
cucaccccugcccugg

SEQ ID NO: 2556935 - RNA, 17 nt, Human
cucaccccugcccuggg

SEQ ID NO: 2556936 - RNA, 21 nt, Human
cucacccccuucuccauccac

SEQ ID NO: 2556937 - RNA, 13 nt, Human
cucaccccggcag

SEQ ID NO: 2556938 - RNA, 21 nt, Human
cucacccccucgggucuccuc

SEQ ID NO: 2556939 - RNA, 16 nt, Human
cucaccccgucugggg

SEQ ID NO: 2556940 - RNA, 13 nt, Human
cucaccccagccc

SEQ ID NO: 2556941 - RNA, 12 nt, Human
cucaccccagcc

SEQ ID NO: 2556942 - RNA, 14 nt, Human
cucaccccagcccc

SEQ ID NO: 2556943 - RNA, 16 nt, Human
cucacccaugugccaa

SEQ ID NO: 2556944 - RNA, 20 nt, Human
cucaccccccacacucacuc

SEQ ID NO: 2556945 - RNA, 19 nt, Human
cucaccccccacacucacu

SEQ ID NO: 2556946 - RNA, 16 nt, Human
cucaccccccacacuc

SEQ ID NO: 2556947 - RNA, 14 nt, Human
cuaugcauuugaaa

SEQ ID NO: 2556948 - RNA, 23 nt, Human
cuauuugccaugggcuucacugu

SEQ ID NO: 2556949 - RNA, 22 nt, Human
cuauuugccaugggcuucacug

SEQ ID NO: 2556950 - RNA, 16 nt, Human
cuauuuggaauuuaua

SEQ ID NO: 2556951 - RNA, 12 nt, Human
cuauuuggaauu

SEQ ID NO: 2556952 - RNA, 18 nt, Human
cuauuuuaauaaacacuc

SEQ ID NO: 2556953 - RNA, 16 nt, Human
cuauuuguuuucaugg

SEQ ID NO: 2556954 - RNA, 22 nt, Human
cuauuuguugaugcuuguguca

SEQ ID NO: 2556955 - RNA, 17 nt, Human
cuauuugucuuucagga

SEQ ID NO: 2556956 - RNA, 22 nt, Human
cuauuuuaauaaacacucuuga

SEQ ID NO: 2556957 - RNA, 12 nt, Human
cuauuuuauucc

SEQ ID NO: 2556958 - RNA, 23 nt, Human
cuauuuguuuucuucuguauguu

SEQ ID NO: 2556959 - RNA, 18 nt, Human
cuauuuugaaaaauuccu

SEQ ID NO: 2556960 - RNA, 16 nt, Human
cuauuuucauuuucug

SEQ ID NO: 2556961 - RNA, 18 nt, Human
cuauuuucauuguaaaac

SEQ ID NO: 2556962 - RNA, 16 nt, Human
cucaaauggggccaga

SEQ ID NO: 2556963 - RNA, 17 nt, Human
cucaaauggggccagau

SEQ ID NO: 2556964 - RNA, 15 nt, Human
cucaaauggggccag

SEQ ID NO: 2556965 - RNA, 22 nt, Human
cucaaaugcucagaccagcucu

SEQ ID NO: 2556966 - RNA, 12 nt, Human
cuauuuuguaaa

SEQ ID NO: 2556967 - RNA, 17 nt, Human
cuauuuuggauuguaua

SEQ ID NO: 2556968 - RNA, 16 nt, Human
cucaaauuaaucuuuc

SEQ ID NO: 2556969 - RNA, 19 nt, Human
cucaaauggggccagaucc

SEQ ID NO: 2556970 - RNA, 20 nt, Human
cucaaauggggccagaucca

SEQ ID NO: 2556971 - RNA, 21 nt, Human
cucaaauggggccagauccag

SEQ ID NO: 2556972 - RNA, 13 nt, Human
cucaaccucuucu

SEQ ID NO: 2556973 - RNA, 14 nt, Human
cucaaccucuucug

SEQ ID NO: 2556974 - RNA, 18 nt, Human
cucaaccucuucuggcuc

SEQ ID NO: 2556975 - RNA, 20 nt, Human
cucaaccucuucuggcucaa

SEQ ID NO: 2556976 - RNA, 12 nt, Human
cucaaccucuuc

SEQ ID NO: 2556977 - RNA, 23 nt, Human
cucaaauuaaucuuucuuuaccu

SEQ ID NO: 2556978 - RNA, 21 nt, Human
cucaacucuccuccagaguca

SEQ ID NO: 2556979 - RNA, 20 nt, Human
cucaacucuccuccagaguc

SEQ ID NO: 2556980 - RNA, 15 nt, Human
cucaacguauuguuu

SEQ ID NO: 2556981 - RNA, 16 nt, Human
cucaacguauuguuuc

SEQ ID NO: 2556982 - RNA, 17 nt, Human
cucaacguuacauuuuu

SEQ ID NO: 2556983 - RNA, 18 nt, Human
cucaacguugcuccccau

SEQ ID NO: 2556984 - RNA, 21 nt, Human
cucaaccucuucuggcucaaa

SEQ ID NO: 2556985 - RNA, 21 nt, Human
cucaaccugugaugaggggag

SEQ ID NO: 2556986 - RNA, 13 nt, Human
cucaaccugugau

SEQ ID NO: 2556987 - RNA, 16 nt, Human
cucaagcgauucuccu

SEQ ID NO: 2556988 - RNA, 17 nt, Human
cucaagcgauucuccug

SEQ ID NO: 2556989 - RNA, 22 nt, Human
cucaagcccugcagucacagcu

SEQ ID NO: 2556990 - RNA, 18 nt, Human
cucaagaucaaugaaaug

SEQ ID NO: 2556991 - RNA, 17 nt, Human
cucaagaucaaugaaau

SEQ ID NO: 2556992 - RNA, 21 nt, Human
cucaagauacugcuacuguaa

SEQ ID NO: 2556993 - RNA, 22 nt, Human
cucaagauacugcuacuguaau

SEQ ID NO: 2556994 - RNA, 17 nt, Human
cucaagauacugcuacu

SEQ ID NO: 2556995 - RNA, 17 nt, Human
cucaagaggcugaggca

SEQ ID NO: 2556996 - RNA, 17 nt, Human
cucaagcugcaucuaga

SEQ ID NO: 2556997 - RNA, 23 nt, Human
cucaaggaauaaugggcuuagag

SEQ ID NO: 2556998 - RNA, 17 nt, Human
cucaaggaaaggccuga

SEQ ID NO: 2556999 - RNA, 10 nt, Human
cucaaggacu

SEQ ID NO: 2557000 - RNA, 14 nt, Human
cucaaggaaagggg

SEQ ID NO: 2557001 - RNA, 15 nt, Human
cucaaggacuugaaa

SEQ ID NO: 2557002 - RNA, 18 nt, Human
cucaaggacuugaaagca

SEQ ID NO: 2557003 - RNA, 19 nt, Human
cucaaggacuugaaagcau

SEQ ID NO: 2557004 - RNA, 17 nt, Human
cucaagagggcacuggu

SEQ ID NO: 2557005 - RNA, 14 nt, Human
cucaagaggcugag

SEQ ID NO: 2557006 - RNA, 16 nt, Human
cucaagaggcugaggc

SEQ ID NO: 2557007 - RNA, 21 nt, Human
cucaagagggcacugguggcc

SEQ ID NO: 2557008 - RNA, 19 nt, Human
cucaagagggcacuggugg

SEQ ID NO: 2557009 - RNA, 13 nt, Human
cucaacugccuac

SEQ ID NO: 2557010 - RNA, 15 nt, Human
cucaacugccuacuc

SEQ ID NO: 2557011 - RNA, 23 nt, Human
cucaacugccuacuccaaaaugu

SEQ ID NO: 2557012 - RNA, 19 nt, Human
cucaacucuccuccagagu

SEQ ID NO: 2557013 - RNA, 13 nt, Human
cgugccaggcccg

SEQ ID NO: 2557014 - RNA, 23 nt, Human
cgugccuuuugcaccccucccau

SEQ ID NO: 2557015 - RNA, 17 nt, Human
cgugccagucgcgcugc

SEQ ID NO: 2557016 - RNA, 19 nt, Human
cgugccaggcccggggcug

SEQ ID NO: 2557017 - RNA, 23 nt, Human
cgugcuacccccaugcuggaggu

SEQ ID NO: 2557018 - RNA, 20 nt, Human
cgugccagucgcgcugccug

SEQ ID NO: 2557019 - RNA, 21 nt, Human
cgugccuuuugcaccccuccc

SEQ ID NO: 2557020 - RNA, 19 nt, Human
cgugcucgccccagcaggu

SEQ ID NO: 2557021 - RNA, 18 nt, Human
cgugcuccagccuggcuc

SEQ ID NO: 2557022 - RNA, 17 nt, Human
cgugcuccagccuggcu

SEQ ID NO: 2557023 - RNA, 16 nt, Human
cgugcuccagccuggc

SEQ ID NO: 2557024 - RNA, 14 nt, Human
cgugcuaaauuuuc

SEQ ID NO: 2557025 - RNA, 15 nt, Human
cgugcugacagcugc

SEQ ID NO: 2557026 - RNA, 17 nt, Human
cgugcugacagcugcuc

SEQ ID NO: 2557027 - RNA, 16 nt, Human
cgugcugacagcugcu

SEQ ID NO: 2557028 - RNA, 20 nt, Human
cgugcuuagccuccugaccu

SEQ ID NO: 2557029 - RNA, 18 nt, Human
cgugcuuagccuccugac

SEQ ID NO: 2557030 - RNA, 14 nt, Human
cgugcuuccucagu

SEQ ID NO: 2557031 - RNA, 22 nt, Human
cgugcuuguuugcucaccuggg

SEQ ID NO: 2557032 - RNA, 15 nt, Human
cguggaacguuuuuc

SEQ ID NO: 2557033 - RNA, 22 nt, Human
cguggacuccagacucucugug

SEQ ID NO: 2557034 - RNA, 22 nt, Human
cguggacuuggggucagagacu

SEQ ID NO: 2557035 - RNA, 17 nt, Human
cguggagagcuggugcc

SEQ ID NO: 2557036 - RNA, 12 nt, Human
cguggagaggga

SEQ ID NO: 2557037 - RNA, 20 nt, Human
cguggagagcuggugcccgg

SEQ ID NO: 2557038 - RNA, 16 nt, Human
cguggagaugucuucg

SEQ ID NO: 2557039 - RNA, 15 nt, Human
cguggagaugucuuc

SEQ ID NO: 2557040 - RNA, 13 nt, Human
cguggagagggau

SEQ ID NO: 2557041 - RNA, 21 nt, Human
cguggagagggaugaggugcu

SEQ ID NO: 2557042 - RNA, 18 nt, Human
cguggagcagaaucagua

SEQ ID NO: 2557043 - RNA, 17 nt, Human
cguggagcagaaucagu

SEQ ID NO: 2557044 - RNA, 15 nt, Human
cguggagcugccuga

SEQ ID NO: 2557045 - RNA, 14 nt, Human
cguggagcugccug

SEQ ID NO: 2557046 - RNA, 18 nt, Human
cguggaggaaugcucccc

SEQ ID NO: 2557047 - RNA, 17 nt, Human
cguggaggaggaaggca

SEQ ID NO: 2557048 - RNA, 16 nt, Human
cguggaggagcagugc

SEQ ID NO: 2557049 - RNA, 22 nt, Human
cguggaggaaugcucccccauc

SEQ ID NO: 2557050 - RNA, 16 nt, Human
cguggacaggugugcc

SEQ ID NO: 2557051 - RNA, 20 nt, Human
cguggacuccagacucucug

SEQ ID NO: 2557052 - RNA, 17 nt, Human
cguggaccuuccugcca

SEQ ID NO: 2557053 - RNA, 15 nt, Human
cguggaccuuccugc

SEQ ID NO: 2557054 - RNA, 14 nt, Human
cguggaccuuccug

SEQ ID NO: 2557055 - RNA, 16 nt, Human
cguggacucugcacau

SEQ ID NO: 2557056 - RNA, 13 nt, Human
cguggacucugca

SEQ ID NO: 2557057 - RNA, 15 nt, Human
cguggaaagggugcu

SEQ ID NO: 2557058 - RNA, 21 nt, Human
cguggaaagggugcugcuucc

SEQ ID NO: 2557059 - RNA, 20 nt, Human
cguggaacguuuuuccuguu

SEQ ID NO: 2557060 - RNA, 22 nt, Human
cguggaggagcagugcaggcac

SEQ ID NO: 2557061 - RNA, 17 nt, Human
cguggauugcacguggc

SEQ ID NO: 2557062 - RNA, 20 nt, Human
cguggcagauaaucagccuc

SEQ ID NO: 2557063 - RNA, 21 nt, Human
cguggcagauaaucagccucu

SEQ ID NO: 2557064 - RNA, 22 nt, Human
cguggcagauaaucagccucuu

SEQ ID NO: 2557065 - RNA, 21 nt, Human
cguggcauguggccuguggcc

SEQ ID NO: 2557066 - RNA, 20 nt, Human
cguggcauguggccuguggc

SEQ ID NO: 2557067 - RNA, 19 nt, Human
cguggcauguggccugugg

SEQ ID NO: 2557068 - RNA, 16 nt, Human
cguggcauguggccug

SEQ ID NO: 2557069 - RNA, 23 nt, Human
cguggcauagcccagacacagaa

SEQ ID NO: 2557070 - RNA, 16 nt, Human
cguggcauagcccaga

SEQ ID NO: 2557071 - RNA, 13 nt, Human
cguggcaucaccu

SEQ ID NO: 2557072 - RNA, 21 nt, Human
cguggccccagccuggcccag

SEQ ID NO: 2557073 - RNA, 20 nt, Human
cguggccccagccuggccca

SEQ ID NO: 2557074 - RNA, 19 nt, Human
cguggccccagccuggccc

SEQ ID NO: 2557075 - RNA, 18 nt, Human
cguggccccagccuggcc

SEQ ID NO: 2557076 - RNA, 19 nt, Human
cguggcuucccgcucagcc

SEQ ID NO: 2557077 - RNA, 18 nt, Human
cguggcuucccgcucagc

SEQ ID NO: 2557078 - RNA, 17 nt, Human
cguggccccagccuggc

SEQ ID NO: 2557079 - RNA, 16 nt, Human
cguggccccagccugg

SEQ ID NO: 2557080 - RNA, 15 nt, Human
cguggccccagccug

SEQ ID NO: 2557081 - RNA, 14 nt, Human
cguggccccagccu

SEQ ID NO: 2557082 - RNA, 13 nt, Human
cguggccccagcc

SEQ ID NO: 2557083 - RNA, 12 nt, Human
cguggccccagc

SEQ ID NO: 2557084 - RNA, 16 nt, Human
cguggcccagagaagc

SEQ ID NO: 2557085 - RNA, 19 nt, Human
cguggccagcccggcuggu

SEQ ID NO: 2557086 - RNA, 13 nt, Human
cguggccagcccg

SEQ ID NO: 2557087 - RNA, 11 nt, Human
cguggccagcc

SEQ ID NO: 2557088 - RNA, 15 nt, Human
cguggccagcccggc

SEQ ID NO: 2557089 - RNA, 15 nt, Human
cguggcccagagaag

SEQ ID NO: 2557090 - RNA, 21 nt, Human
cguggcuucccgcucagcccu

SEQ ID NO: 2557091 - RNA, 20 nt, Human
cguggcuucccgcucagccc

SEQ ID NO: 2557092 - RNA, 20 nt, Human
cgugggacggugcccaagcc

SEQ ID NO: 2557093 - RNA, 19 nt, Human
cgugggacggugcccaagc

SEQ ID NO: 2557094 - RNA, 22 nt, Human
cgugggaaccccccucccaccc

SEQ ID NO: 2557095 - RNA, 17 nt, Human
cgugggagcgugggagg

SEQ ID NO: 2557096 - RNA, 17 nt, Human
cgugggagagagacgug

SEQ ID NO: 2557097 - RNA, 22 nt, Human
cgugggagacaagaaaucccug

SEQ ID NO: 2557098 - RNA, 23 nt, Human
cgugggaaccccccucccaccca

SEQ ID NO: 2557099 - RNA, 22 nt, Human
cgugggaggcgggaguggagug

SEQ ID NO: 2557100 - RNA, 13 nt, Human
cgugggcucccug

SEQ ID NO: 2557101 - RNA, 17 nt, Human
cgugggcggggccuugc

SEQ ID NO: 2557102 - RNA, 20 nt, Human
cgugggaggcgggaguggag

SEQ ID NO: 2557103 - RNA, 17 nt, Human
cgugggcggcagagagg

SEQ ID NO: 2557104 - RNA, 15 nt, Human
cguugcugugggaac

SEQ ID NO: 2557105 - RNA, 14 nt, Human
cguugcugugggaa

SEQ ID NO: 2557106 - RNA, 11 nt, Human
cguugcugugg

SEQ ID NO: 2557107 - RNA, 12 nt, Human
cguugcaugucg

SEQ ID NO: 2557108 - RNA, 18 nt, Human
cguugauguuggcuggga

SEQ ID NO: 2557109 - RNA, 17 nt, Human
cguugauguuggcuggg

SEQ ID NO: 2557110 - RNA, 19 nt, Human
cguugaggaugaggccgcu

SEQ ID NO: 2557111 - RNA, 16 nt, Human
cguugaggaugaggcc

SEQ ID NO: 2557112 - RNA, 18 nt, Human
cguugaagaggaagggca

SEQ ID NO: 2557113 - RNA, 11 nt, Human
cguggggaggu

SEQ ID NO: 2557114 - RNA, 12 nt, Human
cguggggcagca

SEQ ID NO: 2557115 - RNA, 17 nt, Human
cgugggcucccugacug

SEQ ID NO: 2557116 - RNA, 23 nt, Human
cguggggagggccguaccccacc

SEQ ID NO: 2557117 - RNA, 23 nt, Human
cguccuguccacacccagcucag

SEQ ID NO: 2557118 - RNA, 16 nt, Human
cguccugucagugccg

SEQ ID NO: 2557119 - RNA, 15 nt, Human
cguccugccuguggc

SEQ ID NO: 2557120 - RNA, 14 nt, Human
cguccugccugugg

SEQ ID NO: 2557121 - RNA, 16 nt, Human
cguccugccuguggcg

SEQ ID NO: 2557122 - RNA, 14 nt, Human
cguccugucagugc

SEQ ID NO: 2557123 - RNA, 12 nt, Human
cguccuccucug

SEQ ID NO: 2557124 - RNA, 13 nt, Human
cguccuccucugu

SEQ ID NO: 2557125 - RNA, 14 nt, Human
cguccuccucugug

SEQ ID NO: 2557126 - RNA, 15 nt, Human
cguccuccucuguga

SEQ ID NO: 2557127 - RNA, 13 nt, Human
cguccugccaccu

SEQ ID NO: 2557128 - RNA, 16 nt, Human
cguccucgagcaacug

SEQ ID NO: 2557129 - RNA, 14 nt, Human
cguccugccaccug

SEQ ID NO: 2557130 - RNA, 13 nt, Human
cguccugccugug

SEQ ID NO: 2557131 - RNA, 16 nt, Human
cguccugccaccuggg

SEQ ID NO: 2557132 - RNA, 20 nt, Human
cguccugccaccuggggcag

SEQ ID NO: 2557133 - RNA, 16 nt, Human
cgucuaccugaggggc

SEQ ID NO: 2557134 - RNA, 16 nt, Human
cgucucauacucaccu

SEQ ID NO: 2557135 - RNA, 21 nt, Human
cgucuccaggggcugcuuccu

SEQ ID NO: 2557136 - RNA, 20 nt, Human
cgucuccaggggcugcuucc

SEQ ID NO: 2557137 - RNA, 19 nt, Human
cgucuccaggggcugcuuc

SEQ ID NO: 2557138 - RNA, 14 nt, Human
cgucuccaggggcu

SEQ ID NO: 2557139 - RNA, 23 nt, Human
cgucucaaaaaaaaaaaaaugca

SEQ ID NO: 2557140 - RNA, 11 nt, Human
cgucucagugu

SEQ ID NO: 2557141 - RNA, 21 nt, Human
cgucuacucauuccccggggc

SEQ ID NO: 2557142 - RNA, 17 nt, Human
cgucucaaccccucaca

SEQ ID NO: 2557143 - RNA, 22 nt, Human
cggugcuaucucccccagcccc

SEQ ID NO: 2557144 - RNA, 21 nt, Human
cggugcuaucucccccagccc

SEQ ID NO: 2557145 - RNA, 20 nt, Human
cggugcuaucucccccagcc

SEQ ID NO: 2557146 - RNA, 18 nt, Human
cggugcuaucucccccag

SEQ ID NO: 2557147 - RNA, 22 nt, Human
cggugccuuuuuucacggaagu

SEQ ID NO: 2557148 - RNA, 23 nt, Human
cggugcccaagccagaggcuggg

SEQ ID NO: 2557149 - RNA, 19 nt, Human
cggugccuggguggggcug

SEQ ID NO: 2557150 - RNA, 20 nt, Human
cggugccuggguggggcugc

SEQ ID NO: 2557151 - RNA, 22 nt, Human
cgucugacaggcaaugcuggcu

SEQ ID NO: 2557152 - RNA, 23 nt, Human
cgucuuagaaguggaccaggaca

SEQ ID NO: 2557153 - RNA, 20 nt, Human
cgucuuagcaagaaguaaaa

SEQ ID NO: 2557154 - RNA, 15 nt, Human
cgucugacccucucc

SEQ ID NO: 2557155 - RNA, 13 nt, Human
cgucuucagccua

SEQ ID NO: 2557156 - RNA, 14 nt, Human
cgucuucagccuag

SEQ ID NO: 2557157 - RNA, 21 nt, Human
cgucugacaggcaaugcuggc

SEQ ID NO: 2557158 - RNA, 20 nt, Human
cgucugacaggcaaugcugg

SEQ ID NO: 2557159 - RNA, 19 nt, Human
cgucuugcuugggaagggg

SEQ ID NO: 2557160 - RNA, 14 nt, Human
cgucuugcuuggga

SEQ ID NO: 2557161 - RNA, 12 nt, Human
cgucuucauuaa

SEQ ID NO: 2557162 - RNA, 17 nt, Human
cgucuugcuugggaagg

SEQ ID NO: 2557163 - RNA, 23 nt, Human
cgucuucauuaagcccucuucca

SEQ ID NO: 2557164 - RNA, 19 nt, Human
cgucuucuguauacugugg

SEQ ID NO: 2557165 - RNA, 15 nt, Human
cgucuucagccuagc

SEQ ID NO: 2557166 - RNA, 10 nt, Human
cgucuuugca

SEQ ID NO: 2557167 - RNA, 15 nt, Human
cgugaaaacggagcu

SEQ ID NO: 2557168 - RNA, 16 nt, Human
cgugaaaacggagcug

SEQ ID NO: 2557169 - RNA, 17 nt, Human
cgugaaaacggagcuga

SEQ ID NO: 2557170 - RNA, 16 nt, Human
cgugcacacaccagag

SEQ ID NO: 2557171 - RNA, 19 nt, Human
cgugcacacaccagagccc

SEQ ID NO: 2557172 - RNA, 18 nt, Human
cgugcacacaccagagcc

SEQ ID NO: 2557173 - RNA, 18 nt, Human
cgugaaaacggagcugaa

SEQ ID NO: 2557174 - RNA, 17 nt, Human
cgugcacguggagagcu

SEQ ID NO: 2557175 - RNA, 20 nt, Human
cgugcacguggagagcuggu

SEQ ID NO: 2557176 - RNA, 21 nt, Human
cgugcacguggagagcuggug

SEQ ID NO: 2557177 - RNA, 22 nt, Human
cgugcacguggagagcuggugc

SEQ ID NO: 2557178 - RNA, 15 nt, Human
cgugcauugugcuuc

SEQ ID NO: 2557179 - RNA, 12 nt, Human
cgugcauugugc

SEQ ID NO: 2557180 - RNA, 21 nt, Human
cgugcauugugcuucuuucuu

SEQ ID NO: 2557181 - RNA, 23 nt, Human
cgugcauaccacuuuuguucuug

SEQ ID NO: 2557182 - RNA, 22 nt, Human
cgugcauuggaagaccccaccc

SEQ ID NO: 2557183 - RNA, 21 nt, Human
cgugcauuggaagaccccacc

SEQ ID NO: 2557184 - RNA, 13 nt, Human
cgugcaugugcac

SEQ ID NO: 2557185 - RNA, 21 nt, Human
cgugcaguggugcgaucuggg

SEQ ID NO: 2557186 - RNA, 16 nt, Human
cgugcagacuggaggg

SEQ ID NO: 2557187 - RNA, 17 nt, Human
cgugcagacuggagggg

SEQ ID NO: 2557188 - RNA, 14 nt, Human
cgugcagcauauga

SEQ ID NO: 2557189 - RNA, 18 nt, Human
cuaaaagagauuucaaga

SEQ ID NO: 2557190 - RNA, 21 nt, Human
cuaaaauuugcccucccaucc

SEQ ID NO: 2557191 - RNA, 18 nt, Human
cuaaaauuccacugcguu

SEQ ID NO: 2557192 - RNA, 23 nt, Human
cuaaacaagauuuuaaagacaug

SEQ ID NO: 2557193 - RNA, 22 nt, Human
cuaaacaagauuuuaaagacau

SEQ ID NO: 2557194 - RNA, 14 nt, Human
cuaaacaagauuuu

SEQ ID NO: 2557195 - RNA, 21 nt, Human
cuaaacaagaaucagucuauc

SEQ ID NO: 2557196 - RNA, 17 nt, Human
cuaaaauuuuuaaggac

SEQ ID NO: 2557197 - RNA, 23 nt, Human
cuaaaauuugcccucccaucccg

SEQ ID NO: 2557198 - RNA, 19 nt, Human
cuaaacaagaaucagucua

SEQ ID NO: 2557199 - RNA, 17 nt, Human
cuaaacauuuuguuauu

SEQ ID NO: 2557200 - RNA, 17 nt, Human
cuaaacagauauaaaug

SEQ ID NO: 2557201 - RNA, 13 nt, Human
cuaaacagauaua

SEQ ID NO: 2557202 - RNA, 18 nt, Human
cuaaacauccaauauuuu

SEQ ID NO: 2557203 - RNA, 12 nt, Human
cuaaacagauau

SEQ ID NO: 2557204 - RNA, 18 nt, Human
cuaaacagacuauuuaac

SEQ ID NO: 2557205 - RNA, 16 nt, Human
cuaaacagacuauuua

SEQ ID NO: 2557206 - RNA, 19 nt, Human
cuaaacaaugcugauuugg

SEQ ID NO: 2557207 - RNA, 15 nt, Human
cuaaacccaauccaa

SEQ ID NO: 2557208 - RNA, 19 nt, Human
cuaaacccaauccaaaugg

SEQ ID NO: 2557209 - RNA, 17 nt, Human
cuaaaccuuaguacuga

SEQ ID NO: 2557210 - RNA, 16 nt, Human
cuaaacccaauccaaa

SEQ ID NO: 2557211 - RNA, 19 nt, Human
cuaaaccuuaguacugagu

SEQ ID NO: 2557212 - RNA, 18 nt, Human
cuaaaccuuaguacugag

SEQ ID NO: 2557213 - RNA, 20 nt, Human
cuaaacgagucaauccccuc

SEQ ID NO: 2557214 - RNA, 21 nt, Human
cuaaacgagucaauccccuca

SEQ ID NO: 2557215 - RNA, 24 nt, Human
cguuguaaaauauagcuguacaaa

SEQ ID NO: 2557216 - RNA, 21 nt, Human
cguuguaaaauauagcuguac

SEQ ID NO: 2557217 - RNA, 14 nt, Human
cguuguaaaauaua

SEQ ID NO: 2557218 - RNA, 23 nt, Human
cguugcugugggaacgagagggg

SEQ ID NO: 2557219 - RNA, 21 nt, Human
cguugggccccagccuucuuu

SEQ ID NO: 2557220 - RNA, 16 nt, Human
cguuggagaagcccgu

SEQ ID NO: 2557221 - RNA, 20 nt, Human
cguuguuuacuuaaagauuu

SEQ ID NO: 2557222 - RNA, 18 nt, Human
cguuguuuacuuaaagau

SEQ ID NO: 2557223 - RNA, 11 nt, Human
cguugugaggg

SEQ ID NO: 2557224 - RNA, 18 nt, Human
cguugucucccuggcccu

SEQ ID NO: 2557225 - RNA, 17 nt, Human
cguugucucccuggccc

SEQ ID NO: 2557226 - RNA, 16 nt, Human
cguugucucccuggcc

SEQ ID NO: 2557227 - RNA, 13 nt, Human
cguugucucccug

SEQ ID NO: 2557228 - RNA, 22 nt, Human
cguuuaagacuguaaugaaucu

SEQ ID NO: 2557229 - RNA, 20 nt, Human
cuaaaacaaaagcucaucca

SEQ ID NO: 2557230 - RNA, 12 nt, Human
cuaaaacaauaa

SEQ ID NO: 2557231 - RNA, 22 nt, Human
cuaaaaaugggacuucuuuuca

SEQ ID NO: 2557232 - RNA, 13 nt, Human
cuaaaaaugcaac

SEQ ID NO: 2557233 - RNA, 22 nt, Human
cuaaaaccugagcuagaagcug

SEQ ID NO: 2557234 - RNA, 15 nt, Human
cuaaaaccugagcua

SEQ ID NO: 2557235 - RNA, 17 nt, Human
cuaaaacaauaaaauuu

SEQ ID NO: 2557236 - RNA, 16 nt, Human
cuaaaacuaaauagca

SEQ ID NO: 2557237 - RNA, 22 nt, Human
cuaaaacuaaauagcauguauu

SEQ ID NO: 2557238 - RNA, 22 nt, Human
cuaaaaauauuauaacuuaaaa

SEQ ID NO: 2557239 - RNA, 17 nt, Human
cguuuacuaugccugug

SEQ ID NO: 2557240 - RNA, 14 nt, Human
cguuuacuaugccu

SEQ ID NO: 2557241 - RNA, 23 nt, Human
cguuuacaagcccccccuuccac

SEQ ID NO: 2557242 - RNA, 15 nt, Human
cuaaacggauuccaa

SEQ ID NO: 2557243 - RNA, 16 nt, Human
cuaaacggauuccaaa

SEQ ID NO: 2557244 - RNA, 17 nt, Human
cuaaacggauuccaaag

SEQ ID NO: 2557245 - RNA, 17 nt, Human
cuaaauauauuuuaaga

SEQ ID NO: 2557246 - RNA, 20 nt, Human
cuaaauauauuuuaagacga

SEQ ID NO: 2557247 - RNA, 18 nt, Human
cuaaauauauuuuaagac

SEQ ID NO: 2557248 - RNA, 21 nt, Human
cuaaauccuuuacuguuaguc

SEQ ID NO: 2557249 - RNA, 17 nt, Human
cuaaauccuuuacuguu

SEQ ID NO: 2557250 - RNA, 13 nt, Human
cuaaauauuuccu

SEQ ID NO: 2557251 - RNA, 14 nt, Human
cuaaauauuuccuu

SEQ ID NO: 2557252 - RNA, 22 nt, Human
cuaaauauuuccuuaaacugug

SEQ ID NO: 2557253 - RNA, 15 nt, Human
cuaaauauuuccuua

SEQ ID NO: 2557254 - RNA, 16 nt, Human
cuaaaucuagacucaa

SEQ ID NO: 2557255 - RNA, 15 nt, Human
cuaaaugaauguuua

SEQ ID NO: 2557256 - RNA, 20 nt, Human
cuaaaucuccaaaauaaaac

SEQ ID NO: 2557257 - RNA, 15 nt, Human
cuaaauggaaccacu

SEQ ID NO: 2557258 - RNA, 16 nt, Human
cuaaaugaauguuuac

SEQ ID NO: 2557259 - RNA, 21 nt, Human
cuaaaugcauauccugagcca

SEQ ID NO: 2557260 - RNA, 16 nt, Human
cuaaauggaaccacuc

SEQ ID NO: 2557261 - RNA, 17 nt, Human
cuaaauggaaccacucu

SEQ ID NO: 2557262 - RNA, 18 nt, Human
cuaaauggaaccacucua

SEQ ID NO: 2557263 - RNA, 16 nt, Human
cuaaauggccucaugu

SEQ ID NO: 2557264 - RNA, 13 nt, Human
cuaaauggccuca

SEQ ID NO: 2557265 - RNA, 12 nt, Human
cuaaauggccuc

SEQ ID NO: 2557266 - RNA, 22 nt, Human
cuaaaugcauauccugagccau

SEQ ID NO: 2557267 - RNA, 23 nt, Human
cuaaauugacacuuaaaaauggu

SEQ ID NO: 2557268 - RNA, 19 nt, Human
cuaaauuacaauugucauu

SEQ ID NO: 2557269 - RNA, 18 nt, Human
cuaaauuguaaacuccug

SEQ ID NO: 2557270 - RNA, 14 nt, Human
cuaaauuguaaacu

SEQ ID NO: 2557271 - RNA, 21 nt, Human
cuaaauguggagaaacuguag

SEQ ID NO: 2557272 - RNA, 19 nt, Human
cuaaauguaacagucugau

SEQ ID NO: 2557273 - RNA, 18 nt, Human
cuaaauguaacagucuga

SEQ ID NO: 2557274 - RNA, 16 nt, Human
cuaaauguugaaagau

SEQ ID NO: 2557275 - RNA, 19 nt, Human
cuaaauggccucauguggc

SEQ ID NO: 2557276 - RNA, 17 nt, Human
cuaaauggccucaugug

SEQ ID NO: 2557277 - RNA, 18 nt, Human
cuaaauggucgcccagga

SEQ ID NO: 2557278 - RNA, 19 nt, Human
cuaaauggucgcccaggag

SEQ ID NO: 2557279 - RNA, 16 nt, Human
cuaaauguaacagucu

SEQ ID NO: 2557280 - RNA, 15 nt, Human
cuaaauguaacaguc

SEQ ID NO: 2557281 - RNA, 14 nt, Human
cuaaauguaacagu

SEQ ID NO: 2557282 - RNA, 15 nt, Human
cuaaaugcugaaaaa

SEQ ID NO: 2557283 - RNA, 20 nt, Human
cuaaauggucgcccaggaga

SEQ ID NO: 2557284 - RNA, 21 nt, Human
cuaaauggucgcccaggagac

SEQ ID NO: 2557285 - RNA, 17 nt, Human
cuaacauggaaguacua

SEQ ID NO: 2557286 - RNA, 15 nt, Human
cuaacauggaaguac

SEQ ID NO: 2557287 - RNA, 15 nt, Human
cuaacaugauuuggg

SEQ ID NO: 2557288 - RNA, 15 nt, Human
cuaacacuggccccu

SEQ ID NO: 2557289 - RNA, 13 nt, Human
cuaacacuggccc

SEQ ID NO: 2557290 - RNA, 14 nt, Human
cuaacacuggcccc

SEQ ID NO: 2557291 - RNA, 23 nt, Human
cuaaauuugaauguuaagcagau

SEQ ID NO: 2557292 - RNA, 15 nt, Human
cuaacacacagcucc

SEQ ID NO: 2557293 - RNA, 15 nt, Human
cuaacaaugacauuu

SEQ ID NO: 2557294 - RNA, 13 nt, Human
cuaacaaugacau

SEQ ID NO: 2557295 - RNA, 22 nt, Human
cuaacaaucagcuccuuccugg

SEQ ID NO: 2557296 - RNA, 21 nt, Human
cuaacaccagcguuugagggg

SEQ ID NO: 2557297 - RNA, 14 nt, Human
cuaacacccagucu

SEQ ID NO: 2557298 - RNA, 16 nt, Human
cuaacacuauuuuaug

SEQ ID NO: 2557299 - RNA, 15 nt, Human
cuaacacuauuuuau

SEQ ID NO: 2557300 - RNA, 16 nt, Human
cuaacacacagcuccc

SEQ ID NO: 2557301 - RNA, 14 nt, Human
cuaacacagcaugu

SEQ ID NO: 2557302 - RNA, 16 nt, Human
cuaacacagcaugugu

SEQ ID NO: 2557303 - RNA, 17 nt, Human
cuaacacagcaugugua

SEQ ID NO: 2557304 - RNA, 13 nt, Human
cuaacaccagcgu

SEQ ID NO: 2557305 - RNA, 17 nt, Human
cuaacacauuaucggga

SEQ ID NO: 2557306 - RNA, 15 nt, Human
cuaacaccagacaga

SEQ ID NO: 2557307 - RNA, 12 nt, Human
cggccuccaucc

SEQ ID NO: 2557308 - RNA, 14 nt, Human
cggccuccauccug

SEQ ID NO: 2557309 - RNA, 16 nt, Human
cggcccgaucuuucua

SEQ ID NO: 2557310 - RNA, 17 nt, Human
cggcccagcccggcucc

SEQ ID NO: 2557311 - RNA, 15 nt, Human
cggccgcuccagggg

SEQ ID NO: 2557312 - RNA, 14 nt, Human
cggccgcuccaggg

SEQ ID NO: 2557313 - RNA, 13 nt, Human
cggccgcuccagg

SEQ ID NO: 2557314 - RNA, 14 nt, Human
cggccggccagccc

SEQ ID NO: 2557315 - RNA, 16 nt, Human
cggccggccagccccu

SEQ ID NO: 2557316 - RNA, 23 nt, Human
cggccggccagccccuggcccca

SEQ ID NO: 2557317 - RNA, 19 nt, Human
cggccgucuucacucgccc

SEQ ID NO: 2557318 - RNA, 17 nt, Human
cggcuggagaccaugca

SEQ ID NO: 2557319 - RNA, 20 nt, Human
cggcuggaaaugcugggcug

SEQ ID NO: 2557320 - RNA, 18 nt, Human
cggcuggaaaugcugggc

SEQ ID NO: 2557321 - RNA, 11 nt, Human
cggcugcugag

SEQ ID NO: 2557322 - RNA, 15 nt, Human
cggcuggacuuggag

SEQ ID NO: 2557323 - RNA, 11 nt, Human
cggcugcccuu

SEQ ID NO: 2557324 - RNA, 12 nt, Human
cggcugcccuuu

SEQ ID NO: 2557325 - RNA, 22 nt, Human
cggcugcagcucacccagcccc

SEQ ID NO: 2557326 - RNA, 18 nt, Human
cggcugcagcucacccag

SEQ ID NO: 2557327 - RNA, 20 nt, Human
cggcugcagaggccagaggc

SEQ ID NO: 2557328 - RNA, 15 nt, Human
cggcugcagaggcca

SEQ ID NO: 2557329 - RNA, 12 nt, Human
cggcugcagagg

SEQ ID NO: 2557330 - RNA, 20 nt, Human
cggcugagucaugaucuccc

SEQ ID NO: 2557331 - RNA, 14 nt, Human
cggccucagcaccc

SEQ ID NO: 2557332 - RNA, 22 nt, Human
cggcugagucaugaucucccug

SEQ ID NO: 2557333 - RNA, 23 nt, Human
cggcugagucaugaucucccugc

SEQ ID NO: 2557334 - RNA, 14 nt, Human
cggccaccucugcg

SEQ ID NO: 2557335 - RNA, 13 nt, Human
cggccaccucugc

SEQ ID NO: 2557336 - RNA, 12 nt, Human
cggccaccucug

SEQ ID NO: 2557337 - RNA, 16 nt, Human
cggccacuggccaucu

SEQ ID NO: 2557338 - RNA, 14 nt, Human
cggccacuggccau

SEQ ID NO: 2557339 - RNA, 15 nt, Human
cggccagccaugucu

SEQ ID NO: 2557340 - RNA, 24 nt, Human
cggccaggccagagggagugacag

SEQ ID NO: 2557341 - RNA, 17 nt, Human
cggccagggagaagcuc

SEQ ID NO: 2557342 - RNA, 13 nt, Human
cggccaggugggc

SEQ ID NO: 2557343 - RNA, 20 nt, Human
cggccagccccggcccuggg

SEQ ID NO: 2557344 - RNA, 16 nt, Human
cggccagggagaagcu

SEQ ID NO: 2557345 - RNA, 16 nt, Human
cggcccaagcccgacu

SEQ ID NO: 2557346 - RNA, 15 nt, Human
cggcccaagcccgac

SEQ ID NO: 2557347 - RNA, 12 nt, Human
cggcccacagcu

SEQ ID NO: 2557348 - RNA, 19 nt, Human
cggccccugcugguucagg

SEQ ID NO: 2557349 - RNA, 18 nt, Human
cggccccugcugguucag

SEQ ID NO: 2557350 - RNA, 13 nt, Human
cggccccugcugg

SEQ ID NO: 2557351 - RNA, 19 nt, Human
cggcccacagcucccaccc

SEQ ID NO: 2557352 - RNA, 22 nt, Human
cggcccacagcucccaccccac

SEQ ID NO: 2557353 - RNA, 22 nt, Human
cggcccaagcccgacuugcugu

SEQ ID NO: 2557354 - RNA, 15 nt, Human
cggcccacagcuccc

SEQ ID NO: 2557355 - RNA, 17 nt, Human
cggccaccugcggugcu

SEQ ID NO: 2557356 - RNA, 16 nt, Human
cggccaccugcggugc

SEQ ID NO: 2557357 - RNA, 15 nt, Human
cggccaccugcggug

SEQ ID NO: 2557358 - RNA, 11 nt, Human
cggccaccugc

SEQ ID NO: 2557359 - RNA, 11 nt, Human
cggccaccucu

SEQ ID NO: 2557360 - RNA, 14 nt, Human
cggcauuucaaaug

SEQ ID NO: 2557361 - RNA, 15 nt, Human
cggcauuaaagccau

SEQ ID NO: 2557362 - RNA, 22 nt, Human
cggcaugggaaagccaccucuc

SEQ ID NO: 2557363 - RNA, 14 nt, Human
cggcauuccugcuu

SEQ ID NO: 2557364 - RNA, 21 nt, Human
cggcaugggaaagccaccucu

SEQ ID NO: 2557365 - RNA, 14 nt, Human
cggcauggcuggga

SEQ ID NO: 2557366 - RNA, 13 nt, Human
cggcauggcuggg

SEQ ID NO: 2557367 - RNA, 21 nt, Human
cggcaggacaacgaggaagcc

SEQ ID NO: 2557368 - RNA, 21 nt, Human
cggcaguucugggugcucccu

SEQ ID NO: 2557369 - RNA, 13 nt, Human
cggaaguuuucaa

SEQ ID NO: 2557370 - RNA, 12 nt, Human
cggaaguuuuca

SEQ ID NO: 2557371 - RNA, 12 nt, Human
cggaagggcaca

SEQ ID NO: 2557372 - RNA, 20 nt, Human
cggaagccuuuuuccccaaa

SEQ ID NO: 2557373 - RNA, 14 nt, Human
cggaagcagugccu

SEQ ID NO: 2557374 - RNA, 20 nt, Human
cggaagcagugccuuccaua

SEQ ID NO: 2557375 - RNA, 22 nt, Human
cggaagcagugccuuccauaau

SEQ ID NO: 2557376 - RNA, 23 nt, Human
cggaagcagugccuuccauaauu

SEQ ID NO: 2557377 - RNA, 18 nt, Human
cggaaggcuggcugggca

SEQ ID NO: 2557378 - RNA, 13 nt, Human
cggaagagccuug

SEQ ID NO: 2557379 - RNA, 20 nt, Human
cggaaaagguuuuauuuugu

SEQ ID NO: 2557380 - RNA, 21 nt, Human
cggaaaacgguggaggccagg

SEQ ID NO: 2557381 - RNA, 19 nt, Human
cgcuuuugcuggucacugc

SEQ ID NO: 2557382 - RNA, 18 nt, Human
cggaaguuuucaaugaug

SEQ ID NO: 2557383 - RNA, 21 nt, Human
cggcacagggucugcucuuuc

SEQ ID NO: 2557384 - RNA, 14 nt, Human
cggaauaguuggcu

SEQ ID NO: 2557385 - RNA, 19 nt, Human
cggcacagggucugcucuu

SEQ ID NO: 2557386 - RNA, 20 nt, Human
cggcacccacaagugccacu

SEQ ID NO: 2557387 - RNA, 15 nt, Human
cggcacccacccagc

SEQ ID NO: 2557388 - RNA, 14 nt, Human
cggcagcagccauc

SEQ ID NO: 2557389 - RNA, 13 nt, Human
cggcagcagccau

SEQ ID NO: 2557390 - RNA, 13 nt, Human
cggcagagaggac

SEQ ID NO: 2557391 - RNA, 11 nt, Human
cggcagagagg

SEQ ID NO: 2557392 - RNA, 14 nt, Human
cgguauuaugcuuc

SEQ ID NO: 2557393 - RNA, 12 nt, Human
cgguacucccau

SEQ ID NO: 2557394 - RNA, 22 nt, Human
cgguauccccccaucuugcuuc

SEQ ID NO: 2557395 - RNA, 18 nt, Human
cgguauccccccaucuug

SEQ ID NO: 2557396 - RNA, 18 nt, Human
cgguagguucagccaagg

SEQ ID NO: 2557397 - RNA, 22 nt, Human
cgguagccagcacacagggcag

SEQ ID NO: 2557398 - RNA, 15 nt, Human
cgguagccagcacac

SEQ ID NO: 2557399 - RNA, 21 nt, Human
cgguagccagcacacagggca

SEQ ID NO: 2557400 - RNA, 21 nt, Human
cggguuuuauuguuuaaaauc

SEQ ID NO: 2557401 - RNA, 23 nt, Human
cggguuuggcgggccaaggacug

SEQ ID NO: 2557402 - RNA, 20 nt, Human
cgguaaaacaccggagacua

SEQ ID NO: 2557403 - RNA, 19 nt, Human
cggguuuggcgggccaagg

SEQ ID NO: 2557404 - RNA, 20 nt, Human
cgguccacccaggagccccg

SEQ ID NO: 2557405 - RNA, 16 nt, Human
cgguccacccaggagc

SEQ ID NO: 2557406 - RNA, 15 nt, Human
cgguccacccaggag

SEQ ID NO: 2557407 - RNA, 14 nt, Human
cgguccacccagga

SEQ ID NO: 2557408 - RNA, 19 nt, Human
cgggguggugggaaccaug

SEQ ID NO: 2557409 - RNA, 13 nt, Human
cgggucugccucu

SEQ ID NO: 2557410 - RNA, 22 nt, Human
cgggucaucuguaccucugccu

SEQ ID NO: 2557411 - RNA, 20 nt, Human
cgggugaacaaagcagccac

SEQ ID NO: 2557412 - RNA, 15 nt, Human
cgggucaucuguacc

SEQ ID NO: 2557413 - RNA, 19 nt, Human
cgggucacaggagggaggg

SEQ ID NO: 2557414 - RNA, 18 nt, Human
cgggguggugggaaccau

SEQ ID NO: 2557415 - RNA, 12 nt, Human
cgggguggagca

SEQ ID NO: 2557416 - RNA, 11 nt, Human
cgggucacagg

SEQ ID NO: 2557417 - RNA, 23 nt, Human
cggguggggguggaauaaaauac

SEQ ID NO: 2557418 - RNA, 12 nt, Human
cgggugggggug

SEQ ID NO: 2557419 - RNA, 19 nt, Human
cgggugggcggcacagccu

SEQ ID NO: 2557420 - RNA, 20 nt, Human
cggguggggcuuggggcuca

SEQ ID NO: 2557421 - RNA, 16 nt, Human
cggguggggcuugggg

SEQ ID NO: 2557422 - RNA, 16 nt, Human
cggguugugugucugu

SEQ ID NO: 2557423 - RNA, 17 nt, Human
cggguugugugucuguu

SEQ ID NO: 2557424 - RNA, 22 nt, Human
cgggugugcaaugucugaguga

SEQ ID NO: 2557425 - RNA, 21 nt, Human
cgggugaacaaagcagccacg

SEQ ID NO: 2557426 - RNA, 15 nt, Human
cgggugcucagggcu

SEQ ID NO: 2557427 - RNA, 18 nt, Human
cggguggaucaccugagg

SEQ ID NO: 2557428 - RNA, 19 nt, Human
cggguggaucaccugaggu

SEQ ID NO: 2557429 - RNA, 15 nt, Human
cggguggcaggugga

SEQ ID NO: 2557430 - RNA, 18 nt, Human
cgggugcucagggcugac

SEQ ID NO: 2557431 - RNA, 20 nt, Human
cgggugggcggcacagccuu

SEQ ID NO: 2557432 - RNA, 18 nt, Human
cggguggcuagucagaga

SEQ ID NO: 2557433 - RNA, 19 nt, Human
cggucugcaagucagagga

SEQ ID NO: 2557434 - RNA, 16 nt, Human
cggucugcaagucaga

SEQ ID NO: 2557435 - RNA, 20 nt, Human
cggucugcaagucagaggau

SEQ ID NO: 2557436 - RNA, 11 nt, Human
cggucucaggc

SEQ ID NO: 2557437 - RNA, 21 nt, Human
cggucuaaagugagcucuaug

SEQ ID NO: 2557438 - RNA, 14 nt, Human
cggucccacacugg

SEQ ID NO: 2557439 - RNA, 18 nt, Human
cgguccaagccugcaacu

SEQ ID NO: 2557440 - RNA, 17 nt, Human
cgguauuaugcuucuug

SEQ ID NO: 2557441 - RNA, 16 nt, Human
cgguauuaugcuucuu

SEQ ID NO: 2557442 - RNA, 22 nt, Human
cggucggguuuuauuguuuaaa

SEQ ID NO: 2557443 - RNA, 18 nt, Human
cgguccccuccgccaggc

SEQ ID NO: 2557444 - RNA, 19 nt, Human
cggucccuugagaccucag

SEQ ID NO: 2557445 - RNA, 21 nt, Human
cggucccuugagaccucagcc

SEQ ID NO: 2557446 - RNA, 22 nt, Human
cggucccuugagaccucagcca

SEQ ID NO: 2557447 - RNA, 23 nt, Human
cggucccuugagaccucagccau

SEQ ID NO: 2557448 - RNA, 17 nt, Human
cggugagcuacaaaugc

SEQ ID NO: 2557449 - RNA, 20 nt, Human
cggugcccaagccagaggcu

SEQ ID NO: 2557450 - RNA, 18 nt, Human
cggugcccaagccagagg

SEQ ID NO: 2557451 - RNA, 15 nt, Human
cggugcccaagccag

SEQ ID NO: 2557452 - RNA, 14 nt, Human
cggugcccaagcca

SEQ ID NO: 2557453 - RNA, 14 nt, Human
cggugcagucuggg

SEQ ID NO: 2557454 - RNA, 13 nt, Human
cggugcagucugg

SEQ ID NO: 2557455 - RNA, 16 nt, Human
cggugagaacucugcc

SEQ ID NO: 2557456 - RNA, 16 nt, Human
cggugcagucugggug

SEQ ID NO: 2557457 - RNA, 17 nt, Human
cggugccagguuuucug

SEQ ID NO: 2557458 - RNA, 21 nt, Human
cggugagaggggaacagacug

SEQ ID NO: 2557459 - RNA, 20 nt, Human
cggugagaggggaacagacu

SEQ ID NO: 2557460 - RNA, 14 nt, Human
cggggacccuguga

SEQ ID NO: 2557461 - RNA, 12 nt, Human
cggggacccugu

SEQ ID NO: 2557462 - RNA, 14 nt, Human
cgggcagcacagca

SEQ ID NO: 2557463 - RNA, 12 nt, Human
cgggcagcacag

SEQ ID NO: 2557464 - RNA, 23 nt, Human
cggggacagcuccuucuguccua

SEQ ID NO: 2557465 - RNA, 16 nt, Human
cggggagcccccgccc

SEQ ID NO: 2557466 - RNA, 22 nt, Human
cggggaggagagagcagcuucu

SEQ ID NO: 2557467 - RNA, 18 nt, Human
cggggagcgcccgcgccc

SEQ ID NO: 2557468 - RNA, 13 nt, Human
cggggaggccaag

SEQ ID NO: 2557469 - RNA, 14 nt, Human
cggggaggccaagu

SEQ ID NO: 2557470 - RNA, 19 nt, Human
cggggaggccaagugcagg

SEQ ID NO: 2557471 - RNA, 21 nt, Human
cggggaggccaagugcaggcu

SEQ ID NO: 2557472 - RNA, 18 nt, Human
cggggccucgggaccuca

SEQ ID NO: 2557473 - RNA, 23 nt, Human
cggggcucuucucauuucacccc

SEQ ID NO: 2557474 - RNA, 17 nt, Human
cggggcucuucucauuu

SEQ ID NO: 2557475 - RNA, 17 nt, Human
cggggcguuucuuugcc

SEQ ID NO: 2557476 - RNA, 14 nt, Human
cggggcguuucuuu

SEQ ID NO: 2557477 - RNA, 16 nt, Human
cggggcucuucucauu

SEQ ID NO: 2557478 - RNA, 22 nt, Human
cggggccuugcgguauccgccc

SEQ ID NO: 2557479 - RNA, 22 nt, Human
cggggccuggcgggaugggcca

SEQ ID NO: 2557480 - RNA, 23 nt, Human
cggggcuucaaccuugagacagc

SEQ ID NO: 2557481 - RNA, 14 nt, Human
cggggcuuggcuga

SEQ ID NO: 2557482 - RNA, 15 nt, Human
cggggcuuggcugag

SEQ ID NO: 2557483 - RNA, 21 nt, Human
cggggcuggguuggcgcaccc

SEQ ID NO: 2557484 - RNA, 12 nt, Human
cggggcuggguu

SEQ ID NO: 2557485 - RNA, 10 nt, Human
cggggcuggg

SEQ ID NO: 2557486 - RNA, 15 nt, Human
cgggggcagagaggg

SEQ ID NO: 2557487 - RNA, 13 nt, Human
cgggggcagcuga

SEQ ID NO: 2557488 - RNA, 12 nt, Human
cgggggcagcug

SEQ ID NO: 2557489 - RNA, 12 nt, Human
cgggggcuggcc

SEQ ID NO: 2557490 - RNA, 15 nt, Human
cgggggcuggccuag

SEQ ID NO: 2557491 - RNA, 13 nt, Human
cgggggcuggccu

SEQ ID NO: 2557492 - RNA, 15 nt, Human
cggggggacagcucc

SEQ ID NO: 2557493 - RNA, 15 nt, Human
cgggguauccugggg

SEQ ID NO: 2557494 - RNA, 16 nt, Human
cgggguccuguggcag

SEQ ID NO: 2557495 - RNA, 16 nt, Human
cgggguauuuuaggca

SEQ ID NO: 2557496 - RNA, 21 nt, Human
cgggguauccugggggaccca

SEQ ID NO: 2557497 - RNA, 23 nt, Human
cggggggccccagucagccucuc

SEQ ID NO: 2557498 - RNA, 22 nt, Human
cggggggccccagucagccucu

SEQ ID NO: 2557499 - RNA, 18 nt, Human
cgggggcuggccuaggag

SEQ ID NO: 2557500 - RNA, 12 nt, Human
cggggggaggga

SEQ ID NO: 2557501 - RNA, 20 nt, Human
cggggggccccagucagccu

SEQ ID NO: 2557502 - RNA, 23 nt, Human
cggggugaguccauucucccagg

SEQ ID NO: 2557503 - RNA, 19 nt, Human
cgggguccuguggcaggca

SEQ ID NO: 2557504 - RNA, 17 nt, Human
cgggguccuguggcagg

SEQ ID NO: 2557505 - RNA, 22 nt, Human
cggggugaguccauucucccag

SEQ ID NO: 2557506 - RNA, 16 nt, Human
cggggugcccacaggc

SEQ ID NO: 2557507 - RNA, 22 nt, Human
cgggcacucagaagacacugau

SEQ ID NO: 2557508 - RNA, 14 nt, Human
cgggcacucagaag

SEQ ID NO: 2557509 - RNA, 19 nt, Human
cgggcaccuauagucccag

SEQ ID NO: 2557510 - RNA, 21 nt, Human
cgggcaccuauagucccagcu

SEQ ID NO: 2557511 - RNA, 22 nt, Human
cggggacagcuccuucuguccu

SEQ ID NO: 2557512 - RNA, 17 nt, Human
cgggauuaguacacacu

SEQ ID NO: 2557513 - RNA, 16 nt, Human
cgggaugguccugggg

SEQ ID NO: 2557514 - RNA, 18 nt, Human
cgggaugguccuggggcu

SEQ ID NO: 2557515 - RNA, 18 nt, Human
cgggaggucgaggcagga

SEQ ID NO: 2557516 - RNA, 20 nt, Human
cgggaggucgaggcaggagg

SEQ ID NO: 2557517 - RNA, 19 nt, Human
cggcuggccuggccccuca

SEQ ID NO: 2557518 - RNA, 22 nt, Human
cggcuggccuggccccucaggg

SEQ ID NO: 2557519 - RNA, 22 nt, Human
cggcuggagaccaugcagagcg

SEQ ID NO: 2557520 - RNA, 21 nt, Human
cggcuggagaccaugcagagc

SEQ ID NO: 2557521 - RNA, 23 nt, Human
cggcuggccuggccccucagggu

SEQ ID NO: 2557522 - RNA, 16 nt, Human
cgggagaaucauguga

SEQ ID NO: 2557523 - RNA, 21 nt, Human
cgggagaaucaugugaacccg

SEQ ID NO: 2557524 - RNA, 12 nt, Human
cgggagacagca

SEQ ID NO: 2557525 - RNA, 14 nt, Human
cgggagcagugucu

SEQ ID NO: 2557526 - RNA, 15 nt, Human
cgggagcagugucuu

SEQ ID NO: 2557527 - RNA, 20 nt, Human
cgggagcagugucuuccaua

SEQ ID NO: 2557528 - RNA, 23 nt, Human
cgggagcagugucuuccauaaug

SEQ ID NO: 2557529 - RNA, 14 nt, Human
cgggagcaucucuu

SEQ ID NO: 2557530 - RNA, 22 nt, Human
cgggagccaugcgcccccuccg

SEQ ID NO: 2557531 - RNA, 22 nt, Human
cgggagcaucucuugaggccag

SEQ ID NO: 2557532 - RNA, 18 nt, Human
cgggagccgcuggcagaa

SEQ ID NO: 2557533 - RNA, 17 nt, Human
cgggagccgcuggcaga

SEQ ID NO: 2557534 - RNA, 15 nt, Human
cggaaaccuuggugu

SEQ ID NO: 2557535 - RNA, 22 nt, Human
cgcugggugguacccucuggag

SEQ ID NO: 2557536 - RNA, 19 nt, Human
cgcugggugguacccucug

SEQ ID NO: 2557537 - RNA, 14 nt, Human
cgcugggugguacc

SEQ ID NO: 2557538 - RNA, 18 nt, Human
cgcucucuggccuucggc

SEQ ID NO: 2557539 - RNA, 22 nt, Human
cgcugucagccauuccuguucc

SEQ ID NO: 2557540 - RNA, 15 nt, Human
cgcugguagagaugg

SEQ ID NO: 2557541 - RNA, 13 nt, Human
cgcugucacaggc

SEQ ID NO: 2557542 - RNA, 23 nt, Human
cgcugguagagauggaggaggag

SEQ ID NO: 2557543 - RNA, 17 nt, Human
cgcugugcugcccugcc

SEQ ID NO: 2557544 - RNA, 16 nt, Human
cgcugugcugcccugc

SEQ ID NO: 2557545 - RNA, 15 nt, Human
cgcugugcugcccug

SEQ ID NO: 2557546 - RNA, 15 nt, Human
cgcugucuccagacc

SEQ ID NO: 2557547 - RNA, 14 nt, Human
cgcugucuccagac

SEQ ID NO: 2557548 - RNA, 23 nt, Human
cgcugucccuaguaaaaauacaa

SEQ ID NO: 2557549 - RNA, 15 nt, Human
cggaaaacaugcuac

SEQ ID NO: 2557550 - RNA, 20 nt, Human
cggaaaacaugcuacacacu

SEQ ID NO: 2557551 - RNA, 16 nt, Human
cgcuuugauucauagu

SEQ ID NO: 2557552 - RNA, 18 nt, Human
cgcuugugcagaaaacau

SEQ ID NO: 2557553 - RNA, 17 nt, Human
cgcuugugcagaaaaca

SEQ ID NO: 2557554 - RNA, 17 nt, Human
cgcuuguccagcgccua

SEQ ID NO: 2557555 - RNA, 20 nt, Human
cgcuuguccagcgccuagug

SEQ ID NO: 2557556 - RNA, 23 nt, Human
cgcuugccucggcuccugcugca

SEQ ID NO: 2557557 - RNA, 14 nt, Human
cgcuuggagcagag

SEQ ID NO: 2557558 - RNA, 22 nt, Human
cgcuugccucggcuccugcugc

SEQ ID NO: 2557559 - RNA, 21 nt, Human
cgcuugccucggcuccugcug

SEQ ID NO: 2557560 - RNA, 18 nt, Human
cgcuugcuuuucuguauu

SEQ ID NO: 2557561 - RNA, 20 nt, Human
cgcuugccucggcuccugcu

SEQ ID NO: 2557562 - RNA, 18 nt, Human
cgcuugccucggcuccug

SEQ ID NO: 2557563 - RNA, 16 nt, Human
cgcuugccucggcucc

SEQ ID NO: 2557564 - RNA, 15 nt, Human
cgcuugccucggcuc

SEQ ID NO: 2557565 - RNA, 14 nt, Human
cgcuugccucggcu

SEQ ID NO: 2557566 - RNA, 13 nt, Human
cgcuugccucggc

SEQ ID NO: 2557567 - RNA, 11 nt, Human
cgcuugccucg

SEQ ID NO: 2557568 - RNA, 18 nt, Human
cgcugugcugcccugccc

SEQ ID NO: 2557569 - RNA, 19 nt, Human
cgcuucuugccucugugcu

SEQ ID NO: 2557570 - RNA, 18 nt, Human
cgcuucuugccucugugc

SEQ ID NO: 2557571 - RNA, 22 nt, Human
cgcuucuugccucugugcugug

SEQ ID NO: 2557572 - RNA, 17 nt, Human
cgcuugccacuagggcu

SEQ ID NO: 2557573 - RNA, 16 nt, Human
cgcuacccgggaaggg

SEQ ID NO: 2557574 - RNA, 12 nt, Human
cgcucagcccuc

SEQ ID NO: 2557575 - RNA, 21 nt, Human
cgcucagcccucccugccccu

SEQ ID NO: 2557576 - RNA, 16 nt, Human
cgcucagcccucccug

SEQ ID NO: 2557577 - RNA, 14 nt, Human
cgcucucuggccuu

SEQ ID NO: 2557578 - RNA, 15 nt, Human
cgcucucuggccuuc

SEQ ID NO: 2557579 - RNA, 22 nt, Human
cgcucagggccaugcugaggcc

SEQ ID NO: 2557580 - RNA, 21 nt, Human
cgcucagggccaugcugaggc

SEQ ID NO: 2557581 - RNA, 20 nt, Human
cgcucagggccaugcugagg

SEQ ID NO: 2557582 - RNA, 19 nt, Human
cgcucagggccaugcugag

SEQ ID NO: 2557583 - RNA, 11 nt, Human
cgcuacccacu

SEQ ID NO: 2557584 - RNA, 23 nt, Human
cgcgccuucucccccccggggcu

SEQ ID NO: 2557585 - RNA, 19 nt, Human
cgcgccuucucccccccgg

SEQ ID NO: 2557586 - RNA, 13 nt, Human
cgcgcugccugug

SEQ ID NO: 2557587 - RNA, 19 nt, Human
cgcgcgucccccugccggc

SEQ ID NO: 2557588 - RNA, 15 nt, Human
cgcgcugccugugug

SEQ ID NO: 2557589 - RNA, 20 nt, Human
cgcgccacucgcuuccccca

SEQ ID NO: 2557590 - RNA, 22 nt, Human
cgcgccacucgcuucccccaua

SEQ ID NO: 2557591 - RNA, 22 nt, Human
cgcgccacuacacuccagccug

SEQ ID NO: 2557592 - RNA, 23 nt, Human
cgcgccacuacacuccagccuga

SEQ ID NO: 2557593 - RNA, 15 nt, Human
cgcgccacucgcuuc

SEQ ID NO: 2557594 - RNA, 18 nt, Human
cgcgccacucgcuucccc

SEQ ID NO: 2557595 - RNA, 22 nt, Human
cgcuaagagggagggagggcuc

SEQ ID NO: 2557596 - RNA, 21 nt, Human
cgcuaaucccgauucacccug

SEQ ID NO: 2557597 - RNA, 23 nt, Human
cgcggcggagcuggccccgccgc

SEQ ID NO: 2557598 - RNA, 22 nt, Human
cgcggcggagcuggccccgccg

SEQ ID NO: 2557599 - RNA, 21 nt, Human
cgcggcggagcuggccccgcc

SEQ ID NO: 2557600 - RNA, 18 nt, Human
cgcggcggagcuggcccc

SEQ ID NO: 2557601 - RNA, 17 nt, Human
cgcggcggagcuggccc

SEQ ID NO: 2557602 - RNA, 22 nt, Human
cgcggccagccccggcccuggg

SEQ ID NO: 2557603 - RNA, 15 nt, Human
cgcggccagccccgg

SEQ ID NO: 2557604 - RNA, 14 nt, Human
cgcggccagccccg

SEQ ID NO: 2557605 - RNA, 12 nt, Human
cgcggccagccc

SEQ ID NO: 2557606 - RNA, 15 nt, Human
cgcggcggagcuggc

SEQ ID NO: 2557607 - RNA, 19 nt, Human
ccucugcccacucccugca

SEQ ID NO: 2557608 - RNA, 17 nt, Human
ccucugcccacucccug

SEQ ID NO: 2557609 - RNA, 20 nt, Human
ccucugcccacucccugcaa

SEQ ID NO: 2557610 - RNA, 17 nt, Human
ccucugcccagcuuggg

SEQ ID NO: 2557611 - RNA, 16 nt, Human
ccucugcccagcuugg

SEQ ID NO: 2557612 - RNA, 14 nt, Human
ccucugcccagcuu

SEQ ID NO: 2557613 - RNA, 13 nt, Human
ccucugcccagcu

SEQ ID NO: 2557614 - RNA, 11 nt, Human
ccucugcccag

SEQ ID NO: 2557615 - RNA, 23 nt, Human
ccucugccagaagauccccucag

SEQ ID NO: 2557616 - RNA, 11 nt, Human
ccucugccaga

SEQ ID NO: 2557617 - RNA, 20 nt, Human
ccucugccaccuccccuauc

SEQ ID NO: 2557618 - RNA, 22 nt, Human
cgccagauucuuuccugaggcu

SEQ ID NO: 2557619 - RNA, 20 nt, Human
ccucugcccagcuugggccc

SEQ ID NO: 2557620 - RNA, 18 nt, Human
ccucugcccagcuugggc

SEQ ID NO: 2557621 - RNA, 19 nt, Human
ccucugccccauccuccag

SEQ ID NO: 2557622 - RNA, 23 nt, Human
ccucugcccagcuugggcccagc

SEQ ID NO: 2557623 - RNA, 22 nt, Human
ccucugccccauccuccagcag

SEQ ID NO: 2557624 - RNA, 14 nt, Human
ccucugccccgucu

SEQ ID NO: 2557625 - RNA, 21 nt, Human
cgccagccuccucuggacggc

SEQ ID NO: 2557626 - RNA, 18 nt, Human
cgccagccuccucuggac

SEQ ID NO: 2557627 - RNA, 17 nt, Human
cgccagccuccucugga

SEQ ID NO: 2557628 - RNA, 16 nt, Human
cgccagccuccucugg

SEQ ID NO: 2557629 - RNA, 15 nt, Human
cgccagccuccucug

SEQ ID NO: 2557630 - RNA, 14 nt, Human
cgccagccuccucu

SEQ ID NO: 2557631 - RNA, 13 nt, Human
cgccagccuccuc

SEQ ID NO: 2557632 - RNA, 22 nt, Human
cgccagcacagaaacagaggag

SEQ ID NO: 2557633 - RNA, 15 nt, Human
cgccagcgaacuuga

SEQ ID NO: 2557634 - RNA, 23 nt, Human
cgccagccuccucuggacggcag

SEQ ID NO: 2557635 - RNA, 20 nt, Human
cgcccacuguccugggcgcc

SEQ ID NO: 2557636 - RNA, 19 nt, Human
cgcccacuguccugggcgc

SEQ ID NO: 2557637 - RNA, 18 nt, Human
cgcccacuguccugggcg

SEQ ID NO: 2557638 - RNA, 17 nt, Human
cgcccacuguccugggc

SEQ ID NO: 2557639 - RNA, 16 nt, Human
cgcccacuguccuggg

SEQ ID NO: 2557640 - RNA, 15 nt, Human
cgcccacuguccugg

SEQ ID NO: 2557641 - RNA, 14 nt, Human
cgcccacuguccug

SEQ ID NO: 2557642 - RNA, 12 nt, Human
cgcccacugucc

SEQ ID NO: 2557643 - RNA, 14 nt, Human
cgcccaccucccca

SEQ ID NO: 2557644 - RNA, 12 nt, Human
cgcccaccuccc

SEQ ID NO: 2557645 - RNA, 11 nt, Human
cgcccaccucc

SEQ ID NO: 2557646 - RNA, 23 nt, Human
cgcccaccgcaugcccccucgug

SEQ ID NO: 2557647 - RNA, 21 nt, Human
cgcccaccgcaugcccccucg

SEQ ID NO: 2557648 - RNA, 18 nt, Human
cgcccaccgcaugccccc

SEQ ID NO: 2557649 - RNA, 17 nt, Human
cgcccaccgcaugcccc

SEQ ID NO: 2557650 - RNA, 16 nt, Human
cgcccaccgcaugccc

SEQ ID NO: 2557651 - RNA, 13 nt, Human
cgcccaccgcaug

SEQ ID NO: 2557652 - RNA, 19 nt, Human
cgcccaccccgcucugcau

SEQ ID NO: 2557653 - RNA, 18 nt, Human
cgcccaccccgcucugca

SEQ ID NO: 2557654 - RNA, 22 nt, Human
cgcccacaggaagccugcaguc

SEQ ID NO: 2557655 - RNA, 21 nt, Human
cgcccacaggaagccugcagu

SEQ ID NO: 2557656 - RNA, 20 nt, Human
cgcccacaggaagccugcag

SEQ ID NO: 2557657 - RNA, 16 nt, Human
cgccaucccagcccca

SEQ ID NO: 2557658 - RNA, 14 nt, Human
cgccaucccagccc

SEQ ID NO: 2557659 - RNA, 23 nt, Human
cgccaggggaaaaucagccugcu

SEQ ID NO: 2557660 - RNA, 17 nt, Human
cgcccuuccucuccacc

SEQ ID NO: 2557661 - RNA, 13 nt, Human
cgcccuuccucuc

SEQ ID NO: 2557662 - RNA, 12 nt, Human
cgcccuuccucu

SEQ ID NO: 2557663 - RNA, 15 nt, Human
cgcccuuaccuuccc

SEQ ID NO: 2557664 - RNA, 22 nt, Human
cgcccugggcucgucuuugcag

SEQ ID NO: 2557665 - RNA, 21 nt, Human
cgcccugggcucgucuuugca

SEQ ID NO: 2557666 - RNA, 19 nt, Human
cgcgccaaauaaugucucu

SEQ ID NO: 2557667 - RNA, 23 nt, Human
cgcgccaaauaaugucucuguga

SEQ ID NO: 2557668 - RNA, 21 nt, Human
cgcgccaaauaaugucucugu

SEQ ID NO: 2557669 - RNA, 16 nt, Human
cgcccuggacugugug

SEQ ID NO: 2557670 - RNA, 22 nt, Human
cgcccuggaagccggcggccca

SEQ ID NO: 2557671 - RNA, 16 nt, Human
cgcccuggaagccggc

SEQ ID NO: 2557672 - RNA, 12 nt, Human
cgcccugggcuc

SEQ ID NO: 2557673 - RNA, 13 nt, Human
cgcccuggaagcc

SEQ ID NO: 2557674 - RNA, 12 nt, Human
cgcccuggaagc

SEQ ID NO: 2557675 - RNA, 21 nt, Human
cgcccugcuccucccuggcug

SEQ ID NO: 2557676 - RNA, 18 nt, Human
cgcccugcuccucccugg

SEQ ID NO: 2557677 - RNA, 17 nt, Human
cgcccugcuccucccug

SEQ ID NO: 2557678 - RNA, 15 nt, Human
cgcccugcuccuccc

SEQ ID NO: 2557679 - RNA, 14 nt, Human
cgccccugccaccu

SEQ ID NO: 2557680 - RNA, 21 nt, Human
cgccccucccacagcgcuggc

SEQ ID NO: 2557681 - RNA, 21 nt, Human
cgccccucauuuaucccucaa

SEQ ID NO: 2557682 - RNA, 19 nt, Human
cgccccucccacagcgcug

SEQ ID NO: 2557683 - RNA, 17 nt, Human
cgccccgccccacauuc

SEQ ID NO: 2557684 - RNA, 13 nt, Human
cgccccgccccac

SEQ ID NO: 2557685 - RNA, 14 nt, Human
cgccccgccccaca

SEQ ID NO: 2557686 - RNA, 12 nt, Human
cgcccagucugg

SEQ ID NO: 2557687 - RNA, 14 nt, Human
cgcccccugcccuc

SEQ ID NO: 2557688 - RNA, 16 nt, Human
cgcccaguccuuccac

SEQ ID NO: 2557689 - RNA, 19 nt, Human
cgcccccugcccuccccuc

SEQ ID NO: 2557690 - RNA, 15 nt, Human
cgcccccugcccucc

SEQ ID NO: 2557691 - RNA, 22 nt, Human
cgcccaggcuuagucacugaga

SEQ ID NO: 2557692 - RNA, 15 nt, Human
cgcccaguccuucca

SEQ ID NO: 2557693 - RNA, 14 nt, Human
cgcccaguccuucc

SEQ ID NO: 2557694 - RNA, 22 nt, Human
cgcccaggcuggccagccccac

SEQ ID NO: 2557695 - RNA, 20 nt, Human
cgcccaggcuggccagcccc

SEQ ID NO: 2557696 - RNA, 19 nt, Human
cgcccaggcuggccagccc

SEQ ID NO: 2557697 - RNA, 17 nt, Human
cgcccaggcuggccagc

SEQ ID NO: 2557698 - RNA, 16 nt, Human
cgcccaggcuggccag

SEQ ID NO: 2557699 - RNA, 15 nt, Human
cgcccaggcuggcca

SEQ ID NO: 2557700 - RNA, 20 nt, Human
cgcccaggcuggagugcagu

SEQ ID NO: 2557701 - RNA, 22 nt, Human
cgcccagagacccaagcugccu

SEQ ID NO: 2557702 - RNA, 22 nt, Human
cgcccacuguccugggcgcccu

SEQ ID NO: 2557703 - RNA, 16 nt, Human
cuccuccuucccaaag

SEQ ID NO: 2557704 - RNA, 12 nt, Human
cuccuccuuccc

SEQ ID NO: 2557705 - RNA, 17 nt, Human
cuccucccggugcccaa

SEQ ID NO: 2557706 - RNA, 15 nt, Human
cuccucccggugccc

SEQ ID NO: 2557707 - RNA, 17 nt, Human
cuccuccccaaaucaau

SEQ ID NO: 2557708 - RNA, 14 nt, Human
cuccuccccaaauc

SEQ ID NO: 2557709 - RNA, 15 nt, Human
cuccucccauguuau

SEQ ID NO: 2557710 - RNA, 14 nt, Human
cuccucccggugcc

SEQ ID NO: 2557711 - RNA, 19 nt, Human
cuccuccuuggugccuggc

SEQ ID NO: 2557712 - RNA, 22 nt, Human
cuccucuccccagcaagugaga

SEQ ID NO: 2557713 - RNA, 15 nt, Human
cuccucuccccagcc

SEQ ID NO: 2557714 - RNA, 15 nt, Human
cuccucgcaagcugg

SEQ ID NO: 2557715 - RNA, 16 nt, Human
cuccucgcaagcuggg

SEQ ID NO: 2557716 - RNA, 17 nt, Human
cuccucgagggcaggga

SEQ ID NO: 2557717 - RNA, 15 nt, Human
cuccucgagggcagg

SEQ ID NO: 2557718 - RNA, 21 nt, Human
cuccucgagggcagggacuuu

SEQ ID NO: 2557719 - RNA, 14 nt, Human
cuccucgcaagcug

SEQ ID NO: 2557720 - RNA, 19 nt, Human
cuccuccaccgccauggcu

SEQ ID NO: 2557721 - RNA, 18 nt, Human
cuccuccaccgccauggc

SEQ ID NO: 2557722 - RNA, 16 nt, Human
cuccuccaccgccaug

SEQ ID NO: 2557723 - RNA, 15 nt, Human
cuccuccaccgccau

SEQ ID NO: 2557724 - RNA, 13 nt, Human
cuccuccaccgcc

SEQ ID NO: 2557725 - RNA, 18 nt, Human
cuccuccaaaggcccccu

SEQ ID NO: 2557726 - RNA, 14 nt, Human
cuccuccaaaggcc

SEQ ID NO: 2557727 - RNA, 22 nt, Human
cuccuccagccgccaugcuccu

SEQ ID NO: 2557728 - RNA, 20 nt, Human
cuccucauguacauacccug

SEQ ID NO: 2557729 - RNA, 11 nt, Human
cuccucaugua

SEQ ID NO: 2557730 - RNA, 15 nt, Human
cuccucaucccgugu

SEQ ID NO: 2557731 - RNA, 14 nt, Human
cuccucaucucuaa

SEQ ID NO: 2557732 - RNA, 21 nt, Human
cuccuccaagacacuguggac

SEQ ID NO: 2557733 - RNA, 15 nt, Human
cuccuccaaaggaag

SEQ ID NO: 2557734 - RNA, 18 nt, Human
cuccuccaaaggaagucu

SEQ ID NO: 2557735 - RNA, 23 nt, Human
cuccuccaaaggaagucuaggag

SEQ ID NO: 2557736 - RNA, 22 nt, Human
cuccuccaccgccauggcuucc

SEQ ID NO: 2557737 - RNA, 16 nt, Human
cuccuccacucucccc

SEQ ID NO: 2557738 - RNA, 11 nt, Human
cuccuccaggg

SEQ ID NO: 2557739 - RNA, 13 nt, Human
cuccuccagggcc

SEQ ID NO: 2557740 - RNA, 15 nt, Human
cuccuccaugggaga

SEQ ID NO: 2557741 - RNA, 18 nt, Human
cuccuccaugggagaaaa

SEQ ID NO: 2557742 - RNA, 13 nt, Human
cuccuccagggug

SEQ ID NO: 2557743 - RNA, 14 nt, Human
cuccuccagggcca

SEQ ID NO: 2557744 - RNA, 19 nt, Human
cuccuccagggccacgugc

SEQ ID NO: 2557745 - RNA, 20 nt, Human
cuccuccagggccacgugcc

SEQ ID NO: 2557746 - RNA, 22 nt, Human
cuccuccagggccacgugccag

SEQ ID NO: 2557747 - RNA, 16 nt, Human
cuccgcccugccacuc

SEQ ID NO: 2557748 - RNA, 15 nt, Human
cuccgcccugccacu

SEQ ID NO: 2557749 - RNA, 17 nt, Human
cuccgcccugccacuca

SEQ ID NO: 2557750 - RNA, 14 nt, Human
cuccgcccugccac

SEQ ID NO: 2557751 - RNA, 13 nt, Human
cuccgcccugcca

SEQ ID NO: 2557752 - RNA, 23 nt, Human
cuccgccaggcgagauggggugg

SEQ ID NO: 2557753 - RNA, 21 nt, Human
cuccgccagccuccucuggac

SEQ ID NO: 2557754 - RNA, 13 nt, Human
cuccgccaggcga

SEQ ID NO: 2557755 - RNA, 20 nt, Human
cuccgccagccuccucugga

SEQ ID NO: 2557756 - RNA, 18 nt, Human
cuccgccagccuccucug

SEQ ID NO: 2557757 - RNA, 15 nt, Human
cuccgccagccuccu

SEQ ID NO: 2557758 - RNA, 23 nt, Human
cuccgccauucucaagcccugca

SEQ ID NO: 2557759 - RNA, 17 nt, Human
cuccucacccccagcuu

SEQ ID NO: 2557760 - RNA, 15 nt, Human
cuccucacccccagc

SEQ ID NO: 2557761 - RNA, 20 nt, Human
cuccucacccccagcuuugc

SEQ ID NO: 2557762 - RNA, 21 nt, Human
cuccucacccccagcuuugcu

SEQ ID NO: 2557763 - RNA, 19 nt, Human
cuccucaccucaugcccac

SEQ ID NO: 2557764 - RNA, 17 nt, Human
cuccucaccucaugccc

SEQ ID NO: 2557765 - RNA, 16 nt, Human
cuccucaccucaugcc

SEQ ID NO: 2557766 - RNA, 15 nt, Human
cuccucaccucaugc

SEQ ID NO: 2557767 - RNA, 14 nt, Human
cuccucaccucaug

SEQ ID NO: 2557768 - RNA, 12 nt, Human
cuccucaccuca

SEQ ID NO: 2557769 - RNA, 15 nt, Human
cuccucaccccgucu

SEQ ID NO: 2557770 - RNA, 18 nt, Human
cuccucaccccgucuggg

SEQ ID NO: 2557771 - RNA, 12 nt, Human
cuccucaucccg

SEQ ID NO: 2557772 - RNA, 20 nt, Human
cuccucaccucaugcccacc

SEQ ID NO: 2557773 - RNA, 22 nt, Human
cuccucaccucuggacuggcua

SEQ ID NO: 2557774 - RNA, 18 nt, Human
cuccucaccucuggacug

SEQ ID NO: 2557775 - RNA, 21 nt, Human
cuccucaccucuggacuggcu

SEQ ID NO: 2557776 - RNA, 13 nt, Human
cuccucaccucug

SEQ ID NO: 2557777 - RNA, 14 nt, Human
cuccucaccucugg

SEQ ID NO: 2557778 - RNA, 15 nt, Human
cuccucaccucugga

SEQ ID NO: 2557779 - RNA, 16 nt, Human
cuccucaccucuggac

SEQ ID NO: 2557780 - RNA, 19 nt, Human
cucccuauuuuuuuucugu

SEQ ID NO: 2557781 - RNA, 20 nt, Human
cucccuauuuuuuuucuguu

SEQ ID NO: 2557782 - RNA, 14 nt, Human
cucccucagugccc

SEQ ID NO: 2557783 - RNA, 23 nt, Human
cucccucagugcccucauuuuau

SEQ ID NO: 2557784 - RNA, 13 nt, Human
cucccucauucca

SEQ ID NO: 2557785 - RNA, 17 nt, Human
cucccuuucuucccuac

SEQ ID NO: 2557786 - RNA, 23 nt, Human
cucccuuuuuccuuguccccaca

SEQ ID NO: 2557787 - RNA, 22 nt, Human
cucccuuuuuccuuguccccac

SEQ ID NO: 2557788 - RNA, 22 nt, Human
cuccgaacacccucgaagcgcg

SEQ ID NO: 2557789 - RNA, 15 nt, Human
cuccgaccagacacc

SEQ ID NO: 2557790 - RNA, 14 nt, Human
cucccuuuuuauau

SEQ ID NO: 2557791 - RNA, 22 nt, Human
cucccucauuucaggagcagcc

SEQ ID NO: 2557792 - RNA, 14 nt, Human
cucccuuugaaaug

SEQ ID NO: 2557793 - RNA, 21 nt, Human
cucccuuuuuccuugucccca

SEQ ID NO: 2557794 - RNA, 20 nt, Human
cucccuuuuuccuugucccc

SEQ ID NO: 2557795 - RNA, 18 nt, Human
cucccuuuuuccuugucc

SEQ ID NO: 2557796 - RNA, 16 nt, Human
cucccuuuuuccuugu

SEQ ID NO: 2557797 - RNA, 21 nt, Human
cucccuuuuuauaucccauuu

SEQ ID NO: 2557798 - RNA, 14 nt, Human
cuccugccucagcc

SEQ ID NO: 2557799 - RNA, 13 nt, Human
cuccugccucagc

SEQ ID NO: 2557800 - RNA, 11 nt, Human
cuccugcccuu

SEQ ID NO: 2557801 - RNA, 15 nt, Human
cuccugccgacuccu

SEQ ID NO: 2557802 - RNA, 13 nt, Human
cuccugcccuguu

SEQ ID NO: 2557803 - RNA, 12 nt, Human
cuccugcccugu

SEQ ID NO: 2557804 - RNA, 18 nt, Human
cuccugcccaguccccca

SEQ ID NO: 2557805 - RNA, 20 nt, Human
cuccugcaggcagccaggcc

SEQ ID NO: 2557806 - RNA, 18 nt, Human
cuccugcaggcagccagg

SEQ ID NO: 2557807 - RNA, 14 nt, Human
cuccugcagaccac

SEQ ID NO: 2557808 - RNA, 12 nt, Human
cuccugcccagg

SEQ ID NO: 2557809 - RNA, 13 nt, Human
cuccugcccagga

SEQ ID NO: 2557810 - RNA, 14 nt, Human
cuccugcccaggag

SEQ ID NO: 2557811 - RNA, 15 nt, Human
cuccugcccaggaga

SEQ ID NO: 2557812 - RNA, 17 nt, Human
cuccugcccaguccccc

SEQ ID NO: 2557813 - RNA, 15 nt, Human
cuccugcccaguccc

SEQ ID NO: 2557814 - RNA, 14 nt, Human
cuccugcccagucc

SEQ ID NO: 2557815 - RNA, 13 nt, Human
cuccugcccaguc

SEQ ID NO: 2557816 - RNA, 16 nt, Human
cuccugcccaggagag

SEQ ID NO: 2557817 - RNA, 17 nt, Human
cuccugcccaggagagc

SEQ ID NO: 2557818 - RNA, 20 nt, Human
cuccugcccaggagagccag

SEQ ID NO: 2557819 - RNA, 22 nt, Human
cuccugcccaggagagccagcc

SEQ ID NO: 2557820 - RNA, 17 nt, Human
cuccugcaggcagccag

SEQ ID NO: 2557821 - RNA, 16 nt, Human
cuccugcaggcagcca

SEQ ID NO: 2557822 - RNA, 22 nt, Human
cuccugcacuuacuugcuuauu

SEQ ID NO: 2557823 - RNA, 20 nt, Human
cuccugcacuuacuugcuua

SEQ ID NO: 2557824 - RNA, 19 nt, Human
cuccugcacuuacuugcuu

SEQ ID NO: 2557825 - RNA, 18 nt, Human
cuccugcacuuacuugcu

SEQ ID NO: 2557826 - RNA, 11 nt, Human
cuccugcaggc

SEQ ID NO: 2557827 - RNA, 17 nt, Human
cuccucuccccagccca

SEQ ID NO: 2557828 - RNA, 18 nt, Human
cuccucuccccagcccag

SEQ ID NO: 2557829 - RNA, 19 nt, Human
cuccucuccccagcccaga

SEQ ID NO: 2557830 - RNA, 20 nt, Human
cuccucuccccagcccagag

SEQ ID NO: 2557831 - RNA, 21 nt, Human
cuccucuccccagcccagaga

SEQ ID NO: 2557832 - RNA, 22 nt, Human
cuccucuccccagcccagagac

SEQ ID NO: 2557833 - RNA, 14 nt, Human
cuccucuccccuac

SEQ ID NO: 2557834 - RNA, 12 nt, Human
cuccucuccccu

SEQ ID NO: 2557835 - RNA, 23 nt, Human
cuccucuccccagcccagagaca

SEQ ID NO: 2557836 - RNA, 17 nt, Human
cuccugcacuuacuugc

SEQ ID NO: 2557837 - RNA, 15 nt, Human
cuccugcacuuacuu

SEQ ID NO: 2557838 - RNA, 14 nt, Human
cuccucuccccucu

SEQ ID NO: 2557839 - RNA, 18 nt, Human
cuccucuccccuaccacu

SEQ ID NO: 2557840 - RNA, 17 nt, Human
cuccucuccccuaccac

SEQ ID NO: 2557841 - RNA, 15 nt, Human
cuccucuccccucua

SEQ ID NO: 2557842 - RNA, 20 nt, Human
cuccuguggccccacccugg

SEQ ID NO: 2557843 - RNA, 19 nt, Human
cuccuguggccccacccug

SEQ ID NO: 2557844 - RNA, 15 nt, Human
cuccugugcuuuccc

SEQ ID NO: 2557845 - RNA, 13 nt, Human
cuccuguggcccc

SEQ ID NO: 2557846 - RNA, 20 nt, Human
cuccugugcuacuuugccuu

SEQ ID NO: 2557847 - RNA, 11 nt, Human
cuccugugcua

SEQ ID NO: 2557848 - RNA, 16 nt, Human
cuccugugcaugggug

SEQ ID NO: 2557849 - RNA, 17 nt, Human
cuccugugcaacuuucc

SEQ ID NO: 2557850 - RNA, 13 nt, Human
cuccugugcccuu

SEQ ID NO: 2557851 - RNA, 12 nt, Human
cuccugugcccu

SEQ ID NO: 2557852 - RNA, 22 nt, Human
cuccugugcccacaucccaggc

SEQ ID NO: 2557853 - RNA, 21 nt, Human
cuccugugcccacaucccagg

SEQ ID NO: 2557854 - RNA, 14 nt, Human
cuccugugcccaca

SEQ ID NO: 2557855 - RNA, 11 nt, Human
cuccugugccc

SEQ ID NO: 2557856 - RNA, 17 nt, Human
cuccugugcauggguga

SEQ ID NO: 2557857 - RNA, 20 nt, Human
cuccugugcaugggugaagg

SEQ ID NO: 2557858 - RNA, 22 nt, Human
cuccuguggccccacccugggc

SEQ ID NO: 2557859 - RNA, 21 nt, Human
cuccuguggccccacccuggg

SEQ ID NO: 2557860 - RNA, 13 nt, Human
cuccuguguacag

SEQ ID NO: 2557861 - RNA, 11 nt, Human
cuccuguguaa

SEQ ID NO: 2557862 - RNA, 19 nt, Human
cuccugugugugcgccuac

SEQ ID NO: 2557863 - RNA, 16 nt, Human
cuccugugugugcgcc

SEQ ID NO: 2557864 - RNA, 21 nt, Human
cuccugucuucccaggguagc

SEQ ID NO: 2557865 - RNA, 19 nt, Human
cuccugucuucccagggua

SEQ ID NO: 2557866 - RNA, 18 nt, Human
cuccugucuucccagggu

SEQ ID NO: 2557867 - RNA, 17 nt, Human
cuccugucuucccaggg

SEQ ID NO: 2557868 - RNA, 15 nt, Human
cuccugucuucccag

SEQ ID NO: 2557869 - RNA, 14 nt, Human
cuccugucuuccca

SEQ ID NO: 2557870 - RNA, 10 nt, Human
cuccugucuu

SEQ ID NO: 2557871 - RNA, 17 nt, Human
cuccugucugccagcca

SEQ ID NO: 2557872 - RNA, 19 nt, Human
cuccugucugccagccagc

SEQ ID NO: 2557873 - RNA, 22 nt, Human
cuccugucugccagccagcagc

SEQ ID NO: 2557874 - RNA, 23 nt, Human
cuccugucugccagccagcagcc

SEQ ID NO: 2557875 - RNA, 18 nt, Human
cuccugccuuccuccugg

SEQ ID NO: 2557876 - RNA, 19 nt, Human
cuccugccuuccuccuggg

SEQ ID NO: 2557877 - RNA, 20 nt, Human
cuccugccuuccuccugggc

SEQ ID NO: 2557878 - RNA, 16 nt, Human
cuccugccuucugucc

SEQ ID NO: 2557879 - RNA, 22 nt, Human
cuccugccuucuguccuggugu

SEQ ID NO: 2557880 - RNA, 21 nt, Human
cuccugccuucuguccuggug

SEQ ID NO: 2557881 - RNA, 17 nt, Human
cuccugcgcgcaugugc

SEQ ID NO: 2557882 - RNA, 15 nt, Human
cuccugccucagccu

SEQ ID NO: 2557883 - RNA, 17 nt, Human
cuccugccugccccucu

SEQ ID NO: 2557884 - RNA, 14 nt, Human
cuccugccugcccc

SEQ ID NO: 2557885 - RNA, 17 nt, Human
cuccugccgacuccugg

SEQ ID NO: 2557886 - RNA, 16 nt, Human
cuccugccgacuccug

SEQ ID NO: 2557887 - RNA, 18 nt, Human
cuccugccuguagcagug

SEQ ID NO: 2557888 - RNA, 16 nt, Human
cuccugccuguagcag

SEQ ID NO: 2557889 - RNA, 15 nt, Human
cuccugccuguagca

SEQ ID NO: 2557890 - RNA, 14 nt, Human
cuccugccuguagc

SEQ ID NO: 2557891 - RNA, 16 nt, Human
cuccugccuuccuccu

SEQ ID NO: 2557892 - RNA, 19 nt, Human
cuccugccuguagcaguga

SEQ ID NO: 2557893 - RNA, 23 nt, Human
cucccuaucuaacccucccaugg

SEQ ID NO: 2557894 - RNA, 17 nt, Human
cucccuauuuuuuuucu

SEQ ID NO: 2557895 - RNA, 21 nt, Human
cucccuagugacccggaggcc

SEQ ID NO: 2557896 - RNA, 21 nt, Human
cucccuagccagcacuuguau

SEQ ID NO: 2557897 - RNA, 22 nt, Human
cucccuaccaccuccccagccu

SEQ ID NO: 2557898 - RNA, 23 nt, Human
cucccuagugacccggaggccac

SEQ ID NO: 2557899 - RNA, 22 nt, Human
cucccuagugacccggaggcca

SEQ ID NO: 2557900 - RNA, 16 nt, Human
cucccggcguggugga

SEQ ID NO: 2557901 - RNA, 20 nt, Human
cucccggcuaugggggcacu

SEQ ID NO: 2557902 - RNA, 13 nt, Human
cucccuaccaccu

SEQ ID NO: 2557903 - RNA, 14 nt, Human
cucccuaccaccuc

SEQ ID NO: 2557904 - RNA, 15 nt, Human
cucccuaccaccucc

SEQ ID NO: 2557905 - RNA, 14 nt, Human
cucccggcacucca

SEQ ID NO: 2557906 - RNA, 17 nt, Human
cucccgcugcugcugcu

SEQ ID NO: 2557907 - RNA, 20 nt, Human
cucccggagguugggugggc

SEQ ID NO: 2557908 - RNA, 19 nt, Human
cucccggagguuggguggg

SEQ ID NO: 2557909 - RNA, 15 nt, Human
cucccggagggcccu

SEQ ID NO: 2557910 - RNA, 17 nt, Human
cucccggcaugggaaag

SEQ ID NO: 2557911 - RNA, 18 nt, Human
cucccggcacuccaugcu

SEQ ID NO: 2557912 - RNA, 19 nt, Human
cucccggcaugggaaagcc

SEQ ID NO: 2557913 - RNA, 12 nt, Human
cucccggcgugg

SEQ ID NO: 2557914 - RNA, 16 nt, Human
cucccgcugcugcugc

SEQ ID NO: 2557915 - RNA, 15 nt, Human
cucccgcugcugcug

SEQ ID NO: 2557916 - RNA, 14 nt, Human
cucccgcugcugcu

SEQ ID NO: 2557917 - RNA, 13 nt, Human
cucccgcugcugc

SEQ ID NO: 2557918 - RNA, 18 nt, Human
cuccccugcugcaggggc

SEQ ID NO: 2557919 - RNA, 20 nt, Human
cucccgcugcccaggggagc

SEQ ID NO: 2557920 - RNA, 18 nt, Human
cucccgaguagcugggac

SEQ ID NO: 2557921 - RNA, 17 nt, Human
cucccgaguagcuggga

SEQ ID NO: 2557922 - RNA, 16 nt, Human
cucccgaguagcuggg

SEQ ID NO: 2557923 - RNA, 18 nt, Human
cucccgaauagcugggac

SEQ ID NO: 2557924 - RNA, 15 nt, Human
cucccgaguagcugg

SEQ ID NO: 2557925 - RNA, 16 nt, Human
cuccccugcugcaggg

SEQ ID NO: 2557926 - RNA, 15 nt, Human
cuccccugcugcagg

SEQ ID NO: 2557927 - RNA, 13 nt, Human
cuccccugcugca

SEQ ID NO: 2557928 - RNA, 16 nt, Human
cuccccugcugaaggu

SEQ ID NO: 2557929 - RNA, 13 nt, Human
cuccccugcuggg

SEQ ID NO: 2557930 - RNA, 16 nt, Human
cucccgaauagcuggg

SEQ ID NO: 2557931 - RNA, 17 nt, Human
cucccgaauagcuggga

SEQ ID NO: 2557932 - RNA, 20 nt, Human
cucccaucugggaguccccu

SEQ ID NO: 2557933 - RNA, 15 nt, Human
cucccaucugggagu

SEQ ID NO: 2557934 - RNA, 13 nt, Human
cucccaucuggga

SEQ ID NO: 2557935 - RNA, 12 nt, Human
cucccaucuggg

SEQ ID NO: 2557936 - RNA, 22 nt, Human
cucccaucugggaguccccuuu

SEQ ID NO: 2557937 - RNA, 16 nt, Human
cucccaugaccauacu

SEQ ID NO: 2557938 - RNA, 21 nt, Human
cucccaugaccauacugaggg

SEQ ID NO: 2557939 - RNA, 21 nt, Human
cuccccaaaucaauacacuag

SEQ ID NO: 2557940 - RNA, 12 nt, Human
cucccauuucua

SEQ ID NO: 2557941 - RNA, 14 nt, Human
cucccauuuccuga

SEQ ID NO: 2557942 - RNA, 16 nt, Human
cucccauuucuacucu

SEQ ID NO: 2557943 - RNA, 14 nt, Human
cucccauuucuacu

SEQ ID NO: 2557944 - RNA, 12 nt, Human
cuccccaaaaac

SEQ ID NO: 2557945 - RNA, 21 nt, Human
cuccccacacuaaccuggguu

SEQ ID NO: 2557946 - RNA, 20 nt, Human
cuccccaacccugccccugc

SEQ ID NO: 2557947 - RNA, 17 nt, Human
cuccccaacccugcccc

SEQ ID NO: 2557948 - RNA, 19 nt, Human
cuccccaacccugccccug

SEQ ID NO: 2557949 - RNA, 12 nt, Human
cuccccaacccu

SEQ ID NO: 2557950 - RNA, 14 nt, Human
cuccccaacccugc

SEQ ID NO: 2557951 - RNA, 15 nt, Human
cuccccaacccugcc

SEQ ID NO: 2557952 - RNA, 19 nt, Human
cuccccacugccuacugca

SEQ ID NO: 2557953 - RNA, 16 nt, Human
cuccccacugccuacu

SEQ ID NO: 2557954 - RNA, 12 nt, Human
cuccccagcaag

SEQ ID NO: 2557955 - RNA, 17 nt, Human
cuccccagccccuagcc

SEQ ID NO: 2557956 - RNA, 15 nt, Human
cuccccagccccuag

SEQ ID NO: 2557957 - RNA, 13 nt, Human
cuccccagccccu

SEQ ID NO: 2557958 - RNA, 20 nt, Human
cuccccagaguuccccaugc

SEQ ID NO: 2557959 - RNA, 17 nt, Human
cuccccagagcacuggg

SEQ ID NO: 2557960 - RNA, 16 nt, Human
cuccccagagcacugg

SEQ ID NO: 2557961 - RNA, 15 nt, Human
cuccccagagcacug

SEQ ID NO: 2557962 - RNA, 13 nt, Human
cuccccagcccug

SEQ ID NO: 2557963 - RNA, 22 nt, Human
cuccccagccccuagcccagga

SEQ ID NO: 2557964 - RNA, 21 nt, Human
cuccccagccccuagcccagg

SEQ ID NO: 2557965 - RNA, 19 nt, Human
cuccccagccccuagccca

SEQ ID NO: 2557966 - RNA, 16 nt, Human
cuccccagcccuggcu

SEQ ID NO: 2557967 - RNA, 15 nt, Human
cuccccagcccuggc

SEQ ID NO: 2557968 - RNA, 20 nt, Human
cuccccagcaagugagagcu

SEQ ID NO: 2557969 - RNA, 20 nt, Human
cuccccagccccaucccaaa

SEQ ID NO: 2557970 - RNA, 12 nt, Human
cuccccugcugg

SEQ ID NO: 2557971 - RNA, 15 nt, Human
cuccccugcccugcu

SEQ ID NO: 2557972 - RNA, 16 nt, Human
cuccccugcccugcug

SEQ ID NO: 2557973 - RNA, 14 nt, Human
cuccccugcccugg

SEQ ID NO: 2557974 - RNA, 12 nt, Human
cuccccagcuca

SEQ ID NO: 2557975 - RNA, 17 nt, Human
cuccccaggccaggcca

SEQ ID NO: 2557976 - RNA, 15 nt, Human
cuccccaggccaggc

SEQ ID NO: 2557977 - RNA, 12 nt, Human
cuccccaggcca

SEQ ID NO: 2557978 - RNA, 21 nt, Human
cuccccaggccaggccaccag

SEQ ID NO: 2557979 - RNA, 21 nt, Human
cuccccaggccguggcugccc

SEQ ID NO: 2557980 - RNA, 23 nt, Human
cucacuauggugccaauggaacc

SEQ ID NO: 2557981 - RNA, 17 nt, Human
cucacuauggugccaau

SEQ ID NO: 2557982 - RNA, 18 nt, Human
cucacuauguugcccagg

SEQ ID NO: 2557983 - RNA, 15 nt, Human
cucacuauggugcca

SEQ ID NO: 2557984 - RNA, 22 nt, Human
cucacuaugaaucuauuauacu

SEQ ID NO: 2557985 - RNA, 17 nt, Human
cucacuauccuacccca

SEQ ID NO: 2557986 - RNA, 11 nt, Human
cuccauccuga

SEQ ID NO: 2557987 - RNA, 16 nt, Human
cuccauccugaggcuc

SEQ ID NO: 2557988 - RNA, 18 nt, Human
cuccauccugaggcucca

SEQ ID NO: 2557989 - RNA, 14 nt, Human
cuccaucuccacuc

SEQ ID NO: 2557990 - RNA, 12 nt, Human
cuccaucucucu

SEQ ID NO: 2557991 - RNA, 16 nt, Human
cuccaucuccacucca

SEQ ID NO: 2557992 - RNA, 17 nt, Human
cuccaucucucuggccc

SEQ ID NO: 2557993 - RNA, 16 nt, Human
cuccaucucucuggcc

SEQ ID NO: 2557994 - RNA, 15 nt, Human
cuccaucucucuggc

SEQ ID NO: 2557995 - RNA, 13 nt, Human
cuccaucucucug

SEQ ID NO: 2557996 - RNA, 18 nt, Human
cuccaucucucuggcccu

SEQ ID NO: 2557997 - RNA, 16 nt, Human
cuccaucuggcagggu

SEQ ID NO: 2557998 - RNA, 13 nt, Human
cuccaugagcacc

SEQ ID NO: 2557999 - RNA, 21 nt, Human
cuccaugagacacaucuccuc

SEQ ID NO: 2558000 - RNA, 17 nt, Human
cuccaugaguuuuuucu

SEQ ID NO: 2558001 - RNA, 17 nt, Human
cuccaucuucuuugcag

SEQ ID NO: 2558002 - RNA, 16 nt, Human
cuccaucuucuuugca

SEQ ID NO: 2558003 - RNA, 19 nt, Human
cuccaucuucagcuucuuc

SEQ ID NO: 2558004 - RNA, 17 nt, Human
cuccaucuucagcuucu

SEQ ID NO: 2558005 - RNA, 12 nt, Human
cuccaucuguuu

SEQ ID NO: 2558006 - RNA, 12 nt, Human
cuccaucuuauu

SEQ ID NO: 2558007 - RNA, 21 nt, Human
cuccauggcuuccuccucccu

SEQ ID NO: 2558008 - RNA, 20 nt, Human
cuccauggcuuccuccuccc

SEQ ID NO: 2558009 - RNA, 19 nt, Human
cuccauggcuuccuccucc

SEQ ID NO: 2558010 - RNA, 18 nt, Human
cuccauggcuuccuccuc

SEQ ID NO: 2558011 - RNA, 17 nt, Human
cuccauggcuuccuccu

SEQ ID NO: 2558012 - RNA, 16 nt, Human
cuccauggcuuccucc

SEQ ID NO: 2558013 - RNA, 15 nt, Human
cuccauggcuuccuc

SEQ ID NO: 2558014 - RNA, 13 nt, Human
cuccaugucucug

SEQ ID NO: 2558015 - RNA, 22 nt, Human
cuccaugucucugagcauuaga

SEQ ID NO: 2558016 - RNA, 13 nt, Human
cuccaugugggcu

SEQ ID NO: 2558017 - RNA, 17 nt, Human
cucccaaagugcuggga

SEQ ID NO: 2558018 - RNA, 22 nt, Human
cucccaacucaccccagcccca

SEQ ID NO: 2558019 - RNA, 19 nt, Human
cucccaggggcuggcuuca

SEQ ID NO: 2558020 - RNA, 21 nt, Human
cucccaaggcugcgucuggag

SEQ ID NO: 2558021 - RNA, 18 nt, Human
cucccaaggcugcgucug

SEQ ID NO: 2558022 - RNA, 22 nt, Human
cucccagggccagggcccugca

SEQ ID NO: 2558023 - RNA, 23 nt, Human
cucccagggccagggcccugcag

SEQ ID NO: 2558024 - RNA, 17 nt, Human
cucccaacucaccccag

SEQ ID NO: 2558025 - RNA, 16 nt, Human
cucccaacucacccca

SEQ ID NO: 2558026 - RNA, 18 nt, Human
cucccaaagugcugggau

SEQ ID NO: 2558027 - RNA, 22 nt, Human
cucccaaagugcugggauuaca

SEQ ID NO: 2558028 - RNA, 23 nt, Human
cucccaucugugaaaggaaagag

SEQ ID NO: 2558029 - RNA, 18 nt, Human
cucccaucugugaaagga

SEQ ID NO: 2558030 - RNA, 15 nt, Human
cucccaucugugaaa

SEQ ID NO: 2558031 - RNA, 14 nt, Human
cucccaucugugaa

SEQ ID NO: 2558032 - RNA, 11 nt, Human
cucccaucugu

SEQ ID NO: 2558033 - RNA, 21 nt, Human
cucccaucucacacaugagca

SEQ ID NO: 2558034 - RNA, 11 nt, Human
cucccaucugg

SEQ ID NO: 2558035 - RNA, 24 nt, Human
cucccagguaccagcugcgcuugc

SEQ ID NO: 2558036 - RNA, 16 nt, Human
cucccagguaccagcu

SEQ ID NO: 2558037 - RNA, 19 nt, Human
cucccagguaccagcugcg

SEQ ID NO: 2558038 - RNA, 18 nt, Human
cucccagguaccagcugc

SEQ ID NO: 2558039 - RNA, 17 nt, Human
cucccagguaccagcug

SEQ ID NO: 2558040 - RNA, 22 nt, Human
cucccagguaccagcugcgcuu

SEQ ID NO: 2558041 - RNA, 21 nt, Human
cucccagguaccagcugcgcu

SEQ ID NO: 2558042 - RNA, 17 nt, Human
cuccuucacagaugggu

SEQ ID NO: 2558043 - RNA, 16 nt, Human
cuccuucacagauggg

SEQ ID NO: 2558044 - RNA, 14 nt, Human
cuccugugugugcg

SEQ ID NO: 2558045 - RNA, 14 nt, Human
cuccuguguacagg

SEQ ID NO: 2558046 - RNA, 18 nt, Human
cuccuguguagcugggau

SEQ ID NO: 2558047 - RNA, 20 nt, Human
cuccugugugugcgccuaca

SEQ ID NO: 2558048 - RNA, 19 nt, Human
cuccuucacagaugggugc

SEQ ID NO: 2558049 - RNA, 13 nt, Human
cucgcugccagcu

SEQ ID NO: 2558050 - RNA, 16 nt, Human
cucgcugccagcucug

SEQ ID NO: 2558051 - RNA, 13 nt, Human
cuccuucaccuuu

SEQ ID NO: 2558052 - RNA, 20 nt, Human
cucgcugcugcgcccugggc

SEQ ID NO: 2558053 - RNA, 19 nt, Human
cucgcugccagcucuguau

SEQ ID NO: 2558054 - RNA, 15 nt, Human
cucgcuggacucuca

SEQ ID NO: 2558055 - RNA, 16 nt, Human
cucgcuggacucucag

SEQ ID NO: 2558056 - RNA, 15 nt, Human
cucgcugcuucugug

SEQ ID NO: 2558057 - RNA, 12 nt, Human
cucgcuguugcu

SEQ ID NO: 2558058 - RNA, 19 nt, Human
cucgcuggacucucagucu

SEQ ID NO: 2558059 - RNA, 17 nt, Human
cucggcucacugcaucc

SEQ ID NO: 2558060 - RNA, 18 nt, Human
cucggcucacugcauccu

SEQ ID NO: 2558061 - RNA, 22 nt, Human
cucggcuccccauguguccugg

SEQ ID NO: 2558062 - RNA, 19 nt, Human
cucggcuccccaugugucc

SEQ ID NO: 2558063 - RNA, 14 nt, Human
cucggcucacugca

SEQ ID NO: 2558064 - RNA, 20 nt, Human
cucggaguaucugggaacug

SEQ ID NO: 2558065 - RNA, 21 nt, Human
cucggaguaucugggaacugu

SEQ ID NO: 2558066 - RNA, 15 nt, Human
cucggaggcugcccc

SEQ ID NO: 2558067 - RNA, 13 nt, Human
cucggaggcugcc

SEQ ID NO: 2558068 - RNA, 12 nt, Human
cucggaggcugc

SEQ ID NO: 2558069 - RNA, 18 nt, Human
cucggaggccccaaagga

SEQ ID NO: 2558070 - RNA, 17 nt, Human
cucggagggauuccccu

SEQ ID NO: 2558071 - RNA, 16 nt, Human
cucggaggcugccccc

SEQ ID NO: 2558072 - RNA, 17 nt, Human
cucggaguaucugggaa

SEQ ID NO: 2558073 - RNA, 19 nt, Human
cucgcuucccccauagcca

SEQ ID NO: 2558074 - RNA, 16 nt, Human
cucgcuucccccauag

SEQ ID NO: 2558075 - RNA, 18 nt, Human
cucgcuucccccauagcc

SEQ ID NO: 2558076 - RNA, 15 nt, Human
cucgcuguugcugaa

SEQ ID NO: 2558077 - RNA, 13 nt, Human
cucgcuguugcug

SEQ ID NO: 2558078 - RNA, 16 nt, Human
cucgcuguugcugaau

SEQ ID NO: 2558079 - RNA, 14 nt, Human
cucgcuucccccau

SEQ ID NO: 2558080 - RNA, 15 nt, Human
cucggaggccccaaa

SEQ ID NO: 2558081 - RNA, 13 nt, Human
cucggaggcccca

SEQ ID NO: 2558082 - RNA, 12 nt, Human
cucggaggcccc

SEQ ID NO: 2558083 - RNA, 13 nt, Human
cucggaggaagcc

SEQ ID NO: 2558084 - RNA, 17 nt, Human
cucggaggaagccccca

SEQ ID NO: 2558085 - RNA, 13 nt, Human
cucggagccucau

SEQ ID NO: 2558086 - RNA, 16 nt, Human
cucggagccucauccg

SEQ ID NO: 2558087 - RNA, 22 nt, Human
cucggagccucauccgaggcag

SEQ ID NO: 2558088 - RNA, 23 nt, Human
cucggagccucauccgaggcagg

SEQ ID NO: 2558089 - RNA, 16 nt, Human
cucuacagaggccaug

SEQ ID NO: 2558090 - RNA, 14 nt, Human
cucuacagaggcca

SEQ ID NO: 2558091 - RNA, 15 nt, Human
cucuacaucuucugc

SEQ ID NO: 2558092 - RNA, 23 nt, Human
cucuacagagcuucccugacuca

SEQ ID NO: 2558093 - RNA, 21 nt, Human
cucuacagcuaaucagcauuc

SEQ ID NO: 2558094 - RNA, 19 nt, Human
cucuacagaggccaugggc

SEQ ID NO: 2558095 - RNA, 17 nt, Human
cucuacaaacucccacu

SEQ ID NO: 2558096 - RNA, 16 nt, Human
cucuacaacugagucc

SEQ ID NO: 2558097 - RNA, 23 nt, Human
cucuacaacugaguccuuaaaca

SEQ ID NO: 2558098 - RNA, 17 nt, Human
cucuacaacugaguccu

SEQ ID NO: 2558099 - RNA, 14 nt, Human
cucuacacugugaa

SEQ ID NO: 2558100 - RNA, 16 nt, Human
cucuaauuuauuuugu

SEQ ID NO: 2558101 - RNA, 22 nt, Human
cucuaauuggaagaaauuccug

SEQ ID NO: 2558102 - RNA, 16 nt, Human
cucuacaaacucccac

SEQ ID NO: 2558103 - RNA, 20 nt, Human
cucuaauucccauuuugcaa

SEQ ID NO: 2558104 - RNA, 17 nt, Human
cucuaauuggaagaaau

SEQ ID NO: 2558105 - RNA, 17 nt, Human
cucuacagagcuucccu

SEQ ID NO: 2558106 - RNA, 18 nt, Human
cucuacagagcuucccug

SEQ ID NO: 2558107 - RNA, 20 nt, Human
cucuacagagcuucccugac

SEQ ID NO: 2558108 - RNA, 22 nt, Human
cucuacagagcuucccugacuc

SEQ ID NO: 2558109 - RNA, 13 nt, Human
cucuacagaggcc

SEQ ID NO: 2558110 - RNA, 21 nt, Human
cucuaaccccaggccccgagg

SEQ ID NO: 2558111 - RNA, 19 nt, Human
cucuaaccccaggccccga

SEQ ID NO: 2558112 - RNA, 15 nt, Human
cucuaacccuaggca

SEQ ID NO: 2558113 - RNA, 18 nt, Human
cucuaaccccaggccccg

SEQ ID NO: 2558114 - RNA, 17 nt, Human
cucuaaccccaggcccc

SEQ ID NO: 2558115 - RNA, 16 nt, Human
cucuaaccccaggccc

SEQ ID NO: 2558116 - RNA, 15 nt, Human
cucuaaccccaggcc

SEQ ID NO: 2558117 - RNA, 19 nt, Human
cucggcuccugcugcacca

SEQ ID NO: 2558118 - RNA, 17 nt, Human
cucggcuccugcugcac

SEQ ID NO: 2558119 - RNA, 16 nt, Human
cucggcuccugcugca

SEQ ID NO: 2558120 - RNA, 17 nt, Human
cucggcuuuucucagcu

SEQ ID NO: 2558121 - RNA, 15 nt, Human
cucggcuccugcugc

SEQ ID NO: 2558122 - RNA, 14 nt, Human
cucggcuccugcug

SEQ ID NO: 2558123 - RNA, 13 nt, Human
cucggcuccugcu

SEQ ID NO: 2558124 - RNA, 20 nt, Human
cucggaucaccgagaguagc

SEQ ID NO: 2558125 - RNA, 13 nt, Human
cucuacaaaaagc

SEQ ID NO: 2558126 - RNA, 20 nt, Human
cucuaggggucaggcuccau

SEQ ID NO: 2558127 - RNA, 17 nt, Human
cucuaggggucaggcuc

SEQ ID NO: 2558128 - RNA, 14 nt, Human
cucuagggcagugg

SEQ ID NO: 2558129 - RNA, 22 nt, Human
cucuagggagggacauggcccc

SEQ ID NO: 2558130 - RNA, 20 nt, Human
cucuagggaccccuccuccc

SEQ ID NO: 2558131 - RNA, 19 nt, Human
cucuagggaccccuccucc

SEQ ID NO: 2558132 - RNA, 18 nt, Human
cucuagggaccccuccuc

SEQ ID NO: 2558133 - RNA, 16 nt, Human
cucuagggaccccucc

SEQ ID NO: 2558134 - RNA, 14 nt, Human
cucuagguggggcg

SEQ ID NO: 2558135 - RNA, 13 nt, Human
cucuagguggggc

SEQ ID NO: 2558136 - RNA, 22 nt, Human
cucuaggugcccuuggaggcca

SEQ ID NO: 2558137 - RNA, 15 nt, Human
cucuaguauuccaga

SEQ ID NO: 2558138 - RNA, 15 nt, Human
cucuagguggggcgg

SEQ ID NO: 2558139 - RNA, 13 nt, Human
cucuagugcccuc

SEQ ID NO: 2558140 - RNA, 14 nt, Human
cucuagugcccucc

SEQ ID NO: 2558141 - RNA, 18 nt, Human
cucuagugcccuccacag

SEQ ID NO: 2558142 - RNA, 18 nt, Human
cucuagcuggugguuuca

SEQ ID NO: 2558143 - RNA, 17 nt, Human
cucuagcuggugguuuc

SEQ ID NO: 2558144 - RNA, 13 nt, Human
cucuagcuggugg

SEQ ID NO: 2558145 - RNA, 16 nt, Human
cucuagcugugggggu

SEQ ID NO: 2558146 - RNA, 17 nt, Human
cucuaggaaauauuuau

SEQ ID NO: 2558147 - RNA, 15 nt, Human
cucuaggcuggggaa

SEQ ID NO: 2558148 - RNA, 14 nt, Human
cucuaggcugggga

SEQ ID NO: 2558149 - RNA, 13 nt, Human
cucuaggcugggg

SEQ ID NO: 2558150 - RNA, 12 nt, Human
cucuaggcuggg

SEQ ID NO: 2558151 - RNA, 14 nt, Human
cucuagggaccccu

SEQ ID NO: 2558152 - RNA, 23 nt, Human
cucuagggaaaaaccagcgugug

SEQ ID NO: 2558153 - RNA, 16 nt, Human
cucuagagcagggauu

SEQ ID NO: 2558154 - RNA, 13 nt, Human
cucuagagcaggg

SEQ ID NO: 2558155 - RNA, 16 nt, Human
cucuagacacugccac

SEQ ID NO: 2558156 - RNA, 21 nt, Human
cucuagacacugccacacagg

SEQ ID NO: 2558157 - RNA, 20 nt, Human
cucuagaauuuuaagugcuu

SEQ ID NO: 2558158 - RNA, 23 nt, Human
cucuagaauuuuaagugcuuugu

SEQ ID NO: 2558159 - RNA, 17 nt, Human
cucuagacaacccugca

SEQ ID NO: 2558160 - RNA, 18 nt, Human
cucuagacaacccugcaa

SEQ ID NO: 2558161 - RNA, 23 nt, Human
cucuagacaacccugcaaaggac

SEQ ID NO: 2558162 - RNA, 19 nt, Human
cucuagaagccaagggaaa

SEQ ID NO: 2558163 - RNA, 18 nt, Human
cucuagaagccaagggaa

SEQ ID NO: 2558164 - RNA, 22 nt, Human
cucuagaagccaagggaaaggg

SEQ ID NO: 2558165 - RNA, 13 nt, Human
cucuacuuugagg

SEQ ID NO: 2558166 - RNA, 15 nt, Human
cucuagaagccaagg

SEQ ID NO: 2558167 - RNA, 12 nt, Human
cucuagaaauuu

SEQ ID NO: 2558168 - RNA, 15 nt, Human
cucuaggaaauauuu

SEQ ID NO: 2558169 - RNA, 20 nt, Human
cucuagcugggggugggcca

SEQ ID NO: 2558170 - RNA, 23 nt, Human
cucuagcugggggugggccaggc

SEQ ID NO: 2558171 - RNA, 14 nt, Human
cucuagccugggca

SEQ ID NO: 2558172 - RNA, 17 nt, Human
cucuagauuuuguuuug

SEQ ID NO: 2558173 - RNA, 20 nt, Human
cucuagauuuuguuuugcuu

SEQ ID NO: 2558174 - RNA, 19 nt, Human
cucuagauuuuguuuugcu

SEQ ID NO: 2558175 - RNA, 19 nt, Human
cucuagccaaaugguuuaa

SEQ ID NO: 2558176 - RNA, 13 nt, Human
cucuagccugggc

SEQ ID NO: 2558177 - RNA, 13 nt, Human
cucuacccuggca

SEQ ID NO: 2558178 - RNA, 12 nt, Human
cucuaccugaca

SEQ ID NO: 2558179 - RNA, 22 nt, Human
cucuaccugacacucccuuggg

SEQ ID NO: 2558180 - RNA, 22 nt, Human
cucuacccucccacccccuucu

SEQ ID NO: 2558181 - RNA, 20 nt, Human
cucuaccucauaucaguuug

SEQ ID NO: 2558182 - RNA, 19 nt, Human
cucuacccauauuacagau

SEQ ID NO: 2558183 - RNA, 16 nt, Human
cucuacccauauuaca

SEQ ID NO: 2558184 - RNA, 14 nt, Human
cucuacccucccac

SEQ ID NO: 2558185 - RNA, 15 nt, Human
cucuacccucccacc

SEQ ID NO: 2558186 - RNA, 16 nt, Human
cucuacccucccaccc

SEQ ID NO: 2558187 - RNA, 17 nt, Human
cucuacccucccacccc

SEQ ID NO: 2558188 - RNA, 18 nt, Human
cucuacccucccaccccc

SEQ ID NO: 2558189 - RNA, 18 nt, Human
cucuacaucuucugccuu

SEQ ID NO: 2558190 - RNA, 17 nt, Human
cucuacaucuucugccu

SEQ ID NO: 2558191 - RNA, 20 nt, Human
cucuaccaagcuauccuggc

SEQ ID NO: 2558192 - RNA, 18 nt, Human
cucuaccagacuguguau

SEQ ID NO: 2558193 - RNA, 20 nt, Human
cucuaccauccccuguagag

SEQ ID NO: 2558194 - RNA, 13 nt, Human
cucuacccagggc

SEQ ID NO: 2558195 - RNA, 14 nt, Human
cucuacccagggcc

SEQ ID NO: 2558196 - RNA, 17 nt, Human
cucuacccagggccugc

SEQ ID NO: 2558197 - RNA, 18 nt, Human
cucuacccagggccugca

SEQ ID NO: 2558198 - RNA, 20 nt, Human
cucuaccauuugcagagucc

SEQ ID NO: 2558199 - RNA, 22 nt, Human
cucuaccauuugcagaguccug

SEQ ID NO: 2558200 - RNA, 20 nt, Human
cucuacuuagcaugucccua

SEQ ID NO: 2558201 - RNA, 15 nt, Human
cucuacuuaaugaga

SEQ ID NO: 2558202 - RNA, 19 nt, Human
cucuacuuagcaugucccu

SEQ ID NO: 2558203 - RNA, 17 nt, Human
cucuacuuagcaugucc

SEQ ID NO: 2558204 - RNA, 18 nt, Human
cucuacugggagccuacc

SEQ ID NO: 2558205 - RNA, 21 nt, Human
cucuacugggagccuacccac

SEQ ID NO: 2558206 - RNA, 18 nt, Human
cucuacuuaauccaaugg

SEQ ID NO: 2558207 - RNA, 17 nt, Human
cucuacuuaauccaaug

SEQ ID NO: 2558208 - RNA, 16 nt, Human
cucuacuuagcauguc

SEQ ID NO: 2558209 - RNA, 20 nt, Human
cucuacguggcaaauuaacu

SEQ ID NO: 2558210 - RNA, 19 nt, Human
cucuacuaaaaagaaggaa

SEQ ID NO: 2558211 - RNA, 15 nt, Human
cucuacuaaaaagaa

SEQ ID NO: 2558212 - RNA, 22 nt, Human
cucuacuaaaaauacaaaaauu

SEQ ID NO: 2558213 - RNA, 16 nt, Human
cucuacuaaaaaugca

SEQ ID NO: 2558214 - RNA, 19 nt, Human
cucuacuaaaaauacagaa

SEQ ID NO: 2558215 - RNA, 21 nt, Human
cucuacuaacaaucagcuccu

SEQ ID NO: 2558216 - RNA, 16 nt, Human
cucuacuccuaccuca

SEQ ID NO: 2558217 - RNA, 19 nt, Human
cucuacuccuaccucagcc

SEQ ID NO: 2558218 - RNA, 19 nt, Human
cucuaguuugauuaaauuc

SEQ ID NO: 2558219 - RNA, 20 nt, Human
cucuaguuugauuaaauucu

SEQ ID NO: 2558220 - RNA, 15 nt, Human
cucuaguucuuuguu

SEQ ID NO: 2558221 - RNA, 13 nt, Human
cucuaguucuuug

SEQ ID NO: 2558222 - RNA, 18 nt, Human
cucuaguucuuuguucau

SEQ ID NO: 2558223 - RNA, 21 nt, Human
cucuaguuugauuaaauucuu

SEQ ID NO: 2558224 - RNA, 15 nt, Human
cucuaguuugauuaa

SEQ ID NO: 2558225 - RNA, 18 nt, Human
cucuagugcugugaaaaa

SEQ ID NO: 2558226 - RNA, 19 nt, Human
cucuagugcugugaaaaaa

SEQ ID NO: 2558227 - RNA, 20 nt, Human
cucuagugcugugaaaaaaa

SEQ ID NO: 2558228 - RNA, 14 nt, Human
cucuagugcuguga

SEQ ID NO: 2558229 - RNA, 15 nt, Human
cucuagugcugugaa

SEQ ID NO: 2558230 - RNA, 16 nt, Human
cucuagugcugugaaa

SEQ ID NO: 2558231 - RNA, 17 nt, Human
cucuagugcugugaaaa

SEQ ID NO: 2558232 - RNA, 12 nt, Human
cucuagugcugu

SEQ ID NO: 2558233 - RNA, 13 nt, Human
cucuagugcugug

SEQ ID NO: 2558234 - RNA, 14 nt, Human
cucuagugccuucu

SEQ ID NO: 2558235 - RNA, 16 nt, Human
cucuagugccuucuaa

SEQ ID NO: 2558236 - RNA, 21 nt, Human
cucuagugcccuccacagccg

SEQ ID NO: 2558237 - RNA, 15 nt, Human
cucucaggccagcug

SEQ ID NO: 2558238 - RNA, 13 nt, Human
cucucaggccagc

SEQ ID NO: 2558239 - RNA, 23 nt, Human
cucucaggccaaacucaccugcc

SEQ ID NO: 2558240 - RNA, 22 nt, Human
cucucaggccaaacucaccugc

SEQ ID NO: 2558241 - RNA, 21 nt, Human
cucucaggccaaacucaccug

SEQ ID NO: 2558242 - RNA, 20 nt, Human
cucucaggccaaacucaccu

SEQ ID NO: 2558243 - RNA, 12 nt, Human
cucucaggccaa

SEQ ID NO: 2558244 - RNA, 21 nt, Human
cucucaggcaugccuguguga

SEQ ID NO: 2558245 - RNA, 21 nt, Human
cucucaggccagcugcuuggg

SEQ ID NO: 2558246 - RNA, 19 nt, Human
cucucaggccagcugcuug

SEQ ID NO: 2558247 - RNA, 18 nt, Human
cucucaggccagcugcuu

SEQ ID NO: 2558248 - RNA, 17 nt, Human
cucucaggccagcugcu

SEQ ID NO: 2558249 - RNA, 14 nt, Human
cucucaugaaccuc

SEQ ID NO: 2558250 - RNA, 20 nt, Human
cucucauguuuucaacugcc

SEQ ID NO: 2558251 - RNA, 11 nt, Human
cucucauuccc

SEQ ID NO: 2558252 - RNA, 14 nt, Human
cucucauuccccag

SEQ ID NO: 2558253 - RNA, 15 nt, Human
cucucauuccccagg

SEQ ID NO: 2558254 - RNA, 21 nt, Human
cucucauuccccagguggcug

SEQ ID NO: 2558255 - RNA, 16 nt, Human
cucucauuccccaggu

SEQ ID NO: 2558256 - RNA, 20 nt, Human
cucucauuccccagguggcu

SEQ ID NO: 2558257 - RNA, 13 nt, Human
cucuccaaccugg

SEQ ID NO: 2558258 - RNA, 17 nt, Human
cucuccaagggcuucug

SEQ ID NO: 2558259 - RNA, 15 nt, Human
cucuccaagggcuuc

SEQ ID NO: 2558260 - RNA, 14 nt, Human
cucuccaagggcuu

SEQ ID NO: 2558261 - RNA, 13 nt, Human
cucuccaagggcu

SEQ ID NO: 2558262 - RNA, 15 nt, Human
cucuccaaaaaugca

SEQ ID NO: 2558263 - RNA, 14 nt, Human
cucuccaaccugga

SEQ ID NO: 2558264 - RNA, 12 nt, Human
cucuccaagggc

SEQ ID NO: 2558265 - RNA, 16 nt, Human
cucuccaaccuggaca

SEQ ID NO: 2558266 - RNA, 18 nt, Human
cucuccagccccuggaug

SEQ ID NO: 2558267 - RNA, 17 nt, Human
cucuccagccccuggau

SEQ ID NO: 2558268 - RNA, 16 nt, Human
cucuccagccccugga

SEQ ID NO: 2558269 - RNA, 15 nt, Human
cucuccagccccugg

SEQ ID NO: 2558270 - RNA, 17 nt, Human
cucuccaagucucagug

SEQ ID NO: 2558271 - RNA, 22 nt, Human
cucuccaagggcuucugcaccc

SEQ ID NO: 2558272 - RNA, 21 nt, Human
cucuccaagggcuucugcacc

SEQ ID NO: 2558273 - RNA, 11 nt, Human
cucuccacugc

SEQ ID NO: 2558274 - RNA, 14 nt, Human
cucuccagccccug

SEQ ID NO: 2558275 - RNA, 14 nt, Human
cucuccacugccuu

SEQ ID NO: 2558276 - RNA, 12 nt, Human
cucuccacugcc

SEQ ID NO: 2558277 - RNA, 13 nt, Human
cucuccagcucca

SEQ ID NO: 2558278 - RNA, 13 nt, Human
cucuccagcuaua

SEQ ID NO: 2558279 - RNA, 23 nt, Human
cucuccaagggcuucugcacccu

SEQ ID NO: 2558280 - RNA, 15 nt, Human
cucuccagcuccaag

SEQ ID NO: 2558281 - RNA, 14 nt, Human
cucuccagcuccaa

SEQ ID NO: 2558282 - RNA, 13 nt, Human
cucuccccagcaa

SEQ ID NO: 2558283 - RNA, 19 nt, Human
cucuccagccccuggaugc

SEQ ID NO: 2558284 - RNA, 14 nt, Human
cucuccagccugac

SEQ ID NO: 2558285 - RNA, 12 nt, Human
cucuccucugcu

SEQ ID NO: 2558286 - RNA, 24 nt, Human
cucuccccagcaagugagagcugg

SEQ ID NO: 2558287 - RNA, 22 nt, Human
cucuccccagcaagugagagcu

SEQ ID NO: 2558288 - RNA, 14 nt, Human
cucuccccagcaag

SEQ ID NO: 2558289 - RNA, 18 nt, Human
cucuccucugcugcuggc

SEQ ID NO: 2558290 - RNA, 15 nt, Human
cucuccucugcugcu

SEQ ID NO: 2558291 - RNA, 14 nt, Human
cucuccucugcugc

SEQ ID NO: 2558292 - RNA, 13 nt, Human
cucuccucugcug

SEQ ID NO: 2558293 - RNA, 22 nt, Human
cucuccucuugccacugccucu

SEQ ID NO: 2558294 - RNA, 19 nt, Human
cucuccucuugccacugcc

SEQ ID NO: 2558295 - RNA, 21 nt, Human
cucuccugauagucuuucagu

SEQ ID NO: 2558296 - RNA, 16 nt, Human
cucuccagcuccaaga

SEQ ID NO: 2558297 - RNA, 12 nt, Human
cucuccugccua

SEQ ID NO: 2558298 - RNA, 17 nt, Human
cucuccucuugccacug

SEQ ID NO: 2558299 - RNA, 16 nt, Human
cucuccucuugccacu

SEQ ID NO: 2558300 - RNA, 15 nt, Human
cucuccucuugccac

SEQ ID NO: 2558301 - RNA, 14 nt, Human
cucuccucuugcca

SEQ ID NO: 2558302 - RNA, 16 nt, Human
cucuccuuccuggagc

SEQ ID NO: 2558303 - RNA, 14 nt, Human
cucuccuuccugug

SEQ ID NO: 2558304 - RNA, 14 nt, Human
cucuccuuucuuuu

SEQ ID NO: 2558305 - RNA, 16 nt, Human
cucuccuuucuuucua

SEQ ID NO: 2558306 - RNA, 21 nt, Human
cucuccuguccaaccuaaccc

SEQ ID NO: 2558307 - RNA, 13 nt, Human
cucuccuggagga

SEQ ID NO: 2558308 - RNA, 12 nt, Human
cucuccuggagg

SEQ ID NO: 2558309 - RNA, 13 nt, Human
cucuccugccuac

SEQ ID NO: 2558310 - RNA, 13 nt, Human
cucucucaggcca

SEQ ID NO: 2558311 - RNA, 12 nt, Human
cucucuccagau

SEQ ID NO: 2558312 - RNA, 21 nt, Human
cucucucaauuuuugguugaa

SEQ ID NO: 2558313 - RNA, 14 nt, Human
cucucuccacccua

SEQ ID NO: 2558314 - RNA, 14 nt, Human
cucucuccccucaa

SEQ ID NO: 2558315 - RNA, 20 nt, Human
cucucucccauggagcccca

SEQ ID NO: 2558316 - RNA, 14 nt, Human
cucucucccaugga

SEQ ID NO: 2558317 - RNA, 23 nt, Human
cucucucccagucuacccagaga

SEQ ID NO: 2558318 - RNA, 19 nt, Human
cucucucccagucuaccca

SEQ ID NO: 2558319 - RNA, 13 nt, Human
cucucucccaguc

SEQ ID NO: 2558320 - RNA, 12 nt, Human
cucucuccagga

SEQ ID NO: 2558321 - RNA, 14 nt, Human
cucucuccagaugu

SEQ ID NO: 2558322 - RNA, 17 nt, Human
cucucuccagauguuuc

SEQ ID NO: 2558323 - RNA, 12 nt, Human
cucucucccagu

SEQ ID NO: 2558324 - RNA, 12 nt, Human
cucucucacucc

SEQ ID NO: 2558325 - RNA, 16 nt, Human
cucucuauagcaccag

SEQ ID NO: 2558326 - RNA, 19 nt, Human
cucucuacuccuaccucag

SEQ ID NO: 2558327 - RNA, 20 nt, Human
cucucuacuccuaccucagc

SEQ ID NO: 2558328 - RNA, 21 nt, Human
cucuccuuucuuuuucuucuu

SEQ ID NO: 2558329 - RNA, 16 nt, Human
cucuccuuucuuuuuc

SEQ ID NO: 2558330 - RNA, 22 nt, Human
cucucuacuccuaccucagccu

SEQ ID NO: 2558331 - RNA, 14 nt, Human
cugacccacugcuu

SEQ ID NO: 2558332 - RNA, 13 nt, Human
cugacccacugcu

SEQ ID NO: 2558333 - RNA, 13 nt, Human
cugacccaugcug

SEQ ID NO: 2558334 - RNA, 16 nt, Human
cugacccaggccgcag

SEQ ID NO: 2558335 - RNA, 15 nt, Human
cugacccaggccgca

SEQ ID NO: 2558336 - RNA, 14 nt, Human
cugacccaggccgc

SEQ ID NO: 2558337 - RNA, 13 nt, Human
cugacccaggccg

SEQ ID NO: 2558338 - RNA, 12 nt, Human
cugacccaggcc

SEQ ID NO: 2558339 - RNA, 15 nt, Human
cugacccagccuguu

SEQ ID NO: 2558340 - RNA, 21 nt, Human
cugacccagccccuugagaaa

SEQ ID NO: 2558341 - RNA, 15 nt, Human
cugacccaugcugcc

SEQ ID NO: 2558342 - RNA, 14 nt, Human
cugacccaugcugc

SEQ ID NO: 2558343 - RNA, 16 nt, Human
cugacccaugcugccc

SEQ ID NO: 2558344 - RNA, 18 nt, Human
cugacuagugaggaaaga

SEQ ID NO: 2558345 - RNA, 23 nt, Human
cugacuagaagggccaguccugc

SEQ ID NO: 2558346 - RNA, 22 nt, Human
cugacuagaagggccaguccug

SEQ ID NO: 2558347 - RNA, 12 nt, Human
cugacccacugc

SEQ ID NO: 2558348 - RNA, 12 nt, Human
cugaccacacuu

SEQ ID NO: 2558349 - RNA, 13 nt, Human
cugaccacacuuc

SEQ ID NO: 2558350 - RNA, 16 nt, Human
cugaccacacuuccug

SEQ ID NO: 2558351 - RNA, 17 nt, Human
cugaccacacuuccugu

SEQ ID NO: 2558352 - RNA, 18 nt, Human
cugaccacacuuccuguc

SEQ ID NO: 2558353 - RNA, 19 nt, Human
cugaccacacuuccugucc

SEQ ID NO: 2558354 - RNA, 20 nt, Human
cugaccacacuuccugucca

SEQ ID NO: 2558355 - RNA, 21 nt, Human
cugaccaauauuguacaguuu

SEQ ID NO: 2558356 - RNA, 20 nt, Human
cugaccaauauuguacaguu

SEQ ID NO: 2558357 - RNA, 19 nt, Human
cugaccaauauuguacagu

SEQ ID NO: 2558358 - RNA, 22 nt, Human
cugacauuguuggccaaagcca

SEQ ID NO: 2558359 - RNA, 18 nt, Human
cugacauuuggaguguuc

SEQ ID NO: 2558360 - RNA, 21 nt, Human
cugacauuuggaguguucccc

SEQ ID NO: 2558361 - RNA, 15 nt, Human
cugacauuaacaguu

SEQ ID NO: 2558362 - RNA, 18 nt, Human
cugacauuaacaguuuuc

SEQ ID NO: 2558363 - RNA, 20 nt, Human
cugacauuaacaguuuucca

SEQ ID NO: 2558364 - RNA, 19 nt, Human
cugaccaacaguuccuuca

SEQ ID NO: 2558365 - RNA, 16 nt, Human
cugaccaacauggaga

SEQ ID NO: 2558366 - RNA, 14 nt, Human
cugaccaagagaga

SEQ ID NO: 2558367 - RNA, 17 nt, Human
cugaccaagagagaaag

SEQ ID NO: 2558368 - RNA, 18 nt, Human
cugaccaauauuguacag

SEQ ID NO: 2558369 - RNA, 15 nt, Human
cugaccaauauugua

SEQ ID NO: 2558370 - RNA, 18 nt, Human
cugacagaugucagccga

SEQ ID NO: 2558371 - RNA, 12 nt, Human
cugacagccucc

SEQ ID NO: 2558372 - RNA, 13 nt, Human
cugacagccuccc

SEQ ID NO: 2558373 - RNA, 14 nt, Human
cugacagccuccca

SEQ ID NO: 2558374 - RNA, 13 nt, Human
cugacagcugcuc

SEQ ID NO: 2558375 - RNA, 14 nt, Human
cugacagcugcucc

SEQ ID NO: 2558376 - RNA, 12 nt, Human
cugacagcugcu

SEQ ID NO: 2558377 - RNA, 17 nt, Human
cugacagccucccaccc

SEQ ID NO: 2558378 - RNA, 20 nt, Human
cugacagccucccaccccca

SEQ ID NO: 2558379 - RNA, 23 nt, Human
cugaagauggcauccugugaagu

SEQ ID NO: 2558380 - RNA, 22 nt, Human
cugaagaugcagcucacuaccc

SEQ ID NO: 2558381 - RNA, 16 nt, Human
cugaagaugcagcuca

SEQ ID NO: 2558382 - RNA, 20 nt, Human
cugaagauggcauccuguga

SEQ ID NO: 2558383 - RNA, 15 nt, Human
cugaagaugcagcuc

SEQ ID NO: 2558384 - RNA, 22 nt, Human
cugaagaugcagcaaaauguga

SEQ ID NO: 2558385 - RNA, 17 nt, Human
cugaagaugaucauuug

SEQ ID NO: 2558386 - RNA, 16 nt, Human
cugaagaugaucauuu

SEQ ID NO: 2558387 - RNA, 23 nt, Human
cugaagauauaacuauugcccag

SEQ ID NO: 2558388 - RNA, 20 nt, Human
cugaagaguggguuucacaa

SEQ ID NO: 2558389 - RNA, 18 nt, Human
cugaagaguccucugaau

SEQ ID NO: 2558390 - RNA, 15 nt, Human
cugaagaguccucug

SEQ ID NO: 2558391 - RNA, 16 nt, Human
cugaagaguccucuga

SEQ ID NO: 2558392 - RNA, 23 nt, Human
cugaagaggcgggccagccaggc

SEQ ID NO: 2558393 - RNA, 22 nt, Human
cugaagaggcgggccagccagg

SEQ ID NO: 2558394 - RNA, 14 nt, Human
cugaagaguccucu

SEQ ID NO: 2558395 - RNA, 21 nt, Human
cugaagaggcgggccagccag

SEQ ID NO: 2558396 - RNA, 19 nt, Human
cugacauguggggccaggu

SEQ ID NO: 2558397 - RNA, 14 nt, Human
cugacauguggggc

SEQ ID NO: 2558398 - RNA, 20 nt, Human
cugacaugauuccuuccugu

SEQ ID NO: 2558399 - RNA, 21 nt, Human
cugacauuguuggccaaagcc

SEQ ID NO: 2558400 - RNA, 21 nt, Human
cugacauguggggccagguca

SEQ ID NO: 2558401 - RNA, 16 nt, Human
cugacaugauuccuuc

SEQ ID NO: 2558402 - RNA, 14 nt, Human
cugacauuaacagu

SEQ ID NO: 2558403 - RNA, 14 nt, Human
cugacaucucugca

SEQ ID NO: 2558404 - RNA, 15 nt, Human
cugacaucucugcaa

SEQ ID NO: 2558405 - RNA, 16 nt, Human
cugacaucucugcaau

SEQ ID NO: 2558406 - RNA, 16 nt, Human
cugacaucuggaaucu

SEQ ID NO: 2558407 - RNA, 21 nt, Human
cugacaucuguguuucaagug

SEQ ID NO: 2558408 - RNA, 17 nt, Human
cugacaucuguguuuca

SEQ ID NO: 2558409 - RNA, 16 nt, Human
cugacaucuguguuuc

SEQ ID NO: 2558410 - RNA, 14 nt, Human
cugacauccccacu

SEQ ID NO: 2558411 - RNA, 15 nt, Human
cugacaugauuccuu

SEQ ID NO: 2558412 - RNA, 21 nt, Human
cugacaucuuaguauuugcau

SEQ ID NO: 2558413 - RNA, 23 nt, Human
cugacaggcagccuggacauaga

SEQ ID NO: 2558414 - RNA, 20 nt, Human
cugacaggcagccuggacau

SEQ ID NO: 2558415 - RNA, 15 nt, Human
cugacagcugcuccu

SEQ ID NO: 2558416 - RNA, 16 nt, Human
cugacagcugcuccua

SEQ ID NO: 2558417 - RNA, 15 nt, Human
cugacaggcagccug

SEQ ID NO: 2558418 - RNA, 17 nt, Human
cugacagcugcuccuag

SEQ ID NO: 2558419 - RNA, 21 nt, Human
cugacaggcaaugcuggcugu

SEQ ID NO: 2558420 - RNA, 15 nt, Human
cugacagucuugugc

SEQ ID NO: 2558421 - RNA, 21 nt, Human
cugacaguccucuccaccuag

SEQ ID NO: 2558422 - RNA, 19 nt, Human
cugacaguccucuccaccu

SEQ ID NO: 2558423 - RNA, 17 nt, Human
cugacaguccucuccac

SEQ ID NO: 2558424 - RNA, 13 nt, Human
cugacuucuaagu

SEQ ID NO: 2558425 - RNA, 15 nt, Human
cugacuucuaaguaa

SEQ ID NO: 2558426 - RNA, 21 nt, Human
cugacuucaggggcugcccgc

SEQ ID NO: 2558427 - RNA, 20 nt, Human
cugacuucaggggcugcccg

SEQ ID NO: 2558428 - RNA, 19 nt, Human
cugacuucaggggcugccc

SEQ ID NO: 2558429 - RNA, 14 nt, Human
cugacuucaggggc

SEQ ID NO: 2558430 - RNA, 18 nt, Human
cugacuguuuucucuuga

SEQ ID NO: 2558431 - RNA, 19 nt, Human
cugacuucugccuggagac

SEQ ID NO: 2558432 - RNA, 18 nt, Human
cugacuucugccuggaga

SEQ ID NO: 2558433 - RNA, 16 nt, Human
cugacuucugccugga

SEQ ID NO: 2558434 - RNA, 15 nt, Human
cugacuucugccugg

SEQ ID NO: 2558435 - RNA, 14 nt, Human
cugacuucugccug

SEQ ID NO: 2558436 - RNA, 13 nt, Human
cugacuucugccu

SEQ ID NO: 2558437 - RNA, 12 nt, Human
cugacuucugcc

SEQ ID NO: 2558438 - RNA, 16 nt, Human
cugacuucuaaguaaa

SEQ ID NO: 2558439 - RNA, 17 nt, Human
cugacuucaucucccac

SEQ ID NO: 2558440 - RNA, 23 nt, Human
cugacuucaucucccaccuagca

SEQ ID NO: 2558441 - RNA, 11 nt, Human
cugacuucugc

SEQ ID NO: 2558442 - RNA, 22 nt, Human
cugacuucaggggcugcccgcu

SEQ ID NO: 2558443 - RNA, 16 nt, Human
cugacucacaagaaga

SEQ ID NO: 2558444 - RNA, 15 nt, Human
cugacucacaagaag

SEQ ID NO: 2558445 - RNA, 14 nt, Human
cugacucacaagaa

SEQ ID NO: 2558446 - RNA, 13 nt, Human
cugacucacaaga

SEQ ID NO: 2558447 - RNA, 18 nt, Human
cugacucaacauguuacu

SEQ ID NO: 2558448 - RNA, 21 nt, Human
cugacucgucugacugugugu

SEQ ID NO: 2558449 - RNA, 21 nt, Human
cugacucuaggugcccuugga

SEQ ID NO: 2558450 - RNA, 13 nt, Human
cugacucucugug

SEQ ID NO: 2558451 - RNA, 14 nt, Human
cugacucucuguga

SEQ ID NO: 2558452 - RNA, 12 nt, Human
cugacucagggc

SEQ ID NO: 2558453 - RNA, 14 nt, Human
cugacucagggcuc

SEQ ID NO: 2558454 - RNA, 21 nt, Human
cugacucacaagaagaccaga

SEQ ID NO: 2558455 - RNA, 17 nt, Human
cugacucacaagaagac

SEQ ID NO: 2558456 - RNA, 17 nt, Human
cugacucuuaagaagac

SEQ ID NO: 2558457 - RNA, 17 nt, Human
cugacucugaaaucuga

SEQ ID NO: 2558458 - RNA, 15 nt, Human
cugacucugaaaucu

SEQ ID NO: 2558459 - RNA, 14 nt, Human
cugacucugaaauc

SEQ ID NO: 2558460 - RNA, 14 nt, Human
cugacucucaaauc

SEQ ID NO: 2558461 - RNA, 16 nt, Human
cugacucucugugacc

SEQ ID NO: 2558462 - RNA, 18 nt, Human
cugacucucugugaccug

SEQ ID NO: 2558463 - RNA, 16 nt, Human
cugacuguuuucucuu

SEQ ID NO: 2558464 - RNA, 15 nt, Human
cugacucugcccccu

SEQ ID NO: 2558465 - RNA, 14 nt, Human
cugacucugccccc

SEQ ID NO: 2558466 - RNA, 12 nt, Human
cugacucugccc

SEQ ID NO: 2558467 - RNA, 20 nt, Human
cugacucugaaaucugaaga

SEQ ID NO: 2558468 - RNA, 20 nt, Human
cugacucugcccccugcugg

SEQ ID NO: 2558469 - RNA, 19 nt, Human
cugacucugcccccugcug

SEQ ID NO: 2558470 - RNA, 21 nt, Human
cugacucugcccccugcuggc

SEQ ID NO: 2558471 - RNA, 14 nt, Human
cugagaaauuuaua

SEQ ID NO: 2558472 - RNA, 11 nt, Human
cugagaaauuu

SEQ ID NO: 2558473 - RNA, 15 nt, Human
cugagaacacuguga

SEQ ID NO: 2558474 - RNA, 11 nt, Human
cugagaacacu

SEQ ID NO: 2558475 - RNA, 15 nt, Human
cugacuuugcucuuu

SEQ ID NO: 2558476 - RNA, 22 nt, Human
cugacuuucauuucuugaggua

SEQ ID NO: 2558477 - RNA, 16 nt, Human
cugacuuugcucuuuc

SEQ ID NO: 2558478 - RNA, 22 nt, Human
cugagaacccugcguggggaca

SEQ ID NO: 2558479 - RNA, 18 nt, Human
cugagaacccugcguggg

SEQ ID NO: 2558480 - RNA, 23 nt, Human
cugagaacccugcguggggacag

SEQ ID NO: 2558481 - RNA, 22 nt, Human
cugagaacacugugaaaacauu

SEQ ID NO: 2558482 - RNA, 17 nt, Human
cugagaacacugugaaa

SEQ ID NO: 2558483 - RNA, 17 nt, Human
cugagaacccugcgugg

SEQ ID NO: 2558484 - RNA, 22 nt, Human
cugagaaagacuauucaaacag

SEQ ID NO: 2558485 - RNA, 23 nt, Human
cugagaaagacuauucaaacagu

SEQ ID NO: 2558486 - RNA, 20 nt, Human
cugacuuggggagauggagu

SEQ ID NO: 2558487 - RNA, 22 nt, Human
cugacuuggggagauggaguuc

SEQ ID NO: 2558488 - RNA, 21 nt, Human
cugacuuggggagauggaguu

SEQ ID NO: 2558489 - RNA, 14 nt, Human
cugacuuugcucuu

SEQ ID NO: 2558490 - RNA, 23 nt, Human
cugagaagagagaucaaauggaa

SEQ ID NO: 2558491 - RNA, 17 nt, Human
cugagaagauugugaau

SEQ ID NO: 2558492 - RNA, 22 nt, Human
cugagaagagagaucaaaugga

SEQ ID NO: 2558493 - RNA, 23 nt, Human
cugagaagguccuuaaugauccg

SEQ ID NO: 2558494 - RNA, 17 nt, Human
cugagaagguccuuaau

SEQ ID NO: 2558495 - RNA, 15 nt, Human
cugagaauaagaaag

SEQ ID NO: 2558496 - RNA, 23 nt, Human
cugagaauauaauacuguauuug

SEQ ID NO: 2558497 - RNA, 20 nt, Human
cugagaauauaauacuguau

SEQ ID NO: 2558498 - RNA, 15 nt, Human
cugagacagcccggg

SEQ ID NO: 2558499 - RNA, 14 nt, Human
cugagacagcccgg

SEQ ID NO: 2558500 - RNA, 16 nt, Human
cugagaauuccaagga

SEQ ID NO: 2558501 - RNA, 15 nt, Human
cugagaauuccaagg

SEQ ID NO: 2558502 - RNA, 19 nt, Human
cugagaauguaagaacuac

SEQ ID NO: 2558503 - RNA, 22 nt, Human
cugagaauuuaaaaauaagaaa

SEQ ID NO: 2558504 - RNA, 17 nt, Human
cugagacaaauggaggc

SEQ ID NO: 2558505 - RNA, 17 nt, Human
cugagaauguaagaacu

SEQ ID NO: 2558506 - RNA, 14 nt, Human
cugagaaucuuuau

SEQ ID NO: 2558507 - RNA, 22 nt, Human
cugagaaucuuuauugagaaag

SEQ ID NO: 2558508 - RNA, 20 nt, Human
cugaggcccuucucuccagc

SEQ ID NO: 2558509 - RNA, 19 nt, Human
cugaggcccuucucuccag

SEQ ID NO: 2558510 - RNA, 18 nt, Human
cugaggcccuucucucca

SEQ ID NO: 2558511 - RNA, 15 nt, Human
cugaggcccuucucu

SEQ ID NO: 2558512 - RNA, 14 nt, Human
cugaggcccuucuc

SEQ ID NO: 2558513 - RNA, 23 nt, Human
cugaggcccagagggccugcaag

SEQ ID NO: 2558514 - RNA, 21 nt, Human
cugaggcccagagggccugca

SEQ ID NO: 2558515 - RNA, 19 nt, Human
cugaggcccagagggccug

SEQ ID NO: 2558516 - RNA, 18 nt, Human
cugaggcccagagggccu

SEQ ID NO: 2558517 - RNA, 17 nt, Human
cugaggcccagagggcc

SEQ ID NO: 2558518 - RNA, 16 nt, Human
cugaggcccagagggc

SEQ ID NO: 2558519 - RNA, 15 nt, Human
cugaggcccagaggg

SEQ ID NO: 2558520 - RNA, 14 nt, Human
cugaggcccagagg

SEQ ID NO: 2558521 - RNA, 13 nt, Human
cugaggcccagag

SEQ ID NO: 2558522 - RNA, 12 nt, Human
cugaggcccaga

SEQ ID NO: 2558523 - RNA, 14 nt, Human
cugaggcagguccc

SEQ ID NO: 2558524 - RNA, 17 nt, Human
cugaggcagguccccag

SEQ ID NO: 2558525 - RNA, 18 nt, Human
cugaggcagguccccaga

SEQ ID NO: 2558526 - RNA, 19 nt, Human
cugaggcagguccccagac

SEQ ID NO: 2558527 - RNA, 21 nt, Human
cugaggccacacucagcacaa

SEQ ID NO: 2558528 - RNA, 24 nt, Human
cugaggccacacucagcacaaggc

SEQ ID NO: 2558529 - RNA, 14 nt, Human
cugaggccacacuc

SEQ ID NO: 2558530 - RNA, 20 nt, Human
cugaggccacacucagcaca

SEQ ID NO: 2558531 - RNA, 12 nt, Human
cugaggccacac

SEQ ID NO: 2558532 - RNA, 22 nt, Human
cugaggcagggaaguccccagg

SEQ ID NO: 2558533 - RNA, 22 nt, Human
cugaggcagcagugugaggcca

SEQ ID NO: 2558534 - RNA, 23 nt, Human
cugaggcagcagugugaggccag

SEQ ID NO: 2558535 - RNA, 24 nt, Human
cugaggcagcagugugaggccagg

SEQ ID NO: 2558536 - RNA, 15 nt, Human
cugaggcagaagaau

SEQ ID NO: 2558537 - RNA, 15 nt, Human
cugaggcaggaggau

SEQ ID NO: 2558538 - RNA, 14 nt, Human
cugaggcagggaag

SEQ ID NO: 2558539 - RNA, 16 nt, Human
cugaggcagggaaguc

SEQ ID NO: 2558540 - RNA, 20 nt, Human
cugaggcagggaagucccca

SEQ ID NO: 2558541 - RNA, 21 nt, Human
cugaggcagggaaguccccag

SEQ ID NO: 2558542 - RNA, 15 nt, Human
cugaggcagcagugu

SEQ ID NO: 2558543 - RNA, 17 nt, Human
cugaggcagcaguguga

SEQ ID NO: 2558544 - RNA, 18 nt, Human
cugaggcagacagcagcu

SEQ ID NO: 2558545 - RNA, 22 nt, Human
cugaggcagacagcagcucagg

SEQ ID NO: 2558546 - RNA, 14 nt, Human
cugaggcagacagc

SEQ ID NO: 2558547 - RNA, 15 nt, Human
cugaggcagacagca

SEQ ID NO: 2558548 - RNA, 16 nt, Human
cugaggcagacagcag

SEQ ID NO: 2558549 - RNA, 17 nt, Human
cugaggcagacagcagc

SEQ ID NO: 2558550 - RNA, 19 nt, Human
cugaggaucagaguaaucc

SEQ ID NO: 2558551 - RNA, 15 nt, Human
cugaggagugaggaa

SEQ ID NO: 2558552 - RNA, 15 nt, Human
cugaggaugagcugg

SEQ ID NO: 2558553 - RNA, 13 nt, Human
cugaggaugagcu

SEQ ID NO: 2558554 - RNA, 16 nt, Human
cugaggcaagagaauu

SEQ ID NO: 2558555 - RNA, 12 nt, Human
cugaggcaagag

SEQ ID NO: 2558556 - RNA, 13 nt, Human
cugaggcacgagc

SEQ ID NO: 2558557 - RNA, 13 nt, Human
cugaggcagacag

SEQ ID NO: 2558558 - RNA, 17 nt, Human
cugaggaugagcuggaa

SEQ ID NO: 2558559 - RNA, 16 nt, Human
cugaggaugagcugga

SEQ ID NO: 2558560 - RNA, 22 nt, Human
cugaggauuuaagggauggaaa

SEQ ID NO: 2558561 - RNA, 18 nt, Human
cugaggaugagcuggaag

SEQ ID NO: 2558562 - RNA, 14 nt, Human
cugaggauuucaag

SEQ ID NO: 2558563 - RNA, 17 nt, Human
cugaggauuucaagccu

SEQ ID NO: 2558564 - RNA, 18 nt, Human
cugaggauuucaagccug

SEQ ID NO: 2558565 - RNA, 12 nt, Human
cugagcugaggc

SEQ ID NO: 2558566 - RNA, 13 nt, Human
cugagcugaggca

SEQ ID NO: 2558567 - RNA, 17 nt, Human
cugaggaucagaguaau

SEQ ID NO: 2558568 - RNA, 22 nt, Human
cugagcucgguggacccaggga

SEQ ID NO: 2558569 - RNA, 19 nt, Human
cugagcucugcauuugucu

SEQ ID NO: 2558570 - RNA, 21 nt, Human
cugagccagauuucacucucc

SEQ ID NO: 2558571 - RNA, 20 nt, Human
cugagccagauuucacucuc

SEQ ID NO: 2558572 - RNA, 19 nt, Human
cugagccagauuucacucu

SEQ ID NO: 2558573 - RNA, 18 nt, Human
cugagccagauuucacuc

SEQ ID NO: 2558574 - RNA, 17 nt, Human
cugagccagauuucacu

SEQ ID NO: 2558575 - RNA, 18 nt, Human
cugagacagcccgggcuc

SEQ ID NO: 2558576 - RNA, 17 nt, Human
cugagacagcccgggcu

SEQ ID NO: 2558577 - RNA, 16 nt, Human
cugagacagcccgggc

SEQ ID NO: 2558578 - RNA, 14 nt, Human
cugagcccuggcag

SEQ ID NO: 2558579 - RNA, 15 nt, Human
cugagcccuggcagg

SEQ ID NO: 2558580 - RNA, 17 nt, Human
cugagcccucaaaguga

SEQ ID NO: 2558581 - RNA, 16 nt, Human
cugagcccucaaagug

SEQ ID NO: 2558582 - RNA, 11 nt, Human
cugagcccugg

SEQ ID NO: 2558583 - RNA, 12 nt, Human
cugagcccuggc

SEQ ID NO: 2558584 - RNA, 13 nt, Human
cugagcccuggca

SEQ ID NO: 2558585 - RNA, 16 nt, Human
cugagccucagucucc

SEQ ID NO: 2558586 - RNA, 21 nt, Human
cugagccucagucucccuccc

SEQ ID NO: 2558587 - RNA, 19 nt, Human
cugagccagucccaggggc

SEQ ID NO: 2558588 - RNA, 18 nt, Human
cugagccagucccagggg

SEQ ID NO: 2558589 - RNA, 15 nt, Human
cugagccagauuuca

SEQ ID NO: 2558590 - RNA, 20 nt, Human
cugagacaaauggaggccug

SEQ ID NO: 2558591 - RNA, 22 nt, Human
cugagccaguucaguaccugga

SEQ ID NO: 2558592 - RNA, 22 nt, Human
cugagccagugucaggaggaag

SEQ ID NO: 2558593 - RNA, 16 nt, Human
cugagccagugucagg

SEQ ID NO: 2558594 - RNA, 22 nt, Human
cugagccucucaccuguacucu

SEQ ID NO: 2558595 - RNA, 13 nt, Human
cugagccuggcca

SEQ ID NO: 2558596 - RNA, 14 nt, Human
cugagccuggccag

SEQ ID NO: 2558597 - RNA, 15 nt, Human
cugagccuggccagc

SEQ ID NO: 2558598 - RNA, 17 nt, Human
cugagccuggccagccu

SEQ ID NO: 2558599 - RNA, 14 nt, Human
cugagccucugcuc

SEQ ID NO: 2558600 - RNA, 15 nt, Human
cugagccucugcucc

SEQ ID NO: 2558601 - RNA, 16 nt, Human
cugagccucugcuccc

SEQ ID NO: 2558602 - RNA, 18 nt, Human
cugagccucugcucccca

SEQ ID NO: 2558603 - RNA, 21 nt, Human
cugagccucucaccuguacuc

SEQ ID NO: 2558604 - RNA, 13 nt, Human
cugagccucucac

SEQ ID NO: 2558605 - RNA, 12 nt, Human
cugagccucugc

SEQ ID NO: 2558606 - RNA, 22 nt, Human
cugagccucagucucccucccu

SEQ ID NO: 2558607 - RNA, 16 nt, Human
cugagcgacagugaga

SEQ ID NO: 2558608 - RNA, 20 nt, Human
cugagcgacagugagacucu

SEQ ID NO: 2558609 - RNA, 16 nt, Human
cugagccuuguaauuc

SEQ ID NO: 2558610 - RNA, 15 nt, Human
cugagccuuguaauu

SEQ ID NO: 2558611 - RNA, 12 nt, Human
cugagccuucag

SEQ ID NO: 2558612 - RNA, 16 nt, Human
cugagccuggcuggca

SEQ ID NO: 2558613 - RNA, 14 nt, Human
cugagccuggcugg

SEQ ID NO: 2558614 - RNA, 17 nt, Human
cugagccuucagucuug

SEQ ID NO: 2558615 - RNA, 13 nt, Human
cugagcucacucg

SEQ ID NO: 2558616 - RNA, 22 nt, Human
cugagcuccaugugcccccucu

SEQ ID NO: 2558617 - RNA, 18 nt, Human
cugagcuccccaccaccc

SEQ ID NO: 2558618 - RNA, 17 nt, Human
cugagcucgguggaccc

SEQ ID NO: 2558619 - RNA, 18 nt, Human
cugagcucgguggaccca

SEQ ID NO: 2558620 - RNA, 20 nt, Human
cugagcucgguggacccagg

SEQ ID NO: 2558621 - RNA, 20 nt, Human
cugagcuccccaccacccca

SEQ ID NO: 2558622 - RNA, 14 nt, Human
cugagcuccucugg

SEQ ID NO: 2558623 - RNA, 15 nt, Human
cugagcuccucuggg

SEQ ID NO: 2558624 - RNA, 16 nt, Human
cugagcuccucugggc

SEQ ID NO: 2558625 - RNA, 17 nt, Human
cugagcuccucugggca

SEQ ID NO: 2558626 - RNA, 18 nt, Human
cugagcuccucugggcag

SEQ ID NO: 2558627 - RNA, 20 nt, Human
cugagcuccucugggcagga

SEQ ID NO: 2558628 - RNA, 23 nt, Human
cugagcuccucugggcaggaccu

SEQ ID NO: 2558629 - RNA, 19 nt, Human
cugagcuagaagcuggagg

SEQ ID NO: 2558630 - RNA, 13 nt, Human
cugagcuauuuca

SEQ ID NO: 2558631 - RNA, 16 nt, Human
cugagcuauuucaucu

SEQ ID NO: 2558632 - RNA, 21 nt, Human
cugagcuauuucaucuauuuu

SEQ ID NO: 2558633 - RNA, 19 nt, Human
cugagcggaugcaucuggg

SEQ ID NO: 2558634 - RNA, 14 nt, Human
cugagcgcuccugc

SEQ ID NO: 2558635 - RNA, 23 nt, Human
cugagcgugcuuuccaaaaccca

SEQ ID NO: 2558636 - RNA, 20 nt, Human
cugagcgaggagaugcuccu

SEQ ID NO: 2558637 - RNA, 21 nt, Human
cugagccuuguaauucuaaau

SEQ ID NO: 2558638 - RNA, 17 nt, Human
cugagcgauuauuaucu

SEQ ID NO: 2558639 - RNA, 15 nt, Human
cugagcgccaggaug

SEQ ID NO: 2558640 - RNA, 15 nt, Human
cugagcgccuccauc

SEQ ID NO: 2558641 - RNA, 13 nt, Human
cugagcgccucca

SEQ ID NO: 2558642 - RNA, 22 nt, Human
cugagcgccuccauccaaggcc

SEQ ID NO: 2558643 - RNA, 17 nt, Human
cucuuuaugacuguuuu

SEQ ID NO: 2558644 - RNA, 22 nt, Human
cucuuuauauggccucaagauc

SEQ ID NO: 2558645 - RNA, 13 nt, Human
cucuuucccuccc

SEQ ID NO: 2558646 - RNA, 17 nt, Human
cucuuucccucccuucc

SEQ ID NO: 2558647 - RNA, 17 nt, Human
cucuuuagaguuagacu

SEQ ID NO: 2558648 - RNA, 15 nt, Human
cucuuuagaguuaga

SEQ ID NO: 2558649 - RNA, 21 nt, Human
cucuuuaagaguuaguuucuu

SEQ ID NO: 2558650 - RNA, 19 nt, Human
cucuuuagaguuagacugu

SEQ ID NO: 2558651 - RNA, 18 nt, Human
cucuuuagaguuagacug

SEQ ID NO: 2558652 - RNA, 21 nt, Human
cucuuuagaguuagacuguug

SEQ ID NO: 2558653 - RNA, 12 nt, Human
cucuuuagccag

SEQ ID NO: 2558654 - RNA, 16 nt, Human
cucuuuaaucuucagu

SEQ ID NO: 2558655 - RNA, 23 nt, Human
cucuuuaaugucacaggcagguc

SEQ ID NO: 2558656 - RNA, 22 nt, Human
cucuuuaaugucacaggcaggu

SEQ ID NO: 2558657 - RNA, 21 nt, Human
cucuuuaaugucacaggcagg

SEQ ID NO: 2558658 - RNA, 20 nt, Human
cucuuuaaugucacaggcag

SEQ ID NO: 2558659 - RNA, 17 nt, Human
cucuugguccugcugca

SEQ ID NO: 2558660 - RNA, 16 nt, Human
cucuugguccugcugc

SEQ ID NO: 2558661 - RNA, 15 nt, Human
cucuugguccugcug

SEQ ID NO: 2558662 - RNA, 13 nt, Human
cucuugguccugc

SEQ ID NO: 2558663 - RNA, 13 nt, Human
cucuuguggaugu

SEQ ID NO: 2558664 - RNA, 13 nt, Human
cucuuuaaaaaca

SEQ ID NO: 2558665 - RNA, 16 nt, Human
cucuuguuuucaguuu

SEQ ID NO: 2558666 - RNA, 15 nt, Human
cucuuuaacuucucg

SEQ ID NO: 2558667 - RNA, 18 nt, Human
cucuuuaaugucacaggc

SEQ ID NO: 2558668 - RNA, 15 nt, Human
cucuucuugaaauuu

SEQ ID NO: 2558669 - RNA, 20 nt, Human
cucuucuugaaauuuuaacc

SEQ ID NO: 2558670 - RNA, 15 nt, Human
cucuucuucuucaga

SEQ ID NO: 2558671 - RNA, 17 nt, Human
cucuucuucuucagaag

SEQ ID NO: 2558672 - RNA, 18 nt, Human
cucuucuucuucagaaga

SEQ ID NO: 2558673 - RNA, 16 nt, Human
cucuucugugggugac

SEQ ID NO: 2558674 - RNA, 18 nt, Human
cucuucuggguuccuucc

SEQ ID NO: 2558675 - RNA, 23 nt, Human
cucuucugugggugacccagguc

SEQ ID NO: 2558676 - RNA, 19 nt, Human
cucuucuuaacuuaaauuu

SEQ ID NO: 2558677 - RNA, 18 nt, Human
cucuuccagaaucccaag

SEQ ID NO: 2558678 - RNA, 13 nt, Human
cucuuccagaauc

SEQ ID NO: 2558679 - RNA, 23 nt, Human
cucuuccgaaaaauccucuuccu

SEQ ID NO: 2558680 - RNA, 22 nt, Human
cucuuccgaaaaauccucuucc

SEQ ID NO: 2558681 - RNA, 20 nt, Human
cucuuccgaaaaauccucuu

SEQ ID NO: 2558682 - RNA, 20 nt, Human
cucuuccuacccaaccacuc

SEQ ID NO: 2558683 - RNA, 19 nt, Human
cucuuccuacccaaccacu

SEQ ID NO: 2558684 - RNA, 22 nt, Human
cucuuccuacccaaccacucaa

SEQ ID NO: 2558685 - RNA, 15 nt, Human
cucuuccuacccaac

SEQ ID NO: 2558686 - RNA, 12 nt, Human
cucuuccuaccc

SEQ ID NO: 2558687 - RNA, 20 nt, Human
cucuuccgugacgucacugg

SEQ ID NO: 2558688 - RNA, 19 nt, Human
cucuuccggagauguagca

SEQ ID NO: 2558689 - RNA, 22 nt, Human
cucuuccggagauguagcaaaa

SEQ ID NO: 2558690 - RNA, 23 nt, Human
cucuuccggagauguagcaaaac

SEQ ID NO: 2558691 - RNA, 15 nt, Human
cucuugaacuccuga

SEQ ID NO: 2558692 - RNA, 19 nt, Human
cucuuggguucaagcgauu

SEQ ID NO: 2558693 - RNA, 21 nt, Human
cucuuggguucaagcgauucu

SEQ ID NO: 2558694 - RNA, 19 nt, Human
cucuuggguucaagugauu

SEQ ID NO: 2558695 - RNA, 23 nt, Human
cucuucuugaacacucaugcuga

SEQ ID NO: 2558696 - RNA, 18 nt, Human
cucuucuugaacacucau

SEQ ID NO: 2558697 - RNA, 14 nt, Human
cucuucuucuuucu

SEQ ID NO: 2558698 - RNA, 22 nt, Human
cucuucuuuauacuguaauuua

SEQ ID NO: 2558699 - RNA, 21 nt, Human
cucuucuuuauacuguaauuu

SEQ ID NO: 2558700 - RNA, 22 nt, Human
cucuucuuuaaagggauggcaa

SEQ ID NO: 2558701 - RNA, 22 nt, Human
cucuugaaauauaggaacuuaa

SEQ ID NO: 2558702 - RNA, 24 nt, Human
cucuucuuuauacuguaauuuagu

SEQ ID NO: 2558703 - RNA, 23 nt, Human
cucuucuuuuaaaccauuuucuu

SEQ ID NO: 2558704 - RNA, 19 nt, Human
cucuucuuuuggcuuccau

SEQ ID NO: 2558705 - RNA, 16 nt, Human
cucuucuuuuggcuuc

SEQ ID NO: 2558706 - RNA, 16 nt, Human
cugaaagcccugagcu

SEQ ID NO: 2558707 - RNA, 17 nt, Human
cugaaagcccugagcuu

SEQ ID NO: 2558708 - RNA, 18 nt, Human
cugaaagcccugagcuuu

SEQ ID NO: 2558709 - RNA, 19 nt, Human
cugaaagcccugagcuuuc

SEQ ID NO: 2558710 - RNA, 23 nt, Human
cugaaagcccugagcuuucugcu

SEQ ID NO: 2558711 - RNA, 23 nt, Human
cugaaagccauuuguuggggcag

SEQ ID NO: 2558712 - RNA, 23 nt, Human
cugaaagccagcugccgaccaga

SEQ ID NO: 2558713 - RNA, 22 nt, Human
cugaaauagacccacaagaggc

SEQ ID NO: 2558714 - RNA, 18 nt, Human
cugaaauauacacacagc

SEQ ID NO: 2558715 - RNA, 19 nt, Human
cugaaauauacacacagca

SEQ ID NO: 2558716 - RNA, 14 nt, Human
cucuuucuguauau

SEQ ID NO: 2558717 - RNA, 20 nt, Human
cucuuuccuuggcucccauu

SEQ ID NO: 2558718 - RNA, 15 nt, Human
cucuuucuguauaua

SEQ ID NO: 2558719 - RNA, 19 nt, Human
cucuuucugucccuucugu

SEQ ID NO: 2558720 - RNA, 16 nt, Human
cucuuuccuccuucca

SEQ ID NO: 2558721 - RNA, 13 nt, Human
cucuuuccuugcu

SEQ ID NO: 2558722 - RNA, 11 nt, Human
cucuuuccuug

SEQ ID NO: 2558723 - RNA, 16 nt, Human
cucuuuccuucuugcc

SEQ ID NO: 2558724 - RNA, 22 nt, Human
cucuuuccuguuguuguuaaug

SEQ ID NO: 2558725 - RNA, 10 nt, Human
cucuuugaga

SEQ ID NO: 2558726 - RNA, 15 nt, Human
cucuuugagauagaa

SEQ ID NO: 2558727 - RNA, 23 nt, Human
cucuuugagauagaagaacugca

SEQ ID NO: 2558728 - RNA, 14 nt, Human
cucuuugaaugaca

SEQ ID NO: 2558729 - RNA, 18 nt, Human
cucuuucuucucugcugc

SEQ ID NO: 2558730 - RNA, 22 nt, Human
cucuuugaaauagucuguguga

SEQ ID NO: 2558731 - RNA, 12 nt, Human
cucuuugaauuu

SEQ ID NO: 2558732 - RNA, 17 nt, Human
cucuuugaaugacaaag

SEQ ID NO: 2558733 - RNA, 20 nt, Human
cucuuugaauuuucuguguu

SEQ ID NO: 2558734 - RNA, 15 nt, Human
cugaaagcccugagc

SEQ ID NO: 2558735 - RNA, 21 nt, Human
cugaaagccacguuccuuacu

SEQ ID NO: 2558736 - RNA, 14 nt, Human
cugaaagccagcug

SEQ ID NO: 2558737 - RNA, 13 nt, Human
cugaaauuucaga

SEQ ID NO: 2558738 - RNA, 20 nt, Human
cugaaauucuccuggagguc

SEQ ID NO: 2558739 - RNA, 13 nt, Human
cugaaaugaagau

SEQ ID NO: 2558740 - RNA, 16 nt, Human
cugaaaucugaagacc

SEQ ID NO: 2558741 - RNA, 19 nt, Human
cugaaaucucagaauuccu

SEQ ID NO: 2558742 - RNA, 20 nt, Human
cugaacacuuuuguuguaaa

SEQ ID NO: 2558743 - RNA, 23 nt, Human
cugaacacuccaauuaaggauuu

SEQ ID NO: 2558744 - RNA, 19 nt, Human
cugaacacuuuuguuguaa

SEQ ID NO: 2558745 - RNA, 18 nt, Human
cugaacacuccaauuaag

SEQ ID NO: 2558746 - RNA, 14 nt, Human
cugaaauuucagau

SEQ ID NO: 2558747 - RNA, 13 nt, Human
cugaaauuuuaua

SEQ ID NO: 2558748 - RNA, 14 nt, Human
cugaaauuucacca

SEQ ID NO: 2558749 - RNA, 22 nt, Human
cugaacuaauaaaucuguugcc

SEQ ID NO: 2558750 - RNA, 15 nt, Human
cugaacucaaacuga

SEQ ID NO: 2558751 - RNA, 18 nt, Human
cugaacucaaacugagga

SEQ ID NO: 2558752 - RNA, 13 nt, Human
cugaacucacuuu

SEQ ID NO: 2558753 - RNA, 16 nt, Human
cugaacucugacaaca

SEQ ID NO: 2558754 - RNA, 17 nt, Human
cugaacucugacaacag

SEQ ID NO: 2558755 - RNA, 17 nt, Human
cugaacggggagaaaag

SEQ ID NO: 2558756 - RNA, 12 nt, Human
cugaacagugga

SEQ ID NO: 2558757 - RNA, 13 nt, Human
cugaacggggaga

SEQ ID NO: 2558758 - RNA, 13 nt, Human
cugaacagcugua

SEQ ID NO: 2558759 - RNA, 19 nt, Human
cugaagaauugaaaaacca

SEQ ID NO: 2558760 - RNA, 16 nt, Human
cugaacugggaccuuu

SEQ ID NO: 2558761 - RNA, 16 nt, Human
cugaagaccucgagca

SEQ ID NO: 2558762 - RNA, 23 nt, Human
cugaagaagcaccaaucaugaau

SEQ ID NO: 2558763 - RNA, 19 nt, Human
cugaacugauggguuucuc

SEQ ID NO: 2558764 - RNA, 13 nt, Human
cugaacucuccag

SEQ ID NO: 2558765 - RNA, 22 nt, Human
cucuggcuccagcuggccggga

SEQ ID NO: 2558766 - RNA, 16 nt, Human
cucuggcucucauggg

SEQ ID NO: 2558767 - RNA, 13 nt, Human
cucuggcucucau

SEQ ID NO: 2558768 - RNA, 12 nt, Human
cucuggcucuca

SEQ ID NO: 2558769 - RNA, 18 nt, Human
cucuggcugaacccugug

SEQ ID NO: 2558770 - RNA, 17 nt, Human
cucuggcugaacccugu

SEQ ID NO: 2558771 - RNA, 16 nt, Human
cucuggcugaacccug

SEQ ID NO: 2558772 - RNA, 15 nt, Human
cucuggcugaacccu

SEQ ID NO: 2558773 - RNA, 20 nt, Human
cucuggcugaacccugugcu

SEQ ID NO: 2558774 - RNA, 19 nt, Human
cucuggcugaacccugugc

SEQ ID NO: 2558775 - RNA, 21 nt, Human
cucuggcugaacccugugcug

SEQ ID NO: 2558776 - RNA, 13 nt, Human
cucuggcuggcua

SEQ ID NO: 2558777 - RNA, 18 nt, Human
cucuggcuuccagguauc

SEQ ID NO: 2558778 - RNA, 17 nt, Human
cucuggcuuccagguau

SEQ ID NO: 2558779 - RNA, 14 nt, Human
cucuggcuuccagg

SEQ ID NO: 2558780 - RNA, 13 nt, Human
cucuggcuuccag

SEQ ID NO: 2558781 - RNA, 12 nt, Human
cucuggcuucca

SEQ ID NO: 2558782 - RNA, 22 nt, Human
cucuggcugguuuggaaugcuu

SEQ ID NO: 2558783 - RNA, 21 nt, Human
cucuggcugguuuggaaugcu

SEQ ID NO: 2558784 - RNA, 15 nt, Human
cucuggcuggggagc

SEQ ID NO: 2558785 - RNA, 13 nt, Human
cucuggcugggga

SEQ ID NO: 2558786 - RNA, 23 nt, Human
cucuggcuggcuaacuggaagca

SEQ ID NO: 2558787 - RNA, 22 nt, Human
cucugggaaaugagaaggcagc

SEQ ID NO: 2558788 - RNA, 20 nt, Human
cucugggaaaugagaaggca

SEQ ID NO: 2558789 - RNA, 14 nt, Human
cucugucucaucca

SEQ ID NO: 2558790 - RNA, 15 nt, Human
cucugucucauccau

SEQ ID NO: 2558791 - RNA, 23 nt, Human
cucugggaaaugagaaggcagcc

SEQ ID NO: 2558792 - RNA, 19 nt, Human
cucugggaaauaagagaga

SEQ ID NO: 2558793 - RNA, 17 nt, Human
cucugucugcccuucac

SEQ ID NO: 2558794 - RNA, 14 nt, Human
cucugucugcccuu

SEQ ID NO: 2558795 - RNA, 22 nt, Human
cucugucugaguaagaaacaga

SEQ ID NO: 2558796 - RNA, 23 nt, Human
cucugucucaugugugcucuucu

SEQ ID NO: 2558797 - RNA, 20 nt, Human
cucugucucaugugugcucu

SEQ ID NO: 2558798 - RNA, 16 nt, Human
cucugucucaugugug

SEQ ID NO: 2558799 - RNA, 14 nt, Human
cucugucucaugug

SEQ ID NO: 2558800 - RNA, 13 nt, Human
cucugugcugugu

SEQ ID NO: 2558801 - RNA, 15 nt, Human
cucugugcuguggaa

SEQ ID NO: 2558802 - RNA, 14 nt, Human
cucugugcugugga

SEQ ID NO: 2558803 - RNA, 21 nt, Human
cucugugcugacccuccuguu

SEQ ID NO: 2558804 - RNA, 20 nt, Human
cucugugcugacccuccugu

SEQ ID NO: 2558805 - RNA, 19 nt, Human
cucugugcugacccuccug

SEQ ID NO: 2558806 - RNA, 15 nt, Human
cucugugcugacccu

SEQ ID NO: 2558807 - RNA, 15 nt, Human
cucugugccuucuuu

SEQ ID NO: 2558808 - RNA, 16 nt, Human
cucugugccuucuuuu

SEQ ID NO: 2558809 - RNA, 23 nt, Human
cucugugcccaugggcacugcug

SEQ ID NO: 2558810 - RNA, 22 nt, Human
cucugugcccaugggcacugcu

SEQ ID NO: 2558811 - RNA, 20 nt, Human
cucugugcccaugggcacug

SEQ ID NO: 2558812 - RNA, 16 nt, Human
cucugugcccaugggc

SEQ ID NO: 2558813 - RNA, 20 nt, Human
cucugugcccccaucacccu

SEQ ID NO: 2558814 - RNA, 13 nt, Human
cucugugccuucg

SEQ ID NO: 2558815 - RNA, 14 nt, Human
cucugugcccaugg

SEQ ID NO: 2558816 - RNA, 12 nt, Human
cucugugcccau

SEQ ID NO: 2558817 - RNA, 22 nt, Human
cucugugcccacccuccacucu

SEQ ID NO: 2558818 - RNA, 18 nt, Human
cucugugagacucgagaa

SEQ ID NO: 2558819 - RNA, 17 nt, Human
cucugugagacucgaga

SEQ ID NO: 2558820 - RNA, 13 nt, Human
cucugugagacuc

SEQ ID NO: 2558821 - RNA, 22 nt, Human
cucugucugcccuucaccccag

SEQ ID NO: 2558822 - RNA, 17 nt, Human
cucugucuucaccugau

SEQ ID NO: 2558823 - RNA, 22 nt, Human
cucugugagcaucacaguuuug

SEQ ID NO: 2558824 - RNA, 18 nt, Human
cucugugagcaucacagu

SEQ ID NO: 2558825 - RNA, 21 nt, Human
cucugugagcaucacaguuuu

SEQ ID NO: 2558826 - RNA, 20 nt, Human
cucugugcagucacuggagg

SEQ ID NO: 2558827 - RNA, 15 nt, Human
cucuuccaggcuggg

SEQ ID NO: 2558828 - RNA, 14 nt, Human
cucuuccaggcugg

SEQ ID NO: 2558829 - RNA, 13 nt, Human
cucuuccaggcug

SEQ ID NO: 2558830 - RNA, 23 nt, Human
cucuuacuuuccuuuccccagcc

SEQ ID NO: 2558831 - RNA, 22 nt, Human
cucuuacuuuccuuuccccagc

SEQ ID NO: 2558832 - RNA, 14 nt, Human
cucuuacugcuaac

SEQ ID NO: 2558833 - RNA, 19 nt, Human
cucuuacugcaaaugucau

SEQ ID NO: 2558834 - RNA, 17 nt, Human
cucuuccacucuccuug

SEQ ID NO: 2558835 - RNA, 13 nt, Human
cucuuagaaaaac

SEQ ID NO: 2558836 - RNA, 15 nt, Human
cucuuagaaaaacca

SEQ ID NO: 2558837 - RNA, 22 nt, Human
cucuuacgcccaacccuucccc

SEQ ID NO: 2558838 - RNA, 18 nt, Human
cucuuacgcccaacccuu

SEQ ID NO: 2558839 - RNA, 18 nt, Human
cucuguucaguguaaaua

SEQ ID NO: 2558840 - RNA, 16 nt, Human
cucuuacugcaaaugu

SEQ ID NO: 2558841 - RNA, 20 nt, Human
cucuuacgcccaacccuucc

SEQ ID NO: 2558842 - RNA, 14 nt, Human
cucuuacugcaaau

SEQ ID NO: 2558843 - RNA, 17 nt, Human
cucuguucauuuccuca

SEQ ID NO: 2558844 - RNA, 16 nt, Human
cucuguucauuuccuc

SEQ ID NO: 2558845 - RNA, 23 nt, Human
cucugugcuuugacucaccuguu

SEQ ID NO: 2558846 - RNA, 21 nt, Human
cucugugcuuugacucaccug

SEQ ID NO: 2558847 - RNA, 18 nt, Human
cucugugcuuugacucac

SEQ ID NO: 2558848 - RNA, 18 nt, Human
cucugugcuguggaagca

SEQ ID NO: 2558849 - RNA, 22 nt, Human
cucugugcuuuuaaaugcauaa

SEQ ID NO: 2558850 - RNA, 16 nt, Human
cucugugggcugcacu

SEQ ID NO: 2558851 - RNA, 14 nt, Human
cucugugggcugca

SEQ ID NO: 2558852 - RNA, 13 nt, Human
cucugugggcugc

SEQ ID NO: 2558853 - RNA, 14 nt, Human
cucuggcccugccu

SEQ ID NO: 2558854 - RNA, 23 nt, Human
cucugugggcugcacucugugcc

SEQ ID NO: 2558855 - RNA, 17 nt, Human
cucugugggcugcacuc

SEQ ID NO: 2558856 - RNA, 17 nt, Human
cucugugggcuggcagu

SEQ ID NO: 2558857 - RNA, 16 nt, Human
cucugugucacuggcu

SEQ ID NO: 2558858 - RNA, 13 nt, Human
cucugugucacug

SEQ ID NO: 2558859 - RNA, 19 nt, Human
cucuguguauuugcuuuuu

SEQ ID NO: 2558860 - RNA, 18 nt, Human
cucuguguauuugcuuuu

SEQ ID NO: 2558861 - RNA, 15 nt, Human
cucugugucaggugg

SEQ ID NO: 2558862 - RNA, 13 nt, Human
cucuguucauuuc

SEQ ID NO: 2558863 - RNA, 14 nt, Human
cucuguucauuucc

SEQ ID NO: 2558864 - RNA, 14 nt, Human
cucuguucagugua

SEQ ID NO: 2558865 - RNA, 15 nt, Human
cucuguucaguguaa

SEQ ID NO: 2558866 - RNA, 17 nt, Human
cucuguucaguguaaau

SEQ ID NO: 2558867 - RNA, 19 nt, Human
cucuguguuuguuccuaca

SEQ ID NO: 2558868 - RNA, 20 nt, Human
cucuguguugugaaugucau

SEQ ID NO: 2558869 - RNA, 23 nt, Human
cucugugucacuggcugccucca

SEQ ID NO: 2558870 - RNA, 20 nt, Human
cucugugucacuggcugccu

SEQ ID NO: 2558871 - RNA, 18 nt, Human
cucugugucacuggcugc

SEQ ID NO: 2558872 - RNA, 17 nt, Human
cucugugucacuggcug

SEQ ID NO: 2558873 - RNA, 13 nt, Human
cucugugugcucc

SEQ ID NO: 2558874 - RNA, 21 nt, Human
cucuggagggguguggcuccu

SEQ ID NO: 2558875 - RNA, 20 nt, Human
cucuggagggguguggcucc

SEQ ID NO: 2558876 - RNA, 19 nt, Human
cucuggagggguguggcuc

SEQ ID NO: 2558877 - RNA, 16 nt, Human
cucuggaggggagggg

SEQ ID NO: 2558878 - RNA, 15 nt, Human
cucuggaugccugau

SEQ ID NO: 2558879 - RNA, 22 nt, Human
cucuggaucaaaguaggcagga

SEQ ID NO: 2558880 - RNA, 20 nt, Human
cucuggaguggccacuaagc

SEQ ID NO: 2558881 - RNA, 12 nt, Human
cucuggaguggc

SEQ ID NO: 2558882 - RNA, 14 nt, Human
cucuggaguggcca

SEQ ID NO: 2558883 - RNA, 15 nt, Human
cucuggaguggccac

SEQ ID NO: 2558884 - RNA, 16 nt, Human
cucuggaguggccacu

SEQ ID NO: 2558885 - RNA, 14 nt, Human
cucuggcagcucag

SEQ ID NO: 2558886 - RNA, 12 nt, Human
cucuggcagcuc

SEQ ID NO: 2558887 - RNA, 22 nt, Human
cucuggacaggcauguucucug

SEQ ID NO: 2558888 - RNA, 16 nt, Human
cucuggacaggcaugu

SEQ ID NO: 2558889 - RNA, 14 nt, Human
cucuggacaggcau

SEQ ID NO: 2558890 - RNA, 19 nt, Human
cucuggagcccacuguacu

SEQ ID NO: 2558891 - RNA, 15 nt, Human
cucuggaggggaggg

SEQ ID NO: 2558892 - RNA, 14 nt, Human
cucuggaggggagg

SEQ ID NO: 2558893 - RNA, 24 nt, Human
cucugcuuugacugagcagacugg

SEQ ID NO: 2558894 - RNA, 15 nt, Human
cucuggcuccagcug

SEQ ID NO: 2558895 - RNA, 16 nt, Human
cucuggcuccagcugg

SEQ ID NO: 2558896 - RNA, 20 nt, Human
cucuggcuagaggccagccc

SEQ ID NO: 2558897 - RNA, 21 nt, Human
cucuggcuagaggccagcccc

SEQ ID NO: 2558898 - RNA, 22 nt, Human
cucuggcuagaggccagcccca

SEQ ID NO: 2558899 - RNA, 16 nt, Human
cucuggcuagaggcca

SEQ ID NO: 2558900 - RNA, 19 nt, Human
cucuggccuucggccucca

SEQ ID NO: 2558901 - RNA, 16 nt, Human
cucuggccucccaccc

SEQ ID NO: 2558902 - RNA, 15 nt, Human
cucuggccucccacc

SEQ ID NO: 2558903 - RNA, 14 nt, Human
cucuggccucccac

SEQ ID NO: 2558904 - RNA, 13 nt, Human
cucuggccuccca

SEQ ID NO: 2558905 - RNA, 17 nt, Human
cucuggccucccacccg

SEQ ID NO: 2558906 - RNA, 19 nt, Human
cucuggcuagaggccagcc

SEQ ID NO: 2558907 - RNA, 16 nt, Human
cucuggcagcucagag

SEQ ID NO: 2558908 - RNA, 15 nt, Human
cucuggcagcucaga

SEQ ID NO: 2558909 - RNA, 12 nt, Human
cucuggccuucg

SEQ ID NO: 2558910 - RNA, 23 nt, Human
cucuggaugccugauugccaagc

SEQ ID NO: 2558911 - RNA, 19 nt, Human
cucuggaugccugauugcc

SEQ ID NO: 2558912 - RNA, 18 nt, Human
cucuggcccugccuucuu

SEQ ID NO: 2558913 - RNA, 18 nt, Human
cucuggccucagccgacu

SEQ ID NO: 2558914 - RNA, 15 nt, Human
cucuggcccugccuu

SEQ ID NO: 2558915 - RNA, 22 nt, Human
cucucuccccucaaagucugca

SEQ ID NO: 2558916 - RNA, 19 nt, Human
cucucuccccucaaagucu

SEQ ID NO: 2558917 - RNA, 14 nt, Human
cucucuccuccugc

SEQ ID NO: 2558918 - RNA, 17 nt, Human
cucucuccuccugccca

SEQ ID NO: 2558919 - RNA, 15 nt, Human
cucucuccuguacuu

SEQ ID NO: 2558920 - RNA, 13 nt, Human
cucucuccucccu

SEQ ID NO: 2558921 - RNA, 20 nt, Human
cucucuccuguacuuuuucc

SEQ ID NO: 2558922 - RNA, 20 nt, Human
cucucuccuccugcccaccu

SEQ ID NO: 2558923 - RNA, 14 nt, Human
cucucuccugucca

SEQ ID NO: 2558924 - RNA, 19 nt, Human
cucucuccuguccaaccua

SEQ ID NO: 2558925 - RNA, 15 nt, Human
cucucuccuuugcug

SEQ ID NO: 2558926 - RNA, 15 nt, Human
cucucuccuguccaa

SEQ ID NO: 2558927 - RNA, 13 nt, Human
cucucucugacuc

SEQ ID NO: 2558928 - RNA, 15 nt, Human
cucucucucuuuccu

SEQ ID NO: 2558929 - RNA, 15 nt, Human
cucucucucucuccc

SEQ ID NO: 2558930 - RNA, 15 nt, Human
cucucucucuccccu

SEQ ID NO: 2558931 - RNA, 12 nt, Human
cucucucuucug

SEQ ID NO: 2558932 - RNA, 18 nt, Human
cucucucuucugcuccac

SEQ ID NO: 2558933 - RNA, 20 nt, Human
cucucugaagaugaucauuu

SEQ ID NO: 2558934 - RNA, 14 nt, Human
cucucucugacucu

SEQ ID NO: 2558935 - RNA, 18 nt, Human
cucugccugaaccuucca

SEQ ID NO: 2558936 - RNA, 14 nt, Human
cucugccugcauuc

SEQ ID NO: 2558937 - RNA, 16 nt, Human
cucugccugcauucug

SEQ ID NO: 2558938 - RNA, 11 nt, Human
cucugccugcc

SEQ ID NO: 2558939 - RNA, 22 nt, Human
cucugccugcauucugccgugu

SEQ ID NO: 2558940 - RNA, 22 nt, Human
cucugccugaagucacacagug

SEQ ID NO: 2558941 - RNA, 21 nt, Human
cucugccugaagucacacagu

SEQ ID NO: 2558942 - RNA, 21 nt, Human
cucucucuucugcuccacccu

SEQ ID NO: 2558943 - RNA, 16 nt, Human
cucucugaaccccucc

SEQ ID NO: 2558944 - RNA, 15 nt, Human
cucugcuucucugac

SEQ ID NO: 2558945 - RNA, 14 nt, Human
cucugcuucucuga

SEQ ID NO: 2558946 - RNA, 13 nt, Human
cucugcuucucug

SEQ ID NO: 2558947 - RNA, 12 nt, Human
cucugcuucucu

SEQ ID NO: 2558948 - RNA, 17 nt, Human
cucugcuucucugacuu

SEQ ID NO: 2558949 - RNA, 16 nt, Human
cucugcuucucugacu

SEQ ID NO: 2558950 - RNA, 21 nt, Human
cucugcuucucugacuucugc

SEQ ID NO: 2558951 - RNA, 19 nt, Human
cucugcuugacaacaucug

SEQ ID NO: 2558952 - RNA, 21 nt, Human
cucugcuggccuggccggcaa

SEQ ID NO: 2558953 - RNA, 17 nt, Human
cucugcuggccuggccg

SEQ ID NO: 2558954 - RNA, 16 nt, Human
cucugcuggccuggcc

SEQ ID NO: 2558955 - RNA, 15 nt, Human
cucugcuggccuggc

SEQ ID NO: 2558956 - RNA, 14 nt, Human
cucugcuggccugg

SEQ ID NO: 2558957 - RNA, 13 nt, Human
cucugcuggccug

SEQ ID NO: 2558958 - RNA, 13 nt, Human
cucugccugcccc

SEQ ID NO: 2558959 - RNA, 12 nt, Human
cucugccugccc

SEQ ID NO: 2558960 - RNA, 13 nt, Human
cucugcugucuaa

SEQ ID NO: 2558961 - RNA, 23 nt, Human
cucugcuguacauauuugagacu

SEQ ID NO: 2558962 - RNA, 14 nt, Human
cucugcuucucacg

SEQ ID NO: 2558963 - RNA, 15 nt, Human
cucuggacaggcaug

SEQ ID NO: 2558964 - RNA, 17 nt, Human
cucugcuugagucaggu

SEQ ID NO: 2558965 - RNA, 18 nt, Human
cucugcuugagucagguu

SEQ ID NO: 2558966 - RNA, 19 nt, Human
cucugcuuugacugagcag

SEQ ID NO: 2558967 - RNA, 19 nt, Human
cuguauuugugacuaauug

SEQ ID NO: 2558968 - RNA, 17 nt, Human
cuguauuugugacuaau

SEQ ID NO: 2558969 - RNA, 16 nt, Human
cuguauuugugacuaa

SEQ ID NO: 2558970 - RNA, 15 nt, Human
cuguauuugugacua

SEQ ID NO: 2558971 - RNA, 14 nt, Human
cuguauuugugacu

SEQ ID NO: 2558972 - RNA, 13 nt, Human
cuguauuugugac

SEQ ID NO: 2558973 - RNA, 12 nt, Human
cuguauuuguga

SEQ ID NO: 2558974 - RNA, 23 nt, Human
cuguauuuguaucucugaagcau

SEQ ID NO: 2558975 - RNA, 21 nt, Human
cuguauuugugacuaauugua

SEQ ID NO: 2558976 - RNA, 20 nt, Human
cuguauuugugacuaauugu

SEQ ID NO: 2558977 - RNA, 23 nt, Human
cuguauuugugacuaauuguaua

SEQ ID NO: 2558978 - RNA, 16 nt, Human
cuguauuuuaaaagaa

SEQ ID NO: 2558979 - RNA, 13 nt, Human
cuguauuuuaaaa

SEQ ID NO: 2558980 - RNA, 20 nt, Human
cuguccacacccagcucagc

SEQ ID NO: 2558981 - RNA, 15 nt, Human
cuguccacacccagc

SEQ ID NO: 2558982 - RNA, 11 nt, Human
cuguccaagga

SEQ ID NO: 2558983 - RNA, 16 nt, Human
cuguccaaccuaaccc

SEQ ID NO: 2558984 - RNA, 20 nt, Human
cuguccaaccuaaccccuuu

SEQ ID NO: 2558985 - RNA, 23 nt, Human
cuguccaaccuaaccccuuuccu

SEQ ID NO: 2558986 - RNA, 19 nt, Human
cuguccaaaggaggcuggc

SEQ ID NO: 2558987 - RNA, 20 nt, Human
cuguccaaaggaggcuggca

SEQ ID NO: 2558988 - RNA, 21 nt, Human
cuguccaaaggaggcuggcag

SEQ ID NO: 2558989 - RNA, 22 nt, Human
cuguccaaaggaggcuggcagg

SEQ ID NO: 2558990 - RNA, 20 nt, Human
cuguccaaacugccuaagcc

SEQ ID NO: 2558991 - RNA, 15 nt, Human
cuguccaaacugccu

SEQ ID NO: 2558992 - RNA, 17 nt, Human
cuguccaaaggaggcug

SEQ ID NO: 2558993 - RNA, 18 nt, Human
cuguccaaaggaggcugg

SEQ ID NO: 2558994 - RNA, 15 nt, Human
cuguccagacagccu

SEQ ID NO: 2558995 - RNA, 13 nt, Human
cuguccagacagc

SEQ ID NO: 2558996 - RNA, 12 nt, Human
cuguccagacag

SEQ ID NO: 2558997 - RNA, 19 nt, Human
cuguccaggcacugcugcc

SEQ ID NO: 2558998 - RNA, 18 nt, Human
cuguccaggcacugcugc

SEQ ID NO: 2558999 - RNA, 22 nt, Human
cuguccaggcacugcugcccag

SEQ ID NO: 2559000 - RNA, 21 nt, Human
cuguccaggcacugcugccca

SEQ ID NO: 2559001 - RNA, 20 nt, Human
cuguccaggcacugcugccc

SEQ ID NO: 2559002 - RNA, 14 nt, Human
cugucccaccccca

SEQ ID NO: 2559003 - RNA, 19 nt, Human
cugucccaccaugcagugc

SEQ ID NO: 2559004 - RNA, 17 nt, Human
cuguccaggcacugcug

SEQ ID NO: 2559005 - RNA, 22 nt, Human
cugucccagguuaucugggcau

SEQ ID NO: 2559006 - RNA, 19 nt, Human
cugucccagguuaucuggg

SEQ ID NO: 2559007 - RNA, 23 nt, Human
cugucccaccucuucucuuccug

SEQ ID NO: 2559008 - RNA, 15 nt, Human
cugucccaccucuuc

SEQ ID NO: 2559009 - RNA, 16 nt, Human
cugucccacccccacc

SEQ ID NO: 2559010 - RNA, 14 nt, Human
cugucccaccucuu

SEQ ID NO: 2559011 - RNA, 13 nt, Human
cugucccaccucu

SEQ ID NO: 2559012 - RNA, 19 nt, Human
cugucccauggacacucca

SEQ ID NO: 2559013 - RNA, 17 nt, Human
cugucccauggacacuc

SEQ ID NO: 2559014 - RNA, 22 nt, Human
cugucccagugccgagaaggaa

SEQ ID NO: 2559015 - RNA, 16 nt, Human
cuguauauaaaggaaa

SEQ ID NO: 2559016 - RNA, 18 nt, Human
cuguauauaaaauauuuu

SEQ ID NO: 2559017 - RNA, 21 nt, Human
cuguauaguuaggauagcauu

SEQ ID NO: 2559018 - RNA, 16 nt, Human
cuguauaguuaggaua

SEQ ID NO: 2559019 - RNA, 15 nt, Human
cuguauauacaauaa

SEQ ID NO: 2559020 - RNA, 18 nt, Human
cuguauauacaauaacau

SEQ ID NO: 2559021 - RNA, 19 nt, Human
cuguauauacaauaacaua

SEQ ID NO: 2559022 - RNA, 23 nt, Human
cuguauauacaauaacauaauuu

SEQ ID NO: 2559023 - RNA, 15 nt, Human
cuguaucccaugagc

SEQ ID NO: 2559024 - RNA, 14 nt, Human
cuguaucccaugag

SEQ ID NO: 2559025 - RNA, 20 nt, Human
cuguaccuuuugaggagccc

SEQ ID NO: 2559026 - RNA, 21 nt, Human
cuguaccuguuccuuagaccu

SEQ ID NO: 2559027 - RNA, 14 nt, Human
cuguaccucugccu

SEQ ID NO: 2559028 - RNA, 22 nt, Human
cuguaccucuugagccuugaac

SEQ ID NO: 2559029 - RNA, 22 nt, Human
cuguaccuuuugaggagcccca

SEQ ID NO: 2559030 - RNA, 15 nt, Human
cuguauaguacuggc

SEQ ID NO: 2559031 - RNA, 15 nt, Human
cuguaugauucccag

SEQ ID NO: 2559032 - RNA, 18 nt, Human
cuguaucccaugagccuc

SEQ ID NO: 2559033 - RNA, 13 nt, Human
cuguauauacuuu

SEQ ID NO: 2559034 - RNA, 19 nt, Human
cuguaucccaugagccuca

SEQ ID NO: 2559035 - RNA, 21 nt, Human
cuguauggaauacaauguaau

SEQ ID NO: 2559036 - RNA, 12 nt, Human
cuguaugucaga

SEQ ID NO: 2559037 - RNA, 20 nt, Human
cuguaugucucgugguagga

SEQ ID NO: 2559038 - RNA, 13 nt, Human
cuguauguugucc

SEQ ID NO: 2559039 - RNA, 19 nt, Human
cuguauuaagagugaaaau

SEQ ID NO: 2559040 - RNA, 18 nt, Human
cuguauguuguccaauug

SEQ ID NO: 2559041 - RNA, 15 nt, Human
cuguauguuguccaa

SEQ ID NO: 2559042 - RNA, 15 nt, Human
cuguauuaagccacu

SEQ ID NO: 2559043 - RNA, 18 nt, Human
cuguauuuaugugugagg

SEQ ID NO: 2559044 - RNA, 23 nt, Human
cuguauuuaugugugaggagcug

SEQ ID NO: 2559045 - RNA, 14 nt, Human
cuguauuuguaucu

SEQ ID NO: 2559046 - RNA, 22 nt, Human
cuguauuugccggugccuagga

SEQ ID NO: 2559047 - RNA, 16 nt, Human
cuguauuugagaauau

SEQ ID NO: 2559048 - RNA, 17 nt, Human
cuguauuuaugugugag

SEQ ID NO: 2559049 - RNA, 20 nt, Human
cuguccuacucugugucagg

SEQ ID NO: 2559050 - RNA, 18 nt, Human
cuguccuacucuguguca

SEQ ID NO: 2559051 - RNA, 17 nt, Human
cuguccuacucuguguc

SEQ ID NO: 2559052 - RNA, 16 nt, Human
cuguccuacucugugu

SEQ ID NO: 2559053 - RNA, 21 nt, Human
cugucccuugccucaaugcca

SEQ ID NO: 2559054 - RNA, 20 nt, Human
cugucccuugccucaaugcc

SEQ ID NO: 2559055 - RNA, 16 nt, Human
cugucccuugccucaa

SEQ ID NO: 2559056 - RNA, 15 nt, Human
cugucccuugccuca

SEQ ID NO: 2559057 - RNA, 13 nt, Human
cugucccuugccu

SEQ ID NO: 2559058 - RNA, 18 nt, Human
cugucccuucugucccuc

SEQ ID NO: 2559059 - RNA, 19 nt, Human
cugucccuucugucccuca

SEQ ID NO: 2559060 - RNA, 17 nt, Human
cugucccuucugucccu

SEQ ID NO: 2559061 - RNA, 21 nt, Human
cugucccuucucuuaauuuaa

SEQ ID NO: 2559062 - RNA, 23 nt, Human
cugucccucccaccucugugacc

SEQ ID NO: 2559063 - RNA, 19 nt, Human
cugucccuucccccauaag

SEQ ID NO: 2559064 - RNA, 16 nt, Human
cugucccuucucuuaa

SEQ ID NO: 2559065 - RNA, 18 nt, Human
cugucccccagcucuggu

SEQ ID NO: 2559066 - RNA, 17 nt, Human
cugucccccagcucugg

SEQ ID NO: 2559067 - RNA, 16 nt, Human
cugucccccagcucug

SEQ ID NO: 2559068 - RNA, 15 nt, Human
cugucccccagcucu

SEQ ID NO: 2559069 - RNA, 14 nt, Human
cugucccccagcuc

SEQ ID NO: 2559070 - RNA, 13 nt, Human
cugucccccagcu

SEQ ID NO: 2559071 - RNA, 18 nt, Human
cugucccauggacacucc

SEQ ID NO: 2559072 - RNA, 14 nt, Human
cugucccccugaca

SEQ ID NO: 2559073 - RNA, 13 nt, Human
cugucccccugac

SEQ ID NO: 2559074 - RNA, 21 nt, Human
cugucccucccaccucuguga

SEQ ID NO: 2559075 - RNA, 19 nt, Human
cugucccucccaccucugu

SEQ ID NO: 2559076 - RNA, 18 nt, Human
cugucccucccaccucug

SEQ ID NO: 2559077 - RNA, 17 nt, Human
cugucccucccaccucu

SEQ ID NO: 2559078 - RNA, 15 nt, Human
cugucccucccccuu

SEQ ID NO: 2559079 - RNA, 12 nt, Human
cugucccuccgg

SEQ ID NO: 2559080 - RNA, 16 nt, Human
cugucccucccaccuc

SEQ ID NO: 2559081 - RNA, 15 nt, Human
cugucccucccaccu

SEQ ID NO: 2559082 - RNA, 13 nt, Human
cugucccucccac

SEQ ID NO: 2559083 - RNA, 23 nt, Human
cugucccucaaaugacccaaaga

SEQ ID NO: 2559084 - RNA, 12 nt, Human
cugucccucacu

SEQ ID NO: 2559085 - RNA, 13 nt, Human
cugucccucacug

SEQ ID NO: 2559086 - RNA, 13 nt, Human
cugucccucacag

SEQ ID NO: 2559087 - RNA, 16 nt, Human
cugucccucacagcac

SEQ ID NO: 2559088 - RNA, 12 nt, Human
cugucccucaca

SEQ ID NO: 2559089 - RNA, 15 nt, Human
cugucccucaaauga

SEQ ID NO: 2559090 - RNA, 17 nt, Human
cugucccuaggucagcu

SEQ ID NO: 2559091 - RNA, 19 nt, Human
cugucccuaguaaaaauac

SEQ ID NO: 2559092 - RNA, 21 nt, Human
cugucccuaguaaaaauacaa

SEQ ID NO: 2559093 - RNA, 21 nt, Human
cuguccucacugcucccugaa

SEQ ID NO: 2559094 - RNA, 19 nt, Human
cuguccucacugcucccug

SEQ ID NO: 2559095 - RNA, 16 nt, Human
cugucucaguuucacu

SEQ ID NO: 2559096 - RNA, 12 nt, Human
cugucucaucca

SEQ ID NO: 2559097 - RNA, 15 nt, Human
cugucucauccauca

SEQ ID NO: 2559098 - RNA, 16 nt, Human
cugucucauccaucau

SEQ ID NO: 2559099 - RNA, 17 nt, Human
cugucucauccaucauc

SEQ ID NO: 2559100 - RNA, 20 nt, Human
cugucucauccaucaucaug

SEQ ID NO: 2559101 - RNA, 21 nt, Human
cugucucauccaucaucaugu

SEQ ID NO: 2559102 - RNA, 21 nt, Human
cugucucaagagggcacuggu

SEQ ID NO: 2559103 - RNA, 20 nt, Human
cugucucaagagggcacugg

SEQ ID NO: 2559104 - RNA, 19 nt, Human
cugucucaagagggcacug

SEQ ID NO: 2559105 - RNA, 18 nt, Human
cugucucaagagggcacu

SEQ ID NO: 2559106 - RNA, 21 nt, Human
cuguccuacucugugucaggu

SEQ ID NO: 2559107 - RNA, 13 nt, Human
cugucccuuggag

SEQ ID NO: 2559108 - RNA, 15 nt, Human
cuguccuaggccaca

SEQ ID NO: 2559109 - RNA, 16 nt, Human
cuguccucacugcucc

SEQ ID NO: 2559110 - RNA, 14 nt, Human
cuguccucacugcu

SEQ ID NO: 2559111 - RNA, 13 nt, Human
cuguccucacugc

SEQ ID NO: 2559112 - RNA, 22 nt, Human
cugucccuuggagcuguaaacc

SEQ ID NO: 2559113 - RNA, 22 nt, Human
cugucucaaaaaaagaaaaaga

SEQ ID NO: 2559114 - RNA, 15 nt, Human
cugucucuagccacu

SEQ ID NO: 2559115 - RNA, 20 nt, Human
cugucucuagccacuuuggu

SEQ ID NO: 2559116 - RNA, 17 nt, Human
cugucucuagccacuuu

SEQ ID NO: 2559117 - RNA, 13 nt, Human
cugucucucauga

SEQ ID NO: 2559118 - RNA, 17 nt, Human
cugucucucaugaaccu

SEQ ID NO: 2559119 - RNA, 18 nt, Human
cugucucuacuaaaaaua

SEQ ID NO: 2559120 - RNA, 22 nt, Human
cugucuccuuucaccccagggc

SEQ ID NO: 2559121 - RNA, 23 nt, Human
cugucuccuuucaccccagggcc

SEQ ID NO: 2559122 - RNA, 17 nt, Human
cugucucaguuucacuu

SEQ ID NO: 2559123 - RNA, 13 nt, Human
cugucucaucccc

SEQ ID NO: 2559124 - RNA, 14 nt, Human
cugucucaucccca

SEQ ID NO: 2559125 - RNA, 15 nt, Human
cugucucauccccag

SEQ ID NO: 2559126 - RNA, 16 nt, Human
cugucucauccccagg

SEQ ID NO: 2559127 - RNA, 17 nt, Human
cugucucauccccaggg

SEQ ID NO: 2559128 - RNA, 19 nt, Human
cugucucauccccaggggu

SEQ ID NO: 2559129 - RNA, 21 nt, Human
cugucucauccccaggggucc

SEQ ID NO: 2559130 - RNA, 12 nt, Human
cugucuccagac

SEQ ID NO: 2559131 - RNA, 20 nt, Human
cugucucauccccagggguc

SEQ ID NO: 2559132 - RNA, 20 nt, Human
cugucuccuuaacacugagc

SEQ ID NO: 2559133 - RNA, 22 nt, Human
cugggcucccuucccaccucuc

SEQ ID NO: 2559134 - RNA, 21 nt, Human
cugggcucccuucccaccucu

SEQ ID NO: 2559135 - RNA, 20 nt, Human
cugggcucccuucccaccuc

SEQ ID NO: 2559136 - RNA, 20 nt, Human
cugggccuccucacaacaug

SEQ ID NO: 2559137 - RNA, 19 nt, Human
cugggcucccuucccaccu

SEQ ID NO: 2559138 - RNA, 14 nt, Human
cuggguacuugugg

SEQ ID NO: 2559139 - RNA, 16 nt, Human
cuggguacuuguggac

SEQ ID NO: 2559140 - RNA, 18 nt, Human
cuggguacuuguggacac

SEQ ID NO: 2559141 - RNA, 16 nt, Human
cugggucgcccuggac

SEQ ID NO: 2559142 - RNA, 19 nt, Human
cuggguacuuguggacaca

SEQ ID NO: 2559143 - RNA, 20 nt, Human
cuggguuggcgcacccuccc

SEQ ID NO: 2559144 - RNA, 18 nt, Human
cuggguuggcgcacccuc

SEQ ID NO: 2559145 - RNA, 16 nt, Human
cuggguuggcgcaccc

SEQ ID NO: 2559146 - RNA, 23 nt, Human
cuggguuggcgcacccuccccuc

SEQ ID NO: 2559147 - RNA, 22 nt, Human
cuggguuggcgcacccuccccu

SEQ ID NO: 2559148 - RNA, 15 nt, Human
cuggguuggagggug

SEQ ID NO: 2559149 - RNA, 22 nt, Human
cuggguuggugcacagugauuu

SEQ ID NO: 2559150 - RNA, 19 nt, Human
cuggguuggugcacaguga

SEQ ID NO: 2559151 - RNA, 16 nt, Human
cuggguuggugcacag

SEQ ID NO: 2559152 - RNA, 15 nt, Human
cuggguuggugcaca

SEQ ID NO: 2559153 - RNA, 14 nt, Human
cuggguuggugcac

SEQ ID NO: 2559154 - RNA, 13 nt, Human
cuggguuggugca

SEQ ID NO: 2559155 - RNA, 23 nt, Human
cuggguuuauuacauggcagugu

SEQ ID NO: 2559156 - RNA, 22 nt, Human
cuggguuuauuacauggcagug

SEQ ID NO: 2559157 - RNA, 22 nt, Human
cuggguuuaaggggagaggaaa

SEQ ID NO: 2559158 - RNA, 18 nt, Human
cuggguuuaaggggagag

SEQ ID NO: 2559159 - RNA, 15 nt, Human
cuggguuuggacccc

SEQ ID NO: 2559160 - RNA, 13 nt, Human
cuggguuucuagc

SEQ ID NO: 2559161 - RNA, 18 nt, Human
cuggguuucucuguauag

SEQ ID NO: 2559162 - RNA, 18 nt, Human
cugggucgcccuggacug

SEQ ID NO: 2559163 - RNA, 17 nt, Human
cugggucgcccuggacu

SEQ ID NO: 2559164 - RNA, 22 nt, Human
cugggucgcccuggacugugug

SEQ ID NO: 2559165 - RNA, 22 nt, Human
cugggucucgcuuuguugccca

SEQ ID NO: 2559166 - RNA, 15 nt, Human
cugggucugugucuc

SEQ ID NO: 2559167 - RNA, 16 nt, Human
cugggucugugucucu

SEQ ID NO: 2559168 - RNA, 17 nt, Human
cugggucugugucucuu

SEQ ID NO: 2559169 - RNA, 13 nt, Human
cugguagggcagu

SEQ ID NO: 2559170 - RNA, 18 nt, Human
cugguaggaccaagcauc

SEQ ID NO: 2559171 - RNA, 19 nt, Human
cuggucacaggacucugcc

SEQ ID NO: 2559172 - RNA, 17 nt, Human
cugguaggaccaagcau

SEQ ID NO: 2559173 - RNA, 15 nt, Human
cugguaggaccaagc

SEQ ID NO: 2559174 - RNA, 15 nt, Human
cugguagcucaggug

SEQ ID NO: 2559175 - RNA, 16 nt, Human
cugguagcucaggugg

SEQ ID NO: 2559176 - RNA, 14 nt, Human
cugguagcucaggu

SEQ ID NO: 2559177 - RNA, 13 nt, Human
cugguagcucagg

SEQ ID NO: 2559178 - RNA, 14 nt, Human
cugguagauagaaa

SEQ ID NO: 2559179 - RNA, 15 nt, Human
cugguagauagaaau

SEQ ID NO: 2559180 - RNA, 23 nt, Human
cugguagauagaaauaaauagcu

SEQ ID NO: 2559181 - RNA, 16 nt, Human
cuggguuuggacccca

SEQ ID NO: 2559182 - RNA, 18 nt, Human
cuggguuuggaccccagc

SEQ ID NO: 2559183 - RNA, 14 nt, Human
cugguagagaugga

SEQ ID NO: 2559184 - RNA, 23 nt, Human
cuggucacaggacucugccuccu

SEQ ID NO: 2559185 - RNA, 22 nt, Human
cuggucacaggacucugccucc

SEQ ID NO: 2559186 - RNA, 21 nt, Human
cuggucacaggacucugccuc

SEQ ID NO: 2559187 - RNA, 20 nt, Human
cuggucacaggacucugccu

SEQ ID NO: 2559188 - RNA, 12 nt, Human
cugguagggcag

SEQ ID NO: 2559189 - RNA, 19 nt, Human
cugguaguuaguagcaugu

SEQ ID NO: 2559190 - RNA, 23 nt, Human
cuggucacagggcaugccccggc

SEQ ID NO: 2559191 - RNA, 21 nt, Human
cugguaguuaguagcauguug

SEQ ID NO: 2559192 - RNA, 14 nt, Human
cuggucacugccau

SEQ ID NO: 2559193 - RNA, 22 nt, Human
cuggucacugccauggaggcac

SEQ ID NO: 2559194 - RNA, 14 nt, Human
cuggucccacucag

SEQ ID NO: 2559195 - RNA, 23 nt, Human
cuggucucaaacucuugaccuca

SEQ ID NO: 2559196 - RNA, 13 nt, Human
cuggucccacuca

SEQ ID NO: 2559197 - RNA, 19 nt, Human
cugguccaugauggaguca

SEQ ID NO: 2559198 - RNA, 16 nt, Human
cugguccaugauggag

SEQ ID NO: 2559199 - RNA, 17 nt, Human
cugguccaugauggagu

SEQ ID NO: 2559200 - RNA, 21 nt, Human
cugguccauagagagcaagac

SEQ ID NO: 2559201 - RNA, 21 nt, Human
cugguccagggaagcuggccg

SEQ ID NO: 2559202 - RNA, 22 nt, Human
cugguccagggaagcuggccga

SEQ ID NO: 2559203 - RNA, 15 nt, Human
cugguccagggaagc

SEQ ID NO: 2559204 - RNA, 17 nt, Human
cugguccagggaagcug

SEQ ID NO: 2559205 - RNA, 12 nt, Human
cuggucagccca

SEQ ID NO: 2559206 - RNA, 13 nt, Human
cuggucagcccaa

SEQ ID NO: 2559207 - RNA, 15 nt, Human
cugguccaaaagauu

SEQ ID NO: 2559208 - RNA, 22 nt, Human
cugguccaaaagauugcugaaa

SEQ ID NO: 2559209 - RNA, 14 nt, Human
cugguggcagcuca

SEQ ID NO: 2559210 - RNA, 13 nt, Human
cugguggcagcuc

SEQ ID NO: 2559211 - RNA, 18 nt, Human
cuggugugaccugagggc

SEQ ID NO: 2559212 - RNA, 17 nt, Human
cuggugugaccugaggg

SEQ ID NO: 2559213 - RNA, 16 nt, Human
cuggugugaccugagg

SEQ ID NO: 2559214 - RNA, 17 nt, Human
cuggugugaacuaaacu

SEQ ID NO: 2559215 - RNA, 17 nt, Human
cuggucuccucagccuc

SEQ ID NO: 2559216 - RNA, 16 nt, Human
cuggucucgaacuccu

SEQ ID NO: 2559217 - RNA, 12 nt, Human
cugguggcagcu

SEQ ID NO: 2559218 - RNA, 13 nt, Human
cuggucucagcag

SEQ ID NO: 2559219 - RNA, 21 nt, Human
cuggucucaaacuccugggcu

SEQ ID NO: 2559220 - RNA, 21 nt, Human
cuggucucagcagcgaccacc

SEQ ID NO: 2559221 - RNA, 20 nt, Human
cuggucucagcagcgaccac

SEQ ID NO: 2559222 - RNA, 14 nt, Human
cuggucucagcagc

SEQ ID NO: 2559223 - RNA, 16 nt, Human
cuggucuccucagccu

SEQ ID NO: 2559224 - RNA, 22 nt, Human
cuggucucagcagcgaccaccc

SEQ ID NO: 2559225 - RNA, 23 nt, Human
cugguguuucuagcacuggccug

SEQ ID NO: 2559226 - RNA, 22 nt, Human
cugguguuucuagcacuggccu

SEQ ID NO: 2559227 - RNA, 24 nt, Human
cugguguuucuagcacuggccugc

SEQ ID NO: 2559228 - RNA, 20 nt, Human
cugguucaggguuggccccu

SEQ ID NO: 2559229 - RNA, 22 nt, Human
cugguuccagggucccucugug

SEQ ID NO: 2559230 - RNA, 18 nt, Human
cugguuccagggucccuc

SEQ ID NO: 2559231 - RNA, 16 nt, Human
cugguuccaggguccc

SEQ ID NO: 2559232 - RNA, 15 nt, Human
cugguuccagggucc

SEQ ID NO: 2559233 - RNA, 14 nt, Human
cugguuccaggguc

SEQ ID NO: 2559234 - RNA, 13 nt, Human
cugguuccagggu

SEQ ID NO: 2559235 - RNA, 20 nt, Human
cugguuaacuuguuuggccu

SEQ ID NO: 2559236 - RNA, 18 nt, Human
cuguaaggcaaucauggu

SEQ ID NO: 2559237 - RNA, 23 nt, Human
cugguuccagggucccucugugu

SEQ ID NO: 2559238 - RNA, 14 nt, Human
cuguaagcugaagu

SEQ ID NO: 2559239 - RNA, 18 nt, Human
cuguaauuugugauacaa

SEQ ID NO: 2559240 - RNA, 17 nt, Human
cuguaauuugugauaca

SEQ ID NO: 2559241 - RNA, 16 nt, Human
cuguaaggcaugaagg

SEQ ID NO: 2559242 - RNA, 17 nt, Human
cuguaaggcaugaagga

SEQ ID NO: 2559243 - RNA, 21 nt, Human
cuguaauuugugauacaaugc

SEQ ID NO: 2559244 - RNA, 22 nt, Human
cuguaauuugugauacaaugcu

SEQ ID NO: 2559245 - RNA, 23 nt, Human
cuguacagagcccacgcccccac

SEQ ID NO: 2559246 - RNA, 16 nt, Human
cuguaaguuuugaauu

SEQ ID NO: 2559247 - RNA, 22 nt, Human
cuguacaugaaaacacauuuuu

SEQ ID NO: 2559248 - RNA, 23 nt, Human
cuguacaugaaaacacauuuuuc

SEQ ID NO: 2559249 - RNA, 15 nt, Human
cuguacauuguggga

SEQ ID NO: 2559250 - RNA, 16 nt, Human
cuguacauagccuaua

SEQ ID NO: 2559251 - RNA, 15 nt, Human
cuguacauagccuau

SEQ ID NO: 2559252 - RNA, 19 nt, Human
cuguaccagcccagauguu

SEQ ID NO: 2559253 - RNA, 21 nt, Human
cuguaccucuugagccuugaa

SEQ ID NO: 2559254 - RNA, 18 nt, Human
cugggagagccuuccagg

SEQ ID NO: 2559255 - RNA, 17 nt, Human
cugggagagccuuccag

SEQ ID NO: 2559256 - RNA, 12 nt, Human
cugggagaaccu

SEQ ID NO: 2559257 - RNA, 14 nt, Human
cugggagaaccuca

SEQ ID NO: 2559258 - RNA, 15 nt, Human
cugggagaaccucag

SEQ ID NO: 2559259 - RNA, 16 nt, Human
cugggagaaccucagg

SEQ ID NO: 2559260 - RNA, 20 nt, Human
cugggagagccuuccagggg

SEQ ID NO: 2559261 - RNA, 19 nt, Human
cugggagagccuuccaggg

SEQ ID NO: 2559262 - RNA, 21 nt, Human
cugggagagccuuccaggggu

SEQ ID NO: 2559263 - RNA, 12 nt, Human
cugggagaggau

SEQ ID NO: 2559264 - RNA, 17 nt, Human
cugggagaaccucaggc

SEQ ID NO: 2559265 - RNA, 18 nt, Human
cugggagaaccucaggcu

SEQ ID NO: 2559266 - RNA, 18 nt, Human
cuggcuguuggcuggggg

SEQ ID NO: 2559267 - RNA, 20 nt, Human
cuggcuuguaacuccaccaa

SEQ ID NO: 2559268 - RNA, 17 nt, Human
cuggcuuguaacuccac

SEQ ID NO: 2559269 - RNA, 19 nt, Human
cuggcuuguaacuccacca

SEQ ID NO: 2559270 - RNA, 14 nt, Human
cuggcuuugagaag

SEQ ID NO: 2559271 - RNA, 22 nt, Human
cuggcuuucuccgacugcuagg

SEQ ID NO: 2559272 - RNA, 15 nt, Human
cuggcuuucuccgac

SEQ ID NO: 2559273 - RNA, 11 nt, Human
cuggcuuuggc

SEQ ID NO: 2559274 - RNA, 14 nt, Human
cuggcuuuggcuuc

SEQ ID NO: 2559275 - RNA, 23 nt, Human
cuggcuuuuauuaaugcacuuuc

SEQ ID NO: 2559276 - RNA, 22 nt, Human
cuggcuuuuauuaaugcacuuu

SEQ ID NO: 2559277 - RNA, 14 nt, Human
cuggcuuuuauuaa

SEQ ID NO: 2559278 - RNA, 23 nt, Human
cuggcuuuucacugcuggcugcc

SEQ ID NO: 2559279 - RNA, 17 nt, Human
cugggaaaauaccccau

SEQ ID NO: 2559280 - RNA, 14 nt, Human
cugggaaaauaccc

SEQ ID NO: 2559281 - RNA, 11 nt, Human
cugggaaacag

SEQ ID NO: 2559282 - RNA, 19 nt, Human
cugggaaagacauccauaa

SEQ ID NO: 2559283 - RNA, 15 nt, Human
cugggaaacagaggc

SEQ ID NO: 2559284 - RNA, 16 nt, Human
cugggaaacagaggcu

SEQ ID NO: 2559285 - RNA, 19 nt, Human
cuggcugucaguaugacau

SEQ ID NO: 2559286 - RNA, 20 nt, Human
cuggcuguguucuggugagg

SEQ ID NO: 2559287 - RNA, 17 nt, Human
cuggcuguuggcugggg

SEQ ID NO: 2559288 - RNA, 16 nt, Human
cuggcuguuggcuggg

SEQ ID NO: 2559289 - RNA, 20 nt, Human
cuggcugguuagagguuccc

SEQ ID NO: 2559290 - RNA, 12 nt, Human
cuggcugggacg

SEQ ID NO: 2559291 - RNA, 16 nt, Human
cuggcugggacguggc

SEQ ID NO: 2559292 - RNA, 19 nt, Human
cuggcugggacguggcuca

SEQ ID NO: 2559293 - RNA, 21 nt, Human
cuggcugggacguggcucagc

SEQ ID NO: 2559294 - RNA, 12 nt, Human
cuggcgcagcca

SEQ ID NO: 2559295 - RNA, 20 nt, Human
cuggcgacaguuuuccuucu

SEQ ID NO: 2559296 - RNA, 22 nt, Human
cuggcgacacguagcagcuuag

SEQ ID NO: 2559297 - RNA, 19 nt, Human
cuggcgacaguuuuccuuc

SEQ ID NO: 2559298 - RNA, 14 nt, Human
cuggccuuuuccua

SEQ ID NO: 2559299 - RNA, 13 nt, Human
cuggccuuuuccu

SEQ ID NO: 2559300 - RNA, 14 nt, Human
cuggccuuucauau

SEQ ID NO: 2559301 - RNA, 17 nt, Human
cuggccuuccacuuggc

SEQ ID NO: 2559302 - RNA, 16 nt, Human
cuggccuuccugcccu

SEQ ID NO: 2559303 - RNA, 12 nt, Human
cuggccuguucu

SEQ ID NO: 2559304 - RNA, 19 nt, Human
cuggcgccaucgccgggac

SEQ ID NO: 2559305 - RNA, 22 nt, Human
cuggcgccaacaacuucuccau

SEQ ID NO: 2559306 - RNA, 21 nt, Human
cuggcgccaacaacuucucca

SEQ ID NO: 2559307 - RNA, 16 nt, Human
cuggcgcagccaaggc

SEQ ID NO: 2559308 - RNA, 19 nt, Human
cuggcgcagccaaggccga

SEQ ID NO: 2559309 - RNA, 15 nt, Human
cuggcgcagccaagg

SEQ ID NO: 2559310 - RNA, 13 nt, Human
cuggcgcagccaa

SEQ ID NO: 2559311 - RNA, 14 nt, Human
cuggcuggaaggga

SEQ ID NO: 2559312 - RNA, 14 nt, Human
cuggcugcuugccc

SEQ ID NO: 2559313 - RNA, 13 nt, Human
cuggcugcuugcc

SEQ ID NO: 2559314 - RNA, 19 nt, Human
cuggcugcugcccccaccc

SEQ ID NO: 2559315 - RNA, 17 nt, Human
cuggcugcugcccccac

SEQ ID NO: 2559316 - RNA, 16 nt, Human
cuggcugcugccccca

SEQ ID NO: 2559317 - RNA, 15 nt, Human
cuggcugcugccccc

SEQ ID NO: 2559318 - RNA, 15 nt, Human
cuggcuggcugcagu

SEQ ID NO: 2559319 - RNA, 17 nt, Human
cuggcuggcugcaguga

SEQ ID NO: 2559320 - RNA, 15 nt, Human
cuggcuggcacagaa

SEQ ID NO: 2559321 - RNA, 18 nt, Human
cuggcuggagccuagaac

SEQ ID NO: 2559322 - RNA, 15 nt, Human
cuggcuggagccuag

SEQ ID NO: 2559323 - RNA, 12 nt, Human
cuggcuggagcc

SEQ ID NO: 2559324 - RNA, 13 nt, Human
cuggcuggaguga

SEQ ID NO: 2559325 - RNA, 19 nt, Human
cugggagaggugccagcaa

SEQ ID NO: 2559326 - RNA, 18 nt, Human
cugggagaggugccagca

SEQ ID NO: 2559327 - RNA, 23 nt, Human
cugggagaggugccagcaacuga

SEQ ID NO: 2559328 - RNA, 20 nt, Human
cugggagaggugccagcaac

SEQ ID NO: 2559329 - RNA, 15 nt, Human
cugggagauucaagg

SEQ ID NO: 2559330 - RNA, 22 nt, Human
cugggagcagcccgcugagugg

SEQ ID NO: 2559331 - RNA, 19 nt, Human
cugggagauucaagggacc

SEQ ID NO: 2559332 - RNA, 19 nt, Human
cugggagccuacccacccc

SEQ ID NO: 2559333 - RNA, 22 nt, Human
cugggagccuacccacccccag

SEQ ID NO: 2559334 - RNA, 16 nt, Human
cugggagccuacccac

SEQ ID NO: 2559335 - RNA, 23 nt, Human
cugggaggagggagagggagguc

SEQ ID NO: 2559336 - RNA, 20 nt, Human
cugggaggagggagagggag

SEQ ID NO: 2559337 - RNA, 19 nt, Human
cugggaggagggagaggga

SEQ ID NO: 2559338 - RNA, 17 nt, Human
cugggaggagggagagg

SEQ ID NO: 2559339 - RNA, 16 nt, Human
cugggaggagggagag

SEQ ID NO: 2559340 - RNA, 15 nt, Human
cugggaggagggaga

SEQ ID NO: 2559341 - RNA, 14 nt, Human
cugggaggagggag

SEQ ID NO: 2559342 - RNA, 19 nt, Human
cugggaggaauggacagac

SEQ ID NO: 2559343 - RNA, 22 nt, Human
cugggaggaauggacagacaga

SEQ ID NO: 2559344 - RNA, 20 nt, Human
cugggagcuccacucugcuu

SEQ ID NO: 2559345 - RNA, 17 nt, Human
cugggagcuccacucug

SEQ ID NO: 2559346 - RNA, 16 nt, Human
cugggagcuccacucu

SEQ ID NO: 2559347 - RNA, 21 nt, Human
cugggagcuccacucugcuuc

SEQ ID NO: 2559348 - RNA, 15 nt, Human
cugggaggaagcagg

SEQ ID NO: 2559349 - RNA, 17 nt, Human
cugggaggaauggacag

SEQ ID NO: 2559350 - RNA, 21 nt, Human
cugggaggaagcagguugagg

SEQ ID NO: 2559351 - RNA, 21 nt, Human
cugggaggcucuggagcccac

SEQ ID NO: 2559352 - RNA, 20 nt, Human
cugggaggcucuggagccca

SEQ ID NO: 2559353 - RNA, 21 nt, Human
cugggaggcaagaggggugga

SEQ ID NO: 2559354 - RNA, 20 nt, Human
cugggaggcaagaggggugg

SEQ ID NO: 2559355 - RNA, 18 nt, Human
cugggaggcaagaggggu

SEQ ID NO: 2559356 - RNA, 17 nt, Human
cugggaggcaagagggg

SEQ ID NO: 2559357 - RNA, 23 nt, Human
cugggaggcaagagggguggaga

SEQ ID NO: 2559358 - RNA, 22 nt, Human
cugggaggcaagagggguggag

SEQ ID NO: 2559359 - RNA, 18 nt, Human
cugggaggcucuggagcc

SEQ ID NO: 2559360 - RNA, 17 nt, Human
cugggaggcucuggagc

SEQ ID NO: 2559361 - RNA, 19 nt, Human
cugggaggucaaggcugca

SEQ ID NO: 2559362 - RNA, 21 nt, Human
cugggaggucaaggcugcagu

SEQ ID NO: 2559363 - RNA, 23 nt, Human
cugggaguaguugucuuuccugg

SEQ ID NO: 2559364 - RNA, 21 nt, Human
cugggaguaguugucuuuccu

SEQ ID NO: 2559365 - RNA, 18 nt, Human
cugggcccugggcuggaa

SEQ ID NO: 2559366 - RNA, 16 nt, Human
cugggcccugggcugg

SEQ ID NO: 2559367 - RNA, 15 nt, Human
cugggcccugggcug

SEQ ID NO: 2559368 - RNA, 14 nt, Human
cugggcccugggcu

SEQ ID NO: 2559369 - RNA, 13 nt, Human
cugggcccugggc

SEQ ID NO: 2559370 - RNA, 16 nt, Human
cugggccgcugccacg

SEQ ID NO: 2559371 - RNA, 15 nt, Human
cugggccgcugccac

SEQ ID NO: 2559372 - RNA, 21 nt, Human
cugggccccagcccacccucc

SEQ ID NO: 2559373 - RNA, 20 nt, Human
cugggccccagcccacccuc

SEQ ID NO: 2559374 - RNA, 19 nt, Human
cugggccccagcccacccu

SEQ ID NO: 2559375 - RNA, 15 nt, Human
cugggccccaguugu

SEQ ID NO: 2559376 - RNA, 11 nt, Human
cugggcccugg

SEQ ID NO: 2559377 - RNA, 19 nt, Human
cugggccccaguuguauuu

SEQ ID NO: 2559378 - RNA, 24 nt, Human
cugggccccaaacgggcugcccug

SEQ ID NO: 2559379 - RNA, 13 nt, Human
cugggccccacca

SEQ ID NO: 2559380 - RNA, 14 nt, Human
cugggccccaccac

SEQ ID NO: 2559381 - RNA, 18 nt, Human
cugggccccagcccaccc

SEQ ID NO: 2559382 - RNA, 16 nt, Human
cugggccccagcccac

SEQ ID NO: 2559383 - RNA, 15 nt, Human
cugggccccagccca

SEQ ID NO: 2559384 - RNA, 14 nt, Human
cugggccccagccc

SEQ ID NO: 2559385 - RNA, 13 nt, Human
cugggccccagcc

SEQ ID NO: 2559386 - RNA, 12 nt, Human
cugggccccagc

SEQ ID NO: 2559387 - RNA, 16 nt, Human
cugggccccaccaccu

SEQ ID NO: 2559388 - RNA, 18 nt, Human
cugggccccaccaccuag

SEQ ID NO: 2559389 - RNA, 13 nt, Human
cugggaguccccu

SEQ ID NO: 2559390 - RNA, 20 nt, Human
cugggaucccucauccucau

SEQ ID NO: 2559391 - RNA, 18 nt, Human
cugggaugauuggagggg

SEQ ID NO: 2559392 - RNA, 20 nt, Human
cugggaucacauguggacuu

SEQ ID NO: 2559393 - RNA, 14 nt, Human
cugggaguccccuu

SEQ ID NO: 2559394 - RNA, 13 nt, Human
cugggauccuaag

SEQ ID NO: 2559395 - RNA, 16 nt, Human
cugggauuacaggugu

SEQ ID NO: 2559396 - RNA, 18 nt, Human
cugggauuacagguguga

SEQ ID NO: 2559397 - RNA, 20 nt, Human
cugggauuacaggugugaac

SEQ ID NO: 2559398 - RNA, 17 nt, Human
cugggauuacaggugug

SEQ ID NO: 2559399 - RNA, 22 nt, Human
cugggaugagccgcugugagcc

SEQ ID NO: 2559400 - RNA, 21 nt, Human
cugggaugagccgcugugagc

SEQ ID NO: 2559401 - RNA, 17 nt, Human
cugggaugagccgcugu

SEQ ID NO: 2559402 - RNA, 17 nt, Human
cugggauccuaagggcu

SEQ ID NO: 2559403 - RNA, 20 nt, Human
cugggaugggaggagaggac

SEQ ID NO: 2559404 - RNA, 16 nt, Human
cuggccuucggccucc

SEQ ID NO: 2559405 - RNA, 17 nt, Human
cuggccuucggccucca

SEQ ID NO: 2559406 - RNA, 18 nt, Human
cuggccuucggccuccau

SEQ ID NO: 2559407 - RNA, 21 nt, Human
cuggccuucggccuccauccu

SEQ ID NO: 2559408 - RNA, 15 nt, Human
cuggccuucggccuc

SEQ ID NO: 2559409 - RNA, 17 nt, Human
cuggccuggccccucag

SEQ ID NO: 2559410 - RNA, 16 nt, Human
cuggccuggccccuca

SEQ ID NO: 2559411 - RNA, 16 nt, Human
cuggccugagcuggga

SEQ ID NO: 2559412 - RNA, 14 nt, Human
cuggccucugcacu

SEQ ID NO: 2559413 - RNA, 13 nt, Human
cuggccucugcac

SEQ ID NO: 2559414 - RNA, 14 nt, Human
cuggccuggccccu

SEQ ID NO: 2559415 - RNA, 13 nt, Human
cuggccuggcccc

SEQ ID NO: 2559416 - RNA, 15 nt, Human
cuggccugcugggcu

SEQ ID NO: 2559417 - RNA, 19 nt, Human
cuggccugcugggcucucc

SEQ ID NO: 2559418 - RNA, 20 nt, Human
cuggccugcugggcucucca

SEQ ID NO: 2559419 - RNA, 18 nt, Human
cuggccugagcugggaug

SEQ ID NO: 2559420 - RNA, 15 nt, Human
cuggccugagcuggg

SEQ ID NO: 2559421 - RNA, 19 nt, Human
cuggccugcacggugggcc

SEQ ID NO: 2559422 - RNA, 24 nt, Human
cuggccugaggucucgcugaugcu

SEQ ID NO: 2559423 - RNA, 20 nt, Human
cuggccugaggucucgcuga

SEQ ID NO: 2559424 - RNA, 23 nt, Human
cuggccagggccuggaagacaga

SEQ ID NO: 2559425 - RNA, 16 nt, Human
cuggccagggccugga

SEQ ID NO: 2559426 - RNA, 15 nt, Human
cuggccagggccugg

SEQ ID NO: 2559427 - RNA, 16 nt, Human
cuggccaguccaggcu

SEQ ID NO: 2559428 - RNA, 15 nt, Human
cuggccaguccaggc

SEQ ID NO: 2559429 - RNA, 18 nt, Human
cuggccaguccaggcugc

SEQ ID NO: 2559430 - RNA, 13 nt, Human
cuggccccaggac

SEQ ID NO: 2559431 - RNA, 17 nt, Human
cuggccaguccaggcug

SEQ ID NO: 2559432 - RNA, 16 nt, Human
cuggccccaggaccug

SEQ ID NO: 2559433 - RNA, 20 nt, Human
cuggccccaggaccuggcug

SEQ ID NO: 2559434 - RNA, 14 nt, Human
cuggccagggccug

SEQ ID NO: 2559435 - RNA, 13 nt, Human
cuggccaggcaga

SEQ ID NO: 2559436 - RNA, 14 nt, Human
cuggccaggcagau

SEQ ID NO: 2559437 - RNA, 21 nt, Human
cuggccaggcagaucugugcc

SEQ ID NO: 2559438 - RNA, 22 nt, Human
cuggccaggcagaucugugccc

SEQ ID NO: 2559439 - RNA, 21 nt, Human
cuggccagccccacagcccac

SEQ ID NO: 2559440 - RNA, 20 nt, Human
cuggccagccccacagccca

SEQ ID NO: 2559441 - RNA, 19 nt, Human
cuggccagccccacagccc

SEQ ID NO: 2559442 - RNA, 18 nt, Human
cuggccagccccacagcc

SEQ ID NO: 2559443 - RNA, 17 nt, Human
cuggccagccccacagc

SEQ ID NO: 2559444 - RNA, 12 nt, Human
cuggccaggagc

SEQ ID NO: 2559445 - RNA, 13 nt, Human
cuggccaggagcu

SEQ ID NO: 2559446 - RNA, 15 nt, Human
cuggccaggagcucu

SEQ ID NO: 2559447 - RNA, 17 nt, Human
cuggccaggagcucuuc

SEQ ID NO: 2559448 - RNA, 20 nt, Human
cuggccaggagcucuucagg

SEQ ID NO: 2559449 - RNA, 22 nt, Human
cuggccaggagcucuucaggcc

SEQ ID NO: 2559450 - RNA, 12 nt, Human
cuggccaggaug

SEQ ID NO: 2559451 - RNA, 23 nt, Human
cuggccaggauggaggggugguc

SEQ ID NO: 2559452 - RNA, 11 nt, Human
cuggccaggca

SEQ ID NO: 2559453 - RNA, 23 nt, Human
cuggccucaagugauucuccugc

SEQ ID NO: 2559454 - RNA, 19 nt, Human
cuggccccaugucucucag

SEQ ID NO: 2559455 - RNA, 21 nt, Human
cuggccccaugucucucagaa

SEQ ID NO: 2559456 - RNA, 15 nt, Human
cuggcccccagcugu

SEQ ID NO: 2559457 - RNA, 21 nt, Human
cuggccccaggaccuggcugc

SEQ ID NO: 2559458 - RNA, 17 nt, Human
cuggccccauggucagc

SEQ ID NO: 2559459 - RNA, 16 nt, Human
cuggccccaugucucu

SEQ ID NO: 2559460 - RNA, 13 nt, Human
cuggccuccacag

SEQ ID NO: 2559461 - RNA, 14 nt, Human
cuggccucccaaau

SEQ ID NO: 2559462 - RNA, 22 nt, Human
cuggccucaggugggccgcagg

SEQ ID NO: 2559463 - RNA, 22 nt, Human
cuggccucaagugauucuccug

SEQ ID NO: 2559464 - RNA, 12 nt, Human
cuggccucugca

SEQ ID NO: 2559465 - RNA, 16 nt, Human
cuggccucccaaauga

SEQ ID NO: 2559466 - RNA, 13 nt, Human
cuggccucccaca

SEQ ID NO: 2559467 - RNA, 12 nt, Human
cuggccucccac

SEQ ID NO: 2559468 - RNA, 14 nt, Human
cuggccucccacag

SEQ ID NO: 2559469 - RNA, 18 nt, Human
cuggcaaggacacagaug

SEQ ID NO: 2559470 - RNA, 17 nt, Human
cuggcaaggacacagau

SEQ ID NO: 2559471 - RNA, 19 nt, Human
cuggcacccaccguggagg

SEQ ID NO: 2559472 - RNA, 15 nt, Human
cuggcacagggcagu

SEQ ID NO: 2559473 - RNA, 15 nt, Human
cuggcaauagugugu

SEQ ID NO: 2559474 - RNA, 19 nt, Human
cuggcaauaguguguucug

SEQ ID NO: 2559475 - RNA, 22 nt, Human
cuggcacccggccccugcuggu

SEQ ID NO: 2559476 - RNA, 18 nt, Human
cuggcacccggccccugc

SEQ ID NO: 2559477 - RNA, 17 nt, Human
cuggcacccggccccug

SEQ ID NO: 2559478 - RNA, 16 nt, Human
cuggcacccggccccu

SEQ ID NO: 2559479 - RNA, 18 nt, Human
cuggaauauauaaccagu

SEQ ID NO: 2559480 - RNA, 20 nt, Human
cuggaagugcuaauuuugaa

SEQ ID NO: 2559481 - RNA, 18 nt, Human
cuggaaucuggagaccag

SEQ ID NO: 2559482 - RNA, 19 nt, Human
cuggaaucuggagaccagg

SEQ ID NO: 2559483 - RNA, 17 nt, Human
cuggaaucuggagacca

SEQ ID NO: 2559484 - RNA, 20 nt, Human
cuggaagguggggacaggga

SEQ ID NO: 2559485 - RNA, 15 nt, Human
cuggaauacaugaaa

SEQ ID NO: 2559486 - RNA, 18 nt, Human
cuggaauacaugaaauau

SEQ ID NO: 2559487 - RNA, 23 nt, Human
cuggaaucaggaauauuuuccaa

SEQ ID NO: 2559488 - RNA, 23 nt, Human
cuggaaucaagaugucagacugg

SEQ ID NO: 2559489 - RNA, 22 nt, Human
cuggcaaagguggcucuccagu

SEQ ID NO: 2559490 - RNA, 21 nt, Human
cuggcaaagguggcucuccag

SEQ ID NO: 2559491 - RNA, 18 nt, Human
cuggcaaagguggcucuc

SEQ ID NO: 2559492 - RNA, 22 nt, Human
cuggcaaagggagcagaacuga

SEQ ID NO: 2559493 - RNA, 14 nt, Human
cuggcaacaucuuu

SEQ ID NO: 2559494 - RNA, 19 nt, Human
cuggcaaagggagcagaac

SEQ ID NO: 2559495 - RNA, 20 nt, Human
cuggaaucuggagagcuaga

SEQ ID NO: 2559496 - RNA, 19 nt, Human
cuggaaucuggagagcuag

SEQ ID NO: 2559497 - RNA, 24 nt, Human
cuggaaucuggagaccagggagcc

SEQ ID NO: 2559498 - RNA, 16 nt, Human
cuggcaaggacacaga

SEQ ID NO: 2559499 - RNA, 22 nt, Human
cuggcaagcuagaaccuggagg

SEQ ID NO: 2559500 - RNA, 19 nt, Human
cuggcaagcuagaaccugg

SEQ ID NO: 2559501 - RNA, 17 nt, Human
cuggcaacaucuuuauc

SEQ ID NO: 2559502 - RNA, 14 nt, Human
cuggcaagaaugug

SEQ ID NO: 2559503 - RNA, 22 nt, Human
cuggcaugggaaugaaugucag

SEQ ID NO: 2559504 - RNA, 19 nt, Human
cuggcaugggaaugaaugu

SEQ ID NO: 2559505 - RNA, 18 nt, Human
cuggcaugggaaugaaug

SEQ ID NO: 2559506 - RNA, 16 nt, Human
cuggcaugggaaugaa

SEQ ID NO: 2559507 - RNA, 15 nt, Human
cuggcacuauaaugu

SEQ ID NO: 2559508 - RNA, 16 nt, Human
cuggcacuauaaugua

SEQ ID NO: 2559509 - RNA, 22 nt, Human
cuggcacuauaauguaagcucu

SEQ ID NO: 2559510 - RNA, 17 nt, Human
cuggcaccgccuucucu

SEQ ID NO: 2559511 - RNA, 21 nt, Human
cuggcacgguggcucaggccu

SEQ ID NO: 2559512 - RNA, 23 nt, Human
cuggcaucgcaccauucugacuc

SEQ ID NO: 2559513 - RNA, 17 nt, Human
cuggccaccugaggugg

SEQ ID NO: 2559514 - RNA, 16 nt, Human
cuggccaccugaggug

SEQ ID NO: 2559515 - RNA, 15 nt, Human
cuggccaccugaggu

SEQ ID NO: 2559516 - RNA, 11 nt, Human
cuggccaccug

SEQ ID NO: 2559517 - RNA, 18 nt, Human
cuggccaccucucuccuu

SEQ ID NO: 2559518 - RNA, 16 nt, Human
cuggccaccucucucc

SEQ ID NO: 2559519 - RNA, 23 nt, Human
cuggccaccaggcuggcgcagcc

SEQ ID NO: 2559520 - RNA, 22 nt, Human
cuggccaccaggcuggcgcagc

SEQ ID NO: 2559521 - RNA, 21 nt, Human
cuggccaccaggcuggcgcag

SEQ ID NO: 2559522 - RNA, 20 nt, Human
cuggccaccaggcuggcgca

SEQ ID NO: 2559523 - RNA, 19 nt, Human
cuggccaccaggcuggcgc

SEQ ID NO: 2559524 - RNA, 18 nt, Human
cuggccaccaggcuggcg

SEQ ID NO: 2559525 - RNA, 17 nt, Human
cuggccaccaggcuggc

SEQ ID NO: 2559526 - RNA, 16 nt, Human
cuggccaccaggcugg

SEQ ID NO: 2559527 - RNA, 15 nt, Human
cuggccaccaggcug

SEQ ID NO: 2559528 - RNA, 13 nt, Human
cuggccaccaggc

SEQ ID NO: 2559529 - RNA, 16 nt, Human
cuggccagccccacag

SEQ ID NO: 2559530 - RNA, 15 nt, Human
cuggccagccccaca

SEQ ID NO: 2559531 - RNA, 14 nt, Human
cuggccagccccac

SEQ ID NO: 2559532 - RNA, 13 nt, Human
cuggccagcccca

SEQ ID NO: 2559533 - RNA, 22 nt, Human
cuggccaccugaggugggccca

SEQ ID NO: 2559534 - RNA, 21 nt, Human
cuggccaccugaggugggccc

SEQ ID NO: 2559535 - RNA, 20 nt, Human
cuggccaccugaggugggcc

SEQ ID NO: 2559536 - RNA, 18 nt, Human
cuggccaccugagguggg

SEQ ID NO: 2559537 - RNA, 21 nt, Human
cuggccaccaccccccacucu

SEQ ID NO: 2559538 - RNA, 20 nt, Human
cuggccaccaccccccacuc

SEQ ID NO: 2559539 - RNA, 19 nt, Human
cuggccaccaccccccacu

SEQ ID NO: 2559540 - RNA, 16 nt, Human
cuggccaccacccccc

SEQ ID NO: 2559541 - RNA, 14 nt, Human
cuggccaccacccc

SEQ ID NO: 2559542 - RNA, 13 nt, Human
cuggccaccaccc

SEQ ID NO: 2559543 - RNA, 18 nt, Human
cuggcauuagaauuauuu

SEQ ID NO: 2559544 - RNA, 24 nt, Human
cuggcaugggaaugaaugucagug

SEQ ID NO: 2559545 - RNA, 15 nt, Human
cuggcauuacagcug

SEQ ID NO: 2559546 - RNA, 16 nt, Human
cuggcauuacagcugg

SEQ ID NO: 2559547 - RNA, 20 nt, Human
cugcccaggccccugccacc

SEQ ID NO: 2559548 - RNA, 19 nt, Human
cugcccaggccccugccac

SEQ ID NO: 2559549 - RNA, 18 nt, Human
cugcccaggccccugcca

SEQ ID NO: 2559550 - RNA, 16 nt, Human
cugcccaggccccugc

SEQ ID NO: 2559551 - RNA, 17 nt, Human
cugccccagcccaaguc

SEQ ID NO: 2559552 - RNA, 16 nt, Human
cugccccagcccaagu

SEQ ID NO: 2559553 - RNA, 13 nt, Human
cugccccagccca

SEQ ID NO: 2559554 - RNA, 14 nt, Human
cugccccagccaga

SEQ ID NO: 2559555 - RNA, 13 nt, Human
cugccccagccag

SEQ ID NO: 2559556 - RNA, 13 nt, Human
cugccccagaggc

SEQ ID NO: 2559557 - RNA, 23 nt, Human
cugccccaccccuccccauuagc

SEQ ID NO: 2559558 - RNA, 13 nt, Human
cugccccaacucu

SEQ ID NO: 2559559 - RNA, 12 nt, Human
cugccccaacuc

SEQ ID NO: 2559560 - RNA, 12 nt, Human
cugcccacccgu

SEQ ID NO: 2559561 - RNA, 14 nt, Human
cugccccaacuccu

SEQ ID NO: 2559562 - RNA, 21 nt, Human
cugccccaacuccuggaagcu

SEQ ID NO: 2559563 - RNA, 16 nt, Human
cugccccaacuccugg

SEQ ID NO: 2559564 - RNA, 17 nt, Human
cugccccaacuccugga

SEQ ID NO: 2559565 - RNA, 18 nt, Human
cugccccaacuccuggaa

SEQ ID NO: 2559566 - RNA, 20 nt, Human
cugccccaacuccuggaagc

SEQ ID NO: 2559567 - RNA, 12 nt, Human
cugcccaccugg

SEQ ID NO: 2559568 - RNA, 15 nt, Human
cugcccaggccccug

SEQ ID NO: 2559569 - RNA, 14 nt, Human
cugcccaggccccu

SEQ ID NO: 2559570 - RNA, 19 nt, Human
cugcccaaccugcucuccu

SEQ ID NO: 2559571 - RNA, 17 nt, Human
cugccauucacuucaua

SEQ ID NO: 2559572 - RNA, 15 nt, Human
cugccauuucugaga

SEQ ID NO: 2559573 - RNA, 15 nt, Human
cugcccacccccuca

SEQ ID NO: 2559574 - RNA, 14 nt, Human
cugcccacccccuc

SEQ ID NO: 2559575 - RNA, 13 nt, Human
cugcccacccccu

SEQ ID NO: 2559576 - RNA, 12 nt, Human
cugcccaccccc

SEQ ID NO: 2559577 - RNA, 19 nt, Human
cugcccacccccucaagcc

SEQ ID NO: 2559578 - RNA, 16 nt, Human
cugcccacccccucaa

SEQ ID NO: 2559579 - RNA, 16 nt, Human
cugcccaauuggagga

SEQ ID NO: 2559580 - RNA, 21 nt, Human
cugcccaauaugcaguucugc

SEQ ID NO: 2559581 - RNA, 21 nt, Human
cugcccaauuuugcagggagc

SEQ ID NO: 2559582 - RNA, 17 nt, Human
cugcccacauuggaccc

SEQ ID NO: 2559583 - RNA, 24 nt, Human
cugcccgucucucucccauggagc

SEQ ID NO: 2559584 - RNA, 23 nt, Human
cugcccgucucucucccauggag

SEQ ID NO: 2559585 - RNA, 22 nt, Human
cugcccgucucucucccaugga

SEQ ID NO: 2559586 - RNA, 21 nt, Human
cugcccgucucucucccaugg

SEQ ID NO: 2559587 - RNA, 19 nt, Human
cugcccgucucucucccau

SEQ ID NO: 2559588 - RNA, 18 nt, Human
cugcccgucucucuccca

SEQ ID NO: 2559589 - RNA, 21 nt, Human
cugcccguaaacacgccugca

SEQ ID NO: 2559590 - RNA, 18 nt, Human
cugcccguaaacacgccu

SEQ ID NO: 2559591 - RNA, 19 nt, Human
cugcccguaaacacgccug

SEQ ID NO: 2559592 - RNA, 23 nt, Human
cugcccggggcagcugccagaga

SEQ ID NO: 2559593 - RNA, 19 nt, Human
cugcccgggcgcggccagc

SEQ ID NO: 2559594 - RNA, 19 nt, Human
cugcccgcucccagugucu

SEQ ID NO: 2559595 - RNA, 17 nt, Human
cugcccgcucccagugu

SEQ ID NO: 2559596 - RNA, 16 nt, Human
cugcccgcucccagug

SEQ ID NO: 2559597 - RNA, 21 nt, Human
cugcccgggcgcggccagccc

SEQ ID NO: 2559598 - RNA, 13 nt, Human
cugcccggggcag

SEQ ID NO: 2559599 - RNA, 15 nt, Human
cugcccggggcagcu

SEQ ID NO: 2559600 - RNA, 16 nt, Human
cugcccggggcagcug

SEQ ID NO: 2559601 - RNA, 19 nt, Human
cugcccggggcagcugcca

SEQ ID NO: 2559602 - RNA, 20 nt, Human
cugcccggggcagcugccag

SEQ ID NO: 2559603 - RNA, 21 nt, Human
cugcccggggcagcugccaga

SEQ ID NO: 2559604 - RNA, 22 nt, Human
cugcccggggcagcugccagag

SEQ ID NO: 2559605 - RNA, 20 nt, Human
cugcccuaaugcgcaggcug

SEQ ID NO: 2559606 - RNA, 21 nt, Human
cugcccuaaugcgcaggcugg

SEQ ID NO: 2559607 - RNA, 15 nt, Human
cugcccgucuucagc

SEQ ID NO: 2559608 - RNA, 16 nt, Human
cugcccgucuucagcc

SEQ ID NO: 2559609 - RNA, 17 nt, Human
cugcccgucuucagccu

SEQ ID NO: 2559610 - RNA, 18 nt, Human
cugcccgucuucagccua

SEQ ID NO: 2559611 - RNA, 22 nt, Human
cugcccuaaugcgcaggcuggc

SEQ ID NO: 2559612 - RNA, 18 nt, Human
cugcccuacagaggucuc

SEQ ID NO: 2559613 - RNA, 21 nt, Human
cugcccgucuucagccuagcc

SEQ ID NO: 2559614 - RNA, 22 nt, Human
cugcccucguggccagcccggc

SEQ ID NO: 2559615 - RNA, 21 nt, Human
cugcccucguggccagcccgg

SEQ ID NO: 2559616 - RNA, 23 nt, Human
cugcccucguggccagcccggcu

SEQ ID NO: 2559617 - RNA, 20 nt, Human
cugcccucguggccagcccg

SEQ ID NO: 2559618 - RNA, 19 nt, Human
cugcccucguggccagccc

SEQ ID NO: 2559619 - RNA, 18 nt, Human
cugcccucguggccagcc

SEQ ID NO: 2559620 - RNA, 18 nt, Human
cugccccuggcagccccu

SEQ ID NO: 2559621 - RNA, 19 nt, Human
cugccccagcccaagucca

SEQ ID NO: 2559622 - RNA, 18 nt, Human
cugccccagcccaagucc

SEQ ID NO: 2559623 - RNA, 13 nt, Human
cugccccagcucu

SEQ ID NO: 2559624 - RNA, 19 nt, Human
cugccccuggcagccccug

SEQ ID NO: 2559625 - RNA, 13 nt, Human
cugcccgagcugg

SEQ ID NO: 2559626 - RNA, 14 nt, Human
cugccccagcucug

SEQ ID NO: 2559627 - RNA, 13 nt, Human
cugccccuguucu

SEQ ID NO: 2559628 - RNA, 16 nt, Human
cugccccuggcucuga

SEQ ID NO: 2559629 - RNA, 13 nt, Human
cugcccggcaggg

SEQ ID NO: 2559630 - RNA, 20 nt, Human
cugcccggcaggguccuaga

SEQ ID NO: 2559631 - RNA, 21 nt, Human
cugcccgagcuggugcauuac

SEQ ID NO: 2559632 - RNA, 18 nt, Human
cugccccuguucucuucc

SEQ ID NO: 2559633 - RNA, 14 nt, Human
cugcccgagcuggu

SEQ ID NO: 2559634 - RNA, 15 nt, Human
cugcccgagcuggug

SEQ ID NO: 2559635 - RNA, 16 nt, Human
cugcccgagcuggugc

SEQ ID NO: 2559636 - RNA, 15 nt, Human
cugcccgcucccagu

SEQ ID NO: 2559637 - RNA, 14 nt, Human
cugcccgcucccag

SEQ ID NO: 2559638 - RNA, 13 nt, Human
cugcccgcuccca

SEQ ID NO: 2559639 - RNA, 17 nt, Human
cugcccgagcuggugca

SEQ ID NO: 2559640 - RNA, 21 nt, Human
cugccaggaagccagcaggcu

SEQ ID NO: 2559641 - RNA, 20 nt, Human
cugccaggaagccagcaggc

SEQ ID NO: 2559642 - RNA, 14 nt, Human
cugccaggaagcca

SEQ ID NO: 2559643 - RNA, 13 nt, Human
cugccaggaagcc

SEQ ID NO: 2559644 - RNA, 12 nt, Human
cugccagcugca

SEQ ID NO: 2559645 - RNA, 13 nt, Human
cugccagcugcac

SEQ ID NO: 2559646 - RNA, 11 nt, Human
cugccagcugc

SEQ ID NO: 2559647 - RNA, 22 nt, Human
cugccagaugcugauguucagu

SEQ ID NO: 2559648 - RNA, 21 nt, Human
cugccagaugcugauguucag

SEQ ID NO: 2559649 - RNA, 17 nt, Human
cugccagcucuguauca

SEQ ID NO: 2559650 - RNA, 23 nt, Human
cugccagaugcugauguucagug

SEQ ID NO: 2559651 - RNA, 15 nt, Human
cugccagcaacgcag

SEQ ID NO: 2559652 - RNA, 18 nt, Human
cugccagaugcugauguu

SEQ ID NO: 2559653 - RNA, 17 nt, Human
cugccagaugcugaugu

SEQ ID NO: 2559654 - RNA, 16 nt, Human
cugccagaugcugaug

SEQ ID NO: 2559655 - RNA, 14 nt, Human
cugccagaugcuga

SEQ ID NO: 2559656 - RNA, 20 nt, Human
cugccagagaagcaucggag

SEQ ID NO: 2559657 - RNA, 13 nt, Human
cugccagaugcug

SEQ ID NO: 2559658 - RNA, 13 nt, Human
cugccagagaagc

SEQ ID NO: 2559659 - RNA, 16 nt, Human
cugccagcugcacuga

SEQ ID NO: 2559660 - RNA, 17 nt, Human
cugccagcugcacugau

SEQ ID NO: 2559661 - RNA, 22 nt, Human
cugccaggaagccagcaggcuc

SEQ ID NO: 2559662 - RNA, 21 nt, Human
cugccauccagguucagcuug

SEQ ID NO: 2559663 - RNA, 15 nt, Human
cugccauccucccaa

SEQ ID NO: 2559664 - RNA, 20 nt, Human
cugccauggaggcacacagc

SEQ ID NO: 2559665 - RNA, 22 nt, Human
cugccauggcgugucccucucg

SEQ ID NO: 2559666 - RNA, 14 nt, Human
cugccauggcgugu

SEQ ID NO: 2559667 - RNA, 21 nt, Human
cugccauggcgugucccucuc

SEQ ID NO: 2559668 - RNA, 23 nt, Human
cugccauggaggcacacagcugc

SEQ ID NO: 2559669 - RNA, 21 nt, Human
cugccauggaggcacacagcu

SEQ ID NO: 2559670 - RNA, 15 nt, Human
cugccacccuaccug

SEQ ID NO: 2559671 - RNA, 19 nt, Human
cugccacccaccucccugc

SEQ ID NO: 2559672 - RNA, 22 nt, Human
cugccacccaccucccugccuc

SEQ ID NO: 2559673 - RNA, 23 nt, Human
cugccacccaccucccugccucc

SEQ ID NO: 2559674 - RNA, 20 nt, Human
cugccacccaccucccugcc

SEQ ID NO: 2559675 - RNA, 20 nt, Human
cugcaucaagaugugacaug

SEQ ID NO: 2559676 - RNA, 14 nt, Human
cugcauauguugaa

SEQ ID NO: 2559677 - RNA, 21 nt, Human
cugcauauguugaauacuuuu

SEQ ID NO: 2559678 - RNA, 21 nt, Human
cugcauaguauuccauugugu

SEQ ID NO: 2559679 - RNA, 14 nt, Human
cugcauacaaucug

SEQ ID NO: 2559680 - RNA, 15 nt, Human
cugcauaccaaccug

SEQ ID NO: 2559681 - RNA, 15 nt, Human
cugcauaugaaagga

SEQ ID NO: 2559682 - RNA, 20 nt, Human
cugcauacuuuuuaaaugua

SEQ ID NO: 2559683 - RNA, 14 nt, Human
cugcauacuuuuua

SEQ ID NO: 2559684 - RNA, 16 nt, Human
cugcauaccaaccugg

SEQ ID NO: 2559685 - RNA, 16 nt, Human
cugccaccucccugac

SEQ ID NO: 2559686 - RNA, 15 nt, Human
cugccaccucccuga

SEQ ID NO: 2559687 - RNA, 13 nt, Human
cugccaccucccu

SEQ ID NO: 2559688 - RNA, 13 nt, Human
cugccaccucccc

SEQ ID NO: 2559689 - RNA, 12 nt, Human
cugccaccuccc

SEQ ID NO: 2559690 - RNA, 14 nt, Human
cugccaccuccccu

SEQ ID NO: 2559691 - RNA, 22 nt, Human
cugccaccuccccuauccaccc

SEQ ID NO: 2559692 - RNA, 22 nt, Human
cugccagaagauccccucagga

SEQ ID NO: 2559693 - RNA, 21 nt, Human
cugccagaagauccccucagg

SEQ ID NO: 2559694 - RNA, 18 nt, Human
cugccaccucccugaccc

SEQ ID NO: 2559695 - RNA, 17 nt, Human
cugccaccucccugacc

SEQ ID NO: 2559696 - RNA, 17 nt, Human
cugccagacccccugga

SEQ ID NO: 2559697 - RNA, 19 nt, Human
cugccagacccccuggaga

SEQ ID NO: 2559698 - RNA, 22 nt, Human
cugccagacggcacccacccag

SEQ ID NO: 2559699 - RNA, 23 nt, Human
cugccagaagauccccucaggac

SEQ ID NO: 2559700 - RNA, 11 nt, Human
cugccagagaa

SEQ ID NO: 2559701 - RNA, 12 nt, Human
cugccacccugg

SEQ ID NO: 2559702 - RNA, 14 nt, Human
cugccacccugggg

SEQ ID NO: 2559703 - RNA, 21 nt, Human
cugccacccuggggagaaagu

SEQ ID NO: 2559704 - RNA, 11 nt, Human
cugccaccucc

SEQ ID NO: 2559705 - RNA, 19 nt, Human
cugccacccuaccuguuca

SEQ ID NO: 2559706 - RNA, 14 nt, Human
cugcaccggcuggc

SEQ ID NO: 2559707 - RNA, 22 nt, Human
cugcacccuggggccuggaccu

SEQ ID NO: 2559708 - RNA, 21 nt, Human
cugcacccuggggccuggacc

SEQ ID NO: 2559709 - RNA, 16 nt, Human
cugcacccuggggccu

SEQ ID NO: 2559710 - RNA, 21 nt, Human
cugaggccccuucuagguggc

SEQ ID NO: 2559711 - RNA, 23 nt, Human
cugaggcccuucucuccagcccc

SEQ ID NO: 2559712 - RNA, 22 nt, Human
cugaggcccuucucuccagccc

SEQ ID NO: 2559713 - RNA, 16 nt, Human
cugcaccggcuggccu

SEQ ID NO: 2559714 - RNA, 15 nt, Human
cugcaccggcuggcc

SEQ ID NO: 2559715 - RNA, 15 nt, Human
cugcaccgggccaca

SEQ ID NO: 2559716 - RNA, 14 nt, Human
cugcaccgggccac

SEQ ID NO: 2559717 - RNA, 20 nt, Human
cugcacuccccugcugggug

SEQ ID NO: 2559718 - RNA, 19 nt, Human
cugcacuccccugcugggu

SEQ ID NO: 2559719 - RNA, 13 nt, Human
cugcacuccccug

SEQ ID NO: 2559720 - RNA, 18 nt, Human
cugcaccgggccacagag

SEQ ID NO: 2559721 - RNA, 23 nt, Human
cugcacccuggggccuggaccug

SEQ ID NO: 2559722 - RNA, 20 nt, Human
cugcacuccagucuggguga

SEQ ID NO: 2559723 - RNA, 20 nt, Human
cugcacuccagccuggguga

SEQ ID NO: 2559724 - RNA, 21 nt, Human
cugcacuguccugcuccacag

SEQ ID NO: 2559725 - RNA, 20 nt, Human
cugcacuguccugcuccaca

SEQ ID NO: 2559726 - RNA, 19 nt, Human
cugcacuguccugcuccac

SEQ ID NO: 2559727 - RNA, 18 nt, Human
cugcacuguccugcucca

SEQ ID NO: 2559728 - RNA, 23 nt, Human
cugcacuguccugcuccacagug

SEQ ID NO: 2559729 - RNA, 15 nt, Human
cugcagaaggaaaaa

SEQ ID NO: 2559730 - RNA, 14 nt, Human
cugcagaaggaaaa

SEQ ID NO: 2559731 - RNA, 17 nt, Human
cugcacuguccugcucc

SEQ ID NO: 2559732 - RNA, 16 nt, Human
cugcacuguccugcuc

SEQ ID NO: 2559733 - RNA, 15 nt, Human
cugcacuguccugcu

SEQ ID NO: 2559734 - RNA, 14 nt, Human
cugcacuguccugc

SEQ ID NO: 2559735 - RNA, 13 nt, Human
cugcacuguccug

SEQ ID NO: 2559736 - RNA, 11 nt, Human
cugcacugucc

SEQ ID NO: 2559737 - RNA, 16 nt, Human
cugcagaaggccaaga

SEQ ID NO: 2559738 - RNA, 15 nt, Human
cugcagaaggccaag

SEQ ID NO: 2559739 - RNA, 14 nt, Human
cugcagaaggccaa

SEQ ID NO: 2559740 - RNA, 13 nt, Human
cugcagaaggcca

SEQ ID NO: 2559741 - RNA, 22 nt, Human
cugcagaaggaaaaauguguaa

SEQ ID NO: 2559742 - RNA, 21 nt, Human
cugcagaaggaaaaaugugua

SEQ ID NO: 2559743 - RNA, 20 nt, Human
cugcagaaggaaaaaugugu

SEQ ID NO: 2559744 - RNA, 19 nt, Human
cugcagaaggaaaaaugug

SEQ ID NO: 2559745 - RNA, 19 nt, Human
cugcagaaggccaagaauc

SEQ ID NO: 2559746 - RNA, 15 nt, Human
cugcagaccacgccc

SEQ ID NO: 2559747 - RNA, 22 nt, Human
cugcagaauuuggguucugccu

SEQ ID NO: 2559748 - RNA, 22 nt, Human
cugcacuggggagcccgucuca

SEQ ID NO: 2559749 - RNA, 16 nt, Human
cugcacuggggagccc

SEQ ID NO: 2559750 - RNA, 12 nt, Human
cugcacugucaa

SEQ ID NO: 2559751 - RNA, 21 nt, Human
cugcacuccccugcugggugu

SEQ ID NO: 2559752 - RNA, 18 nt, Human
cugcacuccccugcuggg

SEQ ID NO: 2559753 - RNA, 20 nt, Human
cugcacuccggccugaugac

SEQ ID NO: 2559754 - RNA, 21 nt, Human
cugcacuggaguccagucucu

SEQ ID NO: 2559755 - RNA, 15 nt, Human
cugcagcaauaaagc

SEQ ID NO: 2559756 - RNA, 16 nt, Human
cugcagcaauaaagca

SEQ ID NO: 2559757 - RNA, 13 nt, Human
cugcagagggcac

SEQ ID NO: 2559758 - RNA, 20 nt, Human
cugcagaggccagaggcccc

SEQ ID NO: 2559759 - RNA, 17 nt, Human
cugcagaggccagaggc

SEQ ID NO: 2559760 - RNA, 21 nt, Human
cugcagaggccagaggccccc

SEQ ID NO: 2559761 - RNA, 21 nt, Human
cugcagaggggaaaccagugu

SEQ ID NO: 2559762 - RNA, 13 nt, Human
cugcagaggccag

SEQ ID NO: 2559763 - RNA, 11 nt, Human
cugcagaggcc

SEQ ID NO: 2559764 - RNA, 23 nt, Human
cugcagagcugcgggcugggugu

SEQ ID NO: 2559765 - RNA, 10 nt, Human
cugcagaggg

SEQ ID NO: 2559766 - RNA, 18 nt, Human
cugcagaccuguccuccu

SEQ ID NO: 2559767 - RNA, 16 nt, Human
cugcagaccuguccuc

SEQ ID NO: 2559768 - RNA, 15 nt, Human
cugcagaccuguccu

SEQ ID NO: 2559769 - RNA, 14 nt, Human
cugcagaccugucc

SEQ ID NO: 2559770 - RNA, 11 nt, Human
cugcagaccug

SEQ ID NO: 2559771 - RNA, 22 nt, Human
cugcagaccuguccuccuggug

SEQ ID NO: 2559772 - RNA, 20 nt, Human
cugcagaccuguccuccugg

SEQ ID NO: 2559773 - RNA, 15 nt, Human
cugcagacucacugu

SEQ ID NO: 2559774 - RNA, 18 nt, Human
cugcaggucccuaauaaa

SEQ ID NO: 2559775 - RNA, 17 nt, Human
cugcaggucccuaauaa

SEQ ID NO: 2559776 - RNA, 16 nt, Human
cugcaggucccuaaua

SEQ ID NO: 2559777 - RNA, 15 nt, Human
cugcaggucccuaau

SEQ ID NO: 2559778 - RNA, 14 nt, Human
cugcaggucccuaa

SEQ ID NO: 2559779 - RNA, 13 nt, Human
cugcaggucccua

SEQ ID NO: 2559780 - RNA, 12 nt, Human
cugcaggucccu

SEQ ID NO: 2559781 - RNA, 11 nt, Human
cugcagguccc

SEQ ID NO: 2559782 - RNA, 17 nt, Human
cugcagcaauaaagcag

SEQ ID NO: 2559783 - RNA, 23 nt, Human
cugcagauuugggcuggaacaga

SEQ ID NO: 2559784 - RNA, 20 nt, Human
cugcagauuugggcuggaac

SEQ ID NO: 2559785 - RNA, 19 nt, Human
cugcagauuugggcuggaa

SEQ ID NO: 2559786 - RNA, 23 nt, Human
cugcagaggggaaaccaguguag

SEQ ID NO: 2559787 - RNA, 18 nt, Human
cugcagauuugggcugga

SEQ ID NO: 2559788 - RNA, 14 nt, Human
cugcagcagaggca

SEQ ID NO: 2559789 - RNA, 13 nt, Human
cugcagcagaggc

SEQ ID NO: 2559790 - RNA, 20 nt, Human
cugcagcagcgguggccucu

SEQ ID NO: 2559791 - RNA, 19 nt, Human
cugcagcagcgguggccuc

SEQ ID NO: 2559792 - RNA, 18 nt, Human
cugcagcagaggcacugg

SEQ ID NO: 2559793 - RNA, 11 nt, Human
cugcagcauga

SEQ ID NO: 2559794 - RNA, 17 nt, Human
cugcagcaugaccugug

SEQ ID NO: 2559795 - RNA, 22 nt, Human
cugcagcaugaccugugaccag

SEQ ID NO: 2559796 - RNA, 22 nt, Human
cugcaggggcucuggagagaaa

SEQ ID NO: 2559797 - RNA, 19 nt, Human
cugcaggggcucuggagag

SEQ ID NO: 2559798 - RNA, 18 nt, Human
cugcaggggcucuggaga

SEQ ID NO: 2559799 - RNA, 17 nt, Human
cugcagggggugugucu

SEQ ID NO: 2559800 - RNA, 20 nt, Human
cugcagggggugugucugcu

SEQ ID NO: 2559801 - RNA, 21 nt, Human
cugcaggguggugcugggacu

SEQ ID NO: 2559802 - RNA, 20 nt, Human
cugcaggguggugcugggac

SEQ ID NO: 2559803 - RNA, 19 nt, Human
cugcaggguggugcuggga

SEQ ID NO: 2559804 - RNA, 18 nt, Human
cugcaggguggugcuggg

SEQ ID NO: 2559805 - RNA, 16 nt, Human
cugcaggguggugcug

SEQ ID NO: 2559806 - RNA, 21 nt, Human
cugcaggggcucuggagagaa

SEQ ID NO: 2559807 - RNA, 23 nt, Human
cugcagggggugugucugcucag

SEQ ID NO: 2559808 - RNA, 21 nt, Human
cugcagcauguugcugaggag

SEQ ID NO: 2559809 - RNA, 20 nt, Human
cugcagcauguugcugagga

SEQ ID NO: 2559810 - RNA, 18 nt, Human
cugcagcauguugcugag

SEQ ID NO: 2559811 - RNA, 19 nt, Human
cugcagcaugaccugugac

SEQ ID NO: 2559812 - RNA, 22 nt, Human
cugcagcauguugcugaggagu

SEQ ID NO: 2559813 - RNA, 12 nt, Human
cugcagccagcc

SEQ ID NO: 2559814 - RNA, 14 nt, Human
cugcagccagccca

SEQ ID NO: 2559815 - RNA, 15 nt, Human
cugcagccagcccag

SEQ ID NO: 2559816 - RNA, 16 nt, Human
cugcagccagcccagc

SEQ ID NO: 2559817 - RNA, 17 nt, Human
cugcagccagcccagcc

SEQ ID NO: 2559818 - RNA, 18 nt, Human
cugcagccagcccagccc

SEQ ID NO: 2559819 - RNA, 22 nt, Human
cugcagccagcccagcccagcu

SEQ ID NO: 2559820 - RNA, 17 nt, Human
cugcaggggcucuggag

SEQ ID NO: 2559821 - RNA, 16 nt, Human
cugcaggggcucugga

SEQ ID NO: 2559822 - RNA, 15 nt, Human
cugcaggggcucugg

SEQ ID NO: 2559823 - RNA, 23 nt, Human
cugcaguagucucugugcuuuga

SEQ ID NO: 2559824 - RNA, 20 nt, Human
cugcaguagucucugugcuu

SEQ ID NO: 2559825 - RNA, 16 nt, Human
cugcaguagucucugu

SEQ ID NO: 2559826 - RNA, 15 nt, Human
cugcaguagucucug

SEQ ID NO: 2559827 - RNA, 17 nt, Human
cugcaguaugaaaauaa

SEQ ID NO: 2559828 - RNA, 16 nt, Human
cugcaguaugaaaaua

SEQ ID NO: 2559829 - RNA, 20 nt, Human
cugcagguugggccauacug

SEQ ID NO: 2559830 - RNA, 15 nt, Human
cugcagguugggcca

SEQ ID NO: 2559831 - RNA, 14 nt, Human
cugcaguaaaucuu

SEQ ID NO: 2559832 - RNA, 17 nt, Human
cugcaguaaaucuuuua

SEQ ID NO: 2559833 - RNA, 21 nt, Human
cugcagguucuucuuccugaa

SEQ ID NO: 2559834 - RNA, 20 nt, Human
cugcagguucuucuuccuga

SEQ ID NO: 2559835 - RNA, 19 nt, Human
cugcaggugcugcugcgug

SEQ ID NO: 2559836 - RNA, 17 nt, Human
cugcaggugcugcugcg

SEQ ID NO: 2559837 - RNA, 14 nt, Human
cugcaggugcugcu

SEQ ID NO: 2559838 - RNA, 23 nt, Human
cugcaggguggugcugggacuga

SEQ ID NO: 2559839 - RNA, 22 nt, Human
cugcaggguggugcugggacug

SEQ ID NO: 2559840 - RNA, 23 nt, Human
cugcaggucccuaauaaagcugu

SEQ ID NO: 2559841 - RNA, 22 nt, Human
cugcaggucccuaauaaagcug

SEQ ID NO: 2559842 - RNA, 21 nt, Human
cugcaggucccuaauaaagcu

SEQ ID NO: 2559843 - RNA, 20 nt, Human
cugcaggucccuaauaaagc

SEQ ID NO: 2559844 - RNA, 19 nt, Human
cugcaggucccuaauaaag

SEQ ID NO: 2559845 - RNA, 16 nt, Human
cugcaguugccaguca

SEQ ID NO: 2559846 - RNA, 13 nt, Human
cugcaguugccag

SEQ ID NO: 2559847 - RNA, 19 nt, Human
cugcaguuugagacaggag

SEQ ID NO: 2559848 - RNA, 21 nt, Human
cugcaguuugagacaggagac

SEQ ID NO: 2559849 - RNA, 13 nt, Human
cugcaguccugga

SEQ ID NO: 2559850 - RNA, 22 nt, Human
cugcagucaucuugaccaagca

SEQ ID NO: 2559851 - RNA, 14 nt, Human
cugcagucacagcu

SEQ ID NO: 2559852 - RNA, 13 nt, Human
cugcagucacagc

SEQ ID NO: 2559853 - RNA, 22 nt, Human
cugcagucacuucgugggaucu

SEQ ID NO: 2559854 - RNA, 19 nt, Human
cugcagucacuucguggga

SEQ ID NO: 2559855 - RNA, 21 nt, Human
cugcagucagucaugauggca

SEQ ID NO: 2559856 - RNA, 22 nt, Human
cugcagugaaagacaagcugca

SEQ ID NO: 2559857 - RNA, 9 nt, Human
cugcaguga

SEQ ID NO: 2559858 - RNA, 21 nt, Human
cugcagucuggcugagcccug

SEQ ID NO: 2559859 - RNA, 20 nt, Human
cugcagucuggcugagcccu

SEQ ID NO: 2559860 - RNA, 17 nt, Human
cugcagucuggcugagc

SEQ ID NO: 2559861 - RNA, 14 nt, Human
cugcuuguuuccua

SEQ ID NO: 2559862 - RNA, 19 nt, Human
cugcuugugucccuccugg

SEQ ID NO: 2559863 - RNA, 22 nt, Human
cugcuuggguggagaagccauu

SEQ ID NO: 2559864 - RNA, 13 nt, Human
cugcuuguuuccu

SEQ ID NO: 2559865 - RNA, 16 nt, Human
cugcuuucuguuguca

SEQ ID NO: 2559866 - RNA, 20 nt, Human
cugcuuugacugagcagacu

SEQ ID NO: 2559867 - RNA, 21 nt, Human
cugcuuugacugagcagacug

SEQ ID NO: 2559868 - RNA, 22 nt, Human
cugcuuuucugcccuggcugcu

SEQ ID NO: 2559869 - RNA, 21 nt, Human
cugcuuuucugcccuggcugc

SEQ ID NO: 2559870 - RNA, 20 nt, Human
cugcuuuucugcccuggcug

SEQ ID NO: 2559871 - RNA, 19 nt, Human
cugcuuuucugcccuggcu

SEQ ID NO: 2559872 - RNA, 15 nt, Human
cugcuuuuggucugu

SEQ ID NO: 2559873 - RNA, 13 nt, Human
cugcuuuggaaau

SEQ ID NO: 2559874 - RNA, 21 nt, Human
cugcuuugcucuucaagaaau

SEQ ID NO: 2559875 - RNA, 23 nt, Human
cugcuuugacugagcagacuggu

SEQ ID NO: 2559876 - RNA, 16 nt, Human
cugcuuugggcugccc

SEQ ID NO: 2559877 - RNA, 20 nt, Human
cugcuuugggaagccgugcu

SEQ ID NO: 2559878 - RNA, 22 nt, Human
cugcuuugacugagcagacugg

SEQ ID NO: 2559879 - RNA, 17 nt, Human
cugcuuuuggucugugu

SEQ ID NO: 2559880 - RNA, 24 nt, Human
cugcuuuucugcccuggcugcugc

SEQ ID NO: 2559881 - RNA, 22 nt, Human
cuggaagccaaaauguaggcuu

SEQ ID NO: 2559882 - RNA, 15 nt, Human
cuggaagccagcuuu

SEQ ID NO: 2559883 - RNA, 16 nt, Human
cuggaagccagcuuuc

SEQ ID NO: 2559884 - RNA, 17 nt, Human
cuggaagccagcuuucc

SEQ ID NO: 2559885 - RNA, 18 nt, Human
cuggaagccggcggccca

SEQ ID NO: 2559886 - RNA, 17 nt, Human
cuggaagcuaauuugca

SEQ ID NO: 2559887 - RNA, 18 nt, Human
cuggaagcuaauuugcau

SEQ ID NO: 2559888 - RNA, 19 nt, Human
cuggaagcuaauuugcauu

SEQ ID NO: 2559889 - RNA, 22 nt, Human
cuggaagccggcggcccaagcc

SEQ ID NO: 2559890 - RNA, 22 nt, Human
cuggaagcuaauuugcauuaaa

SEQ ID NO: 2559891 - RNA, 12 nt, Human
cuggaagcugug

SEQ ID NO: 2559892 - RNA, 17 nt, Human
cuggaaggagugagagg

SEQ ID NO: 2559893 - RNA, 16 nt, Human
cuggaagcuguguccu

SEQ ID NO: 2559894 - RNA, 22 nt, Human
cuggaagcuguguccuugcacc

SEQ ID NO: 2559895 - RNA, 15 nt, Human
cuggaagugacuuug

SEQ ID NO: 2559896 - RNA, 18 nt, Human
cuggaagugacuuuggcu

SEQ ID NO: 2559897 - RNA, 16 nt, Human
cuggaaguccaaugug

SEQ ID NO: 2559898 - RNA, 19 nt, Human
cuggaaguccaauguggca

SEQ ID NO: 2559899 - RNA, 22 nt, Human
cuggaagggcuagaaccuguag

SEQ ID NO: 2559900 - RNA, 15 nt, Human
cuggaagggcuagaa

SEQ ID NO: 2559901 - RNA, 16 nt, Human
cuggaagggcagagua

SEQ ID NO: 2559902 - RNA, 19 nt, Human
cuggaaggggaagggacac

SEQ ID NO: 2559903 - RNA, 17 nt, Human
cuggaaggggcccgugg

SEQ ID NO: 2559904 - RNA, 19 nt, Human
cuggaaggggcccguggga

SEQ ID NO: 2559905 - RNA, 18 nt, Human
cugcuugggcuucauccu

SEQ ID NO: 2559906 - RNA, 17 nt, Human
cugcuugggcuucaucc

SEQ ID NO: 2559907 - RNA, 15 nt, Human
cugcuugggcuucau

SEQ ID NO: 2559908 - RNA, 13 nt, Human
cugcuugggcuuc

SEQ ID NO: 2559909 - RNA, 19 nt, Human
cugcuugggcuucauccuc

SEQ ID NO: 2559910 - RNA, 19 nt, Human
cugcuugugaaaggaaaga

SEQ ID NO: 2559911 - RNA, 18 nt, Human
cugcuuggguggagaagc

SEQ ID NO: 2559912 - RNA, 14 nt, Human
cugcuuggguggag

SEQ ID NO: 2559913 - RNA, 21 nt, Human
cugcuuggguggagaagccau

SEQ ID NO: 2559914 - RNA, 20 nt, Human
cugcuuggguggagaagcca

SEQ ID NO: 2559915 - RNA, 20 nt, Human
cugcuugauuuuugccucuu

SEQ ID NO: 2559916 - RNA, 13 nt, Human
cugcuugauuuuu

SEQ ID NO: 2559917 - RNA, 22 nt, Human
cugcuugaggcaacucaucuua

SEQ ID NO: 2559918 - RNA, 20 nt, Human
cugcuugcuugcuuuuuaau

SEQ ID NO: 2559919 - RNA, 13 nt, Human
cugcugcuggcug

SEQ ID NO: 2559920 - RNA, 12 nt, Human
cugcugcuggcu

SEQ ID NO: 2559921 - RNA, 16 nt, Human
cugcugcugcugcgcc

SEQ ID NO: 2559922 - RNA, 20 nt, Human
cugcugcugcgcccuuaccu

SEQ ID NO: 2559923 - RNA, 16 nt, Human
cugcugcugcgcccuu

SEQ ID NO: 2559924 - RNA, 15 nt, Human
cugcugcugcgcccu

SEQ ID NO: 2559925 - RNA, 14 nt, Human
cugcugcugcugug

SEQ ID NO: 2559926 - RNA, 15 nt, Human
cugcugcuggaucac

SEQ ID NO: 2559927 - RNA, 15 nt, Human
cugcugcugcugcug

SEQ ID NO: 2559928 - RNA, 19 nt, Human
cugcugggacuggccaggu

SEQ ID NO: 2559929 - RNA, 12 nt, Human
cugcuggcugcc

SEQ ID NO: 2559930 - RNA, 14 nt, Human
cugcuggcuugcag

SEQ ID NO: 2559931 - RNA, 16 nt, Human
cugcuggcuugcagug

SEQ ID NO: 2559932 - RNA, 17 nt, Human
cugcugggacuggccag

SEQ ID NO: 2559933 - RNA, 15 nt, Human
cugcuggcugccuua

SEQ ID NO: 2559934 - RNA, 14 nt, Human
cugcuggcugccuu

SEQ ID NO: 2559935 - RNA, 14 nt, Human
cugcugcuggcugg

SEQ ID NO: 2559936 - RNA, 13 nt, Human
cugcuggcugccu

SEQ ID NO: 2559937 - RNA, 15 nt, Human
cugcuggguguggcg

SEQ ID NO: 2559938 - RNA, 14 nt, Human
cugcuggguguggc

SEQ ID NO: 2559939 - RNA, 12 nt, Human
cugcuggguggc

SEQ ID NO: 2559940 - RNA, 11 nt, Human
cugcugggugg

SEQ ID NO: 2559941 - RNA, 14 nt, Human
cugcugggcucucc

SEQ ID NO: 2559942 - RNA, 17 nt, Human
cugcugguccgugggac

SEQ ID NO: 2559943 - RNA, 16 nt, Human
cugcugguccguggga

SEQ ID NO: 2559944 - RNA, 16 nt, Human
cugcuggucacagccu

SEQ ID NO: 2559945 - RNA, 15 nt, Human
cugcuggucacagcc

SEQ ID NO: 2559946 - RNA, 22 nt, Human
cugcugguaauuuguaucugaa

SEQ ID NO: 2559947 - RNA, 20 nt, Human
cugcugguaauuuguaucug

SEQ ID NO: 2559948 - RNA, 18 nt, Human
cugcuggucacagccucc

SEQ ID NO: 2559949 - RNA, 17 nt, Human
cugcuggucacagccuc

SEQ ID NO: 2559950 - RNA, 20 nt, Human
cugcuggucacagccuccuc

SEQ ID NO: 2559951 - RNA, 17 nt, Human
cugcuggguguggcgca

SEQ ID NO: 2559952 - RNA, 17 nt, Human
cugcuggguggcccauc

SEQ ID NO: 2559953 - RNA, 16 nt, Human
cugcuggguggcccau

SEQ ID NO: 2559954 - RNA, 15 nt, Human
cugcuggguggccca

SEQ ID NO: 2559955 - RNA, 14 nt, Human
cugcuggguggccc

SEQ ID NO: 2559956 - RNA, 19 nt, Human
cugcuggguggcccauccc

SEQ ID NO: 2559957 - RNA, 18 nt, Human
cugcuggguggcccaucc

SEQ ID NO: 2559958 - RNA, 21 nt, Human
cugcuggguggcccauccccc

SEQ ID NO: 2559959 - RNA, 19 nt, Human
cugcuggguuuuccuccgg

SEQ ID NO: 2559960 - RNA, 12 nt, Human
cugcuugaggaa

SEQ ID NO: 2559961 - RNA, 13 nt, Human
cugcuugaggaaa

SEQ ID NO: 2559962 - RNA, 14 nt, Human
cugcuugaggaaaa

SEQ ID NO: 2559963 - RNA, 16 nt, Human
cugcuugaggaaaaca

SEQ ID NO: 2559964 - RNA, 13 nt, Human
cugcuugaggcaa

SEQ ID NO: 2559965 - RNA, 20 nt, Human
cugcuugaggcaacucaucu

SEQ ID NO: 2559966 - RNA, 21 nt, Human
cugcuugaggcaacucaucuu

SEQ ID NO: 2559967 - RNA, 20 nt, Human
cugcuucucugacuucugcc

SEQ ID NO: 2559968 - RNA, 19 nt, Human
cugcuucucugacuucugc

SEQ ID NO: 2559969 - RNA, 17 nt, Human
cugcuucucugacuucu

SEQ ID NO: 2559970 - RNA, 16 nt, Human
cugcuucucugacuuc

SEQ ID NO: 2559971 - RNA, 15 nt, Human
cugcuucucugacuu

SEQ ID NO: 2559972 - RNA, 14 nt, Human
cugcuucucugacu

SEQ ID NO: 2559973 - RNA, 13 nt, Human
cugcuucucugac

SEQ ID NO: 2559974 - RNA, 22 nt, Human
cugcuucucugacuucugccug

SEQ ID NO: 2559975 - RNA, 21 nt, Human
cugcuucucugacuucugccu

SEQ ID NO: 2559976 - RNA, 23 nt, Human
cugcuucucugacuucugccugg

SEQ ID NO: 2559977 - RNA, 17 nt, Human
cugcuugacaacaucug

SEQ ID NO: 2559978 - RNA, 16 nt, Human
cugcuucuuaacccca

SEQ ID NO: 2559979 - RNA, 21 nt, Human
cugcuucucccacuuggccaa

SEQ ID NO: 2559980 - RNA, 20 nt, Human
cugcuucucccacuuggcca

SEQ ID NO: 2559981 - RNA, 18 nt, Human
cugcuucucccacuuggc

SEQ ID NO: 2559982 - RNA, 19 nt, Human
cugcuucuccauggccacc

SEQ ID NO: 2559983 - RNA, 16 nt, Human
cugcuucuccagccug

SEQ ID NO: 2559984 - RNA, 15 nt, Human
cugcuucuccagccu

SEQ ID NO: 2559985 - RNA, 14 nt, Human
cugcuucuccagcc

SEQ ID NO: 2559986 - RNA, 23 nt, Human
cugcuguccccucuugccccaac

SEQ ID NO: 2559987 - RNA, 22 nt, Human
cugcuguccccucuugccccaa

SEQ ID NO: 2559988 - RNA, 21 nt, Human
cugcuguccccucuugcccca

SEQ ID NO: 2559989 - RNA, 20 nt, Human
cugcuguccccucuugcccc

SEQ ID NO: 2559990 - RNA, 20 nt, Human
cugcugucccucccccuugu

SEQ ID NO: 2559991 - RNA, 18 nt, Human
cugcuuccuccuggaaau

SEQ ID NO: 2559992 - RNA, 17 nt, Human
cugcugucccucccccu

SEQ ID NO: 2559993 - RNA, 19 nt, Human
cugcuuccugucuuuggga

SEQ ID NO: 2559994 - RNA, 19 nt, Human
cugcuguccccucuugccc

SEQ ID NO: 2559995 - RNA, 18 nt, Human
cugcuguccccucuugcc

SEQ ID NO: 2559996 - RNA, 14 nt, Human
cugcuguccccucu

SEQ ID NO: 2559997 - RNA, 13 nt, Human
cugcuguccccuc

SEQ ID NO: 2559998 - RNA, 21 nt, Human
cugcuguccagacagccugua

SEQ ID NO: 2559999 - RNA, 20 nt, Human
cugcuguccagacagccugu

SEQ ID NO: 2560000 - RNA, 19 nt, Human
cugcuguccagacagccug

SEQ ID NO: 2560001 - RNA, 18 nt, Human
cugcuguccagacagccu

SEQ ID NO: 2560002 - RNA, 17 nt, Human
cugcuguccagacagcc

SEQ ID NO: 2560003 - RNA, 16 nt, Human
cugcuguccagacagc

SEQ ID NO: 2560004 - RNA, 15 nt, Human
cugcuguccagacag

SEQ ID NO: 2560005 - RNA, 14 nt, Human
cugcuguccagaca

SEQ ID NO: 2560006 - RNA, 11 nt, Human
cugcuguccag

SEQ ID NO: 2560007 - RNA, 22 nt, Human
cugcuggugcagagcugaagau

SEQ ID NO: 2560008 - RNA, 18 nt, Human
cugcuggugcagagcuga

SEQ ID NO: 2560009 - RNA, 23 nt, Human
cugcucuauuguagcauuucuug

SEQ ID NO: 2560010 - RNA, 15 nt, Human
cugcucuccgaccag

SEQ ID NO: 2560011 - RNA, 15 nt, Human
cugcucuauuguagc

SEQ ID NO: 2560012 - RNA, 20 nt, Human
cugcuccucuccccagcaag

SEQ ID NO: 2560013 - RNA, 19 nt, Human
cugcuccucuccccagcaa

SEQ ID NO: 2560014 - RNA, 23 nt, Human
cugcucccccacccccuccccag

SEQ ID NO: 2560015 - RNA, 21 nt, Human
cugcucccccacccccucccc

SEQ ID NO: 2560016 - RNA, 22 nt, Human
cugcucccccacccccucccca

SEQ ID NO: 2560017 - RNA, 23 nt, Human
cugcuccucuccccagcaaguga

SEQ ID NO: 2560018 - RNA, 23 nt, Human
cugcggugcuaucucccccagcc

SEQ ID NO: 2560019 - RNA, 22 nt, Human
cugcggugcuaucucccccagc

SEQ ID NO: 2560020 - RNA, 21 nt, Human
cugcggugcuaucucccccag

SEQ ID NO: 2560021 - RNA, 20 nt, Human
cugcggugcuaucuccccca

SEQ ID NO: 2560022 - RNA, 21 nt, Human
cugcucccagcagcccuaagg

SEQ ID NO: 2560023 - RNA, 17 nt, Human
cugcucccagcagcccu

SEQ ID NO: 2560024 - RNA, 16 nt, Human
cugcucccagcagccc

SEQ ID NO: 2560025 - RNA, 15 nt, Human
cugcucccagcagcc

SEQ ID NO: 2560026 - RNA, 14 nt, Human
cugcucccagcagc

SEQ ID NO: 2560027 - RNA, 22 nt, Human
cugcgguuuguuggaucuucaa

SEQ ID NO: 2560028 - RNA, 22 nt, Human
cugcgggugaacaaagcagcca

SEQ ID NO: 2560029 - RNA, 18 nt, Human
cugcuccccagcccuggc

SEQ ID NO: 2560030 - RNA, 17 nt, Human
cugcuccccagcccugg

SEQ ID NO: 2560031 - RNA, 16 nt, Human
cugcuccccagcccug

SEQ ID NO: 2560032 - RNA, 22 nt, Human
cugcucccagcagcccuaagga

SEQ ID NO: 2560033 - RNA, 20 nt, Human
cugcuccccagcagcggaac

SEQ ID NO: 2560034 - RNA, 20 nt, Human
cugcuccccagcccuggcuc

SEQ ID NO: 2560035 - RNA, 19 nt, Human
cugcuccccagcccuggcu

SEQ ID NO: 2560036 - RNA, 16 nt, Human
cugcuccccaggggag

SEQ ID NO: 2560037 - RNA, 12 nt, Human
cugcucccccac

SEQ ID NO: 2560038 - RNA, 13 nt, Human
cugcucccccacc

SEQ ID NO: 2560039 - RNA, 14 nt, Human
cugcucccccaccc

SEQ ID NO: 2560040 - RNA, 17 nt, Human
cugcucccccacccccu

SEQ ID NO: 2560041 - RNA, 21 nt, Human
cugcucugcgugucaccugug

SEQ ID NO: 2560042 - RNA, 22 nt, Human
cugcucugcgugucaccugugc

SEQ ID NO: 2560043 - RNA, 20 nt, Human
cugcucugcgugucaccugu

SEQ ID NO: 2560044 - RNA, 22 nt, Human
cugcucugcccuuguucccuag

SEQ ID NO: 2560045 - RNA, 18 nt, Human
cugcucuggaauuugcaa

SEQ ID NO: 2560046 - RNA, 13 nt, Human
cugcucuggaaaa

SEQ ID NO: 2560047 - RNA, 20 nt, Human
cugcucuccaagucucagug

SEQ ID NO: 2560048 - RNA, 20 nt, Human
cugcucugaugaagaggagu

SEQ ID NO: 2560049 - RNA, 11 nt, Human
cugcucugccc

SEQ ID NO: 2560050 - RNA, 16 nt, Human
cugcucuugaacuccu

SEQ ID NO: 2560051 - RNA, 18 nt, Human
cugcucuugaacuccuga

SEQ ID NO: 2560052 - RNA, 19 nt, Human
cugcucuugaacuccugac

SEQ ID NO: 2560053 - RNA, 19 nt, Human
cugcucuggaauuugcaag

SEQ ID NO: 2560054 - RNA, 15 nt, Human
cugcucugugcccac

SEQ ID NO: 2560055 - RNA, 12 nt, Human
cugcucugguua

SEQ ID NO: 2560056 - RNA, 13 nt, Human
cugcugcaguugc

SEQ ID NO: 2560057 - RNA, 10 nt, Human
cugcugcagu

SEQ ID NO: 2560058 - RNA, 14 nt, Human
cugcugcaguugcc

SEQ ID NO: 2560059 - RNA, 15 nt, Human
cugcugcaguugcca

SEQ ID NO: 2560060 - RNA, 23 nt, Human
cugcugccugcuuuuuauggccu

SEQ ID NO: 2560061 - RNA, 14 nt, Human
cugcugccugcuuu

SEQ ID NO: 2560062 - RNA, 21 nt, Human
cugcugcaggggcucuggaga

SEQ ID NO: 2560063 - RNA, 20 nt, Human
cugcugccgccucccagccu

SEQ ID NO: 2560064 - RNA, 14 nt, Human
cugcugccucccca

SEQ ID NO: 2560065 - RNA, 21 nt, Human
cugcugccgccucccagccug

SEQ ID NO: 2560066 - RNA, 15 nt, Human
cugcugccuccccaa

SEQ ID NO: 2560067 - RNA, 19 nt, Human
cugcugccuccccaacccu

SEQ ID NO: 2560068 - RNA, 21 nt, Human
cugccugcaguacuuuaccuc

SEQ ID NO: 2560069 - RNA, 20 nt, Human
cugccugcaguacuuuaccu

SEQ ID NO: 2560070 - RNA, 22 nt, Human
cugccugcagaggucugugcug

SEQ ID NO: 2560071 - RNA, 21 nt, Human
cugccugcagaggucugugcu

SEQ ID NO: 2560072 - RNA, 19 nt, Human
cugccugcagaggucugug

SEQ ID NO: 2560073 - RNA, 16 nt, Human
cugccugcagaggucu

SEQ ID NO: 2560074 - RNA, 15 nt, Human
cugcccugccugagg

SEQ ID NO: 2560075 - RNA, 13 nt, Human
cugcccugccuga

SEQ ID NO: 2560076 - RNA, 15 nt, Human
cugccugcaccccug

SEQ ID NO: 2560077 - RNA, 12 nt, Human
cugcccugccug

SEQ ID NO: 2560078 - RNA, 19 nt, Human
cugccugaagucacacagu

SEQ ID NO: 2560079 - RNA, 23 nt, Human
cugccugccgguaaacacgccug

SEQ ID NO: 2560080 - RNA, 12 nt, Human
cugccugccugu

SEQ ID NO: 2560081 - RNA, 15 nt, Human
cugccugccugucug

SEQ ID NO: 2560082 - RNA, 14 nt, Human
cugccugccugucu

SEQ ID NO: 2560083 - RNA, 16 nt, Human
cugccugccugucugu

SEQ ID NO: 2560084 - RNA, 18 nt, Human
cugccugcgcccaccccg

SEQ ID NO: 2560085 - RNA, 16 nt, Human
cugccugccuuggccu

SEQ ID NO: 2560086 - RNA, 23 nt, Human
cugccugcagaggucugugcuga

SEQ ID NO: 2560087 - RNA, 15 nt, Human
cugccugccagcugc

SEQ ID NO: 2560088 - RNA, 16 nt, Human
cugccugccagcugca

SEQ ID NO: 2560089 - RNA, 20 nt, Human
cugccugccagcugcacuga

SEQ ID NO: 2560090 - RNA, 21 nt, Human
cugccugccagcugcacugau

SEQ ID NO: 2560091 - RNA, 12 nt, Human
cugccugcccac

SEQ ID NO: 2560092 - RNA, 17 nt, Human
cugcccugcccaccugg

SEQ ID NO: 2560093 - RNA, 20 nt, Human
cugcccugcccaccuggccu

SEQ ID NO: 2560094 - RNA, 16 nt, Human
cugccugaagucacac

SEQ ID NO: 2560095 - RNA, 18 nt, Human
cugccugaagucacacag

SEQ ID NO: 2560096 - RNA, 21 nt, Human
cugcccugcccaccuggccuc

SEQ ID NO: 2560097 - RNA, 18 nt, Human
cugcccugcccuagcucc

SEQ ID NO: 2560098 - RNA, 15 nt, Human
cugcgggucacagga

SEQ ID NO: 2560099 - RNA, 21 nt, Human
cugcgggucacaggagggagg

SEQ ID NO: 2560100 - RNA, 22 nt, Human
cugcgggcuggguguggucucc

SEQ ID NO: 2560101 - RNA, 15 nt, Human
cugcggggcuuggcu

SEQ ID NO: 2560102 - RNA, 19 nt, Human
cugcgccgccgccggaguc

SEQ ID NO: 2560103 - RNA, 16 nt, Human
cugcgcccuuccccag

SEQ ID NO: 2560104 - RNA, 14 nt, Human
cugcgcccugggcu

SEQ ID NO: 2560105 - RNA, 13 nt, Human
cugcgcccugggc

SEQ ID NO: 2560106 - RNA, 18 nt, Human
cugcgcccuuaccuuccc

SEQ ID NO: 2560107 - RNA, 17 nt, Human
cugcgcccuuaccuucc

SEQ ID NO: 2560108 - RNA, 13 nt, Human
cugcgcccuuccc

SEQ ID NO: 2560109 - RNA, 14 nt, Human
cugcgcccuucccc

SEQ ID NO: 2560110 - RNA, 19 nt, Human
cugcggugcuaucuccccc

SEQ ID NO: 2560111 - RNA, 18 nt, Human
cugcggugcuaucucccc

SEQ ID NO: 2560112 - RNA, 22 nt, Human
cugcgggucacaggagggaggg

SEQ ID NO: 2560113 - RNA, 23 nt, Human
cugcgggucacaggagggagggg

SEQ ID NO: 2560114 - RNA, 23 nt, Human
cugcgguccacccaggagccccg

SEQ ID NO: 2560115 - RNA, 22 nt, Human
cugccugcuuuucacugcugca

SEQ ID NO: 2560116 - RNA, 20 nt, Human
cugccugcuuuucacugcug

SEQ ID NO: 2560117 - RNA, 22 nt, Human
cugccugcuuuuuauggccugu

SEQ ID NO: 2560118 - RNA, 13 nt, Human
cugccuuccuccu

SEQ ID NO: 2560119 - RNA, 14 nt, Human
cugccuuccuccug

SEQ ID NO: 2560120 - RNA, 15 nt, Human
cugccuuccuccugg

SEQ ID NO: 2560121 - RNA, 16 nt, Human
cugccuuccuccuggg

SEQ ID NO: 2560122 - RNA, 17 nt, Human
cugccuucccuagcuuu

SEQ ID NO: 2560123 - RNA, 16 nt, Human
cugccuucccuagcuu

SEQ ID NO: 2560124 - RNA, 15 nt, Human
cugccuucccuagcu

SEQ ID NO: 2560125 - RNA, 12 nt, Human
cugccuucccua

SEQ ID NO: 2560126 - RNA, 11 nt, Human
cugccuucccu

SEQ ID NO: 2560127 - RNA, 23 nt, Human
cugccugcuuuucacugcugcaa

SEQ ID NO: 2560128 - RNA, 17 nt, Human
cugccuucgcuucuugc

SEQ ID NO: 2560129 - RNA, 15 nt, Human
cugccuucgcuucuu

SEQ ID NO: 2560130 - RNA, 14 nt, Human
cugccuucgcuucu

SEQ ID NO: 2560131 - RNA, 13 nt, Human
cugccuucgcuuc

SEQ ID NO: 2560132 - RNA, 15 nt, Human
cugccuuccuugcua

SEQ ID NO: 2560133 - RNA, 14 nt, Human
cugccuuccuugcu

SEQ ID NO: 2560134 - RNA, 13 nt, Human
cugccuuccuugc

SEQ ID NO: 2560135 - RNA, 12 nt, Human
cugccuuccuug

SEQ ID NO: 2560136 - RNA, 18 nt, Human
cugccuuccuccugggcc

SEQ ID NO: 2560137 - RNA, 21 nt, Human
cugccuuccuccugggcccuc

SEQ ID NO: 2560138 - RNA, 18 nt, Human
cugcgcccaccccgcucu

SEQ ID NO: 2560139 - RNA, 17 nt, Human
cugcgcccaccccgcuc

SEQ ID NO: 2560140 - RNA, 15 nt, Human
cugcgcccaccccgc

SEQ ID NO: 2560141 - RNA, 23 nt, Human
cugcgcccaguccuuccaccucg

SEQ ID NO: 2560142 - RNA, 19 nt, Human
cugcgcccaguccuuccac

SEQ ID NO: 2560143 - RNA, 22 nt, Human
cugcgcccaccccgcucugcau

SEQ ID NO: 2560144 - RNA, 20 nt, Human
cugcgcccaccccgcucugc

SEQ ID NO: 2560145 - RNA, 18 nt, Human
cugcgcccaguccuucca

SEQ ID NO: 2560146 - RNA, 12 nt, Human
cuugcaccugca

SEQ ID NO: 2560147 - RNA, 16 nt, Human
cuugcaccucugaccu

SEQ ID NO: 2560148 - RNA, 22 nt, Human
cuugcaagaaucagugcaaaga

SEQ ID NO: 2560149 - RNA, 18 nt, Human
cuugcaagaaucagugca

SEQ ID NO: 2560150 - RNA, 14 nt, Human
cuugcaauggcagc

SEQ ID NO: 2560151 - RNA, 19 nt, Human
cuugcacgcccauguguga

SEQ ID NO: 2560152 - RNA, 13 nt, Human
cuugcaccugcau

SEQ ID NO: 2560153 - RNA, 14 nt, Human
cuugcaccugcauc

SEQ ID NO: 2560154 - RNA, 21 nt, Human
cuugcacuaaaguauguaaag

SEQ ID NO: 2560155 - RNA, 22 nt, Human
cuugcaaaguaucccuacugua

SEQ ID NO: 2560156 - RNA, 14 nt, Human
cuugcaacacacag

SEQ ID NO: 2560157 - RNA, 15 nt, Human
cuugcaacacacaga

SEQ ID NO: 2560158 - RNA, 17 nt, Human
cuugcaacacacagaca

SEQ ID NO: 2560159 - RNA, 19 nt, Human
cuugcaacacacagacaca

SEQ ID NO: 2560160 - RNA, 20 nt, Human
cuugcaacuucaugucaacu

SEQ ID NO: 2560161 - RNA, 14 nt, Human
cuugcaagaaucag

SEQ ID NO: 2560162 - RNA, 21 nt, Human
cuugagugggguuaucucugu

SEQ ID NO: 2560163 - RNA, 23 nt, Human
cuugagugggguuaucucugugu

SEQ ID NO: 2560164 - RNA, 22 nt, Human
cuugagugggguuaucucugug

SEQ ID NO: 2560165 - RNA, 21 nt, Human
cuugcauaauaagcuaaagag

SEQ ID NO: 2560166 - RNA, 22 nt, Human
cuugcauaauaagcuaaagagg

SEQ ID NO: 2560167 - RNA, 20 nt, Human
cuugcauaauaagcuaaaga

SEQ ID NO: 2560168 - RNA, 22 nt, Human
cuugcaguucagcaccacccua

SEQ ID NO: 2560169 - RNA, 21 nt, Human
cuugcaguagauuuucuuuaa

SEQ ID NO: 2560170 - RNA, 17 nt, Human
cuugcaguagauuuucu

SEQ ID NO: 2560171 - RNA, 22 nt, Human
cuugcaguagauuuucuuuaaa

SEQ ID NO: 2560172 - RNA, 18 nt, Human
cuugcaguucagcaccac

SEQ ID NO: 2560173 - RNA, 20 nt, Human
cuugcaggucucaacccuuu

SEQ ID NO: 2560174 - RNA, 14 nt, Human
cuugcaguagauuu

SEQ ID NO: 2560175 - RNA, 18 nt, Human
cuugcagacucuacagag

SEQ ID NO: 2560176 - RNA, 23 nt, Human
cuugcaucaauuuuucuuauuuc

SEQ ID NO: 2560177 - RNA, 21 nt, Human
cuugcaugaggcuaguguggu

SEQ ID NO: 2560178 - RNA, 21 nt, Human
cuugcaugguuuagaaagcuu

SEQ ID NO: 2560179 - RNA, 19 nt, Human
cuugagccuugaacuuuga

SEQ ID NO: 2560180 - RNA, 16 nt, Human
cuugagccaguaauug

SEQ ID NO: 2560181 - RNA, 13 nt, Human
cuugagccaguaa

SEQ ID NO: 2560182 - RNA, 21 nt, Human
cuugagcaguggcugguccag

SEQ ID NO: 2560183 - RNA, 16 nt, Human
cuugagcaguggcugg

SEQ ID NO: 2560184 - RNA, 14 nt, Human
cuugagcaguggcu

SEQ ID NO: 2560185 - RNA, 21 nt, Human
cuugagcaaguuccuucuggu

SEQ ID NO: 2560186 - RNA, 20 nt, Human
cuugagcaaguuccuucugg

SEQ ID NO: 2560187 - RNA, 13 nt, Human
cuugagcaguggc

SEQ ID NO: 2560188 - RNA, 20 nt, Human
cuugagaguagaugguuuga

SEQ ID NO: 2560189 - RNA, 22 nt, Human
cuugagaguaucaggucuccca

SEQ ID NO: 2560190 - RNA, 19 nt, Human
cuugagcaaguuccuucug

SEQ ID NO: 2560191 - RNA, 15 nt, Human
cuugagaugucuucu

SEQ ID NO: 2560192 - RNA, 20 nt, Human
cuugaccauucuccaccugc

SEQ ID NO: 2560193 - RNA, 17 nt, Human
cuugaccauucuccacc

SEQ ID NO: 2560194 - RNA, 21 nt, Human
cuugaccauucuccaccugcc

SEQ ID NO: 2560195 - RNA, 14 nt, Human
cuugagagggugga

SEQ ID NO: 2560196 - RNA, 20 nt, Human
cuugagccuugaacuuugac

SEQ ID NO: 2560197 - RNA, 22 nt, Human
cuugagccuugaacuuugaccu

SEQ ID NO: 2560198 - RNA, 13 nt, Human
cuugagcucagga

SEQ ID NO: 2560199 - RNA, 12 nt, Human
cuugagcccagg

SEQ ID NO: 2560200 - RNA, 22 nt, Human
cuugaggaggggcagguaaacu

SEQ ID NO: 2560201 - RNA, 14 nt, Human
cuugaggaguguga

SEQ ID NO: 2560202 - RNA, 16 nt, Human
cuugaggauuuugagu

SEQ ID NO: 2560203 - RNA, 22 nt, Human
cuugaggagugugagaaucaaa

SEQ ID NO: 2560204 - RNA, 14 nt, Human
cuugagggcccaga

SEQ ID NO: 2560205 - RNA, 24 nt, Human
cuugaggcuuagcuuugcucugcc

SEQ ID NO: 2560206 - RNA, 16 nt, Human
cuugagggagcuuagc

SEQ ID NO: 2560207 - RNA, 17 nt, Human
cuugaggauuuugagua

SEQ ID NO: 2560208 - RNA, 14 nt, Human
cuugaggccaggag

SEQ ID NO: 2560209 - RNA, 19 nt, Human
cuugagggcccagagcagg

SEQ ID NO: 2560210 - RNA, 18 nt, Human
cuugagggcccagagcag

SEQ ID NO: 2560211 - RNA, 17 nt, Human
cuugagggcccagagca

SEQ ID NO: 2560212 - RNA, 16 nt, Human
cuugagggcccagagc

SEQ ID NO: 2560213 - RNA, 14 nt, Human
cuugaggucuuuug

SEQ ID NO: 2560214 - RNA, 17 nt, Human
cuugaggucuuuugaca

SEQ ID NO: 2560215 - RNA, 22 nt, Human
cuugaccagcagaucccagcuc

SEQ ID NO: 2560216 - RNA, 18 nt, Human
cuugaggucuuuugacau

SEQ ID NO: 2560217 - RNA, 22 nt, Human
cuugaggucuuuugacaugugg

SEQ ID NO: 2560218 - RNA, 23 nt, Human
cuugaggucuuuugacaugugga

SEQ ID NO: 2560219 - RNA, 14 nt, Human
cuugaacccgggag

SEQ ID NO: 2560220 - RNA, 19 nt, Human
cuugaacccgggaggcaga

SEQ ID NO: 2560221 - RNA, 20 nt, Human
cuugaacccgggaggcagag

SEQ ID NO: 2560222 - RNA, 18 nt, Human
cuugaacuccuggccuca

SEQ ID NO: 2560223 - RNA, 17 nt, Human
cuugaacuccuggccuc

SEQ ID NO: 2560224 - RNA, 15 nt, Human
cuugaacuccuggcc

SEQ ID NO: 2560225 - RNA, 14 nt, Human
cuugaacuccuggc

SEQ ID NO: 2560226 - RNA, 20 nt, Human
cuugaacuggguacuugugg

SEQ ID NO: 2560227 - RNA, 18 nt, Human
cuugaacuggguacuugu

SEQ ID NO: 2560228 - RNA, 15 nt, Human
cuugaacuuugaccu

SEQ ID NO: 2560229 - RNA, 17 nt, Human
cuugaccaggccugggc

SEQ ID NO: 2560230 - RNA, 15 nt, Human
cuugaccaggccugg

SEQ ID NO: 2560231 - RNA, 23 nt, Human
cuugaccagcagaucccagcuca

SEQ ID NO: 2560232 - RNA, 17 nt, Human
cuugaacugagcuugga

SEQ ID NO: 2560233 - RNA, 19 nt, Human
cuugaacugagcuuggaag

SEQ ID NO: 2560234 - RNA, 16 nt, Human
cuugaacuggguacuu

SEQ ID NO: 2560235 - RNA, 19 nt, Human
cuugaaauuuuaaacuaua

SEQ ID NO: 2560236 - RNA, 13 nt, Human
cuugaaauuuuaa

SEQ ID NO: 2560237 - RNA, 20 nt, Human
cuugaaauuaagaaggcaaa

SEQ ID NO: 2560238 - RNA, 19 nt, Human
cuugaacuccuggccucaa

SEQ ID NO: 2560239 - RNA, 19 nt, Human
cuucuuuccacagaagcuc

SEQ ID NO: 2560240 - RNA, 14 nt, Human
cuucuuucauuuuc

SEQ ID NO: 2560241 - RNA, 16 nt, Human
cuucuuuccucuuccc

SEQ ID NO: 2560242 - RNA, 15 nt, Human
cuucuuuccucuucc

SEQ ID NO: 2560243 - RNA, 14 nt, Human
cuucuuuccucuuc

SEQ ID NO: 2560244 - RNA, 11 nt, Human
cuucuuuccuc

SEQ ID NO: 2560245 - RNA, 21 nt, Human
cuucuuucuuugggaauauuu

SEQ ID NO: 2560246 - RNA, 19 nt, Human
cuucuuugauaauguuaaa

SEQ ID NO: 2560247 - RNA, 17 nt, Human
cuucuuugauaauguua

SEQ ID NO: 2560248 - RNA, 18 nt, Human
cuucuuugcagccugggu

SEQ ID NO: 2560249 - RNA, 14 nt, Human
cuucuuugauaaug

SEQ ID NO: 2560250 - RNA, 13 nt, Human
cuucuuuccacag

SEQ ID NO: 2560251 - RNA, 22 nt, Human
cuucuuuauaauucuacuuuga

SEQ ID NO: 2560252 - RNA, 20 nt, Human
cuucuuuauacuguaauuua

SEQ ID NO: 2560253 - RNA, 14 nt, Human
cuucuuuauacugu

SEQ ID NO: 2560254 - RNA, 20 nt, Human
cugucugacaaccucuuggu

SEQ ID NO: 2560255 - RNA, 13 nt, Human
cugucucuggccu

SEQ ID NO: 2560256 - RNA, 16 nt, Human
cugucucugccucccu

SEQ ID NO: 2560257 - RNA, 18 nt, Human
cugucucugccucccuca

SEQ ID NO: 2560258 - RNA, 13 nt, Human
cugucucugccuc

SEQ ID NO: 2560259 - RNA, 16 nt, Human
cugucucuccaucugu

SEQ ID NO: 2560260 - RNA, 13 nt, Human
cugucucuccauc

SEQ ID NO: 2560261 - RNA, 22 nt, Human
cugucugaaggacacuuccugc

SEQ ID NO: 2560262 - RNA, 20 nt, Human
cugucugaaggacacuuccu

SEQ ID NO: 2560263 - RNA, 19 nt, Human
cugucugaaggacacuucc

SEQ ID NO: 2560264 - RNA, 16 nt, Human
cugucugaagccaaug

SEQ ID NO: 2560265 - RNA, 15 nt, Human
cugucucuuccauau

SEQ ID NO: 2560266 - RNA, 14 nt, Human
cugucucugucaug

SEQ ID NO: 2560267 - RNA, 12 nt, Human
cugucucuucca

SEQ ID NO: 2560268 - RNA, 14 nt, Human
cuucuuuuugcugu

SEQ ID NO: 2560269 - RNA, 15 nt, Human
cuucuuuuugcuguu

SEQ ID NO: 2560270 - RNA, 15 nt, Human
cuucuuuuggcuucc

SEQ ID NO: 2560271 - RNA, 23 nt, Human
cuucuuuuuauuuucuuuuguaa

SEQ ID NO: 2560272 - RNA, 19 nt, Human
cuugaaauauaggaacuua

SEQ ID NO: 2560273 - RNA, 21 nt, Human
cuugaaauuaagaaggcaaaa

SEQ ID NO: 2560274 - RNA, 16 nt, Human
cuucuuuuugcuguug

SEQ ID NO: 2560275 - RNA, 22 nt, Human
cuugaaaugaaaguauaacuga

SEQ ID NO: 2560276 - RNA, 13 nt, Human
cuucuuuugcucu

SEQ ID NO: 2560277 - RNA, 16 nt, Human
cuucuuuugauuaugu

SEQ ID NO: 2560278 - RNA, 13 nt, Human
cuucuuuugauua

SEQ ID NO: 2560279 - RNA, 14 nt, Human
cuucuuuugauuau

SEQ ID NO: 2560280 - RNA, 14 nt, Human
cuucuuuugcucuu

SEQ ID NO: 2560281 - RNA, 13 nt, Human
cuucuuuugugaa

SEQ ID NO: 2560282 - RNA, 15 nt, Human
cuucuuuuuauuuuc

SEQ ID NO: 2560283 - RNA, 20 nt, Human
cuucuuuuuauuuucuuuug

SEQ ID NO: 2560284 - RNA, 18 nt, Human
cuucuuuggguaaacgug

SEQ ID NO: 2560285 - RNA, 19 nt, Human
cuucuuugcuuugcccagc

SEQ ID NO: 2560286 - RNA, 15 nt, Human
cuucuuugcuugccu

SEQ ID NO: 2560287 - RNA, 13 nt, Human
cuucuuugcuugc

SEQ ID NO: 2560288 - RNA, 19 nt, Human
cuucuuuuaaaccauuuuc

SEQ ID NO: 2560289 - RNA, 13 nt, Human
cuucuuuuacuca

SEQ ID NO: 2560290 - RNA, 12 nt, Human
cuucuuuugagc

SEQ ID NO: 2560291 - RNA, 17 nt, Human
cuucuuuucacauucuu

SEQ ID NO: 2560292 - RNA, 20 nt, Human
cuucuuuucacauucuuaua

SEQ ID NO: 2560293 - RNA, 16 nt, Human
cuucuuuucacauucu

SEQ ID NO: 2560294 - RNA, 14 nt, Human
cuucuuuucacauu

SEQ ID NO: 2560295 - RNA, 18 nt, Human
cuuguaaaaauuaaaagu

SEQ ID NO: 2560296 - RNA, 18 nt, Human
cuuguaaaggaauuuaaa

SEQ ID NO: 2560297 - RNA, 18 nt, Human
cuuguaaagacuguagaa

SEQ ID NO: 2560298 - RNA, 21 nt, Human
cuuguaaauagcucagguguc

SEQ ID NO: 2560299 - RNA, 22 nt, Human
cuuggggaguuaagaccuggca

SEQ ID NO: 2560300 - RNA, 23 nt, Human
cuuggggaguuaagaccuggcag

SEQ ID NO: 2560301 - RNA, 21 nt, Human
cuuggggaguuaagaccuggc

SEQ ID NO: 2560302 - RNA, 20 nt, Human
cuugguuuguaaauuaacuu

SEQ ID NO: 2560303 - RNA, 19 nt, Human
cuuggggauucuuccaucu

SEQ ID NO: 2560304 - RNA, 21 nt, Human
cuuggggauucuuccaucuga

SEQ ID NO: 2560305 - RNA, 14 nt, Human
cuuggggcaggcag

SEQ ID NO: 2560306 - RNA, 15 nt, Human
cuuggggcaggcagu

SEQ ID NO: 2560307 - RNA, 19 nt, Human
cuuggggaccagagcugcc

SEQ ID NO: 2560308 - RNA, 18 nt, Human
cuuggggaccagagcugc

SEQ ID NO: 2560309 - RNA, 17 nt, Human
cuuggggaccagagcug

SEQ ID NO: 2560310 - RNA, 14 nt, Human
cuuggcuucuucuu

SEQ ID NO: 2560311 - RNA, 14 nt, Human
cuuggcuugcccac

SEQ ID NO: 2560312 - RNA, 16 nt, Human
cuuggggaccagagcu

SEQ ID NO: 2560313 - RNA, 16 nt, Human
cuuggcuggugcaccu

SEQ ID NO: 2560314 - RNA, 13 nt, Human
cuuggcuggugca

SEQ ID NO: 2560315 - RNA, 17 nt, Human
cuuggcuguagaaggag

SEQ ID NO: 2560316 - RNA, 21 nt, Human
cuuggcugugaggccccugga

SEQ ID NO: 2560317 - RNA, 13 nt, Human
cuuggcugugagg

SEQ ID NO: 2560318 - RNA, 12 nt, Human
cuuggcugugag

SEQ ID NO: 2560319 - RNA, 22 nt, Human
cuuggcuguagaaggagacaga

SEQ ID NO: 2560320 - RNA, 16 nt, Human
cuuggcuucucauacg

SEQ ID NO: 2560321 - RNA, 23 nt, Human
cuuggcuucucauacguccacca

SEQ ID NO: 2560322 - RNA, 18 nt, Human
cuuggcuuccuuucuugg

SEQ ID NO: 2560323 - RNA, 16 nt, Human
cuuggcuuccuuucuu

SEQ ID NO: 2560324 - RNA, 20 nt, Human
cuuggcuguuggcagugagu

SEQ ID NO: 2560325 - RNA, 20 nt, Human
cuuggcuucaggggaguccc

SEQ ID NO: 2560326 - RNA, 22 nt, Human
cuugucacugguagaccaaaau

SEQ ID NO: 2560327 - RNA, 13 nt, Human
cuugucaaagaag

SEQ ID NO: 2560328 - RNA, 13 nt, Human
cuugucagagcug

SEQ ID NO: 2560329 - RNA, 21 nt, Human
cuugucagagcugggaggggu

SEQ ID NO: 2560330 - RNA, 14 nt, Human
cuugucagagcugg

SEQ ID NO: 2560331 - RNA, 15 nt, Human
cuugucagagcuggg

SEQ ID NO: 2560332 - RNA, 16 nt, Human
cuuguggacacagcuc

SEQ ID NO: 2560333 - RNA, 18 nt, Human
cuuguggacacagcucuu

SEQ ID NO: 2560334 - RNA, 17 nt, Human
cuuguggacacagcucu

SEQ ID NO: 2560335 - RNA, 15 nt, Human
cuugucacugguaga

SEQ ID NO: 2560336 - RNA, 23 nt, Human
cuugucacugguagaccaaaaua

SEQ ID NO: 2560337 - RNA, 14 nt, Human
cuuguauuuuguga

SEQ ID NO: 2560338 - RNA, 18 nt, Human
cuuguauuauguguguuu

SEQ ID NO: 2560339 - RNA, 15 nt, Human
cuuguauuaagaaug

SEQ ID NO: 2560340 - RNA, 12 nt, Human
cuuguauuuaaa

SEQ ID NO: 2560341 - RNA, 18 nt, Human
cuuguauuuaaauauuaa

SEQ ID NO: 2560342 - RNA, 20 nt, Human
cuuguauuuaaauauuaaau

SEQ ID NO: 2560343 - RNA, 14 nt, Human
cuuguaacuccacc

SEQ ID NO: 2560344 - RNA, 19 nt, Human
cuuguaucaacacuguuac

SEQ ID NO: 2560345 - RNA, 23 nt, Human
cuuguauauuuuaagaaauaaca

SEQ ID NO: 2560346 - RNA, 20 nt, Human
cuuguaucaacacuguuacu

SEQ ID NO: 2560347 - RNA, 21 nt, Human
cuuguaugaaagauggcugug

SEQ ID NO: 2560348 - RNA, 15 nt, Human
cuuguaacuccacca

SEQ ID NO: 2560349 - RNA, 17 nt, Human
cuuguaacuccaccaac

SEQ ID NO: 2560350 - RNA, 20 nt, Human
cuuguaaugauauagccaga

SEQ ID NO: 2560351 - RNA, 21 nt, Human
cuuguaacuccaccaacccau

SEQ ID NO: 2560352 - RNA, 13 nt, Human
cuuguauuaaacu

SEQ ID NO: 2560353 - RNA, 23 nt, Human
cuuguauuaaacucuucacaaaa

SEQ ID NO: 2560354 - RNA, 14 nt, Human
cuuguauuaagaau

SEQ ID NO: 2560355 - RNA, 17 nt, Human
cuuguauuaaagacaga

SEQ ID NO: 2560356 - RNA, 17 nt, Human
cuuguauuaaguuguua

SEQ ID NO: 2560357 - RNA, 13 nt, Human
cuuguauuaaguu

SEQ ID NO: 2560358 - RNA, 13 nt, Human
cuuguauuaugug

SEQ ID NO: 2560359 - RNA, 23 nt, Human
cuuguauuaaguuguuaauaaaa

SEQ ID NO: 2560360 - RNA, 22 nt, Human
cuuguauuaaguuguuaauaaa

SEQ ID NO: 2560361 - RNA, 15 nt, Human
cuuggagccugcaga

SEQ ID NO: 2560362 - RNA, 16 nt, Human
cuuggagccugcagag

SEQ ID NO: 2560363 - RNA, 17 nt, Human
cuuggagccugcagagc

SEQ ID NO: 2560364 - RNA, 18 nt, Human
cuuggagccugcagagcu

SEQ ID NO: 2560365 - RNA, 15 nt, Human
cuuggaccucugcuc

SEQ ID NO: 2560366 - RNA, 14 nt, Human
cuuggaccucugcu

SEQ ID NO: 2560367 - RNA, 13 nt, Human
cuuggaccucugc

SEQ ID NO: 2560368 - RNA, 12 nt, Human
cuuggaccucug

SEQ ID NO: 2560369 - RNA, 13 nt, Human
cuuggagccugca

SEQ ID NO: 2560370 - RNA, 21 nt, Human
cuuggagccggacuuucggag

SEQ ID NO: 2560371 - RNA, 14 nt, Human
cuuggagccggacu

SEQ ID NO: 2560372 - RNA, 16 nt, Human
cuuggaccucugcucu

SEQ ID NO: 2560373 - RNA, 18 nt, Human
cuuggagccccagugcca

SEQ ID NO: 2560374 - RNA, 21 nt, Human
cuuggagccccagugccaagc

SEQ ID NO: 2560375 - RNA, 21 nt, Human
cuuggauuauuuuaaaucauu

SEQ ID NO: 2560376 - RNA, 18 nt, Human
cuuggauguaccugcccc

SEQ ID NO: 2560377 - RNA, 15 nt, Human
cuuggauguauaugu

SEQ ID NO: 2560378 - RNA, 23 nt, Human
cuuggauaaugcuguugccucau

SEQ ID NO: 2560379 - RNA, 19 nt, Human
cuuggagccugcagagcug

SEQ ID NO: 2560380 - RNA, 20 nt, Human
cuuggagccugcagagcugc

SEQ ID NO: 2560381 - RNA, 22 nt, Human
cuuggaguauuggggucugacc

SEQ ID NO: 2560382 - RNA, 18 nt, Human
cuuggauaaugcuguugc

SEQ ID NO: 2560383 - RNA, 22 nt, Human
cuuggauaaugcuguugccuca

SEQ ID NO: 2560384 - RNA, 22 nt, Human
cuuggcucgaaucucugugccu

SEQ ID NO: 2560385 - RNA, 21 nt, Human
cuuggcucgaaucucugugcc

SEQ ID NO: 2560386 - RNA, 20 nt, Human
cuuggcucgaaucucugugc

SEQ ID NO: 2560387 - RNA, 19 nt, Human
cuuggcucgaaucucugug

SEQ ID NO: 2560388 - RNA, 18 nt, Human
cuuggcucgaaucucugu

SEQ ID NO: 2560389 - RNA, 14 nt, Human
cuuggcucagacau

SEQ ID NO: 2560390 - RNA, 16 nt, Human
cuuggcucagacaugu

SEQ ID NO: 2560391 - RNA, 13 nt, Human
cuuggcugcaggg

SEQ ID NO: 2560392 - RNA, 12 nt, Human
cuuggcugcagg

SEQ ID NO: 2560393 - RNA, 13 nt, Human
cuuggauuguccc

SEQ ID NO: 2560394 - RNA, 14 nt, Human
cuuggauugucccc

SEQ ID NO: 2560395 - RNA, 17 nt, Human
cuuggcuacacagggau

SEQ ID NO: 2560396 - RNA, 19 nt, Human
cuuggcggcagcagccauc

SEQ ID NO: 2560397 - RNA, 23 nt, Human
cuuggcucaaguccucuuuucug

SEQ ID NO: 2560398 - RNA, 12 nt, Human
cuuggcucagac

SEQ ID NO: 2560399 - RNA, 21 nt, Human
cuuggcucaauccucuaagcu

SEQ ID NO: 2560400 - RNA, 24 nt, Human
cuuggcucacugcaacuucugccu

SEQ ID NO: 2560401 - RNA, 13 nt, Human
cuugcuugcuuuu

SEQ ID NO: 2560402 - RNA, 17 nt, Human
cuugcugguuuucugga

SEQ ID NO: 2560403 - RNA, 23 nt, Human
cuugcuggggacggggggcccca

SEQ ID NO: 2560404 - RNA, 16 nt, Human
cuugcuguauaugcag

SEQ ID NO: 2560405 - RNA, 14 nt, Human
cuugcuguccuagg

SEQ ID NO: 2560406 - RNA, 18 nt, Human
cuugcuuggcugcuuggc

SEQ ID NO: 2560407 - RNA, 14 nt, Human
cuugcuuggcugcu

SEQ ID NO: 2560408 - RNA, 22 nt, Human
cuugcuggacggggacugggga

SEQ ID NO: 2560409 - RNA, 22 nt, Human
cuugcuuguugggauuccugac

SEQ ID NO: 2560410 - RNA, 21 nt, Human
cuugcuuguugggauuccuga

SEQ ID NO: 2560411 - RNA, 21 nt, Human
cuuggacauccuccucccacc

SEQ ID NO: 2560412 - RNA, 20 nt, Human
cuuggacauccuccucccac

SEQ ID NO: 2560413 - RNA, 19 nt, Human
cuuggacauccuccuccca

SEQ ID NO: 2560414 - RNA, 17 nt, Human
cuuggacauccuccucc

SEQ ID NO: 2560415 - RNA, 22 nt, Human
cuuggacauccuccucccaccc

SEQ ID NO: 2560416 - RNA, 15 nt, Human
cuugcuuuuaaaauc

SEQ ID NO: 2560417 - RNA, 16 nt, Human
cuuggacauccuccuc

SEQ ID NO: 2560418 - RNA, 15 nt, Human
cuuggacauccuccu

SEQ ID NO: 2560419 - RNA, 13 nt, Human
cuugcauuuuugc

SEQ ID NO: 2560420 - RNA, 14 nt, Human
cuugcauuuuugca

SEQ ID NO: 2560421 - RNA, 20 nt, Human
cuugcauuuuugcaggagca

SEQ ID NO: 2560422 - RNA, 21 nt, Human
cuugcauuuuugcaggagcag

SEQ ID NO: 2560423 - RNA, 20 nt, Human
cuugcugccuucuggauucu

SEQ ID NO: 2560424 - RNA, 17 nt, Human
cuugcuggacggggacu

SEQ ID NO: 2560425 - RNA, 21 nt, Human
cuugcuggacggggacugggg

SEQ ID NO: 2560426 - RNA, 19 nt, Human
cuugcugccuucuggauuc

SEQ ID NO: 2560427 - RNA, 15 nt, Human
cuugcugccuucugg

SEQ ID NO: 2560428 - RNA, 17 nt, Human
cuugccaaauauaaaua

SEQ ID NO: 2560429 - RNA, 12 nt, Human
cuugcauuccca

SEQ ID NO: 2560430 - RNA, 16 nt, Human
cuugcauucccagugg

SEQ ID NO: 2560431 - RNA, 14 nt, Human
cuugcauucccagu

SEQ ID NO: 2560432 - RNA, 18 nt, Human
cuugcauugaauauauua

SEQ ID NO: 2560433 - RNA, 12 nt, Human
cuugcauuuuug

SEQ ID NO: 2560434 - RNA, 14 nt, Human
cuugcauugcagag

SEQ ID NO: 2560435 - RNA, 12 nt, Human
cuuugaauuuuc

SEQ ID NO: 2560436 - RNA, 22 nt, Human
cuuugcacugagggccacacua

SEQ ID NO: 2560437 - RNA, 19 nt, Human
cuuugcacugagggccaca

SEQ ID NO: 2560438 - RNA, 18 nt, Human
cuuugcacugagggccac

SEQ ID NO: 2560439 - RNA, 16 nt, Human
cuuugcacugagggcc

SEQ ID NO: 2560440 - RNA, 15 nt, Human
cuuugcacugagggc

SEQ ID NO: 2560441 - RNA, 14 nt, Human
cuuugcacugaggg

SEQ ID NO: 2560442 - RNA, 13 nt, Human
cuuugcacugagg

SEQ ID NO: 2560443 - RNA, 15 nt, Human
cuuugcagacaggca

SEQ ID NO: 2560444 - RNA, 14 nt, Human
cuuugcagacaggc

SEQ ID NO: 2560445 - RNA, 18 nt, Human
cuuugaauaaaaaugcac

SEQ ID NO: 2560446 - RNA, 18 nt, Human
cuuugaaggggccucacc

SEQ ID NO: 2560447 - RNA, 17 nt, Human
cuuugaauaaaaaugca

SEQ ID NO: 2560448 - RNA, 16 nt, Human
cuuugaagucauacca

SEQ ID NO: 2560449 - RNA, 18 nt, Human
cuuugaauccucucucug

SEQ ID NO: 2560450 - RNA, 19 nt, Human
cuuugaauccucucucugu

SEQ ID NO: 2560451 - RNA, 23 nt, Human
cuuugaauccucucucuguguua

SEQ ID NO: 2560452 - RNA, 23 nt, Human
cuuugaaugcuuuuugaauguua

SEQ ID NO: 2560453 - RNA, 16 nt, Human
cuuugaaugcuuuuug

SEQ ID NO: 2560454 - RNA, 13 nt, Human
cuuugaaugcuuu

SEQ ID NO: 2560455 - RNA, 15 nt, Human
cuuugaaugacaaag

SEQ ID NO: 2560456 - RNA, 16 nt, Human
cuuugaaugcggccca

SEQ ID NO: 2560457 - RNA, 16 nt, Human
cuuugcccaacaccag

SEQ ID NO: 2560458 - RNA, 15 nt, Human
cuuugcccagaaaga

SEQ ID NO: 2560459 - RNA, 14 nt, Human
cuuugcccacaaug

SEQ ID NO: 2560460 - RNA, 19 nt, Human
cuuugcccaacaccagccc

SEQ ID NO: 2560461 - RNA, 18 nt, Human
cuuugcccaacaccagcc

SEQ ID NO: 2560462 - RNA, 16 nt, Human
cuuugcacugauauau

SEQ ID NO: 2560463 - RNA, 23 nt, Human
cuuugcacugagggccacacuau

SEQ ID NO: 2560464 - RNA, 13 nt, Human
cuuugccagcuuu

SEQ ID NO: 2560465 - RNA, 18 nt, Human
cuuugccagcugcugcug

SEQ ID NO: 2560466 - RNA, 20 nt, Human
cuuugccagcuuuuccuccc

SEQ ID NO: 2560467 - RNA, 21 nt, Human
cuuugccacccucaugcugug

SEQ ID NO: 2560468 - RNA, 17 nt, Human
cuuugccagcugcugcu

SEQ ID NO: 2560469 - RNA, 18 nt, Human
cuuugccagaaagcauaa

SEQ ID NO: 2560470 - RNA, 23 nt, Human
cuuuggaaagaguaggaagacuu

SEQ ID NO: 2560471 - RNA, 19 nt, Human
cuuuggaaagaguaggaag

SEQ ID NO: 2560472 - RNA, 20 nt, Human
cuuugcccugguagggcagu

SEQ ID NO: 2560473 - RNA, 22 nt, Human
cuuugcccaacaccagccccug

SEQ ID NO: 2560474 - RNA, 23 nt, Human
cuuugccccaccuuuauuaaaau

SEQ ID NO: 2560475 - RNA, 21 nt, Human
cuuuccugaggcugggcuccc

SEQ ID NO: 2560476 - RNA, 20 nt, Human
cuuuccugaggcugggcucc

SEQ ID NO: 2560477 - RNA, 16 nt, Human
cuuuccugaggcuggg

SEQ ID NO: 2560478 - RNA, 17 nt, Human
cuuuccugaggcugggc

SEQ ID NO: 2560479 - RNA, 17 nt, Human
cuuucuuagaaauuuau

SEQ ID NO: 2560480 - RNA, 22 nt, Human
cuuucuuacaaggaagguggug

SEQ ID NO: 2560481 - RNA, 15 nt, Human
cuuucuuuaccugag

SEQ ID NO: 2560482 - RNA, 14 nt, Human
cuuucuuagaaauu

SEQ ID NO: 2560483 - RNA, 13 nt, Human
cuuucuuagaaau

SEQ ID NO: 2560484 - RNA, 11 nt, Human
cuuucuuagaa

SEQ ID NO: 2560485 - RNA, 22 nt, Human
cuuucuguugucauugcuguug

SEQ ID NO: 2560486 - RNA, 21 nt, Human
cuuucuguugucauugcuguu

SEQ ID NO: 2560487 - RNA, 15 nt, Human
cuuucuguugucauu

SEQ ID NO: 2560488 - RNA, 14 nt, Human
cuuucuguugucau

SEQ ID NO: 2560489 - RNA, 15 nt, Human
cuuucuguuggugua

SEQ ID NO: 2560490 - RNA, 16 nt, Human
cuuucuguugccacaa

SEQ ID NO: 2560491 - RNA, 19 nt, Human
cuuugaagcaguuguguca

SEQ ID NO: 2560492 - RNA, 16 nt, Human
cuuugaaggggccuca

SEQ ID NO: 2560493 - RNA, 14 nt, Human
cuuugaagcaguug

SEQ ID NO: 2560494 - RNA, 22 nt, Human
cuuugaagaggaaaaugaauaa

SEQ ID NO: 2560495 - RNA, 20 nt, Human
cuuugaagaggaaaaugaau

SEQ ID NO: 2560496 - RNA, 18 nt, Human
cuuugaagaggaaaauga

SEQ ID NO: 2560497 - RNA, 14 nt, Human
cuuugaagaggaaa

SEQ ID NO: 2560498 - RNA, 13 nt, Human
cuuugaagaggaa

SEQ ID NO: 2560499 - RNA, 15 nt, Human
cuuugaaauuguuua

SEQ ID NO: 2560500 - RNA, 21 nt, Human
cuuugaaauagucugugugaa

SEQ ID NO: 2560501 - RNA, 21 nt, Human
cuuuccacccccucccuggcc

SEQ ID NO: 2560502 - RNA, 19 nt, Human
cuuugaaauagucugugug

SEQ ID NO: 2560503 - RNA, 23 nt, Human
cuuugaaauguguuucuguauaa

SEQ ID NO: 2560504 - RNA, 22 nt, Human
cuuugaaauguguuucuguaua

SEQ ID NO: 2560505 - RNA, 21 nt, Human
cuuugaaauguguuucuguau

SEQ ID NO: 2560506 - RNA, 18 nt, Human
cuuugaaauguguuucug

SEQ ID NO: 2560507 - RNA, 14 nt, Human
cuuugaaauguguu

SEQ ID NO: 2560508 - RNA, 16 nt, Human
cuuugaaaugaauaua

SEQ ID NO: 2560509 - RNA, 22 nt, Human
cuuucuuugggaauauuugaau

SEQ ID NO: 2560510 - RNA, 21 nt, Human
cuuucuuugggaauauuugaa

SEQ ID NO: 2560511 - RNA, 20 nt, Human
cuuucuuugggaauauuuga

SEQ ID NO: 2560512 - RNA, 18 nt, Human
cuuucuuugggaauauuu

SEQ ID NO: 2560513 - RNA, 23 nt, Human
cuuucuuugggaauauuugaauc

SEQ ID NO: 2560514 - RNA, 21 nt, Human
cuuucuuuucgccguggcugc

SEQ ID NO: 2560515 - RNA, 17 nt, Human
cuuucuuucuuagaaau

SEQ ID NO: 2560516 - RNA, 16 nt, Human
cuuucuuucuuagaaa

SEQ ID NO: 2560517 - RNA, 15 nt, Human
cuuucuuucuuagaa

SEQ ID NO: 2560518 - RNA, 17 nt, Human
cuuucuuucuaacucca

SEQ ID NO: 2560519 - RNA, 18 nt, Human
cuuucuuuaccugagacc

SEQ ID NO: 2560520 - RNA, 17 nt, Human
cuuucuuuaccugagac

SEQ ID NO: 2560521 - RNA, 16 nt, Human
cuuuccaaaguacacu

SEQ ID NO: 2560522 - RNA, 20 nt, Human
cuuuccaaagccaaugugaa

SEQ ID NO: 2560523 - RNA, 16 nt, Human
cuuucauuuacugugg

SEQ ID NO: 2560524 - RNA, 22 nt, Human
cuuuccaaaguacacuguuuca

SEQ ID NO: 2560525 - RNA, 16 nt, Human
cuuuccaaaugcccag

SEQ ID NO: 2560526 - RNA, 21 nt, Human
cuuuccacuccuccuagccac

SEQ ID NO: 2560527 - RNA, 14 nt, Human
cuuuccaggaaggc

SEQ ID NO: 2560528 - RNA, 21 nt, Human
cuuuccacggagccacuccuc

SEQ ID NO: 2560529 - RNA, 22 nt, Human
cuuuccacggagccacuccucu

SEQ ID NO: 2560530 - RNA, 18 nt, Human
cuuuccacuccuccuagc

SEQ ID NO: 2560531 - RNA, 23 nt, Human
cuuuccaaagccaaugugaacag

SEQ ID NO: 2560532 - RNA, 21 nt, Human
cuuuccaaaggccauggagag

SEQ ID NO: 2560533 - RNA, 23 nt, Human
cuuucauuaaaggcuucucucuc

SEQ ID NO: 2560534 - RNA, 23 nt, Human
cuuuccacccccucccuggccug

SEQ ID NO: 2560535 - RNA, 15 nt, Human
cuuuccccaugucuc

SEQ ID NO: 2560536 - RNA, 20 nt, Human
cuuuccccaugucucgacuc

SEQ ID NO: 2560537 - RNA, 21 nt, Human
cuuuccccaugucucgacuca

SEQ ID NO: 2560538 - RNA, 17 nt, Human
cuuuccccagcccaggg

SEQ ID NO: 2560539 - RNA, 16 nt, Human
cuuuccccagcccagg

SEQ ID NO: 2560540 - RNA, 15 nt, Human
cuuuccccagcccag

SEQ ID NO: 2560541 - RNA, 14 nt, Human
cuuuccccagccca

SEQ ID NO: 2560542 - RNA, 13 nt, Human
cuuuccccagccc

SEQ ID NO: 2560543 - RNA, 21 nt, Human
cuuuccagcucaccccccaca

SEQ ID NO: 2560544 - RNA, 17 nt, Human
cuuucccauggggaggg

SEQ ID NO: 2560545 - RNA, 13 nt, Human
cuuuccagcucac

SEQ ID NO: 2560546 - RNA, 12 nt, Human
cuuuccagcuca

SEQ ID NO: 2560547 - RNA, 9 nt, Human
cuuuccaga

SEQ ID NO: 2560548 - RNA, 22 nt, Human
cuuuccacccccucccuggccu

SEQ ID NO: 2560549 - RNA, 20 nt, Human
cuuucccuuuuccauuugaa

SEQ ID NO: 2560550 - RNA, 13 nt, Human
cuuuccccugugg

SEQ ID NO: 2560551 - RNA, 21 nt, Human
cuuuccgguguuuaagacauu

SEQ ID NO: 2560552 - RNA, 19 nt, Human
cuuucccccaccagcuaag

SEQ ID NO: 2560553 - RNA, 18 nt, Human
cuuuccuaucauggagug

SEQ ID NO: 2560554 - RNA, 21 nt, Human
cuuuccuagauggcagucacu

SEQ ID NO: 2560555 - RNA, 17 nt, Human
cuuuccuaaggcugcaa

SEQ ID NO: 2560556 - RNA, 20 nt, Human
cuuuccuaaggcugcaaggu

SEQ ID NO: 2560557 - RNA, 20 nt, Human
cuuuccuagauggcagucac

SEQ ID NO: 2560558 - RNA, 15 nt, Human
cuuuccuaaauguuu

SEQ ID NO: 2560559 - RNA, 16 nt, Human
cuuuccuaaggcugca

SEQ ID NO: 2560560 - RNA, 17 nt, Human
cuuuccguggcacugca

SEQ ID NO: 2560561 - RNA, 19 nt, Human
cuuuccguggcacugcaua

SEQ ID NO: 2560562 - RNA, 14 nt, Human
cuugucaugugaca

SEQ ID NO: 2560563 - RNA, 15 nt, Human
cuugugucucugugc

SEQ ID NO: 2560564 - RNA, 17 nt, Human
cuugugucucugugcuu

SEQ ID NO: 2560565 - RNA, 18 nt, Human
cuugugucucugugcuuu

SEQ ID NO: 2560566 - RNA, 21 nt, Human
cuuguggacacagcucuucuc

SEQ ID NO: 2560567 - RNA, 17 nt, Human
cuugugugguuuggccc

SEQ ID NO: 2560568 - RNA, 18 nt, Human
cuugugucuguacacgug

SEQ ID NO: 2560569 - RNA, 15 nt, Human
cuugugucuguacac

SEQ ID NO: 2560570 - RNA, 14 nt, Human
cuugugucuguaca

SEQ ID NO: 2560571 - RNA, 12 nt, Human
cuugugucugua

SEQ ID NO: 2560572 - RNA, 21 nt, Human
cuugugucucugugcuuuuaa

SEQ ID NO: 2560573 - RNA, 13 nt, Human
cuugugucugcgu

SEQ ID NO: 2560574 - RNA, 19 nt, Human
cuuuauuuuguguuuagga

SEQ ID NO: 2560575 - RNA, 18 nt, Human
cuuuauuuuuuaaguauu

SEQ ID NO: 2560576 - RNA, 21 nt, Human
cuuuauuuuuuaaguauuuau

SEQ ID NO: 2560577 - RNA, 22 nt, Human
cuuuauuuuuuaaguauuuaua

SEQ ID NO: 2560578 - RNA, 23 nt, Human
cuuuauuuuuuaaguauuuauau

SEQ ID NO: 2560579 - RNA, 19 nt, Human
cuugugugugggcugugag

SEQ ID NO: 2560580 - RNA, 21 nt, Human
cuugugugugggcugugagug

SEQ ID NO: 2560581 - RNA, 11 nt, Human
cuuguguguuu

SEQ ID NO: 2560582 - RNA, 20 nt, Human
cuugugugugggcugugagu

SEQ ID NO: 2560583 - RNA, 13 nt, Human
cuuuauuuucugg

SEQ ID NO: 2560584 - RNA, 18 nt, Human
cuuuauuuucugguagau

SEQ ID NO: 2560585 - RNA, 22 nt, Human
cuuucaagcagucgugccugug

SEQ ID NO: 2560586 - RNA, 20 nt, Human
cuuucaagcagucgugccug

SEQ ID NO: 2560587 - RNA, 19 nt, Human
cuuucaagcagucgugccu

SEQ ID NO: 2560588 - RNA, 14 nt, Human
cuuucaacuugcau

SEQ ID NO: 2560589 - RNA, 14 nt, Human
cuuucaaauuucac

SEQ ID NO: 2560590 - RNA, 15 nt, Human
cuuucaaauuucaca

SEQ ID NO: 2560591 - RNA, 14 nt, Human
cuuucaaaaacaug

SEQ ID NO: 2560592 - RNA, 19 nt, Human
cuuucaaaaccuuuugaaa

SEQ ID NO: 2560593 - RNA, 15 nt, Human
cuuucaaagaaggaa

SEQ ID NO: 2560594 - RNA, 21 nt, Human
cuuucaaauugagagaaugga

SEQ ID NO: 2560595 - RNA, 18 nt, Human
cuuucaaagaaggaauuc

SEQ ID NO: 2560596 - RNA, 21 nt, Human
cuuucaaagaaggaauucuag

SEQ ID NO: 2560597 - RNA, 23 nt, Human
cuuucaagcagucgugccugugu

SEQ ID NO: 2560598 - RNA, 17 nt, Human
cuuucauccacuagugc

SEQ ID NO: 2560599 - RNA, 22 nt, Human
cuuucauccugacucugccccc

SEQ ID NO: 2560600 - RNA, 21 nt, Human
cuuucauccugacucugcccc

SEQ ID NO: 2560601 - RNA, 20 nt, Human
cuuucauccugacucugccc

SEQ ID NO: 2560602 - RNA, 19 nt, Human
cuuucauccugacucugcc

SEQ ID NO: 2560603 - RNA, 18 nt, Human
cuuucauccugacucugc

SEQ ID NO: 2560604 - RNA, 17 nt, Human
cuuucauccugacucug

SEQ ID NO: 2560605 - RNA, 19 nt, Human
cuuucauguaaacugugca

SEQ ID NO: 2560606 - RNA, 20 nt, Human
cuuucauguaaacugugcac

SEQ ID NO: 2560607 - RNA, 21 nt, Human
cuuucauguaaacugugcacc

SEQ ID NO: 2560608 - RNA, 21 nt, Human
cuuucauuaaaggcuucucuc

SEQ ID NO: 2560609 - RNA, 20 nt, Human
cuuucauuaaagcauuuacu

SEQ ID NO: 2560610 - RNA, 21 nt, Human
cuuucauggggugaugcuggg

SEQ ID NO: 2560611 - RNA, 19 nt, Human
cuuucauggggugaugcug

SEQ ID NO: 2560612 - RNA, 17 nt, Human
cuuucauguaaacugug

SEQ ID NO: 2560613 - RNA, 22 nt, Human
cuuucaugaguuuuucccagcu

SEQ ID NO: 2560614 - RNA, 18 nt, Human
cuuucaugaguuuuuccc

SEQ ID NO: 2560615 - RNA, 18 nt, Human
cuuuuuuauacauaaaca

SEQ ID NO: 2560616 - RNA, 21 nt, Human
cuuuuucuccagcugggcucu

SEQ ID NO: 2560617 - RNA, 18 nt, Human
cuuuuucuaaugugguua

SEQ ID NO: 2560618 - RNA, 14 nt, Human
cuuuuucucccucu

SEQ ID NO: 2560619 - RNA, 17 nt, Human
cuuuuucucccucugga

SEQ ID NO: 2560620 - RNA, 19 nt, Human
cuuuuuuauacacauaauu

SEQ ID NO: 2560621 - RNA, 19 nt, Human
cuuuuuuaucaugugaaau

SEQ ID NO: 2560622 - RNA, 18 nt, Human
cuuuuuuaugugccgugu

SEQ ID NO: 2560623 - RNA, 23 nt, Human
cuuuuuuaugugccguguuauug

SEQ ID NO: 2560624 - RNA, 21 nt, Human
cuuuuuucacggaaguuuuca

SEQ ID NO: 2560625 - RNA, 15 nt, Human
cuuuuuucacaaauu

SEQ ID NO: 2560626 - RNA, 12 nt, Human
cuuuuuucaaaa

SEQ ID NO: 2560627 - RNA, 11 nt, Human
gaaaaagaaaa

SEQ ID NO: 2560628 - RNA, 16 nt, Human
gaaaaagaaaaaauau

SEQ ID NO: 2560629 - RNA, 19 nt, Human
cuuuuuagggccaggcagg

SEQ ID NO: 2560630 - RNA, 12 nt, Human
cuuuuucauuug

SEQ ID NO: 2560631 - RNA, 18 nt, Human
cuuuuucauuugccuauu

SEQ ID NO: 2560632 - RNA, 15 nt, Human
cuuuuucauuugccu

SEQ ID NO: 2560633 - RNA, 13 nt, Human
cuuuuucauuugc

SEQ ID NO: 2560634 - RNA, 17 nt, Human
cuuuuucauuugccuau

SEQ ID NO: 2560635 - RNA, 22 nt, Human
cuuuuuccagacacuuuuuuga

SEQ ID NO: 2560636 - RNA, 16 nt, Human
cuuuuuuauacauaaa

SEQ ID NO: 2560637 - RNA, 17 nt, Human
cuuuuuuauacauaaac

SEQ ID NO: 2560638 - RNA, 15 nt, Human
cuuuuuuauacauaa

SEQ ID NO: 2560639 - RNA, 17 nt, Human
cuuuuuccuugucccca

SEQ ID NO: 2560640 - RNA, 13 nt, Human
cuuuuuccagagg

SEQ ID NO: 2560641 - RNA, 17 nt, Human
cuuuuuccccaaagucu

SEQ ID NO: 2560642 - RNA, 19 nt, Human
cuuuugcaccugcucucuu

SEQ ID NO: 2560643 - RNA, 20 nt, Human
cuuuugcaccccucccauua

SEQ ID NO: 2560644 - RNA, 19 nt, Human
cuuuugcaccccucccauu

SEQ ID NO: 2560645 - RNA, 22 nt, Human
cuuuugcaccugcucucuugua

SEQ ID NO: 2560646 - RNA, 18 nt, Human
cuuuugcaccccucccau

SEQ ID NO: 2560647 - RNA, 17 nt, Human
cuuuugcaccccuccca

SEQ ID NO: 2560648 - RNA, 16 nt, Human
cuuuugcaccccuccc

SEQ ID NO: 2560649 - RNA, 15 nt, Human
cuuuugcaccccucc

SEQ ID NO: 2560650 - RNA, 14 nt, Human
cuuuugcaccccuc

SEQ ID NO: 2560651 - RNA, 12 nt, Human
cuuuugcacccc

SEQ ID NO: 2560652 - RNA, 23 nt, Human
cuuuuuaaaguguuucuguuauu

SEQ ID NO: 2560653 - RNA, 19 nt, Human
cuuuuuaaaguguuucugu

SEQ ID NO: 2560654 - RNA, 20 nt, Human
cuuuuuaaauguaaagauau

SEQ ID NO: 2560655 - RNA, 21 nt, Human
cuuuuuaaauguaaagauauu

SEQ ID NO: 2560656 - RNA, 23 nt, Human
cuuuuuaaauucaguccuaagaa

SEQ ID NO: 2560657 - RNA, 17 nt, Human
cuuuuuaagcuuauuua

SEQ ID NO: 2560658 - RNA, 19 nt, Human
cuuuuuaagcuuauuuaau

SEQ ID NO: 2560659 - RNA, 20 nt, Human
cuuuuuaauaaaaaggcacc

SEQ ID NO: 2560660 - RNA, 14 nt, Human
cuuuuuaauaaaaa

SEQ ID NO: 2560661 - RNA, 15 nt, Human
cuuuuuaauaaaaag

SEQ ID NO: 2560662 - RNA, 22 nt, Human
cuuuuuaauuguuguuucuuuc

SEQ ID NO: 2560663 - RNA, 16 nt, Human
cuuuuuaauuguuguu

SEQ ID NO: 2560664 - RNA, 15 nt, Human
cuuuuuaauuguugu

SEQ ID NO: 2560665 - RNA, 14 nt, Human
cuuuuuaauuguug

SEQ ID NO: 2560666 - RNA, 17 nt, Human
cuuuuuaauucaccaaa

SEQ ID NO: 2560667 - RNA, 22 nt, Human
cuuuuuaauauugauaugcuua

SEQ ID NO: 2560668 - RNA, 23 nt, Human
cuuuuuaauuguuguuucuuucu

SEQ ID NO: 2560669 - RNA, 20 nt, Human
cuuuuuaccaaguuucaggu

SEQ ID NO: 2560670 - RNA, 15 nt, Human
cuuuuuacuccccuu

SEQ ID NO: 2560671 - RNA, 19 nt, Human
cuuuuuacuccccuugagc

SEQ ID NO: 2560672 - RNA, 20 nt, Human
cuuuucuuuucuacccuagc

SEQ ID NO: 2560673 - RNA, 17 nt, Human
cuuuucuuuucuacccu

SEQ ID NO: 2560674 - RNA, 13 nt, Human
cuuuucuuuucuu

SEQ ID NO: 2560675 - RNA, 23 nt, Human
cuuuugauaaucaacugggcuga

SEQ ID NO: 2560676 - RNA, 22 nt, Human
cuuuugauaaucaacugggcug

SEQ ID NO: 2560677 - RNA, 14 nt, Human
cuuuugcaaacuuu

SEQ ID NO: 2560678 - RNA, 17 nt, Human
cuuuucuuucagccaag

SEQ ID NO: 2560679 - RNA, 16 nt, Human
cuuuucuuucuaccaa

SEQ ID NO: 2560680 - RNA, 20 nt, Human
cuuuuccuuggggcaggcag

SEQ ID NO: 2560681 - RNA, 16 nt, Human
cuuuucgccguggcug

SEQ ID NO: 2560682 - RNA, 15 nt, Human
cuuuuaauuaaaugc

SEQ ID NO: 2560683 - RNA, 14 nt, Human
cuuuuaauuaaaug

SEQ ID NO: 2560684 - RNA, 19 nt, Human
cuuuuaaugcuccaaaugc

SEQ ID NO: 2560685 - RNA, 18 nt, Human
cuuuuaaugcuccaaaug

SEQ ID NO: 2560686 - RNA, 22 nt, Human
cuuuuaauuaaugaaauaucug

SEQ ID NO: 2560687 - RNA, 19 nt, Human
cuuuuaauuaaugaaauau

SEQ ID NO: 2560688 - RNA, 16 nt, Human
cuuuuaauuaaugaaa

SEQ ID NO: 2560689 - RNA, 20 nt, Human
cuuuuaauuaaaugcucauc

SEQ ID NO: 2560690 - RNA, 13 nt, Human
cuuuucacaaaua

SEQ ID NO: 2560691 - RNA, 12 nt, Human
cuuuucacaaau

SEQ ID NO: 2560692 - RNA, 20 nt, Human
cuuuucacauagcugucuag

SEQ ID NO: 2560693 - RNA, 23 nt, Human
cuuuuaauuaaugaaauaucugu

SEQ ID NO: 2560694 - RNA, 13 nt, Human
cuuuucacauucu

SEQ ID NO: 2560695 - RNA, 15 nt, Human
cuuuucacaaauaaa

SEQ ID NO: 2560696 - RNA, 14 nt, Human
cuuuucacaaauaa

SEQ ID NO: 2560697 - RNA, 20 nt, Human
cuuuucacauucuuauaaau

SEQ ID NO: 2560698 - RNA, 19 nt, Human
cuuuucacauucuuauaaa

SEQ ID NO: 2560699 - RNA, 17 nt, Human
cuuuucacauucuuaua

SEQ ID NO: 2560700 - RNA, 14 nt, Human
cuuuucacauucuu

SEQ ID NO: 2560701 - RNA, 23 nt, Human
cuuuuccaacccucaucaccaac

SEQ ID NO: 2560702 - RNA, 13 nt, Human
cuuuuccaacccu

SEQ ID NO: 2560703 - RNA, 22 nt, Human
cuuuucauuuaggugaggaagc

SEQ ID NO: 2560704 - RNA, 19 nt, Human
cuuuucacucccuccauca

SEQ ID NO: 2560705 - RNA, 12 nt, Human
cuuuucacugcu

SEQ ID NO: 2560706 - RNA, 16 nt, Human
cuuuuccucucucccg

SEQ ID NO: 2560707 - RNA, 23 nt, Human
cuuuuccucccuuggguucugau

SEQ ID NO: 2560708 - RNA, 15 nt, Human
cuuuuccucccuugg

SEQ ID NO: 2560709 - RNA, 13 nt, Human
cuuuuccucccuu

SEQ ID NO: 2560710 - RNA, 20 nt, Human
cuuuuccuauuuucagccca

SEQ ID NO: 2560711 - RNA, 19 nt, Human
cuuuuccuauuuucagccc

SEQ ID NO: 2560712 - RNA, 16 nt, Human
cuuuuccuauuuguuu

SEQ ID NO: 2560713 - RNA, 20 nt, Human
cuuuucacugcugcaaggcc

SEQ ID NO: 2560714 - RNA, 16 nt, Human
cuuuucacugcuggcu

SEQ ID NO: 2560715 - RNA, 14 nt, Human
cuuuucccuucuuu

SEQ ID NO: 2560716 - RNA, 18 nt, Human
cuuuuccucucucccgga

SEQ ID NO: 2560717 - RNA, 13 nt, Human
cuuuuccuugggg

SEQ ID NO: 2560718 - RNA, 17 nt, Human
cuuuuccuuggggcagg

SEQ ID NO: 2560719 - RNA, 21 nt, Human
cuuuuccuuggggcaggcagu

SEQ ID NO: 2560720 - RNA, 20 nt, Human
cuuuucgcaggauucuuccu

SEQ ID NO: 2560721 - RNA, 21 nt, Human
cuuuucgcaggauucuuccuc

SEQ ID NO: 2560722 - RNA, 18 nt, Human
cuuuggaguccccucacc

SEQ ID NO: 2560723 - RNA, 16 nt, Human
cuuuggaguccccuca

SEQ ID NO: 2560724 - RNA, 14 nt, Human
cuuuggaguccccu

SEQ ID NO: 2560725 - RNA, 14 nt, Human
cuuuggaggccccu

SEQ ID NO: 2560726 - RNA, 22 nt, Human
cuuuggaguccccucaccuccu

SEQ ID NO: 2560727 - RNA, 18 nt, Human
cuuuguuuuuaugaagaa

SEQ ID NO: 2560728 - RNA, 21 nt, Human
cuuuguuuuuuuuuccugucc

SEQ ID NO: 2560729 - RNA, 16 nt, Human
cuuuguuuuuuuuucc

SEQ ID NO: 2560730 - RNA, 18 nt, Human
cuuuuaaaacacuuccau

SEQ ID NO: 2560731 - RNA, 23 nt, Human
cuuuguuuuuuuuuccuguccuu

SEQ ID NO: 2560732 - RNA, 17 nt, Human
cuuuggaccuaauccaa

SEQ ID NO: 2560733 - RNA, 23 nt, Human
cuuuggagcuuuuuucuuuaaga

SEQ ID NO: 2560734 - RNA, 13 nt, Human
cuuuggagcuuuu

SEQ ID NO: 2560735 - RNA, 23 nt, Human
cuuuggagaucaaggagaggagg

SEQ ID NO: 2560736 - RNA, 16 nt, Human
cuuuggagaucaagga

SEQ ID NO: 2560737 - RNA, 11 nt, Human
cuuuggaagga

SEQ ID NO: 2560738 - RNA, 19 nt, Human
cuuuggagaccauuaucag

SEQ ID NO: 2560739 - RNA, 21 nt, Human
cuuuggaccuaaauggccuca

SEQ ID NO: 2560740 - RNA, 16 nt, Human
cuuuggaccuaaucca

SEQ ID NO: 2560741 - RNA, 20 nt, Human
cuuuuaaaccucaccuuugu

SEQ ID NO: 2560742 - RNA, 16 nt, Human
cuuuuaaaagacaaga

SEQ ID NO: 2560743 - RNA, 14 nt, Human
cuuuuaaaagacaa

SEQ ID NO: 2560744 - RNA, 17 nt, Human
cuuuuaaaccauuuucu

SEQ ID NO: 2560745 - RNA, 12 nt, Human
cuuuuaaacugu

SEQ ID NO: 2560746 - RNA, 13 nt, Human
cuuuuaaacugug

SEQ ID NO: 2560747 - RNA, 15 nt, Human
cuuuuaaacugugua

SEQ ID NO: 2560748 - RNA, 22 nt, Human
cuuuuaaaagacaagacuucag

SEQ ID NO: 2560749 - RNA, 23 nt, Human
cuuuuaaaggggcagaaaaacuc

SEQ ID NO: 2560750 - RNA, 14 nt, Human
cuuuuaaucagaca

SEQ ID NO: 2560751 - RNA, 22 nt, Human
cuuuuaauaaacuuuuuuuuga

SEQ ID NO: 2560752 - RNA, 16 nt, Human
cuuuuaauacagggua

SEQ ID NO: 2560753 - RNA, 21 nt, Human
cuuuuaacaccugauguguac

SEQ ID NO: 2560754 - RNA, 20 nt, Human
cuuuuaacaccugaugugua

SEQ ID NO: 2560755 - RNA, 19 nt, Human
cuuuuaacaccugaugugu

SEQ ID NO: 2560756 - RNA, 22 nt, Human
cuuuuaaaggggcagaaaaacu

SEQ ID NO: 2560757 - RNA, 23 nt, Human
cuuuuaacaccugauguguacau

SEQ ID NO: 2560758 - RNA, 16 nt, Human
gaacacuccuucacag

SEQ ID NO: 2560759 - RNA, 15 nt, Human
gaacacuccuucaca

SEQ ID NO: 2560760 - RNA, 19 nt, Human
gaacagacuggaagcacag

SEQ ID NO: 2560761 - RNA, 20 nt, Human
gaacagacuggaagcacagc

SEQ ID NO: 2560762 - RNA, 17 nt, Human
gaacacuccuucacaga

SEQ ID NO: 2560763 - RNA, 20 nt, Human
gaacacuccaauuaaggauu

SEQ ID NO: 2560764 - RNA, 11 nt, Human
gaaauuugaau

SEQ ID NO: 2560765 - RNA, 21 nt, Human
gaaauucccuucaucuggaac

SEQ ID NO: 2560766 - RNA, 22 nt, Human
gaaauucccuucaucuggaacc

SEQ ID NO: 2560767 - RNA, 12 nt, Human
gaaauuccugua

SEQ ID NO: 2560768 - RNA, 13 nt, Human
gaaauuuccagag

SEQ ID NO: 2560769 - RNA, 21 nt, Human
gaaauuauguauguuuacaua

SEQ ID NO: 2560770 - RNA, 18 nt, Human
gaaauuauguauguuuac

SEQ ID NO: 2560771 - RNA, 15 nt, Human
gaaauuauuuaauaa

SEQ ID NO: 2560772 - RNA, 13 nt, Human
gaaauuauuuaau

SEQ ID NO: 2560773 - RNA, 17 nt, Human
gaaauucccuucaucug

SEQ ID NO: 2560774 - RNA, 17 nt, Human
gaaauuauuuaauaaaa

SEQ ID NO: 2560775 - RNA, 23 nt, Human
gaaauuaguacuccccuccuuga

SEQ ID NO: 2560776 - RNA, 19 nt, Human
gaaauuacuacaaaauuug

SEQ ID NO: 2560777 - RNA, 13 nt, Human
gaaauuagccggg

SEQ ID NO: 2560778 - RNA, 21 nt, Human
gaaauuacuuaucauccacau

SEQ ID NO: 2560779 - RNA, 16 nt, Human
gaaauuagcuguguga

SEQ ID NO: 2560780 - RNA, 13 nt, Human
gaaauuagggccc

SEQ ID NO: 2560781 - RNA, 19 nt, Human
gaaauuagcugugugaaau

SEQ ID NO: 2560782 - RNA, 16 nt, Human
gaacagcuucagguua

SEQ ID NO: 2560783 - RNA, 15 nt, Human
gaacagcuucagguu

SEQ ID NO: 2560784 - RNA, 14 nt, Human
gaacagcuucaggu

SEQ ID NO: 2560785 - RNA, 15 nt, Human
gaacagcuguaaucu

SEQ ID NO: 2560786 - RNA, 22 nt, Human
gaacagacuggaagcacagcuu

SEQ ID NO: 2560787 - RNA, 18 nt, Human
gaacagauaaucagugug

SEQ ID NO: 2560788 - RNA, 14 nt, Human
gaaauuugauuucu

SEQ ID NO: 2560789 - RNA, 19 nt, Human
gaacaggcaagugaagaaa

SEQ ID NO: 2560790 - RNA, 17 nt, Human
gaacagcuucagguuau

SEQ ID NO: 2560791 - RNA, 13 nt, Human
gaacaguaaacau

SEQ ID NO: 2560792 - RNA, 14 nt, Human
gaacaguaacugcc

SEQ ID NO: 2560793 - RNA, 12 nt, Human
gaacaguaaaca

SEQ ID NO: 2560794 - RNA, 14 nt, Human
gaacaguguuuccc

SEQ ID NO: 2560795 - RNA, 24 nt, Human
gaacaguuaccucugccucagaaa

SEQ ID NO: 2560796 - RNA, 16 nt, Human
gaacaguguuucccau

SEQ ID NO: 2560797 - RNA, 17 nt, Human
gaacaguguuucccaua

SEQ ID NO: 2560798 - RNA, 18 nt, Human
gaacaguguuucccauaa

SEQ ID NO: 2560799 - RNA, 21 nt, Human
gaacaguguuucccauaauuu

SEQ ID NO: 2560800 - RNA, 19 nt, Human
gaacauccuuccuucccac

SEQ ID NO: 2560801 - RNA, 14 nt, Human
gaacaguuuguaca

SEQ ID NO: 2560802 - RNA, 14 nt, Human
gaacaucccugcca

SEQ ID NO: 2560803 - RNA, 19 nt, Human
gaacauggacuuguauauu

SEQ ID NO: 2560804 - RNA, 17 nt, Human
gaacauggacuuguaua

SEQ ID NO: 2560805 - RNA, 13 nt, Human
gaacauccuuccu

SEQ ID NO: 2560806 - RNA, 15 nt, Human
gaacaucccugccag

SEQ ID NO: 2560807 - RNA, 17 nt, Human
gaacaucuguccuguga

SEQ ID NO: 2560808 - RNA, 23 nt, Human
gaacaugaaaacagaaaacgguu

SEQ ID NO: 2560809 - RNA, 15 nt, Human
gaacauggagagcua

SEQ ID NO: 2560810 - RNA, 22 nt, Human
gaacauggacuuguauauuugu

SEQ ID NO: 2560811 - RNA, 19 nt, Human
gaacaugugagagguuuga

SEQ ID NO: 2560812 - RNA, 11 nt, Human
gaaccaaagcg

SEQ ID NO: 2560813 - RNA, 20 nt, Human
gaaccaaagcgaauuuuaaa

SEQ ID NO: 2560814 - RNA, 23 nt, Human
gaaccaaagcgaauuuuaaaaga

SEQ ID NO: 2560815 - RNA, 19 nt, Human
gaaccaacaaguaaauauu

SEQ ID NO: 2560816 - RNA, 24 nt, Human
gaaccaacaaccucaacugccuac

SEQ ID NO: 2560817 - RNA, 15 nt, Human
gaaccaacacuaaca

SEQ ID NO: 2560818 - RNA, 17 nt, Human
gaaccaaaucuggaagc

SEQ ID NO: 2560819 - RNA, 16 nt, Human
gaaccaaaucuggaag

SEQ ID NO: 2560820 - RNA, 16 nt, Human
gaacauguacacuggu

SEQ ID NO: 2560821 - RNA, 13 nt, Human
gaaauauuuauuu

SEQ ID NO: 2560822 - RNA, 20 nt, Human
gaaauaucugaaaauguaug

SEQ ID NO: 2560823 - RNA, 15 nt, Human
gaaauauuuagcaaa

SEQ ID NO: 2560824 - RNA, 14 nt, Human
gaaauaucauuuau

SEQ ID NO: 2560825 - RNA, 13 nt, Human
gaaauaucauuua

SEQ ID NO: 2560826 - RNA, 18 nt, Human
gaaauaucugaaaaugua

SEQ ID NO: 2560827 - RNA, 19 nt, Human
gaaauaucugaaaauguau

SEQ ID NO: 2560828 - RNA, 16 nt, Human
gaaauauuuauuuuaa

SEQ ID NO: 2560829 - RNA, 15 nt, Human
gaaauauuuauuuua

SEQ ID NO: 2560830 - RNA, 19 nt, Human
gaaauauuuagcaaauaau

SEQ ID NO: 2560831 - RNA, 22 nt, Human
gaaauaucaguuacucagcccu

SEQ ID NO: 2560832 - RNA, 15 nt, Human
gaaaugaaugugugu

SEQ ID NO: 2560833 - RNA, 13 nt, Human
gaaaugaaugugu

SEQ ID NO: 2560834 - RNA, 12 nt, Human
gaaaugaauaua

SEQ ID NO: 2560835 - RNA, 19 nt, Human
gaaaugaauaauuucccaa

SEQ ID NO: 2560836 - RNA, 15 nt, Human
gaaaugaauuaaagu

SEQ ID NO: 2560837 - RNA, 14 nt, Human
gaaaugaccaauau

SEQ ID NO: 2560838 - RNA, 15 nt, Human
gaaaugagaaggcag

SEQ ID NO: 2560839 - RNA, 20 nt, Human
gaaaugaaugugugugguuu

SEQ ID NO: 2560840 - RNA, 19 nt, Human
gaaaugacuaaaaaacaaa

SEQ ID NO: 2560841 - RNA, 23 nt, Human
gaaauaaaaggaagccaaagagu

SEQ ID NO: 2560842 - RNA, 17 nt, Human
gaaauaaaggaugugau

SEQ ID NO: 2560843 - RNA, 17 nt, Human
gaaauauaggaacuuaa

SEQ ID NO: 2560844 - RNA, 20 nt, Human
gaaauaucaguuacucagcc

SEQ ID NO: 2560845 - RNA, 21 nt, Human
gaaauaucaguuacucagccc

SEQ ID NO: 2560846 - RNA, 12 nt, Human
gaaauaucauuu

SEQ ID NO: 2560847 - RNA, 23 nt, Human
gaaauaucaguuacucagcccug

SEQ ID NO: 2560848 - RNA, 20 nt, Human
gaaauaaaggaugugauugu

SEQ ID NO: 2560849 - RNA, 23 nt, Human
gaaauauauauguguguguaugu

SEQ ID NO: 2560850 - RNA, 14 nt, Human
gaaauauauaugug

SEQ ID NO: 2560851 - RNA, 17 nt, Human
gaaauauauaugugugu

SEQ ID NO: 2560852 - RNA, 19 nt, Human
gaaaugggcagagcagaga

SEQ ID NO: 2560853 - RNA, 17 nt, Human
gaaaugggcagagcaga

SEQ ID NO: 2560854 - RNA, 17 nt, Human
gaaauguacagcaagga

SEQ ID NO: 2560855 - RNA, 18 nt, Human
gaaaugcugauggauaac

SEQ ID NO: 2560856 - RNA, 17 nt, Human
gaaaugcugcauuuuaa

SEQ ID NO: 2560857 - RNA, 14 nt, Human
gaaaugcugccugc

SEQ ID NO: 2560858 - RNA, 13 nt, Human
gaaaugcugccug

SEQ ID NO: 2560859 - RNA, 14 nt, Human
gaaauguguuucug

SEQ ID NO: 2560860 - RNA, 13 nt, Human
gaaauguguuucu

SEQ ID NO: 2560861 - RNA, 18 nt, Human
gaaauuacuacaaaauuu

SEQ ID NO: 2560862 - RNA, 15 nt, Human
gaaaugggcagagca

SEQ ID NO: 2560863 - RNA, 16 nt, Human
gaaaugggcagagcag

SEQ ID NO: 2560864 - RNA, 20 nt, Human
gaaaugcauuauuuugaaug

SEQ ID NO: 2560865 - RNA, 23 nt, Human
gaaaugcauccauuccucaggga

SEQ ID NO: 2560866 - RNA, 18 nt, Human
gaaaugaggucagagccu

SEQ ID NO: 2560867 - RNA, 14 nt, Human
gaaaugaucaguuu

SEQ ID NO: 2560868 - RNA, 11 nt, Human
gaaaugagcug

SEQ ID NO: 2560869 - RNA, 18 nt, Human
gaaaugagaucaggcucu

SEQ ID NO: 2560870 - RNA, 19 nt, Human
gaaaugagaaggcagccac

SEQ ID NO: 2560871 - RNA, 18 nt, Human
gaaaugagaaggcagcca

SEQ ID NO: 2560872 - RNA, 17 nt, Human
gaaaugagaaggcagcc

SEQ ID NO: 2560873 - RNA, 16 nt, Human
gaaaugagaucaggcu

SEQ ID NO: 2560874 - RNA, 22 nt, Human
gaaagacuauucaaacagucuc

SEQ ID NO: 2560875 - RNA, 23 nt, Human
gaaagacuauucaaacagucuca

SEQ ID NO: 2560876 - RNA, 19 nt, Human
gaaagacuauucaaacagu

SEQ ID NO: 2560877 - RNA, 18 nt, Human
gaaacugaggaauuuucu

SEQ ID NO: 2560878 - RNA, 22 nt, Human
gaaacugaggaauuuucuuugu

SEQ ID NO: 2560879 - RNA, 15 nt, Human
gaaacugcagggaaa

SEQ ID NO: 2560880 - RNA, 16 nt, Human
gaaagagagaaaauaa

SEQ ID NO: 2560881 - RNA, 17 nt, Human
gaaagagagaaaauaaa

SEQ ID NO: 2560882 - RNA, 18 nt, Human
gaaagagagaaaauaaaa

SEQ ID NO: 2560883 - RNA, 20 nt, Human
gaaagagagaaaauaaaaag

SEQ ID NO: 2560884 - RNA, 21 nt, Human
gaaagagagaaaauaaaaagu

SEQ ID NO: 2560885 - RNA, 22 nt, Human
gaaagagagaaaauaaaaaguu

SEQ ID NO: 2560886 - RNA, 23 nt, Human
gaaagagagaaaauaaaaaguua

SEQ ID NO: 2560887 - RNA, 12 nt, Human
gaaagagagaaa

SEQ ID NO: 2560888 - RNA, 13 nt, Human
gaaagagagaaaa

SEQ ID NO: 2560889 - RNA, 14 nt, Human
gaaagagagaaaau

SEQ ID NO: 2560890 - RNA, 15 nt, Human
gaaagagagaaaaua

SEQ ID NO: 2560891 - RNA, 11 nt, Human
gaaagagagaa

SEQ ID NO: 2560892 - RNA, 14 nt, Human
gaaagacugagcuc

SEQ ID NO: 2560893 - RNA, 19 nt, Human
gaaagagagagaauucuuu

SEQ ID NO: 2560894 - RNA, 22 nt, Human
gaaagagcacuuaagagaauau

SEQ ID NO: 2560895 - RNA, 21 nt, Human
gaaagagcacuuaagagaaua

SEQ ID NO: 2560896 - RNA, 18 nt, Human
gaaagagcacuuaagaga

SEQ ID NO: 2560897 - RNA, 16 nt, Human
gaaagagcacuuaaga

SEQ ID NO: 2560898 - RNA, 17 nt, Human
gaaagaugagcuuuucu

SEQ ID NO: 2560899 - RNA, 14 nt, Human
gaaagauaacuagg

SEQ ID NO: 2560900 - RNA, 22 nt, Human
gaaagauggcugugccucugcc

SEQ ID NO: 2560901 - RNA, 16 nt, Human
gaaagaucaaaagguu

SEQ ID NO: 2560902 - RNA, 13 nt, Human
gaaagcagaacag

SEQ ID NO: 2560903 - RNA, 14 nt, Human
gaaagcagaacagu

SEQ ID NO: 2560904 - RNA, 23 nt, Human
gaaagauggcugugccucugccu

SEQ ID NO: 2560905 - RNA, 14 nt, Human
gaaagcaauaaaug

SEQ ID NO: 2560906 - RNA, 20 nt, Human
gaaaccuuuuuuaagauuuu

SEQ ID NO: 2560907 - RNA, 19 nt, Human
gaaaccuuuuuuaagauuu

SEQ ID NO: 2560908 - RNA, 18 nt, Human
gaaaccuuuuuuaagauu

SEQ ID NO: 2560909 - RNA, 17 nt, Human
gaaaccuuuuuuaagau

SEQ ID NO: 2560910 - RNA, 14 nt, Human
gaaaccuuuuuuaa

SEQ ID NO: 2560911 - RNA, 21 nt, Human
gaaaccuuuagggcagcuugc

SEQ ID NO: 2560912 - RNA, 20 nt, Human
gaaaccuuuagggcagcuug

SEQ ID NO: 2560913 - RNA, 19 nt, Human
gaaaccuuuagggcagcuu

SEQ ID NO: 2560914 - RNA, 17 nt, Human
gaaaccuugguguaguu

SEQ ID NO: 2560915 - RNA, 18 nt, Human
gaaaccuuuagggcagcu

SEQ ID NO: 2560916 - RNA, 17 nt, Human
gaaaccuuuagggcagc

SEQ ID NO: 2560917 - RNA, 22 nt, Human
gaaaccuugguguaguugaacu

SEQ ID NO: 2560918 - RNA, 13 nt, Human
gaaaaauguguaa

SEQ ID NO: 2560919 - RNA, 14 nt, Human
gaaaaauguguaau

SEQ ID NO: 2560920 - RNA, 16 nt, Human
gaaaaaugagccuggc

SEQ ID NO: 2560921 - RNA, 20 nt, Human
gaaaaaucuaagugauauaa

SEQ ID NO: 2560922 - RNA, 18 nt, Human
gaaaaaugagagaaggga

SEQ ID NO: 2560923 - RNA, 16 nt, Human
gaaaaaucuaagugau

SEQ ID NO: 2560924 - RNA, 20 nt, Human
gaaaaaugcccuuaaaucau

SEQ ID NO: 2560925 - RNA, 16 nt, Human
gaaaaagcacaagaag

SEQ ID NO: 2560926 - RNA, 17 nt, Human
gaaaaagcacaagaagc

SEQ ID NO: 2560927 - RNA, 22 nt, Human
gaaaaagcaguaacugacaacu

SEQ ID NO: 2560928 - RNA, 13 nt, Human
gaaacugccagca

SEQ ID NO: 2560929 - RNA, 15 nt, Human
gaaacugccagcaac

SEQ ID NO: 2560930 - RNA, 16 nt, Human
gaaacuccacaucugc

SEQ ID NO: 2560931 - RNA, 23 nt, Human
gaaacucaccugcuggccccuca

SEQ ID NO: 2560932 - RNA, 22 nt, Human
gaaacucagagucggaacggag

SEQ ID NO: 2560933 - RNA, 19 nt, Human
gaaacucaccugcuggccc

SEQ ID NO: 2560934 - RNA, 20 nt, Human
gaaacucaccugcuggcccc

SEQ ID NO: 2560935 - RNA, 21 nt, Human
gaaacucaccugcuggccccu

SEQ ID NO: 2560936 - RNA, 22 nt, Human
gaaacucaccugcuggccccuc

SEQ ID NO: 2560937 - RNA, 14 nt, Human
gaaacugaaugcuc

SEQ ID NO: 2560938 - RNA, 19 nt, Human
gaaacucuuuuugggcucc

SEQ ID NO: 2560939 - RNA, 17 nt, Human
gaaacuccacaucugcc

SEQ ID NO: 2560940 - RNA, 23 nt, Human
gaaacucauaauagacuucccac

SEQ ID NO: 2560941 - RNA, 19 nt, Human
gaaacuaggugcauauuua

SEQ ID NO: 2560942 - RNA, 17 nt, Human
gaaacucaccauguaaa

SEQ ID NO: 2560943 - RNA, 20 nt, Human
gaaacucaccauguaaaaga

SEQ ID NO: 2560944 - RNA, 21 nt, Human
gaaacucacccccaaggggca

SEQ ID NO: 2560945 - RNA, 18 nt, Human
gaaacucaccugcuggcc

SEQ ID NO: 2560946 - RNA, 20 nt, Human
gaaacuaggugcauauuuau

SEQ ID NO: 2560947 - RNA, 22 nt, Human
gaaaccuuuuuuaagauuuuuc

SEQ ID NO: 2560948 - RNA, 21 nt, Human
gaaaccuuuuuuaagauuuuu

SEQ ID NO: 2560949 - RNA, 23 nt, Human
gaaaccuuuuuuaagauuuuucu

SEQ ID NO: 2560950 - RNA, 17 nt, Human
gaaagcauuugaaugca

SEQ ID NO: 2560951 - RNA, 16 nt, Human
gaaagcauuugaaugc

SEQ ID NO: 2560952 - RNA, 15 nt, Human
gaaagcauuugaaug

SEQ ID NO: 2560953 - RNA, 14 nt, Human
gaaagcauuugaau

SEQ ID NO: 2560954 - RNA, 23 nt, Human
gaaagcacaggugggcuucccag

SEQ ID NO: 2560955 - RNA, 15 nt, Human
gaaagcacagguggg

SEQ ID NO: 2560956 - RNA, 12 nt, Human
gaaagcauuuga

SEQ ID NO: 2560957 - RNA, 21 nt, Human
gaaagcacugcaugaauaaaa

SEQ ID NO: 2560958 - RNA, 21 nt, Human
gaaagcauguggcauguucau

SEQ ID NO: 2560959 - RNA, 13 nt, Human
gaaagccaccucu

SEQ ID NO: 2560960 - RNA, 21 nt, Human
gaaagcauuugaaugcauuuu

SEQ ID NO: 2560961 - RNA, 20 nt, Human
gaaagcauuugaaugcauuu

SEQ ID NO: 2560962 - RNA, 18 nt, Human
gaaagcauuugaaugcau

SEQ ID NO: 2560963 - RNA, 14 nt, Human
gaaagccaggcagg

SEQ ID NO: 2560964 - RNA, 11 nt, Human
gaaagccaggc

SEQ ID NO: 2560965 - RNA, 20 nt, Human
gaaagccaccucucccucaa

SEQ ID NO: 2560966 - RNA, 19 nt, Human
gaaagccaccucucccuca

SEQ ID NO: 2560967 - RNA, 18 nt, Human
gaaagccaccucucccuc

SEQ ID NO: 2560968 - RNA, 15 nt, Human
gaaagccaccucucc

SEQ ID NO: 2560969 - RNA, 14 nt, Human
gaaagccaccucuc

SEQ ID NO: 2560970 - RNA, 22 nt, Human
gaaagcauguggcauguucauc

SEQ ID NO: 2560971 - RNA, 16 nt, Human
gaaaggaaagaggcuc

SEQ ID NO: 2560972 - RNA, 11 nt, Human
gaaaggaaaga

SEQ ID NO: 2560973 - RNA, 21 nt, Human
gaaagcuugcccuggugccuc

SEQ ID NO: 2560974 - RNA, 17 nt, Human
gaaagcauccaugugug

SEQ ID NO: 2560975 - RNA, 20 nt, Human
gaaagccagugacuccagga

SEQ ID NO: 2560976 - RNA, 19 nt, Human
gaaagccagugacuccagg

SEQ ID NO: 2560977 - RNA, 17 nt, Human
gaaagccagugacucca

SEQ ID NO: 2560978 - RNA, 23 nt, Human
gaaagccaggcagguagccaggg

SEQ ID NO: 2560979 - RNA, 16 nt, Human
gaaagccagugacucc

SEQ ID NO: 2560980 - RNA, 17 nt, Human
gaaaggagaggaaagaa

SEQ ID NO: 2560981 - RNA, 14 nt, Human
gaaaggauucaugu

SEQ ID NO: 2560982 - RNA, 22 nt, Human
gaaaguacuucuccacccugcu

SEQ ID NO: 2560983 - RNA, 22 nt, Human
gaaaggauguaaacagugccug

SEQ ID NO: 2560984 - RNA, 17 nt, Human
gaaagucagaugcccag

SEQ ID NO: 2560985 - RNA, 20 nt, Human
gaaagucagaugcccagagg

SEQ ID NO: 2560986 - RNA, 22 nt, Human
gaaagucgaauuaauagcuuuu

SEQ ID NO: 2560987 - RNA, 21 nt, Human
gaaagucauuggcuuuauccu

SEQ ID NO: 2560988 - RNA, 18 nt, Human
gaaagucauuggcuuuau

SEQ ID NO: 2560989 - RNA, 17 nt, Human
gaaagucauuggcuuua

SEQ ID NO: 2560990 - RNA, 14 nt, Human
gaaagucauuggcu

SEQ ID NO: 2560991 - RNA, 22 nt, Human
gaaaggaagcuccacugucacc

SEQ ID NO: 2560992 - RNA, 18 nt, Human
gaaaggaagcuccacugu

SEQ ID NO: 2560993 - RNA, 21 nt, Human
gaaaggaagugggacuggcac

SEQ ID NO: 2560994 - RNA, 21 nt, Human
gaaaggacucugggguuuuua

SEQ ID NO: 2560995 - RNA, 11 nt, Human
gaaaggagacu

SEQ ID NO: 2560996 - RNA, 15 nt, Human
gaaaggaguagaaaa

SEQ ID NO: 2560997 - RNA, 16 nt, Human
gaaaggaguagaaaaa

SEQ ID NO: 2560998 - RNA, 20 nt, Human
gaaaggauguaaacagugcc

SEQ ID NO: 2560999 - RNA, 14 nt, Human
gaaaggagaggaaa

SEQ ID NO: 2561000 - RNA, 23 nt, Human
gaaaggacucugggguuuuuacu

SEQ ID NO: 2561001 - RNA, 13 nt, Human
gaaaggagacuag

SEQ ID NO: 2561002 - RNA, 14 nt, Human
gaaauaaaaccuuu

SEQ ID NO: 2561003 - RNA, 22 nt, Human
gaaaguuuucagaaccucuucc

SEQ ID NO: 2561004 - RNA, 16 nt, Human
gaaauaaaaggaagcc

SEQ ID NO: 2561005 - RNA, 17 nt, Human
gaaauaaaaggaagcca

SEQ ID NO: 2561006 - RNA, 18 nt, Human
gaaauaaaaggaagccaa

SEQ ID NO: 2561007 - RNA, 19 nt, Human
gaaauaaaaggaagccaaa

SEQ ID NO: 2561008 - RNA, 15 nt, Human
gaaauaaaaccuuuc

SEQ ID NO: 2561009 - RNA, 16 nt, Human
gaaauaaaaccuuuca

SEQ ID NO: 2561010 - RNA, 17 nt, Human
gaaauaaaaccuuucaa

SEQ ID NO: 2561011 - RNA, 18 nt, Human
gaaauaaaaccuuucaaa

SEQ ID NO: 2561012 - RNA, 14 nt, Human
gaaaguuuacagga

SEQ ID NO: 2561013 - RNA, 18 nt, Human
gaaaguugcacggcugcu

SEQ ID NO: 2561014 - RNA, 17 nt, Human
gaaaguuacaaauugcu

SEQ ID NO: 2561015 - RNA, 16 nt, Human
gaaaguuuacaggaaa

SEQ ID NO: 2561016 - RNA, 20 nt, Human
gaaaguugcacggcugcuga

SEQ ID NO: 2561017 - RNA, 19 nt, Human
gaaaguugcacggcugcug

SEQ ID NO: 2561018 - RNA, 17 nt, Human
gaaaguuccuuauguau

SEQ ID NO: 2561019 - RNA, 23 nt, Human
gaaaguguaaagcauuccaacaa

SEQ ID NO: 2561020 - RNA, 16 nt, Human
gaaaguguaaagcauu

SEQ ID NO: 2561021 - RNA, 15 nt, Human
gaaaguguaaagcau

SEQ ID NO: 2561022 - RNA, 14 nt, Human
gaaaguguaaagca

SEQ ID NO: 2561023 - RNA, 13 nt, Human
gaaaguguaaagc

SEQ ID NO: 2561024 - RNA, 12 nt, Human
gaaaguguaaag

SEQ ID NO: 2561025 - RNA, 20 nt, Human
gaaaguggugcucaguugua

SEQ ID NO: 2561026 - RNA, 18 nt, Human
gaaaguggugcucaguug

SEQ ID NO: 2561027 - RNA, 16 nt, Human
gaaaguggugcucagu

SEQ ID NO: 2561028 - RNA, 23 nt, Human
gaaagugggugagaugcuggaga

SEQ ID NO: 2561029 - RNA, 21 nt, Human
gaaagugggugagaugcugga

SEQ ID NO: 2561030 - RNA, 21 nt, Human
gaaaguggccaugccacccug

SEQ ID NO: 2561031 - RNA, 16 nt, Human
gaaagugaauuugaau

SEQ ID NO: 2561032 - RNA, 17 nt, Human
gaaagugaauuugaaug

SEQ ID NO: 2561033 - RNA, 19 nt, Human
gaaagugaauuugaaugaa

SEQ ID NO: 2561034 - RNA, 23 nt, Human
gaaagugaauuugaaugaaaaau

SEQ ID NO: 2561035 - RNA, 22 nt, Human
gaaagugauuucuagaaagccu

SEQ ID NO: 2561036 - RNA, 21 nt, Human
gaaagugauaucccccagccu

SEQ ID NO: 2561037 - RNA, 13 nt, Human
gaaagugaauuug

SEQ ID NO: 2561038 - RNA, 19 nt, Human
gaaagugaagcaaaucaga

SEQ ID NO: 2561039 - RNA, 16 nt, Human
gaaagugaaaguccag

SEQ ID NO: 2561040 - RNA, 22 nt, Human
gaaggaaacccagcucuggucc

SEQ ID NO: 2561041 - RNA, 21 nt, Human
gaaggaaacccagcucugguc

SEQ ID NO: 2561042 - RNA, 15 nt, Human
gaaggaacguccccu

SEQ ID NO: 2561043 - RNA, 22 nt, Human
gaagcuucuggugaccuuccaa

SEQ ID NO: 2561044 - RNA, 19 nt, Human
gaaggaaagaaagaaggaa

SEQ ID NO: 2561045 - RNA, 16 nt, Human
gaagcuuccaguccaa

SEQ ID NO: 2561046 - RNA, 13 nt, Human
gaagcuuccaguc

SEQ ID NO: 2561047 - RNA, 19 nt, Human
gaaggaagacuucaucccu

SEQ ID NO: 2561048 - RNA, 23 nt, Human
gaaggaaccaaagcgaauuuuaa

SEQ ID NO: 2561049 - RNA, 20 nt, Human
gaaggaacucuggcuuccag

SEQ ID NO: 2561050 - RNA, 15 nt, Human
gaaggaacucuggcu

SEQ ID NO: 2561051 - RNA, 23 nt, Human
gaaggaacucuggcuuccaggua

SEQ ID NO: 2561052 - RNA, 22 nt, Human
gaaggaacucuggcuuccaggu

SEQ ID NO: 2561053 - RNA, 23 nt, Human
gaaggaaggagacucaccucugc

SEQ ID NO: 2561054 - RNA, 16 nt, Human
gaaggaagugaagagg

SEQ ID NO: 2561055 - RNA, 22 nt, Human
gaaggacccggaggggccuggc

SEQ ID NO: 2561056 - RNA, 22 nt, Human
gaaggaccacauuuuauauuua

SEQ ID NO: 2561057 - RNA, 20 nt, Human
gaaggaccacauuuuauauu

SEQ ID NO: 2561058 - RNA, 16 nt, Human
gaaggaccacauuuua

SEQ ID NO: 2561059 - RNA, 17 nt, Human
gaaggacacuuccugcc

SEQ ID NO: 2561060 - RNA, 18 nt, Human
gaaggacacuuccugccu

SEQ ID NO: 2561061 - RNA, 15 nt, Human
gaaggacacuuccug

SEQ ID NO: 2561062 - RNA, 16 nt, Human
gaaggacaaggcuaga

SEQ ID NO: 2561063 - RNA, 15 nt, Human
gaaggaggaggagga

SEQ ID NO: 2561064 - RNA, 21 nt, Human
gaaggacauugcggacagcca

SEQ ID NO: 2561065 - RNA, 20 nt, Human
gaaggacauugcggacagcc

SEQ ID NO: 2561066 - RNA, 22 nt, Human
gaaggaauaaauugcuccuuga

SEQ ID NO: 2561067 - RNA, 20 nt, Human
gaaggaauauauggcagagu

SEQ ID NO: 2561068 - RNA, 19 nt, Human
gaaggaauauauggcagag

SEQ ID NO: 2561069 - RNA, 15 nt, Human
gaaggaauugacuuc

SEQ ID NO: 2561070 - RNA, 19 nt, Human
gaaggacauugcggacagc

SEQ ID NO: 2561071 - RNA, 20 nt, Human
gaagccuguuuuguuggaag

SEQ ID NO: 2561072 - RNA, 22 nt, Human
gaagccuguuuuguuggaaggu

SEQ ID NO: 2561073 - RNA, 13 nt, Human
gaagccuggaaca

SEQ ID NO: 2561074 - RNA, 16 nt, Human
gaagccugcccuuguc

SEQ ID NO: 2561075 - RNA, 14 nt, Human
gaagccuuagccag

SEQ ID NO: 2561076 - RNA, 23 nt, Human
gaagcuguguccuugcaccugca

SEQ ID NO: 2561077 - RNA, 13 nt, Human
gaagcuguuguac

SEQ ID NO: 2561078 - RNA, 24 nt, Human
gaagcuguguccuugcaccugcau

SEQ ID NO: 2561079 - RNA, 20 nt, Human
gaaggaaacccagcucuggu

SEQ ID NO: 2561080 - RNA, 19 nt, Human
gaaggaaacccagcucugg

SEQ ID NO: 2561081 - RNA, 21 nt, Human
gaagcuguuguacauuuauga

SEQ ID NO: 2561082 - RNA, 19 nt, Human
gaagcuguuguacauuuau

SEQ ID NO: 2561083 - RNA, 18 nt, Human
gaagcuguuguacauuua

SEQ ID NO: 2561084 - RNA, 16 nt, Human
gaagcuguuguacauu

SEQ ID NO: 2561085 - RNA, 22 nt, Human
gaagcuguuguacauuuaugau

SEQ ID NO: 2561086 - RNA, 15 nt, Human
gaagcuucagaaguu

SEQ ID NO: 2561087 - RNA, 20 nt, Human
gaagccgcuggggccaguug

SEQ ID NO: 2561088 - RNA, 18 nt, Human
gaagccgcuggggccagu

SEQ ID NO: 2561089 - RNA, 13 nt, Human
gaagccucuggga

SEQ ID NO: 2561090 - RNA, 14 nt, Human
gaagccgcugcugg

SEQ ID NO: 2561091 - RNA, 21 nt, Human
gaagccucugggucagugguc

SEQ ID NO: 2561092 - RNA, 12 nt, Human
gaagccugaggc

SEQ ID NO: 2561093 - RNA, 13 nt, Human
gaagccugaggcu

SEQ ID NO: 2561094 - RNA, 12 nt, Human
gaagccugcccu

SEQ ID NO: 2561095 - RNA, 15 nt, Human
gaagccugcaggagu

SEQ ID NO: 2561096 - RNA, 16 nt, Human
gaagccaaagaaaaau

SEQ ID NO: 2561097 - RNA, 14 nt, Human
gaagccaaagaaaa

SEQ ID NO: 2561098 - RNA, 13 nt, Human
gaagccaaagaaa

SEQ ID NO: 2561099 - RNA, 12 nt, Human
gaagccaaagaa

SEQ ID NO: 2561100 - RNA, 17 nt, Human
gaagccaacuuggcuuu

SEQ ID NO: 2561101 - RNA, 15 nt, Human
gaagccaacuuggcu

SEQ ID NO: 2561102 - RNA, 13 nt, Human
gaagccaaagagu

SEQ ID NO: 2561103 - RNA, 14 nt, Human
gaagccgcuggggc

SEQ ID NO: 2561104 - RNA, 10 nt, Human
gaagccaaag

SEQ ID NO: 2561105 - RNA, 18 nt, Human
gaagccaaaccucuguga

SEQ ID NO: 2561106 - RNA, 15 nt, Human
gaagcauuuuauaaa

SEQ ID NO: 2561107 - RNA, 17 nt, Human
gaagcauuuuauaaauc

SEQ ID NO: 2561108 - RNA, 13 nt, Human
gaagcauuuuaua

SEQ ID NO: 2561109 - RNA, 18 nt, Human
gaaggaggaggaggaggu

SEQ ID NO: 2561110 - RNA, 14 nt, Human
gaaggaggcuggcu

SEQ ID NO: 2561111 - RNA, 15 nt, Human
gaaggaggugaggga

SEQ ID NO: 2561112 - RNA, 13 nt, Human
gaaggaggugagg

SEQ ID NO: 2561113 - RNA, 19 nt, Human
gaaggaggguuagggaggg

SEQ ID NO: 2561114 - RNA, 16 nt, Human
gaaggaugccaagaag

SEQ ID NO: 2561115 - RNA, 16 nt, Human
gaaggaugagcauuua

SEQ ID NO: 2561116 - RNA, 10 nt, Human
gaaggauccg

SEQ ID NO: 2561117 - RNA, 10 nt, Human
gaaggauccu

SEQ ID NO: 2561118 - RNA, 22 nt, Human
gaaggaucuguuuuuaaaaauc

SEQ ID NO: 2561119 - RNA, 20 nt, Human
gaaggcagggagggccuggg

SEQ ID NO: 2561120 - RNA, 22 nt, Human
gaaggcagggagggccugggcc

SEQ ID NO: 2561121 - RNA, 23 nt, Human
gaaggcagggagggccugggccc

SEQ ID NO: 2561122 - RNA, 21 nt, Human
gaaggcagggggaaggugggg

SEQ ID NO: 2561123 - RNA, 14 nt, Human
gaaggauuguaaaa

SEQ ID NO: 2561124 - RNA, 18 nt, Human
gaaggcagggagggccug

SEQ ID NO: 2561125 - RNA, 13 nt, Human
gaaggauuguaaa

SEQ ID NO: 2561126 - RNA, 14 nt, Human
gaaggaugagcauu

SEQ ID NO: 2561127 - RNA, 15 nt, Human
gaaggauguacauuu

SEQ ID NO: 2561128 - RNA, 16 nt, Human
gaaggauguacauuuc

SEQ ID NO: 2561129 - RNA, 17 nt, Human
gaaggauguacauuucc

SEQ ID NO: 2561130 - RNA, 20 nt, Human
gaaggauguacauuuccaaa

SEQ ID NO: 2561131 - RNA, 13 nt, Human
gaagggggcuggg

SEQ ID NO: 2561132 - RNA, 21 nt, Human
gaaggggcgucuguucccccu

SEQ ID NO: 2561133 - RNA, 13 nt, Human
gaagggggauaug

SEQ ID NO: 2561134 - RNA, 22 nt, Human
gaaggggccucaccgagugggg

SEQ ID NO: 2561135 - RNA, 23 nt, Human
gaaggggcccugguccuuccagg

SEQ ID NO: 2561136 - RNA, 16 nt, Human
gaaggggccagaggcu

SEQ ID NO: 2561137 - RNA, 17 nt, Human
gaaggggccagaggcuc

SEQ ID NO: 2561138 - RNA, 14 nt, Human
gaaggggccagagg

SEQ ID NO: 2561139 - RNA, 23 nt, Human
gaaggggaggcagccggcaccca

SEQ ID NO: 2561140 - RNA, 17 nt, Human
gaaggcaucagucccua

SEQ ID NO: 2561141 - RNA, 22 nt, Human
gaaggcagggggaagguggggu

SEQ ID NO: 2561142 - RNA, 21 nt, Human
gaaggcauaucagucucugag

SEQ ID NO: 2561143 - RNA, 18 nt, Human
gaaggucggaggcuuggg

SEQ ID NO: 2561144 - RNA, 23 nt, Human
gaaggucacucuuccugcaagga

SEQ ID NO: 2561145 - RNA, 16 nt, Human
gaagguccugcuauua

SEQ ID NO: 2561146 - RNA, 15 nt, Human
gaaggucggaggcuu

SEQ ID NO: 2561147 - RNA, 14 nt, Human
gaaggucggaggcu

SEQ ID NO: 2561148 - RNA, 22 nt, Human
gaagggggccaugaggccucag

SEQ ID NO: 2561149 - RNA, 21 nt, Human
gaaggucacucuuccugcaag

SEQ ID NO: 2561150 - RNA, 14 nt, Human
gaaggucaccagca

SEQ ID NO: 2561151 - RNA, 17 nt, Human
gaaggucaccugagccc

SEQ ID NO: 2561152 - RNA, 14 nt, Human
gaagggggccauga

SEQ ID NO: 2561153 - RNA, 16 nt, Human
gaagggggauaugaau

SEQ ID NO: 2561154 - RNA, 20 nt, Human
gaagggggccaugaggccuc

SEQ ID NO: 2561155 - RNA, 21 nt, Human
gaaggugaggagcuugaaacc

SEQ ID NO: 2561156 - RNA, 19 nt, Human
gaaguaaccauuugcacug

SEQ ID NO: 2561157 - RNA, 14 nt, Human
gaaguaacaguaac

SEQ ID NO: 2561158 - RNA, 19 nt, Human
gaaguaauaugcacacauu

SEQ ID NO: 2561159 - RNA, 20 nt, Human
gaaguaauaugcacacauuu

SEQ ID NO: 2561160 - RNA, 20 nt, Human
gaagucaagcccagccacgu

SEQ ID NO: 2561161 - RNA, 13 nt, Human
gaagucacacagu

SEQ ID NO: 2561162 - RNA, 19 nt, Human
gaaguauuuugcuggaaua

SEQ ID NO: 2561163 - RNA, 21 nt, Human
gaaguaauaugcacacauuuu

SEQ ID NO: 2561164 - RNA, 15 nt, Human
gaagucaaagcaagg

SEQ ID NO: 2561165 - RNA, 16 nt, Human
gaagucaaagcaagga

SEQ ID NO: 2561166 - RNA, 17 nt, Human
gaaguaagugggguugc

SEQ ID NO: 2561167 - RNA, 15 nt, Human
gaagucacugcacag

SEQ ID NO: 2561168 - RNA, 13 nt, Human
gaagucagagagg

SEQ ID NO: 2561169 - RNA, 18 nt, Human
gaagucuuagauguauau

SEQ ID NO: 2561170 - RNA, 22 nt, Human
gaaguccccuuccaucccagag

SEQ ID NO: 2561171 - RNA, 17 nt, Human
gaaguccccaggcccca

SEQ ID NO: 2561172 - RNA, 16 nt, Human
gaaguccccaggcccc

SEQ ID NO: 2561173 - RNA, 23 nt, Human
gaaguccaagcauuuagauguau

SEQ ID NO: 2561174 - RNA, 14 nt, Human
gaaguccaaugugg

SEQ ID NO: 2561175 - RNA, 17 nt, Human
gaaguccaauguggcaa

SEQ ID NO: 2561176 - RNA, 23 nt, Human
gaaguccccaggccccaggaagc

SEQ ID NO: 2561177 - RNA, 17 nt, Human
gaagaagggagaagaaa

SEQ ID NO: 2561178 - RNA, 16 nt, Human
gaagaagggagaagaa

SEQ ID NO: 2561179 - RNA, 15 nt, Human
gaagaagggagaaga

SEQ ID NO: 2561180 - RNA, 14 nt, Human
gaagaagggagaag

SEQ ID NO: 2561181 - RNA, 19 nt, Human
gaagaagggagaagaaagg

SEQ ID NO: 2561182 - RNA, 18 nt, Human
gaagaagggagaagaaag

SEQ ID NO: 2561183 - RNA, 16 nt, Human
gaagaagggcacccua

SEQ ID NO: 2561184 - RNA, 14 nt, Human
gaagaagucagaga

SEQ ID NO: 2561185 - RNA, 13 nt, Human
gaagaaguguguc

SEQ ID NO: 2561186 - RNA, 16 nt, Human
gaagacuucaucccuc

SEQ ID NO: 2561187 - RNA, 15 nt, Human
gaagacuucaucccu

SEQ ID NO: 2561188 - RNA, 19 nt, Human
gaagacuucaucccucugg

SEQ ID NO: 2561189 - RNA, 17 nt, Human
gaagacuucaucccucu

SEQ ID NO: 2561190 - RNA, 18 nt, Human
gaagagccugcaggugcu

SEQ ID NO: 2561191 - RNA, 16 nt, Human
gaagagccggagccuc

SEQ ID NO: 2561192 - RNA, 18 nt, Human
gaagaauacaaacauauu

SEQ ID NO: 2561193 - RNA, 12 nt, Human
gaagagccuugc

SEQ ID NO: 2561194 - RNA, 15 nt, Human
gaagagcuguucaca

SEQ ID NO: 2561195 - RNA, 20 nt, Human
gaagagcuguucacagccag

SEQ ID NO: 2561196 - RNA, 13 nt, Human
gaagagcuguuca

SEQ ID NO: 2561197 - RNA, 17 nt, Human
gaagagcuauuauauaa

SEQ ID NO: 2561198 - RNA, 23 nt, Human
gaagagcuguucacagccagacu

SEQ ID NO: 2561199 - RNA, 14 nt, Human
gaagaggaaaauga

SEQ ID NO: 2561200 - RNA, 18 nt, Human
gaagaggaaaaugaauaa

SEQ ID NO: 2561201 - RNA, 15 nt, Human
gaagaggaaaaugaa

SEQ ID NO: 2561202 - RNA, 10 nt, Human
gaagaggacu

SEQ ID NO: 2561203 - RNA, 20 nt, Human
gaagaguagcauuucauucu

SEQ ID NO: 2561204 - RNA, 16 nt, Human
gaagaguagcauuuca

SEQ ID NO: 2561205 - RNA, 23 nt, Human
gaagaguaagucaaccugccuga

SEQ ID NO: 2561206 - RNA, 14 nt, Human
gaagaguccucuga

SEQ ID NO: 2561207 - RNA, 16 nt, Human
gaagaguccucugaau

SEQ ID NO: 2561208 - RNA, 22 nt, Human
gaagauugagauguguucacaa

SEQ ID NO: 2561209 - RNA, 17 nt, Human
gaagauugagauguguu

SEQ ID NO: 2561210 - RNA, 18 nt, Human
gaagcauuuacuuugugu

SEQ ID NO: 2561211 - RNA, 14 nt, Human
gaagauucuuuccc

SEQ ID NO: 2561212 - RNA, 13 nt, Human
gaagauugugaau

SEQ ID NO: 2561213 - RNA, 22 nt, Human
gaagauuugaugcuggagaggu

SEQ ID NO: 2561214 - RNA, 20 nt, Human
gaagauuugaugcuggagag

SEQ ID NO: 2561215 - RNA, 13 nt, Human
gaagaugcagcuc

SEQ ID NO: 2561216 - RNA, 14 nt, Human
gaagaugcagcuca

SEQ ID NO: 2561217 - RNA, 20 nt, Human
gaagauggcauccugugaag

SEQ ID NO: 2561218 - RNA, 16 nt, Human
gaagauggcauccugu

SEQ ID NO: 2561219 - RNA, 17 nt, Human
gaagaugaaagaggagg

SEQ ID NO: 2561220 - RNA, 13 nt, Human
gaagaugaaagag

SEQ ID NO: 2561221 - RNA, 14 nt, Human
gaagaugaaucaau

SEQ ID NO: 2561222 - RNA, 21 nt, Human
gaagaugcagcaaaaugugaa

SEQ ID NO: 2561223 - RNA, 16 nt, Human
gaagaugaucagaccu

SEQ ID NO: 2561224 - RNA, 13 nt, Human
gaagaugaucaga

SEQ ID NO: 2561225 - RNA, 17 nt, Human
gaagauguagaggagaa

SEQ ID NO: 2561226 - RNA, 18 nt, Human
gaagaugggggcaagaag

SEQ ID NO: 2561227 - RNA, 12 nt, Human
gaagaugggggc

SEQ ID NO: 2561228 - RNA, 17 nt, Human
gaagauucuccugugcu

SEQ ID NO: 2561229 - RNA, 17 nt, Human
gaagaguguacuggggg

SEQ ID NO: 2561230 - RNA, 15 nt, Human
gaagaguguacuggg

SEQ ID NO: 2561231 - RNA, 14 nt, Human
gaagaguguacugg

SEQ ID NO: 2561232 - RNA, 17 nt, Human
gaagaguggguuucaca

SEQ ID NO: 2561233 - RNA, 18 nt, Human
gaagaguggguuucacaa

SEQ ID NO: 2561234 - RNA, 14 nt, Human
gaagagugagaggg

SEQ ID NO: 2561235 - RNA, 16 nt, Human
gaagagugagagggca

SEQ ID NO: 2561236 - RNA, 14 nt, Human
gaagauauuuuucc

SEQ ID NO: 2561237 - RNA, 21 nt, Human
gaagauauaacuauugcccag

SEQ ID NO: 2561238 - RNA, 14 nt, Human
gaagauaucuugaa

SEQ ID NO: 2561239 - RNA, 22 nt, Human
gaagauauaacuauugcccagg

SEQ ID NO: 2561240 - RNA, 20 nt, Human
gaagauaggcucugcacaga

SEQ ID NO: 2561241 - RNA, 18 nt, Human
gaagauaggcucugcaca

SEQ ID NO: 2561242 - RNA, 17 nt, Human
gaagauccuaaaacaaa

SEQ ID NO: 2561243 - RNA, 20 nt, Human
gaagauccccucaggacugc

SEQ ID NO: 2561244 - RNA, 16 nt, Human
gaagauccccucagga

SEQ ID NO: 2561245 - RNA, 18 nt, Human
gaagaucacgcuccccgc

SEQ ID NO: 2561246 - RNA, 15 nt, Human
gaagauccccucagg

SEQ ID NO: 2561247 - RNA, 17 nt, Human
gaagaucacgcuccccg

SEQ ID NO: 2561248 - RNA, 16 nt, Human
gaagaucacgcucccc

SEQ ID NO: 2561249 - RNA, 21 nt, Human
gaagaucauauacgugaaaau

SEQ ID NO: 2561250 - RNA, 22 nt, Human
gaagauccugcggguggggcuu

SEQ ID NO: 2561251 - RNA, 14 nt, Human
gaagauccugcggg

SEQ ID NO: 2561252 - RNA, 13 nt, Human
gaagauccuaccc

SEQ ID NO: 2561253 - RNA, 18 nt, Human
gaagaucguuaguaucua

SEQ ID NO: 2561254 - RNA, 15 nt, Human
gaagaucuuaaauuu

SEQ ID NO: 2561255 - RNA, 15 nt, Human
gaaccacaagacugc

SEQ ID NO: 2561256 - RNA, 14 nt, Human
gaaccacaagacug

SEQ ID NO: 2561257 - RNA, 18 nt, Human
gaaccacaucuugcucug

SEQ ID NO: 2561258 - RNA, 20 nt, Human
gaaccacaucuugcucugcu

SEQ ID NO: 2561259 - RNA, 23 nt, Human
gaaccaaguggaccuugagacca

SEQ ID NO: 2561260 - RNA, 24 nt, Human
gaaccaaguggaccuugagaccac

SEQ ID NO: 2561261 - RNA, 13 nt, Human
gaacuccugaccu

SEQ ID NO: 2561262 - RNA, 16 nt, Human
gaacuccuaaaucaag

SEQ ID NO: 2561263 - RNA, 13 nt, Human
gaacuguuguaua

SEQ ID NO: 2561264 - RNA, 20 nt, Human
gaacuguguuucaaguucaa

SEQ ID NO: 2561265 - RNA, 13 nt, Human
gaaccaauauuug

SEQ ID NO: 2561266 - RNA, 17 nt, Human
gaacugugccuuugagu

SEQ ID NO: 2561267 - RNA, 16 nt, Human
gaacucccuuucaaca

SEQ ID NO: 2561268 - RNA, 15 nt, Human
gaacuccuaaaucaa

SEQ ID NO: 2561269 - RNA, 17 nt, Human
gaacuuggcgcugcccc

SEQ ID NO: 2561270 - RNA, 17 nt, Human
gaacuucucucagacuu

SEQ ID NO: 2561271 - RNA, 14 nt, Human
gaacuucuaauaua

SEQ ID NO: 2561272 - RNA, 14 nt, Human
gaacuuaaauaaug

SEQ ID NO: 2561273 - RNA, 14 nt, Human
gaacuguuguauaa

SEQ ID NO: 2561274 - RNA, 15 nt, Human
gaacuguuguauaaa

SEQ ID NO: 2561275 - RNA, 16 nt, Human
gaacuguuguauaaau

SEQ ID NO: 2561276 - RNA, 20 nt, Human
gaacuguuguauaaauuuau

SEQ ID NO: 2561277 - RNA, 17 nt, Human
gaacuuaaauaauguga

SEQ ID NO: 2561278 - RNA, 15 nt, Human
gaacuucuaauauau

SEQ ID NO: 2561279 - RNA, 13 nt, Human
gaacuucuaauau

SEQ ID NO: 2561280 - RNA, 23 nt, Human
gaacuucgcaucaaaagacaauu

SEQ ID NO: 2561281 - RNA, 13 nt, Human
gaacuuaaaauga

SEQ ID NO: 2561282 - RNA, 15 nt, Human
gaacuuaaauaaaug

SEQ ID NO: 2561283 - RNA, 18 nt, Human
gaacuuaaauaaauguca

SEQ ID NO: 2561284 - RNA, 22 nt, Human
gaacuuguaaaggaauuuaaaa

SEQ ID NO: 2561285 - RNA, 22 nt, Human
gaacuuggggaguuaagaccug

SEQ ID NO: 2561286 - RNA, 17 nt, Human
gaacuuggggaacaagg

SEQ ID NO: 2561287 - RNA, 18 nt, Human
gaacuuggcgcugccccu

SEQ ID NO: 2561288 - RNA, 17 nt, Human
gaacuugggccacugug

SEQ ID NO: 2561289 - RNA, 13 nt, Human
gaacuuucauuuu

SEQ ID NO: 2561290 - RNA, 12 nt, Human
gaacuuucauuu

SEQ ID NO: 2561291 - RNA, 15 nt, Human
gaacuuguuuucugg

SEQ ID NO: 2561292 - RNA, 17 nt, Human
gaacuuuccaggaaggc

SEQ ID NO: 2561293 - RNA, 23 nt, Human
gaacuuucauuuuuuuccaggcu

SEQ ID NO: 2561294 - RNA, 14 nt, Human
gaacuuucauuuuu

SEQ ID NO: 2561295 - RNA, 24 nt, Human
gaacuuuccacauucagagcuuac

SEQ ID NO: 2561296 - RNA, 22 nt, Human
gaagaaauuccuguagcaucuu

SEQ ID NO: 2561297 - RNA, 18 nt, Human
gaagaaauuccuguagca

SEQ ID NO: 2561298 - RNA, 18 nt, Human
gaagaacacccucuaaau

SEQ ID NO: 2561299 - RNA, 15 nt, Human
gaagaaauuccugua

SEQ ID NO: 2561300 - RNA, 14 nt, Human
gaagaaauuccugu

SEQ ID NO: 2561301 - RNA, 15 nt, Human
gaagaaaucacagaa

SEQ ID NO: 2561302 - RNA, 21 nt, Human
gaagaaaggguguuuuucugu

SEQ ID NO: 2561303 - RNA, 15 nt, Human
gaagaaaguggaaaa

SEQ ID NO: 2561304 - RNA, 22 nt, Human
gaagaaaucacagaaucauaug

SEQ ID NO: 2561305 - RNA, 18 nt, Human
gaagaaaucacagaauca

SEQ ID NO: 2561306 - RNA, 22 nt, Human
gaagaacaucuuuaugguaaag

SEQ ID NO: 2561307 - RNA, 13 nt, Human
gaagaacauagaa

SEQ ID NO: 2561308 - RNA, 16 nt, Human
gaagaacauccaagga

SEQ ID NO: 2561309 - RNA, 17 nt, Human
gaagaacauccaaggag

SEQ ID NO: 2561310 - RNA, 20 nt, Human
gaagaacauccaaggagaaa

SEQ ID NO: 2561311 - RNA, 14 nt, Human
gaagaagcucucuc

SEQ ID NO: 2561312 - RNA, 17 nt, Human
gaagaagcuuaggcagg

SEQ ID NO: 2561313 - RNA, 16 nt, Human
gaagaagcuuaggcag

SEQ ID NO: 2561314 - RNA, 18 nt, Human
gaagaagcuuaggcaggg

SEQ ID NO: 2561315 - RNA, 16 nt, Human
gaacuuugaccucugc

SEQ ID NO: 2561316 - RNA, 22 nt, Human
gaacuuugaccucugcagcaau

SEQ ID NO: 2561317 - RNA, 17 nt, Human
gaagaaaggguguuuuu

SEQ ID NO: 2561318 - RNA, 21 nt, Human
gaagaaaggccaucagagcaa

SEQ ID NO: 2561319 - RNA, 18 nt, Human
gaagaaaggccaucagag

SEQ ID NO: 2561320 - RNA, 17 nt, Human
gaagaaagagaaggagc

SEQ ID NO: 2561321 - RNA, 14 nt, Human
gaacuuugaaggac

SEQ ID NO: 2561322 - RNA, 21 nt, Human
gaacuuucucuucauacuuuu

SEQ ID NO: 2561323 - RNA, 23 nt, Human
gaacuuucucuucauacuuuuuu

SEQ ID NO: 2561324 - RNA, 12 nt, Human
gagacagcccgg

SEQ ID NO: 2561325 - RNA, 16 nt, Human
gagacagccaacuaug

SEQ ID NO: 2561326 - RNA, 14 nt, Human
gagacagagcuggu

SEQ ID NO: 2561327 - RNA, 19 nt, Human
gagacagaguuuucacucu

SEQ ID NO: 2561328 - RNA, 16 nt, Human
gagacacggagcccag

SEQ ID NO: 2561329 - RNA, 20 nt, Human
gagacaccugcaccuccccc

SEQ ID NO: 2561330 - RNA, 21 nt, Human
gagacaccugcaccucccccc

SEQ ID NO: 2561331 - RNA, 15 nt, Human
gagacacuggccccu

SEQ ID NO: 2561332 - RNA, 20 nt, Human
gagacacuaacgacuucagg

SEQ ID NO: 2561333 - RNA, 13 nt, Human
gagacaccugcac

SEQ ID NO: 2561334 - RNA, 15 nt, Human
gagacaccugcaccu

SEQ ID NO: 2561335 - RNA, 17 nt, Human
gagacaccugcaccucc

SEQ ID NO: 2561336 - RNA, 18 nt, Human
gagacaccugcaccuccc

SEQ ID NO: 2561337 - RNA, 19 nt, Human
gagacaccugcaccucccc

SEQ ID NO: 2561338 - RNA, 15 nt, Human
gagacagaagcaggc

SEQ ID NO: 2561339 - RNA, 12 nt, Human
gagacagaagca

SEQ ID NO: 2561340 - RNA, 17 nt, Human
gagacacuugccuucuu

SEQ ID NO: 2561341 - RNA, 17 nt, Human
gagacacuggccccuca

SEQ ID NO: 2561342 - RNA, 16 nt, Human
gagacagaagcaggcu

SEQ ID NO: 2561343 - RNA, 22 nt, Human
gagacagagaggacgugggcgg

SEQ ID NO: 2561344 - RNA, 14 nt, Human
gagaauugggggcu

SEQ ID NO: 2561345 - RNA, 18 nt, Human
gagaauugcuugaaccca

SEQ ID NO: 2561346 - RNA, 18 nt, Human
gagaauucuuacauguuu

SEQ ID NO: 2561347 - RNA, 22 nt, Human
gagaauucuuacauguuuucuu

SEQ ID NO: 2561348 - RNA, 21 nt, Human
gagaauuucuaccauuucaga

SEQ ID NO: 2561349 - RNA, 15 nt, Human
gagaauuuuaaauua

SEQ ID NO: 2561350 - RNA, 16 nt, Human
gagaauuuuaaauuau

SEQ ID NO: 2561351 - RNA, 17 nt, Human
gagaauugggauuacau

SEQ ID NO: 2561352 - RNA, 15 nt, Human
gagaauuguaucauu

SEQ ID NO: 2561353 - RNA, 21 nt, Human
gagaauuguaucauuugaaca

SEQ ID NO: 2561354 - RNA, 20 nt, Human
gagacaaacaccucccagga

SEQ ID NO: 2561355 - RNA, 22 nt, Human
gagacaaacaccucccaggaga

SEQ ID NO: 2561356 - RNA, 19 nt, Human
gagacaaacaccucccagg

SEQ ID NO: 2561357 - RNA, 17 nt, Human
gagacaagaaaucccug

SEQ ID NO: 2561358 - RNA, 16 nt, Human
gagacaaauggaggcc

SEQ ID NO: 2561359 - RNA, 17 nt, Human
gagacacaagccuucgg

SEQ ID NO: 2561360 - RNA, 15 nt, Human
gagacacaagccuuc

SEQ ID NO: 2561361 - RNA, 18 nt, Human
gagacacacugaagaagc

SEQ ID NO: 2561362 - RNA, 20 nt, Human
gagacacaacaacuccuagg

SEQ ID NO: 2561363 - RNA, 18 nt, Human
gagacaaaucuaugccac

SEQ ID NO: 2561364 - RNA, 16 nt, Human
gagaagcccgugugag

SEQ ID NO: 2561365 - RNA, 15 nt, Human
gagaagcccguguga

SEQ ID NO: 2561366 - RNA, 14 nt, Human
gagaagcccgugug

SEQ ID NO: 2561367 - RNA, 22 nt, Human
gagaagccccuuccccauggga

SEQ ID NO: 2561368 - RNA, 21 nt, Human
gagaagccccuuccccauggg

SEQ ID NO: 2561369 - RNA, 15 nt, Human
gagaagccccuuccc

SEQ ID NO: 2561370 - RNA, 20 nt, Human
gagaagccauugucuucgga

SEQ ID NO: 2561371 - RNA, 15 nt, Human
gagaagccauugucu

SEQ ID NO: 2561372 - RNA, 11 nt, Human
gagaagccauu

SEQ ID NO: 2561373 - RNA, 20 nt, Human
gagaagccagugcggcaggu

SEQ ID NO: 2561374 - RNA, 22 nt, Human
gagaagccaggaauuucccagg

SEQ ID NO: 2561375 - RNA, 23 nt, Human
gagaagccaggaauuucccagga

SEQ ID NO: 2561376 - RNA, 12 nt, Human
gagaagccagga

SEQ ID NO: 2561377 - RNA, 22 nt, Human
gagaagccagcuuuccucauca

SEQ ID NO: 2561378 - RNA, 21 nt, Human
gagaaugcacaaacagaggcc

SEQ ID NO: 2561379 - RNA, 20 nt, Human
gagaaugcacaaacagaggc

SEQ ID NO: 2561380 - RNA, 22 nt, Human
gagaaugcacaaacagaggccg

SEQ ID NO: 2561381 - RNA, 13 nt, Human
gagaaugagccuc

SEQ ID NO: 2561382 - RNA, 13 nt, Human
gagaaugaggguc

SEQ ID NO: 2561383 - RNA, 17 nt, Human
gagaaugagggccaaga

SEQ ID NO: 2561384 - RNA, 16 nt, Human
gagaauucuuacaugu

SEQ ID NO: 2561385 - RNA, 23 nt, Human
gagaaccgagcaaagaucaaaau

SEQ ID NO: 2561386 - RNA, 22 nt, Human
gagaaccgagcaaagaucaaaa

SEQ ID NO: 2561387 - RNA, 20 nt, Human
gagaaccgagcaaagaucaa

SEQ ID NO: 2561388 - RNA, 21 nt, Human
gagaacccugcguggggacag

SEQ ID NO: 2561389 - RNA, 20 nt, Human
gagaacccugcguggggaca

SEQ ID NO: 2561390 - RNA, 16 nt, Human
gagaagaacugaaauc

SEQ ID NO: 2561391 - RNA, 14 nt, Human
gagaagaacugaaa

SEQ ID NO: 2561392 - RNA, 13 nt, Human
gagaagaacugaa

SEQ ID NO: 2561393 - RNA, 15 nt, Human
gagaagagcuguuca

SEQ ID NO: 2561394 - RNA, 22 nt, Human
gagaagagcuguucacagccag

SEQ ID NO: 2561395 - RNA, 15 nt, Human
gagaagagggccugu

SEQ ID NO: 2561396 - RNA, 14 nt, Human
gagaagagggccug

SEQ ID NO: 2561397 - RNA, 21 nt, Human
gagaagaggcuggugcugugg

SEQ ID NO: 2561398 - RNA, 13 nt, Human
gagaagaggcugg

SEQ ID NO: 2561399 - RNA, 19 nt, Human
gagaagagggccuguggga

SEQ ID NO: 2561400 - RNA, 16 nt, Human
gagaagagggccugug

SEQ ID NO: 2561401 - RNA, 23 nt, Human
gagaagcaagaaagaaacccgac

SEQ ID NO: 2561402 - RNA, 23 nt, Human
gagaaaguacuucuccacccugc

SEQ ID NO: 2561403 - RNA, 18 nt, Human
gagaaagaagagacagga

SEQ ID NO: 2561404 - RNA, 13 nt, Human
gagaaagaagaga

SEQ ID NO: 2561405 - RNA, 19 nt, Human
gagaaagagcacuuaagag

SEQ ID NO: 2561406 - RNA, 18 nt, Human
gagaaagagcacuuaaga

SEQ ID NO: 2561407 - RNA, 18 nt, Human
gagaaagaaguaggcaug

SEQ ID NO: 2561408 - RNA, 20 nt, Human
gagaaauauggacacuuaau

SEQ ID NO: 2561409 - RNA, 23 nt, Human
gagaaauaaaguuugcuuagaaa

SEQ ID NO: 2561410 - RNA, 20 nt, Human
gagaaagugauuucuagaaa

SEQ ID NO: 2561411 - RNA, 16 nt, Human
gagaaagaggaagcuu

SEQ ID NO: 2561412 - RNA, 18 nt, Human
gagaaagugugagcaaac

SEQ ID NO: 2561413 - RNA, 17 nt, Human
gagaacaaacagaucga

SEQ ID NO: 2561414 - RNA, 14 nt, Human
gagaaauuuauaaa

SEQ ID NO: 2561415 - RNA, 22 nt, Human
gagaacacagccgauucaccug

SEQ ID NO: 2561416 - RNA, 17 nt, Human
gagaaccaaaucuggaa

SEQ ID NO: 2561417 - RNA, 13 nt, Human
gagaaccaaaucu

SEQ ID NO: 2561418 - RNA, 18 nt, Human
gagaaccaaaucuggaag

SEQ ID NO: 2561419 - RNA, 19 nt, Human
gagaaccacuacaugcagc

SEQ ID NO: 2561420 - RNA, 13 nt, Human
gagaaagacuauu

SEQ ID NO: 2561421 - RNA, 15 nt, Human
gagaaagacuauuca

SEQ ID NO: 2561422 - RNA, 17 nt, Human
gagaaagacuauucaaa

SEQ ID NO: 2561423 - RNA, 18 nt, Human
gagaaagacuauucaaac

SEQ ID NO: 2561424 - RNA, 17 nt, Human
gagaaacucuugagauc

SEQ ID NO: 2561425 - RNA, 23 nt, Human
gagaaaccuuauuguaccucucu

SEQ ID NO: 2561426 - RNA, 21 nt, Human
gagaaaccuuauuguaccucu

SEQ ID NO: 2561427 - RNA, 12 nt, Human
gagaaacccugu

SEQ ID NO: 2561428 - RNA, 19 nt, Human
gagaaacagagacaggccc

SEQ ID NO: 2561429 - RNA, 19 nt, Human
gacuuguauauuuuaagaa

SEQ ID NO: 2561430 - RNA, 13 nt, Human
gacucgguuucuc

SEQ ID NO: 2561431 - RNA, 13 nt, Human
gacuuggaagcuc

SEQ ID NO: 2561432 - RNA, 19 nt, Human
gacuuguauauuuguacaa

SEQ ID NO: 2561433 - RNA, 18 nt, Human
gacuugugucccaugauc

SEQ ID NO: 2561434 - RNA, 13 nt, Human
gacuuguguccca

SEQ ID NO: 2561435 - RNA, 13 nt, Human
gacuugugucucu

SEQ ID NO: 2561436 - RNA, 16 nt, Human
gacuugugucucugug

SEQ ID NO: 2561437 - RNA, 19 nt, Human
gagaaaauaaaaaguuaaa

SEQ ID NO: 2561438 - RNA, 18 nt, Human
gagaaaauccccauugaa

SEQ ID NO: 2561439 - RNA, 17 nt, Human
gagaaacaauaaagaga

SEQ ID NO: 2561440 - RNA, 13 nt, Human
gagaaacagagac

SEQ ID NO: 2561441 - RNA, 14 nt, Human
gagaaacagagaca

SEQ ID NO: 2561442 - RNA, 21 nt, Human
gagaaaauggacguguuauga

SEQ ID NO: 2561443 - RNA, 18 nt, Human
gagaaaauaaaaaguuaa

SEQ ID NO: 2561444 - RNA, 16 nt, Human
gacuuguuuuugcaca

SEQ ID NO: 2561445 - RNA, 15 nt, Human
gacuuguuuuugcac

SEQ ID NO: 2561446 - RNA, 18 nt, Human
gacuuguuuuaugcucag

SEQ ID NO: 2561447 - RNA, 16 nt, Human
gacuuggaagcuccgc

SEQ ID NO: 2561448 - RNA, 15 nt, Human
gacuuggaagcuccg

SEQ ID NO: 2561449 - RNA, 20 nt, Human
gacucgggcuccugugcccu

SEQ ID NO: 2561450 - RNA, 19 nt, Human
gacucgggcuccugugccc

SEQ ID NO: 2561451 - RNA, 14 nt, Human
gacucggggguggg

SEQ ID NO: 2561452 - RNA, 16 nt, Human
gacucgggggugggga

SEQ ID NO: 2561453 - RNA, 14 nt, Human
gacuuggaagcucc

SEQ ID NO: 2561454 - RNA, 18 nt, Human
gacucgcgacaaugcaaa

SEQ ID NO: 2561455 - RNA, 17 nt, Human
gacuccugcaggcagcc

SEQ ID NO: 2561456 - RNA, 19 nt, Human
gacucgcgacaaugcaaac

SEQ ID NO: 2561457 - RNA, 18 nt, Human
gacucgggcuccugugcc

SEQ ID NO: 2561458 - RNA, 17 nt, Human
gacucgggcuccugugc

SEQ ID NO: 2561459 - RNA, 16 nt, Human
gacucgggcuccugug

SEQ ID NO: 2561460 - RNA, 15 nt, Human
gacucgggcuccugu

SEQ ID NO: 2561461 - RNA, 14 nt, Human
gacuccggcccucc

SEQ ID NO: 2561462 - RNA, 23 nt, Human
gagacagcccgggcucugccucc

SEQ ID NO: 2561463 - RNA, 22 nt, Human
gagacagcccgggcucugccuc

SEQ ID NO: 2561464 - RNA, 21 nt, Human
gagacagcccgggcucugccu

SEQ ID NO: 2561465 - RNA, 20 nt, Human
gagacagcccgggcucugcc

SEQ ID NO: 2561466 - RNA, 19 nt, Human
gagacagcccgggcucugc

SEQ ID NO: 2561467 - RNA, 18 nt, Human
gagacagcccgggcucug

SEQ ID NO: 2561468 - RNA, 17 nt, Human
gagacagcccgggcucu

SEQ ID NO: 2561469 - RNA, 14 nt, Human
gagacagcccgggc

SEQ ID NO: 2561470 - RNA, 15 nt, Human
gagacagcucugcau

SEQ ID NO: 2561471 - RNA, 18 nt, Human
gagacagcucugcauacu

SEQ ID NO: 2561472 - RNA, 13 nt, Human
gagacagcucugc

SEQ ID NO: 2561473 - RNA, 24 nt, Human
gagacagcccgggcucugccuccc

SEQ ID NO: 2561474 - RNA, 22 nt, Human
gagacaguuucuuagcuuuuua

SEQ ID NO: 2561475 - RNA, 21 nt, Human
gagacaguuucuuagcuuuuu

SEQ ID NO: 2561476 - RNA, 19 nt, Human
gagacagccccagagcagg

SEQ ID NO: 2561477 - RNA, 18 nt, Human
gagacagccccagagcag

SEQ ID NO: 2561478 - RNA, 15 nt, Human
gagacagccccagag

SEQ ID NO: 2561479 - RNA, 14 nt, Human
gagacagccccaga

SEQ ID NO: 2561480 - RNA, 13 nt, Human
gagacagccccag

SEQ ID NO: 2561481 - RNA, 15 nt, Human
gagacauacuugaag

SEQ ID NO: 2561482 - RNA, 18 nt, Human
gagacauacuugaagggc

SEQ ID NO: 2561483 - RNA, 20 nt, Human
gagacauacuugaagggcca

SEQ ID NO: 2561484 - RNA, 21 nt, Human
gagacauacuugaagggccag

SEQ ID NO: 2561485 - RNA, 13 nt, Human
gagacaugugaca

SEQ ID NO: 2561486 - RNA, 19 nt, Human
gagacauuccugggcacag

SEQ ID NO: 2561487 - RNA, 14 nt, Human
gagaccaaccugac

SEQ ID NO: 2561488 - RNA, 15 nt, Human
gagaccaaccugacc

SEQ ID NO: 2561489 - RNA, 14 nt, Human
gagacaugugacau

SEQ ID NO: 2561490 - RNA, 18 nt, Human
gagacauuccugggcaca

SEQ ID NO: 2561491 - RNA, 20 nt, Human
gagacuuccaaaccugacag

SEQ ID NO: 2561492 - RNA, 14 nt, Human
gagacuugcucucu

SEQ ID NO: 2561493 - RNA, 13 nt, Human
gagacuuguauga

SEQ ID NO: 2561494 - RNA, 21 nt, Human
gagacuuagggcaccaggggu

SEQ ID NO: 2561495 - RNA, 18 nt, Human
gagacuuagggcaccagg

SEQ ID NO: 2561496 - RNA, 17 nt, Human
gagacuguuuugaauuu

SEQ ID NO: 2561497 - RNA, 12 nt, Human
gagacuggagca

SEQ ID NO: 2561498 - RNA, 23 nt, Human
gagacugcuucccauccuacccu

SEQ ID NO: 2561499 - RNA, 16 nt, Human
gagacuggagcaucug

SEQ ID NO: 2561500 - RNA, 23 nt, Human
gagacugucucaagagggcacug

SEQ ID NO: 2561501 - RNA, 23 nt, Human
gagaccaguugggagcacuggag

SEQ ID NO: 2561502 - RNA, 22 nt, Human
gagacugcgggaugguccuggg

SEQ ID NO: 2561503 - RNA, 23 nt, Human
gagacugcgggaugguccugggg

SEQ ID NO: 2561504 - RNA, 22 nt, Human
gagacugcuucccauccuaccc

SEQ ID NO: 2561505 - RNA, 20 nt, Human
gagacugcuucccauccuac

SEQ ID NO: 2561506 - RNA, 17 nt, Human
gagacugcuucccaucc

SEQ ID NO: 2561507 - RNA, 14 nt, Human
gagacugcuuccca

SEQ ID NO: 2561508 - RNA, 22 nt, Human
gagacugucucaagagggcacu

SEQ ID NO: 2561509 - RNA, 14 nt, Human
gagacucugucuca

SEQ ID NO: 2561510 - RNA, 15 nt, Human
gagacugcccagcua

SEQ ID NO: 2561511 - RNA, 19 nt, Human
gagacugcgggaugguccu

SEQ ID NO: 2561512 - RNA, 12 nt, Human
gagacucugugg

SEQ ID NO: 2561513 - RNA, 23 nt, Human
gagacucuguggggccuugguuc

SEQ ID NO: 2561514 - RNA, 20 nt, Human
gagacucgagaacuuucauu

SEQ ID NO: 2561515 - RNA, 17 nt, Human
gagacucgagaacuuuc

SEQ ID NO: 2561516 - RNA, 16 nt, Human
gagacucgagaacuuu

SEQ ID NO: 2561517 - RNA, 15 nt, Human
gagacucgagaacuu

SEQ ID NO: 2561518 - RNA, 17 nt, Human
gagacuccugcccuguu

SEQ ID NO: 2561519 - RNA, 14 nt, Human
gagacucgagaacu

SEQ ID NO: 2561520 - RNA, 22 nt, Human
gagacuccugcaggcagccagg

SEQ ID NO: 2561521 - RNA, 18 nt, Human
gagacucgcgacaaugca

SEQ ID NO: 2561522 - RNA, 16 nt, Human
gagacucgcgacaaug

SEQ ID NO: 2561523 - RNA, 18 nt, Human
gagaccaggcaaagcaag

SEQ ID NO: 2561524 - RNA, 17 nt, Human
gagaccaggagggcacu

SEQ ID NO: 2561525 - RNA, 14 nt, Human
gagaccaggcaaag

SEQ ID NO: 2561526 - RNA, 16 nt, Human
gagaccagggagccuu

SEQ ID NO: 2561527 - RNA, 22 nt, Human
gagaccaguugggagcacugga

SEQ ID NO: 2561528 - RNA, 21 nt, Human
gagaccaguugggagcacugg

SEQ ID NO: 2561529 - RNA, 20 nt, Human
gagaccaguugggagcacug

SEQ ID NO: 2561530 - RNA, 12 nt, Human
gagaccaucccu

SEQ ID NO: 2561531 - RNA, 16 nt, Human
gagaccaaccugacca

SEQ ID NO: 2561532 - RNA, 17 nt, Human
gagaccaaccugaccaa

SEQ ID NO: 2561533 - RNA, 22 nt, Human
gagaccaagacucugaaaucuc

SEQ ID NO: 2561534 - RNA, 23 nt, Human
gagaccaagacucugaaaucuca

SEQ ID NO: 2561535 - RNA, 13 nt, Human
gagaccagccugg

SEQ ID NO: 2561536 - RNA, 16 nt, Human
gagaccagccugggca

SEQ ID NO: 2561537 - RNA, 19 nt, Human
gagaccagccugggcagca

SEQ ID NO: 2561538 - RNA, 18 nt, Human
gagaccaaggcgggagca

SEQ ID NO: 2561539 - RNA, 14 nt, Human
gagaccagccuggc

SEQ ID NO: 2561540 - RNA, 23 nt, Human
gagagcccagagguaacagaaca

SEQ ID NO: 2561541 - RNA, 21 nt, Human
gagagcccagagguaacagaa

SEQ ID NO: 2561542 - RNA, 11 nt, Human
gagagcccagc

SEQ ID NO: 2561543 - RNA, 23 nt, Human
gagagccugcucccccacccccu

SEQ ID NO: 2561544 - RNA, 15 nt, Human
gagagccugcuggca

SEQ ID NO: 2561545 - RNA, 14 nt, Human
gagagccugcuggc

SEQ ID NO: 2561546 - RNA, 13 nt, Human
gagagccugcugg

SEQ ID NO: 2561547 - RNA, 12 nt, Human
gagagccugcug

SEQ ID NO: 2561548 - RNA, 13 nt, Human
gagagccugcugc

SEQ ID NO: 2561549 - RNA, 14 nt, Human
gagagccugcugca

SEQ ID NO: 2561550 - RNA, 19 nt, Human
gagagccagagaagugaca

SEQ ID NO: 2561551 - RNA, 15 nt, Human
gagagccagagaagu

SEQ ID NO: 2561552 - RNA, 16 nt, Human
gagagccagaaccugg

SEQ ID NO: 2561553 - RNA, 22 nt, Human
gagagccagagaagugacaggg

SEQ ID NO: 2561554 - RNA, 11 nt, Human
gagagccagcc

SEQ ID NO: 2561555 - RNA, 12 nt, Human
gagagccagccc

SEQ ID NO: 2561556 - RNA, 13 nt, Human
gagagccagcccu

SEQ ID NO: 2561557 - RNA, 14 nt, Human
gagagccauuuugu

SEQ ID NO: 2561558 - RNA, 14 nt, Human
gagagccagcccuc

SEQ ID NO: 2561559 - RNA, 20 nt, Human
gagagccagcccucccuguc

SEQ ID NO: 2561560 - RNA, 14 nt, Human
gagagcccagaggu

SEQ ID NO: 2561561 - RNA, 17 nt, Human
gagagccauuuugugaa

SEQ ID NO: 2561562 - RNA, 10 nt, Human
gagagcccag

SEQ ID NO: 2561563 - RNA, 16 nt, Human
gagagccaccaagagg

SEQ ID NO: 2561564 - RNA, 16 nt, Human
gagagaguugaaccua

SEQ ID NO: 2561565 - RNA, 23 nt, Human
gagagcaggcuggcagcucucca

SEQ ID NO: 2561566 - RNA, 17 nt, Human
gagagaggcagagagcg

SEQ ID NO: 2561567 - RNA, 16 nt, Human
gagagaggcagagagc

SEQ ID NO: 2561568 - RNA, 12 nt, Human
gagagaggggaa

SEQ ID NO: 2561569 - RNA, 11 nt, Human
gagagaaaaua

SEQ ID NO: 2561570 - RNA, 12 nt, Human
gagagaaaauaa

SEQ ID NO: 2561571 - RNA, 18 nt, Human
gagagaaaacagaccuaa

SEQ ID NO: 2561572 - RNA, 22 nt, Human
gagagaaaacagaccuaaugcu

SEQ ID NO: 2561573 - RNA, 13 nt, Human
gagagaaaacuua

SEQ ID NO: 2561574 - RNA, 23 nt, Human
gagagaaaacagaccuaaugcuc

SEQ ID NO: 2561575 - RNA, 17 nt, Human
gagagaagagaaugcac

SEQ ID NO: 2561576 - RNA, 14 nt, Human
gagagaaaaacaaa

SEQ ID NO: 2561577 - RNA, 22 nt, Human
gagacuuuuaaucagacaaagu

SEQ ID NO: 2561578 - RNA, 14 nt, Human
gagagaaaauaaaa

SEQ ID NO: 2561579 - RNA, 13 nt, Human
gagagaaaauaaa

SEQ ID NO: 2561580 - RNA, 20 nt, Human
gagagaaaacuuauuugagu

SEQ ID NO: 2561581 - RNA, 12 nt, Human
gagagaagggga

SEQ ID NO: 2561582 - RNA, 15 nt, Human
gagagaaggggagga

SEQ ID NO: 2561583 - RNA, 17 nt, Human
gagagaaggggaggagg

SEQ ID NO: 2561584 - RNA, 16 nt, Human
gagagaaggggaggag

SEQ ID NO: 2561585 - RNA, 13 nt, Human
gagagaagugccc

SEQ ID NO: 2561586 - RNA, 19 nt, Human
gagagacacacugaagaag

SEQ ID NO: 2561587 - RNA, 21 nt, Human
gagagaagugccccugcugcc

SEQ ID NO: 2561588 - RNA, 18 nt, Human
gagagaagugccccugcu

SEQ ID NO: 2561589 - RNA, 15 nt, Human
gagagaggcagagag

SEQ ID NO: 2561590 - RNA, 13 nt, Human
gagagaggacagc

SEQ ID NO: 2561591 - RNA, 13 nt, Human
gagagaggcagag

SEQ ID NO: 2561592 - RNA, 15 nt, Human
gagagugagguggaa

SEQ ID NO: 2561593 - RNA, 14 nt, Human
gagaguuuccugaa

SEQ ID NO: 2561594 - RNA, 19 nt, Human
gagagugaacaaauuuaca

SEQ ID NO: 2561595 - RNA, 17 nt, Human
gagauacagaauuuuau

SEQ ID NO: 2561596 - RNA, 15 nt, Human
gagagugaacaaauu

SEQ ID NO: 2561597 - RNA, 11 nt, Human
gagaguaacuu

SEQ ID NO: 2561598 - RNA, 14 nt, Human
gagagucugucuca

SEQ ID NO: 2561599 - RNA, 19 nt, Human
gagagguuauaggucacuc

SEQ ID NO: 2561600 - RNA, 16 nt, Human
gagagguuaaggugca

SEQ ID NO: 2561601 - RNA, 12 nt, Human
gagagguggagc

SEQ ID NO: 2561602 - RNA, 23 nt, Human
gagaggugggccagucuguggau

SEQ ID NO: 2561603 - RNA, 22 nt, Human
gagaggugggccagucugugga

SEQ ID NO: 2561604 - RNA, 14 nt, Human
gagaggugggccag

SEQ ID NO: 2561605 - RNA, 18 nt, Human
gagaggucaagcccagga

SEQ ID NO: 2561606 - RNA, 19 nt, Human
gagaggucaagcccaggag

SEQ ID NO: 2561607 - RNA, 24 nt, Human
gagaggucaagcccaggaggacug

SEQ ID NO: 2561608 - RNA, 21 nt, Human
gagaggugccagcaacugaau

SEQ ID NO: 2561609 - RNA, 14 nt, Human
gagaggugccagca

SEQ ID NO: 2561610 - RNA, 13 nt, Human
gagaggugccagc

SEQ ID NO: 2561611 - RNA, 17 nt, Human
gagaggucuuuuuuaaa

SEQ ID NO: 2561612 - RNA, 11 nt, Human
gagagggcuuu

SEQ ID NO: 2561613 - RNA, 21 nt, Human
gagagggugggagugggccca

SEQ ID NO: 2561614 - RNA, 18 nt, Human
gagaggggaacagacugg

SEQ ID NO: 2561615 - RNA, 13 nt, Human
gagaggggaacag

SEQ ID NO: 2561616 - RNA, 14 nt, Human
gagagccuuccagg

SEQ ID NO: 2561617 - RNA, 13 nt, Human
gagagccuuccag

SEQ ID NO: 2561618 - RNA, 13 nt, Human
gagagccuggugc

SEQ ID NO: 2561619 - RNA, 17 nt, Human
gagagccuggugcugcu

SEQ ID NO: 2561620 - RNA, 19 nt, Human
gagagggaggcaagcccug

SEQ ID NO: 2561621 - RNA, 19 nt, Human
gagagccuggugcugcugc

SEQ ID NO: 2561622 - RNA, 18 nt, Human
gagagggcaguguuuccu

SEQ ID NO: 2561623 - RNA, 16 nt, Human
gagagggcaggcauga

SEQ ID NO: 2561624 - RNA, 14 nt, Human
gagagggcagaggg

SEQ ID NO: 2561625 - RNA, 23 nt, Human
gagagggaggucacuggaaaggg

SEQ ID NO: 2561626 - RNA, 21 nt, Human
gagagggcaugcgcacaaggc

SEQ ID NO: 2561627 - RNA, 14 nt, Human
gaggaacaaggcaa

SEQ ID NO: 2561628 - RNA, 21 nt, Human
gaggaaauaagaaaaaucaug

SEQ ID NO: 2561629 - RNA, 13 nt, Human
gaggaaaggccag

SEQ ID NO: 2561630 - RNA, 14 nt, Human
gaggaaaggccagc

SEQ ID NO: 2561631 - RNA, 19 nt, Human
gaggaaaggccagcuggca

SEQ ID NO: 2561632 - RNA, 23 nt, Human
gaggaaacucaccugcuggcccc

SEQ ID NO: 2561633 - RNA, 14 nt, Human
gaggaaacucagag

SEQ ID NO: 2561634 - RNA, 20 nt, Human
gaggaaagucauuggcuuua

SEQ ID NO: 2561635 - RNA, 18 nt, Human
gaggaaagucauuggcuu

SEQ ID NO: 2561636 - RNA, 12 nt, Human
gaggaaagucau

SEQ ID NO: 2561637 - RNA, 19 nt, Human
gaggaaagguuugagaagc

SEQ ID NO: 2561638 - RNA, 23 nt, Human
gaggaaaggccagcuggcagcag

SEQ ID NO: 2561639 - RNA, 16 nt, Human
gaggaacaaggcaagg

SEQ ID NO: 2561640 - RNA, 14 nt, Human
gaggaaccagagcc

SEQ ID NO: 2561641 - RNA, 15 nt, Human
gaggaaccagagcca

SEQ ID NO: 2561642 - RNA, 18 nt, Human
gaggaaccagagccaugg

SEQ ID NO: 2561643 - RNA, 22 nt, Human
gaggaaccagagccauggacuc

SEQ ID NO: 2561644 - RNA, 17 nt, Human
gaggaagaagcuuaggc

SEQ ID NO: 2561645 - RNA, 23 nt, Human
gaggaacuucagacacaaaaguc

SEQ ID NO: 2561646 - RNA, 23 nt, Human
gaggaagaacggggcucuucuca

SEQ ID NO: 2561647 - RNA, 21 nt, Human
gaggaacuguccagagagcaa

SEQ ID NO: 2561648 - RNA, 19 nt, Human
gaggaacuguccagagagc

SEQ ID NO: 2561649 - RNA, 19 nt, Human
gaggaagaacggggcucuu

SEQ ID NO: 2561650 - RNA, 18 nt, Human
gaggaacuguccagagag

SEQ ID NO: 2561651 - RNA, 17 nt, Human
gaggaacuguccagaga

SEQ ID NO: 2561652 - RNA, 16 nt, Human
gaggaacuguccagag

SEQ ID NO: 2561653 - RNA, 15 nt, Human
gaggaacuguccaga

SEQ ID NO: 2561654 - RNA, 20 nt, Human
gaggaacuagccaccaacuc

SEQ ID NO: 2561655 - RNA, 18 nt, Human
gaggaagccgcuggggcc

SEQ ID NO: 2561656 - RNA, 17 nt, Human
gaggaagccgcuggggc

SEQ ID NO: 2561657 - RNA, 14 nt, Human
gaggaagccgcugg

SEQ ID NO: 2561658 - RNA, 21 nt, Human
gaggaagcagaauaaagcaau

SEQ ID NO: 2561659 - RNA, 20 nt, Human
gaggaagcagaauaaagcaa

SEQ ID NO: 2561660 - RNA, 19 nt, Human
gaggaagcagaauaaagca

SEQ ID NO: 2561661 - RNA, 17 nt, Human
gaggaagcagaauaaag

SEQ ID NO: 2561662 - RNA, 16 nt, Human
gaggaagcagaauaaa

SEQ ID NO: 2561663 - RNA, 15 nt, Human
gaggaagcagaauaa

SEQ ID NO: 2561664 - RNA, 14 nt, Human
gaggaagcagaaua

SEQ ID NO: 2561665 - RNA, 13 nt, Human
gaggaagcagaau

SEQ ID NO: 2561666 - RNA, 13 nt, Human
gaggaagccgcug

SEQ ID NO: 2561667 - RNA, 17 nt, Human
gaggaagagaaaaaaua

SEQ ID NO: 2561668 - RNA, 20 nt, Human
gaggaagaagcuuaggcagg

SEQ ID NO: 2561669 - RNA, 13 nt, Human
gaggaagagcagg

SEQ ID NO: 2561670 - RNA, 17 nt, Human
gaggaagagcaggcaca

SEQ ID NO: 2561671 - RNA, 19 nt, Human
gaggaagagcaggcacaug

SEQ ID NO: 2561672 - RNA, 12 nt, Human
gaggaagcagaa

SEQ ID NO: 2561673 - RNA, 21 nt, Human
gaggaagaugggggcaagaag

SEQ ID NO: 2561674 - RNA, 20 nt, Human
gagcuuugaaaauucagugg

SEQ ID NO: 2561675 - RNA, 21 nt, Human
gagcuuucuguccuuuuggca

SEQ ID NO: 2561676 - RNA, 23 nt, Human
gagcuuucuguccuuuuggcacu

SEQ ID NO: 2561677 - RNA, 22 nt, Human
gagcuuucugcuaucaaagagg

SEQ ID NO: 2561678 - RNA, 21 nt, Human
gagcuuuccauguugcugcca

SEQ ID NO: 2561679 - RNA, 19 nt, Human
gagcuuuccauguugcugc

SEQ ID NO: 2561680 - RNA, 18 nt, Human
gagcuuuccauguugcug

SEQ ID NO: 2561681 - RNA, 17 nt, Human
gagcuuuccauguugcu

SEQ ID NO: 2561682 - RNA, 20 nt, Human
gagcuugggggaugacuaga

SEQ ID NO: 2561683 - RNA, 22 nt, Human
gagcuuuauguaauaaugugaa

SEQ ID NO: 2561684 - RNA, 15 nt, Human
gagcuuucaaagaag

SEQ ID NO: 2561685 - RNA, 18 nt, Human
gagcuuucaaagaaggaa

SEQ ID NO: 2561686 - RNA, 22 nt, Human
gagcuugaaacccguggcgcuu

SEQ ID NO: 2561687 - RNA, 13 nt, Human
gagcuugggaaug

SEQ ID NO: 2561688 - RNA, 14 nt, Human
gagcuuggccagaa

SEQ ID NO: 2561689 - RNA, 15 nt, Human
gagcuuggccagaag

SEQ ID NO: 2561690 - RNA, 17 nt, Human
gagcuuugcugcuacag

SEQ ID NO: 2561691 - RNA, 14 nt, Human
gagcuuugcugcua

SEQ ID NO: 2561692 - RNA, 13 nt, Human
gagcuuugcugcu

SEQ ID NO: 2561693 - RNA, 12 nt, Human
gagcuuugcugc

SEQ ID NO: 2561694 - RNA, 21 nt, Human
gagcuuugcauguuccacuaa

SEQ ID NO: 2561695 - RNA, 19 nt, Human
gagcuuugcauguuccacu

SEQ ID NO: 2561696 - RNA, 15 nt, Human
gagcuuuucuaggcu

SEQ ID NO: 2561697 - RNA, 23 nt, Human
gaggaaaaccaagccguggcuuc

SEQ ID NO: 2561698 - RNA, 21 nt, Human
gaggaaaaccaagccguggcu

SEQ ID NO: 2561699 - RNA, 20 nt, Human
gaggaaaaccaagccguggc

SEQ ID NO: 2561700 - RNA, 18 nt, Human
gagcuuuuuucuuuaaga

SEQ ID NO: 2561701 - RNA, 22 nt, Human
gaggaaaaaaaucguccaggga

SEQ ID NO: 2561702 - RNA, 17 nt, Human
gaggaaagcaaaggaga

SEQ ID NO: 2561703 - RNA, 16 nt, Human
gaggaaagcaaaggag

SEQ ID NO: 2561704 - RNA, 16 nt, Human
gaggaaagaaugaaag

SEQ ID NO: 2561705 - RNA, 17 nt, Human
gaggaaacucaccugcu

SEQ ID NO: 2561706 - RNA, 20 nt, Human
gaggaaacucaccugcuggc

SEQ ID NO: 2561707 - RNA, 22 nt, Human
gaggaaacucaccugcuggccc

SEQ ID NO: 2561708 - RNA, 21 nt, Human
gaggaaaaguaaggugcaguu

SEQ ID NO: 2561709 - RNA, 22 nt, Human
gaggaaaaguaaccaucacugg

SEQ ID NO: 2561710 - RNA, 14 nt, Human
gaggaaacucaccu

SEQ ID NO: 2561711 - RNA, 18 nt, Human
gaggaaacaacagcuuua

SEQ ID NO: 2561712 - RNA, 17 nt, Human
gagcugacacaggauga

SEQ ID NO: 2561713 - RNA, 16 nt, Human
gagcugacacaggaug

SEQ ID NO: 2561714 - RNA, 10 nt, Human
gagcugagau

SEQ ID NO: 2561715 - RNA, 13 nt, Human
gagcugagaucgu

SEQ ID NO: 2561716 - RNA, 16 nt, Human
gagcugagcagggaga

SEQ ID NO: 2561717 - RNA, 13 nt, Human
gagcugagaugga

SEQ ID NO: 2561718 - RNA, 17 nt, Human
gagcugagccucucacc

SEQ ID NO: 2561719 - RNA, 13 nt, Human
gagcugagcaggg

SEQ ID NO: 2561720 - RNA, 23 nt, Human
gagcugacacaaaccugccuggg

SEQ ID NO: 2561721 - RNA, 22 nt, Human
gagcugacacaaaccugccugg

SEQ ID NO: 2561722 - RNA, 23 nt, Human
gagcugaacccauuuugagugac

SEQ ID NO: 2561723 - RNA, 18 nt, Human
gagcugacacaaaccugc

SEQ ID NO: 2561724 - RNA, 22 nt, Human
gagcugaacccauuuugaguga

SEQ ID NO: 2561725 - RNA, 19 nt, Human
gagcugaacccauuuugag

SEQ ID NO: 2561726 - RNA, 22 nt, Human
gagcugaaaaaucacauccugg

SEQ ID NO: 2561727 - RNA, 17 nt, Human
gagcugaaaugcugcau

SEQ ID NO: 2561728 - RNA, 21 nt, Human
gagcucuugugaggaaaguca

SEQ ID NO: 2561729 - RNA, 20 nt, Human
gagcugaaaaaucacauccu

SEQ ID NO: 2561730 - RNA, 20 nt, Human
gagcugauccagagcacaga

SEQ ID NO: 2561731 - RNA, 16 nt, Human
gagcugauccagagca

SEQ ID NO: 2561732 - RNA, 15 nt, Human
gagcugauccagagc

SEQ ID NO: 2561733 - RNA, 13 nt, Human
gagcugauccaga

SEQ ID NO: 2561734 - RNA, 15 nt, Human
gagcugaguggggga

SEQ ID NO: 2561735 - RNA, 23 nt, Human
gagcugaggggggccgugcccag

SEQ ID NO: 2561736 - RNA, 17 nt, Human
gagcugaggccacacuc

SEQ ID NO: 2561737 - RNA, 16 nt, Human
gagcugaggcagcagu

SEQ ID NO: 2561738 - RNA, 17 nt, Human
gagcugaggcaauucua

SEQ ID NO: 2561739 - RNA, 16 nt, Human
gagcucgugggacagu

SEQ ID NO: 2561740 - RNA, 21 nt, Human
gagcucguguauccuggggcu

SEQ ID NO: 2561741 - RNA, 20 nt, Human
gagcucguguauccuggggc

SEQ ID NO: 2561742 - RNA, 19 nt, Human
gagcucguguauccugggg

SEQ ID NO: 2561743 - RNA, 18 nt, Human
gagcucguguauccuggg

SEQ ID NO: 2561744 - RNA, 16 nt, Human
gagcucguguauccug

SEQ ID NO: 2561745 - RNA, 15 nt, Human
gagcucgguggaccc

SEQ ID NO: 2561746 - RNA, 23 nt, Human
gagcucguguauccuggggcucc

SEQ ID NO: 2561747 - RNA, 22 nt, Human
gagcucguguauccuggggcuc

SEQ ID NO: 2561748 - RNA, 14 nt, Human
gagcucuacccagg

SEQ ID NO: 2561749 - RNA, 15 nt, Human
gagcucuacccaggg

SEQ ID NO: 2561750 - RNA, 20 nt, Human
gagcucuacccagggccugc

SEQ ID NO: 2561751 - RNA, 21 nt, Human
gagcucuacccagggccugca

SEQ ID NO: 2561752 - RNA, 23 nt, Human
gagcucuacccagggccugcagg

SEQ ID NO: 2561753 - RNA, 17 nt, Human
gagcucuugugaggaaa

SEQ ID NO: 2561754 - RNA, 17 nt, Human
gagcucuucauguuuca

SEQ ID NO: 2561755 - RNA, 20 nt, Human
gagcuccagacccccagcaa

SEQ ID NO: 2561756 - RNA, 16 nt, Human
gagcucacucggcacc

SEQ ID NO: 2561757 - RNA, 19 nt, Human
gagcucacuguggugucug

SEQ ID NO: 2561758 - RNA, 20 nt, Human
gagcuauuuccauuccagaa

SEQ ID NO: 2561759 - RNA, 19 nt, Human
gagcuauuuccauuccaga

SEQ ID NO: 2561760 - RNA, 21 nt, Human
gagcuauuuccauuccagaau

SEQ ID NO: 2561761 - RNA, 18 nt, Human
gagcuauuuccauuccag

SEQ ID NO: 2561762 - RNA, 13 nt, Human
gagcuauuuccau

SEQ ID NO: 2561763 - RNA, 13 nt, Human
gagcuauugcugu

SEQ ID NO: 2561764 - RNA, 14 nt, Human
gagcuauguauuaa

SEQ ID NO: 2561765 - RNA, 22 nt, Human
gagcuccacucugcuucucuga

SEQ ID NO: 2561766 - RNA, 13 nt, Human
gagcuccagaccc

SEQ ID NO: 2561767 - RNA, 15 nt, Human
gagcuccagaccccc

SEQ ID NO: 2561768 - RNA, 17 nt, Human
gagcuccagacccccag

SEQ ID NO: 2561769 - RNA, 19 nt, Human
gagcuccagacccccagca

SEQ ID NO: 2561770 - RNA, 22 nt, Human
gagcuccagacccccagcaacc

SEQ ID NO: 2561771 - RNA, 21 nt, Human
gagcucagagagggcaggcau

SEQ ID NO: 2561772 - RNA, 20 nt, Human
gagcucagagagggcaggca

SEQ ID NO: 2561773 - RNA, 15 nt, Human
gagcucagaccccca

SEQ ID NO: 2561774 - RNA, 14 nt, Human
gagcucagaccccc

SEQ ID NO: 2561775 - RNA, 18 nt, Human
gagcucagacccccacuc

SEQ ID NO: 2561776 - RNA, 20 nt, Human
gagcucagacccccacucuc

SEQ ID NO: 2561777 - RNA, 18 nt, Human
gagcucagagagggcagg

SEQ ID NO: 2561778 - RNA, 21 nt, Human
gagcucagacccccacucuca

SEQ ID NO: 2561779 - RNA, 15 nt, Human
gagcuagaagcugga

SEQ ID NO: 2561780 - RNA, 21 nt, Human
gagcuagaaccuggagggcua

SEQ ID NO: 2561781 - RNA, 17 nt, Human
gagcuagaaccuggagg

SEQ ID NO: 2561782 - RNA, 19 nt, Human
gagcuagaaccuggagagc

SEQ ID NO: 2561783 - RNA, 17 nt, Human
gagcuagaaccuggaga

SEQ ID NO: 2561784 - RNA, 14 nt, Human
gagcuagaaccugg

SEQ ID NO: 2561785 - RNA, 22 nt, Human
gagcuagaaccuagaagggcua

SEQ ID NO: 2561786 - RNA, 15 nt, Human
gagccugccuggagc

SEQ ID NO: 2561787 - RNA, 14 nt, Human
gagccugccuggag

SEQ ID NO: 2561788 - RNA, 13 nt, Human
gagccugccugga

SEQ ID NO: 2561789 - RNA, 15 nt, Human
gagccugcaguuauu

SEQ ID NO: 2561790 - RNA, 18 nt, Human
gagccugcaggugcugcu

SEQ ID NO: 2561791 - RNA, 15 nt, Human
gagcuagcagcaggg

SEQ ID NO: 2561792 - RNA, 17 nt, Human
gagcuagcagcagggag

SEQ ID NO: 2561793 - RNA, 18 nt, Human
gagcuagcgcugccgcac

SEQ ID NO: 2561794 - RNA, 19 nt, Human
gagcuagcgcugccgcacc

SEQ ID NO: 2561795 - RNA, 23 nt, Human
gagcuagcgcugccgcaccccag

SEQ ID NO: 2561796 - RNA, 18 nt, Human
gagcuagaagcuggagga

SEQ ID NO: 2561797 - RNA, 14 nt, Human
gagcuagcgcugcc

SEQ ID NO: 2561798 - RNA, 19 nt, Human
gagccagauuucacucucc

SEQ ID NO: 2561799 - RNA, 18 nt, Human
gagccagauuucacucuc

SEQ ID NO: 2561800 - RNA, 15 nt, Human
gagccagauuucacu

SEQ ID NO: 2561801 - RNA, 20 nt, Human
gagccacugcaccgggccac

SEQ ID NO: 2561802 - RNA, 13 nt, Human
gagccacugcacc

SEQ ID NO: 2561803 - RNA, 16 nt, Human
gagcagccuguggcau

SEQ ID NO: 2561804 - RNA, 18 nt, Human
gagcagccuguggcaucu

SEQ ID NO: 2561805 - RNA, 11 nt, Human
gagcagccugu

SEQ ID NO: 2561806 - RNA, 13 nt, Human
gagcagccugugg

SEQ ID NO: 2561807 - RNA, 14 nt, Human
gagcagccuguggc

SEQ ID NO: 2561808 - RNA, 15 nt, Human
gagcagccuguggca

SEQ ID NO: 2561809 - RNA, 19 nt, Human
gagccacugcaccgggcca

SEQ ID NO: 2561810 - RNA, 18 nt, Human
gagccacugcaccgggcc

SEQ ID NO: 2561811 - RNA, 17 nt, Human
gagcccaccuuggcuca

SEQ ID NO: 2561812 - RNA, 15 nt, Human
gagcccaccuuggcu

SEQ ID NO: 2561813 - RNA, 13 nt, Human
gagcccaccuugg

SEQ ID NO: 2561814 - RNA, 12 nt, Human
gagccaggcaca

SEQ ID NO: 2561815 - RNA, 13 nt, Human
gagccaggcacac

SEQ ID NO: 2561816 - RNA, 12 nt, Human
gagccaggccug

SEQ ID NO: 2561817 - RNA, 21 nt, Human
gagccaggccugggucugugu

SEQ ID NO: 2561818 - RNA, 22 nt, Human
gagccaggccugggucuguguc

SEQ ID NO: 2561819 - RNA, 13 nt, Human
gagccagcucccu

SEQ ID NO: 2561820 - RNA, 18 nt, Human
gagccagcucccucuauu

SEQ ID NO: 2561821 - RNA, 13 nt, Human
gagccagauuuca

SEQ ID NO: 2561822 - RNA, 19 nt, Human
gagccagcccucccugucc

SEQ ID NO: 2561823 - RNA, 16 nt, Human
gagccagcccucccug

SEQ ID NO: 2561824 - RNA, 15 nt, Human
gagccagccugcucc

SEQ ID NO: 2561825 - RNA, 20 nt, Human
gagccagcccucccuguccu

SEQ ID NO: 2561826 - RNA, 21 nt, Human
gagccagcccucccuguccuc

SEQ ID NO: 2561827 - RNA, 19 nt, Human
gagauagccaaggccaaag

SEQ ID NO: 2561828 - RNA, 16 nt, Human
gagcagagaccauccc

SEQ ID NO: 2561829 - RNA, 18 nt, Human
gagcagagaccaucccug

SEQ ID NO: 2561830 - RNA, 17 nt, Human
gagcagagaccaucccu

SEQ ID NO: 2561831 - RNA, 21 nt, Human
gagauagccaaggccaaagga

SEQ ID NO: 2561832 - RNA, 20 nt, Human
gagauagccaaggccaaagg

SEQ ID NO: 2561833 - RNA, 15 nt, Human
gagauaaaucuagua

SEQ ID NO: 2561834 - RNA, 17 nt, Human
gagaguuuugucuugaa

SEQ ID NO: 2561835 - RNA, 22 nt, Human
gagaguuuugucuugaaugucu

SEQ ID NO: 2561836 - RNA, 14 nt, Human
gagaguuuuggaug

SEQ ID NO: 2561837 - RNA, 15 nt, Human
gagaguuuugucuug

SEQ ID NO: 2561838 - RNA, 18 nt, Human
gagagugcaacaguagca

SEQ ID NO: 2561839 - RNA, 21 nt, Human
gagauaauguuagagguuuua

SEQ ID NO: 2561840 - RNA, 15 nt, Human
gagauaauaugagaa

SEQ ID NO: 2561841 - RNA, 17 nt, Human
gagcagccucagaacaa

SEQ ID NO: 2561842 - RNA, 20 nt, Human
gagcagcccuggagucaugc

SEQ ID NO: 2561843 - RNA, 16 nt, Human
gagcagcccuggaguc

SEQ ID NO: 2561844 - RNA, 15 nt, Human
gagcagaggggcuga

SEQ ID NO: 2561845 - RNA, 22 nt, Human
gagcagccacauuccugaugcu

SEQ ID NO: 2561846 - RNA, 21 nt, Human
gagcagccacauuccugaugc

SEQ ID NO: 2561847 - RNA, 13 nt, Human
gagcagaggcagc

SEQ ID NO: 2561848 - RNA, 18 nt, Human
gagcagagcaagucugca

SEQ ID NO: 2561849 - RNA, 21 nt, Human
gagcagagaccaucccugaag

SEQ ID NO: 2561850 - RNA, 19 nt, Human
gagcagagaccaucccuga

SEQ ID NO: 2561851 - RNA, 23 nt, Human
gagcagagaccaucccugaaggc

SEQ ID NO: 2561852 - RNA, 12 nt, Human
gagauauauuuu

SEQ ID NO: 2561853 - RNA, 18 nt, Human
gagauaucugagggagga

SEQ ID NO: 2561854 - RNA, 15 nt, Human
gagauauauuuuuaa

SEQ ID NO: 2561855 - RNA, 19 nt, Human
gagccggggaguuucuuuc

SEQ ID NO: 2561856 - RNA, 18 nt, Human
gagccggggaguuucuuu

SEQ ID NO: 2561857 - RNA, 22 nt, Human
gagccggggaguuucuuuccug

SEQ ID NO: 2561858 - RNA, 20 nt, Human
gagccgggccuggggcuccu

SEQ ID NO: 2561859 - RNA, 14 nt, Human
gagccgggccuggg

SEQ ID NO: 2561860 - RNA, 13 nt, Human
gagccgggccugg

SEQ ID NO: 2561861 - RNA, 15 nt, Human
gagccgggccccugg

SEQ ID NO: 2561862 - RNA, 16 nt, Human
gagccgggccccuggg

SEQ ID NO: 2561863 - RNA, 22 nt, Human
gagccgggaaagaagagccgga

SEQ ID NO: 2561864 - RNA, 17 nt, Human
gagccgggucugccucu

SEQ ID NO: 2561865 - RNA, 20 nt, Human
gagccgggucugccucuucu

SEQ ID NO: 2561866 - RNA, 21 nt, Human
gagccgggucugccucuucug

SEQ ID NO: 2561867 - RNA, 22 nt, Human
gagccgggucugccucuucugg

SEQ ID NO: 2561868 - RNA, 20 nt, Human
gagccggguggaucgccuga

SEQ ID NO: 2561869 - RNA, 14 nt, Human
gagccgugaugccu

SEQ ID NO: 2561870 - RNA, 16 nt, Human
gagccggagccuccag

SEQ ID NO: 2561871 - RNA, 12 nt, Human
gagccggagccu

SEQ ID NO: 2561872 - RNA, 22 nt, Human
gagccggacuuucggaguuggg

SEQ ID NO: 2561873 - RNA, 20 nt, Human
gagccgcugugagccccugg

SEQ ID NO: 2561874 - RNA, 19 nt, Human
gagccgcugugagccccug

SEQ ID NO: 2561875 - RNA, 19 nt, Human
gagccgcuggcagaaggga

SEQ ID NO: 2561876 - RNA, 14 nt, Human
gagccgcuggcaga

SEQ ID NO: 2561877 - RNA, 20 nt, Human
gagccgagaucgcgccacug

SEQ ID NO: 2561878 - RNA, 22 nt, Human
gagcccuugccuccccauuucc

SEQ ID NO: 2561879 - RNA, 21 nt, Human
gagccgcaucuucuccaucug

SEQ ID NO: 2561880 - RNA, 22 nt, Human
gagccgcaucuucuccaucugg

SEQ ID NO: 2561881 - RNA, 22 nt, Human
gagccgagaucacgccacugca

SEQ ID NO: 2561882 - RNA, 21 nt, Human
gagccgagaucacgccacugc

SEQ ID NO: 2561883 - RNA, 16 nt, Human
gagcccacaaagccuu

SEQ ID NO: 2561884 - RNA, 14 nt, Human
gagcccaagggaau

SEQ ID NO: 2561885 - RNA, 19 nt, Human
gagcccacugcccaccccc

SEQ ID NO: 2561886 - RNA, 18 nt, Human
gagcccacgcccccacug

SEQ ID NO: 2561887 - RNA, 21 nt, Human
gagcccacuguacuugcucuu

SEQ ID NO: 2561888 - RNA, 18 nt, Human
gagcccacuguacuugcu

SEQ ID NO: 2561889 - RNA, 17 nt, Human
gagcccuugccucccca

SEQ ID NO: 2561890 - RNA, 16 nt, Human
gagcccuugccucccc

SEQ ID NO: 2561891 - RNA, 15 nt, Human
gagcccuugccuccc

SEQ ID NO: 2561892 - RNA, 23 nt, Human
gagcccacugcccacccccucaa

SEQ ID NO: 2561893 - RNA, 21 nt, Human
gagcccacugcccacccccuc

SEQ ID NO: 2561894 - RNA, 20 nt, Human
gagcccacugcccacccccu

SEQ ID NO: 2561895 - RNA, 11 nt, Human
gagcccacugu

SEQ ID NO: 2561896 - RNA, 20 nt, Human
gagccgagaucacgccacug

SEQ ID NO: 2561897 - RNA, 19 nt, Human
gagccgagaucacgccacu

SEQ ID NO: 2561898 - RNA, 12 nt, Human
gagccugaggga

SEQ ID NO: 2561899 - RNA, 15 nt, Human
gagccugagggaucu

SEQ ID NO: 2561900 - RNA, 10 nt, Human
gagccugagg

SEQ ID NO: 2561901 - RNA, 12 nt, Human
gagccugcaguu

SEQ ID NO: 2561902 - RNA, 22 nt, Human
gagccucugucacugcaggcac

SEQ ID NO: 2561903 - RNA, 21 nt, Human
gagccucugucacugcaggca

SEQ ID NO: 2561904 - RNA, 20 nt, Human
gagccucugucacugcaggc

SEQ ID NO: 2561905 - RNA, 18 nt, Human
gagccucugucacugcag

SEQ ID NO: 2561906 - RNA, 13 nt, Human
gagccucugucac

SEQ ID NO: 2561907 - RNA, 12 nt, Human
gagccucuguca

SEQ ID NO: 2561908 - RNA, 17 nt, Human
gagccucugcuccccag

SEQ ID NO: 2561909 - RNA, 19 nt, Human
gagccugaauuuuguugcu

SEQ ID NO: 2561910 - RNA, 24 nt, Human
gagccucugucacugcaggcacuc

SEQ ID NO: 2561911 - RNA, 17 nt, Human
gagccucauccgaggca

SEQ ID NO: 2561912 - RNA, 18 nt, Human
gagccucauccgaggcag

SEQ ID NO: 2561913 - RNA, 19 nt, Human
gagccucauccgaggcagg

SEQ ID NO: 2561914 - RNA, 20 nt, Human
gagccucauccgaggcaggg

SEQ ID NO: 2561915 - RNA, 20 nt, Human
gagccucccucaauuccccc

SEQ ID NO: 2561916 - RNA, 21 nt, Human
gagccucccucaauucccccu

SEQ ID NO: 2561917 - RNA, 13 nt, Human
gagccuccugccc

SEQ ID NO: 2561918 - RNA, 16 nt, Human
gagccucugcucccca

SEQ ID NO: 2561919 - RNA, 22 nt, Human
gagccuccucucucaaacuggg

SEQ ID NO: 2561920 - RNA, 15 nt, Human
gagccucagcauccu

SEQ ID NO: 2561921 - RNA, 14 nt, Human
gagccucagcaucc

SEQ ID NO: 2561922 - RNA, 19 nt, Human
gagccucagucucccuccc

SEQ ID NO: 2561923 - RNA, 18 nt, Human
gagccucagucucccucc

SEQ ID NO: 2561924 - RNA, 17 nt, Human
gagccucagcauccugg

SEQ ID NO: 2561925 - RNA, 15 nt, Human
gagccuacccacccc

SEQ ID NO: 2561926 - RNA, 17 nt, Human
gagccuacccaccccca

SEQ ID NO: 2561927 - RNA, 13 nt, Human
gagccgugguccu

SEQ ID NO: 2561928 - RNA, 17 nt, Human
gagccgugguccuuugg

SEQ ID NO: 2561929 - RNA, 13 nt, Human
gagccucagcauc

SEQ ID NO: 2561930 - RNA, 21 nt, Human
gacguacguaucagcggcccc

SEQ ID NO: 2561931 - RNA, 19 nt, Human
gacgguucaccagccucuc

SEQ ID NO: 2561932 - RNA, 17 nt, Human
gacgguucaccagccuc

SEQ ID NO: 2561933 - RNA, 18 nt, Human
gacgguucaccagccucu

SEQ ID NO: 2561934 - RNA, 16 nt, Human
gacggucccacacugg

SEQ ID NO: 2561935 - RNA, 21 nt, Human
gacgguauuaugcuucuugga

SEQ ID NO: 2561936 - RNA, 16 nt, Human
gacggugcagucuggg

SEQ ID NO: 2561937 - RNA, 23 nt, Human
gacgggugggcggcuggagacca

SEQ ID NO: 2561938 - RNA, 16 nt, Human
gacggugcccaagcca

SEQ ID NO: 2561939 - RNA, 23 nt, Human
gacggugcccaagccagaggcug

SEQ ID NO: 2561940 - RNA, 18 nt, Human
gacggugcccaagccaga

SEQ ID NO: 2561941 - RNA, 21 nt, Human
gacggugggcauuugugaggc

SEQ ID NO: 2561942 - RNA, 17 nt, Human
gacggugcuccaggcag

SEQ ID NO: 2561943 - RNA, 15 nt, Human
gacgguucaccagcc

SEQ ID NO: 2561944 - RNA, 20 nt, Human
gacguguuaugacuccagaa

SEQ ID NO: 2561945 - RNA, 17 nt, Human
gacguguuaugacucca

SEQ ID NO: 2561946 - RNA, 15 nt, Human
gacguaggggagggg

SEQ ID NO: 2561947 - RNA, 21 nt, Human
gacguagcugcaaaggacaga

SEQ ID NO: 2561948 - RNA, 23 nt, Human
gacguaugcuuauuuuaaaauuu

SEQ ID NO: 2561949 - RNA, 14 nt, Human
gacgucaagucucc

SEQ ID NO: 2561950 - RNA, 20 nt, Human
gacguacuccaacagaagaa

SEQ ID NO: 2561951 - RNA, 12 nt, Human
gacguagcugca

SEQ ID NO: 2561952 - RNA, 20 nt, Human
gacguaggaacgguaaauuu

SEQ ID NO: 2561953 - RNA, 18 nt, Human
gacgucaagucuccuucc

SEQ ID NO: 2561954 - RNA, 12 nt, Human
gacgucccucca

SEQ ID NO: 2561955 - RNA, 18 nt, Human
gacggagucccaccuugg

SEQ ID NO: 2561956 - RNA, 14 nt, Human
gacggagucccacc

SEQ ID NO: 2561957 - RNA, 18 nt, Human
gacgaggggugucuuggg

SEQ ID NO: 2561958 - RNA, 22 nt, Human
gacgaggcccucgggcccagcc

SEQ ID NO: 2561959 - RNA, 21 nt, Human
gacgaggcccucgggcccagc

SEQ ID NO: 2561960 - RNA, 17 nt, Human
gacgaggcccucgggcc

SEQ ID NO: 2561961 - RNA, 14 nt, Human
gacgaccuuuaccu

SEQ ID NO: 2561962 - RNA, 21 nt, Human
gacggagucccaccuuggcug

SEQ ID NO: 2561963 - RNA, 19 nt, Human
gacgcagcaggaggccagg

SEQ ID NO: 2561964 - RNA, 22 nt, Human
gacgcaugcccucaaucccagc

SEQ ID NO: 2561965 - RNA, 23 nt, Human
gacggggggccccagucagccuc

SEQ ID NO: 2561966 - RNA, 22 nt, Human
gacggggggccccagucagccu

SEQ ID NO: 2561967 - RNA, 19 nt, Human
gacgguauuaugcuucuug

SEQ ID NO: 2561968 - RNA, 17 nt, Human
gacgggguuucaccaug

SEQ ID NO: 2561969 - RNA, 16 nt, Human
gacggggacuggggau

SEQ ID NO: 2561970 - RNA, 17 nt, Human
gacggggggccccaguc

SEQ ID NO: 2561971 - RNA, 22 nt, Human
gacggcugggcacacgccuccc

SEQ ID NO: 2561972 - RNA, 18 nt, Human
gaccuuuccaccacagcc

SEQ ID NO: 2561973 - RNA, 17 nt, Human
gaccuuuccaccacagc

SEQ ID NO: 2561974 - RNA, 17 nt, Human
gaccuuucagcugugaa

SEQ ID NO: 2561975 - RNA, 20 nt, Human
gaccuuguuguuguuaaaua

SEQ ID NO: 2561976 - RNA, 13 nt, Human
gaccuuuccacca

SEQ ID NO: 2561977 - RNA, 23 nt, Human
gaccuuuccaccacagccagcac

SEQ ID NO: 2561978 - RNA, 21 nt, Human
gaccuuuccaccacagccagc

SEQ ID NO: 2561979 - RNA, 17 nt, Human
gaccuuuccugaggaag

SEQ ID NO: 2561980 - RNA, 21 nt, Human
gacgaacauccaaccuuccca

SEQ ID NO: 2561981 - RNA, 21 nt, Human
gaccuuugucaucuuucuucu

SEQ ID NO: 2561982 - RNA, 22 nt, Human
gaccuuuucaacuuggcuuccu

SEQ ID NO: 2561983 - RNA, 14 nt, Human
gacgaacuuccaug

SEQ ID NO: 2561984 - RNA, 21 nt, Human
gacgacaagugcugaacagug

SEQ ID NO: 2561985 - RNA, 21 nt, Human
gacgaacuuccauggcccuca

SEQ ID NO: 2561986 - RNA, 15 nt, Human
gaccuuguucacacu

SEQ ID NO: 2561987 - RNA, 13 nt, Human
gaccuugugaucu

SEQ ID NO: 2561988 - RNA, 17 nt, Human
gaccuuguuacuucuga

SEQ ID NO: 2561989 - RNA, 20 nt, Human
gaccuuguugcaugauguau

SEQ ID NO: 2561990 - RNA, 14 nt, Human
gaccuuguugcaug

SEQ ID NO: 2561991 - RNA, 21 nt, Human
gaccuuucaauaggaaaaacu

SEQ ID NO: 2561992 - RNA, 16 nt, Human
gaccuuguuacuucug

SEQ ID NO: 2561993 - RNA, 23 nt, Human
gaccuugcaacuucaugucaacu

SEQ ID NO: 2561994 - RNA, 16 nt, Human
gaccuugcaacuucau

SEQ ID NO: 2561995 - RNA, 19 nt, Human
gaccuugaaggguaaagaa

SEQ ID NO: 2561996 - RNA, 20 nt, Human
gaccugcggcugcugugugc

SEQ ID NO: 2561997 - RNA, 16 nt, Human
gaccugcggcugcugu

SEQ ID NO: 2561998 - RNA, 12 nt, Human
gaccugccugua

SEQ ID NO: 2561999 - RNA, 23 nt, Human
gaccugccuccugccugccccuc

SEQ ID NO: 2562000 - RNA, 18 nt, Human
gaccugccucuucccccu

SEQ ID NO: 2562001 - RNA, 19 nt, Human
gaccugccucggccuccca

SEQ ID NO: 2562002 - RNA, 17 nt, Human
gaccuggcaaggacaca

SEQ ID NO: 2562003 - RNA, 16 nt, Human
gaccuggcaaggacac

SEQ ID NO: 2562004 - RNA, 17 nt, Human
gaccuggauaacuuagg

SEQ ID NO: 2562005 - RNA, 15 nt, Human
gaccuggauaacuua

SEQ ID NO: 2562006 - RNA, 20 nt, Human
gaccuggagccccugggugg

SEQ ID NO: 2562007 - RNA, 18 nt, Human
gaccuggagccccugggu

SEQ ID NO: 2562008 - RNA, 17 nt, Human
gaccuggagccccuggg

SEQ ID NO: 2562009 - RNA, 16 nt, Human
gaccuggagccccugg

SEQ ID NO: 2562010 - RNA, 23 nt, Human
gaccuugaacuggguacuugugg

SEQ ID NO: 2562011 - RNA, 19 nt, Human
gaccugcugagggaccagc

SEQ ID NO: 2562012 - RNA, 20 nt, Human
gaccugcugagggaccagcc

SEQ ID NO: 2562013 - RNA, 21 nt, Human
gaccugcugagggaccagcca

SEQ ID NO: 2562014 - RNA, 15 nt, Human
gaccuggagccccug

SEQ ID NO: 2562015 - RNA, 14 nt, Human
gaccuggagccccu

SEQ ID NO: 2562016 - RNA, 13 nt, Human
gaccuggagcccc

SEQ ID NO: 2562017 - RNA, 12 nt, Human
gaccuggagccc

SEQ ID NO: 2562018 - RNA, 13 nt, Human
gacucauucugaa

SEQ ID NO: 2562019 - RNA, 16 nt, Human
gacucauucugaagga

SEQ ID NO: 2562020 - RNA, 20 nt, Human
gacucauucccuagaucuuu

SEQ ID NO: 2562021 - RNA, 17 nt, Human
gacucauucugaaggag

SEQ ID NO: 2562022 - RNA, 16 nt, Human
gacuccacccauccua

SEQ ID NO: 2562023 - RNA, 14 nt, Human
gacuccacccaucc

SEQ ID NO: 2562024 - RNA, 16 nt, Human
gacuccaggagaggag

SEQ ID NO: 2562025 - RNA, 12 nt, Human
gacuccaggaga

SEQ ID NO: 2562026 - RNA, 20 nt, Human
gacuccagccugccuggcag

SEQ ID NO: 2562027 - RNA, 16 nt, Human
gacuccagacucucug

SEQ ID NO: 2562028 - RNA, 15 nt, Human
gacucagguugucug

SEQ ID NO: 2562029 - RNA, 21 nt, Human
gacucagguuguaguaaagaa

SEQ ID NO: 2562030 - RNA, 23 nt, Human
gacucagguuguaguaaagaaau

SEQ ID NO: 2562031 - RNA, 15 nt, Human
gacucaguggggagg

SEQ ID NO: 2562032 - RNA, 21 nt, Human
gacucauauccccuauuuaac

SEQ ID NO: 2562033 - RNA, 12 nt, Human
gacucaguguuc

SEQ ID NO: 2562034 - RNA, 15 nt, Human
gacucaguuugucag

SEQ ID NO: 2562035 - RNA, 16 nt, Human
gacuccugcaggcagc

SEQ ID NO: 2562036 - RNA, 15 nt, Human
gacuccugcaggcag

SEQ ID NO: 2562037 - RNA, 14 nt, Human
gacuccugcaggca

SEQ ID NO: 2562038 - RNA, 20 nt, Human
gacucccuccucaccucugg

SEQ ID NO: 2562039 - RNA, 23 nt, Human
gacucccuccucaccucuggacu

SEQ ID NO: 2562040 - RNA, 15 nt, Human
gacuccgcuggaggu

SEQ ID NO: 2562041 - RNA, 22 nt, Human
gacucccuuaaaauagaaauaa

SEQ ID NO: 2562042 - RNA, 24 nt, Human
gacucccuccucaccucuggacug

SEQ ID NO: 2562043 - RNA, 16 nt, Human
gacuccccaggccagg

SEQ ID NO: 2562044 - RNA, 15 nt, Human
gacuccccaggccag

SEQ ID NO: 2562045 - RNA, 23 nt, Human
gacucccauuccugaagaaccag

SEQ ID NO: 2562046 - RNA, 18 nt, Human
gacuccccaggccaggcc

SEQ ID NO: 2562047 - RNA, 12 nt, Human
gacucccuccuc

SEQ ID NO: 2562048 - RNA, 13 nt, Human
gacucccuccuca

SEQ ID NO: 2562049 - RNA, 14 nt, Human
gacucccuccucac

SEQ ID NO: 2562050 - RNA, 16 nt, Human
gacucccuccucaccu

SEQ ID NO: 2562051 - RNA, 19 nt, Human
gacucccuccucaccucug

SEQ ID NO: 2562052 - RNA, 13 nt, Human
gacucccauuccu

SEQ ID NO: 2562053 - RNA, 22 nt, Human
gacucccauuccugaagaacca

SEQ ID NO: 2562054 - RNA, 20 nt, Human
gacuccaguggggcaagauu

SEQ ID NO: 2562055 - RNA, 23 nt, Human
gacuccaugagaagccgugggug

SEQ ID NO: 2562056 - RNA, 21 nt, Human
gacuagaauucuagugcugcu

SEQ ID NO: 2562057 - RNA, 19 nt, Human
gacuagaauucuagugcug

SEQ ID NO: 2562058 - RNA, 22 nt, Human
gacuagaauucuagugcugcug

SEQ ID NO: 2562059 - RNA, 18 nt, Human
gacuagaauucuagugcu

SEQ ID NO: 2562060 - RNA, 16 nt, Human
gacuagaauucuagug

SEQ ID NO: 2562061 - RNA, 23 nt, Human
gacuagaagggccaguccugccu

SEQ ID NO: 2562062 - RNA, 17 nt, Human
gacucaggauccagucc

SEQ ID NO: 2562063 - RNA, 12 nt, Human
gacucagggcag

SEQ ID NO: 2562064 - RNA, 13 nt, Human
gacucagggcagc

SEQ ID NO: 2562065 - RNA, 16 nt, Human
gacucagggcagcgcc

SEQ ID NO: 2562066 - RNA, 15 nt, Human
gacucaggaugccca

SEQ ID NO: 2562067 - RNA, 16 nt, Human
gacucaggaugcccag

SEQ ID NO: 2562068 - RNA, 17 nt, Human
gacucaggaugcccagg

SEQ ID NO: 2562069 - RNA, 18 nt, Human
gacucaggaugcccaggg

SEQ ID NO: 2562070 - RNA, 19 nt, Human
gacucaggaugcccagggc

SEQ ID NO: 2562071 - RNA, 23 nt, Human
gacucaggaugcccagggccacu

SEQ ID NO: 2562072 - RNA, 17 nt, Human
gacucagggcagcgcca

SEQ ID NO: 2562073 - RNA, 18 nt, Human
gacucagggcagcgccag

SEQ ID NO: 2562074 - RNA, 20 nt, Human
gacucagggccaugccugcc

SEQ ID NO: 2562075 - RNA, 19 nt, Human
gacucagggccaugccugc

SEQ ID NO: 2562076 - RNA, 23 nt, Human
gacucagggcagcgccaggcuga

SEQ ID NO: 2562077 - RNA, 22 nt, Human
gacucagggccaugccugcccc

SEQ ID NO: 2562078 - RNA, 21 nt, Human
gacucagggccaugccugccc

SEQ ID NO: 2562079 - RNA, 14 nt, Human
gacucagggcccca

SEQ ID NO: 2562080 - RNA, 15 nt, Human
gacucagggccccag

SEQ ID NO: 2562081 - RNA, 17 nt, Human
gacucagggccccagca

SEQ ID NO: 2562082 - RNA, 14 nt, Human
gacucagggcuccu

SEQ ID NO: 2562083 - RNA, 16 nt, Human
gacucagggcuccugg

SEQ ID NO: 2562084 - RNA, 17 nt, Human
gacucagggcuccuggg

SEQ ID NO: 2562085 - RNA, 19 nt, Human
gacucagggcuccuggguu

SEQ ID NO: 2562086 - RNA, 12 nt, Human
gacucagggcuc

SEQ ID NO: 2562087 - RNA, 13 nt, Human
gacucagggcucc

SEQ ID NO: 2562088 - RNA, 18 nt, Human
gacucagggccccagcac

SEQ ID NO: 2562089 - RNA, 20 nt, Human
gacucagggccccagcacua

SEQ ID NO: 2562090 - RNA, 23 nt, Human
gacuacugggcaaagaguguaga

SEQ ID NO: 2562091 - RNA, 15 nt, Human
gacuagaaccuggag

SEQ ID NO: 2562092 - RNA, 20 nt, Human
gacuagaaccuggagggcug

SEQ ID NO: 2562093 - RNA, 16 nt, Human
gacuagaaccuggagg

SEQ ID NO: 2562094 - RNA, 15 nt, Human
gacuagaagggccag

SEQ ID NO: 2562095 - RNA, 12 nt, Human
gacuacaggcac

SEQ ID NO: 2562096 - RNA, 17 nt, Human
gacuacucccccaggug

SEQ ID NO: 2562097 - RNA, 22 nt, Human
gacguguuaugacuccagaauu

SEQ ID NO: 2562098 - RNA, 12 nt, Human
gacguuccagcc

SEQ ID NO: 2562099 - RNA, 14 nt, Human
gacguguuuguguu

SEQ ID NO: 2562100 - RNA, 21 nt, Human
gacuaauuccugcccugccca

SEQ ID NO: 2562101 - RNA, 13 nt, Human
gacuaauuguaua

SEQ ID NO: 2562102 - RNA, 15 nt, Human
gacuacaccuacgga

SEQ ID NO: 2562103 - RNA, 18 nt, Human
gacuaauuuaaaaaauaa

SEQ ID NO: 2562104 - RNA, 13 nt, Human
gacuaauuucaaa

SEQ ID NO: 2562105 - RNA, 22 nt, Human
gacuaauuucaaaaugcuuuuu

SEQ ID NO: 2562106 - RNA, 22 nt, Human
gacuaauuguauaacagguuau

SEQ ID NO: 2562107 - RNA, 21 nt, Human
gacuaauuguauaacagguua

SEQ ID NO: 2562108 - RNA, 12 nt, Human
gacuaauuucaa

SEQ ID NO: 2562109 - RNA, 20 nt, Human
gacuaauuguauaacagguu

SEQ ID NO: 2562110 - RNA, 19 nt, Human
gacuaauuguauaacaggu

SEQ ID NO: 2562111 - RNA, 15 nt, Human
gacuaauuguauaac

SEQ ID NO: 2562112 - RNA, 22 nt, Human
gaccccagcugugagccuuggc

SEQ ID NO: 2562113 - RNA, 18 nt, Human
gaccccagcugugagccu

SEQ ID NO: 2562114 - RNA, 21 nt, Human
gaccccagcugggaggcaaga

SEQ ID NO: 2562115 - RNA, 21 nt, Human
gaccccagcugugagccuugg

SEQ ID NO: 2562116 - RNA, 16 nt, Human
gaccccagcugggagg

SEQ ID NO: 2562117 - RNA, 15 nt, Human
gaccccagcugggag

SEQ ID NO: 2562118 - RNA, 14 nt, Human
gaccccagcuggga

SEQ ID NO: 2562119 - RNA, 13 nt, Human
gaccccagcuggg

SEQ ID NO: 2562120 - RNA, 12 nt, Human
gaccccagcugg

SEQ ID NO: 2562121 - RNA, 17 nt, Human
gaccccaucugcccagg

SEQ ID NO: 2562122 - RNA, 16 nt, Human
gaccccaucugcccag

SEQ ID NO: 2562123 - RNA, 15 nt, Human
gaccccaucugccca

SEQ ID NO: 2562124 - RNA, 16 nt, Human
gaccccaucugugaau

SEQ ID NO: 2562125 - RNA, 19 nt, Human
gaccccaucugugaauaag

SEQ ID NO: 2562126 - RNA, 20 nt, Human
gaccccgagccuggcuccaa

SEQ ID NO: 2562127 - RNA, 22 nt, Human
gaccccucauagcccucacccu

SEQ ID NO: 2562128 - RNA, 18 nt, Human
gaccccaucugcccagga

SEQ ID NO: 2562129 - RNA, 12 nt, Human
gaccccucaccu

SEQ ID NO: 2562130 - RNA, 18 nt, Human
gacccugaggcccagagg

SEQ ID NO: 2562131 - RNA, 23 nt, Human
gaccccucauagcccucacccug

SEQ ID NO: 2562132 - RNA, 13 nt, Human
gaccccuccaugu

SEQ ID NO: 2562133 - RNA, 21 nt, Human
gacccugaggcccagagggcc

SEQ ID NO: 2562134 - RNA, 12 nt, Human
gacccugcccug

SEQ ID NO: 2562135 - RNA, 20 nt, Human
gacccugaggcccagagggc

SEQ ID NO: 2562136 - RNA, 19 nt, Human
gacccugaggcccagaggg

SEQ ID NO: 2562137 - RNA, 15 nt, Human
gacccugcccugugg

SEQ ID NO: 2562138 - RNA, 13 nt, Human
gacccugcccugu

SEQ ID NO: 2562139 - RNA, 16 nt, Human
gacccugcccuguggg

SEQ ID NO: 2562140 - RNA, 23 nt, Human
gacccugucucaaaaaaagaaaa

SEQ ID NO: 2562141 - RNA, 22 nt, Human
gacccaggccgcagcucuugcc

SEQ ID NO: 2562142 - RNA, 17 nt, Human
gacccaggccgcagcuc

SEQ ID NO: 2562143 - RNA, 15 nt, Human
gacccaggccgcagc

SEQ ID NO: 2562144 - RNA, 13 nt, Human
gacccaggccgca

SEQ ID NO: 2562145 - RNA, 11 nt, Human
gacccaggccg

SEQ ID NO: 2562146 - RNA, 16 nt, Human
gacccaggcaccugca

SEQ ID NO: 2562147 - RNA, 11 nt, Human
gacccaggcac

SEQ ID NO: 2562148 - RNA, 15 nt, Human
gacccagucccuggg

SEQ ID NO: 2562149 - RNA, 15 nt, Human
gacccaggcugggca

SEQ ID NO: 2562150 - RNA, 14 nt, Human
gacccaggcugggc

SEQ ID NO: 2562151 - RNA, 19 nt, Human
gacccaggccgcagcucuu

SEQ ID NO: 2562152 - RNA, 13 nt, Human
gacccaggcuggg

SEQ ID NO: 2562153 - RNA, 15 nt, Human
gacccaugcugcccu

SEQ ID NO: 2562154 - RNA, 14 nt, Human
gacccaugcugccc

SEQ ID NO: 2562155 - RNA, 16 nt, Human
gacccaugcugcccug

SEQ ID NO: 2562156 - RNA, 14 nt, Human
gacccagucccugg

SEQ ID NO: 2562157 - RNA, 19 nt, Human
gaccccagcggcugaguca

SEQ ID NO: 2562158 - RNA, 18 nt, Human
gaccccagcggcugaguc

SEQ ID NO: 2562159 - RNA, 12 nt, Human
gacccacugcuu

SEQ ID NO: 2562160 - RNA, 18 nt, Human
gacccaccccugugcucc

SEQ ID NO: 2562161 - RNA, 17 nt, Human
gacccaccccugugcuc

SEQ ID NO: 2562162 - RNA, 16 nt, Human
gacccaccccugugcu

SEQ ID NO: 2562163 - RNA, 15 nt, Human
gacccaccccugugc

SEQ ID NO: 2562164 - RNA, 17 nt, Human
gacccagcccucauccc

SEQ ID NO: 2562165 - RNA, 22 nt, Human
gacccaccugguggccucugcc

SEQ ID NO: 2562166 - RNA, 11 nt, Human
gacccacugcu

SEQ ID NO: 2562167 - RNA, 14 nt, Human
gacccaccccugug

SEQ ID NO: 2562168 - RNA, 12 nt, Human
gacccaccccug

SEQ ID NO: 2562169 - RNA, 18 nt, Human
gaccaagagagaaagaag

SEQ ID NO: 2562170 - RNA, 14 nt, Human
gaccaacugucacu

SEQ ID NO: 2562171 - RNA, 19 nt, Human
gaccaacugggcccaagac

SEQ ID NO: 2562172 - RNA, 14 nt, Human
gaccaagagagaaa

SEQ ID NO: 2562173 - RNA, 12 nt, Human
gaccaagcagga

SEQ ID NO: 2562174 - RNA, 15 nt, Human
gaccaagagagaaag

SEQ ID NO: 2562175 - RNA, 16 nt, Human
gaccaagagagaaaga

SEQ ID NO: 2562176 - RNA, 17 nt, Human
gaccaacccuguuuccu

SEQ ID NO: 2562177 - RNA, 16 nt, Human
gaccaacccuguuucc

SEQ ID NO: 2562178 - RNA, 21 nt, Human
gaccaacauggagaaacccug

SEQ ID NO: 2562179 - RNA, 22 nt, Human
gaccaacauggagaaacccugu

SEQ ID NO: 2562180 - RNA, 18 nt, Human
gaccaacccuguuuccug

SEQ ID NO: 2562181 - RNA, 13 nt, Human
gaccaaccugacc

SEQ ID NO: 2562182 - RNA, 14 nt, Human
gaccaaccugacca

SEQ ID NO: 2562183 - RNA, 20 nt, Human
gaccaacuagacauucuguc

SEQ ID NO: 2562184 - RNA, 19 nt, Human
gaccaacuagacauucugu

SEQ ID NO: 2562185 - RNA, 18 nt, Human
gaccaacuagacauucug

SEQ ID NO: 2562186 - RNA, 17 nt, Human
gaccaacuagacauucu

SEQ ID NO: 2562187 - RNA, 13 nt, Human
gaccaacugggcc

SEQ ID NO: 2562188 - RNA, 14 nt, Human
gaccaacugggccc

SEQ ID NO: 2562189 - RNA, 17 nt, Human
gaccucagaguccaggc

SEQ ID NO: 2562190 - RNA, 18 nt, Human
gaccucagaguccaggcc

SEQ ID NO: 2562191 - RNA, 19 nt, Human
gaccucagaguccaggccc

SEQ ID NO: 2562192 - RNA, 10 nt, Human
gaccucagcc

SEQ ID NO: 2562193 - RNA, 21 nt, Human
gaccucagaguccaggcccca

SEQ ID NO: 2562194 - RNA, 11 nt, Human
gaccucagcca

SEQ ID NO: 2562195 - RNA, 11 nt, Human
gaccucagccu

SEQ ID NO: 2562196 - RNA, 12 nt, Human
gaccucagccug

SEQ ID NO: 2562197 - RNA, 13 nt, Human
gaccucagccugu

SEQ ID NO: 2562198 - RNA, 14 nt, Human
gaccucagccugug

SEQ ID NO: 2562199 - RNA, 16 nt, Human
gaccucagccugugcu

SEQ ID NO: 2562200 - RNA, 19 nt, Human
gaccucagccugugcugcc

SEQ ID NO: 2562201 - RNA, 13 nt, Human
gaccucagccuuc

SEQ ID NO: 2562202 - RNA, 14 nt, Human
gaccucagccuucc

SEQ ID NO: 2562203 - RNA, 16 nt, Human
gaccucagcugcuucu

SEQ ID NO: 2562204 - RNA, 14 nt, Human
gaccucagcugcuu

SEQ ID NO: 2562205 - RNA, 20 nt, Human
gaccucagccuuccccuugc

SEQ ID NO: 2562206 - RNA, 20 nt, Human
gaccuaaaauuugcccuccc

SEQ ID NO: 2562207 - RNA, 19 nt, Human
gaccuaaaauuugcccucc

SEQ ID NO: 2562208 - RNA, 16 nt, Human
gaccuaaauggccuca

SEQ ID NO: 2562209 - RNA, 20 nt, Human
gaccgugggcggggccuugc

SEQ ID NO: 2562210 - RNA, 18 nt, Human
gaccgugggcggggccuu

SEQ ID NO: 2562211 - RNA, 21 nt, Human
gaccgugggcggggccuugcg

SEQ ID NO: 2562212 - RNA, 20 nt, Human
gaccuaaauggccucaugug

SEQ ID NO: 2562213 - RNA, 22 nt, Human
gaccuaaaauuugcccucccau

SEQ ID NO: 2562214 - RNA, 14 nt, Human
gaccuaaugcuccu

SEQ ID NO: 2562215 - RNA, 15 nt, Human
gaccuaaugcuccuu

SEQ ID NO: 2562216 - RNA, 13 nt, Human
gaccuacaaauca

SEQ ID NO: 2562217 - RNA, 22 nt, Human
gaccuaaugcuccuuguuccua

SEQ ID NO: 2562218 - RNA, 14 nt, Human
gaccuaccucaggu

SEQ ID NO: 2562219 - RNA, 13 nt, Human
gaccuaccucagg

SEQ ID NO: 2562220 - RNA, 12 nt, Human
gaccuaccucag

SEQ ID NO: 2562221 - RNA, 15 nt, Human
gaccuaccucagguu

SEQ ID NO: 2562222 - RNA, 14 nt, Human
gaccgugaggccag

SEQ ID NO: 2562223 - RNA, 13 nt, Human
gaccguccucacc

SEQ ID NO: 2562224 - RNA, 19 nt, Human
gaccgugaggccagagaca

SEQ ID NO: 2562225 - RNA, 15 nt, Human
gaccgugaggccaga

SEQ ID NO: 2562226 - RNA, 15 nt, Human
gaccggcggcucgga

SEQ ID NO: 2562227 - RNA, 15 nt, Human
gaccgguacagaaag

SEQ ID NO: 2562228 - RNA, 20 nt, Human
gacccuuacagccucugacu

SEQ ID NO: 2562229 - RNA, 21 nt, Human
gacccuguugcuaagccccag

SEQ ID NO: 2562230 - RNA, 17 nt, Human
gacccuugacaccugcu

SEQ ID NO: 2562231 - RNA, 21 nt, Human
gacccuuauuacacggaaaac

SEQ ID NO: 2562232 - RNA, 17 nt, Human
gacccuuacagccucug

SEQ ID NO: 2562233 - RNA, 19 nt, Human
gacccuucccuugagcccu

SEQ ID NO: 2562234 - RNA, 13 nt, Human
gaccccucaccuu

SEQ ID NO: 2562235 - RNA, 14 nt, Human
gaccccucaccuug

SEQ ID NO: 2562236 - RNA, 12 nt, Human
gacccugucucu

SEQ ID NO: 2562237 - RNA, 20 nt, Human
gacccugugacauggugccu

SEQ ID NO: 2562238 - RNA, 22 nt, Human
gaccccucaccuugcaacacac

SEQ ID NO: 2562239 - RNA, 16 nt, Human
gacccuguugcuaagc

SEQ ID NO: 2562240 - RNA, 15 nt, Human
gacccuguugcuaag

SEQ ID NO: 2562241 - RNA, 22 nt, Human
gacccugugacauggugccuga

SEQ ID NO: 2562242 - RNA, 21 nt, Human
gacccugugacauggugccug

SEQ ID NO: 2562243 - RNA, 14 nt, Human
gacccuguggaagc

SEQ ID NO: 2562244 - RNA, 15 nt, Human
gaccugaggcccuuc

SEQ ID NO: 2562245 - RNA, 13 nt, Human
gaccucaggccug

SEQ ID NO: 2562246 - RNA, 12 nt, Human
gaccucaggccu

SEQ ID NO: 2562247 - RNA, 11 nt, Human
gaccucaggcc

SEQ ID NO: 2562248 - RNA, 17 nt, Human
gaccugaggcugugguc

SEQ ID NO: 2562249 - RNA, 15 nt, Human
gaccugaggcugugg

SEQ ID NO: 2562250 - RNA, 14 nt, Human
gaccugaggcugug

SEQ ID NO: 2562251 - RNA, 13 nt, Human
gaccugaggcugu

SEQ ID NO: 2562252 - RNA, 18 nt, Human
gaccugaggcuccugugc

SEQ ID NO: 2562253 - RNA, 14 nt, Human
gaccugaggcuccu

SEQ ID NO: 2562254 - RNA, 21 nt, Human
gaccucaggcacuagccuuug

SEQ ID NO: 2562255 - RNA, 19 nt, Human
gaccucaggcacuagccuu

SEQ ID NO: 2562256 - RNA, 18 nt, Human
gaccucaggcacuagccu

SEQ ID NO: 2562257 - RNA, 17 nt, Human
gaccucagcugcuucuc

SEQ ID NO: 2562258 - RNA, 17 nt, Human
gaccucaggcacuagcc

SEQ ID NO: 2562259 - RNA, 21 nt, Human
gaccugaggcccuucucucca

SEQ ID NO: 2562260 - RNA, 18 nt, Human
gaccugaggcccuucucu

SEQ ID NO: 2562261 - RNA, 23 nt, Human
gaccugauuucugagcauuuaau

SEQ ID NO: 2562262 - RNA, 14 nt, Human
gaccugauccugga

SEQ ID NO: 2562263 - RNA, 15 nt, Human
gaccugauccuggag

SEQ ID NO: 2562264 - RNA, 18 nt, Human
gaccugauccuggaggcc

SEQ ID NO: 2562265 - RNA, 21 nt, Human
gaccugauccuggaggcccag

SEQ ID NO: 2562266 - RNA, 19 nt, Human
gaccugauuuacaguuuca

SEQ ID NO: 2562267 - RNA, 20 nt, Human
gaccugaggcuccugugcua

SEQ ID NO: 2562268 - RNA, 16 nt, Human
gaccugcacuggggag

SEQ ID NO: 2562269 - RNA, 20 nt, Human
gaccugcacuggggagcccg

SEQ ID NO: 2562270 - RNA, 13 nt, Human
gaccugcaggcca

SEQ ID NO: 2562271 - RNA, 22 nt, Human
gaccugccuccugccugccccu

SEQ ID NO: 2562272 - RNA, 20 nt, Human
gaccugccuccugccugccc

SEQ ID NO: 2562273 - RNA, 19 nt, Human
gaccugccuccugccugcc

SEQ ID NO: 2562274 - RNA, 16 nt, Human
gaccugccuccugccu

SEQ ID NO: 2562275 - RNA, 15 nt, Human
gaccugccucggccu

SEQ ID NO: 2562276 - RNA, 14 nt, Human
gaccugccuccugc

SEQ ID NO: 2562277 - RNA, 13 nt, Human
gaccugccuccug

SEQ ID NO: 2562278 - RNA, 22 nt, Human
gaccugccucccuucaugcaug

SEQ ID NO: 2562279 - RNA, 11 nt, Human
gaccugccucc

SEQ ID NO: 2562280 - RNA, 21 nt, Human
gaccugccccgcccagcugca

SEQ ID NO: 2562281 - RNA, 15 nt, Human
gaccugccaggcagg

SEQ ID NO: 2562282 - RNA, 20 nt, Human
gaccugcaggccaagagcag

SEQ ID NO: 2562283 - RNA, 18 nt, Human
gaccugccaggcaggggu

SEQ ID NO: 2562284 - RNA, 17 nt, Human
gaccugccaggcagggg

SEQ ID NO: 2562285 - RNA, 16 nt, Human
gaccugccaggcaggg

SEQ ID NO: 2562286 - RNA, 21 nt, Human
gaccugccccuccucucugcc

SEQ ID NO: 2562287 - RNA, 20 nt, Human
gaccugccaggcaggggugg

SEQ ID NO: 2562288 - RNA, 19 nt, Human
gaccugccaggcaggggug

SEQ ID NO: 2562289 - RNA, 21 nt, Human
gaccugccaggcagggguggg

SEQ ID NO: 2562290 - RNA, 17 nt, Human
gacaugucuuuucuugc

SEQ ID NO: 2562291 - RNA, 23 nt, Human
gacauggugccugagaggcaggc

SEQ ID NO: 2562292 - RNA, 22 nt, Human
gacauggugccugagaggcagg

SEQ ID NO: 2562293 - RNA, 21 nt, Human
gacauggugccugagaggcag

SEQ ID NO: 2562294 - RNA, 20 nt, Human
gacauggugccugagaggca

SEQ ID NO: 2562295 - RNA, 15 nt, Human
gacaugucuguucua

SEQ ID NO: 2562296 - RNA, 11 nt, Human
gacauguacag

SEQ ID NO: 2562297 - RNA, 18 nt, Human
gacaugugaaaccuuuuu

SEQ ID NO: 2562298 - RNA, 17 nt, Human
gacauuuugccaaaauu

SEQ ID NO: 2562299 - RNA, 15 nt, Human
gacaugugaaaccuu

SEQ ID NO: 2562300 - RNA, 14 nt, Human
gacaugugaaaccu

SEQ ID NO: 2562301 - RNA, 12 nt, Human
gacaugugaaac

SEQ ID NO: 2562302 - RNA, 12 nt, Human
gacauguacaga

SEQ ID NO: 2562303 - RNA, 17 nt, Human
gacaugucuguucuaca

SEQ ID NO: 2562304 - RNA, 21 nt, Human
gacaugucuuuucuugcauga

SEQ ID NO: 2562305 - RNA, 22 nt, Human
gaccaaauuccuuggcaugccu

SEQ ID NO: 2562306 - RNA, 16 nt, Human
gaccaacauggagaaa

SEQ ID NO: 2562307 - RNA, 23 nt, Human
gaccaaauuccuuggcaugccuu

SEQ ID NO: 2562308 - RNA, 17 nt, Human
gaccaacauggagaaac

SEQ ID NO: 2562309 - RNA, 19 nt, Human
gaccaaaauccccuucuca

SEQ ID NO: 2562310 - RNA, 17 nt, Human
gaccaaaauccccuucu

SEQ ID NO: 2562311 - RNA, 13 nt, Human
gaccaaaaucccc

SEQ ID NO: 2562312 - RNA, 17 nt, Human
gaccaaaccuagccccu

SEQ ID NO: 2562313 - RNA, 13 nt, Human
gaccaaaccuagc

SEQ ID NO: 2562314 - RNA, 20 nt, Human
gacauuuuuucagucauaua

SEQ ID NO: 2562315 - RNA, 15 nt, Human
gacauuuuuucaguc

SEQ ID NO: 2562316 - RNA, 22 nt, Human
gacaugggacauuugcucaugg

SEQ ID NO: 2562317 - RNA, 17 nt, Human
gacaugggacauuugcu

SEQ ID NO: 2562318 - RNA, 19 nt, Human
gacauggugccugagaggc

SEQ ID NO: 2562319 - RNA, 18 nt, Human
gacauggugccugagagg

SEQ ID NO: 2562320 - RNA, 17 nt, Human
gacauggugccugagag

SEQ ID NO: 2562321 - RNA, 16 nt, Human
gacauggugccugaga

SEQ ID NO: 2562322 - RNA, 14 nt, Human
gacauggugccuga

SEQ ID NO: 2562323 - RNA, 15 nt, Human
gacauggggaggaag

SEQ ID NO: 2562324 - RNA, 16 nt, Human
gacauggggaggaagg

SEQ ID NO: 2562325 - RNA, 12 nt, Human
gacaugaauaug

SEQ ID NO: 2562326 - RNA, 18 nt, Human
gacaugcgguagccagca

SEQ ID NO: 2562327 - RNA, 14 nt, Human
gacaugaauaugau

SEQ ID NO: 2562328 - RNA, 19 nt, Human
gacaugcgguagccagcac

SEQ ID NO: 2562329 - RNA, 22 nt, Human
gacaugcgguagccagcacaca

SEQ ID NO: 2562330 - RNA, 23 nt, Human
gacaugcgguagccagcacacag

SEQ ID NO: 2562331 - RNA, 14 nt, Human
gacaugcugaagcc

SEQ ID NO: 2562332 - RNA, 20 nt, Human
gacauagagagggagaagaa

SEQ ID NO: 2562333 - RNA, 22 nt, Human
gacauggagacuccugcccugu

SEQ ID NO: 2562334 - RNA, 20 nt, Human
gacauggagacuccugcccu

SEQ ID NO: 2562335 - RNA, 19 nt, Human
gacauggagacuccugccc

SEQ ID NO: 2562336 - RNA, 17 nt, Human
gacauggagacuccugc

SEQ ID NO: 2562337 - RNA, 19 nt, Human
gacaugcugaagccaaagc

SEQ ID NO: 2562338 - RNA, 18 nt, Human
gacaugcugaagccaaag

SEQ ID NO: 2562339 - RNA, 15 nt, Human
gacaugcugaagcca

SEQ ID NO: 2562340 - RNA, 14 nt, Human
gacaugcugacuuu

SEQ ID NO: 2562341 - RNA, 16 nt, Human
gacauggacccggagc

SEQ ID NO: 2562342 - RNA, 17 nt, Human
gacauggacccggagcu

SEQ ID NO: 2562343 - RNA, 17 nt, Human
gacaucucugcacccug

SEQ ID NO: 2562344 - RNA, 15 nt, Human
gacaucucugcaccc

SEQ ID NO: 2562345 - RNA, 14 nt, Human
gacaucuggaaucu

SEQ ID NO: 2562346 - RNA, 18 nt, Human
gacaucuggaaucuggag

SEQ ID NO: 2562347 - RNA, 19 nt, Human
gacaucuggaaucuggaga

SEQ ID NO: 2562348 - RNA, 14 nt, Human
gacaucaacagaua

SEQ ID NO: 2562349 - RNA, 20 nt, Human
gacaucuggaaucuggagac

SEQ ID NO: 2562350 - RNA, 22 nt, Human
gacaucuggaaucuggagacca

SEQ ID NO: 2562351 - RNA, 21 nt, Human
gacaucuguuucuaaauguuu

SEQ ID NO: 2562352 - RNA, 16 nt, Human
gacaucucuuugaauu

SEQ ID NO: 2562353 - RNA, 16 nt, Human
gacaucuuaguauuug

SEQ ID NO: 2562354 - RNA, 20 nt, Human
gacaugaagauucuuuccca

SEQ ID NO: 2562355 - RNA, 19 nt, Human
gacaucuuaguauuugcau

SEQ ID NO: 2562356 - RNA, 20 nt, Human
gacaucuucaaagcuugaag

SEQ ID NO: 2562357 - RNA, 21 nt, Human
gacaucuucaaagcuugaaga

SEQ ID NO: 2562358 - RNA, 23 nt, Human
gacauaggccaugaaaaaaauga

SEQ ID NO: 2562359 - RNA, 13 nt, Human
gacauauucauuu

SEQ ID NO: 2562360 - RNA, 20 nt, Human
gacauauucauuuggaaaua

SEQ ID NO: 2562361 - RNA, 23 nt, Human
gacauacuaaccagcagaaaugc

SEQ ID NO: 2562362 - RNA, 22 nt, Human
gacauagagagggagaagaagu

SEQ ID NO: 2562363 - RNA, 16 nt, Human
gacauaauuucacuga

SEQ ID NO: 2562364 - RNA, 22 nt, Human
gacauagcccaucccugccugg

SEQ ID NO: 2562365 - RNA, 21 nt, Human
gacauagagagggagaagaag

SEQ ID NO: 2562366 - RNA, 18 nt, Human
gacauagcccaucccugc

SEQ ID NO: 2562367 - RNA, 12 nt, Human
gacaggcuggcu

SEQ ID NO: 2562368 - RNA, 14 nt, Human
gacaggcuggcucc

SEQ ID NO: 2562369 - RNA, 21 nt, Human
gacaggcuggcuccagaugca

SEQ ID NO: 2562370 - RNA, 22 nt, Human
gacaggcuggcuccagaugcag

SEQ ID NO: 2562371 - RNA, 23 nt, Human
gacauaacguuuuuccuuuaaaa

SEQ ID NO: 2562372 - RNA, 15 nt, Human
gacagggaagagcag

SEQ ID NO: 2562373 - RNA, 22 nt, Human
gacauaaugggguccuggccau

SEQ ID NO: 2562374 - RNA, 15 nt, Human
gacauacuaaccagc

SEQ ID NO: 2562375 - RNA, 16 nt, Human
gacauacuaaccagca

SEQ ID NO: 2562376 - RNA, 19 nt, Human
gacaggcucuuagcagcuu

SEQ ID NO: 2562377 - RNA, 18 nt, Human
gacaggcucuuagcagcu

SEQ ID NO: 2562378 - RNA, 17 nt, Human
gacaggcucuuagcagc

SEQ ID NO: 2562379 - RNA, 13 nt, Human
gacaggcucuuag

SEQ ID NO: 2562380 - RNA, 21 nt, Human
gacaggcccaagagaugaaga

SEQ ID NO: 2562381 - RNA, 14 nt, Human
gacaggcagcagag

SEQ ID NO: 2562382 - RNA, 15 nt, Human
gacaggcagccugga

SEQ ID NO: 2562383 - RNA, 18 nt, Human
gacaggcccaagagauga

SEQ ID NO: 2562384 - RNA, 22 nt, Human
gacaggcccaagagaugaagag

SEQ ID NO: 2562385 - RNA, 16 nt, Human
gacaggcccaagagau

SEQ ID NO: 2562386 - RNA, 23 nt, Human
gacaggaugggggcuggccucug

SEQ ID NO: 2562387 - RNA, 20 nt, Human
gacaggagggcaagggccau

SEQ ID NO: 2562388 - RNA, 13 nt, Human
gacaggcagcaga

SEQ ID NO: 2562389 - RNA, 23 nt, Human
gacagaucucugcuuuggaaauc

SEQ ID NO: 2562390 - RNA, 21 nt, Human
gacagaucucugcuuuggaaa

SEQ ID NO: 2562391 - RNA, 19 nt, Human
gacagaucucugcuuugga

SEQ ID NO: 2562392 - RNA, 23 nt, Human
gacagaucaagcugugagacagu

SEQ ID NO: 2562393 - RNA, 16 nt, Human
gacagacacaggcccg

SEQ ID NO: 2562394 - RNA, 15 nt, Human
gacagacacaggccc

SEQ ID NO: 2562395 - RNA, 21 nt, Human
gacacuaaccacgcuggaccu

SEQ ID NO: 2562396 - RNA, 20 nt, Human
gacacuaaccacgcuggacc

SEQ ID NO: 2562397 - RNA, 15 nt, Human
gacacguccacccca

SEQ ID NO: 2562398 - RNA, 14 nt, Human
gacagacacaggcc

SEQ ID NO: 2562399 - RNA, 13 nt, Human
gacagcugccugg

SEQ ID NO: 2562400 - RNA, 12 nt, Human
gacagcugccug

SEQ ID NO: 2562401 - RNA, 22 nt, Human
gacagccaacuauggccugugg

SEQ ID NO: 2562402 - RNA, 13 nt, Human
gacagccacggcc

SEQ ID NO: 2562403 - RNA, 20 nt, Human
gacagaugaaugccguggau

SEQ ID NO: 2562404 - RNA, 19 nt, Human
gacagaugaaugccgugga

SEQ ID NO: 2562405 - RNA, 18 nt, Human
gacagaucaauggcgcag

SEQ ID NO: 2562406 - RNA, 14 nt, Human
gacagaugccccag

SEQ ID NO: 2562407 - RNA, 18 nt, Human
gacagaugccccagagcu

SEQ ID NO: 2562408 - RNA, 19 nt, Human
gacagaugccccagagcug

SEQ ID NO: 2562409 - RNA, 19 nt, Human
gacagccaacuauggccug

SEQ ID NO: 2562410 - RNA, 19 nt, Human
gacaggcauguucucugag

SEQ ID NO: 2562411 - RNA, 18 nt, Human
gacaggcauguucucuga

SEQ ID NO: 2562412 - RNA, 17 nt, Human
gacaggcaaugcuggcu

SEQ ID NO: 2562413 - RNA, 24 nt, Human
gacaggcaaugcuggcuguuggcu

SEQ ID NO: 2562414 - RNA, 16 nt, Human
gacaggaugggggcug

SEQ ID NO: 2562415 - RNA, 17 nt, Human
gacaggagggcaagggc

SEQ ID NO: 2562416 - RNA, 16 nt, Human
gacaggcaaugcuggc

SEQ ID NO: 2562417 - RNA, 14 nt, Human
gacaggcaaugcug

SEQ ID NO: 2562418 - RNA, 15 nt, Human
gacagcugccuggga

SEQ ID NO: 2562419 - RNA, 14 nt, Human
gacagcugccuggg

SEQ ID NO: 2562420 - RNA, 11 nt, Human
gacagcugcuc

SEQ ID NO: 2562421 - RNA, 14 nt, Human
gacagcugcuccua

SEQ ID NO: 2562422 - RNA, 17 nt, Human
gacagcugcuccuagag

SEQ ID NO: 2562423 - RNA, 20 nt, Human
gacagcugcuccuagaggga

SEQ ID NO: 2562424 - RNA, 21 nt, Human
gacagcugcuccuagagggag

SEQ ID NO: 2562425 - RNA, 22 nt, Human
gacagcugucccugucaccaag

SEQ ID NO: 2562426 - RNA, 18 nt, Human
gacagcugucccugucac

SEQ ID NO: 2562427 - RNA, 19 nt, Human
gacagcugucccugucacc

SEQ ID NO: 2562428 - RNA, 14 nt, Human
gacagcugucccug

SEQ ID NO: 2562429 - RNA, 15 nt, Human
gacagcugucccugu

SEQ ID NO: 2562430 - RNA, 16 nt, Human
gacagcugucccuguc

SEQ ID NO: 2562431 - RNA, 17 nt, Human
gacagcugucccuguca

SEQ ID NO: 2562432 - RNA, 18 nt, Human
gacaggagaccuggcacu

SEQ ID NO: 2562433 - RNA, 21 nt, Human
gacaggagaccuggcacugga

SEQ ID NO: 2562434 - RNA, 11 nt, Human
gacaggagaaa

SEQ ID NO: 2562435 - RNA, 12 nt, Human
gacaggagaaau

SEQ ID NO: 2562436 - RNA, 24 nt, Human
gacaggagaaaugcauccauuccu

SEQ ID NO: 2562437 - RNA, 15 nt, Human
gacaggaccugacua

SEQ ID NO: 2562438 - RNA, 20 nt, Human
gacaggacgggcuugggcuu

SEQ ID NO: 2562439 - RNA, 21 nt, Human
gacagcuucucauccugcagg

SEQ ID NO: 2562440 - RNA, 15 nt, Human
gacagcuugagccgg

SEQ ID NO: 2562441 - RNA, 22 nt, Human
gacagcuucucauccugcaggc

SEQ ID NO: 2562442 - RNA, 18 nt, Human
gacaagagaugggaauga

SEQ ID NO: 2562443 - RNA, 19 nt, Human
gacaagcaauuagacaaga

SEQ ID NO: 2562444 - RNA, 12 nt, Human
gacaagcagagg

SEQ ID NO: 2562445 - RNA, 22 nt, Human
gacaagccaacuuguaaauaca

SEQ ID NO: 2562446 - RNA, 16 nt, Human
gacaagcacugcuagg

SEQ ID NO: 2562447 - RNA, 19 nt, Human
gacaagccaacuuguaaau

SEQ ID NO: 2562448 - RNA, 12 nt, Human
gacaagccccag

SEQ ID NO: 2562449 - RNA, 23 nt, Human
gacaagccaacuuguaaauacac

SEQ ID NO: 2562450 - RNA, 15 nt, Human
gacaagccccaggca

SEQ ID NO: 2562451 - RNA, 15 nt, Human
gacaagcucacagac

SEQ ID NO: 2562452 - RNA, 22 nt, Human
gacaaggauugcuacuguccua

SEQ ID NO: 2562453 - RNA, 14 nt, Human
gaagucuuuguaca

SEQ ID NO: 2562454 - RNA, 16 nt, Human
gaagucuuuguacaga

SEQ ID NO: 2562455 - RNA, 24 nt, Human
gacaagacuucaguauguugucaa

SEQ ID NO: 2562456 - RNA, 20 nt, Human
gacaagacuucaguauguug

SEQ ID NO: 2562457 - RNA, 19 nt, Human
gacaagacuucaguauguu

SEQ ID NO: 2562458 - RNA, 16 nt, Human
gacaagacuucaguau

SEQ ID NO: 2562459 - RNA, 20 nt, Human
gacaagagaugggaaugagg

SEQ ID NO: 2562460 - RNA, 14 nt, Human
gacaagagauggga

SEQ ID NO: 2562461 - RNA, 15 nt, Human
gacaauaaucucacu

SEQ ID NO: 2562462 - RNA, 13 nt, Human
gacaauaauuuca

SEQ ID NO: 2562463 - RNA, 19 nt, Human
gacaauaauuucagguuuu

SEQ ID NO: 2562464 - RNA, 20 nt, Human
gacaaucaguccccucccau

SEQ ID NO: 2562465 - RNA, 19 nt, Human
gacaaucaguccccuccca

SEQ ID NO: 2562466 - RNA, 18 nt, Human
gacaaucaguccccuccc

SEQ ID NO: 2562467 - RNA, 17 nt, Human
gacaaucaguccccucc

SEQ ID NO: 2562468 - RNA, 16 nt, Human
gacaaucaguccccuc

SEQ ID NO: 2562469 - RNA, 14 nt, Human
gacaaucagucccc

SEQ ID NO: 2562470 - RNA, 17 nt, Human
gacaaucaacucuaaua

SEQ ID NO: 2562471 - RNA, 16 nt, Human
gacaaugacccagugg

SEQ ID NO: 2562472 - RNA, 20 nt, Human
gacaaucaugaaauaugcau

SEQ ID NO: 2562473 - RNA, 19 nt, Human
gacaaucaugaaauaugca

SEQ ID NO: 2562474 - RNA, 21 nt, Human
gacaaucaugaaauaugcauc

SEQ ID NO: 2562475 - RNA, 23 nt, Human
gacaagguagcccuggccagagg

SEQ ID NO: 2562476 - RNA, 14 nt, Human
gacaagguagcccu

SEQ ID NO: 2562477 - RNA, 21 nt, Human
gacaagguagcccuggccaga

SEQ ID NO: 2562478 - RNA, 23 nt, Human
gacaaggccccagagacucagag

SEQ ID NO: 2562479 - RNA, 16 nt, Human
gacaaggccccagaga

SEQ ID NO: 2562480 - RNA, 17 nt, Human
gacaaggccccagagac

SEQ ID NO: 2562481 - RNA, 16 nt, Human
gacaagccccaggcag

SEQ ID NO: 2562482 - RNA, 17 nt, Human
gacaagccccaggcagg

SEQ ID NO: 2562483 - RNA, 13 nt, Human
gacaaggccccag

SEQ ID NO: 2562484 - RNA, 14 nt, Human
gacaaggccccaga

SEQ ID NO: 2562485 - RNA, 14 nt, Human
gacaauaaaacauu

SEQ ID NO: 2562486 - RNA, 20 nt, Human
gacaaguggacucagggcag

SEQ ID NO: 2562487 - RNA, 20 nt, Human
gacaagugcugaacagugga

SEQ ID NO: 2562488 - RNA, 15 nt, Human
gacaaguggacucag

SEQ ID NO: 2562489 - RNA, 22 nt, Human
gacaagguucuucccuuuuaca

SEQ ID NO: 2562490 - RNA, 17 nt, Human
gacacaggcccggcucc

SEQ ID NO: 2562491 - RNA, 15 nt, Human
gacacaggcccggcu

SEQ ID NO: 2562492 - RNA, 13 nt, Human
gacacacagcucu

SEQ ID NO: 2562493 - RNA, 21 nt, Human
gacacacacacgcacgcacac

SEQ ID NO: 2562494 - RNA, 20 nt, Human
gacacacacacgcacgcaca

SEQ ID NO: 2562495 - RNA, 19 nt, Human
gacacacacacgcacgcac

SEQ ID NO: 2562496 - RNA, 18 nt, Human
gacacacacacgcacgca

SEQ ID NO: 2562497 - RNA, 23 nt, Human
gacacacacacgcacgcacacac

SEQ ID NO: 2562498 - RNA, 22 nt, Human
gacacacacacgcacgcacaca

SEQ ID NO: 2562499 - RNA, 13 nt, Human
gacaauuuauuau

SEQ ID NO: 2562500 - RNA, 19 nt, Human
gacaauuuauuauggcaca

SEQ ID NO: 2562501 - RNA, 20 nt, Human
gacaauuucaaaaaaauaaa

SEQ ID NO: 2562502 - RNA, 22 nt, Human
gacacaaguggaccuuaggccu

SEQ ID NO: 2562503 - RNA, 22 nt, Human
gacacaagccuucggcgccuua

SEQ ID NO: 2562504 - RNA, 15 nt, Human
gacacacacacgcac

SEQ ID NO: 2562505 - RNA, 14 nt, Human
gacacacacacgca

SEQ ID NO: 2562506 - RNA, 13 nt, Human
gacacacacacgc

SEQ ID NO: 2562507 - RNA, 12 nt, Human
gacacacacacg

SEQ ID NO: 2562508 - RNA, 12 nt, Human
gacacacacaca

SEQ ID NO: 2562509 - RNA, 17 nt, Human
gacaaugacuuacugua

SEQ ID NO: 2562510 - RNA, 20 nt, Human
gacaaugacuuacuguacau

SEQ ID NO: 2562511 - RNA, 12 nt, Human
gacaaugcaaac

SEQ ID NO: 2562512 - RNA, 21 nt, Human
gacaaugacuuacuguacaug

SEQ ID NO: 2562513 - RNA, 18 nt, Human
gacaaugcaaaccaucau

SEQ ID NO: 2562514 - RNA, 16 nt, Human
gacaaugcaaaccauc

SEQ ID NO: 2562515 - RNA, 12 nt, Human
gacaauuuauua

SEQ ID NO: 2562516 - RNA, 15 nt, Human
gacaauugucuuuuu

SEQ ID NO: 2562517 - RNA, 22 nt, Human
gacaauuuauauuuaauaaaau

SEQ ID NO: 2562518 - RNA, 13 nt, Human
gacaccugcccug

SEQ ID NO: 2562519 - RNA, 14 nt, Human
gacaccugcccugc

SEQ ID NO: 2562520 - RNA, 15 nt, Human
gacaccugcccugcc

SEQ ID NO: 2562521 - RNA, 17 nt, Human
gacaccuugacagggca

SEQ ID NO: 2562522 - RNA, 15 nt, Human
gacaccuugacaggg

SEQ ID NO: 2562523 - RNA, 20 nt, Human
gacaccuugacagggcacac

SEQ ID NO: 2562524 - RNA, 18 nt, Human
gacaccuugacagggcac

SEQ ID NO: 2562525 - RNA, 15 nt, Human
gacacgaauauugcu

SEQ ID NO: 2562526 - RNA, 14 nt, Human
gacaccuuggacau

SEQ ID NO: 2562527 - RNA, 18 nt, Human
gacacuaaccacgcugga

SEQ ID NO: 2562528 - RNA, 17 nt, Human
gacacuaaccacgcugg

SEQ ID NO: 2562529 - RNA, 16 nt, Human
gacacuaaccacgcug

SEQ ID NO: 2562530 - RNA, 15 nt, Human
gacacuaaccacgcu

SEQ ID NO: 2562531 - RNA, 18 nt, Human
gacacgaauauugcugau

SEQ ID NO: 2562532 - RNA, 17 nt, Human
gacacgaauauugcuga

SEQ ID NO: 2562533 - RNA, 19 nt, Human
gacacgaauauugcugaug

SEQ ID NO: 2562534 - RNA, 14 nt, Human
gacacguccacccc

SEQ ID NO: 2562535 - RNA, 15 nt, Human
gacacggggcagugg

SEQ ID NO: 2562536 - RNA, 17 nt, Human
gacaccuuugcaggcau

SEQ ID NO: 2562537 - RNA, 12 nt, Human
gacaccuuucau

SEQ ID NO: 2562538 - RNA, 23 nt, Human
gacacccugugauggggcccugc

SEQ ID NO: 2562539 - RNA, 22 nt, Human
gacacccugugauggggcccug

SEQ ID NO: 2562540 - RNA, 16 nt, Human
gacaccgccacauggc

SEQ ID NO: 2562541 - RNA, 10 nt, Human
gacacccggc

SEQ ID NO: 2562542 - RNA, 13 nt, Human
gacacccucaacc

SEQ ID NO: 2562543 - RNA, 22 nt, Human
gacaccgggccaguaucuauau

SEQ ID NO: 2562544 - RNA, 19 nt, Human
gacaccgggccaguaucua

SEQ ID NO: 2562545 - RNA, 20 nt, Human
gacaccgggguggugggaac

SEQ ID NO: 2562546 - RNA, 17 nt, Human
gacaccuacugaguggc

SEQ ID NO: 2562547 - RNA, 20 nt, Human
gacaccugcaccucccccca

SEQ ID NO: 2562548 - RNA, 22 nt, Human
gacaccugcaccuccccccacu

SEQ ID NO: 2562549 - RNA, 13 nt, Human
gacaccugcaccu

SEQ ID NO: 2562550 - RNA, 15 nt, Human
gacaccugcaccucc

SEQ ID NO: 2562551 - RNA, 16 nt, Human
gacaccugcaccuccc

SEQ ID NO: 2562552 - RNA, 17 nt, Human
gacaccugcaccucccc

SEQ ID NO: 2562553 - RNA, 19 nt, Human
gacaccugcaccucccccc

SEQ ID NO: 2562554 - RNA, 22 nt, Human
gacacaggucuuuccuaaggcu

SEQ ID NO: 2562555 - RNA, 16 nt, Human
gacacaggucuuuccu

SEQ ID NO: 2562556 - RNA, 17 nt, Human
gacacaggucuuuccua

SEQ ID NO: 2562557 - RNA, 17 nt, Human
gacacagugaccauacu

SEQ ID NO: 2562558 - RNA, 19 nt, Human
gacacagggacuugaaguu

SEQ ID NO: 2562559 - RNA, 18 nt, Human
gacacagggacuugaagu

SEQ ID NO: 2562560 - RNA, 16 nt, Human
gacacagggacuugaa

SEQ ID NO: 2562561 - RNA, 21 nt, Human
gacacagggacuugaaguugu

SEQ ID NO: 2562562 - RNA, 20 nt, Human
gacacagggacuugaaguug

SEQ ID NO: 2562563 - RNA, 18 nt, Human
gacacaggcccggcucca

SEQ ID NO: 2562564 - RNA, 17 nt, Human
gacacaggcccucccug

SEQ ID NO: 2562565 - RNA, 13 nt, Human
gacacccugugau

SEQ ID NO: 2562566 - RNA, 12 nt, Human
gacacccuguga

SEQ ID NO: 2562567 - RNA, 22 nt, Human
gacacauaugcaccuugugucu

SEQ ID NO: 2562568 - RNA, 16 nt, Human
gacacauaugaggggg

SEQ ID NO: 2562569 - RNA, 15 nt, Human
gacacauaugagggg

SEQ ID NO: 2562570 - RNA, 21 nt, Human
gacaccccuuauccaggacuc

SEQ ID NO: 2562571 - RNA, 20 nt, Human
gacaccccuuauccaggacu

SEQ ID NO: 2562572 - RNA, 19 nt, Human
gacaccccuuauccaggac

SEQ ID NO: 2562573 - RNA, 18 nt, Human
gacaccccuuauccagga

SEQ ID NO: 2562574 - RNA, 17 nt, Human
gacaccccuuauccagg

SEQ ID NO: 2562575 - RNA, 13 nt, Human
gacacccccucgc

SEQ ID NO: 2562576 - RNA, 15 nt, Human
gcagacaggaccagg

SEQ ID NO: 2562577 - RNA, 13 nt, Human
gcagacaggacca

SEQ ID NO: 2562578 - RNA, 12 nt, Human
gcagacaggacc

SEQ ID NO: 2562579 - RNA, 18 nt, Human
gcagacacagggacuuga

SEQ ID NO: 2562580 - RNA, 16 nt, Human
gcagacacagggacuu

SEQ ID NO: 2562581 - RNA, 18 nt, Human
gcagacaggaccagggau

SEQ ID NO: 2562582 - RNA, 19 nt, Human
gcagacaggcaagcaccuc

SEQ ID NO: 2562583 - RNA, 22 nt, Human
gcagacacagggacuugaaguu

SEQ ID NO: 2562584 - RNA, 21 nt, Human
gcagacacagggacuugaagu

SEQ ID NO: 2562585 - RNA, 19 nt, Human
gcagacacagggacuugaa

SEQ ID NO: 2562586 - RNA, 15 nt, Human
gcagacagcuccacc

SEQ ID NO: 2562587 - RNA, 20 nt, Human
gcagacaggccccgugaggc

SEQ ID NO: 2562588 - RNA, 23 nt, Human
gcagacaggcaagcaccuccugc

SEQ ID NO: 2562589 - RNA, 21 nt, Human
gcagaauaaagcaauuuuccu

SEQ ID NO: 2562590 - RNA, 20 nt, Human
gcagaauaaagcaauuuucc

SEQ ID NO: 2562591 - RNA, 19 nt, Human
gcagaauaaagcaauuuuc

SEQ ID NO: 2562592 - RNA, 18 nt, Human
gcagaauaaagcaauuuu

SEQ ID NO: 2562593 - RNA, 17 nt, Human
gcagaauaaagcaauuu

SEQ ID NO: 2562594 - RNA, 16 nt, Human
gcagaauaaagcaauu

SEQ ID NO: 2562595 - RNA, 15 nt, Human
gcagaauaaagcaau

SEQ ID NO: 2562596 - RNA, 23 nt, Human
gcacuucauugagaguuuugucu

SEQ ID NO: 2562597 - RNA, 13 nt, Human
gcagaauguuuuu

SEQ ID NO: 2562598 - RNA, 17 nt, Human
gcagaauccuggcccuc

SEQ ID NO: 2562599 - RNA, 17 nt, Human
gcagaauguuuuuaaaa

SEQ ID NO: 2562600 - RNA, 23 nt, Human
gcagaauccuaggcuccacccca

SEQ ID NO: 2562601 - RNA, 17 nt, Human
gcagaauagcaaggugc

SEQ ID NO: 2562602 - RNA, 17 nt, Human
gcagaauacuuuucucu

SEQ ID NO: 2562603 - RNA, 22 nt, Human
gcagaauaaagcaauuuuccuu

SEQ ID NO: 2562604 - RNA, 18 nt, Human
gcagaauaaucuuugggu

SEQ ID NO: 2562605 - RNA, 19 nt, Human
gcacuuagcuaucagaaga

SEQ ID NO: 2562606 - RNA, 17 nt, Human
gcacuuagcuaucagaa

SEQ ID NO: 2562607 - RNA, 22 nt, Human
gcacuuacugguaggaccaagc

SEQ ID NO: 2562608 - RNA, 16 nt, Human
gcacuuaugauuucau

SEQ ID NO: 2562609 - RNA, 13 nt, Human
gcacuucacagag

SEQ ID NO: 2562610 - RNA, 18 nt, Human
gcacuuauuuaaugccga

SEQ ID NO: 2562611 - RNA, 15 nt, Human
gcacuucacagagug

SEQ ID NO: 2562612 - RNA, 14 nt, Human
gcacuucacagagu

SEQ ID NO: 2562613 - RNA, 22 nt, Human
gcacuuaacaagcucccaggcc

SEQ ID NO: 2562614 - RNA, 19 nt, Human
gcacuuaaggcacucuguu

SEQ ID NO: 2562615 - RNA, 18 nt, Human
gcacuuaagagaauauuu

SEQ ID NO: 2562616 - RNA, 17 nt, Human
gcacugccaugcagggc

SEQ ID NO: 2562617 - RNA, 15 nt, Human
gcacugccaugcagg

SEQ ID NO: 2562618 - RNA, 14 nt, Human
gcacugccaugcag

SEQ ID NO: 2562619 - RNA, 21 nt, Human
gcacugcccauggacaggcug

SEQ ID NO: 2562620 - RNA, 14 nt, Human
gcacguggccucuu

SEQ ID NO: 2562621 - RNA, 13 nt, Human
gcacguggccucu

SEQ ID NO: 2562622 - RNA, 23 nt, Human
gcacguggcauguggccuguggc

SEQ ID NO: 2562623 - RNA, 18 nt, Human
gcacguggcauguggccu

SEQ ID NO: 2562624 - RNA, 20 nt, Human
gcacguggagagcuggugcc

SEQ ID NO: 2562625 - RNA, 17 nt, Human
gcacguggccucuugag

SEQ ID NO: 2562626 - RNA, 15 nt, Human
gcacguggccucuug

SEQ ID NO: 2562627 - RNA, 19 nt, Human
gcacguggccucuugagca

SEQ ID NO: 2562628 - RNA, 18 nt, Human
gcacggugggccuugcug

SEQ ID NO: 2562629 - RNA, 17 nt, Human
gcacggugggccuugcu

SEQ ID NO: 2562630 - RNA, 16 nt, Human
gcacggugggccuugc

SEQ ID NO: 2562631 - RNA, 13 nt, Human
gcacggcugcuga

SEQ ID NO: 2562632 - RNA, 20 nt, Human
gcacggugggccuugcuggg

SEQ ID NO: 2562633 - RNA, 19 nt, Human
gcacggugggccuugcugg

SEQ ID NO: 2562634 - RNA, 21 nt, Human
gcacguaguagggucaggcca

SEQ ID NO: 2562635 - RNA, 20 nt, Human
gcacguaguagggucaggcc

SEQ ID NO: 2562636 - RNA, 22 nt, Human
gcacguagcugaggccggaugc

SEQ ID NO: 2562637 - RNA, 16 nt, Human
gcacguaguaggguca

SEQ ID NO: 2562638 - RNA, 15 nt, Human
gcacguggagagcug

SEQ ID NO: 2562639 - RNA, 16 nt, Human
gcacguggagagcugg

SEQ ID NO: 2562640 - RNA, 18 nt, Human
gcacguggagagcuggug

SEQ ID NO: 2562641 - RNA, 13 nt, Human
gcacgucauggga

SEQ ID NO: 2562642 - RNA, 19 nt, Human
gcacugguggcccgacagc

SEQ ID NO: 2562643 - RNA, 24 nt, Human
gcacugguggcccgacagccuggc

SEQ ID NO: 2562644 - RNA, 23 nt, Human
gcacugguggcccgacagccugg

SEQ ID NO: 2562645 - RNA, 22 nt, Human
gcacugguggcccgacagccug

SEQ ID NO: 2562646 - RNA, 20 nt, Human
gcacugcuuccagugaggcu

SEQ ID NO: 2562647 - RNA, 22 nt, Human
gcacugcuuccagugaggcucu

SEQ ID NO: 2562648 - RNA, 18 nt, Human
gcacugcuuccagugagg

SEQ ID NO: 2562649 - RNA, 16 nt, Human
gcacugcuuccaguga

SEQ ID NO: 2562650 - RNA, 21 nt, Human
gcacugcuaggcgagugccag

SEQ ID NO: 2562651 - RNA, 20 nt, Human
gcacugcuaggcgagugcca

SEQ ID NO: 2562652 - RNA, 23 nt, Human
gcacugcuaggcgagugccagga

SEQ ID NO: 2562653 - RNA, 22 nt, Human
gcacugcuaggcgagugccagg

SEQ ID NO: 2562654 - RNA, 18 nt, Human
gcacugccugauggaccu

SEQ ID NO: 2562655 - RNA, 11 nt, Human
gcacugccuga

SEQ ID NO: 2562656 - RNA, 17 nt, Human
gcaccuuagacaguccc

SEQ ID NO: 2562657 - RNA, 14 nt, Human
gcaccuuagacagu

SEQ ID NO: 2562658 - RNA, 20 nt, Human
gcaccuuaccaacuuucugu

SEQ ID NO: 2562659 - RNA, 21 nt, Human
gcaccuggcugagccuggcug

SEQ ID NO: 2562660 - RNA, 20 nt, Human
gcaccuggcugagccuggcu

SEQ ID NO: 2562661 - RNA, 18 nt, Human
gcaccuggcaucgcacca

SEQ ID NO: 2562662 - RNA, 22 nt, Human
gcaccuggaauauauaaccagu

SEQ ID NO: 2562663 - RNA, 18 nt, Human
gcaccuggaauauauaac

SEQ ID NO: 2562664 - RNA, 21 nt, Human
gcaccuggaauauauaaccag

SEQ ID NO: 2562665 - RNA, 23 nt, Human
gcacccgggcucagggaccacag

SEQ ID NO: 2562666 - RNA, 22 nt, Human
gcacccgggcucagggaccaca

SEQ ID NO: 2562667 - RNA, 21 nt, Human
gcacccgggcucagggaccac

SEQ ID NO: 2562668 - RNA, 17 nt, Human
gcacccgggcucaggga

SEQ ID NO: 2562669 - RNA, 21 nt, Human
gcacccuaguucuaccucagg

SEQ ID NO: 2562670 - RNA, 15 nt, Human
gcacccucaggcagg

SEQ ID NO: 2562671 - RNA, 18 nt, Human
gcaccuuagacagucccu

SEQ ID NO: 2562672 - RNA, 21 nt, Human
gcaccuuaccaacuuucugua

SEQ ID NO: 2562673 - RNA, 22 nt, Human
gcaccuugugucuguacacgug

SEQ ID NO: 2562674 - RNA, 20 nt, Human
gcaccuugugucuguacacg

SEQ ID NO: 2562675 - RNA, 15 nt, Human
gcacgaaauguuauu

SEQ ID NO: 2562676 - RNA, 15 nt, Human
gcacgaacccaccug

SEQ ID NO: 2562677 - RNA, 16 nt, Human
gcacgaacccaccugc

SEQ ID NO: 2562678 - RNA, 17 nt, Human
gcacgaacccaccugcu

SEQ ID NO: 2562679 - RNA, 19 nt, Human
gcacgaacccaccugcuga

SEQ ID NO: 2562680 - RNA, 23 nt, Human
gcacgaacccaccugcugagaga

SEQ ID NO: 2562681 - RNA, 12 nt, Human
gcacgauuucug

SEQ ID NO: 2562682 - RNA, 23 nt, Human
gcacgauguggaaaaaugagaga

SEQ ID NO: 2562683 - RNA, 12 nt, Human
gcacggacucuu

SEQ ID NO: 2562684 - RNA, 12 nt, Human
gcacggcugcug

SEQ ID NO: 2562685 - RNA, 14 nt, Human
gcacggugggccuu

SEQ ID NO: 2562686 - RNA, 14 nt, Human
gcaauggcagccuu

SEQ ID NO: 2562687 - RNA, 20 nt, Human
gcaccacugcacuccagccu

SEQ ID NO: 2562688 - RNA, 13 nt, Human
gcaauggcagccu

SEQ ID NO: 2562689 - RNA, 12 nt, Human
gcaauggcagcc

SEQ ID NO: 2562690 - RNA, 15 nt, Human
gcaccagcagccugg

SEQ ID NO: 2562691 - RNA, 23 nt, Human
gcaaugccauccucaaacacugc

SEQ ID NO: 2562692 - RNA, 23 nt, Human
gcaccacugcacuccagccuggg

SEQ ID NO: 2562693 - RNA, 21 nt, Human
gcaccacugcacuccagccug

SEQ ID NO: 2562694 - RNA, 22 nt, Human
gcaccacugcacuccagccugg

SEQ ID NO: 2562695 - RNA, 18 nt, Human
gcaccacuguguauuuaa

SEQ ID NO: 2562696 - RNA, 18 nt, Human
gcaccagcgaagggagug

SEQ ID NO: 2562697 - RNA, 17 nt, Human
gcaccagcgaagggagu

SEQ ID NO: 2562698 - RNA, 16 nt, Human
gcaccagcagccugga

SEQ ID NO: 2562699 - RNA, 19 nt, Human
gcaccagcuucuccaggcu

SEQ ID NO: 2562700 - RNA, 18 nt, Human
gcaccagcuucuccaggc

SEQ ID NO: 2562701 - RNA, 17 nt, Human
gcaccagcuucuccagg

SEQ ID NO: 2562702 - RNA, 16 nt, Human
gcaccagcuucuccag

SEQ ID NO: 2562703 - RNA, 20 nt, Human
gcaccagcuucuccaggcuc

SEQ ID NO: 2562704 - RNA, 17 nt, Human
gcaccauucugacucgg

SEQ ID NO: 2562705 - RNA, 15 nt, Human
gcaccauucugacuc

SEQ ID NO: 2562706 - RNA, 19 nt, Human
gcacccggccccugcuggu

SEQ ID NO: 2562707 - RNA, 18 nt, Human
gcacccggccccugcugg

SEQ ID NO: 2562708 - RNA, 19 nt, Human
gcacccacaagugccacug

SEQ ID NO: 2562709 - RNA, 16 nt, Human
gcacccgggcucaggg

SEQ ID NO: 2562710 - RNA, 19 nt, Human
gcacccacccagcacccag

SEQ ID NO: 2562711 - RNA, 22 nt, Human
gcacccaccaucaugucuggcu

SEQ ID NO: 2562712 - RNA, 23 nt, Human
gcaccauucugacucgguuucuc

SEQ ID NO: 2562713 - RNA, 24 nt, Human
gcagccccauucugccugcccagg

SEQ ID NO: 2562714 - RNA, 21 nt, Human
gcagccccauucugccugccc

SEQ ID NO: 2562715 - RNA, 19 nt, Human
gcagccccauucugccugc

SEQ ID NO: 2562716 - RNA, 18 nt, Human
gcagccccauucugccug

SEQ ID NO: 2562717 - RNA, 16 nt, Human
gcagcaauaaagcagc

SEQ ID NO: 2562718 - RNA, 23 nt, Human
gcagcaauaaagcagcguuucua

SEQ ID NO: 2562719 - RNA, 17 nt, Human
gcagccccauucugccu

SEQ ID NO: 2562720 - RNA, 22 nt, Human
gcagcccuagagccugccugga

SEQ ID NO: 2562721 - RNA, 19 nt, Human
gcagcccuagagccugccu

SEQ ID NO: 2562722 - RNA, 18 nt, Human
gcagcccuagagccugcc

SEQ ID NO: 2562723 - RNA, 17 nt, Human
gcagcccuagagccugc

SEQ ID NO: 2562724 - RNA, 13 nt, Human
gcagcccuagagc

SEQ ID NO: 2562725 - RNA, 13 nt, Human
gcagcccugcaga

SEQ ID NO: 2562726 - RNA, 15 nt, Human
gcagcccguguggcc

SEQ ID NO: 2562727 - RNA, 14 nt, Human
gcagaauaaagcaa

SEQ ID NO: 2562728 - RNA, 23 nt, Human
gcagccccgcgccuccuuccuug

SEQ ID NO: 2562729 - RNA, 17 nt, Human
gcagcccguguggcccc

SEQ ID NO: 2562730 - RNA, 18 nt, Human
gcagcccguguggccccu

SEQ ID NO: 2562731 - RNA, 19 nt, Human
gcagcccguguggccccuu

SEQ ID NO: 2562732 - RNA, 20 nt, Human
gcagcccguguggccccuuc

SEQ ID NO: 2562733 - RNA, 24 nt, Human
gcagcccuaaggaucucucaggag

SEQ ID NO: 2562734 - RNA, 23 nt, Human
gcagcccuaaggaucucucagga

SEQ ID NO: 2562735 - RNA, 22 nt, Human
gcagcccuaaggaucucucagg

SEQ ID NO: 2562736 - RNA, 21 nt, Human
gcagcccguguggccccuuca

SEQ ID NO: 2562737 - RNA, 21 nt, Human
gcagccccuguucuggcagag

SEQ ID NO: 2562738 - RNA, 20 nt, Human
gcagccccuguucuggcaga

SEQ ID NO: 2562739 - RNA, 20 nt, Human
gcagccccgugggguuccuc

SEQ ID NO: 2562740 - RNA, 17 nt, Human
gcagaguuguaaauaua

SEQ ID NO: 2562741 - RNA, 16 nt, Human
gcagaguuguaaauau

SEQ ID NO: 2562742 - RNA, 14 nt, Human
gcagaguuguaaau

SEQ ID NO: 2562743 - RNA, 13 nt, Human
gcagaguuguaaa

SEQ ID NO: 2562744 - RNA, 20 nt, Human
gcagaguugaagacagagcu

SEQ ID NO: 2562745 - RNA, 18 nt, Human
gcagauaaacaguaguga

SEQ ID NO: 2562746 - RNA, 19 nt, Human
gcagaccuccccagccccu

SEQ ID NO: 2562747 - RNA, 17 nt, Human
gcagaccuccccagccc

SEQ ID NO: 2562748 - RNA, 16 nt, Human
gcagaccuccccagcc

SEQ ID NO: 2562749 - RNA, 15 nt, Human
gcagaccuccccagc

SEQ ID NO: 2562750 - RNA, 13 nt, Human
gcagaccucccca

SEQ ID NO: 2562751 - RNA, 21 nt, Human
gcagaguugaagacagagcua

SEQ ID NO: 2562752 - RNA, 23 nt, Human
gcagaccacgcccguccugccug

SEQ ID NO: 2562753 - RNA, 20 nt, Human
gcagaccacgcccguccugc

SEQ ID NO: 2562754 - RNA, 21 nt, Human
gcagaccaccccgccugcccu

SEQ ID NO: 2562755 - RNA, 17 nt, Human
gcagaccaccccgccug

SEQ ID NO: 2562756 - RNA, 13 nt, Human
gcagaccaccccg

SEQ ID NO: 2562757 - RNA, 17 nt, Human
gcagacaguuaagagaa

SEQ ID NO: 2562758 - RNA, 15 nt, Human
gcagacauugucagc

SEQ ID NO: 2562759 - RNA, 12 nt, Human
gcagacauuguc

SEQ ID NO: 2562760 - RNA, 19 nt, Human
gcagacaugugcacuugaa

SEQ ID NO: 2562761 - RNA, 20 nt, Human
gcagauucauuuuucuuucu

SEQ ID NO: 2562762 - RNA, 17 nt, Human
gcagauugaaaaggaca

SEQ ID NO: 2562763 - RNA, 19 nt, Human
gcagauucauuuuucuuuc

SEQ ID NO: 2562764 - RNA, 21 nt, Human
gcagauuuucagcaaacucuu

SEQ ID NO: 2562765 - RNA, 20 nt, Human
gcagauuuuaggaaaugaau

SEQ ID NO: 2562766 - RNA, 16 nt, Human
gcagauuugggcugga

SEQ ID NO: 2562767 - RNA, 14 nt, Human
gcagauuggagaaa

SEQ ID NO: 2562768 - RNA, 20 nt, Human
gcagauuguguaacaauuuu

SEQ ID NO: 2562769 - RNA, 19 nt, Human
gcagauuggagaaacccuu

SEQ ID NO: 2562770 - RNA, 20 nt, Human
gcagauuuagugaaagcuag

SEQ ID NO: 2562771 - RNA, 23 nt, Human
gcagauuuagugaaagcuagaga

SEQ ID NO: 2562772 - RNA, 24 nt, Human
gcagaguuuguguguugucuugaa

SEQ ID NO: 2562773 - RNA, 20 nt, Human
gcagaguuuguguguugucu

SEQ ID NO: 2562774 - RNA, 18 nt, Human
gcagaguuuccaaaacca

SEQ ID NO: 2562775 - RNA, 23 nt, Human
gcagaguuguaaauauauaaaua

SEQ ID NO: 2562776 - RNA, 21 nt, Human
gcagaguuguaaauauauaaa

SEQ ID NO: 2562777 - RNA, 20 nt, Human
gcagaguuguaaauauauaa

SEQ ID NO: 2562778 - RNA, 16 nt, Human
gcagauaaucagccuc

SEQ ID NO: 2562779 - RNA, 17 nt, Human
gcagauaaucagccucu

SEQ ID NO: 2562780 - RNA, 18 nt, Human
gcagauaaucagccucuu

SEQ ID NO: 2562781 - RNA, 19 nt, Human
gcagauaaucagccucuua

SEQ ID NO: 2562782 - RNA, 22 nt, Human
gcagauacaggaaaagcugcug

SEQ ID NO: 2562783 - RNA, 18 nt, Human
gcagauaccucacccugc

SEQ ID NO: 2562784 - RNA, 15 nt, Human
gcagauacugucucu

SEQ ID NO: 2562785 - RNA, 17 nt, Human
gcagcccugcagagggc

SEQ ID NO: 2562786 - RNA, 16 nt, Human
gcagcccugcagaggg

SEQ ID NO: 2562787 - RNA, 15 nt, Human
gcagcccugcagagg

SEQ ID NO: 2562788 - RNA, 14 nt, Human
gcagcccugcagag

SEQ ID NO: 2562789 - RNA, 13 nt, Human
gcagcccugcuuu

SEQ ID NO: 2562790 - RNA, 13 nt, Human
gcagcccuccuca

SEQ ID NO: 2562791 - RNA, 15 nt, Human
gcagcccuccucacc

SEQ ID NO: 2562792 - RNA, 18 nt, Human
gcagcccuccucaccccg

SEQ ID NO: 2562793 - RNA, 10 nt, Human
gcagccuggg

SEQ ID NO: 2562794 - RNA, 14 nt, Human
gcagccuggggcug

SEQ ID NO: 2562795 - RNA, 18 nt, Human
gcagccuggguggcuaug

SEQ ID NO: 2562796 - RNA, 17 nt, Human
gcagccuggggcuggcc

SEQ ID NO: 2562797 - RNA, 23 nt, Human
gcagccuguccugggcugguggc

SEQ ID NO: 2562798 - RNA, 19 nt, Human
gcagccuguccugggcugg

SEQ ID NO: 2562799 - RNA, 14 nt, Human
gcagccuguggcau

SEQ ID NO: 2562800 - RNA, 16 nt, Human
gcagccuguggcaucu

SEQ ID NO: 2562801 - RNA, 22 nt, Human
gcagccuguggcaucuuugccu

SEQ ID NO: 2562802 - RNA, 18 nt, Human
gcagcuuuaaccauuaaa

SEQ ID NO: 2562803 - RNA, 22 nt, Human
gcagcuuuaaacucagggacag

SEQ ID NO: 2562804 - RNA, 21 nt, Human
gcagcuuuaaacucagggaca

SEQ ID NO: 2562805 - RNA, 20 nt, Human
gcagcuuuaaacucagggac

SEQ ID NO: 2562806 - RNA, 19 nt, Human
gcagcuuuaaacucaggga

SEQ ID NO: 2562807 - RNA, 17 nt, Human
gcagcuuuaaacucagg

SEQ ID NO: 2562808 - RNA, 15 nt, Human
gcagcucaccucucc

SEQ ID NO: 2562809 - RNA, 14 nt, Human
gcagcuugccccgg

SEQ ID NO: 2562810 - RNA, 21 nt, Human
gcagcuugcguuagaaugagg

SEQ ID NO: 2562811 - RNA, 23 nt, Human
gcagcucaagcagcgaccgcccc

SEQ ID NO: 2562812 - RNA, 15 nt, Human
gcagcucaaaggcac

SEQ ID NO: 2562813 - RNA, 15 nt, Human
gcagccuuggcaaac

SEQ ID NO: 2562814 - RNA, 13 nt, Human
gcagcgccuuucc

SEQ ID NO: 2562815 - RNA, 15 nt, Human
gcagcgccuuuccca

SEQ ID NO: 2562816 - RNA, 18 nt, Human
gcagccuuugccuccccg

SEQ ID NO: 2562817 - RNA, 15 nt, Human
gcagccuuuaaugca

SEQ ID NO: 2562818 - RNA, 17 nt, Human
gcagccuuugccucccc

SEQ ID NO: 2562819 - RNA, 14 nt, Human
gcagcucaccucuc

SEQ ID NO: 2562820 - RNA, 17 nt, Human
gcagcgcggggagcccg

SEQ ID NO: 2562821 - RNA, 14 nt, Human
gcagcucaaaggca

SEQ ID NO: 2562822 - RNA, 17 nt, Human
gcagcucaaaggcacag

SEQ ID NO: 2562823 - RNA, 14 nt, Human
gcagcuaguuuucu

SEQ ID NO: 2562824 - RNA, 21 nt, Human
gcagcggggcgaagcccaggc

SEQ ID NO: 2562825 - RNA, 14 nt, Human
gcaggcagccaggc

SEQ ID NO: 2562826 - RNA, 13 nt, Human
gcaggcagccagg

SEQ ID NO: 2562827 - RNA, 12 nt, Human
gcaggcagccag

SEQ ID NO: 2562828 - RNA, 16 nt, Human
gcaggaggccccuggc

SEQ ID NO: 2562829 - RNA, 14 nt, Human
gcaggaggccccug

SEQ ID NO: 2562830 - RNA, 17 nt, Human
gcaggaggccaggccgg

SEQ ID NO: 2562831 - RNA, 19 nt, Human
gcaggaggccccuggccca

SEQ ID NO: 2562832 - RNA, 18 nt, Human
gcaggaggccccuggccc

SEQ ID NO: 2562833 - RNA, 22 nt, Human
gcaggaggccccuggcccagcg

SEQ ID NO: 2562834 - RNA, 15 nt, Human
gcaggaggccaggcc

SEQ ID NO: 2562835 - RNA, 16 nt, Human
gcaggaggccaggccg

SEQ ID NO: 2562836 - RNA, 14 nt, Human
gcaggaggccaggc

SEQ ID NO: 2562837 - RNA, 23 nt, Human
gcaggaggauugcuugagcccag

SEQ ID NO: 2562838 - RNA, 13 nt, Human
gcaggcagacacg

SEQ ID NO: 2562839 - RNA, 12 nt, Human
gcaggcagacac

SEQ ID NO: 2562840 - RNA, 11 nt, Human
gcaggcagaca

SEQ ID NO: 2562841 - RNA, 10 nt, Human
gcaggcagac

SEQ ID NO: 2562842 - RNA, 23 nt, Human
gcaggcagacacggaucugagaa

SEQ ID NO: 2562843 - RNA, 20 nt, Human
gcaggcagacacggaucuga

SEQ ID NO: 2562844 - RNA, 20 nt, Human
gcaggcacucaaugcagcca

SEQ ID NO: 2562845 - RNA, 15 nt, Human
gcaggcaccuuagug

SEQ ID NO: 2562846 - RNA, 20 nt, Human
gcaggcaccuuaguggcuuu

SEQ ID NO: 2562847 - RNA, 18 nt, Human
gcaggcacagcacaggga

SEQ ID NO: 2562848 - RNA, 15 nt, Human
gcaggcacagcacag

SEQ ID NO: 2562849 - RNA, 15 nt, Human
gcaggcacauggagg

SEQ ID NO: 2562850 - RNA, 22 nt, Human
gcagcuuuaaccauuaaaacug

SEQ ID NO: 2562851 - RNA, 21 nt, Human
gcagcuuuaaccauuaaaacu

SEQ ID NO: 2562852 - RNA, 23 nt, Human
gcaggaaaaggugauauccauuc

SEQ ID NO: 2562853 - RNA, 21 nt, Human
gcaggaaaugaaaaugucuug

SEQ ID NO: 2562854 - RNA, 16 nt, Human
gcaggaaggagagccu

SEQ ID NO: 2562855 - RNA, 17 nt, Human
gcaggaaggagagccug

SEQ ID NO: 2562856 - RNA, 23 nt, Human
gcaggaaggagagccugcugcau

SEQ ID NO: 2562857 - RNA, 20 nt, Human
gcaggaaggcugagaggaga

SEQ ID NO: 2562858 - RNA, 17 nt, Human
gcaggaauguguggcag

SEQ ID NO: 2562859 - RNA, 17 nt, Human
gcaggacaacgaggaag

SEQ ID NO: 2562860 - RNA, 20 nt, Human
gcaggaggaucacuugaguc

SEQ ID NO: 2562861 - RNA, 23 nt, Human
gcaggaggaucacuugaguccag

SEQ ID NO: 2562862 - RNA, 18 nt, Human
gcaggacaacgaggaagc

SEQ ID NO: 2562863 - RNA, 19 nt, Human
gcaggacaacgaggaagcc

SEQ ID NO: 2562864 - RNA, 14 nt, Human
gcaggaggauugcu

SEQ ID NO: 2562865 - RNA, 15 nt, Human
gcauuauugcauuau

SEQ ID NO: 2562866 - RNA, 14 nt, Human
gcauuauugcauua

SEQ ID NO: 2562867 - RNA, 17 nt, Human
gcauuaucuagauacug

SEQ ID NO: 2562868 - RNA, 18 nt, Human
gcauuauauuuguaaauu

SEQ ID NO: 2562869 - RNA, 19 nt, Human
gcauuauauaccauuuauc

SEQ ID NO: 2562870 - RNA, 15 nt, Human
gcauuauauaccauu

SEQ ID NO: 2562871 - RNA, 21 nt, Human
gcauucuugguuggcuggccu

SEQ ID NO: 2562872 - RNA, 20 nt, Human
gcauucugccgugugcccuc

SEQ ID NO: 2562873 - RNA, 22 nt, Human
gcauucugccgugugcccucgg

SEQ ID NO: 2562874 - RNA, 22 nt, Human
gcauucaauuuauucaagaaaa

SEQ ID NO: 2562875 - RNA, 16 nt, Human
gcauucagagagcagc

SEQ ID NO: 2562876 - RNA, 13 nt, Human
gcauucagagagc

SEQ ID NO: 2562877 - RNA, 12 nt, Human
gcauucacccag

SEQ ID NO: 2562878 - RNA, 15 nt, Human
gcauucacccagaca

SEQ ID NO: 2562879 - RNA, 19 nt, Human
gcauucacccagacagcuc

SEQ ID NO: 2562880 - RNA, 20 nt, Human
gcauucacccagacagcucc

SEQ ID NO: 2562881 - RNA, 16 nt, Human
gcauucuuuuaaaaga

SEQ ID NO: 2562882 - RNA, 18 nt, Human
gcauucuuucuguauuga

SEQ ID NO: 2562883 - RNA, 13 nt, Human
gcauucuuucugu

SEQ ID NO: 2562884 - RNA, 17 nt, Human
gcauucuugguuggcug

SEQ ID NO: 2562885 - RNA, 21 nt, Human
gcauucuuuuaaaagacaaga

SEQ ID NO: 2562886 - RNA, 20 nt, Human
gcauucuuuuaaaagacaag

SEQ ID NO: 2562887 - RNA, 12 nt, Human
gcauugaacaca

SEQ ID NO: 2562888 - RNA, 16 nt, Human
gcauugaacacaaacu

SEQ ID NO: 2562889 - RNA, 18 nt, Human
gcauugaacacaaacugu

SEQ ID NO: 2562890 - RNA, 19 nt, Human
gcauugaacacaaacugua

SEQ ID NO: 2562891 - RNA, 14 nt, Human
gcauuugaguuuau

SEQ ID NO: 2562892 - RNA, 23 nt, Human
gcauuugcucuuucaucucugcu

SEQ ID NO: 2562893 - RNA, 21 nt, Human
gcauuugaggucuguucuuuc

SEQ ID NO: 2562894 - RNA, 13 nt, Human
gcauuugcugaau

SEQ ID NO: 2562895 - RNA, 16 nt, Human
gcauuuguuugaacug

SEQ ID NO: 2562896 - RNA, 14 nt, Human
gcauuugcugaaua

SEQ ID NO: 2562897 - RNA, 13 nt, Human
gcauuugugaggc

SEQ ID NO: 2562898 - RNA, 12 nt, Human
gccaaaggaagc

SEQ ID NO: 2562899 - RNA, 15 nt, Human
gccaaauuauuugug

SEQ ID NO: 2562900 - RNA, 11 nt, Human
gccaaauuauu

SEQ ID NO: 2562901 - RNA, 20 nt, Human
gccaaagcuaggguggcccu

SEQ ID NO: 2562902 - RNA, 14 nt, Human
gccaaaccucuguu

SEQ ID NO: 2562903 - RNA, 15 nt, Human
gccaaaccucuguuc

SEQ ID NO: 2562904 - RNA, 16 nt, Human
gccaaaccucuguuca

SEQ ID NO: 2562905 - RNA, 17 nt, Human
gccaaaccucuguucag

SEQ ID NO: 2562906 - RNA, 19 nt, Human
gccaaaccucuguucagug

SEQ ID NO: 2562907 - RNA, 22 nt, Human
gccaaaccucuguucaguguaa

SEQ ID NO: 2562908 - RNA, 16 nt, Human
gccaaagcuagggugg

SEQ ID NO: 2562909 - RNA, 22 nt, Human
gccaaagcuaggccuggccaga

SEQ ID NO: 2562910 - RNA, 16 nt, Human
gccaaagcuaggccug

SEQ ID NO: 2562911 - RNA, 20 nt, Human
gccaaagccaaagcuaggcc

SEQ ID NO: 2562912 - RNA, 13 nt, Human
gccaaagccaaag

SEQ ID NO: 2562913 - RNA, 16 nt, Human
gccaaagccuccucca

SEQ ID NO: 2562914 - RNA, 19 nt, Human
gccaaagccuccuccagcc

SEQ ID NO: 2562915 - RNA, 16 nt, Human
gccaaacucaccugcc

SEQ ID NO: 2562916 - RNA, 14 nt, Human
gccaaacucaccug

SEQ ID NO: 2562917 - RNA, 18 nt, Human
gccaaacccuugucagug

SEQ ID NO: 2562918 - RNA, 13 nt, Human
gccaaaccucugu

SEQ ID NO: 2562919 - RNA, 22 nt, Human
gccaaacccaugaggcaauguc

SEQ ID NO: 2562920 - RNA, 15 nt, Human
gccaaacccugucug

SEQ ID NO: 2562921 - RNA, 16 nt, Human
gccaaaaaaagacagg

SEQ ID NO: 2562922 - RNA, 18 nt, Human
gcauuuguuugaacugau

SEQ ID NO: 2562923 - RNA, 23 nt, Human
gcauuuuguuugguauuguauuu

SEQ ID NO: 2562924 - RNA, 21 nt, Human
gcauuuuguuugguauuguau

SEQ ID NO: 2562925 - RNA, 18 nt, Human
gcauuuuguuugguauug

SEQ ID NO: 2562926 - RNA, 20 nt, Human
gcauuuuugauuuaugcaug

SEQ ID NO: 2562927 - RNA, 16 nt, Human
gcauuuuugcaggagc

SEQ ID NO: 2562928 - RNA, 21 nt, Human
gcauuuuugauuuaugcaugg

SEQ ID NO: 2562929 - RNA, 17 nt, Human
gcauuuuugcaggagca

SEQ ID NO: 2562930 - RNA, 18 nt, Human
gcauuuuugugaaaugaa

SEQ ID NO: 2562931 - RNA, 21 nt, Human
gcauuuuugugaaaugaaaac

SEQ ID NO: 2562932 - RNA, 14 nt, Human
gccaaaaaaagaca

SEQ ID NO: 2562933 - RNA, 13 nt, Human
gcauuauauuuau

SEQ ID NO: 2562934 - RNA, 22 nt, Human
gcauguucucugaggacacuaa

SEQ ID NO: 2562935 - RNA, 21 nt, Human
gcauguucucugaggacacua

SEQ ID NO: 2562936 - RNA, 15 nt, Human
gcauguucucugagg

SEQ ID NO: 2562937 - RNA, 20 nt, Human
gcauggcaaggacugcaggg

SEQ ID NO: 2562938 - RNA, 20 nt, Human
gcauggcacuugcaucugug

SEQ ID NO: 2562939 - RNA, 15 nt, Human
gcauggcacuugcau

SEQ ID NO: 2562940 - RNA, 14 nt, Human
gcauguucucugag

SEQ ID NO: 2562941 - RNA, 15 nt, Human
gcauggagcuggccg

SEQ ID NO: 2562942 - RNA, 12 nt, Human
gcauggagcugg

SEQ ID NO: 2562943 - RNA, 16 nt, Human
gcaugcugcuggacag

SEQ ID NO: 2562944 - RNA, 17 nt, Human
gcauggaguguguauug

SEQ ID NO: 2562945 - RNA, 18 nt, Human
gcauggaguguguauugu

SEQ ID NO: 2562946 - RNA, 19 nt, Human
gcauggaguguguauuguu

SEQ ID NO: 2562947 - RNA, 20 nt, Human
gcauggaguguguauuguuc

SEQ ID NO: 2562948 - RNA, 21 nt, Human
gcauggauguuuuagccauug

SEQ ID NO: 2562949 - RNA, 20 nt, Human
gcauggauauaguuuuacuu

SEQ ID NO: 2562950 - RNA, 22 nt, Human
gcauggaguguguauuguuccc

SEQ ID NO: 2562951 - RNA, 23 nt, Human
gcauggaguguguauuguuccca

SEQ ID NO: 2562952 - RNA, 24 nt, Human
gcauggaguguguauuguucccag

SEQ ID NO: 2562953 - RNA, 20 nt, Human
gcaugcggcccagcccggcu

SEQ ID NO: 2562954 - RNA, 19 nt, Human
gcaugcggcccagcccggc

SEQ ID NO: 2562955 - RNA, 18 nt, Human
gcaugcggcccagcccgg

SEQ ID NO: 2562956 - RNA, 17 nt, Human
gcaugcggcccagcccg

SEQ ID NO: 2562957 - RNA, 16 nt, Human
gcaugcggcccagccc

SEQ ID NO: 2562958 - RNA, 15 nt, Human
gcaugcggcccagcc

SEQ ID NO: 2562959 - RNA, 15 nt, Human
gcaugauuuuguaac

SEQ ID NO: 2562960 - RNA, 14 nt, Human
gcaugcggcccagc

SEQ ID NO: 2562961 - RNA, 18 nt, Human
gcaugcgggcuuccuccu

SEQ ID NO: 2562962 - RNA, 18 nt, Human
gcauggagauagccccac

SEQ ID NO: 2562963 - RNA, 15 nt, Human
gcaugcuggggcaag

SEQ ID NO: 2562964 - RNA, 22 nt, Human
gcaugcucucugcagccagccc

SEQ ID NO: 2562965 - RNA, 23 nt, Human
gcaugcucucugcagccagccca

SEQ ID NO: 2562966 - RNA, 13 nt, Human
gcaugcuggggca

SEQ ID NO: 2562967 - RNA, 15 nt, Human
gcaugcggcccagga

SEQ ID NO: 2562968 - RNA, 13 nt, Human
gcaugcucucugc

SEQ ID NO: 2562969 - RNA, 14 nt, Human
gcaugcucucugca

SEQ ID NO: 2562970 - RNA, 15 nt, Human
gcaugcucucugcag

SEQ ID NO: 2562971 - RNA, 17 nt, Human
gcaugcucucugcagcc

SEQ ID NO: 2562972 - RNA, 18 nt, Human
gcaugcucucugcagcca

SEQ ID NO: 2562973 - RNA, 21 nt, Human
gcaugcucucugcagccagcc

SEQ ID NO: 2562974 - RNA, 21 nt, Human
gcaugaggaacuagccaccaa

SEQ ID NO: 2562975 - RNA, 22 nt, Human
gcaugaggaacuagccaccaac

SEQ ID NO: 2562976 - RNA, 19 nt, Human
gcaugagggaucacagggc

SEQ ID NO: 2562977 - RNA, 20 nt, Human
gcaugagggaucacagggcc

SEQ ID NO: 2562978 - RNA, 21 nt, Human
gcaugagggaucacagggccc

SEQ ID NO: 2562979 - RNA, 17 nt, Human
gcaugaccugugaccag

SEQ ID NO: 2562980 - RNA, 16 nt, Human
gcaugaccugugacca

SEQ ID NO: 2562981 - RNA, 22 nt, Human
gcaugaccugugaccagcacug

SEQ ID NO: 2562982 - RNA, 20 nt, Human
gcaugauguuaaccagaaua

SEQ ID NO: 2562983 - RNA, 23 nt, Human
gcaugauagacacauaugagggg

SEQ ID NO: 2562984 - RNA, 20 nt, Human
gcaucaccuuaggcagggaa

SEQ ID NO: 2562985 - RNA, 15 nt, Human
gcaucaccuccacca

SEQ ID NO: 2562986 - RNA, 18 nt, Human
gcaucaccuuaggcaggg

SEQ ID NO: 2562987 - RNA, 22 nt, Human
gcaucaccuuaggcagggaagu

SEQ ID NO: 2562988 - RNA, 12 nt, Human
gcaucagcugcu

SEQ ID NO: 2562989 - RNA, 14 nt, Human
gcaucucuugaggc

SEQ ID NO: 2562990 - RNA, 16 nt, Human
gcaucucuugaggcca

SEQ ID NO: 2562991 - RNA, 16 nt, Human
gcaucugaaaauugau

SEQ ID NO: 2562992 - RNA, 17 nt, Human
gcaucucuugaggccag

SEQ ID NO: 2562993 - RNA, 18 nt, Human
gcaucucuugaggccagg

SEQ ID NO: 2562994 - RNA, 20 nt, Human
gcaucucuugaggccaggag

SEQ ID NO: 2562995 - RNA, 21 nt, Human
gcaucucuugaggccaggagu

SEQ ID NO: 2562996 - RNA, 19 nt, Human
gcaucugacucacaagaag

SEQ ID NO: 2562997 - RNA, 17 nt, Human
gcaucugacucacaaga

SEQ ID NO: 2562998 - RNA, 15 nt, Human
gcaucuuacugaagg

SEQ ID NO: 2562999 - RNA, 12 nt, Human
gcaucugcaccc

SEQ ID NO: 2563000 - RNA, 13 nt, Human
gcaucuguucugg

SEQ ID NO: 2563001 - RNA, 15 nt, Human
gcaucugaccagcag

SEQ ID NO: 2563002 - RNA, 17 nt, Human
gcaucugaccagcagcg

SEQ ID NO: 2563003 - RNA, 18 nt, Human
gcaucugaccagcagcgc

SEQ ID NO: 2563004 - RNA, 20 nt, Human
gcaucugaccagcagcgccu

SEQ ID NO: 2563005 - RNA, 14 nt, Human
gcaucugaccagca

SEQ ID NO: 2563006 - RNA, 22 nt, Human
gcaucuuugccuugggcugcuc

SEQ ID NO: 2563007 - RNA, 23 nt, Human
gcaucuuugccuugggcugcucc

SEQ ID NO: 2563008 - RNA, 18 nt, Human
gcaugaaguaauaugcac

SEQ ID NO: 2563009 - RNA, 20 nt, Human
gcaugaacauguacuguucu

SEQ ID NO: 2563010 - RNA, 13 nt, Human
gcaugaagguuuc

SEQ ID NO: 2563011 - RNA, 21 nt, Human
gcaucuuccagaagugugauu

SEQ ID NO: 2563012 - RNA, 13 nt, Human
gcaucuuccagaa

SEQ ID NO: 2563013 - RNA, 16 nt, Human
gcaucuuacugaaggu

SEQ ID NO: 2563014 - RNA, 23 nt, Human
gcaucuuacugaagguaaaauug

SEQ ID NO: 2563015 - RNA, 23 nt, Human
gcaucuucuggagucuccagugg

SEQ ID NO: 2563016 - RNA, 20 nt, Human
gcaucuucuggagucuccag

SEQ ID NO: 2563017 - RNA, 19 nt, Human
gcaucuucuggagucucca

SEQ ID NO: 2563018 - RNA, 13 nt, Human
gcaucuucuccau

SEQ ID NO: 2563019 - RNA, 17 nt, Human
gcaucuuccagaagugu

SEQ ID NO: 2563020 - RNA, 14 nt, Human
gcaucuucuccauc

SEQ ID NO: 2563021 - RNA, 13 nt, Human
gcaucuuugccuu

SEQ ID NO: 2563022 - RNA, 15 nt, Human
gcaucuuugccuugg

SEQ ID NO: 2563023 - RNA, 18 nt, Human
gcaucuuugccuugggcu

SEQ ID NO: 2563024 - RNA, 22 nt, Human
gcaucuuggggggguggccgcu

SEQ ID NO: 2563025 - RNA, 22 nt, Human
gcaucuugguccaggaaaugug

SEQ ID NO: 2563026 - RNA, 13 nt, Human
gcauagaaguaaa

SEQ ID NO: 2563027 - RNA, 17 nt, Human
gcaguucugaagaagau

SEQ ID NO: 2563028 - RNA, 19 nt, Human
gcaguucugggugcucccu

SEQ ID NO: 2563029 - RNA, 15 nt, Human
gcaguucugaagaag

SEQ ID NO: 2563030 - RNA, 20 nt, Human
gcagugucuuccauaaugua

SEQ ID NO: 2563031 - RNA, 17 nt, Human
gcaguuauuaacacuaa

SEQ ID NO: 2563032 - RNA, 15 nt, Human
gcagugggagcugcc

SEQ ID NO: 2563033 - RNA, 14 nt, Human
gcagugggagcugc

SEQ ID NO: 2563034 - RNA, 12 nt, Human
gcagugggagcu

SEQ ID NO: 2563035 - RNA, 13 nt, Human
gcagugggagcug

SEQ ID NO: 2563036 - RNA, 22 nt, Human
gcaguggugguuuucuguucuu

SEQ ID NO: 2563037 - RNA, 23 nt, Human
gcaguggugguuuucuguucuuu

SEQ ID NO: 2563038 - RNA, 18 nt, Human
gcaguguagcccacacuu

SEQ ID NO: 2563039 - RNA, 18 nt, Human
gcagugucaucagaagau

SEQ ID NO: 2563040 - RNA, 24 nt, Human
gcagugguuuuggcaaacgcuaaa

SEQ ID NO: 2563041 - RNA, 18 nt, Human
gcagugguguggagaagc

SEQ ID NO: 2563042 - RNA, 12 nt, Human
gcagugugaaaa

SEQ ID NO: 2563043 - RNA, 11 nt, Human
gcagugucuuc

SEQ ID NO: 2563044 - RNA, 14 nt, Human
gcagugucuuccau

SEQ ID NO: 2563045 - RNA, 15 nt, Human
gcagugucuuccaua

SEQ ID NO: 2563046 - RNA, 16 nt, Human
gcagugucuuccauaa

SEQ ID NO: 2563047 - RNA, 14 nt, Human
gcauaucacuugau

SEQ ID NO: 2563048 - RNA, 22 nt, Human
gcauaucagucucugagggcuu

SEQ ID NO: 2563049 - RNA, 21 nt, Human
gcauaucagucucugagggcu

SEQ ID NO: 2563050 - RNA, 16 nt, Human
gcauauccugagccau

SEQ ID NO: 2563051 - RNA, 18 nt, Human
gcauauccaccaccuccc

SEQ ID NO: 2563052 - RNA, 15 nt, Human
gcauauccugagcca

SEQ ID NO: 2563053 - RNA, 19 nt, Human
gcauagaugcaggugagcc

SEQ ID NO: 2563054 - RNA, 22 nt, Human
gcauagagguaccagcaauaug

SEQ ID NO: 2563055 - RNA, 21 nt, Human
gcauaggugaucucauuuaau

SEQ ID NO: 2563056 - RNA, 16 nt, Human
gcauagaugcagguga

SEQ ID NO: 2563057 - RNA, 20 nt, Human
gcauaguaccaaucauuuua

SEQ ID NO: 2563058 - RNA, 20 nt, Human
gcauaguauuccauugugug

SEQ ID NO: 2563059 - RNA, 21 nt, Human
gcauaguauuccauuguguga

SEQ ID NO: 2563060 - RNA, 22 nt, Human
gcauaguauuccauugugugag

SEQ ID NO: 2563061 - RNA, 23 nt, Human
gcauaguauuccauugugugagu

SEQ ID NO: 2563062 - RNA, 18 nt, Human
gcauaguucccauguuaa

SEQ ID NO: 2563063 - RNA, 17 nt, Human
gcauagguuuaauaauu

SEQ ID NO: 2563064 - RNA, 15 nt, Human
gcaguugaaaagacu

SEQ ID NO: 2563065 - RNA, 21 nt, Human
gcauacuucaaaaguauuuuc

SEQ ID NO: 2563066 - RNA, 22 nt, Human
gcauacuucaaaaguauuuucc

SEQ ID NO: 2563067 - RNA, 13 nt, Human
gcaguucaccugc

SEQ ID NO: 2563068 - RNA, 22 nt, Human
gcauagaggcuucuccgccagc

SEQ ID NO: 2563069 - RNA, 16 nt, Human
gcauagaggcuucucc

SEQ ID NO: 2563070 - RNA, 15 nt, Human
gcauagaaggcaggu

SEQ ID NO: 2563071 - RNA, 13 nt, Human
gcauacuuuuuaa

SEQ ID NO: 2563072 - RNA, 14 nt, Human
gcauagaaggcagg

SEQ ID NO: 2563073 - RNA, 22 nt, Human
gcauaucugccuuuauuguguu

SEQ ID NO: 2563074 - RNA, 21 nt, Human
gcauaucugccuuuauugugu

SEQ ID NO: 2563075 - RNA, 18 nt, Human
gcauaucugccuuuauug

SEQ ID NO: 2563076 - RNA, 16 nt, Human
gcauaucugccuuuau

SEQ ID NO: 2563077 - RNA, 15 nt, Human
gcauaucugccuuua

SEQ ID NO: 2563078 - RNA, 14 nt, Human
gcauaucugccuuu

SEQ ID NO: 2563079 - RNA, 12 nt, Human
gcauaucugccu

SEQ ID NO: 2563080 - RNA, 19 nt, Human
gcauauuuauaaaaauaaa

SEQ ID NO: 2563081 - RNA, 23 nt, Human
gcauauuuauagcaauccauguu

SEQ ID NO: 2563082 - RNA, 18 nt, Human
gcauauuuguauaguugc

SEQ ID NO: 2563083 - RNA, 14 nt, Human
gcauauuuguauag

SEQ ID NO: 2563084 - RNA, 13 nt, Human
gcaucaaaagaca

SEQ ID NO: 2563085 - RNA, 15 nt, Human
gcaucaccucaggcc

SEQ ID NO: 2563086 - RNA, 17 nt, Human
gcaucaccucaggccag

SEQ ID NO: 2563087 - RNA, 14 nt, Human
gcaucaccucaggc

SEQ ID NO: 2563088 - RNA, 14 nt, Human
gcaucaaaagacaa

SEQ ID NO: 2563089 - RNA, 23 nt, Human
gcagggucuuuucaucugggaaa

SEQ ID NO: 2563090 - RNA, 21 nt, Human
gcagggucuuuucaucuggga

SEQ ID NO: 2563091 - RNA, 16 nt, Human
gcagggucuuuucauc

SEQ ID NO: 2563092 - RNA, 15 nt, Human
gcagggucuuuucau

SEQ ID NO: 2563093 - RNA, 20 nt, Human
gcagggucugggcaggacuc

SEQ ID NO: 2563094 - RNA, 17 nt, Human
gcagggucugggcagga

SEQ ID NO: 2563095 - RNA, 14 nt, Human
gcagggucugggca

SEQ ID NO: 2563096 - RNA, 18 nt, Human
gcagggucucacucuguc

SEQ ID NO: 2563097 - RNA, 12 nt, Human
gcaggggcucug

SEQ ID NO: 2563098 - RNA, 19 nt, Human
gcaggggcuacaagaggga

SEQ ID NO: 2563099 - RNA, 17 nt, Human
gcaggggcuacaagagg

SEQ ID NO: 2563100 - RNA, 19 nt, Human
gcaggggcguggagggcgu

SEQ ID NO: 2563101 - RNA, 20 nt, Human
gcaggggccuggagauccuc

SEQ ID NO: 2563102 - RNA, 16 nt, Human
gcaggggccuggagau

SEQ ID NO: 2563103 - RNA, 17 nt, Human
gcagggucucacucugu

SEQ ID NO: 2563104 - RNA, 22 nt, Human
gcagggcucagcggggacagcu

SEQ ID NO: 2563105 - RNA, 14 nt, Human
gcagggcucagcgg

SEQ ID NO: 2563106 - RNA, 24 nt, Human
gcaggggauggcguggucaagcac

SEQ ID NO: 2563107 - RNA, 21 nt, Human
gcagggccuagcugcuacaaa

SEQ ID NO: 2563108 - RNA, 14 nt, Human
gcaggggccuggag

SEQ ID NO: 2563109 - RNA, 13 nt, Human
gcaggggccugga

SEQ ID NO: 2563110 - RNA, 16 nt, Human
gcaggcagccaggcca

SEQ ID NO: 2563111 - RNA, 15 nt, Human
gcaggcagccaggcc

SEQ ID NO: 2563112 - RNA, 13 nt, Human
gcagggcagucau

SEQ ID NO: 2563113 - RNA, 14 nt, Human
gcagggcaucuccu

SEQ ID NO: 2563114 - RNA, 15 nt, Human
gcagggcaucuccug

SEQ ID NO: 2563115 - RNA, 19 nt, Human
gcagggcaucuccugugca

SEQ ID NO: 2563116 - RNA, 21 nt, Human
gcagggcaucuccugugcaug

SEQ ID NO: 2563117 - RNA, 19 nt, Human
gcagggccaggacugagcc

SEQ ID NO: 2563118 - RNA, 15 nt, Human
gcagggccaggacug

SEQ ID NO: 2563119 - RNA, 14 nt, Human
gcagggccaggacu

SEQ ID NO: 2563120 - RNA, 22 nt, Human
gcagggcaucuccugugcaugg

SEQ ID NO: 2563121 - RNA, 19 nt, Human
gcagggccaacccuucucc

SEQ ID NO: 2563122 - RNA, 21 nt, Human
gcagggcucagcggggacagc

SEQ ID NO: 2563123 - RNA, 19 nt, Human
gcagggcucagcggggaca

SEQ ID NO: 2563124 - RNA, 20 nt, Human
gcagggccuagcugcuacaa

SEQ ID NO: 2563125 - RNA, 17 nt, Human
gcagggccuagcugcua

SEQ ID NO: 2563126 - RNA, 21 nt, Human
gcagggccccaggcauugcca

SEQ ID NO: 2563127 - RNA, 15 nt, Human
gcagugcaugcuguc

SEQ ID NO: 2563128 - RNA, 17 nt, Human
gcaggugagcaaccagu

SEQ ID NO: 2563129 - RNA, 19 nt, Human
gcaggugaccuucugggaa

SEQ ID NO: 2563130 - RNA, 23 nt, Human
gcagugcaagagacucuggccuc

SEQ ID NO: 2563131 - RNA, 22 nt, Human
gcagugcaagagacucuggccu

SEQ ID NO: 2563132 - RNA, 20 nt, Human
gcagugcaagagacucuggc

SEQ ID NO: 2563133 - RNA, 16 nt, Human
gcagugcaugcugucc

SEQ ID NO: 2563134 - RNA, 13 nt, Human
gcagugccucugg

SEQ ID NO: 2563135 - RNA, 23 nt, Human
gcagugccccuagcuuagagccu

SEQ ID NO: 2563136 - RNA, 18 nt, Human
gcagugcaggcacaguau

SEQ ID NO: 2563137 - RNA, 15 nt, Human
gcagugcaggcacag

SEQ ID NO: 2563138 - RNA, 15 nt, Human
gcagugccuuccaua

SEQ ID NO: 2563139 - RNA, 17 nt, Human
gcagugccucuggucug

SEQ ID NO: 2563140 - RNA, 15 nt, Human
gcaguggacaccagg

SEQ ID NO: 2563141 - RNA, 15 nt, Human
gcaggguggugcugg

SEQ ID NO: 2563142 - RNA, 22 nt, Human
gcagggugcaguaucaugcccu

SEQ ID NO: 2563143 - RNA, 19 nt, Human
gcaggguggugcugggacu

SEQ ID NO: 2563144 - RNA, 18 nt, Human
gcaggguggugcugggac

SEQ ID NO: 2563145 - RNA, 17 nt, Human
gcaggguggugcuggga

SEQ ID NO: 2563146 - RNA, 15 nt, Human
gcagggugggaugga

SEQ ID NO: 2563147 - RNA, 14 nt, Human
gcaggguguuggga

SEQ ID NO: 2563148 - RNA, 16 nt, Human
gcagguaaacuccugu

SEQ ID NO: 2563149 - RNA, 15 nt, Human
gcagguaaacaguuc

SEQ ID NO: 2563150 - RNA, 14 nt, Human
gcagguaccacuga

SEQ ID NO: 2563151 - RNA, 22 nt, Human
gcagguccaggguuugaguuca

SEQ ID NO: 2563152 - RNA, 21 nt, Human
gcaggucaacagcuaugcugg

SEQ ID NO: 2563153 - RNA, 21 nt, Human
gcagguagccagggggacuag

SEQ ID NO: 2563154 - RNA, 19 nt, Human
gcagguagccagggggacu

SEQ ID NO: 2563155 - RNA, 20 nt, Human
gcaggucuugaacuccuggc

SEQ ID NO: 2563156 - RNA, 19 nt, Human
gcaggucuugaacuccugg

SEQ ID NO: 2563157 - RNA, 17 nt, Human
gcaggugaccuucuggg

SEQ ID NO: 2563158 - RNA, 13 nt, Human
gcagguccccaga

SEQ ID NO: 2563159 - RNA, 14 nt, Human
gauaauacaccacu

SEQ ID NO: 2563160 - RNA, 18 nt, Human
gauaauacaccacuacau

SEQ ID NO: 2563161 - RNA, 21 nt, Human
gauaauacaccacuacauucu

SEQ ID NO: 2563162 - RNA, 22 nt, Human
gauaauacaccacuacauucug

SEQ ID NO: 2563163 - RNA, 23 nt, Human
gauagauaggucagugcaaauac

SEQ ID NO: 2563164 - RNA, 21 nt, Human
gauacacccaaaguaucagga

SEQ ID NO: 2563165 - RNA, 16 nt, Human
gauaaguguauuuuuc

SEQ ID NO: 2563166 - RNA, 19 nt, Human
gauacaccgggccuggaga

SEQ ID NO: 2563167 - RNA, 12 nt, Human
gauagaugcugg

SEQ ID NO: 2563168 - RNA, 16 nt, Human
gauagaugcuggccca

SEQ ID NO: 2563169 - RNA, 17 nt, Human
gauagaugcuggcccag

SEQ ID NO: 2563170 - RNA, 18 nt, Human
gauagaugcuggcccagg

SEQ ID NO: 2563171 - RNA, 20 nt, Human
gauagaugcuggcccagggc

SEQ ID NO: 2563172 - RNA, 21 nt, Human
gauagaugcuggcccagggcc

SEQ ID NO: 2563173 - RNA, 13 nt, Human
gauagaugugugg

SEQ ID NO: 2563174 - RNA, 19 nt, Human
gauacaggaaaagcugcug

SEQ ID NO: 2563175 - RNA, 20 nt, Human
gauacacugaaguuaacaga

SEQ ID NO: 2563176 - RNA, 22 nt, Human
gauacacugaaguuaacagaga

SEQ ID NO: 2563177 - RNA, 18 nt, Human
gauacaggaaaagcugcu

SEQ ID NO: 2563178 - RNA, 22 nt, Human
gauagcacagacccugcccugu

SEQ ID NO: 2563179 - RNA, 21 nt, Human
gauagcacagacccugcccug

SEQ ID NO: 2563180 - RNA, 13 nt, Human
gauagcagggcau

SEQ ID NO: 2563181 - RNA, 20 nt, Human
gauagcacagacccugcccu

SEQ ID NO: 2563182 - RNA, 20 nt, Human
gauagcacuuucuacaaugu

SEQ ID NO: 2563183 - RNA, 12 nt, Human
gauagcacuuuc

SEQ ID NO: 2563184 - RNA, 19 nt, Human
gauagcacugagcaaagca

SEQ ID NO: 2563185 - RNA, 21 nt, Human
gaggaaggaaacccagcucug

SEQ ID NO: 2563186 - RNA, 20 nt, Human
gaggaaggaaacccagcucu

SEQ ID NO: 2563187 - RNA, 19 nt, Human
gaggaaggaaacccagcuc

SEQ ID NO: 2563188 - RNA, 13 nt, Human
gaggaaggaaacc

SEQ ID NO: 2563189 - RNA, 17 nt, Human
gauaaaguaguaaaaau

SEQ ID NO: 2563190 - RNA, 15 nt, Human
gauaaaguaguaaaa

SEQ ID NO: 2563191 - RNA, 19 nt, Human
gauaaagccacugaaaauu

SEQ ID NO: 2563192 - RNA, 17 nt, Human
gauaaagccacugaaaa

SEQ ID NO: 2563193 - RNA, 19 nt, Human
gauaaaguugguaaaccuu

SEQ ID NO: 2563194 - RNA, 13 nt, Human
gauaaagauuucu

SEQ ID NO: 2563195 - RNA, 16 nt, Human
gauaaagauuucuuga

SEQ ID NO: 2563196 - RNA, 22 nt, Human
gaggaagccagguccacggucu

SEQ ID NO: 2563197 - RNA, 22 nt, Human
gaggaagcagaauaaagcaauu

SEQ ID NO: 2563198 - RNA, 19 nt, Human
gaggaagcccuaagacguc

SEQ ID NO: 2563199 - RNA, 20 nt, Human
gaggaagcgugaaggccgag

SEQ ID NO: 2563200 - RNA, 13 nt, Human
gauaaagaugauc

SEQ ID NO: 2563201 - RNA, 22 nt, Human
gauaaagaugcaaggaccagga

SEQ ID NO: 2563202 - RNA, 22 nt, Human
gauaaauaguuuaugauuccac

SEQ ID NO: 2563203 - RNA, 21 nt, Human
gauaaauaacuuuuuuuuaag

SEQ ID NO: 2563204 - RNA, 16 nt, Human
gauaaauaacuuuuuu

SEQ ID NO: 2563205 - RNA, 15 nt, Human
gauaaauauuauauu

SEQ ID NO: 2563206 - RNA, 15 nt, Human
gauaaaguuucucag

SEQ ID NO: 2563207 - RNA, 14 nt, Human
gauaaaguuucuca

SEQ ID NO: 2563208 - RNA, 16 nt, Human
gauaaaguuucucaga

SEQ ID NO: 2563209 - RNA, 18 nt, Human
gauaaauaaucggcccac

SEQ ID NO: 2563210 - RNA, 22 nt, Human
gauaaauauuauauuauauaua

SEQ ID NO: 2563211 - RNA, 23 nt, Human
gauaagguaccuuucacauagag

SEQ ID NO: 2563212 - RNA, 22 nt, Human
gauaagaguagaaacugcaggg

SEQ ID NO: 2563213 - RNA, 20 nt, Human
gauaagagggcacacacugu

SEQ ID NO: 2563214 - RNA, 12 nt, Human
gauaaagaugau

SEQ ID NO: 2563215 - RNA, 12 nt, Human
gaucaugcauug

SEQ ID NO: 2563216 - RNA, 13 nt, Human
gaucaugcauugu

SEQ ID NO: 2563217 - RNA, 14 nt, Human
gaucaugcauuguu

SEQ ID NO: 2563218 - RNA, 15 nt, Human
gaucaugcauuguug

SEQ ID NO: 2563219 - RNA, 23 nt, Human
gaucaugguguaauaagacauaa

SEQ ID NO: 2563220 - RNA, 21 nt, Human
gaucaugguguaauaagacau

SEQ ID NO: 2563221 - RNA, 20 nt, Human
gaucaugguguaauaagaca

SEQ ID NO: 2563222 - RNA, 18 nt, Human
gaucaugguguaauaaga

SEQ ID NO: 2563223 - RNA, 15 nt, Human
gaucaugguguaaua

SEQ ID NO: 2563224 - RNA, 14 nt, Human
gaucauggcaucca

SEQ ID NO: 2563225 - RNA, 14 nt, Human
gaucaugguguaau

SEQ ID NO: 2563226 - RNA, 21 nt, Human
gaucauccacugugccaugug

SEQ ID NO: 2563227 - RNA, 21 nt, Human
gaucauccuuuccagcaugag

SEQ ID NO: 2563228 - RNA, 16 nt, Human
gaucauccacugugcc

SEQ ID NO: 2563229 - RNA, 19 nt, Human
gaucauccacugugccaug

SEQ ID NO: 2563230 - RNA, 17 nt, Human
gaucauccacugugcca

SEQ ID NO: 2563231 - RNA, 20 nt, Human
gaucaguauaauuuuuuaaa

SEQ ID NO: 2563232 - RNA, 23 nt, Human
gaucagugggccuccaaggaggg

SEQ ID NO: 2563233 - RNA, 23 nt, Human
gaucaguccuuugaucaguauaa

SEQ ID NO: 2563234 - RNA, 20 nt, Human
gaucaguguaccauuugccu

SEQ ID NO: 2563235 - RNA, 18 nt, Human
gaucaguuauaaguagca

SEQ ID NO: 2563236 - RNA, 20 nt, Human
gauccccaagccuggcaagg

SEQ ID NO: 2563237 - RNA, 13 nt, Human
gaucauuuucuua

SEQ ID NO: 2563238 - RNA, 18 nt, Human
gaucauuuuccccccacu

SEQ ID NO: 2563239 - RNA, 19 nt, Human
gaucauuuuccccccacuc

SEQ ID NO: 2563240 - RNA, 20 nt, Human
gauccccaagugugaacaaa

SEQ ID NO: 2563241 - RNA, 18 nt, Human
gauccccaagugugaaca

SEQ ID NO: 2563242 - RNA, 14 nt, Human
gauccccaagugug

SEQ ID NO: 2563243 - RNA, 21 nt, Human
gaucauuugcccuuaaggaca

SEQ ID NO: 2563244 - RNA, 23 nt, Human
gaucauuuuccccccacucuccc

SEQ ID NO: 2563245 - RNA, 14 nt, Human
gaucauuaucagcc

SEQ ID NO: 2563246 - RNA, 14 nt, Human
gaucauugugaaau

SEQ ID NO: 2563247 - RNA, 20 nt, Human
gaucauugugaaauuauuca

SEQ ID NO: 2563248 - RNA, 18 nt, Human
gaucauuuguuggaauga

SEQ ID NO: 2563249 - RNA, 14 nt, Human
gaucauuuuccccc

SEQ ID NO: 2563250 - RNA, 15 nt, Human
gaucauuuucccccc

SEQ ID NO: 2563251 - RNA, 22 nt, Human
gaucagucugauucccaagcuc

SEQ ID NO: 2563252 - RNA, 11 nt, Human
gaucaggucau

SEQ ID NO: 2563253 - RNA, 13 nt, Human
gaucaggugggga

SEQ ID NO: 2563254 - RNA, 14 nt, Human
gaucagguggggag

SEQ ID NO: 2563255 - RNA, 12 nt, Human
gaucagccuggg

SEQ ID NO: 2563256 - RNA, 15 nt, Human
gaucagccugggcaa

SEQ ID NO: 2563257 - RNA, 22 nt, Human
gaucacgcuccccgccuguucc

SEQ ID NO: 2563258 - RNA, 14 nt, Human
gaucacgcuccccg

SEQ ID NO: 2563259 - RNA, 13 nt, Human
gaucacgcucccc

SEQ ID NO: 2563260 - RNA, 15 nt, Human
gaucagauugcaugu

SEQ ID NO: 2563261 - RNA, 19 nt, Human
gaucagcaaaccggggccu

SEQ ID NO: 2563262 - RNA, 23 nt, Human
gaucagauugcaugugacucuga

SEQ ID NO: 2563263 - RNA, 12 nt, Human
gaucacggcuca

SEQ ID NO: 2563264 - RNA, 15 nt, Human
gaucaauuaaaugua

SEQ ID NO: 2563265 - RNA, 16 nt, Human
gaucaauuaaauguag

SEQ ID NO: 2563266 - RNA, 23 nt, Human
gaucacgccacugcacuccagcc

SEQ ID NO: 2563267 - RNA, 24 nt, Human
gaucacgccacugcacuccagccu

SEQ ID NO: 2563268 - RNA, 14 nt, Human
gaucaauaaaaugu

SEQ ID NO: 2563269 - RNA, 18 nt, Human
gaucaauaaaaugugauu

SEQ ID NO: 2563270 - RNA, 21 nt, Human
gaucaauaaaaugugauuuuu

SEQ ID NO: 2563271 - RNA, 23 nt, Human
gaucaauggcgcagugccucugg

SEQ ID NO: 2563272 - RNA, 22 nt, Human
gaucaauggcgcagugccucug

SEQ ID NO: 2563273 - RNA, 18 nt, Human
gaucaaugacagagccuu

SEQ ID NO: 2563274 - RNA, 14 nt, Human
gaucaaugacagag

SEQ ID NO: 2563275 - RNA, 13 nt, Human
gaucaaugaaaug

SEQ ID NO: 2563276 - RNA, 12 nt, Human
gaucaaugacag

SEQ ID NO: 2563277 - RNA, 19 nt, Human
gaucaauaaaaugugauuu

SEQ ID NO: 2563278 - RNA, 18 nt, Human
gaucacgccacugcacua

SEQ ID NO: 2563279 - RNA, 16 nt, Human
gaucacgccacugcac

SEQ ID NO: 2563280 - RNA, 23 nt, Human
gauagugggcaccccacugcaau

SEQ ID NO: 2563281 - RNA, 16 nt, Human
gaucaaggagaggagg

SEQ ID NO: 2563282 - RNA, 18 nt, Human
gaucaaggagaggaggca

SEQ ID NO: 2563283 - RNA, 22 nt, Human
gauagucuuucaguuaaggaga

SEQ ID NO: 2563284 - RNA, 23 nt, Human
gauagucuuuugcuuuuggcaaa

SEQ ID NO: 2563285 - RNA, 15 nt, Human
gauaguaacaaugaa

SEQ ID NO: 2563286 - RNA, 14 nt, Human
gauaguagcuuccu

SEQ ID NO: 2563287 - RNA, 14 nt, Human
gauagcacuuucua

SEQ ID NO: 2563288 - RNA, 14 nt, Human
gauagucuuucagu

SEQ ID NO: 2563289 - RNA, 18 nt, Human
gauaguagcauacauuua

SEQ ID NO: 2563290 - RNA, 16 nt, Human
gauaguauugugcaua

SEQ ID NO: 2563291 - RNA, 22 nt, Human
gauccugagccagauuucacuc

SEQ ID NO: 2563292 - RNA, 21 nt, Human
gauccugagccagauuucacu

SEQ ID NO: 2563293 - RNA, 13 nt, Human
gauccuggaaauc

SEQ ID NO: 2563294 - RNA, 19 nt, Human
gaucccuagcugugaccuc

SEQ ID NO: 2563295 - RNA, 21 nt, Human
gaucccuagcugugaccucuc

SEQ ID NO: 2563296 - RNA, 16 nt, Human
gaucccucauccucau

SEQ ID NO: 2563297 - RNA, 15 nt, Human
gaucccucauccuca

SEQ ID NO: 2563298 - RNA, 17 nt, Human
gauccccucaggacugc

SEQ ID NO: 2563299 - RNA, 15 nt, Human
gaucccuagcuguga

SEQ ID NO: 2563300 - RNA, 21 nt, Human
gaucccgccucuucuucuuca

SEQ ID NO: 2563301 - RNA, 14 nt, Human
gauccccucaggac

SEQ ID NO: 2563302 - RNA, 13 nt, Human
gauccccucagga

SEQ ID NO: 2563303 - RNA, 14 nt, Human
gauccccagcuguu

SEQ ID NO: 2563304 - RNA, 14 nt, Human
gaucucaggggcug

SEQ ID NO: 2563305 - RNA, 15 nt, Human
gaucgugcuaaauuu

SEQ ID NO: 2563306 - RNA, 16 nt, Human
gaucuaucaauaguca

SEQ ID NO: 2563307 - RNA, 18 nt, Human
gaucgucugacugguguu

SEQ ID NO: 2563308 - RNA, 16 nt, Human
gaucgugacgcugaau

SEQ ID NO: 2563309 - RNA, 18 nt, Human
gaucgugcuaaauuuuca

SEQ ID NO: 2563310 - RNA, 20 nt, Human
gaucgugacgcugaauaaau

SEQ ID NO: 2563311 - RNA, 19 nt, Human
gaucgugacgcugaauaaa

SEQ ID NO: 2563312 - RNA, 22 nt, Human
gaucgugacgcugaauaaaugu

SEQ ID NO: 2563313 - RNA, 23 nt, Human
gaucgugccguuacucuccaacc

SEQ ID NO: 2563314 - RNA, 18 nt, Human
gauccugcggguggggcu

SEQ ID NO: 2563315 - RNA, 17 nt, Human
gauccugcggguggggc

SEQ ID NO: 2563316 - RNA, 20 nt, Human
gaucggagccuccucucuca

SEQ ID NO: 2563317 - RNA, 22 nt, Human
gaucggaggcuugucagagcug

SEQ ID NO: 2563318 - RNA, 17 nt, Human
gaucggagccuccucuc

SEQ ID NO: 2563319 - RNA, 23 nt, Human
gaucgcgccacuacacuccagcc

SEQ ID NO: 2563320 - RNA, 21 nt, Human
gaucgcggcggagcuggcccc

SEQ ID NO: 2563321 - RNA, 17 nt, Human
gaucuuugcagacaggc

SEQ ID NO: 2563322 - RNA, 18 nt, Human
gaucuuugcagacaggca

SEQ ID NO: 2563323 - RNA, 21 nt, Human
gaucuuuggacagaagcagcu

SEQ ID NO: 2563324 - RNA, 11 nt, Human
gaucuuugugg

SEQ ID NO: 2563325 - RNA, 14 nt, Human
gaucuuuguggcca

SEQ ID NO: 2563326 - RNA, 16 nt, Human
gaucuuuguggccaag

SEQ ID NO: 2563327 - RNA, 13 nt, Human
gaucuuuggacag

SEQ ID NO: 2563328 - RNA, 18 nt, Human
gaucuguuuugaaggcaa

SEQ ID NO: 2563329 - RNA, 20 nt, Human
gaucuguuguguacguggag

SEQ ID NO: 2563330 - RNA, 19 nt, Human
gaucucaggggcuguuuga

SEQ ID NO: 2563331 - RNA, 18 nt, Human
gaucucaggggcuguuug

SEQ ID NO: 2563332 - RNA, 17 nt, Human
gaucucaggggcuguuu

SEQ ID NO: 2563333 - RNA, 13 nt, Human
gaucucagguucu

SEQ ID NO: 2563334 - RNA, 21 nt, Human
gaucugugaggggcucucuca

SEQ ID NO: 2563335 - RNA, 16 nt, Human
gaucugugcccagaga

SEQ ID NO: 2563336 - RNA, 13 nt, Human
gaucugugcccca

SEQ ID NO: 2563337 - RNA, 21 nt, Human
gaucuguugcaaacucagccu

SEQ ID NO: 2563338 - RNA, 14 nt, Human
gaucuguugcaaac

SEQ ID NO: 2563339 - RNA, 23 nt, Human
gaucugugcuuuccagcucaccc

SEQ ID NO: 2563340 - RNA, 20 nt, Human
gaucugugcuuuccagcuca

SEQ ID NO: 2563341 - RNA, 13 nt, Human
gaucuguuuugaa

SEQ ID NO: 2563342 - RNA, 17 nt, Human
gaucuguuuugaaggca

SEQ ID NO: 2563343 - RNA, 19 nt, Human
gaucugugcuuuccagcuc

SEQ ID NO: 2563344 - RNA, 18 nt, Human
gaucugugcuuuccagcu

SEQ ID NO: 2563345 - RNA, 19 nt, Human
gaucugugcccagagaugg

SEQ ID NO: 2563346 - RNA, 14 nt, Human
gaucugugccccau

SEQ ID NO: 2563347 - RNA, 18 nt, Human
gaucugugccccaugccu

SEQ ID NO: 2563348 - RNA, 15 nt, Human
gaugaaaauauuuaa

SEQ ID NO: 2563349 - RNA, 16 nt, Human
gaugaaaauauuuaaa

SEQ ID NO: 2563350 - RNA, 15 nt, Human
gaucuuuguggccaa

SEQ ID NO: 2563351 - RNA, 14 nt, Human
gaugaaaauauuua

SEQ ID NO: 2563352 - RNA, 14 nt, Human
gaugaaaauauuug

SEQ ID NO: 2563353 - RNA, 17 nt, Human
gaugaaaauauuuaaag

SEQ ID NO: 2563354 - RNA, 22 nt, Human
gaugaacucuuagaaaugaagg

SEQ ID NO: 2563355 - RNA, 18 nt, Human
gaugaacucuuagaaaug

SEQ ID NO: 2563356 - RNA, 20 nt, Human
gaugaaaucuuacagcuggg

SEQ ID NO: 2563357 - RNA, 19 nt, Human
gaugaaaucuuacagcugg

SEQ ID NO: 2563358 - RNA, 18 nt, Human
gaugaaauaacuccuucu

SEQ ID NO: 2563359 - RNA, 14 nt, Human
gaugaaagaggagg

SEQ ID NO: 2563360 - RNA, 19 nt, Human
gaugaaagagaaggugggu

SEQ ID NO: 2563361 - RNA, 20 nt, Human
gaugaagaaaagugggccag

SEQ ID NO: 2563362 - RNA, 14 nt, Human
gaugaagagugaga

SEQ ID NO: 2563363 - RNA, 13 nt, Human
gaugaacuuucuc

SEQ ID NO: 2563364 - RNA, 19 nt, Human
gaugaacuuauucuguaga

SEQ ID NO: 2563365 - RNA, 17 nt, Human
gaugaacuuauucugua

SEQ ID NO: 2563366 - RNA, 21 nt, Human
gaugaagagugagagggcaug

SEQ ID NO: 2563367 - RNA, 15 nt, Human
gaugaagcaaacaca

SEQ ID NO: 2563368 - RNA, 16 nt, Human
gaugaagcaaacacau

SEQ ID NO: 2563369 - RNA, 19 nt, Human
gaugaagcaaacacauuaa

SEQ ID NO: 2563370 - RNA, 22 nt, Human
gauggggcccugccuccuuugu

SEQ ID NO: 2563371 - RNA, 14 nt, Human
gauggggcccugcc

SEQ ID NO: 2563372 - RNA, 13 nt, Human
gauggggcccugc

SEQ ID NO: 2563373 - RNA, 14 nt, Human
gauggcuccucuca

SEQ ID NO: 2563374 - RNA, 20 nt, Human
gauggcugugccucugccug

SEQ ID NO: 2563375 - RNA, 19 nt, Human
gauggcugugccucugccu

SEQ ID NO: 2563376 - RNA, 18 nt, Human
gauggcugugccucugcc

SEQ ID NO: 2563377 - RNA, 17 nt, Human
gauggcugugccucugc

SEQ ID NO: 2563378 - RNA, 13 nt, Human
gauggcugugccu

SEQ ID NO: 2563379 - RNA, 21 nt, Human
gauggcuaguaucaaaagaaa

SEQ ID NO: 2563380 - RNA, 12 nt, Human
gauggcuccucu

SEQ ID NO: 2563381 - RNA, 13 nt, Human
gauggcuccucuc

SEQ ID NO: 2563382 - RNA, 19 nt, Human
gauggcgugggcugcguga

SEQ ID NO: 2563383 - RNA, 21 nt, Human
gauggcuaaaaccaucauagu

SEQ ID NO: 2563384 - RNA, 19 nt, Human
gaugccugguggcagcugc

SEQ ID NO: 2563385 - RNA, 18 nt, Human
gaugccugguggcagcug

SEQ ID NO: 2563386 - RNA, 20 nt, Human
gaugccugguggcagcugcg

SEQ ID NO: 2563387 - RNA, 23 nt, Human
gauggaugccaauauuaaaucug

SEQ ID NO: 2563388 - RNA, 21 nt, Human
gauggauuccaaccccaacuc

SEQ ID NO: 2563389 - RNA, 12 nt, Human
gauggauuccaa

SEQ ID NO: 2563390 - RNA, 22 nt, Human
gauggauuccaaccccaacucc

SEQ ID NO: 2563391 - RNA, 14 nt, Human
gauggauucucaga

SEQ ID NO: 2563392 - RNA, 22 nt, Human
gauggauuuccagccaaagccu

SEQ ID NO: 2563393 - RNA, 15 nt, Human
gauggauuugaagca

SEQ ID NO: 2563394 - RNA, 17 nt, Human
gauggauucuccacuca

SEQ ID NO: 2563395 - RNA, 14 nt, Human
gauggauuugccug

SEQ ID NO: 2563396 - RNA, 19 nt, Human
gauggauuugccugugcca

SEQ ID NO: 2563397 - RNA, 16 nt, Human
gauggauucucagaua

SEQ ID NO: 2563398 - RNA, 18 nt, Human
gauggauucucagauauu

SEQ ID NO: 2563399 - RNA, 19 nt, Human
gauggauucucagauauuu

SEQ ID NO: 2563400 - RNA, 22 nt, Human
gauggauucucagauauuuaua

SEQ ID NO: 2563401 - RNA, 16 nt, Human
gauggcgggugggggu

SEQ ID NO: 2563402 - RNA, 15 nt, Human
gauggcggguggggg

SEQ ID NO: 2563403 - RNA, 14 nt, Human
gauggcgggugggg

SEQ ID NO: 2563404 - RNA, 21 nt, Human
gauggccuggccagggccugg

SEQ ID NO: 2563405 - RNA, 20 nt, Human
gauggccuggccagggccug

SEQ ID NO: 2563406 - RNA, 14 nt, Human
gauggcgcuaggca

SEQ ID NO: 2563407 - RNA, 20 nt, Human
gauggcaaagaaggagagca

SEQ ID NO: 2563408 - RNA, 14 nt, Human
gauggccuggccag

SEQ ID NO: 2563409 - RNA, 13 nt, Human
gauggccugagaa

SEQ ID NO: 2563410 - RNA, 20 nt, Human
gaugccaaguuguuugagaa

SEQ ID NO: 2563411 - RNA, 19 nt, Human
gaugccaauauuaaaucug

SEQ ID NO: 2563412 - RNA, 15 nt, Human
gaugccacacaagga

SEQ ID NO: 2563413 - RNA, 15 nt, Human
gaugccaaccucugg

SEQ ID NO: 2563414 - RNA, 21 nt, Human
gaugccaagaaguuuaaggaa

SEQ ID NO: 2563415 - RNA, 22 nt, Human
gaugccacaccaagcugugcca

SEQ ID NO: 2563416 - RNA, 21 nt, Human
gaugccacaccaagcugugcc

SEQ ID NO: 2563417 - RNA, 19 nt, Human
gaugccacaccaagcugug

SEQ ID NO: 2563418 - RNA, 16 nt, Human
gaugccacaccaagcu

SEQ ID NO: 2563419 - RNA, 15 nt, Human
gaugccacaccaagc

SEQ ID NO: 2563420 - RNA, 22 nt, Human
gaugccaaccucuggagcaaug

SEQ ID NO: 2563421 - RNA, 17 nt, Human
gaugccacacagagugg

SEQ ID NO: 2563422 - RNA, 14 nt, Human
gaugcagccucaca

SEQ ID NO: 2563423 - RNA, 17 nt, Human
gaugcagcaaaauguga

SEQ ID NO: 2563424 - RNA, 19 nt, Human
gaugcagccucacaguccu

SEQ ID NO: 2563425 - RNA, 12 nt, Human
gaugcagccuca

SEQ ID NO: 2563426 - RNA, 16 nt, Human
gaugcagcauuaugau

SEQ ID NO: 2563427 - RNA, 23 nt, Human
gaugcagagguaaaagugugagc

SEQ ID NO: 2563428 - RNA, 23 nt, Human
gaugcagagagccauuuugugaa

SEQ ID NO: 2563429 - RNA, 21 nt, Human
gaugcagcauuuuguauuugu

SEQ ID NO: 2563430 - RNA, 21 nt, Human
gaugcacagaguuguuacauu

SEQ ID NO: 2563431 - RNA, 22 nt, Human
gaugcacagaguuguuacauuu

SEQ ID NO: 2563432 - RNA, 13 nt, Human
gaugcaccagccc

SEQ ID NO: 2563433 - RNA, 16 nt, Human
gaugcaccaccaagcc

SEQ ID NO: 2563434 - RNA, 18 nt, Human
gaugacaugugacuccua

SEQ ID NO: 2563435 - RNA, 17 nt, Human
gaugacaacuucccagu

SEQ ID NO: 2563436 - RNA, 16 nt, Human
gaugaaguuuuacauu

SEQ ID NO: 2563437 - RNA, 20 nt, Human
gaugacaacuggaauaguuu

SEQ ID NO: 2563438 - RNA, 21 nt, Human
gaugacauugcuaagaugcuc

SEQ ID NO: 2563439 - RNA, 18 nt, Human
gaugacauugcuaagaug

SEQ ID NO: 2563440 - RNA, 16 nt, Human
gaugacauugcuaaga

SEQ ID NO: 2563441 - RNA, 15 nt, Human
gaugacauugcuaag

SEQ ID NO: 2563442 - RNA, 14 nt, Human
gaugacauugcuaa

SEQ ID NO: 2563443 - RNA, 14 nt, Human
gaugacagagcgag

SEQ ID NO: 2563444 - RNA, 20 nt, Human
gaugacaugcacucagcucu

SEQ ID NO: 2563445 - RNA, 21 nt, Human
gauugcaauuugcacaaguuu

SEQ ID NO: 2563446 - RNA, 14 nt, Human
gauugcaauuugca

SEQ ID NO: 2563447 - RNA, 21 nt, Human
gauugcaacaggcugggcuuc

SEQ ID NO: 2563448 - RNA, 16 nt, Human
gauugcaccacugcac

SEQ ID NO: 2563449 - RNA, 23 nt, Human
gauugcaccacugcacuccagcc

SEQ ID NO: 2563450 - RNA, 17 nt, Human
gauucuuuccugaggcu

SEQ ID NO: 2563451 - RNA, 16 nt, Human
gauucuuuccugaggc

SEQ ID NO: 2563452 - RNA, 18 nt, Human
gauucuuuccugaggcug

SEQ ID NO: 2563453 - RNA, 20 nt, Human
gauugcaacaggcugggcuu

SEQ ID NO: 2563454 - RNA, 20 nt, Human
gauucccaagcucugcuccu

SEQ ID NO: 2563455 - RNA, 19 nt, Human
gauucccaagcucugcucc

SEQ ID NO: 2563456 - RNA, 15 nt, Human
gauuccuuccuguuc

SEQ ID NO: 2563457 - RNA, 13 nt, Human
gauuccuuccugu

SEQ ID NO: 2563458 - RNA, 21 nt, Human
gauucccaagcucugcuccuc

SEQ ID NO: 2563459 - RNA, 12 nt, Human
gauucuuuccug

SEQ ID NO: 2563460 - RNA, 17 nt, Human
gauucgguaucccccca

SEQ ID NO: 2563461 - RNA, 16 nt, Human
gauucgguaucccccc

SEQ ID NO: 2563462 - RNA, 13 nt, Human
gauucggcugucu

SEQ ID NO: 2563463 - RNA, 18 nt, Human
gauucgcccaaagccaga

SEQ ID NO: 2563464 - RNA, 17 nt, Human
gauuccuuugaagagga

SEQ ID NO: 2563465 - RNA, 21 nt, Human
gauuccuuugaagaggaaaau

SEQ ID NO: 2563466 - RNA, 23 nt, Human
gauggggcugcaccggcuggccu

SEQ ID NO: 2563467 - RNA, 21 nt, Human
gaugggggaaagcacaggugg

SEQ ID NO: 2563468 - RNA, 17 nt, Human
gaugggggaaagcacag

SEQ ID NO: 2563469 - RNA, 16 nt, Human
gaugggggaacucaga

SEQ ID NO: 2563470 - RNA, 19 nt, Human
gaugggggaacucagaucc

SEQ ID NO: 2563471 - RNA, 20 nt, Human
gaugggggaacucagaucca

SEQ ID NO: 2563472 - RNA, 22 nt, Human
gaugggggaacucagauccagg

SEQ ID NO: 2563473 - RNA, 21 nt, Human
gaugggggagucugaagcaga

SEQ ID NO: 2563474 - RNA, 19 nt, Human
gauucagacagcugccugg

SEQ ID NO: 2563475 - RNA, 23 nt, Human
gauggggucucacaguguugccc

SEQ ID NO: 2563476 - RNA, 13 nt, Human
gauucagcucugc

SEQ ID NO: 2563477 - RNA, 15 nt, Human
gauucagcucugcaa

SEQ ID NO: 2563478 - RNA, 22 nt, Human
gauuccagagaguggcuccucc

SEQ ID NO: 2563479 - RNA, 21 nt, Human
gauuccacuacaccuggcuga

SEQ ID NO: 2563480 - RNA, 20 nt, Human
gauuccagagaguggcuccu

SEQ ID NO: 2563481 - RNA, 19 nt, Human
gauuccagagaguggcucc

SEQ ID NO: 2563482 - RNA, 22 nt, Human
gauuccauuuggcagagcuucu

SEQ ID NO: 2563483 - RNA, 18 nt, Human
gauucccaagcucugcuc

SEQ ID NO: 2563484 - RNA, 17 nt, Human
gauuccagguggcauca

SEQ ID NO: 2563485 - RNA, 19 nt, Human
gauucauaguaacuucuua

SEQ ID NO: 2563486 - RNA, 18 nt, Human
gauucagauuguuaucua

SEQ ID NO: 2563487 - RNA, 17 nt, Human
gauucauauuuacuucu

SEQ ID NO: 2563488 - RNA, 18 nt, Human
gauucauauuuacuucuu

SEQ ID NO: 2563489 - RNA, 19 nt, Human
gauucauauuuacuucuua

SEQ ID NO: 2563490 - RNA, 18 nt, Human
gauuuucaaagcuuuuuc

SEQ ID NO: 2563491 - RNA, 19 nt, Human
gauuuucaaagcuuuuucc

SEQ ID NO: 2563492 - RNA, 15 nt, Human
gauuuuauuugacaa

SEQ ID NO: 2563493 - RNA, 14 nt, Human
gauuuuaugcuuua

SEQ ID NO: 2563494 - RNA, 19 nt, Human
gauuuuaugcuuuaaacau

SEQ ID NO: 2563495 - RNA, 20 nt, Human
gauuugugaacucagccaag

SEQ ID NO: 2563496 - RNA, 13 nt, Human
gauuuuaugcuuu

SEQ ID NO: 2563497 - RNA, 14 nt, Human
gauuuguacugaaa

SEQ ID NO: 2563498 - RNA, 14 nt, Human
gauuugucccaggu

SEQ ID NO: 2563499 - RNA, 11 nt, Human
gauuugugaac

SEQ ID NO: 2563500 - RNA, 15 nt, Human
gauuuuccugaaaac

SEQ ID NO: 2563501 - RNA, 13 nt, Human
gauuuuccaaaug

SEQ ID NO: 2563502 - RNA, 19 nt, Human
gauuuuccuuuuuuauaca

SEQ ID NO: 2563503 - RNA, 18 nt, Human
gauuuuccuuuuuuauac

SEQ ID NO: 2563504 - RNA, 23 nt, Human
gauuuuucuggagguugauaacu

SEQ ID NO: 2563505 - RNA, 18 nt, Human
gauuuuucucaaaguuuu

SEQ ID NO: 2563506 - RNA, 13 nt, Human
gauuuuucucaaa

SEQ ID NO: 2563507 - RNA, 12 nt, Human
gauuuuucucaa

SEQ ID NO: 2563508 - RNA, 16 nt, Human
gauuuucuuuaaaaga

SEQ ID NO: 2563509 - RNA, 22 nt, Human
gauuuucuauuguuacucuggu

SEQ ID NO: 2563510 - RNA, 17 nt, Human
gauuuucuauuguuacu

SEQ ID NO: 2563511 - RNA, 12 nt, Human
gauuuucuauug

SEQ ID NO: 2563512 - RNA, 21 nt, Human
gauuuuccuuuuuuauacaca

SEQ ID NO: 2563513 - RNA, 13 nt, Human
gauuuucuuuaaa

SEQ ID NO: 2563514 - RNA, 18 nt, Human
gauuuucuauuguuacuc

SEQ ID NO: 2563515 - RNA, 20 nt, Human
gauuuuuaccguuucuuccc

SEQ ID NO: 2563516 - RNA, 22 nt, Human
gauuuggucaacacuaacauga

SEQ ID NO: 2563517 - RNA, 12 nt, Human
gauuugggcugg

SEQ ID NO: 2563518 - RNA, 13 nt, Human
gauuuggggugga

SEQ ID NO: 2563519 - RNA, 19 nt, Human
gauuugguguacaauucag

SEQ ID NO: 2563520 - RNA, 23 nt, Human
gauuugggcuggaacagauucac

SEQ ID NO: 2563521 - RNA, 20 nt, Human
gauuuggggcucagaguggg

SEQ ID NO: 2563522 - RNA, 15 nt, Human
gauuuggaagggaaa

SEQ ID NO: 2563523 - RNA, 23 nt, Human
gauuugcucagugucuggcugca

SEQ ID NO: 2563524 - RNA, 12 nt, Human
gauuuggaaaaa

SEQ ID NO: 2563525 - RNA, 21 nt, Human
gauuugcugggcaguuuuucu

SEQ ID NO: 2563526 - RNA, 11 nt, Human
gauuucuguuu

SEQ ID NO: 2563527 - RNA, 19 nt, Human
gauuucuguuuagauaaua

SEQ ID NO: 2563528 - RNA, 17 nt, Human
gauuucugccuuccuug

SEQ ID NO: 2563529 - RNA, 21 nt, Human
gauuugcauugaacacaaacu

SEQ ID NO: 2563530 - RNA, 15 nt, Human
gauuugccugugcca

SEQ ID NO: 2563531 - RNA, 17 nt, Human
gauuugcauugaacaca

SEQ ID NO: 2563532 - RNA, 16 nt, Human
gauuucugccuuccuu

SEQ ID NO: 2563533 - RNA, 13 nt, Human
gauuucugccuuc

SEQ ID NO: 2563534 - RNA, 17 nt, Human
gauuucugcagguucuu

SEQ ID NO: 2563535 - RNA, 18 nt, Human
gauuuccguuaaaauacc

SEQ ID NO: 2563536 - RNA, 11 nt, Human
gauuucuccca

SEQ ID NO: 2563537 - RNA, 20 nt, Human
gauuucucccagcucuagac

SEQ ID NO: 2563538 - RNA, 15 nt, Human
gauuuccguuaaaau

SEQ ID NO: 2563539 - RNA, 22 nt, Human
gauuucccguggccccagccug

SEQ ID NO: 2563540 - RNA, 21 nt, Human
gauuucccguggccccagccu

SEQ ID NO: 2563541 - RNA, 18 nt, Human
gauuucccguggccccag

SEQ ID NO: 2563542 - RNA, 16 nt, Human
gauuucccguggcccc

SEQ ID NO: 2563543 - RNA, 17 nt, Human
gauugcacguggccucu

SEQ ID NO: 2563544 - RNA, 16 nt, Human
gauugcacguggccuc

SEQ ID NO: 2563545 - RNA, 15 nt, Human
gauugcacguggccu

SEQ ID NO: 2563546 - RNA, 22 nt, Human
gauugcaauuugcacaaguuuu

SEQ ID NO: 2563547 - RNA, 20 nt, Human
gauugcacguggccucuuga

SEQ ID NO: 2563548 - RNA, 19 nt, Human
gauugcacguggccucuug

SEQ ID NO: 2563549 - RNA, 23 nt, Human
gauugcacguggccucuugagca

SEQ ID NO: 2563550 - RNA, 19 nt, Human
gauuuccagccagggcugc

SEQ ID NO: 2563551 - RNA, 18 nt, Human
gauuuccagccagggcug

SEQ ID NO: 2563552 - RNA, 22 nt, Human
gauuuccagucuccaccaggaa

SEQ ID NO: 2563553 - RNA, 23 nt, Human
gcaaacagaggaagaauuuguua

SEQ ID NO: 2563554 - RNA, 23 nt, Human
gcaaagcacugacuucuaaguaa

SEQ ID NO: 2563555 - RNA, 21 nt, Human
gcaaagccccaugcuggagcc

SEQ ID NO: 2563556 - RNA, 20 nt, Human
gcaaagccccaugcuggagc

SEQ ID NO: 2563557 - RNA, 19 nt, Human
gcaaagccccaugcuggag

SEQ ID NO: 2563558 - RNA, 18 nt, Human
gcaaagccccaugcugga

SEQ ID NO: 2563559 - RNA, 21 nt, Human
gcaaagcccagcuugaaaccu

SEQ ID NO: 2563560 - RNA, 13 nt, Human
gcaaagcccagcu

SEQ ID NO: 2563561 - RNA, 12 nt, Human
gcaaagcauuga

SEQ ID NO: 2563562 - RNA, 13 nt, Human
gcaaaauugcaaa

SEQ ID NO: 2563563 - RNA, 17 nt, Human
gcaaaauugcaaaucuu

SEQ ID NO: 2563564 - RNA, 20 nt, Human
gcaaaauuugaugccaggac

SEQ ID NO: 2563565 - RNA, 15 nt, Human
gcaaaauuugaugcc

SEQ ID NO: 2563566 - RNA, 21 nt, Human
gcaaaauuguuuuugguugga

SEQ ID NO: 2563567 - RNA, 10 nt, Human
gcaaaauuuc

SEQ ID NO: 2563568 - RNA, 22 nt, Human
gcaaaauuugaugccaggacac

SEQ ID NO: 2563569 - RNA, 21 nt, Human
gcaaaauuugaugccaggaca

SEQ ID NO: 2563570 - RNA, 16 nt, Human
gcaaaauuuuauagcu

SEQ ID NO: 2563571 - RNA, 17 nt, Human
gcaaacacacaaaggua

SEQ ID NO: 2563572 - RNA, 15 nt, Human
gauuuuuguaagaca

SEQ ID NO: 2563573 - RNA, 17 nt, Human
gcaaaauugauguguuu

SEQ ID NO: 2563574 - RNA, 13 nt, Human
gauuuuugccucu

SEQ ID NO: 2563575 - RNA, 15 nt, Human
gauuuuugucuugug

SEQ ID NO: 2563576 - RNA, 19 nt, Human
gcaaagguuccaacuguau

SEQ ID NO: 2563577 - RNA, 12 nt, Human
gcaaaucaaugc

SEQ ID NO: 2563578 - RNA, 13 nt, Human
gcaaaucagaaac

SEQ ID NO: 2563579 - RNA, 15 nt, Human
gcaaaucagaaacuu

SEQ ID NO: 2563580 - RNA, 20 nt, Human
gcaaauccuugugggaaaag

SEQ ID NO: 2563581 - RNA, 15 nt, Human
gcaaauccuauguga

SEQ ID NO: 2563582 - RNA, 15 nt, Human
gcaaaucauagcugg

SEQ ID NO: 2563583 - RNA, 18 nt, Human
gcaaaucaguuacuaaga

SEQ ID NO: 2563584 - RNA, 20 nt, Human
gcaaaucagaaacuugugaa

SEQ ID NO: 2563585 - RNA, 22 nt, Human
gcaaaucagaaacuugugaagu

SEQ ID NO: 2563586 - RNA, 23 nt, Human
gcaaagccccaugcuggagccug

SEQ ID NO: 2563587 - RNA, 22 nt, Human
gcaaagccccaugcuggagccu

SEQ ID NO: 2563588 - RNA, 19 nt, Human
gcaaagggcugaaagccau

SEQ ID NO: 2563589 - RNA, 15 nt, Human
gcaaagggcugaaag

SEQ ID NO: 2563590 - RNA, 14 nt, Human
gcaaagggcugaaa

SEQ ID NO: 2563591 - RNA, 20 nt, Human
gcaaaggggcugaaagaaca

SEQ ID NO: 2563592 - RNA, 22 nt, Human
gcaaagggcugaaagccauuug

SEQ ID NO: 2563593 - RNA, 16 nt, Human
gcaaaguaucccuacu

SEQ ID NO: 2563594 - RNA, 20 nt, Human
gcaaaggggucccauagagg

SEQ ID NO: 2563595 - RNA, 23 nt, Human
gcaaaggggucccauagagguga

SEQ ID NO: 2563596 - RNA, 21 nt, Human
gcaaagguuccaacuguauau

SEQ ID NO: 2563597 - RNA, 18 nt, Human
gcaaagguggcucuccag

SEQ ID NO: 2563598 - RNA, 22 nt, Human
gcaagacgcugugcugcccugc

SEQ ID NO: 2563599 - RNA, 21 nt, Human
gcaagacgcugugcugcccug

SEQ ID NO: 2563600 - RNA, 20 nt, Human
gcaagacgcugugcugcccu

SEQ ID NO: 2563601 - RNA, 14 nt, Human
gcaagacgcugugc

SEQ ID NO: 2563602 - RNA, 23 nt, Human
gcaagacgcugugcugcccugcc

SEQ ID NO: 2563603 - RNA, 15 nt, Human
gcaagaauuugaucg

SEQ ID NO: 2563604 - RNA, 18 nt, Human
gcaagacuguugcucaaa

SEQ ID NO: 2563605 - RNA, 20 nt, Human
gcaagagacucuggccucca

SEQ ID NO: 2563606 - RNA, 19 nt, Human
gcaagagaauugcuugaac

SEQ ID NO: 2563607 - RNA, 17 nt, Human
gcaagagagauguuuug

SEQ ID NO: 2563608 - RNA, 14 nt, Human
gcaagagagauguu

SEQ ID NO: 2563609 - RNA, 13 nt, Human
gcaagagccuugg

SEQ ID NO: 2563610 - RNA, 20 nt, Human
gcaagaggggguggaggggu

SEQ ID NO: 2563611 - RNA, 22 nt, Human
gcaagagccuugguguccaccu

SEQ ID NO: 2563612 - RNA, 23 nt, Human
gcaagagccuugguguccaccug

SEQ ID NO: 2563613 - RNA, 17 nt, Human
gcaagaauugaagcagg

SEQ ID NO: 2563614 - RNA, 21 nt, Human
gcaagaagaucacgcuccccg

SEQ ID NO: 2563615 - RNA, 19 nt, Human
gcaagaagaucacgcuccc

SEQ ID NO: 2563616 - RNA, 14 nt, Human
gcaagaaggaauug

SEQ ID NO: 2563617 - RNA, 14 nt, Human
gcaacagaucugga

SEQ ID NO: 2563618 - RNA, 16 nt, Human
gcaacagaucuggaac

SEQ ID NO: 2563619 - RNA, 17 nt, Human
gcaacagaucuggaacc

SEQ ID NO: 2563620 - RNA, 18 nt, Human
gcaacagaucuggaaccu

SEQ ID NO: 2563621 - RNA, 20 nt, Human
gcaacagaucuggaaccuca

SEQ ID NO: 2563622 - RNA, 17 nt, Human
gcaagaaagaaacccga

SEQ ID NO: 2563623 - RNA, 23 nt, Human
gcaaauccuaugugauuuuaacu

SEQ ID NO: 2563624 - RNA, 17 nt, Human
gcaaauccuaugugauu

SEQ ID NO: 2563625 - RNA, 19 nt, Human
gcaaauccuaugugauuuu

SEQ ID NO: 2563626 - RNA, 22 nt, Human
gcaaauccuugugggaaaagaa

SEQ ID NO: 2563627 - RNA, 17 nt, Human
gcaacacucuauauuua

SEQ ID NO: 2563628 - RNA, 12 nt, Human
gcaacagaucug

SEQ ID NO: 2563629 - RNA, 13 nt, Human
gcaacagaucugg

SEQ ID NO: 2563630 - RNA, 19 nt, Human
gcaacagagugagacccug

SEQ ID NO: 2563631 - RNA, 13 nt, Human
gcaacagaaaaaa

SEQ ID NO: 2563632 - RNA, 14 nt, Human
gcaacagagugaga

SEQ ID NO: 2563633 - RNA, 23 nt, Human
gcaaugcuggcuguuggcugggg

SEQ ID NO: 2563634 - RNA, 22 nt, Human
gcaaugcuggcuguuggcuggg

SEQ ID NO: 2563635 - RNA, 14 nt, Human
gcaaugcuggcugu

SEQ ID NO: 2563636 - RNA, 13 nt, Human
gcaaugcuggcug

SEQ ID NO: 2563637 - RNA, 23 nt, Human
gcaaugaccuuucaauaggaaaa

SEQ ID NO: 2563638 - RNA, 16 nt, Human
gcaaugaugaaugaga

SEQ ID NO: 2563639 - RNA, 17 nt, Human
gcaaugaugaaugagaa

SEQ ID NO: 2563640 - RNA, 13 nt, Human
gcaauccauguua

SEQ ID NO: 2563641 - RNA, 20 nt, Human
gcaauccauguuaguuuuua

SEQ ID NO: 2563642 - RNA, 21 nt, Human
gcaauccauguuaguuuuuac

SEQ ID NO: 2563643 - RNA, 22 nt, Human
gcaauccauguuaguuuuuacu

SEQ ID NO: 2563644 - RNA, 15 nt, Human
gcaaugccaucaucu

SEQ ID NO: 2563645 - RNA, 18 nt, Human
gcaaugccaucaucuccu

SEQ ID NO: 2563646 - RNA, 19 nt, Human
gcaaugccaucaucuccug

SEQ ID NO: 2563647 - RNA, 11 nt, Human
gcaaugcauuu

SEQ ID NO: 2563648 - RNA, 16 nt, Human
gcaaugauuacucuuu

SEQ ID NO: 2563649 - RNA, 15 nt, Human
gcaaugauguccaga

SEQ ID NO: 2563650 - RNA, 10 nt, Human
gcaauccuaa

SEQ ID NO: 2563651 - RNA, 17 nt, Human
gcaaugauguccagaag

SEQ ID NO: 2563652 - RNA, 14 nt, Human
gcaaugauuacucu

SEQ ID NO: 2563653 - RNA, 22 nt, Human
gcaaugaccuuucaauaggaaa

SEQ ID NO: 2563654 - RNA, 20 nt, Human
gcaaugaccuuucaauagga

SEQ ID NO: 2563655 - RNA, 17 nt, Human
gcaaugaccuuucaaua

SEQ ID NO: 2563656 - RNA, 15 nt, Human
gcaaugaccuuucaa

SEQ ID NO: 2563657 - RNA, 15 nt, Human
gcaaucaaaucugcu

SEQ ID NO: 2563658 - RNA, 19 nt, Human
gcaauauuuccucauguga

SEQ ID NO: 2563659 - RNA, 18 nt, Human
gcaauccacaaucugaca

SEQ ID NO: 2563660 - RNA, 17 nt, Human
gcaaucaaaucugcuuu

SEQ ID NO: 2563661 - RNA, 22 nt, Human
gcaaggcaggugccuccaggug

SEQ ID NO: 2563662 - RNA, 21 nt, Human
gcaaggcaggugccuccaggu

SEQ ID NO: 2563663 - RNA, 11 nt, Human
gcaaggcuguc

SEQ ID NO: 2563664 - RNA, 20 nt, Human
gcaaggccgcuguucaccca

SEQ ID NO: 2563665 - RNA, 21 nt, Human
gcaaggccgcuguucacccac

SEQ ID NO: 2563666 - RNA, 19 nt, Human
gcaagggccaugcugaagg

SEQ ID NO: 2563667 - RNA, 15 nt, Human
gcaagggccaugcug

SEQ ID NO: 2563668 - RNA, 14 nt, Human
gcaagggcucccca

SEQ ID NO: 2563669 - RNA, 15 nt, Human
gcaaggggaaaaucu

SEQ ID NO: 2563670 - RNA, 14 nt, Human
gcaagggugauggg

SEQ ID NO: 2563671 - RNA, 16 nt, Human
gcaaggguucccucaa

SEQ ID NO: 2563672 - RNA, 16 nt, Human
gcaaggggaaaaucuc

SEQ ID NO: 2563673 - RNA, 18 nt, Human
gcaaggguucccucaaga

SEQ ID NO: 2563674 - RNA, 20 nt, Human
gcaaggcaggugccuccagg

SEQ ID NO: 2563675 - RNA, 19 nt, Human
gcaaggcaggugccuccag

SEQ ID NO: 2563676 - RNA, 18 nt, Human
gcaaggcaggugccucca

SEQ ID NO: 2563677 - RNA, 13 nt, Human
gcaaggcaggugc

SEQ ID NO: 2563678 - RNA, 11 nt, Human
gcaaggcaggu

SEQ ID NO: 2563679 - RNA, 14 nt, Human
gcaaggcaccugca

SEQ ID NO: 2563680 - RNA, 20 nt, Human
gcaaggaggcuggcuggggc

SEQ ID NO: 2563681 - RNA, 19 nt, Human
gcaaggaggcuggcugggg

SEQ ID NO: 2563682 - RNA, 16 nt, Human
gcaaggaggcuggcug

SEQ ID NO: 2563683 - RNA, 15 nt, Human
gcaaggaggcuggcu

SEQ ID NO: 2563684 - RNA, 14 nt, Human
gcaaggaggcuggc

SEQ ID NO: 2563685 - RNA, 13 nt, Human
gcaaggaggcugg

SEQ ID NO: 2563686 - RNA, 22 nt, Human
gcaaggacuacguuaagggaag

SEQ ID NO: 2563687 - RNA, 19 nt, Human
gcaagcucccaagggaugg

SEQ ID NO: 2563688 - RNA, 21 nt, Human
gcaaggaccaggacucccucc

SEQ ID NO: 2563689 - RNA, 18 nt, Human
gcaaggagauuuacaacu

SEQ ID NO: 2563690 - RNA, 10 nt, Human
gcaagccaga

SEQ ID NO: 2563691 - RNA, 17 nt, Human
gcaagagggguggagac

SEQ ID NO: 2563692 - RNA, 23 nt, Human
gcaagaggggguggaggggugug

SEQ ID NO: 2563693 - RNA, 22 nt, Human
gcaagaggggguggaggggugu

SEQ ID NO: 2563694 - RNA, 13 nt, Human
gcaagaggggugg

SEQ ID NO: 2563695 - RNA, 20 nt, Human
gcaagcauuuauguuuauuu

SEQ ID NO: 2563696 - RNA, 11 nt, Human
gcaagccugcg

SEQ ID NO: 2563697 - RNA, 24 nt, Human
gcaagccugcguucuugugacaga

SEQ ID NO: 2563698 - RNA, 19 nt, Human
gcaagccuguaaucccagc

SEQ ID NO: 2563699 - RNA, 13 nt, Human
gcaagcucccaag

SEQ ID NO: 2563700 - RNA, 19 nt, Human
gcaagcuagaaccuggagg

SEQ ID NO: 2563701 - RNA, 20 nt, Human
gcaagccuguaaucccagcu

SEQ ID NO: 2563702 - RNA, 15 nt, Human
gcaagcccuguugac

SEQ ID NO: 2563703 - RNA, 23 nt, Human
gcaagcccuguugacacaggucu

SEQ ID NO: 2563704 - RNA, 15 nt, Human
gcaagccccugcucc

SEQ ID NO: 2563705 - RNA, 21 nt, Human
gccccaccuuuauuaaaaucu

SEQ ID NO: 2563706 - RNA, 23 nt, Human
gccccaccuuuauuaaaaucuua

SEQ ID NO: 2563707 - RNA, 23 nt, Human
gccccacccugggcccugggcug

SEQ ID NO: 2563708 - RNA, 22 nt, Human
gccccacccugggcccugggcu

SEQ ID NO: 2563709 - RNA, 24 nt, Human
gccccacccugggcccugggcugg

SEQ ID NO: 2563710 - RNA, 15 nt, Human
gccccaccuuuauua

SEQ ID NO: 2563711 - RNA, 20 nt, Human
gccccaccuuuauuaaaauc

SEQ ID NO: 2563712 - RNA, 15 nt, Human
gccccagaaggcagg

SEQ ID NO: 2563713 - RNA, 13 nt, Human
gccccacugggga

SEQ ID NO: 2563714 - RNA, 14 nt, Human
gccccacuggggaa

SEQ ID NO: 2563715 - RNA, 15 nt, Human
gccccacuggggaaa

SEQ ID NO: 2563716 - RNA, 18 nt, Human
gccccagaaggcagggaa

SEQ ID NO: 2563717 - RNA, 11 nt, Human
gccccagagac

SEQ ID NO: 2563718 - RNA, 15 nt, Human
gccccagagacucag

SEQ ID NO: 2563719 - RNA, 22 nt, Human
gccccagagcaggguguuggga

SEQ ID NO: 2563720 - RNA, 17 nt, Human
gccccagagacucagag

SEQ ID NO: 2563721 - RNA, 12 nt, Human
gccccagagcug

SEQ ID NO: 2563722 - RNA, 13 nt, Human
gccccagagcugu

SEQ ID NO: 2563723 - RNA, 14 nt, Human
gccccagagcuguu

SEQ ID NO: 2563724 - RNA, 22 nt, Human
gccccagagcuguuuauggccu

SEQ ID NO: 2563725 - RNA, 23 nt, Human
gccccagagcuguuuauggccuc

SEQ ID NO: 2563726 - RNA, 15 nt, Human
gcccaggggagcccu

SEQ ID NO: 2563727 - RNA, 19 nt, Human
gcccaggggcccacaggga

SEQ ID NO: 2563728 - RNA, 16 nt, Human
gcccaggggagcccuc

SEQ ID NO: 2563729 - RNA, 20 nt, Human
gcccaggggcccacagggaa

SEQ ID NO: 2563730 - RNA, 18 nt, Human
gcccaggggugcccccuc

SEQ ID NO: 2563731 - RNA, 17 nt, Human
gcccaggggugcccccu

SEQ ID NO: 2563732 - RNA, 15 nt, Human
gcccaggggugcccc

SEQ ID NO: 2563733 - RNA, 14 nt, Human
gcccaggggugccc

SEQ ID NO: 2563734 - RNA, 20 nt, Human
gcccaggggugcccccuccu

SEQ ID NO: 2563735 - RNA, 19 nt, Human
gcccaggggugcccccucc

SEQ ID NO: 2563736 - RNA, 22 nt, Human
gcccaggggugcccccuccucu

SEQ ID NO: 2563737 - RNA, 21 nt, Human
gcccaguuucugccucugagg

SEQ ID NO: 2563738 - RNA, 17 nt, Human
gcccaguuucugccucu

SEQ ID NO: 2563739 - RNA, 15 nt, Human
gcccaguuucugccu

SEQ ID NO: 2563740 - RNA, 17 nt, Human
gcccaguuucagggcua

SEQ ID NO: 2563741 - RNA, 16 nt, Human
gcccaguuucagggcu

SEQ ID NO: 2563742 - RNA, 14 nt, Human
gcccaggguggacu

SEQ ID NO: 2563743 - RNA, 23 nt, Human
gcccaggguggacuuagaaagca

SEQ ID NO: 2563744 - RNA, 16 nt, Human
gcccaggguuccccca

SEQ ID NO: 2563745 - RNA, 22 nt, Human
gcccaguuggguggaugccugg

SEQ ID NO: 2563746 - RNA, 20 nt, Human
gccccacccugggcccuggg

SEQ ID NO: 2563747 - RNA, 19 nt, Human
gccccacccugggcccugg

SEQ ID NO: 2563748 - RNA, 16 nt, Human
gccccacccugggccc

SEQ ID NO: 2563749 - RNA, 15 nt, Human
gccccacccugggcc

SEQ ID NO: 2563750 - RNA, 21 nt, Human
gcccaucaguguacccccgcc

SEQ ID NO: 2563751 - RNA, 20 nt, Human
gcccaucaguguacccccgc

SEQ ID NO: 2563752 - RNA, 22 nt, Human
gcccaucaguguacccccgccc

SEQ ID NO: 2563753 - RNA, 14 nt, Human
gccccacccugggc

SEQ ID NO: 2563754 - RNA, 17 nt, Human
gcccaucaauuauagaa

SEQ ID NO: 2563755 - RNA, 13 nt, Human
gcccaucacaggg

SEQ ID NO: 2563756 - RNA, 17 nt, Human
gcccaucacaggguugg

SEQ ID NO: 2563757 - RNA, 21 nt, Human
gcccaucacaggguugggccc

SEQ ID NO: 2563758 - RNA, 22 nt, Human
gcccaucacaggguugggccca

SEQ ID NO: 2563759 - RNA, 20 nt, Human
gcccaggcuggagugcagug

SEQ ID NO: 2563760 - RNA, 19 nt, Human
gcccaggcuggagugcagu

SEQ ID NO: 2563761 - RNA, 12 nt, Human
gcccaggcuggc

SEQ ID NO: 2563762 - RNA, 21 nt, Human
gcccagggacaccagccaggc

SEQ ID NO: 2563763 - RNA, 20 nt, Human
gcccagggacaccagccagg

SEQ ID NO: 2563764 - RNA, 17 nt, Human
gcccaggcuggccagcc

SEQ ID NO: 2563765 - RNA, 16 nt, Human
gcccaggcuggccagc

SEQ ID NO: 2563766 - RNA, 15 nt, Human
gcccaggcuggccag

SEQ ID NO: 2563767 - RNA, 14 nt, Human
gcccaggcuggcca

SEQ ID NO: 2563768 - RNA, 13 nt, Human
gcccaggcuggcc

SEQ ID NO: 2563769 - RNA, 23 nt, Human
gcccagggacaccagccaggcuc

SEQ ID NO: 2563770 - RNA, 22 nt, Human
gcccagggacaccagccaggcu

SEQ ID NO: 2563771 - RNA, 24 nt, Human
gcccagggacaccagccaggcucu

SEQ ID NO: 2563772 - RNA, 18 nt, Human
gcccagggagaggccaug

SEQ ID NO: 2563773 - RNA, 19 nt, Human
gcccagggagaggccauga

SEQ ID NO: 2563774 - RNA, 16 nt, Human
gcccagggagcggaaa

SEQ ID NO: 2563775 - RNA, 17 nt, Human
gcccagggagcggaaag

SEQ ID NO: 2563776 - RNA, 20 nt, Human
gcccagggagcggaaagcag

SEQ ID NO: 2563777 - RNA, 13 nt, Human
gcccagggccacu

SEQ ID NO: 2563778 - RNA, 15 nt, Human
gcccagggccacucu

SEQ ID NO: 2563779 - RNA, 18 nt, Human
gcccagggccacucugcc

SEQ ID NO: 2563780 - RNA, 21 nt, Human
gcccagggagcggaaagcagc

SEQ ID NO: 2563781 - RNA, 23 nt, Human
gcccagggagcggaaagcagcuc

SEQ ID NO: 2563782 - RNA, 14 nt, Human
gcccagggcuccug

SEQ ID NO: 2563783 - RNA, 12 nt, Human
gcccagggcucc

SEQ ID NO: 2563784 - RNA, 19 nt, Human
gcccagggccacucugccu

SEQ ID NO: 2563785 - RNA, 20 nt, Human
gcccagggccacucugccuc

SEQ ID NO: 2563786 - RNA, 18 nt, Human
gcccagggcucagccugg

SEQ ID NO: 2563787 - RNA, 16 nt, Human
gcccagggcuccugca

SEQ ID NO: 2563788 - RNA, 15 nt, Human
gcccagggcuccugc

SEQ ID NO: 2563789 - RNA, 18 nt, Human
gcccagggcuccugcacu

SEQ ID NO: 2563790 - RNA, 22 nt, Human
gcccagggccacucugccucug

SEQ ID NO: 2563791 - RNA, 23 nt, Human
gcccaggccccugccacccuggg

SEQ ID NO: 2563792 - RNA, 19 nt, Human
gcccagagaugccuccacc

SEQ ID NO: 2563793 - RNA, 20 nt, Human
gcccagagaugccuccaccg

SEQ ID NO: 2563794 - RNA, 22 nt, Human
gcccagagaugccuccaccgcu

SEQ ID NO: 2563795 - RNA, 21 nt, Human
gcccagagaugggacugggag

SEQ ID NO: 2563796 - RNA, 16 nt, Human
gcccagagcaggaagc

SEQ ID NO: 2563797 - RNA, 15 nt, Human
gcccagagcaggaag

SEQ ID NO: 2563798 - RNA, 14 nt, Human
gcccagagcaggaa

SEQ ID NO: 2563799 - RNA, 22 nt, Human
gcccagagaugggacugggagg

SEQ ID NO: 2563800 - RNA, 16 nt, Human
gcccagagaugccucc

SEQ ID NO: 2563801 - RNA, 17 nt, Human
gcccagagaugccucca

SEQ ID NO: 2563802 - RNA, 18 nt, Human
gcccagagaugccuccac

SEQ ID NO: 2563803 - RNA, 15 nt, Human
gcccagagagggugg

SEQ ID NO: 2563804 - RNA, 21 nt, Human
gcccagagaggguggugaccu

SEQ ID NO: 2563805 - RNA, 13 nt, Human
gcccaggccccuu

SEQ ID NO: 2563806 - RNA, 23 nt, Human
gcccaggccgggguggagcaugg

SEQ ID NO: 2563807 - RNA, 22 nt, Human
gcccaggccgggguggagcaug

SEQ ID NO: 2563808 - RNA, 21 nt, Human
gcccaggccgggguggagcau

SEQ ID NO: 2563809 - RNA, 18 nt, Human
gcccagagcaggaagcau

SEQ ID NO: 2563810 - RNA, 13 nt, Human
gcccaggccuccu

SEQ ID NO: 2563811 - RNA, 20 nt, Human
gcccaggcuggagugcaaug

SEQ ID NO: 2563812 - RNA, 15 nt, Human
gcccaggcuggagug

SEQ ID NO: 2563813 - RNA, 19 nt, Human
gccccaucaggacucuugu

SEQ ID NO: 2563814 - RNA, 14 nt, Human
gccccaucagugcu

SEQ ID NO: 2563815 - RNA, 14 nt, Human
gccccauccuccag

SEQ ID NO: 2563816 - RNA, 16 nt, Human
gccccauccuccagca

SEQ ID NO: 2563817 - RNA, 17 nt, Human
gccccauccuccagcag

SEQ ID NO: 2563818 - RNA, 18 nt, Human
gccccauccuccagcagg

SEQ ID NO: 2563819 - RNA, 18 nt, Human
gccccaucccaaacccuu

SEQ ID NO: 2563820 - RNA, 19 nt, Human
gccccaguuguauuuauuu

SEQ ID NO: 2563821 - RNA, 21 nt, Human
gccccauaauuuuuuuuuucc

SEQ ID NO: 2563822 - RNA, 17 nt, Human
gccccaucagcuccagc

SEQ ID NO: 2563823 - RNA, 16 nt, Human
gccccaucagcuccag

SEQ ID NO: 2563824 - RNA, 18 nt, Human
gccccaguucaaucuccc

SEQ ID NO: 2563825 - RNA, 15 nt, Human
gccccaucagcucca

SEQ ID NO: 2563826 - RNA, 14 nt, Human
gccccagugcccac

SEQ ID NO: 2563827 - RNA, 13 nt, Human
gccccagugccca

SEQ ID NO: 2563828 - RNA, 22 nt, Human
gccccagucagccucucuccca

SEQ ID NO: 2563829 - RNA, 20 nt, Human
gccccagucagccucucucc

SEQ ID NO: 2563830 - RNA, 18 nt, Human
gccccagucagccucucu

SEQ ID NO: 2563831 - RNA, 17 nt, Human
gccccagucagccucuc

SEQ ID NO: 2563832 - RNA, 19 nt, Human
gccccaguggcuguucugg

SEQ ID NO: 2563833 - RNA, 23 nt, Human
gccccagucagccucucucccag

SEQ ID NO: 2563834 - RNA, 14 nt, Human
gccccagugccaag

SEQ ID NO: 2563835 - RNA, 12 nt, Human
gccccagugccc

SEQ ID NO: 2563836 - RNA, 16 nt, Human
gccccagucagccucu

SEQ ID NO: 2563837 - RNA, 15 nt, Human
gccccagucagccuc

SEQ ID NO: 2563838 - RNA, 14 nt, Human
gccccagucagccu

SEQ ID NO: 2563839 - RNA, 13 nt, Human
gccccagucagcc

SEQ ID NO: 2563840 - RNA, 23 nt, Human
gccccagggucuucccuaccuca

SEQ ID NO: 2563841 - RNA, 15 nt, Human
gccccaggccugaaa

SEQ ID NO: 2563842 - RNA, 16 nt, Human
gccccagggcuacccu

SEQ ID NO: 2563843 - RNA, 18 nt, Human
gccccagggcuacccucc

SEQ ID NO: 2563844 - RNA, 16 nt, Human
gccccagggucuuccc

SEQ ID NO: 2563845 - RNA, 17 nt, Human
gccccagggucuucccu

SEQ ID NO: 2563846 - RNA, 20 nt, Human
gccccagggucuucccuacc

SEQ ID NO: 2563847 - RNA, 21 nt, Human
gccccagggucuucccuaccu

SEQ ID NO: 2563848 - RNA, 19 nt, Human
gccccagaucaccagcccg

SEQ ID NO: 2563849 - RNA, 18 nt, Human
gccccagaucaccagccc

SEQ ID NO: 2563850 - RNA, 20 nt, Human
gccccagauaccagccccug

SEQ ID NO: 2563851 - RNA, 19 nt, Human
gccccagauaccagccccu

SEQ ID NO: 2563852 - RNA, 17 nt, Human
gccccagauaccagccc

SEQ ID NO: 2563853 - RNA, 19 nt, Human
gccccagaggccucucucu

SEQ ID NO: 2563854 - RNA, 15 nt, Human
gccccagaggccucu

SEQ ID NO: 2563855 - RNA, 12 nt, Human
gccccagaggcc

SEQ ID NO: 2563856 - RNA, 20 nt, Human
gccccagcacagcuugaccu

SEQ ID NO: 2563857 - RNA, 13 nt, Human
gccccagcacagc

SEQ ID NO: 2563858 - RNA, 20 nt, Human
gccccagaucaccagcccgg

SEQ ID NO: 2563859 - RNA, 12 nt, Human
gccccagcacua

SEQ ID NO: 2563860 - RNA, 17 nt, Human
gccccagcacuaaagca

SEQ ID NO: 2563861 - RNA, 19 nt, Human
gccccagcacuaaagcagu

SEQ ID NO: 2563862 - RNA, 23 nt, Human
gccccagcacuaaagcaguggac

SEQ ID NO: 2563863 - RNA, 19 nt, Human
gccccagcacuaacguaaa

SEQ ID NO: 2563864 - RNA, 10 nt, Human
gccccagcca

SEQ ID NO: 2563865 - RNA, 12 nt, Human
gccccaggccug

SEQ ID NO: 2563866 - RNA, 14 nt, Human
gccccaggccucug

SEQ ID NO: 2563867 - RNA, 22 nt, Human
gccccaggcagggccaacccuu

SEQ ID NO: 2563868 - RNA, 23 nt, Human
gccccaugcuggagccuguguaa

SEQ ID NO: 2563869 - RNA, 22 nt, Human
gccccaugcuggagccugugua

SEQ ID NO: 2563870 - RNA, 21 nt, Human
gccccaugcuggagccugugu

SEQ ID NO: 2563871 - RNA, 20 nt, Human
gccccaugcuggagccugug

SEQ ID NO: 2563872 - RNA, 19 nt, Human
gccccaugcuggagccugu

SEQ ID NO: 2563873 - RNA, 18 nt, Human
gccccaugcuggagccug

SEQ ID NO: 2563874 - RNA, 17 nt, Human
gccccaugcuggagccu

SEQ ID NO: 2563875 - RNA, 16 nt, Human
gccccaugcuggagcc

SEQ ID NO: 2563876 - RNA, 22 nt, Human
gccccauccucuguacagagcc

SEQ ID NO: 2563877 - RNA, 14 nt, Human
gccccauccucugu

SEQ ID NO: 2563878 - RNA, 13 nt, Human
gccccauccucug

SEQ ID NO: 2563879 - RNA, 12 nt, Human
gccccauuccug

SEQ ID NO: 2563880 - RNA, 15 nt, Human
gccccauuccuggga

SEQ ID NO: 2563881 - RNA, 18 nt, Human
gccccaugucucucagaa

SEQ ID NO: 2563882 - RNA, 15 nt, Human
gccccaugucucuca

SEQ ID NO: 2563883 - RNA, 16 nt, Human
gccccaugucucucag

SEQ ID NO: 2563884 - RNA, 14 nt, Human
gccccauucugccu

SEQ ID NO: 2563885 - RNA, 15 nt, Human
gccccauucugccug

SEQ ID NO: 2563886 - RNA, 15 nt, Human
gcccccaaauaagaa

SEQ ID NO: 2563887 - RNA, 23 nt, Human
gccccauucuuuuguaauuuaaa

SEQ ID NO: 2563888 - RNA, 20 nt, Human
gccccauuuauccaccucca

SEQ ID NO: 2563889 - RNA, 22 nt, Human
gccccauucuuuuguaauuuaa

SEQ ID NO: 2563890 - RNA, 13 nt, Human
gcccccuggccuc

SEQ ID NO: 2563891 - RNA, 14 nt, Human
gcccccuggccucu

SEQ ID NO: 2563892 - RNA, 15 nt, Human
gcccccuggccucug

SEQ ID NO: 2563893 - RNA, 16 nt, Human
gcccccuggccucugu

SEQ ID NO: 2563894 - RNA, 13 nt, Human
gcccccugcuggc

SEQ ID NO: 2563895 - RNA, 13 nt, Human
gcccccugccccc

SEQ ID NO: 2563896 - RNA, 20 nt, Human
gcccccugcuggcucuucug

SEQ ID NO: 2563897 - RNA, 15 nt, Human
gccccaugcuggagc

SEQ ID NO: 2563898 - RNA, 15 nt, Human
gcccccugcuggcuc

SEQ ID NO: 2563899 - RNA, 17 nt, Human
gcccccuggucucuggu

SEQ ID NO: 2563900 - RNA, 16 nt, Human
gcccccuggucucugg

SEQ ID NO: 2563901 - RNA, 14 nt, Human
gcccccuggucucu

SEQ ID NO: 2563902 - RNA, 13 nt, Human
gcccccuggucuc

SEQ ID NO: 2563903 - RNA, 17 nt, Human
gcccccuggccucugug

SEQ ID NO: 2563904 - RNA, 19 nt, Human
gcccccuggccucugugcc

SEQ ID NO: 2563905 - RNA, 23 nt, Human
gcccccugguggacaguccuggg

SEQ ID NO: 2563906 - RNA, 21 nt, Human
gcccccugguggacaguccug

SEQ ID NO: 2563907 - RNA, 22 nt, Human
gcccccugguggacaguccugg

SEQ ID NO: 2563908 - RNA, 23 nt, Human
gcccccacagaaagacugagcuc

SEQ ID NO: 2563909 - RNA, 15 nt, Human
gcccccacagugcug

SEQ ID NO: 2563910 - RNA, 14 nt, Human
gcccccaagccugc

SEQ ID NO: 2563911 - RNA, 17 nt, Human
gcccccacccacuuccc

SEQ ID NO: 2563912 - RNA, 22 nt, Human
gcccccaccacggccacuggcc

SEQ ID NO: 2563913 - RNA, 21 nt, Human
gcccccaccacuaggacucug

SEQ ID NO: 2563914 - RNA, 14 nt, Human
gcccccugcccccc

SEQ ID NO: 2563915 - RNA, 22 nt, Human
gcccccaccccggggacccugu

SEQ ID NO: 2563916 - RNA, 21 nt, Human
gcccccaccccggggacccug

SEQ ID NO: 2563917 - RNA, 17 nt, Human
gcccccaccccggggac

SEQ ID NO: 2563918 - RNA, 19 nt, Human
gcccccugcccuccccucu

SEQ ID NO: 2563919 - RNA, 14 nt, Human
gcccccugcccucc

SEQ ID NO: 2563920 - RNA, 18 nt, Human
gcccccugccccccagcc

SEQ ID NO: 2563921 - RNA, 12 nt, Human
gcccccugcccu

SEQ ID NO: 2563922 - RNA, 19 nt, Human
gccccgaggacccagaccc

SEQ ID NO: 2563923 - RNA, 18 nt, Human
gccccgaggacccagacc

SEQ ID NO: 2563924 - RNA, 17 nt, Human
gccccgaggacccagac

SEQ ID NO: 2563925 - RNA, 22 nt, Human
gccccgaggacccagacccagu

SEQ ID NO: 2563926 - RNA, 21 nt, Human
gccccgaggacccagacccag

SEQ ID NO: 2563927 - RNA, 18 nt, Human
gccccucacccugccuua

SEQ ID NO: 2563928 - RNA, 14 nt, Human
gccccucagggucc

SEQ ID NO: 2563929 - RNA, 18 nt, Human
gccccgaggccuucucug

SEQ ID NO: 2563930 - RNA, 19 nt, Human
gcccccuuugggcccaggg

SEQ ID NO: 2563931 - RNA, 18 nt, Human
gcccccuuugggcccagg

SEQ ID NO: 2563932 - RNA, 21 nt, Human
gcccccuuugggcccagggac

SEQ ID NO: 2563933 - RNA, 15 nt, Human
gccccgaggccuucu

SEQ ID NO: 2563934 - RNA, 15 nt, Human
gcccccuucucccac

SEQ ID NO: 2563935 - RNA, 16 nt, Human
gcccccuucucccaca

SEQ ID NO: 2563936 - RNA, 17 nt, Human
gcccccuucucccacac

SEQ ID NO: 2563937 - RNA, 18 nt, Human
gcccccuucucccacacu

SEQ ID NO: 2563938 - RNA, 19 nt, Human
gcccccuucucccacacug

SEQ ID NO: 2563939 - RNA, 23 nt, Human
gcccccuuucagaugucuucugc

SEQ ID NO: 2563940 - RNA, 18 nt, Human
gcccccuuucagaugucu

SEQ ID NO: 2563941 - RNA, 16 nt, Human
gcccccuuucagaugu

SEQ ID NO: 2563942 - RNA, 20 nt, Human
gcccccuucucccacacugc

SEQ ID NO: 2563943 - RNA, 22 nt, Human
gcccccuucucccacacugcua

SEQ ID NO: 2563944 - RNA, 19 nt, Human
gccccucuggucgcuccug

SEQ ID NO: 2563945 - RNA, 18 nt, Human
gccccucuggucgcuccu

SEQ ID NO: 2563946 - RNA, 14 nt, Human
gccccucuggucgc

SEQ ID NO: 2563947 - RNA, 20 nt, Human
gccccucugcccagcuuggg

SEQ ID NO: 2563948 - RNA, 19 nt, Human
gccccucugcccagcuugg

SEQ ID NO: 2563949 - RNA, 16 nt, Human
gccccucccccugcca

SEQ ID NO: 2563950 - RNA, 22 nt, Human
gccccucccccaacccccaccc

SEQ ID NO: 2563951 - RNA, 23 nt, Human
gccccucccccaacccccacccc

SEQ ID NO: 2563952 - RNA, 13 nt, Human
gccccucccgccc

SEQ ID NO: 2563953 - RNA, 16 nt, Human
gccccucccaccacag

SEQ ID NO: 2563954 - RNA, 16 nt, Human
gccccucccgccccuu

SEQ ID NO: 2563955 - RNA, 18 nt, Human
gccccucagggucccugg

SEQ ID NO: 2563956 - RNA, 16 nt, Human
gccccucagggucccu

SEQ ID NO: 2563957 - RNA, 14 nt, Human
gccccucaccuggg

SEQ ID NO: 2563958 - RNA, 20 nt, Human
gccccucaccugggcaccug

SEQ ID NO: 2563959 - RNA, 17 nt, Human
gccccucaccugggcac

SEQ ID NO: 2563960 - RNA, 18 nt, Human
gccccucccacagcgcug

SEQ ID NO: 2563961 - RNA, 12 nt, Human
gccccucccacc

SEQ ID NO: 2563962 - RNA, 13 nt, Human
gccccucccacca

SEQ ID NO: 2563963 - RNA, 14 nt, Human
gccccucccaccac

SEQ ID NO: 2563964 - RNA, 15 nt, Human
gccccucccaccaca

SEQ ID NO: 2563965 - RNA, 12 nt, Human
gccccuccccca

SEQ ID NO: 2563966 - RNA, 15 nt, Human
gccccucccccaacc

SEQ ID NO: 2563967 - RNA, 21 nt, Human
gccccucccccaacccccacc

SEQ ID NO: 2563968 - RNA, 21 nt, Human
gccccugggcuuggccugcug

SEQ ID NO: 2563969 - RNA, 20 nt, Human
gccccugggcuuggccugcu

SEQ ID NO: 2563970 - RNA, 19 nt, Human
gccccugggcuuggccugc

SEQ ID NO: 2563971 - RNA, 18 nt, Human
gccccugggcuuggccug

SEQ ID NO: 2563972 - RNA, 23 nt, Human
gccccugggcuuggccugcugug

SEQ ID NO: 2563973 - RNA, 22 nt, Human
gccccugggcuuggccugcugu

SEQ ID NO: 2563974 - RNA, 16 nt, Human
gccccugagaucucug

SEQ ID NO: 2563975 - RNA, 22 nt, Human
gccccugagacaaauggaggcc

SEQ ID NO: 2563976 - RNA, 16 nt, Human
gccccugaacaagaau

SEQ ID NO: 2563977 - RNA, 19 nt, Human
gccccucuugccccccacc

SEQ ID NO: 2563978 - RNA, 21 nt, Human
gccccucuugccccccacccc

SEQ ID NO: 2563979 - RNA, 22 nt, Human
gccccucuggucgcuccugccc

SEQ ID NO: 2563980 - RNA, 20 nt, Human
gccccucuggucgcuccugc

SEQ ID NO: 2563981 - RNA, 21 nt, Human
gccccucugcccagcuugggc

SEQ ID NO: 2563982 - RNA, 13 nt, Human
gccccucuugccc

SEQ ID NO: 2563983 - RNA, 16 nt, Human
gccccucuugcccccc

SEQ ID NO: 2563984 - RNA, 18 nt, Human
gccccucuugccccccac

SEQ ID NO: 2563985 - RNA, 14 nt, Human
gccccuucugcuca

SEQ ID NO: 2563986 - RNA, 15 nt, Human
gccccuucugcucag

SEQ ID NO: 2563987 - RNA, 17 nt, Human
gccccuucugcucagcu

SEQ ID NO: 2563988 - RNA, 18 nt, Human
gccccuucugcucagcuc

SEQ ID NO: 2563989 - RNA, 17 nt, Human
gccccuguucuggcaga

SEQ ID NO: 2563990 - RNA, 21 nt, Human
gccccuggguggguggugggg

SEQ ID NO: 2563991 - RNA, 20 nt, Human
gccccugggugggugguggg

SEQ ID NO: 2563992 - RNA, 21 nt, Human
gccccugggucagucuggugg

SEQ ID NO: 2563993 - RNA, 16 nt, Human
gccccugguccugagg

SEQ ID NO: 2563994 - RNA, 17 nt, Human
gccccuguauggcacug

SEQ ID NO: 2563995 - RNA, 22 nt, Human
gccccuggguggguggugggga

SEQ ID NO: 2563996 - RNA, 18 nt, Human
gccccugucuagagaggg

SEQ ID NO: 2563997 - RNA, 19 nt, Human
gccccugucuagagaggga

SEQ ID NO: 2563998 - RNA, 13 nt, Human
gccccuguucucu

SEQ ID NO: 2563999 - RNA, 18 nt, Human
gccccuguggagacuggg

SEQ ID NO: 2564000 - RNA, 22 nt, Human
gccccuguuaccuaauuagagc

SEQ ID NO: 2564001 - RNA, 14 nt, Human
gcccgcacagagcu

SEQ ID NO: 2564002 - RNA, 22 nt, Human
gcccgagcuggugcauuacaga

SEQ ID NO: 2564003 - RNA, 21 nt, Human
gcccgaauacaaacaccugga

SEQ ID NO: 2564004 - RNA, 15 nt, Human
gcccgagcuggugca

SEQ ID NO: 2564005 - RNA, 13 nt, Human
gcccgaauacaaa

SEQ ID NO: 2564006 - RNA, 15 nt, Human
gcccgacagccuggc

SEQ ID NO: 2564007 - RNA, 14 nt, Human
gcccgacagccugg

SEQ ID NO: 2564008 - RNA, 12 nt, Human
gcccgacagccu

SEQ ID NO: 2564009 - RNA, 21 nt, Human
gccccuuuucacucccuccau

SEQ ID NO: 2564010 - RNA, 16 nt, Human
gccccuuuuuacuccc

SEQ ID NO: 2564011 - RNA, 18 nt, Human
gccccuuuuuacuccccu

SEQ ID NO: 2564012 - RNA, 19 nt, Human
gccccuuuuuacuccccuu

SEQ ID NO: 2564013 - RNA, 20 nt, Human
gccccuuuuuacuccccuug

SEQ ID NO: 2564014 - RNA, 23 nt, Human
gccccuuuuucauauguugcuca

SEQ ID NO: 2564015 - RNA, 21 nt, Human
gccccuuuuuacuccccuuga

SEQ ID NO: 2564016 - RNA, 19 nt, Human
gccccuucugcucagcucu

SEQ ID NO: 2564017 - RNA, 20 nt, Human
gccccuucugcucagcucug

SEQ ID NO: 2564018 - RNA, 23 nt, Human
gccccuucugcucagcucugggc

SEQ ID NO: 2564019 - RNA, 20 nt, Human
gccccuugcucuccccugcc

SEQ ID NO: 2564020 - RNA, 22 nt, Human
gccccuuuacggacacccccuc

SEQ ID NO: 2564021 - RNA, 20 nt, Human
gccccuuuacggacaccccc

SEQ ID NO: 2564022 - RNA, 15 nt, Human
gccccuuuacggaca

SEQ ID NO: 2564023 - RNA, 15 nt, Human
gcccugcagagggca

SEQ ID NO: 2564024 - RNA, 22 nt, Human
gcccugagcucgguggacccag

SEQ ID NO: 2564025 - RNA, 14 nt, Human
gcccugcagagggc

SEQ ID NO: 2564026 - RNA, 13 nt, Human
gcccugcagaggg

SEQ ID NO: 2564027 - RNA, 14 nt, Human
gcccugagcuuucu

SEQ ID NO: 2564028 - RNA, 15 nt, Human
gcccugagcucggug

SEQ ID NO: 2564029 - RNA, 16 nt, Human
gcccugagcucggugg

SEQ ID NO: 2564030 - RNA, 19 nt, Human
gcccugaccucccagcccu

SEQ ID NO: 2564031 - RNA, 13 nt, Human
gcccugagcucgg

SEQ ID NO: 2564032 - RNA, 14 nt, Human
gcccugacccugug

SEQ ID NO: 2564033 - RNA, 17 nt, Human
gcccugaccucccagcc

SEQ ID NO: 2564034 - RNA, 16 nt, Human
gcccugaccucccagc

SEQ ID NO: 2564035 - RNA, 15 nt, Human
gcccugaccucccag

SEQ ID NO: 2564036 - RNA, 13 nt, Human
gcccugaccuccc

SEQ ID NO: 2564037 - RNA, 12 nt, Human
gcccugaccucc

SEQ ID NO: 2564038 - RNA, 17 nt, Human
gcccugacauuggagcc

SEQ ID NO: 2564039 - RNA, 17 nt, Human
gcccugacccuguggaa

SEQ ID NO: 2564040 - RNA, 19 nt, Human
gcccucugcccacucccug

SEQ ID NO: 2564041 - RNA, 18 nt, Human
gcccucugcccacucccu

SEQ ID NO: 2564042 - RNA, 16 nt, Human
gcccucugcccacucc

SEQ ID NO: 2564043 - RNA, 13 nt, Human
gcccucugcccac

SEQ ID NO: 2564044 - RNA, 19 nt, Human
gcccuccccagagcacugg

SEQ ID NO: 2564045 - RNA, 17 nt, Human
gcccuccccagagcacu

SEQ ID NO: 2564046 - RNA, 17 nt, Human
gcccuccccaucccaug

SEQ ID NO: 2564047 - RNA, 21 nt, Human
gcccucccugccccucccuuc

SEQ ID NO: 2564048 - RNA, 18 nt, Human
gcccucccuguuccccag

SEQ ID NO: 2564049 - RNA, 20 nt, Human
gcccucccuguuccccagag

SEQ ID NO: 2564050 - RNA, 14 nt, Human
gcccucccuguccu

SEQ ID NO: 2564051 - RNA, 16 nt, Human
gcccucccuguccucc

SEQ ID NO: 2564052 - RNA, 18 nt, Human
gcccucccuguccuccuc

SEQ ID NO: 2564053 - RNA, 21 nt, Human
gcccucccuguccuccucgga

SEQ ID NO: 2564054 - RNA, 22 nt, Human
gcccucccuguuccccagagaa

SEQ ID NO: 2564055 - RNA, 21 nt, Human
gcccucccuuggaaaccugcc

SEQ ID NO: 2564056 - RNA, 19 nt, Human
gcccucccuuggaaaccug

SEQ ID NO: 2564057 - RNA, 21 nt, Human
gcccucccuguuccccagaga

SEQ ID NO: 2564058 - RNA, 22 nt, Human
gcccuccgacagcccccucugc

SEQ ID NO: 2564059 - RNA, 18 nt, Human
gcccuccgacagcccccu

SEQ ID NO: 2564060 - RNA, 14 nt, Human
gcccuccgacagcc

SEQ ID NO: 2564061 - RNA, 23 nt, Human
gcccucccuuggaaaccugcccu

SEQ ID NO: 2564062 - RNA, 23 nt, Human
gcccuccgccauucucaagcccu

SEQ ID NO: 2564063 - RNA, 17 nt, Human
gcccuccuacccugcgc

SEQ ID NO: 2564064 - RNA, 20 nt, Human
gcccgggaaggucaccagca

SEQ ID NO: 2564065 - RNA, 18 nt, Human
gcccgggaaggucaccag

SEQ ID NO: 2564066 - RNA, 14 nt, Human
gcccggcugguuuu

SEQ ID NO: 2564067 - RNA, 15 nt, Human
gcccgcacccccacc

SEQ ID NO: 2564068 - RNA, 16 nt, Human
gcccgcacccccaccc

SEQ ID NO: 2564069 - RNA, 17 nt, Human
gcccgcacccccacccu

SEQ ID NO: 2564070 - RNA, 21 nt, Human
gcccgcacccccacccuuugg

SEQ ID NO: 2564071 - RNA, 19 nt, Human
gcccgcacccccacccuuu

SEQ ID NO: 2564072 - RNA, 21 nt, Human
gcccuccaagaccuucuccuu

SEQ ID NO: 2564073 - RNA, 19 nt, Human
gcccuccaagaccuucucc

SEQ ID NO: 2564074 - RNA, 19 nt, Human
gcccgggagcugcugcccu

SEQ ID NO: 2564075 - RNA, 14 nt, Human
gcccgggagcugcu

SEQ ID NO: 2564076 - RNA, 23 nt, Human
gcccgggaaggucaccagcacca

SEQ ID NO: 2564077 - RNA, 18 nt, Human
gcccgggcgcggccagcc

SEQ ID NO: 2564078 - RNA, 19 nt, Human
gcccucauggccccucuga

SEQ ID NO: 2564079 - RNA, 18 nt, Human
gcccucauggccccucug

SEQ ID NO: 2564080 - RNA, 22 nt, Human
gcccucauggccccucugaccu

SEQ ID NO: 2564081 - RNA, 23 nt, Human
gcccuccaagaccuucuccuuca

SEQ ID NO: 2564082 - RNA, 22 nt, Human
gcccuccaagaccuucuccuuc

SEQ ID NO: 2564083 - RNA, 14 nt, Human
gcccuccaaaagca

SEQ ID NO: 2564084 - RNA, 19 nt, Human
gcccgggcgcggccagccc

SEQ ID NO: 2564085 - RNA, 15 nt, Human
gcccuccaaaagcac

SEQ ID NO: 2564086 - RNA, 14 nt, Human
gcccuccacagccg

SEQ ID NO: 2564087 - RNA, 20 nt, Human
gcccuccacagccgcagccu

SEQ ID NO: 2564088 - RNA, 17 nt, Human
gcccuccacaucccuga

SEQ ID NO: 2564089 - RNA, 23 nt, Human
gcccuccacagccgcagccuccc

SEQ ID NO: 2564090 - RNA, 17 nt, Human
gcccuccagcucuuucc

SEQ ID NO: 2564091 - RNA, 21 nt, Human
gcccuccagcucuuuccuccu

SEQ ID NO: 2564092 - RNA, 20 nt, Human
gcccuccaucuaaacugccc

SEQ ID NO: 2564093 - RNA, 21 nt, Human
gcccuccacgccggcucuucc

SEQ ID NO: 2564094 - RNA, 21 nt, Human
gcccuccaucuaaacugcccc

SEQ ID NO: 2564095 - RNA, 16 nt, Human
gcccuccaucccgaca

SEQ ID NO: 2564096 - RNA, 22 nt, Human
gcccuccaucccgacauggacc

SEQ ID NO: 2564097 - RNA, 16 nt, Human
gcccuccccagagcac

SEQ ID NO: 2564098 - RNA, 15 nt, Human
gcccuccccagagca

SEQ ID NO: 2564099 - RNA, 13 nt, Human
gcccuccccagag

SEQ ID NO: 2564100 - RNA, 14 nt, Human
gcccucccaucccg

SEQ ID NO: 2564101 - RNA, 12 nt, Human
gcccucccaggc

SEQ ID NO: 2564102 - RNA, 21 nt, Human
gcccucccaggcucucaacag

SEQ ID NO: 2564103 - RNA, 17 nt, Human
gcccaccuuggcucaag

SEQ ID NO: 2564104 - RNA, 16 nt, Human
gcccaccuuggcucaa

SEQ ID NO: 2564105 - RNA, 15 nt, Human
gcccaccuuggcuca

SEQ ID NO: 2564106 - RNA, 13 nt, Human
gcccaccuuggcu

SEQ ID NO: 2564107 - RNA, 14 nt, Human
gcccacuucugcca

SEQ ID NO: 2564108 - RNA, 19 nt, Human
gcccagaaaaggacagaaa

SEQ ID NO: 2564109 - RNA, 16 nt, Human
gcccagaauaaguuau

SEQ ID NO: 2564110 - RNA, 16 nt, Human
gcccagaaaaggacag

SEQ ID NO: 2564111 - RNA, 22 nt, Human
gcccacuugucccacuaucugg

SEQ ID NO: 2564112 - RNA, 22 nt, Human
gcccaccugucaaacaaagcca

SEQ ID NO: 2564113 - RNA, 23 nt, Human
gcccagaauaaguuauugcaguu

SEQ ID NO: 2564114 - RNA, 20 nt, Human
gcccagaauaaguuauugca

SEQ ID NO: 2564115 - RNA, 16 nt, Human
gcccagaaugaggcug

SEQ ID NO: 2564116 - RNA, 17 nt, Human
gcccagaaugaggcugc

SEQ ID NO: 2564117 - RNA, 18 nt, Human
gcccagaaaaggacagaa

SEQ ID NO: 2564118 - RNA, 24 nt, Human
gcccaccuggccucugcacucccc

SEQ ID NO: 2564119 - RNA, 21 nt, Human
gcccaccuggccucugcacuc

SEQ ID NO: 2564120 - RNA, 20 nt, Human
gcccaccuggccucugcacu

SEQ ID NO: 2564121 - RNA, 17 nt, Human
gcccaccuggccucugc

SEQ ID NO: 2564122 - RNA, 16 nt, Human
gcccaccuggccucug

SEQ ID NO: 2564123 - RNA, 15 nt, Human
gcccaccuggccucu

SEQ ID NO: 2564124 - RNA, 14 nt, Human
gcccaccccccuca

SEQ ID NO: 2564125 - RNA, 20 nt, Human
gcccaccuggccaccugagg

SEQ ID NO: 2564126 - RNA, 19 nt, Human
gcccaccuggccaccugag

SEQ ID NO: 2564127 - RNA, 18 nt, Human
gcccaccuggccaccuga

SEQ ID NO: 2564128 - RNA, 17 nt, Human
gcccaccuggccaccug

SEQ ID NO: 2564129 - RNA, 16 nt, Human
gcccaccuggccaccu

SEQ ID NO: 2564130 - RNA, 14 nt, Human
gcccaccuggccac

SEQ ID NO: 2564131 - RNA, 13 nt, Human
gcccaccuggcca

SEQ ID NO: 2564132 - RNA, 13 nt, Human
gcccaccccccuc

SEQ ID NO: 2564133 - RNA, 14 nt, Human
gccaugguaccccc

SEQ ID NO: 2564134 - RNA, 19 nt, Human
gccaugguacccccuucug

SEQ ID NO: 2564135 - RNA, 17 nt, Human
gccaugguacccccuuc

SEQ ID NO: 2564136 - RNA, 16 nt, Human
gccaugguacccccuu

SEQ ID NO: 2564137 - RNA, 24 nt, Human
gcccaaccugcucuccucuugcca

SEQ ID NO: 2564138 - RNA, 22 nt, Human
gcccaagaauagaugcugacug

SEQ ID NO: 2564139 - RNA, 21 nt, Human
gcccaagaauagaugcugacu

SEQ ID NO: 2564140 - RNA, 19 nt, Human
gcccaagacagaugcccca

SEQ ID NO: 2564141 - RNA, 20 nt, Human
gcccaagacagaugccccag

SEQ ID NO: 2564142 - RNA, 21 nt, Human
gcccaagacagaugccccaga

SEQ ID NO: 2564143 - RNA, 23 nt, Human
gcccaagacagaugccccagagc

SEQ ID NO: 2564144 - RNA, 16 nt, Human
gccaugggccuccugu

SEQ ID NO: 2564145 - RNA, 15 nt, Human
gccaugggccuccug

SEQ ID NO: 2564146 - RNA, 19 nt, Human
gccaugggcacugugggua

SEQ ID NO: 2564147 - RNA, 24 nt, Human
gccaugcuccuggcccacugcauc

SEQ ID NO: 2564148 - RNA, 23 nt, Human
gcccaagccagaggcuggguuca

SEQ ID NO: 2564149 - RNA, 21 nt, Human
gcccaagccagaggcuggguu

SEQ ID NO: 2564150 - RNA, 18 nt, Human
gcccaagccagaggcugg

SEQ ID NO: 2564151 - RNA, 17 nt, Human
gcccaagccagaggcug

SEQ ID NO: 2564152 - RNA, 16 nt, Human
gcccaagccagaggcu

SEQ ID NO: 2564153 - RNA, 13 nt, Human
gcccaagaugcuu

SEQ ID NO: 2564154 - RNA, 15 nt, Human
gcccaagccagaggc

SEQ ID NO: 2564155 - RNA, 18 nt, Human
gcccaaggcggccccucc

SEQ ID NO: 2564156 - RNA, 17 nt, Human
gcccaaggcggccccuc

SEQ ID NO: 2564157 - RNA, 23 nt, Human
gcccaagggaaagaaaaggaagg

SEQ ID NO: 2564158 - RNA, 15 nt, Human
gcccaagggaucugg

SEQ ID NO: 2564159 - RNA, 18 nt, Human
gcccaagggaucuggucc

SEQ ID NO: 2564160 - RNA, 19 nt, Human
gcccaagggaucugguccu

SEQ ID NO: 2564161 - RNA, 16 nt, Human
gcccaaggcggccccu

SEQ ID NO: 2564162 - RNA, 15 nt, Human
gcccaaggcggcccc

SEQ ID NO: 2564163 - RNA, 12 nt, Human
gcccaagcucuu

SEQ ID NO: 2564164 - RNA, 20 nt, Human
gcccaagcccgacuugcugu

SEQ ID NO: 2564165 - RNA, 20 nt, Human
gcccaagcucagaaggcucu

SEQ ID NO: 2564166 - RNA, 17 nt, Human
gcccaccaacaucccau

SEQ ID NO: 2564167 - RNA, 16 nt, Human
gcccacauuggaccca

SEQ ID NO: 2564168 - RNA, 13 nt, Human
gcccaccccaccc

SEQ ID NO: 2564169 - RNA, 14 nt, Human
gcccaccagugacu

SEQ ID NO: 2564170 - RNA, 14 nt, Human
gcccaccagagcug

SEQ ID NO: 2564171 - RNA, 13 nt, Human
gcccaccagagcu

SEQ ID NO: 2564172 - RNA, 21 nt, Human
gcccaccaacaucccauugcc

SEQ ID NO: 2564173 - RNA, 14 nt, Human
gcccacaucccagg

SEQ ID NO: 2564174 - RNA, 15 nt, Human
gcccacaucccaggc

SEQ ID NO: 2564175 - RNA, 20 nt, Human
gcccacauagugaugguucc

SEQ ID NO: 2564176 - RNA, 13 nt, Human
gcccaagucccug

SEQ ID NO: 2564177 - RNA, 19 nt, Human
gcccaaguccaaauguuua

SEQ ID NO: 2564178 - RNA, 16 nt, Human
gcccaaguccaaaugu

SEQ ID NO: 2564179 - RNA, 15 nt, Human
gcccaaguccaaaug

SEQ ID NO: 2564180 - RNA, 21 nt, Human
gccaguaagggaaauagaaaa

SEQ ID NO: 2564181 - RNA, 22 nt, Human
gccaguaacgcgucuuccugag

SEQ ID NO: 2564182 - RNA, 21 nt, Human
gccaguaacgcgucuuccuga

SEQ ID NO: 2564183 - RNA, 20 nt, Human
gccaguaacgcgucuuccug

SEQ ID NO: 2564184 - RNA, 23 nt, Human
gccaguaucuauauauguguaug

SEQ ID NO: 2564185 - RNA, 22 nt, Human
gccaguaucuauauauguguau

SEQ ID NO: 2564186 - RNA, 23 nt, Human
gccaguaagggaaauagaaaaac

SEQ ID NO: 2564187 - RNA, 21 nt, Human
gccaguaucuauauaugugua

SEQ ID NO: 2564188 - RNA, 21 nt, Human
gccaguccaggcugccguggg

SEQ ID NO: 2564189 - RNA, 20 nt, Human
gccaguccaggcugccgugg

SEQ ID NO: 2564190 - RNA, 14 nt, Human
gccaguccaggcug

SEQ ID NO: 2564191 - RNA, 13 nt, Human
gccaguccaggcu

SEQ ID NO: 2564192 - RNA, 21 nt, Human
gccagucaccccggccaccug

SEQ ID NO: 2564193 - RNA, 16 nt, Human
gccagucccugaggca

SEQ ID NO: 2564194 - RNA, 22 nt, Human
gccagucccugaggcagguccc

SEQ ID NO: 2564195 - RNA, 16 nt, Human
gccaguccuagcugca

SEQ ID NO: 2564196 - RNA, 16 nt, Human
gccagucccaggggca

SEQ ID NO: 2564197 - RNA, 13 nt, Human
gccagucccaggg

SEQ ID NO: 2564198 - RNA, 22 nt, Human
gccaguccuagcugcacagggc

SEQ ID NO: 2564199 - RNA, 19 nt, Human
gccaguccuagcugcacag

SEQ ID NO: 2564200 - RNA, 14 nt, Human
gccaguccugccug

SEQ ID NO: 2564201 - RNA, 19 nt, Human
gccaucauaggaagggacc

SEQ ID NO: 2564202 - RNA, 23 nt, Human
gccaucaucuccugccuuccucc

SEQ ID NO: 2564203 - RNA, 16 nt, Human
gccaguccugccuggc

SEQ ID NO: 2564204 - RNA, 17 nt, Human
gccaguccugccuggcc

SEQ ID NO: 2564205 - RNA, 23 nt, Human
gccaguaaaugggggugcauuug

SEQ ID NO: 2564206 - RNA, 19 nt, Human
gccaguaacgcgucuuccu

SEQ ID NO: 2564207 - RNA, 12 nt, Human
gccaguaaaugg

SEQ ID NO: 2564208 - RNA, 18 nt, Human
gccaggcugaccacagca

SEQ ID NO: 2564209 - RNA, 19 nt, Human
gccaggcugaccacagcac

SEQ ID NO: 2564210 - RNA, 21 nt, Human
gccaggcucugugcugacccu

SEQ ID NO: 2564211 - RNA, 20 nt, Human
gccaggcugaccacagcaca

SEQ ID NO: 2564212 - RNA, 15 nt, Human
gccaggcuggucuca

SEQ ID NO: 2564213 - RNA, 20 nt, Human
gccaggcucugugcugaccc

SEQ ID NO: 2564214 - RNA, 16 nt, Human
gccaggcucugugcug

SEQ ID NO: 2564215 - RNA, 15 nt, Human
gccaggcugaccaca

SEQ ID NO: 2564216 - RNA, 16 nt, Human
gccaggcugaccacag

SEQ ID NO: 2564217 - RNA, 17 nt, Human
gccaggcugaccacagc

SEQ ID NO: 2564218 - RNA, 17 nt, Human
gccaggcugggucgccc

SEQ ID NO: 2564219 - RNA, 23 nt, Human
gccaggcugggucgcccuggacu

SEQ ID NO: 2564220 - RNA, 13 nt, Human
gccaggcuggucu

SEQ ID NO: 2564221 - RNA, 17 nt, Human
gccaugauggcaacaga

SEQ ID NO: 2564222 - RNA, 19 nt, Human
gccaugauggcaacagauc

SEQ ID NO: 2564223 - RNA, 21 nt, Human
gccaugauggcaacagaucug

SEQ ID NO: 2564224 - RNA, 23 nt, Human
gccaugauggcaacagaucugga

SEQ ID NO: 2564225 - RNA, 22 nt, Human
gccaugauggaaauauuuauuu

SEQ ID NO: 2564226 - RNA, 20 nt, Human
gccaugaggccucaguggac

SEQ ID NO: 2564227 - RNA, 16 nt, Human
gccaugaggccucagu

SEQ ID NO: 2564228 - RNA, 19 nt, Human
gccaugaggccucagugga

SEQ ID NO: 2564229 - RNA, 20 nt, Human
gccaugaggaacaaggcaag

SEQ ID NO: 2564230 - RNA, 20 nt, Human
gccaugaggaguugcuguuu

SEQ ID NO: 2564231 - RNA, 15 nt, Human
gccaugauguggagu

SEQ ID NO: 2564232 - RNA, 22 nt, Human
gccaugauggugcugaccucug

SEQ ID NO: 2564233 - RNA, 21 nt, Human
gccaugauggugcugaccucu

SEQ ID NO: 2564234 - RNA, 22 nt, Human
gccaugauguggaguggggcag

SEQ ID NO: 2564235 - RNA, 17 nt, Human
gccaugauguggagugg

SEQ ID NO: 2564236 - RNA, 20 nt, Human
gccaugauucgcccaaagcc

SEQ ID NO: 2564237 - RNA, 14 nt, Human
gccaugccucagcc

SEQ ID NO: 2564238 - RNA, 13 nt, Human
gccaugccucagc

SEQ ID NO: 2564239 - RNA, 14 nt, Human
gccaugcuccuggc

SEQ ID NO: 2564240 - RNA, 20 nt, Human
gccaugcgcccccuccgccc

SEQ ID NO: 2564241 - RNA, 21 nt, Human
gccaugccucagcccugaccc

SEQ ID NO: 2564242 - RNA, 17 nt, Human
gccaugccucagcccug

SEQ ID NO: 2564243 - RNA, 21 nt, Human
gccaucccucgugguccccaa

SEQ ID NO: 2564244 - RNA, 14 nt, Human
gccaucccucgugg

SEQ ID NO: 2564245 - RNA, 21 nt, Human
gccauccaaauaagaaaccua

SEQ ID NO: 2564246 - RNA, 19 nt, Human
gccaucaucaguggagcca

SEQ ID NO: 2564247 - RNA, 20 nt, Human
gccauccaaauaagaaaccu

SEQ ID NO: 2564248 - RNA, 17 nt, Human
gccaucauguuuacaga

SEQ ID NO: 2564249 - RNA, 21 nt, Human
gccaucauguuuacagaggac

SEQ ID NO: 2564250 - RNA, 14 nt, Human
gccauccagguuca

SEQ ID NO: 2564251 - RNA, 23 nt, Human
gccauccucaaacacugcaggca

SEQ ID NO: 2564252 - RNA, 21 nt, Human
gccauccucaaacacugcagg

SEQ ID NO: 2564253 - RNA, 20 nt, Human
gccauccucaaacacugcag

SEQ ID NO: 2564254 - RNA, 19 nt, Human
gccauccucaaacacugca

SEQ ID NO: 2564255 - RNA, 18 nt, Human
gccauccucaaacacugc

SEQ ID NO: 2564256 - RNA, 22 nt, Human
gccauccggcccccagagcgcc

SEQ ID NO: 2564257 - RNA, 19 nt, Human
gccauccggcccccagagc

SEQ ID NO: 2564258 - RNA, 22 nt, Human
gccaucuugguaaauuucccca

SEQ ID NO: 2564259 - RNA, 16 nt, Human
gccaucuugguaaauu

SEQ ID NO: 2564260 - RNA, 15 nt, Human
gccaucuugguaaau

SEQ ID NO: 2564261 - RNA, 14 nt, Human
gccaucuugguaaa

SEQ ID NO: 2564262 - RNA, 14 nt, Human
gccaucuucccagc

SEQ ID NO: 2564263 - RNA, 17 nt, Human
gccaucuuccagguggg

SEQ ID NO: 2564264 - RNA, 17 nt, Human
gccaucugugggcacgc

SEQ ID NO: 2564265 - RNA, 12 nt, Human
gccaucuguggg

SEQ ID NO: 2564266 - RNA, 13 nt, Human
gccaucugugggc

SEQ ID NO: 2564267 - RNA, 15 nt, Human
gccaucugugggcac

SEQ ID NO: 2564268 - RNA, 21 nt, Human
gccaucugggcuccuccaggg

SEQ ID NO: 2564269 - RNA, 21 nt, Human
gccagagacacaagccuucgg

SEQ ID NO: 2564270 - RNA, 22 nt, Human
gccacugcaccgggccacagag

SEQ ID NO: 2564271 - RNA, 22 nt, Human
gccagagacacaagccuucggc

SEQ ID NO: 2564272 - RNA, 20 nt, Human
gccagagacggaagccuuuu

SEQ ID NO: 2564273 - RNA, 22 nt, Human
gccacucccggcacuccaugcu

SEQ ID NO: 2564274 - RNA, 21 nt, Human
gccacuccucugacucagggc

SEQ ID NO: 2564275 - RNA, 19 nt, Human
gccacugcaccgggccaca

SEQ ID NO: 2564276 - RNA, 13 nt, Human
gccacuccucuga

SEQ ID NO: 2564277 - RNA, 14 nt, Human
gccacuccucugac

SEQ ID NO: 2564278 - RNA, 15 nt, Human
gccacuccucugacu

SEQ ID NO: 2564279 - RNA, 17 nt, Human
gccacuccucugacuca

SEQ ID NO: 2564280 - RNA, 21 nt, Human
gccacuccgagaggugggcca

SEQ ID NO: 2564281 - RNA, 22 nt, Human
gccacuccagaccccuggcuuu

SEQ ID NO: 2564282 - RNA, 21 nt, Human
gccacugcaccgggccacaga

SEQ ID NO: 2564283 - RNA, 20 nt, Human
gccacugcaccgggccacag

SEQ ID NO: 2564284 - RNA, 20 nt, Human
gccaaggccaaaggaagcac

SEQ ID NO: 2564285 - RNA, 21 nt, Human
gccaacacgcaccugccucag

SEQ ID NO: 2564286 - RNA, 23 nt, Human
gccaacacgcaccugccucagga

SEQ ID NO: 2564287 - RNA, 20 nt, Human
gccaacacucaagaagcagg

SEQ ID NO: 2564288 - RNA, 17 nt, Human
gccaacagaagcuucca

SEQ ID NO: 2564289 - RNA, 17 nt, Human
gccaacacgcaccugcc

SEQ ID NO: 2564290 - RNA, 20 nt, Human
gccaacacgcaccugccuca

SEQ ID NO: 2564291 - RNA, 16 nt, Human
gccaacaacuucucca

SEQ ID NO: 2564292 - RNA, 18 nt, Human
gccaacaaagcuguugau

SEQ ID NO: 2564293 - RNA, 14 nt, Human
gccaacaccaggga

SEQ ID NO: 2564294 - RNA, 19 nt, Human
gccaaauuauuuguguaau

SEQ ID NO: 2564295 - RNA, 18 nt, Human
gccaaauuauuuguguaa

SEQ ID NO: 2564296 - RNA, 15 nt, Human
gccaacaaagcuguu

SEQ ID NO: 2564297 - RNA, 13 nt, Human
gccaacaaagcug

SEQ ID NO: 2564298 - RNA, 23 nt, Human
gccaaauuauuuguguaauagaa

SEQ ID NO: 2564299 - RNA, 14 nt, Human
gccaaauuuuggcc

SEQ ID NO: 2564300 - RNA, 24 nt, Human
gccaaggccaaaggaagcacaugc

SEQ ID NO: 2564301 - RNA, 20 nt, Human
gccaaggccagaguggccug

SEQ ID NO: 2564302 - RNA, 21 nt, Human
gccaaggccagaguggccugg

SEQ ID NO: 2564303 - RNA, 20 nt, Human
gccacuccagaccccuggcu

SEQ ID NO: 2564304 - RNA, 21 nt, Human
gccacuccagaccccuggcuu

SEQ ID NO: 2564305 - RNA, 20 nt, Human
gccaaggccgaagcucuggc

SEQ ID NO: 2564306 - RNA, 19 nt, Human
gccaaggccgaagcucugg

SEQ ID NO: 2564307 - RNA, 18 nt, Human
gccaaggccgaagcucug

SEQ ID NO: 2564308 - RNA, 16 nt, Human
gccaacacucaagaag

SEQ ID NO: 2564309 - RNA, 15 nt, Human
gccaaggccuucucc

SEQ ID NO: 2564310 - RNA, 14 nt, Human
gccaaggccuucuc

SEQ ID NO: 2564311 - RNA, 18 nt, Human
gccaaggccuucuccucc

SEQ ID NO: 2564312 - RNA, 13 nt, Human
gccagauuucacu

SEQ ID NO: 2564313 - RNA, 24 nt, Human
gccagauucuuuccugaggcuggg

SEQ ID NO: 2564314 - RNA, 20 nt, Human
gccagauucuuuccugaggc

SEQ ID NO: 2564315 - RNA, 15 nt, Human
gccagaugcaccagc

SEQ ID NO: 2564316 - RNA, 19 nt, Human
gccagauucuuuccugagg

SEQ ID NO: 2564317 - RNA, 22 nt, Human
gccagccgagauagccaaggcc

SEQ ID NO: 2564318 - RNA, 14 nt, Human
gccagccuccucug

SEQ ID NO: 2564319 - RNA, 13 nt, Human
gccagccuccucu

SEQ ID NO: 2564320 - RNA, 12 nt, Human
gccagccuccuc

SEQ ID NO: 2564321 - RNA, 21 nt, Human
gccagccuccgagagggagag

SEQ ID NO: 2564322 - RNA, 20 nt, Human
gccagccuccgagagggaga

SEQ ID NO: 2564323 - RNA, 18 nt, Human
gccagccuccgagaggga

SEQ ID NO: 2564324 - RNA, 21 nt, Human
gccagccgugaugcucaggcu

SEQ ID NO: 2564325 - RNA, 20 nt, Human
gccagccgugaugcucaggc

SEQ ID NO: 2564326 - RNA, 18 nt, Human
gccagccgugaugcucag

SEQ ID NO: 2564327 - RNA, 15 nt, Human
gccagauccagccug

SEQ ID NO: 2564328 - RNA, 16 nt, Human
gccagauccagccugg

SEQ ID NO: 2564329 - RNA, 17 nt, Human
gccagauccagccuggg

SEQ ID NO: 2564330 - RNA, 20 nt, Human
gccagauccagccugggguc

SEQ ID NO: 2564331 - RNA, 13 nt, Human
gccagaggcuggg

SEQ ID NO: 2564332 - RNA, 12 nt, Human
gccagaggcugg

SEQ ID NO: 2564333 - RNA, 17 nt, Human
gccagagggagugacag

SEQ ID NO: 2564334 - RNA, 14 nt, Human
gccagaugcaccag

SEQ ID NO: 2564335 - RNA, 15 nt, Human
gccagauccucuugg

SEQ ID NO: 2564336 - RNA, 16 nt, Human
gccagauccucuuggu

SEQ ID NO: 2564337 - RNA, 19 nt, Human
gccagaggcccccagccca

SEQ ID NO: 2564338 - RNA, 18 nt, Human
gccagaggcccccagccc

SEQ ID NO: 2564339 - RNA, 16 nt, Human
gccagaggcccccagc

SEQ ID NO: 2564340 - RNA, 15 nt, Human
gccagaggcccccag

SEQ ID NO: 2564341 - RNA, 23 nt, Human
gccagaggcccccagcccagggc

SEQ ID NO: 2564342 - RNA, 20 nt, Human
gccagaggcccccagcccag

SEQ ID NO: 2564343 - RNA, 24 nt, Human
gccagaggcccccagcccagggcu

SEQ ID NO: 2564344 - RNA, 22 nt, Human
gccagaggcucguugacuggcu

SEQ ID NO: 2564345 - RNA, 16 nt, Human
gccagagauccaaaag

SEQ ID NO: 2564346 - RNA, 20 nt, Human
gccagagauccaaaagaagc

SEQ ID NO: 2564347 - RNA, 13 nt, Human
gccagagauccaa

SEQ ID NO: 2564348 - RNA, 21 nt, Human
gccagagagccuggugcugcu

SEQ ID NO: 2564349 - RNA, 21 nt, Human
gccagagauccaaaagaagcc

SEQ ID NO: 2564350 - RNA, 14 nt, Human
gccagaggccccca

SEQ ID NO: 2564351 - RNA, 17 nt, Human
gccaggaauuucccagg

SEQ ID NO: 2564352 - RNA, 18 nt, Human
gccaggaauuucccagga

SEQ ID NO: 2564353 - RNA, 19 nt, Human
gccaggaauuucccaggac

SEQ ID NO: 2564354 - RNA, 20 nt, Human
gccaggaauuucccaggacc

SEQ ID NO: 2564355 - RNA, 15 nt, Human
gccaggaagccagca

SEQ ID NO: 2564356 - RNA, 17 nt, Human
gccaggacugagccccg

SEQ ID NO: 2564357 - RNA, 16 nt, Human
gccaggacugagcccc

SEQ ID NO: 2564358 - RNA, 15 nt, Human
gccaggacugagccc

SEQ ID NO: 2564359 - RNA, 22 nt, Human
gccaggacuccccaggccaggc

SEQ ID NO: 2564360 - RNA, 21 nt, Human
gccaggacuccccaggccagg

SEQ ID NO: 2564361 - RNA, 19 nt, Human
gccaggacuccccaggcca

SEQ ID NO: 2564362 - RNA, 17 nt, Human
gccaggacuccccaggc

SEQ ID NO: 2564363 - RNA, 23 nt, Human
gccaggaauuucccaggacccug

SEQ ID NO: 2564364 - RNA, 21 nt, Human
gccaggaauuucccaggaccc

SEQ ID NO: 2564365 - RNA, 22 nt, Human
gccaggaauuucccaggacccu

SEQ ID NO: 2564366 - RNA, 14 nt, Human
gccaggacaggccc

SEQ ID NO: 2564367 - RNA, 15 nt, Human
gccaggacaggcccg

SEQ ID NO: 2564368 - RNA, 22 nt, Human
gccaggaccagucaaccugggc

SEQ ID NO: 2564369 - RNA, 15 nt, Human
gccaggacuccccag

SEQ ID NO: 2564370 - RNA, 22 nt, Human
gccaggagcaaauguuucugca

SEQ ID NO: 2564371 - RNA, 20 nt, Human
gccaggagcaaauguuucug

SEQ ID NO: 2564372 - RNA, 15 nt, Human
gccaggagcaaaugu

SEQ ID NO: 2564373 - RNA, 19 nt, Human
gccaggacugagccccgca

SEQ ID NO: 2564374 - RNA, 16 nt, Human
gccaggagccuccugc

SEQ ID NO: 2564375 - RNA, 14 nt, Human
gccaggagccuccu

SEQ ID NO: 2564376 - RNA, 20 nt, Human
gccaggagccuccugcccuu

SEQ ID NO: 2564377 - RNA, 19 nt, Human
gccaggagccuccugcccu

SEQ ID NO: 2564378 - RNA, 16 nt, Human
gccaggcgggcucaag

SEQ ID NO: 2564379 - RNA, 16 nt, Human
gccaggcgagaugggg

SEQ ID NO: 2564380 - RNA, 21 nt, Human
gccaggccugggucugugucu

SEQ ID NO: 2564381 - RNA, 12 nt, Human
gccaggcucugu

SEQ ID NO: 2564382 - RNA, 20 nt, Human
gccaggcuccuuccugucuu

SEQ ID NO: 2564383 - RNA, 21 nt, Human
gccaggcuccuuccugucuuc

SEQ ID NO: 2564384 - RNA, 14 nt, Human
gccaggcuccuucc

SEQ ID NO: 2564385 - RNA, 15 nt, Human
gccaggcuccuuccu

SEQ ID NO: 2564386 - RNA, 18 nt, Human
gccaggcuccuuccuguc

SEQ ID NO: 2564387 - RNA, 19 nt, Human
gccaggcuccuuccugucu

SEQ ID NO: 2564388 - RNA, 14 nt, Human
gccaggaagccagc

SEQ ID NO: 2564389 - RNA, 13 nt, Human
gccaggaagccag

SEQ ID NO: 2564390 - RNA, 12 nt, Human
gccaggaagcca

SEQ ID NO: 2564391 - RNA, 20 nt, Human
gccagcugcuugggcuucau

SEQ ID NO: 2564392 - RNA, 18 nt, Human
gccagcugcuugggcuuc

SEQ ID NO: 2564393 - RNA, 17 nt, Human
gccagcugcuugggcuu

SEQ ID NO: 2564394 - RNA, 20 nt, Human
gccagcugccgaccagagcc

SEQ ID NO: 2564395 - RNA, 18 nt, Human
gccagcugccccagccag

SEQ ID NO: 2564396 - RNA, 16 nt, Human
gccagcugcuugggcu

SEQ ID NO: 2564397 - RNA, 15 nt, Human
gccagcugccgacca

SEQ ID NO: 2564398 - RNA, 17 nt, Human
gccagcugccccagcca

SEQ ID NO: 2564399 - RNA, 12 nt, Human
gccagccuggcu

SEQ ID NO: 2564400 - RNA, 16 nt, Human
gccagccuggcuucug

SEQ ID NO: 2564401 - RNA, 17 nt, Human
gccagccuggcuucugg

SEQ ID NO: 2564402 - RNA, 18 nt, Human
gccagccuggcuucugga

SEQ ID NO: 2564403 - RNA, 19 nt, Human
gccagccuggcuucuggag

SEQ ID NO: 2564404 - RNA, 16 nt, Human
gccagccuccucugga

SEQ ID NO: 2564405 - RNA, 15 nt, Human
gccagccuccucugg

SEQ ID NO: 2564406 - RNA, 19 nt, Human
gccagccugcuccuuccca

SEQ ID NO: 2564407 - RNA, 17 nt, Human
gccagccuccucuggac

SEQ ID NO: 2564408 - RNA, 11 nt, Human
gccagccuggc

SEQ ID NO: 2564409 - RNA, 23 nt, Human
gccagcucuguaucaggacccag

SEQ ID NO: 2564410 - RNA, 15 nt, Human
gccagcucuguauca

SEQ ID NO: 2564411 - RNA, 20 nt, Human
gccagccuggcuucuggagc

SEQ ID NO: 2564412 - RNA, 21 nt, Human
gccagccuggcuucuggagcc

SEQ ID NO: 2564413 - RNA, 22 nt, Human
gccagccuggcuucuggagccc

SEQ ID NO: 2564414 - RNA, 20 nt, Human
gccagcugcacugaugcugc

SEQ ID NO: 2564415 - RNA, 14 nt, Human
gccagcugcacuga

SEQ ID NO: 2564416 - RNA, 13 nt, Human
gccuguuuaagag

SEQ ID NO: 2564417 - RNA, 20 nt, Human
gccugguggaaggaggcgca

SEQ ID NO: 2564418 - RNA, 20 nt, Human
gccuguuuuagaagguucuc

SEQ ID NO: 2564419 - RNA, 12 nt, Human
gccuguuuaaga

SEQ ID NO: 2564420 - RNA, 13 nt, Human
gccuggugggccu

SEQ ID NO: 2564421 - RNA, 15 nt, Human
gccuggugggccucc

SEQ ID NO: 2564422 - RNA, 21 nt, Human
gccuguugggccaggagccuc

SEQ ID NO: 2564423 - RNA, 21 nt, Human
gccuuacacaaugguuuucuu

SEQ ID NO: 2564424 - RNA, 18 nt, Human
gccuuacccucauguucu

SEQ ID NO: 2564425 - RNA, 20 nt, Human
gccuuacacaaugguuuucu

SEQ ID NO: 2564426 - RNA, 13 nt, Human
gccuuaaaacuuu

SEQ ID NO: 2564427 - RNA, 14 nt, Human
gccuuaaaaccaaa

SEQ ID NO: 2564428 - RNA, 12 nt, Human
gccuuaaaacuu

SEQ ID NO: 2564429 - RNA, 18 nt, Human
gccuuagaagucacacag

SEQ ID NO: 2564430 - RNA, 17 nt, Human
gccuuagaagucacaca

SEQ ID NO: 2564431 - RNA, 19 nt, Human
gccuuagaagucacacagu

SEQ ID NO: 2564432 - RNA, 17 nt, Human
gccuuagaaccuuucuu

SEQ ID NO: 2564433 - RNA, 14 nt, Human
gccuuauggaacac

SEQ ID NO: 2564434 - RNA, 10 nt, Human
gccuuaugga

SEQ ID NO: 2564435 - RNA, 13 nt, Human
gccuuauccucug

SEQ ID NO: 2564436 - RNA, 20 nt, Human
gccuuaucaagugucuucca

SEQ ID NO: 2564437 - RNA, 19 nt, Human
gccuuaucaagugucuucc

SEQ ID NO: 2564438 - RNA, 17 nt, Human
gccuuaucaagugucuu

SEQ ID NO: 2564439 - RNA, 14 nt, Human
gccuuaucaagugu

SEQ ID NO: 2564440 - RNA, 13 nt, Human
gccuuaucaagug

SEQ ID NO: 2564441 - RNA, 17 nt, Human
gccuuaaaaccaaagag

SEQ ID NO: 2564442 - RNA, 16 nt, Human
gccuuauccucugauc

SEQ ID NO: 2564443 - RNA, 15 nt, Human
gccuuauccucugau

SEQ ID NO: 2564444 - RNA, 22 nt, Human
gccuuaucuugcaccccaaagc

SEQ ID NO: 2564445 - RNA, 23 nt, Human
gccuuaucuccaagaccagagau

SEQ ID NO: 2564446 - RNA, 15 nt, Human
gccugcaauuucaua

SEQ ID NO: 2564447 - RNA, 15 nt, Human
gccugccacucaggc

SEQ ID NO: 2564448 - RNA, 14 nt, Human
gccugccagcugca

SEQ ID NO: 2564449 - RNA, 15 nt, Human
gccugccagcugcac

SEQ ID NO: 2564450 - RNA, 23 nt, Human
gccugccacucaggcccaaagcc

SEQ ID NO: 2564451 - RNA, 14 nt, Human
gccugccaguccua

SEQ ID NO: 2564452 - RNA, 18 nt, Human
gccugccagcugcacuga

SEQ ID NO: 2564453 - RNA, 16 nt, Human
gccugggggugccagg

SEQ ID NO: 2564454 - RNA, 17 nt, Human
gccugggggugccagga

SEQ ID NO: 2564455 - RNA, 22 nt, Human
gccugggguaccaagagacucc

SEQ ID NO: 2564456 - RNA, 15 nt, Human
gccugccaguccuag

SEQ ID NO: 2564457 - RNA, 21 nt, Human
gccugggggugccaggaccag

SEQ ID NO: 2564458 - RNA, 22 nt, Human
gccugggggcugggcagaggaa

SEQ ID NO: 2564459 - RNA, 14 nt, Human
gccugguggcagcu

SEQ ID NO: 2564460 - RNA, 13 nt, Human
gccuggugcugcu

SEQ ID NO: 2564461 - RNA, 18 nt, Human
gccugguggcagcugcgg

SEQ ID NO: 2564462 - RNA, 21 nt, Human
gccugguggcagcugcggucc

SEQ ID NO: 2564463 - RNA, 19 nt, Human
gccugguggcagcugcggu

SEQ ID NO: 2564464 - RNA, 13 nt, Human
gccuggugcagug

SEQ ID NO: 2564465 - RNA, 13 nt, Human
gccugguggcagc

SEQ ID NO: 2564466 - RNA, 14 nt, Human
gccugggguggggu

SEQ ID NO: 2564467 - RNA, 16 nt, Human
gccuggggugggguca

SEQ ID NO: 2564468 - RNA, 14 nt, Human
gccuggggucugga

SEQ ID NO: 2564469 - RNA, 17 nt, Human
gccugguccucacacuc

SEQ ID NO: 2564470 - RNA, 22 nt, Human
gccugggguggggucaugcccu

SEQ ID NO: 2564471 - RNA, 13 nt, Human
gccuuccuugcua

SEQ ID NO: 2564472 - RNA, 19 nt, Human
gccuuccuguuuuucacau

SEQ ID NO: 2564473 - RNA, 22 nt, Human
gccuucgauacaccgggccugg

SEQ ID NO: 2564474 - RNA, 18 nt, Human
gccuucgauacaccgggc

SEQ ID NO: 2564475 - RNA, 20 nt, Human
gccuuggagggucccaagcu

SEQ ID NO: 2564476 - RNA, 19 nt, Human
gccuuggagggucccaagc

SEQ ID NO: 2564477 - RNA, 19 nt, Human
gccuuggaaguugcauggc

SEQ ID NO: 2564478 - RNA, 14 nt, Human
gccuugcuggacgg

SEQ ID NO: 2564479 - RNA, 22 nt, Human
gccuugcucccaaccccacacg

SEQ ID NO: 2564480 - RNA, 19 nt, Human
gccuugcuaccucaagggg

SEQ ID NO: 2564481 - RNA, 11 nt, Human
gccuuccuugc

SEQ ID NO: 2564482 - RNA, 19 nt, Human
gccuuccugcccuacagag

SEQ ID NO: 2564483 - RNA, 23 nt, Human
gccuucgauacaccgggccugga

SEQ ID NO: 2564484 - RNA, 16 nt, Human
gccuuccagggguggg

SEQ ID NO: 2564485 - RNA, 15 nt, Human
gccuuccaggggugg

SEQ ID NO: 2564486 - RNA, 21 nt, Human
gccuuccaggggugggacacc

SEQ ID NO: 2564487 - RNA, 18 nt, Human
gccuuccagcacccugca

SEQ ID NO: 2564488 - RNA, 21 nt, Human
gccuuccucugcagcugaccu

SEQ ID NO: 2564489 - RNA, 20 nt, Human
gccuuccucugcagcugacc

SEQ ID NO: 2564490 - RNA, 19 nt, Human
gccuuccucugcagcugac

SEQ ID NO: 2564491 - RNA, 17 nt, Human
gccuuccucugcagcug

SEQ ID NO: 2564492 - RNA, 16 nt, Human
gccuuccucugcagcu

SEQ ID NO: 2564493 - RNA, 13 nt, Human
gccuuccucugca

SEQ ID NO: 2564494 - RNA, 22 nt, Human
gccuuccacuuggcuacacagg

SEQ ID NO: 2564495 - RNA, 23 nt, Human
gccuuccacgcugucuccagacc

SEQ ID NO: 2564496 - RNA, 20 nt, Human
gccuuauggaacacucugag

SEQ ID NO: 2564497 - RNA, 19 nt, Human
gccuuauggaacacucuga

SEQ ID NO: 2564498 - RNA, 18 nt, Human
gccuuauggaacacucug

SEQ ID NO: 2564499 - RNA, 16 nt, Human
gccuuauggaacacuc

SEQ ID NO: 2564500 - RNA, 13 nt, Human
gccuucagggagu

SEQ ID NO: 2564501 - RNA, 21 nt, Human
gccuucagggagugagggauu

SEQ ID NO: 2564502 - RNA, 17 nt, Human
gccuuauccucugaucu

SEQ ID NO: 2564503 - RNA, 13 nt, Human
gccuucaucuccc

SEQ ID NO: 2564504 - RNA, 12 nt, Human
gccuuccagggg

SEQ ID NO: 2564505 - RNA, 13 nt, Human
gccuucauuaccu

SEQ ID NO: 2564506 - RNA, 19 nt, Human
gccuuccacgcugucucca

SEQ ID NO: 2564507 - RNA, 22 nt, Human
gccuuccacgcugucuccagac

SEQ ID NO: 2564508 - RNA, 22 nt, Human
gccuuuggaaacagcucgacuu

SEQ ID NO: 2564509 - RNA, 13 nt, Human
gccuuugcuccuc

SEQ ID NO: 2564510 - RNA, 20 nt, Human
gccuuuggaugaccagaaca

SEQ ID NO: 2564511 - RNA, 15 nt, Human
gccuuugccuccccg

SEQ ID NO: 2564512 - RNA, 18 nt, Human
gccuuugagcccacaaag

SEQ ID NO: 2564513 - RNA, 23 nt, Human
gccuuugagacaguuucuuagcu

SEQ ID NO: 2564514 - RNA, 22 nt, Human
gccuuugaguuuccucaggcug

SEQ ID NO: 2564515 - RNA, 17 nt, Human
gccuuugaucagguggg

SEQ ID NO: 2564516 - RNA, 23 nt, Human
gccuuugagcccacaaagccuua

SEQ ID NO: 2564517 - RNA, 21 nt, Human
gccuuugagacaguuucuuag

SEQ ID NO: 2564518 - RNA, 20 nt, Human
gccuuugagacaguuucuua

SEQ ID NO: 2564519 - RNA, 19 nt, Human
gccuuugagacaguuucuu

SEQ ID NO: 2564520 - RNA, 14 nt, Human
gccuuugagacagu

SEQ ID NO: 2564521 - RNA, 16 nt, Human
gccuuugaccugccuc

SEQ ID NO: 2564522 - RNA, 14 nt, Human
gccuuggcucagac

SEQ ID NO: 2564523 - RNA, 15 nt, Human
gccuuggcucagaca

SEQ ID NO: 2564524 - RNA, 16 nt, Human
gccuuggcucagacau

SEQ ID NO: 2564525 - RNA, 12 nt, Human
gccuuggcucag

SEQ ID NO: 2564526 - RNA, 20 nt, Human
gccuuggccuccccugcuga

SEQ ID NO: 2564527 - RNA, 21 nt, Human
gccuuggauaaugcuguugcc

SEQ ID NO: 2564528 - RNA, 21 nt, Human
gccuuggagggucccaagcug

SEQ ID NO: 2564529 - RNA, 19 nt, Human
gccuuggauaaugcuguug

SEQ ID NO: 2564530 - RNA, 23 nt, Human
gccuuggauaaugcuguugccuc

SEQ ID NO: 2564531 - RNA, 23 nt, Human
gccuuuuuucacggaaguuuuca

SEQ ID NO: 2564532 - RNA, 20 nt, Human
gccuuuuuucacggaaguuu

SEQ ID NO: 2564533 - RNA, 19 nt, Human
gccuuuuuucacggaaguu

SEQ ID NO: 2564534 - RNA, 16 nt, Human
gccuuuggcucuggag

SEQ ID NO: 2564535 - RNA, 23 nt, Human
gcgacaaugcaaaccaucauuga

SEQ ID NO: 2564536 - RNA, 23 nt, Human
gcgaaaggauguaaacagugccu

SEQ ID NO: 2564537 - RNA, 15 nt, Human
gccuuuggcucugga

SEQ ID NO: 2564538 - RNA, 13 nt, Human
gccuuuggcucug

SEQ ID NO: 2564539 - RNA, 13 nt, Human
gccuuuggcuuca

SEQ ID NO: 2564540 - RNA, 15 nt, Human
gccuuuggcaggugc

SEQ ID NO: 2564541 - RNA, 13 nt, Human
gccuuuggcaggu

SEQ ID NO: 2564542 - RNA, 16 nt, Human
gccuuuggcagaguuc

SEQ ID NO: 2564543 - RNA, 15 nt, Human
gcuaggaacacuccu

SEQ ID NO: 2564544 - RNA, 23 nt, Human
gcuagcuucugcuuuucugcccu

SEQ ID NO: 2564545 - RNA, 18 nt, Human
gcuagcuucugcuuuucu

SEQ ID NO: 2564546 - RNA, 17 nt, Human
gcuagcuucugcuuuuc

SEQ ID NO: 2564547 - RNA, 19 nt, Human
gcuaggaaauccagggugg

SEQ ID NO: 2564548 - RNA, 15 nt, Human
gcuagcuucugcuuu

SEQ ID NO: 2564549 - RNA, 22 nt, Human
gcuagaauucccucucucugac

SEQ ID NO: 2564550 - RNA, 19 nt, Human
gcuagaaucuggagagcua

SEQ ID NO: 2564551 - RNA, 17 nt, Human
gcuagaauauccuacuu

SEQ ID NO: 2564552 - RNA, 21 nt, Human
gcuagaagugggccaggacag

SEQ ID NO: 2564553 - RNA, 15 nt, Human
gcuagaagcuggagg

SEQ ID NO: 2564554 - RNA, 14 nt, Human
gcuagaagcuggag

SEQ ID NO: 2564555 - RNA, 21 nt, Human
gcuaccuugugacccagcacu

SEQ ID NO: 2564556 - RNA, 15 nt, Human
gcuagaaggccacau

SEQ ID NO: 2564557 - RNA, 13 nt, Human
gcuagaaggccac

SEQ ID NO: 2564558 - RNA, 17 nt, Human
gcuagaaggccacaugu

SEQ ID NO: 2564559 - RNA, 20 nt, Human
gcuagaagugggccaggaca

SEQ ID NO: 2564560 - RNA, 13 nt, Human
gcuauaggugcua

SEQ ID NO: 2564561 - RNA, 17 nt, Human
gcuauagcucaggaccu

SEQ ID NO: 2564562 - RNA, 16 nt, Human
gcuauagcucaggacc

SEQ ID NO: 2564563 - RNA, 16 nt, Human
gcuauaggcuggagaa

SEQ ID NO: 2564564 - RNA, 16 nt, Human
gcuauagcuacaggaa

SEQ ID NO: 2564565 - RNA, 18 nt, Human
gcuauagcuacaggaagc

SEQ ID NO: 2564566 - RNA, 16 nt, Human
gcuaggaacacuccuu

SEQ ID NO: 2564567 - RNA, 22 nt, Human
gcuaggaaauccaggguggugg

SEQ ID NO: 2564568 - RNA, 17 nt, Human
gcuauagccuggggugg

SEQ ID NO: 2564569 - RNA, 22 nt, Human
gcuagcuucugcuuuucugccc

SEQ ID NO: 2564570 - RNA, 19 nt, Human
gcuauagacccgaggaaac

SEQ ID NO: 2564571 - RNA, 23 nt, Human
gcuauagacccgaggaaacucag

SEQ ID NO: 2564572 - RNA, 20 nt, Human
gcuaccuugugacccagcac

SEQ ID NO: 2564573 - RNA, 19 nt, Human
gcuagaacucccuuucaac

SEQ ID NO: 2564574 - RNA, 16 nt, Human
gcuaccuuuguauucu

SEQ ID NO: 2564575 - RNA, 20 nt, Human
gcuaccuuuguauucucucc

SEQ ID NO: 2564576 - RNA, 20 nt, Human
gcuacagguuacaacagauu

SEQ ID NO: 2564577 - RNA, 19 nt, Human
gcuacagguuacaacagau

SEQ ID NO: 2564578 - RNA, 18 nt, Human
gcuacagguuacaacaga

SEQ ID NO: 2564579 - RNA, 16 nt, Human
gcuacagguuacaaca

SEQ ID NO: 2564580 - RNA, 15 nt, Human
gcuacagguuacaac

SEQ ID NO: 2564581 - RNA, 22 nt, Human
gcuacaggaagcaccccaugcc

SEQ ID NO: 2564582 - RNA, 23 nt, Human
gcuacaggaagcaccccaugcca

SEQ ID NO: 2564583 - RNA, 14 nt, Human
gcuacagguuacaa

SEQ ID NO: 2564584 - RNA, 23 nt, Human
gcuacaggggaagguggccucug

SEQ ID NO: 2564585 - RNA, 12 nt, Human
gcuacagguuac

SEQ ID NO: 2564586 - RNA, 13 nt, Human
gcuacacacugca

SEQ ID NO: 2564587 - RNA, 20 nt, Human
gcuacacacugcauguuugu

SEQ ID NO: 2564588 - RNA, 20 nt, Human
gcuaagagggagggagggcu

SEQ ID NO: 2564589 - RNA, 18 nt, Human
gcuaagagcuagcgcugc

SEQ ID NO: 2564590 - RNA, 14 nt, Human
gcuacacaggggaa

SEQ ID NO: 2564591 - RNA, 14 nt, Human
gcuacacagggaug

SEQ ID NO: 2564592 - RNA, 16 nt, Human
gcuacacagaucacag

SEQ ID NO: 2564593 - RNA, 20 nt, Human
gcuaagagcuagcgcugccg

SEQ ID NO: 2564594 - RNA, 19 nt, Human
gcuacaggaagcaccccau

SEQ ID NO: 2564595 - RNA, 20 nt, Human
gcuacaggaagcaccccaug

SEQ ID NO: 2564596 - RNA, 21 nt, Human
gcuacaggaagcaccccaugc

SEQ ID NO: 2564597 - RNA, 16 nt, Human
gcgucuguucccccuu

SEQ ID NO: 2564598 - RNA, 23 nt, Human
gcgucuggaggggccccugcuuc

SEQ ID NO: 2564599 - RNA, 21 nt, Human
gcgucuggaggggccccugcu

SEQ ID NO: 2564600 - RNA, 20 nt, Human
gcgucuggaggggccccugc

SEQ ID NO: 2564601 - RNA, 18 nt, Human
gcgucuggaggggccccu

SEQ ID NO: 2564602 - RNA, 17 nt, Human
gcgucuguucccccuuc

SEQ ID NO: 2564603 - RNA, 18 nt, Human
gcgucugucuucaagggc

SEQ ID NO: 2564604 - RNA, 17 nt, Human
gcgucuggaggggcccc

SEQ ID NO: 2564605 - RNA, 21 nt, Human
gcgucuccuguuuuucugggu

SEQ ID NO: 2564606 - RNA, 21 nt, Human
gcgucuggaaguccaaugugg

SEQ ID NO: 2564607 - RNA, 20 nt, Human
gcgucuccuguuuuucuggg

SEQ ID NO: 2564608 - RNA, 11 nt, Human
gcgucuccugu

SEQ ID NO: 2564609 - RNA, 23 nt, Human
gcuaaagagcccuugccucccca

SEQ ID NO: 2564610 - RNA, 22 nt, Human
gcuaaagagcccuugccucccc

SEQ ID NO: 2564611 - RNA, 18 nt, Human
gcuaaagagcccuugccu

SEQ ID NO: 2564612 - RNA, 17 nt, Human
gcuaaagcaauaugcau

SEQ ID NO: 2564613 - RNA, 19 nt, Human
gcuaaagcaauaugcauuu

SEQ ID NO: 2564614 - RNA, 13 nt, Human
gcuaaagaaaaag

SEQ ID NO: 2564615 - RNA, 14 nt, Human
gcuaaagagcccuu

SEQ ID NO: 2564616 - RNA, 13 nt, Human
gcuaagagggagg

SEQ ID NO: 2564617 - RNA, 17 nt, Human
gcuaagaauauuugaau

SEQ ID NO: 2564618 - RNA, 16 nt, Human
gcuaagaauauuugaa

SEQ ID NO: 2564619 - RNA, 14 nt, Human
gcgggcagcacagc

SEQ ID NO: 2564620 - RNA, 20 nt, Human
gcgggcaccuauagucccag

SEQ ID NO: 2564621 - RNA, 16 nt, Human
gcgggaugguccuggg

SEQ ID NO: 2564622 - RNA, 17 nt, Human
gcgggaugguccugggg

SEQ ID NO: 2564623 - RNA, 15 nt, Human
gcgggaugguccugg

SEQ ID NO: 2564624 - RNA, 16 nt, Human
gcgcucagggccaugc

SEQ ID NO: 2564625 - RNA, 15 nt, Human
gcggacagccacggc

SEQ ID NO: 2564626 - RNA, 13 nt, Human
gcgggccaaggac

SEQ ID NO: 2564627 - RNA, 15 nt, Human
gcgggccaaggacug

SEQ ID NO: 2564628 - RNA, 17 nt, Human
gcgggccaaggacugcc

SEQ ID NO: 2564629 - RNA, 20 nt, Human
gcgggccaaggacugccgac

SEQ ID NO: 2564630 - RNA, 15 nt, Human
gcgggcagcacagca

SEQ ID NO: 2564631 - RNA, 16 nt, Human
gcgggcagcacagcaa

SEQ ID NO: 2564632 - RNA, 21 nt, Human
gcgggccagccaggcgggcuc

SEQ ID NO: 2564633 - RNA, 19 nt, Human
gcgggccagccaggcgggc

SEQ ID NO: 2564634 - RNA, 16 nt, Human
gcgggccagccaggcg

SEQ ID NO: 2564635 - RNA, 15 nt, Human
gcgggccagccaggc

SEQ ID NO: 2564636 - RNA, 20 nt, Human
gcgggcgccuguagucccag

SEQ ID NO: 2564637 - RNA, 20 nt, Human
gcgggccccucaucgcgucc

SEQ ID NO: 2564638 - RNA, 13 nt, Human
gcgggucacagga

SEQ ID NO: 2564639 - RNA, 15 nt, Human
gcgggucacaggagg

SEQ ID NO: 2564640 - RNA, 15 nt, Human
gcgggggccagggaa

SEQ ID NO: 2564641 - RNA, 13 nt, Human
gcggggggaggga

SEQ ID NO: 2564642 - RNA, 20 nt, Human
gcggggcgaagcccaggccc

SEQ ID NO: 2564643 - RNA, 14 nt, Human
gcgguggaaggccc

SEQ ID NO: 2564644 - RNA, 22 nt, Human
gcgggugaacaaagcagccacg

SEQ ID NO: 2564645 - RNA, 21 nt, Human
gcgggugaacaaagcagccac

SEQ ID NO: 2564646 - RNA, 19 nt, Human
gcgggucacaggagggagg

SEQ ID NO: 2564647 - RNA, 20 nt, Human
gcgggucacaggagggaggg

SEQ ID NO: 2564648 - RNA, 23 nt, Human
gcgguuaugaaauucacccccuu

SEQ ID NO: 2564649 - RNA, 15 nt, Human
gcgguggcccugucc

SEQ ID NO: 2564650 - RNA, 14 nt, Human
gcgguggcccuguc

SEQ ID NO: 2564651 - RNA, 18 nt, Human
gcgguggaaggcccgagg

SEQ ID NO: 2564652 - RNA, 18 nt, Human
gcggugcuguccucaggu

SEQ ID NO: 2564653 - RNA, 18 nt, Human
gcggugggcacccacccu

SEQ ID NO: 2564654 - RNA, 14 nt, Human
gcgguuuggggagc

SEQ ID NO: 2564655 - RNA, 19 nt, Human
gcgucucauacucaccuca

SEQ ID NO: 2564656 - RNA, 15 nt, Human
gcguagaaguuuuug

SEQ ID NO: 2564657 - RNA, 17 nt, Human
gcgucgcccucccaggc

SEQ ID NO: 2564658 - RNA, 17 nt, Human
gcgcggggagcccgucg

SEQ ID NO: 2564659 - RNA, 23 nt, Human
gcgcggccagccccggcccuggg

SEQ ID NO: 2564660 - RNA, 21 nt, Human
gcgcggccagccccggcccug

SEQ ID NO: 2564661 - RNA, 15 nt, Human
gcgcgucccccugcc

SEQ ID NO: 2564662 - RNA, 16 nt, Human
gcgcggccagccccgg

SEQ ID NO: 2564663 - RNA, 15 nt, Human
gcgcggccagccccg

SEQ ID NO: 2564664 - RNA, 14 nt, Human
gcgcggccagcccc

SEQ ID NO: 2564665 - RNA, 13 nt, Human
gcgcggccagccc

SEQ ID NO: 2564666 - RNA, 14 nt, Human
gcgcgccacucgcu

SEQ ID NO: 2564667 - RNA, 22 nt, Human
gcgcucagggccaugcugaggc

SEQ ID NO: 2564668 - RNA, 13 nt, Human
gcgcucagggcca

SEQ ID NO: 2564669 - RNA, 13 nt, Human
gcgcuacccacuu

SEQ ID NO: 2564670 - RNA, 16 nt, Human
gcgcuacccacuucua

SEQ ID NO: 2564671 - RNA, 13 nt, Human
gcggacagccacg

SEQ ID NO: 2564672 - RNA, 11 nt, Human
gcggacagcca

SEQ ID NO: 2564673 - RNA, 22 nt, Human
gcgccgugaguucucagggcuc

SEQ ID NO: 2564674 - RNA, 20 nt, Human
gcgccgugaguucucagggc

SEQ ID NO: 2564675 - RNA, 14 nt, Human
gcgccuuucccaac

SEQ ID NO: 2564676 - RNA, 15 nt, Human
gcgccuuucccaacu

SEQ ID NO: 2564677 - RNA, 20 nt, Human
gcgcgagggccucaaaggcc

SEQ ID NO: 2564678 - RNA, 16 nt, Human
gcgccuuucccaacuc

SEQ ID NO: 2564679 - RNA, 23 nt, Human
gcgccgugaguucucagggcucc

SEQ ID NO: 2564680 - RNA, 19 nt, Human
gcgccgugaguucucaggg

SEQ ID NO: 2564681 - RNA, 18 nt, Human
gcgccggcgggcgggccg

SEQ ID NO: 2564682 - RNA, 22 nt, Human
gcgccgucuccaggggcugcuu

SEQ ID NO: 2564683 - RNA, 15 nt, Human
gcgccuacaggagug

SEQ ID NO: 2564684 - RNA, 23 nt, Human
gcgacagagcgagagucugucuc

SEQ ID NO: 2564685 - RNA, 19 nt, Human
gcgccgcaaaccacacugg

SEQ ID NO: 2564686 - RNA, 15 nt, Human
gcgccgucuccaggg

SEQ ID NO: 2564687 - RNA, 13 nt, Human
gcgccgucuccag

SEQ ID NO: 2564688 - RNA, 17 nt, Human
gcgccggcgggcgggcc

SEQ ID NO: 2564689 - RNA, 23 nt, Human
gcgccggcaaaacuuuggcacug

SEQ ID NO: 2564690 - RNA, 21 nt, Human
gcgccgcaaaccacacuggac

SEQ ID NO: 2564691 - RNA, 12 nt, Human
gcgacagugaga

SEQ ID NO: 2564692 - RNA, 19 nt, Human
gcgacagagcgagagucug

SEQ ID NO: 2564693 - RNA, 15 nt, Human
gcgaaccaauauuug

SEQ ID NO: 2564694 - RNA, 17 nt, Human
gccgaagcucuggcuga

SEQ ID NO: 2564695 - RNA, 14 nt, Human
gccgaagcucuggc

SEQ ID NO: 2564696 - RNA, 12 nt, Human
gccgaagcucug

SEQ ID NO: 2564697 - RNA, 15 nt, Human
gccgaaugcccucag

SEQ ID NO: 2564698 - RNA, 20 nt, Human
gccgaauccccucccuguca

SEQ ID NO: 2564699 - RNA, 19 nt, Human
gccgaagcucuggcugaac

SEQ ID NO: 2564700 - RNA, 14 nt, Human
gccgaccagagccc

SEQ ID NO: 2564701 - RNA, 14 nt, Human
gccgaaugugcagg

SEQ ID NO: 2564702 - RNA, 17 nt, Human
gccgaccagagccccac

SEQ ID NO: 2564703 - RNA, 19 nt, Human
gccgaaccaggagcugcuc

SEQ ID NO: 2564704 - RNA, 12 nt, Human
gccgaaccagga

SEQ ID NO: 2564705 - RNA, 19 nt, Human
gccgaagaaggguccuucc

SEQ ID NO: 2564706 - RNA, 22 nt, Human
gccgaagaaggguccuucccuc

SEQ ID NO: 2564707 - RNA, 12 nt, Human
gcccuuggccag

SEQ ID NO: 2564708 - RNA, 14 nt, Human
gcccuugccucccc

SEQ ID NO: 2564709 - RNA, 13 nt, Human
gcccuugccuccc

SEQ ID NO: 2564710 - RNA, 21 nt, Human
gcccuugcccugaccucccag

SEQ ID NO: 2564711 - RNA, 18 nt, Human
gcccuugcccugaccucc

SEQ ID NO: 2564712 - RNA, 16 nt, Human
gcccuugcccugaccu

SEQ ID NO: 2564713 - RNA, 15 nt, Human
gcccuugcccugacc

SEQ ID NO: 2564714 - RNA, 14 nt, Human
gcccuugcccugac

SEQ ID NO: 2564715 - RNA, 13 nt, Human
gcccuugucugag

SEQ ID NO: 2564716 - RNA, 21 nt, Human
gcccuugucccacucaagcca

SEQ ID NO: 2564717 - RNA, 24 nt, Human
gcccuugucccacucaagccaagc

SEQ ID NO: 2564718 - RNA, 12 nt, Human
gcccuuguccca

SEQ ID NO: 2564719 - RNA, 16 nt, Human
gcccuugccuccccau

SEQ ID NO: 2564720 - RNA, 16 nt, Human
gcccuuggaggccagc

SEQ ID NO: 2564721 - RNA, 18 nt, Human
gcccuucucuccagcccc

SEQ ID NO: 2564722 - RNA, 17 nt, Human
gcccuucucuccagccc

SEQ ID NO: 2564723 - RNA, 16 nt, Human
gcccuucucuccagcc

SEQ ID NO: 2564724 - RNA, 14 nt, Human
gcccuucucuccag

SEQ ID NO: 2564725 - RNA, 20 nt, Human
gcccugcuggccgccucacc

SEQ ID NO: 2564726 - RNA, 18 nt, Human
gcccugcuggccgccuca

SEQ ID NO: 2564727 - RNA, 14 nt, Human
gcccugcuggccgc

SEQ ID NO: 2564728 - RNA, 11 nt, Human
gcccugcuggc

SEQ ID NO: 2564729 - RNA, 23 nt, Human
gcccugcuggccgccucaccccc

SEQ ID NO: 2564730 - RNA, 22 nt, Human
gcccugcuggccgccucacccc

SEQ ID NO: 2564731 - RNA, 21 nt, Human
gcccugcuggccgccucaccc

SEQ ID NO: 2564732 - RNA, 18 nt, Human
gcccugcuuugggcugcc

SEQ ID NO: 2564733 - RNA, 16 nt, Human
gcccugcuuugggcug

SEQ ID NO: 2564734 - RNA, 20 nt, Human
gccgggcgugguggugagug

SEQ ID NO: 2564735 - RNA, 14 nt, Human
gccgguaccuggga

SEQ ID NO: 2564736 - RNA, 21 nt, Human
gccgggcgcgguggcucacgc

SEQ ID NO: 2564737 - RNA, 12 nt, Human
gccgggccuggg

SEQ ID NO: 2564738 - RNA, 19 nt, Human
gccgggcgugguggcgggc

SEQ ID NO: 2564739 - RNA, 13 nt, Human
gccggcuggaaau

SEQ ID NO: 2564740 - RNA, 18 nt, Human
gccggcgagcccugugga

SEQ ID NO: 2564741 - RNA, 15 nt, Human
gccggcgagcccugu

SEQ ID NO: 2564742 - RNA, 17 nt, Human
gccggcgagcccugugg

SEQ ID NO: 2564743 - RNA, 22 nt, Human
gccggcuggaaaugcugggcug

SEQ ID NO: 2564744 - RNA, 19 nt, Human
gccggcuucaugccagcua

SEQ ID NO: 2564745 - RNA, 17 nt, Human
gccggcggcccaagccc

SEQ ID NO: 2564746 - RNA, 20 nt, Human
gccgggaacagacaacagaa

SEQ ID NO: 2564747 - RNA, 19 nt, Human
gccgggaccccgagccugg

SEQ ID NO: 2564748 - RNA, 23 nt, Human
gccgggaccccgagccuggcucc

SEQ ID NO: 2564749 - RNA, 18 nt, Human
gccgggaccccgagccug

SEQ ID NO: 2564750 - RNA, 22 nt, Human
gccgggaacagacaacagaagu

SEQ ID NO: 2564751 - RNA, 21 nt, Human
gccgagaucacgccacugcac

SEQ ID NO: 2564752 - RNA, 20 nt, Human
gccgagaucacgccacugca

SEQ ID NO: 2564753 - RNA, 22 nt, Human
gccgagaucacgccacugcacu

SEQ ID NO: 2564754 - RNA, 22 nt, Human
gccgaccgaggcuggagcuggc

SEQ ID NO: 2564755 - RNA, 11 nt, Human
gccgaccucag

SEQ ID NO: 2564756 - RNA, 12 nt, Human
gccgcagcccug

SEQ ID NO: 2564757 - RNA, 23 nt, Human
gccggccucucuggccucccacc

SEQ ID NO: 2564758 - RNA, 12 nt, Human
gccgcagagcug

SEQ ID NO: 2564759 - RNA, 20 nt, Human
gccggccucucuggccuccc

SEQ ID NO: 2564760 - RNA, 11 nt, Human
gccgcagcccu

SEQ ID NO: 2564761 - RNA, 23 nt, Human
gccgcaccccagagugugggaag

SEQ ID NO: 2564762 - RNA, 15 nt, Human
gccgcaccccagagu

SEQ ID NO: 2564763 - RNA, 16 nt, Human
gccgcaccccagagug

SEQ ID NO: 2564764 - RNA, 16 nt, Human
gccgcaauacaggaac

SEQ ID NO: 2564765 - RNA, 17 nt, Human
gccgcaagucugcagcc

SEQ ID NO: 2564766 - RNA, 13 nt, Human
gccgcaccccaga

SEQ ID NO: 2564767 - RNA, 17 nt, Human
gccucacaguccuuacc

SEQ ID NO: 2564768 - RNA, 13 nt, Human
gccucacaguccu

SEQ ID NO: 2564769 - RNA, 17 nt, Human
gccucaaccuccugggc

SEQ ID NO: 2564770 - RNA, 13 nt, Human
gccucaaggacuu

SEQ ID NO: 2564771 - RNA, 13 nt, Human
gcccuugcccuga

SEQ ID NO: 2564772 - RNA, 16 nt, Human
gccucacagaagaaua

SEQ ID NO: 2564773 - RNA, 20 nt, Human
gccuauuauauuaaaauaug

SEQ ID NO: 2564774 - RNA, 15 nt, Human
gccuauuauauuaaa

SEQ ID NO: 2564775 - RNA, 22 nt, Human
gccuauuaguaguuaauucugu

SEQ ID NO: 2564776 - RNA, 22 nt, Human
gccuaugugcaugcagcaucua

SEQ ID NO: 2564777 - RNA, 19 nt, Human
gccucaaccuccugggcua

SEQ ID NO: 2564778 - RNA, 18 nt, Human
gccucaaccuccugggcu

SEQ ID NO: 2564779 - RNA, 22 nt, Human
gccuaugcacauauggacucug

SEQ ID NO: 2564780 - RNA, 20 nt, Human
gccuaugcacauauggacuc

SEQ ID NO: 2564781 - RNA, 23 nt, Human
gccuaugcacauauggacucugc

SEQ ID NO: 2564782 - RNA, 14 nt, Human
gccuaugcacauau

SEQ ID NO: 2564783 - RNA, 18 nt, Human
gccuaugaucccagcacu

SEQ ID NO: 2564784 - RNA, 15 nt, Human
gccuaugaucccagc

SEQ ID NO: 2564785 - RNA, 16 nt, Human
gccuaacaccagcguu

SEQ ID NO: 2564786 - RNA, 16 nt, Human
gccgugguccuuuggg

SEQ ID NO: 2564787 - RNA, 14 nt, Human
gccguuacucucca

SEQ ID NO: 2564788 - RNA, 15 nt, Human
gccguuacucuccaa

SEQ ID NO: 2564789 - RNA, 18 nt, Human
gccguuacucuccaaccu

SEQ ID NO: 2564790 - RNA, 20 nt, Human
gccguuacucuccaaccugg

SEQ ID NO: 2564791 - RNA, 19 nt, Human
gccgugccuucagcucuac

SEQ ID NO: 2564792 - RNA, 17 nt, Human
gccgugccuucagcucu

SEQ ID NO: 2564793 - RNA, 15 nt, Human
gccgugccuucagcu

SEQ ID NO: 2564794 - RNA, 14 nt, Human
gccgugccuucagc

SEQ ID NO: 2564795 - RNA, 17 nt, Human
gccgugcucgccccagc

SEQ ID NO: 2564796 - RNA, 15 nt, Human
gccgugcccaggggc

SEQ ID NO: 2564797 - RNA, 21 nt, Human
gccgugcucgccccagcaggu

SEQ ID NO: 2564798 - RNA, 19 nt, Human
gccguggcuucccgcucag

SEQ ID NO: 2564799 - RNA, 15 nt, Human
gccguggcuucccgc

SEQ ID NO: 2564800 - RNA, 22 nt, Human
gccguggcuucccgcucagccc

SEQ ID NO: 2564801 - RNA, 21 nt, Human
gccguggcuucccgcucagcc

SEQ ID NO: 2564802 - RNA, 15 nt, Human
gccgugggccugggg

SEQ ID NO: 2564803 - RNA, 20 nt, Human
gccgugcucgccccagcagg

SEQ ID NO: 2564804 - RNA, 14 nt, Human
gccgugcccugccc

SEQ ID NO: 2564805 - RNA, 20 nt, Human
gccguguaaccauggaccca

SEQ ID NO: 2564806 - RNA, 23 nt, Human
gccguggggccgccgccucuuuc

SEQ ID NO: 2564807 - RNA, 20 nt, Human
gccguggggccgccgccucu

SEQ ID NO: 2564808 - RNA, 17 nt, Human
gccgucuaccugagggg

SEQ ID NO: 2564809 - RNA, 16 nt, Human
gccgucuaccugaggg

SEQ ID NO: 2564810 - RNA, 18 nt, Human
gccguccucccgggcccu

SEQ ID NO: 2564811 - RNA, 14 nt, Human
gccguccucccggg

SEQ ID NO: 2564812 - RNA, 20 nt, Human
gccguccucccgggcccucc

SEQ ID NO: 2564813 - RNA, 19 nt, Human
gccguccucccgggcccuc

SEQ ID NO: 2564814 - RNA, 21 nt, Human
gccguccucccgggcccuccc

SEQ ID NO: 2564815 - RNA, 15 nt, Human
gccgucuaccugagg

SEQ ID NO: 2564816 - RNA, 18 nt, Human
gccgucagccaaauguaa

SEQ ID NO: 2564817 - RNA, 19 nt, Human
gccguaccccacccucagc

SEQ ID NO: 2564818 - RNA, 18 nt, Human
gccguaccccacccucag

SEQ ID NO: 2564819 - RNA, 16 nt, Human
gccguaccccacccuc

SEQ ID NO: 2564820 - RNA, 15 nt, Human
gccguaccccacccu

SEQ ID NO: 2564821 - RNA, 22 nt, Human
gccguaccccacccucagcacc

SEQ ID NO: 2564822 - RNA, 14 nt, Human
gccgguuugaguga

SEQ ID NO: 2564823 - RNA, 14 nt, Human
gccguaccccaccc

SEQ ID NO: 2564824 - RNA, 19 nt, Human
gccggucugcaagucagag

SEQ ID NO: 2564825 - RNA, 18 nt, Human
gccggucugcaagucaga

SEQ ID NO: 2564826 - RNA, 17 nt, Human
gccggugagaauaagag

SEQ ID NO: 2564827 - RNA, 20 nt, Human
gccggucugcaagucagagg

SEQ ID NO: 2564828 - RNA, 22 nt, Human
gccugagaagagagaucaaaug

SEQ ID NO: 2564829 - RNA, 15 nt, Human
gccugagaggcaggc

SEQ ID NO: 2564830 - RNA, 14 nt, Human
gccugagaggcagg

SEQ ID NO: 2564831 - RNA, 13 nt, Human
gccugagaggcag

SEQ ID NO: 2564832 - RNA, 13 nt, Human
gccugaccuugag

SEQ ID NO: 2564833 - RNA, 13 nt, Human
gccucugccucug

SEQ ID NO: 2564834 - RNA, 12 nt, Human
gccucugccucu

SEQ ID NO: 2564835 - RNA, 20 nt, Human
gccucugagggaaagcccag

SEQ ID NO: 2564836 - RNA, 17 nt, Human
gccucugcaaaggaaau

SEQ ID NO: 2564837 - RNA, 15 nt, Human
gccucugcauucagg

SEQ ID NO: 2564838 - RNA, 23 nt, Human
gccucugccaaaggaugugauau

SEQ ID NO: 2564839 - RNA, 15 nt, Human
gccucugccccgucu

SEQ ID NO: 2564840 - RNA, 16 nt, Human
gccucugccccgucuc

SEQ ID NO: 2564841 - RNA, 18 nt, Human
gccugaggucuguacguu

SEQ ID NO: 2564842 - RNA, 13 nt, Human
gccugaggucugu

SEQ ID NO: 2564843 - RNA, 16 nt, Human
gccugaguagaaaggc

SEQ ID NO: 2564844 - RNA, 21 nt, Human
gccugaguagaaaggccuuua

SEQ ID NO: 2564845 - RNA, 21 nt, Human
gccugcaaacucacugcucaa

SEQ ID NO: 2564846 - RNA, 21 nt, Human
gccugcaaacgcugccugccc

SEQ ID NO: 2564847 - RNA, 19 nt, Human
gccugcaaacgcugccugc

SEQ ID NO: 2564848 - RNA, 20 nt, Human
gccugcaaacgcugccugcc

SEQ ID NO: 2564849 - RNA, 15 nt, Human
gccugcaagggagug

SEQ ID NO: 2564850 - RNA, 13 nt, Human
gccugcaagggag

SEQ ID NO: 2564851 - RNA, 20 nt, Human
gccugaggucuggcugcuug

SEQ ID NO: 2564852 - RNA, 19 nt, Human
gccugaggucuggcugcuu

SEQ ID NO: 2564853 - RNA, 18 nt, Human
gccugaggucuggcugcu

SEQ ID NO: 2564854 - RNA, 16 nt, Human
gccugaggucuggcug

SEQ ID NO: 2564855 - RNA, 21 nt, Human
gccugaggucucgcugaugcu

SEQ ID NO: 2564856 - RNA, 17 nt, Human
gccugaggucucgcuga

SEQ ID NO: 2564857 - RNA, 21 nt, Human
gccugaggucaggaguucaag

SEQ ID NO: 2564858 - RNA, 17 nt, Human
gccugaggguggagacu

SEQ ID NO: 2564859 - RNA, 15 nt, Human
gccugaggguggaga

SEQ ID NO: 2564860 - RNA, 14 nt, Human
gccugaggguggag

SEQ ID NO: 2564861 - RNA, 12 nt, Human
gccugagggugg

SEQ ID NO: 2564862 - RNA, 20 nt, Human
gccugagaggcaggcauaga

SEQ ID NO: 2564863 - RNA, 19 nt, Human
gccugagaggcaggcauag

SEQ ID NO: 2564864 - RNA, 18 nt, Human
gccugagaggcaggcaua

SEQ ID NO: 2564865 - RNA, 16 nt, Human
gccugagaggcaggca

SEQ ID NO: 2564866 - RNA, 15 nt, Human
gccugagggccccuc

SEQ ID NO: 2564867 - RNA, 19 nt, Human
gccugagggccccucugcc

SEQ ID NO: 2564868 - RNA, 18 nt, Human
gccugagggccccucugc

SEQ ID NO: 2564869 - RNA, 17 nt, Human
gccugagggccccucug

SEQ ID NO: 2564870 - RNA, 16 nt, Human
gccugagggccccucu

SEQ ID NO: 2564871 - RNA, 21 nt, Human
gccugagggccccucugccca

SEQ ID NO: 2564872 - RNA, 20 nt, Human
gccugagggccccucugccc

SEQ ID NO: 2564873 - RNA, 22 nt, Human
gccugagggccccucugcccag

SEQ ID NO: 2564874 - RNA, 23 nt, Human
gccugagggcgaggggagggugg

SEQ ID NO: 2564875 - RNA, 15 nt, Human
gccucugagauuugg

SEQ ID NO: 2564876 - RNA, 22 nt, Human
gccucugaccccuccucacugg

SEQ ID NO: 2564877 - RNA, 21 nt, Human
gccucugaccccuccucacug

SEQ ID NO: 2564878 - RNA, 20 nt, Human
gccucugaccccuccucacu

SEQ ID NO: 2564879 - RNA, 19 nt, Human
gccucugaccccuccucac

SEQ ID NO: 2564880 - RNA, 19 nt, Human
gccucugacuuaagcugcc

SEQ ID NO: 2564881 - RNA, 22 nt, Human
gccucugagggaaagcccagaa

SEQ ID NO: 2564882 - RNA, 14 nt, Human
gccucugcacuccc

SEQ ID NO: 2564883 - RNA, 18 nt, Human
gccucugaccccuccuca

SEQ ID NO: 2564884 - RNA, 17 nt, Human
gccucugaccccuccuc

SEQ ID NO: 2564885 - RNA, 16 nt, Human
gccucugaccccuccu

SEQ ID NO: 2564886 - RNA, 15 nt, Human
gccucugaccccucc

SEQ ID NO: 2564887 - RNA, 14 nt, Human
gccucugaccccuc

SEQ ID NO: 2564888 - RNA, 13 nt, Human
gccucugaccccu

SEQ ID NO: 2564889 - RNA, 15 nt, Human
gccucucucccaguc

SEQ ID NO: 2564890 - RNA, 13 nt, Human
gccucucucccag

SEQ ID NO: 2564891 - RNA, 21 nt, Human
gccucugacacacagcucugu

SEQ ID NO: 2564892 - RNA, 20 nt, Human
gccucugacacacagcucug

SEQ ID NO: 2564893 - RNA, 19 nt, Human
gccucugacacacagcucu

SEQ ID NO: 2564894 - RNA, 16 nt, Human
gccucucucccagucu

SEQ ID NO: 2564895 - RNA, 12 nt, Human
gccucucuccca

SEQ ID NO: 2564896 - RNA, 16 nt, Human
gccucucucaggccaa

SEQ ID NO: 2564897 - RNA, 18 nt, Human
gccucugacacacagcuc

SEQ ID NO: 2564898 - RNA, 17 nt, Human
gccucugacacacagcu

SEQ ID NO: 2564899 - RNA, 14 nt, Human
gccucucucaggcc

SEQ ID NO: 2564900 - RNA, 13 nt, Human
gccucucucaggc

SEQ ID NO: 2564901 - RNA, 20 nt, Human
gccucucauuccagaggaag

SEQ ID NO: 2564902 - RNA, 13 nt, Human
gccucccaacuca

SEQ ID NO: 2564903 - RNA, 19 nt, Human
gccucccaaagugcuggga

SEQ ID NO: 2564904 - RNA, 18 nt, Human
gccucccaaagugcuggg

SEQ ID NO: 2564905 - RNA, 16 nt, Human
gccucagcauccuggc

SEQ ID NO: 2564906 - RNA, 15 nt, Human
gccucagcauccugg

SEQ ID NO: 2564907 - RNA, 18 nt, Human
gccucacaguccuuacca

SEQ ID NO: 2564908 - RNA, 19 nt, Human
gccucccaacucaccccag

SEQ ID NO: 2564909 - RNA, 18 nt, Human
gccucccaacucacccca

SEQ ID NO: 2564910 - RNA, 17 nt, Human
gccucccaacucacccc

SEQ ID NO: 2564911 - RNA, 16 nt, Human
gccucccaacucaccc

SEQ ID NO: 2564912 - RNA, 16 nt, Human
gccucccaucacccgc

SEQ ID NO: 2564913 - RNA, 14 nt, Human
gccucccaucaccc

SEQ ID NO: 2564914 - RNA, 13 nt, Human
gccucccagccug

SEQ ID NO: 2564915 - RNA, 14 nt, Human
gccucccagccugg

SEQ ID NO: 2564916 - RNA, 10 nt, Human
gccucccagc

SEQ ID NO: 2564917 - RNA, 14 nt, Human
gccucccacugggg

SEQ ID NO: 2564918 - RNA, 15 nt, Human
gccucccaaaugagc

SEQ ID NO: 2564919 - RNA, 13 nt, Human
gccucccacuggg

SEQ ID NO: 2564920 - RNA, 16 nt, Human
gccuccucacccccag

SEQ ID NO: 2564921 - RNA, 17 nt, Human
gccuccucacccccagc

SEQ ID NO: 2564922 - RNA, 18 nt, Human
gccuccucacccccagcu

SEQ ID NO: 2564923 - RNA, 19 nt, Human
gccuccucacccccagcuu

SEQ ID NO: 2564924 - RNA, 20 nt, Human
gccuccuacagcccaccugg

SEQ ID NO: 2564925 - RNA, 14 nt, Human
gccuccucaccccc

SEQ ID NO: 2564926 - RNA, 16 nt, Human
gccucucaucaacuga

SEQ ID NO: 2564927 - RNA, 23 nt, Human
gccucucaccuguacucuuccga

SEQ ID NO: 2564928 - RNA, 21 nt, Human
gccuccucacccccagcuuug

SEQ ID NO: 2564929 - RNA, 18 nt, Human
gccucucaucaacugaau

SEQ ID NO: 2564930 - RNA, 19 nt, Human
gccucucaucaacugaaug

SEQ ID NO: 2564931 - RNA, 19 nt, Human
gccucucauuccagaggaa

SEQ ID NO: 2564932 - RNA, 15 nt, Human
gccucccuucaugca

SEQ ID NO: 2564933 - RNA, 18 nt, Human
gccucccuucaugcaugg

SEQ ID NO: 2564934 - RNA, 20 nt, Human
gccucccuucaugcauggaa

SEQ ID NO: 2564935 - RNA, 22 nt, Human
gccucccuucaugcauggaaau

SEQ ID NO: 2564936 - RNA, 15 nt, Human
gccuccgagagggag

SEQ ID NO: 2564937 - RNA, 23 nt, Human
gccucccuucaugcauggaaauu

SEQ ID NO: 2564938 - RNA, 18 nt, Human
gccuccgagagggagaga

SEQ ID NO: 2564939 - RNA, 16 nt, Human
gccuccgagagggaga

SEQ ID NO: 2564940 - RNA, 19 nt, Human
gccuccggcgucagccucc

SEQ ID NO: 2564941 - RNA, 18 nt, Human
gccuccggcgucagccuc

SEQ ID NO: 2564942 - RNA, 17 nt, Human
gccuccggcgucagccu

SEQ ID NO: 2564943 - RNA, 16 nt, Human
gccuccggccuccccu

SEQ ID NO: 2564944 - RNA, 12 nt, Human
gccuccggccuc

SEQ ID NO: 2564945 - RNA, 21 nt, Human
gccuccggcgucagccuccag

SEQ ID NO: 2564946 - RNA, 20 nt, Human
gccuccggcgucagccucca

SEQ ID NO: 2564947 - RNA, 23 nt, Human
gccuccggcgucagccuccagcc

SEQ ID NO: 2564948 - RNA, 16 nt, Human
gccuccguauuucaga

SEQ ID NO: 2564949 - RNA, 17 nt, Human
gccucccgaguagcugg

SEQ ID NO: 2564950 - RNA, 17 nt, Human
gccucccaucacccgcu

SEQ ID NO: 2564951 - RNA, 19 nt, Human
gccucccgaguagcuggga

SEQ ID NO: 2564952 - RNA, 18 nt, Human
gccucccgaguagcuggg

SEQ ID NO: 2564953 - RNA, 20 nt, Human
gccucccgaguagcugggac

SEQ ID NO: 2564954 - RNA, 20 nt, Human
gccucccuguugaagcucug

SEQ ID NO: 2564955 - RNA, 21 nt, Human
gccucccuguugaagcucugg

SEQ ID NO: 2564956 - RNA, 16 nt, Human
gccucccuggucccuu

SEQ ID NO: 2564957 - RNA, 14 nt, Human
uuuuccugaaaacc

SEQ ID NO: 2564958 - RNA, 21 nt, Human
uuuuaauuccaugaaucgcuu

SEQ ID NO: 2564959 - RNA, 15 nt, Human
uuuuaauuccaugaa

SEQ ID NO: 2564960 - RNA, 22 nt, Human
uuuuaauuccaauaugaugacu

SEQ ID NO: 2564961 - RNA, 19 nt, Human
uuuuaauuccaauaugaug

SEQ ID NO: 2564962 - RNA, 18 nt, Human
uuuuaauuccaauaugau

SEQ ID NO: 2564963 - RNA, 11 nt, Human
uuuuaauucca

SEQ ID NO: 2564964 - RNA, 18 nt, Human
uuuuaauuccaugaaucg

SEQ ID NO: 2564965 - RNA, 15 nt, Human
uuuuaauugauuauu

SEQ ID NO: 2564966 - RNA, 16 nt, Human
uuuuaauuauuauucu

SEQ ID NO: 2564967 - RNA, 11 nt, Human
uuuuaauuauu

SEQ ID NO: 2564968 - RNA, 13 nt, Human
uuuuaauuaaaug

SEQ ID NO: 2564969 - RNA, 22 nt, Human
uuuuaauuaaugaaauaucugu

SEQ ID NO: 2564970 - RNA, 20 nt, Human
uuuuaauuauuauuuauaua

SEQ ID NO: 2564971 - RNA, 17 nt, Human
uuuuaauuauuauucuu

SEQ ID NO: 2564972 - RNA, 23 nt, Human
uuuuaauuauuauuuauauaugu

SEQ ID NO: 2564973 - RNA, 20 nt, Human
uuuuaauucaccaaaguauu

SEQ ID NO: 2564974 - RNA, 12 nt, Human
uuuucuuugugu

SEQ ID NO: 2564975 - RNA, 19 nt, Human
uuuucuuuguguagcuuug

SEQ ID NO: 2564976 - RNA, 16 nt, Human
uuuucuuuguguagcu

SEQ ID NO: 2564977 - RNA, 17 nt, Human
uuuucuacccuagccau

SEQ ID NO: 2564978 - RNA, 16 nt, Human
uuuucuacccuagcca

SEQ ID NO: 2564979 - RNA, 18 nt, Human
uuuucuacagugguuuua

SEQ ID NO: 2564980 - RNA, 14 nt, Human
uuuucuacaguggu

SEQ ID NO: 2564981 - RNA, 13 nt, Human
uuuucuacaguua

SEQ ID NO: 2564982 - RNA, 17 nt, Human
uuuucuuugaaugcuuu

SEQ ID NO: 2564983 - RNA, 14 nt, Human
uuuucuuugaaauu

SEQ ID NO: 2564984 - RNA, 18 nt, Human
uuuucuaaaguaaaaaca

SEQ ID NO: 2564985 - RNA, 13 nt, Human
uuuucuaagagaa

SEQ ID NO: 2564986 - RNA, 21 nt, Human
uuuucuaaugugguuauuucu

SEQ ID NO: 2564987 - RNA, 15 nt, Human
uuuucuaaugugguu

SEQ ID NO: 2564988 - RNA, 15 nt, Human
uuuucuaagagaagu

SEQ ID NO: 2564989 - RNA, 13 nt, Human
uuuucuacagugg

SEQ ID NO: 2564990 - RNA, 14 nt, Human
uuuuggucauugua

SEQ ID NO: 2564991 - RNA, 21 nt, Human
uuuugguccaaguugugcuua

SEQ ID NO: 2564992 - RNA, 23 nt, Human
uuuugguauuacacuguauuugu

SEQ ID NO: 2564993 - RNA, 19 nt, Human
uuuugguacuuauuacugc

SEQ ID NO: 2564994 - RNA, 17 nt, Human
uuuugguauuacacugu

SEQ ID NO: 2564995 - RNA, 18 nt, Human
uuuuggucuggagggaag

SEQ ID NO: 2564996 - RNA, 15 nt, Human
uuuuggucuguguga

SEQ ID NO: 2564997 - RNA, 14 nt, Human
uuuuggcugcugaa

SEQ ID NO: 2564998 - RNA, 22 nt, Human
uuuuggcugaaauucuccugga

SEQ ID NO: 2564999 - RNA, 19 nt, Human
uuuuggcccccgagcuggg

SEQ ID NO: 2565000 - RNA, 19 nt, Human
uuuugggguuguguuguca

SEQ ID NO: 2565001 - RNA, 19 nt, Human
uuuugguaaagacuggcuu

SEQ ID NO: 2565002 - RNA, 21 nt, Human
uuuuggggauaugcuuaguaa

SEQ ID NO: 2565003 - RNA, 18 nt, Human
uuuuggggauaugcuuag

SEQ ID NO: 2565004 - RNA, 23 nt, Human
uuuuggggggccccccuccuugc

SEQ ID NO: 2565005 - RNA, 18 nt, Human
uuuuggggaagugaggaa

SEQ ID NO: 2565006 - RNA, 22 nt, Human
uuuugggcuccuuuuucucccu

SEQ ID NO: 2565007 - RNA, 13 nt, Human
uuuugaaucaaua

SEQ ID NO: 2565008 - RNA, 13 nt, Human
uuuucuuuucuau

SEQ ID NO: 2565009 - RNA, 20 nt, Human
uuuugacaaggggcaguggu

SEQ ID NO: 2565010 - RNA, 18 nt, Human
uuuugaaugcuuccugac

SEQ ID NO: 2565011 - RNA, 16 nt, Human
uuuugaauccaugcuu

SEQ ID NO: 2565012 - RNA, 14 nt, Human
uuuugaauguuauu

SEQ ID NO: 2565013 - RNA, 18 nt, Human
uuuugaaugguguuguau

SEQ ID NO: 2565014 - RNA, 22 nt, Human
uuuugaaugcuuccugacaauc

SEQ ID NO: 2565015 - RNA, 17 nt, Human
uuuuggccaaaguguua

SEQ ID NO: 2565016 - RNA, 15 nt, Human
uuuuggccaaagugu

SEQ ID NO: 2565017 - RNA, 16 nt, Human
uuuuggccaaaguguu

SEQ ID NO: 2565018 - RNA, 19 nt, Human
uuuuggcaaaacucuacuu

SEQ ID NO: 2565019 - RNA, 19 nt, Human
uuuuggcaaacgcuaaaga

SEQ ID NO: 2565020 - RNA, 19 nt, Human
uuuuggcacugagauauuu

SEQ ID NO: 2565021 - RNA, 19 nt, Human
uuuugacacuauaucugua

SEQ ID NO: 2565022 - RNA, 16 nt, Human
uuuugacacuauaucu

SEQ ID NO: 2565023 - RNA, 13 nt, Human
uuuugaauguuau

SEQ ID NO: 2565024 - RNA, 18 nt, Human
uuuugacacuauaucugu

SEQ ID NO: 2565025 - RNA, 16 nt, Human
uuuuggaugcagugcu

SEQ ID NO: 2565026 - RNA, 16 nt, Human
uuuuggauuguauauu

SEQ ID NO: 2565027 - RNA, 20 nt, Human
uuuuguauguaaaugugcau

SEQ ID NO: 2565028 - RNA, 17 nt, Human
uuuuguauucucugagc

SEQ ID NO: 2565029 - RNA, 15 nt, Human
uuuuguauuuuuaau

SEQ ID NO: 2565030 - RNA, 19 nt, Human
uuuuguauuuuccaagugu

SEQ ID NO: 2565031 - RNA, 10 nt, Human
uuuuguauuu

SEQ ID NO: 2565032 - RNA, 16 nt, Human
uuuugucauauaagau

SEQ ID NO: 2565033 - RNA, 18 nt, Human
uuuugucauuuucuccau

SEQ ID NO: 2565034 - RNA, 22 nt, Human
uuuugucgaauuuuuauuauuu

SEQ ID NO: 2565035 - RNA, 18 nt, Human
uuuuguauuuuuaauggg

SEQ ID NO: 2565036 - RNA, 13 nt, Human
uuuugucuuauau

SEQ ID NO: 2565037 - RNA, 13 nt, Human
uuuugucuugugu

SEQ ID NO: 2565038 - RNA, 18 nt, Human
uuuuuaaaaaagaaacau

SEQ ID NO: 2565039 - RNA, 18 nt, Human
uuuugugaaaaugucaaa

SEQ ID NO: 2565040 - RNA, 13 nt, Human
uuuugucuugaau

SEQ ID NO: 2565041 - RNA, 12 nt, Human
uuuugucuugaa

SEQ ID NO: 2565042 - RNA, 23 nt, Human
uuuuuaaaaaucauaaacugugu

SEQ ID NO: 2565043 - RNA, 20 nt, Human
uuuuuaaaaaugcaaauccu

SEQ ID NO: 2565044 - RNA, 22 nt, Human
uuuuuaaaaguuucaaugugau

SEQ ID NO: 2565045 - RNA, 19 nt, Human
uuuuuaaaaguuucaaugu

SEQ ID NO: 2565046 - RNA, 17 nt, Human
uuuuuaaaauaucuuuu

SEQ ID NO: 2565047 - RNA, 16 nt, Human
uuuuuaaaauauuuau

SEQ ID NO: 2565048 - RNA, 17 nt, Human
uuuuuaaaauauuuauu

SEQ ID NO: 2565049 - RNA, 16 nt, Human
uuuuuaaaauuuuaau

SEQ ID NO: 2565050 - RNA, 17 nt, Human
uuuuuaaagacagaguc

SEQ ID NO: 2565051 - RNA, 13 nt, Human
uuuuuaaagacuu

SEQ ID NO: 2565052 - RNA, 12 nt, Human
uuuuuaaagacu

SEQ ID NO: 2565053 - RNA, 18 nt, Human
uuuuuaaagacuuuuaug

SEQ ID NO: 2565054 - RNA, 16 nt, Human
uuuuuaaauaaaagca

SEQ ID NO: 2565055 - RNA, 20 nt, Human
uuuuuaaaguguuucuguua

SEQ ID NO: 2565056 - RNA, 20 nt, Human
uuuugguuguauucuuugau

SEQ ID NO: 2565057 - RNA, 12 nt, Human
uuuugguuguau

SEQ ID NO: 2565058 - RNA, 16 nt, Human
uuuugguugcuuuaau

SEQ ID NO: 2565059 - RNA, 22 nt, Human
uuuugguuugcagaugacaaaa

SEQ ID NO: 2565060 - RNA, 22 nt, Human
uuuugguugucaauauuaaaua

SEQ ID NO: 2565061 - RNA, 14 nt, Human
uuuugguuuuguuc

SEQ ID NO: 2565062 - RNA, 16 nt, Human
uuuugguuuuguuccc

SEQ ID NO: 2565063 - RNA, 20 nt, Human
uuuugguuuuguuccccucc

SEQ ID NO: 2565064 - RNA, 15 nt, Human
uuuugguugcuuuaa

SEQ ID NO: 2565065 - RNA, 20 nt, Human
uuuugguugaauaaacuaga

SEQ ID NO: 2565066 - RNA, 16 nt, Human
uuuugguucuuaguuc

SEQ ID NO: 2565067 - RNA, 15 nt, Human
uuuugguugaauaaa

SEQ ID NO: 2565068 - RNA, 20 nt, Human
uuuuggugguuuuagugauu

SEQ ID NO: 2565069 - RNA, 18 nt, Human
uuuuguaaacucaaaaua

SEQ ID NO: 2565070 - RNA, 21 nt, Human
uuuuguaaagaugccggguuu

SEQ ID NO: 2565071 - RNA, 15 nt, Human
uuuuguaaagaugcc

SEQ ID NO: 2565072 - RNA, 20 nt, Human
uuuuguaagaugcuggguug

SEQ ID NO: 2565073 - RNA, 15 nt, Human
uuuuguaagaugcug

SEQ ID NO: 2565074 - RNA, 13 nt, Human
uuuuguaaagugu

SEQ ID NO: 2565075 - RNA, 14 nt, Human
uuuuguaagacaaa

SEQ ID NO: 2565076 - RNA, 19 nt, Human
uuuuguaucuacaucuuuu

SEQ ID NO: 2565077 - RNA, 13 nt, Human
uuuuguauauauc

SEQ ID NO: 2565078 - RNA, 14 nt, Human
uuuuguaucuacau

SEQ ID NO: 2565079 - RNA, 14 nt, Human
uuuuguauguaaau

SEQ ID NO: 2565080 - RNA, 23 nt, Human
uuuuguauaguuguggacauuua

SEQ ID NO: 2565081 - RNA, 18 nt, Human
uuuuguauaguaaaguga

SEQ ID NO: 2565082 - RNA, 16 nt, Human
uuuuguauaguaaagu

SEQ ID NO: 2565083 - RNA, 17 nt, Human
uuuuguauaguaaagug

SEQ ID NO: 2565084 - RNA, 16 nt, Human
uuuuguauaauuguau

SEQ ID NO: 2565085 - RNA, 15 nt, Human
uuuuguauaauugua

SEQ ID NO: 2565086 - RNA, 17 nt, Human
uuuuguacuguaaagag

SEQ ID NO: 2565087 - RNA, 16 nt, Human
uuuuguacuguaaaga

SEQ ID NO: 2565088 - RNA, 13 nt, Human
uuuuguacuguaa

SEQ ID NO: 2565089 - RNA, 17 nt, Human
uuuuguaauuauuguga

SEQ ID NO: 2565090 - RNA, 23 nt, Human
uuuuguaggggucaaagaaaugc

SEQ ID NO: 2565091 - RNA, 14 nt, Human
uuuuguagaugaaa

SEQ ID NO: 2565092 - RNA, 22 nt, Human
uuuuguaggggucaaagaaaug

SEQ ID NO: 2565093 - RNA, 19 nt, Human
uuuuguagagccagggucu

SEQ ID NO: 2565094 - RNA, 15 nt, Human
uuuuguaauuauugu

SEQ ID NO: 2565095 - RNA, 14 nt, Human
uuuuguaauuuaaa

SEQ ID NO: 2565096 - RNA, 13 nt, Human
uuuuuuguuucau

SEQ ID NO: 2565097 - RNA, 12 nt, Human
uuuuuugauaaa

SEQ ID NO: 2565098 - RNA, 15 nt, Human
uuuuuugcaagugaa

SEQ ID NO: 2565099 - RNA, 23 nt, Human
uuuuuuggggauaugcuuaguaa

SEQ ID NO: 2565100 - RNA, 13 nt, Human
uuuuuuguauuau

SEQ ID NO: 2565101 - RNA, 12 nt, Human
uuuuuuguuuca

SEQ ID NO: 2565102 - RNA, 11 nt, Human
uuuuucugauu

SEQ ID NO: 2565103 - RNA, 18 nt, Human
uuuuucugacuccagugg

SEQ ID NO: 2565104 - RNA, 13 nt, Human
uuuuucuuguaau

SEQ ID NO: 2565105 - RNA, 14 nt, Human
uuuuucuuuaagau

SEQ ID NO: 2565106 - RNA, 13 nt, Human
uuuuucuuuauaa

SEQ ID NO: 2565107 - RNA, 16 nt, Human
uuuuucuuuauaaacu

SEQ ID NO: 2565108 - RNA, 17 nt, Human
uuuuucuuuauaaacuu

SEQ ID NO: 2565109 - RNA, 23 nt, Human
uuuuugaaaggcauguuccucug

SEQ ID NO: 2565110 - RNA, 14 nt, Human
uuuuugaaauaaua

SEQ ID NO: 2565111 - RNA, 13 nt, Human
uuuuugaaaacau

SEQ ID NO: 2565112 - RNA, 11 nt, Human
uuuuuaaaugc

SEQ ID NO: 2565113 - RNA, 20 nt, Human
uuuuuaagauaauaauauau

SEQ ID NO: 2565114 - RNA, 18 nt, Human
uuuuuaaaguuacuuugu

SEQ ID NO: 2565115 - RNA, 14 nt, Human
uuuuuaagcuguaa

SEQ ID NO: 2565116 - RNA, 16 nt, Human
uuuuuaagauuuuucu

SEQ ID NO: 2565117 - RNA, 13 nt, Human
uuuuuaagauuuu

SEQ ID NO: 2565118 - RNA, 18 nt, Human
uuuuuaagccuuaaagga

SEQ ID NO: 2565119 - RNA, 18 nt, Human
uuuuuaagcuguuuccau

SEQ ID NO: 2565120 - RNA, 23 nt, Human
uuuuuaagcuguaaaaagagaga

SEQ ID NO: 2565121 - RNA, 16 nt, Human
uuuuuaaguauuuaua

SEQ ID NO: 2565122 - RNA, 11 nt, Human
uuuuuccuuca

SEQ ID NO: 2565123 - RNA, 15 nt, Human
uuuuuccuuaaucca

SEQ ID NO: 2565124 - RNA, 20 nt, Human
uuuuuccuuaauccagcuga

SEQ ID NO: 2565125 - RNA, 17 nt, Human
uuuuuaagguuauuuau

SEQ ID NO: 2565126 - RNA, 18 nt, Human
uuuuuccuagcccucuca

SEQ ID NO: 2565127 - RNA, 14 nt, Human
uuuuuccuguccuu

SEQ ID NO: 2565128 - RNA, 14 nt, Human
uuuuucucccucug

SEQ ID NO: 2565129 - RNA, 18 nt, Human
uuuuucucaaaguuuuga

SEQ ID NO: 2565130 - RNA, 19 nt, Human
uuuuucucaugaaucugca

SEQ ID NO: 2565131 - RNA, 16 nt, Human
uuuuucucaaaguuuu

SEQ ID NO: 2565132 - RNA, 18 nt, Human
uuuuucuacuuuuaaaga

SEQ ID NO: 2565133 - RNA, 16 nt, Human
uuuuucuaagagaagu

SEQ ID NO: 2565134 - RNA, 15 nt, Human
uuuuucuaagagaag

SEQ ID NO: 2565135 - RNA, 19 nt, Human
uuuuucucuaggaaauauu

SEQ ID NO: 2565136 - RNA, 11 nt, Human
uuuuucucuaa

SEQ ID NO: 2565137 - RNA, 19 nt, Human
uuuuuccuucagugccuua

SEQ ID NO: 2565138 - RNA, 16 nt, Human
uuuuuccuucccuucu

SEQ ID NO: 2565139 - RNA, 11 nt, Human
uuuuuccuuua

SEQ ID NO: 2565140 - RNA, 22 nt, Human
uuuuucuaaaacuaaauagcau

SEQ ID NO: 2565141 - RNA, 18 nt, Human
uuuuucuaaaacuaaaua

SEQ ID NO: 2565142 - RNA, 11 nt, Human
uuuuuccuuuu

SEQ ID NO: 2565143 - RNA, 17 nt, Human
uuuuuccuuguauuuaa

SEQ ID NO: 2565144 - RNA, 22 nt, Human
uuuuuccuuguccccacacucc

SEQ ID NO: 2565145 - RNA, 15 nt, Human
uuugguuuuguuccc

SEQ ID NO: 2565146 - RNA, 14 nt, Human
uuugguuuuguucc

SEQ ID NO: 2565147 - RNA, 15 nt, Human
uuugguggagauaaa

SEQ ID NO: 2565148 - RNA, 20 nt, Human
uuugguggggguagagcuga

SEQ ID NO: 2565149 - RNA, 15 nt, Human
uuugguggcuuugca

SEQ ID NO: 2565150 - RNA, 16 nt, Human
uuuguauaaaauaauu

SEQ ID NO: 2565151 - RNA, 14 nt, Human
uuuguauaaaauaa

SEQ ID NO: 2565152 - RNA, 13 nt, Human
uuuguauaaaaua

SEQ ID NO: 2565153 - RNA, 19 nt, Human
uuugguuuuguuccccucc

SEQ ID NO: 2565154 - RNA, 16 nt, Human
uuugguuuuguucccc

SEQ ID NO: 2565155 - RNA, 21 nt, Human
uuugguuuuguuccccuccuc

SEQ ID NO: 2565156 - RNA, 21 nt, Human
uuuguaaaaacagcauugcuu

SEQ ID NO: 2565157 - RNA, 17 nt, Human
uuuggaguccccucacc

SEQ ID NO: 2565158 - RNA, 14 nt, Human
uuuggaggugcuua

SEQ ID NO: 2565159 - RNA, 20 nt, Human
uuuggagucagacagaugug

SEQ ID NO: 2565160 - RNA, 18 nt, Human
uuuggagaguuuccugaa

SEQ ID NO: 2565161 - RNA, 11 nt, Human
uuuggaaugug

SEQ ID NO: 2565162 - RNA, 21 nt, Human
uuuggaauuuugugcccccau

SEQ ID NO: 2565163 - RNA, 21 nt, Human
uuuggaugggagugagacaga

SEQ ID NO: 2565164 - RNA, 19 nt, Human
uuuggaugggagugagaca

SEQ ID NO: 2565165 - RNA, 20 nt, Human
uuuggaguccccucaccucc

SEQ ID NO: 2565166 - RNA, 20 nt, Human
uuuggauauaggucagugag

SEQ ID NO: 2565167 - RNA, 21 nt, Human
uuuggucuuuuuuuguauuau

SEQ ID NO: 2565168 - RNA, 20 nt, Human
uuuggucuuuaaugaaaagc

SEQ ID NO: 2565169 - RNA, 14 nt, Human
uuuggucugggacu

SEQ ID NO: 2565170 - RNA, 22 nt, Human
uuugcauggcuccagaaauguc

SEQ ID NO: 2565171 - RNA, 23 nt, Human
uuugcauggcacuugcaucugug

SEQ ID NO: 2565172 - RNA, 14 nt, Human
uuugcauguuccac

SEQ ID NO: 2565173 - RNA, 21 nt, Human
uuugcaugugaaaaucaaaua

SEQ ID NO: 2565174 - RNA, 22 nt, Human
uuugcauggcacuugcaucugu

SEQ ID NO: 2565175 - RNA, 20 nt, Human
uuugcauggcacuugcaucu

SEQ ID NO: 2565176 - RNA, 18 nt, Human
uuugcauggcacuugcau

SEQ ID NO: 2565177 - RNA, 21 nt, Human
uuugcauggaauuuguaaguu

SEQ ID NO: 2565178 - RNA, 15 nt, Human
uuugcuuugugauuu

SEQ ID NO: 2565179 - RNA, 16 nt, Human
uuugcuuugugauuuu

SEQ ID NO: 2565180 - RNA, 14 nt, Human
uuuggaauuuugug

SEQ ID NO: 2565181 - RNA, 12 nt, Human
uuuggaaugcuu

SEQ ID NO: 2565182 - RNA, 14 nt, Human
uuugcuuuuugcua

SEQ ID NO: 2565183 - RNA, 14 nt, Human
uuugcuuuuucuga

SEQ ID NO: 2565184 - RNA, 12 nt, Human
uuugcuuuuucu

SEQ ID NO: 2565185 - RNA, 15 nt, Human
uuugcuuugcccagc

SEQ ID NO: 2565186 - RNA, 15 nt, Human
uuugcuuucugcuca

SEQ ID NO: 2565187 - RNA, 15 nt, Human
uuugcuuugcuuucu

SEQ ID NO: 2565188 - RNA, 18 nt, Human
uuugcuuugcuuucugcu

SEQ ID NO: 2565189 - RNA, 22 nt, Human
uuugcuuuuccuuuguuuuuau

SEQ ID NO: 2565190 - RNA, 18 nt, Human
uuugaauguuaaauaaau

SEQ ID NO: 2565191 - RNA, 16 nt, Human
uuugaauguuaaauaa

SEQ ID NO: 2565192 - RNA, 13 nt, Human
uuugaauguuaaa

SEQ ID NO: 2565193 - RNA, 22 nt, Human
uuugaauguuaaauaaauugua

SEQ ID NO: 2565194 - RNA, 23 nt, Human
uuugcauaguaccaaucauuuua

SEQ ID NO: 2565195 - RNA, 21 nt, Human
uuugaauguuaaauaaauugu

SEQ ID NO: 2565196 - RNA, 15 nt, Human
uuugcaucugaaaau

SEQ ID NO: 2565197 - RNA, 15 nt, Human
uuugcauauguauga

SEQ ID NO: 2565198 - RNA, 16 nt, Human
uuugaaugcauuuugu

SEQ ID NO: 2565199 - RNA, 14 nt, Human
uuugaaugcauuuu

SEQ ID NO: 2565200 - RNA, 17 nt, Human
uuugaauguaugcuuca

SEQ ID NO: 2565201 - RNA, 22 nt, Human
uuugaauguaugcuucauacag

SEQ ID NO: 2565202 - RNA, 22 nt, Human
uuugaaugugauuuuaaagagu

SEQ ID NO: 2565203 - RNA, 16 nt, Human
uuugaaugcuuccuga

SEQ ID NO: 2565204 - RNA, 13 nt, Human
uuugaaugcauuu

SEQ ID NO: 2565205 - RNA, 14 nt, Human
uuugaaugacaaag

SEQ ID NO: 2565206 - RNA, 24 nt, Human
uuugaaugaaaaauuuaagcauug

SEQ ID NO: 2565207 - RNA, 15 nt, Human
uuugaaugaaaaauu

SEQ ID NO: 2565208 - RNA, 21 nt, Human
uuugaaugaaaaauuuaagca

SEQ ID NO: 2565209 - RNA, 22 nt, Human
uuugaaugaaaaauuuaagcau

SEQ ID NO: 2565210 - RNA, 23 nt, Human
uuugaaugaaaaauuuaagcauu

SEQ ID NO: 2565211 - RNA, 13 nt, Human
uuugaaugaaaaa

SEQ ID NO: 2565212 - RNA, 14 nt, Human
uuugaaugaaaaau

SEQ ID NO: 2565213 - RNA, 21 nt, Human
uuugaaucuugucucaaugcu

SEQ ID NO: 2565214 - RNA, 23 nt, Human
uuuuaaaagacaagacuucagua

SEQ ID NO: 2565215 - RNA, 15 nt, Human
uuuuaaaagacaaga

SEQ ID NO: 2565216 - RNA, 14 nt, Human
uuuuaaaagacaag

SEQ ID NO: 2565217 - RNA, 20 nt, Human
uuuuaaaagaugcaauguag

SEQ ID NO: 2565218 - RNA, 21 nt, Human
uuuuaaaagaaugauuaugaa

SEQ ID NO: 2565219 - RNA, 19 nt, Human
uuuguucucagcucccccu

SEQ ID NO: 2565220 - RNA, 15 nt, Human
uuuguugaaauuaug

SEQ ID NO: 2565221 - RNA, 18 nt, Human
uuuuaaagacuuuuauga

SEQ ID NO: 2565222 - RNA, 15 nt, Human
uuuuaaaaguuucaa

SEQ ID NO: 2565223 - RNA, 13 nt, Human
uuuuaaaaguuuc

SEQ ID NO: 2565224 - RNA, 17 nt, Human
uuuuaaagaaugcucuu

SEQ ID NO: 2565225 - RNA, 12 nt, Human
uuuuaaaaguuu

SEQ ID NO: 2565226 - RNA, 16 nt, Human
uuuuaaaaguuauuaa

SEQ ID NO: 2565227 - RNA, 16 nt, Human
uuuguauauuauuucu

SEQ ID NO: 2565228 - RNA, 12 nt, Human
uuuguauauugu

SEQ ID NO: 2565229 - RNA, 21 nt, Human
uuuguauaguugcuugccuga

SEQ ID NO: 2565230 - RNA, 15 nt, Human
uuuguauaguugcuu

SEQ ID NO: 2565231 - RNA, 21 nt, Human
uuuguaucugcaggcagacac

SEQ ID NO: 2565232 - RNA, 13 nt, Human
uuuguaucugaag

SEQ ID NO: 2565233 - RNA, 21 nt, Human
uuuguaucucugaagcauguu

SEQ ID NO: 2565234 - RNA, 20 nt, Human
uuuguaucucugaagcaugu

SEQ ID NO: 2565235 - RNA, 22 nt, Human
uuuguaucugcaggcagacacg

SEQ ID NO: 2565236 - RNA, 17 nt, Human
uuuguauaguaaaguga

SEQ ID NO: 2565237 - RNA, 23 nt, Human
uuuguaaaagaacaguaaacauu

SEQ ID NO: 2565238 - RNA, 16 nt, Human
uuuguauaguaaagug

SEQ ID NO: 2565239 - RNA, 21 nt, Human
uuuguaaaagaacaguaaaca

SEQ ID NO: 2565240 - RNA, 22 nt, Human
uuuguaaaaacagcauugcuuu

SEQ ID NO: 2565241 - RNA, 20 nt, Human
uuuguucgcauggucacaca

SEQ ID NO: 2565242 - RNA, 16 nt, Human
uuuguucuaguuuuca

SEQ ID NO: 2565243 - RNA, 19 nt, Human
uuuguuccccuccuccacu

SEQ ID NO: 2565244 - RNA, 21 nt, Human
uuuguucuggcucuuccaggc

SEQ ID NO: 2565245 - RNA, 15 nt, Human
uuuguucuucuuaaa

SEQ ID NO: 2565246 - RNA, 14 nt, Human
uuuguucuuuuuau

SEQ ID NO: 2565247 - RNA, 20 nt, Human
uuuuaacaaaagcaagacug

SEQ ID NO: 2565248 - RNA, 16 nt, Human
uuuuaacaaaagcaag

SEQ ID NO: 2565249 - RNA, 13 nt, Human
uuuuaaauuuuau

SEQ ID NO: 2565250 - RNA, 20 nt, Human
uuuuaauaauguuucaaaca

SEQ ID NO: 2565251 - RNA, 12 nt, Human
uuuuaauacagg

SEQ ID NO: 2565252 - RNA, 14 nt, Human
uuuuaauauaaauu

SEQ ID NO: 2565253 - RNA, 18 nt, Human
uuuuaauagaauaaaaua

SEQ ID NO: 2565254 - RNA, 21 nt, Human
uuuuaauagaauauaauuauc

SEQ ID NO: 2565255 - RNA, 14 nt, Human
uuuuaaucaugaaa

SEQ ID NO: 2565256 - RNA, 12 nt, Human
uuuuaaucauga

SEQ ID NO: 2565257 - RNA, 22 nt, Human
uuuuaaucagacaaaguaauuc

SEQ ID NO: 2565258 - RNA, 20 nt, Human
uuuuaaucaugaaauuacuu

SEQ ID NO: 2565259 - RNA, 16 nt, Human
uuuuaaucaugaaauu

SEQ ID NO: 2565260 - RNA, 17 nt, Human
uuuuaaugcuccaaaug

SEQ ID NO: 2565261 - RNA, 23 nt, Human
uuuuaauggggguagcagcugga

SEQ ID NO: 2565262 - RNA, 22 nt, Human
uuuuaauggggguagcagcugg

SEQ ID NO: 2565263 - RNA, 20 nt, Human
uuuuaauggggguagcagcu

SEQ ID NO: 2565264 - RNA, 12 nt, Human
uuuuaaugugcu

SEQ ID NO: 2565265 - RNA, 11 nt, Human
uuuuaaugugc

SEQ ID NO: 2565266 - RNA, 18 nt, Human
uuuuaaugugcuguguaa

SEQ ID NO: 2565267 - RNA, 17 nt, Human
uuuuaaugugcugugua

SEQ ID NO: 2565268 - RNA, 15 nt, Human
uuuuaaugugcugug

SEQ ID NO: 2565269 - RNA, 13 nt, Human
uuuuaaugugcug

SEQ ID NO: 2565270 - RNA, 21 nt, Human
uuuuaaugugcuguguaaagu

SEQ ID NO: 2565271 - RNA, 19 nt, Human
uuuuaaugugcuguguaaa

SEQ ID NO: 2565272 - RNA, 13 nt, Human
uuuuaauuaaaua

SEQ ID NO: 2565273 - RNA, 21 nt, Human
uuuuaaauuauaacuuaaaau

SEQ ID NO: 2565274 - RNA, 21 nt, Human
uuuuaaaugcaccuggaauau

SEQ ID NO: 2565275 - RNA, 19 nt, Human
uuuuaaaugcauaaaugca

SEQ ID NO: 2565276 - RNA, 19 nt, Human
uuuuaaauggguagagaaa

SEQ ID NO: 2565277 - RNA, 11 nt, Human
uuuuaaaugca

SEQ ID NO: 2565278 - RNA, 12 nt, Human
uuuuaaaugcac

SEQ ID NO: 2565279 - RNA, 18 nt, Human
uuuuaaauauuuuuucuu

SEQ ID NO: 2565280 - RNA, 20 nt, Human
uuuuaaagagugaaaaauga

SEQ ID NO: 2565281 - RNA, 13 nt, Human
uuuuaaagacaug

SEQ ID NO: 2565282 - RNA, 21 nt, Human
uuuuaaagaccugacaccuuu

SEQ ID NO: 2565283 - RNA, 11 nt, Human
uuucucugcca

SEQ ID NO: 2565284 - RNA, 20 nt, Human
uuucucugauuugcaaaaaa

SEQ ID NO: 2565285 - RNA, 20 nt, Human
uuucucugggguauuugggg

SEQ ID NO: 2565286 - RNA, 13 nt, Human
uuucugagaaaga

SEQ ID NO: 2565287 - RNA, 20 nt, Human
uuucuguucuuucuggcuau

SEQ ID NO: 2565288 - RNA, 15 nt, Human
uuucugagaaagacu

SEQ ID NO: 2565289 - RNA, 15 nt, Human
uuucugaaguggacu

SEQ ID NO: 2565290 - RNA, 20 nt, Human
uuucuaaaggcuaccuuugu

SEQ ID NO: 2565291 - RNA, 21 nt, Human
uuucuaaaggcuaccuuugua

SEQ ID NO: 2565292 - RNA, 12 nt, Human
uuucuaaaguaa

SEQ ID NO: 2565293 - RNA, 20 nt, Human
uuucuagaacaucccugcca

SEQ ID NO: 2565294 - RNA, 22 nt, Human
uuucuagaacaucccugccagc

SEQ ID NO: 2565295 - RNA, 21 nt, Human
uuucuagaauuuaucacacuu

SEQ ID NO: 2565296 - RNA, 16 nt, Human
uuucuagacuugugcu

SEQ ID NO: 2565297 - RNA, 16 nt, Human
uuucuagacuuucugu

SEQ ID NO: 2565298 - RNA, 15 nt, Human
uuucuagacuuucug

SEQ ID NO: 2565299 - RNA, 23 nt, Human
uuucuacucgaguuacagacaaa

SEQ ID NO: 2565300 - RNA, 17 nt, Human
uuucuacucugaacuaa

SEQ ID NO: 2565301 - RNA, 15 nt, Human
uuucuacucugaacu

SEQ ID NO: 2565302 - RNA, 18 nt, Human
uuucuacuuugaagucau

SEQ ID NO: 2565303 - RNA, 22 nt, Human
uuucuacuuugaagucauacca

SEQ ID NO: 2565304 - RNA, 16 nt, Human
uuucuacuuuuaaaga

SEQ ID NO: 2565305 - RNA, 21 nt, Human
uuuccuggacauccucuucug

SEQ ID NO: 2565306 - RNA, 20 nt, Human
uuuccuggacauccucuucu

SEQ ID NO: 2565307 - RNA, 20 nt, Human
uuuccuggacacucagaccu

SEQ ID NO: 2565308 - RNA, 16 nt, Human
uuuccuggacacucag

SEQ ID NO: 2565309 - RNA, 17 nt, Human
uuuccugccuucuucuu

SEQ ID NO: 2565310 - RNA, 16 nt, Human
uuuccugccuucuucu

SEQ ID NO: 2565311 - RNA, 17 nt, Human
uuuccugcccuuccuca

SEQ ID NO: 2565312 - RNA, 22 nt, Human
uuuccugagcuuggccagaagg

SEQ ID NO: 2565313 - RNA, 16 nt, Human
uuuccugaggcugggc

SEQ ID NO: 2565314 - RNA, 12 nt, Human
uuuccugcccug

SEQ ID NO: 2565315 - RNA, 13 nt, Human
uuuccugcccugg

SEQ ID NO: 2565316 - RNA, 12 nt, Human
uuuccucccuuc

SEQ ID NO: 2565317 - RNA, 13 nt, Human
uuuccucccuucu

SEQ ID NO: 2565318 - RNA, 14 nt, Human
uuuccucccuucug

SEQ ID NO: 2565319 - RNA, 17 nt, Human
uuuccucccuucugcua

SEQ ID NO: 2565320 - RNA, 13 nt, Human
uuuccucccucag

SEQ ID NO: 2565321 - RNA, 11 nt, Human
uuuccucccuu

SEQ ID NO: 2565322 - RNA, 16 nt, Human
uuuccuccccagcagg

SEQ ID NO: 2565323 - RNA, 16 nt, Human
uuuccucaucugucca

SEQ ID NO: 2565324 - RNA, 19 nt, Human
uuuccucauuccugaaaga

SEQ ID NO: 2565325 - RNA, 12 nt, Human
uuuccuccccag

SEQ ID NO: 2565326 - RNA, 14 nt, Human
uuuccuccccagca

SEQ ID NO: 2565327 - RNA, 15 nt, Human
uuaccacccccacac

SEQ ID NO: 2565328 - RNA, 12 nt, Human
uuaccaccccca

SEQ ID NO: 2565329 - RNA, 13 nt, Human
uuaccacccccac

SEQ ID NO: 2565330 - RNA, 14 nt, Human
uuuccucaucuguc

SEQ ID NO: 2565331 - RNA, 12 nt, Human
uuuccucaucug

SEQ ID NO: 2565332 - RNA, 21 nt, Human
uuuccucaggcugcuggagga

SEQ ID NO: 2565333 - RNA, 21 nt, Human
uuacauuuuuacaauaaauaa

SEQ ID NO: 2565334 - RNA, 15 nt, Human
uuacauuuuuacaau

SEQ ID NO: 2565335 - RNA, 14 nt, Human
uuacauuuuuacaa

SEQ ID NO: 2565336 - RNA, 13 nt, Human
uuacauuuuuaca

SEQ ID NO: 2565337 - RNA, 12 nt, Human
uuaccaaccugu

SEQ ID NO: 2565338 - RNA, 13 nt, Human
uuaccaaccuguu

SEQ ID NO: 2565339 - RNA, 17 nt, Human
uuacauuuuuacaauaa

SEQ ID NO: 2565340 - RNA, 16 nt, Human
uuacauuuuuacaaua

SEQ ID NO: 2565341 - RNA, 18 nt, Human
uuacauuuuuacaauaaa

SEQ ID NO: 2565342 - RNA, 14 nt, Human
uuaccacagacaua

SEQ ID NO: 2565343 - RNA, 17 nt, Human
uuaccacagacauacua

SEQ ID NO: 2565344 - RNA, 18 nt, Human
uuaccaacuuucuguaaa

SEQ ID NO: 2565345 - RNA, 16 nt, Human
uuaccaacuuucugua

SEQ ID NO: 2565346 - RNA, 15 nt, Human
uuaccaacuuucugu

SEQ ID NO: 2565347 - RNA, 14 nt, Human
uuaccaacuuucug

SEQ ID NO: 2565348 - RNA, 20 nt, Human
uuaccaaccuguuaccuacu

SEQ ID NO: 2565349 - RNA, 13 nt, Human
uuaccaacuuucu

SEQ ID NO: 2565350 - RNA, 14 nt, Human
uuaccaagaagccu

SEQ ID NO: 2565351 - RNA, 13 nt, Human
uuaccaagaagcc

SEQ ID NO: 2565352 - RNA, 18 nt, Human
uuugaaucaucaagucuu

SEQ ID NO: 2565353 - RNA, 19 nt, Human
uuugaauauaaacacuaua

SEQ ID NO: 2565354 - RNA, 22 nt, Human
uuugaagaugccgcauuuggau

SEQ ID NO: 2565355 - RNA, 19 nt, Human
uuugaauccucucucugug

SEQ ID NO: 2565356 - RNA, 12 nt, Human
uuugaaucuugu

SEQ ID NO: 2565357 - RNA, 18 nt, Human
uuugaaucuugucucaau

SEQ ID NO: 2565358 - RNA, 16 nt, Human
uuugaaucuugucuca

SEQ ID NO: 2565359 - RNA, 19 nt, Human
uuugaaucaauaauauauu

SEQ ID NO: 2565360 - RNA, 17 nt, Human
uuugaauccaugcuugg

SEQ ID NO: 2565361 - RNA, 19 nt, Human
uuugaagaaugaacaaauu

SEQ ID NO: 2565362 - RNA, 15 nt, Human
uuugaagaggaaaau

SEQ ID NO: 2565363 - RNA, 17 nt, Human
uuugaagaacaugugag

SEQ ID NO: 2565364 - RNA, 18 nt, Human
uuugaagaacaugugaga

SEQ ID NO: 2565365 - RNA, 16 nt, Human
uuugaacucagaucug

SEQ ID NO: 2565366 - RNA, 21 nt, Human
uuugaacucagaucugucuga

SEQ ID NO: 2565367 - RNA, 17 nt, Human
uuugaacugauaaagau

SEQ ID NO: 2565368 - RNA, 19 nt, Human
uuugaacugauaaagauga

SEQ ID NO: 2565369 - RNA, 15 nt, Human
uuugaacugauaaag

SEQ ID NO: 2565370 - RNA, 14 nt, Human
uuugaacucuucaa

SEQ ID NO: 2565371 - RNA, 13 nt, Human
uuucuucuucccu

SEQ ID NO: 2565372 - RNA, 12 nt, Human
uuucuucuuccc

SEQ ID NO: 2565373 - RNA, 22 nt, Human
uuucuugagguacucugcacau

SEQ ID NO: 2565374 - RNA, 22 nt, Human
uuucuugacucuuguuuucagu

SEQ ID NO: 2565375 - RNA, 21 nt, Human
uuucuugaucaacaucuuuuc

SEQ ID NO: 2565376 - RNA, 23 nt, Human
uuucuugccaaugaggucugaaa

SEQ ID NO: 2565377 - RNA, 16 nt, Human
uuucuugcagaucaaa

SEQ ID NO: 2565378 - RNA, 15 nt, Human
uuucuguugguguau

SEQ ID NO: 2565379 - RNA, 20 nt, Human
uuucugaccaaucacugagu

SEQ ID NO: 2565380 - RNA, 15 nt, Human
uuucuguugaaguuu

SEQ ID NO: 2565381 - RNA, 18 nt, Human
uuucuguuuccuuuuuua

SEQ ID NO: 2565382 - RNA, 18 nt, Human
uuucuguugucauugcug

SEQ ID NO: 2565383 - RNA, 17 nt, Human
uuucuguugucauugcu

SEQ ID NO: 2565384 - RNA, 13 nt, Human
uuucuguugucau

SEQ ID NO: 2565385 - RNA, 22 nt, Human
uuucuguucuguggaaagugua

SEQ ID NO: 2565386 - RNA, 14 nt, Human
uuucuguugccaca

SEQ ID NO: 2565387 - RNA, 22 nt, Human
uuucuuagcuuuuuaauuguug

SEQ ID NO: 2565388 - RNA, 21 nt, Human
uuucuuagcuuuuuaauuguu

SEQ ID NO: 2565389 - RNA, 20 nt, Human
uuucuuagcuuuuuaauugu

SEQ ID NO: 2565390 - RNA, 19 nt, Human
uuucuuagcuuuuuaauug

SEQ ID NO: 2565391 - RNA, 16 nt, Human
uuucuuaaaccuucag

SEQ ID NO: 2565392 - RNA, 23 nt, Human
uuucuguugucauugcuguuguc

SEQ ID NO: 2565393 - RNA, 12 nt, Human
uuucuguuuucu

SEQ ID NO: 2565394 - RNA, 16 nt, Human
uuucuuaaacaaaugu

SEQ ID NO: 2565395 - RNA, 18 nt, Human
uuucuuagggaaggauac

SEQ ID NO: 2565396 - RNA, 23 nt, Human
uuucuuagggaaggauacaaaag

SEQ ID NO: 2565397 - RNA, 17 nt, Human
uuucuuauuucauuucu

SEQ ID NO: 2565398 - RNA, 16 nt, Human
uuucuuagugccugug

SEQ ID NO: 2565399 - RNA, 18 nt, Human
uuucuuauuuaacuuaac

SEQ ID NO: 2565400 - RNA, 17 nt, Human
uuucuuaucuucugcaa

SEQ ID NO: 2565401 - RNA, 13 nt, Human
uuucuucucccuc

SEQ ID NO: 2565402 - RNA, 13 nt, Human
uuucuucucugcu

SEQ ID NO: 2565403 - RNA, 23 nt, Human
uuucuucuguauuuuuuuuucua

SEQ ID NO: 2565404 - RNA, 12 nt, Human
uuucuucuauuu

SEQ ID NO: 2565405 - RNA, 16 nt, Human
uuucuuccucugcuga

SEQ ID NO: 2565406 - RNA, 14 nt, Human
uuucuuccucugcu

SEQ ID NO: 2565407 - RNA, 12 nt, Human
uuucuucucccu

SEQ ID NO: 2565408 - RNA, 13 nt, Human
uuucuuccucugc

SEQ ID NO: 2565409 - RNA, 11 nt, Human
uuucuuccucu

SEQ ID NO: 2565410 - RNA, 18 nt, Human
uuucuucccuguauuuuc

SEQ ID NO: 2565411 - RNA, 18 nt, Human
uuucuucaugcaaugaca

SEQ ID NO: 2565412 - RNA, 19 nt, Human
uuucuucaugcaaugacau

SEQ ID NO: 2565413 - RNA, 22 nt, Human
uuucuucaugcaaugacaucuu

SEQ ID NO: 2565414 - RNA, 14 nt, Human
uuucuucccaucac

SEQ ID NO: 2565415 - RNA, 21 nt, Human
uuucuucacuguugaaaauua

SEQ ID NO: 2565416 - RNA, 16 nt, Human
uuucuucaugcaauga

SEQ ID NO: 2565417 - RNA, 18 nt, Human
uuucuucaacaucaaugu

SEQ ID NO: 2565418 - RNA, 21 nt, Human
uuucuucaacaucaauguuca

SEQ ID NO: 2565419 - RNA, 18 nt, Human
guauagaugcaagauauu

SEQ ID NO: 2565420 - RNA, 14 nt, Human
guauagaugcaaga

SEQ ID NO: 2565421 - RNA, 15 nt, Human
guauagagauaugca

SEQ ID NO: 2565422 - RNA, 16 nt, Human
guauagacuccugaaa

SEQ ID NO: 2565423 - RNA, 16 nt, Human
guauagaugcaagaua

SEQ ID NO: 2565424 - RNA, 14 nt, Human
guauagcuguauug

SEQ ID NO: 2565425 - RNA, 17 nt, Human
guauagcuguauugaau

SEQ ID NO: 2565426 - RNA, 16 nt, Human
guauagcuguauugaa

SEQ ID NO: 2565427 - RNA, 15 nt, Human
guauagcuguauuga

SEQ ID NO: 2565428 - RNA, 23 nt, Human
guauagcuguauugaaucaugua

SEQ ID NO: 2565429 - RNA, 19 nt, Human
guauagcuguauugaauca

SEQ ID NO: 2565430 - RNA, 19 nt, Human
guauaguacuggcauggua

SEQ ID NO: 2565431 - RNA, 23 nt, Human
guauagaaaugcugguuuuucag

SEQ ID NO: 2565432 - RNA, 22 nt, Human
guauagaaaugcugguuuuuca

SEQ ID NO: 2565433 - RNA, 15 nt, Human
guauagaaaugcugg

SEQ ID NO: 2565434 - RNA, 14 nt, Human
guauagaaaugcug

SEQ ID NO: 2565435 - RNA, 16 nt, Human
guauaguguaaaauaa

SEQ ID NO: 2565436 - RNA, 15 nt, Human
guauaguguaaaaua

SEQ ID NO: 2565437 - RNA, 14 nt, Human
guauaguguaaaau

SEQ ID NO: 2565438 - RNA, 13 nt, Human
guauaguguaaaa

SEQ ID NO: 2565439 - RNA, 19 nt, Human
guauaguuaggauagcauu

SEQ ID NO: 2565440 - RNA, 18 nt, Human
guauagguagauguucag

SEQ ID NO: 2565441 - RNA, 16 nt, Human
guauauaaaauauuuu

SEQ ID NO: 2565442 - RNA, 17 nt, Human
guauaguugcuugccug

SEQ ID NO: 2565443 - RNA, 18 nt, Human
guauaguugcuugccuga

SEQ ID NO: 2565444 - RNA, 16 nt, Human
guauaguugcuugccu

SEQ ID NO: 2565445 - RNA, 12 nt, Human
guauaguugcuu

SEQ ID NO: 2565446 - RNA, 22 nt, Human
guauauaaaggaaaaaagagaa

SEQ ID NO: 2565447 - RNA, 16 nt, Human
guauauacgcaucuau

SEQ ID NO: 2565448 - RNA, 14 nt, Human
guauauauucccaa

SEQ ID NO: 2565449 - RNA, 13 nt, Human
guauauauuccca

SEQ ID NO: 2565450 - RNA, 20 nt, Human
guauauauguguguuuaaau

SEQ ID NO: 2565451 - RNA, 19 nt, Human
guauauauguguguuuaaa

SEQ ID NO: 2565452 - RNA, 18 nt, Human
guauauauguguguuuaa

SEQ ID NO: 2565453 - RNA, 16 nt, Human
guauauauguguguuu

SEQ ID NO: 2565454 - RNA, 14 nt, Human
guauauaugugugu

SEQ ID NO: 2565455 - RNA, 13 nt, Human
guauauaugugug

SEQ ID NO: 2565456 - RNA, 22 nt, Human
guauauaucugcuucaguggag

SEQ ID NO: 2565457 - RNA, 12 nt, Human
guauauaugugu

SEQ ID NO: 2565458 - RNA, 20 nt, Human
guauauauaugccaugaugg

SEQ ID NO: 2565459 - RNA, 21 nt, Human
guauauauaugccaugaugga

SEQ ID NO: 2565460 - RNA, 13 nt, Human
guauauacuuuuu

SEQ ID NO: 2565461 - RNA, 14 nt, Human
guauauauagaauc

SEQ ID NO: 2565462 - RNA, 20 nt, Human
guauauaaugguuucaaaga

SEQ ID NO: 2565463 - RNA, 12 nt, Human
guauauacuuuu

SEQ ID NO: 2565464 - RNA, 15 nt, Human
guauauagcccagcc

SEQ ID NO: 2565465 - RNA, 16 nt, Human
guauauguugggugca

SEQ ID NO: 2565466 - RNA, 21 nt, Human
guauaugucucaggucccugc

SEQ ID NO: 2565467 - RNA, 15 nt, Human
guauaugucucaggu

SEQ ID NO: 2565468 - RNA, 13 nt, Human
guauaugucucag

SEQ ID NO: 2565469 - RNA, 23 nt, Human
guauccuccagguuuuucaauua

SEQ ID NO: 2565470 - RNA, 21 nt, Human
guauccuccagguuuuucaau

SEQ ID NO: 2565471 - RNA, 17 nt, Human
guauccuggggcucccu

SEQ ID NO: 2565472 - RNA, 13 nt, Human
guauccuggggcu

SEQ ID NO: 2565473 - RNA, 16 nt, Human
guauauguaugugugu

SEQ ID NO: 2565474 - RNA, 17 nt, Human
guauauguaugugugua

SEQ ID NO: 2565475 - RNA, 21 nt, Human
guauaucuggacaagccaacu

SEQ ID NO: 2565476 - RNA, 18 nt, Human
guauaucuggacaagcca

SEQ ID NO: 2565477 - RNA, 22 nt, Human
guauaugucaagccauaauugu

SEQ ID NO: 2565478 - RNA, 17 nt, Human
guauaucuggacaagcc

SEQ ID NO: 2565479 - RNA, 19 nt, Human
guauaucagaaaagggaag

SEQ ID NO: 2565480 - RNA, 14 nt, Human
guauaucagaaaag

SEQ ID NO: 2565481 - RNA, 13 nt, Human
guaucuccaggau

SEQ ID NO: 2565482 - RNA, 14 nt, Human
guaucuccaggauu

SEQ ID NO: 2565483 - RNA, 17 nt, Human
guaucuaugcauuuucu

SEQ ID NO: 2565484 - RNA, 20 nt, Human
guaucuauauauguguaugu

SEQ ID NO: 2565485 - RNA, 18 nt, Human
guaucuagugcagcugau

SEQ ID NO: 2565486 - RNA, 14 nt, Human
guaucugaaggaga

SEQ ID NO: 2565487 - RNA, 11 nt, Human
guaucugaagg

SEQ ID NO: 2565488 - RNA, 20 nt, Human
guaucucugaagcauguuuc

SEQ ID NO: 2565489 - RNA, 19 nt, Human
guaucucugaagcauguuu

SEQ ID NO: 2565490 - RNA, 17 nt, Human
guaucucugaagcaugu

SEQ ID NO: 2565491 - RNA, 20 nt, Human
guaucucggaccuuucagcu

SEQ ID NO: 2565492 - RNA, 15 nt, Human
guaucuccucgcaag

SEQ ID NO: 2565493 - RNA, 18 nt, Human
guauccugggggacccaa

SEQ ID NO: 2565494 - RNA, 20 nt, Human
guauccugugacauguaaca

SEQ ID NO: 2565495 - RNA, 15 nt, Human
guaucgauguuaugu

SEQ ID NO: 2565496 - RNA, 14 nt, Human
guaucggagacagu

SEQ ID NO: 2565497 - RNA, 15 nt, Human
guaucggagacagug

SEQ ID NO: 2565498 - RNA, 15 nt, Human
guaucguaaccagcc

SEQ ID NO: 2565499 - RNA, 17 nt, Human
guaucggagacagugau

SEQ ID NO: 2565500 - RNA, 16 nt, Human
guaucguauagcugua

SEQ ID NO: 2565501 - RNA, 15 nt, Human
guaucguauagcugu

SEQ ID NO: 2565502 - RNA, 17 nt, Human
guaucguaaccagccag

SEQ ID NO: 2565503 - RNA, 16 nt, Human
guaucguaaccagcca

SEQ ID NO: 2565504 - RNA, 20 nt, Human
guaucuagacccaucuucuu

SEQ ID NO: 2565505 - RNA, 24 nt, Human
guaucuagcaaucacaacacuggc

SEQ ID NO: 2565506 - RNA, 15 nt, Human
guaucuagugcagcu

SEQ ID NO: 2565507 - RNA, 16 nt, Human
guaucuagugcagcug

SEQ ID NO: 2565508 - RNA, 17 nt, Human
guaucuagugcagcuga

SEQ ID NO: 2565509 - RNA, 13 nt, Human
guaucuagugcag

SEQ ID NO: 2565510 - RNA, 14 nt, Human
guaucuagcaauca

SEQ ID NO: 2565511 - RNA, 19 nt, Human
guaugaauaaagacaccua

SEQ ID NO: 2565512 - RNA, 18 nt, Human
guaugaauaaagacaccu

SEQ ID NO: 2565513 - RNA, 13 nt, Human
guaugaggcauuu

SEQ ID NO: 2565514 - RNA, 15 nt, Human
guaugaggcauuugu

SEQ ID NO: 2565515 - RNA, 15 nt, Human
guaugaaucuaugcc

SEQ ID NO: 2565516 - RNA, 20 nt, Human
guaugaaucuaugccaaaga

SEQ ID NO: 2565517 - RNA, 16 nt, Human
guaugaaucuaugcca

SEQ ID NO: 2565518 - RNA, 21 nt, Human
guaugaaucuaugccaaagau

SEQ ID NO: 2565519 - RNA, 15 nt, Human
guaugaaugcagugg

SEQ ID NO: 2565520 - RNA, 14 nt, Human
guaugacuaaagag

SEQ ID NO: 2565521 - RNA, 18 nt, Human
guaugacuaaagagagaa

SEQ ID NO: 2565522 - RNA, 12 nt, Human
guaugagcugag

SEQ ID NO: 2565523 - RNA, 20 nt, Human
guaugacuaaagagagaaug

SEQ ID NO: 2565524 - RNA, 14 nt, Human
guaucuucauguau

SEQ ID NO: 2565525 - RNA, 15 nt, Human
guaucuguucuuuaa

SEQ ID NO: 2565526 - RNA, 21 nt, Human
guaucuugggggacagggcug

SEQ ID NO: 2565527 - RNA, 23 nt, Human
guaucuuguuuuuccacuacugc

SEQ ID NO: 2565528 - RNA, 16 nt, Human
guaucuuuuuucaaaa

SEQ ID NO: 2565529 - RNA, 23 nt, Human
guaugaaagauggcugugccucu

SEQ ID NO: 2565530 - RNA, 22 nt, Human
guaugaaagauggcugugccuc

SEQ ID NO: 2565531 - RNA, 12 nt, Human
guaucuggugac

SEQ ID NO: 2565532 - RNA, 12 nt, Human
guaucugagcag

SEQ ID NO: 2565533 - RNA, 19 nt, Human
guaucuggugacuuuccuc

SEQ ID NO: 2565534 - RNA, 17 nt, Human
guaucugcaggcagaca

SEQ ID NO: 2565535 - RNA, 16 nt, Human
guaucugcaggcagac

SEQ ID NO: 2565536 - RNA, 19 nt, Human
guaucugcaggcagacacg

SEQ ID NO: 2565537 - RNA, 18 nt, Human
guaucugcaggcagacac

SEQ ID NO: 2565538 - RNA, 16 nt, Human
guaucuguaucucucu

SEQ ID NO: 2565539 - RNA, 14 nt, Human
guaucugggaacug

SEQ ID NO: 2565540 - RNA, 17 nt, Human
guaugaggcauuuguuu

SEQ ID NO: 2565541 - RNA, 20 nt, Human
guaugaggcauuuguuugaa

SEQ ID NO: 2565542 - RNA, 20 nt, Human
guaugagucaaugugcagug

SEQ ID NO: 2565543 - RNA, 14 nt, Human
guaugagcugaggg

SEQ ID NO: 2565544 - RNA, 21 nt, Human
guaugagucaaugugcagugu

SEQ ID NO: 2565545 - RNA, 20 nt, Human
guaugaucacggcucacugc

SEQ ID NO: 2565546 - RNA, 17 nt, Human
guauguuagugcaaauu

SEQ ID NO: 2565547 - RNA, 16 nt, Human
guauguguguguaugc

SEQ ID NO: 2565548 - RNA, 18 nt, Human
guauguguguguaugcua

SEQ ID NO: 2565549 - RNA, 15 nt, Human
guauguguguguaug

SEQ ID NO: 2565550 - RNA, 13 nt, Human
guauguguguaga

SEQ ID NO: 2565551 - RNA, 14 nt, Human
guauguguguaugg

SEQ ID NO: 2565552 - RNA, 21 nt, Human
guaugaucacggcucacugca

SEQ ID NO: 2565553 - RNA, 11 nt, Human
guauguugucc

SEQ ID NO: 2565554 - RNA, 17 nt, Human
guauguugucaaagaga

SEQ ID NO: 2565555 - RNA, 16 nt, Human
guauguugucaaagag

SEQ ID NO: 2565556 - RNA, 13 nt, Human
guauguugucaaa

SEQ ID NO: 2565557 - RNA, 17 nt, Human
guauguugaagccuuug

SEQ ID NO: 2565558 - RNA, 18 nt, Human
guauguuaagcucuuuau

SEQ ID NO: 2565559 - RNA, 17 nt, Human
guauguguuugugugug

SEQ ID NO: 2565560 - RNA, 16 nt, Human
guauguguuugugugu

SEQ ID NO: 2565561 - RNA, 21 nt, Human
guauguuugcacacuugugug

SEQ ID NO: 2565562 - RNA, 14 nt, Human
guauguuuuagcau

SEQ ID NO: 2565563 - RNA, 16 nt, Human
guauguuuuagcaugu

SEQ ID NO: 2565564 - RNA, 14 nt, Human
guauguuugcacac

SEQ ID NO: 2565565 - RNA, 21 nt, Human
guauguuguccaauuguugac

SEQ ID NO: 2565566 - RNA, 18 nt, Human
guauguuguccaauuguu

SEQ ID NO: 2565567 - RNA, 18 nt, Human
guauuaagaaaaucuauu

SEQ ID NO: 2565568 - RNA, 13 nt, Human
guauuaaagacag

SEQ ID NO: 2565569 - RNA, 19 nt, Human
guauuaaaaaaaacaaaaa

SEQ ID NO: 2565570 - RNA, 22 nt, Human
guauuaaaaaaaacaaaaagaa

SEQ ID NO: 2565571 - RNA, 19 nt, Human
guauguuuuuguguauuug

SEQ ID NO: 2565572 - RNA, 15 nt, Human
guauuaaaaaaaaca

SEQ ID NO: 2565573 - RNA, 23 nt, Human
guauguuuuuguguauuuguuaa

SEQ ID NO: 2565574 - RNA, 19 nt, Human
guaguaaaaauuaaaaaaa

SEQ ID NO: 2565575 - RNA, 20 nt, Human
guagguuggaagcuagcucc

SEQ ID NO: 2565576 - RNA, 17 nt, Human
guagguucagccaaggu

SEQ ID NO: 2565577 - RNA, 14 nt, Human
guagguugggagaa

SEQ ID NO: 2565578 - RNA, 16 nt, Human
guaguaccaaaugcuu

SEQ ID NO: 2565579 - RNA, 15 nt, Human
guaguaauugacaug

SEQ ID NO: 2565580 - RNA, 19 nt, Human
guaguaccaaaugcuuuaa

SEQ ID NO: 2565581 - RNA, 21 nt, Human
guaguacuccugcaaaauuuu

SEQ ID NO: 2565582 - RNA, 21 nt, Human
guaguagcccuuucugugugc

SEQ ID NO: 2565583 - RNA, 20 nt, Human
guaguagcccuuucugugug

SEQ ID NO: 2565584 - RNA, 17 nt, Human
guaguagcccuuucugu

SEQ ID NO: 2565585 - RNA, 22 nt, Human
guaguacuccugcaaaauuuua

SEQ ID NO: 2565586 - RNA, 14 nt, Human
guagucaggugccu

SEQ ID NO: 2565587 - RNA, 13 nt, Human
guaguaugauggg

SEQ ID NO: 2565588 - RNA, 14 nt, Human
guaguaucaaauau

SEQ ID NO: 2565589 - RNA, 22 nt, Human
guaguagucucauuacuuuuga

SEQ ID NO: 2565590 - RNA, 16 nt, Human
guaguauaaagaaaag

SEQ ID NO: 2565591 - RNA, 18 nt, Human
guaguagggucaggccac

SEQ ID NO: 2565592 - RNA, 17 nt, Human
guagggugggccuucag

SEQ ID NO: 2565593 - RNA, 22 nt, Human
guagggugggccuucagggagu

SEQ ID NO: 2565594 - RNA, 16 nt, Human
guaggguuauaauaau

SEQ ID NO: 2565595 - RNA, 23 nt, Human
guaggguuuaauccccaguaaaa

SEQ ID NO: 2565596 - RNA, 16 nt, Human
guagguucagccaagg

SEQ ID NO: 2565597 - RNA, 15 nt, Human
guagguucagccaag

SEQ ID NO: 2565598 - RNA, 23 nt, Human
guagguaucauuuucugcauuua

SEQ ID NO: 2565599 - RNA, 22 nt, Human
guaggggagggguugccacagg

SEQ ID NO: 2565600 - RNA, 20 nt, Human
guaggggucaaagaaaugcu

SEQ ID NO: 2565601 - RNA, 15 nt, Human
guaggggugugugug

SEQ ID NO: 2565602 - RNA, 22 nt, Human
guaggguaauuaguaacaugug

SEQ ID NO: 2565603 - RNA, 17 nt, Human
guaggguaaggugccuu

SEQ ID NO: 2565604 - RNA, 14 nt, Human
guagggugggccuu

SEQ ID NO: 2565605 - RNA, 22 nt, Human
guagggucaggccacggcagcc

SEQ ID NO: 2565606 - RNA, 21 nt, Human
guagggucaggccacggcagc

SEQ ID NO: 2565607 - RNA, 17 nt, Human
guauaauucacauugua

SEQ ID NO: 2565608 - RNA, 18 nt, Human
guauaauuguaucguaua

SEQ ID NO: 2565609 - RNA, 19 nt, Human
guauacaacccuggcauua

SEQ ID NO: 2565610 - RNA, 22 nt, Human
guauaauuuuuuaaaguuacuu

SEQ ID NO: 2565611 - RNA, 15 nt, Human
guauaccugauuuuu

SEQ ID NO: 2565612 - RNA, 15 nt, Human
guauacuguaggcac

SEQ ID NO: 2565613 - RNA, 21 nt, Human
guauacaguggauuaauuaaa

SEQ ID NO: 2565614 - RNA, 12 nt, Human
guauacaugcca

SEQ ID NO: 2565615 - RNA, 15 nt, Human
guaguguuggagaag

SEQ ID NO: 2565616 - RNA, 14 nt, Human
guaguguuggagaa

SEQ ID NO: 2565617 - RNA, 16 nt, Human
guagucuugaugacca

SEQ ID NO: 2565618 - RNA, 14 nt, Human
guagugagauagca

SEQ ID NO: 2565619 - RNA, 14 nt, Human
guagucucugugcu

SEQ ID NO: 2565620 - RNA, 12 nt, Human
guagucuugaug

SEQ ID NO: 2565621 - RNA, 18 nt, Human
guagucucauuacuuuug

SEQ ID NO: 2565622 - RNA, 12 nt, Human
guagucccagcc

SEQ ID NO: 2565623 - RNA, 16 nt, Human
guaguccgugcugaca

SEQ ID NO: 2565624 - RNA, 22 nt, Human
guaguccgugcugacagcugcu

SEQ ID NO: 2565625 - RNA, 23 nt, Human
guaguccgugcugacagcugcuc

SEQ ID NO: 2565626 - RNA, 12 nt, Human
guaguccuguga

SEQ ID NO: 2565627 - RNA, 22 nt, Human
guaguccucauaaaaagcaaaa

SEQ ID NO: 2565628 - RNA, 12 nt, Human
guagucccagcu

SEQ ID NO: 2565629 - RNA, 13 nt, Human
guagucccagcua

SEQ ID NO: 2565630 - RNA, 17 nt, Human
guagucaagauuguguu

SEQ ID NO: 2565631 - RNA, 16 nt, Human
guagggcgggaggaug

SEQ ID NO: 2565632 - RNA, 23 nt, Human
guaggcuccugccaguguggaac

SEQ ID NO: 2565633 - RNA, 19 nt, Human
guaggcucaacuagggagu

SEQ ID NO: 2565634 - RNA, 17 nt, Human
guaggcucaacuaggga

SEQ ID NO: 2565635 - RNA, 15 nt, Human
guagggaacucuggg

SEQ ID NO: 2565636 - RNA, 18 nt, Human
guagcccccuggccucug

SEQ ID NO: 2565637 - RNA, 19 nt, Human
guagcccccuggccucugu

SEQ ID NO: 2565638 - RNA, 23 nt, Human
guagcccccuggccucugugccu

SEQ ID NO: 2565639 - RNA, 22 nt, Human
guagggcgggaggauguucugg

SEQ ID NO: 2565640 - RNA, 21 nt, Human
guagggcgggaggauguucug

SEQ ID NO: 2565641 - RNA, 13 nt, Human
guagggagggcgg

SEQ ID NO: 2565642 - RNA, 12 nt, Human
guagggcugacu

SEQ ID NO: 2565643 - RNA, 21 nt, Human
guagggcugccaccaagguga

SEQ ID NO: 2565644 - RNA, 23 nt, Human
guagggcgggaggauguucuggg

SEQ ID NO: 2565645 - RNA, 14 nt, Human
guagccaugggacc

SEQ ID NO: 2565646 - RNA, 23 nt, Human
guagccaucccaugaacacacug

SEQ ID NO: 2565647 - RNA, 20 nt, Human
guagccaucccaugaacaca

SEQ ID NO: 2565648 - RNA, 23 nt, Human
guagccagggggacuagccccug

SEQ ID NO: 2565649 - RNA, 23 nt, Human
guagccaggguguggcccugcca

SEQ ID NO: 2565650 - RNA, 22 nt, Human
guagccagggggacuagccccu

SEQ ID NO: 2565651 - RNA, 19 nt, Human
guagccagggggacuagcc

SEQ ID NO: 2565652 - RNA, 19 nt, Human
guagccagcacacagggca

SEQ ID NO: 2565653 - RNA, 21 nt, Human
guagccagcacacagggcagu

SEQ ID NO: 2565654 - RNA, 16 nt, Human
guagcccccuggccuc

SEQ ID NO: 2565655 - RNA, 17 nt, Human
guagcccccuggccucu

SEQ ID NO: 2565656 - RNA, 21 nt, Human
guagcccacacuugagaggau

SEQ ID NO: 2565657 - RNA, 15 nt, Human
guagccaugggacca

SEQ ID NO: 2565658 - RNA, 16 nt, Human
guagcccacucugcuc

SEQ ID NO: 2565659 - RNA, 20 nt, Human
guagcccacucugcucgccu

SEQ ID NO: 2565660 - RNA, 15 nt, Human
guagccagcacacag

SEQ ID NO: 2565661 - RNA, 18 nt, Human
guagccagcacacagggc

SEQ ID NO: 2565662 - RNA, 14 nt, Human
guagccaaagguuc

SEQ ID NO: 2565663 - RNA, 19 nt, Human
guagcauuucauucuucuc

SEQ ID NO: 2565664 - RNA, 17 nt, Human
guagcauuucauucuuc

SEQ ID NO: 2565665 - RNA, 18 nt, Human
guagccaaggugggcuga

SEQ ID NO: 2565666 - RNA, 19 nt, Human
guagccaaggugggcugag

SEQ ID NO: 2565667 - RNA, 21 nt, Human
guagcauguugagccaggccu

SEQ ID NO: 2565668 - RNA, 15 nt, Human
guagcauuacagugg

SEQ ID NO: 2565669 - RNA, 18 nt, Human
guagcagguaccacugau

SEQ ID NO: 2565670 - RNA, 13 nt, Human
guagcauacauuu

SEQ ID NO: 2565671 - RNA, 16 nt, Human
guagcaucuucuggag

SEQ ID NO: 2565672 - RNA, 12 nt, Human
guagcaugagag

SEQ ID NO: 2565673 - RNA, 15 nt, Human
guagcauuucauucu

SEQ ID NO: 2565674 - RNA, 13 nt, Human
guagcauuucauu

SEQ ID NO: 2565675 - RNA, 15 nt, Human
guagauuuucuuuaa

SEQ ID NO: 2565676 - RNA, 13 nt, Human
guagauuuucuuu

SEQ ID NO: 2565677 - RNA, 14 nt, Human
guagauuuuccaaa

SEQ ID NO: 2565678 - RNA, 16 nt, Human
guagauuuucuuuaaa

SEQ ID NO: 2565679 - RNA, 19 nt, Human
guagauuuauuucaucaua

SEQ ID NO: 2565680 - RNA, 21 nt, Human
guagauuuauuucaucauauu

SEQ ID NO: 2565681 - RNA, 21 nt, Human
guagauuuuaaaaguuauuaa

SEQ ID NO: 2565682 - RNA, 16 nt, Human
guagauucuguggaac

SEQ ID NO: 2565683 - RNA, 13 nt, Human
guagauucugugg

SEQ ID NO: 2565684 - RNA, 19 nt, Human
guagauucuguggaacaag

SEQ ID NO: 2565685 - RNA, 12 nt, Human
guagauuuauuu

SEQ ID NO: 2565686 - RNA, 16 nt, Human
guagauuuauuucauc

SEQ ID NO: 2565687 - RNA, 21 nt, Human
guagcaaguucuagagaagag

SEQ ID NO: 2565688 - RNA, 20 nt, Human
guagcaaguucuagagaaga

SEQ ID NO: 2565689 - RNA, 15 nt, Human
guagcagggaaaaua

SEQ ID NO: 2565690 - RNA, 17 nt, Human
guagcagguaccacuga

SEQ ID NO: 2565691 - RNA, 15 nt, Human
guagcaguagaugca

SEQ ID NO: 2565692 - RNA, 14 nt, Human
guagcagcuggacu

SEQ ID NO: 2565693 - RNA, 13 nt, Human
guagcagcuggac

SEQ ID NO: 2565694 - RNA, 12 nt, Human
guagcagcugga

SEQ ID NO: 2565695 - RNA, 11 nt, Human
guagcagcugg

SEQ ID NO: 2565696 - RNA, 13 nt, Human
guagcacuuacug

SEQ ID NO: 2565697 - RNA, 18 nt, Human
guagaguuaagaagcugu

SEQ ID NO: 2565698 - RNA, 17 nt, Human
guagaguuaagaagcug

SEQ ID NO: 2565699 - RNA, 16 nt, Human
guagaguuaagaagcu

SEQ ID NO: 2565700 - RNA, 15 nt, Human
guagaguuaagaagc

SEQ ID NO: 2565701 - RNA, 14 nt, Human
guagaguuaagaag

SEQ ID NO: 2565702 - RNA, 12 nt, Human
guagaguuaaga

SEQ ID NO: 2565703 - RNA, 19 nt, Human
gcuauaggcuggagaagcu

SEQ ID NO: 2565704 - RNA, 18 nt, Human
gcuauaggugcuacaaaa

SEQ ID NO: 2565705 - RNA, 15 nt, Human
guagagugugccuga

SEQ ID NO: 2565706 - RNA, 14 nt, Human
guagauagaaauaa

SEQ ID NO: 2565707 - RNA, 20 nt, Human
guagaguuugaaggagguga

SEQ ID NO: 2565708 - RNA, 12 nt, Human
guagauagaaau

SEQ ID NO: 2565709 - RNA, 17 nt, Human
guagaucaguggucucc

SEQ ID NO: 2565710 - RNA, 19 nt, Human
guagaucaccagaauaaac

SEQ ID NO: 2565711 - RNA, 17 nt, Human
guagaucaccagaauaa

SEQ ID NO: 2565712 - RNA, 19 nt, Human
guagauauuuuuucugaau

SEQ ID NO: 2565713 - RNA, 13 nt, Human
guagauagaaaua

SEQ ID NO: 2565714 - RNA, 23 nt, Human
guagaugaaaaagcauguacagu

SEQ ID NO: 2565715 - RNA, 22 nt, Human
guagaugaaaaagcauguacag

SEQ ID NO: 2565716 - RNA, 21 nt, Human
guagaugaaaaagcauguaca

SEQ ID NO: 2565717 - RNA, 17 nt, Human
guagaucagagcagcag

SEQ ID NO: 2565718 - RNA, 17 nt, Human
guagaugggagggaggc

SEQ ID NO: 2565719 - RNA, 21 nt, Human
guagaugggagggaggcucag

SEQ ID NO: 2565720 - RNA, 21 nt, Human
guagaugugcauuuuugugaa

SEQ ID NO: 2565721 - RNA, 23 nt, Human
guagauguucagauugcuuugau

SEQ ID NO: 2565722 - RNA, 17 nt, Human
guccccaccgcagacag

SEQ ID NO: 2565723 - RNA, 17 nt, Human
guccccaccccugcccc

SEQ ID NO: 2565724 - RNA, 16 nt, Human
guccccaccccugccc

SEQ ID NO: 2565725 - RNA, 15 nt, Human
guccccaccccugcc

SEQ ID NO: 2565726 - RNA, 14 nt, Human
guccccaccccugc

SEQ ID NO: 2565727 - RNA, 12 nt, Human
guccccaccccu

SEQ ID NO: 2565728 - RNA, 17 nt, Human
gucccuaauaaagcugu

SEQ ID NO: 2565729 - RNA, 16 nt, Human
gucccuaauaaagcug

SEQ ID NO: 2565730 - RNA, 18 nt, Human
gucccauuucucacugag

SEQ ID NO: 2565731 - RNA, 16 nt, Human
gucccauuucucacug

SEQ ID NO: 2565732 - RNA, 17 nt, Human
guccccaaaccugcaag

SEQ ID NO: 2565733 - RNA, 18 nt, Human
guccccaaaccugcaagg

SEQ ID NO: 2565734 - RNA, 22 nt, Human
guccccaaauccgaaccuccuc

SEQ ID NO: 2565735 - RNA, 12 nt, Human
guccccacacuc

SEQ ID NO: 2565736 - RNA, 11 nt, Human
guccccacacu

SEQ ID NO: 2565737 - RNA, 21 nt, Human
guccccaagauucacaccuga

SEQ ID NO: 2565738 - RNA, 24 nt, Human
guccccacacuccuacaccuaacu

SEQ ID NO: 2565739 - RNA, 13 nt, Human
gucccauguggug

SEQ ID NO: 2565740 - RNA, 22 nt, Human
gucccauggacacuccagugcc

SEQ ID NO: 2565741 - RNA, 21 nt, Human
gucccauggacacuccagugc

SEQ ID NO: 2565742 - RNA, 17 nt, Human
gucccaugaucccugug

SEQ ID NO: 2565743 - RNA, 23 nt, Human
gucccauggacacuccagugcca

SEQ ID NO: 2565744 - RNA, 17 nt, Human
gucccauccaggcaguc

SEQ ID NO: 2565745 - RNA, 16 nt, Human
gucccauccaggcagu

SEQ ID NO: 2565746 - RNA, 15 nt, Human
gucccauccaggcag

SEQ ID NO: 2565747 - RNA, 14 nt, Human
gucccauccaggca

SEQ ID NO: 2565748 - RNA, 13 nt, Human
gucccauccaggc

SEQ ID NO: 2565749 - RNA, 18 nt, Human
gucccauauccugccuca

SEQ ID NO: 2565750 - RNA, 16 nt, Human
gucccauauccugccu

SEQ ID NO: 2565751 - RNA, 15 nt, Human
gucccauauccugcc

SEQ ID NO: 2565752 - RNA, 23 nt, Human
gucccaugacccaccccugugcu

SEQ ID NO: 2565753 - RNA, 22 nt, Human
gucccaugacccaccccugugc

SEQ ID NO: 2565754 - RNA, 20 nt, Human
gucccaugacccaccccugu

SEQ ID NO: 2565755 - RNA, 19 nt, Human
gucccaugacccaccccug

SEQ ID NO: 2565756 - RNA, 18 nt, Human
gucccaugacccaccccu

SEQ ID NO: 2565757 - RNA, 17 nt, Human
gucccaugacccacccc

SEQ ID NO: 2565758 - RNA, 16 nt, Human
gucccaugacccaccc

SEQ ID NO: 2565759 - RNA, 20 nt, Human
gucccaggagcugcccagag

SEQ ID NO: 2565760 - RNA, 14 nt, Human
gucccauauccugc

SEQ ID NO: 2565761 - RNA, 18 nt, Human
gucccaggcugagccuca

SEQ ID NO: 2565762 - RNA, 19 nt, Human
gucccaggcugagccucag

SEQ ID NO: 2565763 - RNA, 16 nt, Human
gucccaggcugagccu

SEQ ID NO: 2565764 - RNA, 17 nt, Human
gucccaggcugagccuc

SEQ ID NO: 2565765 - RNA, 15 nt, Human
gucccaggcugagcc

SEQ ID NO: 2565766 - RNA, 17 nt, Human
gucccacuaucugggug

SEQ ID NO: 2565767 - RNA, 20 nt, Human
gucccacgaauuugcugggg

SEQ ID NO: 2565768 - RNA, 12 nt, Human
gucccaggcaga

SEQ ID NO: 2565769 - RNA, 23 nt, Human
gucccaccuuggcugcagggagu

SEQ ID NO: 2565770 - RNA, 22 nt, Human
gucccacgaauuugcuggggaa

SEQ ID NO: 2565771 - RNA, 20 nt, Human
gucccaccuuggcugcaggg

SEQ ID NO: 2565772 - RNA, 21 nt, Human
gucccugcacuugcagacucu

SEQ ID NO: 2565773 - RNA, 19 nt, Human
gucccugcacuugcagacu

SEQ ID NO: 2565774 - RNA, 16 nt, Human
gucccugcacuugcag

SEQ ID NO: 2565775 - RNA, 22 nt, Human
gucccugaggcagguccccaga

SEQ ID NO: 2565776 - RNA, 20 nt, Human
gucccugacucucugugacc

SEQ ID NO: 2565777 - RNA, 22 nt, Human
gucccucuguguauuugcuuuu

SEQ ID NO: 2565778 - RNA, 14 nt, Human
gucccucuguguau

SEQ ID NO: 2565779 - RNA, 16 nt, Human
gucccugaagagaagg

SEQ ID NO: 2565780 - RNA, 18 nt, Human
gucccugaggcagguccc

SEQ ID NO: 2565781 - RNA, 17 nt, Human
gucccugacucucugug

SEQ ID NO: 2565782 - RNA, 18 nt, Human
gucccugacucucuguga

SEQ ID NO: 2565783 - RNA, 13 nt, Human
gucccucugugua

SEQ ID NO: 2565784 - RNA, 12 nt, Human
gucccucugugu

SEQ ID NO: 2565785 - RNA, 11 nt, Human
gucccucugug

SEQ ID NO: 2565786 - RNA, 20 nt, Human
gucccucugccccauccucc

SEQ ID NO: 2565787 - RNA, 21 nt, Human
gucccucugccccauccucca

SEQ ID NO: 2565788 - RNA, 11 nt, Human
gucccucugcc

SEQ ID NO: 2565789 - RNA, 14 nt, Human
gucccucugcccca

SEQ ID NO: 2565790 - RNA, 16 nt, Human
gucccucucaggcaug

SEQ ID NO: 2565791 - RNA, 21 nt, Human
gucccucucggaaggcuggcu

SEQ ID NO: 2565792 - RNA, 13 nt, Human
gucccucucaggc

SEQ ID NO: 2565793 - RNA, 14 nt, Human
gucccucucaggca

SEQ ID NO: 2565794 - RNA, 20 nt, Human
gucccuaauaaagcugugug

SEQ ID NO: 2565795 - RNA, 18 nt, Human
gucccuaauaaagcugug

SEQ ID NO: 2565796 - RNA, 23 nt, Human
gucccuaccgagucucuucucca

SEQ ID NO: 2565797 - RNA, 22 nt, Human
gucccuaccgagucucuucucc

SEQ ID NO: 2565798 - RNA, 21 nt, Human
gucccuaccgagucucuucuc

SEQ ID NO: 2565799 - RNA, 16 nt, Human
gucccuacaccccucc

SEQ ID NO: 2565800 - RNA, 21 nt, Human
gucccuacaccccuccccugc

SEQ ID NO: 2565801 - RNA, 16 nt, Human
gucccucccaccucug

SEQ ID NO: 2565802 - RNA, 15 nt, Human
gucccucccaccucu

SEQ ID NO: 2565803 - RNA, 14 nt, Human
gucccucccaccuc

SEQ ID NO: 2565804 - RNA, 13 nt, Human
gucccucccaccu

SEQ ID NO: 2565805 - RNA, 18 nt, Human
gucccucccaccucugug

SEQ ID NO: 2565806 - RNA, 17 nt, Human
gucccucccaccucugu

SEQ ID NO: 2565807 - RNA, 16 nt, Human
gucccucccccuuguc

SEQ ID NO: 2565808 - RNA, 21 nt, Human
gucccuccugggaucugcucg

SEQ ID NO: 2565809 - RNA, 14 nt, Human
gucccuccugggau

SEQ ID NO: 2565810 - RNA, 13 nt, Human
gucccuccuggga

SEQ ID NO: 2565811 - RNA, 12 nt, Human
gucccuccuggg

SEQ ID NO: 2565812 - RNA, 21 nt, Human
gucccucccaccucugugacc

SEQ ID NO: 2565813 - RNA, 23 nt, Human
gucccuccgggaccuggugcugc

SEQ ID NO: 2565814 - RNA, 20 nt, Human
gucccucaaaugacccaaag

SEQ ID NO: 2565815 - RNA, 22 nt, Human
gucccuauguauuugcaguuca

SEQ ID NO: 2565816 - RNA, 15 nt, Human
gucccuaugcauauc

SEQ ID NO: 2565817 - RNA, 12 nt, Human
gucccucccacc

SEQ ID NO: 2565818 - RNA, 23 nt, Human
gucccucaaaugacccaaagacc

SEQ ID NO: 2565819 - RNA, 21 nt, Human
gucccuccacguucaccccuc

SEQ ID NO: 2565820 - RNA, 20 nt, Human
gucccuccacguucaccccu

SEQ ID NO: 2565821 - RNA, 19 nt, Human
gucccuccacguucacccc

SEQ ID NO: 2565822 - RNA, 15 nt, Human
gucagcucccuucuc

SEQ ID NO: 2565823 - RNA, 16 nt, Human
gucagcuugcugcccu

SEQ ID NO: 2565824 - RNA, 20 nt, Human
gucagcuugcugcccuaggc

SEQ ID NO: 2565825 - RNA, 16 nt, Human
gucagcuuugccuucc

SEQ ID NO: 2565826 - RNA, 17 nt, Human
gucagcuuugccuucca

SEQ ID NO: 2565827 - RNA, 23 nt, Human
gucagcuuugccuuccacgcugu

SEQ ID NO: 2565828 - RNA, 15 nt, Human
gucauguuuaagaaa

SEQ ID NO: 2565829 - RNA, 11 nt, Human
gucauuaaaug

SEQ ID NO: 2565830 - RNA, 12 nt, Human
gucauuaaaggu

SEQ ID NO: 2565831 - RNA, 14 nt, Human
gucauuaaaauaaa

SEQ ID NO: 2565832 - RNA, 18 nt, Human
gucagcuuugccuuccac

SEQ ID NO: 2565833 - RNA, 22 nt, Human
gucauuaaaauaaauaaaugca

SEQ ID NO: 2565834 - RNA, 21 nt, Human
gucagcuccccucggagaaga

SEQ ID NO: 2565835 - RNA, 22 nt, Human
gucagcuccccucggagaagag

SEQ ID NO: 2565836 - RNA, 23 nt, Human
gucagcuccccucggagaagagc

SEQ ID NO: 2565837 - RNA, 16 nt, Human
gucagcucccuucucu

SEQ ID NO: 2565838 - RNA, 17 nt, Human
gucagcuacuaaugaug

SEQ ID NO: 2565839 - RNA, 16 nt, Human
gucauucguucugugg

SEQ ID NO: 2565840 - RNA, 14 nt, Human
gucauucagaaaaa

SEQ ID NO: 2565841 - RNA, 15 nt, Human
gucauucaauaaauu

SEQ ID NO: 2565842 - RNA, 21 nt, Human
gucauuagccugaguagaaag

SEQ ID NO: 2565843 - RNA, 19 nt, Human
gucauuagccugaguagaa

SEQ ID NO: 2565844 - RNA, 16 nt, Human
gucauuagacuccucc

SEQ ID NO: 2565845 - RNA, 13 nt, Human
gucauuagccuga

SEQ ID NO: 2565846 - RNA, 19 nt, Human
gucauuauccuugcuauga

SEQ ID NO: 2565847 - RNA, 22 nt, Human
gucauuauagaucccccagacu

SEQ ID NO: 2565848 - RNA, 21 nt, Human
gucauuaugagaggcaaugau

SEQ ID NO: 2565849 - RNA, 17 nt, Human
gucauuggcuuuauccu

SEQ ID NO: 2565850 - RNA, 14 nt, Human
gucauuggcuuuau

SEQ ID NO: 2565851 - RNA, 18 nt, Human
gucauugcuguugucccu

SEQ ID NO: 2565852 - RNA, 22 nt, Human
gucauugcuguugucccucugc

SEQ ID NO: 2565853 - RNA, 21 nt, Human
guccaggggccccuccagcuu

SEQ ID NO: 2565854 - RNA, 20 nt, Human
guccaggggccccuccagcu

SEQ ID NO: 2565855 - RNA, 23 nt, Human
guccaggggccccuccagcuugu

SEQ ID NO: 2565856 - RNA, 21 nt, Human
gucccaccuuggcugcaggga

SEQ ID NO: 2565857 - RNA, 17 nt, Human
guccagcccuggcugaa

SEQ ID NO: 2565858 - RNA, 16 nt, Human
guccagcccuggcuga

SEQ ID NO: 2565859 - RNA, 14 nt, Human
guccagcccuggcu

SEQ ID NO: 2565860 - RNA, 21 nt, Human
guccagauuuacacugggaga

SEQ ID NO: 2565861 - RNA, 22 nt, Human
guccagauuuacacugggagag

SEQ ID NO: 2565862 - RNA, 23 nt, Human
guccagcccuggcugaaggacug

SEQ ID NO: 2565863 - RNA, 20 nt, Human
guccagcccuggcugaagga

SEQ ID NO: 2565864 - RNA, 19 nt, Human
guccagcccuggcugaagg

SEQ ID NO: 2565865 - RNA, 18 nt, Human
guccagcccuggcugaag

SEQ ID NO: 2565866 - RNA, 20 nt, Human
guccagccgccauugccacc

SEQ ID NO: 2565867 - RNA, 22 nt, Human
guccagccgccauugccaccag

SEQ ID NO: 2565868 - RNA, 20 nt, Human
guccagggcccugagcucgg

SEQ ID NO: 2565869 - RNA, 11 nt, Human
guccagccugg

SEQ ID NO: 2565870 - RNA, 13 nt, Human
guccagccugggc

SEQ ID NO: 2565871 - RNA, 19 nt, Human
guccaggggccccuccagc

SEQ ID NO: 2565872 - RNA, 18 nt, Human
guccaggggccccuccag

SEQ ID NO: 2565873 - RNA, 14 nt, Human
guccaggggccccu

SEQ ID NO: 2565874 - RNA, 11 nt, Human
guccaggggau

SEQ ID NO: 2565875 - RNA, 18 nt, Human
guccagggcuagugacuu

SEQ ID NO: 2565876 - RNA, 19 nt, Human
guccagauuuacacuggga

SEQ ID NO: 2565877 - RNA, 17 nt, Human
guccagauuuacacugg

SEQ ID NO: 2565878 - RNA, 15 nt, Human
guccagauuuacacu

SEQ ID NO: 2565879 - RNA, 23 nt, Human
guccagagagagaagugccccug

SEQ ID NO: 2565880 - RNA, 16 nt, Human
guccagacagccugua

SEQ ID NO: 2565881 - RNA, 12 nt, Human
guccacugucac

SEQ ID NO: 2565882 - RNA, 20 nt, Human
guccagagagagaagugccc

SEQ ID NO: 2565883 - RNA, 21 nt, Human
guccagaccuuguucacacuc

SEQ ID NO: 2565884 - RNA, 22 nt, Human
guccagagagagaagugccccu

SEQ ID NO: 2565885 - RNA, 15 nt, Human
guccacgacugucuc

SEQ ID NO: 2565886 - RNA, 16 nt, Human
guccacgacugucucc

SEQ ID NO: 2565887 - RNA, 18 nt, Human
guccacgacugucuccau

SEQ ID NO: 2565888 - RNA, 15 nt, Human
guccacucccagugc

SEQ ID NO: 2565889 - RNA, 12 nt, Human
guccacucccag

SEQ ID NO: 2565890 - RNA, 16 nt, Human
guccacucccagugcu

SEQ ID NO: 2565891 - RNA, 15 nt, Human
guccacggcucuagg

SEQ ID NO: 2565892 - RNA, 22 nt, Human
guccaccugagcugccauccag

SEQ ID NO: 2565893 - RNA, 11 nt, Human
guccacccagc

SEQ ID NO: 2565894 - RNA, 20 nt, Human
guccacccaccuaugugcca

SEQ ID NO: 2565895 - RNA, 14 nt, Human
guccacccagcaaa

SEQ ID NO: 2565896 - RNA, 21 nt, Human
guccaccuggccccaugucuc

SEQ ID NO: 2565897 - RNA, 23 nt, Human
guccacccaggagccccgaggcc

SEQ ID NO: 2565898 - RNA, 12 nt, Human
guccacccagga

SEQ ID NO: 2565899 - RNA, 13 nt, Human
guccacaggaagu

SEQ ID NO: 2565900 - RNA, 21 nt, Human
guccaccaugggguccuacca

SEQ ID NO: 2565901 - RNA, 22 nt, Human
gucagaugcugugcaaauguua

SEQ ID NO: 2565902 - RNA, 18 nt, Human
gucagaugggaagacaug

SEQ ID NO: 2565903 - RNA, 14 nt, Human
gucagauuuccagu

SEQ ID NO: 2565904 - RNA, 19 nt, Human
gucagcuccccucggagaa

SEQ ID NO: 2565905 - RNA, 16 nt, Human
gucagcaaaaagcaaa

SEQ ID NO: 2565906 - RNA, 15 nt, Human
gucagcaaaaagcaa

SEQ ID NO: 2565907 - RNA, 21 nt, Human
gucagauuuccagucuccacc

SEQ ID NO: 2565908 - RNA, 22 nt, Human
gucagcaaaaagcaaaaucauu

SEQ ID NO: 2565909 - RNA, 20 nt, Human
gucagcaaaaagcaaaauca

SEQ ID NO: 2565910 - RNA, 19 nt, Human
gucagcuacuaaugauguu

SEQ ID NO: 2565911 - RNA, 21 nt, Human
gucagaggcuaauucugcaga

SEQ ID NO: 2565912 - RNA, 21 nt, Human
gucagaggauggccagugucu

SEQ ID NO: 2565913 - RNA, 20 nt, Human
gucagaggauggccaguguc

SEQ ID NO: 2565914 - RNA, 15 nt, Human
gucagauacaaugua

SEQ ID NO: 2565915 - RNA, 14 nt, Human
gucagagccugcag

SEQ ID NO: 2565916 - RNA, 22 nt, Human
gucagacuggcuggcugcagug

SEQ ID NO: 2565917 - RNA, 16 nt, Human
gucagacuuuaaagaa

SEQ ID NO: 2565918 - RNA, 16 nt, Human
gucagagacugcugug

SEQ ID NO: 2565919 - RNA, 15 nt, Human
gucagacuuuaaaga

SEQ ID NO: 2565920 - RNA, 12 nt, Human
gucagagagaau

SEQ ID NO: 2565921 - RNA, 17 nt, Human
gucagagaggagucaga

SEQ ID NO: 2565922 - RNA, 14 nt, Human
gucagacugcuggg

SEQ ID NO: 2565923 - RNA, 15 nt, Human
gucagacugcuggga

SEQ ID NO: 2565924 - RNA, 16 nt, Human
gucagacugcugggac

SEQ ID NO: 2565925 - RNA, 20 nt, Human
gucagacugcugggacuggc

SEQ ID NO: 2565926 - RNA, 22 nt, Human
gucagacugcugggacuggcca

SEQ ID NO: 2565927 - RNA, 24 nt, Human
gucagacugcugggacuggccagg

SEQ ID NO: 2565928 - RNA, 14 nt, Human
gucagacuggcugg

SEQ ID NO: 2565929 - RNA, 18 nt, Human
gucagacuggcuggcugc

SEQ ID NO: 2565930 - RNA, 16 nt, Human
gucagagccugcaguu

SEQ ID NO: 2565931 - RNA, 15 nt, Human
gucagagccugcagu

SEQ ID NO: 2565932 - RNA, 19 nt, Human
gucagagaggagucagaga

SEQ ID NO: 2565933 - RNA, 21 nt, Human
gucagagaggagucagagaga

SEQ ID NO: 2565934 - RNA, 14 nt, Human
gucagagcugggag

SEQ ID NO: 2565935 - RNA, 19 nt, Human
gucagaggauggccagugu

SEQ ID NO: 2565936 - RNA, 16 nt, Human
gucagaggauggccag

SEQ ID NO: 2565937 - RNA, 15 nt, Human
gucagaggauggcca

SEQ ID NO: 2565938 - RNA, 14 nt, Human
gucagaggauggcc

SEQ ID NO: 2565939 - RNA, 12 nt, Human
gucagagcuggg

SEQ ID NO: 2565940 - RNA, 13 nt, Human
gucagaggauggc

SEQ ID NO: 2565941 - RNA, 13 nt, Human
gucagagcuggga

SEQ ID NO: 2565942 - RNA, 16 nt, Human
gucacucuggcagcuc

SEQ ID NO: 2565943 - RNA, 14 nt, Human
gucacucuggcagc

SEQ ID NO: 2565944 - RNA, 13 nt, Human
gucacucuggcag

SEQ ID NO: 2565945 - RNA, 12 nt, Human
gucacucuggca

SEQ ID NO: 2565946 - RNA, 19 nt, Human
gucacucuggcagcucaga

SEQ ID NO: 2565947 - RNA, 17 nt, Human
gucacucuggcagcuca

SEQ ID NO: 2565948 - RNA, 16 nt, Human
gucagacgccugagga

SEQ ID NO: 2565949 - RNA, 17 nt, Human
gucagacgccugaggaa

SEQ ID NO: 2565950 - RNA, 18 nt, Human
gucagacgccugaggaac

SEQ ID NO: 2565951 - RNA, 22 nt, Human
gucacucuggcagcucagagag

SEQ ID NO: 2565952 - RNA, 18 nt, Human
gucacucccaagcccccu

SEQ ID NO: 2565953 - RNA, 12 nt, Human
gucacuccuggg

SEQ ID NO: 2565954 - RNA, 13 nt, Human
gucacuccugggg

SEQ ID NO: 2565955 - RNA, 21 nt, Human
gucacuccuggggccucuugg

SEQ ID NO: 2565956 - RNA, 18 nt, Human
gucaccccggccaccugc

SEQ ID NO: 2565957 - RNA, 17 nt, Human
gucaccccggccaccug

SEQ ID NO: 2565958 - RNA, 22 nt, Human
gucaccccggccaccugcggug

SEQ ID NO: 2565959 - RNA, 20 nt, Human
gucaccccuccaggaaugau

SEQ ID NO: 2565960 - RNA, 15 nt, Human
gucaccccuccagga

SEQ ID NO: 2565961 - RNA, 18 nt, Human
gucacucauugcugagcc

SEQ ID NO: 2565962 - RNA, 19 nt, Human
gucacucauugcugagccu

SEQ ID NO: 2565963 - RNA, 20 nt, Human
gucacucauugcugagccuc

SEQ ID NO: 2565964 - RNA, 21 nt, Human
gucacucauugcugagccucu

SEQ ID NO: 2565965 - RNA, 22 nt, Human
gucacucauugcugagccucug

SEQ ID NO: 2565966 - RNA, 23 nt, Human
gucacucauugcugagccucugc

SEQ ID NO: 2565967 - RNA, 14 nt, Human
gucacucccaagcc

SEQ ID NO: 2565968 - RNA, 11 nt, Human
gucacucccaa

SEQ ID NO: 2565969 - RNA, 24 nt, Human
gucacucauugcugagccucugcu

SEQ ID NO: 2565970 - RNA, 14 nt, Human
gucacucauugcug

SEQ ID NO: 2565971 - RNA, 23 nt, Human
gucacucagauggaaccgcagga

SEQ ID NO: 2565972 - RNA, 23 nt, Human
gucacuacgugacuguggcacac

SEQ ID NO: 2565973 - RNA, 14 nt, Human
gucacuacucacag

SEQ ID NO: 2565974 - RNA, 17 nt, Human
gucacuacucacagucu

SEQ ID NO: 2565975 - RNA, 22 nt, Human
gucacuacucacagucucuuua

SEQ ID NO: 2565976 - RNA, 15 nt, Human
gucaaugcagccccc

SEQ ID NO: 2565977 - RNA, 19 nt, Human
gucaauccugugggugaag

SEQ ID NO: 2565978 - RNA, 17 nt, Human
gucaauccccucauuca

SEQ ID NO: 2565979 - RNA, 22 nt, Human
gucaauccccucauucaggaaa

SEQ ID NO: 2565980 - RNA, 15 nt, Human
gucaauccugugggu

SEQ ID NO: 2565981 - RNA, 16 nt, Human
gucaauccugugggug

SEQ ID NO: 2565982 - RNA, 12 nt, Human
gucaauauuuaa

SEQ ID NO: 2565983 - RNA, 23 nt, Human
gucaauauuaaauacagacacua

SEQ ID NO: 2565984 - RNA, 22 nt, Human
gucaauccaagagucugaugau

SEQ ID NO: 2565985 - RNA, 13 nt, Human
gucaauauuuaaa

SEQ ID NO: 2565986 - RNA, 16 nt, Human
gucaauccccucauuc

SEQ ID NO: 2565987 - RNA, 22 nt, Human
gucaauauuaaauacagacacu

SEQ ID NO: 2565988 - RNA, 20 nt, Human
gucaauauuaaauacagaca

SEQ ID NO: 2565989 - RNA, 18 nt, Human
gucaauauuaaauacaga

SEQ ID NO: 2565990 - RNA, 17 nt, Human
gucaauauuaaauacag

SEQ ID NO: 2565991 - RNA, 16 nt, Human
gucaauauuaaauaca

SEQ ID NO: 2565992 - RNA, 15 nt, Human
gucaauauuaaauac

SEQ ID NO: 2565993 - RNA, 14 nt, Human
gucaauauuaaaua

SEQ ID NO: 2565994 - RNA, 21 nt, Human
gucaauacaguacaggcagca

SEQ ID NO: 2565995 - RNA, 14 nt, Human
gucaccagcuccuc

SEQ ID NO: 2565996 - RNA, 23 nt, Human
gucaccaggaauguuaaagucag

SEQ ID NO: 2565997 - RNA, 16 nt, Human
gucaccagcuccuccc

SEQ ID NO: 2565998 - RNA, 18 nt, Human
gucaccaggaauguuaaa

SEQ ID NO: 2565999 - RNA, 22 nt, Human
gucaccaccuucccagcucucc

SEQ ID NO: 2566000 - RNA, 19 nt, Human
gucaccaccuucccagcuc

SEQ ID NO: 2566001 - RNA, 20 nt, Human
gucaccaccuucccagcucu

SEQ ID NO: 2566002 - RNA, 13 nt, Human
gucaccaccucuc

SEQ ID NO: 2566003 - RNA, 11 nt, Human
gucaccaccuu

SEQ ID NO: 2566004 - RNA, 14 nt, Human
gucaccaccuuccc

SEQ ID NO: 2566005 - RNA, 15 nt, Human
gucaccaccuuccca

SEQ ID NO: 2566006 - RNA, 16 nt, Human
gucaccaccuucccag

SEQ ID NO: 2566007 - RNA, 17 nt, Human
gucaccaccuucccagc

SEQ ID NO: 2566008 - RNA, 23 nt, Human
gucaauaaaauccauacauuugu

SEQ ID NO: 2566009 - RNA, 19 nt, Human
gucaauacaguacaggcag

SEQ ID NO: 2566010 - RNA, 20 nt, Human
gucaauacaguacaggcagc

SEQ ID NO: 2566011 - RNA, 21 nt, Human
gucaagucucugcuggcccag

SEQ ID NO: 2566012 - RNA, 22 nt, Human
gucaauaaaauccauacauuug

SEQ ID NO: 2566013 - RNA, 15 nt, Human
gucaagugaaaaagg

SEQ ID NO: 2566014 - RNA, 19 nt, Human
guauuuuguuuuugucuua

SEQ ID NO: 2566015 - RNA, 14 nt, Human
gucaaguaagaaga

SEQ ID NO: 2566016 - RNA, 15 nt, Human
gucaaguaagaagac

SEQ ID NO: 2566017 - RNA, 13 nt, Human
gucaagucaacca

SEQ ID NO: 2566018 - RNA, 14 nt, Human
gucaagucucugcu

SEQ ID NO: 2566019 - RNA, 17 nt, Human
gucaagucucugcuggc

SEQ ID NO: 2566020 - RNA, 20 nt, Human
guauuuuaaaagaaugauua

SEQ ID NO: 2566021 - RNA, 13 nt, Human
guauuuuaaucac

SEQ ID NO: 2566022 - RNA, 13 nt, Human
guauuacacugua

SEQ ID NO: 2566023 - RNA, 18 nt, Human
guauuuuaaaagaaugau

SEQ ID NO: 2566024 - RNA, 14 nt, Human
guauuaauauucau

SEQ ID NO: 2566025 - RNA, 16 nt, Human
guauuaagaaugaaau

SEQ ID NO: 2566026 - RNA, 22 nt, Human
guauuaaguuguuaauaaaagu

SEQ ID NO: 2566027 - RNA, 23 nt, Human
guauuuuaucuuugauucuccuu

SEQ ID NO: 2566028 - RNA, 13 nt, Human
guauuuuauugua

SEQ ID NO: 2566029 - RNA, 22 nt, Human
guauuuuaucuuugauucuccu

SEQ ID NO: 2566030 - RNA, 14 nt, Human
guauuuuacuaaua

SEQ ID NO: 2566031 - RNA, 19 nt, Human
guauuuuaggcagggauuu

SEQ ID NO: 2566032 - RNA, 21 nt, Human
guauuuuaguaagagauuccu

SEQ ID NO: 2566033 - RNA, 14 nt, Human
guauuuuggagaaa

SEQ ID NO: 2566034 - RNA, 18 nt, Human
guauuuucuuucucuacu

SEQ ID NO: 2566035 - RNA, 18 nt, Human
guauuuuguauuguuuca

SEQ ID NO: 2566036 - RNA, 17 nt, Human
guauuuuggagaaauua

SEQ ID NO: 2566037 - RNA, 15 nt, Human
guauuuucuuucucu

SEQ ID NO: 2566038 - RNA, 13 nt, Human
guauuuucuuucu

SEQ ID NO: 2566039 - RNA, 20 nt, Human
guauuuuccaagugugcaua

SEQ ID NO: 2566040 - RNA, 17 nt, Human
guauuuuccaagugugc

SEQ ID NO: 2566041 - RNA, 16 nt, Human
guauuuuccaagugug

SEQ ID NO: 2566042 - RNA, 17 nt, Human
guauuuuauuguaacag

SEQ ID NO: 2566043 - RNA, 16 nt, Human
guauuuuccuguaaaa

SEQ ID NO: 2566044 - RNA, 11 nt, Human
guauuuuccug

SEQ ID NO: 2566045 - RNA, 22 nt, Human
guauuuucccccuuuucugcau

SEQ ID NO: 2566046 - RNA, 18 nt, Human
gucgucaaagcugaaaug

SEQ ID NO: 2566047 - RNA, 15 nt, Human
gucgucgcacagucu

SEQ ID NO: 2566048 - RNA, 20 nt, Human
gucguagccaaggugggcug

SEQ ID NO: 2566049 - RNA, 16 nt, Human
gucgggggcuggccua

SEQ ID NO: 2566050 - RNA, 17 nt, Human
gucggggggacagcucc

SEQ ID NO: 2566051 - RNA, 17 nt, Human
gucgugccuguguccau

SEQ ID NO: 2566052 - RNA, 15 nt, Human
gucgugccugugucc

SEQ ID NO: 2566053 - RNA, 14 nt, Human
gucgugccuguguc

SEQ ID NO: 2566054 - RNA, 13 nt, Human
gucgugccugugu

SEQ ID NO: 2566055 - RNA, 21 nt, Human
gucgugccuccuuccaccucc

SEQ ID NO: 2566056 - RNA, 19 nt, Human
gucgucgcacagucucucu

SEQ ID NO: 2566057 - RNA, 12 nt, Human
gucgugccugug

SEQ ID NO: 2566058 - RNA, 17 nt, Human
gucgucgcacagucucu

SEQ ID NO: 2566059 - RNA, 17 nt, Human
gucgugagcucuuguga

SEQ ID NO: 2566060 - RNA, 17 nt, Human
gucguggagaugucuuc

SEQ ID NO: 2566061 - RNA, 18 nt, Human
gucgugccuguguccaug

SEQ ID NO: 2566062 - RNA, 23 nt, Human
gucguggcagauaaucagccucu

SEQ ID NO: 2566063 - RNA, 15 nt, Human
gucguggcagauaau

SEQ ID NO: 2566064 - RNA, 22 nt, Human
gucguggcagauaaucagccuc

SEQ ID NO: 2566065 - RNA, 21 nt, Human
gucuaagauaguaacaaugaa

SEQ ID NO: 2566066 - RNA, 16 nt, Human
gucuaaauaaguuugc

SEQ ID NO: 2566067 - RNA, 17 nt, Human
gucuaaaguuuacagua

SEQ ID NO: 2566068 - RNA, 16 nt, Human
gucuaaaguuuacagu

SEQ ID NO: 2566069 - RNA, 15 nt, Human
gucuaaaguuuacag

SEQ ID NO: 2566070 - RNA, 11 nt, Human
gucuaaaguuu

SEQ ID NO: 2566071 - RNA, 13 nt, Human
gucuaaauuugaa

SEQ ID NO: 2566072 - RNA, 13 nt, Human
gucuaaauauuuc

SEQ ID NO: 2566073 - RNA, 16 nt, Human
gucuaaauauuuccuu

SEQ ID NO: 2566074 - RNA, 15 nt, Human
gucuaaaugcugaaa

SEQ ID NO: 2566075 - RNA, 23 nt, Human
gucuaaauauuuccuuaaacugu

SEQ ID NO: 2566076 - RNA, 19 nt, Human
gucucacuauguugcccag

SEQ ID NO: 2566077 - RNA, 11 nt, Human
gucucacucug

SEQ ID NO: 2566078 - RNA, 18 nt, Human
gucucacuauguugccca

SEQ ID NO: 2566079 - RNA, 19 nt, Human
guccuuaccagcagagcac

SEQ ID NO: 2566080 - RNA, 18 nt, Human
guccuuaccagcagagca

SEQ ID NO: 2566081 - RNA, 12 nt, Human
gucccugccuca

SEQ ID NO: 2566082 - RNA, 15 nt, Human
guccuuagaacauuu

SEQ ID NO: 2566083 - RNA, 21 nt, Human
guccuuaccagcagagcaccu

SEQ ID NO: 2566084 - RNA, 14 nt, Human
gucccugccaaugg

SEQ ID NO: 2566085 - RNA, 11 nt, Human
gucccugccaa

SEQ ID NO: 2566086 - RNA, 15 nt, Human
gucccugccaaugga

SEQ ID NO: 2566087 - RNA, 18 nt, Human
gucccugccccagcaaga

SEQ ID NO: 2566088 - RNA, 21 nt, Human
gucggaaaacaugcuacacac

SEQ ID NO: 2566089 - RNA, 17 nt, Human
guccuuagaacauuuua

SEQ ID NO: 2566090 - RNA, 23 nt, Human
gucggccucuaaccccaggcccc

SEQ ID NO: 2566091 - RNA, 22 nt, Human
gucggccucuaaccccaggccc

SEQ ID NO: 2566092 - RNA, 21 nt, Human
gucggccucuaaccccaggcc

SEQ ID NO: 2566093 - RNA, 20 nt, Human
gucggccucuaaccccaggc

SEQ ID NO: 2566094 - RNA, 16 nt, Human
gucggaggcuugggac

SEQ ID NO: 2566095 - RNA, 17 nt, Human
gucggaggcuugggacc

SEQ ID NO: 2566096 - RNA, 14 nt, Human
gucggaggcuuggg

SEQ ID NO: 2566097 - RNA, 16 nt, Human
gucgggcaugacacga

SEQ ID NO: 2566098 - RNA, 18 nt, Human
gucggcugaccaugcuca

SEQ ID NO: 2566099 - RNA, 17 nt, Human
gucggcugaccaugcuc

SEQ ID NO: 2566100 - RNA, 14 nt, Human
gucggcugaccaug

SEQ ID NO: 2566101 - RNA, 23 nt, Human
gucggguuuuauuguuuaaaauc

SEQ ID NO: 2566102 - RNA, 18 nt, Human
gucgggaguucgagacca

SEQ ID NO: 2566103 - RNA, 15 nt, Human
gucgggggcuggccu

SEQ ID NO: 2566104 - RNA, 14 nt, Human
gucucuucugagcu

SEQ ID NO: 2566105 - RNA, 22 nt, Human
gucucuucugagcuauuucauc

SEQ ID NO: 2566106 - RNA, 13 nt, Human
gucugacuguuuc

SEQ ID NO: 2566107 - RNA, 13 nt, Human
gucucuugaggga

SEQ ID NO: 2566108 - RNA, 23 nt, Human
gucucuugagggagcuuagccaa

SEQ ID NO: 2566109 - RNA, 16 nt, Human
gucucugguuccuccc

SEQ ID NO: 2566110 - RNA, 17 nt, Human
gucucugguuccucccc

SEQ ID NO: 2566111 - RNA, 18 nt, Human
gucucuucuccacuggau

SEQ ID NO: 2566112 - RNA, 21 nt, Human
gucucuggauuauauuaugaa

SEQ ID NO: 2566113 - RNA, 13 nt, Human
gucucuggccugu

SEQ ID NO: 2566114 - RNA, 12 nt, Human
gucucuggccug

SEQ ID NO: 2566115 - RNA, 21 nt, Human
gucucuggcaguucuggaaug

SEQ ID NO: 2566116 - RNA, 16 nt, Human
gucucuggcaguucug

SEQ ID NO: 2566117 - RNA, 20 nt, Human
gucucugcuggcccagccaa

SEQ ID NO: 2566118 - RNA, 21 nt, Human
gucucucuggggccacacaga

SEQ ID NO: 2566119 - RNA, 19 nt, Human
gucucucucucucuacaaa

SEQ ID NO: 2566120 - RNA, 21 nt, Human
gucucugagggcuuccuuugg

SEQ ID NO: 2566121 - RNA, 14 nt, Human
gucucugagggcuu

SEQ ID NO: 2566122 - RNA, 21 nt, Human
gucucugaagugaaacugcuu

SEQ ID NO: 2566123 - RNA, 13 nt, Human
gucucugagcauu

SEQ ID NO: 2566124 - RNA, 15 nt, Human
gucucugaagugaaa

SEQ ID NO: 2566125 - RNA, 17 nt, Human
gucucuggaauuugaaa

SEQ ID NO: 2566126 - RNA, 13 nt, Human
gucucugcuggcc

SEQ ID NO: 2566127 - RNA, 15 nt, Human
gucucugcuggccca

SEQ ID NO: 2566128 - RNA, 16 nt, Human
gucucugcuggcccag

SEQ ID NO: 2566129 - RNA, 17 nt, Human
gucucugcuggcccagc

SEQ ID NO: 2566130 - RNA, 18 nt, Human
gucucugccucccucacc

SEQ ID NO: 2566131 - RNA, 17 nt, Human
gucucugccggcucuuu

SEQ ID NO: 2566132 - RNA, 14 nt, Human
gucucugcugccgc

SEQ ID NO: 2566133 - RNA, 13 nt, Human
gucucugcugccg

SEQ ID NO: 2566134 - RNA, 12 nt, Human
gucucugcugcc

SEQ ID NO: 2566135 - RNA, 12 nt, Human
gucucugccucc

SEQ ID NO: 2566136 - RNA, 18 nt, Human
gucucugccggcucuuuc

SEQ ID NO: 2566137 - RNA, 12 nt, Human
gucucugcugaa

SEQ ID NO: 2566138 - RNA, 21 nt, Human
gucucacugaaacauuuaaau

SEQ ID NO: 2566139 - RNA, 15 nt, Human
gucucacugaaacau

SEQ ID NO: 2566140 - RNA, 23 nt, Human
gucucacgggcaugggcacuccc

SEQ ID NO: 2566141 - RNA, 22 nt, Human
gucucacucugucgcccagucu

SEQ ID NO: 2566142 - RNA, 19 nt, Human
gucucacucugucgcccag

SEQ ID NO: 2566143 - RNA, 18 nt, Human
gucucacucugucgccca

SEQ ID NO: 2566144 - RNA, 16 nt, Human
gucucacucugucgcc

SEQ ID NO: 2566145 - RNA, 15 nt, Human
gucucacucugucgc

SEQ ID NO: 2566146 - RNA, 17 nt, Human
gucucucucccauggag

SEQ ID NO: 2566147 - RNA, 16 nt, Human
gucucucucccaugga

SEQ ID NO: 2566148 - RNA, 13 nt, Human
gucucucucccau

SEQ ID NO: 2566149 - RNA, 17 nt, Human
gucucuaggcuggggaa

SEQ ID NO: 2566150 - RNA, 14 nt, Human
gucucucucucucu

SEQ ID NO: 2566151 - RNA, 23 nt, Human
gucucucucccauggagccccag

SEQ ID NO: 2566152 - RNA, 15 nt, Human
gucucucucucucua

SEQ ID NO: 2566153 - RNA, 12 nt, Human
gucucucuccca

SEQ ID NO: 2566154 - RNA, 15 nt, Human
gucucuaggcugggg

SEQ ID NO: 2566155 - RNA, 14 nt, Human
gucucuaggcuggg

SEQ ID NO: 2566156 - RNA, 13 nt, Human
gucucuaggcugg

SEQ ID NO: 2566157 - RNA, 16 nt, Human
gucucuagccacuuug

SEQ ID NO: 2566158 - RNA, 14 nt, Human
gucucuagccacuu

SEQ ID NO: 2566159 - RNA, 18 nt, Human
gucucuagagcagggauu

SEQ ID NO: 2566160 - RNA, 14 nt, Human
gucucuagugcugu

SEQ ID NO: 2566161 - RNA, 16 nt, Human
gucucuagugcuguga

SEQ ID NO: 2566162 - RNA, 17 nt, Human
gucucuagugcugugaa

SEQ ID NO: 2566163 - RNA, 18 nt, Human
gucucuagugcugugaaa

SEQ ID NO: 2566164 - RNA, 21 nt, Human
gucucagcagcgaccaccccu

SEQ ID NO: 2566165 - RNA, 23 nt, Human
gucucacugugggaaggccagcu

SEQ ID NO: 2566166 - RNA, 22 nt, Human
gucucacugugggaaggccagc

SEQ ID NO: 2566167 - RNA, 13 nt, Human
gucucagccuccc

SEQ ID NO: 2566168 - RNA, 22 nt, Human
gucucagcagcgaccaccccug

SEQ ID NO: 2566169 - RNA, 15 nt, Human
gucucaggaccuagg

SEQ ID NO: 2566170 - RNA, 13 nt, Human
gucucgugguagg

SEQ ID NO: 2566171 - RNA, 12 nt, Human
gucucaggagca

SEQ ID NO: 2566172 - RNA, 16 nt, Human
gucucaggagcauggg

SEQ ID NO: 2566173 - RNA, 12 nt, Human
gucucuagagca

SEQ ID NO: 2566174 - RNA, 19 nt, Human
gucucgugguaggacugua

SEQ ID NO: 2566175 - RNA, 15 nt, Human
gucugugagaugcua

SEQ ID NO: 2566176 - RNA, 16 nt, Human
gucugugagaugcuag

SEQ ID NO: 2566177 - RNA, 17 nt, Human
gucugugagaugcuaga

SEQ ID NO: 2566178 - RNA, 21 nt, Human
gucugugagaugcuagaacuc

SEQ ID NO: 2566179 - RNA, 22 nt, Human
gucugugagaugcuagaacucc

SEQ ID NO: 2566180 - RNA, 23 nt, Human
gucugugagaugcuagaacuccc

SEQ ID NO: 2566181 - RNA, 18 nt, Human
gucugugccauuuuguau

SEQ ID NO: 2566182 - RNA, 21 nt, Human
gucugugaauuggaccauccu

SEQ ID NO: 2566183 - RNA, 12 nt, Human
gucugugcuagg

SEQ ID NO: 2566184 - RNA, 17 nt, Human
gucugcccuucacccca

SEQ ID NO: 2566185 - RNA, 11 nt, Human
gucugccucuu

SEQ ID NO: 2566186 - RNA, 10 nt, Human
gucugcccuu

SEQ ID NO: 2566187 - RNA, 17 nt, Human
gucugcuauauuuucau

SEQ ID NO: 2566188 - RNA, 15 nt, Human
gucugcuauauuuuc

SEQ ID NO: 2566189 - RNA, 18 nt, Human
gucugcuauauuuucaug

SEQ ID NO: 2566190 - RNA, 16 nt, Human
gucugucuucacagcu

SEQ ID NO: 2566191 - RNA, 22 nt, Human
gucugucuucacagcucugugu

SEQ ID NO: 2566192 - RNA, 23 nt, Human
gucugagacucucuuaggagcag

SEQ ID NO: 2566193 - RNA, 16 nt, Human
gucugccagccagcag

SEQ ID NO: 2566194 - RNA, 17 nt, Human
gucugccagccagcagc

SEQ ID NO: 2566195 - RNA, 18 nt, Human
gucugccagccagcagcc

SEQ ID NO: 2566196 - RNA, 13 nt, Human
gucugccagggcc

SEQ ID NO: 2566197 - RNA, 12 nt, Human
gucugccagggc

SEQ ID NO: 2566198 - RNA, 11 nt, Human
gucugccaggg

SEQ ID NO: 2566199 - RNA, 11 nt, Human
gucugugugug

SEQ ID NO: 2566200 - RNA, 12 nt, Human
gucugugugugu

SEQ ID NO: 2566201 - RNA, 16 nt, Human
gucuguguguguguau

SEQ ID NO: 2566202 - RNA, 20 nt, Human
gucuguguguguguaugugg

SEQ ID NO: 2566203 - RNA, 14 nt, Human
gucugugcugaggc

SEQ ID NO: 2566204 - RNA, 13 nt, Human
gucugugcugagg

SEQ ID NO: 2566205 - RNA, 12 nt, Human
gucugugcugag

SEQ ID NO: 2566206 - RNA, 13 nt, Human
gucuguggaucag

SEQ ID NO: 2566207 - RNA, 20 nt, Human
gucuguggcuuucagccucu

SEQ ID NO: 2566208 - RNA, 21 nt, Human
gucuguggcuuucagccucug

SEQ ID NO: 2566209 - RNA, 20 nt, Human
gucugugugaugaacuuucu

SEQ ID NO: 2566210 - RNA, 17 nt, Human
gucugugugcaagugug

SEQ ID NO: 2566211 - RNA, 11 nt, Human
gucuguguguu

SEQ ID NO: 2566212 - RNA, 21 nt, Human
gucuguguguuuaugugugug

SEQ ID NO: 2566213 - RNA, 22 nt, Human
gucuguguguuuaugugugugu

SEQ ID NO: 2566214 - RNA, 20 nt, Human
gucuguguuccaaccacuga

SEQ ID NO: 2566215 - RNA, 12 nt, Human
gucuguuagcca

SEQ ID NO: 2566216 - RNA, 20 nt, Human
gucuguuaccaugucacugu

SEQ ID NO: 2566217 - RNA, 16 nt, Human
gucuguuaugcuguga

SEQ ID NO: 2566218 - RNA, 21 nt, Human
gucuguuccccauggccacuu

SEQ ID NO: 2566219 - RNA, 17 nt, Human
gucuguucacuuuuccu

SEQ ID NO: 2566220 - RNA, 14 nt, Human
gucuguguuuuaau

SEQ ID NO: 2566221 - RNA, 22 nt, Human
gucuguguugcgugucgugggu

SEQ ID NO: 2566222 - RNA, 15 nt, Human
gucuguuaccauguc

SEQ ID NO: 2566223 - RNA, 14 nt, Human
gucuguuacacugg

SEQ ID NO: 2566224 - RNA, 16 nt, Human
gucuguuaacuuaaua

SEQ ID NO: 2566225 - RNA, 14 nt, Human
gucuguucuuucca

SEQ ID NO: 2566226 - RNA, 17 nt, Human
gucuguucuuuccaaag

SEQ ID NO: 2566227 - RNA, 19 nt, Human
gucuguuggcaggcuggcc

SEQ ID NO: 2566228 - RNA, 18 nt, Human
gucuguuggcaggcuggc

SEQ ID NO: 2566229 - RNA, 16 nt, Human
gucuguuggcaggcug

SEQ ID NO: 2566230 - RNA, 14 nt, Human
gucuguuggcaggc

SEQ ID NO: 2566231 - RNA, 15 nt, Human
gucuguucuugaagc

SEQ ID NO: 2566232 - RNA, 13 nt, Human
gucuguucuugaa

SEQ ID NO: 2566233 - RNA, 17 nt, Human
gucuguuuauaaacauu

SEQ ID NO: 2566234 - RNA, 21 nt, Human
gucuguuggcaggcuggccag

SEQ ID NO: 2566235 - RNA, 20 nt, Human
gucuguuggcaggcuggcca

SEQ ID NO: 2566236 - RNA, 22 nt, Human
gucuguuggcaggcuggccagu

SEQ ID NO: 2566237 - RNA, 13 nt, Human
gucuguuuuauga

SEQ ID NO: 2566238 - RNA, 15 nt, Human
gucuguuuuaugacu

SEQ ID NO: 2566239 - RNA, 12 nt, Human
gucuguuuuccu

SEQ ID NO: 2566240 - RNA, 21 nt, Human
gucuguuuuccuuucucaccg

SEQ ID NO: 2566241 - RNA, 20 nt, Human
gucuguuuuccuuucucacc

SEQ ID NO: 2566242 - RNA, 16 nt, Human
gucuguuuuccuuucu

SEQ ID NO: 2566243 - RNA, 14 nt, Human
gucuguuuuccuuu

SEQ ID NO: 2566244 - RNA, 20 nt, Human
gucuuggcuuucauguuauu

SEQ ID NO: 2566245 - RNA, 16 nt, Human
gucuuggcuuucaugu

SEQ ID NO: 2566246 - RNA, 23 nt, Human
gucuuggcggcagcagccaucau

SEQ ID NO: 2566247 - RNA, 18 nt, Human
gucuuggcggcagcagcc

SEQ ID NO: 2566248 - RNA, 16 nt, Human
gucuuggcggcagcag

SEQ ID NO: 2566249 - RNA, 15 nt, Human
gucuuggcggcagca

SEQ ID NO: 2566250 - RNA, 22 nt, Human
gucuuggcagcaccugucuccu

SEQ ID NO: 2566251 - RNA, 23 nt, Human
gucuuggagcugagccucucacc

SEQ ID NO: 2566252 - RNA, 18 nt, Human
gucuuggagcugagccuc

SEQ ID NO: 2566253 - RNA, 20 nt, Human
gucuuggcagcaccugucuc

SEQ ID NO: 2566254 - RNA, 17 nt, Human
gucuuggagcugagccu

SEQ ID NO: 2566255 - RNA, 18 nt, Human
gucuuggacacuguacaa

SEQ ID NO: 2566256 - RNA, 20 nt, Human
gucuugggcagagcuggcuc

SEQ ID NO: 2566257 - RNA, 19 nt, Human
gucuugggcagagcuggcu

SEQ ID NO: 2566258 - RNA, 21 nt, Human
gucuugggaaauaugaaugcc

SEQ ID NO: 2566259 - RNA, 16 nt, Human
gucuugggaaauauga

SEQ ID NO: 2566260 - RNA, 16 nt, Human
gucuugggcagagcug

SEQ ID NO: 2566261 - RNA, 22 nt, Human
gucuugggcagagcuggcucug

SEQ ID NO: 2566262 - RNA, 21 nt, Human
gucuugggcagagcuggcucu

SEQ ID NO: 2566263 - RNA, 16 nt, Human
gucuugguuccagccu

SEQ ID NO: 2566264 - RNA, 16 nt, Human
gucuuuuuucacuaca

SEQ ID NO: 2566265 - RNA, 17 nt, Human
gucuugguuccagccug

SEQ ID NO: 2566266 - RNA, 19 nt, Human
gucuugguuccagccugcc

SEQ ID NO: 2566267 - RNA, 15 nt, Human
gucuugguauucuua

SEQ ID NO: 2566268 - RNA, 21 nt, Human
gucuugcaauggcagccuugg

SEQ ID NO: 2566269 - RNA, 20 nt, Human
gucuugcaauggcagccuug

SEQ ID NO: 2566270 - RNA, 23 nt, Human
gucuugcaauggcagccuuggca

SEQ ID NO: 2566271 - RNA, 18 nt, Human
gucuugaugaccaaaguc

SEQ ID NO: 2566272 - RNA, 15 nt, Human
gucuuggacacugua

SEQ ID NO: 2566273 - RNA, 14 nt, Human
gucuuggacacugu

SEQ ID NO: 2566274 - RNA, 18 nt, Human
gucuugcuaccucaguca

SEQ ID NO: 2566275 - RNA, 22 nt, Human
gucuugcuauggggagaaaaga

SEQ ID NO: 2566276 - RNA, 19 nt, Human
gucuugcaauggcagccuu

SEQ ID NO: 2566277 - RNA, 18 nt, Human
gucuugcaauggcagccu

SEQ ID NO: 2566278 - RNA, 17 nt, Human
gucuugcaauggcagcc

SEQ ID NO: 2566279 - RNA, 16 nt, Human
gucuugcaauggcagc

SEQ ID NO: 2566280 - RNA, 20 nt, Human
gucuugaacuccuggccuca

SEQ ID NO: 2566281 - RNA, 18 nt, Human
gucuugaacuccuggccu

SEQ ID NO: 2566282 - RNA, 21 nt, Human
gucuugaacuccuggccucaa

SEQ ID NO: 2566283 - RNA, 19 nt, Human
gucuugaaugucuuuugaa

SEQ ID NO: 2566284 - RNA, 17 nt, Human
gucuugaaugucuuuug

SEQ ID NO: 2566285 - RNA, 15 nt, Human
gucuugaaugucuuu

SEQ ID NO: 2566286 - RNA, 12 nt, Human
gucuugaaagau

SEQ ID NO: 2566287 - RNA, 20 nt, Human
gucuucuuugcccacaaugc

SEQ ID NO: 2566288 - RNA, 17 nt, Human
gucuucugccuguuaua

SEQ ID NO: 2566289 - RNA, 15 nt, Human
gucuucugccuguua

SEQ ID NO: 2566290 - RNA, 14 nt, Human
gucuucugccuguu

SEQ ID NO: 2566291 - RNA, 13 nt, Human
gucuucugccugu

SEQ ID NO: 2566292 - RNA, 16 nt, Human
gucuucuuacaugcau

SEQ ID NO: 2566293 - RNA, 14 nt, Human
gucuucuucagggu

SEQ ID NO: 2566294 - RNA, 17 nt, Human
gucuucuuugcccacaa

SEQ ID NO: 2566295 - RNA, 17 nt, Human
gucuugaacuccuggcc

SEQ ID NO: 2566296 - RNA, 16 nt, Human
gucuugaacuccuggc

SEQ ID NO: 2566297 - RNA, 13 nt, Human
gucuucuccccag

SEQ ID NO: 2566298 - RNA, 12 nt, Human
gucuucucccca

SEQ ID NO: 2566299 - RNA, 17 nt, Human
gucuucuccaccacgcu

SEQ ID NO: 2566300 - RNA, 20 nt, Human
gucuucuccaccacgcuggg

SEQ ID NO: 2566301 - RNA, 18 nt, Human
gucuucucaggcucugcc

SEQ ID NO: 2566302 - RNA, 19 nt, Human
gucuucucaggcucugccc

SEQ ID NO: 2566303 - RNA, 22 nt, Human
gucuucucaggcucugcccugc

SEQ ID NO: 2566304 - RNA, 16 nt, Human
gucuucucauagcauu

SEQ ID NO: 2566305 - RNA, 17 nt, Human
gucuucucauagcauua

SEQ ID NO: 2566306 - RNA, 19 nt, Human
gucuucucauagcauuaac

SEQ ID NO: 2566307 - RNA, 20 nt, Human
gucuucucauagcauuaacu

SEQ ID NO: 2566308 - RNA, 23 nt, Human
gucuucucauagcauuaacuaau

SEQ ID NO: 2566309 - RNA, 21 nt, Human
gucuuaaaaaguggaaaaaua

SEQ ID NO: 2566310 - RNA, 15 nt, Human
gucuucucaggcucu

SEQ ID NO: 2566311 - RNA, 15 nt, Human
gugcagaaaacauug

SEQ ID NO: 2566312 - RNA, 14 nt, Human
gugcagaaaacauu

SEQ ID NO: 2566313 - RNA, 23 nt, Human
gugcacugucacuuugcucuggg

SEQ ID NO: 2566314 - RNA, 15 nt, Human
gugcacugucacuuu

SEQ ID NO: 2566315 - RNA, 13 nt, Human
gugcacugucacu

SEQ ID NO: 2566316 - RNA, 17 nt, Human
gugcagaaaacauuguu

SEQ ID NO: 2566317 - RNA, 16 nt, Human
gugcagaaaacauugu

SEQ ID NO: 2566318 - RNA, 14 nt, Human
gugcagacuggagg

SEQ ID NO: 2566319 - RNA, 23 nt, Human
gugcagaggaaguggaaggcauc

SEQ ID NO: 2566320 - RNA, 23 nt, Human
gugcagacuggaggggacgcugg

SEQ ID NO: 2566321 - RNA, 15 nt, Human
gugcagacuggaggg

SEQ ID NO: 2566322 - RNA, 21 nt, Human
gugcacugcccauggacaggc

SEQ ID NO: 2566323 - RNA, 19 nt, Human
gugcacugcccauggacag

SEQ ID NO: 2566324 - RNA, 20 nt, Human
gugcacugcccauggacagg

SEQ ID NO: 2566325 - RNA, 15 nt, Human
gugcacugcccaugg

SEQ ID NO: 2566326 - RNA, 14 nt, Human
gugauuuuuuuguc

SEQ ID NO: 2566327 - RNA, 14 nt, Human
gugauuuuuuucuu

SEQ ID NO: 2566328 - RNA, 19 nt, Human
gugauuuuaacucugucuu

SEQ ID NO: 2566329 - RNA, 21 nt, Human
gugcaaaaagcugaguauggu

SEQ ID NO: 2566330 - RNA, 20 nt, Human
gugcaaaacagcguuuaaga

SEQ ID NO: 2566331 - RNA, 13 nt, Human
gugauuuuuguaa

SEQ ID NO: 2566332 - RNA, 18 nt, Human
gugauuuuuguaauuuuu

SEQ ID NO: 2566333 - RNA, 22 nt, Human
gugauuugacuguuuuuaccca

SEQ ID NO: 2566334 - RNA, 21 nt, Human
gugauuugacuguuuuuaccc

SEQ ID NO: 2566335 - RNA, 19 nt, Human
gugauuugacuguuuuuac

SEQ ID NO: 2566336 - RNA, 14 nt, Human
gugauuugacuguu

SEQ ID NO: 2566337 - RNA, 22 nt, Human
gugauuucccguggccccagcc

SEQ ID NO: 2566338 - RNA, 13 nt, Human
gugauuugacugu

SEQ ID NO: 2566339 - RNA, 14 nt, Human
gugauuuuaacucu

SEQ ID NO: 2566340 - RNA, 16 nt, Human
gugauuuuaacucugu

SEQ ID NO: 2566341 - RNA, 17 nt, Human
gugauuuuaacucuguc

SEQ ID NO: 2566342 - RNA, 18 nt, Human
gugauuuuaacucugucu

SEQ ID NO: 2566343 - RNA, 23 nt, Human
gugauuucccguggccccagccu

SEQ ID NO: 2566344 - RNA, 21 nt, Human
gugauuucccguggccccagc

SEQ ID NO: 2566345 - RNA, 20 nt, Human
gugauuucccguggccccag

SEQ ID NO: 2566346 - RNA, 18 nt, Human
gugauuucccguggcccc

SEQ ID NO: 2566347 - RNA, 19 nt, Human
gugauuucagagagggcag

SEQ ID NO: 2566348 - RNA, 23 nt, Human
gugauuuagaacuguaugucaga

SEQ ID NO: 2566349 - RNA, 21 nt, Human
gugauuuagaacuguauguca

SEQ ID NO: 2566350 - RNA, 18 nt, Human
gugauuuagaacuguaug

SEQ ID NO: 2566351 - RNA, 18 nt, Human
gugauuuacgcucauugu

SEQ ID NO: 2566352 - RNA, 24 nt, Human
gugauccacccaccucagccuccc

SEQ ID NO: 2566353 - RNA, 23 nt, Human
gugauccacccaccucagccucc

SEQ ID NO: 2566354 - RNA, 21 nt, Human
gugccaggacuccccaggcca

SEQ ID NO: 2566355 - RNA, 18 nt, Human
gugccaggacuccccagg

SEQ ID NO: 2566356 - RNA, 17 nt, Human
gugccaggacuccccag

SEQ ID NO: 2566357 - RNA, 18 nt, Human
gugccagccuuccucugc

SEQ ID NO: 2566358 - RNA, 13 nt, Human
gugccaggaccag

SEQ ID NO: 2566359 - RNA, 16 nt, Human
gugccaggaccaguca

SEQ ID NO: 2566360 - RNA, 19 nt, Human
gugccagccuuccucugca

SEQ ID NO: 2566361 - RNA, 13 nt, Human
gugccagccuucc

SEQ ID NO: 2566362 - RNA, 22 nt, Human
gugccagccgugaugcucaggc

SEQ ID NO: 2566363 - RNA, 20 nt, Human
gugcauccgggggcagcucu

SEQ ID NO: 2566364 - RNA, 18 nt, Human
gugcauccgggggcagcu

SEQ ID NO: 2566365 - RNA, 18 nt, Human
gugcauauuguacacuuu

SEQ ID NO: 2566366 - RNA, 15 nt, Human
gugcauauuguacac

SEQ ID NO: 2566367 - RNA, 14 nt, Human
gugcauauuguaca

SEQ ID NO: 2566368 - RNA, 13 nt, Human
gugcauauuguac

SEQ ID NO: 2566369 - RNA, 20 nt, Human
gugcauauuguacacuuuuu

SEQ ID NO: 2566370 - RNA, 12 nt, Human
gugcauccaaag

SEQ ID NO: 2566371 - RNA, 13 nt, Human
gugcaucucagcc

SEQ ID NO: 2566372 - RNA, 21 nt, Human
gugccagcaacugaauaaaua

SEQ ID NO: 2566373 - RNA, 21 nt, Human
gugcauauuccuuucuaucau

SEQ ID NO: 2566374 - RNA, 16 nt, Human
gugcauauuccuuucu

SEQ ID NO: 2566375 - RNA, 19 nt, Human
gugcaguugacagcaggug

SEQ ID NO: 2566376 - RNA, 20 nt, Human
gugcaguugacagcaggugg

SEQ ID NO: 2566377 - RNA, 22 nt, Human
gugcauaccacuuuuguucuug

SEQ ID NO: 2566378 - RNA, 15 nt, Human
gugcaguugacagca

SEQ ID NO: 2566379 - RNA, 20 nt, Human
gugcaguucuaguuugcauu

SEQ ID NO: 2566380 - RNA, 19 nt, Human
gugcaguucuaguuugcau

SEQ ID NO: 2566381 - RNA, 24 nt, Human
gugcaguucccccaaccucagacu

SEQ ID NO: 2566382 - RNA, 18 nt, Human
gugcaggccugcucaggg

SEQ ID NO: 2566383 - RNA, 22 nt, Human
gugcaguucccccaaccucaga

SEQ ID NO: 2566384 - RNA, 15 nt, Human
gugcaggcuggcacc

SEQ ID NO: 2566385 - RNA, 17 nt, Human
gugcagcuucuguccug

SEQ ID NO: 2566386 - RNA, 12 nt, Human
gugcagcugauu

SEQ ID NO: 2566387 - RNA, 13 nt, Human
gugcagcugauuu

SEQ ID NO: 2566388 - RNA, 14 nt, Human
gugcagcugauuuu

SEQ ID NO: 2566389 - RNA, 16 nt, Human
gugcagcugauuuuaa

SEQ ID NO: 2566390 - RNA, 16 nt, Human
gugcagcuucuguccu

SEQ ID NO: 2566391 - RNA, 15 nt, Human
gugcagcuucugucc

SEQ ID NO: 2566392 - RNA, 18 nt, Human
gugcagcugauuuuaaca

SEQ ID NO: 2566393 - RNA, 23 nt, Human
gugcagcugauuuuaacaauaac

SEQ ID NO: 2566394 - RNA, 23 nt, Human
gugcaguggugcgaucuggguuc

SEQ ID NO: 2566395 - RNA, 20 nt, Human
gugcaguggugcgaucuggg

SEQ ID NO: 2566396 - RNA, 21 nt, Human
gugcagccuguccugggcugg

SEQ ID NO: 2566397 - RNA, 15 nt, Human
gugcagccuguccug

SEQ ID NO: 2566398 - RNA, 18 nt, Human
gugcagccgcugagcgag

SEQ ID NO: 2566399 - RNA, 22 nt, Human
gugcagcucaaggaaaggccug

SEQ ID NO: 2566400 - RNA, 23 nt, Human
gugcagcucaaggaaaggccuga

SEQ ID NO: 2566401 - RNA, 17 nt, Human
gugcagccgcugagcga

SEQ ID NO: 2566402 - RNA, 20 nt, Human
gugcagcccguguggccccu

SEQ ID NO: 2566403 - RNA, 21 nt, Human
gugcagcccguguggccccuu

SEQ ID NO: 2566404 - RNA, 19 nt, Human
gugcagcccccacugccuu

SEQ ID NO: 2566405 - RNA, 22 nt, Human
gugcagccccgccuccaggcca

SEQ ID NO: 2566406 - RNA, 19 nt, Human
gugcagcccguguggcccc

SEQ ID NO: 2566407 - RNA, 17 nt, Human
gugcagaugagguugcu

SEQ ID NO: 2566408 - RNA, 16 nt, Human
gugcagagugcccaga

SEQ ID NO: 2566409 - RNA, 18 nt, Human
gugcagagugcccagaac

SEQ ID NO: 2566410 - RNA, 15 nt, Human
gugcagcauaugagg

SEQ ID NO: 2566411 - RNA, 17 nt, Human
gugcagcauaugaggau

SEQ ID NO: 2566412 - RNA, 22 nt, Human
gugcuaaaaaugggacuucuuu

SEQ ID NO: 2566413 - RNA, 21 nt, Human
gugcuaaaaaugggacuucuu

SEQ ID NO: 2566414 - RNA, 18 nt, Human
gugcuaaaaaugggacuu

SEQ ID NO: 2566415 - RNA, 14 nt, Human
gugcuaaaaauggg

SEQ ID NO: 2566416 - RNA, 22 nt, Human
gugcuaaauggucgcccaggag

SEQ ID NO: 2566417 - RNA, 13 nt, Human
gugcuaaauuuuc

SEQ ID NO: 2566418 - RNA, 23 nt, Human
gugcuaaccacgucugucuucac

SEQ ID NO: 2566419 - RNA, 17 nt, Human
gugcguguguagaguua

SEQ ID NO: 2566420 - RNA, 15 nt, Human
gugcguguguagagu

SEQ ID NO: 2566421 - RNA, 13 nt, Human
gugcguguguaga

SEQ ID NO: 2566422 - RNA, 13 nt, Human
gugcuaaaaaugg

SEQ ID NO: 2566423 - RNA, 14 nt, Human
gugcguguuugcac

SEQ ID NO: 2566424 - RNA, 13 nt, Human
gugcgugugucca

SEQ ID NO: 2566425 - RNA, 13 nt, Human
gugcgugugugca

SEQ ID NO: 2566426 - RNA, 14 nt, Human
gugcgugggugaag

SEQ ID NO: 2566427 - RNA, 12 nt, Human
gugcguggguga

SEQ ID NO: 2566428 - RNA, 12 nt, Human
gugcgugcucag

SEQ ID NO: 2566429 - RNA, 21 nt, Human
gugcgugaaacacaccaggcu

SEQ ID NO: 2566430 - RNA, 16 nt, Human
gugcuaagugugaacu

SEQ ID NO: 2566431 - RNA, 14 nt, Human
gugcuaagugugaa

SEQ ID NO: 2566432 - RNA, 13 nt, Human
gugcuaaguguga

SEQ ID NO: 2566433 - RNA, 18 nt, Human
gugcuaagugugaacugg

SEQ ID NO: 2566434 - RNA, 17 nt, Human
gugcuaagugugaacug

SEQ ID NO: 2566435 - RNA, 17 nt, Human
gugcuaauaacagugca

SEQ ID NO: 2566436 - RNA, 20 nt, Human
gugcuaagugugaacuggac

SEQ ID NO: 2566437 - RNA, 16 nt, Human
gugcuaaauuuucagu

SEQ ID NO: 2566438 - RNA, 14 nt, Human
gugcgccuacagga

SEQ ID NO: 2566439 - RNA, 15 nt, Human
gugcgauucuggaua

SEQ ID NO: 2566440 - RNA, 14 nt, Human
gugcgagugugugc

SEQ ID NO: 2566441 - RNA, 23 nt, Human
gugcgagugugugcaugugugug

SEQ ID NO: 2566442 - RNA, 22 nt, Human
gugcgccgagucugucucuguc

SEQ ID NO: 2566443 - RNA, 22 nt, Human
gugcgcugacaaccaccgcucc

SEQ ID NO: 2566444 - RNA, 15 nt, Human
gugcguccacgagcu

SEQ ID NO: 2566445 - RNA, 15 nt, Human
gugcgguggcucacg

SEQ ID NO: 2566446 - RNA, 14 nt, Human
gugcggcugugcag

SEQ ID NO: 2566447 - RNA, 14 nt, Human
gugcgugaaacaca

SEQ ID NO: 2566448 - RNA, 15 nt, Human
gugcgugaaacacac

SEQ ID NO: 2566449 - RNA, 19 nt, Human
gugcggcagggacacccga

SEQ ID NO: 2566450 - RNA, 14 nt, Human
gugcggccuuuggc

SEQ ID NO: 2566451 - RNA, 20 nt, Human
gugccccugcugccucccca

SEQ ID NO: 2566452 - RNA, 15 nt, Human
gugccuucagcucua

SEQ ID NO: 2566453 - RNA, 20 nt, Human
gugcccuccacagccgcagc

SEQ ID NO: 2566454 - RNA, 14 nt, Human
gugcccucgcugcu

SEQ ID NO: 2566455 - RNA, 11 nt, Human
gugccuucauu

SEQ ID NO: 2566456 - RNA, 12 nt, Human
gugccuucauuu

SEQ ID NO: 2566457 - RNA, 14 nt, Human
gugccuucauuugg

SEQ ID NO: 2566458 - RNA, 12 nt, Human
gugccuuccaua

SEQ ID NO: 2566459 - RNA, 12 nt, Human
gugccuuccaac

SEQ ID NO: 2566460 - RNA, 15 nt, Human
gugccuuccauaauu

SEQ ID NO: 2566461 - RNA, 21 nt, Human
gugccuuccaugucggccucu

SEQ ID NO: 2566462 - RNA, 20 nt, Human
gugccuuccaugucggccuc

SEQ ID NO: 2566463 - RNA, 17 nt, Human
gugccuuccauaauuau

SEQ ID NO: 2566464 - RNA, 22 nt, Human
gugccuuccauaauuaugacag

SEQ ID NO: 2566465 - RNA, 20 nt, Human
gugcgaccccaucugcccag

SEQ ID NO: 2566466 - RNA, 18 nt, Human
gugcgaccccaucugccc

SEQ ID NO: 2566467 - RNA, 16 nt, Human
gugcgaccccaucugc

SEQ ID NO: 2566468 - RNA, 22 nt, Human
gugccuuuuuucacggaaguuu

SEQ ID NO: 2566469 - RNA, 18 nt, Human
gugccuuuuuucacggaa

SEQ ID NO: 2566470 - RNA, 21 nt, Human
gugccuuuugcaccccuccca

SEQ ID NO: 2566471 - RNA, 22 nt, Human
gugccuuuugcaccccucccau

SEQ ID NO: 2566472 - RNA, 21 nt, Human
gugcgaucuggguucacugca

SEQ ID NO: 2566473 - RNA, 19 nt, Human
gugccuuuugcaccccucc

SEQ ID NO: 2566474 - RNA, 19 nt, Human
gugccuuggggaauuuccu

SEQ ID NO: 2566475 - RNA, 18 nt, Human
gugccuuuugcaccccuc

SEQ ID NO: 2566476 - RNA, 23 nt, Human
gugccuuggagggucccaagcug

SEQ ID NO: 2566477 - RNA, 14 nt, Human
gugccuuuugccau

SEQ ID NO: 2566478 - RNA, 20 nt, Human
gugccuucgcgguggaaggc

SEQ ID NO: 2566479 - RNA, 22 nt, Human
gugccuuccaugucggccucua

SEQ ID NO: 2566480 - RNA, 23 nt, Human
gugccuuccuguuuuucacauuu

SEQ ID NO: 2566481 - RNA, 19 nt, Human
gugccuucuuauucucacu

SEQ ID NO: 2566482 - RNA, 23 nt, Human
gugccuucuuauucucacuccac

SEQ ID NO: 2566483 - RNA, 16 nt, Human
gugccaugugccaggu

SEQ ID NO: 2566484 - RNA, 14 nt, Human
gugccaugugccag

SEQ ID NO: 2566485 - RNA, 20 nt, Human
gugccagguuuucugggugu

SEQ ID NO: 2566486 - RNA, 16 nt, Human
gugccagguccuugcc

SEQ ID NO: 2566487 - RNA, 16 nt, Human
gugccagggcagcacu

SEQ ID NO: 2566488 - RNA, 19 nt, Human
gugccaggcccggggcugg

SEQ ID NO: 2566489 - RNA, 20 nt, Human
gugccaggcccggggcuggc

SEQ ID NO: 2566490 - RNA, 21 nt, Human
gugccaggauggaaugauggg

SEQ ID NO: 2566491 - RNA, 23 nt, Human
gugccaggacuccccaggccagg

SEQ ID NO: 2566492 - RNA, 12 nt, Human
gugccaggcccg

SEQ ID NO: 2566493 - RNA, 13 nt, Human
gugccaggcccgg

SEQ ID NO: 2566494 - RNA, 17 nt, Human
gugccaggcccggggcu

SEQ ID NO: 2566495 - RNA, 20 nt, Human
gugcccaagaauagaugcug

SEQ ID NO: 2566496 - RNA, 13 nt, Human
gugccccccuugc

SEQ ID NO: 2566497 - RNA, 20 nt, Human
gugccccccuugccagacau

SEQ ID NO: 2566498 - RNA, 22 nt, Human
gugccccccauccuggcccauc

SEQ ID NO: 2566499 - RNA, 13 nt, Human
gugccccuagcuu

SEQ ID NO: 2566500 - RNA, 17 nt, Human
gugccccgccuccccga

SEQ ID NO: 2566501 - RNA, 16 nt, Human
gugccccgccuccccg

SEQ ID NO: 2566502 - RNA, 13 nt, Human
gugccccugcugc

SEQ ID NO: 2566503 - RNA, 19 nt, Human
gugccccugcugccucccc

SEQ ID NO: 2566504 - RNA, 17 nt, Human
gugcccccucuaccauu

SEQ ID NO: 2566505 - RNA, 14 nt, Human
gugcccccucuacc

SEQ ID NO: 2566506 - RNA, 20 nt, Human
gugcccccuccucucccauc

SEQ ID NO: 2566507 - RNA, 18 nt, Human
gugcccccuccucuccca

SEQ ID NO: 2566508 - RNA, 17 nt, Human
gugcccccuccucuccc

SEQ ID NO: 2566509 - RNA, 14 nt, Human
gugcccccuccucu

SEQ ID NO: 2566510 - RNA, 13 nt, Human
gugcccccuccuc

SEQ ID NO: 2566511 - RNA, 17 nt, Human
gugacuaauuguauaac

SEQ ID NO: 2566512 - RNA, 15 nt, Human
gugacuaauuguaua

SEQ ID NO: 2566513 - RNA, 21 nt, Human
gugacuaauuguauaacaggu

SEQ ID NO: 2566514 - RNA, 20 nt, Human
gugacuaauuguauaacagg

SEQ ID NO: 2566515 - RNA, 19 nt, Human
gugacuaauuguauaacag

SEQ ID NO: 2566516 - RNA, 18 nt, Human
gugacuaauuguauaaca

SEQ ID NO: 2566517 - RNA, 23 nt, Human
gugacuaauuguauaacagguua

SEQ ID NO: 2566518 - RNA, 22 nt, Human
gugacuaauuguauaacagguu

SEQ ID NO: 2566519 - RNA, 21 nt, Human
gugacuauggagcugagcagg

SEQ ID NO: 2566520 - RNA, 14 nt, Human
gugacuaugaacuu

SEQ ID NO: 2566521 - RNA, 20 nt, Human
gugacuauauagagauguuu

SEQ ID NO: 2566522 - RNA, 17 nt, Human
gugacuauauagagaug

SEQ ID NO: 2566523 - RNA, 15 nt, Human
gugacuauauagaga

SEQ ID NO: 2566524 - RNA, 20 nt, Human
gugagccacugcaccgggcc

SEQ ID NO: 2566525 - RNA, 15 nt, Human
gugagccacugcacc

SEQ ID NO: 2566526 - RNA, 14 nt, Human
gugagccccugguc

SEQ ID NO: 2566527 - RNA, 17 nt, Human
gugagcccauggcccuc

SEQ ID NO: 2566528 - RNA, 18 nt, Human
gugagcccauggcccucc

SEQ ID NO: 2566529 - RNA, 18 nt, Human
gugagcccagcuggguca

SEQ ID NO: 2566530 - RNA, 20 nt, Human
gugagcccagcugggucagg

SEQ ID NO: 2566531 - RNA, 15 nt, Human
gugagcccagcuggg

SEQ ID NO: 2566532 - RNA, 20 nt, Human
gugagccagguaaugaggga

SEQ ID NO: 2566533 - RNA, 15 nt, Human
gugacucacccaagc

SEQ ID NO: 2566534 - RNA, 14 nt, Human
gugagccacugcac

SEQ ID NO: 2566535 - RNA, 19 nt, Human
gugagccgagaucacgcca

SEQ ID NO: 2566536 - RNA, 23 nt, Human
gugagccuggcucuugugcugga

SEQ ID NO: 2566537 - RNA, 16 nt, Human
gugagccuggcucuug

SEQ ID NO: 2566538 - RNA, 14 nt, Human
gugagccuggcucu

SEQ ID NO: 2566539 - RNA, 13 nt, Human
gugagccuggcuc

SEQ ID NO: 2566540 - RNA, 17 nt, Human
gugagccccugguccug

SEQ ID NO: 2566541 - RNA, 12 nt, Human
gugagccgcauc

SEQ ID NO: 2566542 - RNA, 18 nt, Human
gugagccgcaucuucucc

SEQ ID NO: 2566543 - RNA, 21 nt, Human
gugagccgcaucuucuccauc

SEQ ID NO: 2566544 - RNA, 13 nt, Human
gugaggagcuggg

SEQ ID NO: 2566545 - RNA, 18 nt, Human
gugaggagcugcuggcuu

SEQ ID NO: 2566546 - RNA, 14 nt, Human
gugagccuuggcug

SEQ ID NO: 2566547 - RNA, 17 nt, Human
gugaggagcugcuggcu

SEQ ID NO: 2566548 - RNA, 15 nt, Human
gugaggagcugcugg

SEQ ID NO: 2566549 - RNA, 17 nt, Human
gugaggaugaaaaaaua

SEQ ID NO: 2566550 - RNA, 18 nt, Human
gugaggagcuugaaaccc

SEQ ID NO: 2566551 - RNA, 15 nt, Human
gugaguguggcuccc

SEQ ID NO: 2566552 - RNA, 16 nt, Human
gugaguguaaguguga

SEQ ID NO: 2566553 - RNA, 15 nt, Human
gugaggaugucuggg

SEQ ID NO: 2566554 - RNA, 18 nt, Human
gugaggaugucacucaga

SEQ ID NO: 2566555 - RNA, 22 nt, Human
gugaggaugucacucagaugga

SEQ ID NO: 2566556 - RNA, 16 nt, Human
gugagcggagaucgca

SEQ ID NO: 2566557 - RNA, 21 nt, Human
gugaggauggccucugcuaag

SEQ ID NO: 2566558 - RNA, 17 nt, Human
gugaggaugggaaggag

SEQ ID NO: 2566559 - RNA, 19 nt, Human
gugaggaugggaaggaggg

SEQ ID NO: 2566560 - RNA, 15 nt, Human
gugauacaaugcugu

SEQ ID NO: 2566561 - RNA, 18 nt, Human
gugaguuugagcugccuu

SEQ ID NO: 2566562 - RNA, 17 nt, Human
gugauacaaugcugugc

SEQ ID NO: 2566563 - RNA, 13 nt, Human
gugauaaacuuug

SEQ ID NO: 2566564 - RNA, 14 nt, Human
gugauaaacuuugc

SEQ ID NO: 2566565 - RNA, 20 nt, Human
gugauacaacuucaagugca

SEQ ID NO: 2566566 - RNA, 21 nt, Human
gugaguuugagcugccuuccc

SEQ ID NO: 2566567 - RNA, 17 nt, Human
gugaguuugagcugccu

SEQ ID NO: 2566568 - RNA, 15 nt, Human
gugaguuugagcugc

SEQ ID NO: 2566569 - RNA, 20 nt, Human
gugaguuuaguaaggcugug

SEQ ID NO: 2566570 - RNA, 17 nt, Human
gugaguugauagcacag

SEQ ID NO: 2566571 - RNA, 17 nt, Human
gugaguuacagcgagag

SEQ ID NO: 2566572 - RNA, 16 nt, Human
gugaguguggcucccc

SEQ ID NO: 2566573 - RNA, 22 nt, Human
gugaguguguccaagugugugu

SEQ ID NO: 2566574 - RNA, 23 nt, Human
gugaguguguccaagugugugug

SEQ ID NO: 2566575 - RNA, 13 nt, Human
gugagugugugca

SEQ ID NO: 2566576 - RNA, 20 nt, Human
gugaguucucagggcuccug

SEQ ID NO: 2566577 - RNA, 18 nt, Human
gugaguucucagggcucc

SEQ ID NO: 2566578 - RNA, 17 nt, Human
gugaguucucagggcuc

SEQ ID NO: 2566579 - RNA, 15 nt, Human
gugaguucucagggc

SEQ ID NO: 2566580 - RNA, 14 nt, Human
gugaguucucaggg

SEQ ID NO: 2566581 - RNA, 15 nt, Human
gugagugugugcaag

SEQ ID NO: 2566582 - RNA, 23 nt, Human
gugauauauaaguguacauaugu

SEQ ID NO: 2566583 - RNA, 21 nt, Human
gugauauauaaguguacauau

SEQ ID NO: 2566584 - RNA, 13 nt, Human
gugauauauuuaa

SEQ ID NO: 2566585 - RNA, 19 nt, Human
gugauauggcagaagacac

SEQ ID NO: 2566586 - RNA, 16 nt, Human
gugauauggcagaaga

SEQ ID NO: 2566587 - RNA, 13 nt, Human
gugauauggagcc

SEQ ID NO: 2566588 - RNA, 19 nt, Human
gugauauaaguguguguuu

SEQ ID NO: 2566589 - RNA, 22 nt, Human
gugauagucuuuugcuuuuggc

SEQ ID NO: 2566590 - RNA, 18 nt, Human
gugauagcuaacauuuua

SEQ ID NO: 2566591 - RNA, 14 nt, Human
gugauagcacuuuc

SEQ ID NO: 2566592 - RNA, 13 nt, Human
gugauagcacuuu

SEQ ID NO: 2566593 - RNA, 20 nt, Human
gugauacccauagcuuccau

SEQ ID NO: 2566594 - RNA, 20 nt, Human
gugaucagaccauaauguua

SEQ ID NO: 2566595 - RNA, 17 nt, Human
gugaucacagcagcuuc

SEQ ID NO: 2566596 - RNA, 22 nt, Human
gugauccacccaccucagccuc

SEQ ID NO: 2566597 - RNA, 16 nt, Human
gugaucaauaaaaugu

SEQ ID NO: 2566598 - RNA, 17 nt, Human
gugaucaauaaaaugug

SEQ ID NO: 2566599 - RNA, 19 nt, Human
gugaucaauaaaaugugau

SEQ ID NO: 2566600 - RNA, 18 nt, Human
gugaucaauaaaauguga

SEQ ID NO: 2566601 - RNA, 17 nt, Human
gugaucaauuaaaugua

SEQ ID NO: 2566602 - RNA, 13 nt, Human
gugaucaaagcca

SEQ ID NO: 2566603 - RNA, 14 nt, Human
gugacagaggcagc

SEQ ID NO: 2566604 - RNA, 13 nt, Human
gugacagaggcag

SEQ ID NO: 2566605 - RNA, 12 nt, Human
gugacagaggca

SEQ ID NO: 2566606 - RNA, 20 nt, Human
gugacagacuccugaggaca

SEQ ID NO: 2566607 - RNA, 19 nt, Human
gugacagacuccugaggac

SEQ ID NO: 2566608 - RNA, 16 nt, Human
gugacagacuccugag

SEQ ID NO: 2566609 - RNA, 15 nt, Human
gugacagacuccuga

SEQ ID NO: 2566610 - RNA, 17 nt, Human
gugacagacaggcucuu

SEQ ID NO: 2566611 - RNA, 23 nt, Human
gugacagaccacaucuuuaucug

SEQ ID NO: 2566612 - RNA, 22 nt, Human
gugacacuucagagagcuggua

SEQ ID NO: 2566613 - RNA, 19 nt, Human
gugacacagcagcuucacc

SEQ ID NO: 2566614 - RNA, 12 nt, Human
gugacacagcag

SEQ ID NO: 2566615 - RNA, 23 nt, Human
gugacaccagccuuucucccagg

SEQ ID NO: 2566616 - RNA, 16 nt, Human
gugacagacaggcucu

SEQ ID NO: 2566617 - RNA, 15 nt, Human
gugacagacaggcuc

SEQ ID NO: 2566618 - RNA, 22 nt, Human
gugacacagcagcuucaccaga

SEQ ID NO: 2566619 - RNA, 18 nt, Human
gugacacuucagagagcu

SEQ ID NO: 2566620 - RNA, 20 nt, Human
gugacacuucagagagcugg

SEQ ID NO: 2566621 - RNA, 21 nt, Human
gugacacuucagagagcuggu

SEQ ID NO: 2566622 - RNA, 14 nt, Human
gugacaauaaaaca

SEQ ID NO: 2566623 - RNA, 16 nt, Human
gugacaauuuuguaca

SEQ ID NO: 2566624 - RNA, 12 nt, Human
gugacaauaaaa

SEQ ID NO: 2566625 - RNA, 18 nt, Human
gugacaaggccccagaga

SEQ ID NO: 2566626 - RNA, 19 nt, Human
gugacaaggccccagagac

SEQ ID NO: 2566627 - RNA, 23 nt, Human
gugacaagcuccuggucuugaga

SEQ ID NO: 2566628 - RNA, 13 nt, Human
gugacaaggcccc

SEQ ID NO: 2566629 - RNA, 14 nt, Human
gugacaaggcccca

SEQ ID NO: 2566630 - RNA, 17 nt, Human
gugacaaggccccagag

SEQ ID NO: 2566631 - RNA, 14 nt, Human
gugaccucugccug

SEQ ID NO: 2566632 - RNA, 13 nt, Human
gugaccucugccu

SEQ ID NO: 2566633 - RNA, 15 nt, Human
gugacagaggcagcc

SEQ ID NO: 2566634 - RNA, 12 nt, Human
gugaccucugcc

SEQ ID NO: 2566635 - RNA, 21 nt, Human
gugaccuuccaagagccugag

SEQ ID NO: 2566636 - RNA, 22 nt, Human
gugaccuuccaagagccugaga

SEQ ID NO: 2566637 - RNA, 15 nt, Human
gugaccucugccuga

SEQ ID NO: 2566638 - RNA, 15 nt, Human
gugacggucccacac

SEQ ID NO: 2566639 - RNA, 13 nt, Human
gugacggucccac

SEQ ID NO: 2566640 - RNA, 19 nt, Human
gugacgcugaauaaauguc

SEQ ID NO: 2566641 - RNA, 22 nt, Human
gugacggucccacacuggugac

SEQ ID NO: 2566642 - RNA, 19 nt, Human
gugacggucccacacuggu

SEQ ID NO: 2566643 - RNA, 18 nt, Human
gugacgcugaauaaaugu

SEQ ID NO: 2566644 - RNA, 17 nt, Human
gugacgcugaauaaaug

SEQ ID NO: 2566645 - RNA, 15 nt, Human
gugacgcugaauaaa

SEQ ID NO: 2566646 - RNA, 17 nt, Human
gugacgccugcccuccc

SEQ ID NO: 2566647 - RNA, 15 nt, Human
gugaccuucugggaa

SEQ ID NO: 2566648 - RNA, 22 nt, Human
gugacagacuccugaggacagc

SEQ ID NO: 2566649 - RNA, 19 nt, Human
gugaaaacaagugcuggca

SEQ ID NO: 2566650 - RNA, 18 nt, Human
gugaaaaaaaaaaugcug

SEQ ID NO: 2566651 - RNA, 15 nt, Human
gugaaaacaagugcu

SEQ ID NO: 2566652 - RNA, 14 nt, Human
gugaaaaaaaaaau

SEQ ID NO: 2566653 - RNA, 15 nt, Human
gugaaaaaaaaaaug

SEQ ID NO: 2566654 - RNA, 22 nt, Human
gucuuuuuuuuaaugugcugug

SEQ ID NO: 2566655 - RNA, 19 nt, Human
gucuuuuuuuuaaugugcu

SEQ ID NO: 2566656 - RNA, 18 nt, Human
gucuuuuuuuuaaugugc

SEQ ID NO: 2566657 - RNA, 17 nt, Human
gucuuuuuuuuaaugug

SEQ ID NO: 2566658 - RNA, 16 nt, Human
gucuuuuuuuuaaugu

SEQ ID NO: 2566659 - RNA, 21 nt, Human
gucuuuuuuuguauuauaaaa

SEQ ID NO: 2566660 - RNA, 17 nt, Human
gucuuuuuuuguauuau

SEQ ID NO: 2566661 - RNA, 13 nt, Human
gucuuuuuuugua

SEQ ID NO: 2566662 - RNA, 15 nt, Human
gucuuguacaugugu

SEQ ID NO: 2566663 - RNA, 13 nt, Human
gugaacacaucag

SEQ ID NO: 2566664 - RNA, 13 nt, Human
gugaaugaacacu

SEQ ID NO: 2566665 - RNA, 15 nt, Human
gugaaucuaaaagcu

SEQ ID NO: 2566666 - RNA, 19 nt, Human
gugaacaaaagaugcucuu

SEQ ID NO: 2566667 - RNA, 21 nt, Human
gugaacaaauuuacagagaca

SEQ ID NO: 2566668 - RNA, 17 nt, Human
gugaacaaagcagccac

SEQ ID NO: 2566669 - RNA, 18 nt, Human
gugaacaaaagaugcucu

SEQ ID NO: 2566670 - RNA, 18 nt, Human
gugaacaaagcagccacg

SEQ ID NO: 2566671 - RNA, 20 nt, Human
gugaaugcugggacucagcc

SEQ ID NO: 2566672 - RNA, 15 nt, Human
gugaaugcugggacu

SEQ ID NO: 2566673 - RNA, 13 nt, Human
gugaaugcuggga

SEQ ID NO: 2566674 - RNA, 21 nt, Human
gugaaugaugauccuaggcau

SEQ ID NO: 2566675 - RNA, 18 nt, Human
gugaauucuugaaggaaa

SEQ ID NO: 2566676 - RNA, 21 nt, Human
gugaaugcugggacucagccu

SEQ ID NO: 2566677 - RNA, 14 nt, Human
gugaauggauugga

SEQ ID NO: 2566678 - RNA, 20 nt, Human
gugaauggauuggauuauuu

SEQ ID NO: 2566679 - RNA, 15 nt, Human
gugaauggauuggau

SEQ ID NO: 2566680 - RNA, 20 nt, Human
gugacaaggauugcuacugu

SEQ ID NO: 2566681 - RNA, 14 nt, Human
gugaauuugaauga

SEQ ID NO: 2566682 - RNA, 16 nt, Human
gugaauuugaaugaaa

SEQ ID NO: 2566683 - RNA, 18 nt, Human
gugaauuugaaugaaaaa

SEQ ID NO: 2566684 - RNA, 22 nt, Human
gugaauucuugaaggaaaauga

SEQ ID NO: 2566685 - RNA, 22 nt, Human
gugaauugccugcagagagaag

SEQ ID NO: 2566686 - RNA, 20 nt, Human
gugaauugccugcagagaga

SEQ ID NO: 2566687 - RNA, 23 nt, Human
gugaauugccugcagagagaagc

SEQ ID NO: 2566688 - RNA, 19 nt, Human
gugaauugugaccaaguua

SEQ ID NO: 2566689 - RNA, 13 nt, Human
gugaauuugaaug

SEQ ID NO: 2566690 - RNA, 19 nt, Human
gugaauuucuucacuguug

SEQ ID NO: 2566691 - RNA, 15 nt, Human
gugucgggcaugaca

SEQ ID NO: 2566692 - RNA, 21 nt, Human
guguccuguaguugcguggac

SEQ ID NO: 2566693 - RNA, 23 nt, Human
guguccuggugcucucugccacu

SEQ ID NO: 2566694 - RNA, 16 nt, Human
guguccuuagaacauu

SEQ ID NO: 2566695 - RNA, 15 nt, Human
guguccuucccugca

SEQ ID NO: 2566696 - RNA, 12 nt, Human
guguccuucccu

SEQ ID NO: 2566697 - RNA, 17 nt, Human
guguccuugcaccugca

SEQ ID NO: 2566698 - RNA, 18 nt, Human
guguccuugcaccugcau

SEQ ID NO: 2566699 - RNA, 16 nt, Human
guguccuggugcucuc

SEQ ID NO: 2566700 - RNA, 13 nt, Human
guguccuggugcu

SEQ ID NO: 2566701 - RNA, 20 nt, Human
guguccugaccacccucccc

SEQ ID NO: 2566702 - RNA, 18 nt, Human
guguccugaccacccucc

SEQ ID NO: 2566703 - RNA, 17 nt, Human
guguccugaccacccuc

SEQ ID NO: 2566704 - RNA, 16 nt, Human
guguccugaccacccu

SEQ ID NO: 2566705 - RNA, 13 nt, Human
guguccugaccac

SEQ ID NO: 2566706 - RNA, 15 nt, Human
guguccucacggugc

SEQ ID NO: 2566707 - RNA, 20 nt, Human
guguccccuccacugucaca

SEQ ID NO: 2566708 - RNA, 14 nt, Human
guguccuaggagua

SEQ ID NO: 2566709 - RNA, 23 nt, Human
gugucccugcacuugcagacucu

SEQ ID NO: 2566710 - RNA, 14 nt, Human
guguccggucccug

SEQ ID NO: 2566711 - RNA, 17 nt, Human
gugucucccuucauccu

SEQ ID NO: 2566712 - RNA, 17 nt, Human
gugucuccaacccccca

SEQ ID NO: 2566713 - RNA, 13 nt, Human
gugucuccaaccc

SEQ ID NO: 2566714 - RNA, 22 nt, Human
gugucucaguccaccugagcug

SEQ ID NO: 2566715 - RNA, 14 nt, Human
gugucucuuggucc

SEQ ID NO: 2566716 - RNA, 19 nt, Human
gugucuccaaccccccagc

SEQ ID NO: 2566717 - RNA, 18 nt, Human
gugucuccaaccccccag

SEQ ID NO: 2566718 - RNA, 21 nt, Human
gugucuccaaccccccagcac

SEQ ID NO: 2566719 - RNA, 14 nt, Human
gugucuacagagaa

SEQ ID NO: 2566720 - RNA, 19 nt, Human
gugucuaggcaggaccugu

SEQ ID NO: 2566721 - RNA, 13 nt, Human
gugucuaaacugc

SEQ ID NO: 2566722 - RNA, 17 nt, Human
guguccuuucccuccac

SEQ ID NO: 2566723 - RNA, 14 nt, Human
gugucuaaaaacac

SEQ ID NO: 2566724 - RNA, 17 nt, Human
gugucuaaaaacaccaa

SEQ ID NO: 2566725 - RNA, 14 nt, Human
guguccuugugcau

SEQ ID NO: 2566726 - RNA, 19 nt, Human
guguccuugcaccugcauc

SEQ ID NO: 2566727 - RNA, 20 nt, Human
guguccuugugcaugagcua

SEQ ID NO: 2566728 - RNA, 16 nt, Human
guguccuuucccucca

SEQ ID NO: 2566729 - RNA, 15 nt, Human
gugucguagccaagg

SEQ ID NO: 2566730 - RNA, 23 nt, Human
gugucgcucugcuggccuggccg

SEQ ID NO: 2566731 - RNA, 14 nt, Human
gugugagugugugc

SEQ ID NO: 2566732 - RNA, 21 nt, Human
gugucuggauucccaggauga

SEQ ID NO: 2566733 - RNA, 17 nt, Human
gugucuggauucccagg

SEQ ID NO: 2566734 - RNA, 11 nt, Human
gugugagugug

SEQ ID NO: 2566735 - RNA, 20 nt, Human
gugugagucaccaagcccag

SEQ ID NO: 2566736 - RNA, 16 nt, Human
gugugauugacagcuu

SEQ ID NO: 2566737 - RNA, 21 nt, Human
gugugauugacagcuuugcug

SEQ ID NO: 2566738 - RNA, 21 nt, Human
gugugauugggaauaaauaug

SEQ ID NO: 2566739 - RNA, 23 nt, Human
gugugauugacagcuuugcugcu

SEQ ID NO: 2566740 - RNA, 16 nt, Human
gugugauugaaucuga

SEQ ID NO: 2566741 - RNA, 22 nt, Human
gugugaugaacuuucucuucau

SEQ ID NO: 2566742 - RNA, 17 nt, Human
gugugaugaacuuucuc

SEQ ID NO: 2566743 - RNA, 14 nt, Human
gugugaucgucuga

SEQ ID NO: 2566744 - RNA, 17 nt, Human
gugugaucccaagugcc

SEQ ID NO: 2566745 - RNA, 19 nt, Human
gugugaucccaagugccag

SEQ ID NO: 2566746 - RNA, 18 nt, Human
gugugcauauuguacacu

SEQ ID NO: 2566747 - RNA, 16 nt, Human
gugugcauauuguaca

SEQ ID NO: 2566748 - RNA, 15 nt, Human
gugugcauauuguac

SEQ ID NO: 2566749 - RNA, 14 nt, Human
gugugcauauugua

SEQ ID NO: 2566750 - RNA, 13 nt, Human
gugugcagugaag

SEQ ID NO: 2566751 - RNA, 22 nt, Human
gugugcaccuuaccaacuuucu

SEQ ID NO: 2566752 - RNA, 23 nt, Human
gugugcacuaaggggcccggcca

SEQ ID NO: 2566753 - RNA, 22 nt, Human
gugugcauauuguacacuuuuu

SEQ ID NO: 2566754 - RNA, 21 nt, Human
gugugcauauuguacacuuuu

SEQ ID NO: 2566755 - RNA, 12 nt, Human
gugugcaugugu

SEQ ID NO: 2566756 - RNA, 21 nt, Human
gugugccauagaguuuaacac

SEQ ID NO: 2566757 - RNA, 16 nt, Human
gugugcauugcuguga

SEQ ID NO: 2566758 - RNA, 18 nt, Human
gugugcaugugugugcuc

SEQ ID NO: 2566759 - RNA, 20 nt, Human
gugugcaugugugugcucag

SEQ ID NO: 2566760 - RNA, 19 nt, Human
gugugcaaugucugaguga

SEQ ID NO: 2566761 - RNA, 16 nt, Human
gugugcaagugugugc

SEQ ID NO: 2566762 - RNA, 16 nt, Human
gugugcaaguauguga

SEQ ID NO: 2566763 - RNA, 14 nt, Human
gugugauuuuucug

SEQ ID NO: 2566764 - RNA, 16 nt, Human
gugugcaccaggguug

SEQ ID NO: 2566765 - RNA, 17 nt, Human
gugugcacuaaggggcc

SEQ ID NO: 2566766 - RNA, 20 nt, Human
gugugcacaaauauuuauuu

SEQ ID NO: 2566767 - RNA, 22 nt, Human
gugugcacacacaccacacaua

SEQ ID NO: 2566768 - RNA, 21 nt, Human
gugucucuugguccugcugca

SEQ ID NO: 2566769 - RNA, 20 nt, Human
gugucucuugguccugcugc

SEQ ID NO: 2566770 - RNA, 19 nt, Human
gugucucuugguccugcug

SEQ ID NO: 2566771 - RNA, 18 nt, Human
gugucucuugguccugcu

SEQ ID NO: 2566772 - RNA, 14 nt, Human
gugucuggcugcag

SEQ ID NO: 2566773 - RNA, 21 nt, Human
gugucugcacccagggguggg

SEQ ID NO: 2566774 - RNA, 22 nt, Human
gugucucuuuucucuuucuccu

SEQ ID NO: 2566775 - RNA, 15 nt, Human
gugucugcucaguaa

SEQ ID NO: 2566776 - RNA, 22 nt, Human
gugucucuugguccugcugcag

SEQ ID NO: 2566777 - RNA, 21 nt, Human
gugucucggagggauuccccu

SEQ ID NO: 2566778 - RNA, 18 nt, Human
gugucucuuuucucuuuc

SEQ ID NO: 2566779 - RNA, 19 nt, Human
gugucucuuuucucuuucu

SEQ ID NO: 2566780 - RNA, 22 nt, Human
gugucugagcccucaaagugag

SEQ ID NO: 2566781 - RNA, 14 nt, Human
gugucugcacccag

SEQ ID NO: 2566782 - RNA, 12 nt, Human
guguguugugug

SEQ ID NO: 2566783 - RNA, 14 nt, Human
guguguugugugug

SEQ ID NO: 2566784 - RNA, 19 nt, Human
guguguuuaaauaaaguau

SEQ ID NO: 2566785 - RNA, 18 nt, Human
guguguuuaaauaaagua

SEQ ID NO: 2566786 - RNA, 16 nt, Human
guguguuuaaauaaag

SEQ ID NO: 2566787 - RNA, 15 nt, Human
guguguuuaaauaaa

SEQ ID NO: 2566788 - RNA, 17 nt, Human
guguguuguguguggga

SEQ ID NO: 2566789 - RNA, 18 nt, Human
guguguugucuugaaaga

SEQ ID NO: 2566790 - RNA, 16 nt, Human
guguguugucuugaaa

SEQ ID NO: 2566791 - RNA, 13 nt, Human
guguguugucuug

SEQ ID NO: 2566792 - RNA, 16 nt, Human
guguguugucucuuga

SEQ ID NO: 2566793 - RNA, 14 nt, Human
guguguugucucuu

SEQ ID NO: 2566794 - RNA, 15 nt, Human
guguguugccacagg

SEQ ID NO: 2566795 - RNA, 14 nt, Human
guguguuuaugugu

SEQ ID NO: 2566796 - RNA, 15 nt, Human
guguguuuaugugug

SEQ ID NO: 2566797 - RNA, 15 nt, Human
guguguuucugaucu

SEQ ID NO: 2566798 - RNA, 12 nt, Human
guguguuuuaaa

SEQ ID NO: 2566799 - RNA, 16 nt, Human
guguguuuaugugugu

SEQ ID NO: 2566800 - RNA, 14 nt, Human
guguguuucacuuu

SEQ ID NO: 2566801 - RNA, 22 nt, Human
guguguuuaaauaaaguaucau

SEQ ID NO: 2566802 - RNA, 14 nt, Human
guguguuugugauu

SEQ ID NO: 2566803 - RNA, 21 nt, Human
guguggagaagcggcuggcag

SEQ ID NO: 2566804 - RNA, 23 nt, Human
guguggagaagccacaggccuga

SEQ ID NO: 2566805 - RNA, 22 nt, Human
guguggagaagccacaggccug

SEQ ID NO: 2566806 - RNA, 16 nt, Human
guguggacugugaugc

SEQ ID NO: 2566807 - RNA, 20 nt, Human
guguggaaauuaagaagaaa

SEQ ID NO: 2566808 - RNA, 18 nt, Human
guguggacucaaguccuu

SEQ ID NO: 2566809 - RNA, 15 nt, Human
guguggacugugaug

SEQ ID NO: 2566810 - RNA, 13 nt, Human
guguggagaagcg

SEQ ID NO: 2566811 - RNA, 14 nt, Human
guguggcagugguu

SEQ ID NO: 2566812 - RNA, 14 nt, Human
guguggcuccuucc

SEQ ID NO: 2566813 - RNA, 13 nt, Human
guguggcugagga

SEQ ID NO: 2566814 - RNA, 15 nt, Human
guguggcuccccucu

SEQ ID NO: 2566815 - RNA, 12 nt, Human
guguggcagugg

SEQ ID NO: 2566816 - RNA, 15 nt, Human
guguggccccuucac

SEQ ID NO: 2566817 - RNA, 14 nt, Human
guguggcccugcca

SEQ ID NO: 2566818 - RNA, 19 nt, Human
guguggcucacguguguga

SEQ ID NO: 2566819 - RNA, 17 nt, Human
gugugggaguguguaau

SEQ ID NO: 2566820 - RNA, 14 nt, Human
gugugggcuguguc

SEQ ID NO: 2566821 - RNA, 13 nt, Human
gugugggaaggga

SEQ ID NO: 2566822 - RNA, 16 nt, Human
gugugggaagggagag

SEQ ID NO: 2566823 - RNA, 20 nt, Human
guguggcugaggaggccucc

SEQ ID NO: 2566824 - RNA, 15 nt, Human
guguggcugaggagg

SEQ ID NO: 2566825 - RNA, 23 nt, Human
gugugccccccauccuggcccau

SEQ ID NO: 2566826 - RNA, 22 nt, Human
gugugccccccauccuggccca

SEQ ID NO: 2566827 - RNA, 21 nt, Human
gugugccccccauccuggccc

SEQ ID NO: 2566828 - RNA, 20 nt, Human
gugugccccccauccuggcc

SEQ ID NO: 2566829 - RNA, 19 nt, Human
gugugccccccauccuggc

SEQ ID NO: 2566830 - RNA, 18 nt, Human
gugugccccccauccugg

SEQ ID NO: 2566831 - RNA, 17 nt, Human
gugugccccccauccug

SEQ ID NO: 2566832 - RNA, 16 nt, Human
gugugccccccauccu

SEQ ID NO: 2566833 - RNA, 13 nt, Human
gugugccugcagc

SEQ ID NO: 2566834 - RNA, 14 nt, Human
gugugccugcagcc

SEQ ID NO: 2566835 - RNA, 15 nt, Human
gugugccugcagccc

SEQ ID NO: 2566836 - RNA, 16 nt, Human
gugugccugcagcccc

SEQ ID NO: 2566837 - RNA, 17 nt, Human
gugugcucaggagcccu

SEQ ID NO: 2566838 - RNA, 16 nt, Human
gugugcucaggagccc

SEQ ID NO: 2566839 - RNA, 22 nt, Human
gugugccugucuguuacacugg

SEQ ID NO: 2566840 - RNA, 13 nt, Human
gugugccugucug

SEQ ID NO: 2566841 - RNA, 18 nt, Human
gugugccugcagccccgc

SEQ ID NO: 2566842 - RNA, 19 nt, Human
gugugcucaggagcccugg

SEQ ID NO: 2566843 - RNA, 18 nt, Human
gugugcucaggagcccug

SEQ ID NO: 2566844 - RNA, 16 nt, Human
gugugcguguuugcac

SEQ ID NO: 2566845 - RNA, 12 nt, Human
gugugcucugau

SEQ ID NO: 2566846 - RNA, 22 nt, Human
gugugcucugaucauccacugu

SEQ ID NO: 2566847 - RNA, 15 nt, Human
gugugcucugaucau

SEQ ID NO: 2566848 - RNA, 19 nt, Human
gugugcugggagcuccacu

SEQ ID NO: 2566849 - RNA, 12 nt, Human
gugugcugggag

SEQ ID NO: 2566850 - RNA, 18 nt, Human
gugugcuuuaugcugaaa

SEQ ID NO: 2566851 - RNA, 22 nt, Human
gugugcuuuaugcugaaacaga

SEQ ID NO: 2566852 - RNA, 19 nt, Human
guguggaaauuaagaagaa

SEQ ID NO: 2566853 - RNA, 11 nt, Human
gugugcuggga

SEQ ID NO: 2566854 - RNA, 14 nt, Human
gugugcuggaggac

SEQ ID NO: 2566855 - RNA, 17 nt, Human
gugugcucuucuucuuu

SEQ ID NO: 2566856 - RNA, 13 nt, Human
gugugcucuucuu

SEQ ID NO: 2566857 - RNA, 20 nt, Human
guuaaaagaugaaaauauuu

SEQ ID NO: 2566858 - RNA, 22 nt, Human
guuaaaauaccagccaguaaau

SEQ ID NO: 2566859 - RNA, 14 nt, Human
guuaaacauugaag

SEQ ID NO: 2566860 - RNA, 20 nt, Human
guuaaaagagguuuuucuua

SEQ ID NO: 2566861 - RNA, 21 nt, Human
guuaaaagagguuuuucuuaa

SEQ ID NO: 2566862 - RNA, 21 nt, Human
guuaaaauaacuaguguugcu

SEQ ID NO: 2566863 - RNA, 14 nt, Human
guuaaaagaugaaa

SEQ ID NO: 2566864 - RNA, 16 nt, Human
guuaaaagaugaaaau

SEQ ID NO: 2566865 - RNA, 20 nt, Human
guuaaaaaaaggcauuguuu

SEQ ID NO: 2566866 - RNA, 14 nt, Human
guuaaaagagguuu

SEQ ID NO: 2566867 - RNA, 12 nt, Human
guuaaaacuguc

SEQ ID NO: 2566868 - RNA, 19 nt, Human
guuaaauaaauuguauauu

SEQ ID NO: 2566869 - RNA, 18 nt, Human
guuaaauaaauuguauau

SEQ ID NO: 2566870 - RNA, 17 nt, Human
guuaaauaaauuguaua

SEQ ID NO: 2566871 - RNA, 13 nt, Human
guuaaauaaauug

SEQ ID NO: 2566872 - RNA, 23 nt, Human
guuaaaggcucgauuuuguaucu

SEQ ID NO: 2566873 - RNA, 13 nt, Human
guuaaaggaaaaa

SEQ ID NO: 2566874 - RNA, 20 nt, Human
guuaaagucagugggaacgu

SEQ ID NO: 2566875 - RNA, 21 nt, Human
guuaaauaaauuguauauuca

SEQ ID NO: 2566876 - RNA, 20 nt, Human
guuaaauaaauuguauauuc

SEQ ID NO: 2566877 - RNA, 22 nt, Human
guuaaauaaauuguauauucac

SEQ ID NO: 2566878 - RNA, 20 nt, Human
guuaaauagaguauaugcac

SEQ ID NO: 2566879 - RNA, 19 nt, Human
guuaaauagaguauaugca

SEQ ID NO: 2566880 - RNA, 21 nt, Human
guuaaauagaguauaugcacu

SEQ ID NO: 2566881 - RNA, 12 nt, Human
guuaaauauuua

SEQ ID NO: 2566882 - RNA, 22 nt, Human
guuaaacuagcauaucugccuu

SEQ ID NO: 2566883 - RNA, 21 nt, Human
guuaaacuagcauaucugccu

SEQ ID NO: 2566884 - RNA, 20 nt, Human
guuaaacuagcauaucugcc

SEQ ID NO: 2566885 - RNA, 19 nt, Human
guuaaacuagcauaucugc

SEQ ID NO: 2566886 - RNA, 15 nt, Human
guuaaacuagcauau

SEQ ID NO: 2566887 - RNA, 21 nt, Human
guuaaaccauccauguauuuu

SEQ ID NO: 2566888 - RNA, 15 nt, Human
guuaaaauuccaucc

SEQ ID NO: 2566889 - RNA, 23 nt, Human
guuaaacuagcauaucugccuuu

SEQ ID NO: 2566890 - RNA, 17 nt, Human
guuaaacucgcucacug

SEQ ID NO: 2566891 - RNA, 15 nt, Human
guuaaagcugccggc

SEQ ID NO: 2566892 - RNA, 19 nt, Human
guuaaacuuacuuaguguu

SEQ ID NO: 2566893 - RNA, 22 nt, Human
guuacagaaaguggugcucagu

SEQ ID NO: 2566894 - RNA, 21 nt, Human
guuacagaaaguggugcucag

SEQ ID NO: 2566895 - RNA, 19 nt, Human
guuacagaaaguggugcuc

SEQ ID NO: 2566896 - RNA, 13 nt, Human
guuacagaaagug

SEQ ID NO: 2566897 - RNA, 13 nt, Human
guuacagacaaag

SEQ ID NO: 2566898 - RNA, 12 nt, Human
guuacagaaagu

SEQ ID NO: 2566899 - RNA, 13 nt, Human
guuacacuugugc

SEQ ID NO: 2566900 - RNA, 23 nt, Human
guuacacuggaggagagaagaau

SEQ ID NO: 2566901 - RNA, 22 nt, Human
guuacacuggaggagagaagaa

SEQ ID NO: 2566902 - RNA, 17 nt, Human
guuacacauuuuucaga

SEQ ID NO: 2566903 - RNA, 15 nt, Human
guuacacuaaaaggu

SEQ ID NO: 2566904 - RNA, 16 nt, Human
guuacacuaaaaggug

SEQ ID NO: 2566905 - RNA, 18 nt, Human
guuaacugagugccuuuu

SEQ ID NO: 2566906 - RNA, 17 nt, Human
guuaacuuuaagacuga

SEQ ID NO: 2566907 - RNA, 23 nt, Human
guuaacuuuaagacugagcaccu

SEQ ID NO: 2566908 - RNA, 16 nt, Human
guuacacauuuuucag

SEQ ID NO: 2566909 - RNA, 18 nt, Human
guuaaauuuguaaguuuc

SEQ ID NO: 2566910 - RNA, 17 nt, Human
guuaaauuuguaaguuu

SEQ ID NO: 2566911 - RNA, 16 nt, Human
guuaaauuuguaaguu

SEQ ID NO: 2566912 - RNA, 15 nt, Human
guuaaauuuguaagu

SEQ ID NO: 2566913 - RNA, 14 nt, Human
guuaaauuuguaag

SEQ ID NO: 2566914 - RNA, 13 nt, Human
guuaaauuuguaa

SEQ ID NO: 2566915 - RNA, 17 nt, Human
guuaaauuucuggaccu

SEQ ID NO: 2566916 - RNA, 17 nt, Human
guuaaauugcuguguau

SEQ ID NO: 2566917 - RNA, 14 nt, Human
guuaacaaugauau

SEQ ID NO: 2566918 - RNA, 12 nt, Human
guuaacacauuu

SEQ ID NO: 2566919 - RNA, 23 nt, Human
guuaaauuuguaaguuucaggug

SEQ ID NO: 2566920 - RNA, 19 nt, Human
guuaaauuuguaaguuuca

SEQ ID NO: 2566921 - RNA, 20 nt, Human
guuaaaugaaauuguaaaac

SEQ ID NO: 2566922 - RNA, 18 nt, Human
guuaaaugaaauuguaaa

SEQ ID NO: 2566923 - RNA, 17 nt, Human
guuaaaugaaauuguaa

SEQ ID NO: 2566924 - RNA, 15 nt, Human
guuaaaugaaauugu

SEQ ID NO: 2566925 - RNA, 13 nt, Human
guuaaauauuuac

SEQ ID NO: 2566926 - RNA, 15 nt, Human
guuaaauauuuacau

SEQ ID NO: 2566927 - RNA, 16 nt, Human
guuaaauauuuacaua

SEQ ID NO: 2566928 - RNA, 22 nt, Human
guuaaauauuuacauaugaaau

SEQ ID NO: 2566929 - RNA, 18 nt, Human
guuaacacauuuuguaua

SEQ ID NO: 2566930 - RNA, 16 nt, Human
guuaacacauuuugua

SEQ ID NO: 2566931 - RNA, 15 nt, Human
guuaacacauuuugu

SEQ ID NO: 2566932 - RNA, 13 nt, Human
guuaacacauuuu

SEQ ID NO: 2566933 - RNA, 23 nt, Human
guuaacacauuuuguauaauugu

SEQ ID NO: 2566934 - RNA, 19 nt, Human
guuaacacauuuuguauaa

SEQ ID NO: 2566935 - RNA, 12 nt, Human
guuaacagauuu

SEQ ID NO: 2566936 - RNA, 23 nt, Human
guuaacagagacagauaacucuc

SEQ ID NO: 2566937 - RNA, 17 nt, Human
guuaaccucagugucau

SEQ ID NO: 2566938 - RNA, 20 nt, Human
guuaaccagaauaaaguucu

SEQ ID NO: 2566939 - RNA, 21 nt, Human
guuaacuauuuuauuuucuaa

SEQ ID NO: 2566940 - RNA, 21 nt, Human
guguuaggccuggcacagugu

SEQ ID NO: 2566941 - RNA, 19 nt, Human
guguuaggccuggcacagu

SEQ ID NO: 2566942 - RNA, 18 nt, Human
guguuaggccuggcacag

SEQ ID NO: 2566943 - RNA, 15 nt, Human
guguuaggccuggca

SEQ ID NO: 2566944 - RNA, 16 nt, Human
guguuagggaagggcc

SEQ ID NO: 2566945 - RNA, 22 nt, Human
guguuagggaagggccugccac

SEQ ID NO: 2566946 - RNA, 19 nt, Human
guguuacuguaauuccuca

SEQ ID NO: 2566947 - RNA, 14 nt, Human
guguuaggccuggc

SEQ ID NO: 2566948 - RNA, 15 nt, Human
guguuacuguaauuc

SEQ ID NO: 2566949 - RNA, 18 nt, Human
guguuaugacuccagaau

SEQ ID NO: 2566950 - RNA, 23 nt, Human
guguuagggaagggccugccaca

SEQ ID NO: 2566951 - RNA, 12 nt, Human
guguuaguuccc

SEQ ID NO: 2566952 - RNA, 24 nt, Human
guguuaggccuggcacagugucug

SEQ ID NO: 2566953 - RNA, 20 nt, Human
guguuauaauggguaauaua

SEQ ID NO: 2566954 - RNA, 12 nt, Human
guguuacuaagu

SEQ ID NO: 2566955 - RNA, 23 nt, Human
guguuacccaguaacucaucugu

SEQ ID NO: 2566956 - RNA, 16 nt, Human
guguuaccugaaaaca

SEQ ID NO: 2566957 - RNA, 14 nt, Human
guguuacuaaguuu

SEQ ID NO: 2566958 - RNA, 19 nt, Human
guguuaauacuaguuguga

SEQ ID NO: 2566959 - RNA, 15 nt, Human
guguuaaucaauuua

SEQ ID NO: 2566960 - RNA, 16 nt, Human
guguuaaucauuucau

SEQ ID NO: 2566961 - RNA, 18 nt, Human
guguuaaucaauuuaaac

SEQ ID NO: 2566962 - RNA, 14 nt, Human
guguguuuuucaua

SEQ ID NO: 2566963 - RNA, 21 nt, Human
guguuaaaugugaugaauacu

SEQ ID NO: 2566964 - RNA, 19 nt, Human
guguuaaaugaaauuguaa

SEQ ID NO: 2566965 - RNA, 16 nt, Human
guguguuuuaaaauga

SEQ ID NO: 2566966 - RNA, 13 nt, Human
guguguuuuaaaa

SEQ ID NO: 2566967 - RNA, 19 nt, Human
guguguuuuaaaaugagaa

SEQ ID NO: 2566968 - RNA, 14 nt, Human
guguguuuguguga

SEQ ID NO: 2566969 - RNA, 17 nt, Human
guguguuuucauaauaa

SEQ ID NO: 2566970 - RNA, 21 nt, Human
guguguuuugagaguauauua

SEQ ID NO: 2566971 - RNA, 20 nt, Human
guguguuuugagaguauauu

SEQ ID NO: 2566972 - RNA, 18 nt, Human
guguguuuucauaauaaa

SEQ ID NO: 2566973 - RNA, 16 nt, Human
guguucuccuuuuccu

SEQ ID NO: 2566974 - RNA, 11 nt, Human
guguucuccuu

SEQ ID NO: 2566975 - RNA, 19 nt, Human
guguuccuggcaguuuaaa

SEQ ID NO: 2566976 - RNA, 21 nt, Human
guguucccauuucagcugauc

SEQ ID NO: 2566977 - RNA, 18 nt, Human
guguuccccuuccacuga

SEQ ID NO: 2566978 - RNA, 19 nt, Human
guguuccccuuccacugag

SEQ ID NO: 2566979 - RNA, 22 nt, Human
guguuccccuuccacugagggc

SEQ ID NO: 2566980 - RNA, 23 nt, Human
guguuccccuuccacugagggca

SEQ ID NO: 2566981 - RNA, 10 nt, Human
guguuccugg

SEQ ID NO: 2566982 - RNA, 15 nt, Human
guguuccuggcaaua

SEQ ID NO: 2566983 - RNA, 18 nt, Human
guguuccuggcaauagug

SEQ ID NO: 2566984 - RNA, 17 nt, Human
guguucauacauuugag

SEQ ID NO: 2566985 - RNA, 12 nt, Human
guguucauacau

SEQ ID NO: 2566986 - RNA, 19 nt, Human
guguuccccaucugggucc

SEQ ID NO: 2566987 - RNA, 17 nt, Human
guguucccauuucagcu

SEQ ID NO: 2566988 - RNA, 15 nt, Human
guguuccaacaacca

SEQ ID NO: 2566989 - RNA, 16 nt, Human
guguuauuuaaagaag

SEQ ID NO: 2566990 - RNA, 17 nt, Human
guguuauuuaaaugagu

SEQ ID NO: 2566991 - RNA, 17 nt, Human
guguuauuuaaagaaga

SEQ ID NO: 2566992 - RNA, 23 nt, Human
guguucaaggccauccuucccug

SEQ ID NO: 2566993 - RNA, 18 nt, Human
guguuuucugaauaacau

SEQ ID NO: 2566994 - RNA, 12 nt, Human
guguuuugcugu

SEQ ID NO: 2566995 - RNA, 19 nt, Human
guguuuucugaauaacauu

SEQ ID NO: 2566996 - RNA, 13 nt, Human
guguuuucugaau

SEQ ID NO: 2566997 - RNA, 15 nt, Human
guguuuucauaauaa

SEQ ID NO: 2566998 - RNA, 16 nt, Human
guguuuucauaauaaa

SEQ ID NO: 2566999 - RNA, 14 nt, Human
guguuuuaauuuaa

SEQ ID NO: 2567000 - RNA, 14 nt, Human
guguucucucuuau

SEQ ID NO: 2567001 - RNA, 16 nt, Human
guguucugauuagaaa

SEQ ID NO: 2567002 - RNA, 18 nt, Human
guguucuggugaggccuu

SEQ ID NO: 2567003 - RNA, 15 nt, Human
guguuuuaauuuaaa

SEQ ID NO: 2567004 - RNA, 13 nt, Human
guguuuucauaau

SEQ ID NO: 2567005 - RNA, 14 nt, Human
guguuuucauaaua

SEQ ID NO: 2567006 - RNA, 14 nt, Human
guguuuuucugcuu

SEQ ID NO: 2567007 - RNA, 21 nt, Human
guguuuuuguaaagugugguc

SEQ ID NO: 2567008 - RNA, 19 nt, Human
guguuuuucugcuuuugaa

SEQ ID NO: 2567009 - RNA, 15 nt, Human
guguuuuugaaauau

SEQ ID NO: 2567010 - RNA, 14 nt, Human
guguuuuuguaaag

SEQ ID NO: 2567011 - RNA, 18 nt, Human
guguuuuucauaaagcag

SEQ ID NO: 2567012 - RNA, 15 nt, Human
guguuuuuaacucaa

SEQ ID NO: 2567013 - RNA, 21 nt, Human
guggugagaggcauccaguau

SEQ ID NO: 2567014 - RNA, 17 nt, Human
guggugaccucugccug

SEQ ID NO: 2567015 - RNA, 14 nt, Human
guggugaccucugc

SEQ ID NO: 2567016 - RNA, 23 nt, Human
guggucuguuggcaggcuggcca

SEQ ID NO: 2567017 - RNA, 22 nt, Human
guggucuguuggcaggcuggcc

SEQ ID NO: 2567018 - RNA, 21 nt, Human
guggucuguuggcaggcuggc

SEQ ID NO: 2567019 - RNA, 20 nt, Human
guggucuguuggcaggcugg

SEQ ID NO: 2567020 - RNA, 15 nt, Human
guggugaagaaaacu

SEQ ID NO: 2567021 - RNA, 19 nt, Human
guggucuuuguaagagugu

SEQ ID NO: 2567022 - RNA, 15 nt, Human
guggucuuuguaaga

SEQ ID NO: 2567023 - RNA, 16 nt, Human
guggucuuucuggaga

SEQ ID NO: 2567024 - RNA, 17 nt, Human
guggucuuucuggagag

SEQ ID NO: 2567025 - RNA, 19 nt, Human
guggucuguuggcaggcug

SEQ ID NO: 2567026 - RNA, 17 nt, Human
guggucuguuggcaggc

SEQ ID NO: 2567027 - RNA, 22 nt, Human
guggucugcucgggcccaggcc

SEQ ID NO: 2567028 - RNA, 19 nt, Human
guggucugcucgggcccag

SEQ ID NO: 2567029 - RNA, 13 nt, Human
guggucuguuggc

SEQ ID NO: 2567030 - RNA, 20 nt, Human
guggucugaauguucugaca

SEQ ID NO: 2567031 - RNA, 23 nt, Human
guggucugaauguucugacauua

SEQ ID NO: 2567032 - RNA, 14 nt, Human
guggucugcaggca

SEQ ID NO: 2567033 - RNA, 24 nt, Human
guggucugaauguucugacauuaa

SEQ ID NO: 2567034 - RNA, 15 nt, Human
guggucugcaggcag

SEQ ID NO: 2567035 - RNA, 18 nt, Human
guggucugcucgggccca

SEQ ID NO: 2567036 - RNA, 16 nt, Human
guggucugcaggcagg

SEQ ID NO: 2567037 - RNA, 23 nt, Human
guggugagcagaaguggagcugg

SEQ ID NO: 2567038 - RNA, 19 nt, Human
guggugaucaauuaaaugu

SEQ ID NO: 2567039 - RNA, 13 nt, Human
guggugagaucau

SEQ ID NO: 2567040 - RNA, 19 nt, Human
guggugcgaucuggguuca

SEQ ID NO: 2567041 - RNA, 21 nt, Human
guguaaguagauaggccaugg

SEQ ID NO: 2567042 - RNA, 21 nt, Human
guguaaguauucuuauuuaau

SEQ ID NO: 2567043 - RNA, 15 nt, Human
guguaauaagacaua

SEQ ID NO: 2567044 - RNA, 13 nt, Human
guguaauaagaca

SEQ ID NO: 2567045 - RNA, 22 nt, Human
guguaagugugaguaagagcug

SEQ ID NO: 2567046 - RNA, 16 nt, Human
guguaaucaauaaacg

SEQ ID NO: 2567047 - RNA, 15 nt, Human
guguaaucaauaaac

SEQ ID NO: 2567048 - RNA, 14 nt, Human
guguaaucaauaaa

SEQ ID NO: 2567049 - RNA, 14 nt, Human
guguaauaagacau

SEQ ID NO: 2567050 - RNA, 19 nt, Human
guguaaucaauaaacgauu

SEQ ID NO: 2567051 - RNA, 17 nt, Human
guguaaucaauaaacga

SEQ ID NO: 2567052 - RNA, 19 nt, Human
guguaaucauuucuugggc

SEQ ID NO: 2567053 - RNA, 21 nt, Human
guguaaucauuucuugggccc

SEQ ID NO: 2567054 - RNA, 16 nt, Human
guggucccaccccaca

SEQ ID NO: 2567055 - RNA, 15 nt, Human
guggucccaccccac

SEQ ID NO: 2567056 - RNA, 14 nt, Human
guggucccacccca

SEQ ID NO: 2567057 - RNA, 15 nt, Human
guggucacugcuguc

SEQ ID NO: 2567058 - RNA, 14 nt, Human
guggucacugcugu

SEQ ID NO: 2567059 - RNA, 18 nt, Human
gugguccauggaaugcuu

SEQ ID NO: 2567060 - RNA, 22 nt, Human
guggucaggcguagaucaccag

SEQ ID NO: 2567061 - RNA, 16 nt, Human
guggucauuaagcauu

SEQ ID NO: 2567062 - RNA, 18 nt, Human
gugguccuaaucuucuga

SEQ ID NO: 2567063 - RNA, 17 nt, Human
guggucccaccccacac

SEQ ID NO: 2567064 - RNA, 18 nt, Human
guggucuccacuggggau

SEQ ID NO: 2567065 - RNA, 24 nt, Human
guggucccaacaggaggacaauuc

SEQ ID NO: 2567066 - RNA, 23 nt, Human
guggucccaacaggaggacaauu

SEQ ID NO: 2567067 - RNA, 13 nt, Human
gugguccccaaca

SEQ ID NO: 2567068 - RNA, 12 nt, Human
gugguccugacu

SEQ ID NO: 2567069 - RNA, 17 nt, Human
guggucuccuuggaaau

SEQ ID NO: 2567070 - RNA, 15 nt, Human
gugguccugagaccu

SEQ ID NO: 2567071 - RNA, 13 nt, Human
guggucugaaugu

SEQ ID NO: 2567072 - RNA, 14 nt, Human
guggucugaauguu

SEQ ID NO: 2567073 - RNA, 17 nt, Human
guggucugaauguucug

SEQ ID NO: 2567074 - RNA, 18 nt, Human
guggucugaauguucuga

SEQ ID NO: 2567075 - RNA, 14 nt, Human
gugguacccucugg

SEQ ID NO: 2567076 - RNA, 17 nt, Human
gugguagagugugccug

SEQ ID NO: 2567077 - RNA, 16 nt, Human
gugguaagcucuggcu

SEQ ID NO: 2567078 - RNA, 20 nt, Human
gugguacacacagauuacug

SEQ ID NO: 2567079 - RNA, 22 nt, Human
guggucacagcggaggugugga

SEQ ID NO: 2567080 - RNA, 18 nt, Human
guggucacagcggaggug

SEQ ID NO: 2567081 - RNA, 16 nt, Human
guggucacagcggagg

SEQ ID NO: 2567082 - RNA, 15 nt, Human
guggucacagcggag

SEQ ID NO: 2567083 - RNA, 22 nt, Human
guggucaaaccgcacucaccca

SEQ ID NO: 2567084 - RNA, 20 nt, Human
gugguauccugugacaugua

SEQ ID NO: 2567085 - RNA, 12 nt, Human
gugguaugugug

SEQ ID NO: 2567086 - RNA, 15 nt, Human
gugguaugugugugu

SEQ ID NO: 2567087 - RNA, 19 nt, Human
gugguaugaucacggcuca

SEQ ID NO: 2567088 - RNA, 16 nt, Human
gugguauccugugaca

SEQ ID NO: 2567089 - RNA, 14 nt, Human
gugguauagaaaug

SEQ ID NO: 2567090 - RNA, 17 nt, Human
guguauauguaugugug

SEQ ID NO: 2567091 - RNA, 13 nt, Human
guguauaucagaa

SEQ ID NO: 2567092 - RNA, 14 nt, Human
guguauacaugcca

SEQ ID NO: 2567093 - RNA, 14 nt, Human
guguauauguaugu

SEQ ID NO: 2567094 - RNA, 22 nt, Human
guguauccccccccuguauagu

SEQ ID NO: 2567095 - RNA, 21 nt, Human
guguauccccccccuguauag

SEQ ID NO: 2567096 - RNA, 23 nt, Human
guguauccauuaucauguguaau

SEQ ID NO: 2567097 - RNA, 22 nt, Human
guguauccauuaucauguguaa

SEQ ID NO: 2567098 - RNA, 20 nt, Human
guguauccauuaucaugugu

SEQ ID NO: 2567099 - RNA, 16 nt, Human
guguauccauuaucau

SEQ ID NO: 2567100 - RNA, 20 nt, Human
guguauccuggggcucccuu

SEQ ID NO: 2567101 - RNA, 15 nt, Human
guguauccuggggcu

SEQ ID NO: 2567102 - RNA, 14 nt, Human
guguauccuggggc

SEQ ID NO: 2567103 - RNA, 13 nt, Human
guguauccugggg

SEQ ID NO: 2567104 - RNA, 15 nt, Human
guguaugacuaaaga

SEQ ID NO: 2567105 - RNA, 18 nt, Human
guguaucguaaccagcca

SEQ ID NO: 2567106 - RNA, 16 nt, Human
guguaugacuaaagag

SEQ ID NO: 2567107 - RNA, 14 nt, Human
guguaggcagacac

SEQ ID NO: 2567108 - RNA, 13 nt, Human
guguaggcagaca

SEQ ID NO: 2567109 - RNA, 12 nt, Human
guguaggcagac

SEQ ID NO: 2567110 - RNA, 14 nt, Human
guguagcuuugcuc

SEQ ID NO: 2567111 - RNA, 18 nt, Human
guguauagaaguagauua

SEQ ID NO: 2567112 - RNA, 15 nt, Human
guguaguugaacuga

SEQ ID NO: 2567113 - RNA, 17 nt, Human
guguaguugaacugaua

SEQ ID NO: 2567114 - RNA, 15 nt, Human
guguaggcagacaca

SEQ ID NO: 2567115 - RNA, 18 nt, Human
gugucccugcacuugcag

SEQ ID NO: 2567116 - RNA, 16 nt, Human
gugucccugcacuugc

SEQ ID NO: 2567117 - RNA, 13 nt, Human
gugucccugcacu

SEQ ID NO: 2567118 - RNA, 18 nt, Human
gugucccccucuguccag

SEQ ID NO: 2567119 - RNA, 14 nt, Human
gugucccccucugu

SEQ ID NO: 2567120 - RNA, 13 nt, Human
guguccccuccac

SEQ ID NO: 2567121 - RNA, 22 nt, Human
gugucccaugacccaccccugu

SEQ ID NO: 2567122 - RNA, 21 nt, Human
gugucccaugacccaccccug

SEQ ID NO: 2567123 - RNA, 19 nt, Human
gugucccaugacccacccc

SEQ ID NO: 2567124 - RNA, 23 nt, Human
gugucccaugacccaccccugug

SEQ ID NO: 2567125 - RNA, 16 nt, Human
guguaugggugugugu

SEQ ID NO: 2567126 - RNA, 22 nt, Human
guguauggguguguguuugugu

SEQ ID NO: 2567127 - RNA, 16 nt, Human
guguaugugcgugugu

SEQ ID NO: 2567128 - RNA, 19 nt, Human
guguauggaaauaaaugua

SEQ ID NO: 2567129 - RNA, 20 nt, Human
guguauggagagaaaacaga

SEQ ID NO: 2567130 - RNA, 19 nt, Human
guguaugcuacuacaaaaa

SEQ ID NO: 2567131 - RNA, 15 nt, Human
guguaauuucuuugc

SEQ ID NO: 2567132 - RNA, 13 nt, Human
guguaauuucuuu

SEQ ID NO: 2567133 - RNA, 13 nt, Human
guguacaaagaaa

SEQ ID NO: 2567134 - RNA, 23 nt, Human
guguaauuuuguucuaguuuuca

SEQ ID NO: 2567135 - RNA, 19 nt, Human
guguacacugacaccuuug

SEQ ID NO: 2567136 - RNA, 21 nt, Human
guguacacgggacugacgcaa

SEQ ID NO: 2567137 - RNA, 15 nt, Human
guguacacgggacug

SEQ ID NO: 2567138 - RNA, 18 nt, Human
guguacagaauucugcua

SEQ ID NO: 2567139 - RNA, 22 nt, Human
guguaauuuaaaauugugaugu

SEQ ID NO: 2567140 - RNA, 23 nt, Human
guguaauuuaaaauugugaugug

SEQ ID NO: 2567141 - RNA, 20 nt, Human
guguaauuuaaaauugugau

SEQ ID NO: 2567142 - RNA, 23 nt, Human
guguaaucauuucuugggcccuc

SEQ ID NO: 2567143 - RNA, 22 nt, Human
guguacaucccauguaacagaa

SEQ ID NO: 2567144 - RNA, 19 nt, Human
guguacaucccauguaaca

SEQ ID NO: 2567145 - RNA, 15 nt, Human
guguacauaugugcu

SEQ ID NO: 2567146 - RNA, 12 nt, Human
guguacauaugu

SEQ ID NO: 2567147 - RNA, 16 nt, Human
guguacauaacugaaa

SEQ ID NO: 2567148 - RNA, 17 nt, Human
guguacauggaauaaca

SEQ ID NO: 2567149 - RNA, 14 nt, Human
guguacauaacuga

SEQ ID NO: 2567150 - RNA, 12 nt, Human
guguacagugug

SEQ ID NO: 2567151 - RNA, 22 nt, Human
guguacagucuuguauuaaguu

SEQ ID NO: 2567152 - RNA, 16 nt, Human
guguacagucuuguau

SEQ ID NO: 2567153 - RNA, 13 nt, Human
guguacagucuug

SEQ ID NO: 2567154 - RNA, 14 nt, Human
guguagccugugca

SEQ ID NO: 2567155 - RNA, 16 nt, Human
guguagccuugcccgg

SEQ ID NO: 2567156 - RNA, 17 nt, Human
guguagccuugcccgga

SEQ ID NO: 2567157 - RNA, 14 nt, Human
guguagccaagguc

SEQ ID NO: 2567158 - RNA, 18 nt, Human
guguagaguuaagaagcu

SEQ ID NO: 2567159 - RNA, 17 nt, Human
guguagaguuaagaagc

SEQ ID NO: 2567160 - RNA, 20 nt, Human
guguagaguuaagaagcugu

SEQ ID NO: 2567161 - RNA, 17 nt, Human
guguagaagcauuccuu

SEQ ID NO: 2567162 - RNA, 14 nt, Human
guguagaagcauuc

SEQ ID NO: 2567163 - RNA, 13 nt, Human
guguagaagcauu

SEQ ID NO: 2567164 - RNA, 23 nt, Human
guguagaagcauuccuucuuuga

SEQ ID NO: 2567165 - RNA, 19 nt, Human
guguagaagcauuccuucu

SEQ ID NO: 2567166 - RNA, 15 nt, Human
guguagaguuaagaa

SEQ ID NO: 2567167 - RNA, 19 nt, Human
guguacccccgcccaggcu

SEQ ID NO: 2567168 - RNA, 17 nt, Human
guguaccauuugccucc

SEQ ID NO: 2567169 - RNA, 17 nt, Human
guguacccccgcccagg

SEQ ID NO: 2567170 - RNA, 22 nt, Human
guguacauggaauaacauguaa

SEQ ID NO: 2567171 - RNA, 20 nt, Human
guguacguggagagggauga

SEQ ID NO: 2567172 - RNA, 16 nt, Human
guguacguggagaggg

SEQ ID NO: 2567173 - RNA, 15 nt, Human
guguacuuaacuauu

SEQ ID NO: 2567174 - RNA, 17 nt, Human
gugggcccaaugcacuu

SEQ ID NO: 2567175 - RNA, 16 nt, Human
gugggccagucugugg

SEQ ID NO: 2567176 - RNA, 15 nt, Human
gugggccagucugug

SEQ ID NO: 2567177 - RNA, 19 nt, Human
gugggccagccccucccac

SEQ ID NO: 2567178 - RNA, 14 nt, Human
gugggccaggacag

SEQ ID NO: 2567179 - RNA, 18 nt, Human
gugggccaggacaggccc

SEQ ID NO: 2567180 - RNA, 18 nt, Human
gugggcaggugguggcac

SEQ ID NO: 2567181 - RNA, 17 nt, Human
gugggcaggugguggca

SEQ ID NO: 2567182 - RNA, 20 nt, Human
gugggcaggugggagcuuga

SEQ ID NO: 2567183 - RNA, 17 nt, Human
gugggccaacaaagaac

SEQ ID NO: 2567184 - RNA, 20 nt, Human
gugggcauugauggggaagg

SEQ ID NO: 2567185 - RNA, 12 nt, Human
gugggccagccc

SEQ ID NO: 2567186 - RNA, 13 nt, Human
gugggccagcccc

SEQ ID NO: 2567187 - RNA, 15 nt, Human
gugggccagccccuc

SEQ ID NO: 2567188 - RNA, 17 nt, Human
gugggccagccccuccc

SEQ ID NO: 2567189 - RNA, 22 nt, Human
gugggccucugguuuggggcga

SEQ ID NO: 2567190 - RNA, 12 nt, Human
gugggccucugg

SEQ ID NO: 2567191 - RNA, 23 nt, Human
gugggccucugguuuggggcgag

SEQ ID NO: 2567192 - RNA, 13 nt, Human
gugggccuggcca

SEQ ID NO: 2567193 - RNA, 15 nt, Human
gugggccuccucugu

SEQ ID NO: 2567194 - RNA, 20 nt, Human
gugggccuccucuguccagg

SEQ ID NO: 2567195 - RNA, 23 nt, Human
gugggccuccucuguccagggcc

SEQ ID NO: 2567196 - RNA, 11 nt, Human
gugggccucug

SEQ ID NO: 2567197 - RNA, 19 nt, Human
gugggccucaaggacuuga

SEQ ID NO: 2567198 - RNA, 21 nt, Human
gugggcccaggaccagcuggg

SEQ ID NO: 2567199 - RNA, 20 nt, Human
gugggcccaggaccagcugg

SEQ ID NO: 2567200 - RNA, 19 nt, Human
gugggcccaggaccagcug

SEQ ID NO: 2567201 - RNA, 14 nt, Human
gugggcccaggacc

SEQ ID NO: 2567202 - RNA, 23 nt, Human
gugggcccaggaccagcuggggc

SEQ ID NO: 2567203 - RNA, 22 nt, Human
gugggcccaggaccagcugggg

SEQ ID NO: 2567204 - RNA, 18 nt, Human
gugggcccuccgacagcc

SEQ ID NO: 2567205 - RNA, 18 nt, Human
gugggccagucuguggau

SEQ ID NO: 2567206 - RNA, 17 nt, Human
gugggccagucugugga

SEQ ID NO: 2567207 - RNA, 11 nt, Human
gugggcccagg

SEQ ID NO: 2567208 - RNA, 17 nt, Human
gugggccagugugggaa

SEQ ID NO: 2567209 - RNA, 13 nt, Human
gugggcucccuga

SEQ ID NO: 2567210 - RNA, 14 nt, Human
gugggcucccugac

SEQ ID NO: 2567211 - RNA, 15 nt, Human
gugggcucccugacu

SEQ ID NO: 2567212 - RNA, 13 nt, Human
gugggcugagccc

SEQ ID NO: 2567213 - RNA, 14 nt, Human
gugggcugagcccu

SEQ ID NO: 2567214 - RNA, 15 nt, Human
gugggcugagcccug

SEQ ID NO: 2567215 - RNA, 16 nt, Human
gugggcugagcccugg

SEQ ID NO: 2567216 - RNA, 15 nt, Human
gugggcuaguugggc

SEQ ID NO: 2567217 - RNA, 14 nt, Human
gugggcuaauuaaa

SEQ ID NO: 2567218 - RNA, 17 nt, Human
gugggcguggucacugc

SEQ ID NO: 2567219 - RNA, 12 nt, Human
gugggcuaagca

SEQ ID NO: 2567220 - RNA, 19 nt, Human
gugggccuucagggaguga

SEQ ID NO: 2567221 - RNA, 20 nt, Human
gugggccuuguccccugccu

SEQ ID NO: 2567222 - RNA, 18 nt, Human
gugggccuugcuggggac

SEQ ID NO: 2567223 - RNA, 17 nt, Human
gugggccuugcugggga

SEQ ID NO: 2567224 - RNA, 15 nt, Human
gugggccuugcuggg

SEQ ID NO: 2567225 - RNA, 16 nt, Human
gugggcggcagagagg

SEQ ID NO: 2567226 - RNA, 13 nt, Human
gugggcggcagag

SEQ ID NO: 2567227 - RNA, 21 nt, Human
gugggcgugagaccugccccu

SEQ ID NO: 2567228 - RNA, 22 nt, Human
gugggcgugagaccugccccuc

SEQ ID NO: 2567229 - RNA, 18 nt, Human
gugggcgugagaccugcc

SEQ ID NO: 2567230 - RNA, 18 nt, Human
gugggcgggcagcacagc

SEQ ID NO: 2567231 - RNA, 19 nt, Human
gugggcggcacagccuucu

SEQ ID NO: 2567232 - RNA, 19 nt, Human
gugggcgggcagcacagca

SEQ ID NO: 2567233 - RNA, 14 nt, Human
guggguggugggga

SEQ ID NO: 2567234 - RNA, 16 nt, Human
gugggugguggaucug

SEQ ID NO: 2567235 - RNA, 12 nt, Human
guggguggugga

SEQ ID NO: 2567236 - RNA, 16 nt, Human
guggguuauucuggag

SEQ ID NO: 2567237 - RNA, 16 nt, Human
gugggugguggggagg

SEQ ID NO: 2567238 - RNA, 23 nt, Human
guggguuucuaaagcugccagcc

SEQ ID NO: 2567239 - RNA, 12 nt, Human
gugguaacccug

SEQ ID NO: 2567240 - RNA, 21 nt, Human
guggguuuucaucaagacugg

SEQ ID NO: 2567241 - RNA, 16 nt, Human
guggguuuucuuccca

SEQ ID NO: 2567242 - RNA, 17 nt, Human
guggggcagcuugaggg

SEQ ID NO: 2567243 - RNA, 13 nt, Human
guggggcagcuug

SEQ ID NO: 2567244 - RNA, 23 nt, Human
guggggcagcacagagagggggc

SEQ ID NO: 2567245 - RNA, 19 nt, Human
guggggcagcacagagagg

SEQ ID NO: 2567246 - RNA, 14 nt, Human
guggggcagcacag

SEQ ID NO: 2567247 - RNA, 12 nt, Human
guggggcagcac

SEQ ID NO: 2567248 - RNA, 18 nt, Human
guggggaccucaggccug

SEQ ID NO: 2567249 - RNA, 15 nt, Human
guggggaccucaggc

SEQ ID NO: 2567250 - RNA, 22 nt, Human
gugggcuggugacccagucaga

SEQ ID NO: 2567251 - RNA, 14 nt, Human
gugggcugugagug

SEQ ID NO: 2567252 - RNA, 23 nt, Human
gugggcuucccaguggcugcugc

SEQ ID NO: 2567253 - RNA, 22 nt, Human
gugggcuucccaguggcugcug

SEQ ID NO: 2567254 - RNA, 16 nt, Human
gugggcuucccagugg

SEQ ID NO: 2567255 - RNA, 13 nt, Human
gugggcugugagu

SEQ ID NO: 2567256 - RNA, 15 nt, Human
gugggcugcaucugg

SEQ ID NO: 2567257 - RNA, 21 nt, Human
gugggcugcacucugugccca

SEQ ID NO: 2567258 - RNA, 20 nt, Human
gugggcugcacucugugccc

SEQ ID NO: 2567259 - RNA, 19 nt, Human
gugggcugcacucugugcc

SEQ ID NO: 2567260 - RNA, 18 nt, Human
gugggcucugugcaguca

SEQ ID NO: 2567261 - RNA, 18 nt, Human
gugggcugagcccuggca

SEQ ID NO: 2567262 - RNA, 13 nt, Human
guggggaggggcu

SEQ ID NO: 2567263 - RNA, 13 nt, Human
guggggaggggcg

SEQ ID NO: 2567264 - RNA, 11 nt, Human
guggggagggg

SEQ ID NO: 2567265 - RNA, 22 nt, Human
guggggacguccugccaccugg

SEQ ID NO: 2567266 - RNA, 18 nt, Human
guggggaucucaggggcu

SEQ ID NO: 2567267 - RNA, 19 nt, Human
guggggaucucaggggcug

SEQ ID NO: 2567268 - RNA, 15 nt, Human
guggggauugcccau

SEQ ID NO: 2567269 - RNA, 16 nt, Human
guggggauuucuccca

SEQ ID NO: 2567270 - RNA, 18 nt, Human
guggggcaagauuuuccu

SEQ ID NO: 2567271 - RNA, 17 nt, Human
guggggauuucucccag

SEQ ID NO: 2567272 - RNA, 13 nt, Human
guggggacagggc

SEQ ID NO: 2567273 - RNA, 14 nt, Human
gugggcuugauucu

SEQ ID NO: 2567274 - RNA, 11 nt, Human
guggggacagg

SEQ ID NO: 2567275 - RNA, 17 nt, Human
guggggagacugggcug

SEQ ID NO: 2567276 - RNA, 13 nt, Human
guggggagggccg

SEQ ID NO: 2567277 - RNA, 22 nt, Human
guggcugcuucaaggauccuga

SEQ ID NO: 2567278 - RNA, 19 nt, Human
guggcugcuucaaggaucc

SEQ ID NO: 2567279 - RNA, 16 nt, Human
guggcugcuucaagga

SEQ ID NO: 2567280 - RNA, 15 nt, Human
guggcugcuucaagg

SEQ ID NO: 2567281 - RNA, 17 nt, Human
guggcuggaagauccug

SEQ ID NO: 2567282 - RNA, 12 nt, Human
guggcuggaaga

SEQ ID NO: 2567283 - RNA, 17 nt, Human
guggcuggaucugugag

SEQ ID NO: 2567284 - RNA, 23 nt, Human
guggcugcuucaaggauccugag

SEQ ID NO: 2567285 - RNA, 19 nt, Human
guggcuggguuggagggug

SEQ ID NO: 2567286 - RNA, 20 nt, Human
guggcuggaagauccugcgg

SEQ ID NO: 2567287 - RNA, 11 nt, Human
guggcuggggg

SEQ ID NO: 2567288 - RNA, 16 nt, Human
guggcugggggcagga

SEQ ID NO: 2567289 - RNA, 17 nt, Human
guggcugguccagggcu

SEQ ID NO: 2567290 - RNA, 21 nt, Human
guggcuggguccaggggaugg

SEQ ID NO: 2567291 - RNA, 14 nt, Human
guggcugucagcag

SEQ ID NO: 2567292 - RNA, 15 nt, Human
guggcugucagcagg

SEQ ID NO: 2567293 - RNA, 15 nt, Human
guggcuguccagugc

SEQ ID NO: 2567294 - RNA, 19 nt, Human
guggcugucagcaggaagc

SEQ ID NO: 2567295 - RNA, 15 nt, Human
guggcugguccaggg

SEQ ID NO: 2567296 - RNA, 18 nt, Human
guggcuggguuuacacgc

SEQ ID NO: 2567297 - RNA, 17 nt, Human
guggcugggggcaggag

SEQ ID NO: 2567298 - RNA, 22 nt, Human
guggcugggggcaggagggccc

SEQ ID NO: 2567299 - RNA, 22 nt, Human
guggcuuaaaacaacacucaca

SEQ ID NO: 2567300 - RNA, 19 nt, Human
guggcuguccagugcccau

SEQ ID NO: 2567301 - RNA, 18 nt, Human
guggcuguccagugccca

SEQ ID NO: 2567302 - RNA, 17 nt, Human
guggcuguccagugccc

SEQ ID NO: 2567303 - RNA, 20 nt, Human
guggcuuacuacauguggga

SEQ ID NO: 2567304 - RNA, 12 nt, Human
gugggcaggugg

SEQ ID NO: 2567305 - RNA, 14 nt, Human
gugggcaggaaaag

SEQ ID NO: 2567306 - RNA, 13 nt, Human
gugggcaggaaaa

SEQ ID NO: 2567307 - RNA, 21 nt, Human
gugggcacgcugugggcaggu

SEQ ID NO: 2567308 - RNA, 20 nt, Human
gugggcacgcugugggcagg

SEQ ID NO: 2567309 - RNA, 23 nt, Human
gugggcacgcugugggcaggugg

SEQ ID NO: 2567310 - RNA, 21 nt, Human
guggcuucauuagagcaggcg

SEQ ID NO: 2567311 - RNA, 17 nt, Human
gugggcaaacaggcagu

SEQ ID NO: 2567312 - RNA, 20 nt, Human
gugggcacccacccugggac

SEQ ID NO: 2567313 - RNA, 16 nt, Human
gugggcacccacccug

SEQ ID NO: 2567314 - RNA, 20 nt, Human
guggcuucccgcucagcccu

SEQ ID NO: 2567315 - RNA, 19 nt, Human
guggcuucccgcucagccc

SEQ ID NO: 2567316 - RNA, 18 nt, Human
guggcuucccgcucagcc

SEQ ID NO: 2567317 - RNA, 20 nt, Human
guggcuucauuagagcaggc

SEQ ID NO: 2567318 - RNA, 19 nt, Human
guggcuucauuagagcagg

SEQ ID NO: 2567319 - RNA, 15 nt, Human
gugcuacaaaaacac

SEQ ID NO: 2567320 - RNA, 20 nt, Human
gugcuacaaaaacacagcaa

SEQ ID NO: 2567321 - RNA, 15 nt, Human
gugcuaauuuugaaa

SEQ ID NO: 2567322 - RNA, 13 nt, Human
gugcuaauuuuga

SEQ ID NO: 2567323 - RNA, 14 nt, Human
guggcucacgccug

SEQ ID NO: 2567324 - RNA, 19 nt, Human
guggcuagucaagcuccuc

SEQ ID NO: 2567325 - RNA, 20 nt, Human
guggcuagucaagcuccucc

SEQ ID NO: 2567326 - RNA, 21 nt, Human
guggcuagucaagcuccuccu

SEQ ID NO: 2567327 - RNA, 22 nt, Human
guggcuagucaagcuccuccuc

SEQ ID NO: 2567328 - RNA, 23 nt, Human
guggcuagucaagcuccuccucc

SEQ ID NO: 2567329 - RNA, 17 nt, Human
guggcuagucagagaga

SEQ ID NO: 2567330 - RNA, 19 nt, Human
guggcuagucagagagagu

SEQ ID NO: 2567331 - RNA, 12 nt, Human
guggcuaggcag

SEQ ID NO: 2567332 - RNA, 18 nt, Human
guggcuagucaagcuccu

SEQ ID NO: 2567333 - RNA, 21 nt, Human
gugcuacaaaaacacagcaag

SEQ ID NO: 2567334 - RNA, 21 nt, Human
gugcuaauaacagugcauauu

SEQ ID NO: 2567335 - RNA, 14 nt, Human
guggcugcuucaag

SEQ ID NO: 2567336 - RNA, 12 nt, Human
guggcugcuuca

SEQ ID NO: 2567337 - RNA, 15 nt, Human
guggcugcugcccag

SEQ ID NO: 2567338 - RNA, 13 nt, Human
guggcugcugccc

SEQ ID NO: 2567339 - RNA, 16 nt, Human
guggcugcugcccagg

SEQ ID NO: 2567340 - RNA, 12 nt, Human
guggcugcugcc

SEQ ID NO: 2567341 - RNA, 19 nt, Human
guggcugcuagcacuugga

SEQ ID NO: 2567342 - RNA, 13 nt, Human
guggcuccuuccc

SEQ ID NO: 2567343 - RNA, 16 nt, Human
guggcugccucauuua

SEQ ID NO: 2567344 - RNA, 20 nt, Human
guggcugccucauuuagaga

SEQ ID NO: 2567345 - RNA, 17 nt, Human
guggcugcuagcacuug

SEQ ID NO: 2567346 - RNA, 18 nt, Human
guggcugcggcacccuug

SEQ ID NO: 2567347 - RNA, 16 nt, Human
guggcugcccacacac

SEQ ID NO: 2567348 - RNA, 20 nt, Human
guggcuccucccggugccca

SEQ ID NO: 2567349 - RNA, 13 nt, Human
guggcuccucccg

SEQ ID NO: 2567350 - RNA, 20 nt, Human
guggcuccuaucuguguuuu

SEQ ID NO: 2567351 - RNA, 18 nt, Human
guggcuccuaucuguguu

SEQ ID NO: 2567352 - RNA, 22 nt, Human
guggcuccccucuauuuagcau

SEQ ID NO: 2567353 - RNA, 23 nt, Human
guggcuccccucuauuuagcaug

SEQ ID NO: 2567354 - RNA, 14 nt, Human
guggcucaugccug

SEQ ID NO: 2567355 - RNA, 15 nt, Human
guggcucagccagca

SEQ ID NO: 2567356 - RNA, 15 nt, Human
guggcuccagcacca

SEQ ID NO: 2567357 - RNA, 19 nt, Human
guggcucaugccuguaauc

SEQ ID NO: 2567358 - RNA, 12 nt, Human
guggcuccccuc

SEQ ID NO: 2567359 - RNA, 14 nt, Human
guggcuccccucua

SEQ ID NO: 2567360 - RNA, 22 nt, Human
guggcucacgccuguaauccca

SEQ ID NO: 2567361 - RNA, 23 nt, Human
guggcucacgccuguaaucccag

SEQ ID NO: 2567362 - RNA, 20 nt, Human
guggcucacgugugugacuc

SEQ ID NO: 2567363 - RNA, 20 nt, Human
guucuggcucuuccaggcug

SEQ ID NO: 2567364 - RNA, 16 nt, Human
guucuggcucuuccag

SEQ ID NO: 2567365 - RNA, 19 nt, Human
guucugcuggccuggaucu

SEQ ID NO: 2567366 - RNA, 16 nt, Human
guucugcuggccugga

SEQ ID NO: 2567367 - RNA, 14 nt, Human
guucugcuggccug

SEQ ID NO: 2567368 - RNA, 12 nt, Human
guucuggccaga

SEQ ID NO: 2567369 - RNA, 13 nt, Human
guucuggccagaa

SEQ ID NO: 2567370 - RNA, 12 nt, Human
guucuggcucuu

SEQ ID NO: 2567371 - RNA, 18 nt, Human
guucugcucaucauucuc

SEQ ID NO: 2567372 - RNA, 23 nt, Human
guucugcucaucauucucugucu

SEQ ID NO: 2567373 - RNA, 15 nt, Human
guucugcucaucauu

SEQ ID NO: 2567374 - RNA, 22 nt, Human
guucugcaaaaauauuuauaaa

SEQ ID NO: 2567375 - RNA, 15 nt, Human
guucugcuccucucc

SEQ ID NO: 2567376 - RNA, 14 nt, Human
guucugcuccucuc

SEQ ID NO: 2567377 - RNA, 13 nt, Human
guucugcuccucu

SEQ ID NO: 2567378 - RNA, 11 nt, Human
guucugcuccu

SEQ ID NO: 2567379 - RNA, 19 nt, Human
guucugcuccucuccaggc

SEQ ID NO: 2567380 - RNA, 18 nt, Human
guucugcuccucuccagg

SEQ ID NO: 2567381 - RNA, 17 nt, Human
guucugcuccucuccag

SEQ ID NO: 2567382 - RNA, 16 nt, Human
guucugcuccucucca

SEQ ID NO: 2567383 - RNA, 13 nt, Human
guucugcuggccu

SEQ ID NO: 2567384 - RNA, 22 nt, Human
guucugcuccucuccaggcacc

SEQ ID NO: 2567385 - RNA, 23 nt, Human
guucuggcagaguugaagacaga

SEQ ID NO: 2567386 - RNA, 18 nt, Human
guucuuucacccuuuucu

SEQ ID NO: 2567387 - RNA, 17 nt, Human
guucuuuaggagauuuu

SEQ ID NO: 2567388 - RNA, 23 nt, Human
guucugggacacaguucaauucu

SEQ ID NO: 2567389 - RNA, 16 nt, Human
guucugggacacaguu

SEQ ID NO: 2567390 - RNA, 15 nt, Human
guucugggacacagu

SEQ ID NO: 2567391 - RNA, 14 nt, Human
guucugggacacag

SEQ ID NO: 2567392 - RNA, 12 nt, Human
guucugggacac

SEQ ID NO: 2567393 - RNA, 11 nt, Human
guucugggaca

SEQ ID NO: 2567394 - RNA, 16 nt, Human
guucuggccagaaugc

SEQ ID NO: 2567395 - RNA, 15 nt, Human
guucuggcccucacc

SEQ ID NO: 2567396 - RNA, 22 nt, Human
guucuggcugccccaaccugcu

SEQ ID NO: 2567397 - RNA, 20 nt, Human
guucuggcugccccaaccug

SEQ ID NO: 2567398 - RNA, 21 nt, Human
guucuggcccucaccccugcc

SEQ ID NO: 2567399 - RNA, 23 nt, Human
guucuggcccucaccccugcccu

SEQ ID NO: 2567400 - RNA, 13 nt, Human
guucuuuccaaag

SEQ ID NO: 2567401 - RNA, 14 nt, Human
guucuuuccaaagu

SEQ ID NO: 2567402 - RNA, 18 nt, Human
guucuuuccaaaguacac

SEQ ID NO: 2567403 - RNA, 20 nt, Human
guucuuuccaaaguacacug

SEQ ID NO: 2567404 - RNA, 15 nt, Human
guucuuucuggaguc

SEQ ID NO: 2567405 - RNA, 15 nt, Human
guucuuucuuccucu

SEQ ID NO: 2567406 - RNA, 14 nt, Human
guucuuucuuccuc

SEQ ID NO: 2567407 - RNA, 19 nt, Human
guucuuucuuccucugcug

SEQ ID NO: 2567408 - RNA, 18 nt, Human
guucuuucuuccucugcu

SEQ ID NO: 2567409 - RNA, 17 nt, Human
guucuuucuuccucugc

SEQ ID NO: 2567410 - RNA, 16 nt, Human
guucuuucuuccucug

SEQ ID NO: 2567411 - RNA, 18 nt, Human
guucuuuggaaggaguga

SEQ ID NO: 2567412 - RNA, 15 nt, Human
guucuuugggccaga

SEQ ID NO: 2567413 - RNA, 16 nt, Human
guucuuugggccagac

SEQ ID NO: 2567414 - RNA, 20 nt, Human
guucuuuguucauagcccag

SEQ ID NO: 2567415 - RNA, 13 nt, Human
guucuuuguucau

SEQ ID NO: 2567416 - RNA, 17 nt, Human
guucuuugggccagaca

SEQ ID NO: 2567417 - RNA, 22 nt, Human
guucuuugggccagacaugcca

SEQ ID NO: 2567418 - RNA, 21 nt, Human
guucuuuguucauagcccagu

SEQ ID NO: 2567419 - RNA, 13 nt, Human
guucuuuuaaagg

SEQ ID NO: 2567420 - RNA, 17 nt, Human
guugaaaaacagcugag

SEQ ID NO: 2567421 - RNA, 17 nt, Human
guugaaaagacuccaaa

SEQ ID NO: 2567422 - RNA, 22 nt, Human
guugaaaagacuccaaagaaau

SEQ ID NO: 2567423 - RNA, 23 nt, Human
guugaaaagacuccaaagaaaug

SEQ ID NO: 2567424 - RNA, 18 nt, Human
guugaaaauucaaaaagu

SEQ ID NO: 2567425 - RNA, 19 nt, Human
guugaaaauuauuuuaaac

SEQ ID NO: 2567426 - RNA, 16 nt, Human
guucuaagucuuucca

SEQ ID NO: 2567427 - RNA, 19 nt, Human
guucuaaaaauugugauca

SEQ ID NO: 2567428 - RNA, 14 nt, Human
guucguucuguuua

SEQ ID NO: 2567429 - RNA, 14 nt, Human
guucuaaagaugga

SEQ ID NO: 2567430 - RNA, 20 nt, Human
guucuaaagauggaaaaacc

SEQ ID NO: 2567431 - RNA, 17 nt, Human
guucuaaagauggaaaa

SEQ ID NO: 2567432 - RNA, 23 nt, Human
guucuaaagauggaaaaaccacc

SEQ ID NO: 2567433 - RNA, 14 nt, Human
guucgcauggucac

SEQ ID NO: 2567434 - RNA, 20 nt, Human
guucgcauggucacacacug

SEQ ID NO: 2567435 - RNA, 18 nt, Human
guucggauuuggggugga

SEQ ID NO: 2567436 - RNA, 16 nt, Human
guucgggugugcaaug

SEQ ID NO: 2567437 - RNA, 13 nt, Human
guucguagcuuuc

SEQ ID NO: 2567438 - RNA, 13 nt, Human
guucguucuguuu

SEQ ID NO: 2567439 - RNA, 17 nt, Human
guucguggaaagggugc

SEQ ID NO: 2567440 - RNA, 19 nt, Human
guucgagaccagucuggcc

SEQ ID NO: 2567441 - RNA, 16 nt, Human
guucgagaccagucug

SEQ ID NO: 2567442 - RNA, 20 nt, Human
guucgagaccagccuggcca

SEQ ID NO: 2567443 - RNA, 18 nt, Human
guucgagaccagccuggc

SEQ ID NO: 2567444 - RNA, 19 nt, Human
guucgagaccagccuggcc

SEQ ID NO: 2567445 - RNA, 17 nt, Human
guucgagaccagccugg

SEQ ID NO: 2567446 - RNA, 16 nt, Human
guucgagaccagccug

SEQ ID NO: 2567447 - RNA, 18 nt, Human
guuccuuccucugagccu

SEQ ID NO: 2567448 - RNA, 19 nt, Human
guuccuuccucugagccuu

SEQ ID NO: 2567449 - RNA, 17 nt, Human
guuccuuccucugagcc

SEQ ID NO: 2567450 - RNA, 20 nt, Human
guuccuucuggugucugcuu

SEQ ID NO: 2567451 - RNA, 23 nt, Human
guuccuugaucuguauauacaau

SEQ ID NO: 2567452 - RNA, 16 nt, Human
guucgacucagccuca

SEQ ID NO: 2567453 - RNA, 14 nt, Human
guucgacucagccu

SEQ ID NO: 2567454 - RNA, 19 nt, Human
guucgagaccaaccugacc

SEQ ID NO: 2567455 - RNA, 22 nt, Human
guucgacgagacggucgagcag

SEQ ID NO: 2567456 - RNA, 17 nt, Human
guucugccugccagcug

SEQ ID NO: 2567457 - RNA, 19 nt, Human
guucugccugccagcugca

SEQ ID NO: 2567458 - RNA, 22 nt, Human
guucugccugccagcugcacug

SEQ ID NO: 2567459 - RNA, 23 nt, Human
guucugccugccagcugcacuga

SEQ ID NO: 2567460 - RNA, 13 nt, Human
guucugccugcca

SEQ ID NO: 2567461 - RNA, 15 nt, Human
guucugccugccagc

SEQ ID NO: 2567462 - RNA, 15 nt, Human
guucugcacacagca

SEQ ID NO: 2567463 - RNA, 16 nt, Human
guucugcacacagcac

SEQ ID NO: 2567464 - RNA, 16 nt, Human
guucugcaaaaauauu

SEQ ID NO: 2567465 - RNA, 20 nt, Human
guucugauuagaaaugacca

SEQ ID NO: 2567466 - RNA, 13 nt, Human
guucugauuagaa

SEQ ID NO: 2567467 - RNA, 14 nt, Human
guucugauuagaaa

SEQ ID NO: 2567468 - RNA, 16 nt, Human
guucugauuagaaaug

SEQ ID NO: 2567469 - RNA, 18 nt, Human
guucugauuagaaaugac

SEQ ID NO: 2567470 - RNA, 19 nt, Human
guucugauccuaguuccac

SEQ ID NO: 2567471 - RNA, 22 nt, Human
guucugagauuauuuuaaucua

SEQ ID NO: 2567472 - RNA, 18 nt, Human
guucugaugaugugccug

SEQ ID NO: 2567473 - RNA, 17 nt, Human
guucugaugaugugccu

SEQ ID NO: 2567474 - RNA, 14 nt, Human
guucugaguguuuu

SEQ ID NO: 2567475 - RNA, 13 nt, Human
guucugaagaaga

SEQ ID NO: 2567476 - RNA, 12 nt, Human
guucugaagaag

SEQ ID NO: 2567477 - RNA, 17 nt, Human
guucuaagucuuuccau

SEQ ID NO: 2567478 - RNA, 19 nt, Human
guucuaagucuuuccauug

SEQ ID NO: 2567479 - RNA, 18 nt, Human
guucuaauuuuggaugga

SEQ ID NO: 2567480 - RNA, 15 nt, Human
guucugaagaagaug

SEQ ID NO: 2567481 - RNA, 14 nt, Human
guucugaagaagau

SEQ ID NO: 2567482 - RNA, 18 nt, Human
guucugaauaauuucuua

SEQ ID NO: 2567483 - RNA, 16 nt, Human
guucugaauaauuucu

SEQ ID NO: 2567484 - RNA, 15 nt, Human
guucugaauaauuuc

SEQ ID NO: 2567485 - RNA, 14 nt, Human
guucucuucuugaa

SEQ ID NO: 2567486 - RNA, 20 nt, Human
guucugaauaugcugcucau

SEQ ID NO: 2567487 - RNA, 15 nt, Human
guucugacauuaaca

SEQ ID NO: 2567488 - RNA, 16 nt, Human
guucugacauuaacag

SEQ ID NO: 2567489 - RNA, 17 nt, Human
guucugacauuaacagu

SEQ ID NO: 2567490 - RNA, 21 nt, Human
guucugacauuaacaguuuuc

SEQ ID NO: 2567491 - RNA, 23 nt, Human
guucugacauuaacaguuuucca

SEQ ID NO: 2567492 - RNA, 13 nt, Human
guucugacuugac

SEQ ID NO: 2567493 - RNA, 23 nt, Human
guugccagucaccccggccaccu

SEQ ID NO: 2567494 - RNA, 18 nt, Human
guugccagucaccccggc

SEQ ID NO: 2567495 - RNA, 17 nt, Human
guugccagucaccccgg

SEQ ID NO: 2567496 - RNA, 16 nt, Human
guugccagucaccccg

SEQ ID NO: 2567497 - RNA, 19 nt, Human
guugccaagcuccaagccc

SEQ ID NO: 2567498 - RNA, 18 nt, Human
guugccaagcuccaagcc

SEQ ID NO: 2567499 - RNA, 15 nt, Human
guugccaagcuccaa

SEQ ID NO: 2567500 - RNA, 21 nt, Human
guugccaaauauguccugggg

SEQ ID NO: 2567501 - RNA, 11 nt, Human
guugccacagg

SEQ ID NO: 2567502 - RNA, 13 nt, Human
guugccaagcugg

SEQ ID NO: 2567503 - RNA, 13 nt, Human
guugccacaggac

SEQ ID NO: 2567504 - RNA, 14 nt, Human
guugccacaggaca

SEQ ID NO: 2567505 - RNA, 15 nt, Human
guugccacaggccuc

SEQ ID NO: 2567506 - RNA, 12 nt, Human
guugccacaggc

SEQ ID NO: 2567507 - RNA, 15 nt, Human
guugccacaggacac

SEQ ID NO: 2567508 - RNA, 16 nt, Human
guugccacaggacaca

SEQ ID NO: 2567509 - RNA, 14 nt, Human
guugccagucaccc

SEQ ID NO: 2567510 - RNA, 13 nt, Human
guugccagucacc

SEQ ID NO: 2567511 - RNA, 18 nt, Human
guuggacccgcucuggac

SEQ ID NO: 2567512 - RNA, 17 nt, Human
guuggacccgcucugga

SEQ ID NO: 2567513 - RNA, 16 nt, Human
guuggacccgcucugg

SEQ ID NO: 2567514 - RNA, 15 nt, Human
guuggacccgcucug

SEQ ID NO: 2567515 - RNA, 20 nt, Human
guuggacccgcucuggacca

SEQ ID NO: 2567516 - RNA, 19 nt, Human
guuggagagcuagaaccug

SEQ ID NO: 2567517 - RNA, 13 nt, Human
guuggaucuucaa

SEQ ID NO: 2567518 - RNA, 19 nt, Human
guuggagccugcagggugg

SEQ ID NO: 2567519 - RNA, 16 nt, Human
guuggagccugcaggg

SEQ ID NO: 2567520 - RNA, 14 nt, Human
guuggagccugcag

SEQ ID NO: 2567521 - RNA, 22 nt, Human
guuggagagcuagaaccuggag

SEQ ID NO: 2567522 - RNA, 12 nt, Human
guuggagccugc

SEQ ID NO: 2567523 - RNA, 14 nt, Human
guugcccaggcagg

SEQ ID NO: 2567524 - RNA, 12 nt, Human
guugcccaggca

SEQ ID NO: 2567525 - RNA, 19 nt, Human
guugccacaggccucccug

SEQ ID NO: 2567526 - RNA, 17 nt, Human
guugccacaggccuccc

SEQ ID NO: 2567527 - RNA, 16 nt, Human
guugccacaggccucc

SEQ ID NO: 2567528 - RNA, 17 nt, Human
guugccagagauggagg

SEQ ID NO: 2567529 - RNA, 11 nt, Human
guugccagaga

SEQ ID NO: 2567530 - RNA, 15 nt, Human
guugccagagaugga

SEQ ID NO: 2567531 - RNA, 14 nt, Human
guuggccaguguga

SEQ ID NO: 2567532 - RNA, 19 nt, Human
guuggccaggcuggucuca

SEQ ID NO: 2567533 - RNA, 19 nt, Human
guuggccaggcugcucuug

SEQ ID NO: 2567534 - RNA, 18 nt, Human
guuggccaggcuggucuc

SEQ ID NO: 2567535 - RNA, 17 nt, Human
guuggccaggcuggucu

SEQ ID NO: 2567536 - RNA, 14 nt, Human
guuggccaggcugg

SEQ ID NO: 2567537 - RNA, 15 nt, Human
guuggccaggcuggu

SEQ ID NO: 2567538 - RNA, 14 nt, Human
guuggccaggcugc

SEQ ID NO: 2567539 - RNA, 20 nt, Human
guuggccacgucuuccuucu

SEQ ID NO: 2567540 - RNA, 13 nt, Human
guuggccaggcug

SEQ ID NO: 2567541 - RNA, 20 nt, Human
guuggcaggcuggccagucc

SEQ ID NO: 2567542 - RNA, 17 nt, Human
guuggcaggcuggccag

SEQ ID NO: 2567543 - RNA, 16 nt, Human
guuggcaggcuggcca

SEQ ID NO: 2567544 - RNA, 15 nt, Human
guuggcaggcuggcc

SEQ ID NO: 2567545 - RNA, 14 nt, Human
guuggcaggcuggc

SEQ ID NO: 2567546 - RNA, 13 nt, Human
guuggcaggcugg

SEQ ID NO: 2567547 - RNA, 19 nt, Human
guuggcacucacagaccug

SEQ ID NO: 2567548 - RNA, 15 nt, Human
guuggcacucacaga

SEQ ID NO: 2567549 - RNA, 20 nt, Human
guuggcacucacagaccugg

SEQ ID NO: 2567550 - RNA, 23 nt, Human
guuggcagugagugagccuggcu

SEQ ID NO: 2567551 - RNA, 22 nt, Human
guuggcagugagugagccuggc

SEQ ID NO: 2567552 - RNA, 16 nt, Human
guuggcagugagugag

SEQ ID NO: 2567553 - RNA, 23 nt, Human
guuggccaaagccaaagcuaggc

SEQ ID NO: 2567554 - RNA, 18 nt, Human
guuggcaaaaaggcagga

SEQ ID NO: 2567555 - RNA, 12 nt, Human
guuggauuuguu

SEQ ID NO: 2567556 - RNA, 20 nt, Human
guuggauuuuugucuugugu

SEQ ID NO: 2567557 - RNA, 14 nt, Human
guuggcaaaaaggc

SEQ ID NO: 2567558 - RNA, 21 nt, Human
guuggauuuauaaaugcuauu

SEQ ID NO: 2567559 - RNA, 18 nt, Human
guuggauuuauaaaugcu

SEQ ID NO: 2567560 - RNA, 14 nt, Human
guuggauuuuuguc

SEQ ID NO: 2567561 - RNA, 23 nt, Human
guugcacccagcccuggucucag

SEQ ID NO: 2567562 - RNA, 20 nt, Human
guugcacccagcccuggucu

SEQ ID NO: 2567563 - RNA, 18 nt, Human
guugcacccagcccuggu

SEQ ID NO: 2567564 - RNA, 17 nt, Human
guugcacccagcccugg

SEQ ID NO: 2567565 - RNA, 16 nt, Human
guugcacccagcccug

SEQ ID NO: 2567566 - RNA, 15 nt, Human
guugcacccagcccu

SEQ ID NO: 2567567 - RNA, 14 nt, Human
guugcacccagccc

SEQ ID NO: 2567568 - RNA, 13 nt, Human
guugcacccagcc

SEQ ID NO: 2567569 - RNA, 15 nt, Human
guugcaggaccucag

SEQ ID NO: 2567570 - RNA, 14 nt, Human
guugcacugauauu

SEQ ID NO: 2567571 - RNA, 19 nt, Human
guugcacuuaugauuucau

SEQ ID NO: 2567572 - RNA, 19 nt, Human
guugcacuuggccucugga

SEQ ID NO: 2567573 - RNA, 15 nt, Human
guugcagugagcuga

SEQ ID NO: 2567574 - RNA, 20 nt, Human
guugcaugucgugaccaacu

SEQ ID NO: 2567575 - RNA, 16 nt, Human
guugcaugauguauuu

SEQ ID NO: 2567576 - RNA, 13 nt, Human
guugcagugagcu

SEQ ID NO: 2567577 - RNA, 20 nt, Human
guugcauuaaaaaugcauau

SEQ ID NO: 2567578 - RNA, 17 nt, Human
guugccaaacagccaca

SEQ ID NO: 2567579 - RNA, 18 nt, Human
guugccaaacagccacac

SEQ ID NO: 2567580 - RNA, 20 nt, Human
guugccaaauauguccuggg

SEQ ID NO: 2567581 - RNA, 19 nt, Human
guugccaaauauguccugg

SEQ ID NO: 2567582 - RNA, 16 nt, Human
guugcaacuuuguaua

SEQ ID NO: 2567583 - RNA, 14 nt, Human
guugcaaccacugc

SEQ ID NO: 2567584 - RNA, 13 nt, Human
guugcaaccacug

SEQ ID NO: 2567585 - RNA, 15 nt, Human
guugcaaacucagcc

SEQ ID NO: 2567586 - RNA, 15 nt, Human
guugcaaggccgcug

SEQ ID NO: 2567587 - RNA, 16 nt, Human
guugcacagcuaugaa

SEQ ID NO: 2567588 - RNA, 22 nt, Human
guugcaauagaacagagaaaga

SEQ ID NO: 2567589 - RNA, 20 nt, Human
guugcacacccacucagcuc

SEQ ID NO: 2567590 - RNA, 16 nt, Human
guugcaaggccgcugu

SEQ ID NO: 2567591 - RNA, 17 nt, Human
guugcaaggccgcuguu

SEQ ID NO: 2567592 - RNA, 23 nt, Human
guugcaaggccgcuguucaccca

SEQ ID NO: 2567593 - RNA, 17 nt, Human
guugcaaguacugcugu

SEQ ID NO: 2567594 - RNA, 14 nt, Human
guugcaacuuugua

SEQ ID NO: 2567595 - RNA, 18 nt, Human
guugauuucuuuccagag

SEQ ID NO: 2567596 - RNA, 20 nt, Human
guugauugcuaaauguaaca

SEQ ID NO: 2567597 - RNA, 18 nt, Human
guugauugcuaaauguaa

SEQ ID NO: 2567598 - RNA, 22 nt, Human
guugauugcuaaauguaacagu

SEQ ID NO: 2567599 - RNA, 23 nt, Human
guugauucgguauccccccaucu

SEQ ID NO: 2567600 - RNA, 13 nt, Human
guugauugcuaaa

SEQ ID NO: 2567601 - RNA, 12 nt, Human
guugauugcuaa

SEQ ID NO: 2567602 - RNA, 17 nt, Human
guugauugcuaaaugua

SEQ ID NO: 2567603 - RNA, 16 nt, Human
guugauugcuaaaugu

SEQ ID NO: 2567604 - RNA, 15 nt, Human
guugauugcuaaaug

SEQ ID NO: 2567605 - RNA, 14 nt, Human
guugauugcuaaau

SEQ ID NO: 2567606 - RNA, 23 nt, Human
guugauuucagcaccuacagugu

SEQ ID NO: 2567607 - RNA, 20 nt, Human
guugauggugguauguuuuc

SEQ ID NO: 2567608 - RNA, 21 nt, Human
guugauggugguauguuuuca

SEQ ID NO: 2567609 - RNA, 16 nt, Human
guugauguuggcuggg

SEQ ID NO: 2567610 - RNA, 17 nt, Human
guugauggguucuaauu

SEQ ID NO: 2567611 - RNA, 17 nt, Human
guugauguuggcuggga

SEQ ID NO: 2567612 - RNA, 13 nt, Human
guugaagccuuug

SEQ ID NO: 2567613 - RNA, 14 nt, Human
guugaagccuuugu

SEQ ID NO: 2567614 - RNA, 14 nt, Human
guugaagcucuggu

SEQ ID NO: 2567615 - RNA, 22 nt, Human
guugaagcuaagauuuagagau

SEQ ID NO: 2567616 - RNA, 13 nt, Human
guugaagcucugg

SEQ ID NO: 2567617 - RNA, 19 nt, Human
guugaaugacaacagaagc

SEQ ID NO: 2567618 - RNA, 16 nt, Human
guugaauggccugccu

SEQ ID NO: 2567619 - RNA, 13 nt, Human
guugaauacuuuu

SEQ ID NO: 2567620 - RNA, 17 nt, Human
guugaauacuuuuuaca

SEQ ID NO: 2567621 - RNA, 15 nt, Human
guugaaugacaacag

SEQ ID NO: 2567622 - RNA, 20 nt, Human
guugaaauuauguauguuua

SEQ ID NO: 2567623 - RNA, 22 nt, Human
guugaaaauucaaaaaguguuu

SEQ ID NO: 2567624 - RNA, 15 nt, Human
guugaaagaguccua

SEQ ID NO: 2567625 - RNA, 15 nt, Human
guugaagaggaaggg

SEQ ID NO: 2567626 - RNA, 21 nt, Human
guugaacugauaguuacuguu

SEQ ID NO: 2567627 - RNA, 16 nt, Human
guugaagacagagcua

SEQ ID NO: 2567628 - RNA, 17 nt, Human
guuacagacaaagcgug

SEQ ID NO: 2567629 - RNA, 15 nt, Human
guuacagacaaagcg

SEQ ID NO: 2567630 - RNA, 21 nt, Human
guuacagcgagaggcagagaa

SEQ ID NO: 2567631 - RNA, 19 nt, Human
guuacagcgagaggcagag

SEQ ID NO: 2567632 - RNA, 18 nt, Human
guuacagccuguuaguaa

SEQ ID NO: 2567633 - RNA, 21 nt, Human
guuacagccuguuaguaacau

SEQ ID NO: 2567634 - RNA, 22 nt, Human
guuacaggcaccgagaauguug

SEQ ID NO: 2567635 - RNA, 22 nt, Human
guuacaugcauacuucaaaagu

SEQ ID NO: 2567636 - RNA, 21 nt, Human
guuacaugcauacuucaaaag

SEQ ID NO: 2567637 - RNA, 23 nt, Human
guuacaugcauacuucaaaagua

SEQ ID NO: 2567638 - RNA, 16 nt, Human
guuacauuaauguuaa

SEQ ID NO: 2567639 - RNA, 14 nt, Human
guuacauuaauguu

SEQ ID NO: 2567640 - RNA, 13 nt, Human
guuacauuaaugu

SEQ ID NO: 2567641 - RNA, 17 nt, Human
guuacaucacaguguuu

SEQ ID NO: 2567642 - RNA, 19 nt, Human
guuacaugcauacuucaaa

SEQ ID NO: 2567643 - RNA, 18 nt, Human
guuacauaagauaaaugu

SEQ ID NO: 2567644 - RNA, 19 nt, Human
guuacauaagauaaaugug

SEQ ID NO: 2567645 - RNA, 23 nt, Human
guuaccauuuugggguacccacu

SEQ ID NO: 2567646 - RNA, 21 nt, Human
guuacauuuuuaagugcugca

SEQ ID NO: 2567647 - RNA, 18 nt, Human
guuaccaugucacugugg

SEQ ID NO: 2567648 - RNA, 15 nt, Human
guuaccaugucacug

SEQ ID NO: 2567649 - RNA, 23 nt, Human
guuaccucugccucagaaaacaa

SEQ ID NO: 2567650 - RNA, 22 nt, Human
guuaccugaaaacacugugcac

SEQ ID NO: 2567651 - RNA, 15 nt, Human
guuaccuccuauaaa

SEQ ID NO: 2567652 - RNA, 17 nt, Human
guuaccuccuauaaacu

SEQ ID NO: 2567653 - RNA, 17 nt, Human
guuacccuccuguaaau

SEQ ID NO: 2567654 - RNA, 20 nt, Human
guuacccaguaacucaucug

SEQ ID NO: 2567655 - RNA, 13 nt, Human
guuacccagagaa

SEQ ID NO: 2567656 - RNA, 13 nt, Human
guuaccuacuuug

SEQ ID NO: 2567657 - RNA, 16 nt, Human
guuaccuacuuugacu

SEQ ID NO: 2567658 - RNA, 19 nt, Human
guuaccuaauuagagcaga

SEQ ID NO: 2567659 - RNA, 10 nt, Human
guuaccuaau

SEQ ID NO: 2567660 - RNA, 16 nt, Human
guuauaaaagugauug

SEQ ID NO: 2567661 - RNA, 17 nt, Human
guuauaaaucaauguca

SEQ ID NO: 2567662 - RNA, 18 nt, Human
guuauaaaucaaugucac

SEQ ID NO: 2567663 - RNA, 19 nt, Human
guuauacugucgguuuuuu

SEQ ID NO: 2567664 - RNA, 22 nt, Human
guuauaaaagugauuguuggca

SEQ ID NO: 2567665 - RNA, 14 nt, Human
guuauaaaagugau

SEQ ID NO: 2567666 - RNA, 14 nt, Human
guuauaaagauaca

SEQ ID NO: 2567667 - RNA, 15 nt, Human
guuauaaagauacag

SEQ ID NO: 2567668 - RNA, 13 nt, Human
guuaguucccaac

SEQ ID NO: 2567669 - RNA, 12 nt, Human
guuauaaaagug

SEQ ID NO: 2567670 - RNA, 14 nt, Human
guuaguuuuuacuu

SEQ ID NO: 2567671 - RNA, 19 nt, Human
guuaguuucuccaagcagg

SEQ ID NO: 2567672 - RNA, 16 nt, Human
guuaguuucuccaagc

SEQ ID NO: 2567673 - RNA, 22 nt, Human
guuaguuucuccaagcaggaca

SEQ ID NO: 2567674 - RNA, 16 nt, Human
guuaguuucuuuggga

SEQ ID NO: 2567675 - RNA, 15 nt, Human
guuacucagaauucu

SEQ ID NO: 2567676 - RNA, 14 nt, Human
guuacuaucugcuu

SEQ ID NO: 2567677 - RNA, 20 nt, Human
guuacuagguaacuucauau

SEQ ID NO: 2567678 - RNA, 12 nt, Human
guuacucagccc

SEQ ID NO: 2567679 - RNA, 13 nt, Human
guuacucagcccu

SEQ ID NO: 2567680 - RNA, 14 nt, Human
guuacucagcccug

SEQ ID NO: 2567681 - RNA, 15 nt, Human
guuacucagcccugg

SEQ ID NO: 2567682 - RNA, 16 nt, Human
guuacuccagugccaa

SEQ ID NO: 2567683 - RNA, 22 nt, Human
guuacuccagugccaacaaucc

SEQ ID NO: 2567684 - RNA, 14 nt, Human
guuacucuccaacc

SEQ ID NO: 2567685 - RNA, 16 nt, Human
guuacucagcccuggg

SEQ ID NO: 2567686 - RNA, 17 nt, Human
guuacucagcccugggc

SEQ ID NO: 2567687 - RNA, 18 nt, Human
guuacucagcccugggcc

SEQ ID NO: 2567688 - RNA, 17 nt, Human
guuacucuccaaccugg

SEQ ID NO: 2567689 - RNA, 18 nt, Human
guuacucuccaaccugga

SEQ ID NO: 2567690 - RNA, 22 nt, Human
guuacucuccaaccuggacaac

SEQ ID NO: 2567691 - RNA, 11 nt, Human
guuacucugaa

SEQ ID NO: 2567692 - RNA, 14 nt, Human
guuacucugaaggg

SEQ ID NO: 2567693 - RNA, 14 nt, Human
guuacuaagaagaa

SEQ ID NO: 2567694 - RNA, 13 nt, Human
guuacuaagaaga

SEQ ID NO: 2567695 - RNA, 17 nt, Human
guuacuaacuaaacucu

SEQ ID NO: 2567696 - RNA, 16 nt, Human
guuacuaacuaaacuc

SEQ ID NO: 2567697 - RNA, 21 nt, Human
guuaccugaucaaugacagag

SEQ ID NO: 2567698 - RNA, 23 nt, Human
guuacgcacacguacuuaaauga

SEQ ID NO: 2567699 - RNA, 22 nt, Human
guuacuaaguuuuuauggcuuu

SEQ ID NO: 2567700 - RNA, 15 nt, Human
guuacuacaugcacu

SEQ ID NO: 2567701 - RNA, 23 nt, Human
guuacuaauuggccucuuuaaga

SEQ ID NO: 2567702 - RNA, 16 nt, Human
guuacuagguaacuuc

SEQ ID NO: 2567703 - RNA, 13 nt, Human
guuacuauaugcc

SEQ ID NO: 2567704 - RNA, 22 nt, Human
guuaucaccgugggcucccuga

SEQ ID NO: 2567705 - RNA, 20 nt, Human
guuaucaccgugggcucccu

SEQ ID NO: 2567706 - RNA, 23 nt, Human
guuaucaaacuucagcuguacuu

SEQ ID NO: 2567707 - RNA, 14 nt, Human
guuauaucaacaga

SEQ ID NO: 2567708 - RNA, 17 nt, Human
guuauauauuuuuugua

SEQ ID NO: 2567709 - RNA, 19 nt, Human
guuauauugaaaaaauaga

SEQ ID NO: 2567710 - RNA, 20 nt, Human
guuauauuuuacuacugugg

SEQ ID NO: 2567711 - RNA, 13 nt, Human
guuauauagguuu

SEQ ID NO: 2567712 - RNA, 12 nt, Human
guuauauaaaug

SEQ ID NO: 2567713 - RNA, 13 nt, Human
guuauauaaaugg

SEQ ID NO: 2567714 - RNA, 10 nt, Human
guuauauaaa

SEQ ID NO: 2567715 - RNA, 19 nt, Human
guuauaguauaucuggaca

SEQ ID NO: 2567716 - RNA, 16 nt, Human
guuauaguauaucugg

SEQ ID NO: 2567717 - RNA, 15 nt, Human
guuauaguauaucug

SEQ ID NO: 2567718 - RNA, 17 nt, Human
guuauaggucacuccug

SEQ ID NO: 2567719 - RNA, 22 nt, Human
guuauagagggucuaagauuca

SEQ ID NO: 2567720 - RNA, 20 nt, Human
guuaugaaauucacccccuu

SEQ ID NO: 2567721 - RNA, 15 nt, Human
guuaugaaauaaaga

SEQ ID NO: 2567722 - RNA, 23 nt, Human
guuaugaauauuuacguuuuugu

SEQ ID NO: 2567723 - RNA, 12 nt, Human
guuaugaauauu

SEQ ID NO: 2567724 - RNA, 21 nt, Human
guuaugacuccagaauuuccc

SEQ ID NO: 2567725 - RNA, 14 nt, Human
guuaucucuguguu

SEQ ID NO: 2567726 - RNA, 13 nt, Human
guuaucucugugu

SEQ ID NO: 2567727 - RNA, 12 nt, Human
guuaucucugug

SEQ ID NO: 2567728 - RNA, 16 nt, Human
guuaucuaaaagaaau

SEQ ID NO: 2567729 - RNA, 21 nt, Human
guuaucgaaauaacaauguua

SEQ ID NO: 2567730 - RNA, 18 nt, Human
guuaucgaaauaacaaug

SEQ ID NO: 2567731 - RNA, 23 nt, Human
guuaucgaaauaacaauguuaag

SEQ ID NO: 2567732 - RNA, 15 nt, Human
guuaucuaaaagaaa

SEQ ID NO: 2567733 - RNA, 17 nt, Human
guuaucgaaauaacaau

SEQ ID NO: 2567734 - RNA, 15 nt, Human
guuaucgaaauaaca

SEQ ID NO: 2567735 - RNA, 14 nt, Human
guuaucgaaauaac

SEQ ID NO: 2567736 - RNA, 21 nt, Human
guuaucccuuccuuuuagccu

SEQ ID NO: 2567737 - RNA, 21 nt, Human
guuauuaaacguaugcaugug

SEQ ID NO: 2567738 - RNA, 14 nt, Human
guuauguguguaua

SEQ ID NO: 2567739 - RNA, 19 nt, Human
guuauguguguauauguau

SEQ ID NO: 2567740 - RNA, 22 nt, Human
guuauuagagauuaccuccuga

SEQ ID NO: 2567741 - RNA, 21 nt, Human
guuauuagggugguauuuagu

SEQ ID NO: 2567742 - RNA, 22 nt, Human
guuauuaaacguaugcauguga

SEQ ID NO: 2567743 - RNA, 21 nt, Human
guuauuacccagaguuuuuau

SEQ ID NO: 2567744 - RNA, 19 nt, Human
guucaagcgauucuucugc

SEQ ID NO: 2567745 - RNA, 19 nt, Human
guuauuaaaaaucucaaau

SEQ ID NO: 2567746 - RNA, 22 nt, Human
guuaugugaaugaucucucuga

SEQ ID NO: 2567747 - RNA, 15 nt, Human
guuaugguguuucuc

SEQ ID NO: 2567748 - RNA, 19 nt, Human
guuaugcggucuagggaau

SEQ ID NO: 2567749 - RNA, 21 nt, Human
guuauguaaaaggccaaaccu

SEQ ID NO: 2567750 - RNA, 20 nt, Human
guuaugauuuuuuuuucaua

SEQ ID NO: 2567751 - RNA, 22 nt, Human
guuaugcaagggacuguguguu

SEQ ID NO: 2567752 - RNA, 13 nt, Human
guuaugcugugac

SEQ ID NO: 2567753 - RNA, 23 nt, Human
guuauggaaacuguugccagaga

SEQ ID NO: 2567754 - RNA, 19 nt, Human
guucaaugaucuagguuua

SEQ ID NO: 2567755 - RNA, 17 nt, Human
guucaaugaucuagguu

SEQ ID NO: 2567756 - RNA, 14 nt, Human
guucaaugaucuag

SEQ ID NO: 2567757 - RNA, 13 nt, Human
guucaaugaucua

SEQ ID NO: 2567758 - RNA, 12 nt, Human
guucaaugaucu

SEQ ID NO: 2567759 - RNA, 10 nt, Human
guucaaugau

SEQ ID NO: 2567760 - RNA, 16 nt, Human
guucaauucucauuug

SEQ ID NO: 2567761 - RNA, 17 nt, Human
guucaauggcugcugaa

SEQ ID NO: 2567762 - RNA, 22 nt, Human
guucaaugaucuagguuuaacu

SEQ ID NO: 2567763 - RNA, 21 nt, Human
guucaaugaucuagguuuaac

SEQ ID NO: 2567764 - RNA, 20 nt, Human
guucaaugaucuagguuuaa

SEQ ID NO: 2567765 - RNA, 13 nt, Human
guucaauuagaau

SEQ ID NO: 2567766 - RNA, 23 nt, Human
guucaauucucauuugucacaca

SEQ ID NO: 2567767 - RNA, 20 nt, Human
guucaagcgauucuucugcu

SEQ ID NO: 2567768 - RNA, 18 nt, Human
guuauuauaauuguauca

SEQ ID NO: 2567769 - RNA, 16 nt, Human
guuauuauaauuguau

SEQ ID NO: 2567770 - RNA, 14 nt, Human
guuauuauaauugu

SEQ ID NO: 2567771 - RNA, 13 nt, Human
guuauuauaauug

SEQ ID NO: 2567772 - RNA, 18 nt, Human
guucaaggccauccuucc

SEQ ID NO: 2567773 - RNA, 18 nt, Human
guucaauaauaaauauuu

SEQ ID NO: 2567774 - RNA, 18 nt, Human
guucaaucucccgcugcu

SEQ ID NO: 2567775 - RNA, 23 nt, Human
guucaagugauucucaugccuca

SEQ ID NO: 2567776 - RNA, 20 nt, Human
guucaaguaauucugcuguc

SEQ ID NO: 2567777 - RNA, 19 nt, Human
guucaaggccauccuuccc

SEQ ID NO: 2567778 - RNA, 18 nt, Human
guucacucuuggagccug

SEQ ID NO: 2567779 - RNA, 19 nt, Human
guucacucuuggagccugc

SEQ ID NO: 2567780 - RNA, 17 nt, Human
guucacucuuggagccu

SEQ ID NO: 2567781 - RNA, 20 nt, Human
guucacucuuggagccugca

SEQ ID NO: 2567782 - RNA, 24 nt, Human
guucacucuuggagccugcagagc

SEQ ID NO: 2567783 - RNA, 19 nt, Human
guucacugcaaccuccgcc

SEQ ID NO: 2567784 - RNA, 15 nt, Human
guucacuaaagcagu

SEQ ID NO: 2567785 - RNA, 24 nt, Human
guucacucuacuuagcaugucccu

SEQ ID NO: 2567786 - RNA, 19 nt, Human
guucacgugcagcucaagg

SEQ ID NO: 2567787 - RNA, 22 nt, Human
guucaccuugaagaaccucuca

SEQ ID NO: 2567788 - RNA, 12 nt, Human
guucacauuuuu

SEQ ID NO: 2567789 - RNA, 16 nt, Human
guucacccacagggcu

SEQ ID NO: 2567790 - RNA, 11 nt, Human
guucaccagcc

SEQ ID NO: 2567791 - RNA, 12 nt, Human
guucaccagccu

SEQ ID NO: 2567792 - RNA, 16 nt, Human
guucaccccuccaccc

SEQ ID NO: 2567793 - RNA, 14 nt, Human
guucaccccuccac

SEQ ID NO: 2567794 - RNA, 12 nt, Human
guucaccccucc

SEQ ID NO: 2567795 - RNA, 22 nt, Human
guucagagacucagggccccag

SEQ ID NO: 2567796 - RNA, 16 nt, Human
guucagagacucaggg

SEQ ID NO: 2567797 - RNA, 17 nt, Human
guucagagacucagggc

SEQ ID NO: 2567798 - RNA, 21 nt, Human
guucagaaaugcugccugccu

SEQ ID NO: 2567799 - RNA, 19 nt, Human
guucagaaaugcugccugc

SEQ ID NO: 2567800 - RNA, 16 nt, Human
guucacuuuugacaaa

SEQ ID NO: 2567801 - RNA, 20 nt, Human
guucacuuuugacaaaggca

SEQ ID NO: 2567802 - RNA, 18 nt, Human
guucagaaaugcugccug

SEQ ID NO: 2567803 - RNA, 17 nt, Human
guucagaaaugcugccu

SEQ ID NO: 2567804 - RNA, 21 nt, Human
guucacuucaucuucucagcu

SEQ ID NO: 2567805 - RNA, 16 nt, Human
guucacuucaucuucu

SEQ ID NO: 2567806 - RNA, 24 nt, Human
guucauguuugcuucauaaaugaa

SEQ ID NO: 2567807 - RNA, 14 nt, Human
guucauguuugcuu

SEQ ID NO: 2567808 - RNA, 14 nt, Human
guucaugagaaucu

SEQ ID NO: 2567809 - RNA, 16 nt, Human
guucaugccaccaugg

SEQ ID NO: 2567810 - RNA, 19 nt, Human
guucaugagaaucuauauu

SEQ ID NO: 2567811 - RNA, 12 nt, Human
guucaugagaau

SEQ ID NO: 2567812 - RNA, 20 nt, Human
guucaucugagcaagagcug

SEQ ID NO: 2567813 - RNA, 13 nt, Human
guucaucuugaau

SEQ ID NO: 2567814 - RNA, 12 nt, Human
guucaucuugaa

SEQ ID NO: 2567815 - RNA, 18 nt, Human
guucaucuugaauuguaa

SEQ ID NO: 2567816 - RNA, 17 nt, Human
guucaucguauaacaca

SEQ ID NO: 2567817 - RNA, 22 nt, Human
guucauccaauccucacugggu

SEQ ID NO: 2567818 - RNA, 16 nt, Human
guucauccauucuauu

SEQ ID NO: 2567819 - RNA, 20 nt, Human
guucauccaauccucacugg

SEQ ID NO: 2567820 - RNA, 21 nt, Human
guucauccaauccucacuggg

SEQ ID NO: 2567821 - RNA, 22 nt, Human
guucauauguaccauguacaug

SEQ ID NO: 2567822 - RNA, 15 nt, Human
guucauccaauccuc

SEQ ID NO: 2567823 - RNA, 18 nt, Human
guucauccaauccucacu

SEQ ID NO: 2567824 - RNA, 19 nt, Human
guucauccaauccucacug

SEQ ID NO: 2567825 - RNA, 16 nt, Human
guucaucaaugaauga

SEQ ID NO: 2567826 - RNA, 17 nt, Human
guucaucauccuaagcu

SEQ ID NO: 2567827 - RNA, 22 nt, Human
guucagcacugucccuugccuc

SEQ ID NO: 2567828 - RNA, 16 nt, Human
guucagcacugucccu

SEQ ID NO: 2567829 - RNA, 15 nt, Human
guucagcacuguccc

SEQ ID NO: 2567830 - RNA, 16 nt, Human
guucagauugcuuuga

SEQ ID NO: 2567831 - RNA, 16 nt, Human
guucagcaccacccua

SEQ ID NO: 2567832 - RNA, 14 nt, Human
guucagcacugucc

SEQ ID NO: 2567833 - RNA, 17 nt, Human
guucagcaccacccuag

SEQ ID NO: 2567834 - RNA, 18 nt, Human
guucagcacugucccuug

SEQ ID NO: 2567835 - RNA, 12 nt, Human
guucagccaagg

SEQ ID NO: 2567836 - RNA, 19 nt, Human
guucauauuccauauuuau

SEQ ID NO: 2567837 - RNA, 14 nt, Human
guucagccccuccu

SEQ ID NO: 2567838 - RNA, 15 nt, Human
guucagccccuccuc

SEQ ID NO: 2567839 - RNA, 15 nt, Human
guucagccaagguuu

SEQ ID NO: 2567840 - RNA, 15 nt, Human
guuccaauaaacagg

SEQ ID NO: 2567841 - RNA, 14 nt, Human
guuccaauaaacag

SEQ ID NO: 2567842 - RNA, 21 nt, Human
guuccaagacauugucaauaa

SEQ ID NO: 2567843 - RNA, 15 nt, Human
guuccaagacauugu

SEQ ID NO: 2567844 - RNA, 16 nt, Human
guuccaagacauuguc

SEQ ID NO: 2567845 - RNA, 17 nt, Human
guuccaagacauuguca

SEQ ID NO: 2567846 - RNA, 19 nt, Human
guuccaagacauugucaau

SEQ ID NO: 2567847 - RNA, 17 nt, Human
guucauuuugagcugaa

SEQ ID NO: 2567848 - RNA, 20 nt, Human
guucauuucaaauacaucuu

SEQ ID NO: 2567849 - RNA, 19 nt, Human
guuccaaaugaauguuguc

SEQ ID NO: 2567850 - RNA, 15 nt, Human
guuccaaaugaaugu

SEQ ID NO: 2567851 - RNA, 17 nt, Human
guuccaaccacugaauc

SEQ ID NO: 2567852 - RNA, 13 nt, Human
guuccaagacauu

SEQ ID NO: 2567853 - RNA, 14 nt, Human
guuccaagacauug

SEQ ID NO: 2567854 - RNA, 22 nt, Human
guucauuauuggaauuaaccug

SEQ ID NO: 2567855 - RNA, 15 nt, Human
guucauguuugcuuc

SEQ ID NO: 2567856 - RNA, 15 nt, Human
guucauuauuggaau

SEQ ID NO: 2567857 - RNA, 16 nt, Human
guucauuaaagcauga

SEQ ID NO: 2567858 - RNA, 20 nt, Human
guucauuaaagcaugaaugg

SEQ ID NO: 2567859 - RNA, 16 nt, Human
guucauugcacuuuga

SEQ ID NO: 2567860 - RNA, 14 nt, Human
guucauuguaaugu

SEQ ID NO: 2567861 - RNA, 18 nt, Human
guucauuguaauguuacu

SEQ ID NO: 2567862 - RNA, 19 nt, Human
guucauuguaauguuacug

SEQ ID NO: 2567863 - RNA, 13 nt, Human
guucauuugugua

SEQ ID NO: 2567864 - RNA, 13 nt, Human
guucauuuccuca

SEQ ID NO: 2567865 - RNA, 20 nt, Human
guucauuguaauguuacuga

SEQ ID NO: 2567866 - RNA, 21 nt, Human
guucauuguaauguuacugau

SEQ ID NO: 2567867 - RNA, 22 nt, Human
guucauuguaauguuacugauc

SEQ ID NO: 2567868 - RNA, 23 nt, Human
guucauuguaauguuacugauca

SEQ ID NO: 2567869 - RNA, 13 nt, Human
guuccagccugcc

SEQ ID NO: 2567870 - RNA, 14 nt, Human
guuccagccugcca

SEQ ID NO: 2567871 - RNA, 14 nt, Human
guuccagcaccaca

SEQ ID NO: 2567872 - RNA, 23 nt, Human
guuccagcaauucuccugccuca

SEQ ID NO: 2567873 - RNA, 20 nt, Human
guuccagcaauucuccugcc

SEQ ID NO: 2567874 - RNA, 21 nt, Human
guuccagcaauucuccugccu

SEQ ID NO: 2567875 - RNA, 16 nt, Human
guuccacugagcucca

SEQ ID NO: 2567876 - RNA, 15 nt, Human
guuccacugagcucc

SEQ ID NO: 2567877 - RNA, 18 nt, Human
guuccacugagcuccaug

SEQ ID NO: 2567878 - RNA, 14 nt, Human
guuccacugagcuc

SEQ ID NO: 2567879 - RNA, 13 nt, Human
guuccacugagcu

SEQ ID NO: 2567880 - RNA, 20 nt, Human
guuccaccaucaagccacca

SEQ ID NO: 2567881 - RNA, 17 nt, Human
guuccaccaucaagcca

SEQ ID NO: 2567882 - RNA, 12 nt, Human
guuccacuaacc

SEQ ID NO: 2567883 - RNA, 16 nt, Human
guuccacguguuuuau

SEQ ID NO: 2567884 - RNA, 21 nt, Human
guuccacgucccccuggggcu

SEQ ID NO: 2567885 - RNA, 20 nt, Human
guuccacgucccccuggggc

SEQ ID NO: 2567886 - RNA, 14 nt, Human
guuccuaauccucu

SEQ ID NO: 2567887 - RNA, 21 nt, Human
guuccagggucccucugugua

SEQ ID NO: 2567888 - RNA, 20 nt, Human
guuccagggucccucugugu

SEQ ID NO: 2567889 - RNA, 15 nt, Human
guuccagccugccac

SEQ ID NO: 2567890 - RNA, 12 nt, Human
guuccagcucuu

SEQ ID NO: 2567891 - RNA, 19 nt, Human
guuccagggucccucugug

SEQ ID NO: 2567892 - RNA, 17 nt, Human
guuccagggucccucug

SEQ ID NO: 2567893 - RNA, 14 nt, Human
guuccagcucuuug

SEQ ID NO: 2567894 - RNA, 16 nt, Human
guuccagcucuuugaa

SEQ ID NO: 2567895 - RNA, 15 nt, Human
guuccuauugucauu

SEQ ID NO: 2567896 - RNA, 14 nt, Human
guuccuauugucau

SEQ ID NO: 2567897 - RNA, 22 nt, Human
guuccuauggcuggccacugca

SEQ ID NO: 2567898 - RNA, 22 nt, Human
guuccucauuagcauuuugcua

SEQ ID NO: 2567899 - RNA, 16 nt, Human
guuccuagccaccgcc

SEQ ID NO: 2567900 - RNA, 15 nt, Human
guuccuagaguagag

SEQ ID NO: 2567901 - RNA, 19 nt, Human
guuccuaagagugcugggc

SEQ ID NO: 2567902 - RNA, 23 nt, Human
guuccuggcaguuuaaaaaaauu

SEQ ID NO: 2567903 - RNA, 13 nt, Human
guuccuuagaccu

SEQ ID NO: 2567904 - RNA, 14 nt, Human
guuccuuacugcag

SEQ ID NO: 2567905 - RNA, 15 nt, Human
guuccuuacugcaga

SEQ ID NO: 2567906 - RNA, 14 nt, Human
guuccuggcaguuu

SEQ ID NO: 2567907 - RNA, 21 nt, Human
guuccuggcaauaguguguuc

SEQ ID NO: 2567908 - RNA, 13 nt, Human
guuccuggcaaua

SEQ ID NO: 2567909 - RNA, 12 nt, Human
guuccuggcaau

SEQ ID NO: 2567910 - RNA, 12 nt, Human
guuccugcaugc

SEQ ID NO: 2567911 - RNA, 16 nt, Human
guuccugaaccugaug

SEQ ID NO: 2567912 - RNA, 20 nt, Human
guuccugcggagugaagagg

SEQ ID NO: 2567913 - RNA, 19 nt, Human
guuccugcggagugaagag

SEQ ID NO: 2567914 - RNA, 21 nt, Human
guuccugaauucuauuugcug

SEQ ID NO: 2567915 - RNA, 14 nt, Human
guuccucuuugcau

SEQ ID NO: 2567916 - RNA, 15 nt, Human
guuccugcaaugaag

SEQ ID NO: 2567917 - RNA, 13 nt, Human
guuccucuuugca

SEQ ID NO: 2567918 - RNA, 15 nt, Human
guuccucugccugcc

SEQ ID NO: 2567919 - RNA, 16 nt, Human
guuccucugccugccc

SEQ ID NO: 2567920 - RNA, 14 nt, Human
guuccucugccugc

SEQ ID NO: 2567921 - RNA, 13 nt, Human
guuccucugccug

SEQ ID NO: 2567922 - RNA, 12 nt, Human
guuccucugccu

SEQ ID NO: 2567923 - RNA, 18 nt, Human
guuccuauugucauuaaa

SEQ ID NO: 2567924 - RNA, 23 nt, Human
guuccuccccuccuccuggacuc

SEQ ID NO: 2567925 - RNA, 13 nt, Human
guuccucgcccug

SEQ ID NO: 2567926 - RNA, 15 nt, Human
guuccucgcccuggg

SEQ ID NO: 2567927 - RNA, 16 nt, Human
guuccucgcccugggu

SEQ ID NO: 2567928 - RNA, 14 nt, Human
guuugaaaucuuuu

SEQ ID NO: 2567929 - RNA, 17 nt, Human
guuugaaacaaagaagg

SEQ ID NO: 2567930 - RNA, 16 nt, Human
guuugaauguuaaaua

SEQ ID NO: 2567931 - RNA, 15 nt, Human
guuugaauguuaaau

SEQ ID NO: 2567932 - RNA, 15 nt, Human
guuugaaacaaagaa

SEQ ID NO: 2567933 - RNA, 19 nt, Human
guuucuuuguaaugaaaac

SEQ ID NO: 2567934 - RNA, 17 nt, Human
guuucuuuaagaaagua

SEQ ID NO: 2567935 - RNA, 13 nt, Human
guuucccauaauu

SEQ ID NO: 2567936 - RNA, 16 nt, Human
guuucuuuagcaguuu

SEQ ID NO: 2567937 - RNA, 21 nt, Human
guuucuuuuguauguaaaugu

SEQ ID NO: 2567938 - RNA, 20 nt, Human
guuucuuuuguauguaaaug

SEQ ID NO: 2567939 - RNA, 17 nt, Human
guuucuuuuguauguaa

SEQ ID NO: 2567940 - RNA, 17 nt, Human
guuugaauguuaaauaa

SEQ ID NO: 2567941 - RNA, 16 nt, Human
guuugacuagaugaug

SEQ ID NO: 2567942 - RNA, 18 nt, Human
guuugacuagaugaugga

SEQ ID NO: 2567943 - RNA, 17 nt, Human
guuugagaucagccugg

SEQ ID NO: 2567944 - RNA, 23 nt, Human
guuugauuaaauucuugcaaagu

SEQ ID NO: 2567945 - RNA, 16 nt, Human
guuugaaacaaagaag

SEQ ID NO: 2567946 - RNA, 19 nt, Human
guuugacuagaugauggau

SEQ ID NO: 2567947 - RNA, 18 nt, Human
guuugagaucagccuggg

SEQ ID NO: 2567948 - RNA, 16 nt, Human
guuucuuagcuuuuua

SEQ ID NO: 2567949 - RNA, 13 nt, Human
guuucuuagcuuu

SEQ ID NO: 2567950 - RNA, 13 nt, Human
guuucuuccaaag

SEQ ID NO: 2567951 - RNA, 20 nt, Human
guuucuucaacaggagaauu

SEQ ID NO: 2567952 - RNA, 23 nt, Human
guuucuucauccggcagccugga

SEQ ID NO: 2567953 - RNA, 11 nt, Human
guuucuuccaa

SEQ ID NO: 2567954 - RNA, 18 nt, Human
guuucuuuguaaugaaaa

SEQ ID NO: 2567955 - RNA, 16 nt, Human
guuucuuuaguuuuug

SEQ ID NO: 2567956 - RNA, 14 nt, Human
guuuccucaggcug

SEQ ID NO: 2567957 - RNA, 16 nt, Human
guuuccucaggcugcu

SEQ ID NO: 2567958 - RNA, 21 nt, Human
guuucccaucccacugcuccc

SEQ ID NO: 2567959 - RNA, 19 nt, Human
guuucccaucccacugcuc

SEQ ID NO: 2567960 - RNA, 20 nt, Human
guuucccauaauuuucuuca

SEQ ID NO: 2567961 - RNA, 21 nt, Human
guuucccauaauuuucuucau

SEQ ID NO: 2567962 - RNA, 18 nt, Human
guuuccucuaguucuuug

SEQ ID NO: 2567963 - RNA, 18 nt, Human
guuuccucaggcugcugg

SEQ ID NO: 2567964 - RNA, 19 nt, Human
guuuccucaggcugcugga

SEQ ID NO: 2567965 - RNA, 22 nt, Human
guuuccucaggcugcuggagga

SEQ ID NO: 2567966 - RNA, 20 nt, Human
guuuccucauuccugaaaga

SEQ ID NO: 2567967 - RNA, 22 nt, Human
guuuccucuaguucuuuguuca

SEQ ID NO: 2567968 - RNA, 18 nt, Human
guuugagacacugguuua

SEQ ID NO: 2567969 - RNA, 15 nt, Human
guuugagaagcacug

SEQ ID NO: 2567970 - RNA, 20 nt, Human
guuugagaagaaaacaucua

SEQ ID NO: 2567971 - RNA, 21 nt, Human
guuugauucagacagcugccu

SEQ ID NO: 2567972 - RNA, 20 nt, Human
guuugauucagacagcugcc

SEQ ID NO: 2567973 - RNA, 16 nt, Human
guuugauucagacagc

SEQ ID NO: 2567974 - RNA, 17 nt, Human
guuuggggcgaggcaga

SEQ ID NO: 2567975 - RNA, 16 nt, Human
guuuggggcgaggcag

SEQ ID NO: 2567976 - RNA, 11 nt, Human
guuuggggcga

SEQ ID NO: 2567977 - RNA, 15 nt, Human
guuugguauuguauu

SEQ ID NO: 2567978 - RNA, 18 nt, Human
guuuggggcgaggcagag

SEQ ID NO: 2567979 - RNA, 16 nt, Human
guuuggguauauucau

SEQ ID NO: 2567980 - RNA, 22 nt, Human
guuugguggggguagagcugau

SEQ ID NO: 2567981 - RNA, 23 nt, Human
guuuggucugggacuuccuugcu

SEQ ID NO: 2567982 - RNA, 20 nt, Human
guuuguaaauuaacuuuuau

SEQ ID NO: 2567983 - RNA, 18 nt, Human
guuugguauuguauuuau

SEQ ID NO: 2567984 - RNA, 17 nt, Human
guuugguauuguauuua

SEQ ID NO: 2567985 - RNA, 15 nt, Human
guuuguauaacuucu

SEQ ID NO: 2567986 - RNA, 15 nt, Human
guuugguguguuccc

SEQ ID NO: 2567987 - RNA, 20 nt, Human
guuuguauguguguagacaa

SEQ ID NO: 2567988 - RNA, 16 nt, Human
guuuguauguauaauu

SEQ ID NO: 2567989 - RNA, 14 nt, Human
guuuguauguauaa

SEQ ID NO: 2567990 - RNA, 16 nt, Human
guuuguauaacuucuu

SEQ ID NO: 2567991 - RNA, 13 nt, Human
guuuguauauugu

SEQ ID NO: 2567992 - RNA, 21 nt, Human
guuugucauuagccugaguag

SEQ ID NO: 2567993 - RNA, 15 nt, Human
guuugucauuagccu

SEQ ID NO: 2567994 - RNA, 17 nt, Human
guuugucacaugaaaca

SEQ ID NO: 2567995 - RNA, 13 nt, Human
guuugucauuagc

SEQ ID NO: 2567996 - RNA, 18 nt, Human
guuugucgcucaugugug

SEQ ID NO: 2567997 - RNA, 15 nt, Human
guuuguggccucaga

SEQ ID NO: 2567998 - RNA, 13 nt, Human
guuuguaugugug

SEQ ID NO: 2567999 - RNA, 16 nt, Human
guuuguggccucagaa

SEQ ID NO: 2568000 - RNA, 18 nt, Human
guuuguuucugaaaggga

SEQ ID NO: 2568001 - RNA, 20 nt, Human
guuuguguguugucucuuga

SEQ ID NO: 2568002 - RNA, 15 nt, Human
guuuguguguugucu

SEQ ID NO: 2568003 - RNA, 15 nt, Human
guuugugugucuuaa

SEQ ID NO: 2568004 - RNA, 14 nt, Human
guuugugugucuua

SEQ ID NO: 2568005 - RNA, 13 nt, Human
guuugugugucuu

SEQ ID NO: 2568006 - RNA, 22 nt, Human
guuuguguauuuacgcuuugau

SEQ ID NO: 2568007 - RNA, 20 nt, Human
guuuguggcugggggcagga

SEQ ID NO: 2568008 - RNA, 22 nt, Human
guuuguggcugggggcaggagg

SEQ ID NO: 2568009 - RNA, 13 nt, Human
guuuguggcuggg

SEQ ID NO: 2568010 - RNA, 13 nt, Human
guuuucaagucaa

SEQ ID NO: 2568011 - RNA, 15 nt, Human
guuuucaagucaaau

SEQ ID NO: 2568012 - RNA, 17 nt, Human
guuuucaagucaaauua

SEQ ID NO: 2568013 - RNA, 18 nt, Human
guuuucaagucaaauuaa

SEQ ID NO: 2568014 - RNA, 21 nt, Human
guuuuauuuuuuauuguuuuc

SEQ ID NO: 2568015 - RNA, 20 nt, Human
guuuucaaaauuguuacaaa

SEQ ID NO: 2568016 - RNA, 17 nt, Human
guuuucaaaauaaaaau

SEQ ID NO: 2568017 - RNA, 12 nt, Human
guuuucacucuu

SEQ ID NO: 2568018 - RNA, 11 nt, Human
guuuucacucu

SEQ ID NO: 2568019 - RNA, 13 nt, Human
guuuucaaugaug

SEQ ID NO: 2568020 - RNA, 19 nt, Human
guuuucagaaccucuuccc

SEQ ID NO: 2568021 - RNA, 20 nt, Human
guuuucagaaccucuucccc

SEQ ID NO: 2568022 - RNA, 21 nt, Human
guuuucagaaccucuucccca

SEQ ID NO: 2568023 - RNA, 14 nt, Human
guuuucagacucag

SEQ ID NO: 2568024 - RNA, 16 nt, Human
guuuuaaaaugagaaa

SEQ ID NO: 2568025 - RNA, 15 nt, Human
guuuuaaaaugagaa

SEQ ID NO: 2568026 - RNA, 21 nt, Human
guuuuaaaaaaauaaaacauu

SEQ ID NO: 2568027 - RNA, 20 nt, Human
guuuuaaaaaaauaaaacau

SEQ ID NO: 2568028 - RNA, 22 nt, Human
guuuuaaaaaaauaaaacauuu

SEQ ID NO: 2568029 - RNA, 21 nt, Human
guuuuaaaauaaaaauucuga

SEQ ID NO: 2568030 - RNA, 24 nt, Human
guuuuaaaauaaaaauucugaaug

SEQ ID NO: 2568031 - RNA, 20 nt, Human
guuuguuucugaaagggacg

SEQ ID NO: 2568032 - RNA, 14 nt, Human
guuuguucaucugu

SEQ ID NO: 2568033 - RNA, 21 nt, Human
guuuguguguugucuugaaag

SEQ ID NO: 2568034 - RNA, 17 nt, Human
guuuguuacauagguau

SEQ ID NO: 2568035 - RNA, 19 nt, Human
guuuuaaaaaaauaaaaca

SEQ ID NO: 2568036 - RNA, 15 nt, Human
guuuuaaaaaaauaa

SEQ ID NO: 2568037 - RNA, 14 nt, Human
guuuguuuguuuca

SEQ ID NO: 2568038 - RNA, 21 nt, Human
guuuuguuccccuccuccacu

SEQ ID NO: 2568039 - RNA, 20 nt, Human
guuuuguuccccuccuccac

SEQ ID NO: 2568040 - RNA, 22 nt, Human
guuuuguuccccuccuccacuc

SEQ ID NO: 2568041 - RNA, 15 nt, Human
guuuuguucuuuaaa

SEQ ID NO: 2568042 - RNA, 17 nt, Human
guuuuguuccccuccuc

SEQ ID NO: 2568043 - RNA, 16 nt, Human
guuuuguuccccuccu

SEQ ID NO: 2568044 - RNA, 15 nt, Human
guuuuguuccccucc

SEQ ID NO: 2568045 - RNA, 14 nt, Human
guuuuguuccccuc

SEQ ID NO: 2568046 - RNA, 18 nt, Human
guuuuguaagaugcuggg

SEQ ID NO: 2568047 - RNA, 21 nt, Human
guuuugguaucuguucuuuaa

SEQ ID NO: 2568048 - RNA, 17 nt, Human
guuuuggugguuuuagu

SEQ ID NO: 2568049 - RNA, 16 nt, Human
guuuugguugcuuuaa

SEQ ID NO: 2568050 - RNA, 23 nt, Human
guuuuguaagaugcuggguuggu

SEQ ID NO: 2568051 - RNA, 17 nt, Human
guuuuguaagaugcugg

SEQ ID NO: 2568052 - RNA, 16 nt, Human
guuuuguaagaugcug

SEQ ID NO: 2568053 - RNA, 20 nt, Human
guuuuccaugaguccccugu

SEQ ID NO: 2568054 - RNA, 19 nt, Human
guuuuccaugaguccccug

SEQ ID NO: 2568055 - RNA, 20 nt, Human
guuuuccagguuuaagcugu

SEQ ID NO: 2568056 - RNA, 14 nt, Human
guuuuccaugaaaa

SEQ ID NO: 2568057 - RNA, 15 nt, Human
guuuuccaugaaaac

SEQ ID NO: 2568058 - RNA, 17 nt, Human
guuuuccaugaaaacgu

SEQ ID NO: 2568059 - RNA, 18 nt, Human
guuuuccaugaaaacguu

SEQ ID NO: 2568060 - RNA, 13 nt, Human
guuuuccaugaaa

SEQ ID NO: 2568061 - RNA, 17 nt, Human
guuuucagacucagacu

SEQ ID NO: 2568062 - RNA, 14 nt, Human
guuuuccucccuuc

SEQ ID NO: 2568063 - RNA, 13 nt, Human
guuuuccucccuu

SEQ ID NO: 2568064 - RNA, 15 nt, Human
guuuuccucccuucu

SEQ ID NO: 2568065 - RNA, 18 nt, Human
guuuuccucccuucugcu

SEQ ID NO: 2568066 - RNA, 22 nt, Human
guuuuccucccuucugcuacug

SEQ ID NO: 2568067 - RNA, 13 nt, Human
guuuuccugaaga

SEQ ID NO: 2568068 - RNA, 22 nt, Human
guuuucccgagcaaagucuaaa

SEQ ID NO: 2568069 - RNA, 17 nt, Human
guuuuccccucccuggg

SEQ ID NO: 2568070 - RNA, 17 nt, Human
guuuuccauuguuugaa

SEQ ID NO: 2568071 - RNA, 23 nt, Human
guuuucccgagcaaagucuaaag

SEQ ID NO: 2568072 - RNA, 21 nt, Human
guuuucccugaccucccucua

SEQ ID NO: 2568073 - RNA, 16 nt, Human
guuuuccuaaaugcag

SEQ ID NO: 2568074 - RNA, 17 nt, Human
guuuuccuaaaugcagu

SEQ ID NO: 2568075 - RNA, 22 nt, Human
guuuuccuauaauauaauaaau

SEQ ID NO: 2568076 - RNA, 20 nt, Human
guuuucccuugaggaaacaa

SEQ ID NO: 2568077 - RNA, 18 nt, Human
guuguuugagaaauuaag

SEQ ID NO: 2568078 - RNA, 22 nt, Human
guuguuugaugcauuaaaagaa

SEQ ID NO: 2568079 - RNA, 22 nt, Human
guuuacuagggaucccucaucu

SEQ ID NO: 2568080 - RNA, 16 nt, Human
guuuacuaugccugug

SEQ ID NO: 2568081 - RNA, 17 nt, Human
guuuacuaugccugugu

SEQ ID NO: 2568082 - RNA, 20 nt, Human
guuuacuaugccugugucuu

SEQ ID NO: 2568083 - RNA, 22 nt, Human
guuuaccugaauaaaugguagu

SEQ ID NO: 2568084 - RNA, 16 nt, Human
guuuaccugaauaaau

SEQ ID NO: 2568085 - RNA, 12 nt, Human
guuuaccuugua

SEQ ID NO: 2568086 - RNA, 16 nt, Human
guuuaccugugaaaua

SEQ ID NO: 2568087 - RNA, 14 nt, Human
guuuagauaauaca

SEQ ID NO: 2568088 - RNA, 15 nt, Human
guuuagauaauacac

SEQ ID NO: 2568089 - RNA, 16 nt, Human
guuuagaagaagugug

SEQ ID NO: 2568090 - RNA, 23 nt, Human
guuuaccuuuuaauuaaugaaau

SEQ ID NO: 2568091 - RNA, 13 nt, Human
guuuacuauuuua

SEQ ID NO: 2568092 - RNA, 20 nt, Human
guuguuuacuuaaagauuua

SEQ ID NO: 2568093 - RNA, 16 nt, Human
guuguuguuaaauauc

SEQ ID NO: 2568094 - RNA, 24 nt, Human
guuguuguuaaugaaaaugucaga

SEQ ID NO: 2568095 - RNA, 20 nt, Human
guuguuugauucagacagcu

SEQ ID NO: 2568096 - RNA, 15 nt, Human
guuguuucuuucuag

SEQ ID NO: 2568097 - RNA, 14 nt, Human
guuguuucuuucua

SEQ ID NO: 2568098 - RNA, 13 nt, Human
guuguuucuuucu

SEQ ID NO: 2568099 - RNA, 11 nt, Human
guuguuucuuu

SEQ ID NO: 2568100 - RNA, 14 nt, Human
guuguuacauuuuu

SEQ ID NO: 2568101 - RNA, 15 nt, Human
guuguuacauuuuua

SEQ ID NO: 2568102 - RNA, 21 nt, Human
guuguuacuaacuaaacucuc

SEQ ID NO: 2568103 - RNA, 20 nt, Human
guuguuacuaacuaaacucu

SEQ ID NO: 2568104 - RNA, 19 nt, Human
guuguuacuaacuaaacuc

SEQ ID NO: 2568105 - RNA, 16 nt, Human
guuguuauggaaacug

SEQ ID NO: 2568106 - RNA, 21 nt, Human
guuuagcuggaaaaguauguu

SEQ ID NO: 2568107 - RNA, 20 nt, Human
guuuagcuggaaaaguaugu

SEQ ID NO: 2568108 - RNA, 19 nt, Human
guuuaggaacuacugagga

SEQ ID NO: 2568109 - RNA, 20 nt, Human
guuuauauaagcuuguauuc

SEQ ID NO: 2568110 - RNA, 21 nt, Human
guuuauagagggccaagacuu

SEQ ID NO: 2568111 - RNA, 20 nt, Human
guuuauagagggccaagacu

SEQ ID NO: 2568112 - RNA, 20 nt, Human
guuuauagcaaacuuggaau

SEQ ID NO: 2568113 - RNA, 12 nt, Human
guuuauauaaau

SEQ ID NO: 2568114 - RNA, 15 nt, Human
guuuaguuaaaugag

SEQ ID NO: 2568115 - RNA, 18 nt, Human
guuuaguggcucaacauu

SEQ ID NO: 2568116 - RNA, 15 nt, Human
guuuauaccuuugcc

SEQ ID NO: 2568117 - RNA, 20 nt, Human
guuuaucauucaaguguaaa

SEQ ID NO: 2568118 - RNA, 17 nt, Human
guuuaucauucaagugu

SEQ ID NO: 2568119 - RNA, 16 nt, Human
guuuaucauucaagug

SEQ ID NO: 2568120 - RNA, 15 nt, Human
guuuaucauucaagu

SEQ ID NO: 2568121 - RNA, 14 nt, Human
guuuaucauucaag

SEQ ID NO: 2568122 - RNA, 19 nt, Human
guuuauaucucucaugcau

SEQ ID NO: 2568123 - RNA, 13 nt, Human
guuucauauuucu

SEQ ID NO: 2568124 - RNA, 17 nt, Human
guuucauacucuagauu

SEQ ID NO: 2568125 - RNA, 22 nt, Human
guuucagugucaaauaaacacu

SEQ ID NO: 2568126 - RNA, 18 nt, Human
guuucauacucuagauuu

SEQ ID NO: 2568127 - RNA, 20 nt, Human
guuucaggugacaugugaaa

SEQ ID NO: 2568128 - RNA, 16 nt, Human
guuucaggugacaugu

SEQ ID NO: 2568129 - RNA, 15 nt, Human
guuucaggugacaug

SEQ ID NO: 2568130 - RNA, 14 nt, Human
guuucaggugacau

SEQ ID NO: 2568131 - RNA, 23 nt, Human
guuucagugucaaauaaacacug

SEQ ID NO: 2568132 - RNA, 21 nt, Human
guuucagugucaaauaaacac

SEQ ID NO: 2568133 - RNA, 18 nt, Human
guuucauguaauccucaa

SEQ ID NO: 2568134 - RNA, 16 nt, Human
guuucauccuuuucau

SEQ ID NO: 2568135 - RNA, 14 nt, Human
guuucauauuucuu

SEQ ID NO: 2568136 - RNA, 18 nt, Human
guuucauguuuugugacu

SEQ ID NO: 2568137 - RNA, 15 nt, Human
guuucauucuccugc

SEQ ID NO: 2568138 - RNA, 19 nt, Human
guuucauguuuugugacua

SEQ ID NO: 2568139 - RNA, 16 nt, Human
guuucauucuccugcc

SEQ ID NO: 2568140 - RNA, 15 nt, Human
guuucccauaauuuu

SEQ ID NO: 2568141 - RNA, 22 nt, Human
guuguggauuuaacagaaaugu

SEQ ID NO: 2568142 - RNA, 15 nt, Human
guugugggugggaga

SEQ ID NO: 2568143 - RNA, 19 nt, Human
guuguggaaagccucugcu

SEQ ID NO: 2568144 - RNA, 21 nt, Human
guuguggagagugcaacagua

SEQ ID NO: 2568145 - RNA, 14 nt, Human
guuguguauagaug

SEQ ID NO: 2568146 - RNA, 17 nt, Human
guuguggugcugacaaa

SEQ ID NO: 2568147 - RNA, 16 nt, Human
guugugggugggagag

SEQ ID NO: 2568148 - RNA, 16 nt, Human
guuguguacguggaga

SEQ ID NO: 2568149 - RNA, 14 nt, Human
guugugguuaaucu

SEQ ID NO: 2568150 - RNA, 12 nt, Human
guuguguguggg

SEQ ID NO: 2568151 - RNA, 13 nt, Human
guuguguguggga

SEQ ID NO: 2568152 - RNA, 14 nt, Human
guugugugugggag

SEQ ID NO: 2568153 - RNA, 16 nt, Human
guugugugugggagug

SEQ ID NO: 2568154 - RNA, 12 nt, Human
guuguguuguca

SEQ ID NO: 2568155 - RNA, 14 nt, Human
guuguguugucacc

SEQ ID NO: 2568156 - RNA, 22 nt, Human
guugugugugggaguguguaau

SEQ ID NO: 2568157 - RNA, 16 nt, Human
guuguuaaugaaaaug

SEQ ID NO: 2568158 - RNA, 17 nt, Human
guuguuaaugaaaaugu

SEQ ID NO: 2568159 - RNA, 18 nt, Human
guuguuaaugaaaauguc

SEQ ID NO: 2568160 - RNA, 19 nt, Human
guuguuaaugaaaauguca

SEQ ID NO: 2568161 - RNA, 15 nt, Human
guuguuaauaaaagu

SEQ ID NO: 2568162 - RNA, 19 nt, Human
guugucucccuggcccuca

SEQ ID NO: 2568163 - RNA, 17 nt, Human
guugucucccuggcccu

SEQ ID NO: 2568164 - RNA, 16 nt, Human
guugucucccuggccc

SEQ ID NO: 2568165 - RNA, 15 nt, Human
guugucucccuggcc

SEQ ID NO: 2568166 - RNA, 18 nt, Human
guugucucuagagcaggg

SEQ ID NO: 2568167 - RNA, 14 nt, Human
guugucucccuggc

SEQ ID NO: 2568168 - RNA, 13 nt, Human
guugucucccugg

SEQ ID NO: 2568169 - RNA, 19 nt, Human
guugucugaagucacugca

SEQ ID NO: 2568170 - RNA, 22 nt, Human
guugucugaagucacugcacag

SEQ ID NO: 2568171 - RNA, 14 nt, Human
guugugaauguugu

SEQ ID NO: 2568172 - RNA, 17 nt, Human
guugugaccugaaguuc

SEQ ID NO: 2568173 - RNA, 13 nt, Human
guugugaccugaa

SEQ ID NO: 2568174 - RNA, 14 nt, Human
guugugaggccugg

SEQ ID NO: 2568175 - RNA, 13 nt, Human
guugugaggccug

SEQ ID NO: 2568176 - RNA, 17 nt, Human
guugugaccuuaguguu

SEQ ID NO: 2568177 - RNA, 18 nt, Human
guugugaccugaaguuca

SEQ ID NO: 2568178 - RNA, 21 nt, Human
guugugauagcuaacauuuua

SEQ ID NO: 2568179 - RNA, 20 nt, Human
guugugaguuuaccuuguau

SEQ ID NO: 2568180 - RNA, 17 nt, Human
guugugcaaauuaacag

SEQ ID NO: 2568181 - RNA, 16 nt, Human
guugugccccuuucca

SEQ ID NO: 2568182 - RNA, 22 nt, Human
guugugaggccuggccaggcac

SEQ ID NO: 2568183 - RNA, 12 nt, Human
guuggcuggggg

SEQ ID NO: 2568184 - RNA, 13 nt, Human
guuggcuggccuu

SEQ ID NO: 2568185 - RNA, 12 nt, Human
guuggcuggccu

SEQ ID NO: 2568186 - RNA, 14 nt, Human
guuggcuggaugaa

SEQ ID NO: 2568187 - RNA, 17 nt, Human
guuggcugggaacucac

SEQ ID NO: 2568188 - RNA, 13 nt, Human
guuggcugggccc

SEQ ID NO: 2568189 - RNA, 14 nt, Human
guuggcugggccca

SEQ ID NO: 2568190 - RNA, 16 nt, Human
guuggcugggcccaga

SEQ ID NO: 2568191 - RNA, 21 nt, Human
guuggcgcacccuccccuccc

SEQ ID NO: 2568192 - RNA, 19 nt, Human
guuggcgcacccuccccuc

SEQ ID NO: 2568193 - RNA, 18 nt, Human
guuggcgagaggaggggc

SEQ ID NO: 2568194 - RNA, 13 nt, Human
guuggccuccggc

SEQ ID NO: 2568195 - RNA, 20 nt, Human
guuggcugacuuccacaccu

SEQ ID NO: 2568196 - RNA, 14 nt, Human
guuggccccugccc

SEQ ID NO: 2568197 - RNA, 13 nt, Human
guuggccccugcc

SEQ ID NO: 2568198 - RNA, 17 nt, Human
guuggcccaagcucuug

SEQ ID NO: 2568199 - RNA, 13 nt, Human
guuggccucugca

SEQ ID NO: 2568200 - RNA, 13 nt, Human
guuggccugcacu

SEQ ID NO: 2568201 - RNA, 20 nt, Human
guuggccccugcccggcugc

SEQ ID NO: 2568202 - RNA, 12 nt, Human
guugucagcuga

SEQ ID NO: 2568203 - RNA, 17 nt, Human
guugucccucugcuacg

SEQ ID NO: 2568204 - RNA, 13 nt, Human
guugucccucugc

SEQ ID NO: 2568205 - RNA, 22 nt, Human
guuguccaauuguugacaguuc

SEQ ID NO: 2568206 - RNA, 20 nt, Human
guugucauugcuguuguccc

SEQ ID NO: 2568207 - RNA, 19 nt, Human
guuguccuccccuugggcg

SEQ ID NO: 2568208 - RNA, 16 nt, Human
guuguccuccccuugg

SEQ ID NO: 2568209 - RNA, 15 nt, Human
guuguccuaugggag

SEQ ID NO: 2568210 - RNA, 19 nt, Human
guuggcugggggccucagu

SEQ ID NO: 2568211 - RNA, 17 nt, Human
guugucaagucucugcu

SEQ ID NO: 2568212 - RNA, 22 nt, Human
guugucaagucucugcuggccc

SEQ ID NO: 2568213 - RNA, 15 nt, Human
guugucaauauuaaa

SEQ ID NO: 2568214 - RNA, 17 nt, Human
guuggcugggcccagaa

SEQ ID NO: 2568215 - RNA, 21 nt, Human
guugucaauauuaaauacaga

SEQ ID NO: 2568216 - RNA, 19 nt, Human
guugucaauauuaaauaca

SEQ ID NO: 2568217 - RNA, 17 nt, Human
guugucaauauuaaaua

SEQ ID NO: 2568218 - RNA, 16 nt, Human
guugucaauauuaaau

SEQ ID NO: 2568219 - RNA, 23 nt, Human
guugucaauauuaaauacagaca

SEQ ID NO: 2568220 - RNA, 18 nt, Human
uaaaaaugguuuaaaugg

SEQ ID NO: 2568221 - RNA, 19 nt, Human
uaaaaaugguuuaaauggu

SEQ ID NO: 2568222 - RNA, 13 nt, Human
uaaaaagauuugu

SEQ ID NO: 2568223 - RNA, 18 nt, Human
uaaaaauguaaauauucu

SEQ ID NO: 2568224 - RNA, 13 nt, Human
uaaaaauguaaau

SEQ ID NO: 2568225 - RNA, 14 nt, Human
uaaaaagaucacuu

SEQ ID NO: 2568226 - RNA, 18 nt, Human
uaaaaagauugaaguauu

SEQ ID NO: 2568227 - RNA, 20 nt, Human
uaaaaagauugaaguauuuu

SEQ ID NO: 2568228 - RNA, 21 nt, Human
uaaaaagaaggaaaaugaucu

SEQ ID NO: 2568229 - RNA, 20 nt, Human
uaaaaagaaggaaaaugauc

SEQ ID NO: 2568230 - RNA, 13 nt, Human
uaaaaagaaggaa

SEQ ID NO: 2568231 - RNA, 20 nt, Human
uaaaaagagagaaaacuuau

SEQ ID NO: 2568232 - RNA, 19 nt, Human
uaaaaagagagaaaacuua

SEQ ID NO: 2568233 - RNA, 21 nt, Human
uaaaaagacauucuuccaaaa

SEQ ID NO: 2568234 - RNA, 19 nt, Human
uaaaaagaaacaagaugcu

SEQ ID NO: 2568235 - RNA, 18 nt, Human
uaaaaagaaacaagaugc

SEQ ID NO: 2568236 - RNA, 16 nt, Human
uaaaaagaaacaagau

SEQ ID NO: 2568237 - RNA, 16 nt, Human
uaaaaacagcauugcu

SEQ ID NO: 2568238 - RNA, 22 nt, Human
uaaaaacaaaggagauaaaucu

SEQ ID NO: 2568239 - RNA, 20 nt, Human
guuuuuacccauauccccuc

SEQ ID NO: 2568240 - RNA, 18 nt, Human
guuuuuacccauaucccc

SEQ ID NO: 2568241 - RNA, 16 nt, Human
guuuuuacccauaucc

SEQ ID NO: 2568242 - RNA, 14 nt, Human
guuuuuacccauau

SEQ ID NO: 2568243 - RNA, 13 nt, Human
guuuuuacccaua

SEQ ID NO: 2568244 - RNA, 17 nt, Human
uaaaaacaaagaaauua

SEQ ID NO: 2568245 - RNA, 21 nt, Human
uaaaaacaaagaaauuaugug

SEQ ID NO: 2568246 - RNA, 19 nt, Human
guuuuguuuccuuucacug

SEQ ID NO: 2568247 - RNA, 18 nt, Human
guuuuguuugcuaucuua

SEQ ID NO: 2568248 - RNA, 15 nt, Human
guuuuguuugcuauc

SEQ ID NO: 2568249 - RNA, 19 nt, Human
guuuuuaagcuguuuccau

SEQ ID NO: 2568250 - RNA, 15 nt, Human
guuuuuaagcuguuu

SEQ ID NO: 2568251 - RNA, 14 nt, Human
guuuuuaagcuguu

SEQ ID NO: 2568252 - RNA, 13 nt, Human
guuuuuaagcugu

SEQ ID NO: 2568253 - RNA, 18 nt, Human
guuuuuaauauaaagccu

SEQ ID NO: 2568254 - RNA, 21 nt, Human
guuuuuaaggguuuguggaaa

SEQ ID NO: 2568255 - RNA, 17 nt, Human
guuuuuaauaaagacag

SEQ ID NO: 2568256 - RNA, 22 nt, Human
uaaaaauguuaaaauguauucu

SEQ ID NO: 2568257 - RNA, 17 nt, Human
uaaaaauucugaaugua

SEQ ID NO: 2568258 - RNA, 14 nt, Human
uaaaaauucugaau

SEQ ID NO: 2568259 - RNA, 20 nt, Human
uaaaaauguaaauauucuau

SEQ ID NO: 2568260 - RNA, 19 nt, Human
uaaaaauguaaauauucua

SEQ ID NO: 2568261 - RNA, 21 nt, Human
uaaaaauguaaauauucuaua

SEQ ID NO: 2568262 - RNA, 22 nt, Human
uaaaaauuguuaauuuuuccua

SEQ ID NO: 2568263 - RNA, 17 nt, Human
uaaaaauugugaucaga

SEQ ID NO: 2568264 - RNA, 15 nt, Human
uaaaaauucugaaug

SEQ ID NO: 2568265 - RNA, 23 nt, Human
uaaaaauuguuucaaaauaaaaa

SEQ ID NO: 2568266 - RNA, 17 nt, Human
uaaaacaaaauuuguuu

SEQ ID NO: 2568267 - RNA, 16 nt, Human
uaaaacaaaagcucau

SEQ ID NO: 2568268 - RNA, 22 nt, Human
uaaaacaagcacuaaacaaaga

SEQ ID NO: 2568269 - RNA, 15 nt, Human
uaaaacaacacucac

SEQ ID NO: 2568270 - RNA, 23 nt, Human
uaaaacacaacaucuuuuucuac

SEQ ID NO: 2568271 - RNA, 22 nt, Human
uaaaacacaacaucuuuuucua

SEQ ID NO: 2568272 - RNA, 17 nt, Human
uaaaacacaacaucuuu

SEQ ID NO: 2568273 - RNA, 23 nt, Human
uaaaacaauaaaauuuuuuuuca

SEQ ID NO: 2568274 - RNA, 14 nt, Human
uaaaacaauauugu

SEQ ID NO: 2568275 - RNA, 18 nt, Human
uaaaacaauauuguuucu

SEQ ID NO: 2568276 - RNA, 13 nt, Human
uaaaacagacacu

SEQ ID NO: 2568277 - RNA, 15 nt, Human
uaaaacagacacugg

SEQ ID NO: 2568278 - RNA, 17 nt, Human
uaaaacagacacuggca

SEQ ID NO: 2568279 - RNA, 18 nt, Human
uaaaacagacacuggcau

SEQ ID NO: 2568280 - RNA, 19 nt, Human
uaaaacagacacuggcaug

SEQ ID NO: 2568281 - RNA, 19 nt, Human
uaaaacacuuccauaaucu

SEQ ID NO: 2568282 - RNA, 21 nt, Human
uaaaacacaccuaagagaaaa

SEQ ID NO: 2568283 - RNA, 14 nt, Human
uaaaacagaagccu

SEQ ID NO: 2568284 - RNA, 18 nt, Human
uaaaaucauuucugcauc

SEQ ID NO: 2568285 - RNA, 22 nt, Human
uaaaaucauuucugcaucagcu

SEQ ID NO: 2568286 - RNA, 17 nt, Human
uaaaauccauacauuug

SEQ ID NO: 2568287 - RNA, 15 nt, Human
uaaaauccauacauu

SEQ ID NO: 2568288 - RNA, 10 nt, Human
uaaaaucauu

SEQ ID NO: 2568289 - RNA, 13 nt, Human
uaaaaucauuucu

SEQ ID NO: 2568290 - RNA, 22 nt, Human
uaaaagguauuaaauugauguu

SEQ ID NO: 2568291 - RNA, 19 nt, Human
uaaaaggugaccaaugaug

SEQ ID NO: 2568292 - RNA, 12 nt, Human
uaaaaggugacc

SEQ ID NO: 2568293 - RNA, 20 nt, Human
uaaaagggcucuuuagccag

SEQ ID NO: 2568294 - RNA, 21 nt, Human
uaaaagggauuacccaagcaa

SEQ ID NO: 2568295 - RNA, 20 nt, Human
uaaaagggauuacccaagca

SEQ ID NO: 2568296 - RNA, 19 nt, Human
uaaaagggauuacccaagc

SEQ ID NO: 2568297 - RNA, 18 nt, Human
uaaaaggccaaaccucug

SEQ ID NO: 2568298 - RNA, 21 nt, Human
uaaaagguaugcaaucaaauc

SEQ ID NO: 2568299 - RNA, 18 nt, Human
uaaaaggcaaauguguac

SEQ ID NO: 2568300 - RNA, 19 nt, Human
uaaaaggcaaauguguaca

SEQ ID NO: 2568301 - RNA, 15 nt, Human
uaaaaggccaaaccu

SEQ ID NO: 2568302 - RNA, 14 nt, Human
uaaaaggaagccaa

SEQ ID NO: 2568303 - RNA, 12 nt, Human
uaaaaggagcca

SEQ ID NO: 2568304 - RNA, 11 nt, Human
uaaaagcagca

SEQ ID NO: 2568305 - RNA, 20 nt, Human
uaaaagcagcaucugcuaau

SEQ ID NO: 2568306 - RNA, 19 nt, Human
uaaaaggaagccaaagagu

SEQ ID NO: 2568307 - RNA, 21 nt, Human
uaaaaggaaaucucaccccau

SEQ ID NO: 2568308 - RNA, 17 nt, Human
uaaaagcaauuccaacc

SEQ ID NO: 2568309 - RNA, 11 nt, Human
uaaaagcacac

SEQ ID NO: 2568310 - RNA, 19 nt, Human
uaaaagagguuuuucuuaa

SEQ ID NO: 2568311 - RNA, 21 nt, Human
uaaaagagguuuuucuuaaau

SEQ ID NO: 2568312 - RNA, 17 nt, Human
uaaaagauaaauauuau

SEQ ID NO: 2568313 - RNA, 14 nt, Human
uaaaagauacaguu

SEQ ID NO: 2568314 - RNA, 17 nt, Human
uaaaagauacaguuacu

SEQ ID NO: 2568315 - RNA, 20 nt, Human
uaaaagauacaguuacucag

SEQ ID NO: 2568316 - RNA, 20 nt, Human
uaaaagauauaagugcugua

SEQ ID NO: 2568317 - RNA, 19 nt, Human
uaaaagauauaagugcugu

SEQ ID NO: 2568318 - RNA, 18 nt, Human
uaaaagauauaagugcug

SEQ ID NO: 2568319 - RNA, 20 nt, Human
uaaaagauucauuuuuaauc

SEQ ID NO: 2568320 - RNA, 19 nt, Human
uaaaagauucauuuuuaau

SEQ ID NO: 2568321 - RNA, 14 nt, Human
uaaaagauucauuu

SEQ ID NO: 2568322 - RNA, 12 nt, Human
uaaaagauucau

SEQ ID NO: 2568323 - RNA, 21 nt, Human
uaaaagauacaguuacucaga

SEQ ID NO: 2568324 - RNA, 16 nt, Human
uaaaagauauaagugc

SEQ ID NO: 2568325 - RNA, 13 nt, Human
uaaaagauauaag

SEQ ID NO: 2568326 - RNA, 12 nt, Human
uaaaagauauaa

SEQ ID NO: 2568327 - RNA, 23 nt, Human
uaaaagauaacaagaucuuucag

SEQ ID NO: 2568328 - RNA, 17 nt, Human
uaaaagagauuucaaga

SEQ ID NO: 2568329 - RNA, 16 nt, Human
uaaaagagauuucaag

SEQ ID NO: 2568330 - RNA, 13 nt, Human
uaaaaccaaagag

SEQ ID NO: 2568331 - RNA, 20 nt, Human
uaaaagagauuucaagagau

SEQ ID NO: 2568332 - RNA, 18 nt, Human
uaaaagagauuucaagag

SEQ ID NO: 2568333 - RNA, 18 nt, Human
uaaaagagguuuuucuua

SEQ ID NO: 2568334 - RNA, 13 nt, Human
uaaaaccacagca

SEQ ID NO: 2568335 - RNA, 11 nt, Human
uaaaaccaaag

SEQ ID NO: 2568336 - RNA, 22 nt, Human
uaaaacauuuuaaauggacaga

SEQ ID NO: 2568337 - RNA, 18 nt, Human
uaaaacauuuucacacaa

SEQ ID NO: 2568338 - RNA, 14 nt, Human
uaaaacauuuuaaa

SEQ ID NO: 2568339 - RNA, 21 nt, Human
uaaaacauuuuaaauggacag

SEQ ID NO: 2568340 - RNA, 18 nt, Human
uaaaacauuuuaaaugga

SEQ ID NO: 2568341 - RNA, 17 nt, Human
uaaaacauuuuaaaugg

SEQ ID NO: 2568342 - RNA, 16 nt, Human
uaaaacauuuuaaaug

SEQ ID NO: 2568343 - RNA, 15 nt, Human
uaaaacauuuucaca

SEQ ID NO: 2568344 - RNA, 17 nt, Human
uaaaacauuuucacaca

SEQ ID NO: 2568345 - RNA, 17 nt, Human
uaaaacauuaagaaaau

SEQ ID NO: 2568346 - RNA, 16 nt, Human
uaaaacauuaagaaaa

SEQ ID NO: 2568347 - RNA, 14 nt, Human
uaaaacauuaagaa

SEQ ID NO: 2568348 - RNA, 12 nt, Human
uaaaacauuaau

SEQ ID NO: 2568349 - RNA, 13 nt, Human
uaaaacauuaaga

SEQ ID NO: 2568350 - RNA, 14 nt, Human
uaaaacauguaaua

SEQ ID NO: 2568351 - RNA, 12 nt, Human
uaaaacauguaa

SEQ ID NO: 2568352 - RNA, 16 nt, Human
uaaagcagcguuucua

SEQ ID NO: 2568353 - RNA, 17 nt, Human
uaaagcagcguuucuau

SEQ ID NO: 2568354 - RNA, 19 nt, Human
uaaagcagcguuucuauga

SEQ ID NO: 2568355 - RNA, 18 nt, Human
uaaagcaggcagaacuca

SEQ ID NO: 2568356 - RNA, 12 nt, Human
uaaagccuccuc

SEQ ID NO: 2568357 - RNA, 13 nt, Human
uaaagcauuuaua

SEQ ID NO: 2568358 - RNA, 22 nt, Human
uaaagcacagucugaugacaca

SEQ ID NO: 2568359 - RNA, 20 nt, Human
uaaagcagagggacuuugua

SEQ ID NO: 2568360 - RNA, 23 nt, Human
uaaagcaauuuuccuugaagccg

SEQ ID NO: 2568361 - RNA, 22 nt, Human
uaaagcaauuuuccuugaagcc

SEQ ID NO: 2568362 - RNA, 21 nt, Human
uaaagcaauuuuccuugaagc

SEQ ID NO: 2568363 - RNA, 20 nt, Human
uaaagcaauuuuccuugaag

SEQ ID NO: 2568364 - RNA, 19 nt, Human
uaaagcaauuuuccuugaa

SEQ ID NO: 2568365 - RNA, 17 nt, Human
uaaagcaauuuuccuug

SEQ ID NO: 2568366 - RNA, 16 nt, Human
uaaagcaauuuuccuu

SEQ ID NO: 2568367 - RNA, 15 nt, Human
uaaagcaauuuuccu

SEQ ID NO: 2568368 - RNA, 14 nt, Human
uaaagcaauuuucc

SEQ ID NO: 2568369 - RNA, 13 nt, Human
uaaagcaauuuuc

SEQ ID NO: 2568370 - RNA, 12 nt, Human
uaaagcaauuuu

SEQ ID NO: 2568371 - RNA, 11 nt, Human
uaaagcaauuu

SEQ ID NO: 2568372 - RNA, 15 nt, Human
uaaagcaauaugcau

SEQ ID NO: 2568373 - RNA, 17 nt, Human
uaaagcaauaugcauuu

SEQ ID NO: 2568374 - RNA, 22 nt, Human
uaaagcaacuguuaugaaauaa

SEQ ID NO: 2568375 - RNA, 20 nt, Human
uaaagcaacuguuaugaaau

SEQ ID NO: 2568376 - RNA, 23 nt, Human
uaaagcaacugucuauuucugcu

SEQ ID NO: 2568377 - RNA, 23 nt, Human
uaaagcaauaauggucccaucca

SEQ ID NO: 2568378 - RNA, 13 nt, Human
uaaagaaagagag

SEQ ID NO: 2568379 - RNA, 14 nt, Human
uaaagaaagagaga

SEQ ID NO: 2568380 - RNA, 22 nt, Human
uaaagcaacugucuauuucugc

SEQ ID NO: 2568381 - RNA, 12 nt, Human
uaaagaaagaga

SEQ ID NO: 2568382 - RNA, 19 nt, Human
uaaagaaaauaucugaaau

SEQ ID NO: 2568383 - RNA, 12 nt, Human
uaaagaaaacug

SEQ ID NO: 2568384 - RNA, 18 nt, Human
uaaagaaaaucucuguga

SEQ ID NO: 2568385 - RNA, 21 nt, Human
uaaaggcccuaucuguuuaca

SEQ ID NO: 2568386 - RNA, 15 nt, Human
uaaaggcuaccuuug

SEQ ID NO: 2568387 - RNA, 13 nt, Human
uaaaggaaaugau

SEQ ID NO: 2568388 - RNA, 16 nt, Human
uaaaggaaaugauuga

SEQ ID NO: 2568389 - RNA, 20 nt, Human
uaaagccugaguuugcuuuc

SEQ ID NO: 2568390 - RNA, 14 nt, Human
uaaagcugaaaacu

SEQ ID NO: 2568391 - RNA, 16 nt, Human
uaaagcugccuguagu

SEQ ID NO: 2568392 - RNA, 17 nt, Human
uaaagcugccuguaguu

SEQ ID NO: 2568393 - RNA, 19 nt, Human
uaaagcuugcaacaaaauu

SEQ ID NO: 2568394 - RNA, 23 nt, Human
uaaagcugccuguaguuaggaaa

SEQ ID NO: 2568395 - RNA, 18 nt, Human
uaaagcugccuguaguua

SEQ ID NO: 2568396 - RNA, 21 nt, Human
uaaagcugccuguaguuagga

SEQ ID NO: 2568397 - RNA, 14 nt, Human
uaaaguguuugaaa

SEQ ID NO: 2568398 - RNA, 17 nt, Human
uaaaggcuaccuuugua

SEQ ID NO: 2568399 - RNA, 22 nt, Human
uaaaguguccauugacauguac

SEQ ID NO: 2568400 - RNA, 21 nt, Human
uaaaguguccauugacaugua

SEQ ID NO: 2568401 - RNA, 20 nt, Human
uaaaguguccauugacaugu

SEQ ID NO: 2568402 - RNA, 18 nt, Human
uaaaguguccauugacau

SEQ ID NO: 2568403 - RNA, 20 nt, Human
uaaaggccucuuccuugcug

SEQ ID NO: 2568404 - RNA, 16 nt, Human
uaaaguuacuuuguca

SEQ ID NO: 2568405 - RNA, 17 nt, Human
uaaaguguuucuguuau

SEQ ID NO: 2568406 - RNA, 18 nt, Human
uaaaguguguuguugcuu

SEQ ID NO: 2568407 - RNA, 17 nt, Human
uaaaguguguuguugcu

SEQ ID NO: 2568408 - RNA, 20 nt, Human
uaaaguguggucccaacagg

SEQ ID NO: 2568409 - RNA, 18 nt, Human
uaaaguguggucccaaca

SEQ ID NO: 2568410 - RNA, 23 nt, Human
uaaaguguccauugacauguaca

SEQ ID NO: 2568411 - RNA, 17 nt, Human
uaaaguguguuucuaug

SEQ ID NO: 2568412 - RNA, 20 nt, Human
uaaaguuagucuacucuuaa

SEQ ID NO: 2568413 - RNA, 16 nt, Human
uaaaguuagucuacuc

SEQ ID NO: 2568414 - RNA, 18 nt, Human
uaaaguguuucuguuauu

SEQ ID NO: 2568415 - RNA, 15 nt, Human
uaaaguuagucuacu

SEQ ID NO: 2568416 - RNA, 23 nt, Human
uaaacacccaugaaucaaagaca

SEQ ID NO: 2568417 - RNA, 22 nt, Human
uaaacacccaugaaucaaagac

SEQ ID NO: 2568418 - RNA, 18 nt, Human
uaaacacgccugcaaacg

SEQ ID NO: 2568419 - RNA, 17 nt, Human
uaaacacucuugaaaaa

SEQ ID NO: 2568420 - RNA, 15 nt, Human
uaaacacucuugaaa

SEQ ID NO: 2568421 - RNA, 18 nt, Human
uaaacacucuugaaaaau

SEQ ID NO: 2568422 - RNA, 16 nt, Human
uaaacaucacacacac

SEQ ID NO: 2568423 - RNA, 18 nt, Human
uaaacacccuucacauac

SEQ ID NO: 2568424 - RNA, 15 nt, Human
uaaacaucacacaca

SEQ ID NO: 2568425 - RNA, 20 nt, Human
uaaacauccaauauuuucuu

SEQ ID NO: 2568426 - RNA, 17 nt, Human
uaaacauccaauauuuu

SEQ ID NO: 2568427 - RNA, 17 nt, Human
uaaacauccuucaagaa

SEQ ID NO: 2568428 - RNA, 23 nt, Human
uaaaaucagccaauuauguuaaa

SEQ ID NO: 2568429 - RNA, 15 nt, Human
uaaaaucauguacau

SEQ ID NO: 2568430 - RNA, 18 nt, Human
uaaaaucauguacauuuc

SEQ ID NO: 2568431 - RNA, 19 nt, Human
uaaaaucauguacauuucu

SEQ ID NO: 2568432 - RNA, 13 nt, Human
uaaaaucugucac

SEQ ID NO: 2568433 - RNA, 14 nt, Human
uaaaaucugucacg

SEQ ID NO: 2568434 - RNA, 13 nt, Human
uaaaaucuuaaac

SEQ ID NO: 2568435 - RNA, 19 nt, Human
uaaaaucuuggcacagaaa

SEQ ID NO: 2568436 - RNA, 16 nt, Human
uaaaaucuugaaaaug

SEQ ID NO: 2568437 - RNA, 21 nt, Human
uaaacaagaccacguuucuaa

SEQ ID NO: 2568438 - RNA, 22 nt, Human
uaaacaagaccacguuucuaaa

SEQ ID NO: 2568439 - RNA, 20 nt, Human
uaaacaagaccacguuucua

SEQ ID NO: 2568440 - RNA, 19 nt, Human
uaaacaagaccacguuucu

SEQ ID NO: 2568441 - RNA, 20 nt, Human
uaaaaucuuggcacagaaac

SEQ ID NO: 2568442 - RNA, 17 nt, Human
uaaagaaaaagucaucc

SEQ ID NO: 2568443 - RNA, 18 nt, Human
uaaacuuuuuuuugagaa

SEQ ID NO: 2568444 - RNA, 17 nt, Human
uaaacuuuuuuuugaga

SEQ ID NO: 2568445 - RNA, 21 nt, Human
uaaacuucucugaagggaggu

SEQ ID NO: 2568446 - RNA, 20 nt, Human
uaaacuucucugaagggagg

SEQ ID NO: 2568447 - RNA, 17 nt, Human
uaaacuucucugaaggg

SEQ ID NO: 2568448 - RNA, 14 nt, Human
uaaacuucucugaa

SEQ ID NO: 2568449 - RNA, 18 nt, Human
uaaacuuccccaucuucu

SEQ ID NO: 2568450 - RNA, 22 nt, Human
uaaacuugguuuuuaaaaaacu

SEQ ID NO: 2568451 - RNA, 21 nt, Human
uaaacuuagaauaaaauugua

SEQ ID NO: 2568452 - RNA, 20 nt, Human
uaaacuuagaauaaaauugu

SEQ ID NO: 2568453 - RNA, 19 nt, Human
uaaacuuagaauaaaauug

SEQ ID NO: 2568454 - RNA, 22 nt, Human
uaaacuguguggacugugaugc

SEQ ID NO: 2568455 - RNA, 13 nt, Human
uaaacuguguuua

SEQ ID NO: 2568456 - RNA, 20 nt, Human
uaaacuucauggucaugggu

SEQ ID NO: 2568457 - RNA, 22 nt, Human
uaaacuuagugcggacaaguuu

SEQ ID NO: 2568458 - RNA, 12 nt, Human
uaaacugugcac

SEQ ID NO: 2568459 - RNA, 14 nt, Human
uaaacugugcacca

SEQ ID NO: 2568460 - RNA, 19 nt, Human
uaaacauugguucuuguau

SEQ ID NO: 2568461 - RNA, 15 nt, Human
uaaacuguguacaua

SEQ ID NO: 2568462 - RNA, 18 nt, Human
uaaacuguguacauaacu

SEQ ID NO: 2568463 - RNA, 17 nt, Human
uaaacuguguauuccaa

SEQ ID NO: 2568464 - RNA, 22 nt, Human
uaaacuguguauuccaagacau

SEQ ID NO: 2568465 - RNA, 13 nt, Human
uaaacugugugca

SEQ ID NO: 2568466 - RNA, 20 nt, Human
uaaacuguguggacugugau

SEQ ID NO: 2568467 - RNA, 12 nt, Human
uaaacuguguuu

SEQ ID NO: 2568468 - RNA, 15 nt, Human
uaaacauguguuuua

SEQ ID NO: 2568469 - RNA, 12 nt, Human
uaaacauguguu

SEQ ID NO: 2568470 - RNA, 18 nt, Human
uaaacaugguuacaauca

SEQ ID NO: 2568471 - RNA, 13 nt, Human
uaaacauguguuu

SEQ ID NO: 2568472 - RNA, 16 nt, Human
uaaacaugguuacaau

SEQ ID NO: 2568473 - RNA, 20 nt, Human
uaaacauuaguguucauagc

SEQ ID NO: 2568474 - RNA, 22 nt, Human
uaaacauuaaucaaucaucugu

SEQ ID NO: 2568475 - RNA, 18 nt, Human
uaaacauugaaguaauga

SEQ ID NO: 2568476 - RNA, 21 nt, Human
uaaacauugguucuuguauua

SEQ ID NO: 2568477 - RNA, 16 nt, Human
uaaaccaaaaacugaa

SEQ ID NO: 2568478 - RNA, 22 nt, Human
uaaaugucucuuuaaugucaca

SEQ ID NO: 2568479 - RNA, 20 nt, Human
uaaaugucuaguuguaacac

SEQ ID NO: 2568480 - RNA, 19 nt, Human
uaaauguaucuuauucaca

SEQ ID NO: 2568481 - RNA, 14 nt, Human
uaaauguaacaguc

SEQ ID NO: 2568482 - RNA, 13 nt, Human
uaaauguaacagu

SEQ ID NO: 2568483 - RNA, 17 nt, Human
uaaauguaaagauauuu

SEQ ID NO: 2568484 - RNA, 18 nt, Human
uaaauguaacagucugau

SEQ ID NO: 2568485 - RNA, 17 nt, Human
uaaauguaacagucuga

SEQ ID NO: 2568486 - RNA, 19 nt, Human
uaaauguaacagucugauc

SEQ ID NO: 2568487 - RNA, 13 nt, Human
uaaauguaaagau

SEQ ID NO: 2568488 - RNA, 16 nt, Human
uaaauguaaagauauu

SEQ ID NO: 2568489 - RNA, 21 nt, Human
uaaaugguguacauaauguau

SEQ ID NO: 2568490 - RNA, 16 nt, Human
uaaauguagguaugaa

SEQ ID NO: 2568491 - RNA, 18 nt, Human
uaaaugggggugcauuug

SEQ ID NO: 2568492 - RNA, 19 nt, Human
uaaaugggggugcauuuga

SEQ ID NO: 2568493 - RNA, 17 nt, Human
uaaaugguguacauaau

SEQ ID NO: 2568494 - RNA, 16 nt, Human
uaaaugguguacauaa

SEQ ID NO: 2568495 - RNA, 15 nt, Human
uaaaugguguacaua

SEQ ID NO: 2568496 - RNA, 20 nt, Human
uaaaugguauagcaaauguu

SEQ ID NO: 2568497 - RNA, 14 nt, Human
uaaaugguuaaaag

SEQ ID NO: 2568498 - RNA, 17 nt, Human
uaaauggggcucacaaa

SEQ ID NO: 2568499 - RNA, 16 nt, Human
uaaauggguagagaaa

SEQ ID NO: 2568500 - RNA, 14 nt, Human
uaaaugguauagca

SEQ ID NO: 2568501 - RNA, 17 nt, Human
uaaauggucgcccagga

SEQ ID NO: 2568502 - RNA, 14 nt, Human
uaaaugggggugca

SEQ ID NO: 2568503 - RNA, 17 nt, Human
uaaaugggggugcauuu

SEQ ID NO: 2568504 - RNA, 20 nt, Human
uaaauggcuuccuggcaaua

SEQ ID NO: 2568505 - RNA, 23 nt, Human
uaaauggccucauguggcuggaa

SEQ ID NO: 2568506 - RNA, 11 nt, Human
uaaauggcugc

SEQ ID NO: 2568507 - RNA, 13 nt, Human
uaaaugcccagcc

SEQ ID NO: 2568508 - RNA, 16 nt, Human
uaaaguuuacaguaaa

SEQ ID NO: 2568509 - RNA, 14 nt, Human
uaaaguuuacagua

SEQ ID NO: 2568510 - RNA, 13 nt, Human
uaaaguuuacagu

SEQ ID NO: 2568511 - RNA, 23 nt, Human
uaaaguuuacaguaaauaaauug

SEQ ID NO: 2568512 - RNA, 17 nt, Human
uaaaguuuacaguaaau

SEQ ID NO: 2568513 - RNA, 16 nt, Human
uaaaguugguaaaccu

SEQ ID NO: 2568514 - RNA, 17 nt, Human
uaaaguugguaaaccuu

SEQ ID NO: 2568515 - RNA, 23 nt, Human
uaaaguucuguacucaaauguag

SEQ ID NO: 2568516 - RNA, 17 nt, Human
uaaaguucugaguguuu

SEQ ID NO: 2568517 - RNA, 17 nt, Human
uaaaugcccagccccuu

SEQ ID NO: 2568518 - RNA, 16 nt, Human
uaaaugcccagccccu

SEQ ID NO: 2568519 - RNA, 15 nt, Human
uaaaugcccagcccc

SEQ ID NO: 2568520 - RNA, 14 nt, Human
uaaaugcccagccc

SEQ ID NO: 2568521 - RNA, 17 nt, Human
uaaauggaaaaaaugau

SEQ ID NO: 2568522 - RNA, 21 nt, Human
uaaaugcuuugugugauugaa

SEQ ID NO: 2568523 - RNA, 17 nt, Human
uaaaugcuuuaugcaaa

SEQ ID NO: 2568524 - RNA, 23 nt, Human
uaaaugcuauuuuuuauuuuacu

SEQ ID NO: 2568525 - RNA, 15 nt, Human
uaaaugcuauuuuuu

SEQ ID NO: 2568526 - RNA, 14 nt, Human
uaaaugcuauuuuu

SEQ ID NO: 2568527 - RNA, 13 nt, Human
uaaaugcuauuuu

SEQ ID NO: 2568528 - RNA, 16 nt, Human
uaaauggaaccacucu

SEQ ID NO: 2568529 - RNA, 22 nt, Human
uaaauggccucauguggcugga

SEQ ID NO: 2568530 - RNA, 16 nt, Human
uaaauggccucaugug

SEQ ID NO: 2568531 - RNA, 12 nt, Human
uaaauggccuca

SEQ ID NO: 2568532 - RNA, 16 nt, Human
uaaaugugccuucauu

SEQ ID NO: 2568533 - RNA, 19 nt, Human
uaaaugugaugaauacugu

SEQ ID NO: 2568534 - RNA, 23 nt, Human
uaaaugucuuuuuuuuaaugugc

SEQ ID NO: 2568535 - RNA, 22 nt, Human
uaaaugucuuuuuuuuaaugug

SEQ ID NO: 2568536 - RNA, 21 nt, Human
uaaaugucuuuuuuuuaaugu

SEQ ID NO: 2568537 - RNA, 12 nt, Human
uaaaugucuguu

SEQ ID NO: 2568538 - RNA, 16 nt, Human
uaaaugucuaauguau

SEQ ID NO: 2568539 - RNA, 15 nt, Human
uaaaugucuaaugua

SEQ ID NO: 2568540 - RNA, 12 nt, Human
uaaaugucuaau

SEQ ID NO: 2568541 - RNA, 21 nt, Human
uaaaugugcauucuuuuaaaa

SEQ ID NO: 2568542 - RNA, 16 nt, Human
uaaaugugcauucuuu

SEQ ID NO: 2568543 - RNA, 16 nt, Human
uaaaugugcuuuuaaa

SEQ ID NO: 2568544 - RNA, 11 nt, Human
uaaauuauuuu

SEQ ID NO: 2568545 - RNA, 20 nt, Human
uaaauucaaccacuguaaaa

SEQ ID NO: 2568546 - RNA, 23 nt, Human
uaaaugugcauucuuuuaaaaga

SEQ ID NO: 2568547 - RNA, 16 nt, Human
uaaauucacaaacuuu

SEQ ID NO: 2568548 - RNA, 23 nt, Human
uaaauucaaccacuguaaaauga

SEQ ID NO: 2568549 - RNA, 18 nt, Human
uaaauucacaaacuuuua

SEQ ID NO: 2568550 - RNA, 22 nt, Human
uaaauucaccuagucuaaggau

SEQ ID NO: 2568551 - RNA, 17 nt, Human
uaaauucacaauagaaa

SEQ ID NO: 2568552 - RNA, 18 nt, Human
uaaauucagauauauuuu

SEQ ID NO: 2568553 - RNA, 20 nt, Human
uaaauucagauauauuuuuc

SEQ ID NO: 2568554 - RNA, 23 nt, Human
uaaauucagauauauuuuucaca

SEQ ID NO: 2568555 - RNA, 17 nt, Human
uaaauucuugcaaagua

SEQ ID NO: 2568556 - RNA, 18 nt, Human
uaaauucuugcaaaguau

SEQ ID NO: 2568557 - RNA, 22 nt, Human
uaaauucuugcaaaguaucccu

SEQ ID NO: 2568558 - RNA, 20 nt, Human
uaaauuccucuuugcuuugc

SEQ ID NO: 2568559 - RNA, 16 nt, Human
uaaauuccucuuugcu

SEQ ID NO: 2568560 - RNA, 17 nt, Human
uaaauuccucuuugcuu

SEQ ID NO: 2568561 - RNA, 18 nt, Human
uaaauuccucuuugcuuu

SEQ ID NO: 2568562 - RNA, 19 nt, Human
uaaauuccucuuugcuuug

SEQ ID NO: 2568563 - RNA, 16 nt, Human
uaaauucuugcaaagu

SEQ ID NO: 2568564 - RNA, 12 nt, Human
uaaauuccucuu

SEQ ID NO: 2568565 - RNA, 14 nt, Human
uaaauuccucuuug

SEQ ID NO: 2568566 - RNA, 16 nt, Human
uaaauuccacuggacu

SEQ ID NO: 2568567 - RNA, 20 nt, Human
uaaauucauuuuaauuuugu

SEQ ID NO: 2568568 - RNA, 13 nt, Human
uaaauucauuuua

SEQ ID NO: 2568569 - RNA, 18 nt, Human
uaaauucaguccuaagaa

SEQ ID NO: 2568570 - RNA, 14 nt, Human
uaaauucaguccua

SEQ ID NO: 2568571 - RNA, 13 nt, Human
uaaauuccacugg

SEQ ID NO: 2568572 - RNA, 14 nt, Human
uaaauuccacugga

SEQ ID NO: 2568573 - RNA, 13 nt, Human
uaaauuuauguga

SEQ ID NO: 2568574 - RNA, 17 nt, Human
uaaauugaauaauggua

SEQ ID NO: 2568575 - RNA, 16 nt, Human
uaaauugaauaauggu

SEQ ID NO: 2568576 - RNA, 13 nt, Human
uaaauugaauaau

SEQ ID NO: 2568577 - RNA, 12 nt, Human
uaaauugaauaa

SEQ ID NO: 2568578 - RNA, 23 nt, Human
uaaauugacacuuaaaaaugguu

SEQ ID NO: 2568579 - RNA, 20 nt, Human
uaaauugacacuuaaaaaug

SEQ ID NO: 2568580 - RNA, 23 nt, Human
uaaauuuccccaacagugugaag

SEQ ID NO: 2568581 - RNA, 21 nt, Human
uaaauuuccccaacaguguga

SEQ ID NO: 2568582 - RNA, 20 nt, Human
uaaauuuccccaacagugug

SEQ ID NO: 2568583 - RNA, 14 nt, Human
uaaauuugaauguu

SEQ ID NO: 2568584 - RNA, 22 nt, Human
uaaauuuccccaacagugugaa

SEQ ID NO: 2568585 - RNA, 22 nt, Human
uaaauuugaauguuaagcagau

SEQ ID NO: 2568586 - RNA, 19 nt, Human
uaaauugaaucaguauaaa

SEQ ID NO: 2568587 - RNA, 22 nt, Human
uaaauugaaucaguauaaacaa

SEQ ID NO: 2568588 - RNA, 14 nt, Human
uaaauuuauuuacu

SEQ ID NO: 2568589 - RNA, 15 nt, Human
uaaauuuauuuacug

SEQ ID NO: 2568590 - RNA, 18 nt, Human
uaaauuuauuuacugcua

SEQ ID NO: 2568591 - RNA, 15 nt, Human
uaaauuuauuucaaa

SEQ ID NO: 2568592 - RNA, 19 nt, Human
uaaauuuccccaacagugu

SEQ ID NO: 2568593 - RNA, 18 nt, Human
uaaauuuccccaacagug

SEQ ID NO: 2568594 - RNA, 17 nt, Human
uaaauuuccccaacagu

SEQ ID NO: 2568595 - RNA, 17 nt, Human
uaaauuuauuucaaaaa

SEQ ID NO: 2568596 - RNA, 18 nt, Human
uaacaccaugauuaacca

SEQ ID NO: 2568597 - RNA, 23 nt, Human
uaacacauuuuguauaauuguau

SEQ ID NO: 2568598 - RNA, 18 nt, Human
uaacacauuuuguauaau

SEQ ID NO: 2568599 - RNA, 17 nt, Human
uaacacauuuuguauaa

SEQ ID NO: 2568600 - RNA, 17 nt, Human
uaacacauuugauucug

SEQ ID NO: 2568601 - RNA, 14 nt, Human
uaacacauuuugua

SEQ ID NO: 2568602 - RNA, 22 nt, Human
uaacacauuaucgggagcagug

SEQ ID NO: 2568603 - RNA, 23 nt, Human
uaaauuuguaaguuucaggugac

SEQ ID NO: 2568604 - RNA, 20 nt, Human
uaaauuuguaaguuucaggu

SEQ ID NO: 2568605 - RNA, 19 nt, Human
uaaauuuguaaguuucagg

SEQ ID NO: 2568606 - RNA, 18 nt, Human
uaaauuuguaaguuucag

SEQ ID NO: 2568607 - RNA, 17 nt, Human
uaaauuuguaaguuuca

SEQ ID NO: 2568608 - RNA, 16 nt, Human
uaaauuuguaaguuuc

SEQ ID NO: 2568609 - RNA, 15 nt, Human
uaaauuuguaaguuu

SEQ ID NO: 2568610 - RNA, 13 nt, Human
uaaauuuguaagu

SEQ ID NO: 2568611 - RNA, 12 nt, Human
uaaauuuguaag

SEQ ID NO: 2568612 - RNA, 15 nt, Human
uaacacuauuuuaug

SEQ ID NO: 2568613 - RNA, 14 nt, Human
uaacacuauuuuau

SEQ ID NO: 2568614 - RNA, 19 nt, Human
uaacacuauguuuauuuac

SEQ ID NO: 2568615 - RNA, 16 nt, Human
uaacacuauaaagguu

SEQ ID NO: 2568616 - RNA, 13 nt, Human
uaacacuggcccc

SEQ ID NO: 2568617 - RNA, 15 nt, Human
uaacacuggccccua

SEQ ID NO: 2568618 - RNA, 17 nt, Human
uaacaccugauguguac

SEQ ID NO: 2568619 - RNA, 16 nt, Human
uaacaccugaugugua

SEQ ID NO: 2568620 - RNA, 14 nt, Human
uaacaccugaugug

SEQ ID NO: 2568621 - RNA, 19 nt, Human
uaacacauuuuguauaauu

SEQ ID NO: 2568622 - RNA, 21 nt, Human
uaacaccagguuuauggaaaa

SEQ ID NO: 2568623 - RNA, 15 nt, Human
uaacuggaaacuuca

SEQ ID NO: 2568624 - RNA, 17 nt, Human
uaacugugaaguuuaca

SEQ ID NO: 2568625 - RNA, 18 nt, Human
uaacuggagccccaucag

SEQ ID NO: 2568626 - RNA, 18 nt, Human
uaacuuuuguaagacaaa

SEQ ID NO: 2568627 - RNA, 13 nt, Human
uaacuuuuguaag

SEQ ID NO: 2568628 - RNA, 20 nt, Human
uaacuuuuguaaauacacau

SEQ ID NO: 2568629 - RNA, 16 nt, Human
uaacuguuauuuauaa

SEQ ID NO: 2568630 - RNA, 17 nt, Human
uaacuguuauuuauaau

SEQ ID NO: 2568631 - RNA, 22 nt, Human
uaacuguuaaauugcuguguau

SEQ ID NO: 2568632 - RNA, 18 nt, Human
uaacugugaaguuuacau

SEQ ID NO: 2568633 - RNA, 22 nt, Human
uaacuggaagcauguaggagaa

SEQ ID NO: 2568634 - RNA, 19 nt, Human
uaagaaaaaggaugcacag

SEQ ID NO: 2568635 - RNA, 23 nt, Human
uaagaaaaaggaugcacagaguu

SEQ ID NO: 2568636 - RNA, 17 nt, Human
uaagaaaaaucauguuu

SEQ ID NO: 2568637 - RNA, 14 nt, Human
uaagaaaaaucaug

SEQ ID NO: 2568638 - RNA, 22 nt, Human
uaagaaaagagauauuuuaaaa

SEQ ID NO: 2568639 - RNA, 18 nt, Human
uaagaaaagagauauuuu

SEQ ID NO: 2568640 - RNA, 16 nt, Human
uaagaaaagauguaga

SEQ ID NO: 2568641 - RNA, 14 nt, Human
uaagaaaagagaua

SEQ ID NO: 2568642 - RNA, 16 nt, Human
uaagaaaaaucauguu

SEQ ID NO: 2568643 - RNA, 16 nt, Human
uaagaaaacaucacug

SEQ ID NO: 2568644 - RNA, 16 nt, Human
uaagaaaaaggaugca

SEQ ID NO: 2568645 - RNA, 18 nt, Human
uaagaaaaaggaugcaca

SEQ ID NO: 2568646 - RNA, 20 nt, Human
uaagaaaaaauaacacacau

SEQ ID NO: 2568647 - RNA, 13 nt, Human
uaagagagaauga

SEQ ID NO: 2568648 - RNA, 21 nt, Human
uaagagacagucaccccagga

SEQ ID NO: 2568649 - RNA, 14 nt, Human
uaagaaccuggaac

SEQ ID NO: 2568650 - RNA, 19 nt, Human
uaagaaccuuuugagugcc

SEQ ID NO: 2568651 - RNA, 22 nt, Human
uaagaacaaagagaaaaaauac

SEQ ID NO: 2568652 - RNA, 23 nt, Human
uaagagagaaugagagacacacu

SEQ ID NO: 2568653 - RNA, 14 nt, Human
uaagagagaaugag

SEQ ID NO: 2568654 - RNA, 15 nt, Human
uaagaggcagcguga

SEQ ID NO: 2568655 - RNA, 23 nt, Human
uaagaggcagaaaauugcacaau

SEQ ID NO: 2568656 - RNA, 20 nt, Human
uaagaggcagaaaauugcac

SEQ ID NO: 2568657 - RNA, 21 nt, Human
uaagaggacauaauggggucc

SEQ ID NO: 2568658 - RNA, 17 nt, Human
uaagaggcagaaaauug

SEQ ID NO: 2568659 - RNA, 17 nt, Human
uaagagcuggugucuga

SEQ ID NO: 2568660 - RNA, 24 nt, Human
uaagaaaucuaguauuucaugcug

SEQ ID NO: 2568661 - RNA, 19 nt, Human
uaagaaaucaaagagagaa

SEQ ID NO: 2568662 - RNA, 18 nt, Human
uaagaaacccagacugaa

SEQ ID NO: 2568663 - RNA, 23 nt, Human
uaagaaacacacugaggcaggga

SEQ ID NO: 2568664 - RNA, 21 nt, Human
uaagaaaauaucacuugucaa

SEQ ID NO: 2568665 - RNA, 19 nt, Human
uaagaaaagauuuuaauca

SEQ ID NO: 2568666 - RNA, 22 nt, Human
uaagaaaauauuuugucuaaaa

SEQ ID NO: 2568667 - RNA, 21 nt, Human
uaagaaaauauuuugucuaaa

SEQ ID NO: 2568668 - RNA, 20 nt, Human
uaagaaaauauuuugucuaa

SEQ ID NO: 2568669 - RNA, 17 nt, Human
uaagaaaauauuuuguc

SEQ ID NO: 2568670 - RNA, 14 nt, Human
uaagaaaagauuuu

SEQ ID NO: 2568671 - RNA, 12 nt, Human
uaagaaaagauu

SEQ ID NO: 2568672 - RNA, 21 nt, Human
uaagaaaagauacgacuuuau

SEQ ID NO: 2568673 - RNA, 23 nt, Human
uaagaaaauauuuugucuaaaau

SEQ ID NO: 2568674 - RNA, 20 nt, Human
uaagaaacaacucuuugaga

SEQ ID NO: 2568675 - RNA, 21 nt, Human
uaagaaacaacucuuugagaa

SEQ ID NO: 2568676 - RNA, 20 nt, Human
uaagaaacacacugaggcag

SEQ ID NO: 2568677 - RNA, 21 nt, Human
uaagaaacacacugaggcagg

SEQ ID NO: 2568678 - RNA, 11 nt, Human
uaacagaaaug

SEQ ID NO: 2568679 - RNA, 23 nt, Human
uaacagaaagggcaacaauaaaa

SEQ ID NO: 2568680 - RNA, 21 nt, Human
uaacagaaagggcaacaauaa

SEQ ID NO: 2568681 - RNA, 11 nt, Human
uaacagaaagg

SEQ ID NO: 2568682 - RNA, 15 nt, Human
uaacacuuuacaaug

SEQ ID NO: 2568683 - RNA, 20 nt, Human
uaacauugggaaaucuuaua

SEQ ID NO: 2568684 - RNA, 21 nt, Human
uaacauuuuaaauaaaagaaa

SEQ ID NO: 2568685 - RNA, 13 nt, Human
uaacauuuuaaau

SEQ ID NO: 2568686 - RNA, 16 nt, Human
uaacauuucaagggca

SEQ ID NO: 2568687 - RNA, 20 nt, Human
uaacauuggguccugggucu

SEQ ID NO: 2568688 - RNA, 22 nt, Human
uaacauucuguaaaaugucugu

SEQ ID NO: 2568689 - RNA, 20 nt, Human
uaaccaaaaagaccagacua

SEQ ID NO: 2568690 - RNA, 17 nt, Human
uaaccaaaaagaccaga

SEQ ID NO: 2568691 - RNA, 15 nt, Human
uaaccacggaaaaga

SEQ ID NO: 2568692 - RNA, 19 nt, Human
uaaccacgucugucuucac

SEQ ID NO: 2568693 - RNA, 19 nt, Human
uaaccacuuaaaaaauguc

SEQ ID NO: 2568694 - RNA, 20 nt, Human
uaaccacuuaaaaaaugucc

SEQ ID NO: 2568695 - RNA, 20 nt, Human
uaaccacgucugucuucaca

SEQ ID NO: 2568696 - RNA, 17 nt, Human
uaaccaggggccaugaa

SEQ ID NO: 2568697 - RNA, 23 nt, Human
uaaccaguguuguggauuuaaca

SEQ ID NO: 2568698 - RNA, 13 nt, Human
uaaccagaucauu

SEQ ID NO: 2568699 - RNA, 16 nt, Human
uaaccacuucagcuga

SEQ ID NO: 2568700 - RNA, 16 nt, Human
uaacccaacucuccug

SEQ ID NO: 2568701 - RNA, 14 nt, Human
uaaccauuugcacu

SEQ ID NO: 2568702 - RNA, 14 nt, Human
uaacccaacucucc

SEQ ID NO: 2568703 - RNA, 13 nt, Human
uaacccagauuuu

SEQ ID NO: 2568704 - RNA, 11 nt, Human
uaaccccaccc

SEQ ID NO: 2568705 - RNA, 13 nt, Human
uaaccccagcucc

SEQ ID NO: 2568706 - RNA, 19 nt, Human
uaaccccagcucccuagga

SEQ ID NO: 2568707 - RNA, 17 nt, Human
uaaccaucacugguugc

SEQ ID NO: 2568708 - RNA, 23 nt, Human
uaaccauugucuuguucugugau

SEQ ID NO: 2568709 - RNA, 20 nt, Human
uaaccauugucuuguucugu

SEQ ID NO: 2568710 - RNA, 19 nt, Human
uaaccauugucuuguucug

SEQ ID NO: 2568711 - RNA, 18 nt, Human
uaaccauugucuuguucu

SEQ ID NO: 2568712 - RNA, 15 nt, Human
uaaccauuaaaacug

SEQ ID NO: 2568713 - RNA, 13 nt, Human
uaacugacaacuu

SEQ ID NO: 2568714 - RNA, 14 nt, Human
uaacugaaggagaa

SEQ ID NO: 2568715 - RNA, 15 nt, Human
uaacugaaggagaag

SEQ ID NO: 2568716 - RNA, 16 nt, Human
uaacugaaggagaagg

SEQ ID NO: 2568717 - RNA, 14 nt, Human
uaacugaaaaugug

SEQ ID NO: 2568718 - RNA, 16 nt, Human
uaacucuugucuauuu

SEQ ID NO: 2568719 - RNA, 15 nt, Human
uaacucugucuucac

SEQ ID NO: 2568720 - RNA, 14 nt, Human
uaacucuugucuau

SEQ ID NO: 2568721 - RNA, 11 nt, Human
uaacucugucu

SEQ ID NO: 2568722 - RNA, 14 nt, Human
uaacucugucuuca

SEQ ID NO: 2568723 - RNA, 20 nt, Human
uaacugaaaaugugcuauac

SEQ ID NO: 2568724 - RNA, 21 nt, Human
uaacugaaaaugugcuauacu

SEQ ID NO: 2568725 - RNA, 16 nt, Human
uaacucuaaaagaucc

SEQ ID NO: 2568726 - RNA, 14 nt, Human
uaacucuaaaagau

SEQ ID NO: 2568727 - RNA, 14 nt, Human
uaacuccuucuugu

SEQ ID NO: 2568728 - RNA, 21 nt, Human
uaacucugcacuacuccucug

SEQ ID NO: 2568729 - RNA, 18 nt, Human
uaacucuaaaagauccuu

SEQ ID NO: 2568730 - RNA, 17 nt, Human
uaacucuaaaagauccu

SEQ ID NO: 2568731 - RNA, 23 nt, Human
uaacucuaaaagauccuuuuuaa

SEQ ID NO: 2568732 - RNA, 22 nt, Human
uaacucuaauucccauuuugca

SEQ ID NO: 2568733 - RNA, 22 nt, Human
uaacucaauauuuuccaugaaa

SEQ ID NO: 2568734 - RNA, 14 nt, Human
uaacucaauauuuu

SEQ ID NO: 2568735 - RNA, 19 nt, Human
uaacuauuuuauuuucuaa

SEQ ID NO: 2568736 - RNA, 17 nt, Human
uaacuauugcccagguu

SEQ ID NO: 2568737 - RNA, 16 nt, Human
uaacucaccuaacuca

SEQ ID NO: 2568738 - RNA, 15 nt, Human
uaacuccccacccca

SEQ ID NO: 2568739 - RNA, 19 nt, Human
uaacuccagugauguucuu

SEQ ID NO: 2568740 - RNA, 16 nt, Human
uaacuauguugauaaa

SEQ ID NO: 2568741 - RNA, 17 nt, Human
uaacccuuaucaccagc

SEQ ID NO: 2568742 - RNA, 18 nt, Human
uaacccucccauggcacc

SEQ ID NO: 2568743 - RNA, 20 nt, Human
uaacccuggugguugcuguu

SEQ ID NO: 2568744 - RNA, 12 nt, Human
uaaccccuuucc

SEQ ID NO: 2568745 - RNA, 13 nt, Human
uaaccccuuuccu

SEQ ID NO: 2568746 - RNA, 23 nt, Human
uaacccgcucaucacuggaugaa

SEQ ID NO: 2568747 - RNA, 16 nt, Human
uaaccccuuuccugcg

SEQ ID NO: 2568748 - RNA, 14 nt, Human
uaaccccaggcccc

SEQ ID NO: 2568749 - RNA, 13 nt, Human
uaaccccaggccc

SEQ ID NO: 2568750 - RNA, 12 nt, Human
uaaccccaggcc

SEQ ID NO: 2568751 - RNA, 15 nt, Human
uaaccccgggcgggu

SEQ ID NO: 2568752 - RNA, 15 nt, Human
uaaccccaggccccg

SEQ ID NO: 2568753 - RNA, 18 nt, Human
uaaccccgggcggguggc

SEQ ID NO: 2568754 - RNA, 15 nt, Human
uaauaugcacacauu

SEQ ID NO: 2568755 - RNA, 16 nt, Human
uaauaugcacacauuu

SEQ ID NO: 2568756 - RNA, 17 nt, Human
uaauaugcacacauuuu

SEQ ID NO: 2568757 - RNA, 18 nt, Human
uaauaugcacacauuuuu

SEQ ID NO: 2568758 - RNA, 22 nt, Human
uaauauggcucuucauaauucu

SEQ ID NO: 2568759 - RNA, 18 nt, Human
uaauauggcaaaaauggc

SEQ ID NO: 2568760 - RNA, 16 nt, Human
uaauauggcaaaaaug

SEQ ID NO: 2568761 - RNA, 15 nt, Human
uaauauggcaaaaau

SEQ ID NO: 2568762 - RNA, 22 nt, Human
uaauauggccacaguagucuug

SEQ ID NO: 2568763 - RNA, 19 nt, Human
uaauaugcacacauuuuuu

SEQ ID NO: 2568764 - RNA, 16 nt, Human
uaauaugcugccaaau

SEQ ID NO: 2568765 - RNA, 10 nt, Human
uaauaugcau

SEQ ID NO: 2568766 - RNA, 18 nt, Human
uaauaugcugccaaauuu

SEQ ID NO: 2568767 - RNA, 14 nt, Human
uaauaugaaaacuu

SEQ ID NO: 2568768 - RNA, 15 nt, Human
uaauaugaaaacuua

SEQ ID NO: 2568769 - RNA, 16 nt, Human
uaauaugaaaacuuau

SEQ ID NO: 2568770 - RNA, 12 nt, Human
uaauaugagaau

SEQ ID NO: 2568771 - RNA, 18 nt, Human
uaauaucccuacauguau

SEQ ID NO: 2568772 - RNA, 17 nt, Human
uaauaucccuacaugua

SEQ ID NO: 2568773 - RNA, 23 nt, Human
uaauaucaucaguauugaagcau

SEQ ID NO: 2568774 - RNA, 15 nt, Human
uaauaauguuuaaua

SEQ ID NO: 2568775 - RNA, 23 nt, Human
uaauaaucuuauuagggagaaaa

SEQ ID NO: 2568776 - RNA, 23 nt, Human
uaauaaucauuggauucugagag

SEQ ID NO: 2568777 - RNA, 16 nt, Human
uaauaauauauguuua

SEQ ID NO: 2568778 - RNA, 14 nt, Human
uaauaauguuucaa

SEQ ID NO: 2568779 - RNA, 20 nt, Human
uaauaaucuuauuagggaga

SEQ ID NO: 2568780 - RNA, 13 nt, Human
uaauaaugugaau

SEQ ID NO: 2568781 - RNA, 15 nt, Human
uaauaucaauagaag

SEQ ID NO: 2568782 - RNA, 18 nt, Human
uaaucugggccagaauuu

SEQ ID NO: 2568783 - RNA, 23 nt, Human
uaaucugggccagaauuucaaac

SEQ ID NO: 2568784 - RNA, 20 nt, Human
uaaucuguagggcuggaccu

SEQ ID NO: 2568785 - RNA, 17 nt, Human
uaaucuguagggcugga

SEQ ID NO: 2568786 - RNA, 16 nt, Human
uaaucuguagggcugg

SEQ ID NO: 2568787 - RNA, 17 nt, Human
uaaucugggaagggaag

SEQ ID NO: 2568788 - RNA, 22 nt, Human
uaaucuggacuccucuguccag

SEQ ID NO: 2568789 - RNA, 21 nt, Human
uaaucuggacuccucugucca

SEQ ID NO: 2568790 - RNA, 20 nt, Human
uaaucuggacuccucugucc

SEQ ID NO: 2568791 - RNA, 19 nt, Human
uaaucuggacuccucuguc

SEQ ID NO: 2568792 - RNA, 22 nt, Human
uaaucuagauaucgacuuguuu

SEQ ID NO: 2568793 - RNA, 17 nt, Human
uaaucuagauaucgacu

SEQ ID NO: 2568794 - RNA, 22 nt, Human
uaaucuagaacacaggcaaaau

SEQ ID NO: 2568795 - RNA, 14 nt, Human
uaaucuagaacaca

SEQ ID NO: 2568796 - RNA, 17 nt, Human
uaaucuaauucuaagga

SEQ ID NO: 2568797 - RNA, 22 nt, Human
uaaucuacuccuuguaaagacu

SEQ ID NO: 2568798 - RNA, 15 nt, Human
uaaucuggacuccuc

SEQ ID NO: 2568799 - RNA, 21 nt, Human
uaaucugcaaagaaugagaag

SEQ ID NO: 2568800 - RNA, 16 nt, Human
uaaucuauuggguuca

SEQ ID NO: 2568801 - RNA, 21 nt, Human
uaaucugauggcuucuccagg

SEQ ID NO: 2568802 - RNA, 18 nt, Human
uaaucuggacuccucugu

SEQ ID NO: 2568803 - RNA, 17 nt, Human
uaaucuggacuccucug

SEQ ID NO: 2568804 - RNA, 16 nt, Human
uaauauuaaauauaug

SEQ ID NO: 2568805 - RNA, 15 nt, Human
uaauaugggcauugu

SEQ ID NO: 2568806 - RNA, 23 nt, Human
uaauauggcucuucauaauucua

SEQ ID NO: 2568807 - RNA, 21 nt, Human
uaauccccaguaaaauugcca

SEQ ID NO: 2568808 - RNA, 20 nt, Human
uaauauuaaggaagacaaug

SEQ ID NO: 2568809 - RNA, 20 nt, Human
uaauccucuaggaggucucu

SEQ ID NO: 2568810 - RNA, 12 nt, Human
uaaucuaaaugg

SEQ ID NO: 2568811 - RNA, 13 nt, Human
uaaucuaaaugga

SEQ ID NO: 2568812 - RNA, 21 nt, Human
uaauccgaaucucuuuuugcu

SEQ ID NO: 2568813 - RNA, 22 nt, Human
uaaucccugggcauugcuuucc

SEQ ID NO: 2568814 - RNA, 19 nt, Human
uaauccgaaucucuuuuug

SEQ ID NO: 2568815 - RNA, 19 nt, Human
uaaucccugggcauugcuu

SEQ ID NO: 2568816 - RNA, 20 nt, Human
uaaucccugggcauugcuuu

SEQ ID NO: 2568817 - RNA, 17 nt, Human
uaaucccgauucacccu

SEQ ID NO: 2568818 - RNA, 14 nt, Human
uaaucccugggcau

SEQ ID NO: 2568819 - RNA, 23 nt, Human
uaauggacaugagauaauguuag

SEQ ID NO: 2568820 - RNA, 19 nt, Human
uaauggacaugagauaaug

SEQ ID NO: 2568821 - RNA, 19 nt, Human
uaauggccaugguaccccc

SEQ ID NO: 2568822 - RNA, 16 nt, Human
uaauggccaugguacc

SEQ ID NO: 2568823 - RNA, 17 nt, Human
uaauggccggcuggaaa

SEQ ID NO: 2568824 - RNA, 21 nt, Human
uaauggccaugguacccccuu

SEQ ID NO: 2568825 - RNA, 23 nt, Human
uaauggccggcuggaaaugcugg

SEQ ID NO: 2568826 - RNA, 15 nt, Human
uaauggggcggugag

SEQ ID NO: 2568827 - RNA, 14 nt, Human
uaaugcuuuuauau

SEQ ID NO: 2568828 - RNA, 21 nt, Human
uaaugcuucuuucauuuucug

SEQ ID NO: 2568829 - RNA, 20 nt, Human
uaaugcuuagagaauguucu

SEQ ID NO: 2568830 - RNA, 19 nt, Human
uaaugcuuagagaauguuc

SEQ ID NO: 2568831 - RNA, 16 nt, Human
uaaugcuguugccuca

SEQ ID NO: 2568832 - RNA, 15 nt, Human
uaaugcuacugucuc

SEQ ID NO: 2568833 - RNA, 13 nt, Human
uaaugcuacuguc

SEQ ID NO: 2568834 - RNA, 22 nt, Human
uaaugcuacgugugauuuuucu

SEQ ID NO: 2568835 - RNA, 18 nt, Human
uaaugcuacgugugauuu

SEQ ID NO: 2568836 - RNA, 17 nt, Human
uaaugcuacgugugauu

SEQ ID NO: 2568837 - RNA, 16 nt, Human
uaaugcuacgugugau

SEQ ID NO: 2568838 - RNA, 13 nt, Human
uaaugcuccuugu

SEQ ID NO: 2568839 - RNA, 18 nt, Human
uaaugcuccuuguuccua

SEQ ID NO: 2568840 - RNA, 14 nt, Human
uaaugcuguugccu

SEQ ID NO: 2568841 - RNA, 17 nt, Human
uaaugcuguugccucau

SEQ ID NO: 2568842 - RNA, 22 nt, Human
uaaugauaacuggaaacuucag

SEQ ID NO: 2568843 - RNA, 17 nt, Human
uaaugauaacuggaaac

SEQ ID NO: 2568844 - RNA, 23 nt, Human
uaaugauaacuggaaacuucagc

SEQ ID NO: 2568845 - RNA, 15 nt, Human
uaaugcgugcauacc

SEQ ID NO: 2568846 - RNA, 19 nt, Human
uaaugcgugcauaccacuu

SEQ ID NO: 2568847 - RNA, 22 nt, Human
uaaugcgugcauaccacuuuug

SEQ ID NO: 2568848 - RNA, 23 nt, Human
uaaugcgugcauaccacuuuugu

SEQ ID NO: 2568849 - RNA, 20 nt, Human
uaaugcuaaagaaaaaguca

SEQ ID NO: 2568850 - RNA, 22 nt, Human
uaauguuucaaacauauauaac

SEQ ID NO: 2568851 - RNA, 18 nt, Human
uaauguuguuauuuaaag

SEQ ID NO: 2568852 - RNA, 14 nt, Human
uaauguuguuauuu

SEQ ID NO: 2568853 - RNA, 21 nt, Human
uaauguuguaugucuuguuua

SEQ ID NO: 2568854 - RNA, 20 nt, Human
uaauguuguaugucuuguuu

SEQ ID NO: 2568855 - RNA, 20 nt, Human
uaauggggguagcagcugga

SEQ ID NO: 2568856 - RNA, 18 nt, Human
uaauggggguagcagcug

SEQ ID NO: 2568857 - RNA, 17 nt, Human
uaauggggguagcagcu

SEQ ID NO: 2568858 - RNA, 15 nt, Human
uaauggggguagcag

SEQ ID NO: 2568859 - RNA, 15 nt, Human
uaaugggauuuucuu

SEQ ID NO: 2568860 - RNA, 18 nt, Human
uaaugggcuuagagcagu

SEQ ID NO: 2568861 - RNA, 21 nt, Human
uaauggggguagcagcuggac

SEQ ID NO: 2568862 - RNA, 15 nt, Human
uaaugggguccuggc

SEQ ID NO: 2568863 - RNA, 17 nt, Human
uaaugggguccuggcca

SEQ ID NO: 2568864 - RNA, 18 nt, Human
uaaugggguccuggccau

SEQ ID NO: 2568865 - RNA, 16 nt, Human
uaaugguaccagauaa

SEQ ID NO: 2568866 - RNA, 14 nt, Human
uaaugguaccagau

SEQ ID NO: 2568867 - RNA, 18 nt, Human
uaauggguuucauauuuc

SEQ ID NO: 2568868 - RNA, 22 nt, Human
uaaugggguccuggccauccca

SEQ ID NO: 2568869 - RNA, 20 nt, Human
uaauguucugaauaauuucu

SEQ ID NO: 2568870 - RNA, 22 nt, Human
uaauguucugaauaauuucuua

SEQ ID NO: 2568871 - RNA, 23 nt, Human
uaauguuacugaucaugcauugu

SEQ ID NO: 2568872 - RNA, 18 nt, Human
uaaugguaccagauaaaa

SEQ ID NO: 2568873 - RNA, 17 nt, Human
uaaugguaccagauaaa

SEQ ID NO: 2568874 - RNA, 19 nt, Human
uaaugguaccagauaaaau

SEQ ID NO: 2568875 - RNA, 15 nt, Human
uaauguuacugauca

SEQ ID NO: 2568876 - RNA, 21 nt, Human
uaauguuacugaucaugcauu

SEQ ID NO: 2568877 - RNA, 12 nt, Human
uaauguuugcua

SEQ ID NO: 2568878 - RNA, 14 nt, Human
uaauuaaaaaauuu

SEQ ID NO: 2568879 - RNA, 13 nt, Human
uaauguuugcuau

SEQ ID NO: 2568880 - RNA, 11 nt, Human
uaauguuuccu

SEQ ID NO: 2568881 - RNA, 14 nt, Human
uaauuaaguacuau

SEQ ID NO: 2568882 - RNA, 17 nt, Human
uaauuaaguacuaugua

SEQ ID NO: 2568883 - RNA, 20 nt, Human
uaauuaaguacuauguauca

SEQ ID NO: 2568884 - RNA, 22 nt, Human
uaauuagagcagaugaccccuc

SEQ ID NO: 2568885 - RNA, 16 nt, Human
uaaggauguucuagca

SEQ ID NO: 2568886 - RNA, 12 nt, Human
uaaggauuuuau

SEQ ID NO: 2568887 - RNA, 13 nt, Human
uaaggauuuuaug

SEQ ID NO: 2568888 - RNA, 17 nt, Human
uaaggauuuuaugcuuu

SEQ ID NO: 2568889 - RNA, 19 nt, Human
uaaggauuuuaugcuuuaa

SEQ ID NO: 2568890 - RNA, 15 nt, Human
uaaggauugugauau

SEQ ID NO: 2568891 - RNA, 14 nt, Human
uaagcuauucagua

SEQ ID NO: 2568892 - RNA, 14 nt, Human
uaaggcaaucaugg

SEQ ID NO: 2568893 - RNA, 22 nt, Human
uaaggauuuuaugcuuuaaaca

SEQ ID NO: 2568894 - RNA, 20 nt, Human
uaaggauuuuaugcuuuaaa

SEQ ID NO: 2568895 - RNA, 14 nt, Human
uaagggaaauagaa

SEQ ID NO: 2568896 - RNA, 21 nt, Human
uaaggcugcaagguuuaggcu

SEQ ID NO: 2568897 - RNA, 20 nt, Human
uaaggcugaggaaaggccag

SEQ ID NO: 2568898 - RNA, 13 nt, Human
uaaggcugaggaa

SEQ ID NO: 2568899 - RNA, 21 nt, Human
uaagcuaaagaggcugaaaga

SEQ ID NO: 2568900 - RNA, 16 nt, Human
uaagcuaacccccuuc

SEQ ID NO: 2568901 - RNA, 22 nt, Human
uaagcuaacccccuucuacuga

SEQ ID NO: 2568902 - RNA, 22 nt, Human
uaagcccugucgagacacuugc

SEQ ID NO: 2568903 - RNA, 20 nt, Human
uaagcccugucgagacacuu

SEQ ID NO: 2568904 - RNA, 16 nt, Human
uaagcccugucgagac

SEQ ID NO: 2568905 - RNA, 11 nt, Human
uaagcccuguc

SEQ ID NO: 2568906 - RNA, 19 nt, Human
uaagcccucuuccaucaug

SEQ ID NO: 2568907 - RNA, 13 nt, Human
uaagcccccgcug

SEQ ID NO: 2568908 - RNA, 17 nt, Human
uaagccucauauuuaaa

SEQ ID NO: 2568909 - RNA, 17 nt, Human
uaagccuaccugcucuc

SEQ ID NO: 2568910 - RNA, 16 nt, Human
uaagccucauauuuaa

SEQ ID NO: 2568911 - RNA, 16 nt, Human
uaagccuaaaaguggg

SEQ ID NO: 2568912 - RNA, 15 nt, Human
uaagccuaccugcuc

SEQ ID NO: 2568913 - RNA, 14 nt, Human
uaagcccuugaaga

SEQ ID NO: 2568914 - RNA, 15 nt, Human
uaagaggcagggucu

SEQ ID NO: 2568915 - RNA, 12 nt, Human
uaagaggcaggg

SEQ ID NO: 2568916 - RNA, 22 nt, Human
uaagccccagcaagcaauccua

SEQ ID NO: 2568917 - RNA, 17 nt, Human
uaagccccagcaagcaa

SEQ ID NO: 2568918 - RNA, 16 nt, Human
uaagccccagcaagca

SEQ ID NO: 2568919 - RNA, 20 nt, Human
uaagccauucugacucauau

SEQ ID NO: 2568920 - RNA, 19 nt, Human
uaagccauucugacucaua

SEQ ID NO: 2568921 - RNA, 15 nt, Human
uaagccaugggagac

SEQ ID NO: 2568922 - RNA, 14 nt, Human
uaaguauuucccag

SEQ ID NO: 2568923 - RNA, 17 nt, Human
uaaguauuugaaacuga

SEQ ID NO: 2568924 - RNA, 15 nt, Human
uaagucaaccugccu

SEQ ID NO: 2568925 - RNA, 17 nt, Human
uaagucaaccugccuga

SEQ ID NO: 2568926 - RNA, 19 nt, Human
uaaggugaaggugaaucua

SEQ ID NO: 2568927 - RNA, 18 nt, Human
uaaggugauauauuuaaa

SEQ ID NO: 2568928 - RNA, 20 nt, Human
uaaggugauauauuuaaaaa

SEQ ID NO: 2568929 - RNA, 20 nt, Human
uaagguggguacgggagggu

SEQ ID NO: 2568930 - RNA, 12 nt, Human
uaaggugcaguu

SEQ ID NO: 2568931 - RNA, 13 nt, Human
uaaggugccuucu

SEQ ID NO: 2568932 - RNA, 15 nt, Human
uaaggugugcucuga

SEQ ID NO: 2568933 - RNA, 13 nt, Human
uaagggaagaauu

SEQ ID NO: 2568934 - RNA, 21 nt, Human
uaagggaaggaacucuggcuu

SEQ ID NO: 2568935 - RNA, 20 nt, Human
uaagggacauguuuugauaa

SEQ ID NO: 2568936 - RNA, 14 nt, Human
uaagggagaaaaaa

SEQ ID NO: 2568937 - RNA, 13 nt, Human
uaaggggcagcuu

SEQ ID NO: 2568938 - RNA, 16 nt, Human
uaaggggcccggccag

SEQ ID NO: 2568939 - RNA, 14 nt, Human
uaagggcagaguca

SEQ ID NO: 2568940 - RNA, 13 nt, Human
uaagggcagaguc

SEQ ID NO: 2568941 - RNA, 22 nt, Human
uaagggcuggucucugcugaag

SEQ ID NO: 2568942 - RNA, 17 nt, Human
uaaggguaucuggugac

SEQ ID NO: 2568943 - RNA, 15 nt, Human
uaaggguuaagaaaa

SEQ ID NO: 2568944 - RNA, 20 nt, Human
uaaggguuaguuuacaauca

SEQ ID NO: 2568945 - RNA, 21 nt, Human
uaagguaccuuucacauagag

SEQ ID NO: 2568946 - RNA, 13 nt, Human
uaaggguuuuaga

SEQ ID NO: 2568947 - RNA, 18 nt, Human
uaaggucauuaccacagg

SEQ ID NO: 2568948 - RNA, 20 nt, Human
uaaguccuuuauguggaaaa

SEQ ID NO: 2568949 - RNA, 17 nt, Human
uaaguccuuuaugugga

SEQ ID NO: 2568950 - RNA, 15 nt, Human
uaaguccuuuaugug

SEQ ID NO: 2568951 - RNA, 18 nt, Human
uaagucuaaauauuuccu

SEQ ID NO: 2568952 - RNA, 21 nt, Human
uaagucauguuccuucaagau

SEQ ID NO: 2568953 - RNA, 19 nt, Human
uaagucauguuccuucaag

SEQ ID NO: 2568954 - RNA, 22 nt, Human
uaagucauguuccuucaagauc

SEQ ID NO: 2568955 - RNA, 20 nt, Human
uaaguccuugcaagaaucag

SEQ ID NO: 2568956 - RNA, 13 nt, Human
uaagucuguuuua

SEQ ID NO: 2568957 - RNA, 16 nt, Human
uaagucuguuuuauga

SEQ ID NO: 2568958 - RNA, 19 nt, Human
uaagucuguuuuaugacuu

SEQ ID NO: 2568959 - RNA, 20 nt, Human
uaagucuguuuuaugacuuc

SEQ ID NO: 2568960 - RNA, 21 nt, Human
uaagucuguuuuaugacuuca

SEQ ID NO: 2568961 - RNA, 20 nt, Human
uaagucuuaucaagcagcca

SEQ ID NO: 2568962 - RNA, 22 nt, Human
uaagucuuaucaagcagccaag

SEQ ID NO: 2568963 - RNA, 13 nt, Human
uaagugaaauaag

SEQ ID NO: 2568964 - RNA, 16 nt, Human
uaagugaaaaggucau

SEQ ID NO: 2568965 - RNA, 23 nt, Human
uaagugaggaugaaaaaauaaca

SEQ ID NO: 2568966 - RNA, 12 nt, Human
uaagugagagag

SEQ ID NO: 2568967 - RNA, 22 nt, Human
uaagugauugcugguuuuaguu

SEQ ID NO: 2568968 - RNA, 19 nt, Human
uaagugcguguguagaguu

SEQ ID NO: 2568969 - RNA, 18 nt, Human
uaagugcguguguagagu

SEQ ID NO: 2568970 - RNA, 17 nt, Human
uaagugcguguguagag

SEQ ID NO: 2568971 - RNA, 16 nt, Human
uaagugcguguguaga

SEQ ID NO: 2568972 - RNA, 16 nt, Human
uaagugccuuccaugu

SEQ ID NO: 2568973 - RNA, 14 nt, Human
uaagugccuuccau

SEQ ID NO: 2568974 - RNA, 13 nt, Human
uaagugccuucca

SEQ ID NO: 2568975 - RNA, 14 nt, Human
uaagugcugcauuu

SEQ ID NO: 2568976 - RNA, 22 nt, Human
uaagugcacaacauuacaggga

SEQ ID NO: 2568977 - RNA, 14 nt, Human
uaagugcacaacau

SEQ ID NO: 2568978 - RNA, 18 nt, Human
uaagugauuuuuuugucc

SEQ ID NO: 2568979 - RNA, 16 nt, Human
uaagugauuguaugaa

SEQ ID NO: 2568980 - RNA, 22 nt, Human
uaagugccaggauggaaugaug

SEQ ID NO: 2568981 - RNA, 15 nt, Human
uaagugcugcauuua

SEQ ID NO: 2568982 - RNA, 16 nt, Human
uaagugcugcauuuaa

SEQ ID NO: 2568983 - RNA, 18 nt, Human
uaagugcugcauuuaaaa

SEQ ID NO: 2568984 - RNA, 22 nt, Human
uaagugcugcauuuaaaagaua

SEQ ID NO: 2568985 - RNA, 16 nt, Human
uaagugguguguguau

SEQ ID NO: 2568986 - RNA, 23 nt, Human
uaagugcguguguagaguuaaga

SEQ ID NO: 2568987 - RNA, 12 nt, Human
uaagugcuguau

SEQ ID NO: 2568988 - RNA, 15 nt, Human
uaaguggugugugua

SEQ ID NO: 2568989 - RNA, 15 nt, Human
uaagugugaacugga

SEQ ID NO: 2568990 - RNA, 14 nt, Human
uaagugugaacugg

SEQ ID NO: 2568991 - RNA, 12 nt, Human
uaagugugaacu

SEQ ID NO: 2568992 - RNA, 18 nt, Human
uaaguguauuuuucaaua

SEQ ID NO: 2568993 - RNA, 20 nt, Human
uaaguguauuuuucaauaaa

SEQ ID NO: 2568994 - RNA, 14 nt, Human
uaaguguacauaug

SEQ ID NO: 2568995 - RNA, 21 nt, Human
uaagugcguguguagaguuaa

SEQ ID NO: 2568996 - RNA, 18 nt, Human
uaaguguacauaugugcu

SEQ ID NO: 2568997 - RNA, 13 nt, Human
uaaguguauuuuu

SEQ ID NO: 2568998 - RNA, 22 nt, Human
uaauaagacauaacguuuuucc

SEQ ID NO: 2568999 - RNA, 20 nt, Human
uaauaagacauaacguuuuu

SEQ ID NO: 2569000 - RNA, 19 nt, Human
uaauaagacauaacguuuu

SEQ ID NO: 2569001 - RNA, 17 nt, Human
uaauaagacauaacguu

SEQ ID NO: 2569002 - RNA, 14 nt, Human
uaauaagacauaac

SEQ ID NO: 2569003 - RNA, 12 nt, Human
uaauaagacaua

SEQ ID NO: 2569004 - RNA, 19 nt, Human
uaauaagaaugguugccuu

SEQ ID NO: 2569005 - RNA, 21 nt, Human
uaauaacugugaaguuuacau

SEQ ID NO: 2569006 - RNA, 19 nt, Human
uaauaaauauuuuugccau

SEQ ID NO: 2569007 - RNA, 22 nt, Human
uaauaauauacuuguggacuaa

SEQ ID NO: 2569008 - RNA, 13 nt, Human
uaauaauauaugu

SEQ ID NO: 2569009 - RNA, 18 nt, Human
uaauaagcuaaagaggcu

SEQ ID NO: 2569010 - RNA, 12 nt, Human
uaauaaagcugu

SEQ ID NO: 2569011 - RNA, 22 nt, Human
uaagugugaacuggacccuguu

SEQ ID NO: 2569012 - RNA, 11 nt, Human
uaauaaagcug

SEQ ID NO: 2569013 - RNA, 12 nt, Human
uaauaaauauga

SEQ ID NO: 2569014 - RNA, 23 nt, Human
uaaguguauuuuucaauaaagca

SEQ ID NO: 2569015 - RNA, 15 nt, Human
uaauaaauauuuaug

SEQ ID NO: 2569016 - RNA, 16 nt, Human
uaauaaauauuuaugu

SEQ ID NO: 2569017 - RNA, 14 nt, Human
uaucauagaaaugu

SEQ ID NO: 2569018 - RNA, 15 nt, Human
uaucauagaaaugua

SEQ ID NO: 2569019 - RNA, 20 nt, Human
uaucaguuuguccuguagag

SEQ ID NO: 2569020 - RNA, 20 nt, Human
uaucagucaauauuuuuaga

SEQ ID NO: 2569021 - RNA, 21 nt, Human
uaucagucaauauuuuuagau

SEQ ID NO: 2569022 - RNA, 23 nt, Human
uaucaguuugcuagcagaaaucu

SEQ ID NO: 2569023 - RNA, 20 nt, Human
uaucaggugcugccauccag

SEQ ID NO: 2569024 - RNA, 9 nt, Human
uaucaguag

SEQ ID NO: 2569025 - RNA, 16 nt, Human
uaucaaacugaagcca

SEQ ID NO: 2569026 - RNA, 13 nt, Human
uaucaaacugaag

SEQ ID NO: 2569027 - RNA, 19 nt, Human
uaucaggugcugccaucca

SEQ ID NO: 2569028 - RNA, 14 nt, Human
uaucaaaagaaaga

SEQ ID NO: 2569029 - RNA, 20 nt, Human
uaucaaacagaauuuuaaag

SEQ ID NO: 2569030 - RNA, 14 nt, Human
uaucaugacauguu

SEQ ID NO: 2569031 - RNA, 13 nt, Human
uaucaugacaugu

SEQ ID NO: 2569032 - RNA, 17 nt, Human
uaucaugacaaagacug

SEQ ID NO: 2569033 - RNA, 16 nt, Human
uaucaugagugaauaa

SEQ ID NO: 2569034 - RNA, 15 nt, Human
uaucaugcaaaugcu

SEQ ID NO: 2569035 - RNA, 16 nt, Human
uaucaugcaaaugcug

SEQ ID NO: 2569036 - RNA, 17 nt, Human
uaucaugcaaaugcugu

SEQ ID NO: 2569037 - RNA, 15 nt, Human
uaucauauugguauu

SEQ ID NO: 2569038 - RNA, 21 nt, Human
uaucaucagcauaccuuuauu

SEQ ID NO: 2569039 - RNA, 14 nt, Human
uaucaucaguauug

SEQ ID NO: 2569040 - RNA, 15 nt, Human
uaucaucaguauuga

SEQ ID NO: 2569041 - RNA, 23 nt, Human
uaucauagaaauguaacuuuugu

SEQ ID NO: 2569042 - RNA, 18 nt, Human
uaucauagaaauguaacu

SEQ ID NO: 2569043 - RNA, 14 nt, Human
uaucauucaagugu

SEQ ID NO: 2569044 - RNA, 13 nt, Human
uaucauucaagug

SEQ ID NO: 2569045 - RNA, 14 nt, Human
uaucauuaaaguuc

SEQ ID NO: 2569046 - RNA, 13 nt, Human
uaucauuaaaguu

SEQ ID NO: 2569047 - RNA, 12 nt, Human
uaucauuaaagu

SEQ ID NO: 2569048 - RNA, 22 nt, Human
uaucauguguaaucaauaaacg

SEQ ID NO: 2569049 - RNA, 20 nt, Human
uaucauguguaaucaauaaa

SEQ ID NO: 2569050 - RNA, 17 nt, Human
uaucauggucucaguca

SEQ ID NO: 2569051 - RNA, 17 nt, Human
uaucaugcauguccugu

SEQ ID NO: 2569052 - RNA, 19 nt, Human
uaucaugcauguccuguaa

SEQ ID NO: 2569053 - RNA, 14 nt, Human
uaucaugcccugug

SEQ ID NO: 2569054 - RNA, 12 nt, Human
uaucaugcauuc

SEQ ID NO: 2569055 - RNA, 12 nt, Human
uaucauggucuc

SEQ ID NO: 2569056 - RNA, 18 nt, Human
uaucaugccccuguacuc

SEQ ID NO: 2569057 - RNA, 15 nt, Human
uaucauggagugacg

SEQ ID NO: 2569058 - RNA, 19 nt, Human
uaucaaaacuuucuuuucu

SEQ ID NO: 2569059 - RNA, 21 nt, Human
uauauuuuuuguuaaaugauu

SEQ ID NO: 2569060 - RNA, 13 nt, Human
uauauuuuuauau

SEQ ID NO: 2569061 - RNA, 19 nt, Human
uauauuuuuaagauaauaa

SEQ ID NO: 2569062 - RNA, 17 nt, Human
uauauuuuuaagauaau

SEQ ID NO: 2569063 - RNA, 20 nt, Human
uauauuuuuaagauaauaau

SEQ ID NO: 2569064 - RNA, 15 nt, Human
uauauuuuuaagaua

SEQ ID NO: 2569065 - RNA, 14 nt, Human
uauauuuucuguuu

SEQ ID NO: 2569066 - RNA, 12 nt, Human
uauauuuuggga

SEQ ID NO: 2569067 - RNA, 13 nt, Human
uauauuuugggaa

SEQ ID NO: 2569068 - RNA, 24 nt, Human
uauauuuucaugacuuuuccaugu

SEQ ID NO: 2569069 - RNA, 14 nt, Human
uauauuuguacaaa

SEQ ID NO: 2569070 - RNA, 21 nt, Human
uauauuugugauagcacuuuc

SEQ ID NO: 2569071 - RNA, 23 nt, Human
uauauuuucaugacuuuuccaug

SEQ ID NO: 2569072 - RNA, 15 nt, Human
uauauuuguacaaaa

SEQ ID NO: 2569073 - RNA, 13 nt, Human
uauauuuguacaa

SEQ ID NO: 2569074 - RNA, 12 nt, Human
uauauuuguaca

SEQ ID NO: 2569075 - RNA, 20 nt, Human
uauauuuguaaauuuaugug

SEQ ID NO: 2569076 - RNA, 22 nt, Human
uauauuugggccugcuccagac

SEQ ID NO: 2569077 - RNA, 14 nt, Human
uauauuugcuuuuu

SEQ ID NO: 2569078 - RNA, 20 nt, Human
uauauuugaaauauugacuu

SEQ ID NO: 2569079 - RNA, 13 nt, Human
uauauggauaaug

SEQ ID NO: 2569080 - RNA, 18 nt, Human
uauauggaugauucagaa

SEQ ID NO: 2569081 - RNA, 16 nt, Human
uauauggaugauucag

SEQ ID NO: 2569082 - RNA, 19 nt, Human
uauauggaugauucagaaa

SEQ ID NO: 2569083 - RNA, 16 nt, Human
uauaugcuucuguuuu

SEQ ID NO: 2569084 - RNA, 19 nt, Human
uauaugaagaaaaucacuu

SEQ ID NO: 2569085 - RNA, 14 nt, Human
uauaugcuucuguu

SEQ ID NO: 2569086 - RNA, 14 nt, Human
uauaucuuuuucca

SEQ ID NO: 2569087 - RNA, 18 nt, Human
uauaugaagaaaaucacu

SEQ ID NO: 2569088 - RNA, 22 nt, Human
uauauaagauggaagcuuccag

SEQ ID NO: 2569089 - RNA, 18 nt, Human
uauauaagauggaagcuu

SEQ ID NO: 2569090 - RNA, 13 nt, Human
uauaucugcuguc

SEQ ID NO: 2569091 - RNA, 12 nt, Human
uauaucuuguuu

SEQ ID NO: 2569092 - RNA, 14 nt, Human
uauaucuguauaua

SEQ ID NO: 2569093 - RNA, 17 nt, Human
uauaucugcuucagugg

SEQ ID NO: 2569094 - RNA, 16 nt, Human
uauaucugcuucagug

SEQ ID NO: 2569095 - RNA, 17 nt, Human
uauaucugcuguccaga

SEQ ID NO: 2569096 - RNA, 15 nt, Human
uauaucuguauauaa

SEQ ID NO: 2569097 - RNA, 19 nt, Human
uauauaacaaugcuguauu

SEQ ID NO: 2569098 - RNA, 17 nt, Human
uauauaacaaugcugua

SEQ ID NO: 2569099 - RNA, 22 nt, Human
uauauaaaccuaaaaaagauau

SEQ ID NO: 2569100 - RNA, 21 nt, Human
uauauaaaccuaaaaaagaua

SEQ ID NO: 2569101 - RNA, 17 nt, Human
uauauaaaccuaaaaaa

SEQ ID NO: 2569102 - RNA, 15 nt, Human
uauauaaaccuaaaa

SEQ ID NO: 2569103 - RNA, 14 nt, Human
uauauaaaccuaaa

SEQ ID NO: 2569104 - RNA, 21 nt, Human
uauauaaaauauuuucauaca

SEQ ID NO: 2569105 - RNA, 23 nt, Human
uauauaaaauaaauauauauaaa

SEQ ID NO: 2569106 - RNA, 23 nt, Human
uauauaaaggaaaaaagagaagu

SEQ ID NO: 2569107 - RNA, 20 nt, Human
uauagguuuuguuugcuauc

SEQ ID NO: 2569108 - RNA, 18 nt, Human
uauagguuuuguuugcua

SEQ ID NO: 2569109 - RNA, 22 nt, Human
uauagagauguuuuuaaaaguu

SEQ ID NO: 2569110 - RNA, 21 nt, Human
uauagaggcuagcuucugcuu

SEQ ID NO: 2569111 - RNA, 18 nt, Human
uauaguauaucuggacaa

SEQ ID NO: 2569112 - RNA, 13 nt, Human
uauaguauaucug

SEQ ID NO: 2569113 - RNA, 22 nt, Human
uauauaaaauaaauauauauaa

SEQ ID NO: 2569114 - RNA, 19 nt, Human
uauauaaaauaaauauaua

SEQ ID NO: 2569115 - RNA, 18 nt, Human
uauauaaaauaaauauau

SEQ ID NO: 2569116 - RNA, 17 nt, Human
uauauaaaauaaauaua

SEQ ID NO: 2569117 - RNA, 16 nt, Human
uauauaaaauaaauau

SEQ ID NO: 2569118 - RNA, 23 nt, Human
uauauaaaaagaaaagauaaaga

SEQ ID NO: 2569119 - RNA, 20 nt, Human
uauauaaaaagaaaagauaa

SEQ ID NO: 2569120 - RNA, 19 nt, Human
uauauaaaaagaaaagaua

SEQ ID NO: 2569121 - RNA, 18 nt, Human
uauauaaaaagaaaagau

SEQ ID NO: 2569122 - RNA, 12 nt, Human
uauauaaaaaga

SEQ ID NO: 2569123 - RNA, 22 nt, Human
uauaguuuuacuuuuaaacugu

SEQ ID NO: 2569124 - RNA, 23 nt, Human
uauaguuuuacuuuuaaacugug

SEQ ID NO: 2569125 - RNA, 13 nt, Human
uauagugauguaa

SEQ ID NO: 2569126 - RNA, 18 nt, Human
uauagugauguaaucuug

SEQ ID NO: 2569127 - RNA, 17 nt, Human
uauaguuuuacuuuuaa

SEQ ID NO: 2569128 - RNA, 13 nt, Human
uauaguccagcuu

SEQ ID NO: 2569129 - RNA, 20 nt, Human
uauagucccagcuacucaga

SEQ ID NO: 2569130 - RNA, 11 nt, Human
uauacuuuuuu

SEQ ID NO: 2569131 - RNA, 17 nt, Human
uauaaauaggagaggau

SEQ ID NO: 2569132 - RNA, 13 nt, Human
uauaaauaggaga

SEQ ID NO: 2569133 - RNA, 14 nt, Human
uauagaaacacgaa

SEQ ID NO: 2569134 - RNA, 17 nt, Human
uauacuuuuuucuuauu

SEQ ID NO: 2569135 - RNA, 21 nt, Human
uauacuuuuuucuuauuuaac

SEQ ID NO: 2569136 - RNA, 19 nt, Human
uauacuuuuuucuuauuua

SEQ ID NO: 2569137 - RNA, 15 nt, Human
uauaaauaaauauau

SEQ ID NO: 2569138 - RNA, 14 nt, Human
uauaaauaaauaua

SEQ ID NO: 2569139 - RNA, 13 nt, Human
uauaaauaaauau

SEQ ID NO: 2569140 - RNA, 12 nt, Human
uauaaauaaaua

SEQ ID NO: 2569141 - RNA, 17 nt, Human
uauaaauaaauauauau

SEQ ID NO: 2569142 - RNA, 16 nt, Human
uauaaauaaauauaua

SEQ ID NO: 2569143 - RNA, 18 nt, Human
uauaaauaaauauauaua

SEQ ID NO: 2569144 - RNA, 16 nt, Human
uauaaaguaguccugu

SEQ ID NO: 2569145 - RNA, 18 nt, Human
uauaaaguaguccuguga

SEQ ID NO: 2569146 - RNA, 16 nt, Human
uauaaaguaaagcuaa

SEQ ID NO: 2569147 - RNA, 15 nt, Human
uauaaaguaaagcua

SEQ ID NO: 2569148 - RNA, 19 nt, Human
uauaaacuaucaguuuguc

SEQ ID NO: 2569149 - RNA, 22 nt, Human
uauaaaccucuaauuuauuuug

SEQ ID NO: 2569150 - RNA, 23 nt, Human
uauaaacuuagugcggacaaguu

SEQ ID NO: 2569151 - RNA, 16 nt, Human
uauaaagguugacaau

SEQ ID NO: 2569152 - RNA, 15 nt, Human
uauagaauauuuauu

SEQ ID NO: 2569153 - RNA, 21 nt, Human
uauagaauauuuauuaccucu

SEQ ID NO: 2569154 - RNA, 16 nt, Human
uauagacaaauaauaa

SEQ ID NO: 2569155 - RNA, 11 nt, Human
uauagacucua

SEQ ID NO: 2569156 - RNA, 21 nt, Human
uauagagauaugcagaaggaa

SEQ ID NO: 2569157 - RNA, 17 nt, Human
uauagagauaugcagaa

SEQ ID NO: 2569158 - RNA, 15 nt, Human
uauagagauaugcag

SEQ ID NO: 2569159 - RNA, 16 nt, Human
uauagacccgaggaaa

SEQ ID NO: 2569160 - RNA, 18 nt, Human
uauagaacugaaugagaa

SEQ ID NO: 2569161 - RNA, 17 nt, Human
uauagaacugaaugaga

SEQ ID NO: 2569162 - RNA, 11 nt, Human
uauagaaaugc

SEQ ID NO: 2569163 - RNA, 15 nt, Human
uauaaacuuuaccuu

SEQ ID NO: 2569164 - RNA, 16 nt, Human
uauaaacuuuaccuuu

SEQ ID NO: 2569165 - RNA, 19 nt, Human
uauaaaccucuaauuuauu

SEQ ID NO: 2569166 - RNA, 20 nt, Human
uauaaaccuaaaaaagauau

SEQ ID NO: 2569167 - RNA, 19 nt, Human
uauaaaccuaaaaaagaua

SEQ ID NO: 2569168 - RNA, 18 nt, Human
uauaaaccuaaaaaagau

SEQ ID NO: 2569169 - RNA, 17 nt, Human
uauaaacuuuaccuuuu

SEQ ID NO: 2569170 - RNA, 13 nt, Human
uauaaacuuuacc

SEQ ID NO: 2569171 - RNA, 14 nt, Human
uauaaacuuuaccu

SEQ ID NO: 2569172 - RNA, 16 nt, Human
uauaaaccuaaaaaag

SEQ ID NO: 2569173 - RNA, 15 nt, Human
uauaaaccuaaaaaa

SEQ ID NO: 2569174 - RNA, 11 nt, Human
uauaaacuuua

SEQ ID NO: 2569175 - RNA, 16 nt, Human
uaguuugauuaaauuc

SEQ ID NO: 2569176 - RNA, 21 nt, Human
uaguuugauuaaauucuugca

SEQ ID NO: 2569177 - RNA, 12 nt, Human
uaguuucuugug

SEQ ID NO: 2569178 - RNA, 20 nt, Human
uaguuucuguucuguggaaa

SEQ ID NO: 2569179 - RNA, 17 nt, Human
uaguuuaccucuuuaaa

SEQ ID NO: 2569180 - RNA, 15 nt, Human
uaguuugauuaaauu

SEQ ID NO: 2569181 - RNA, 14 nt, Human
uauaaacaucacac

SEQ ID NO: 2569182 - RNA, 22 nt, Human
uauaaacaugcuugcauuauau

SEQ ID NO: 2569183 - RNA, 18 nt, Human
uauaaacaucacacacac

SEQ ID NO: 2569184 - RNA, 17 nt, Human
uauaaacaucacacaca

SEQ ID NO: 2569185 - RNA, 14 nt, Human
uaguuucuuuggga

SEQ ID NO: 2569186 - RNA, 14 nt, Human
uauaaacacuauau

SEQ ID NO: 2569187 - RNA, 23 nt, Human
uaguggauuacugccauucacuu

SEQ ID NO: 2569188 - RNA, 16 nt, Human
uaguauuuauuuaaug

SEQ ID NO: 2569189 - RNA, 18 nt, Human
uagugggcaccccacugc

SEQ ID NO: 2569190 - RNA, 20 nt, Human
uaguggcuucauuagagcag

SEQ ID NO: 2569191 - RNA, 14 nt, Human
uaguggcuucaaaa

SEQ ID NO: 2569192 - RNA, 13 nt, Human
uaguggcugucca

SEQ ID NO: 2569193 - RNA, 20 nt, Human
uaguggcuuaaaacaacacu

SEQ ID NO: 2569194 - RNA, 17 nt, Human
uaguauuguccaggucu

SEQ ID NO: 2569195 - RNA, 15 nt, Human
uaguaugaggcauuu

SEQ ID NO: 2569196 - RNA, 16 nt, Human
uaguaugguggcuggg

SEQ ID NO: 2569197 - RNA, 20 nt, Human
uaguuguuugauucagacag

SEQ ID NO: 2569198 - RNA, 16 nt, Human
uaguugagccagcaga

SEQ ID NO: 2569199 - RNA, 22 nt, Human
uaguuguuugauucagacagcu

SEQ ID NO: 2569200 - RNA, 21 nt, Human
uaguuguuugauucagacagc

SEQ ID NO: 2569201 - RNA, 16 nt, Human
uaguggucuuuguaag

SEQ ID NO: 2569202 - RNA, 18 nt, Human
uaguggggucucccucuc

SEQ ID NO: 2569203 - RNA, 20 nt, Human
uaguggggucucccucuccu

SEQ ID NO: 2569204 - RNA, 21 nt, Human
uaguggggucucccucuccug

SEQ ID NO: 2569205 - RNA, 22 nt, Human
uaguggggucucccucuccugc

SEQ ID NO: 2569206 - RNA, 15 nt, Human
uaguggucuuuguaa

SEQ ID NO: 2569207 - RNA, 14 nt, Human
uaguggucuuugua

SEQ ID NO: 2569208 - RNA, 13 nt, Human
uaguggucuuugu

SEQ ID NO: 2569209 - RNA, 23 nt, Human
uaguggggucucccucuccugcc

SEQ ID NO: 2569210 - RNA, 22 nt, Human
uaguugaacugauaguuacugu

SEQ ID NO: 2569211 - RNA, 20 nt, Human
uaguugaacugauaguuacu

SEQ ID NO: 2569212 - RNA, 18 nt, Human
uaguugaacugauaguua

SEQ ID NO: 2569213 - RNA, 15 nt, Human
uaguucuuuggaaau

SEQ ID NO: 2569214 - RNA, 14 nt, Human
uaguugaacugaua

SEQ ID NO: 2569215 - RNA, 16 nt, Human
uaggugacagagugag

SEQ ID NO: 2569216 - RNA, 11 nt, Human
uaggugacaga

SEQ ID NO: 2569217 - RNA, 14 nt, Human
uaggucucuucccc

SEQ ID NO: 2569218 - RNA, 19 nt, Human
uaggucucggacuaagccu

SEQ ID NO: 2569219 - RNA, 17 nt, Human
uaggucugauauucaaa

SEQ ID NO: 2569220 - RNA, 11 nt, Human
uagggaaaaac

SEQ ID NO: 2569221 - RNA, 15 nt, Human
uaggucucaauaccu

SEQ ID NO: 2569222 - RNA, 20 nt, Human
uaggugcuacaaaaacacag

SEQ ID NO: 2569223 - RNA, 22 nt, Human
uaggugcuacaaaaacacagca

SEQ ID NO: 2569224 - RNA, 23 nt, Human
uaggugcuacaaaaacacagcaa

SEQ ID NO: 2569225 - RNA, 21 nt, Human
uaggucuuaauacacacaguu

SEQ ID NO: 2569226 - RNA, 16 nt, Human
uagguggaucaccuga

SEQ ID NO: 2569227 - RNA, 18 nt, Human
uagcuguacaaauauaag

SEQ ID NO: 2569228 - RNA, 16 nt, Human
uagcuguacaaauaua

SEQ ID NO: 2569229 - RNA, 12 nt, Human
uagcuguacaaa

SEQ ID NO: 2569230 - RNA, 14 nt, Human
uagcuguauugaau

SEQ ID NO: 2569231 - RNA, 12 nt, Human
uagcuguauuga

SEQ ID NO: 2569232 - RNA, 15 nt, Human
uagcugucuagagua

SEQ ID NO: 2569233 - RNA, 17 nt, Human
uagcuguaaggcaugaa

SEQ ID NO: 2569234 - RNA, 19 nt, Human
uagcuguaaggcaugaagg

SEQ ID NO: 2569235 - RNA, 12 nt, Human
uagcuguaaggc

SEQ ID NO: 2569236 - RNA, 22 nt, Human
uagcugguuuccucauuccuga

SEQ ID NO: 2569237 - RNA, 22 nt, Human
uagcuggucuuauuuguaaagc

SEQ ID NO: 2569238 - RNA, 20 nt, Human
uagcugggggugggccaggc

SEQ ID NO: 2569239 - RNA, 23 nt, Human
uagcugcauccuccaagaaucua

SEQ ID NO: 2569240 - RNA, 17 nt, Human
uagcuggugguuucacg

SEQ ID NO: 2569241 - RNA, 14 nt, Human
uagcuggugguuuc

SEQ ID NO: 2569242 - RNA, 20 nt, Human
uagcugguuggagagcuaga

SEQ ID NO: 2569243 - RNA, 21 nt, Human
uaggcuggagaagcucaccca

SEQ ID NO: 2569244 - RNA, 19 nt, Human
uaggcuggagaagcucacc

SEQ ID NO: 2569245 - RNA, 17 nt, Human
uaggcuggagaagcuca

SEQ ID NO: 2569246 - RNA, 15 nt, Human
uaggcuggagaagcu

SEQ ID NO: 2569247 - RNA, 14 nt, Human
uaggcuggagaagc

SEQ ID NO: 2569248 - RNA, 12 nt, Human
uaggcuggagaa

SEQ ID NO: 2569249 - RNA, 17 nt, Human
uagcugucuagaguagc

SEQ ID NO: 2569250 - RNA, 16 nt, Human
uagcuguauugaauca

SEQ ID NO: 2569251 - RNA, 21 nt, Human
uagcugucugcucagacagaa

SEQ ID NO: 2569252 - RNA, 18 nt, Human
uaggcuuaguuugugugu

SEQ ID NO: 2569253 - RNA, 18 nt, Human
uaggcugguggcccagga

SEQ ID NO: 2569254 - RNA, 19 nt, Human
uaggcugguggcccaggac

SEQ ID NO: 2569255 - RNA, 15 nt, Human
uaggcugguggccca

SEQ ID NO: 2569256 - RNA, 16 nt, Human
uaggcugguggcccag

SEQ ID NO: 2569257 - RNA, 16 nt, Human
uaggcuggagcccagg

SEQ ID NO: 2569258 - RNA, 19 nt, Human
uaggcuggagcccagggag

SEQ ID NO: 2569259 - RNA, 21 nt, Human
uaggugugacugaauuucuuu

SEQ ID NO: 2569260 - RNA, 23 nt, Human
uaggugugacugaauuucuuuug

SEQ ID NO: 2569261 - RNA, 19 nt, Human
uaggugugacugaauuucu

SEQ ID NO: 2569262 - RNA, 15 nt, Human
uagguggcaaggcug

SEQ ID NO: 2569263 - RNA, 16 nt, Human
uagguggcaaggcugu

SEQ ID NO: 2569264 - RNA, 16 nt, Human
uaggugggccagcccc

SEQ ID NO: 2569265 - RNA, 19 nt, Human
uaggugggccagccccucc

SEQ ID NO: 2569266 - RNA, 20 nt, Human
uaggugggccagccccuccc

SEQ ID NO: 2569267 - RNA, 21 nt, Human
uaggugggccagccccuccca

SEQ ID NO: 2569268 - RNA, 23 nt, Human
uaggugggccagccccucccacc

SEQ ID NO: 2569269 - RNA, 14 nt, Human
uagguucagccaag

SEQ ID NO: 2569270 - RNA, 17 nt, Human
uagguuaaaaaaaggca

SEQ ID NO: 2569271 - RNA, 22 nt, Human
uagguguugauuuucuguugua

SEQ ID NO: 2569272 - RNA, 22 nt, Human
uagguuaauuccaauuauauga

SEQ ID NO: 2569273 - RNA, 16 nt, Human
uaggugucauuuccau

SEQ ID NO: 2569274 - RNA, 13 nt, Human
uagguguggggga

SEQ ID NO: 2569275 - RNA, 17 nt, Human
uaggugugggggaagca

SEQ ID NO: 2569276 - RNA, 15 nt, Human
uagguucagccaagg

SEQ ID NO: 2569277 - RNA, 12 nt, Human
uagguucuaaaa

SEQ ID NO: 2569278 - RNA, 12 nt, Human
uaguagauuuua

SEQ ID NO: 2569279 - RNA, 17 nt, Human
uaguaugaggcauuugu

SEQ ID NO: 2569280 - RNA, 18 nt, Human
uaguaugaggcauuuguu

SEQ ID NO: 2569281 - RNA, 19 nt, Human
uaguagcccuuucugugug

SEQ ID NO: 2569282 - RNA, 18 nt, Human
uaguagcccuuucugugu

SEQ ID NO: 2569283 - RNA, 17 nt, Human
uaguagcccuuucugug

SEQ ID NO: 2569284 - RNA, 14 nt, Human
uaguagcauguuga

SEQ ID NO: 2569285 - RNA, 16 nt, Human
uaguagcccuuucugu

SEQ ID NO: 2569286 - RNA, 16 nt, Human
uagcauacguacacau

SEQ ID NO: 2569287 - RNA, 17 nt, Human
uagcauacguacacauu

SEQ ID NO: 2569288 - RNA, 18 nt, Human
uagcauacguacacauuu

SEQ ID NO: 2569289 - RNA, 19 nt, Human
uagcauacguacacauuuu

SEQ ID NO: 2569290 - RNA, 15 nt, Human
uagcagcuuccagau

SEQ ID NO: 2569291 - RNA, 14 nt, Human
uagcagcuuccaga

SEQ ID NO: 2569292 - RNA, 11 nt, Human
uagcagcugga

SEQ ID NO: 2569293 - RNA, 10 nt, Human
uagcagcugg

SEQ ID NO: 2569294 - RNA, 14 nt, Human
uagcagcuaucucu

SEQ ID NO: 2569295 - RNA, 11 nt, Human
uagcagggaaa

SEQ ID NO: 2569296 - RNA, 22 nt, Human
uagcagcggaacaaggagucag

SEQ ID NO: 2569297 - RNA, 23 nt, Human
uagcaucuucuggagucuccagu

SEQ ID NO: 2569298 - RNA, 22 nt, Human
uagcaucuucuggagucuccag

SEQ ID NO: 2569299 - RNA, 16 nt, Human
uagcaucuucuggagu

SEQ ID NO: 2569300 - RNA, 13 nt, Human
uagcaucuucugg

SEQ ID NO: 2569301 - RNA, 23 nt, Human
uagcauaucugccuuuauugugu

SEQ ID NO: 2569302 - RNA, 22 nt, Human
uagcauaucugccuuuauugug

SEQ ID NO: 2569303 - RNA, 21 nt, Human
uagcauaucugccuuuauugu

SEQ ID NO: 2569304 - RNA, 18 nt, Human
uagcauaucugccuuuau

SEQ ID NO: 2569305 - RNA, 12 nt, Human
uagcauaucaau

SEQ ID NO: 2569306 - RNA, 14 nt, Human
uagcauaugaguuu

SEQ ID NO: 2569307 - RNA, 22 nt, Human
uagcaggagaggagagccagag

SEQ ID NO: 2569308 - RNA, 21 nt, Human
uagcaggagaggagagccaga

SEQ ID NO: 2569309 - RNA, 19 nt, Human
uagcaggagaggagagcca

SEQ ID NO: 2569310 - RNA, 17 nt, Human
uagcaggagaggagagc

SEQ ID NO: 2569311 - RNA, 12 nt, Human
uagcagcuggac

SEQ ID NO: 2569312 - RNA, 22 nt, Human
uagcaggacugaauugucccca

SEQ ID NO: 2569313 - RNA, 17 nt, Human
uagcauaucugccuuua

SEQ ID NO: 2569314 - RNA, 16 nt, Human
uagcauaucugccuuu

SEQ ID NO: 2569315 - RNA, 14 nt, Human
uagcauaucugccu

SEQ ID NO: 2569316 - RNA, 23 nt, Human
uagauuccccauugccuccuccu

SEQ ID NO: 2569317 - RNA, 14 nt, Human
uagauuuauuucau

SEQ ID NO: 2569318 - RNA, 15 nt, Human
uagauuuauuucauc

SEQ ID NO: 2569319 - RNA, 20 nt, Human
uagauuuggcuccucugcuu

SEQ ID NO: 2569320 - RNA, 13 nt, Human
uagauuugaccua

SEQ ID NO: 2569321 - RNA, 12 nt, Human
uagauuugaccu

SEQ ID NO: 2569322 - RNA, 24 nt, Human
uagauuuggcuccucugcuucuca

SEQ ID NO: 2569323 - RNA, 18 nt, Human
uagauuagcucuggacca

SEQ ID NO: 2569324 - RNA, 16 nt, Human
uagauuagcucuggac

SEQ ID NO: 2569325 - RNA, 16 nt, Human
uagauuauggagcuuu

SEQ ID NO: 2569326 - RNA, 15 nt, Human
uagauuagcucugga

SEQ ID NO: 2569327 - RNA, 14 nt, Human
uagauuagcucugg

SEQ ID NO: 2569328 - RNA, 20 nt, Human
uagauuagaucuuuuaagcc

SEQ ID NO: 2569329 - RNA, 17 nt, Human
uagauuauggagcuuuu

SEQ ID NO: 2569330 - RNA, 21 nt, Human
uagauuacccccucauuguuu

SEQ ID NO: 2569331 - RNA, 16 nt, Human
uagaguuagacuguug

SEQ ID NO: 2569332 - RNA, 15 nt, Human
uagaguuagacuguu

SEQ ID NO: 2569333 - RNA, 17 nt, Human
uagaguuagacuguugg

SEQ ID NO: 2569334 - RNA, 16 nt, Human
uagauacuguaucaug

SEQ ID NO: 2569335 - RNA, 14 nt, Human
uagauaggccaugg

SEQ ID NO: 2569336 - RNA, 23 nt, Human
uagauagaaauaaauagcuauau

SEQ ID NO: 2569337 - RNA, 12 nt, Human
uagauagaaaua

SEQ ID NO: 2569338 - RNA, 21 nt, Human
uagauagaaauaaauagcuau

SEQ ID NO: 2569339 - RNA, 11 nt, Human
uagauagaaau

SEQ ID NO: 2569340 - RNA, 19 nt, Human
uagcugggacuacaggcac

SEQ ID NO: 2569341 - RNA, 17 nt, Human
uagcugggacuacaggc

SEQ ID NO: 2569342 - RNA, 15 nt, Human
uagcugggacuacag

SEQ ID NO: 2569343 - RNA, 12 nt, Human
uagcugggacua

SEQ ID NO: 2569344 - RNA, 12 nt, Human
uagcucaguuua

SEQ ID NO: 2569345 - RNA, 23 nt, Human
uagcugacccagccccuugagaa

SEQ ID NO: 2569346 - RNA, 21 nt, Human
uagcugacccagccccuugag

SEQ ID NO: 2569347 - RNA, 16 nt, Human
uagcugcaaaggacag

SEQ ID NO: 2569348 - RNA, 23 nt, Human
uagcugcacagggcagcugggcc

SEQ ID NO: 2569349 - RNA, 17 nt, Human
uagcugcaaaggacaga

SEQ ID NO: 2569350 - RNA, 21 nt, Human
uagcugcauccuccaagaauc

SEQ ID NO: 2569351 - RNA, 11 nt, Human
uagcugcagaa

SEQ ID NO: 2569352 - RNA, 12 nt, Human
uagcugcagaac

SEQ ID NO: 2569353 - RNA, 23 nt, Human
uagcugaugaacuuauucuguag

SEQ ID NO: 2569354 - RNA, 21 nt, Human
uagcugaugaacuuauucugu

SEQ ID NO: 2569355 - RNA, 17 nt, Human
uagcugagcgugguggc

SEQ ID NO: 2569356 - RNA, 11 nt, Human
uagcugagugu

SEQ ID NO: 2569357 - RNA, 21 nt, Human
uagcucaggugucccugcacu

SEQ ID NO: 2569358 - RNA, 20 nt, Human
uagcucaggugucccugcac

SEQ ID NO: 2569359 - RNA, 12 nt, Human
uagcucauucuc

SEQ ID NO: 2569360 - RNA, 11 nt, Human
uagcucaguuu

SEQ ID NO: 2569361 - RNA, 18 nt, Human
uagccugugccucuggga

SEQ ID NO: 2569362 - RNA, 20 nt, Human
uagccugugccucugggacu

SEQ ID NO: 2569363 - RNA, 22 nt, Human
uagccuggauauuauucuugua

SEQ ID NO: 2569364 - RNA, 14 nt, Human
uagccugggguggg

SEQ ID NO: 2569365 - RNA, 17 nt, Human
uagccugggccacaggg

SEQ ID NO: 2569366 - RNA, 20 nt, Human
uagccuaauacaacauguag

SEQ ID NO: 2569367 - RNA, 19 nt, Human
uagccagcacuuguauaua

SEQ ID NO: 2569368 - RNA, 20 nt, Human
uagccagcacacagggcagu

SEQ ID NO: 2569369 - RNA, 14 nt, Human
uagccagcugcucc

SEQ ID NO: 2569370 - RNA, 15 nt, Human
uagccagcugcuccc

SEQ ID NO: 2569371 - RNA, 18 nt, Human
uagccagcugcuccccag

SEQ ID NO: 2569372 - RNA, 22 nt, Human
uagccagggggacuagccccug

SEQ ID NO: 2569373 - RNA, 23 nt, Human
uagccaggaucaugguguaauaa

SEQ ID NO: 2569374 - RNA, 22 nt, Human
uagccaggaucaugguguaaua

SEQ ID NO: 2569375 - RNA, 20 nt, Human
uagccaggaucaugguguaa

SEQ ID NO: 2569376 - RNA, 18 nt, Human
uagccaggaucauggugu

SEQ ID NO: 2569377 - RNA, 15 nt, Human
uagccaggaucaugg

SEQ ID NO: 2569378 - RNA, 13 nt, Human
uagccaggaucau

SEQ ID NO: 2569379 - RNA, 13 nt, Human
uagccccauaauu

SEQ ID NO: 2569380 - RNA, 16 nt, Human
uagccaguugaauuua

SEQ ID NO: 2569381 - RNA, 22 nt, Human
uagccaggguguggcccugcca

SEQ ID NO: 2569382 - RNA, 19 nt, Human
uagcaugaggccacugcug

SEQ ID NO: 2569383 - RNA, 15 nt, Human
uagcaugacauuucu

SEQ ID NO: 2569384 - RNA, 16 nt, Human
uagcaugacauuucuu

SEQ ID NO: 2569385 - RNA, 21 nt, Human
uagcaugacaagccccaggca

SEQ ID NO: 2569386 - RNA, 22 nt, Human
uagcaugacaagccccaggcag

SEQ ID NO: 2569387 - RNA, 16 nt, Human
uagcaugacaagcccc

SEQ ID NO: 2569388 - RNA, 17 nt, Human
uagcaugacaagcccca

SEQ ID NO: 2569389 - RNA, 18 nt, Human
uagcaugacaagccccag

SEQ ID NO: 2569390 - RNA, 20 nt, Human
uagcaugacaagccccaggc

SEQ ID NO: 2569391 - RNA, 16 nt, Human
uagccccucuccugga

SEQ ID NO: 2569392 - RNA, 16 nt, Human
uagcccgaauacaaac

SEQ ID NO: 2569393 - RNA, 15 nt, Human
uagcccgaauacaaa

SEQ ID NO: 2569394 - RNA, 18 nt, Human
uagccccuuagcccccac

SEQ ID NO: 2569395 - RNA, 16 nt, Human
uagcccccuggccucu

SEQ ID NO: 2569396 - RNA, 17 nt, Human
uagcccccuggccucug

SEQ ID NO: 2569397 - RNA, 18 nt, Human
uagcccccuggccucugu

SEQ ID NO: 2569398 - RNA, 15 nt, Human
uagcccccuggccuc

SEQ ID NO: 2569399 - RNA, 19 nt, Human
uagcccccaggcugcugga

SEQ ID NO: 2569400 - RNA, 15 nt, Human
uagcccccacccacu

SEQ ID NO: 2569401 - RNA, 18 nt, Human
uagcccccacccacuucc

SEQ ID NO: 2569402 - RNA, 18 nt, Human
uagcccccaggcugcugg

SEQ ID NO: 2569403 - RNA, 20 nt, Human
uagccuaacacacuccaaga

SEQ ID NO: 2569404 - RNA, 12 nt, Human
uagcccgccugc

SEQ ID NO: 2569405 - RNA, 16 nt, Human
uagccgaccucagccu

SEQ ID NO: 2569406 - RNA, 17 nt, Human
uagccgaccucagccuu

SEQ ID NO: 2569407 - RNA, 14 nt, Human
uagccgagagccug

SEQ ID NO: 2569408 - RNA, 15 nt, Human
uagccgagagccugc

SEQ ID NO: 2569409 - RNA, 17 nt, Human
uagccgagagccugcuc

SEQ ID NO: 2569410 - RNA, 18 nt, Human
uagccgagagccugcucc

SEQ ID NO: 2569411 - RNA, 19 nt, Human
uagccgggcaugguggcgc

SEQ ID NO: 2569412 - RNA, 19 nt, Human
uagccgagagccugcuccc

SEQ ID NO: 2569413 - RNA, 16 nt, Human
uagaauguauuguacc

SEQ ID NO: 2569414 - RNA, 13 nt, Human
uagaauguauugu

SEQ ID NO: 2569415 - RNA, 18 nt, Human
uagaauguauuguaccuu

SEQ ID NO: 2569416 - RNA, 17 nt, Human
uagaauguauuguaccu

SEQ ID NO: 2569417 - RNA, 22 nt, Human
uagaauguauuguaccuuuuaa

SEQ ID NO: 2569418 - RNA, 13 nt, Human
uagaauguguuuu

SEQ ID NO: 2569419 - RNA, 20 nt, Human
uagaauguguuuucugaaua

SEQ ID NO: 2569420 - RNA, 18 nt, Human
uagaauguguuuucugaa

SEQ ID NO: 2569421 - RNA, 16 nt, Human
uagaaugauuucaugc

SEQ ID NO: 2569422 - RNA, 15 nt, Human
uagaauccaaacuug

SEQ ID NO: 2569423 - RNA, 23 nt, Human
uagaauccaaacuuggauuuuug

SEQ ID NO: 2569424 - RNA, 21 nt, Human
uagaaugauuucaugcuaucu

SEQ ID NO: 2569425 - RNA, 20 nt, Human
uagaaugaaaauuguauguu

SEQ ID NO: 2569426 - RNA, 12 nt, Human
uagaaugaaaau

SEQ ID NO: 2569427 - RNA, 12 nt, Human
uagaaucuggag

SEQ ID NO: 2569428 - RNA, 17 nt, Human
uagaaugaaaacucauu

SEQ ID NO: 2569429 - RNA, 15 nt, Human
uagaauuaacacaug

SEQ ID NO: 2569430 - RNA, 16 nt, Human
uagaauuaacacauga

SEQ ID NO: 2569431 - RNA, 18 nt, Human
uagaauuaacacaugauc

SEQ ID NO: 2569432 - RNA, 23 nt, Human
uagaauuaguggcacuugcuuuu

SEQ ID NO: 2569433 - RNA, 16 nt, Human
uagaauuauuuaaaca

SEQ ID NO: 2569434 - RNA, 20 nt, Human
uagaauucccucucucugac

SEQ ID NO: 2569435 - RNA, 19 nt, Human
uagaauucccucucucuga

SEQ ID NO: 2569436 - RNA, 15 nt, Human
uagaauucccucucu

SEQ ID NO: 2569437 - RNA, 15 nt, Human
uagaauuauuuaaac

SEQ ID NO: 2569438 - RNA, 12 nt, Human
uagaauuauuua

SEQ ID NO: 2569439 - RNA, 19 nt, Human
uagaauaaaauuguaaaau

SEQ ID NO: 2569440 - RNA, 15 nt, Human
uagaauaaaauugua

SEQ ID NO: 2569441 - RNA, 23 nt, Human
uagaauaccacaggaaccacaag

SEQ ID NO: 2569442 - RNA, 14 nt, Human
uagaauaaaauugu

SEQ ID NO: 2569443 - RNA, 22 nt, Human
uagaaguuuuuguacuguaaag

SEQ ID NO: 2569444 - RNA, 18 nt, Human
uagaaguuuuuguacugu

SEQ ID NO: 2569445 - RNA, 16 nt, Human
uagaaguuuuuguacu

SEQ ID NO: 2569446 - RNA, 14 nt, Human
uagaaguuuuugua

SEQ ID NO: 2569447 - RNA, 13 nt, Human
uagaaguuuuugu

SEQ ID NO: 2569448 - RNA, 18 nt, Human
uagaaguuguuugucauc

SEQ ID NO: 2569449 - RNA, 16 nt, Human
uagaaguuacugaaug

SEQ ID NO: 2569450 - RNA, 20 nt, Human
uagaaguuacugaaugcacc

SEQ ID NO: 2569451 - RNA, 15 nt, Human
uagaaguuacugaau

SEQ ID NO: 2569452 - RNA, 19 nt, Human
uagaagugggccaggacag

SEQ ID NO: 2569453 - RNA, 16 nt, Human
uagaauauccuacuuc

SEQ ID NO: 2569454 - RNA, 20 nt, Human
uagaauauuuauuaccucug

SEQ ID NO: 2569455 - RNA, 14 nt, Human
uagaauccaaacuu

SEQ ID NO: 2569456 - RNA, 21 nt, Human
uagaaucagccuaggggucag

SEQ ID NO: 2569457 - RNA, 19 nt, Human
uagaauauuuauuaccucu

SEQ ID NO: 2569458 - RNA, 15 nt, Human
uagaauauuuauuac

SEQ ID NO: 2569459 - RNA, 12 nt, Human
uagaauauuuau

SEQ ID NO: 2569460 - RNA, 23 nt, Human
uagaauaguguucugcaaaaaua

SEQ ID NO: 2569461 - RNA, 15 nt, Human
uagaauauaauuauc

SEQ ID NO: 2569462 - RNA, 18 nt, Human
uagaauauaauuaucgga

SEQ ID NO: 2569463 - RNA, 20 nt, Human
uacuuuaaaggaaaaaaugu

SEQ ID NO: 2569464 - RNA, 15 nt, Human
uacuuuaaaggaaaa

SEQ ID NO: 2569465 - RNA, 14 nt, Human
uacuuuaaaggaaa

SEQ ID NO: 2569466 - RNA, 21 nt, Human
uacuuuaaaggaaaaaauguu

SEQ ID NO: 2569467 - RNA, 16 nt, Human
uagaaguggaccagga

SEQ ID NO: 2569468 - RNA, 18 nt, Human
uagaaguggaccaggaca

SEQ ID NO: 2569469 - RNA, 19 nt, Human
uagaaguggaccaggacag

SEQ ID NO: 2569470 - RNA, 20 nt, Human
uagaaguggaccaggacagg

SEQ ID NO: 2569471 - RNA, 16 nt, Human
uagaagugggccagga

SEQ ID NO: 2569472 - RNA, 20 nt, Human
uagaagugggccaggacagg

SEQ ID NO: 2569473 - RNA, 19 nt, Human
uacuuguggacuaaaagau

SEQ ID NO: 2569474 - RNA, 16 nt, Human
uacuuguggacuaaaa

SEQ ID NO: 2569475 - RNA, 15 nt, Human
uacuuguggacuaaa

SEQ ID NO: 2569476 - RNA, 14 nt, Human
uacuuguggacaca

SEQ ID NO: 2569477 - RNA, 22 nt, Human
uacuuguucaaaauauguucuu

SEQ ID NO: 2569478 - RNA, 22 nt, Human
uacuuguggacuaaaagauaua

SEQ ID NO: 2569479 - RNA, 20 nt, Human
uacuuguggacuaaaagaua

SEQ ID NO: 2569480 - RNA, 23 nt, Human
uacuuguggacuaaaagauauaa

SEQ ID NO: 2569481 - RNA, 13 nt, Human
uacuuguucaaaa

SEQ ID NO: 2569482 - RNA, 15 nt, Human
uagaguuaagaagcu

SEQ ID NO: 2569483 - RNA, 13 nt, Human
uagaguuaagaag

SEQ ID NO: 2569484 - RNA, 12 nt, Human
uagaguuaagaa

SEQ ID NO: 2569485 - RNA, 17 nt, Human
uagaguuaacaaugaua

SEQ ID NO: 2569486 - RNA, 15 nt, Human
uagaguuaacaauga

SEQ ID NO: 2569487 - RNA, 18 nt, Human
uagaguguuguugagaau

SEQ ID NO: 2569488 - RNA, 16 nt, Human
uagaguguuguugaga

SEQ ID NO: 2569489 - RNA, 23 nt, Human
uagaguuaagaagcuguuguaca

SEQ ID NO: 2569490 - RNA, 19 nt, Human
uagaguuaagaagcuguug

SEQ ID NO: 2569491 - RNA, 17 nt, Human
uagaguuaagaagcugu

SEQ ID NO: 2569492 - RNA, 16 nt, Human
uagaguuaagaagcug

SEQ ID NO: 2569493 - RNA, 14 nt, Human
uagaguuagacugu

SEQ ID NO: 2569494 - RNA, 13 nt, Human
uagaguuagacug

SEQ ID NO: 2569495 - RNA, 14 nt, Human
uagaguugauacua

SEQ ID NO: 2569496 - RNA, 17 nt, Human
uagaguugauacuacag

SEQ ID NO: 2569497 - RNA, 14 nt, Human
uagaguccucacuc

SEQ ID NO: 2569498 - RNA, 17 nt, Human
uagagucugaacagcug

SEQ ID NO: 2569499 - RNA, 20 nt, Human
uagaguccucacucccaguc

SEQ ID NO: 2569500 - RNA, 16 nt, Human
uagaggugagggaagc

SEQ ID NO: 2569501 - RNA, 13 nt, Human
uagaguccucacu

SEQ ID NO: 2569502 - RNA, 19 nt, Human
uagagugagggccugaggu

SEQ ID NO: 2569503 - RNA, 15 nt, Human
uagagugucuuucca

SEQ ID NO: 2569504 - RNA, 16 nt, Human
uagagugagggccuga

SEQ ID NO: 2569505 - RNA, 15 nt, Human
uagagugagggccug

SEQ ID NO: 2569506 - RNA, 12 nt, Human
uagagugggagc

SEQ ID NO: 2569507 - RNA, 14 nt, Human
uagagguucaaaga

SEQ ID NO: 2569508 - RNA, 15 nt, Human
uagagguucaaagau

SEQ ID NO: 2569509 - RNA, 18 nt, Human
uagagacagaagcaggcu

SEQ ID NO: 2569510 - RNA, 15 nt, Human
uagagacagaagcag

SEQ ID NO: 2569511 - RNA, 14 nt, Human
uagagacagaagca

SEQ ID NO: 2569512 - RNA, 23 nt, Human
uagagguaccagcaauauguaaa

SEQ ID NO: 2569513 - RNA, 21 nt, Human
uagagacagaagcaggcugga

SEQ ID NO: 2569514 - RNA, 13 nt, Human
uagagaaggaccc

SEQ ID NO: 2569515 - RNA, 19 nt, Human
uagagaaguauacauaagu

SEQ ID NO: 2569516 - RNA, 22 nt, Human
uagagaaggacccggaggggcc

SEQ ID NO: 2569517 - RNA, 11 nt, Human
uagagacaggg

SEQ ID NO: 2569518 - RNA, 22 nt, Human
uagaauucuagugcugcugaag

SEQ ID NO: 2569519 - RNA, 20 nt, Human
uagaauucuagugcugcuga

SEQ ID NO: 2569520 - RNA, 19 nt, Human
uagaauucuagugcugcug

SEQ ID NO: 2569521 - RNA, 18 nt, Human
uagaauucuagugcugcu

SEQ ID NO: 2569522 - RNA, 16 nt, Human
uagaauucuagugcug

SEQ ID NO: 2569523 - RNA, 23 nt, Human
uagaauuccuucagggugaugcc

SEQ ID NO: 2569524 - RNA, 16 nt, Human
uagaauuccuucaggg

SEQ ID NO: 2569525 - RNA, 21 nt, Human
uagaauucccucucucugacu

SEQ ID NO: 2569526 - RNA, 22 nt, Human
uagaccacaaauagugcucgcu

SEQ ID NO: 2569527 - RNA, 18 nt, Human
uagaccaagcuuguccaa

SEQ ID NO: 2569528 - RNA, 20 nt, Human
uagacccacuggacucaccu

SEQ ID NO: 2569529 - RNA, 15 nt, Human
uagacccaucuucuu

SEQ ID NO: 2569530 - RNA, 23 nt, Human
uagaccauuuaucugggauuaug

SEQ ID NO: 2569531 - RNA, 16 nt, Human
uagacucuuacuuuuu

SEQ ID NO: 2569532 - RNA, 13 nt, Human
uagacucuuacuu

SEQ ID NO: 2569533 - RNA, 17 nt, Human
uagacucuuacuuuuua

SEQ ID NO: 2569534 - RNA, 23 nt, Human
uagacuguugggguggguauaaa

SEQ ID NO: 2569535 - RNA, 22 nt, Human
uagacuucugcuuuccacaccu

SEQ ID NO: 2569536 - RNA, 19 nt, Human
uagacuucugcuuuccaca

SEQ ID NO: 2569537 - RNA, 22 nt, Human
uagacuucgacucaggauccag

SEQ ID NO: 2569538 - RNA, 20 nt, Human
uagacuucgacucaggaucc

SEQ ID NO: 2569539 - RNA, 18 nt, Human
uagacuuaauagaaacau

SEQ ID NO: 2569540 - RNA, 18 nt, Human
uagacuucgacucaggau

SEQ ID NO: 2569541 - RNA, 21 nt, Human
uagacucaucuuacuguaccu

SEQ ID NO: 2569542 - RNA, 18 nt, Human
uagacucaucuuacugua

SEQ ID NO: 2569543 - RNA, 17 nt, Human
uagacucaucuuacugu

SEQ ID NO: 2569544 - RNA, 19 nt, Human
uagacucaucuuacuguac

SEQ ID NO: 2569545 - RNA, 23 nt, Human
uagacuaaggccauuauuguacu

SEQ ID NO: 2569546 - RNA, 19 nt, Human
uagaccuuguuacuucuga

SEQ ID NO: 2569547 - RNA, 17 nt, Human
uagaccuuguuacuucu

SEQ ID NO: 2569548 - RNA, 21 nt, Human
uaccgagucucuucuccacug

SEQ ID NO: 2569549 - RNA, 18 nt, Human
uaccgagucucuucucca

SEQ ID NO: 2569550 - RNA, 17 nt, Human
uaccgagucucuucucc

SEQ ID NO: 2569551 - RNA, 19 nt, Human
uaccgaaaccuugccuuuc

SEQ ID NO: 2569552 - RNA, 18 nt, Human
uaccgaaaccuugccuuu

SEQ ID NO: 2569553 - RNA, 17 nt, Human
uaccgaaaccuugccuu

SEQ ID NO: 2569554 - RNA, 19 nt, Human
uacccagccaucugcccag

SEQ ID NO: 2569555 - RNA, 18 nt, Human
uacccagccaucugccca

SEQ ID NO: 2569556 - RNA, 17 nt, Human
uacccagccaucugccc

SEQ ID NO: 2569557 - RNA, 16 nt, Human
uacccagccaucugcc

SEQ ID NO: 2569558 - RNA, 23 nt, Human
uacccagccaucugcccaggggu

SEQ ID NO: 2569559 - RNA, 20 nt, Human
uacccagccaucugcccagg

SEQ ID NO: 2569560 - RNA, 19 nt, Human
uaccgugagcgacaaagau

SEQ ID NO: 2569561 - RNA, 15 nt, Human
uaccgcguuguaaaa

SEQ ID NO: 2569562 - RNA, 16 nt, Human
uaccgcguuguaaaau

SEQ ID NO: 2569563 - RNA, 14 nt, Human
uaccgcguuguaaa

SEQ ID NO: 2569564 - RNA, 22 nt, Human
uaccgagucucuucuccacugg

SEQ ID NO: 2569565 - RNA, 22 nt, Human
uaccuaacgaaguauccuucag

SEQ ID NO: 2569566 - RNA, 15 nt, Human
uaccguuucuucccu

SEQ ID NO: 2569567 - RNA, 14 nt, Human
uaccguuucuuccc

SEQ ID NO: 2569568 - RNA, 19 nt, Human
uaccuaaaaggaaaucuca

SEQ ID NO: 2569569 - RNA, 22 nt, Human
uaccuaaaaggaaaucucaccc

SEQ ID NO: 2569570 - RNA, 23 nt, Human
uaccuaaaaggaaaucucacccc

SEQ ID NO: 2569571 - RNA, 14 nt, Human
uacccagccaucug

SEQ ID NO: 2569572 - RNA, 13 nt, Human
uacccagagcauu

SEQ ID NO: 2569573 - RNA, 20 nt, Human
uacccagagaauauauacau

SEQ ID NO: 2569574 - RNA, 15 nt, Human
uacccagagaauaua

SEQ ID NO: 2569575 - RNA, 21 nt, Human
uacccagagaagccccuuccc

SEQ ID NO: 2569576 - RNA, 19 nt, Human
uacccagagaagccccuuc

SEQ ID NO: 2569577 - RNA, 18 nt, Human
uacccagagaagccccuu

SEQ ID NO: 2569578 - RNA, 21 nt, Human
uacccacuucuaaauagcaau

SEQ ID NO: 2569579 - RNA, 16 nt, Human
uacccagagaagcccc

SEQ ID NO: 2569580 - RNA, 22 nt, Human
uaccaaaaaucucaauauuuca

SEQ ID NO: 2569581 - RNA, 15 nt, Human
uacccacugcucugg

SEQ ID NO: 2569582 - RNA, 19 nt, Human
uacauuuuuacaauaaaua

SEQ ID NO: 2569583 - RNA, 17 nt, Human
uacauuuuuacaauaaa

SEQ ID NO: 2569584 - RNA, 21 nt, Human
uacauuuuuacaauaaauaau

SEQ ID NO: 2569585 - RNA, 23 nt, Human
uacauuuuuaagugcugcauuua

SEQ ID NO: 2569586 - RNA, 16 nt, Human
uacauuuuuacaauaa

SEQ ID NO: 2569587 - RNA, 15 nt, Human
uacauuuuuacaaua

SEQ ID NO: 2569588 - RNA, 14 nt, Human
uacauuuuuacaau

SEQ ID NO: 2569589 - RNA, 22 nt, Human
uacauggcagaguuuguguguu

SEQ ID NO: 2569590 - RNA, 16 nt, Human
uacauggccaguguga

SEQ ID NO: 2569591 - RNA, 22 nt, Human
uaccucaacccccauuucuauu

SEQ ID NO: 2569592 - RNA, 17 nt, Human
uaccucaaccuauggua

SEQ ID NO: 2569593 - RNA, 13 nt, Human
uaccuauuuucau

SEQ ID NO: 2569594 - RNA, 20 nt, Human
uaccuauuuucauuguaaaa

SEQ ID NO: 2569595 - RNA, 13 nt, Human
uaccuauguaaca

SEQ ID NO: 2569596 - RNA, 23 nt, Human
uaccuauauaauaaagcuacuga

SEQ ID NO: 2569597 - RNA, 16 nt, Human
uaccuagauuuacagc

SEQ ID NO: 2569598 - RNA, 15 nt, Human
uaccucacccugcua

SEQ ID NO: 2569599 - RNA, 11 nt, Human
uaccucagccu

SEQ ID NO: 2569600 - RNA, 15 nt, Human
uaccucacugggguc

SEQ ID NO: 2569601 - RNA, 18 nt, Human
uaccucacccugcuacac

SEQ ID NO: 2569602 - RNA, 16 nt, Human
uaccucagccuagacc

SEQ ID NO: 2569603 - RNA, 12 nt, Human
uaccucagccua

SEQ ID NO: 2569604 - RNA, 14 nt, Human
uaccucagccuaga

SEQ ID NO: 2569605 - RNA, 13 nt, Human
uaccucagucagu

SEQ ID NO: 2569606 - RNA, 20 nt, Human
uaccucagguugcugguugc

SEQ ID NO: 2569607 - RNA, 14 nt, Human
uaccucagguugcu

SEQ ID NO: 2569608 - RNA, 12 nt, Human
uaccucagguug

SEQ ID NO: 2569609 - RNA, 21 nt, Human
uaccucagguugcugguugcu

SEQ ID NO: 2569610 - RNA, 15 nt, Human
uaccuccucagggau

SEQ ID NO: 2569611 - RNA, 13 nt, Human
uaccuccucaggg

SEQ ID NO: 2569612 - RNA, 16 nt, Human
uaccucaggcagcuca

SEQ ID NO: 2569613 - RNA, 14 nt, Human
uaccucaggcagcu

SEQ ID NO: 2569614 - RNA, 18 nt, Human
uaccucaggcagcucaag

SEQ ID NO: 2569615 - RNA, 17 nt, Human
uaccucaggcagcucaa

SEQ ID NO: 2569616 - RNA, 14 nt, Human
uaccucaggcagga

SEQ ID NO: 2569617 - RNA, 15 nt, Human
uaccucaggcaggaa

SEQ ID NO: 2569618 - RNA, 19 nt, Human
uaccuauaaaguaaagcua

SEQ ID NO: 2569619 - RNA, 16 nt, Human
uaccuaucaucuuaag

SEQ ID NO: 2569620 - RNA, 14 nt, Human
uaccuacuuugacu

SEQ ID NO: 2569621 - RNA, 21 nt, Human
uaccuacuuugacuuuuugca

SEQ ID NO: 2569622 - RNA, 13 nt, Human
uaccuagauuuac

SEQ ID NO: 2569623 - RNA, 13 nt, Human
uaccuacuuugac

SEQ ID NO: 2569624 - RNA, 20 nt, Human
uaccuaccacagugucugua

SEQ ID NO: 2569625 - RNA, 16 nt, Human
uaccuaccacaguguc

SEQ ID NO: 2569626 - RNA, 17 nt, Human
uaccuaccacagugucu

SEQ ID NO: 2569627 - RNA, 18 nt, Human
uaccuaccacagugucug

SEQ ID NO: 2569628 - RNA, 19 nt, Human
uaccuaaacagauauaaau

SEQ ID NO: 2569629 - RNA, 15 nt, Human
uaccuaaacagauau

SEQ ID NO: 2569630 - RNA, 14 nt, Human
uaccuaaacagaua

SEQ ID NO: 2569631 - RNA, 21 nt, Human
uaccuaaaagagauuucaaga

SEQ ID NO: 2569632 - RNA, 15 nt, Human
uaccuaacauuauuu

SEQ ID NO: 2569633 - RNA, 22 nt, Human
uaccuaaacagauauaaauggc

SEQ ID NO: 2569634 - RNA, 15 nt, Human
uaccuaauuagagca

SEQ ID NO: 2569635 - RNA, 15 nt, Human
uaccuacauacaauu

SEQ ID NO: 2569636 - RNA, 13 nt, Human
uaccuacauguau

SEQ ID NO: 2569637 - RNA, 23 nt, Human
uaccuacauguauuuguuugcau

SEQ ID NO: 2569638 - RNA, 20 nt, Human
uaccuaauuagagcagauga

SEQ ID NO: 2569639 - RNA, 17 nt, Human
uaccuaauuagagcaga

SEQ ID NO: 2569640 - RNA, 21 nt, Human
uacgaaaagaggggaagagac

SEQ ID NO: 2569641 - RNA, 18 nt, Human
uacgaaaagaggggaaga

SEQ ID NO: 2569642 - RNA, 13 nt, Human
uaccuuuuuuaua

SEQ ID NO: 2569643 - RNA, 16 nt, Human
uaccuuuuuuauacau

SEQ ID NO: 2569644 - RNA, 17 nt, Human
uaccuuuuuuauacaua

SEQ ID NO: 2569645 - RNA, 20 nt, Human
uaccuuuuuauuugcaugug

SEQ ID NO: 2569646 - RNA, 21 nt, Human
uaccuuuuuugauaaaguuuc

SEQ ID NO: 2569647 - RNA, 20 nt, Human
uacuaauagacaauuuauua

SEQ ID NO: 2569648 - RNA, 21 nt, Human
uacuaauagacaauuuauuau

SEQ ID NO: 2569649 - RNA, 19 nt, Human
uacuaagaugacauugcua

SEQ ID NO: 2569650 - RNA, 15 nt, Human
uacuaagaugacauu

SEQ ID NO: 2569651 - RNA, 22 nt, Human
uacuaagcuuugccagcugcug

SEQ ID NO: 2569652 - RNA, 18 nt, Human
uacuaaggaguaaucugu

SEQ ID NO: 2569653 - RNA, 20 nt, Human
uacuaagcauagcaaacaga

SEQ ID NO: 2569654 - RNA, 14 nt, Human
uacuaaggaaucuu

SEQ ID NO: 2569655 - RNA, 14 nt, Human
uacuaaagaaagau

SEQ ID NO: 2569656 - RNA, 18 nt, Human
uacuaaacauuuuguuau

SEQ ID NO: 2569657 - RNA, 23 nt, Human
uacuaacaaucagcuccuuccug

SEQ ID NO: 2569658 - RNA, 13 nt, Human
uacuaacuuuccu

SEQ ID NO: 2569659 - RNA, 16 nt, Human
uacuaaagaaagauua

SEQ ID NO: 2569660 - RNA, 15 nt, Human
uacuaaagaaagauu

SEQ ID NO: 2569661 - RNA, 15 nt, Human
uacuaagaagaaaau

SEQ ID NO: 2569662 - RNA, 14 nt, Human
uacuaagaagaaaa

SEQ ID NO: 2569663 - RNA, 15 nt, Human
uacuaagaaaagaua

SEQ ID NO: 2569664 - RNA, 14 nt, Human
uaccucuuauugca

SEQ ID NO: 2569665 - RNA, 16 nt, Human
uaccucuuagcugagu

SEQ ID NO: 2569666 - RNA, 15 nt, Human
uaccucuuagcugag

SEQ ID NO: 2569667 - RNA, 14 nt, Human
uaccucuuagcuga

SEQ ID NO: 2569668 - RNA, 14 nt, Human
uaccucugugugcu

SEQ ID NO: 2569669 - RNA, 12 nt, Human
uaccucugugug

SEQ ID NO: 2569670 - RNA, 20 nt, Human
uaccuuagauuagcucugga

SEQ ID NO: 2569671 - RNA, 16 nt, Human
uaccuuagauuagcuc

SEQ ID NO: 2569672 - RNA, 22 nt, Human
uaccuuacuguggaggaaggau

SEQ ID NO: 2569673 - RNA, 17 nt, Human
uaccucuuauugcaaaa

SEQ ID NO: 2569674 - RNA, 21 nt, Human
uaccucuugagccuugaacuu

SEQ ID NO: 2569675 - RNA, 17 nt, Human
uaccucugauaccucaa

SEQ ID NO: 2569676 - RNA, 15 nt, Human
uaccucugauaccuc

SEQ ID NO: 2569677 - RNA, 14 nt, Human
uaccucugauaccu

SEQ ID NO: 2569678 - RNA, 23 nt, Human
uaccucucuuauagaauauuuau

SEQ ID NO: 2569679 - RNA, 21 nt, Human
uaccucucuuauagaauauuu

SEQ ID NO: 2569680 - RNA, 17 nt, Human
uaccucucuuauagaau

SEQ ID NO: 2569681 - RNA, 18 nt, Human
uaccucggugccuuccuc

SEQ ID NO: 2569682 - RNA, 14 nt, Human
uaccuccugagaaa

SEQ ID NO: 2569683 - RNA, 11 nt, Human
uaccuccugcc

SEQ ID NO: 2569684 - RNA, 13 nt, Human
uaccuccugccca

SEQ ID NO: 2569685 - RNA, 15 nt, Human
uaccuccugucucug

SEQ ID NO: 2569686 - RNA, 14 nt, Human
uaccuccugucucu

SEQ ID NO: 2569687 - RNA, 15 nt, Human
uaccuccugcccagg

SEQ ID NO: 2569688 - RNA, 16 nt, Human
uaccuccugcccagga

SEQ ID NO: 2569689 - RNA, 23 nt, Human
uaccuccucagggauggccguug

SEQ ID NO: 2569690 - RNA, 17 nt, Human
uaccuccucagggaugg

SEQ ID NO: 2569691 - RNA, 13 nt, Human
uaccuccugagaa

SEQ ID NO: 2569692 - RNA, 11 nt, Human
uaccuccuccu

SEQ ID NO: 2569693 - RNA, 19 nt, Human
uaccuuuuuuagaguugau

SEQ ID NO: 2569694 - RNA, 22 nt, Human
uaccuuuuuuagaguugauacu

SEQ ID NO: 2569695 - RNA, 13 nt, Human
uaccuuuuuuaga

SEQ ID NO: 2569696 - RNA, 16 nt, Human
uaccuuuuaauuaaug

SEQ ID NO: 2569697 - RNA, 21 nt, Human
uaccuuuuaacaccugaugug

SEQ ID NO: 2569698 - RNA, 12 nt, Human
uaccuuccaguc

SEQ ID NO: 2569699 - RNA, 21 nt, Human
uaccuuuugaggagccccagc

SEQ ID NO: 2569700 - RNA, 22 nt, Human
uaccuuagauuagcucuggacc

SEQ ID NO: 2569701 - RNA, 21 nt, Human
uaccuuagauuagcucuggac

SEQ ID NO: 2569702 - RNA, 13 nt, Human
uaccuucaauaaa

SEQ ID NO: 2569703 - RNA, 14 nt, Human
uaccuucaauaaag

SEQ ID NO: 2569704 - RNA, 16 nt, Human
uaccuucaauaaagua

SEQ ID NO: 2569705 - RNA, 17 nt, Human
uaccuucaauaaaguau

SEQ ID NO: 2569706 - RNA, 20 nt, Human
uaccuucaauaaaguaucua

SEQ ID NO: 2569707 - RNA, 20 nt, Human
uaccuuccagucaggaugac

SEQ ID NO: 2569708 - RNA, 14 nt, Human
uaccuucauuucag

SEQ ID NO: 2569709 - RNA, 13 nt, Human
uaccuucauuuca

SEQ ID NO: 2569710 - RNA, 19 nt, Human
uacuugcucuugaugccug

SEQ ID NO: 2569711 - RNA, 18 nt, Human
uacuugcucuugaugccu

SEQ ID NO: 2569712 - RNA, 14 nt, Human
uacuugcucuugau

SEQ ID NO: 2569713 - RNA, 13 nt, Human
uacuugcucuuga

SEQ ID NO: 2569714 - RNA, 14 nt, Human
uacuugucaaagaa

SEQ ID NO: 2569715 - RNA, 18 nt, Human
uacuugaagggccagagc

SEQ ID NO: 2569716 - RNA, 19 nt, Human
uacuugaagggccagagcc

SEQ ID NO: 2569717 - RNA, 18 nt, Human
uacuugucaaagaagguu

SEQ ID NO: 2569718 - RNA, 16 nt, Human
uacuugucaaagaagg

SEQ ID NO: 2569719 - RNA, 15 nt, Human
uacuugucaaagaag

SEQ ID NO: 2569720 - RNA, 13 nt, Human
uacuugucaauau

SEQ ID NO: 2569721 - RNA, 11 nt, Human
uacuugucaau

SEQ ID NO: 2569722 - RNA, 20 nt, Human
uacuugucaauauuuaaaca

SEQ ID NO: 2569723 - RNA, 13 nt, Human
uacuuguggacac

SEQ ID NO: 2569724 - RNA, 20 nt, Human
uacuguuugucuucucccca

SEQ ID NO: 2569725 - RNA, 12 nt, Human
uacuguuugucu

SEQ ID NO: 2569726 - RNA, 13 nt, Human
uacuguuucuguc

SEQ ID NO: 2569727 - RNA, 13 nt, Human
uacuuaacuauuc

SEQ ID NO: 2569728 - RNA, 20 nt, Human
uacuuaaauggaaaaaauga

SEQ ID NO: 2569729 - RNA, 19 nt, Human
uacuuaaagauuuaucaaa

SEQ ID NO: 2569730 - RNA, 14 nt, Human
uacuuaaagauuua

SEQ ID NO: 2569731 - RNA, 12 nt, Human
uacuuaaagauu

SEQ ID NO: 2569732 - RNA, 19 nt, Human
uacuguuugucuucucccc

SEQ ID NO: 2569733 - RNA, 17 nt, Human
uacuuaaaugaaagcau

SEQ ID NO: 2569734 - RNA, 18 nt, Human
uacuuaaaugaaagcaug

SEQ ID NO: 2569735 - RNA, 11 nt, Human
uacuugaaggg

SEQ ID NO: 2569736 - RNA, 12 nt, Human
uacuugaagggc

SEQ ID NO: 2569737 - RNA, 14 nt, Human
uacuugaagggcca

SEQ ID NO: 2569738 - RNA, 15 nt, Human
uacuugaagggccag

SEQ ID NO: 2569739 - RNA, 16 nt, Human
uacuugaagggccaga

SEQ ID NO: 2569740 - RNA, 17 nt, Human
uacuugaagggccagag

SEQ ID NO: 2569741 - RNA, 22 nt, Human
uacugcgacuuucugccuggag

SEQ ID NO: 2569742 - RNA, 21 nt, Human
uacugcgacuuucugccugga

SEQ ID NO: 2569743 - RNA, 20 nt, Human
uacugcgacuuucugccugg

SEQ ID NO: 2569744 - RNA, 19 nt, Human
uacugcgacuuucugccug

SEQ ID NO: 2569745 - RNA, 18 nt, Human
uacugcgacuuucugccu

SEQ ID NO: 2569746 - RNA, 17 nt, Human
uacugcgacuuucugcc

SEQ ID NO: 2569747 - RNA, 16 nt, Human
uacugcgacuuucugc

SEQ ID NO: 2569748 - RNA, 12 nt, Human
uacugcgacuuu

SEQ ID NO: 2569749 - RNA, 21 nt, Human
uacugcuaaguauuucccagc

SEQ ID NO: 2569750 - RNA, 20 nt, Human
uacugcuaaguauuucccag

SEQ ID NO: 2569751 - RNA, 19 nt, Human
uacugcuaaguauuuccca

SEQ ID NO: 2569752 - RNA, 15 nt, Human
uacugcuacuguaau

SEQ ID NO: 2569753 - RNA, 22 nt, Human
uacugcuaaguauuucccagca

SEQ ID NO: 2569754 - RNA, 20 nt, Human
uacugcuacuguaauuuuau

SEQ ID NO: 2569755 - RNA, 19 nt, Human
uacugcuagucuuaagaac

SEQ ID NO: 2569756 - RNA, 23 nt, Human
uacugucagcuccccucggagaa

SEQ ID NO: 2569757 - RNA, 16 nt, Human
uacuguccuacccacc

SEQ ID NO: 2569758 - RNA, 16 nt, Human
uacugugcuggagcca

SEQ ID NO: 2569759 - RNA, 15 nt, Human
uacugugcuggagcc

SEQ ID NO: 2569760 - RNA, 13 nt, Human
uacugugacugau

SEQ ID NO: 2569761 - RNA, 18 nt, Human
uacugugcuggagccacu

SEQ ID NO: 2569762 - RNA, 16 nt, Human
uacuguggaaaaauau

SEQ ID NO: 2569763 - RNA, 19 nt, Human
uacuguggaaaaauauuua

SEQ ID NO: 2569764 - RNA, 20 nt, Human
uacuguggaaaaauauuuaa

SEQ ID NO: 2569765 - RNA, 21 nt, Human
uacugucugguuuuaacaauu

SEQ ID NO: 2569766 - RNA, 20 nt, Human
uacugucugguuuuaacaau

SEQ ID NO: 2569767 - RNA, 19 nt, Human
uacugucugguuuuaacaa

SEQ ID NO: 2569768 - RNA, 16 nt, Human
uacugucugguuuuaa

SEQ ID NO: 2569769 - RNA, 15 nt, Human
uacugugaaacuggc

SEQ ID NO: 2569770 - RNA, 22 nt, Human
uacugucugguuuuaacaauuu

SEQ ID NO: 2569771 - RNA, 21 nt, Human
uacugucuucaguaagccgug

SEQ ID NO: 2569772 - RNA, 22 nt, Human
uacugucucacugaaacauuua

SEQ ID NO: 2569773 - RNA, 14 nt, Human
uacugucucacuga

SEQ ID NO: 2569774 - RNA, 16 nt, Human
uacuguuaaaggaaaa

SEQ ID NO: 2569775 - RNA, 15 nt, Human
uacuguuaaaggaaa

SEQ ID NO: 2569776 - RNA, 22 nt, Human
uacuguguuccuggcaauagug

SEQ ID NO: 2569777 - RNA, 12 nt, Human
uacuguguuccu

SEQ ID NO: 2569778 - RNA, 13 nt, Human
uacuguguuccug

SEQ ID NO: 2569779 - RNA, 14 nt, Human
uacuguguuccugg

SEQ ID NO: 2569780 - RNA, 13 nt, Human
uacuguguuucag

SEQ ID NO: 2569781 - RNA, 16 nt, Human
uacuguguuccuggca

SEQ ID NO: 2569782 - RNA, 19 nt, Human
uacuguguuccuggcaaua

SEQ ID NO: 2569783 - RNA, 22 nt, Human
uacuguggaggaaggauuguaa

SEQ ID NO: 2569784 - RNA, 22 nt, Human
uacugugugugugaaugaacac

SEQ ID NO: 2569785 - RNA, 23 nt, Human
uacugugugugugaaugaacacu

SEQ ID NO: 2569786 - RNA, 23 nt, Human
uacuguggaggaaggauuguaaa

SEQ ID NO: 2569787 - RNA, 21 nt, Human
uacugugugugugaaugaaca

SEQ ID NO: 2569788 - RNA, 18 nt, Human
uacuguggaggaaggauu

SEQ ID NO: 2569789 - RNA, 16 nt, Human
uacuguggaggaagga

SEQ ID NO: 2569790 - RNA, 14 nt, Human
uacuguggaggaag

SEQ ID NO: 2569791 - RNA, 12 nt, Human
uacuguggagga

SEQ ID NO: 2569792 - RNA, 18 nt, Human
uacuguggaaaagaaaca

SEQ ID NO: 2569793 - RNA, 22 nt, Human
uacuacaguccucccaucucac

SEQ ID NO: 2569794 - RNA, 16 nt, Human
uacuaauuccacaccu

SEQ ID NO: 2569795 - RNA, 16 nt, Human
uacuaauuuucuagau

SEQ ID NO: 2569796 - RNA, 23 nt, Human
uacuaaggaguaaucuguguaca

SEQ ID NO: 2569797 - RNA, 22 nt, Human
uacuaaggaguaaucuguguac

SEQ ID NO: 2569798 - RNA, 13 nt, Human
uacuaauuccaca

SEQ ID NO: 2569799 - RNA, 16 nt, Human
uacuaaugauguuuuc

SEQ ID NO: 2569800 - RNA, 13 nt, Human
uacuaaugauguu

SEQ ID NO: 2569801 - RNA, 14 nt, Human
uacuaaugauguuu

SEQ ID NO: 2569802 - RNA, 15 nt, Human
uacuaaugauguuuu

SEQ ID NO: 2569803 - RNA, 13 nt, Human
uacuacaguuugu

SEQ ID NO: 2569804 - RNA, 14 nt, Human
uacuacaguuuguu

SEQ ID NO: 2569805 - RNA, 21 nt, Human
uacuacaguuguuuuuugaaa

SEQ ID NO: 2569806 - RNA, 14 nt, Human
uacucauguguaug

SEQ ID NO: 2569807 - RNA, 13 nt, Human
uacucauguguau

SEQ ID NO: 2569808 - RNA, 12 nt, Human
uacucaugugua

SEQ ID NO: 2569809 - RNA, 23 nt, Human
uacuacaguuguuuuuugaaaac

SEQ ID NO: 2569810 - RNA, 22 nt, Human
uacucauguguaugggcaaaaa

SEQ ID NO: 2569811 - RNA, 20 nt, Human
uacucauguguaugggcaaa

SEQ ID NO: 2569812 - RNA, 14 nt, Human
uacucauucaggga

SEQ ID NO: 2569813 - RNA, 18 nt, Human
uacucauuccccggggcg

SEQ ID NO: 2569814 - RNA, 18 nt, Human
uacucgaguuacagacaa

SEQ ID NO: 2569815 - RNA, 22 nt, Human
uacucgaguuacagacaaagcg

SEQ ID NO: 2569816 - RNA, 12 nt, Human
uacuccucccag

SEQ ID NO: 2569817 - RNA, 14 nt, Human
uacuccuaccucag

SEQ ID NO: 2569818 - RNA, 15 nt, Human
uacuccuaccucagc

SEQ ID NO: 2569819 - RNA, 16 nt, Human
uacuccuaccucagcc

SEQ ID NO: 2569820 - RNA, 17 nt, Human
uacuccuaccucagccu

SEQ ID NO: 2569821 - RNA, 15 nt, Human
uacuccccuccuuga

SEQ ID NO: 2569822 - RNA, 10 nt, Human
uacuccccuu

SEQ ID NO: 2569823 - RNA, 22 nt, Human
uacucccucaaagcacacguca

SEQ ID NO: 2569824 - RNA, 15 nt, Human
uacuccccuugagcu

SEQ ID NO: 2569825 - RNA, 16 nt, Human
uacuccccuugagcug

SEQ ID NO: 2569826 - RNA, 20 nt, Human
uacucauucauuuauucauu

SEQ ID NO: 2569827 - RNA, 19 nt, Human
uacuccaguggugaagaaa

SEQ ID NO: 2569828 - RNA, 14 nt, Human
uacuccagugguga

SEQ ID NO: 2569829 - RNA, 21 nt, Human
uacuccagugccaacaauccu

SEQ ID NO: 2569830 - RNA, 14 nt, Human
uacucccagacacc

SEQ ID NO: 2569831 - RNA, 22 nt, Human
uacucccacucccggccuguca

SEQ ID NO: 2569832 - RNA, 24 nt, Human
uacugccagaugcugauguucagu

SEQ ID NO: 2569833 - RNA, 21 nt, Human
uacugccagaugcugauguuc

SEQ ID NO: 2569834 - RNA, 18 nt, Human
uacugccagaugcugaug

SEQ ID NO: 2569835 - RNA, 17 nt, Human
uacugccagaugcugau

SEQ ID NO: 2569836 - RNA, 16 nt, Human
uacugccagaugcuga

SEQ ID NO: 2569837 - RNA, 15 nt, Human
uacugccagaugcug

SEQ ID NO: 2569838 - RNA, 14 nt, Human
uacugccagaugcu

SEQ ID NO: 2569839 - RNA, 12 nt, Human
uacugccagaug

SEQ ID NO: 2569840 - RNA, 14 nt, Human
uacugccacucuuu

SEQ ID NO: 2569841 - RNA, 22 nt, Human
uacugcccaggccugccuguuc

SEQ ID NO: 2569842 - RNA, 21 nt, Human
uacugcccaggccugccuguu

SEQ ID NO: 2569843 - RNA, 20 nt, Human
uacugcccaggccugccugu

SEQ ID NO: 2569844 - RNA, 19 nt, Human
uacugcccaggccugccug

SEQ ID NO: 2569845 - RNA, 21 nt, Human
uacugccuauuuuaauaaaca

SEQ ID NO: 2569846 - RNA, 14 nt, Human
uacugccuauuuua

SEQ ID NO: 2569847 - RNA, 23 nt, Human
uacugcccuccagcucuuuccuc

SEQ ID NO: 2569848 - RNA, 22 nt, Human
uacugcccuccagcucuuuccu

SEQ ID NO: 2569849 - RNA, 22 nt, Human
uacugcccggggcagcugccag

SEQ ID NO: 2569850 - RNA, 20 nt, Human
uacugccauucacuucauaa

SEQ ID NO: 2569851 - RNA, 23 nt, Human
uacugcccaauaugcaguucugc

SEQ ID NO: 2569852 - RNA, 19 nt, Human
uacugcccggggcagcugc

SEQ ID NO: 2569853 - RNA, 18 nt, Human
uacugcaaaugucaucag

SEQ ID NO: 2569854 - RNA, 17 nt, Human
uacugauuuuugugauu

SEQ ID NO: 2569855 - RNA, 15 nt, Human
uacugauuuuuguga

SEQ ID NO: 2569856 - RNA, 17 nt, Human
uacugauuuuuguaaga

SEQ ID NO: 2569857 - RNA, 13 nt, Human
uacugauuuuugu

SEQ ID NO: 2569858 - RNA, 21 nt, Human
uacugauuuccuuuggagcuu

SEQ ID NO: 2569859 - RNA, 15 nt, Human
uacugauuguuucau

SEQ ID NO: 2569860 - RNA, 13 nt, Human
uacugcaugcacu

SEQ ID NO: 2569861 - RNA, 22 nt, Human
uacugcagccuuugccuccccg

SEQ ID NO: 2569862 - RNA, 11 nt, Human
uacugccaaag

SEQ ID NO: 2569863 - RNA, 20 nt, Human
uacugcagccuuugccuccc

SEQ ID NO: 2569864 - RNA, 22 nt, Human
uacugcagaauacaguaagcug

SEQ ID NO: 2569865 - RNA, 19 nt, Human
uacugcaauuaaagugaua

SEQ ID NO: 2569866 - RNA, 14 nt, Human
uacugcaagaaaau

SEQ ID NO: 2569867 - RNA, 17 nt, Human
uacugcagaauacagua

SEQ ID NO: 2569868 - RNA, 15 nt, Human
uacugcaagaaaaug

SEQ ID NO: 2569869 - RNA, 20 nt, Human
uacaggaugaugacuaugga

SEQ ID NO: 2569870 - RNA, 18 nt, Human
uacaguuccuagguauaa

SEQ ID NO: 2569871 - RNA, 23 nt, Human
uacaguucggugagcuacaaaug

SEQ ID NO: 2569872 - RNA, 15 nt, Human
uacaggaaguacugg

SEQ ID NO: 2569873 - RNA, 14 nt, Human
uacaggaaguacug

SEQ ID NO: 2569874 - RNA, 22 nt, Human
uacaggaaguacuggagaaaau

SEQ ID NO: 2569875 - RNA, 15 nt, Human
uacaggagugagcac

SEQ ID NO: 2569876 - RNA, 18 nt, Human
uacaguuuguuaguauga

SEQ ID NO: 2569877 - RNA, 21 nt, Human
uacaguuugcuguacuagaga

SEQ ID NO: 2569878 - RNA, 16 nt, Human
uacaguuugcuguacu

SEQ ID NO: 2569879 - RNA, 15 nt, Human
uacaguuugcuguac

SEQ ID NO: 2569880 - RNA, 13 nt, Human
uacaguuucaaaa

SEQ ID NO: 2569881 - RNA, 12 nt, Human
uacaguuucaaa

SEQ ID NO: 2569882 - RNA, 20 nt, Human
uacaguuguuuuuugaaaac

SEQ ID NO: 2569883 - RNA, 20 nt, Human
uacaguugaaaaacagcuga

SEQ ID NO: 2569884 - RNA, 22 nt, Human
uacaguucuucgggaagagagg

SEQ ID NO: 2569885 - RNA, 21 nt, Human
uacaguucuucgggaagagag

SEQ ID NO: 2569886 - RNA, 18 nt, Human
uacaguucuucgggaaga

SEQ ID NO: 2569887 - RNA, 18 nt, Human
uacaguuguuggccuccg

SEQ ID NO: 2569888 - RNA, 16 nt, Human
uacaguuguuggccuc

SEQ ID NO: 2569889 - RNA, 19 nt, Human
uacaguuggaaauccaucc

SEQ ID NO: 2569890 - RNA, 15 nt, Human
uacaguuguuggccu

SEQ ID NO: 2569891 - RNA, 12 nt, Human
uacaguucuucg

SEQ ID NO: 2569892 - RNA, 11 nt, Human
uacaguucuuc

SEQ ID NO: 2569893 - RNA, 16 nt, Human
uacagcuguuuaagau

SEQ ID NO: 2569894 - RNA, 17 nt, Human
uacaguugaaaaacagc

SEQ ID NO: 2569895 - RNA, 19 nt, Human
uacaguugaaaaacagcug

SEQ ID NO: 2569896 - RNA, 14 nt, Human
uacacuuacuguug

SEQ ID NO: 2569897 - RNA, 21 nt, Human
uacacuuacuguuguccuaug

SEQ ID NO: 2569898 - RNA, 19 nt, Human
uacacuuacuguuguccua

SEQ ID NO: 2569899 - RNA, 18 nt, Human
uacagcuaaucagcauuc

SEQ ID NO: 2569900 - RNA, 16 nt, Human
uacagcuaaucagcau

SEQ ID NO: 2569901 - RNA, 22 nt, Human
uacacuguuucaaacuuuacua

SEQ ID NO: 2569902 - RNA, 16 nt, Human
uacacuuacacuuuau

SEQ ID NO: 2569903 - RNA, 23 nt, Human
uacacugugcugagucugaaggc

SEQ ID NO: 2569904 - RNA, 22 nt, Human
uacacugugcugagucugaagg

SEQ ID NO: 2569905 - RNA, 20 nt, Human
uacacuguuucaaacuuuac

SEQ ID NO: 2569906 - RNA, 21 nt, Human
uacagcucagaaguuucuucu

SEQ ID NO: 2569907 - RNA, 19 nt, Human
uacagcgagaggcagagaa

SEQ ID NO: 2569908 - RNA, 16 nt, Human
uacagcgagaggcaga

SEQ ID NO: 2569909 - RNA, 20 nt, Human
uacagcgagaggcagagaaa

SEQ ID NO: 2569910 - RNA, 19 nt, Human
uacagcugagcacauucug

SEQ ID NO: 2569911 - RNA, 13 nt, Human
uacagcugccugc

SEQ ID NO: 2569912 - RNA, 20 nt, Human
uacagcuggguggcacugcc

SEQ ID NO: 2569913 - RNA, 14 nt, Human
uacagcugccugca

SEQ ID NO: 2569914 - RNA, 14 nt, Human
uacagcuguuuaag

SEQ ID NO: 2569915 - RNA, 24 nt, Human
uacagcuggguggcacugccaugc

SEQ ID NO: 2569916 - RNA, 21 nt, Human
uacagcuggguggcacugcca

SEQ ID NO: 2569917 - RNA, 20 nt, Human
uacagcuugaccgugaggcc

SEQ ID NO: 2569918 - RNA, 13 nt, Human
uacaggaaguacu

SEQ ID NO: 2569919 - RNA, 18 nt, Human
uacaggaagguagaaaua

SEQ ID NO: 2569920 - RNA, 16 nt, Human
uacauaaacaaguccu

SEQ ID NO: 2569921 - RNA, 13 nt, Human
uacauaaaggugg

SEQ ID NO: 2569922 - RNA, 15 nt, Human
uacauaacugaaaau

SEQ ID NO: 2569923 - RNA, 17 nt, Human
uacauaacugaaaaugu

SEQ ID NO: 2569924 - RNA, 21 nt, Human
uacauaacugaaaaugugcua

SEQ ID NO: 2569925 - RNA, 13 nt, Human
uacauaacugaaa

SEQ ID NO: 2569926 - RNA, 21 nt, Human
uacauaaaggugguaugugug

SEQ ID NO: 2569927 - RNA, 19 nt, Human
uacaguuuguuaguaugag

SEQ ID NO: 2569928 - RNA, 21 nt, Human
uacaguuuguuaguaugaggc

SEQ ID NO: 2569929 - RNA, 16 nt, Human
uacaguuuguuuacac

SEQ ID NO: 2569930 - RNA, 15 nt, Human
uacaguuuguuuaca

SEQ ID NO: 2569931 - RNA, 17 nt, Human
uacaguuugucacauga

SEQ ID NO: 2569932 - RNA, 17 nt, Human
uacaguuugcuguacua

SEQ ID NO: 2569933 - RNA, 17 nt, Human
uacaguuuguuuacaca

SEQ ID NO: 2569934 - RNA, 17 nt, Human
uacaugaaaacacauuu

SEQ ID NO: 2569935 - RNA, 18 nt, Human
uacaugaaaacacauuuu

SEQ ID NO: 2569936 - RNA, 19 nt, Human
uacaugaaaacacauuuuu

SEQ ID NO: 2569937 - RNA, 23 nt, Human
uacaugaaaacacauuuuucuua

SEQ ID NO: 2569938 - RNA, 16 nt, Human
uacaugaaaacacauu

SEQ ID NO: 2569939 - RNA, 20 nt, Human
uacaucuuuuuucacaaauu

SEQ ID NO: 2569940 - RNA, 18 nt, Human
uacaucuuuuuucacaaa

SEQ ID NO: 2569941 - RNA, 17 nt, Human
uacaucuuuuuucacaa

SEQ ID NO: 2569942 - RNA, 20 nt, Human
uacaucuuuucaacaaguaa

SEQ ID NO: 2569943 - RNA, 17 nt, Human
uacauaaacugacuuua

SEQ ID NO: 2569944 - RNA, 15 nt, Human
uacaucuuucacauu

SEQ ID NO: 2569945 - RNA, 20 nt, Human
uacaucuuucacauuggcua

SEQ ID NO: 2569946 - RNA, 16 nt, Human
uacauaagauaaaugu

SEQ ID NO: 2569947 - RNA, 17 nt, Human
uacauaagauaaaugug

SEQ ID NO: 2569948 - RNA, 12 nt, Human
uacaugaaacag

SEQ ID NO: 2569949 - RNA, 13 nt, Human
uacaugaaacaga

SEQ ID NO: 2569950 - RNA, 14 nt, Human
uacaugaaacagaa

SEQ ID NO: 2569951 - RNA, 15 nt, Human
uacaugaaacagaaa

SEQ ID NO: 2569952 - RNA, 22 nt, Human
uacaugcaauuuauuaaaauga

SEQ ID NO: 2569953 - RNA, 21 nt, Human
uacaugcacuuggcugcauaa

SEQ ID NO: 2569954 - RNA, 21 nt, Human
uacaugaaacagaaacaaaaa

SEQ ID NO: 2569955 - RNA, 11 nt, Human
uacaugcauac

SEQ ID NO: 2569956 - RNA, 22 nt, Human
uacaugcagcccaugcccaccu

SEQ ID NO: 2569957 - RNA, 14 nt, Human
uacaugcagcccau

SEQ ID NO: 2569958 - RNA, 17 nt, Human
uacaugcagcccaugcc

SEQ ID NO: 2569959 - RNA, 19 nt, Human
uacaugcauacuucaaaag

SEQ ID NO: 2569960 - RNA, 17 nt, Human
uacaugcauacuucaaa

SEQ ID NO: 2569961 - RNA, 14 nt, Human
uacaugcauacuuc

SEQ ID NO: 2569962 - RNA, 14 nt, Human
uacaugcugcuaau

SEQ ID NO: 2569963 - RNA, 12 nt, Human
uacaugcugcua

SEQ ID NO: 2569964 - RNA, 15 nt, Human
uacaugcucuuagaa

SEQ ID NO: 2569965 - RNA, 15 nt, Human
uacaugcuuugugaa

SEQ ID NO: 2569966 - RNA, 16 nt, Human
uacaugcuuugugaac

SEQ ID NO: 2569967 - RNA, 14 nt, Human
uacaugccagugac

SEQ ID NO: 2569968 - RNA, 21 nt, Human
uacaugcauacuucaaaagua

SEQ ID NO: 2569969 - RNA, 20 nt, Human
uacaugcauuacugcaugca

SEQ ID NO: 2569970 - RNA, 22 nt, Human
uacaugcauugagcucucucau

SEQ ID NO: 2569971 - RNA, 14 nt, Human
uacaugcauuugag

SEQ ID NO: 2569972 - RNA, 19 nt, Human
uacauuuuuaagugcugca

SEQ ID NO: 2569973 - RNA, 22 nt, Human
uacauuuuuaagugcugcauuu

SEQ ID NO: 2569974 - RNA, 19 nt, Human
uacauggcagaguuugugu

SEQ ID NO: 2569975 - RNA, 16 nt, Human
uacauggcagaguuug

SEQ ID NO: 2569976 - RNA, 22 nt, Human
uacauggacaauacccccaggc

SEQ ID NO: 2569977 - RNA, 14 nt, Human
uacauuuuuaagug

SEQ ID NO: 2569978 - RNA, 14 nt, Human
uacauggaauaaca

SEQ ID NO: 2569979 - RNA, 18 nt, Human
uacauggaauaacaugua

SEQ ID NO: 2569980 - RNA, 19 nt, Human
uacauggaauaacauguaa

SEQ ID NO: 2569981 - RNA, 22 nt, Human
uacauggaauaacauguaauua

SEQ ID NO: 2569982 - RNA, 13 nt, Human
uacaaaucaauca

SEQ ID NO: 2569983 - RNA, 17 nt, Human
uacaaauauaagaauaa

SEQ ID NO: 2569984 - RNA, 16 nt, Human
uacaaauauaagaaua

SEQ ID NO: 2569985 - RNA, 14 nt, Human
uacaaauauaagaa

SEQ ID NO: 2569986 - RNA, 12 nt, Human
uacaaauauaag

SEQ ID NO: 2569987 - RNA, 18 nt, Human
uacaaaguguguauuaaa

SEQ ID NO: 2569988 - RNA, 18 nt, Human
uacaaauauaagaauaaa

SEQ ID NO: 2569989 - RNA, 16 nt, Human
uacaaaucaaguauuu

SEQ ID NO: 2569990 - RNA, 23 nt, Human
uacaaauacucuuaggaagagaa

SEQ ID NO: 2569991 - RNA, 19 nt, Human
uacaaauacucuuaggaag

SEQ ID NO: 2569992 - RNA, 17 nt, Human
uacaaauacucuuagga

SEQ ID NO: 2569993 - RNA, 12 nt, Human
uacaaauacucu

SEQ ID NO: 2569994 - RNA, 19 nt, Human
uacaaaguguguauuaaaa

SEQ ID NO: 2569995 - RNA, 15 nt, Human
uacaaaguguguauu

SEQ ID NO: 2569996 - RNA, 13 nt, Human
uacaaagugaugu

SEQ ID NO: 2569997 - RNA, 13 nt, Human
uacaaagugugua

SEQ ID NO: 2569998 - RNA, 14 nt, Human
uacaaaguagaagu

SEQ ID NO: 2569999 - RNA, 18 nt, Human
uacaaaguagaagucuua

SEQ ID NO: 2570000 - RNA, 18 nt, Human
uacaaagaagacauguuu

SEQ ID NO: 2570001 - RNA, 17 nt, Human
uacaaagaagacauguu

SEQ ID NO: 2570002 - RNA, 16 nt, Human
uacaaagaagacaugu

SEQ ID NO: 2570003 - RNA, 15 nt, Human
uacaaagaagacaug

SEQ ID NO: 2570004 - RNA, 22 nt, Human
uacaaagaagacauguuuuaga

SEQ ID NO: 2570005 - RNA, 19 nt, Human
uacaaagaagacauguuuu

SEQ ID NO: 2570006 - RNA, 19 nt, Human
uacaaacucccacuuguca

SEQ ID NO: 2570007 - RNA, 13 nt, Human
uacaaagaaauaa

SEQ ID NO: 2570008 - RNA, 14 nt, Human
uacaaagaagacau

SEQ ID NO: 2570009 - RNA, 17 nt, Human
uacaaagaaauaacaag

SEQ ID NO: 2570010 - RNA, 13 nt, Human
uacaaagaagaca

SEQ ID NO: 2570011 - RNA, 17 nt, Human
uacaaacaugugguuaa

SEQ ID NO: 2570012 - RNA, 18 nt, Human
uaauuuugugaagcaaaa

SEQ ID NO: 2570013 - RNA, 20 nt, Human
uaauucucaugugauccuuu

SEQ ID NO: 2570014 - RNA, 15 nt, Human
uaauucucaggccau

SEQ ID NO: 2570015 - RNA, 12 nt, Human
uaauuuuuauau

SEQ ID NO: 2570016 - RNA, 19 nt, Human
uaauuuuguucuaguuuuc

SEQ ID NO: 2570017 - RNA, 13 nt, Human
uaauuuuuaaagu

SEQ ID NO: 2570018 - RNA, 17 nt, Human
uaauuuuuauauuugaa

SEQ ID NO: 2570019 - RNA, 16 nt, Human
uaauuuuuauauuuga

SEQ ID NO: 2570020 - RNA, 12 nt, Human
uacaaacaaugg

SEQ ID NO: 2570021 - RNA, 17 nt, Human
uacaaacaccuggacuu

SEQ ID NO: 2570022 - RNA, 22 nt, Human
uacaaacaauggaaacugaaug

SEQ ID NO: 2570023 - RNA, 12 nt, Human
uacaaacauauu

SEQ ID NO: 2570024 - RNA, 15 nt, Human
uacaaacauauuugu

SEQ ID NO: 2570025 - RNA, 18 nt, Human
uacaaacaaaauuucuau

SEQ ID NO: 2570026 - RNA, 22 nt, Human
uaauuccucucacuaaacuuua

SEQ ID NO: 2570027 - RNA, 16 nt, Human
uaauuagugcuaagug

SEQ ID NO: 2570028 - RNA, 15 nt, Human
uaauuagugcuaagu

SEQ ID NO: 2570029 - RNA, 14 nt, Human
uaauuagugcuaag

SEQ ID NO: 2570030 - RNA, 12 nt, Human
uaauuagugcua

SEQ ID NO: 2570031 - RNA, 18 nt, Human
uaauuagggguugcuaag

SEQ ID NO: 2570032 - RNA, 17 nt, Human
uaauuagggguugcuaa

SEQ ID NO: 2570033 - RNA, 13 nt, Human
uaauuuugugaag

SEQ ID NO: 2570034 - RNA, 15 nt, Human
uaauucuaugagaua

SEQ ID NO: 2570035 - RNA, 12 nt, Human
uaauucucaggc

SEQ ID NO: 2570036 - RNA, 21 nt, Human
uaauucuaaggaauaugagcu

SEQ ID NO: 2570037 - RNA, 18 nt, Human
uaauucuaaaugaauguu

SEQ ID NO: 2570038 - RNA, 11 nt, Human
uaauucuaaau

SEQ ID NO: 2570039 - RNA, 13 nt, Human
uaauucuaaggaa

SEQ ID NO: 2570040 - RNA, 12 nt, Human
uaauucuaaagg

SEQ ID NO: 2570041 - RNA, 11 nt, Human
uaauucuaaag

SEQ ID NO: 2570042 - RNA, 19 nt, Human
uacaauuuucucccaggaa

SEQ ID NO: 2570043 - RNA, 18 nt, Human
uacaauuuucucccagga

SEQ ID NO: 2570044 - RNA, 21 nt, Human
uacaauuuucucccaggaagc

SEQ ID NO: 2570045 - RNA, 11 nt, Human
uacacacacac

SEQ ID NO: 2570046 - RNA, 17 nt, Human
uacaauuuacaaagugu

SEQ ID NO: 2570047 - RNA, 16 nt, Human
uacaauuuacaaagug

SEQ ID NO: 2570048 - RNA, 22 nt, Human
uacaauuuacaaaguguguauu

SEQ ID NO: 2570049 - RNA, 21 nt, Human
uacaauuguaaaacugaggca

SEQ ID NO: 2570050 - RNA, 15 nt, Human
uacaauuuacaaagu

SEQ ID NO: 2570051 - RNA, 17 nt, Human
uacaauuguaaaacuga

SEQ ID NO: 2570052 - RNA, 14 nt, Human
uacaauugaacuua

SEQ ID NO: 2570053 - RNA, 20 nt, Human
uacaauugaacuuaaauaaa

SEQ ID NO: 2570054 - RNA, 17 nt, Human
uacaagaaaaaaugaau

SEQ ID NO: 2570055 - RNA, 14 nt, Human
uacaacuucagcag

SEQ ID NO: 2570056 - RNA, 14 nt, Human
uacaacuucaagug

SEQ ID NO: 2570057 - RNA, 23 nt, Human
uacaaccaagcucucugcaucua

SEQ ID NO: 2570058 - RNA, 20 nt, Human
uacaaccaagcucucugcau

SEQ ID NO: 2570059 - RNA, 19 nt, Human
uacaaccaagcucucugca

SEQ ID NO: 2570060 - RNA, 14 nt, Human
uacaacugaguccu

SEQ ID NO: 2570061 - RNA, 23 nt, Human
uacaacugccucgaaacacagaa

SEQ ID NO: 2570062 - RNA, 17 nt, Human
uacaacuuaaguugguc

SEQ ID NO: 2570063 - RNA, 20 nt, Human
uacaacugaguccuuaaaca

SEQ ID NO: 2570064 - RNA, 18 nt, Human
uacaacuuaaauaauaaa

SEQ ID NO: 2570065 - RNA, 13 nt, Human
uacaaauuagaaa

SEQ ID NO: 2570066 - RNA, 12 nt, Human
uacaaaugucuu

SEQ ID NO: 2570067 - RNA, 21 nt, Human
uacaaauggacauaggacuca

SEQ ID NO: 2570068 - RNA, 15 nt, Human
uacaaauuagaaaau

SEQ ID NO: 2570069 - RNA, 14 nt, Human
uacaaauuagaaaa

SEQ ID NO: 2570070 - RNA, 15 nt, Human
uacaaauugcuuacu

SEQ ID NO: 2570071 - RNA, 19 nt, Human
uacaacaagaguuuauuuc

SEQ ID NO: 2570072 - RNA, 19 nt, Human
uacaaauugcuugaaagaa

SEQ ID NO: 2570073 - RNA, 21 nt, Human
uacaaauugcuuacuuuggaa

SEQ ID NO: 2570074 - RNA, 16 nt, Human
uacaaauugcuugaaa

SEQ ID NO: 2570075 - RNA, 16 nt, Human
uacaaauuuguuauuu

SEQ ID NO: 2570076 - RNA, 20 nt, Human
uacaacagauuugugaacuc

SEQ ID NO: 2570077 - RNA, 19 nt, Human
uacaacagauuugugaacu

SEQ ID NO: 2570078 - RNA, 18 nt, Human
uacaacagauuugugaac

SEQ ID NO: 2570079 - RNA, 17 nt, Human
uacaacagauuugugaa

SEQ ID NO: 2570080 - RNA, 16 nt, Human
uacaacagauuuguga

SEQ ID NO: 2570081 - RNA, 15 nt, Human
uacaacagauuugug

SEQ ID NO: 2570082 - RNA, 14 nt, Human
uacaacagauuugu

SEQ ID NO: 2570083 - RNA, 13 nt, Human
uacaacagauuug

SEQ ID NO: 2570084 - RNA, 12 nt, Human
uacaacagauuu

SEQ ID NO: 2570085 - RNA, 22 nt, Human
uacaacaagaguuuauuuccaa

SEQ ID NO: 2570086 - RNA, 17 nt, Human
uacaaccaagcucucug

SEQ ID NO: 2570087 - RNA, 14 nt, Human
uacaaccaagcucu

SEQ ID NO: 2570088 - RNA, 20 nt, Human
uacaacagugcuaaaaaugg

SEQ ID NO: 2570089 - RNA, 14 nt, Human
uacaacagugcuaa

SEQ ID NO: 2570090 - RNA, 13 nt, Human
uacaacagugcua

SEQ ID NO: 2570091 - RNA, 21 nt, Human
uacaacagauuugugaacuca

SEQ ID NO: 2570092 - RNA, 12 nt, Human
uacaaccugcuu

SEQ ID NO: 2570093 - RNA, 17 nt, Human
uacacacucaaaucaag

SEQ ID NO: 2570094 - RNA, 15 nt, Human
uacacacugcauguu

SEQ ID NO: 2570095 - RNA, 23 nt, Human
uacacacgugcaauuuguuugug

SEQ ID NO: 2570096 - RNA, 16 nt, Human
uacacacgugcaauuu

SEQ ID NO: 2570097 - RNA, 15 nt, Human
uacacagcucuagac

SEQ ID NO: 2570098 - RNA, 17 nt, Human
uacacagucugcaagau

SEQ ID NO: 2570099 - RNA, 16 nt, Human
uacacagucugcaaga

SEQ ID NO: 2570100 - RNA, 23 nt, Human
uacacaggauccuauucucacca

SEQ ID NO: 2570101 - RNA, 16 nt, Human
uacacacucaaaucaa

SEQ ID NO: 2570102 - RNA, 19 nt, Human
uacacacacacacacagcc

SEQ ID NO: 2570103 - RNA, 20 nt, Human
uacacacacacacacagcca

SEQ ID NO: 2570104 - RNA, 21 nt, Human
uacacacacacacacagccac

SEQ ID NO: 2570105 - RNA, 14 nt, Human
uacacacacacaca

SEQ ID NO: 2570106 - RNA, 16 nt, Human
uacacacacacacaca

SEQ ID NO: 2570107 - RNA, 17 nt, Human
uacacacacacacacag

SEQ ID NO: 2570108 - RNA, 18 nt, Human
uacacacacacacacagc

SEQ ID NO: 2570109 - RNA, 12 nt, Human
uacacacacaca

SEQ ID NO: 2570110 - RNA, 13 nt, Human
uacacacacacac

SEQ ID NO: 2570111 - RNA, 21 nt, Human
uacacugugcugagucugaag

SEQ ID NO: 2570112 - RNA, 23 nt, Human
uacacugacaccuuugcaggcau

SEQ ID NO: 2570113 - RNA, 16 nt, Human
uacacugacaccuuug

SEQ ID NO: 2570114 - RNA, 17 nt, Human
uacacugaauauuuaua

SEQ ID NO: 2570115 - RNA, 18 nt, Human
uacacugaauauuuauau

SEQ ID NO: 2570116 - RNA, 16 nt, Human
uacacucuuuguaaga

SEQ ID NO: 2570117 - RNA, 20 nt, Human
uacacugaaguuaacagaga

SEQ ID NO: 2570118 - RNA, 12 nt, Human
uacacucuuaua

SEQ ID NO: 2570119 - RNA, 13 nt, Human
uacacucuuauag

SEQ ID NO: 2570120 - RNA, 18 nt, Human
uacacauucaauaagcau

SEQ ID NO: 2570121 - RNA, 20 nt, Human
uacacauucggcucccugga

SEQ ID NO: 2570122 - RNA, 21 nt, Human
uacacauguaucuaugcauuu

SEQ ID NO: 2570123 - RNA, 14 nt, Human
uacacuccagugag

SEQ ID NO: 2570124 - RNA, 17 nt, Human
uacacaucucagacccu

SEQ ID NO: 2570125 - RNA, 19 nt, Human
uacacauaauuaaaguguc

SEQ ID NO: 2570126 - RNA, 23 nt, Human
uacacauagcauguaaugguauc

SEQ ID NO: 2570127 - RNA, 11 nt, Human
uacacaguugc

SEQ ID NO: 2570128 - RNA, 20 nt, Human
uacacagggauguacaaggc

SEQ ID NO: 2570129 - RNA, 21 nt, Human
ugaaggcuggguucugauccu

SEQ ID NO: 2570130 - RNA, 20 nt, Human
ugaaggcuggguucugaucc

SEQ ID NO: 2570131 - RNA, 14 nt, Human
ugaaggcuguacac

SEQ ID NO: 2570132 - RNA, 13 nt, Human
ugaaggcuucucu

SEQ ID NO: 2570133 - RNA, 15 nt, Human
ugaaggcuucucucu

SEQ ID NO: 2570134 - RNA, 16 nt, Human
ugaaggcuucucucug

SEQ ID NO: 2570135 - RNA, 14 nt, Human
ugaaguuuacauug

SEQ ID NO: 2570136 - RNA, 19 nt, Human
ugaaggcuucucucugugg

SEQ ID NO: 2570137 - RNA, 13 nt, Human
ugaaguuugaaug

SEQ ID NO: 2570138 - RNA, 12 nt, Human
ugaaguuugaau

SEQ ID NO: 2570139 - RNA, 15 nt, Human
ugaaguuugaauguu

SEQ ID NO: 2570140 - RNA, 14 nt, Human
ugaaguuugaaugu

SEQ ID NO: 2570141 - RNA, 17 nt, Human
ugaaguuucacuccgga

SEQ ID NO: 2570142 - RNA, 14 nt, Human
ugaaguuucacucc

SEQ ID NO: 2570143 - RNA, 14 nt, Human
ugaaguuucacaug

SEQ ID NO: 2570144 - RNA, 13 nt, Human
ugaaguuucacau

SEQ ID NO: 2570145 - RNA, 21 nt, Human
ugaaguuuccuuggcuggugc

SEQ ID NO: 2570146 - RNA, 19 nt, Human
ugaaguuuccuuggcuggu

SEQ ID NO: 2570147 - RNA, 16 nt, Human
ugaaguuuccuuggcu

SEQ ID NO: 2570148 - RNA, 20 nt, Human
ugaaguuuacauuguaaaua

SEQ ID NO: 2570149 - RNA, 16 nt, Human
ugaaguuuacauugua

SEQ ID NO: 2570150 - RNA, 17 nt, Human
ugaaguuuacaaucaaa

SEQ ID NO: 2570151 - RNA, 20 nt, Human
ugaaguuugaauguuaaaua

SEQ ID NO: 2570152 - RNA, 18 nt, Human
ugaaguuugaauguuaaa

SEQ ID NO: 2570153 - RNA, 17 nt, Human
ugaaguuugaauguuaa

SEQ ID NO: 2570154 - RNA, 16 nt, Human
ugaaguuugaauguua

SEQ ID NO: 2570155 - RNA, 21 nt, Human
ugaaguuugaauguuaaauaa

SEQ ID NO: 2570156 - RNA, 18 nt, Human
ugaaguuugaacuucaua

SEQ ID NO: 2570157 - RNA, 14 nt, Human
ugaaguuuuacauu

SEQ ID NO: 2570158 - RNA, 15 nt, Human
ugaaguuuuacauug

SEQ ID NO: 2570159 - RNA, 16 nt, Human
ugaaguuuuacauugu

SEQ ID NO: 2570160 - RNA, 17 nt, Human
ugaaguuuuacauuguu

SEQ ID NO: 2570161 - RNA, 22 nt, Human
ugaaucaauaauauauuuucug

SEQ ID NO: 2570162 - RNA, 15 nt, Human
ugaaucaccuagggg

SEQ ID NO: 2570163 - RNA, 17 nt, Human
ugaaucacguaaagcua

SEQ ID NO: 2570164 - RNA, 14 nt, Human
ugaauccucucucu

SEQ ID NO: 2570165 - RNA, 16 nt, Human
ugaauccucucucugu

SEQ ID NO: 2570166 - RNA, 17 nt, Human
ugaauccucuucuuuau

SEQ ID NO: 2570167 - RNA, 21 nt, Human
ugaauccucucucuguguuac

SEQ ID NO: 2570168 - RNA, 21 nt, Human
ugaaucccccuugccacccca

SEQ ID NO: 2570169 - RNA, 21 nt, Human
ugaaucccacgcuucucuuug

SEQ ID NO: 2570170 - RNA, 19 nt, Human
ugaaucaugguuuuucuua

SEQ ID NO: 2570171 - RNA, 16 nt, Human
ugaauccuagggccug

SEQ ID NO: 2570172 - RNA, 10 nt, Human
ugaauccuac

SEQ ID NO: 2570173 - RNA, 15 nt, Human
ugaauccuaagggcu

SEQ ID NO: 2570174 - RNA, 22 nt, Human
ugaauccuaagggcuggucucu

SEQ ID NO: 2570175 - RNA, 20 nt, Human
ugaaucaguauaaacaaagu

SEQ ID NO: 2570176 - RNA, 21 nt, Human
ugaaucaguauaaacaaaguu

SEQ ID NO: 2570177 - RNA, 22 nt, Human
ugaaucaguauaaacaaaguua

SEQ ID NO: 2570178 - RNA, 16 nt, Human
ugaaucaguauaaaca

SEQ ID NO: 2570179 - RNA, 19 nt, Human
ugaaucaguauaaacaaag

SEQ ID NO: 2570180 - RNA, 21 nt, Human
ugaaucagacccuaccccacc

SEQ ID NO: 2570181 - RNA, 22 nt, Human
ugaaucagacccuaccccacca

SEQ ID NO: 2570182 - RNA, 16 nt, Human
ugaaucaccuaggggu

SEQ ID NO: 2570183 - RNA, 16 nt, Human
ugaaucagacccuacc

SEQ ID NO: 2570184 - RNA, 18 nt, Human
ugaaucagacccuacccc

SEQ ID NO: 2570185 - RNA, 23 nt, Human
ugaaucacguaaagcuagaaaug

SEQ ID NO: 2570186 - RNA, 23 nt, Human
ugaaucugauuggacauuuucuu

SEQ ID NO: 2570187 - RNA, 15 nt, Human
ugaaucuaugccaaa

SEQ ID NO: 2570188 - RNA, 14 nt, Human
ugaaucuaugccaa

SEQ ID NO: 2570189 - RNA, 12 nt, Human
ugaaucuaugcc

SEQ ID NO: 2570190 - RNA, 23 nt, Human
ugaaucuagcuuauuuugaggcu

SEQ ID NO: 2570191 - RNA, 15 nt, Human
ugaaucuagcuuauu

SEQ ID NO: 2570192 - RNA, 20 nt, Human
ugaaucuaagcagcauuucu

SEQ ID NO: 2570193 - RNA, 15 nt, Human
ugaaucuaagcagca

SEQ ID NO: 2570194 - RNA, 15 nt, Human
ugaaucgcuucucuu

SEQ ID NO: 2570195 - RNA, 22 nt, Human
ugaaucuauuauacuguauuaa

SEQ ID NO: 2570196 - RNA, 21 nt, Human
ugaaucuauuauacuguauua

SEQ ID NO: 2570197 - RNA, 19 nt, Human
ugaaucuauuauacuguau

SEQ ID NO: 2570198 - RNA, 18 nt, Human
ugaaucuaugccaaagau

SEQ ID NO: 2570199 - RNA, 16 nt, Human
ugaaucuauuuaagua

SEQ ID NO: 2570200 - RNA, 14 nt, Human
ugaaucuauuuaag

SEQ ID NO: 2570201 - RNA, 20 nt, Human
ugaaucuugucucaaugcuc

SEQ ID NO: 2570202 - RNA, 19 nt, Human
ugaaucuugucucaaugcu

SEQ ID NO: 2570203 - RNA, 16 nt, Human
ugaaucuugucucaau

SEQ ID NO: 2570204 - RNA, 15 nt, Human
ugaaucuugucucaa

SEQ ID NO: 2570205 - RNA, 13 nt, Human
ugaaucuugucuc

SEQ ID NO: 2570206 - RNA, 16 nt, Human
ugaaucuuggugucua

SEQ ID NO: 2570207 - RNA, 23 nt, Human
ugaaucuugucucaaugcucaua

SEQ ID NO: 2570208 - RNA, 21 nt, Human
ugaaucuugucucaaugcuca

SEQ ID NO: 2570209 - RNA, 11 nt, Human
ugaaugaacac

SEQ ID NO: 2570210 - RNA, 12 nt, Human
ugaaugaacacu

SEQ ID NO: 2570211 - RNA, 15 nt, Human
ugaaugaacacucuu

SEQ ID NO: 2570212 - RNA, 15 nt, Human
ugaaugaaccuucug

SEQ ID NO: 2570213 - RNA, 16 nt, Human
ugaaugaaccuucugg

SEQ ID NO: 2570214 - RNA, 15 nt, Human
ugaaugaauggcuaa

SEQ ID NO: 2570215 - RNA, 20 nt, Human
ugaaugaauggcuaagcaaa

SEQ ID NO: 2570216 - RNA, 23 nt, Human
ugaaugaugauccuaggcauuug

SEQ ID NO: 2570217 - RNA, 16 nt, Human
ugaaugauucaguguu

SEQ ID NO: 2570218 - RNA, 19 nt, Human
ugaaugauuuccaaagaga

SEQ ID NO: 2570219 - RNA, 19 nt, Human
ugaaugcacacuagccucu

SEQ ID NO: 2570220 - RNA, 11 nt, Human
ugaauuaaaac

SEQ ID NO: 2570221 - RNA, 21 nt, Human
ugaauguuuccaaccuggagu

SEQ ID NO: 2570222 - RNA, 18 nt, Human
ugaaugcaccauggucaa

SEQ ID NO: 2570223 - RNA, 22 nt, Human
ugaauguuuccaaccuggagua

SEQ ID NO: 2570224 - RNA, 19 nt, Human
ugaauguuuauuccuugau

SEQ ID NO: 2570225 - RNA, 22 nt, Human
ugaauguuuacacucuuuguaa

SEQ ID NO: 2570226 - RNA, 19 nt, Human
ugaauguuuacacucuuug

SEQ ID NO: 2570227 - RNA, 19 nt, Human
ugaaugcaccauggucaaa

SEQ ID NO: 2570228 - RNA, 18 nt, Human
ugaacuucucucagacuu

SEQ ID NO: 2570229 - RNA, 22 nt, Human
ugaacuucucucagacuuacuu

SEQ ID NO: 2570230 - RNA, 15 nt, Human
ugaacuucucucaga

SEQ ID NO: 2570231 - RNA, 21 nt, Human
ugaacuucgcaucaaaagaca

SEQ ID NO: 2570232 - RNA, 19 nt, Human
ugaacuucgcaucaaaaga

SEQ ID NO: 2570233 - RNA, 18 nt, Human
ugaacuucgcaucaaaag

SEQ ID NO: 2570234 - RNA, 14 nt, Human
ugaacuucgcauca

SEQ ID NO: 2570235 - RNA, 16 nt, Human
ugaacuuauucuguag

SEQ ID NO: 2570236 - RNA, 21 nt, Human
ugaacuuauuuacacauaguu

SEQ ID NO: 2570237 - RNA, 22 nt, Human
ugaacuuccugcagguaaacag

SEQ ID NO: 2570238 - RNA, 20 nt, Human
ugaagacucauucuucugua

SEQ ID NO: 2570239 - RNA, 19 nt, Human
ugaagacucauucuucugu

SEQ ID NO: 2570240 - RNA, 18 nt, Human
ugaacuuaaaaugaaagu

SEQ ID NO: 2570241 - RNA, 15 nt, Human
ugaacuuaaaaugaa

SEQ ID NO: 2570242 - RNA, 17 nt, Human
ugaacuuaaauaaaugu

SEQ ID NO: 2570243 - RNA, 22 nt, Human
ugaacuuaaauaaaugucauua

SEQ ID NO: 2570244 - RNA, 13 nt, Human
ugaaacauguuuc

SEQ ID NO: 2570245 - RNA, 13 nt, Human
ugaacugguucau

SEQ ID NO: 2570246 - RNA, 23 nt, Human
ugaacuggguacuuguggacaca

SEQ ID NO: 2570247 - RNA, 13 nt, Human
ugaaacagaaaca

SEQ ID NO: 2570248 - RNA, 16 nt, Human
ugaaacacuuugcaua

SEQ ID NO: 2570249 - RNA, 21 nt, Human
ugaaacaggagagaaagggga

SEQ ID NO: 2570250 - RNA, 14 nt, Human
ugaaacagaaacaa

SEQ ID NO: 2570251 - RNA, 16 nt, Human
ugaaacagaaacaaaa

SEQ ID NO: 2570252 - RNA, 20 nt, Human
ugaaacaggagagaaagggg

SEQ ID NO: 2570253 - RNA, 20 nt, Human
ugaagagaagggcagggcug

SEQ ID NO: 2570254 - RNA, 22 nt, Human
ugaagagaagggcagggcugag

SEQ ID NO: 2570255 - RNA, 15 nt, Human
ugaagacuggaagcu

SEQ ID NO: 2570256 - RNA, 24 nt, Human
ugaagagaaccgagcaaagaucaa

SEQ ID NO: 2570257 - RNA, 16 nt, Human
ugaagagauuuuucau

SEQ ID NO: 2570258 - RNA, 16 nt, Human
ugaagagauccuucug

SEQ ID NO: 2570259 - RNA, 15 nt, Human
ugaagagauuuuuca

SEQ ID NO: 2570260 - RNA, 23 nt, Human
ugaagagaccaagacucugaaau

SEQ ID NO: 2570261 - RNA, 12 nt, Human
ugaagaggaaaa

SEQ ID NO: 2570262 - RNA, 17 nt, Human
ugaagagugagagggca

SEQ ID NO: 2570263 - RNA, 18 nt, Human
ugaagagugagagggcau

SEQ ID NO: 2570264 - RNA, 19 nt, Human
ugaagaguggguuucacaa

SEQ ID NO: 2570265 - RNA, 16 nt, Human
ugaagagugagagggc

SEQ ID NO: 2570266 - RNA, 17 nt, Human
ugaagaguccucugaau

SEQ ID NO: 2570267 - RNA, 16 nt, Human
ugaagaggaaaaugaa

SEQ ID NO: 2570268 - RNA, 23 nt, Human
ugaagaguaagucaaccugccug

SEQ ID NO: 2570269 - RNA, 23 nt, Human
ugaagaguccucugaaugaaccu

SEQ ID NO: 2570270 - RNA, 18 nt, Human
ugaaggccccgcccaggc

SEQ ID NO: 2570271 - RNA, 15 nt, Human
ugaaggaaaaugaua

SEQ ID NO: 2570272 - RNA, 16 nt, Human
ugaaggaaacaguuaa

SEQ ID NO: 2570273 - RNA, 14 nt, Human
ugaaggaaacaguu

SEQ ID NO: 2570274 - RNA, 12 nt, Human
ugaaggaaacag

SEQ ID NO: 2570275 - RNA, 16 nt, Human
ugaagcuuuuauguga

SEQ ID NO: 2570276 - RNA, 21 nt, Human
ugaaggaaaaacacaagcaaa

SEQ ID NO: 2570277 - RNA, 23 nt, Human
ugaaggaaaaacacaagcaaaaa

SEQ ID NO: 2570278 - RNA, 21 nt, Human
ugaagcuuuuaugugaaacau

SEQ ID NO: 2570279 - RNA, 20 nt, Human
ugaaggccccgcccaggcuu

SEQ ID NO: 2570280 - RNA, 19 nt, Human
ugaaggccccgcccaggcu

SEQ ID NO: 2570281 - RNA, 16 nt, Human
ugaaggaaccaaagcg

SEQ ID NO: 2570282 - RNA, 19 nt, Human
ugaaggccgagaagcaaga

SEQ ID NO: 2570283 - RNA, 19 nt, Human
ugaaggaacauuccuuagu

SEQ ID NO: 2570284 - RNA, 16 nt, Human
ugaaggcuggguucug

SEQ ID NO: 2570285 - RNA, 16 nt, Human
ugacaucacuuguaca

SEQ ID NO: 2570286 - RNA, 17 nt, Human
ugacaucacuuguacaa

SEQ ID NO: 2570287 - RNA, 18 nt, Human
ugacaucacuuguacaaa

SEQ ID NO: 2570288 - RNA, 19 nt, Human
ugacaucacuuguacaaaa

SEQ ID NO: 2570289 - RNA, 20 nt, Human
ugacaucacuuguacaaaau

SEQ ID NO: 2570290 - RNA, 21 nt, Human
ugacaucacuuguacaaaaua

SEQ ID NO: 2570291 - RNA, 22 nt, Human
ugacaucacuuguacaaaauaa

SEQ ID NO: 2570292 - RNA, 23 nt, Human
ugacaucacuuguacaaaauaaa

SEQ ID NO: 2570293 - RNA, 13 nt, Human
ugacaucacuugu

SEQ ID NO: 2570294 - RNA, 17 nt, Human
ugacaucaccacaguuu

SEQ ID NO: 2570295 - RNA, 15 nt, Human
ugacauauuuuugcu

SEQ ID NO: 2570296 - RNA, 22 nt, Human
ugacaucucaggggccagagga

SEQ ID NO: 2570297 - RNA, 21 nt, Human
ugacaucucaggggccagagg

SEQ ID NO: 2570298 - RNA, 19 nt, Human
ugacaucucaggggccaga

SEQ ID NO: 2570299 - RNA, 18 nt, Human
ugacaucucaggggccag

SEQ ID NO: 2570300 - RNA, 13 nt, Human
ugacaucucugca

SEQ ID NO: 2570301 - RNA, 14 nt, Human
ugacaucucugcaa

SEQ ID NO: 2570302 - RNA, 23 nt, Human
ugacaucucugcaaucuucucag

SEQ ID NO: 2570303 - RNA, 12 nt, Human
ugacaucucuuu

SEQ ID NO: 2570304 - RNA, 13 nt, Human
ugacaucucuuug

SEQ ID NO: 2570305 - RNA, 14 nt, Human
ugacaucucuuuga

SEQ ID NO: 2570306 - RNA, 17 nt, Human
ugacaucaguggcaugg

SEQ ID NO: 2570307 - RNA, 23 nt, Human
ugacaucaguggcauggcuccag

SEQ ID NO: 2570308 - RNA, 13 nt, Human
ugacauccaagcu

SEQ ID NO: 2570309 - RNA, 15 nt, Human
ugacaucucaggggc

SEQ ID NO: 2570310 - RNA, 14 nt, Human
ugacaucucagggg

SEQ ID NO: 2570311 - RNA, 17 nt, Human
ugacauccaagcuuccu

SEQ ID NO: 2570312 - RNA, 18 nt, Human
ugacagacacaggcccgg

SEQ ID NO: 2570313 - RNA, 17 nt, Human
ugacagacacaggcccg

SEQ ID NO: 2570314 - RNA, 15 nt, Human
ugacagacuccugag

SEQ ID NO: 2570315 - RNA, 14 nt, Human
ugacagacuccuga

SEQ ID NO: 2570316 - RNA, 22 nt, Human
ugacagaccacaucuuuaucug

SEQ ID NO: 2570317 - RNA, 19 nt, Human
ugacagacuccugaggaca

SEQ ID NO: 2570318 - RNA, 17 nt, Human
ugacagacuccugagga

SEQ ID NO: 2570319 - RNA, 14 nt, Human
ugacagacucucgu

SEQ ID NO: 2570320 - RNA, 18 nt, Human
ugacagagcaagacucug

SEQ ID NO: 2570321 - RNA, 23 nt, Human
ugacaucaacugcaucaagaugu

SEQ ID NO: 2570322 - RNA, 23 nt, Human
ugacagagccuucugaggacauu

SEQ ID NO: 2570323 - RNA, 22 nt, Human
ugacagagccuucugaggacau

SEQ ID NO: 2570324 - RNA, 22 nt, Human
ugacagagcaagugagacccug

SEQ ID NO: 2570325 - RNA, 12 nt, Human
ugacagagccag

SEQ ID NO: 2570326 - RNA, 21 nt, Human
ugacagagcaagacucugucu

SEQ ID NO: 2570327 - RNA, 16 nt, Human
ugaccacugcagaaga

SEQ ID NO: 2570328 - RNA, 17 nt, Human
ugaccacugcagaagac

SEQ ID NO: 2570329 - RNA, 18 nt, Human
ugaccacugcagaagaca

SEQ ID NO: 2570330 - RNA, 16 nt, Human
ugaccacucugucuug

SEQ ID NO: 2570331 - RNA, 20 nt, Human
ugaccagcaccaucucuccu

SEQ ID NO: 2570332 - RNA, 22 nt, Human
ugaccagccuccaugcugccuc

SEQ ID NO: 2570333 - RNA, 19 nt, Human
ugaccauccacucuacccu

SEQ ID NO: 2570334 - RNA, 22 nt, Human
ugaccauccacucuacccuccc

SEQ ID NO: 2570335 - RNA, 23 nt, Human
ugaccauccacucuacccuccca

SEQ ID NO: 2570336 - RNA, 21 nt, Human
ugaccagccuccaugcugccu

SEQ ID NO: 2570337 - RNA, 14 nt, Human
ugaccagcagcgcc

SEQ ID NO: 2570338 - RNA, 15 nt, Human
ugaccagcagcgccu

SEQ ID NO: 2570339 - RNA, 11 nt, Human
ugaccagcagc

SEQ ID NO: 2570340 - RNA, 22 nt, Human
ugaccagcagaucccagcucac

SEQ ID NO: 2570341 - RNA, 18 nt, Human
ugacauguuauauauuuu

SEQ ID NO: 2570342 - RNA, 19 nt, Human
ugacauguuauauauuuuu

SEQ ID NO: 2570343 - RNA, 18 nt, Human
ugaccagcacugucucag

SEQ ID NO: 2570344 - RNA, 17 nt, Human
ugaccagcagaucccag

SEQ ID NO: 2570345 - RNA, 18 nt, Human
ugaccagcagaucccagc

SEQ ID NO: 2570346 - RNA, 20 nt, Human
ugaccagcagaucccagcuc

SEQ ID NO: 2570347 - RNA, 21 nt, Human
ugaccagcagaucccagcuca

SEQ ID NO: 2570348 - RNA, 20 nt, Human
ugacauguggggccagguca

SEQ ID NO: 2570349 - RNA, 19 nt, Human
ugacauguggggccagguc

SEQ ID NO: 2570350 - RNA, 19 nt, Human
ugacauguguuggcagccu

SEQ ID NO: 2570351 - RNA, 18 nt, Human
ugacauguggggccaggu

SEQ ID NO: 2570352 - RNA, 17 nt, Human
ugacauguggggccagg

SEQ ID NO: 2570353 - RNA, 14 nt, Human
ugacauguggaaag

SEQ ID NO: 2570354 - RNA, 17 nt, Human
ugacauguggaaaguga

SEQ ID NO: 2570355 - RNA, 21 nt, Human
ugacauguggaaagugaauuu

SEQ ID NO: 2570356 - RNA, 22 nt, Human
ugacauguggaaagugaauuug

SEQ ID NO: 2570357 - RNA, 16 nt, Human
ugacaugugacuccua

SEQ ID NO: 2570358 - RNA, 21 nt, Human
ugacaugugaaaccuuuuuua

SEQ ID NO: 2570359 - RNA, 19 nt, Human
ugacaugugaaaccuuuuu

SEQ ID NO: 2570360 - RNA, 17 nt, Human
ugacaugugaaaccuuu

SEQ ID NO: 2570361 - RNA, 16 nt, Human
ugacaugugaaaccuu

SEQ ID NO: 2570362 - RNA, 15 nt, Human
ugacaugugaaaccu

SEQ ID NO: 2570363 - RNA, 22 nt, Human
ugacaugcgggcugggcagcug

SEQ ID NO: 2570364 - RNA, 21 nt, Human
ugacaugcgggcugggcagcu

SEQ ID NO: 2570365 - RNA, 20 nt, Human
ugacaugcgggcugggcagc

SEQ ID NO: 2570366 - RNA, 19 nt, Human
ugacaugcgggcugggcag

SEQ ID NO: 2570367 - RNA, 14 nt, Human
ugacaucuggaauc

SEQ ID NO: 2570368 - RNA, 16 nt, Human
ugacaucuguguuuca

SEQ ID NO: 2570369 - RNA, 16 nt, Human
ugacaucuucaaagcu

SEQ ID NO: 2570370 - RNA, 15 nt, Human
ugacaugauuccuuc

SEQ ID NO: 2570371 - RNA, 12 nt, Human
ugacaugaaaaa

SEQ ID NO: 2570372 - RNA, 17 nt, Human
ugacaucuuaguauuug

SEQ ID NO: 2570373 - RNA, 19 nt, Human
ugacaugauuccuuccugu

SEQ ID NO: 2570374 - RNA, 18 nt, Human
ugacaugcgggcugggca

SEQ ID NO: 2570375 - RNA, 17 nt, Human
ugacaugcgggcugggc

SEQ ID NO: 2570376 - RNA, 16 nt, Human
ugacaugauuccuucc

SEQ ID NO: 2570377 - RNA, 18 nt, Human
ugacaugauuccuuccug

SEQ ID NO: 2570378 - RNA, 22 nt, Human
ugacaugauuccuuccuguucu

SEQ ID NO: 2570379 - RNA, 18 nt, Human
ugacaugcacucagcucu

SEQ ID NO: 2570380 - RNA, 14 nt, Human
ugaauuacauuugu

SEQ ID NO: 2570381 - RNA, 13 nt, Human
ugaauuguaagga

SEQ ID NO: 2570382 - RNA, 21 nt, Human
ugaauuguaaggaaugauuaa

SEQ ID NO: 2570383 - RNA, 19 nt, Human
ugaauuguaacuguucuug

SEQ ID NO: 2570384 - RNA, 15 nt, Human
ugaauuguccccagu

SEQ ID NO: 2570385 - RNA, 23 nt, Human
ugaauuaaucaucuauaaagaag

SEQ ID NO: 2570386 - RNA, 20 nt, Human
ugaauuaaugacagagccag

SEQ ID NO: 2570387 - RNA, 21 nt, Human
ugaauuaaugacagagccagu

SEQ ID NO: 2570388 - RNA, 23 nt, Human
ugaauuaauaucccuacauguau

SEQ ID NO: 2570389 - RNA, 22 nt, Human
ugaauuaauaucccuacaugua

SEQ ID NO: 2570390 - RNA, 19 nt, Human
ugaauuaauaucccuacau

SEQ ID NO: 2570391 - RNA, 16 nt, Human
ugaauuaauaucccua

SEQ ID NO: 2570392 - RNA, 13 nt, Human
ugaauuacauuug

SEQ ID NO: 2570393 - RNA, 14 nt, Human
ugaauuaaguuuuu

SEQ ID NO: 2570394 - RNA, 17 nt, Human
ugaauuaaauaaacccu

SEQ ID NO: 2570395 - RNA, 15 nt, Human
ugaauuaaaguaauu

SEQ ID NO: 2570396 - RNA, 11 nt, Human
ugaauuaaauu

SEQ ID NO: 2570397 - RNA, 15 nt, Human
ugaauuaaauuuaau

SEQ ID NO: 2570398 - RNA, 16 nt, Human
ugaauuaaauuaggaa

SEQ ID NO: 2570399 - RNA, 23 nt, Human
ugacaacacucauugaccugagg

SEQ ID NO: 2570400 - RNA, 15 nt, Human
ugacaacagacuucu

SEQ ID NO: 2570401 - RNA, 18 nt, Human
ugacaacagacuucugaa

SEQ ID NO: 2570402 - RNA, 19 nt, Human
ugacaacagacuucugaaa

SEQ ID NO: 2570403 - RNA, 14 nt, Human
ugacaacagaagcu

SEQ ID NO: 2570404 - RNA, 13 nt, Human
ugacaacagaagc

SEQ ID NO: 2570405 - RNA, 22 nt, Human
ugacaacagaagcuucagaagu

SEQ ID NO: 2570406 - RNA, 12 nt, Human
ugacaacaucug

SEQ ID NO: 2570407 - RNA, 19 nt, Human
ugacaaccaccgcucccca

SEQ ID NO: 2570408 - RNA, 16 nt, Human
ugacaaccaccgcucc

SEQ ID NO: 2570409 - RNA, 13 nt, Human
ugacaacacucau

SEQ ID NO: 2570410 - RNA, 23 nt, Human
ugacaaauguguaucggaugcuu

SEQ ID NO: 2570411 - RNA, 20 nt, Human
ugacaaagguaaaucagacu

SEQ ID NO: 2570412 - RNA, 14 nt, Human
ugacaaaguuacug

SEQ ID NO: 2570413 - RNA, 14 nt, Human
ugaauuuaaauaua

SEQ ID NO: 2570414 - RNA, 12 nt, Human
ugaauuuaaaua

SEQ ID NO: 2570415 - RNA, 18 nt, Human
ugaauuguaacuguucuu

SEQ ID NO: 2570416 - RNA, 17 nt, Human
ugaauugugaccaaguu

SEQ ID NO: 2570417 - RNA, 13 nt, Human
ugacagacacagg

SEQ ID NO: 2570418 - RNA, 16 nt, Human
ugacagacacaggccc

SEQ ID NO: 2570419 - RNA, 14 nt, Human
ugacagacacaggc

SEQ ID NO: 2570420 - RNA, 17 nt, Human
ugacacaaguggaccuu

SEQ ID NO: 2570421 - RNA, 19 nt, Human
ugacacaaguggaccuuag

SEQ ID NO: 2570422 - RNA, 15 nt, Human
ugacacacagcucug

SEQ ID NO: 2570423 - RNA, 19 nt, Human
ugacacaaaccugccuggg

SEQ ID NO: 2570424 - RNA, 18 nt, Human
ugacacaaaccugccugg

SEQ ID NO: 2570425 - RNA, 17 nt, Human
ugacacaaaccugccug

SEQ ID NO: 2570426 - RNA, 16 nt, Human
ugacacaaguggaccu

SEQ ID NO: 2570427 - RNA, 14 nt, Human
ugacacacagcucu

SEQ ID NO: 2570428 - RNA, 16 nt, Human
ugacaauaaaacauua

SEQ ID NO: 2570429 - RNA, 14 nt, Human
ugacaauaaaacau

SEQ ID NO: 2570430 - RNA, 13 nt, Human
ugacaauaaaaca

SEQ ID NO: 2570431 - RNA, 12 nt, Human
ugacaauaaaac

SEQ ID NO: 2570432 - RNA, 20 nt, Human
ugacaagucauuuuaacuuu

SEQ ID NO: 2570433 - RNA, 14 nt, Human
ugacaagucauuuu

SEQ ID NO: 2570434 - RNA, 17 nt, Human
ugacaaggccccagaga

SEQ ID NO: 2570435 - RNA, 18 nt, Human
ugacaaggccccagagac

SEQ ID NO: 2570436 - RNA, 22 nt, Human
ugacaaggccccagagacucag

SEQ ID NO: 2570437 - RNA, 23 nt, Human
ugacaaggauugcuacuguccua

SEQ ID NO: 2570438 - RNA, 13 nt, Human
ugacaaggcccca

SEQ ID NO: 2570439 - RNA, 14 nt, Human
ugacaaggccccag

SEQ ID NO: 2570440 - RNA, 15 nt, Human
ugacaaggccccaga

SEQ ID NO: 2570441 - RNA, 16 nt, Human
ugacaaggccccagag

SEQ ID NO: 2570442 - RNA, 19 nt, Human
ugacaaccaugagaccacu

SEQ ID NO: 2570443 - RNA, 16 nt, Human
ugacaaccacuggucu

SEQ ID NO: 2570444 - RNA, 20 nt, Human
ugacaaccaccgcuccccag

SEQ ID NO: 2570445 - RNA, 21 nt, Human
ugacaaccaccgcuccccagc

SEQ ID NO: 2570446 - RNA, 17 nt, Human
ugacaaccacuggucug

SEQ ID NO: 2570447 - RNA, 21 nt, Human
ugacaacguuucagcgacucc

SEQ ID NO: 2570448 - RNA, 23 nt, Human
ugacaaccaccgcuccccagccc

SEQ ID NO: 2570449 - RNA, 22 nt, Human
ugacaacuucccagugaauucu

SEQ ID NO: 2570450 - RNA, 19 nt, Human
ugacaacuggaauaguuuu

SEQ ID NO: 2570451 - RNA, 23 nt, Human
ugacucuuuuuagggccaggcag

SEQ ID NO: 2570452 - RNA, 19 nt, Human
ugacugaagaugcagcuca

SEQ ID NO: 2570453 - RNA, 22 nt, Human
ugacucuuuuuagggccaggca

SEQ ID NO: 2570454 - RNA, 15 nt, Human
ugacugccccaacuc

SEQ ID NO: 2570455 - RNA, 16 nt, Human
ugacugccccaacucc

SEQ ID NO: 2570456 - RNA, 17 nt, Human
ugacugccccaacuccu

SEQ ID NO: 2570457 - RNA, 19 nt, Human
ugacugccccaacuccugg

SEQ ID NO: 2570458 - RNA, 22 nt, Human
ugacugcuccccagcccuggcu

SEQ ID NO: 2570459 - RNA, 21 nt, Human
ugacugcuccccagcccuggc

SEQ ID NO: 2570460 - RNA, 20 nt, Human
ugacugcuccccagcccugg

SEQ ID NO: 2570461 - RNA, 16 nt, Human
ugacugcgaucuucag

SEQ ID NO: 2570462 - RNA, 17 nt, Human
ugacugcgaucuucaga

SEQ ID NO: 2570463 - RNA, 20 nt, Human
ugacugccccaacuccugga

SEQ ID NO: 2570464 - RNA, 23 nt, Human
ugacugcuccccagcccuggcuc

SEQ ID NO: 2570465 - RNA, 15 nt, Human
ugacugcugauucuc

SEQ ID NO: 2570466 - RNA, 15 nt, Human
ugacuggcacagucu

SEQ ID NO: 2570467 - RNA, 21 nt, Human
ugacucuuucuauuguuucuu

SEQ ID NO: 2570468 - RNA, 20 nt, Human
ugacucuuguuuucaguuuc

SEQ ID NO: 2570469 - RNA, 14 nt, Human
ugacucuuggcaca

SEQ ID NO: 2570470 - RNA, 19 nt, Human
ugacucuuggcacagcaug

SEQ ID NO: 2570471 - RNA, 16 nt, Human
ugacuuuggcugcaug

SEQ ID NO: 2570472 - RNA, 16 nt, Human
ugacuuuccucuuugg

SEQ ID NO: 2570473 - RNA, 13 nt, Human
ugacuuucucagc

SEQ ID NO: 2570474 - RNA, 16 nt, Human
ugacuuugcucuuucu

SEQ ID NO: 2570475 - RNA, 16 nt, Human
ugacugggcccugccu

SEQ ID NO: 2570476 - RNA, 11 nt, Human
ugacuggauau

SEQ ID NO: 2570477 - RNA, 18 nt, Human
ugacugggcccugccucu

SEQ ID NO: 2570478 - RNA, 21 nt, Human
ugacugggcccugccucuguu

SEQ ID NO: 2570479 - RNA, 13 nt, Human
ugacuuucaggua

SEQ ID NO: 2570480 - RNA, 18 nt, Human
ugaccaugcucaucugcu

SEQ ID NO: 2570481 - RNA, 16 nt, Human
ugaccaugcucaucug

SEQ ID NO: 2570482 - RNA, 12 nt, Human
ugaccaugcuca

SEQ ID NO: 2570483 - RNA, 13 nt, Human
ugaccauucucca

SEQ ID NO: 2570484 - RNA, 14 nt, Human
ugaccauucuccac

SEQ ID NO: 2570485 - RNA, 19 nt, Human
ugaccaugcucaucugcug

SEQ ID NO: 2570486 - RNA, 23 nt, Human
ugacgugccuuuugcaccccucc

SEQ ID NO: 2570487 - RNA, 15 nt, Human
ugacuaaaaaacaaa

SEQ ID NO: 2570488 - RNA, 22 nt, Human
ugacgugccuuuugcaccccuc

SEQ ID NO: 2570489 - RNA, 14 nt, Human
ugacuaaaauauuu

SEQ ID NO: 2570490 - RNA, 22 nt, Human
ugacuaaaaaacaaagaagaca

SEQ ID NO: 2570491 - RNA, 14 nt, Human
ugacuaaaaauauu

SEQ ID NO: 2570492 - RNA, 22 nt, Human
ugacuaaaaauauuauaacuua

SEQ ID NO: 2570493 - RNA, 16 nt, Human
ugacuaaagagagaau

SEQ ID NO: 2570494 - RNA, 17 nt, Human
ugacuaaagagagaaug

SEQ ID NO: 2570495 - RNA, 15 nt, Human
ugacucuuaagaaga

SEQ ID NO: 2570496 - RNA, 14 nt, Human
ugacucuuaagaag

SEQ ID NO: 2570497 - RNA, 16 nt, Human
ugacucuuaagaagac

SEQ ID NO: 2570498 - RNA, 18 nt, Human
ugacuacagucaggaaag

SEQ ID NO: 2570499 - RNA, 13 nt, Human
ugacucuuaagaa

SEQ ID NO: 2570500 - RNA, 16 nt, Human
ugacuacagucaggaa

SEQ ID NO: 2570501 - RNA, 17 nt, Human
ugacuacagucaggaaa

SEQ ID NO: 2570502 - RNA, 23 nt, Human
ugacuaauuguauaacagguuau

SEQ ID NO: 2570503 - RNA, 22 nt, Human
ugacuaauuguauaacagguua

SEQ ID NO: 2570504 - RNA, 21 nt, Human
ugacuaauuguauaacagguu

SEQ ID NO: 2570505 - RNA, 20 nt, Human
ugacuaauuguauaacaggu

SEQ ID NO: 2570506 - RNA, 19 nt, Human
ugacuaauuguauaacagg

SEQ ID NO: 2570507 - RNA, 18 nt, Human
ugacuaauuguauaacag

SEQ ID NO: 2570508 - RNA, 17 nt, Human
ugacuaauuguauaaca

SEQ ID NO: 2570509 - RNA, 15 nt, Human
ugacuaauuguauaa

SEQ ID NO: 2570510 - RNA, 14 nt, Human
ugacuaauuguaua

SEQ ID NO: 2570511 - RNA, 13 nt, Human
ugacuaauuguau

SEQ ID NO: 2570512 - RNA, 21 nt, Human
ugagaaagucuuauuuauuca

SEQ ID NO: 2570513 - RNA, 15 nt, Human
ugagaaauauggaca

SEQ ID NO: 2570514 - RNA, 17 nt, Human
ugagaaauauggacacu

SEQ ID NO: 2570515 - RNA, 15 nt, Human
ugagacagugggaaa

SEQ ID NO: 2570516 - RNA, 13 nt, Human
ugagacaguggga

SEQ ID NO: 2570517 - RNA, 21 nt, Human
ugagaaauauggacacuuaau

SEQ ID NO: 2570518 - RNA, 19 nt, Human
ugagacaguuucuuagcuu

SEQ ID NO: 2570519 - RNA, 18 nt, Human
ugagacaguuucuuagcu

SEQ ID NO: 2570520 - RNA, 16 nt, Human
ugagacaguuucuuag

SEQ ID NO: 2570521 - RNA, 15 nt, Human
ugagacaguuucuua

SEQ ID NO: 2570522 - RNA, 14 nt, Human
ugagacaguuucuu

SEQ ID NO: 2570523 - RNA, 18 nt, Human
ugagacagugggaaauau

SEQ ID NO: 2570524 - RNA, 17 nt, Human
ugagacagugggaaaua

SEQ ID NO: 2570525 - RNA, 16 nt, Human
ugagacagugggaaau

SEQ ID NO: 2570526 - RNA, 21 nt, Human
ugagacaguuucuuagcuuuu

SEQ ID NO: 2570527 - RNA, 20 nt, Human
ugagacaguuucuuagcuuu

SEQ ID NO: 2570528 - RNA, 23 nt, Human
ugagacaguuucuuagcuuuuua

SEQ ID NO: 2570529 - RNA, 21 nt, Human
ugagaaagagcacuuaagaga

SEQ ID NO: 2570530 - RNA, 13 nt, Human
ugagaaagagcac

SEQ ID NO: 2570531 - RNA, 14 nt, Human
ugagaaagagcacu

SEQ ID NO: 2570532 - RNA, 15 nt, Human
ugagaaauaaaguuu

SEQ ID NO: 2570533 - RNA, 15 nt, Human
ugagaaagacuauuc

SEQ ID NO: 2570534 - RNA, 17 nt, Human
ugagaaaacuucuuuua

SEQ ID NO: 2570535 - RNA, 23 nt, Human
ugagaaaccuuauuguaccucuc

SEQ ID NO: 2570536 - RNA, 19 nt, Human
ugagaaaagcuuugaaccc

SEQ ID NO: 2570537 - RNA, 20 nt, Human
ugagaaacaacaauuucuac

SEQ ID NO: 2570538 - RNA, 12 nt, Human
ugagaaaacaug

SEQ ID NO: 2570539 - RNA, 16 nt, Human
ugagaaaacuucuuuu

SEQ ID NO: 2570540 - RNA, 17 nt, Human
ugacuuuuugcauuuaa

SEQ ID NO: 2570541 - RNA, 23 nt, Human
ugacuuuuugcauuuaaaacaga

SEQ ID NO: 2570542 - RNA, 22 nt, Human
ugacuuuuucuaagagcucccg

SEQ ID NO: 2570543 - RNA, 21 nt, Human
ugagaaaaauuuacauggcaa

SEQ ID NO: 2570544 - RNA, 18 nt, Human
ugagaaaaagcuccuguc

SEQ ID NO: 2570545 - RNA, 17 nt, Human
ugagaaaaagcuccugu

SEQ ID NO: 2570546 - RNA, 16 nt, Human
ugagaaaaagcuccug

SEQ ID NO: 2570547 - RNA, 19 nt, Human
ugacuuuuccauguaucua

SEQ ID NO: 2570548 - RNA, 18 nt, Human
ugacuuuuccauguaucu

SEQ ID NO: 2570549 - RNA, 22 nt, Human
ugacuuuuccauguaucuaccu

SEQ ID NO: 2570550 - RNA, 14 nt, Human
ugacuuuuugcauu

SEQ ID NO: 2570551 - RNA, 12 nt, Human
ugacuuuuguau

SEQ ID NO: 2570552 - RNA, 22 nt, Human
ugacuuuucuguccgagcuuug

SEQ ID NO: 2570553 - RNA, 13 nt, Human
ugacuuuuccaug

SEQ ID NO: 2570554 - RNA, 20 nt, Human
ugacuuuuaaggcuaaaacu

SEQ ID NO: 2570555 - RNA, 11 nt, Human
ugacuuugucu

SEQ ID NO: 2570556 - RNA, 13 nt, Human
ugagaccugcccc

SEQ ID NO: 2570557 - RNA, 14 nt, Human
ugagaccugccccu

SEQ ID NO: 2570558 - RNA, 15 nt, Human
ugagaccugccccuc

SEQ ID NO: 2570559 - RNA, 22 nt, Human
ugagaccugccccuccucucug

SEQ ID NO: 2570560 - RNA, 12 nt, Human
ugagaccugccc

SEQ ID NO: 2570561 - RNA, 16 nt, Human
ugagaccucagccaug

SEQ ID NO: 2570562 - RNA, 14 nt, Human
ugagaccaaccugg

SEQ ID NO: 2570563 - RNA, 23 nt, Human
ugagacggagucucgcucuguca

SEQ ID NO: 2570564 - RNA, 21 nt, Human
ugagacgccaccauuccugga

SEQ ID NO: 2570565 - RNA, 20 nt, Human
ugagacgccaccauuccugg

SEQ ID NO: 2570566 - RNA, 17 nt, Human
ugagaccucagccauga

SEQ ID NO: 2570567 - RNA, 19 nt, Human
ugagaccucagccaugagg

SEQ ID NO: 2570568 - RNA, 14 nt, Human
ugagaggggaacag

SEQ ID NO: 2570569 - RNA, 18 nt, Human
ugagaggggaacagacug

SEQ ID NO: 2570570 - RNA, 21 nt, Human
ugagagggcaguguuuccuuu

SEQ ID NO: 2570571 - RNA, 17 nt, Human
ugagagggcaugcgcac

SEQ ID NO: 2570572 - RNA, 22 nt, Human
ugagagggcaugcgcacaaggc

SEQ ID NO: 2570573 - RNA, 19 nt, Human
ugagaguuuuggaugcagu

SEQ ID NO: 2570574 - RNA, 15 nt, Human
ugagcaggauuuuaa

SEQ ID NO: 2570575 - RNA, 21 nt, Human
ugagcagagucuugcuaccuc

SEQ ID NO: 2570576 - RNA, 12 nt, Human
ugagcagagucu

SEQ ID NO: 2570577 - RNA, 21 nt, Human
ugagcagacuggugagcagac

SEQ ID NO: 2570578 - RNA, 23 nt, Human
ugagcagacuggugagcagacug

SEQ ID NO: 2570579 - RNA, 20 nt, Human
ugagcaggauuuuaaucuuu

SEQ ID NO: 2570580 - RNA, 17 nt, Human
ugagcagggauccuggu

SEQ ID NO: 2570581 - RNA, 22 nt, Human
ugagcagggagauccugguugg

SEQ ID NO: 2570582 - RNA, 20 nt, Human
ugagauaccagcgaggaggc

SEQ ID NO: 2570583 - RNA, 15 nt, Human
ugagauagaagaacu

SEQ ID NO: 2570584 - RNA, 16 nt, Human
ugagauagaagaacug

SEQ ID NO: 2570585 - RNA, 19 nt, Human
ugagauagaagaacugcaa

SEQ ID NO: 2570586 - RNA, 21 nt, Human
ugagauagaagaacugcaaag

SEQ ID NO: 2570587 - RNA, 23 nt, Human
ugagauaguagcauacauuuaua

SEQ ID NO: 2570588 - RNA, 23 nt, Human
ugagauagcauugugaacugaca

SEQ ID NO: 2570589 - RNA, 19 nt, Human
ugagauaguagcauacauu

SEQ ID NO: 2570590 - RNA, 19 nt, Human
ugagauagcauugugaacu

SEQ ID NO: 2570591 - RNA, 18 nt, Human
ugagauagcauugugaac

SEQ ID NO: 2570592 - RNA, 16 nt, Human
ugagauagcauuguga

SEQ ID NO: 2570593 - RNA, 16 nt, Human
ugagauaauguuagag

SEQ ID NO: 2570594 - RNA, 21 nt, Human
ugagaguuuugucuugaaugu

SEQ ID NO: 2570595 - RNA, 21 nt, Human
ugagauaccagcgaggaggcu

SEQ ID NO: 2570596 - RNA, 18 nt, Human
ugagaguuuugucuugaa

SEQ ID NO: 2570597 - RNA, 22 nt, Human
ugagauaaugugauauuauaca

SEQ ID NO: 2570598 - RNA, 22 nt, Human
ugagaguuuuggaugcagugcu

SEQ ID NO: 2570599 - RNA, 12 nt, Human
ugaggccuugcu

SEQ ID NO: 2570600 - RNA, 22 nt, Human
ugaggccuuaucauucauucuu

SEQ ID NO: 2570601 - RNA, 13 nt, Human
ugaggccuugcuc

SEQ ID NO: 2570602 - RNA, 22 nt, Human
ugaggccugggccgcugccacg

SEQ ID NO: 2570603 - RNA, 17 nt, Human
ugaggccuggccaggca

SEQ ID NO: 2570604 - RNA, 16 nt, Human
ugaggccuggccaggc

SEQ ID NO: 2570605 - RNA, 15 nt, Human
ugaggccuggccagg

SEQ ID NO: 2570606 - RNA, 14 nt, Human
ugaggccuggccag

SEQ ID NO: 2570607 - RNA, 13 nt, Human
ugaggccugggcc

SEQ ID NO: 2570608 - RNA, 12 nt, Human
ugaggccugggc

SEQ ID NO: 2570609 - RNA, 16 nt, Human
ugaggcucugcccuug

SEQ ID NO: 2570610 - RNA, 15 nt, Human
ugaggcucugcccuu

SEQ ID NO: 2570611 - RNA, 23 nt, Human
ugaggcggguggaucaccugagg

SEQ ID NO: 2570612 - RNA, 16 nt, Human
ugaggcugggcucccu

SEQ ID NO: 2570613 - RNA, 15 nt, Human
ugaggcugggcuccc

SEQ ID NO: 2570614 - RNA, 18 nt, Human
ugaggcucugcccuuggu

SEQ ID NO: 2570615 - RNA, 16 nt, Human
ugaggcucuuucuggg

SEQ ID NO: 2570616 - RNA, 17 nt, Human
ugaggcucuuucugggc

SEQ ID NO: 2570617 - RNA, 18 nt, Human
ugaggcucuuucugggcc

SEQ ID NO: 2570618 - RNA, 18 nt, Human
ugaggcagaagaauugaa

SEQ ID NO: 2570619 - RNA, 24 nt, Human
ugaggcagacagcagcucaggcac

SEQ ID NO: 2570620 - RNA, 21 nt, Human
ugaggcagcagugugaggcca

SEQ ID NO: 2570621 - RNA, 15 nt, Human
ugaggcaggcuuugu

SEQ ID NO: 2570622 - RNA, 13 nt, Human
ugaggcagguccc

SEQ ID NO: 2570623 - RNA, 13 nt, Human
ugaggcagggaag

SEQ ID NO: 2570624 - RNA, 14 nt, Human
ugaggcagggaagu

SEQ ID NO: 2570625 - RNA, 22 nt, Human
ugaggcagggaaguccccaggc

SEQ ID NO: 2570626 - RNA, 23 nt, Human
ugaggccuggacuuuccugcaac

SEQ ID NO: 2570627 - RNA, 20 nt, Human
ugaggccuggacuuuccugc

SEQ ID NO: 2570628 - RNA, 19 nt, Human
ugaggccuggacuuuccug

SEQ ID NO: 2570629 - RNA, 17 nt, Human
ugaggccuggacuuucc

SEQ ID NO: 2570630 - RNA, 14 nt, Human
ugaggccuggacuu

SEQ ID NO: 2570631 - RNA, 12 nt, Human
ugaggccuggac

SEQ ID NO: 2570632 - RNA, 11 nt, Human
ugaggccugga

SEQ ID NO: 2570633 - RNA, 21 nt, Human
ugaggccugcccucagggauc

SEQ ID NO: 2570634 - RNA, 15 nt, Human
ugaggcaggggcgga

SEQ ID NO: 2570635 - RNA, 13 nt, Human
ugaggcagaagaa

SEQ ID NO: 2570636 - RNA, 22 nt, Human
ugaggcacgaaugaucuuucuu

SEQ ID NO: 2570637 - RNA, 16 nt, Human
ugaggcaaugucagga

SEQ ID NO: 2570638 - RNA, 17 nt, Human
ugaggcaaugucaggaa

SEQ ID NO: 2570639 - RNA, 20 nt, Human
ugaggcaaugucaggaacag

SEQ ID NO: 2570640 - RNA, 21 nt, Human
ugaggcaaugucaggaacaga

SEQ ID NO: 2570641 - RNA, 12 nt, Human
ugaggcagacag

SEQ ID NO: 2570642 - RNA, 13 nt, Human
ugaggcagacagc

SEQ ID NO: 2570643 - RNA, 14 nt, Human
ugaggcagacagca

SEQ ID NO: 2570644 - RNA, 15 nt, Human
ugaggcagacagcag

SEQ ID NO: 2570645 - RNA, 16 nt, Human
ugaggcagacagcagc

SEQ ID NO: 2570646 - RNA, 17 nt, Human
ugaggcagacagcagcu

SEQ ID NO: 2570647 - RNA, 20 nt, Human
ugaggcagacagcagcucag

SEQ ID NO: 2570648 - RNA, 23 nt, Human
ugaggcagacagcagcucaggca

SEQ ID NO: 2570649 - RNA, 16 nt, Human
ugagucccagugggag

SEQ ID NO: 2570650 - RNA, 15 nt, Human
ugagucccaguggga

SEQ ID NO: 2570651 - RNA, 13 nt, Human
ugagucccagugg

SEQ ID NO: 2570652 - RNA, 15 nt, Human
ugaggugugggggcu

SEQ ID NO: 2570653 - RNA, 19 nt, Human
ugagucccagugggaggcg

SEQ ID NO: 2570654 - RNA, 20 nt, Human
ugagucccaggcugagccuc

SEQ ID NO: 2570655 - RNA, 21 nt, Human
ugagucccaggcugagccuca

SEQ ID NO: 2570656 - RNA, 18 nt, Human
ugaggugucuuaagccuu

SEQ ID NO: 2570657 - RNA, 22 nt, Human
ugagguggucugaauguucuga

SEQ ID NO: 2570658 - RNA, 19 nt, Human
ugagucccaggcugagccu

SEQ ID NO: 2570659 - RNA, 14 nt, Human
ugaggugugggggc

SEQ ID NO: 2570660 - RNA, 21 nt, Human
ugagguggucugaauguucug

SEQ ID NO: 2570661 - RNA, 21 nt, Human
ugagguggguuuucuucccau

SEQ ID NO: 2570662 - RNA, 13 nt, Human
ugagguggucuga

SEQ ID NO: 2570663 - RNA, 14 nt, Human
ugagguggucugaa

SEQ ID NO: 2570664 - RNA, 17 nt, Human
ugagguggucugaaugu

SEQ ID NO: 2570665 - RNA, 18 nt, Human
ugagguggucugaauguu

SEQ ID NO: 2570666 - RNA, 19 nt, Human
ugagguggucugaauguuc

SEQ ID NO: 2570667 - RNA, 20 nt, Human
ugagguggucugaauguucu

SEQ ID NO: 2570668 - RNA, 18 nt, Human
ugaggugggagguggaag

SEQ ID NO: 2570669 - RNA, 13 nt, Human
ugaggugggaggu

SEQ ID NO: 2570670 - RNA, 16 nt, Human
ugaggugccuguccca

SEQ ID NO: 2570671 - RNA, 20 nt, Human
ugaggugggcccaggaccag

SEQ ID NO: 2570672 - RNA, 16 nt, Human
ugaggugggcccagga

SEQ ID NO: 2570673 - RNA, 15 nt, Human
ugaggugggcccagg

SEQ ID NO: 2570674 - RNA, 14 nt, Human
ugaggugggcccag

SEQ ID NO: 2570675 - RNA, 22 nt, Human
ugaggugggagguggaagaagg

SEQ ID NO: 2570676 - RNA, 21 nt, Human
ugaggugggagguggaagaag

SEQ ID NO: 2570677 - RNA, 13 nt, Human
ugaggugggccca

SEQ ID NO: 2570678 - RNA, 11 nt, Human
ugaggugggcc

SEQ ID NO: 2570679 - RNA, 15 nt, Human
ugaggugccuguccc

SEQ ID NO: 2570680 - RNA, 14 nt, Human
ugaggugccugucc

SEQ ID NO: 2570681 - RNA, 21 nt, Human
ugaggugcccagcuagcugca

SEQ ID NO: 2570682 - RNA, 20 nt, Human
ugaggugcagagugcccaga

SEQ ID NO: 2570683 - RNA, 22 nt, Human
ugaggugcccagcuagcugcag

SEQ ID NO: 2570684 - RNA, 21 nt, Human
ugaggugcagagugcccagaa

SEQ ID NO: 2570685 - RNA, 19 nt, Human
ugaggucagagccugcagu

SEQ ID NO: 2570686 - RNA, 18 nt, Human
ugaggucagagccugcag

SEQ ID NO: 2570687 - RNA, 21 nt, Human
ugaggcugggcucccuuccca

SEQ ID NO: 2570688 - RNA, 12 nt, Human
ugaggcuguccu

SEQ ID NO: 2570689 - RNA, 10 nt, Human
ugaggcugua

SEQ ID NO: 2570690 - RNA, 18 nt, Human
ugaggcugagacugcggg

SEQ ID NO: 2570691 - RNA, 19 nt, Human
ugaggcucuuucugggcca

SEQ ID NO: 2570692 - RNA, 13 nt, Human
ugaggcugagacu

SEQ ID NO: 2570693 - RNA, 17 nt, Human
ugaggugcagagugccc

SEQ ID NO: 2570694 - RNA, 17 nt, Human
ugaggugaaagggagcu

SEQ ID NO: 2570695 - RNA, 18 nt, Human
ugaggugaaagggagcua

SEQ ID NO: 2570696 - RNA, 21 nt, Human
ugaggucuuuugacaugugga

SEQ ID NO: 2570697 - RNA, 22 nt, Human
ugaggucuuuugacauguggaa

SEQ ID NO: 2570698 - RNA, 23 nt, Human
ugaggucuuuugacauguggaaa

SEQ ID NO: 2570699 - RNA, 15 nt, Human
ugaggugaaagggag

SEQ ID NO: 2570700 - RNA, 16 nt, Human
ugaggugaaagggagc

SEQ ID NO: 2570701 - RNA, 14 nt, Human
ugaggcuguccugu

SEQ ID NO: 2570702 - RNA, 13 nt, Human
ugaggcuguccug

SEQ ID NO: 2570703 - RNA, 16 nt, Human
ugaggucaggaguucc

SEQ ID NO: 2570704 - RNA, 23 nt, Human
ugagguccagcccuggcugaagg

SEQ ID NO: 2570705 - RNA, 21 nt, Human
ugagguccagcccuggcugaa

SEQ ID NO: 2570706 - RNA, 20 nt, Human
ugagguccagcccuggcuga

SEQ ID NO: 2570707 - RNA, 16 nt, Human
ugagguccagcccugg

SEQ ID NO: 2570708 - RNA, 13 nt, Human
ugaggcuguagga

SEQ ID NO: 2570709 - RNA, 18 nt, Human
ugaggucauagcagugcu

SEQ ID NO: 2570710 - RNA, 22 nt, Human
ugaggaugaaaaaauaacacug

SEQ ID NO: 2570711 - RNA, 19 nt, Human
ugaggaucagaguaaucca

SEQ ID NO: 2570712 - RNA, 17 nt, Human
ugaggaucagaguaauc

SEQ ID NO: 2570713 - RNA, 13 nt, Human
ugaggaucagagu

SEQ ID NO: 2570714 - RNA, 13 nt, Human
ugaggauuucaag

SEQ ID NO: 2570715 - RNA, 14 nt, Human
ugaggcaagagaau

SEQ ID NO: 2570716 - RNA, 20 nt, Human
ugaggcaauaaaaaucauag

SEQ ID NO: 2570717 - RNA, 20 nt, Human
ugaggcaaccacaggcagca

SEQ ID NO: 2570718 - RNA, 16 nt, Human
ugaggauuuugaguau

SEQ ID NO: 2570719 - RNA, 16 nt, Human
ugaggauuucaagccu

SEQ ID NO: 2570720 - RNA, 20 nt, Human
ugaggauauauuuucacuuu

SEQ ID NO: 2570721 - RNA, 16 nt, Human
ugaggagugugagaau

SEQ ID NO: 2570722 - RNA, 14 nt, Human
ugaggaugaggccg

SEQ ID NO: 2570723 - RNA, 15 nt, Human
ugaggaugagcugga

SEQ ID NO: 2570724 - RNA, 17 nt, Human
ugaggaugucacucaga

SEQ ID NO: 2570725 - RNA, 16 nt, Human
ugaggaugggaaggag

SEQ ID NO: 2570726 - RNA, 20 nt, Human
ugaggaugggaaggagggag

SEQ ID NO: 2570727 - RNA, 22 nt, Human
ugaggaugauuauuuucaaggc

SEQ ID NO: 2570728 - RNA, 16 nt, Human
ugaggaugagcuggaa

SEQ ID NO: 2570729 - RNA, 18 nt, Human
ugaggaugcagagucagc

SEQ ID NO: 2570730 - RNA, 12 nt, Human
ugaggaugggaa

SEQ ID NO: 2570731 - RNA, 16 nt, Human
ugaggagucuugugug

SEQ ID NO: 2570732 - RNA, 15 nt, Human
ugaggagucuugugu

SEQ ID NO: 2570733 - RNA, 19 nt, Human
ugaggaggggcagguaaac

SEQ ID NO: 2570734 - RNA, 15 nt, Human
ugagcuuggccagaa

SEQ ID NO: 2570735 - RNA, 17 nt, Human
ugaggaggccuccaucu

SEQ ID NO: 2570736 - RNA, 20 nt, Human
ugagcuuggcagcugaacua

SEQ ID NO: 2570737 - RNA, 13 nt, Human
ugagcuuggccag

SEQ ID NO: 2570738 - RNA, 14 nt, Human
ugagcuuggccaga

SEQ ID NO: 2570739 - RNA, 16 nt, Human
ugagcuucucugugaa

SEQ ID NO: 2570740 - RNA, 19 nt, Human
ugagcuuggcagcugaacu

SEQ ID NO: 2570741 - RNA, 15 nt, Human
ugagcuucucuguga

SEQ ID NO: 2570742 - RNA, 16 nt, Human
ugagcuuagugaaauu

SEQ ID NO: 2570743 - RNA, 15 nt, Human
ugagcuuaucaugcu

SEQ ID NO: 2570744 - RNA, 23 nt, Human
ugagcuuaagaauuuugagcagg

SEQ ID NO: 2570745 - RNA, 11 nt, Human
ugagcuguuuu

SEQ ID NO: 2570746 - RNA, 15 nt, Human
ugagcuguugccuca

SEQ ID NO: 2570747 - RNA, 14 nt, Human
ugagcuguugccuc

SEQ ID NO: 2570748 - RNA, 15 nt, Human
ugagcugccauccag

SEQ ID NO: 2570749 - RNA, 20 nt, Human
ugagcugccuguaacuugag

SEQ ID NO: 2570750 - RNA, 11 nt, Human
ugagcugccuu

SEQ ID NO: 2570751 - RNA, 16 nt, Human
ugagcugccucugaga

SEQ ID NO: 2570752 - RNA, 16 nt, Human
ugagcugagcagggag

SEQ ID NO: 2570753 - RNA, 22 nt, Human
ugagccgagaucacgccacugc

SEQ ID NO: 2570754 - RNA, 23 nt, Human
ugagcagggcucagcggggacag

SEQ ID NO: 2570755 - RNA, 22 nt, Human
ugagcagggcucagcggggaca

SEQ ID NO: 2570756 - RNA, 20 nt, Human
ugagcagggcucagcgggga

SEQ ID NO: 2570757 - RNA, 21 nt, Human
ugagcuauuuccauuccagaa

SEQ ID NO: 2570758 - RNA, 19 nt, Human
ugagcuauuuccauuccag

SEQ ID NO: 2570759 - RNA, 14 nt, Human
ugagcuauguauua

SEQ ID NO: 2570760 - RNA, 15 nt, Human
ugagcuauuucaucu

SEQ ID NO: 2570761 - RNA, 15 nt, Human
ugagcuauguauuaa

SEQ ID NO: 2570762 - RNA, 16 nt, Human
ugagcuauugcuguuc

SEQ ID NO: 2570763 - RNA, 17 nt, Human
ugagccgcaucuucucc

SEQ ID NO: 2570764 - RNA, 20 nt, Human
ugagccgcaucuucuccauc

SEQ ID NO: 2570765 - RNA, 21 nt, Human
ugagccgcaucuucuccaucu

SEQ ID NO: 2570766 - RNA, 23 nt, Human
ugagccgcaucuucuccaucugg

SEQ ID NO: 2570767 - RNA, 23 nt, Human
ugagccgagaucacgccacugca

SEQ ID NO: 2570768 - RNA, 11 nt, Human
ugagcucagcc

SEQ ID NO: 2570769 - RNA, 12 nt, Human
ugagcucagccc

SEQ ID NO: 2570770 - RNA, 16 nt, Human
ugagcucagaccccca

SEQ ID NO: 2570771 - RNA, 17 nt, Human
ugagcucagacccccac

SEQ ID NO: 2570772 - RNA, 18 nt, Human
ugagcucagacccccacu

SEQ ID NO: 2570773 - RNA, 19 nt, Human
ugagcucagacccccacuc

SEQ ID NO: 2570774 - RNA, 11 nt, Human
ugagcucagga

SEQ ID NO: 2570775 - RNA, 19 nt, Human
ugagcucaggaguuugaga

SEQ ID NO: 2570776 - RNA, 20 nt, Human
ugagcugaaaugcugcauuu

SEQ ID NO: 2570777 - RNA, 18 nt, Human
ugagcugaaaugcugcau

SEQ ID NO: 2570778 - RNA, 17 nt, Human
ugagcugaaaugcugca

SEQ ID NO: 2570779 - RNA, 17 nt, Human
ugagcugagaucgugcc

SEQ ID NO: 2570780 - RNA, 14 nt, Human
ugagcugaggcagc

SEQ ID NO: 2570781 - RNA, 14 nt, Human
ugagcugagcaggg

SEQ ID NO: 2570782 - RNA, 19 nt, Human
ugagcugagaucgugccgu

SEQ ID NO: 2570783 - RNA, 13 nt, Human
ugagcugagcagg

SEQ ID NO: 2570784 - RNA, 20 nt, Human
ugagcucagcccuggugggc

SEQ ID NO: 2570785 - RNA, 20 nt, Human
ugagcucagacccccacucu

SEQ ID NO: 2570786 - RNA, 22 nt, Human
ugagcucagacccccacucuca

SEQ ID NO: 2570787 - RNA, 12 nt, Human
ugagcuccagac

SEQ ID NO: 2570788 - RNA, 13 nt, Human
ugagcuccagacc

SEQ ID NO: 2570789 - RNA, 14 nt, Human
ugagcuccagaccc

SEQ ID NO: 2570790 - RNA, 15 nt, Human
ugagcuccagacccc

SEQ ID NO: 2570791 - RNA, 16 nt, Human
ugagcuccagaccccc

SEQ ID NO: 2570792 - RNA, 17 nt, Human
ugagcuccagaccccca

SEQ ID NO: 2570793 - RNA, 14 nt, Human
ucugcagugccuug

SEQ ID NO: 2570794 - RNA, 20 nt, Human
ucugcagucacuucguggga

SEQ ID NO: 2570795 - RNA, 13 nt, Human
ucugcagugccuu

SEQ ID NO: 2570796 - RNA, 21 nt, Human
ucugcaguagucucugugcuu

SEQ ID NO: 2570797 - RNA, 20 nt, Human
ucugcaguagucucugugcu

SEQ ID NO: 2570798 - RNA, 19 nt, Human
ucugcaguagucucugugc

SEQ ID NO: 2570799 - RNA, 18 nt, Human
ucugcaguagucucugug

SEQ ID NO: 2570800 - RNA, 16 nt, Human
ucugcaguagucucug

SEQ ID NO: 2570801 - RNA, 15 nt, Human
ucugcagugccuugg

SEQ ID NO: 2570802 - RNA, 15 nt, Human
ucugcauauguugaa

SEQ ID NO: 2570803 - RNA, 16 nt, Human
ucugcauauguugaau

SEQ ID NO: 2570804 - RNA, 18 nt, Human
ucugcauauguugaauac

SEQ ID NO: 2570805 - RNA, 18 nt, Human
ucugccauauucuguugg

SEQ ID NO: 2570806 - RNA, 12 nt, Human
ucugcccaaccc

SEQ ID NO: 2570807 - RNA, 19 nt, Human
ucugcauauguugaauacu

SEQ ID NO: 2570808 - RNA, 21 nt, Human
ucugcauauguugaauacuuu

SEQ ID NO: 2570809 - RNA, 12 nt, Human
ucugcccacucc

SEQ ID NO: 2570810 - RNA, 23 nt, Human
ucugccauauucuguuggccagu

SEQ ID NO: 2570811 - RNA, 22 nt, Human
ucugccauauucuguuggccag

SEQ ID NO: 2570812 - RNA, 15 nt, Human
ucugccucccaucac

SEQ ID NO: 2570813 - RNA, 13 nt, Human
ucugccucccauc

SEQ ID NO: 2570814 - RNA, 12 nt, Human
ucugccucccau

SEQ ID NO: 2570815 - RNA, 16 nt, Human
ucugccucaaugugaa

SEQ ID NO: 2570816 - RNA, 14 nt, Human
ucugcccacucccu

SEQ ID NO: 2570817 - RNA, 13 nt, Human
ucugcccacuccc

SEQ ID NO: 2570818 - RNA, 18 nt, Human
ucugcccaauuggaggaa

SEQ ID NO: 2570819 - RNA, 19 nt, Human
ucugcccaaaaauaugguu

SEQ ID NO: 2570820 - RNA, 18 nt, Human
ucugcccacauuggaccc

SEQ ID NO: 2570821 - RNA, 16 nt, Human
ucugccugccagcugc

SEQ ID NO: 2570822 - RNA, 17 nt, Human
ucugccugccagcugca

SEQ ID NO: 2570823 - RNA, 12 nt, Human
ucugccugagcu

SEQ ID NO: 2570824 - RNA, 20 nt, Human
ucugccugaagucacacagu

SEQ ID NO: 2570825 - RNA, 15 nt, Human
ucugccucuucuggg

SEQ ID NO: 2570826 - RNA, 17 nt, Human
ucugccucuucugggag

SEQ ID NO: 2570827 - RNA, 18 nt, Human
ucugccucuucugggagg

SEQ ID NO: 2570828 - RNA, 19 nt, Human
ucugccucuucugggaggg

SEQ ID NO: 2570829 - RNA, 19 nt, Human
ucugccugaagucacacag

SEQ ID NO: 2570830 - RNA, 22 nt, Human
ucugccucugacacacagcucu

SEQ ID NO: 2570831 - RNA, 21 nt, Human
ucugccucugacacacagcuc

SEQ ID NO: 2570832 - RNA, 15 nt, Human
ucugccucugaggga

SEQ ID NO: 2570833 - RNA, 14 nt, Human
ucugccucuucugg

SEQ ID NO: 2570834 - RNA, 14 nt, Human
ucugccucugccug

SEQ ID NO: 2570835 - RNA, 16 nt, Human
ucugccucugccugca

SEQ ID NO: 2570836 - RNA, 23 nt, Human
ucugccucugacacacagcucug

SEQ ID NO: 2570837 - RNA, 21 nt, Human
ucugccucccaucacccgcua

SEQ ID NO: 2570838 - RNA, 20 nt, Human
ucugccucccaucacccgcu

SEQ ID NO: 2570839 - RNA, 17 nt, Human
ucugccucccaucaccc

SEQ ID NO: 2570840 - RNA, 16 nt, Human
ucugccucccaucacc

SEQ ID NO: 2570841 - RNA, 18 nt, Human
ucugccucugacacacag

SEQ ID NO: 2570842 - RNA, 15 nt, Human
ucugccucugacaca

SEQ ID NO: 2570843 - RNA, 12 nt, Human
ucugccucucaa

SEQ ID NO: 2570844 - RNA, 15 nt, Human
ucugccuccucuuca

SEQ ID NO: 2570845 - RNA, 15 nt, Human
ucugccucccucacc

SEQ ID NO: 2570846 - RNA, 21 nt, Human
ucugccucaaugugaaucaga

SEQ ID NO: 2570847 - RNA, 20 nt, Human
ucugccucacauagcuuaca

SEQ ID NO: 2570848 - RNA, 23 nt, Human
ucugacccaugcugcccugugag

SEQ ID NO: 2570849 - RNA, 22 nt, Human
ucugacccaugcugcccuguga

SEQ ID NO: 2570850 - RNA, 20 nt, Human
ucugacccaugcugcccugu

SEQ ID NO: 2570851 - RNA, 19 nt, Human
ucugacccaugcugcccug

SEQ ID NO: 2570852 - RNA, 24 nt, Human
ucucauaggaaaaguacauuuaau

SEQ ID NO: 2570853 - RNA, 15 nt, Human
ucucaucaacugaau

SEQ ID NO: 2570854 - RNA, 23 nt, Human
ucucauaggaaaaguacauuuaa

SEQ ID NO: 2570855 - RNA, 22 nt, Human
ucucauaggaaaaguacauuua

SEQ ID NO: 2570856 - RNA, 17 nt, Human
ucucaucaacugaauga

SEQ ID NO: 2570857 - RNA, 19 nt, Human
ucucaucacuccccuccaa

SEQ ID NO: 2570858 - RNA, 16 nt, Human
ucucaucacuccccuc

SEQ ID NO: 2570859 - RNA, 15 nt, Human
ucucaucacuccccu

SEQ ID NO: 2570860 - RNA, 21 nt, Human
ucucaucaguguccucuugcu

SEQ ID NO: 2570861 - RNA, 15 nt, Human
ucucaucaguguccu

SEQ ID NO: 2570862 - RNA, 13 nt, Human
ucucauccaucau

SEQ ID NO: 2570863 - RNA, 14 nt, Human
ucucauccaucauc

SEQ ID NO: 2570864 - RNA, 19 nt, Human
ucucaucccacgcacucca

SEQ ID NO: 2570865 - RNA, 10 nt, Human
ucucauccca

SEQ ID NO: 2570866 - RNA, 14 nt, Human
ucucauccccaggg

SEQ ID NO: 2570867 - RNA, 22 nt, Human
ucucauccccaggggucccagc

SEQ ID NO: 2570868 - RNA, 12 nt, Human
ucugagagcugu

SEQ ID NO: 2570869 - RNA, 15 nt, Human
ucucauccccagggg

SEQ ID NO: 2570870 - RNA, 18 nt, Human
ucugagaggacuuuucuu

SEQ ID NO: 2570871 - RNA, 24 nt, Human
ucugagaucaaaacgguuuuacug

SEQ ID NO: 2570872 - RNA, 21 nt, Human
ucugagcgccuccauccaagg

SEQ ID NO: 2570873 - RNA, 24 nt, Human
ucugagcccgggcugccugggcug

SEQ ID NO: 2570874 - RNA, 17 nt, Human
ucugagcccucaaagug

SEQ ID NO: 2570875 - RNA, 14 nt, Human
ucugagcgccucca

SEQ ID NO: 2570876 - RNA, 17 nt, Human
ucugagcuauuucaucu

SEQ ID NO: 2570877 - RNA, 20 nt, Human
ucugagcuauuucaucuauu

SEQ ID NO: 2570878 - RNA, 22 nt, Human
ucugagcuauuucaucuauuuu

SEQ ID NO: 2570879 - RNA, 21 nt, Human
ucugagcccgggcugccuggg

SEQ ID NO: 2570880 - RNA, 20 nt, Human
ucugagcccgggcugccugg

SEQ ID NO: 2570881 - RNA, 19 nt, Human
ucugagcccgggcugccug

SEQ ID NO: 2570882 - RNA, 18 nt, Human
ucugagcccgggcugccu

SEQ ID NO: 2570883 - RNA, 17 nt, Human
ucugagcccgggcugcc

SEQ ID NO: 2570884 - RNA, 16 nt, Human
ucugagcccgggcugc

SEQ ID NO: 2570885 - RNA, 15 nt, Human
ucugagcccgggcug

SEQ ID NO: 2570886 - RNA, 13 nt, Human
ucugagcccgggc

SEQ ID NO: 2570887 - RNA, 12 nt, Human
ucugagccaguu

SEQ ID NO: 2570888 - RNA, 22 nt, Human
ucugagccaguucaguaccugg

SEQ ID NO: 2570889 - RNA, 15 nt, Human
ucugagccccuggga

SEQ ID NO: 2570890 - RNA, 16 nt, Human
ucugagccccugggac

SEQ ID NO: 2570891 - RNA, 21 nt, Human
ucugaggaauccagacccggc

SEQ ID NO: 2570892 - RNA, 18 nt, Human
ucugaggaauccagaccc

SEQ ID NO: 2570893 - RNA, 16 nt, Human
ucugauugugauguga

SEQ ID NO: 2570894 - RNA, 18 nt, Human
ucugagcccucaaaguga

SEQ ID NO: 2570895 - RNA, 22 nt, Human
ucugaggaauccagacccggcu

SEQ ID NO: 2570896 - RNA, 23 nt, Human
ucugcaaaaugaggaauguauau

SEQ ID NO: 2570897 - RNA, 21 nt, Human
ucugcaaaaugaggaauguau

SEQ ID NO: 2570898 - RNA, 20 nt, Human
ucugcaaaaugaggaaugua

SEQ ID NO: 2570899 - RNA, 24 nt, Human
ucugcaaacaccaacauguuggga

SEQ ID NO: 2570900 - RNA, 22 nt, Human
ucugcaaaaugaggaauguaua

SEQ ID NO: 2570901 - RNA, 18 nt, Human
ucugcaaagaaugagaag

SEQ ID NO: 2570902 - RNA, 13 nt, Human
ucugauuucagga

SEQ ID NO: 2570903 - RNA, 20 nt, Human
ucugauuugucccuaugcau

SEQ ID NO: 2570904 - RNA, 14 nt, Human
ucugcaaaaauauu

SEQ ID NO: 2570905 - RNA, 19 nt, Human
ucugcaaaaauauuuauaa

SEQ ID NO: 2570906 - RNA, 20 nt, Human
ucugcaaaaauauuuauaaa

SEQ ID NO: 2570907 - RNA, 24 nt, Human
ucugcacccuggggccuggaccug

SEQ ID NO: 2570908 - RNA, 21 nt, Human
ucugcaaugggcacugggaug

SEQ ID NO: 2570909 - RNA, 19 nt, Human
ucugcaaugggcacuggga

SEQ ID NO: 2570910 - RNA, 16 nt, Human
ucugcaaugggcacug

SEQ ID NO: 2570911 - RNA, 23 nt, Human
ucugcaagucagaggauggccag

SEQ ID NO: 2570912 - RNA, 14 nt, Human
ucugcaaucuucuc

SEQ ID NO: 2570913 - RNA, 17 nt, Human
ucugcaaucuucucaga

SEQ ID NO: 2570914 - RNA, 17 nt, Human
ucugcaagucagaggau

SEQ ID NO: 2570915 - RNA, 16 nt, Human
ucugcaagucagagga

SEQ ID NO: 2570916 - RNA, 15 nt, Human
ucugcaagucagagg

SEQ ID NO: 2570917 - RNA, 14 nt, Human
ucugcaagucagag

SEQ ID NO: 2570918 - RNA, 13 nt, Human
ucugcaagucaga

SEQ ID NO: 2570919 - RNA, 12 nt, Human
ucugcaagucag

SEQ ID NO: 2570920 - RNA, 23 nt, Human
ucugcaagggcagaacacuaacc

SEQ ID NO: 2570921 - RNA, 15 nt, Human
ucugcaagccugcgu

SEQ ID NO: 2570922 - RNA, 17 nt, Human
ucugcaaggucuuuggu

SEQ ID NO: 2570923 - RNA, 14 nt, Human
ucugcaagccugcg

SEQ ID NO: 2570924 - RNA, 21 nt, Human
ucugcaagauucugaaacauu

SEQ ID NO: 2570925 - RNA, 20 nt, Human
ucugcaagcacaucugcauu

SEQ ID NO: 2570926 - RNA, 21 nt, Human
ucugcacuacugacauguggg

SEQ ID NO: 2570927 - RNA, 16 nt, Human
ucugcaguaaaucuuu

SEQ ID NO: 2570928 - RNA, 13 nt, Human
ucugcacuccccu

SEQ ID NO: 2570929 - RNA, 23 nt, Human
ucugcacuacuccucugcagugc

SEQ ID NO: 2570930 - RNA, 21 nt, Human
ucugcacuacuccucugcagu

SEQ ID NO: 2570931 - RNA, 20 nt, Human
ucugcacuacuccucugcag

SEQ ID NO: 2570932 - RNA, 19 nt, Human
ucugcacuacuccucugca

SEQ ID NO: 2570933 - RNA, 20 nt, Human
ucugcacuacugacaugugg

SEQ ID NO: 2570934 - RNA, 18 nt, Human
ucugcacuacugacaugu

SEQ ID NO: 2570935 - RNA, 18 nt, Human
ucugcacuacuccucugc

SEQ ID NO: 2570936 - RNA, 14 nt, Human
ucugcacuacuccu

SEQ ID NO: 2570937 - RNA, 12 nt, Human
ucugcacuacuc

SEQ ID NO: 2570938 - RNA, 23 nt, Human
ucugcacccuggggccuggaccu

SEQ ID NO: 2570939 - RNA, 18 nt, Human
ucugcaccguacugugga

SEQ ID NO: 2570940 - RNA, 18 nt, Human
ucuggugaccuuccaaga

SEQ ID NO: 2570941 - RNA, 23 nt, Human
ucuggugaccuuccaagagccug

SEQ ID NO: 2570942 - RNA, 16 nt, Human
ucuggugacuuuccuc

SEQ ID NO: 2570943 - RNA, 18 nt, Human
ucuggucucuaggcuggg

SEQ ID NO: 2570944 - RNA, 17 nt, Human
ucuggucucuaggcugg

SEQ ID NO: 2570945 - RNA, 16 nt, Human
ucuggucucuaggcug

SEQ ID NO: 2570946 - RNA, 21 nt, Human
ucuggucucuaggcuggggaa

SEQ ID NO: 2570947 - RNA, 19 nt, Human
ucuggucucuaggcugggg

SEQ ID NO: 2570948 - RNA, 17 nt, Human
ucuggugaagcucacuu

SEQ ID NO: 2570949 - RNA, 16 nt, Human
ucuggugaccuuccaa

SEQ ID NO: 2570950 - RNA, 14 nt, Human
ucuggucugggugc

SEQ ID NO: 2570951 - RNA, 16 nt, Human
ucuggugacaccagcc

SEQ ID NO: 2570952 - RNA, 17 nt, Human
ucuggugacaccagccu

SEQ ID NO: 2570953 - RNA, 18 nt, Human
ucuggugacaccagccuu

SEQ ID NO: 2570954 - RNA, 13 nt, Human
ucuguaaacugug

SEQ ID NO: 2570955 - RNA, 14 nt, Human
ucuguaaacugugu

SEQ ID NO: 2570956 - RNA, 15 nt, Human
ucuguaaacugugua

SEQ ID NO: 2570957 - RNA, 16 nt, Human
ucuguaaacuguguau

SEQ ID NO: 2570958 - RNA, 18 nt, Human
ucuguaaacucaaaacuu

SEQ ID NO: 2570959 - RNA, 15 nt, Human
ucuguaaacucaaaa

SEQ ID NO: 2570960 - RNA, 12 nt, Human
ucuguaaacugu

SEQ ID NO: 2570961 - RNA, 23 nt, Human
ucuguaaaaucuuucuuucuuag

SEQ ID NO: 2570962 - RNA, 22 nt, Human
ucuguaaaaucuuucuuucuua

SEQ ID NO: 2570963 - RNA, 19 nt, Human
ucuguaaacuguguauucc

SEQ ID NO: 2570964 - RNA, 22 nt, Human
ucuguaaacuguguauuccaag

SEQ ID NO: 2570965 - RNA, 22 nt, Human
ucuguaacucuaaaagauccuu

SEQ ID NO: 2570966 - RNA, 22 nt, Human
ucuggagcccacuguacuugcu

SEQ ID NO: 2570967 - RNA, 16 nt, Human
ucuggagcccacugua

SEQ ID NO: 2570968 - RNA, 12 nt, Human
ucuggagcccac

SEQ ID NO: 2570969 - RNA, 16 nt, Human
ucuggagccaagucca

SEQ ID NO: 2570970 - RNA, 20 nt, Human
ucuggagagguuauagguca

SEQ ID NO: 2570971 - RNA, 22 nt, Human
ucuggagagguuauaggucacu

SEQ ID NO: 2570972 - RNA, 22 nt, Human
ucuggcugccccaaccugcuga

SEQ ID NO: 2570973 - RNA, 21 nt, Human
ucuggcugccccaaccugcug

SEQ ID NO: 2570974 - RNA, 14 nt, Human
ucuggcugcagagc

SEQ ID NO: 2570975 - RNA, 15 nt, Human
ucuggcugcagagca

SEQ ID NO: 2570976 - RNA, 22 nt, Human
ucuggcugguuuggaaugcuuc

SEQ ID NO: 2570977 - RNA, 21 nt, Human
ucuggcuggcuaacuggaagc

SEQ ID NO: 2570978 - RNA, 22 nt, Human
ucuggcuuccagguaucuccag

SEQ ID NO: 2570979 - RNA, 15 nt, Human
ucuggcuuccaggua

SEQ ID NO: 2570980 - RNA, 13 nt, Human
ucuggcuuccagg

SEQ ID NO: 2570981 - RNA, 24 nt, Human
ucuggcuuccagguaucuccagga

SEQ ID NO: 2570982 - RNA, 23 nt, Human
ucuggcuuccagaaaaccccagc

SEQ ID NO: 2570983 - RNA, 17 nt, Human
ucuguaauuguguguga

SEQ ID NO: 2570984 - RNA, 14 nt, Human
ucuguacagagccc

SEQ ID NO: 2570985 - RNA, 13 nt, Human
ucuguacaaugaa

SEQ ID NO: 2570986 - RNA, 13 nt, Human
ucuguacacgugu

SEQ ID NO: 2570987 - RNA, 20 nt, Human
ucuguccuacucugugucag

SEQ ID NO: 2570988 - RNA, 15 nt, Human
ucuguacagagccca

SEQ ID NO: 2570989 - RNA, 17 nt, Human
ucuguacacguguccug

SEQ ID NO: 2570990 - RNA, 13 nt, Human
ucuguccucagcc

SEQ ID NO: 2570991 - RNA, 14 nt, Human
ucuguccucagccu

SEQ ID NO: 2570992 - RNA, 15 nt, Human
ucuguccucagccuu

SEQ ID NO: 2570993 - RNA, 19 nt, Human
ucuguccucagccuugcca

SEQ ID NO: 2570994 - RNA, 21 nt, Human
ucuguccucagccuugccaga

SEQ ID NO: 2570995 - RNA, 10 nt, Human
ucuguccuga

SEQ ID NO: 2570996 - RNA, 23 nt, Human
ucuguacaaugaacccccaugau

SEQ ID NO: 2570997 - RNA, 23 nt, Human
ucuguccucagccuugccagaga

SEQ ID NO: 2570998 - RNA, 17 nt, Human
ucugucgcccagucugg

SEQ ID NO: 2570999 - RNA, 12 nt, Human
ucuguccuggga

SEQ ID NO: 2571000 - RNA, 14 nt, Human
ucugucucagucca

SEQ ID NO: 2571001 - RNA, 21 nt, Human
ucugucucauccaucaucaug

SEQ ID NO: 2571002 - RNA, 13 nt, Human
ucugucucaucca

SEQ ID NO: 2571003 - RNA, 15 nt, Human
ucugucucauaugau

SEQ ID NO: 2571004 - RNA, 16 nt, Human
ucuguguacaaagaaa

SEQ ID NO: 2571005 - RNA, 19 nt, Human
ucugucuccuuaacacuga

SEQ ID NO: 2571006 - RNA, 17 nt, Human
ucugucucauccaucau

SEQ ID NO: 2571007 - RNA, 14 nt, Human
ucugucuccuuaac

SEQ ID NO: 2571008 - RNA, 15 nt, Human
ucugugucacuggcu

SEQ ID NO: 2571009 - RNA, 14 nt, Human
ucugugucacuggc

SEQ ID NO: 2571010 - RNA, 15 nt, Human
ucuguguacaaagaa

SEQ ID NO: 2571011 - RNA, 22 nt, Human
ucugugucacuggcugccucca

SEQ ID NO: 2571012 - RNA, 17 nt, Human
ucugugucacuggcugc

SEQ ID NO: 2571013 - RNA, 23 nt, Human
ucugugucacuggcugccuccac

SEQ ID NO: 2571014 - RNA, 13 nt, Human
ucugucuaggaau

SEQ ID NO: 2571015 - RNA, 21 nt, Human
ucugucucaaaaaauaaaaau

SEQ ID NO: 2571016 - RNA, 12 nt, Human
ucuguccugcug

SEQ ID NO: 2571017 - RNA, 16 nt, Human
ucugucgccuuagcau

SEQ ID NO: 2571018 - RNA, 19 nt, Human
ucugucgccuuagcauguu

SEQ ID NO: 2571019 - RNA, 18 nt, Human
ucugucgccuuagcaugu

SEQ ID NO: 2571020 - RNA, 17 nt, Human
ucugucgccuuagcaug

SEQ ID NO: 2571021 - RNA, 23 nt, Human
ucugucgccuuagcauguuugcu

SEQ ID NO: 2571022 - RNA, 22 nt, Human
ucugucgccuuagcauguuugc

SEQ ID NO: 2571023 - RNA, 20 nt, Human
ucugccugcccaggccccug

SEQ ID NO: 2571024 - RNA, 18 nt, Human
ucugccugcccaggcccc

SEQ ID NO: 2571025 - RNA, 18 nt, Human
ucugccugccagcugcac

SEQ ID NO: 2571026 - RNA, 21 nt, Human
ucugccugccagcugcacuga

SEQ ID NO: 2571027 - RNA, 17 nt, Human
ucugccugcccaggccc

SEQ ID NO: 2571028 - RNA, 20 nt, Human
ucugcucuccuuccuggagc

SEQ ID NO: 2571029 - RNA, 19 nt, Human
ucugcucuccuuccuggag

SEQ ID NO: 2571030 - RNA, 15 nt, Human
ucugcucuccuuccu

SEQ ID NO: 2571031 - RNA, 14 nt, Human
ucugcucuccuucc

SEQ ID NO: 2571032 - RNA, 22 nt, Human
ucugcucgggcccaggccaucu

SEQ ID NO: 2571033 - RNA, 18 nt, Human
ucugcucgggcccaggcc

SEQ ID NO: 2571034 - RNA, 17 nt, Human
ucugcucgggcccaggc

SEQ ID NO: 2571035 - RNA, 16 nt, Human
ucugcucgggcccagg

SEQ ID NO: 2571036 - RNA, 13 nt, Human
ucugcucuccuuc

SEQ ID NO: 2571037 - RNA, 12 nt, Human
ucugcucuccuu

SEQ ID NO: 2571038 - RNA, 22 nt, Human
ucugcuccuggagccuuugaau

SEQ ID NO: 2571039 - RNA, 22 nt, Human
ucugccugccagcugcacugau

SEQ ID NO: 2571040 - RNA, 16 nt, Human
ucugcucgccuuagca

SEQ ID NO: 2571041 - RNA, 14 nt, Human
ucugcucggccguc

SEQ ID NO: 2571042 - RNA, 15 nt, Human
ucugcucggccgucu

SEQ ID NO: 2571043 - RNA, 18 nt, Human
ucugcucggccgucuuca

SEQ ID NO: 2571044 - RNA, 16 nt, Human
ucugcucugcguguca

SEQ ID NO: 2571045 - RNA, 21 nt, Human
ucugcucugcgugucaccugu

SEQ ID NO: 2571046 - RNA, 14 nt, Human
ucugcucugcccuu

SEQ ID NO: 2571047 - RNA, 13 nt, Human
ucugcucugcccu

SEQ ID NO: 2571048 - RNA, 12 nt, Human
ucugcucugccc

SEQ ID NO: 2571049 - RNA, 20 nt, Human
ucugcucugaggcuuccaga

SEQ ID NO: 2571050 - RNA, 19 nt, Human
ucugcucugaggcuuccag

SEQ ID NO: 2571051 - RNA, 17 nt, Human
ucugcucuuucucugcc

SEQ ID NO: 2571052 - RNA, 16 nt, Human
ucugcucuuucucugc

SEQ ID NO: 2571053 - RNA, 15 nt, Human
ucugcucuuucucug

SEQ ID NO: 2571054 - RNA, 14 nt, Human
ucugcucuuucucu

SEQ ID NO: 2571055 - RNA, 19 nt, Human
ucugcucuuucucugccag

SEQ ID NO: 2571056 - RNA, 18 nt, Human
ucugcucuuucucugcca

SEQ ID NO: 2571057 - RNA, 13 nt, Human
ucugcugaaggaa

SEQ ID NO: 2571058 - RNA, 13 nt, Human
ucugcugcuggcu

SEQ ID NO: 2571059 - RNA, 11 nt, Human
ucugcugcugg

SEQ ID NO: 2571060 - RNA, 16 nt, Human
ucugcugaauuuucac

SEQ ID NO: 2571061 - RNA, 14 nt, Human
ucugcugaauuuuc

SEQ ID NO: 2571062 - RNA, 20 nt, Human
ucugcucuuucucugccagu

SEQ ID NO: 2571063 - RNA, 17 nt, Human
ucugcugaauuuucaca

SEQ ID NO: 2571064 - RNA, 13 nt, Human
ucugcugcccucc

SEQ ID NO: 2571065 - RNA, 14 nt, Human
ucugcugcccucca

SEQ ID NO: 2571066 - RNA, 15 nt, Human
ucugcugcccuccau

SEQ ID NO: 2571067 - RNA, 22 nt, Human
ucuggaauguaaucaauguuuc

SEQ ID NO: 2571068 - RNA, 18 nt, Human
ucuggaauguaaucaaug

SEQ ID NO: 2571069 - RNA, 16 nt, Human
ucuggaauguaaucaa

SEQ ID NO: 2571070 - RNA, 15 nt, Human
ucuggaauguaauca

SEQ ID NO: 2571071 - RNA, 22 nt, Human
ucugcugccgccccacccagau

SEQ ID NO: 2571072 - RNA, 19 nt, Human
ucugcuggaguuucaugua

SEQ ID NO: 2571073 - RNA, 14 nt, Human
ucuggaauuugaaa

SEQ ID NO: 2571074 - RNA, 18 nt, Human
ucuggacagccccacccu

SEQ ID NO: 2571075 - RNA, 19 nt, Human
ucuggacagccccacccug

SEQ ID NO: 2571076 - RNA, 21 nt, Human
ucuggacaagccaacuuguaa

SEQ ID NO: 2571077 - RNA, 12 nt, Human
ucuggacaagcc

SEQ ID NO: 2571078 - RNA, 15 nt, Human
ucugcugcuggcugg

SEQ ID NO: 2571079 - RNA, 14 nt, Human
ucugcugcuggcug

SEQ ID NO: 2571080 - RNA, 17 nt, Human
ucugcugcuggcugguu

SEQ ID NO: 2571081 - RNA, 18 nt, Human
ucugcugcugucccuccc

SEQ ID NO: 2571082 - RNA, 13 nt, Human
ucugcuggaguuu

SEQ ID NO: 2571083 - RNA, 21 nt, Human
ucugcugccgccccacccaga

SEQ ID NO: 2571084 - RNA, 18 nt, Human
ucugcugcccuccauccc

SEQ ID NO: 2571085 - RNA, 15 nt, Human
ucuggagaagcagug

SEQ ID NO: 2571086 - RNA, 22 nt, Human
ucuggagaagcagugagccgca

SEQ ID NO: 2571087 - RNA, 20 nt, Human
ucuggagagcuagaaccugg

SEQ ID NO: 2571088 - RNA, 23 nt, Human
ucuggagagcuagaaccuggagg

SEQ ID NO: 2571089 - RNA, 22 nt, Human
ucuggagagcuagaaccuggag

SEQ ID NO: 2571090 - RNA, 21 nt, Human
ucuggagagcuagaaccugga

SEQ ID NO: 2571091 - RNA, 16 nt, Human
ucuggagaagcaguga

SEQ ID NO: 2571092 - RNA, 11 nt, Human
ucuggagaagc

SEQ ID NO: 2571093 - RNA, 19 nt, Human
ucuggacuuggcaacagaa

SEQ ID NO: 2571094 - RNA, 20 nt, Human
ucuggacugaagccugcagg

SEQ ID NO: 2571095 - RNA, 14 nt, Human
ucuggacuggcuag

SEQ ID NO: 2571096 - RNA, 15 nt, Human
ucuggacuggcuaga

SEQ ID NO: 2571097 - RNA, 13 nt, Human
ucuggacugaagc

SEQ ID NO: 2571098 - RNA, 17 nt, Human
ucuggacugaagccugc

SEQ ID NO: 2571099 - RNA, 19 nt, Human
ucuggacugaagccugcag

SEQ ID NO: 2571100 - RNA, 19 nt, Human
ucuggacugccccagaaaa

SEQ ID NO: 2571101 - RNA, 21 nt, Human
ucuggacugaagccugcagga

SEQ ID NO: 2571102 - RNA, 22 nt, Human
ucuggacggcaggcucacugcc

SEQ ID NO: 2571103 - RNA, 21 nt, Human
ucuggacggcaggcucacugc

SEQ ID NO: 2571104 - RNA, 22 nt, Human
ucuggacuccucuguccaggca

SEQ ID NO: 2571105 - RNA, 18 nt, Human
ucuggacuccucugucca

SEQ ID NO: 2571106 - RNA, 16 nt, Human
ucuggacuccucuguc

SEQ ID NO: 2571107 - RNA, 23 nt, Human
ucuggacggcaggcucacugcca

SEQ ID NO: 2571108 - RNA, 15 nt, Human
ucuggacuccucugu

SEQ ID NO: 2571109 - RNA, 21 nt, Human
ucuggaccccaucugugaaua

SEQ ID NO: 2571110 - RNA, 20 nt, Human
ucuggacagccccacccugg

SEQ ID NO: 2571111 - RNA, 23 nt, Human
ucuggacaagccaacuuguaaau

SEQ ID NO: 2571112 - RNA, 23 nt, Human
ucuggaccccaucugugaauaag

SEQ ID NO: 2571113 - RNA, 19 nt, Human
ucuggacggcaggcucacu

SEQ ID NO: 2571114 - RNA, 17 nt, Human
ucuggacggcaggcuca

SEQ ID NO: 2571115 - RNA, 15 nt, Human
ucuggacggcaggcu

SEQ ID NO: 2571116 - RNA, 14 nt, Human
ucuggacggcaggc

SEQ ID NO: 2571117 - RNA, 20 nt, Human
ucuggaccuuguuguuguua

SEQ ID NO: 2571118 - RNA, 18 nt, Human
ugaaaaccacauuggaga

SEQ ID NO: 2571119 - RNA, 20 nt, Human
ugaaaacggagcugaacaau

SEQ ID NO: 2571120 - RNA, 23 nt, Human
ugaaaacccagagaggaaucaga

SEQ ID NO: 2571121 - RNA, 14 nt, Human
ugaaaacccagaga

SEQ ID NO: 2571122 - RNA, 15 nt, Human
ugaaaacccagagag

SEQ ID NO: 2571123 - RNA, 19 nt, Human
ugaaaagaaaaaugagccu

SEQ ID NO: 2571124 - RNA, 16 nt, Human
ugaaaacccagagagg

SEQ ID NO: 2571125 - RNA, 16 nt, Human
ugaaaacguuuuauug

SEQ ID NO: 2571126 - RNA, 17 nt, Human
ugaaaacguuuuauugu

SEQ ID NO: 2571127 - RNA, 18 nt, Human
ugaaaacguuuuauugug

SEQ ID NO: 2571128 - RNA, 15 nt, Human
ugaaaagaaaaauga

SEQ ID NO: 2571129 - RNA, 16 nt, Human
ugaaaauuauuuuaaa

SEQ ID NO: 2571130 - RNA, 15 nt, Human
ugaaaauuauuuuaa

SEQ ID NO: 2571131 - RNA, 16 nt, Human
ugaaaauuauuugaaa

SEQ ID NO: 2571132 - RNA, 20 nt, Human
ugaaaauuaggauuucauga

SEQ ID NO: 2571133 - RNA, 15 nt, Human
ugaaaauuauuugaa

SEQ ID NO: 2571134 - RNA, 20 nt, Human
ugaaaagaaaaaugagccug

SEQ ID NO: 2571135 - RNA, 22 nt, Human
ugaaaagaaaaaugagccuggc

SEQ ID NO: 2571136 - RNA, 23 nt, Human
ugaaacacucaguuguucaauaa

SEQ ID NO: 2571137 - RNA, 15 nt, Human
ugaaacacuuugcau

SEQ ID NO: 2571138 - RNA, 19 nt, Human
ugaaacaccuucucuggag

SEQ ID NO: 2571139 - RNA, 18 nt, Human
ugaaacaccuucucugga

SEQ ID NO: 2571140 - RNA, 16 nt, Human
ugaaacaccuucucug

SEQ ID NO: 2571141 - RNA, 17 nt, Human
ugaaaauuguauguuaa

SEQ ID NO: 2571142 - RNA, 12 nt, Human
ugaaaauuuuga

SEQ ID NO: 2571143 - RNA, 19 nt, Human
ugaaaauucaaaaaguguu

SEQ ID NO: 2571144 - RNA, 18 nt, Human
ugaaaauucaaaaagugu

SEQ ID NO: 2571145 - RNA, 23 nt, Human
ugaaaauucaaaaaguguuuauu

SEQ ID NO: 2571146 - RNA, 17 nt, Human
ugaaaauucaaaaagug

SEQ ID NO: 2571147 - RNA, 21 nt, Human
ugaaaauuauuuuaaacaaaa

SEQ ID NO: 2571148 - RNA, 19 nt, Human
ugaaaauuauuuuaaacaa

SEQ ID NO: 2571149 - RNA, 18 nt, Human
ugaaaauuauuuuaaaca

SEQ ID NO: 2571150 - RNA, 14 nt, Human
ugaaaauucagugg

SEQ ID NO: 2571151 - RNA, 21 nt, Human
ugaaaacacuguucucugccc

SEQ ID NO: 2571152 - RNA, 20 nt, Human
ugaaaacacuguucucugcc

SEQ ID NO: 2571153 - RNA, 16 nt, Human
ugaaaacacugugcac

SEQ ID NO: 2571154 - RNA, 18 nt, Human
ugaaaacacugugcacau

SEQ ID NO: 2571155 - RNA, 17 nt, Human
ugaaaacacuguucucu

SEQ ID NO: 2571156 - RNA, 23 nt, Human
ugaaaacacuguucucugcccuc

SEQ ID NO: 2571157 - RNA, 22 nt, Human
ugaaaacacuguucucugcccu

SEQ ID NO: 2571158 - RNA, 17 nt, Human
ugaaaacaucuggaagg

SEQ ID NO: 2571159 - RNA, 13 nt, Human
ugaaaacaucugg

SEQ ID NO: 2571160 - RNA, 19 nt, Human
ugaaaacaugguagaauug

SEQ ID NO: 2571161 - RNA, 23 nt, Human
ugaaaacaugguagaauuggaga

SEQ ID NO: 2571162 - RNA, 14 nt, Human
ugaaaacauguaau

SEQ ID NO: 2571163 - RNA, 18 nt, Human
ugaaaacagaaaacgguu

SEQ ID NO: 2571164 - RNA, 20 nt, Human
ucuuuuguucgcauggucac

SEQ ID NO: 2571165 - RNA, 23 nt, Human
ucuuuuuaaaguguuucuguuau

SEQ ID NO: 2571166 - RNA, 21 nt, Human
ugaaaacacauuuuucuuagg

SEQ ID NO: 2571167 - RNA, 15 nt, Human
ucuuuuuaauaaaaa

SEQ ID NO: 2571168 - RNA, 14 nt, Human
ucuuuuuaagcuua

SEQ ID NO: 2571169 - RNA, 21 nt, Human
ucuuuuuaagcuuauuuaauu

SEQ ID NO: 2571170 - RNA, 22 nt, Human
ucuuuuguauguaaaugugcau

SEQ ID NO: 2571171 - RNA, 20 nt, Human
ucuuuuguauguaaaugugc

SEQ ID NO: 2571172 - RNA, 17 nt, Human
ucuuuuguauguaaaug

SEQ ID NO: 2571173 - RNA, 15 nt, Human
ucuuuuguauguaaa

SEQ ID NO: 2571174 - RNA, 11 nt, Human
ucuuuuguaug

SEQ ID NO: 2571175 - RNA, 10 nt, Human
ucuuuuguau

SEQ ID NO: 2571176 - RNA, 14 nt, Human
ucuuuucuauuuuc

SEQ ID NO: 2571177 - RNA, 19 nt, Human
ucuuuucuacccuagccau

SEQ ID NO: 2571178 - RNA, 18 nt, Human
ucuuuucuacccuagcca

SEQ ID NO: 2571179 - RNA, 17 nt, Human
ucuuuucuacccuagcc

SEQ ID NO: 2571180 - RNA, 12 nt, Human
ucuuuucuaccc

SEQ ID NO: 2571181 - RNA, 22 nt, Human
ucuuuucgccguggcugcggca

SEQ ID NO: 2571182 - RNA, 19 nt, Human
ucuuuucccacuguuuaag

SEQ ID NO: 2571183 - RNA, 19 nt, Human
ucuuuucaucugggaaaga

SEQ ID NO: 2571184 - RNA, 22 nt, Human
ucuuuucaucugggaaagacau

SEQ ID NO: 2571185 - RNA, 15 nt, Human
ucuuuggacccugag

SEQ ID NO: 2571186 - RNA, 14 nt, Human
ucuuuggacccuga

SEQ ID NO: 2571187 - RNA, 22 nt, Human
ucuuuucacauucuuauaaaua

SEQ ID NO: 2571188 - RNA, 19 nt, Human
ucuuuucacauucuuauaa

SEQ ID NO: 2571189 - RNA, 18 nt, Human
ucuuuucacauucuuaua

SEQ ID NO: 2571190 - RNA, 17 nt, Human
ucuuuucacauucuuau

SEQ ID NO: 2571191 - RNA, 20 nt, Human
ucuuuucagaucauggcauc

SEQ ID NO: 2571192 - RNA, 18 nt, Human
ucuuuucaucugggaaag

SEQ ID NO: 2571193 - RNA, 16 nt, Human
ucuuuggacccugagg

SEQ ID NO: 2571194 - RNA, 16 nt, Human
ucuuugccuguucagu

SEQ ID NO: 2571195 - RNA, 15 nt, Human
ucuuugccuguucag

SEQ ID NO: 2571196 - RNA, 12 nt, Human
ucuuugccuguu

SEQ ID NO: 2571197 - RNA, 12 nt, Human
ucuuugccuggu

SEQ ID NO: 2571198 - RNA, 23 nt, Human
ucuuugccuguucaguuacagaa

SEQ ID NO: 2571199 - RNA, 17 nt, Human
ucuuugccuguucaguu

SEQ ID NO: 2571200 - RNA, 14 nt, Human
ucuuugccuugggc

SEQ ID NO: 2571201 - RNA, 20 nt, Human
ucuuugccuugggcugcucc

SEQ ID NO: 2571202 - RNA, 21 nt, Human
ucuuugccuugggcugcuccu

SEQ ID NO: 2571203 - RNA, 13 nt, Human
ucuuuggacccug

SEQ ID NO: 2571204 - RNA, 15 nt, Human
ucuuugcuugccucu

SEQ ID NO: 2571205 - RNA, 19 nt, Human
ucuuugcuucacuucuccc

SEQ ID NO: 2571206 - RNA, 22 nt, Human
ucuuuggacagaagcagcucuu

SEQ ID NO: 2571207 - RNA, 13 nt, Human
ucuuugcuugccu

SEQ ID NO: 2571208 - RNA, 23 nt, Human
ucuuugagugaagcugggagaac

SEQ ID NO: 2571209 - RNA, 17 nt, Human
ucuuugaauuuucugug

SEQ ID NO: 2571210 - RNA, 16 nt, Human
ucuuugaauuuucugu

SEQ ID NO: 2571211 - RNA, 13 nt, Human
ucuuugcagacag

SEQ ID NO: 2571212 - RNA, 23 nt, Human
ucuuugaccucaaccugugauga

SEQ ID NO: 2571213 - RNA, 17 nt, Human
ucuuugagauagaagaa

SEQ ID NO: 2571214 - RNA, 18 nt, Human
ucuuugagauagaagaac

SEQ ID NO: 2571215 - RNA, 22 nt, Human
ucuuugagauagaagaacugca

SEQ ID NO: 2571216 - RNA, 22 nt, Human
ucuuugccacccucaugcugug

SEQ ID NO: 2571217 - RNA, 21 nt, Human
ucuuugccacccucaugcugu

SEQ ID NO: 2571218 - RNA, 17 nt, Human
ucuuugcagacaggcaa

SEQ ID NO: 2571219 - RNA, 14 nt, Human
ucuuugcagacagg

SEQ ID NO: 2571220 - RNA, 18 nt, Human
ucuuucccauggggaggg

SEQ ID NO: 2571221 - RNA, 15 nt, Human
ucuuugaaugacaaa

SEQ ID NO: 2571222 - RNA, 14 nt, Human
ucuuugaaugcuuu

SEQ ID NO: 2571223 - RNA, 16 nt, Human
ucuuugaaugacaaag

SEQ ID NO: 2571224 - RNA, 13 nt, Human
ucuuucccucccu

SEQ ID NO: 2571225 - RNA, 23 nt, Human
ucuuucccucccuuccucuuucc

SEQ ID NO: 2571226 - RNA, 17 nt, Human
ucuuuccacagaagcuc

SEQ ID NO: 2571227 - RNA, 17 nt, Human
ucuuuccaaaguacacu

SEQ ID NO: 2571228 - RNA, 12 nt, Human
ucuuucccuccc

SEQ ID NO: 2571229 - RNA, 20 nt, Human
ucuugucucaaugcucauaa

SEQ ID NO: 2571230 - RNA, 18 nt, Human
ucuugucucaaugcucau

SEQ ID NO: 2571231 - RNA, 23 nt, Human
ucuugugaggaaagucauuggcu

SEQ ID NO: 2571232 - RNA, 13 nt, Human
ucuugugaggaaa

SEQ ID NO: 2571233 - RNA, 21 nt, Human
ucuugucucaaugcucauaac

SEQ ID NO: 2571234 - RNA, 13 nt, Human
ucuuguguguuua

SEQ ID NO: 2571235 - RNA, 23 nt, Human
ucuuuccaaaguacacuguuuca

SEQ ID NO: 2571236 - RNA, 21 nt, Human
ucuugugcuuuuccuauuugu

SEQ ID NO: 2571237 - RNA, 19 nt, Human
ucuuguggauguuuuaauu

SEQ ID NO: 2571238 - RNA, 23 nt, Human
ucuugugcuggauggagcccagg

SEQ ID NO: 2571239 - RNA, 22 nt, Human
ucuugugcuggauggagcccag

SEQ ID NO: 2571240 - RNA, 21 nt, Human
ucuugugugguuuggcccuuc

SEQ ID NO: 2571241 - RNA, 23 nt, Human
ucuuguggauguuuuaauuccau

SEQ ID NO: 2571242 - RNA, 13 nt, Human
ucuuauaauuuaa

SEQ ID NO: 2571243 - RNA, 14 nt, Human
ucuuauaauuuaaa

SEQ ID NO: 2571244 - RNA, 20 nt, Human
ucuuagguuggcaaaaaggc

SEQ ID NO: 2571245 - RNA, 23 nt, Human
ucuuagguuggcaaaaaggcagg

SEQ ID NO: 2571246 - RNA, 22 nt, Human
ucuuaggguuaugauuaaguaa

SEQ ID NO: 2571247 - RNA, 20 nt, Human
ucugugucagguggggcagc

SEQ ID NO: 2571248 - RNA, 17 nt, Human
ucugugucagguggggc

SEQ ID NO: 2571249 - RNA, 13 nt, Human
ucugugugaaaau

SEQ ID NO: 2571250 - RNA, 14 nt, Human
ucugugugcacaaa

SEQ ID NO: 2571251 - RNA, 21 nt, Human
ucugugugcacaaauauuuau

SEQ ID NO: 2571252 - RNA, 18 nt, Human
ucugugugaugaacuuuc

SEQ ID NO: 2571253 - RNA, 20 nt, Human
ucugugugaugaacuuucuc

SEQ ID NO: 2571254 - RNA, 22 nt, Human
ucugugugcaagugugugcaca

SEQ ID NO: 2571255 - RNA, 15 nt, Human
ucuuagauguauaua

SEQ ID NO: 2571256 - RNA, 22 nt, Human
ucugugugcaccuuaccaacuu

SEQ ID NO: 2571257 - RNA, 16 nt, Human
ucuuagcagcuuccag

SEQ ID NO: 2571258 - RNA, 16 nt, Human
ucuuagcauccugccu

SEQ ID NO: 2571259 - RNA, 19 nt, Human
ucugugugcaccuuaccaa

SEQ ID NO: 2571260 - RNA, 18 nt, Human
ucugugugcaccuuacca

SEQ ID NO: 2571261 - RNA, 13 nt, Human
ucugugugugugu

SEQ ID NO: 2571262 - RNA, 14 nt, Human
ucuuagauguauau

SEQ ID NO: 2571263 - RNA, 11 nt, Human
ucugugugugu

SEQ ID NO: 2571264 - RNA, 22 nt, Human
ucuuaucucagucaugcauaaa

SEQ ID NO: 2571265 - RNA, 20 nt, Human
ucuuaucucagucaugcaua

SEQ ID NO: 2571266 - RNA, 14 nt, Human
ucuuaucucaguca

SEQ ID NO: 2571267 - RNA, 20 nt, Human
ucuuaucauggucucaguca

SEQ ID NO: 2571268 - RNA, 12 nt, Human
ucuuaucucagu

SEQ ID NO: 2571269 - RNA, 21 nt, Human
ucuucagagacuccugcaggc

SEQ ID NO: 2571270 - RNA, 13 nt, Human
ucuucagagcuga

SEQ ID NO: 2571271 - RNA, 12 nt, Human
ucuucagagcug

SEQ ID NO: 2571272 - RNA, 16 nt, Human
ucuucagagcaggggu

SEQ ID NO: 2571273 - RNA, 15 nt, Human
ucuuaucuucugcaa

SEQ ID NO: 2571274 - RNA, 14 nt, Human
ucuucagaucucua

SEQ ID NO: 2571275 - RNA, 15 nt, Human
ucuuauauaugugaa

SEQ ID NO: 2571276 - RNA, 18 nt, Human
ucuuauauaugugaacau

SEQ ID NO: 2571277 - RNA, 18 nt, Human
ucuuagugccugagagua

SEQ ID NO: 2571278 - RNA, 14 nt, Human
ucuuagcuccccuc

SEQ ID NO: 2571279 - RNA, 13 nt, Human
ucuuagcuccccu

SEQ ID NO: 2571280 - RNA, 14 nt, Human
ucuuaguagauuuu

SEQ ID NO: 2571281 - RNA, 14 nt, Human
ucuuagugccugag

SEQ ID NO: 2571282 - RNA, 22 nt, Human
ucuuauccaacaucaacaucuu

SEQ ID NO: 2571283 - RNA, 23 nt, Human
ucuuaucaccacaguaaguuccu

SEQ ID NO: 2571284 - RNA, 16 nt, Human
ucuuaucaagcagcca

SEQ ID NO: 2571285 - RNA, 13 nt, Human
ucuuaucaagcag

SEQ ID NO: 2571286 - RNA, 14 nt, Human
ucuucagaggcccu

SEQ ID NO: 2571287 - RNA, 15 nt, Human
ucuucagaggcccuc

SEQ ID NO: 2571288 - RNA, 15 nt, Human
ucuucagaucucuaa

SEQ ID NO: 2571289 - RNA, 19 nt, Human
ucuucaguuaagccuuugg

SEQ ID NO: 2571290 - RNA, 20 nt, Human
ucuucaguuaagccuuugga

SEQ ID NO: 2571291 - RNA, 22 nt, Human
ucuucaguuaagccuuuggaaa

SEQ ID NO: 2571292 - RNA, 19 nt, Human
ucuucagauacaaacugca

SEQ ID NO: 2571293 - RNA, 16 nt, Human
ucuucauguuucagga

SEQ ID NO: 2571294 - RNA, 21 nt, Human
ucuucauuaagcccucuucca

SEQ ID NO: 2571295 - RNA, 20 nt, Human
ucuucauaacaauuuuagga

SEQ ID NO: 2571296 - RNA, 12 nt, Human
ucuucaguuuua

SEQ ID NO: 2571297 - RNA, 18 nt, Human
ucuucaguuuuaucuuua

SEQ ID NO: 2571298 - RNA, 19 nt, Human
ucuucaguuuuaucuuuaa

SEQ ID NO: 2571299 - RNA, 15 nt, Human
ucuucauuucauugu

SEQ ID NO: 2571300 - RNA, 14 nt, Human
ucuucauuucauug

SEQ ID NO: 2571301 - RNA, 22 nt, Human
ucuucauuaagcccucuuccau

SEQ ID NO: 2571302 - RNA, 22 nt, Human
ucuucauuaccucagugagaag

SEQ ID NO: 2571303 - RNA, 22 nt, Human
ucuucauuucauuguaugaugu

SEQ ID NO: 2571304 - RNA, 21 nt, Human
ucuucauuucauuguaugaug

SEQ ID NO: 2571305 - RNA, 17 nt, Human
ucuucauuucauuguau

SEQ ID NO: 2571306 - RNA, 16 nt, Human
ucuucauuucauugua

SEQ ID NO: 2571307 - RNA, 14 nt, Human
ucuuccaaagcaca

SEQ ID NO: 2571308 - RNA, 24 nt, Human
ucuucauuucauuguaugaugugu

SEQ ID NO: 2571309 - RNA, 19 nt, Human
ucuuguaauccgaaucucu

SEQ ID NO: 2571310 - RNA, 17 nt, Human
ucuugcucuguaaucuc

SEQ ID NO: 2571311 - RNA, 14 nt, Human
ucuugcucuguaau

SEQ ID NO: 2571312 - RNA, 13 nt, Human
ucuugcucuguaa

SEQ ID NO: 2571313 - RNA, 21 nt, Human
ucuugcccuucccugucccuc

SEQ ID NO: 2571314 - RNA, 20 nt, Human
ucuugcccuucccugucccu

SEQ ID NO: 2571315 - RNA, 18 nt, Human
ucuugcccuucccugucc

SEQ ID NO: 2571316 - RNA, 23 nt, Human
ucuuguaauuuaaacaggcccag

SEQ ID NO: 2571317 - RNA, 17 nt, Human
ucuuguacauguguagc

SEQ ID NO: 2571318 - RNA, 14 nt, Human
ucuuguacaugugu

SEQ ID NO: 2571319 - RNA, 23 nt, Human
ucuugcucugcugacagacacag

SEQ ID NO: 2571320 - RNA, 15 nt, Human
ucuugcucugcugac

SEQ ID NO: 2571321 - RNA, 24 nt, Human
ucuuguacauguguagccugugca

SEQ ID NO: 2571322 - RNA, 19 nt, Human
ucuuguacauguguagccu

SEQ ID NO: 2571323 - RNA, 16 nt, Human
ucuuguaguagucuca

SEQ ID NO: 2571324 - RNA, 14 nt, Human
ucuuguauuaagaa

SEQ ID NO: 2571325 - RNA, 16 nt, Human
ucuuguauuaaacucu

SEQ ID NO: 2571326 - RNA, 17 nt, Human
ucuugucucaaugcuca

SEQ ID NO: 2571327 - RNA, 15 nt, Human
ucuugucucaaugcu

SEQ ID NO: 2571328 - RNA, 14 nt, Human
ucuugucucaaugc

SEQ ID NO: 2571329 - RNA, 15 nt, Human
ucuuguauuaagaau

SEQ ID NO: 2571330 - RNA, 23 nt, Human
ucuuguccccucuugacccaucu

SEQ ID NO: 2571331 - RNA, 19 nt, Human
ucuuguauuaaacucuuca

SEQ ID NO: 2571332 - RNA, 13 nt, Human
ucuuguccuagcu

SEQ ID NO: 2571333 - RNA, 19 nt, Human
ucuugccaaauauaaauaa

SEQ ID NO: 2571334 - RNA, 22 nt, Human
ucuugccaaccuguaauaaaua

SEQ ID NO: 2571335 - RNA, 20 nt, Human
ucuugccaaccuguaauaaa

SEQ ID NO: 2571336 - RNA, 19 nt, Human
ucuugaaggaaaaugauac

SEQ ID NO: 2571337 - RNA, 23 nt, Human
ucuugcauggcaaggacugcagg

SEQ ID NO: 2571338 - RNA, 17 nt, Human
ucuugccacugccucuu

SEQ ID NO: 2571339 - RNA, 16 nt, Human
ucuugccacugccucu

SEQ ID NO: 2571340 - RNA, 23 nt, Human
ucuugccccaacccccagcaccc

SEQ ID NO: 2571341 - RNA, 21 nt, Human
ucuugccccaacccccagcac

SEQ ID NO: 2571342 - RNA, 20 nt, Human
ucuugccccaacccccagca

SEQ ID NO: 2571343 - RNA, 18 nt, Human
ucuugccccaacccccag

SEQ ID NO: 2571344 - RNA, 23 nt, Human
ucuugccaaccuguaauaaauau

SEQ ID NO: 2571345 - RNA, 14 nt, Human
ucuugcucugcuga

SEQ ID NO: 2571346 - RNA, 22 nt, Human
ucuugccccaacccccagcacc

SEQ ID NO: 2571347 - RNA, 12 nt, Human
ucuugcccccca

SEQ ID NO: 2571348 - RNA, 16 nt, Human
ucuugcccuucccugu

SEQ ID NO: 2571349 - RNA, 15 nt, Human
ucuugcccuucccug

SEQ ID NO: 2571350 - RNA, 13 nt, Human
ucuugcccuuccc

SEQ ID NO: 2571351 - RNA, 21 nt, Human
ucuugccccccaccccagccu

SEQ ID NO: 2571352 - RNA, 22 nt, Human
ucuugaagacuuuucuuucagc

SEQ ID NO: 2571353 - RNA, 13 nt, Human
ucuugaagacuuu

SEQ ID NO: 2571354 - RNA, 18 nt, Human
ucuugaacugagcuugga

SEQ ID NO: 2571355 - RNA, 21 nt, Human
ucuugaaauuaagaaggcaaa

SEQ ID NO: 2571356 - RNA, 23 nt, Human
ucuugaaaugaaaguauaacuga

SEQ ID NO: 2571357 - RNA, 15 nt, Human
ucuugcaugaggcua

SEQ ID NO: 2571358 - RNA, 20 nt, Human
ucuugaaauauaggaacuua

SEQ ID NO: 2571359 - RNA, 21 nt, Human
ucuugaaauauaggaacuuaa

SEQ ID NO: 2571360 - RNA, 22 nt, Human
ucuugaaauuaagaaggcaaaa

SEQ ID NO: 2571361 - RNA, 17 nt, Human
ucuugaacugagcuugg

SEQ ID NO: 2571362 - RNA, 14 nt, Human
ucuugaaauuaaga

SEQ ID NO: 2571363 - RNA, 20 nt, Human
ucuugaaauuaagaaggcaa

SEQ ID NO: 2571364 - RNA, 17 nt, Human
ucuucuuuuugcuguug

SEQ ID NO: 2571365 - RNA, 14 nt, Human
ucuugaaagcugug

SEQ ID NO: 2571366 - RNA, 12 nt, Human
ucuugaaaugaa

SEQ ID NO: 2571367 - RNA, 13 nt, Human
ucuugaaaugaaa

SEQ ID NO: 2571368 - RNA, 23 nt, Human
ucuuccuugaagaacugcaggcc

SEQ ID NO: 2571369 - RNA, 14 nt, Human
ucuuccuuuuauca

SEQ ID NO: 2571370 - RNA, 18 nt, Human
ucuuccuuggagggggga

SEQ ID NO: 2571371 - RNA, 15 nt, Human
ucuuccaaaggcaua

SEQ ID NO: 2571372 - RNA, 16 nt, Human
ucuucgggaagagagg

SEQ ID NO: 2571373 - RNA, 14 nt, Human
ucuucgggaagaga

SEQ ID NO: 2571374 - RNA, 13 nt, Human
ucuucgggaagag

SEQ ID NO: 2571375 - RNA, 22 nt, Human
ucuucgggaagagaggaguuca

SEQ ID NO: 2571376 - RNA, 18 nt, Human
ucuucgggaagagaggag

SEQ ID NO: 2571377 - RNA, 14 nt, Human
ucuucggaaaccuu

SEQ ID NO: 2571378 - RNA, 13 nt, Human
ucuucgaggugga

SEQ ID NO: 2571379 - RNA, 16 nt, Human
ucuucuuggucucagu

SEQ ID NO: 2571380 - RNA, 17 nt, Human
ucuucguacaguucuuc

SEQ ID NO: 2571381 - RNA, 15 nt, Human
ucuucguacaguucu

SEQ ID NO: 2571382 - RNA, 14 nt, Human
ucuucguacaguuc

SEQ ID NO: 2571383 - RNA, 19 nt, Human
ucuucggggaacuccugga

SEQ ID NO: 2571384 - RNA, 16 nt, Human
ucuucuuuuggcuucc

SEQ ID NO: 2571385 - RNA, 22 nt, Human
ucuucuuuugagcaacuuucuu

SEQ ID NO: 2571386 - RNA, 15 nt, Human
ucuucuuuugugaag

SEQ ID NO: 2571387 - RNA, 15 nt, Human
ucuucuuuuugcugu

SEQ ID NO: 2571388 - RNA, 18 nt, Human
ucuucuuuuggcuuccau

SEQ ID NO: 2571389 - RNA, 21 nt, Human
ucuucuuuuugaaaucagcau

SEQ ID NO: 2571390 - RNA, 23 nt, Human
ucuucuuuaggauugugaugguu

SEQ ID NO: 2571391 - RNA, 21 nt, Human
ucuucuuuuaaaccauuuucu

SEQ ID NO: 2571392 - RNA, 22 nt, Human
ucuucuuuuaaaccauuuucuu

SEQ ID NO: 2571393 - RNA, 19 nt, Human
ucuucuuuugagcaacuuu

SEQ ID NO: 2571394 - RNA, 14 nt, Human
ucagauacaaugua

SEQ ID NO: 2571395 - RNA, 22 nt, Human
ucagauaacuguuauuuauaau

SEQ ID NO: 2571396 - RNA, 14 nt, Human
uaucauuuaauaau

SEQ ID NO: 2571397 - RNA, 18 nt, Human
uaucauucauucuuagcu

SEQ ID NO: 2571398 - RNA, 22 nt, Human
uaucauucaaguguaaaauauu

SEQ ID NO: 2571399 - RNA, 15 nt, Human
uaucauuaaaguucu

SEQ ID NO: 2571400 - RNA, 13 nt, Human
uaucauucauucu

SEQ ID NO: 2571401 - RNA, 13 nt, Human
ucagauauuuaua

SEQ ID NO: 2571402 - RNA, 21 nt, Human
ucagauauuuauauuuuuauu

SEQ ID NO: 2571403 - RNA, 15 nt, Human
ucagcaccacccuag

SEQ ID NO: 2571404 - RNA, 23 nt, Human
ucagcaccacccuagucccuucc

SEQ ID NO: 2571405 - RNA, 12 nt, Human
ucagcaccaccc

SEQ ID NO: 2571406 - RNA, 13 nt, Human
ucagcaccacccu

SEQ ID NO: 2571407 - RNA, 14 nt, Human
ucagcaccacccua

SEQ ID NO: 2571408 - RNA, 19 nt, Human
ucagcacaaggccaucugg

SEQ ID NO: 2571409 - RNA, 19 nt, Human
ucagauccuuguuucaaac

SEQ ID NO: 2571410 - RNA, 18 nt, Human
ucagauccuuguuucaaa

SEQ ID NO: 2571411 - RNA, 17 nt, Human
ucagauccuuguuucaa

SEQ ID NO: 2571412 - RNA, 16 nt, Human
ucagauccuuguuuca

SEQ ID NO: 2571413 - RNA, 14 nt, Human
ucagauccagggac

SEQ ID NO: 2571414 - RNA, 15 nt, Human
ucagauccagggaca

SEQ ID NO: 2571415 - RNA, 16 nt, Human
ucagauccagggacag

SEQ ID NO: 2571416 - RNA, 20 nt, Human
ucagaucauuaucagccugu

SEQ ID NO: 2571417 - RNA, 21 nt, Human
ucagaucauuucaaaacucau

SEQ ID NO: 2571418 - RNA, 21 nt, Human
ucagauauuuuuucagaaaua

SEQ ID NO: 2571419 - RNA, 16 nt, Human
ucagaucacuacugca

SEQ ID NO: 2571420 - RNA, 15 nt, Human
ucagaucacuacugc

SEQ ID NO: 2571421 - RNA, 22 nt, Human
ucagauauuuuuucagaaauau

SEQ ID NO: 2571422 - RNA, 23 nt, Human
ucagauauuuuuucagaaauaug

SEQ ID NO: 2571423 - RNA, 16 nt, Human
ucagaucauggcaucc

SEQ ID NO: 2571424 - RNA, 13 nt, Human
ucagaucauggca

SEQ ID NO: 2571425 - RNA, 23 nt, Human
ucagaucaguguaccauuugccu

SEQ ID NO: 2571426 - RNA, 18 nt, Human
ucagaucacuacugcagu

SEQ ID NO: 2571427 - RNA, 17 nt, Human
ucagaucacuacugcag

SEQ ID NO: 2571428 - RNA, 13 nt, Human
ucagaucagugcu

SEQ ID NO: 2571429 - RNA, 18 nt, Human
ucagcauccuggcacccg

SEQ ID NO: 2571430 - RNA, 17 nt, Human
ucagcauccuggcaccc

SEQ ID NO: 2571431 - RNA, 16 nt, Human
ucagcauccuggcacc

SEQ ID NO: 2571432 - RNA, 15 nt, Human
ucagcauccuggcac

SEQ ID NO: 2571433 - RNA, 23 nt, Human
ucagcauauuuguauaguugcuu

SEQ ID NO: 2571434 - RNA, 22 nt, Human
ucagcauauuuguauaguugcu

SEQ ID NO: 2571435 - RNA, 13 nt, Human
ucagcauauuugu

SEQ ID NO: 2571436 - RNA, 17 nt, Human
ucagcauaccuuuauug

SEQ ID NO: 2571437 - RNA, 17 nt, Human
ucagccuccagccucug

SEQ ID NO: 2571438 - RNA, 16 nt, Human
ucagccuccagccucu

SEQ ID NO: 2571439 - RNA, 15 nt, Human
ucagccuccagccuc

SEQ ID NO: 2571440 - RNA, 14 nt, Human
ucagccuccagccu

SEQ ID NO: 2571441 - RNA, 23 nt, Human
ucagccuagccgaccucagccuu

SEQ ID NO: 2571442 - RNA, 18 nt, Human
ucagccuaggggucaggg

SEQ ID NO: 2571443 - RNA, 13 nt, Human
ucagccucccaaa

SEQ ID NO: 2571444 - RNA, 12 nt, Human
ucagccucccaa

SEQ ID NO: 2571445 - RNA, 17 nt, Human
ucagcacgauuucuguu

SEQ ID NO: 2571446 - RNA, 17 nt, Human
ucagcaccccuuccaug

SEQ ID NO: 2571447 - RNA, 15 nt, Human
ucagcaccccuucca

SEQ ID NO: 2571448 - RNA, 17 nt, Human
ucagcaggaagcaacga

SEQ ID NO: 2571449 - RNA, 20 nt, Human
ucagcaguaccuauaaagua

SEQ ID NO: 2571450 - RNA, 15 nt, Human
ucagcacgauuucug

SEQ ID NO: 2571451 - RNA, 16 nt, Human
ucagcacgauuucugu

SEQ ID NO: 2571452 - RNA, 22 nt, Human
ucagcaccuacaguguacaguc

SEQ ID NO: 2571453 - RNA, 21 nt, Human
ucagcaccuacaguguacagu

SEQ ID NO: 2571454 - RNA, 14 nt, Human
ucagcaccccuucc

SEQ ID NO: 2571455 - RNA, 13 nt, Human
ucagcaccccuuc

SEQ ID NO: 2571456 - RNA, 17 nt, Human
ucagcaccccugucucu

SEQ ID NO: 2571457 - RNA, 20 nt, Human
ucagcaccuacaguguacag

SEQ ID NO: 2571458 - RNA, 22 nt, Human
ucagcuccccucggagaagagc

SEQ ID NO: 2571459 - RNA, 21 nt, Human
ucagcuccccucggagaagag

SEQ ID NO: 2571460 - RNA, 14 nt, Human
ucagcuccuuccug

SEQ ID NO: 2571461 - RNA, 15 nt, Human
ucagcuccuuccugg

SEQ ID NO: 2571462 - RNA, 16 nt, Human
ucagcuccuuccugga

SEQ ID NO: 2571463 - RNA, 17 nt, Human
ucagcuccuuccuggag

SEQ ID NO: 2571464 - RNA, 22 nt, Human
ucagcuccagcucaccagcccc

SEQ ID NO: 2571465 - RNA, 21 nt, Human
ucagcuccagcucaccagccc

SEQ ID NO: 2571466 - RNA, 19 nt, Human
ucagccugagucuccugug

SEQ ID NO: 2571467 - RNA, 16 nt, Human
ucagccugagucuccu

SEQ ID NO: 2571468 - RNA, 15 nt, Human
ucagccugagucucc

SEQ ID NO: 2571469 - RNA, 15 nt, Human
ucagcuccagcucac

SEQ ID NO: 2571470 - RNA, 18 nt, Human
ucagcuccagcucaccag

SEQ ID NO: 2571471 - RNA, 20 nt, Human
ucagccucccgaauagcugg

SEQ ID NO: 2571472 - RNA, 12 nt, Human
ucagccucccga

SEQ ID NO: 2571473 - RNA, 19 nt, Human
ucagccuccagccucuguu

SEQ ID NO: 2571474 - RNA, 18 nt, Human
ucagccuccagccucugu

SEQ ID NO: 2571475 - RNA, 20 nt, Human
ucagccucccaaguagcugg

SEQ ID NO: 2571476 - RNA, 22 nt, Human
ucagccucccaaagugcuggga

SEQ ID NO: 2571477 - RNA, 21 nt, Human
ucagccucucucccagucuac

SEQ ID NO: 2571478 - RNA, 20 nt, Human
ucagccucucucccagucua

SEQ ID NO: 2571479 - RNA, 19 nt, Human
ucagccucucucccagucu

SEQ ID NO: 2571480 - RNA, 18 nt, Human
ucagccucucucccaguc

SEQ ID NO: 2571481 - RNA, 17 nt, Human
ucagccucucucccagu

SEQ ID NO: 2571482 - RNA, 16 nt, Human
ucagccucucucccag

SEQ ID NO: 2571483 - RNA, 10 nt, Human
ucagccugag

SEQ ID NO: 2571484 - RNA, 22 nt, Human
ucagccucuuaaagcugccugu

SEQ ID NO: 2571485 - RNA, 12 nt, Human
ucagccucuuaa

SEQ ID NO: 2571486 - RNA, 21 nt, Human
ucagccucuuaaagcugccug

SEQ ID NO: 2571487 - RNA, 16 nt, Human
ucagccugcuccagcu

SEQ ID NO: 2571488 - RNA, 11 nt, Human
ucagccugagu

SEQ ID NO: 2571489 - RNA, 20 nt, Human
ucagccugaggcugagacug

SEQ ID NO: 2571490 - RNA, 13 nt, Human
ucagccugaggcu

SEQ ID NO: 2571491 - RNA, 18 nt, Human
ucagccugaggcugagac

SEQ ID NO: 2571492 - RNA, 22 nt, Human
ucaggagaguagaacagauaau

SEQ ID NO: 2571493 - RNA, 13 nt, Human
ucaggagagcagc

SEQ ID NO: 2571494 - RNA, 20 nt, Human
ucaggagaggggcagaacag

SEQ ID NO: 2571495 - RNA, 20 nt, Human
ucaggagagaguugaaccua

SEQ ID NO: 2571496 - RNA, 15 nt, Human
ucaggagaggggcag

SEQ ID NO: 2571497 - RNA, 17 nt, Human
ucaggagaggggcagaa

SEQ ID NO: 2571498 - RNA, 18 nt, Human
ucaggagaggggcagaac

SEQ ID NO: 2571499 - RNA, 14 nt, Human
ucaggacuccucuc

SEQ ID NO: 2571500 - RNA, 20 nt, Human
ucaggacuuaacggcuccag

SEQ ID NO: 2571501 - RNA, 12 nt, Human
ucaggagaaaaa

SEQ ID NO: 2571502 - RNA, 15 nt, Human
ucaggacuuggucug

SEQ ID NO: 2571503 - RNA, 12 nt, Human
ucaggaggcuga

SEQ ID NO: 2571504 - RNA, 13 nt, Human
ucaggaggcugag

SEQ ID NO: 2571505 - RNA, 18 nt, Human
ucaggaggcugaggcaga

SEQ ID NO: 2571506 - RNA, 20 nt, Human
ucaggaggcugaggcagaag

SEQ ID NO: 2571507 - RNA, 22 nt, Human
ucaggaggcugaggcagaagaa

SEQ ID NO: 2571508 - RNA, 15 nt, Human
ucaggaggcugaggg

SEQ ID NO: 2571509 - RNA, 18 nt, Human
ucaggaggcugaggggag

SEQ ID NO: 2571510 - RNA, 13 nt, Human
ucaggagggauug

SEQ ID NO: 2571511 - RNA, 17 nt, Human
ucaggaggcaggaccuu

SEQ ID NO: 2571512 - RNA, 11 nt, Human
ucaggagcaca

SEQ ID NO: 2571513 - RNA, 23 nt, Human
ucaggaggaaggcuuacacccac

SEQ ID NO: 2571514 - RNA, 16 nt, Human
ucaggaggaaggcuua

SEQ ID NO: 2571515 - RNA, 16 nt, Human
ucagcugcugaaacaa

SEQ ID NO: 2571516 - RNA, 24 nt, Human
ucagcugccucacuuccuacaaga

SEQ ID NO: 2571517 - RNA, 15 nt, Human
ucagcugcuucuccc

SEQ ID NO: 2571518 - RNA, 12 nt, Human
ucagcugcuucu

SEQ ID NO: 2571519 - RNA, 15 nt, Human
ucagcugcuacuacu

SEQ ID NO: 2571520 - RNA, 12 nt, Human
ucagcugccuca

SEQ ID NO: 2571521 - RNA, 14 nt, Human
ucagcugccucacu

SEQ ID NO: 2571522 - RNA, 15 nt, Human
ucagcugccucacuu

SEQ ID NO: 2571523 - RNA, 14 nt, Human
ucaggacucagaag

SEQ ID NO: 2571524 - RNA, 21 nt, Human
ucaggacucagaagccucugg

SEQ ID NO: 2571525 - RNA, 14 nt, Human
ucaggaccuuuuga

SEQ ID NO: 2571526 - RNA, 23 nt, Human
ucaggaccugggaccuccccuga

SEQ ID NO: 2571527 - RNA, 19 nt, Human
ucaggacgagaaugagggu

SEQ ID NO: 2571528 - RNA, 21 nt, Human
ucaggaccugggaccuccccu

SEQ ID NO: 2571529 - RNA, 14 nt, Human
ucaggaccaggcaa

SEQ ID NO: 2571530 - RNA, 17 nt, Human
ucaggaccugggaccuc

SEQ ID NO: 2571531 - RNA, 20 nt, Human
ucaggaccaaagcuuucaug

SEQ ID NO: 2571532 - RNA, 15 nt, Human
ucaggacagaugcca

SEQ ID NO: 2571533 - RNA, 14 nt, Human
ucaggacagaugcc

SEQ ID NO: 2571534 - RNA, 21 nt, Human
ucagcuggcacugucucugcu

SEQ ID NO: 2571535 - RNA, 20 nt, Human
ucagcuguaagaagagacug

SEQ ID NO: 2571536 - RNA, 16 nt, Human
ucaggacccagaggaa

SEQ ID NO: 2571537 - RNA, 19 nt, Human
ucaggacccagaggaaggg

SEQ ID NO: 2571538 - RNA, 15 nt, Human
ucaggacccagagga

SEQ ID NO: 2571539 - RNA, 13 nt, Human
ucaggaccaggca

SEQ ID NO: 2571540 - RNA, 13 nt, Human
ucaggacacuaau

SEQ ID NO: 2571541 - RNA, 18 nt, Human
ucaguccuccccucacag

SEQ ID NO: 2571542 - RNA, 17 nt, Human
ucaguccuccccucaca

SEQ ID NO: 2571543 - RNA, 13 nt, Human
ucaguccuccccu

SEQ ID NO: 2571544 - RNA, 23 nt, Human
ucagucccuauguauuugcaguu

SEQ ID NO: 2571545 - RNA, 18 nt, Human
ucagucccuauguauuug

SEQ ID NO: 2571546 - RNA, 17 nt, Human
ucagucccuauguauuu

SEQ ID NO: 2571547 - RNA, 16 nt, Human
ucagucccuauguauu

SEQ ID NO: 2571548 - RNA, 13 nt, Human
ucagucccuaugu

SEQ ID NO: 2571549 - RNA, 23 nt, Human
ucaguccccucccaucugggagu

SEQ ID NO: 2571550 - RNA, 20 nt, Human
ucaguccccucccaucuggg

SEQ ID NO: 2571551 - RNA, 18 nt, Human
ucaguccccucccaucug

SEQ ID NO: 2571552 - RNA, 15 nt, Human
ucaguccccucccau

SEQ ID NO: 2571553 - RNA, 14 nt, Human
ucaguccccuccca

SEQ ID NO: 2571554 - RNA, 13 nt, Human
ucaguccccuccc

SEQ ID NO: 2571555 - RNA, 12 nt, Human
ucaguccccucc

SEQ ID NO: 2571556 - RNA, 21 nt, Human
ucaguccuccccucacagccu

SEQ ID NO: 2571557 - RNA, 19 nt, Human
ucaguccuccccucacagc

SEQ ID NO: 2571558 - RNA, 13 nt, Human
ucagucucugagc

SEQ ID NO: 2571559 - RNA, 15 nt, Human
ucagucucugagcag

SEQ ID NO: 2571560 - RNA, 17 nt, Human
ucagucucugagcagug

SEQ ID NO: 2571561 - RNA, 20 nt, Human
ucagucucugagcagugaau

SEQ ID NO: 2571562 - RNA, 19 nt, Human
ucagucugauucccaagcu

SEQ ID NO: 2571563 - RNA, 17 nt, Human
ucagucugauucccaag

SEQ ID NO: 2571564 - RNA, 18 nt, Human
ucagugugacugaucucu

SEQ ID NO: 2571565 - RNA, 19 nt, Human
ucagugugucuaaauuuga

SEQ ID NO: 2571566 - RNA, 14 nt, Human
ucagugugcccccc

SEQ ID NO: 2571567 - RNA, 13 nt, Human
ucagugugccccc

SEQ ID NO: 2571568 - RNA, 17 nt, Human
ucagucucugagggcuu

SEQ ID NO: 2571569 - RNA, 23 nt, Human
ucagucugauuaaagguggugcc

SEQ ID NO: 2571570 - RNA, 22 nt, Human
ucagugugccccccauccuggc

SEQ ID NO: 2571571 - RNA, 22 nt, Human
ucaguguuugggucaccccucc

SEQ ID NO: 2571572 - RNA, 21 nt, Human
ucaguguuaaaugugaugaau

SEQ ID NO: 2571573 - RNA, 14 nt, Human
ucaguguuauuagu

SEQ ID NO: 2571574 - RNA, 20 nt, Human
ucaguguucccuuuccuacu

SEQ ID NO: 2571575 - RNA, 15 nt, Human
ucaguguuaaaugug

SEQ ID NO: 2571576 - RNA, 17 nt, Human
ucaguguuaaaugugau

SEQ ID NO: 2571577 - RNA, 20 nt, Human
ucagugugccccccauccug

SEQ ID NO: 2571578 - RNA, 19 nt, Human
ucagugugccccccauccu

SEQ ID NO: 2571579 - RNA, 14 nt, Human
ucaguuacucagcc

SEQ ID NO: 2571580 - RNA, 15 nt, Human
ucaguucccuuggcc

SEQ ID NO: 2571581 - RNA, 16 nt, Human
ucaguucccuuggccu

SEQ ID NO: 2571582 - RNA, 17 nt, Human
ucaguucccuuggccuc

SEQ ID NO: 2571583 - RNA, 18 nt, Human
ucaguucccuuggccuca

SEQ ID NO: 2571584 - RNA, 19 nt, Human
ucaguucccuuggccucag

SEQ ID NO: 2571585 - RNA, 20 nt, Human
ucaguucccuuggccucaga

SEQ ID NO: 2571586 - RNA, 16 nt, Human
ucaguuccucuuugca

SEQ ID NO: 2571587 - RNA, 20 nt, Human
ucaguuccgauuucccaggc

SEQ ID NO: 2571588 - RNA, 22 nt, Human
ucaguucccuuggccucagaau

SEQ ID NO: 2571589 - RNA, 16 nt, Human
ucaguuaagccuuugg

SEQ ID NO: 2571590 - RNA, 17 nt, Human
ucaguuaagccuuugga

SEQ ID NO: 2571591 - RNA, 20 nt, Human
ucaguuacuaagaagaaaau

SEQ ID NO: 2571592 - RNA, 15 nt, Human
ucaguuacagaaagu

SEQ ID NO: 2571593 - RNA, 14 nt, Human
ucaguuacuaagaa

SEQ ID NO: 2571594 - RNA, 14 nt, Human
ucaguuacagaaag

SEQ ID NO: 2571595 - RNA, 13 nt, Human
ucaguuacagaaa

SEQ ID NO: 2571596 - RNA, 17 nt, Human
ucagguggggcagcuug

SEQ ID NO: 2571597 - RNA, 21 nt, Human
ucagguggggcagcuugaggg

SEQ ID NO: 2571598 - RNA, 16 nt, Human
ucagguggggcagcuu

SEQ ID NO: 2571599 - RNA, 15 nt, Human
ucagguggggcagcu

SEQ ID NO: 2571600 - RNA, 20 nt, Human
ucaggugcugccauccaggu

SEQ ID NO: 2571601 - RNA, 18 nt, Human
ucaggugcugccauccag

SEQ ID NO: 2571602 - RNA, 14 nt, Human
ucagguggggcagc

SEQ ID NO: 2571603 - RNA, 19 nt, Human
ucaggagucccaaggaaag

SEQ ID NO: 2571604 - RNA, 20 nt, Human
ucaggagucccaaggaaagc

SEQ ID NO: 2571605 - RNA, 11 nt, Human
ucagguggcca

SEQ ID NO: 2571606 - RNA, 21 nt, Human
ucagucauuagacuccuccuc

SEQ ID NO: 2571607 - RNA, 20 nt, Human
ucagucaugcauaaauaugc

SEQ ID NO: 2571608 - RNA, 17 nt, Human
ucagucaugcauaaaua

SEQ ID NO: 2571609 - RNA, 12 nt, Human
ucaguccaggau

SEQ ID NO: 2571610 - RNA, 17 nt, Human
ucagucccaucagagag

SEQ ID NO: 2571611 - RNA, 18 nt, Human
ucaguccccgugaaggag

SEQ ID NO: 2571612 - RNA, 18 nt, Human
ucaguccaugaagaugua

SEQ ID NO: 2571613 - RNA, 15 nt, Human
ucaguccauagcaga

SEQ ID NO: 2571614 - RNA, 20 nt, Human
ucagguggggucacucuggc

SEQ ID NO: 2571615 - RNA, 17 nt, Human
ucagguggggucacucu

SEQ ID NO: 2571616 - RNA, 16 nt, Human
ucagucaugcauaaau

SEQ ID NO: 2571617 - RNA, 15 nt, Human
ucagucaugcauaaa

SEQ ID NO: 2571618 - RNA, 14 nt, Human
ucagucaugcauaa

SEQ ID NO: 2571619 - RNA, 19 nt, Human
ucagucagugcaaauguca

SEQ ID NO: 2571620 - RNA, 17 nt, Human
ucaggugggcgugguca

SEQ ID NO: 2571621 - RNA, 21 nt, Human
ucagguggggucacucuggca

SEQ ID NO: 2571622 - RNA, 13 nt, Human
ucagguggccaug

SEQ ID NO: 2571623 - RNA, 17 nt, Human
ucaguucucuucacuca

SEQ ID NO: 2571624 - RNA, 20 nt, Human
ucaguucuagucucucuggg

SEQ ID NO: 2571625 - RNA, 23 nt, Human
ucauacucuagauuuuguuuugc

SEQ ID NO: 2571626 - RNA, 14 nt, Human
ucauacucuagauu

SEQ ID NO: 2571627 - RNA, 19 nt, Human
ucaguucuagucucucugg

SEQ ID NO: 2571628 - RNA, 14 nt, Human
ucaguucucuucac

SEQ ID NO: 2571629 - RNA, 21 nt, Human
ucaguuccucuuugcauggaa

SEQ ID NO: 2571630 - RNA, 19 nt, Human
ucaguuccucuuugcaugg

SEQ ID NO: 2571631 - RNA, 18 nt, Human
ucaguuccucuuugcaug

SEQ ID NO: 2571632 - RNA, 17 nt, Human
ucaguuccucuuugcau

SEQ ID NO: 2571633 - RNA, 20 nt, Human
ucaguuccugcccuuggccu

SEQ ID NO: 2571634 - RNA, 20 nt, Human
ucauacugugcuggagccac

SEQ ID NO: 2571635 - RNA, 18 nt, Human
ucauacugugcuggagcc

SEQ ID NO: 2571636 - RNA, 17 nt, Human
ucauacugugcuggagc

SEQ ID NO: 2571637 - RNA, 15 nt, Human
ucauacugaagaugc

SEQ ID NO: 2571638 - RNA, 13 nt, Human
ucauacugaagau

SEQ ID NO: 2571639 - RNA, 19 nt, Human
ucauacugugcuggagcca

SEQ ID NO: 2571640 - RNA, 16 nt, Human
ucauauuuugauuauu

SEQ ID NO: 2571641 - RNA, 14 nt, Human
ucauauuuugauua

SEQ ID NO: 2571642 - RNA, 12 nt, Human
ucauauuuugau

SEQ ID NO: 2571643 - RNA, 18 nt, Human
ucauauuuucuuucaaaa

SEQ ID NO: 2571644 - RNA, 15 nt, Human
ucauauuuuguauau

SEQ ID NO: 2571645 - RNA, 19 nt, Human
ucauauuuugauuauugua

SEQ ID NO: 2571646 - RNA, 22 nt, Human
ucauagaaauguaacuuuugua

SEQ ID NO: 2571647 - RNA, 13 nt, Human
ucauagaaaugua

SEQ ID NO: 2571648 - RNA, 15 nt, Human
ucaucaaggcacugc

SEQ ID NO: 2571649 - RNA, 19 nt, Human
ucaucaagacuggaaggug

SEQ ID NO: 2571650 - RNA, 16 nt, Human
ucaucaaggcacugcc

SEQ ID NO: 2571651 - RNA, 16 nt, Human
ucaucaguauugaagc

SEQ ID NO: 2571652 - RNA, 20 nt, Human
ucaucaguauugaagcauuu

SEQ ID NO: 2571653 - RNA, 21 nt, Human
ucaucaguauugaagcauuuu

SEQ ID NO: 2571654 - RNA, 15 nt, Human
ucaucaguggagcca

SEQ ID NO: 2571655 - RNA, 23 nt, Human
ucaucaguauugaagcauuuuau

SEQ ID NO: 2571656 - RNA, 15 nt, Human
ucaucaacugaauga

SEQ ID NO: 2571657 - RNA, 22 nt, Human
ucaucaacugaaugaggucagc

SEQ ID NO: 2571658 - RNA, 11 nt, Human
ucaucaagacu

SEQ ID NO: 2571659 - RNA, 23 nt, Human
ucaucaaauggaagacacauuga

SEQ ID NO: 2571660 - RNA, 19 nt, Human
ucaucaaauggaagacaca

SEQ ID NO: 2571661 - RNA, 23 nt, Human
ucauauuuuguauauaucugcuu

SEQ ID NO: 2571662 - RNA, 13 nt, Human
ucaucaacugaau

SEQ ID NO: 2571663 - RNA, 17 nt, Human
ucaucaacccuaaaaag

SEQ ID NO: 2571664 - RNA, 15 nt, Human
ucaucauacaugacu

SEQ ID NO: 2571665 - RNA, 14 nt, Human
ucaucauauuauac

SEQ ID NO: 2571666 - RNA, 17 nt, Human
ucaucauauuauacaga

SEQ ID NO: 2571667 - RNA, 13 nt, Human
ucaucauaaaaua

SEQ ID NO: 2571668 - RNA, 14 nt, Human
ucaucauaaaauaa

SEQ ID NO: 2571669 - RNA, 15 nt, Human
ucaucauaaaauaaa

SEQ ID NO: 2571670 - RNA, 19 nt, Human
ucaucauaaaauaaaguau

SEQ ID NO: 2571671 - RNA, 20 nt, Human
ucaucauucucugucucauc

SEQ ID NO: 2571672 - RNA, 19 nt, Human
ucaucauucucugucucau

SEQ ID NO: 2571673 - RNA, 20 nt, Human
ucaucauuguauauaugugu

SEQ ID NO: 2571674 - RNA, 22 nt, Human
ucaucauucucugucucaucca

SEQ ID NO: 2571675 - RNA, 19 nt, Human
ucaucauuguauauaugug

SEQ ID NO: 2571676 - RNA, 20 nt, Human
ucauggccuauuauauuaaa

SEQ ID NO: 2571677 - RNA, 18 nt, Human
ucauggccccucugaccu

SEQ ID NO: 2571678 - RNA, 14 nt, Human
ucauggccccucug

SEQ ID NO: 2571679 - RNA, 13 nt, Human
ucauggccccucu

SEQ ID NO: 2571680 - RNA, 22 nt, Human
ucauggcagaaggcaaacccau

SEQ ID NO: 2571681 - RNA, 23 nt, Human
ucauggagugacggucccacacu

SEQ ID NO: 2571682 - RNA, 20 nt, Human
ucauggagaagcagaaauac

SEQ ID NO: 2571683 - RNA, 14 nt, Human
ucauggacacuuug

SEQ ID NO: 2571684 - RNA, 20 nt, Human
ucauggauucauuacagcuu

SEQ ID NO: 2571685 - RNA, 23 nt, Human
ucauggaugggggaacucagauc

SEQ ID NO: 2571686 - RNA, 24 nt, Human
ucauggacuucugccagcauaaua

SEQ ID NO: 2571687 - RNA, 21 nt, Human
ucauggaauuggagcucgugg

SEQ ID NO: 2571688 - RNA, 17 nt, Human
ucauggacacuuugaaa

SEQ ID NO: 2571689 - RNA, 19 nt, Human
ucauggaauuggagcucgu

SEQ ID NO: 2571690 - RNA, 11 nt, Human
ucaugaaaauu

SEQ ID NO: 2571691 - RNA, 14 nt, Human
ucaucugcuggucc

SEQ ID NO: 2571692 - RNA, 13 nt, Human
ucaucugcugguc

SEQ ID NO: 2571693 - RNA, 21 nt, Human
ucaucugcucuccuuccugga

SEQ ID NO: 2571694 - RNA, 14 nt, Human
ucauccaccccauc

SEQ ID NO: 2571695 - RNA, 19 nt, Human
ucaucugcugguccguggg

SEQ ID NO: 2571696 - RNA, 12 nt, Human
ucaucuggaacc

SEQ ID NO: 2571697 - RNA, 18 nt, Human
ucaucuggaaccaucaga

SEQ ID NO: 2571698 - RNA, 17 nt, Human
ucauccacauuguuuua

SEQ ID NO: 2571699 - RNA, 16 nt, Human
ucauccacauuguuuu

SEQ ID NO: 2571700 - RNA, 15 nt, Human
ucauccacauuguuu

SEQ ID NO: 2571701 - RNA, 22 nt, Human
ucauccaaucuaaccacaucaa

SEQ ID NO: 2571702 - RNA, 22 nt, Human
ucauccacauuguuuuaaaaag

SEQ ID NO: 2571703 - RNA, 19 nt, Human
ucauccacauuguuuuaaa

SEQ ID NO: 2571704 - RNA, 12 nt, Human
ucauccacccca

SEQ ID NO: 2571705 - RNA, 15 nt, Human
ucauccaauccucac

SEQ ID NO: 2571706 - RNA, 18 nt, Human
ucauccaauccucacugg

SEQ ID NO: 2571707 - RNA, 19 nt, Human
ucauccaauccucacuggg

SEQ ID NO: 2571708 - RNA, 14 nt, Human
ucauccacauuguu

SEQ ID NO: 2571709 - RNA, 20 nt, Human
ucauccaauccucacugggu

SEQ ID NO: 2571710 - RNA, 22 nt, Human
ucauccaauccucacugggugg

SEQ ID NO: 2571711 - RNA, 14 nt, Human
ucaucugggaaaga

SEQ ID NO: 2571712 - RNA, 13 nt, Human
ucaucugggaaag

SEQ ID NO: 2571713 - RNA, 12 nt, Human
ucaucugggaaa

SEQ ID NO: 2571714 - RNA, 23 nt, Human
ucaucuggauaggagccugcugg

SEQ ID NO: 2571715 - RNA, 19 nt, Human
ucaucuggcaacaucuuua

SEQ ID NO: 2571716 - RNA, 23 nt, Human
ucaucuggcaacaucuuuauccg

SEQ ID NO: 2571717 - RNA, 22 nt, Human
ucaucuggauaggagccugcug

SEQ ID NO: 2571718 - RNA, 21 nt, Human
ucaucuggauaggagccugcu

SEQ ID NO: 2571719 - RNA, 13 nt, Human
ucaucuggaacca

SEQ ID NO: 2571720 - RNA, 13 nt, Human
ucaucuuucuuga

SEQ ID NO: 2571721 - RNA, 22 nt, Human
ucaucuuucuugaucaacaucu

SEQ ID NO: 2571722 - RNA, 16 nt, Human
ucaucugggaaagaca

SEQ ID NO: 2571723 - RNA, 14 nt, Human
ucccacucagucca

SEQ ID NO: 2571724 - RNA, 13 nt, Human
ucccacucacccc

SEQ ID NO: 2571725 - RNA, 15 nt, Human
ucccacuaucugggu

SEQ ID NO: 2571726 - RNA, 14 nt, Human
ucccacuaucuggg

SEQ ID NO: 2571727 - RNA, 20 nt, Human
ucccacuaucugggugcaug

SEQ ID NO: 2571728 - RNA, 17 nt, Human
ucccacucaagccaagc

SEQ ID NO: 2571729 - RNA, 20 nt, Human
ucccacgaauuugcugggga

SEQ ID NO: 2571730 - RNA, 18 nt, Human
ucccacgaauuugcuggg

SEQ ID NO: 2571731 - RNA, 15 nt, Human
ucccacgaauuugcu

SEQ ID NO: 2571732 - RNA, 20 nt, Human
ucccacgcacuccaugagca

SEQ ID NO: 2571733 - RNA, 14 nt, Human
ucccacgugggaga

SEQ ID NO: 2571734 - RNA, 18 nt, Human
ucccacgcuucucuuugg

SEQ ID NO: 2571735 - RNA, 21 nt, Human
ucccacgaauuugcuggggaa

SEQ ID NO: 2571736 - RNA, 20 nt, Human
ucccaccucucucacuccuu

SEQ ID NO: 2571737 - RNA, 21 nt, Human
ucccaccuuggcugcagggag

SEQ ID NO: 2571738 - RNA, 19 nt, Human
ucccaccuuggcugcaggg

SEQ ID NO: 2571739 - RNA, 18 nt, Human
ucccaccucucucacucc

SEQ ID NO: 2571740 - RNA, 17 nt, Human
ucccaccucucucacuc

SEQ ID NO: 2571741 - RNA, 23 nt, Human
ucccaccucccccucccccuucu

SEQ ID NO: 2571742 - RNA, 14 nt, Human
ucccaccucucuca

SEQ ID NO: 2571743 - RNA, 18 nt, Human
ucccaccucagccucccg

SEQ ID NO: 2571744 - RNA, 18 nt, Human
ucccaagaucugugcagc

SEQ ID NO: 2571745 - RNA, 16 nt, Human
ucccaccucagccucc

SEQ ID NO: 2571746 - RNA, 18 nt, Human
ucccaggcauuccccagg

SEQ ID NO: 2571747 - RNA, 17 nt, Human
ucccaggcauuccccag

SEQ ID NO: 2571748 - RNA, 15 nt, Human
ucccacuuccccucc

SEQ ID NO: 2571749 - RNA, 23 nt, Human
ucccacugccucagguuccuaug

SEQ ID NO: 2571750 - RNA, 17 nt, Human
ucccacuucccugacac

SEQ ID NO: 2571751 - RNA, 20 nt, Human
ucccacuuccccuccuaccc

SEQ ID NO: 2571752 - RNA, 16 nt, Human
ucccaggauguacaag

SEQ ID NO: 2571753 - RNA, 15 nt, Human
ucccacuugccccug

SEQ ID NO: 2571754 - RNA, 22 nt, Human
ucccacucuagggcaguggagu

SEQ ID NO: 2571755 - RNA, 17 nt, Human
ucccacucuagggcagu

SEQ ID NO: 2571756 - RNA, 23 nt, Human
ucccacucaccccggcagacgcc

SEQ ID NO: 2571757 - RNA, 15 nt, Human
ucccacucaccccgg

SEQ ID NO: 2571758 - RNA, 18 nt, Human
ucccacucaagccaagca

SEQ ID NO: 2571759 - RNA, 16 nt, Human
ucccacugcacccccu

SEQ ID NO: 2571760 - RNA, 13 nt, Human
ucccacugcaccc

SEQ ID NO: 2571761 - RNA, 20 nt, Human
ucccacugcacccccuccug

SEQ ID NO: 2571762 - RNA, 18 nt, Human
ucccacugcacccccucc

SEQ ID NO: 2571763 - RNA, 21 nt, Human
ucccacugcacccccuccugc

SEQ ID NO: 2571764 - RNA, 20 nt, Human
ucccacugccucagguuccu

SEQ ID NO: 2571765 - RNA, 18 nt, Human
ucccacugccucagguuc

SEQ ID NO: 2571766 - RNA, 16 nt, Human
ucccacugccucaggu

SEQ ID NO: 2571767 - RNA, 14 nt, Human
ucccacugccucag

SEQ ID NO: 2571768 - RNA, 22 nt, Human
ucccacugggguccagggagca

SEQ ID NO: 2571769 - RNA, 19 nt, Human
ucccaggcauuccccagga

SEQ ID NO: 2571770 - RNA, 18 nt, Human
ucccaggcugagccucag

SEQ ID NO: 2571771 - RNA, 19 nt, Human
ucccaggcugagccucagu

SEQ ID NO: 2571772 - RNA, 18 nt, Human
ucccaggcuucacccuga

SEQ ID NO: 2571773 - RNA, 15 nt, Human
ucccaggcuucaccc

SEQ ID NO: 2571774 - RNA, 16 nt, Human
ucccaggcuggggcug

SEQ ID NO: 2571775 - RNA, 15 nt, Human
ucccaggcuggggcu

SEQ ID NO: 2571776 - RNA, 18 nt, Human
ucccagggaagugcucug

SEQ ID NO: 2571777 - RNA, 22 nt, Human
ucccaggcuucacccugaaugg

SEQ ID NO: 2571778 - RNA, 16 nt, Human
ucccagggccagggcc

SEQ ID NO: 2571779 - RNA, 17 nt, Human
ucccagggccagggccc

SEQ ID NO: 2571780 - RNA, 20 nt, Human
ucccagggccagggcccugc

SEQ ID NO: 2571781 - RNA, 16 nt, Human
ucccaugagccucagc

SEQ ID NO: 2571782 - RNA, 15 nt, Human
ucccaugagccucag

SEQ ID NO: 2571783 - RNA, 23 nt, Human
ucccagggccagggcccugcaga

SEQ ID NO: 2571784 - RNA, 21 nt, Human
ucccagggccagggcccugca

SEQ ID NO: 2571785 - RNA, 22 nt, Human
ucccagggccagggcccugcag

SEQ ID NO: 2571786 - RNA, 20 nt, Human
ucccaugacccaggcugggc

SEQ ID NO: 2571787 - RNA, 16 nt, Human
ucccaugacccaggcu

SEQ ID NO: 2571788 - RNA, 15 nt, Human
ucccaugacccaggc

SEQ ID NO: 2571789 - RNA, 17 nt, Human
ucccaggggaccacacc

SEQ ID NO: 2571790 - RNA, 12 nt, Human
ucccaggggacc

SEQ ID NO: 2571791 - RNA, 13 nt, Human
uccauauggauuu

SEQ ID NO: 2571792 - RNA, 18 nt, Human
uccauauggauuuucuau

SEQ ID NO: 2571793 - RNA, 14 nt, Human
uccauauucaugua

SEQ ID NO: 2571794 - RNA, 19 nt, Human
uccaugaguuugcccuggu

SEQ ID NO: 2571795 - RNA, 14 nt, Human
uccaugaugcuggg

SEQ ID NO: 2571796 - RNA, 23 nt, Human
uccaugaguuuuuucucuugggc

SEQ ID NO: 2571797 - RNA, 19 nt, Human
uccauaugaccucaugcau

SEQ ID NO: 2571798 - RNA, 18 nt, Human
uccauaugaccucaugca

SEQ ID NO: 2571799 - RNA, 24 nt, Human
uccauaugaccucaugcaucucca

SEQ ID NO: 2571800 - RNA, 17 nt, Human
uccauaugaccucaugc

SEQ ID NO: 2571801 - RNA, 20 nt, Human
uccauauauuagcauuuagu

SEQ ID NO: 2571802 - RNA, 17 nt, Human
uccauauauuagcauuu

SEQ ID NO: 2571803 - RNA, 18 nt, Human
uccauauauuagcauuua

SEQ ID NO: 2571804 - RNA, 13 nt, Human
uccauauaaauau

SEQ ID NO: 2571805 - RNA, 12 nt, Human
uccauauaaaua

SEQ ID NO: 2571806 - RNA, 19 nt, Human
uccauauaaauauuagaaa

SEQ ID NO: 2571807 - RNA, 18 nt, Human
uccauaguaguaugauga

SEQ ID NO: 2571808 - RNA, 20 nt, Human
uccauagagagcaagacgcu

SEQ ID NO: 2571809 - RNA, 22 nt, Human
uccauagccuaaucccugggca

SEQ ID NO: 2571810 - RNA, 14 nt, Human
uccauacagcucua

SEQ ID NO: 2571811 - RNA, 13 nt, Human
uccauacagcucu

SEQ ID NO: 2571812 - RNA, 21 nt, Human
uccauagccuaaucccugggc

SEQ ID NO: 2571813 - RNA, 22 nt, Human
uccagggcuggacugaggccug

SEQ ID NO: 2571814 - RNA, 21 nt, Human
uccagggcuggacugaggccu

SEQ ID NO: 2571815 - RNA, 23 nt, Human
uccagggcuggacugaggccuga

SEQ ID NO: 2571816 - RNA, 13 nt, Human
uccagggcucuga

SEQ ID NO: 2571817 - RNA, 23 nt, Human
uccauaaucuggacuccucuguc

SEQ ID NO: 2571818 - RNA, 13 nt, Human
uccaggggccccu

SEQ ID NO: 2571819 - RNA, 17 nt, Human
uccaggggaugggaggu

SEQ ID NO: 2571820 - RNA, 19 nt, Human
uccagggcuggacugaggc

SEQ ID NO: 2571821 - RNA, 17 nt, Human
uccagggcuggacugag

SEQ ID NO: 2571822 - RNA, 14 nt, Human
uccagggcuggacu

SEQ ID NO: 2571823 - RNA, 14 nt, Human
uccagggcuaguga

SEQ ID NO: 2571824 - RNA, 20 nt, Human
uccagggcccugagcucggu

SEQ ID NO: 2571825 - RNA, 16 nt, Human
uccagggcccugagcu

SEQ ID NO: 2571826 - RNA, 17 nt, Human
uccagggcccugagcuc

SEQ ID NO: 2571827 - RNA, 12 nt, Human
uccauacauuug

SEQ ID NO: 2571828 - RNA, 17 nt, Human
uccauagagagcaagac

SEQ ID NO: 2571829 - RNA, 12 nt, Human
uccauaauuaug

SEQ ID NO: 2571830 - RNA, 17 nt, Human
uccauaauuaugacagu

SEQ ID NO: 2571831 - RNA, 19 nt, Human
uccauaauuaugacaguua

SEQ ID NO: 2571832 - RNA, 21 nt, Human
uccauaauuaugacaguuaua

SEQ ID NO: 2571833 - RNA, 20 nt, Human
uccauaauguauaaagaaca

SEQ ID NO: 2571834 - RNA, 16 nt, Human
uccauaaugcuacugu

SEQ ID NO: 2571835 - RNA, 18 nt, Human
uccauaaugcuacugucu

SEQ ID NO: 2571836 - RNA, 12 nt, Human
uccauaauguau

SEQ ID NO: 2571837 - RNA, 21 nt, Human
ucccaacucaccccagcccca

SEQ ID NO: 2571838 - RNA, 19 nt, Human
ucccaacucaccccagccc

SEQ ID NO: 2571839 - RNA, 14 nt, Human
ucccaacuuguaaa

SEQ ID NO: 2571840 - RNA, 15 nt, Human
ucccaacucuagcug

SEQ ID NO: 2571841 - RNA, 16 nt, Human
ucccaacucuagcugg

SEQ ID NO: 2571842 - RNA, 17 nt, Human
ucccaacucuagcuggg

SEQ ID NO: 2571843 - RNA, 23 nt, Human
ucccaacaggaggacaauucaug

SEQ ID NO: 2571844 - RNA, 14 nt, Human
ucccaacucuagcu

SEQ ID NO: 2571845 - RNA, 17 nt, Human
ucccaacuccuauaauu

SEQ ID NO: 2571846 - RNA, 18 nt, Human
ucccaacucaccccagcc

SEQ ID NO: 2571847 - RNA, 17 nt, Human
ucccaacucaccccagc

SEQ ID NO: 2571848 - RNA, 11 nt, Human
ucccaacaucg

SEQ ID NO: 2571849 - RNA, 22 nt, Human
ucccaacaggaggacaauucau

SEQ ID NO: 2571850 - RNA, 21 nt, Human
ucccaacaggaggacaauuca

SEQ ID NO: 2571851 - RNA, 20 nt, Human
ucccaacaggaggacaauuc

SEQ ID NO: 2571852 - RNA, 19 nt, Human
ucccaacaggaggacaauu

SEQ ID NO: 2571853 - RNA, 18 nt, Human
ucccaacaggaggacaau

SEQ ID NO: 2571854 - RNA, 11 nt, Human
ucccaacagga

SEQ ID NO: 2571855 - RNA, 16 nt, Human
uccaugcgcucagggc

SEQ ID NO: 2571856 - RNA, 15 nt, Human
uccaugcgcucaggg

SEQ ID NO: 2571857 - RNA, 18 nt, Human
uccaugcguguuucugac

SEQ ID NO: 2571858 - RNA, 19 nt, Human
uccaugcguguuucugacu

SEQ ID NO: 2571859 - RNA, 20 nt, Human
uccaugcguguuucugacuc

SEQ ID NO: 2571860 - RNA, 16 nt, Human
uccaugucgccucugc

SEQ ID NO: 2571861 - RNA, 12 nt, Human
uccaugauucua

SEQ ID NO: 2571862 - RNA, 15 nt, Human
uccaugaugcuggga

SEQ ID NO: 2571863 - RNA, 14 nt, Human
uccaugauggaaua

SEQ ID NO: 2571864 - RNA, 12 nt, Human
uccaugauggag

SEQ ID NO: 2571865 - RNA, 15 nt, Human
uccaugauggaguca

SEQ ID NO: 2571866 - RNA, 21 nt, Human
uccaugccugaggguggagac

SEQ ID NO: 2571867 - RNA, 16 nt, Human
uccaugccugagggug

SEQ ID NO: 2571868 - RNA, 15 nt, Human
uccaugccugagggu

SEQ ID NO: 2571869 - RNA, 14 nt, Human
uccaugccugaggg

SEQ ID NO: 2571870 - RNA, 13 nt, Human
uccaugccugagg

SEQ ID NO: 2571871 - RNA, 12 nt, Human
uccaugccugag

SEQ ID NO: 2571872 - RNA, 18 nt, Human
uccaugucgccucugcau

SEQ ID NO: 2571873 - RNA, 17 nt, Human
uccaugucgccucugca

SEQ ID NO: 2571874 - RNA, 14 nt, Human
uccaugucggccuc

SEQ ID NO: 2571875 - RNA, 19 nt, Human
uccaugucgccucugcauu

SEQ ID NO: 2571876 - RNA, 21 nt, Human
uccaugucggccucuaacccc

SEQ ID NO: 2571877 - RNA, 15 nt, Human
uccaugucggccucu

SEQ ID NO: 2571878 - RNA, 16 nt, Human
ucauguacaagaugaa

SEQ ID NO: 2571879 - RNA, 17 nt, Human
ucauguacaagaugaag

SEQ ID NO: 2571880 - RNA, 18 nt, Human
ucauguacaagaugaagg

SEQ ID NO: 2571881 - RNA, 14 nt, Human
ucauguacauuucu

SEQ ID NO: 2571882 - RNA, 17 nt, Human
ucaugggauagcacgug

SEQ ID NO: 2571883 - RNA, 23 nt, Human
ucaugggagggggcuugaagcca

SEQ ID NO: 2571884 - RNA, 18 nt, Human
ucauggcuuaauguuuau

SEQ ID NO: 2571885 - RNA, 15 nt, Human
ucauggcuuaauguu

SEQ ID NO: 2571886 - RNA, 14 nt, Human
ucauggcuuaaugu

SEQ ID NO: 2571887 - RNA, 22 nt, Human
ucauggcugugcccucuugaug

SEQ ID NO: 2571888 - RNA, 12 nt, Human
ucauguacauuu

SEQ ID NO: 2571889 - RNA, 17 nt, Human
ucauguaguaucaaaua

SEQ ID NO: 2571890 - RNA, 16 nt, Human
ucauguaguaucaaau

SEQ ID NO: 2571891 - RNA, 19 nt, Human
ucauguaucaucuggauag

SEQ ID NO: 2571892 - RNA, 18 nt, Human
ucauguaucaucuggaua

SEQ ID NO: 2571893 - RNA, 15 nt, Human
ucauguaucaucugg

SEQ ID NO: 2571894 - RNA, 19 nt, Human
ucauguaguaucaaauauu

SEQ ID NO: 2571895 - RNA, 16 nt, Human
uccaagaagcccagga

SEQ ID NO: 2571896 - RNA, 15 nt, Human
uccaagaagcccagg

SEQ ID NO: 2571897 - RNA, 14 nt, Human
uccaagaagcccag

SEQ ID NO: 2571898 - RNA, 20 nt, Human
ucauguaucaucuggauagg

SEQ ID NO: 2571899 - RNA, 16 nt, Human
ucaugucaacuucugg

SEQ ID NO: 2571900 - RNA, 22 nt, Human
uccaagcaggacauggacaagg

SEQ ID NO: 2571901 - RNA, 14 nt, Human
uccaagcaggacau

SEQ ID NO: 2571902 - RNA, 17 nt, Human
uccaagcaaaugugaau

SEQ ID NO: 2571903 - RNA, 19 nt, Human
uccaagaggguccuuuagu

SEQ ID NO: 2571904 - RNA, 15 nt, Human
uccaagcaaauguga

SEQ ID NO: 2571905 - RNA, 20 nt, Human
uccaagaccuucuccuucac

SEQ ID NO: 2571906 - RNA, 19 nt, Human
uccaagaagcccaggaaag

SEQ ID NO: 2571907 - RNA, 13 nt, Human
uccaagagccuga

SEQ ID NO: 2571908 - RNA, 14 nt, Human
uccaagagccugag

SEQ ID NO: 2571909 - RNA, 12 nt, Human
uccaagagcuga

SEQ ID NO: 2571910 - RNA, 20 nt, Human
uccacaccuggcacugcugu

SEQ ID NO: 2571911 - RNA, 19 nt, Human
uccacaccuggcacugcug

SEQ ID NO: 2571912 - RNA, 15 nt, Human
uccacaccuuuuauu

SEQ ID NO: 2571913 - RNA, 21 nt, Human
uccacaccuuuuauugacaca

SEQ ID NO: 2571914 - RNA, 18 nt, Human
uccacacccucucccagg

SEQ ID NO: 2571915 - RNA, 19 nt, Human
uccacacccucucccagga

SEQ ID NO: 2571916 - RNA, 20 nt, Human
uccacacccucucccaggac

SEQ ID NO: 2571917 - RNA, 21 nt, Human
uccacacccucucccaggacc

SEQ ID NO: 2571918 - RNA, 15 nt, Human
uccacacccccaccc

SEQ ID NO: 2571919 - RNA, 13 nt, Human
uccacacccccac

SEQ ID NO: 2571920 - RNA, 12 nt, Human
uccacaccccca

SEQ ID NO: 2571921 - RNA, 17 nt, Human
uccacaccaagcagcaa

SEQ ID NO: 2571922 - RNA, 19 nt, Human
uccacacacgcaggaacuc

SEQ ID NO: 2571923 - RNA, 21 nt, Human
uccacacacagcugggcugug

SEQ ID NO: 2571924 - RNA, 20 nt, Human
uccacacacagcugggcugu

SEQ ID NO: 2571925 - RNA, 15 nt, Human
uccacacacgcagga

SEQ ID NO: 2571926 - RNA, 14 nt, Human
uccacacacgcagg

SEQ ID NO: 2571927 - RNA, 19 nt, Human
uccacaagauucccagaga

SEQ ID NO: 2571928 - RNA, 20 nt, Human
uccacaagauucccagagac

SEQ ID NO: 2571929 - RNA, 21 nt, Human
uccacaagauucccagagaca

SEQ ID NO: 2571930 - RNA, 23 nt, Human
uccacacacagaggaagagcagg

SEQ ID NO: 2571931 - RNA, 23 nt, Human
uccacagcuuccccucucuccuc

SEQ ID NO: 2571932 - RNA, 14 nt, Human
uccacagcuaccuc

SEQ ID NO: 2571933 - RNA, 18 nt, Human
uccacagccugcaaguca

SEQ ID NO: 2571934 - RNA, 15 nt, Human
uccacagccugcaag

SEQ ID NO: 2571935 - RNA, 18 nt, Human
uccacagccgcagccucc

SEQ ID NO: 2571936 - RNA, 22 nt, Human
uccacagccaucccagccuugg

SEQ ID NO: 2571937 - RNA, 15 nt, Human
uccacagccauccca

SEQ ID NO: 2571938 - RNA, 14 nt, Human
uccacagccgcagc

SEQ ID NO: 2571939 - RNA, 16 nt, Human
uccacagccgcagccu

SEQ ID NO: 2571940 - RNA, 17 nt, Human
uccacagccgcagccuc

SEQ ID NO: 2571941 - RNA, 14 nt, Human
uccacagccauccc

SEQ ID NO: 2571942 - RNA, 22 nt, Human
uccacaccuggcacugcugugc

SEQ ID NO: 2571943 - RNA, 20 nt, Human
uccacagcaaccccaggcug

SEQ ID NO: 2571944 - RNA, 19 nt, Human
uccacagcaaccccaggcu

SEQ ID NO: 2571945 - RNA, 23 nt, Human
uccacacucaccucuaaaacagu

SEQ ID NO: 2571946 - RNA, 19 nt, Human
uccacaagagcccaggccu

SEQ ID NO: 2571947 - RNA, 20 nt, Human
uccacaagagcccaggccuc

SEQ ID NO: 2571948 - RNA, 21 nt, Human
uccacaagagcccaggccucc

SEQ ID NO: 2571949 - RNA, 23 nt, Human
uccaagcgaggucaacagagaag

SEQ ID NO: 2571950 - RNA, 21 nt, Human
uccaagcgaggucaacagaga

SEQ ID NO: 2571951 - RNA, 22 nt, Human
uccaagcgaggucaacagagaa

SEQ ID NO: 2571952 - RNA, 16 nt, Human
uccacaagauucccag

SEQ ID NO: 2571953 - RNA, 17 nt, Human
uccacaagauucccaga

SEQ ID NO: 2571954 - RNA, 18 nt, Human
uccacaagauucccagag

SEQ ID NO: 2571955 - RNA, 11 nt, Human
uccaagccugc

SEQ ID NO: 2571956 - RNA, 12 nt, Human
uccaagcccugg

SEQ ID NO: 2571957 - RNA, 23 nt, Human
uccaagccccaucuucuaaaugg

SEQ ID NO: 2571958 - RNA, 19 nt, Human
uccaagccccaucuucuaa

SEQ ID NO: 2571959 - RNA, 15 nt, Human
uccaagccccaucuu

SEQ ID NO: 2571960 - RNA, 23 nt, Human
uccaagcagccugagcaacucuu

SEQ ID NO: 2571961 - RNA, 22 nt, Human
uccaagcccaguucagcuuggg

SEQ ID NO: 2571962 - RNA, 15 nt, Human
uccaagccagcggga

SEQ ID NO: 2571963 - RNA, 15 nt, Human
uccagcuggccggga

SEQ ID NO: 2571964 - RNA, 21 nt, Human
uccagcuggccgggagccuga

SEQ ID NO: 2571965 - RNA, 22 nt, Human
uccagcuggccgggagccugau

SEQ ID NO: 2571966 - RNA, 19 nt, Human
uccagcugggcucugcaau

SEQ ID NO: 2571967 - RNA, 19 nt, Human
uccagcuggguuggaaaac

SEQ ID NO: 2571968 - RNA, 17 nt, Human
uccaggaaaugugcaca

SEQ ID NO: 2571969 - RNA, 20 nt, Human
uccaggaaggcggggcuuca

SEQ ID NO: 2571970 - RNA, 18 nt, Human
uccaggaaccacaccaca

SEQ ID NO: 2571971 - RNA, 23 nt, Human
uccaggaaacuccacaucugccu

SEQ ID NO: 2571972 - RNA, 21 nt, Human
uccagcuuuguucuucuuaaa

SEQ ID NO: 2571973 - RNA, 21 nt, Human
uccaggaaacuccacaucugc

SEQ ID NO: 2571974 - RNA, 20 nt, Human
uccaggacuauauuugggcc

SEQ ID NO: 2571975 - RNA, 23 nt, Human
uccaggacuauauuugggccugc

SEQ ID NO: 2571976 - RNA, 22 nt, Human
uccaggaaugccuccucccugg

SEQ ID NO: 2571977 - RNA, 16 nt, Human
uccaggagaaggccaa

SEQ ID NO: 2571978 - RNA, 20 nt, Human
uccaggagaaggccaauucc

SEQ ID NO: 2571979 - RNA, 23 nt, Human
uccaggagaaggccaauuccuau

SEQ ID NO: 2571980 - RNA, 17 nt, Human
uccagggcccccaucuc

SEQ ID NO: 2571981 - RNA, 13 nt, Human
uccagggcccuga

SEQ ID NO: 2571982 - RNA, 13 nt, Human
uccaggagaggag

SEQ ID NO: 2571983 - RNA, 22 nt, Human
uccagggccacgugccaggccc

SEQ ID NO: 2571984 - RNA, 23 nt, Human
uccagggccacgugccaggcccg

SEQ ID NO: 2571985 - RNA, 19 nt, Human
uccagcaauucuccugccu

SEQ ID NO: 2571986 - RNA, 20 nt, Human
uccagcaauucuccugccuc

SEQ ID NO: 2571987 - RNA, 19 nt, Human
uccagauuuacacugggag

SEQ ID NO: 2571988 - RNA, 18 nt, Human
uccagcaauucuccugcc

SEQ ID NO: 2571989 - RNA, 17 nt, Human
uccagauugacgacaag

SEQ ID NO: 2571990 - RNA, 18 nt, Human
uccagauguuuccagacu

SEQ ID NO: 2571991 - RNA, 19 nt, Human
uccagauguuuccagacuu

SEQ ID NO: 2571992 - RNA, 20 nt, Human
uccagauuuacacugggaga

SEQ ID NO: 2571993 - RNA, 18 nt, Human
uccagauuuacacuggga

SEQ ID NO: 2571994 - RNA, 16 nt, Human
uccagauuuacacugg

SEQ ID NO: 2571995 - RNA, 22 nt, Human
uccagauuuuuuacagcugccu

SEQ ID NO: 2571996 - RNA, 16 nt, Human
uccagaugcagggcag

SEQ ID NO: 2571997 - RNA, 17 nt, Human
uccagaugcagggcagu

SEQ ID NO: 2571998 - RNA, 18 nt, Human
uccagaugcagggcaguc

SEQ ID NO: 2571999 - RNA, 19 nt, Human
uccagaugcagggcaguca

SEQ ID NO: 2572000 - RNA, 21 nt, Human
uccagaugccuucuccagaca

SEQ ID NO: 2572001 - RNA, 21 nt, Human
uccacccugcucuccgaccag

SEQ ID NO: 2572002 - RNA, 13 nt, Human
uccacaggaagug

SEQ ID NO: 2572003 - RNA, 22 nt, Human
uccacccuggccgaguccaagc

SEQ ID NO: 2572004 - RNA, 12 nt, Human
uccacccuggaa

SEQ ID NO: 2572005 - RNA, 14 nt, Human
uccacccugcucuc

SEQ ID NO: 2572006 - RNA, 13 nt, Human
uccacccugcucu

SEQ ID NO: 2572007 - RNA, 22 nt, Human
uccacugugccaugugccaggu

SEQ ID NO: 2572008 - RNA, 12 nt, Human
uccacccugucc

SEQ ID NO: 2572009 - RNA, 14 nt, Human
uccacccugucccc

SEQ ID NO: 2572010 - RNA, 20 nt, Human
uccacuguguauagaaguag

SEQ ID NO: 2572011 - RNA, 12 nt, Human
uccacuguguau

SEQ ID NO: 2572012 - RNA, 15 nt, Human
uccacuuuaucuuga

SEQ ID NO: 2572013 - RNA, 23 nt, Human
uccacuuagaaauugcauuuccu

SEQ ID NO: 2572014 - RNA, 21 nt, Human
uccacuuagaaauugcauuuc

SEQ ID NO: 2572015 - RNA, 17 nt, Human
uccagagggcacucugc

SEQ ID NO: 2572016 - RNA, 15 nt, Human
uccagaugcagggca

SEQ ID NO: 2572017 - RNA, 20 nt, Human
uccagaggcuauuauuuuca

SEQ ID NO: 2572018 - RNA, 12 nt, Human
uccagagggcac

SEQ ID NO: 2572019 - RNA, 19 nt, Human
uccagagaguggcuccucc

SEQ ID NO: 2572020 - RNA, 22 nt, Human
uccagagaguggcuccucccgg

SEQ ID NO: 2572021 - RNA, 17 nt, Human
uccacuuuaucuugaau

SEQ ID NO: 2572022 - RNA, 14 nt, Human
uccacuuucuagcc

SEQ ID NO: 2572023 - RNA, 18 nt, Human
uccacuuucagugaaagc

SEQ ID NO: 2572024 - RNA, 23 nt, Human
ucccuaccgagucucuucuccac

SEQ ID NO: 2572025 - RNA, 22 nt, Human
ucccuaccgagucucuucucca

SEQ ID NO: 2572026 - RNA, 21 nt, Human
ucccuaccgagucucuucucc

SEQ ID NO: 2572027 - RNA, 19 nt, Human
ucccuaccgagucucuucu

SEQ ID NO: 2572028 - RNA, 18 nt, Human
ucccuaccaccuccccag

SEQ ID NO: 2572029 - RNA, 20 nt, Human
ucccuacccccuaagagcca

SEQ ID NO: 2572030 - RNA, 13 nt, Human
ucccuaccaccuc

SEQ ID NO: 2572031 - RNA, 19 nt, Human
ucccuacccccuaagagcc

SEQ ID NO: 2572032 - RNA, 19 nt, Human
ucccaugacccaggcuggg

SEQ ID NO: 2572033 - RNA, 15 nt, Human
ucccaugaucccugu

SEQ ID NO: 2572034 - RNA, 19 nt, Human
ucccaugaucccuguguug

SEQ ID NO: 2572035 - RNA, 16 nt, Human
ucccaugaucccugug

SEQ ID NO: 2572036 - RNA, 12 nt, Human
ucccaugaugua

SEQ ID NO: 2572037 - RNA, 22 nt, Human
ucccaugagccucagcauccug

SEQ ID NO: 2572038 - RNA, 17 nt, Human
ucccaugagccucagca

SEQ ID NO: 2572039 - RNA, 19 nt, Human
ucccuagaaacuuccaaau

SEQ ID NO: 2572040 - RNA, 17 nt, Human
ucccuacuuccugugac

SEQ ID NO: 2572041 - RNA, 18 nt, Human
ucccuagaaacuuccaaa

SEQ ID NO: 2572042 - RNA, 17 nt, Human
ucccuagaggguuccug

SEQ ID NO: 2572043 - RNA, 18 nt, Human
ucccuagaggguuccugu

SEQ ID NO: 2572044 - RNA, 23 nt, Human
ucccuagaucuuucuauuccaaa

SEQ ID NO: 2572045 - RNA, 16 nt, Human
ucccuagaucuuucua

SEQ ID NO: 2572046 - RNA, 19 nt, Human
ucccuagaggguuccugua

SEQ ID NO: 2572047 - RNA, 20 nt, Human
ucccuagaggguuccuguag

SEQ ID NO: 2572048 - RNA, 17 nt, Human
ucccuagccagcacuug

SEQ ID NO: 2572049 - RNA, 16 nt, Human
ucccuagccagcacuu

SEQ ID NO: 2572050 - RNA, 22 nt, Human
ucccuagccagcacuuguauau

SEQ ID NO: 2572051 - RNA, 20 nt, Human
ucccuagccagcacuuguau

SEQ ID NO: 2572052 - RNA, 18 nt, Human
ucccuagcugugaccucu

SEQ ID NO: 2572053 - RNA, 18 nt, Human
ucccucccuuccucuuuc

SEQ ID NO: 2572054 - RNA, 13 nt, Human
ucccucccuuggg

SEQ ID NO: 2572055 - RNA, 14 nt, Human
ucccucccuugggg

SEQ ID NO: 2572056 - RNA, 18 nt, Human
ucccuccgauccuuccuc

SEQ ID NO: 2572057 - RNA, 15 nt, Human
ucccuccgauccuuc

SEQ ID NO: 2572058 - RNA, 19 nt, Human
ucccuccgauccuuccucc

SEQ ID NO: 2572059 - RNA, 20 nt, Human
ucccuagcuuuagacccugg

SEQ ID NO: 2572060 - RNA, 19 nt, Human
ucccuagcuuuagacccug

SEQ ID NO: 2572061 - RNA, 22 nt, Human
ucccuagcuuuagacccugggu

SEQ ID NO: 2572062 - RNA, 15 nt, Human
ucccucccuuugaaa

SEQ ID NO: 2572063 - RNA, 18 nt, Human
ucccucuacugggagccu

SEQ ID NO: 2572064 - RNA, 22 nt, Human
ucccucuacugggagccuaccc

SEQ ID NO: 2572065 - RNA, 14 nt, Human
ucccuccgggaccu

SEQ ID NO: 2572066 - RNA, 15 nt, Human
ucccuccgggaccug

SEQ ID NO: 2572067 - RNA, 12 nt, Human
ucccuccucacc

SEQ ID NO: 2572068 - RNA, 14 nt, Human
ucccucuguuucuc

SEQ ID NO: 2572069 - RNA, 13 nt, Human
ucccucuguuucu

SEQ ID NO: 2572070 - RNA, 22 nt, Human
ucccugcaucugaccagcagcg

SEQ ID NO: 2572071 - RNA, 16 nt, Human
ucccugcaucugacca

SEQ ID NO: 2572072 - RNA, 18 nt, Human
ucccugcaucugaccagc

SEQ ID NO: 2572073 - RNA, 20 nt, Human
ucccugcaucugaccagcag

SEQ ID NO: 2572074 - RNA, 21 nt, Human
ucccugcaucugaccagcagc

SEQ ID NO: 2572075 - RNA, 16 nt, Human
ucccugccaauggacu

SEQ ID NO: 2572076 - RNA, 14 nt, Human
ucccugccaaugga

SEQ ID NO: 2572077 - RNA, 17 nt, Human
ucccucuggggcuguuc

SEQ ID NO: 2572078 - RNA, 20 nt, Human
ucccugcacuugcagacucu

SEQ ID NO: 2572079 - RNA, 13 nt, Human
ucccucuggggcu

SEQ ID NO: 2572080 - RNA, 18 nt, Human
ucccucugcuccuggagc

SEQ ID NO: 2572081 - RNA, 15 nt, Human
ucccucugcuccugg

SEQ ID NO: 2572082 - RNA, 20 nt, Human
ucccucugcuccuggagccu

SEQ ID NO: 2572083 - RNA, 16 nt, Human
ucccucuggcccugcc

SEQ ID NO: 2572084 - RNA, 17 nt, Human
ucccucuggcccugccu

SEQ ID NO: 2572085 - RNA, 18 nt, Human
ucccucuggcccugccuu

SEQ ID NO: 2572086 - RNA, 19 nt, Human
ucccucuggcccugccuuc

SEQ ID NO: 2572087 - RNA, 20 nt, Human
ucccucuggcccugccuucu

SEQ ID NO: 2572088 - RNA, 23 nt, Human
ucccucucucuucugcuccaccc

SEQ ID NO: 2572089 - RNA, 13 nt, Human
ucccucugaccug

SEQ ID NO: 2572090 - RNA, 17 nt, Human
ucccucugaccugcagg

SEQ ID NO: 2572091 - RNA, 16 nt, Human
ucccucugaggcugua

SEQ ID NO: 2572092 - RNA, 22 nt, Human
ucccucugagaauuccaaggag

SEQ ID NO: 2572093 - RNA, 21 nt, Human
ucccucugagaauuccaagga

SEQ ID NO: 2572094 - RNA, 18 nt, Human
ucccucugaccugcaggc

SEQ ID NO: 2572095 - RNA, 19 nt, Human
ucccucugaccugcaggcc

SEQ ID NO: 2572096 - RNA, 13 nt, Human
ucccucugcccca

SEQ ID NO: 2572097 - RNA, 11 nt, Human
ucccucugccu

SEQ ID NO: 2572098 - RNA, 19 nt, Human
ucccucugaggcuguagga

SEQ ID NO: 2572099 - RNA, 21 nt, Human
ucccucugccugaaccuucca

SEQ ID NO: 2572100 - RNA, 16 nt, Human
ucccucugccuguccc

SEQ ID NO: 2572101 - RNA, 18 nt, Human
ucccucugccugucccuc

SEQ ID NO: 2572102 - RNA, 20 nt, Human
ucccucugccugucccucuc

SEQ ID NO: 2572103 - RNA, 20 nt, Human
ucccucuccauaaccccacc

SEQ ID NO: 2572104 - RNA, 22 nt, Human
ucccucucaggcaugccugugu

SEQ ID NO: 2572105 - RNA, 23 nt, Human
ucccucucaggcaugccugugug

SEQ ID NO: 2572106 - RNA, 21 nt, Human
ucccucucucuucugcuccac

SEQ ID NO: 2572107 - RNA, 20 nt, Human
ucccucucucuucugcucca

SEQ ID NO: 2572108 - RNA, 23 nt, Human
ucccucuacugggagccuaccca

SEQ ID NO: 2572109 - RNA, 13 nt, Human
ucccuccucaccu

SEQ ID NO: 2572110 - RNA, 13 nt, Human
ucccucuauuuau

SEQ ID NO: 2572111 - RNA, 19 nt, Human
ucccucuauuuauguuugc

SEQ ID NO: 2572112 - RNA, 19 nt, Human
ucccucucaggcaugccug

SEQ ID NO: 2572113 - RNA, 20 nt, Human
ucccucucaggcaugccugu

SEQ ID NO: 2572114 - RNA, 20 nt, Human
ucccuggcugcccuggcccu

SEQ ID NO: 2572115 - RNA, 19 nt, Human
ucccuggcugcccuggccc

SEQ ID NO: 2572116 - RNA, 18 nt, Human
ucccuggcugcccuggcc

SEQ ID NO: 2572117 - RNA, 16 nt, Human
ucccuggcugcccugg

SEQ ID NO: 2572118 - RNA, 22 nt, Human
ucccuggcugcccuggcccuga

SEQ ID NO: 2572119 - RNA, 21 nt, Human
ucccuggcugcccuggcccug

SEQ ID NO: 2572120 - RNA, 23 nt, Human
ucccuggcugcccuggcccugag

SEQ ID NO: 2572121 - RNA, 15 nt, Human
ucccuggcucucaga

SEQ ID NO: 2572122 - RNA, 16 nt, Human
ucccuggcucucagaa

SEQ ID NO: 2572123 - RNA, 18 nt, Human
ucccuggcucucagaagg

SEQ ID NO: 2572124 - RNA, 15 nt, Human
ucccuggcugcccug

SEQ ID NO: 2572125 - RNA, 14 nt, Human
ucccuggcugcccu

SEQ ID NO: 2572126 - RNA, 19 nt, Human
ucccuggcucucagaaggu

SEQ ID NO: 2572127 - RNA, 20 nt, Human
ucccuggcucucagaaggua

SEQ ID NO: 2572128 - RNA, 18 nt, Human
ucccuggcuuguaacucc

SEQ ID NO: 2572129 - RNA, 19 nt, Human
ucccuggcuuguaacucca

SEQ ID NO: 2572130 - RNA, 21 nt, Human
ucccuggcuuguaacuccacc

SEQ ID NO: 2572131 - RNA, 11 nt, Human
ucccuggcuug

SEQ ID NO: 2572132 - RNA, 19 nt, Human
ucccugggaggaaauuuga

SEQ ID NO: 2572133 - RNA, 22 nt, Human
ucccuggcuuguaacuccacca

SEQ ID NO: 2572134 - RNA, 16 nt, Human
ucccugggcagaaagu

SEQ ID NO: 2572135 - RNA, 12 nt, Human
ucccugggcauu

SEQ ID NO: 2572136 - RNA, 17 nt, Human
ucccugggcauugcuuu

SEQ ID NO: 2572137 - RNA, 18 nt, Human
ucccugccccucccuuca

SEQ ID NO: 2572138 - RNA, 15 nt, Human
ucccuggccuuucau

SEQ ID NO: 2572139 - RNA, 24 nt, Human
ucccuggccuuucauauuuuagcu

SEQ ID NO: 2572140 - RNA, 16 nt, Human
ucccuggccuuucaua

SEQ ID NO: 2572141 - RNA, 14 nt, Human
ucccuggcucccau

SEQ ID NO: 2572142 - RNA, 16 nt, Human
ucccugccccccagcc

SEQ ID NO: 2572143 - RNA, 14 nt, Human
ucccugccccuccc

SEQ ID NO: 2572144 - RNA, 17 nt, Human
ucccugcauuucugagu

SEQ ID NO: 2572145 - RNA, 14 nt, Human
ucccugcauuucug

SEQ ID NO: 2572146 - RNA, 13 nt, Human
ucccugccagcuc

SEQ ID NO: 2572147 - RNA, 21 nt, Human
ucccuucccacuggaggcaug

SEQ ID NO: 2572148 - RNA, 17 nt, Human
ucccuucccaccucucu

SEQ ID NO: 2572149 - RNA, 16 nt, Human
ucccuucugucccuca

SEQ ID NO: 2572150 - RNA, 14 nt, Human
ucccuucugcuacu

SEQ ID NO: 2572151 - RNA, 15 nt, Human
ucccuucugcuacug

SEQ ID NO: 2572152 - RNA, 13 nt, Human
ucccuucugcuac

SEQ ID NO: 2572153 - RNA, 22 nt, Human
ucccuucccaugacccaggcug

SEQ ID NO: 2572154 - RNA, 23 nt, Human
ucccuucucuguagggaacucug

SEQ ID NO: 2572155 - RNA, 20 nt, Human
ucccugggcugugcuaccug

SEQ ID NO: 2572156 - RNA, 16 nt, Human
ucccuucccauaagcu

SEQ ID NO: 2572157 - RNA, 16 nt, Human
ucccuucccaccucuc

SEQ ID NO: 2572158 - RNA, 19 nt, Human
ucccugggcugugcuaccu

SEQ ID NO: 2572159 - RNA, 16 nt, Human
ucccugggcugugcua

SEQ ID NO: 2572160 - RNA, 15 nt, Human
ucccugggcugugcu

SEQ ID NO: 2572161 - RNA, 14 nt, Human
ucccuucccaccuc

SEQ ID NO: 2572162 - RNA, 18 nt, Human
ucccugggcauugcuuuc

SEQ ID NO: 2572163 - RNA, 23 nt, Human
uccgaaaaauccucuuccucuga

SEQ ID NO: 2572164 - RNA, 22 nt, Human
uccgaaaaauccucuuccucug

SEQ ID NO: 2572165 - RNA, 18 nt, Human
uccgaaaccaaagaagaa

SEQ ID NO: 2572166 - RNA, 19 nt, Human
uccgaaaccaaagaagaaa

SEQ ID NO: 2572167 - RNA, 13 nt, Human
ucccuugagaccu

SEQ ID NO: 2572168 - RNA, 16 nt, Human
ucccuugagaccucag

SEQ ID NO: 2572169 - RNA, 17 nt, Human
ucccuugagaccucagc

SEQ ID NO: 2572170 - RNA, 21 nt, Human
uccgaaagggacuuggaagcu

SEQ ID NO: 2572171 - RNA, 21 nt, Human
ucccuugaccaggccugggcc

SEQ ID NO: 2572172 - RNA, 17 nt, Human
ucccuugaccaggccug

SEQ ID NO: 2572173 - RNA, 17 nt, Human
ucccuugaaauuuuaaa

SEQ ID NO: 2572174 - RNA, 17 nt, Human
ucccuucuuuuucuucu

SEQ ID NO: 2572175 - RNA, 17 nt, Human
ucccuucugucccucac

SEQ ID NO: 2572176 - RNA, 22 nt, Human
ucccuucugucccucacagcac

SEQ ID NO: 2572177 - RNA, 13 nt, Human
ucccuucuugguu

SEQ ID NO: 2572178 - RNA, 20 nt, Human
ucccuucugcuacuggcaaa

SEQ ID NO: 2572179 - RNA, 22 nt, Human
uccgacuugaauuuucccacug

SEQ ID NO: 2572180 - RNA, 21 nt, Human
uccgacuugaauuuucccacu

SEQ ID NO: 2572181 - RNA, 15 nt, Human
uccgacugcuuugga

SEQ ID NO: 2572182 - RNA, 12 nt, Human
uccgacugcuuu

SEQ ID NO: 2572183 - RNA, 15 nt, Human
uccgaaccuccucug

SEQ ID NO: 2572184 - RNA, 17 nt, Human
uccgacucuucugagca

SEQ ID NO: 2572185 - RNA, 16 nt, Human
uccgaaccuccucugu

SEQ ID NO: 2572186 - RNA, 17 nt, Human
uccgaaccuccucugug

SEQ ID NO: 2572187 - RNA, 19 nt, Human
uccgaacacccucgaagcg

SEQ ID NO: 2572188 - RNA, 22 nt, Human
uccgaaagggacuuggaagcuc

SEQ ID NO: 2572189 - RNA, 21 nt, Human
uccgcccacaggaagccugca

SEQ ID NO: 2572190 - RNA, 18 nt, Human
uccgccagggcccacacc

SEQ ID NO: 2572191 - RNA, 13 nt, Human
uccgccagggccc

SEQ ID NO: 2572192 - RNA, 19 nt, Human
uccgccagggcccacaccc

SEQ ID NO: 2572193 - RNA, 19 nt, Human
uccgagccggggaguuucu

SEQ ID NO: 2572194 - RNA, 15 nt, Human
uccgagagggagaga

SEQ ID NO: 2572195 - RNA, 16 nt, Human
uccgagaggugggcca

SEQ ID NO: 2572196 - RNA, 14 nt, Human
uccgagagggagag

SEQ ID NO: 2572197 - RNA, 13 nt, Human
uccgagagggaga

SEQ ID NO: 2572198 - RNA, 17 nt, Human
uccgagagagcaccccu

SEQ ID NO: 2572199 - RNA, 24 nt, Human
uccgagccggggaguuucuuuccu

SEQ ID NO: 2572200 - RNA, 21 nt, Human
uccgagccggggaguuucuuu

SEQ ID NO: 2572201 - RNA, 12 nt, Human
uccgaggcaggg

SEQ ID NO: 2572202 - RNA, 13 nt, Human
uccgaggcagggu

SEQ ID NO: 2572203 - RNA, 14 nt, Human
uccgaggcaggguc

SEQ ID NO: 2572204 - RNA, 13 nt, Human
uccgcccugccac

SEQ ID NO: 2572205 - RNA, 15 nt, Human
uccgcccugccacuc

SEQ ID NO: 2572206 - RNA, 14 nt, Human
uccgcccugccacu

SEQ ID NO: 2572207 - RNA, 16 nt, Human
uccgcccugccacuca

SEQ ID NO: 2572208 - RNA, 12 nt, Human
uccgcccugcuc

SEQ ID NO: 2572209 - RNA, 22 nt, Human
uccgcccucaaaaugacagcca

SEQ ID NO: 2572210 - RNA, 21 nt, Human
uccgcuuucuacccagcgagc

SEQ ID NO: 2572211 - RNA, 19 nt, Human
uccgcccugcuccucccug

SEQ ID NO: 2572212 - RNA, 15 nt, Human
uccgcccugcuccuc

SEQ ID NO: 2572213 - RNA, 14 nt, Human
uccgcccugcuccu

SEQ ID NO: 2572214 - RNA, 17 nt, Human
uccgcccugcuccuccc

SEQ ID NO: 2572215 - RNA, 15 nt, Human
uccggaauccugucc

SEQ ID NO: 2572216 - RNA, 14 nt, Human
uccuccugggcccu

SEQ ID NO: 2572217 - RNA, 15 nt, Human
uccuccugggcccuc

SEQ ID NO: 2572218 - RNA, 16 nt, Human
uccuccugggcccucu

SEQ ID NO: 2572219 - RNA, 21 nt, Human
uccuccuuuucacaguucucu

SEQ ID NO: 2572220 - RNA, 13 nt, Human
uccuccuggacuc

SEQ ID NO: 2572221 - RNA, 13 nt, Human
uccuccuggcaga

SEQ ID NO: 2572222 - RNA, 17 nt, Human
uccuccugcccaccugu

SEQ ID NO: 2572223 - RNA, 11 nt, Human
uccuccuggaa

SEQ ID NO: 2572224 - RNA, 12 nt, Human
uccuccugcuca

SEQ ID NO: 2572225 - RNA, 12 nt, Human
uccuccugccca

SEQ ID NO: 2572226 - RNA, 16 nt, Human
uccuccugcccaccug

SEQ ID NO: 2572227 - RNA, 21 nt, Human
uccucuaggaggucucuaaga

SEQ ID NO: 2572228 - RNA, 23 nt, Human
uccucgcagagaggccaggugca

SEQ ID NO: 2572229 - RNA, 17 nt, Human
uccucuaggaggucucu

SEQ ID NO: 2572230 - RNA, 17 nt, Human
uccucgagggcagggac

SEQ ID NO: 2572231 - RNA, 13 nt, Human
uccucgcaagcug

SEQ ID NO: 2572232 - RNA, 14 nt, Human
uccucgcaagcugg

SEQ ID NO: 2572233 - RNA, 15 nt, Human
uccucgcaagcuggg

SEQ ID NO: 2572234 - RNA, 17 nt, Human
uccucgcagagaggcca

SEQ ID NO: 2572235 - RNA, 16 nt, Human
uccucgcagagaggcc

SEQ ID NO: 2572236 - RNA, 14 nt, Human
uccucgcagagagg

SEQ ID NO: 2572237 - RNA, 16 nt, Human
uccucgcaagcugggu

SEQ ID NO: 2572238 - RNA, 18 nt, Human
uccucucacuaaacuuua

SEQ ID NO: 2572239 - RNA, 17 nt, Human
uccucugcugcuggcug

SEQ ID NO: 2572240 - RNA, 20 nt, Human
uccucucaaccaccuuucag

SEQ ID NO: 2572241 - RNA, 21 nt, Human
uccucucaaccaccuuucaga

SEQ ID NO: 2572242 - RNA, 18 nt, Human
uccucucaaccaccuuuc

SEQ ID NO: 2572243 - RNA, 19 nt, Human
uccucuauugauguacagu

SEQ ID NO: 2572244 - RNA, 15 nt, Human
uccucuggccugugu

SEQ ID NO: 2572245 - RNA, 17 nt, Human
uccucuggauggcacca

SEQ ID NO: 2572246 - RNA, 14 nt, Human
uccucucagccccu

SEQ ID NO: 2572247 - RNA, 13 nt, Human
uccucuguacaga

SEQ ID NO: 2572248 - RNA, 23 nt, Human
uccucuggcuggcuaacuggaag

SEQ ID NO: 2572249 - RNA, 19 nt, Human
uccucuggauggcaccaga

SEQ ID NO: 2572250 - RNA, 9 nt, Human
uccucuggc

SEQ ID NO: 2572251 - RNA, 19 nt, Human
uccugaggcugggcucccu

SEQ ID NO: 2572252 - RNA, 17 nt, Human
uccugaggcugggcucc

SEQ ID NO: 2572253 - RNA, 16 nt, Human
uccugaggcugggcuc

SEQ ID NO: 2572254 - RNA, 15 nt, Human
uccugaggcugggcu

SEQ ID NO: 2572255 - RNA, 16 nt, Human
uccugaggcuccacuu

SEQ ID NO: 2572256 - RNA, 17 nt, Human
uccugaggcuccacuug

SEQ ID NO: 2572257 - RNA, 12 nt, Human
uccugaggcugg

SEQ ID NO: 2572258 - RNA, 13 nt, Human
uccucuguccagg

SEQ ID NO: 2572259 - RNA, 21 nt, Human
uccugaggcuccacuuggucu

SEQ ID NO: 2572260 - RNA, 17 nt, Human
uccugagccagauuuca

SEQ ID NO: 2572261 - RNA, 21 nt, Human
uccucugucagucacagccac

SEQ ID NO: 2572262 - RNA, 22 nt, Human
uccucugucagucacagccacc

SEQ ID NO: 2572263 - RNA, 17 nt, Human
uccucuguccaggcacu

SEQ ID NO: 2572264 - RNA, 23 nt, Human
uccucuguacagagcccacgccc

SEQ ID NO: 2572265 - RNA, 19 nt, Human
uccucuguacagagcccac

SEQ ID NO: 2572266 - RNA, 19 nt, Human
uccucugucagucacagcc

SEQ ID NO: 2572267 - RNA, 20 nt, Human
uccucugggcaggaccucag

SEQ ID NO: 2572268 - RNA, 19 nt, Human
uccugagccagauuucacu

SEQ ID NO: 2572269 - RNA, 18 nt, Human
uccugagccagauuucac

SEQ ID NO: 2572270 - RNA, 15 nt, Human
uccugaggcuccacu

SEQ ID NO: 2572271 - RNA, 17 nt, Human
uccuaguuccaccauca

SEQ ID NO: 2572272 - RNA, 14 nt, Human
uccuaguuccacca

SEQ ID NO: 2572273 - RNA, 14 nt, Human
uccuaagccuaaaa

SEQ ID NO: 2572274 - RNA, 18 nt, Human
uccuaagcuauucaguaa

SEQ ID NO: 2572275 - RNA, 19 nt, Human
uccuaagagugcugggcau

SEQ ID NO: 2572276 - RNA, 17 nt, Human
uccuaagagugcugggc

SEQ ID NO: 2572277 - RNA, 16 nt, Human
uccuaagcuauucagu

SEQ ID NO: 2572278 - RNA, 18 nt, Human
uccggacacuccuagaga

SEQ ID NO: 2572279 - RNA, 15 nt, Human
uccggacacuccuag

SEQ ID NO: 2572280 - RNA, 15 nt, Human
uccggagauguagca

SEQ ID NO: 2572281 - RNA, 21 nt, Human
uccggagugagaagcuuugcc

SEQ ID NO: 2572282 - RNA, 15 nt, Human
uccggaguagcuggg

SEQ ID NO: 2572283 - RNA, 22 nt, Human
uccggaauccuguccucagcuu

SEQ ID NO: 2572284 - RNA, 18 nt, Human
uccggaauccuguccuca

SEQ ID NO: 2572285 - RNA, 22 nt, Human
uccuaucagccugucucuucca

SEQ ID NO: 2572286 - RNA, 21 nt, Human
uccuaguuccaccaucaagcc

SEQ ID NO: 2572287 - RNA, 17 nt, Human
uccuaucuguguuuuga

SEQ ID NO: 2572288 - RNA, 14 nt, Human
uccuaucuguguuu

SEQ ID NO: 2572289 - RNA, 13 nt, Human
uccuaucuguguu

SEQ ID NO: 2572290 - RNA, 22 nt, Human
uccuauugugauuugacuguuu

SEQ ID NO: 2572291 - RNA, 20 nt, Human
uccuauugugauuugacugu

SEQ ID NO: 2572292 - RNA, 19 nt, Human
uccuauugugauuugacug

SEQ ID NO: 2572293 - RNA, 18 nt, Human
uccuauugugauuugacu

SEQ ID NO: 2572294 - RNA, 22 nt, Human
uccuauggcuggccacugcaca

SEQ ID NO: 2572295 - RNA, 20 nt, Human
uccuauggcuggccacugca

SEQ ID NO: 2572296 - RNA, 15 nt, Human
uccuauugugauuug

SEQ ID NO: 2572297 - RNA, 17 nt, Human
uccuauugucauuaaag

SEQ ID NO: 2572298 - RNA, 22 nt, Human
uccuccaggugcacaagcucca

SEQ ID NO: 2572299 - RNA, 20 nt, Human
uccuccaggugcacaagcuc

SEQ ID NO: 2572300 - RNA, 18 nt, Human
uccuccaggugcacaagc

SEQ ID NO: 2572301 - RNA, 14 nt, Human
uccuccaggugcac

SEQ ID NO: 2572302 - RNA, 13 nt, Human
uccuccaggugca

SEQ ID NO: 2572303 - RNA, 12 nt, Human
uccuccaggugc

SEQ ID NO: 2572304 - RNA, 20 nt, Human
uccucaaaacuucagacaua

SEQ ID NO: 2572305 - RNA, 15 nt, Human
uccuauuucuuauag

SEQ ID NO: 2572306 - RNA, 18 nt, Human
uccuauuuggggcuugca

SEQ ID NO: 2572307 - RNA, 18 nt, Human
uccuauuugccaugggcu

SEQ ID NO: 2572308 - RNA, 16 nt, Human
uccuauuugcacugua

SEQ ID NO: 2572309 - RNA, 16 nt, Human
uccuccucaccucaug

SEQ ID NO: 2572310 - RNA, 12 nt, Human
uccuccucaccu

SEQ ID NO: 2572311 - RNA, 22 nt, Human
uccuccuaccgaaaccuugccu

SEQ ID NO: 2572312 - RNA, 19 nt, Human
uccuccgugcuuccucagu

SEQ ID NO: 2572313 - RNA, 18 nt, Human
uccuccucaccucaugcc

SEQ ID NO: 2572314 - RNA, 20 nt, Human
uccuccugcagaccacgccc

SEQ ID NO: 2572315 - RNA, 15 nt, Human
uccuccugcagacca

SEQ ID NO: 2572316 - RNA, 12 nt, Human
uccuccugcaga

SEQ ID NO: 2572317 - RNA, 12 nt, Human
uccuccucagau

SEQ ID NO: 2572318 - RNA, 15 nt, Human
uccuccgaggccagu

SEQ ID NO: 2572319 - RNA, 18 nt, Human
uccuccgugcuuccucag

SEQ ID NO: 2572320 - RNA, 18 nt, Human
uccuccguccagccgcca

SEQ ID NO: 2572321 - RNA, 14 nt, Human
uccuccguccagcc

SEQ ID NO: 2572322 - RNA, 16 nt, Human
uccuccguccagccgc

SEQ ID NO: 2572323 - RNA, 19 nt, Human
uccucccuuuuuccuuguc

SEQ ID NO: 2572324 - RNA, 17 nt, Human
uccucccuuuuuccuug

SEQ ID NO: 2572325 - RNA, 22 nt, Human
uccuccagguuuuucaauuaaa

SEQ ID NO: 2572326 - RNA, 16 nt, Human
uccucccuuguucucu

SEQ ID NO: 2572327 - RNA, 23 nt, Human
uccuccagguuuuucaauuaaac

SEQ ID NO: 2572328 - RNA, 21 nt, Human
uccuccagguuuuucaauuaa

SEQ ID NO: 2572329 - RNA, 20 nt, Human
uccuccagguuuuucaauua

SEQ ID NO: 2572330 - RNA, 14 nt, Human
uccuccgaggccag

SEQ ID NO: 2572331 - RNA, 23 nt, Human
uccuccgagccggggaguuucuu

SEQ ID NO: 2572332 - RNA, 17 nt, Human
uccuccgucaccucaga

SEQ ID NO: 2572333 - RNA, 19 nt, Human
uccuccagguuuuucaauu

SEQ ID NO: 2572334 - RNA, 18 nt, Human
uccuccagguuuuucaau

SEQ ID NO: 2572335 - RNA, 17 nt, Human
uccuccagguuuuucaa

SEQ ID NO: 2572336 - RNA, 16 nt, Human
uccuccagguuuuuca

SEQ ID NO: 2572337 - RNA, 15 nt, Human
uccuccagguuuuuc

SEQ ID NO: 2572338 - RNA, 14 nt, Human
uccuccagguuuuu

SEQ ID NO: 2572339 - RNA, 13 nt, Human
uccuccagguuuu

SEQ ID NO: 2572340 - RNA, 12 nt, Human
uccuccagguuu

SEQ ID NO: 2572341 - RNA, 11 nt, Human
uccuccagguu

SEQ ID NO: 2572342 - RNA, 17 nt, Human
uccuauuuguuuucaug

SEQ ID NO: 2572343 - RNA, 16 nt, Human
uccuauuuguuuucau

SEQ ID NO: 2572344 - RNA, 14 nt, Human
uccuauuuguuuuc

SEQ ID NO: 2572345 - RNA, 15 nt, Human
ucggccuccauccug

SEQ ID NO: 2572346 - RNA, 16 nt, Human
ucggccuccauccuga

SEQ ID NO: 2572347 - RNA, 21 nt, Human
ucgucauguuggccaggcugg

SEQ ID NO: 2572348 - RNA, 22 nt, Human
ucggaggcuugucagagcuggg

SEQ ID NO: 2572349 - RNA, 14 nt, Human
ucggaggcuuggga

SEQ ID NO: 2572350 - RNA, 23 nt, Human
ucggaggcugcccccggcccccu

SEQ ID NO: 2572351 - RNA, 14 nt, Human
ucggaggcugcccc

SEQ ID NO: 2572352 - RNA, 12 nt, Human
ucggaggcccca

SEQ ID NO: 2572353 - RNA, 20 nt, Human
ucggaggccccaaaggaaaa

SEQ ID NO: 2572354 - RNA, 13 nt, Human
ucggaggaagccc

SEQ ID NO: 2572355 - RNA, 12 nt, Human
ucggaggaagcc

SEQ ID NO: 2572356 - RNA, 23 nt, Human
ucggagccucauccgaggcaggg

SEQ ID NO: 2572357 - RNA, 23 nt, Human
ucggagacagugaucuccauaug

SEQ ID NO: 2572358 - RNA, 22 nt, Human
ucggagccucauccgaggcagg

SEQ ID NO: 2572359 - RNA, 21 nt, Human
ucggaaaccuugguguaguug

SEQ ID NO: 2572360 - RNA, 21 nt, Human
ucggagacagugaucuccaua

SEQ ID NO: 2572361 - RNA, 23 nt, Human
ucgcuugugcagaaaacauuguu

SEQ ID NO: 2572362 - RNA, 19 nt, Human
ucgcuuuauuggcugagau

SEQ ID NO: 2572363 - RNA, 15 nt, Human
ucgcuuuugauaauc

SEQ ID NO: 2572364 - RNA, 23 nt, Human
ucgcccagucuggaaugcagugg

SEQ ID NO: 2572365 - RNA, 19 nt, Human
ucgcccagucuggaaugca

SEQ ID NO: 2572366 - RNA, 14 nt, Human
ucgcccagucugga

SEQ ID NO: 2572367 - RNA, 21 nt, Human
ucgccaccuggcauuccuucu

SEQ ID NO: 2572368 - RNA, 18 nt, Human
ucgccaccuggcauuccu

SEQ ID NO: 2572369 - RNA, 18 nt, Human
ucgccaccccuccuuccu

SEQ ID NO: 2572370 - RNA, 13 nt, Human
ucgcauuugucaa

SEQ ID NO: 2572371 - RNA, 15 nt, Human
ucgcauuugucaaug

SEQ ID NO: 2572372 - RNA, 15 nt, Human
ucggaaaacaugcua

SEQ ID NO: 2572373 - RNA, 18 nt, Human
ucggaaaacaugcuacac

SEQ ID NO: 2572374 - RNA, 21 nt, Human
ucgcuucuugccucugugcug

SEQ ID NO: 2572375 - RNA, 21 nt, Human
ucgcuugugcagaaaacauug

SEQ ID NO: 2572376 - RNA, 20 nt, Human
ucgcuugugcagaaaacauu

SEQ ID NO: 2572377 - RNA, 19 nt, Human
ucgcuucuugccucugugc

SEQ ID NO: 2572378 - RNA, 20 nt, Human
ucgauacugcgacuuucugc

SEQ ID NO: 2572379 - RNA, 19 nt, Human
ucgauacugcgacuuucug

SEQ ID NO: 2572380 - RNA, 23 nt, Human
ucgaugggggagucugaagcaga

SEQ ID NO: 2572381 - RNA, 14 nt, Human
ucgaugcaaugaac

SEQ ID NO: 2572382 - RNA, 23 nt, Human
ucgaugaagcccaauaaaccucu

SEQ ID NO: 2572383 - RNA, 23 nt, Human
ucgauacugcgacuuucugccug

SEQ ID NO: 2572384 - RNA, 22 nt, Human
ucgauacugcgacuuucugccu

SEQ ID NO: 2572385 - RNA, 19 nt, Human
ucgaugaagcccaauaaac

SEQ ID NO: 2572386 - RNA, 18 nt, Human
uccuuuucgcaggauucu

SEQ ID NO: 2572387 - RNA, 20 nt, Human
uccuuuguguuucuauugac

SEQ ID NO: 2572388 - RNA, 15 nt, Human
uccuuuguguuucua

SEQ ID NO: 2572389 - RNA, 23 nt, Human
uccuuuguauauuauuucuagga

SEQ ID NO: 2572390 - RNA, 22 nt, Human
uccuuuucgcaggauucuuccu

SEQ ID NO: 2572391 - RNA, 23 nt, Human
ucgcaucaaaagacaauucuuua

SEQ ID NO: 2572392 - RNA, 22 nt, Human
ucgcaucaaaagacaauucuuu

SEQ ID NO: 2572393 - RNA, 21 nt, Human
ucgcaucaaaagacaauucuu

SEQ ID NO: 2572394 - RNA, 19 nt, Human
ucgcauggucacacacuga

SEQ ID NO: 2572395 - RNA, 20 nt, Human
ucgcauggucacacacugau

SEQ ID NO: 2572396 - RNA, 20 nt, Human
ucgcaucaaaagacaauucu

SEQ ID NO: 2572397 - RNA, 17 nt, Human
ucgcaucaaaagacaau

SEQ ID NO: 2572398 - RNA, 15 nt, Human
ucgcaucaaaagaca

SEQ ID NO: 2572399 - RNA, 14 nt, Human
ucgcaucaaaagac

SEQ ID NO: 2572400 - RNA, 21 nt, Human
ucgcaggauucuuccucccuc

SEQ ID NO: 2572401 - RNA, 23 nt, Human
ucgcaggauucuuccucccuccc

SEQ ID NO: 2572402 - RNA, 16 nt, Human
ucgauguuauguaaaa

SEQ ID NO: 2572403 - RNA, 20 nt, Human
ucgauuauucccuguacaau

SEQ ID NO: 2572404 - RNA, 15 nt, Human
ucgauucauauugaa

SEQ ID NO: 2572405 - RNA, 20 nt, Human
uccuuucuuuuucuucuucc

SEQ ID NO: 2572406 - RNA, 17 nt, Human
ucgcaggauucuuccuc

SEQ ID NO: 2572407 - RNA, 21 nt, Human
uccuuaccagcagagcaccuu

SEQ ID NO: 2572408 - RNA, 20 nt, Human
uccuuaccagcagagcaccu

SEQ ID NO: 2572409 - RNA, 14 nt, Human
uccuuacccaucug

SEQ ID NO: 2572410 - RNA, 18 nt, Human
uccuuacccaucugcacc

SEQ ID NO: 2572411 - RNA, 14 nt, Human
uccuuaccucuucc

SEQ ID NO: 2572412 - RNA, 16 nt, Human
uccugucccaccaugc

SEQ ID NO: 2572413 - RNA, 17 nt, Human
uccuguccagcuccaac

SEQ ID NO: 2572414 - RNA, 19 nt, Human
uccugucccucauccauag

SEQ ID NO: 2572415 - RNA, 21 nt, Human
uccugucccuucucuuaauuu

SEQ ID NO: 2572416 - RNA, 18 nt, Human
uccugucccuucucuuaa

SEQ ID NO: 2572417 - RNA, 14 nt, Human
uccuguccagagag

SEQ ID NO: 2572418 - RNA, 16 nt, Human
uccugaggcuuuggau

SEQ ID NO: 2572419 - RNA, 17 nt, Human
uccugaggcuuuggauu

SEQ ID NO: 2572420 - RNA, 18 nt, Human
uccugaggcuuuggauuu

SEQ ID NO: 2572421 - RNA, 13 nt, Human
uccugaggcugag

SEQ ID NO: 2572422 - RNA, 15 nt, Human
uccugaggggcaucu

SEQ ID NO: 2572423 - RNA, 16 nt, Human
uccugaggggcaucug

SEQ ID NO: 2572424 - RNA, 19 nt, Human
uccugaggggcaucugccc

SEQ ID NO: 2572425 - RNA, 13 nt, Human
uccuguccagcuc

SEQ ID NO: 2572426 - RNA, 14 nt, Human
uccuguccagcucc

SEQ ID NO: 2572427 - RNA, 15 nt, Human
uccuguccagcucca

SEQ ID NO: 2572428 - RNA, 16 nt, Human
uccuguccagcuccaa

SEQ ID NO: 2572429 - RNA, 18 nt, Human
uccuguccaaccuaaccc

SEQ ID NO: 2572430 - RNA, 22 nt, Human
uccuguccacacccagcucagc

SEQ ID NO: 2572431 - RNA, 19 nt, Human
uccuguccacacccagcuc

SEQ ID NO: 2572432 - RNA, 17 nt, Human
uccuguccacacccagc

SEQ ID NO: 2572433 - RNA, 20 nt, Human
uccuguccaaccuaaccccu

SEQ ID NO: 2572434 - RNA, 14 nt, Human
uccuuaucaaagga

SEQ ID NO: 2572435 - RNA, 15 nt, Human
uccuuaucaaaggac

SEQ ID NO: 2572436 - RNA, 23 nt, Human
uccuuagcuuagaccucagccug

SEQ ID NO: 2572437 - RNA, 22 nt, Human
uccuuagguuuuuuuccuucug

SEQ ID NO: 2572438 - RNA, 15 nt, Human
uccuuagucuucuca

SEQ ID NO: 2572439 - RNA, 16 nt, Human
uccuuagucuucucau

SEQ ID NO: 2572440 - RNA, 17 nt, Human
uccuuagucuucucaua

SEQ ID NO: 2572441 - RNA, 20 nt, Human
uccuuaccuuuuuauuugca

SEQ ID NO: 2572442 - RNA, 15 nt, Human
uccuuaccuuuuuau

SEQ ID NO: 2572443 - RNA, 17 nt, Human
uccuuaccucuuccgga

SEQ ID NO: 2572444 - RNA, 23 nt, Human
uccuugaaaacacuguucucugc

SEQ ID NO: 2572445 - RNA, 22 nt, Human
uccuugaaaacacuguucucug

SEQ ID NO: 2572446 - RNA, 16 nt, Human
uccuucuuugauaaug

SEQ ID NO: 2572447 - RNA, 13 nt, Human
uccuucuuugaua

SEQ ID NO: 2572448 - RNA, 22 nt, Human
uccuucuuucuaguucagcugc

SEQ ID NO: 2572449 - RNA, 17 nt, Human
uccuuaucaaaggacac

SEQ ID NO: 2572450 - RNA, 18 nt, Human
uccuuagucuucucauag

SEQ ID NO: 2572451 - RNA, 22 nt, Human
uccuuagucuucucauagcauu

SEQ ID NO: 2572452 - RNA, 21 nt, Human
uccuuaucacugacacaaaaa

SEQ ID NO: 2572453 - RNA, 17 nt, Human
uccuugcaucaauuuuu

SEQ ID NO: 2572454 - RNA, 18 nt, Human
uccuugaagaacugcagg

SEQ ID NO: 2572455 - RNA, 20 nt, Human
uccuucuuugauaauguuaa

SEQ ID NO: 2572456 - RNA, 19 nt, Human
uccuucuuugauaauguua

SEQ ID NO: 2572457 - RNA, 22 nt, Human
uccuucuuugauaauguuaaau

SEQ ID NO: 2572458 - RNA, 14 nt, Human
uccuugcucugcac

SEQ ID NO: 2572459 - RNA, 21 nt, Human
uccuugcucucccucuucuca

SEQ ID NO: 2572460 - RNA, 20 nt, Human
uccuugcucucccucuucuc

SEQ ID NO: 2572461 - RNA, 19 nt, Human
uccuugcucucccucuucu

SEQ ID NO: 2572462 - RNA, 14 nt, Human
uccuugcucucccu

SEQ ID NO: 2572463 - RNA, 13 nt, Human
uccuugcucuccc

SEQ ID NO: 2572464 - RNA, 15 nt, Human
uccuugcuaugauga

SEQ ID NO: 2572465 - RNA, 19 nt, Human
uccuugaagaacugcaggc

SEQ ID NO: 2572466 - RNA, 16 nt, Human
uccuugccuccugugu

SEQ ID NO: 2572467 - RNA, 17 nt, Human
uccuugccuccugugua

SEQ ID NO: 2572468 - RNA, 14 nt, Human
uccuugcuacccag

SEQ ID NO: 2572469 - RNA, 18 nt, Human
uccuugccuccuguguaa

SEQ ID NO: 2572470 - RNA, 21 nt, Human
uccuuggugucgggcaugaca

SEQ ID NO: 2572471 - RNA, 18 nt, Human
uccuuggugucgggcaug

SEQ ID NO: 2572472 - RNA, 14 nt, Human
uccuugcucugcag

SEQ ID NO: 2572473 - RNA, 15 nt, Human
uccuugcucugcacc

SEQ ID NO: 2572474 - RNA, 17 nt, Human
uccuugcuguccuaggc

SEQ ID NO: 2572475 - RNA, 19 nt, Human
uccuugcuguccuaggcca

SEQ ID NO: 2572476 - RNA, 14 nt, Human
uccuuggugccugg

SEQ ID NO: 2572477 - RNA, 16 nt, Human
uccuugcucugcaggc

SEQ ID NO: 2572478 - RNA, 16 nt, Human
uccuuggggcaggcag

SEQ ID NO: 2572479 - RNA, 21 nt, Human
uccuugcuguccuaggccaca

SEQ ID NO: 2572480 - RNA, 22 nt, Human
uccuuggugucgggcaugacac

SEQ ID NO: 2572481 - RNA, 20 nt, Human
uccuuugaagaggaaaauga

SEQ ID NO: 2572482 - RNA, 20 nt, Human
uccuuugaauccucucucug

SEQ ID NO: 2572483 - RNA, 18 nt, Human
uccuuggugccuggccug

SEQ ID NO: 2572484 - RNA, 14 nt, Human
uccuuugaagagga

SEQ ID NO: 2572485 - RNA, 17 nt, Human
uccuuggggcaggcagu

SEQ ID NO: 2572486 - RNA, 20 nt, Human
uccuuugauaaaauaaauga

SEQ ID NO: 2572487 - RNA, 15 nt, Human
uccuuugaagaggaa

SEQ ID NO: 2572488 - RNA, 21 nt, Human
uccuuugaauccucucucugu

SEQ ID NO: 2572489 - RNA, 17 nt, Human
uccuuugcacugagggc

SEQ ID NO: 2572490 - RNA, 15 nt, Human
uccuuugcacugagg

SEQ ID NO: 2572491 - RNA, 14 nt, Human
uccuuugcacugag

SEQ ID NO: 2572492 - RNA, 22 nt, Human
uccuuugaucaguauaauuuuu

SEQ ID NO: 2572493 - RNA, 15 nt, Human
uccuuugcaggcuca

SEQ ID NO: 2572494 - RNA, 22 nt, Human
uccuuuggagcuuuuuucuuua

SEQ ID NO: 2572495 - RNA, 20 nt, Human
uccuuugcacugagggccac

SEQ ID NO: 2572496 - RNA, 13 nt, Human
uccuuugggaaag

SEQ ID NO: 2572497 - RNA, 22 nt, Human
uccuuugugaggaagccgcugg

SEQ ID NO: 2572498 - RNA, 18 nt, Human
uccuuugugaggaagccg

SEQ ID NO: 2572499 - RNA, 17 nt, Human
uccuuugugaggaagcc

SEQ ID NO: 2572500 - RNA, 19 nt, Human
uccuuuguauauuauuucu

SEQ ID NO: 2572501 - RNA, 11 nt, Human
uccuuuguaua

SEQ ID NO: 2572502 - RNA, 18 nt, Human
uccuuuguacuuugugcu

SEQ ID NO: 2572503 - RNA, 13 nt, Human
uccuuuguacuuu

SEQ ID NO: 2572504 - RNA, 20 nt, Human
ucucagauccuuguuucaaa

SEQ ID NO: 2572505 - RNA, 19 nt, Human
ucucaguuugugugucuua

SEQ ID NO: 2572506 - RNA, 18 nt, Human
ucucaguuugugugucuu

SEQ ID NO: 2572507 - RNA, 15 nt, Human
ucucaguuuucauaa

SEQ ID NO: 2572508 - RNA, 16 nt, Human
ucucaguuuucauaag

SEQ ID NO: 2572509 - RNA, 17 nt, Human
ucucaguuugugugucu

SEQ ID NO: 2572510 - RNA, 16 nt, Human
ucucaguuuguguguc

SEQ ID NO: 2572511 - RNA, 13 nt, Human
ucucaguuucacu

SEQ ID NO: 2572512 - RNA, 15 nt, Human
ucucacuguugccca

SEQ ID NO: 2572513 - RNA, 14 nt, Human
ucucacuguugccc

SEQ ID NO: 2572514 - RNA, 20 nt, Human
ucucacugugggaaggccag

SEQ ID NO: 2572515 - RNA, 17 nt, Human
ucucacuggaugcaaag

SEQ ID NO: 2572516 - RNA, 22 nt, Human
ucucacuguucccucugcuccu

SEQ ID NO: 2572517 - RNA, 21 nt, Human
ucucacuguucccucugcucc

SEQ ID NO: 2572518 - RNA, 18 nt, Human
ucucacuguucccucugc

SEQ ID NO: 2572519 - RNA, 17 nt, Human
ucucacuguucccucug

SEQ ID NO: 2572520 - RNA, 16 nt, Human
ucucacuguucccucu

SEQ ID NO: 2572521 - RNA, 21 nt, Human
ucucacugugggaaggccagc

SEQ ID NO: 2572522 - RNA, 14 nt, Human
ucucacuguucccu

SEQ ID NO: 2572523 - RNA, 22 nt, Human
ucucagauccuuguuucaaaca

SEQ ID NO: 2572524 - RNA, 19 nt, Human
ucucagauccuuguuucaa

SEQ ID NO: 2572525 - RNA, 18 nt, Human
ucucagauccuuguuuca

SEQ ID NO: 2572526 - RNA, 17 nt, Human
ucucagauccuuguuuc

SEQ ID NO: 2572527 - RNA, 16 nt, Human
ucucagauccuuguuu

SEQ ID NO: 2572528 - RNA, 14 nt, Human
ucucagauccuugu

SEQ ID NO: 2572529 - RNA, 20 nt, Human
ucucagauauuuauauuuuu

SEQ ID NO: 2572530 - RNA, 23 nt, Human
ucucagauauuuauauuuuuauu

SEQ ID NO: 2572531 - RNA, 17 nt, Human
ucucagacccuuuagcc

SEQ ID NO: 2572532 - RNA, 16 nt, Human
ucucagacugcaugua

SEQ ID NO: 2572533 - RNA, 21 nt, Human
ucucagacuuuggaaaaugca

SEQ ID NO: 2572534 - RNA, 20 nt, Human
ucucagagcuacuugggcca

SEQ ID NO: 2572535 - RNA, 19 nt, Human
ucucagagcuacuugggcc

SEQ ID NO: 2572536 - RNA, 22 nt, Human
ucucagacuuuggaaaaugcau

SEQ ID NO: 2572537 - RNA, 21 nt, Human
ucucagagcuacuugggccau

SEQ ID NO: 2572538 - RNA, 14 nt, Human
ucucagauauuuau

SEQ ID NO: 2572539 - RNA, 16 nt, Human
ucucagauauuuauau

SEQ ID NO: 2572540 - RNA, 13 nt, Human
ucucaaauuucua

SEQ ID NO: 2572541 - RNA, 20 nt, Human
ucuaucuugcucuguaaucu

SEQ ID NO: 2572542 - RNA, 19 nt, Human
ucuaucuugcucuguaauc

SEQ ID NO: 2572543 - RNA, 17 nt, Human
ucuaucuugcucuguaa

SEQ ID NO: 2572544 - RNA, 22 nt, Human
ucuaucuuugagcgcccacuag

SEQ ID NO: 2572545 - RNA, 14 nt, Human
ucucaaauuucuaa

SEQ ID NO: 2572546 - RNA, 16 nt, Human
ucucaaauuucuaaau

SEQ ID NO: 2572547 - RNA, 23 nt, Human
ucuaucauuuuuguacaguuugc

SEQ ID NO: 2572548 - RNA, 17 nt, Human
ucuauccacagagaguc

SEQ ID NO: 2572549 - RNA, 15 nt, Human
ucuauccacagagag

SEQ ID NO: 2572550 - RNA, 14 nt, Human
ucuauccacagaga

SEQ ID NO: 2572551 - RNA, 19 nt, Human
ucuaucauuuuuguacagu

SEQ ID NO: 2572552 - RNA, 14 nt, Human
ucuauccucuguaa

SEQ ID NO: 2572553 - RNA, 12 nt, Human
ucuaucucaucu

SEQ ID NO: 2572554 - RNA, 16 nt, Human
ucuauccuacaacaag

SEQ ID NO: 2572555 - RNA, 16 nt, Human
ucuaucuuauauaguu

SEQ ID NO: 2572556 - RNA, 21 nt, Human
ucucacacaugagcaucaggc

SEQ ID NO: 2572557 - RNA, 23 nt, Human
ucucacucugucgcccagucugg

SEQ ID NO: 2572558 - RNA, 22 nt, Human
ucucacugagaagauugugaau

SEQ ID NO: 2572559 - RNA, 21 nt, Human
ucucacugagaagauugugaa

SEQ ID NO: 2572560 - RNA, 20 nt, Human
ucucacugccaugccagcuu

SEQ ID NO: 2572561 - RNA, 12 nt, Human
ucucaauuucua

SEQ ID NO: 2572562 - RNA, 18 nt, Human
ucucaaauuucuaaaucu

SEQ ID NO: 2572563 - RNA, 16 nt, Human
ucucacacaugagcau

SEQ ID NO: 2572564 - RNA, 13 nt, Human
ucucaauuuuugg

SEQ ID NO: 2572565 - RNA, 22 nt, Human
ucucaauuuuugguugaauaaa

SEQ ID NO: 2572566 - RNA, 16 nt, Human
ucgucuuaacucacca

SEQ ID NO: 2572567 - RNA, 17 nt, Human
ucuaauauuaaaaauau

SEQ ID NO: 2572568 - RNA, 16 nt, Human
ucgucugacugugugu

SEQ ID NO: 2572569 - RNA, 15 nt, Human
ucgucugacugugug

SEQ ID NO: 2572570 - RNA, 18 nt, Human
ucgucuguuuauaaacau

SEQ ID NO: 2572571 - RNA, 21 nt, Human
ucgucuccagccccuucucag

SEQ ID NO: 2572572 - RNA, 16 nt, Human
ucgucgcacagucucu

SEQ ID NO: 2572573 - RNA, 19 nt, Human
ucgucggggggacagcucc

SEQ ID NO: 2572574 - RNA, 14 nt, Human
ucgucgcacagucu

SEQ ID NO: 2572575 - RNA, 18 nt, Human
ucguccucccccugccag

SEQ ID NO: 2572576 - RNA, 23 nt, Human
ucguccucccccugccagugccu

SEQ ID NO: 2572577 - RNA, 23 nt, Human
ucgucaucauuuuuccuucccuu

SEQ ID NO: 2572578 - RNA, 14 nt, Human
ucguccucccccug

SEQ ID NO: 2572579 - RNA, 16 nt, Human
ucguccucccccugcc

SEQ ID NO: 2572580 - RNA, 17 nt, Human
ucguccucccccugcca

SEQ ID NO: 2572581 - RNA, 13 nt, Human
ucguccucccccu

SEQ ID NO: 2572582 - RNA, 12 nt, Human
ucguccagggag

SEQ ID NO: 2572583 - RNA, 20 nt, Human
ucuaaugugguuauuucucu

SEQ ID NO: 2572584 - RNA, 19 nt, Human
ucuaaugugguuauuucuc

SEQ ID NO: 2572585 - RNA, 11 nt, Human
ucuaauguggu

SEQ ID NO: 2572586 - RNA, 17 nt, Human
ucuaaugucuucauuuc

SEQ ID NO: 2572587 - RNA, 15 nt, Human
ucuaaugucuucauu

SEQ ID NO: 2572588 - RNA, 14 nt, Human
ucuaaugucuucau

SEQ ID NO: 2572589 - RNA, 24 nt, Human
ucuaauguauuuuauuguaacaga

SEQ ID NO: 2572590 - RNA, 17 nt, Human
ucuaauguauuuuauug

SEQ ID NO: 2572591 - RNA, 20 nt, Human
ucuaauggguauuuaaacaa

SEQ ID NO: 2572592 - RNA, 15 nt, Human
ucuaauguauuuuau

SEQ ID NO: 2572593 - RNA, 20 nt, Human
ucuaaucuagauaucgacuu

SEQ ID NO: 2572594 - RNA, 19 nt, Human
ucuaaucuagauaucgacu

SEQ ID NO: 2572595 - RNA, 20 nt, Human
ucuaauauuuauugcuuuau

SEQ ID NO: 2572596 - RNA, 18 nt, Human
ucuaauauuaaaaauaug

SEQ ID NO: 2572597 - RNA, 22 nt, Human
ucuaauauuuauugcuuuauaa

SEQ ID NO: 2572598 - RNA, 15 nt, Human
ucuacuaauuccaca

SEQ ID NO: 2572599 - RNA, 14 nt, Human
ucuacuauuuaugu

SEQ ID NO: 2572600 - RNA, 16 nt, Human
ucuaauuuuggaugga

SEQ ID NO: 2572601 - RNA, 15 nt, Human
ucuaauuuuggaugg

SEQ ID NO: 2572602 - RNA, 20 nt, Human
ucuaauuucaaaaauauaac

SEQ ID NO: 2572603 - RNA, 15 nt, Human
ucuacuaaaaaugca

SEQ ID NO: 2572604 - RNA, 19 nt, Human
ucuacuaaaaauacaaaaa

SEQ ID NO: 2572605 - RNA, 15 nt, Human
ucuacuaaaaauaca

SEQ ID NO: 2572606 - RNA, 12 nt, Human
ucuacuaaaaau

SEQ ID NO: 2572607 - RNA, 22 nt, Human
ucuaauuucaaaaauauaacuu

SEQ ID NO: 2572608 - RNA, 19 nt, Human
ucuaauuucaaaaauauaa

SEQ ID NO: 2572609 - RNA, 23 nt, Human
ucuaauuuaucuugucucugggc

SEQ ID NO: 2572610 - RNA, 22 nt, Human
ucuaauuuaucuugucucuggg

SEQ ID NO: 2572611 - RNA, 22 nt, Human
ucuaauuggaagaaauuccugu

SEQ ID NO: 2572612 - RNA, 20 nt, Human
ucuaauuggaagaaauuccu

SEQ ID NO: 2572613 - RNA, 18 nt, Human
ucuacucuuaagccaucu

SEQ ID NO: 2572614 - RNA, 17 nt, Human
ucuacucuuaagccauc

SEQ ID NO: 2572615 - RNA, 16 nt, Human
ucuacucuuaagccau

SEQ ID NO: 2572616 - RNA, 18 nt, Human
ucuaggaggucucuaaga

SEQ ID NO: 2572617 - RNA, 18 nt, Human
ucuaggcaucccagggga

SEQ ID NO: 2572618 - RNA, 18 nt, Human
ucuacucuagggaaaaac

SEQ ID NO: 2572619 - RNA, 13 nt, Human
ucuacucucccau

SEQ ID NO: 2572620 - RNA, 21 nt, Human
ucuacucccaaguaugggguu

SEQ ID NO: 2572621 - RNA, 18 nt, Human
ucuacucucccauggcuu

SEQ ID NO: 2572622 - RNA, 20 nt, Human
ucuacucuccucaucucuaa

SEQ ID NO: 2572623 - RNA, 22 nt, Human
ucuacuccuaccucagccuaga

SEQ ID NO: 2572624 - RNA, 19 nt, Human
ucuacuccuuguaaagacu

SEQ ID NO: 2572625 - RNA, 21 nt, Human
ucuacucgaguuacagacaaa

SEQ ID NO: 2572626 - RNA, 20 nt, Human
ucuacucgaguuacagacaa

SEQ ID NO: 2572627 - RNA, 18 nt, Human
ucuacuaauuccacaccu

SEQ ID NO: 2572628 - RNA, 14 nt, Human
ucuacucagaaauu

SEQ ID NO: 2572629 - RNA, 21 nt, Human
ucuacucagaaauuuuuauuu

SEQ ID NO: 2572630 - RNA, 14 nt, Human
ucuacucauauaua

SEQ ID NO: 2572631 - RNA, 17 nt, Human
ucuacuccuaccucagc

SEQ ID NO: 2572632 - RNA, 19 nt, Human
ucuacuccuaccucagccu

SEQ ID NO: 2572633 - RNA, 18 nt, Human
ucuacucauuccccgggg

SEQ ID NO: 2572634 - RNA, 18 nt, Human
ucuacucauauauaucua

SEQ ID NO: 2572635 - RNA, 23 nt, Human
ucuauauguacuugucaaagaag

SEQ ID NO: 2572636 - RNA, 21 nt, Human
ucuauauguacuugucaaaga

SEQ ID NO: 2572637 - RNA, 20 nt, Human
ucuauauguacuugucaaag

SEQ ID NO: 2572638 - RNA, 18 nt, Human
ucuauauguacuugucaa

SEQ ID NO: 2572639 - RNA, 13 nt, Human
ucuauauguacuu

SEQ ID NO: 2572640 - RNA, 20 nt, Human
ucuagguuuaacucagauca

SEQ ID NO: 2572641 - RNA, 21 nt, Human
ucuauaugaauuuaaauauaa

SEQ ID NO: 2572642 - RNA, 19 nt, Human
ucuagguuuaacucagauc

SEQ ID NO: 2572643 - RNA, 17 nt, Human
ucuagguuuaacucaga

SEQ ID NO: 2572644 - RNA, 23 nt, Human
ucuagguucuaaaaauugugauc

SEQ ID NO: 2572645 - RNA, 20 nt, Human
ucuagguggcaaggcugugc

SEQ ID NO: 2572646 - RNA, 18 nt, Human
ucuagguggcaaggcugu

SEQ ID NO: 2572647 - RNA, 14 nt, Human
ucuagguucuaaaa

SEQ ID NO: 2572648 - RNA, 23 nt, Human
ucuaggugcccuuggaggccagc

SEQ ID NO: 2572649 - RNA, 17 nt, Human
ucuagguggcaaggcug

SEQ ID NO: 2572650 - RNA, 15 nt, Human
ucuagguaaauuaca

SEQ ID NO: 2572651 - RNA, 12 nt, Human
ucuaggcugggg

SEQ ID NO: 2572652 - RNA, 20 nt, Human
ucuagguaggggcccacuuc

SEQ ID NO: 2572653 - RNA, 17 nt, Human
ucuagguagugcccuau

SEQ ID NO: 2572654 - RNA, 12 nt, Human
ucuagggaaaaa

SEQ ID NO: 2572655 - RNA, 21 nt, Human
uggaauaaaauauuuuuuuca

SEQ ID NO: 2572656 - RNA, 19 nt, Human
uggaauaaaauacuauuuu

SEQ ID NO: 2572657 - RNA, 18 nt, Human
uggaauaaaauacuauuu

SEQ ID NO: 2572658 - RNA, 15 nt, Human
uggaauaaaauacua

SEQ ID NO: 2572659 - RNA, 15 nt, Human
uggaauaaguucaaa

SEQ ID NO: 2572660 - RNA, 17 nt, Human
uggaauaaggagaauga

SEQ ID NO: 2572661 - RNA, 22 nt, Human
uggaauaauccuaaacauauga

SEQ ID NO: 2572662 - RNA, 16 nt, Human
uggaauauauaaccag

SEQ ID NO: 2572663 - RNA, 13 nt, Human
uggaauaguuuuu

SEQ ID NO: 2572664 - RNA, 21 nt, Human
uggaauauaaggaaagcaaua

SEQ ID NO: 2572665 - RNA, 15 nt, Human
uggaauauauaacca

SEQ ID NO: 2572666 - RNA, 23 nt, Human
uggaauaguauccuccagguuuu

SEQ ID NO: 2572667 - RNA, 22 nt, Human
uggaauaguauccuccagguuu

SEQ ID NO: 2572668 - RNA, 13 nt, Human
uggaauauaaaga

SEQ ID NO: 2572669 - RNA, 14 nt, Human
uggaauauaaggaa

SEQ ID NO: 2572670 - RNA, 18 nt, Human
uggaauauaaggaaagca

SEQ ID NO: 2572671 - RNA, 13 nt, Human
uggaauaaaauac

SEQ ID NO: 2572672 - RNA, 14 nt, Human
uggaaguuuugcau

SEQ ID NO: 2572673 - RNA, 14 nt, Human
uggaauaacaugua

SEQ ID NO: 2572674 - RNA, 15 nt, Human
uggaauaacauguaa

SEQ ID NO: 2572675 - RNA, 19 nt, Human
uggaauaacauguaauuaa

SEQ ID NO: 2572676 - RNA, 16 nt, Human
uggaacucauuccugc

SEQ ID NO: 2572677 - RNA, 19 nt, Human
uggaacucauuccugccug

SEQ ID NO: 2572678 - RNA, 21 nt, Human
uggaacucauuccugccuguc

SEQ ID NO: 2572679 - RNA, 21 nt, Human
uggaacguuuuuccuguucuu

SEQ ID NO: 2572680 - RNA, 13 nt, Human
uggaaugcuugaa

SEQ ID NO: 2572681 - RNA, 20 nt, Human
uggaaugcuucuucucaggc

SEQ ID NO: 2572682 - RNA, 18 nt, Human
uggaaugcuucuucucag

SEQ ID NO: 2572683 - RNA, 24 nt, Human
uggaaugcuuccuagaaguuacug

SEQ ID NO: 2572684 - RNA, 17 nt, Human
uggaaugggcagcucau

SEQ ID NO: 2572685 - RNA, 22 nt, Human
uggaaugcuugaaaaaugugca

SEQ ID NO: 2572686 - RNA, 20 nt, Human
uggaaugaugggucaguugu

SEQ ID NO: 2572687 - RNA, 17 nt, Human
uggaaugcuuccuagaa

SEQ ID NO: 2572688 - RNA, 16 nt, Human
uggaaugcuuccuaga

SEQ ID NO: 2572689 - RNA, 16 nt, Human
uggaaugcuguguuaa

SEQ ID NO: 2572690 - RNA, 18 nt, Human
uggaaugaauuaaauaaa

SEQ ID NO: 2572691 - RNA, 17 nt, Human
uggaaugaauuaaauaa

SEQ ID NO: 2572692 - RNA, 17 nt, Human
uggacagaagcagcucu

SEQ ID NO: 2572693 - RNA, 18 nt, Human
uggacagaagcagcucuu

SEQ ID NO: 2572694 - RNA, 22 nt, Human
uggacagacagaggaugagcuc

SEQ ID NO: 2572695 - RNA, 16 nt, Human
uggacagacagaggau

SEQ ID NO: 2572696 - RNA, 15 nt, Human
uggacagaagcagcu

SEQ ID NO: 2572697 - RNA, 16 nt, Human
uggacagaagcagcuc

SEQ ID NO: 2572698 - RNA, 22 nt, Human
uggacacuuugaaauguguuuc

SEQ ID NO: 2572699 - RNA, 21 nt, Human
uggacacuuugaaauguguuu

SEQ ID NO: 2572700 - RNA, 18 nt, Human
uggaaugguuauaaaagu

SEQ ID NO: 2572701 - RNA, 17 nt, Human
uggaaugguuauaaaag

SEQ ID NO: 2572702 - RNA, 23 nt, Human
uggacacuuugaaauguguuucu

SEQ ID NO: 2572703 - RNA, 12 nt, Human
uggacagaagaa

SEQ ID NO: 2572704 - RNA, 18 nt, Human
uggacaugaagauucuuu

SEQ ID NO: 2572705 - RNA, 18 nt, Human
uggacauccucuucugcu

SEQ ID NO: 2572706 - RNA, 21 nt, Human
uggacaugaagauucuuuccc

SEQ ID NO: 2572707 - RNA, 22 nt, Human
uggacaugaagauucuuuccca

SEQ ID NO: 2572708 - RNA, 23 nt, Human
uggacauccuccucccacccggc

SEQ ID NO: 2572709 - RNA, 20 nt, Human
uggacauccuccucccaccc

SEQ ID NO: 2572710 - RNA, 12 nt, Human
uggacagcccca

SEQ ID NO: 2572711 - RNA, 18 nt, Human
uggacauccuccucccac

SEQ ID NO: 2572712 - RNA, 19 nt, Human
uggacaugcacagcuaaca

SEQ ID NO: 2572713 - RNA, 13 nt, Human
uggacaugcacag

SEQ ID NO: 2572714 - RNA, 18 nt, Human
uggacucaccucccccau

SEQ ID NO: 2572715 - RNA, 20 nt, Human
uggacucaccucccccaucu

SEQ ID NO: 2572716 - RNA, 23 nt, Human
uggacuaucugucugguggcccc

SEQ ID NO: 2572717 - RNA, 22 nt, Human
uggacuaucugucugguggccc

SEQ ID NO: 2572718 - RNA, 18 nt, Human
uggacuauuauaauuuaa

SEQ ID NO: 2572719 - RNA, 20 nt, Human
uggacuaucugucugguggc

SEQ ID NO: 2572720 - RNA, 17 nt, Human
uggacuaucugucuggu

SEQ ID NO: 2572721 - RNA, 15 nt, Human
uggacuaucugucug

SEQ ID NO: 2572722 - RNA, 14 nt, Human
uggacuaucugucu

SEQ ID NO: 2572723 - RNA, 16 nt, Human
uggacaugagauaaug

SEQ ID NO: 2572724 - RNA, 19 nt, Human
uggacauccucuucugcuu

SEQ ID NO: 2572725 - RNA, 24 nt, Human
uggacuacccacguucucacaccc

SEQ ID NO: 2572726 - RNA, 21 nt, Human
uggacuagagggaccucuccc

SEQ ID NO: 2572727 - RNA, 16 nt, Human
ugcuggagccugugua

SEQ ID NO: 2572728 - RNA, 15 nt, Human
ugcuggagccugugu

SEQ ID NO: 2572729 - RNA, 14 nt, Human
ugcuggagccugug

SEQ ID NO: 2572730 - RNA, 13 nt, Human
ugcuggagccugu

SEQ ID NO: 2572731 - RNA, 12 nt, Human
ugcuggagccug

SEQ ID NO: 2572732 - RNA, 11 nt, Human
ugcuggagccu

SEQ ID NO: 2572733 - RNA, 20 nt, Human
ugcuggagccacuaacuaga

SEQ ID NO: 2572734 - RNA, 19 nt, Human
ugcuggagccacuaacuag

SEQ ID NO: 2572735 - RNA, 19 nt, Human
ugcuggagccuguguaaca

SEQ ID NO: 2572736 - RNA, 17 nt, Human
ugcuggagccuguguaa

SEQ ID NO: 2572737 - RNA, 13 nt, Human
ugcuuuaauauca

SEQ ID NO: 2572738 - RNA, 15 nt, Human
ugcuuuaauaucauc

SEQ ID NO: 2572739 - RNA, 18 nt, Human
ugcuuuaauaucaucagu

SEQ ID NO: 2572740 - RNA, 20 nt, Human
ugcuuuaauaucaucaguau

SEQ ID NO: 2572741 - RNA, 19 nt, Human
ugcuuuaauuguuaagaua

SEQ ID NO: 2572742 - RNA, 22 nt, Human
ugcuggagaagagaggagagga

SEQ ID NO: 2572743 - RNA, 18 nt, Human
ugcuggagaagagaggag

SEQ ID NO: 2572744 - RNA, 13 nt, Human
ugcuggagaagag

SEQ ID NO: 2572745 - RNA, 20 nt, Human
ugcuggacggggacugggga

SEQ ID NO: 2572746 - RNA, 12 nt, Human
ugcuggagaggu

SEQ ID NO: 2572747 - RNA, 13 nt, Human
ugcuggagacucc

SEQ ID NO: 2572748 - RNA, 14 nt, Human
ugcuggagagguua

SEQ ID NO: 2572749 - RNA, 13 nt, Human
ugcuggagagguu

SEQ ID NO: 2572750 - RNA, 14 nt, Human
ugcuggagauguuu

SEQ ID NO: 2572751 - RNA, 18 nt, Human
ugcuggagccacuaacua

SEQ ID NO: 2572752 - RNA, 10 nt, Human
ugcuggagcc

SEQ ID NO: 2572753 - RNA, 21 nt, Human
ugcuggacggggacuggggau

SEQ ID NO: 2572754 - RNA, 14 nt, Human
ugcuggacugucau

SEQ ID NO: 2572755 - RNA, 15 nt, Human
ugcuggacugucaua

SEQ ID NO: 2572756 - RNA, 19 nt, Human
ugcuggacugucauagaaa

SEQ ID NO: 2572757 - RNA, 17 nt, Human
ugcuggaauucuaacaa

SEQ ID NO: 2572758 - RNA, 16 nt, Human
ugcuggacaguaucac

SEQ ID NO: 2572759 - RNA, 19 nt, Human
ugcuggacggcauuccugc

SEQ ID NO: 2572760 - RNA, 20 nt, Human
ugcuggacggcauuccugcu

SEQ ID NO: 2572761 - RNA, 14 nt, Human
ugcuuucugcucag

SEQ ID NO: 2572762 - RNA, 15 nt, Human
ugcuuucugcucagc

SEQ ID NO: 2572763 - RNA, 19 nt, Human
ugcuuucugcucagcuucu

SEQ ID NO: 2572764 - RNA, 20 nt, Human
ugcuuucugcucagcuucuc

SEQ ID NO: 2572765 - RNA, 12 nt, Human
ugcuuucugcuc

SEQ ID NO: 2572766 - RNA, 13 nt, Human
ugcuuucugcuca

SEQ ID NO: 2572767 - RNA, 14 nt, Human
ugcuuuacugucaa

SEQ ID NO: 2572768 - RNA, 23 nt, Human
ugcuuucuguugucauugcuguu

SEQ ID NO: 2572769 - RNA, 15 nt, Human
ugcuuucuuucguuu

SEQ ID NO: 2572770 - RNA, 22 nt, Human
ugcuuucuuucguuuguuuguu

SEQ ID NO: 2572771 - RNA, 20 nt, Human
uggaaaaauagccugccucu

SEQ ID NO: 2572772 - RNA, 12 nt, Human
uggaaaaauauu

SEQ ID NO: 2572773 - RNA, 18 nt, Human
ugcuuugacucaccuguu

SEQ ID NO: 2572774 - RNA, 13 nt, Human
uggaaaaauccag

SEQ ID NO: 2572775 - RNA, 18 nt, Human
uggaaaaaugagagaagg

SEQ ID NO: 2572776 - RNA, 18 nt, Human
uggaaaaauccagaaaga

SEQ ID NO: 2572777 - RNA, 19 nt, Human
uggaaaaauccagaaagaa

SEQ ID NO: 2572778 - RNA, 17 nt, Human
uggaaaaauagccugcc

SEQ ID NO: 2572779 - RNA, 22 nt, Human
ugcuuugaagcaguugugucag

SEQ ID NO: 2572780 - RNA, 19 nt, Human
ugcuuugaagcaguugugu

SEQ ID NO: 2572781 - RNA, 14 nt, Human
ugcuuugaagcagu

SEQ ID NO: 2572782 - RNA, 15 nt, Human
ugcuuugaagcaguu

SEQ ID NO: 2572783 - RNA, 20 nt, Human
uggaacauaaaauacaaugu

SEQ ID NO: 2572784 - RNA, 21 nt, Human
uggaacauaaaauacaauguu

SEQ ID NO: 2572785 - RNA, 20 nt, Human
uggaaagcaucaccucaggc

SEQ ID NO: 2572786 - RNA, 21 nt, Human
uggaaagcaucaccucaggcc

SEQ ID NO: 2572787 - RNA, 23 nt, Human
uggaacaucaucaaggcacugcc

SEQ ID NO: 2572788 - RNA, 21 nt, Human
uggaacaucaucaaggcacug

SEQ ID NO: 2572789 - RNA, 20 nt, Human
uggaaagaguaggaagacuu

SEQ ID NO: 2572790 - RNA, 14 nt, Human
uggaaagaguacuc

SEQ ID NO: 2572791 - RNA, 18 nt, Human
uggaaagauaacuaggaa

SEQ ID NO: 2572792 - RNA, 16 nt, Human
uggaaagaaucuaaua

SEQ ID NO: 2572793 - RNA, 23 nt, Human
uggaaagacagcuucucauccug

SEQ ID NO: 2572794 - RNA, 16 nt, Human
uggaaagcaucaccuc

SEQ ID NO: 2572795 - RNA, 19 nt, Human
uggaaagcaucaccucagg

SEQ ID NO: 2572796 - RNA, 23 nt, Human
uggaaagauaacuaggaaaucca

SEQ ID NO: 2572797 - RNA, 17 nt, Human
uggaaacagcucgacuu

SEQ ID NO: 2572798 - RNA, 17 nt, Human
uggaaaacaaggaaguc

SEQ ID NO: 2572799 - RNA, 23 nt, Human
uggaaacuucagcgguuuauaua

SEQ ID NO: 2572800 - RNA, 22 nt, Human
uggaaacagcucgacuuuaaaa

SEQ ID NO: 2572801 - RNA, 21 nt, Human
uggaaacuggaugaggucaua

SEQ ID NO: 2572802 - RNA, 21 nt, Human
uggaaagacuuuuccaacccu

SEQ ID NO: 2572803 - RNA, 21 nt, Human
uggaaacuguugccagagaug

SEQ ID NO: 2572804 - RNA, 14 nt, Human
uggaaacaggacca

SEQ ID NO: 2572805 - RNA, 17 nt, Human
uggaaacuguugccaga

SEQ ID NO: 2572806 - RNA, 19 nt, Human
uggaaagacagcuucucau

SEQ ID NO: 2572807 - RNA, 16 nt, Human
uggcaacagaucugga

SEQ ID NO: 2572808 - RNA, 17 nt, Human
uggcaacagaucuggaa

SEQ ID NO: 2572809 - RNA, 18 nt, Human
uggcaacagaucuggaac

SEQ ID NO: 2572810 - RNA, 20 nt, Human
uggcaacagaucuggaaccu

SEQ ID NO: 2572811 - RNA, 13 nt, Human
uggcaacagaucu

SEQ ID NO: 2572812 - RNA, 15 nt, Human
uggcaacagaucugg

SEQ ID NO: 2572813 - RNA, 14 nt, Human
uggcaacagaagug

SEQ ID NO: 2572814 - RNA, 15 nt, Human
uggcaacagaagcag

SEQ ID NO: 2572815 - RNA, 13 nt, Human
uggcaacagaagc

SEQ ID NO: 2572816 - RNA, 17 nt, Human
uggcaaaggaaggugga

SEQ ID NO: 2572817 - RNA, 22 nt, Human
uggcaaagggagcagaacugaa

SEQ ID NO: 2572818 - RNA, 21 nt, Human
uggcaaagggagcagaacuga

SEQ ID NO: 2572819 - RNA, 17 nt, Human
uggcaaauuaacuugag

SEQ ID NO: 2572820 - RNA, 12 nt, Human
uggcaacagaag

SEQ ID NO: 2572821 - RNA, 20 nt, Human
uggcaaauuaacuugaguuu

SEQ ID NO: 2572822 - RNA, 20 nt, Human
uggauuuucuauuguuacuc

SEQ ID NO: 2572823 - RNA, 19 nt, Human
uggauuuucuauuguuacu

SEQ ID NO: 2572824 - RNA, 22 nt, Human
uggauuuugguuuuguuccccu

SEQ ID NO: 2572825 - RNA, 17 nt, Human
uggauuuguuuaaaagg

SEQ ID NO: 2572826 - RNA, 16 nt, Human
uggauuuguuuaaaag

SEQ ID NO: 2572827 - RNA, 15 nt, Human
uggauuuguuuaaaa

SEQ ID NO: 2572828 - RNA, 13 nt, Human
uggauuugacauu

SEQ ID NO: 2572829 - RNA, 13 nt, Human
uggauuugaugcu

SEQ ID NO: 2572830 - RNA, 13 nt, Human
uggauuugaagca

SEQ ID NO: 2572831 - RNA, 14 nt, Human
uggauuugacauug

SEQ ID NO: 2572832 - RNA, 17 nt, Human
uggauuugccugugcca

SEQ ID NO: 2572833 - RNA, 18 nt, Human
uggauuugccugugccac

SEQ ID NO: 2572834 - RNA, 20 nt, Human
uggaucacagcugcuuucug

SEQ ID NO: 2572835 - RNA, 16 nt, Human
uggaucacagcugcuu

SEQ ID NO: 2572836 - RNA, 16 nt, Human
uggaucagaugaacuc

SEQ ID NO: 2572837 - RNA, 19 nt, Human
uggaucaguccuuugauca

SEQ ID NO: 2572838 - RNA, 15 nt, Human
uggaucuccaaggac

SEQ ID NO: 2572839 - RNA, 14 nt, Human
uggaucuccaagga

SEQ ID NO: 2572840 - RNA, 18 nt, Human
uggaucucauuggacccu

SEQ ID NO: 2572841 - RNA, 20 nt, Human
uggauccugaaauagaggcu

SEQ ID NO: 2572842 - RNA, 23 nt, Human
uggauccuagccuuauccucuga

SEQ ID NO: 2572843 - RNA, 13 nt, Human
uggauccuagccu

SEQ ID NO: 2572844 - RNA, 16 nt, Human
uggaucaguccuuuga

SEQ ID NO: 2572845 - RNA, 20 nt, Human
uggauuuaacagaaauguac

SEQ ID NO: 2572846 - RNA, 24 nt, Human
uggauuuaacagaaauguacagca

SEQ ID NO: 2572847 - RNA, 18 nt, Human
uggaucuccaaggaccag

SEQ ID NO: 2572848 - RNA, 14 nt, Human
uggauuuauaaaug

SEQ ID NO: 2572849 - RNA, 20 nt, Human
uggauuuauaaaugcuauuu

SEQ ID NO: 2572850 - RNA, 14 nt, Human
uggauuucagaaag

SEQ ID NO: 2572851 - RNA, 18 nt, Human
uggaggaaggaaacccag

SEQ ID NO: 2572852 - RNA, 12 nt, Human
uggaggaaggaa

SEQ ID NO: 2572853 - RNA, 20 nt, Human
uggaggaaggaaacccagcu

SEQ ID NO: 2572854 - RNA, 18 nt, Human
uggaggaagagggacaga

SEQ ID NO: 2572855 - RNA, 16 nt, Human
uggacucgccuguaau

SEQ ID NO: 2572856 - RNA, 15 nt, Human
uggacuccugcacac

SEQ ID NO: 2572857 - RNA, 14 nt, Human
uggacuccucuguc

SEQ ID NO: 2572858 - RNA, 15 nt, Human
uggacuccucugucc

SEQ ID NO: 2572859 - RNA, 15 nt, Human
uggacucucagucuc

SEQ ID NO: 2572860 - RNA, 20 nt, Human
uggacucucagucucugagc

SEQ ID NO: 2572861 - RNA, 17 nt, Human
uggacucuacacuguga

SEQ ID NO: 2572862 - RNA, 21 nt, Human
uggacucuacacugugaacuu

SEQ ID NO: 2572863 - RNA, 14 nt, Human
uggaggaaagcaac

SEQ ID NO: 2572864 - RNA, 13 nt, Human
uggacucugcaca

SEQ ID NO: 2572865 - RNA, 22 nt, Human
uggacucucagucucugagcag

SEQ ID NO: 2572866 - RNA, 15 nt, Human
uggaucacagcugcu

SEQ ID NO: 2572867 - RNA, 14 nt, Human
uggaucacagcugc

SEQ ID NO: 2572868 - RNA, 23 nt, Human
uggagggcuagaaccuggagagc

SEQ ID NO: 2572869 - RNA, 22 nt, Human
uggagggcuagaaccuggagag

SEQ ID NO: 2572870 - RNA, 22 nt, Human
uggagggcuagaaccuggagaa

SEQ ID NO: 2572871 - RNA, 21 nt, Human
uggagggcuagaaccuggaga

SEQ ID NO: 2572872 - RNA, 20 nt, Human
uggagggcuagaaccuggag

SEQ ID NO: 2572873 - RNA, 21 nt, Human
uggagggcgugggagcguggg

SEQ ID NO: 2572874 - RNA, 21 nt, Human
uggagggaaugaaccuggagg

SEQ ID NO: 2572875 - RNA, 20 nt, Human
uggagggaaugaaccuggag

SEQ ID NO: 2572876 - RNA, 11 nt, Human
uggagggaagc

SEQ ID NO: 2572877 - RNA, 22 nt, Human
uggagggacaaguggacucagg

SEQ ID NO: 2572878 - RNA, 22 nt, Human
uggaggcuuccugcguccuccu

SEQ ID NO: 2572879 - RNA, 19 nt, Human
uggagggaaugaaccugga

SEQ ID NO: 2572880 - RNA, 21 nt, Human
uggaggacuagaaccuggagg

SEQ ID NO: 2572881 - RNA, 20 nt, Human
uggaggacuagaaccuggag

SEQ ID NO: 2572882 - RNA, 19 nt, Human
uggaggacuagaaccugga

SEQ ID NO: 2572883 - RNA, 14 nt, Human
uggaggagaagaau

SEQ ID NO: 2572884 - RNA, 21 nt, Human
uggaggagaagaauuuucaga

SEQ ID NO: 2572885 - RNA, 15 nt, Human
uggaggagagaagaa

SEQ ID NO: 2572886 - RNA, 14 nt, Human
uggaggagaaggac

SEQ ID NO: 2572887 - RNA, 16 nt, Human
uggaggagcaaaggcu

SEQ ID NO: 2572888 - RNA, 14 nt, Human
uggaggagcaaagg

SEQ ID NO: 2572889 - RNA, 11 nt, Human
uggaggagcaa

SEQ ID NO: 2572890 - RNA, 13 nt, Human
uggaggagcagug

SEQ ID NO: 2572891 - RNA, 21 nt, Human
uggaggagcaaaggcugagaa

SEQ ID NO: 2572892 - RNA, 20 nt, Human
uggaggagcaaaggcugaga

SEQ ID NO: 2572893 - RNA, 18 nt, Human
uggaggagcaaaggcuga

SEQ ID NO: 2572894 - RNA, 21 nt, Human
uggaggagcagugcaggcaca

SEQ ID NO: 2572895 - RNA, 20 nt, Human
uggaggagcagugcaggcac

SEQ ID NO: 2572896 - RNA, 22 nt, Human
uggaggagcagugcaggcacag

SEQ ID NO: 2572897 - RNA, 20 nt, Human
uggaggcuuccugcguccuc

SEQ ID NO: 2572898 - RNA, 12 nt, Human
uggccacuaagc

SEQ ID NO: 2572899 - RNA, 13 nt, Human
uggccacucagcu

SEQ ID NO: 2572900 - RNA, 12 nt, Human
uggccacucagc

SEQ ID NO: 2572901 - RNA, 18 nt, Human
uggccacuaagcagagga

SEQ ID NO: 2572902 - RNA, 19 nt, Human
uggccacuaagcagaggag

SEQ ID NO: 2572903 - RNA, 17 nt, Human
uggccacuccagacccc

SEQ ID NO: 2572904 - RNA, 16 nt, Human
uggccaccuuuucagc

SEQ ID NO: 2572905 - RNA, 23 nt, Human
uggccaccugaggugggcccagg

SEQ ID NO: 2572906 - RNA, 22 nt, Human
uggccaccugaggugggcccag

SEQ ID NO: 2572907 - RNA, 21 nt, Human
uggccaccugaggugggccca

SEQ ID NO: 2572908 - RNA, 17 nt, Human
uggccaccuuuucagcg

SEQ ID NO: 2572909 - RNA, 20 nt, Human
uggccaccugaggugggccc

SEQ ID NO: 2572910 - RNA, 17 nt, Human
uggccaccugagguggg

SEQ ID NO: 2572911 - RNA, 21 nt, Human
uggcagugagugagccuggcu

SEQ ID NO: 2572912 - RNA, 21 nt, Human
uggccagaugcaccagcccuu

SEQ ID NO: 2572913 - RNA, 20 nt, Human
uggccagaugcaccagcccu

SEQ ID NO: 2572914 - RNA, 22 nt, Human
uggccacucagcuuccuaccca

SEQ ID NO: 2572915 - RNA, 15 nt, Human
uggccacucagcuuc

SEQ ID NO: 2572916 - RNA, 12 nt, Human
uggccagcagcu

SEQ ID NO: 2572917 - RNA, 13 nt, Human
uggccagcagcuu

SEQ ID NO: 2572918 - RNA, 21 nt, Human
uggccagccaacuuuugcaug

SEQ ID NO: 2572919 - RNA, 15 nt, Human
uggccagccccacag

SEQ ID NO: 2572920 - RNA, 13 nt, Human
uggccagccccac

SEQ ID NO: 2572921 - RNA, 12 nt, Human
uggccagcccca

SEQ ID NO: 2572922 - RNA, 14 nt, Human
uggccagcagcuug

SEQ ID NO: 2572923 - RNA, 23 nt, Human
uggccaggcagaucugugcccca

SEQ ID NO: 2572924 - RNA, 14 nt, Human
uggccaggauggag

SEQ ID NO: 2572925 - RNA, 12 nt, Human
uggccaggaugg

SEQ ID NO: 2572926 - RNA, 21 nt, Human
uggccaggcacccccuggaga

SEQ ID NO: 2572927 - RNA, 20 nt, Human
uggccaggcacccccuggag

SEQ ID NO: 2572928 - RNA, 12 nt, Human
uggccaggcaga

SEQ ID NO: 2572929 - RNA, 16 nt, Human
uggccaggcagaucug

SEQ ID NO: 2572930 - RNA, 17 nt, Human
uggccaggcagaucugu

SEQ ID NO: 2572931 - RNA, 19 nt, Human
uggccaggcagaucugugc

SEQ ID NO: 2572932 - RNA, 20 nt, Human
uggccaggcagaucugugcc

SEQ ID NO: 2572933 - RNA, 16 nt, Human
uggccagccccacagc

SEQ ID NO: 2572934 - RNA, 23 nt, Human
uggccaggagcucuucaggccuc

SEQ ID NO: 2572935 - RNA, 20 nt, Human
uggccaggagcucuucaggc

SEQ ID NO: 2572936 - RNA, 22 nt, Human
uggccaggagcucuucaggccu

SEQ ID NO: 2572937 - RNA, 17 nt, Human
uggccagccccacagcc

SEQ ID NO: 2572938 - RNA, 14 nt, Human
uggccaggagcucu

SEQ ID NO: 2572939 - RNA, 15 nt, Human
uggccaggagcucuu

SEQ ID NO: 2572940 - RNA, 16 nt, Human
uggccaggagcucuuc

SEQ ID NO: 2572941 - RNA, 23 nt, Human
uggcagugagugagccuggcucu

SEQ ID NO: 2572942 - RNA, 19 nt, Human
uggcagugagugagccugg

SEQ ID NO: 2572943 - RNA, 18 nt, Human
uggcagugagugagccug

SEQ ID NO: 2572944 - RNA, 17 nt, Human
uggcagugagugagccu

SEQ ID NO: 2572945 - RNA, 14 nt, Human
uggcagugagugag

SEQ ID NO: 2572946 - RNA, 22 nt, Human
uggcagucugaauuuuuaaaac

SEQ ID NO: 2572947 - RNA, 13 nt, Human
uggcagugggagc

SEQ ID NO: 2572948 - RNA, 20 nt, Human
uggccaccucucuccuuugc

SEQ ID NO: 2572949 - RNA, 19 nt, Human
uggcagucuauauguuugu

SEQ ID NO: 2572950 - RNA, 13 nt, Human
uggcagucuauau

SEQ ID NO: 2572951 - RNA, 16 nt, Human
uggcagucugaauuuu

SEQ ID NO: 2572952 - RNA, 18 nt, Human
uggcaguccuggaagcca

SEQ ID NO: 2572953 - RNA, 17 nt, Human
uggcagucacugaauuc

SEQ ID NO: 2572954 - RNA, 15 nt, Human
uggcaggugcagccc

SEQ ID NO: 2572955 - RNA, 22 nt, Human
uggcagguggaggugucaggcu

SEQ ID NO: 2572956 - RNA, 15 nt, Human
uggcagggcucagga

SEQ ID NO: 2572957 - RNA, 16 nt, Human
uggcagggugggaugg

SEQ ID NO: 2572958 - RNA, 17 nt, Human
uggcagggugggaugga

SEQ ID NO: 2572959 - RNA, 21 nt, Human
uggcagggguggcugccucau

SEQ ID NO: 2572960 - RNA, 23 nt, Human
uggcagggguggcugccucauuu

SEQ ID NO: 2572961 - RNA, 17 nt, Human
uggcagggcucaggauu

SEQ ID NO: 2572962 - RNA, 14 nt, Human
uggcagggcucagg

SEQ ID NO: 2572963 - RNA, 12 nt, Human
uggcagggcuca

SEQ ID NO: 2572964 - RNA, 18 nt, Human
uggcaggggacaggaguc

SEQ ID NO: 2572965 - RNA, 15 nt, Human
uggcaggggacagga

SEQ ID NO: 2572966 - RNA, 11 nt, Human
uggcagggcuc

SEQ ID NO: 2572967 - RNA, 19 nt, Human
uggcagggccuagcugcua

SEQ ID NO: 2572968 - RNA, 15 nt, Human
uggcagggccuagcu

SEQ ID NO: 2572969 - RNA, 14 nt, Human
uggcagggccuagc

SEQ ID NO: 2572970 - RNA, 19 nt, Human
uggcaggauggccuggcca

SEQ ID NO: 2572971 - RNA, 18 nt, Human
uggcaggauggccuggcc

SEQ ID NO: 2572972 - RNA, 22 nt, Human
uggcaggaugacccugcgaagg

SEQ ID NO: 2572973 - RNA, 21 nt, Human
uggcaacaguuagcuggagcu

SEQ ID NO: 2572974 - RNA, 22 nt, Human
uggcaacagaucuggaaccuca

SEQ ID NO: 2572975 - RNA, 21 nt, Human
uggcacccggccccugcuggu

SEQ ID NO: 2572976 - RNA, 22 nt, Human
uggcaccuucagacuuugcuuc

SEQ ID NO: 2572977 - RNA, 12 nt, Human
uggcaccuccua

SEQ ID NO: 2572978 - RNA, 20 nt, Human
uggcaccuaauccaggcaga

SEQ ID NO: 2572979 - RNA, 15 nt, Human
uggcaccgccuucuc

SEQ ID NO: 2572980 - RNA, 16 nt, Human
uggcaccgccuucucu

SEQ ID NO: 2572981 - RNA, 14 nt, Human
uggcacggugguac

SEQ ID NO: 2572982 - RNA, 19 nt, Human
uggcacgguggcucaggcc

SEQ ID NO: 2572983 - RNA, 20 nt, Human
uggcacgguggcucaggccu

SEQ ID NO: 2572984 - RNA, 13 nt, Human
uggcagcugcuuu

SEQ ID NO: 2572985 - RNA, 19 nt, Human
uggcaggaguuggaagugu

SEQ ID NO: 2572986 - RNA, 17 nt, Human
uggcaggaccaggacua

SEQ ID NO: 2572987 - RNA, 16 nt, Human
uggcaggaccaggacu

SEQ ID NO: 2572988 - RNA, 14 nt, Human
uggcaggaccagga

SEQ ID NO: 2572989 - RNA, 11 nt, Human
uggcaggacca

SEQ ID NO: 2572990 - RNA, 16 nt, Human
uggguaacuagggaag

SEQ ID NO: 2572991 - RNA, 14 nt, Human
ugggguuguguugu

SEQ ID NO: 2572992 - RNA, 19 nt, Human
ugggguugggauugggggc

SEQ ID NO: 2572993 - RNA, 21 nt, Human
ugggguuggcugggcccagaa

SEQ ID NO: 2572994 - RNA, 15 nt, Human
uggggguggaauaaa

SEQ ID NO: 2572995 - RNA, 15 nt, Human
ugggggugagggucc

SEQ ID NO: 2572996 - RNA, 14 nt, Human
ugggggugccagga

SEQ ID NO: 2572997 - RNA, 19 nt, Human
ugggguuuaucagaauucu

SEQ ID NO: 2572998 - RNA, 20 nt, Human
uggguggggggcuucauaca

SEQ ID NO: 2572999 - RNA, 21 nt, Human
uggguggggggcuucauacac

SEQ ID NO: 2573000 - RNA, 15 nt, Human
uggguaaaugcagcg

SEQ ID NO: 2573001 - RNA, 18 nt, Human
uggguggggggcuucaua

SEQ ID NO: 2573002 - RNA, 14 nt, Human
ugggugguggaucu

SEQ ID NO: 2573003 - RNA, 16 nt, Human
uggguggguggugggg

SEQ ID NO: 2573004 - RNA, 22 nt, Human
ugggugguacccucuggagggg

SEQ ID NO: 2573005 - RNA, 18 nt, Human
ugggugguacccucugga

SEQ ID NO: 2573006 - RNA, 14 nt, Human
ugggugguacccuc

SEQ ID NO: 2573007 - RNA, 15 nt, Human
ugggugggugguggg

SEQ ID NO: 2573008 - RNA, 14 nt, Human
uggguggguggugg

SEQ ID NO: 2573009 - RNA, 13 nt, Human
ugggugguacccu

SEQ ID NO: 2573010 - RNA, 12 nt, Human
uggguaaauuca

SEQ ID NO: 2573011 - RNA, 15 nt, Human
uggguggggugagga

SEQ ID NO: 2573012 - RNA, 20 nt, Human
uggguggggugaggaccacu

SEQ ID NO: 2573013 - RNA, 16 nt, Human
uggguucuacccaggu

SEQ ID NO: 2573014 - RNA, 15 nt, Human
uggguucuacccagg

SEQ ID NO: 2573015 - RNA, 22 nt, Human
uggguucuacccaggugcuagg

SEQ ID NO: 2573016 - RNA, 14 nt, Human
uggguucugccugc

SEQ ID NO: 2573017 - RNA, 14 nt, Human
uggguuaguggaug

SEQ ID NO: 2573018 - RNA, 16 nt, Human
uggguuagggaaaaca

SEQ ID NO: 2573019 - RNA, 18 nt, Human
uggguuagggaaaacauu

SEQ ID NO: 2573020 - RNA, 19 nt, Human
uggguuagggaaaacauuc

SEQ ID NO: 2573021 - RNA, 21 nt, Human
uggguuagggaaaacauucca

SEQ ID NO: 2573022 - RNA, 20 nt, Human
uggguguuccuggcaguuua

SEQ ID NO: 2573023 - RNA, 19 nt, Human
uggguguuccuggcaguuu

SEQ ID NO: 2573024 - RNA, 15 nt, Human
uggguguuccuggca

SEQ ID NO: 2573025 - RNA, 23 nt, Human
uggguguaacaggucuccucuua

SEQ ID NO: 2573026 - RNA, 18 nt, Human
uggguguguguagccaag

SEQ ID NO: 2573027 - RNA, 14 nt, Human
ugggugguggggag

SEQ ID NO: 2573028 - RNA, 15 nt, Human
ugggugguggaucug

SEQ ID NO: 2573029 - RNA, 22 nt, Human
uggguguaacaggucuccucuu

SEQ ID NO: 2573030 - RNA, 18 nt, Human
uggguuucuaaagcugcc

SEQ ID NO: 2573031 - RNA, 17 nt, Human
uggguuucuaaagcugc

SEQ ID NO: 2573032 - RNA, 19 nt, Human
uggguuuggaccccagcug

SEQ ID NO: 2573033 - RNA, 14 nt, Human
uggguuuggacccc

SEQ ID NO: 2573034 - RNA, 16 nt, Human
uggguuucuagcccau

SEQ ID NO: 2573035 - RNA, 17 nt, Human
uggguucugauauugcc

SEQ ID NO: 2573036 - RNA, 16 nt, Human
uggguucugccugcca

SEQ ID NO: 2573037 - RNA, 19 nt, Human
uggguucugccugccagcu

SEQ ID NO: 2573038 - RNA, 21 nt, Human
uggguuucuaaagcugccagc

SEQ ID NO: 2573039 - RNA, 16 nt, Human
ugguauagaaaugcug

SEQ ID NO: 2573040 - RNA, 14 nt, Human
ugguauagaaaugc

SEQ ID NO: 2573041 - RNA, 16 nt, Human
ugguauauccaaaagc

SEQ ID NO: 2573042 - RNA, 19 nt, Human
ugguauauccaaaagcuuu

SEQ ID NO: 2573043 - RNA, 22 nt, Human
ugguauagaaaugcugguuuuu

SEQ ID NO: 2573044 - RNA, 21 nt, Human
uggguuuggaccccagcuggg

SEQ ID NO: 2573045 - RNA, 20 nt, Human
uggguuuggaccccagcugg

SEQ ID NO: 2573046 - RNA, 13 nt, Human
ugguauagaaaug

SEQ ID NO: 2573047 - RNA, 22 nt, Human
ugguauccugugacauguaaca

SEQ ID NO: 2573048 - RNA, 15 nt, Human
ugguaucaagaaagu

SEQ ID NO: 2573049 - RNA, 22 nt, Human
ugguaucuagacccaucuucuu

SEQ ID NO: 2573050 - RNA, 22 nt, Human
ugguauauccaaaagcuuuuua

SEQ ID NO: 2573051 - RNA, 22 nt, Human
ugguaucuguucuuuaauuuau

SEQ ID NO: 2573052 - RNA, 19 nt, Human
ugguaucuguucuuuaauu

SEQ ID NO: 2573053 - RNA, 17 nt, Human
ugguaucuguucuuuaa

SEQ ID NO: 2573054 - RNA, 14 nt, Human
ugguaucuguucuu

SEQ ID NO: 2573055 - RNA, 18 nt, Human
ugguaugaucacggcuca

SEQ ID NO: 2573056 - RNA, 16 nt, Human
ugguaucuuaaagugu

SEQ ID NO: 2573057 - RNA, 18 nt, Human
ugguauuguauuuauuca

SEQ ID NO: 2573058 - RNA, 14 nt, Human
ugguauuguauuua

SEQ ID NO: 2573059 - RNA, 13 nt, Human
ugguauuguauuu

SEQ ID NO: 2573060 - RNA, 12 nt, Human
ugguauuguauu

SEQ ID NO: 2573061 - RNA, 23 nt, Human
ugguauuggcuagagguucaaag

SEQ ID NO: 2573062 - RNA, 15 nt, Human
ugguaugagcugagg

SEQ ID NO: 2573063 - RNA, 23 nt, Human
ugguaucuguucuuuaauuuauu

SEQ ID NO: 2573064 - RNA, 14 nt, Human
ugguaugagcugag

SEQ ID NO: 2573065 - RNA, 20 nt, Human
ugguauuacacuguauuugu

SEQ ID NO: 2573066 - RNA, 18 nt, Human
ugguauuacacuguauuu

SEQ ID NO: 2573067 - RNA, 16 nt, Human
ugguaugagcugaggg

SEQ ID NO: 2573068 - RNA, 19 nt, Human
ugguauucaggauuacaug

SEQ ID NO: 2573069 - RNA, 16 nt, Human
ugguauuccugccucc

SEQ ID NO: 2573070 - RNA, 18 nt, Human
ugggcuucacuguauaaa

SEQ ID NO: 2573071 - RNA, 17 nt, Human
ugggcuucaguggcagc

SEQ ID NO: 2573072 - RNA, 22 nt, Human
ugggcuuuuuuuuucucuuucu

SEQ ID NO: 2573073 - RNA, 14 nt, Human
ugggcuuguuuucu

SEQ ID NO: 2573074 - RNA, 23 nt, Human
ugggcuucacuguauaaauagga

SEQ ID NO: 2573075 - RNA, 17 nt, Human
ugggcuucacuguauaa

SEQ ID NO: 2573076 - RNA, 16 nt, Human
ugggcuucacuguaua

SEQ ID NO: 2573077 - RNA, 15 nt, Human
ugggcuucaguggca

SEQ ID NO: 2573078 - RNA, 19 nt, Human
ugggcugguggcucccgga

SEQ ID NO: 2573079 - RNA, 12 nt, Human
ugggcugugagu

SEQ ID NO: 2573080 - RNA, 14 nt, Human
ugggcuuagagcag

SEQ ID NO: 2573081 - RNA, 14 nt, Human
ugggcuuaagaaau

SEQ ID NO: 2573082 - RNA, 23 nt, Human
ugggcuguuggcacucacagacc

SEQ ID NO: 2573083 - RNA, 19 nt, Human
ugggcuguuggcacucaca

SEQ ID NO: 2573084 - RNA, 17 nt, Human
ugggcuguuggcacuca

SEQ ID NO: 2573085 - RNA, 12 nt, Human
ugggcugugcua

SEQ ID NO: 2573086 - RNA, 15 nt, Human
ugggcugugagugua

SEQ ID NO: 2573087 - RNA, 22 nt, Human
ugggcugugaguguaaguguga

SEQ ID NO: 2573088 - RNA, 23 nt, Human
ugggcuggguucuacccaggugc

SEQ ID NO: 2573089 - RNA, 17 nt, Human
ugggcuggugucaccug

SEQ ID NO: 2573090 - RNA, 16 nt, Human
ugggcuaguugggcuu

SEQ ID NO: 2573091 - RNA, 13 nt, Human
ugggcuacaagga

SEQ ID NO: 2573092 - RNA, 20 nt, Human
ugggcguggucacugcuguc

SEQ ID NO: 2573093 - RNA, 19 nt, Human
ugggcguggucacugcugu

SEQ ID NO: 2573094 - RNA, 17 nt, Human
ugggcuaauuaaauaaa

SEQ ID NO: 2573095 - RNA, 16 nt, Human
ugggcuacuuuguccu

SEQ ID NO: 2573096 - RNA, 16 nt, Human
ugggcagaggaaagca

SEQ ID NO: 2573097 - RNA, 21 nt, Human
ugggcagaucuaccccuuacu

SEQ ID NO: 2573098 - RNA, 16 nt, Human
ugggcagaucuacccc

SEQ ID NO: 2573099 - RNA, 15 nt, Human
ugggcagaucuaccc

SEQ ID NO: 2573100 - RNA, 15 nt, Human
ugggcagauuuucag

SEQ ID NO: 2573101 - RNA, 22 nt, Human
ugggcagaucuaccccuuacuu

SEQ ID NO: 2573102 - RNA, 17 nt, Human
ugggcagauuuucagca

SEQ ID NO: 2573103 - RNA, 20 nt, Human
ugggcgugagaccugccccu

SEQ ID NO: 2573104 - RNA, 22 nt, Human
ugggcuaagugauccucccacc

SEQ ID NO: 2573105 - RNA, 16 nt, Human
uggggaugugggaggg

SEQ ID NO: 2573106 - RNA, 15 nt, Human
uggggaugugggagg

SEQ ID NO: 2573107 - RNA, 14 nt, Human
uggggaugugggag

SEQ ID NO: 2573108 - RNA, 19 nt, Human
uggggaacaaggguggcau

SEQ ID NO: 2573109 - RNA, 22 nt, Human
uggggaaaggggucggcugacc

SEQ ID NO: 2573110 - RNA, 21 nt, Human
uggggaaaggggucggcugac

SEQ ID NO: 2573111 - RNA, 23 nt, Human
uggggaaaggggucggcugacca

SEQ ID NO: 2573112 - RNA, 15 nt, Human
uggggaacaagggug

SEQ ID NO: 2573113 - RNA, 21 nt, Human
ugggggaucacagccucugaa

SEQ ID NO: 2573114 - RNA, 20 nt, Human
uggggauugggccccugcca

SEQ ID NO: 2573115 - RNA, 20 nt, Human
ugggggaugacuagaggcag

SEQ ID NO: 2573116 - RNA, 23 nt, Human
uggggauugggugggcaggaaaa

SEQ ID NO: 2573117 - RNA, 20 nt, Human
ugggggaucacagccucuga

SEQ ID NO: 2573118 - RNA, 18 nt, Human
ugggggucuguguguuua

SEQ ID NO: 2573119 - RNA, 15 nt, Human
ugggggucugugugu

SEQ ID NO: 2573120 - RNA, 19 nt, Human
ugggggcugggcagaggaa

SEQ ID NO: 2573121 - RNA, 14 nt, Human
ugggggcuggccuc

SEQ ID NO: 2573122 - RNA, 21 nt, Human
ugggggcugcagcauguugcu

SEQ ID NO: 2573123 - RNA, 12 nt, Human
ugggggugcauu

SEQ ID NO: 2573124 - RNA, 15 nt, Human
ugggggugcauuuga

SEQ ID NO: 2573125 - RNA, 18 nt, Human
ugggggcugggcagagga

SEQ ID NO: 2573126 - RNA, 17 nt, Human
ugggggcugggcagagg

SEQ ID NO: 2573127 - RNA, 11 nt, Human
ugggggaugua

SEQ ID NO: 2573128 - RNA, 13 nt, Human
ugggggcaagaag

SEQ ID NO: 2573129 - RNA, 23 nt, Human
ugggggcaagaagaucacgcucc

SEQ ID NO: 2573130 - RNA, 13 nt, Human
ugggggcagaggg

SEQ ID NO: 2573131 - RNA, 14 nt, Human
ugggggcugcagca

SEQ ID NO: 2573132 - RNA, 16 nt, Human
ugggggcagagggcag

SEQ ID NO: 2573133 - RNA, 21 nt, Human
ugggggcggggugggaaagau

SEQ ID NO: 2573134 - RNA, 14 nt, Human
ugggaguacaaaag

SEQ ID NO: 2573135 - RNA, 22 nt, Human
ugggagcugccuguucagcucc

SEQ ID NO: 2573136 - RNA, 21 nt, Human
ugggagcugccuguucagcuc

SEQ ID NO: 2573137 - RNA, 17 nt, Human
ugggagcugccuguuca

SEQ ID NO: 2573138 - RNA, 21 nt, Human
ugggagugaggaugucugggc

SEQ ID NO: 2573139 - RNA, 15 nt, Human
ugggauccuccaggu

SEQ ID NO: 2573140 - RNA, 13 nt, Human
ugggaguccccuu

SEQ ID NO: 2573141 - RNA, 15 nt, Human
ugggagucaagugug

SEQ ID NO: 2573142 - RNA, 16 nt, Human
ugggagcugaggccac

SEQ ID NO: 2573143 - RNA, 15 nt, Human
ugggagugagcuggu

SEQ ID NO: 2573144 - RNA, 13 nt, Human
ugggauccuggag

SEQ ID NO: 2573145 - RNA, 18 nt, Human
ugggauccuccaggugca

SEQ ID NO: 2573146 - RNA, 18 nt, Human
ugggauuacaggcuccug

SEQ ID NO: 2573147 - RNA, 20 nt, Human
ugggaguccccuuuucuuuu

SEQ ID NO: 2573148 - RNA, 13 nt, Human
ugggaucugcccc

SEQ ID NO: 2573149 - RNA, 16 nt, Human
ugggauuacaggugug

SEQ ID NO: 2573150 - RNA, 20 nt, Human
ugggcagagcuggcucugag

SEQ ID NO: 2573151 - RNA, 18 nt, Human
ugggcagagcuggcucug

SEQ ID NO: 2573152 - RNA, 16 nt, Human
ugggcagagcuggcuc

SEQ ID NO: 2573153 - RNA, 15 nt, Human
ugggcagaggaaagc

SEQ ID NO: 2573154 - RNA, 18 nt, Human
ugggaucugccccucccu

SEQ ID NO: 2573155 - RNA, 16 nt, Human
ugggaucugccccucc

SEQ ID NO: 2573156 - RNA, 17 nt, Human
ugggauuacagguguga

SEQ ID NO: 2573157 - RNA, 21 nt, Human
ugggauuacagggaugagcca

SEQ ID NO: 2573158 - RNA, 17 nt, Human
ugggagaggugccagca

SEQ ID NO: 2573159 - RNA, 23 nt, Human
ugggagaggauuuuuuucugagc

SEQ ID NO: 2573160 - RNA, 20 nt, Human
ugggagaggauuuuuuucug

SEQ ID NO: 2573161 - RNA, 16 nt, Human
ugggacguggcucagc

SEQ ID NO: 2573162 - RNA, 23 nt, Human
ugggagauauauuuuuaagauaa

SEQ ID NO: 2573163 - RNA, 21 nt, Human
ugggagauauauuuuuaagau

SEQ ID NO: 2573164 - RNA, 22 nt, Human
ugggagaggugccagcaacuga

SEQ ID NO: 2573165 - RNA, 14 nt, Human
ugggagauguggaa

SEQ ID NO: 2573166 - RNA, 13 nt, Human
ugggagcaaaaga

SEQ ID NO: 2573167 - RNA, 14 nt, Human
ugggagcugccugu

SEQ ID NO: 2573168 - RNA, 13 nt, Human
ugggagcugccug

SEQ ID NO: 2573169 - RNA, 12 nt, Human
ugggagcugccu

SEQ ID NO: 2573170 - RNA, 20 nt, Human
ugggagcugaggccacacuc

SEQ ID NO: 2573171 - RNA, 22 nt, Human
ugggagcugaggccacacucag

SEQ ID NO: 2573172 - RNA, 23 nt, Human
ugggagauucaagggacccauga

SEQ ID NO: 2573173 - RNA, 19 nt, Human
ugggacaaaucaagcuuca

SEQ ID NO: 2573174 - RNA, 12 nt, Human
ugggacacccug

SEQ ID NO: 2573175 - RNA, 17 nt, Human
ugggaauugugugaugu

SEQ ID NO: 2573176 - RNA, 14 nt, Human
ugggaauuguguga

SEQ ID NO: 2573177 - RNA, 22 nt, Human
ugggaauguuugucucauccca

SEQ ID NO: 2573178 - RNA, 16 nt, Human
ugggaauguuugucuc

SEQ ID NO: 2573179 - RNA, 20 nt, Human
ugggaauguuacauuguuug

SEQ ID NO: 2573180 - RNA, 10 nt, Human
ugggaauguu

SEQ ID NO: 2573181 - RNA, 14 nt, Human
ugggacggugccca

SEQ ID NO: 2573182 - RNA, 23 nt, Human
ugggaccgccagauggggccucu

SEQ ID NO: 2573183 - RNA, 23 nt, Human
ugggacggugcccaagccagagg

SEQ ID NO: 2573184 - RNA, 15 nt, Human
ugggacguggcucag

SEQ ID NO: 2573185 - RNA, 23 nt, Human
ugggaccugccaggcaggggugg

SEQ ID NO: 2573186 - RNA, 19 nt, Human
ugggaccugccaggcaggg

SEQ ID NO: 2573187 - RNA, 18 nt, Human
ugggaccugccaggcagg

SEQ ID NO: 2573188 - RNA, 15 nt, Human
ugggaccuuuagugg

SEQ ID NO: 2573189 - RNA, 20 nt, Human
ugggaccugccaggcagggg

SEQ ID NO: 2573190 - RNA, 13 nt, Human
ugggacacccugu

SEQ ID NO: 2573191 - RNA, 19 nt, Human
ugggaccuaggggcgccgc

SEQ ID NO: 2573192 - RNA, 23 nt, Human
ugggaccucaguuuuaucauuuu

SEQ ID NO: 2573193 - RNA, 17 nt, Human
ugggaccugccaggcag

SEQ ID NO: 2573194 - RNA, 16 nt, Human
uggcuggaagggagga

SEQ ID NO: 2573195 - RNA, 21 nt, Human
uggcugggggccucagugcca

SEQ ID NO: 2573196 - RNA, 19 nt, Human
uggcuggaugaaauuuucu

SEQ ID NO: 2573197 - RNA, 23 nt, Human
uggcuggagacgggugggcggcu

SEQ ID NO: 2573198 - RNA, 16 nt, Human
uggcugguccagggcu

SEQ ID NO: 2573199 - RNA, 15 nt, Human
uggcugguccagggc

SEQ ID NO: 2573200 - RNA, 13 nt, Human
uggcugguccagg

SEQ ID NO: 2573201 - RNA, 22 nt, Human
uggcugguaacaguucauguuu

SEQ ID NO: 2573202 - RNA, 21 nt, Human
uggcuggaagauccugcgggu

SEQ ID NO: 2573203 - RNA, 20 nt, Human
uggcuggaagauccugcggg

SEQ ID NO: 2573204 - RNA, 15 nt, Human
uggcugcuuggccuu

SEQ ID NO: 2573205 - RNA, 13 nt, Human
uggcucuggagac

SEQ ID NO: 2573206 - RNA, 19 nt, Human
uggcuggaagauccugcgg

SEQ ID NO: 2573207 - RNA, 21 nt, Human
uggcugcuucaaggauccuga

SEQ ID NO: 2573208 - RNA, 16 nt, Human
uggcugcuucaaggau

SEQ ID NO: 2573209 - RNA, 11 nt, Human
uggcucugcug

SEQ ID NO: 2573210 - RNA, 12 nt, Human
uggcucugcugg

SEQ ID NO: 2573211 - RNA, 23 nt, Human
uggcucugcaaugggcacuggga

SEQ ID NO: 2573212 - RNA, 22 nt, Human
uggcucugaggugccuguccca

SEQ ID NO: 2573213 - RNA, 14 nt, Human
uggcucugcaaugg

SEQ ID NO: 2573214 - RNA, 22 nt, Human
uggccccacccugggcccuggg

SEQ ID NO: 2573215 - RNA, 20 nt, Human
uggcucuccaagugccagag

SEQ ID NO: 2573216 - RNA, 19 nt, Human
uggcucuccaagugccaga

SEQ ID NO: 2573217 - RNA, 15 nt, Human
uggcucuccaagugc

SEQ ID NO: 2573218 - RNA, 14 nt, Human
uggcucuccaagug

SEQ ID NO: 2573219 - RNA, 12 nt, Human
uggccccagcac

SEQ ID NO: 2573220 - RNA, 13 nt, Human
uggcucuccaagu

SEQ ID NO: 2573221 - RNA, 14 nt, Human
uggcucucuccagg

SEQ ID NO: 2573222 - RNA, 13 nt, Human
uggcucucuccag

SEQ ID NO: 2573223 - RNA, 23 nt, Human
uggcucuccaagugccagaggug

SEQ ID NO: 2573224 - RNA, 17 nt, Human
uggcucucccauuuccu

SEQ ID NO: 2573225 - RNA, 21 nt, Human
uggcucugaggugccuguccc

SEQ ID NO: 2573226 - RNA, 20 nt, Human
uggcucugaggugccugucc

SEQ ID NO: 2573227 - RNA, 19 nt, Human
uggcucugagcgccuccau

SEQ ID NO: 2573228 - RNA, 15 nt, Human
uggcucucuccagga

SEQ ID NO: 2573229 - RNA, 19 nt, Human
uggcucugaccgaaacagc

SEQ ID NO: 2573230 - RNA, 14 nt, Human
uggcccagggccca

SEQ ID NO: 2573231 - RNA, 15 nt, Human
uggcccagggcccag

SEQ ID NO: 2573232 - RNA, 19 nt, Human
uggcccauccccccucacc

SEQ ID NO: 2573233 - RNA, 16 nt, Human
uggcccagggcccaga

SEQ ID NO: 2573234 - RNA, 21 nt, Human
uggcccauccccccucaccag

SEQ ID NO: 2573235 - RNA, 20 nt, Human
uggcccauccccccucacca

SEQ ID NO: 2573236 - RNA, 22 nt, Human
uggcccauccccccucaccagg

SEQ ID NO: 2573237 - RNA, 18 nt, Human
uggccccacccugggccc

SEQ ID NO: 2573238 - RNA, 16 nt, Human
uggccccacccugggc

SEQ ID NO: 2573239 - RNA, 15 nt, Human
uggccccacccuggg

SEQ ID NO: 2573240 - RNA, 13 nt, Human
uggccccacccug

SEQ ID NO: 2573241 - RNA, 20 nt, Human
uggccccaagggcaaaauuc

SEQ ID NO: 2573242 - RNA, 16 nt, Human
uggcuuccuggcaaua

SEQ ID NO: 2573243 - RNA, 16 nt, Human
uggcuuccuuucuugg

SEQ ID NO: 2573244 - RNA, 15 nt, Human
uggcuuccuccugcg

SEQ ID NO: 2573245 - RNA, 21 nt, Human
uggcuuccuccucccuccugc

SEQ ID NO: 2573246 - RNA, 13 nt, Human
uggcuuccuccug

SEQ ID NO: 2573247 - RNA, 14 nt, Human
uggcuucuggagcc

SEQ ID NO: 2573248 - RNA, 22 nt, Human
uggcuucucauacguccaccau

SEQ ID NO: 2573249 - RNA, 21 nt, Human
uggcuucucauacguccacca

SEQ ID NO: 2573250 - RNA, 13 nt, Human
uggcuucucauac

SEQ ID NO: 2573251 - RNA, 14 nt, Human
uggcuuccuuucuu

SEQ ID NO: 2573252 - RNA, 14 nt, Human
uggcuucuccaggg

SEQ ID NO: 2573253 - RNA, 15 nt, Human
uggcuugagaaauau

SEQ ID NO: 2573254 - RNA, 20 nt, Human
uggcuugaagccaagucagc

SEQ ID NO: 2573255 - RNA, 18 nt, Human
uggcuucuucuuuaggau

SEQ ID NO: 2573256 - RNA, 14 nt, Human
uggcuuuugugcau

SEQ ID NO: 2573257 - RNA, 23 nt, Human
uggcuuucuccgacugcuaggga

SEQ ID NO: 2573258 - RNA, 17 nt, Human
uggcuuuggcuucuugg

SEQ ID NO: 2573259 - RNA, 21 nt, Human
uggcuuuauccucuuuagagu

SEQ ID NO: 2573260 - RNA, 15 nt, Human
uggcuuucagccucu

SEQ ID NO: 2573261 - RNA, 22 nt, Human
uggcuuucuccgacugcuaggg

SEQ ID NO: 2573262 - RNA, 20 nt, Human
uggcuuucucccacugaguu

SEQ ID NO: 2573263 - RNA, 21 nt, Human
uggcuuucccggacugcaagc

SEQ ID NO: 2573264 - RNA, 17 nt, Human
uggcuuucauuauuagu

SEQ ID NO: 2573265 - RNA, 12 nt, Human
uggcuuucccgg

SEQ ID NO: 2573266 - RNA, 21 nt, Human
uggcuugaguuuaaauuguaa

SEQ ID NO: 2573267 - RNA, 20 nt, Human
uggcuuuauccucuuuagag

SEQ ID NO: 2573268 - RNA, 16 nt, Human
uggcuuuauccucuuu

SEQ ID NO: 2573269 - RNA, 14 nt, Human
uggcuuuaaugaau

SEQ ID NO: 2573270 - RNA, 16 nt, Human
ugccccaucagugcuc

SEQ ID NO: 2573271 - RNA, 18 nt, Human
ugccccaucagugcuccc

SEQ ID NO: 2573272 - RNA, 20 nt, Human
ugccccaucagugcucccuc

SEQ ID NO: 2573273 - RNA, 21 nt, Human
ugccccaucagugcucccuca

SEQ ID NO: 2573274 - RNA, 23 nt, Human
ugccccucaacucuccuccagag

SEQ ID NO: 2573275 - RNA, 14 nt, Human
ugccccaggaccag

SEQ ID NO: 2573276 - RNA, 18 nt, Human
ugccccaggaccagcuca

SEQ ID NO: 2573277 - RNA, 19 nt, Human
ugccccaggaccagcucag

SEQ ID NO: 2573278 - RNA, 20 nt, Human
ugccccaggaccagcucagg

SEQ ID NO: 2573279 - RNA, 14 nt, Human
ugccccaggccuga

SEQ ID NO: 2573280 - RNA, 15 nt, Human
ugccccagggcuccc

SEQ ID NO: 2573281 - RNA, 17 nt, Human
ugccccuggcagccccu

SEQ ID NO: 2573282 - RNA, 22 nt, Human
ugccccucccccaacccccacc

SEQ ID NO: 2573283 - RNA, 23 nt, Human
ugccccucccccaacccccaccc

SEQ ID NO: 2573284 - RNA, 17 nt, Human
ugccccauccuccagca

SEQ ID NO: 2573285 - RNA, 18 nt, Human
ugccccauccuccagcag

SEQ ID NO: 2573286 - RNA, 19 nt, Human
ugccccucaacucuccucc

SEQ ID NO: 2573287 - RNA, 12 nt, Human
ugccccucccag

SEQ ID NO: 2573288 - RNA, 21 nt, Human
ugccccucccagaacacacuc

SEQ ID NO: 2573289 - RNA, 12 nt, Human
ugccccuccccc

SEQ ID NO: 2573290 - RNA, 17 nt, Human
ugccccucccccaaccc

SEQ ID NO: 2573291 - RNA, 21 nt, Human
ugccccucccccaacccccac

SEQ ID NO: 2573292 - RNA, 20 nt, Human
ugcccagucccccaacccca

SEQ ID NO: 2573293 - RNA, 18 nt, Human
ugcccagucccccaaccc

SEQ ID NO: 2573294 - RNA, 16 nt, Human
ugcccagucccccaac

SEQ ID NO: 2573295 - RNA, 14 nt, Human
ugcccaguccccca

SEQ ID NO: 2573296 - RNA, 20 nt, Human
ugcccagguuucuggucucu

SEQ ID NO: 2573297 - RNA, 21 nt, Human
ugcccagucgauaucucacuu

SEQ ID NO: 2573298 - RNA, 23 nt, Human
ugcccagucccccaaccccagcc

SEQ ID NO: 2573299 - RNA, 22 nt, Human
ugcccagucccccaaccccagc

SEQ ID NO: 2573300 - RNA, 23 nt, Human
ugcccaggggugcccccuccucu

SEQ ID NO: 2573301 - RNA, 22 nt, Human
ugcccaggggugcccccuccuc

SEQ ID NO: 2573302 - RNA, 21 nt, Human
ugcccaggggugcccccuccu

SEQ ID NO: 2573303 - RNA, 20 nt, Human
ugcccaggggugcccccucc

SEQ ID NO: 2573304 - RNA, 19 nt, Human
ugcccaggggugcccccuc

SEQ ID NO: 2573305 - RNA, 18 nt, Human
ugcccaggggugcccccu

SEQ ID NO: 2573306 - RNA, 16 nt, Human
ugcccaggggugcccc

SEQ ID NO: 2573307 - RNA, 15 nt, Human
ugcccaggggugccc

SEQ ID NO: 2573308 - RNA, 11 nt, Human
ugcccaggggu

SEQ ID NO: 2573309 - RNA, 20 nt, Human
ugcccaggggcccacaggga

SEQ ID NO: 2573310 - RNA, 17 nt, Human
ugcccaggggagcccuc

SEQ ID NO: 2573311 - RNA, 16 nt, Human
ugcccaggggagcccu

SEQ ID NO: 2573312 - RNA, 15 nt, Human
ugcccaggggagccc

SEQ ID NO: 2573313 - RNA, 14 nt, Human
ugcccaggggagcc

SEQ ID NO: 2573314 - RNA, 23 nt, Human
ugcccagggcucagccugguggg

SEQ ID NO: 2573315 - RNA, 18 nt, Human
ugcccaugggcacugcug

SEQ ID NO: 2573316 - RNA, 17 nt, Human
ugcccaugggcacugcu

SEQ ID NO: 2573317 - RNA, 16 nt, Human
ugcccaugggcacugc

SEQ ID NO: 2573318 - RNA, 15 nt, Human
ugcccaugggcacug

SEQ ID NO: 2573319 - RNA, 19 nt, Human
ugccccagcucuggcuucc

SEQ ID NO: 2573320 - RNA, 20 nt, Human
ugcccaugggcacugcuggg

SEQ ID NO: 2573321 - RNA, 13 nt, Human
ugccccaggacca

SEQ ID NO: 2573322 - RNA, 16 nt, Human
ugcccaugggagcugg

SEQ ID NO: 2573323 - RNA, 24 nt, Human
ugcccauggacaggcuggcuccag

SEQ ID NO: 2573324 - RNA, 15 nt, Human
ugcccaugccaccgc

SEQ ID NO: 2573325 - RNA, 17 nt, Human
ugcccaguuucagggcu

SEQ ID NO: 2573326 - RNA, 16 nt, Human
ugcccaguuucugccu

SEQ ID NO: 2573327 - RNA, 18 nt, Human
ugcccaguuucugccucu

SEQ ID NO: 2573328 - RNA, 17 nt, Human
ugcccaguuucugccuc

SEQ ID NO: 2573329 - RNA, 20 nt, Human
ugcccaucacaggguugggc

SEQ ID NO: 2573330 - RNA, 19 nt, Human
ugcccaguuucugccucug

SEQ ID NO: 2573331 - RNA, 23 nt, Human
ugcccaucacaggguugggccca

SEQ ID NO: 2573332 - RNA, 19 nt, Human
ugcccaucugggaaaauac

SEQ ID NO: 2573333 - RNA, 13 nt, Human
ugcccaucccugg

SEQ ID NO: 2573334 - RNA, 17 nt, Human
ugcccacccuccacucu

SEQ ID NO: 2573335 - RNA, 20 nt, Human
ugccauccagguucagcuug

SEQ ID NO: 2573336 - RNA, 21 nt, Human
ugccauccagguucagcuugu

SEQ ID NO: 2573337 - RNA, 13 nt, Human
ugcccaccuggcc

SEQ ID NO: 2573338 - RNA, 14 nt, Human
ugcccaccugccca

SEQ ID NO: 2573339 - RNA, 15 nt, Human
ugcccaccugcccau

SEQ ID NO: 2573340 - RNA, 17 nt, Human
ugcccaccugcccauca

SEQ ID NO: 2573341 - RNA, 19 nt, Human
ugcccaccugcccaucaca

SEQ ID NO: 2573342 - RNA, 15 nt, Human
ugcccacucccugca

SEQ ID NO: 2573343 - RNA, 14 nt, Human
ugcccacucccugc

SEQ ID NO: 2573344 - RNA, 16 nt, Human
ugcccacucccugcaa

SEQ ID NO: 2573345 - RNA, 11 nt, Human
ugcccaggcug

SEQ ID NO: 2573346 - RNA, 21 nt, Human
ugcccacccguggagauggga

SEQ ID NO: 2573347 - RNA, 20 nt, Human
ugcccagggcucagccuggu

SEQ ID NO: 2573348 - RNA, 21 nt, Human
ugcccagggcucagccuggug

SEQ ID NO: 2573349 - RNA, 13 nt, Human
ugcccaggcuggc

SEQ ID NO: 2573350 - RNA, 13 nt, Human
ugcccaggcugga

SEQ ID NO: 2573351 - RNA, 20 nt, Human
ugcccaggcuggagugcaau

SEQ ID NO: 2573352 - RNA, 18 nt, Human
ugcccaggcuggagugca

SEQ ID NO: 2573353 - RNA, 22 nt, Human
ugccacccugggcucugugggc

SEQ ID NO: 2573354 - RNA, 22 nt, Human
ugccacuacggaauaguuggcu

SEQ ID NO: 2573355 - RNA, 20 nt, Human
ugccacuaaauugacacuua

SEQ ID NO: 2573356 - RNA, 19 nt, Human
ugccacccuggggagaaag

SEQ ID NO: 2573357 - RNA, 21 nt, Human
ugccacccugggcucuguggg

SEQ ID NO: 2573358 - RNA, 20 nt, Human
ugccacccugggcucugugg

SEQ ID NO: 2573359 - RNA, 19 nt, Human
ugccacccugggcucugug

SEQ ID NO: 2573360 - RNA, 18 nt, Human
ugccacccugggcucugu

SEQ ID NO: 2573361 - RNA, 17 nt, Human
ugccacccugggcucug

SEQ ID NO: 2573362 - RNA, 15 nt, Human
ugccacccugggcuc

SEQ ID NO: 2573363 - RNA, 14 nt, Human
ugccacccugggcu

SEQ ID NO: 2573364 - RNA, 13 nt, Human
ugccacccugggc

SEQ ID NO: 2573365 - RNA, 14 nt, Human
ugccacccuaccug

SEQ ID NO: 2573366 - RNA, 16 nt, Human
ugccacccucaugcug

SEQ ID NO: 2573367 - RNA, 17 nt, Human
ugccacccucaugcugu

SEQ ID NO: 2573368 - RNA, 13 nt, Human
ugccacccuaccu

SEQ ID NO: 2573369 - RNA, 16 nt, Human
ugccaccagucacugu

SEQ ID NO: 2573370 - RNA, 23 nt, Human
ugccaccagagaccguccucacc

SEQ ID NO: 2573371 - RNA, 18 nt, Human
ugccaccaggccaccucc

SEQ ID NO: 2573372 - RNA, 17 nt, Human
ugccaccaggccaccuc

SEQ ID NO: 2573373 - RNA, 14 nt, Human
ugccaccaggccac

SEQ ID NO: 2573374 - RNA, 13 nt, Human
ugccacccaccuc

SEQ ID NO: 2573375 - RNA, 12 nt, Human
ugccacccuacc

SEQ ID NO: 2573376 - RNA, 12 nt, Human
ugccacccacca

SEQ ID NO: 2573377 - RNA, 17 nt, Human
ugccacccaccagggcg

SEQ ID NO: 2573378 - RNA, 19 nt, Human
ugccaccauccugcugcug

SEQ ID NO: 2573379 - RNA, 15 nt, Human
ugccaccauccugcu

SEQ ID NO: 2573380 - RNA, 18 nt, Human
ugccaccauggccagcca

SEQ ID NO: 2573381 - RNA, 22 nt, Human
ugccagguuuuuggucugaccc

SEQ ID NO: 2573382 - RNA, 19 nt, Human
ugccagguuuuuggucuga

SEQ ID NO: 2573383 - RNA, 18 nt, Human
ugccagguuuuuggucug

SEQ ID NO: 2573384 - RNA, 18 nt, Human
ugccaggcaggggugggg

SEQ ID NO: 2573385 - RNA, 17 nt, Human
ugccaggcagggguggg

SEQ ID NO: 2573386 - RNA, 16 nt, Human
ugccaggcaggggugg

SEQ ID NO: 2573387 - RNA, 15 nt, Human
ugccaggcaggggug

SEQ ID NO: 2573388 - RNA, 10 nt, Human
ugccaggcau

SEQ ID NO: 2573389 - RNA, 18 nt, Human
ugccaggauggaaugaug

SEQ ID NO: 2573390 - RNA, 12 nt, Human
ugccaggcaggg

SEQ ID NO: 2573391 - RNA, 20 nt, Human
ugccacucacacagccaggu

SEQ ID NO: 2573392 - RNA, 19 nt, Human
ugccacucacacagccagg

SEQ ID NO: 2573393 - RNA, 18 nt, Human
ugccacucacacagccag

SEQ ID NO: 2573394 - RNA, 16 nt, Human
ugccacucacacagcc

SEQ ID NO: 2573395 - RNA, 15 nt, Human
ugccacucacacagc

SEQ ID NO: 2573396 - RNA, 11 nt, Human
ugccacucaca

SEQ ID NO: 2573397 - RNA, 15 nt, Human
ugccacuagggcucu

SEQ ID NO: 2573398 - RNA, 19 nt, Human
ugccaaauauaaauaaaaa

SEQ ID NO: 2573399 - RNA, 22 nt, Human
ugccaaauauaaauaaaaauaa

SEQ ID NO: 2573400 - RNA, 14 nt, Human
ugcaucaagaugug

SEQ ID NO: 2573401 - RNA, 16 nt, Human
ugccaaauauguccug

SEQ ID NO: 2573402 - RNA, 16 nt, Human
ugccaaauaauaaaaa

SEQ ID NO: 2573403 - RNA, 19 nt, Human
ugcaucaagaugugacaug

SEQ ID NO: 2573404 - RNA, 13 nt, Human
ugccaccaggcca

SEQ ID NO: 2573405 - RNA, 22 nt, Human
ugccaccaggagaaccacuaca

SEQ ID NO: 2573406 - RNA, 14 nt, Human
ugccaccaggagaa

SEQ ID NO: 2573407 - RNA, 17 nt, Human
ugccaccaggagaacca

SEQ ID NO: 2573408 - RNA, 22 nt, Human
ugccaccagagaccguccucac

SEQ ID NO: 2573409 - RNA, 21 nt, Human
ugccaccagagaccguccuca

SEQ ID NO: 2573410 - RNA, 19 nt, Human
ugccaccagagaccguccu

SEQ ID NO: 2573411 - RNA, 18 nt, Human
ugccaccagagaccgucc

SEQ ID NO: 2573412 - RNA, 12 nt, Human
ugccaccaggag

SEQ ID NO: 2573413 - RNA, 13 nt, Human
ugccaccaggaga

SEQ ID NO: 2573414 - RNA, 17 nt, Human
ugccaaauauaaauaaa

SEQ ID NO: 2573415 - RNA, 18 nt, Human
ugccaaauauaaauaaaa

SEQ ID NO: 2573416 - RNA, 20 nt, Human
ugcauauuuauaaaaauaaa

SEQ ID NO: 2573417 - RNA, 18 nt, Human
ugcauauccugagccauc

SEQ ID NO: 2573418 - RNA, 16 nt, Human
ugcauauccugagcca

SEQ ID NO: 2573419 - RNA, 17 nt, Human
ugcauauccugagccau

SEQ ID NO: 2573420 - RNA, 13 nt, Human
ugcauauguugaa

SEQ ID NO: 2573421 - RNA, 15 nt, Human
ugcauauguaugacu

SEQ ID NO: 2573422 - RNA, 21 nt, Human
ugcauauuuauaaaaauaaaa

SEQ ID NO: 2573423 - RNA, 15 nt, Human
ugcauauguugaaua

SEQ ID NO: 2573424 - RNA, 17 nt, Human
ugcauauguugaauacu

SEQ ID NO: 2573425 - RNA, 12 nt, Human
ugcauauguaug

SEQ ID NO: 2573426 - RNA, 20 nt, Human
ugcauauuguauuacuagaa

SEQ ID NO: 2573427 - RNA, 23 nt, Human
ugcaccggcuggccuggccccuc

SEQ ID NO: 2573428 - RNA, 19 nt, Human
ugaguccccuguuuguuuc

SEQ ID NO: 2573429 - RNA, 15 nt, Human
ugcaccgggccacag

SEQ ID NO: 2573430 - RNA, 14 nt, Human
ugcaccgggccaca

SEQ ID NO: 2573431 - RNA, 20 nt, Human
ugaguccccuguuuguuucu

SEQ ID NO: 2573432 - RNA, 22 nt, Human
ugcaccgggccacagagaaagu

SEQ ID NO: 2573433 - RNA, 17 nt, Human
ugcaccgggccacagag

SEQ ID NO: 2573434 - RNA, 19 nt, Human
ugcacugcccauggacagg

SEQ ID NO: 2573435 - RNA, 21 nt, Human
ugcacugcccauggacaggcu

SEQ ID NO: 2573436 - RNA, 16 nt, Human
ugcacugaugcugccc

SEQ ID NO: 2573437 - RNA, 17 nt, Human
ugcacugaugcugcccc

SEQ ID NO: 2573438 - RNA, 21 nt, Human
ugcacugaugcugccccucau

SEQ ID NO: 2573439 - RNA, 22 nt, Human
ugcacugaugcugccccucauc

SEQ ID NO: 2573440 - RNA, 19 nt, Human
ugcacugagggccacacua

SEQ ID NO: 2573441 - RNA, 17 nt, Human
ugcacugagggccacac

SEQ ID NO: 2573442 - RNA, 16 nt, Human
ugcacugagggccaca

SEQ ID NO: 2573443 - RNA, 15 nt, Human
ugcacugagggccac

SEQ ID NO: 2573444 - RNA, 22 nt, Human
ugcacugauauaucaugaguga

SEQ ID NO: 2573445 - RNA, 14 nt, Human
ugcacugaugcugc

SEQ ID NO: 2573446 - RNA, 14 nt, Human
ugcacugagggcca

SEQ ID NO: 2573447 - RNA, 12 nt, Human
ugcacugagggc

SEQ ID NO: 2573448 - RNA, 17 nt, Human
ugcacugagcagagucu

SEQ ID NO: 2573449 - RNA, 15 nt, Human
ugcacugagcagagu

SEQ ID NO: 2573450 - RNA, 15 nt, Human
ugcacggcugcugag

SEQ ID NO: 2573451 - RNA, 14 nt, Human
ugcacggcugcuga

SEQ ID NO: 2573452 - RNA, 13 nt, Human
ugcacggcugcug

SEQ ID NO: 2573453 - RNA, 17 nt, Human
ugcacgcccauguguga

SEQ ID NO: 2573454 - RNA, 19 nt, Human
ugcacgcccaugugugagu

SEQ ID NO: 2573455 - RNA, 22 nt, Human
ugcacgcccaugugugagugug

SEQ ID NO: 2573456 - RNA, 15 nt, Human
ugcacgcccaugugu

SEQ ID NO: 2573457 - RNA, 22 nt, Human
ugcagagcagugggccuggcca

SEQ ID NO: 2573458 - RNA, 15 nt, Human
ugcagagcugaagau

SEQ ID NO: 2573459 - RNA, 21 nt, Human
ugcagagcaggaaacaugacu

SEQ ID NO: 2573460 - RNA, 15 nt, Human
ugcagaggccagagg

SEQ ID NO: 2573461 - RNA, 14 nt, Human
ugcagaggccagag

SEQ ID NO: 2573462 - RNA, 11 nt, Human
ugcagagcugc

SEQ ID NO: 2573463 - RNA, 17 nt, Human
ugcagaggccagaggcc

SEQ ID NO: 2573464 - RNA, 13 nt, Human
ugcagaggggcag

SEQ ID NO: 2573465 - RNA, 13 nt, Human
ugcagaggggaaa

SEQ ID NO: 2573466 - RNA, 20 nt, Human
ugcagcaauaaagcagcguu

SEQ ID NO: 2573467 - RNA, 23 nt, Human
ugcagcaauaaagcagcguuucu

SEQ ID NO: 2573468 - RNA, 17 nt, Human
ugcagcacucacacagg

SEQ ID NO: 2573469 - RNA, 20 nt, Human
ugcagcacucacacaggacc

SEQ ID NO: 2573470 - RNA, 13 nt, Human
ugcagcagaggca

SEQ ID NO: 2573471 - RNA, 16 nt, Human
ugcagcagaggcacug

SEQ ID NO: 2573472 - RNA, 18 nt, Human
ugcagcagcgguggccuc

SEQ ID NO: 2573473 - RNA, 20 nt, Human
ugcacuggggagcccgucuc

SEQ ID NO: 2573474 - RNA, 16 nt, Human
ugcacuggggagcccg

SEQ ID NO: 2573475 - RNA, 21 nt, Human
ugcacuugugauuauuuauua

SEQ ID NO: 2573476 - RNA, 15 nt, Human
ugcacuguaugcugg

SEQ ID NO: 2573477 - RNA, 16 nt, Human
ugcacuguaugcugga

SEQ ID NO: 2573478 - RNA, 21 nt, Human
ugcacuggaguccagucucuu

SEQ ID NO: 2573479 - RNA, 15 nt, Human
ugcacuggaguccag

SEQ ID NO: 2573480 - RNA, 18 nt, Human
ugcacuggaguccagucu

SEQ ID NO: 2573481 - RNA, 19 nt, Human
ugcacuggaguccagucuc

SEQ ID NO: 2573482 - RNA, 20 nt, Human
ugcacuggaguccagucucu

SEQ ID NO: 2573483 - RNA, 14 nt, Human
ugcacuuuguucug

SEQ ID NO: 2573484 - RNA, 12 nt, Human
ugcacuuuguuc

SEQ ID NO: 2573485 - RNA, 20 nt, Human
ugcacuuucuauccucugua

SEQ ID NO: 2573486 - RNA, 19 nt, Human
ugaggccugcccucaggga

SEQ ID NO: 2573487 - RNA, 14 nt, Human
ugcaggcagccagg

SEQ ID NO: 2573488 - RNA, 13 nt, Human
ugcaggcagccag

SEQ ID NO: 2573489 - RNA, 15 nt, Human
ugcaggcagccaggc

SEQ ID NO: 2573490 - RNA, 14 nt, Human
ugcaggcagacacg

SEQ ID NO: 2573491 - RNA, 13 nt, Human
ugcaggcagacac

SEQ ID NO: 2573492 - RNA, 12 nt, Human
ugcaggcagaca

SEQ ID NO: 2573493 - RNA, 23 nt, Human
ugcaggcacucaaugcagccaga

SEQ ID NO: 2573494 - RNA, 21 nt, Human
ugcaggcaccuuaguggcuuu

SEQ ID NO: 2573495 - RNA, 19 nt, Human
ugcaggcaccuuaguggcu

SEQ ID NO: 2573496 - RNA, 16 nt, Human
ugcaggcaccuuagug

SEQ ID NO: 2573497 - RNA, 23 nt, Human
ugcagcaugaccugugaccagca

SEQ ID NO: 2573498 - RNA, 15 nt, Human
ugcagcauaugagga

SEQ ID NO: 2573499 - RNA, 17 nt, Human
ugcagcauaugaggaug

SEQ ID NO: 2573500 - RNA, 20 nt, Human
ugcagcauaugaggaugcag

SEQ ID NO: 2573501 - RNA, 13 nt, Human
ugcagcaugaccu

SEQ ID NO: 2573502 - RNA, 17 nt, Human
ugcagcaugaccuguga

SEQ ID NO: 2573503 - RNA, 19 nt, Human
ugcagcaugaccugugacc

SEQ ID NO: 2573504 - RNA, 22 nt, Human
ugcagcaugaccugugaccagc

SEQ ID NO: 2573505 - RNA, 16 nt, Human
ugcagcagggaugccc

SEQ ID NO: 2573506 - RNA, 17 nt, Human
ugcagcagggaugcccu

SEQ ID NO: 2573507 - RNA, 18 nt, Human
ugcagcagggaugcccug

SEQ ID NO: 2573508 - RNA, 19 nt, Human
ugcagcagggaugcccugg

SEQ ID NO: 2573509 - RNA, 22 nt, Human
ugcagcagggaugcccuggagg

SEQ ID NO: 2573510 - RNA, 18 nt, Human
ugcagcagugagucucuu

SEQ ID NO: 2573511 - RNA, 22 nt, Human
ugcagcagugagucucuucaga

SEQ ID NO: 2573512 - RNA, 21 nt, Human
ugcagcaggaucuagaggggg

SEQ ID NO: 2573513 - RNA, 14 nt, Human
ugcagcagggaugc

SEQ ID NO: 2573514 - RNA, 20 nt, Human
ugcagcagcgguggccucuu

SEQ ID NO: 2573515 - RNA, 14 nt, Human
ugcagcagaggcac

SEQ ID NO: 2573516 - RNA, 20 nt, Human
ugcagugcucgcuguugcug

SEQ ID NO: 2573517 - RNA, 19 nt, Human
ugcagugcucgcuguugcu

SEQ ID NO: 2573518 - RNA, 23 nt, Human
ugcagugccuuggggaauuuccu

SEQ ID NO: 2573519 - RNA, 12 nt, Human
ugcagugccuug

SEQ ID NO: 2573520 - RNA, 17 nt, Human
ugcagugcucgcuguug

SEQ ID NO: 2573521 - RNA, 16 nt, Human
ugcagugcuuccaagg

SEQ ID NO: 2573522 - RNA, 19 nt, Human
ugcaggcccuggccucccc

SEQ ID NO: 2573523 - RNA, 17 nt, Human
ugcaggcccuggccucc

SEQ ID NO: 2573524 - RNA, 20 nt, Human
ugcagugauauggcagaaga

SEQ ID NO: 2573525 - RNA, 17 nt, Human
ugcagugauauggcaga

SEQ ID NO: 2573526 - RNA, 19 nt, Human
ugcaggccccgcuugucca

SEQ ID NO: 2573527 - RNA, 17 nt, Human
ugcagugccccuagcuu

SEQ ID NO: 2573528 - RNA, 16 nt, Human
ugcagugccccuagcu

SEQ ID NO: 2573529 - RNA, 22 nt, Human
ugcagugauauggcagaagaca

SEQ ID NO: 2573530 - RNA, 21 nt, Human
ugcagugauauggcagaagac

SEQ ID NO: 2573531 - RNA, 23 nt, Human
ugcagugauauggcagaagacac

SEQ ID NO: 2573532 - RNA, 16 nt, Human
ugcaggcccuggccuc

SEQ ID NO: 2573533 - RNA, 15 nt, Human
ugcaggcccuggccu

SEQ ID NO: 2573534 - RNA, 12 nt, Human
ugcaggcccugg

SEQ ID NO: 2573535 - RNA, 10 nt, Human
ugcaggcccc

SEQ ID NO: 2573536 - RNA, 21 nt, Human
ugcaggcaugcaugugcuugu

SEQ ID NO: 2573537 - RNA, 16 nt, Human
ugcaggcaucacagcu

SEQ ID NO: 2573538 - RNA, 20 nt, Human
ugcaggccaagagcagaggc

SEQ ID NO: 2573539 - RNA, 21 nt, Human
ugcaggccaagagcagaggca

SEQ ID NO: 2573540 - RNA, 15 nt, Human
ugcaggccaggccag

SEQ ID NO: 2573541 - RNA, 18 nt, Human
ugcaguucugaagaagau

SEQ ID NO: 2573542 - RNA, 17 nt, Human
ugcaguucugaagaaga

SEQ ID NO: 2573543 - RNA, 16 nt, Human
ugcaguucugaagaag

SEQ ID NO: 2573544 - RNA, 15 nt, Human
ugcaguucugaagaa

SEQ ID NO: 2573545 - RNA, 23 nt, Human
ugcagugcucgcuguugcugaau

SEQ ID NO: 2573546 - RNA, 22 nt, Human
ugcagugcucgcuguugcugaa

SEQ ID NO: 2573547 - RNA, 21 nt, Human
ugcagugcucgcuguugcuga

SEQ ID NO: 2573548 - RNA, 17 nt, Human
ugcaguggcucacgccu

SEQ ID NO: 2573549 - RNA, 22 nt, Human
ugcagugguaugaucacggcuc

SEQ ID NO: 2573550 - RNA, 22 nt, Human
ugcaguucugaagaagauggua

SEQ ID NO: 2573551 - RNA, 19 nt, Human
ugcaguucugaagaagaug

SEQ ID NO: 2573552 - RNA, 14 nt, Human
ugcaguugccaguc

SEQ ID NO: 2573553 - RNA, 13 nt, Human
ugcaguugccagu

SEQ ID NO: 2573554 - RNA, 17 nt, Human
ugcaguugacagcaggu

SEQ ID NO: 2573555 - RNA, 18 nt, Human
ugcauauaacuuauauug

SEQ ID NO: 2573556 - RNA, 16 nt, Human
ugcaguugacagcagg

SEQ ID NO: 2573557 - RNA, 14 nt, Human
ugcaguucugcagc

SEQ ID NO: 2573558 - RNA, 15 nt, Human
ugcaguugccaguca

SEQ ID NO: 2573559 - RNA, 22 nt, Human
ugcauauaacuuauauuguaag

SEQ ID NO: 2573560 - RNA, 20 nt, Human
ugcauauaacuuauauugua

SEQ ID NO: 2573561 - RNA, 21 nt, Human
ugcauauaacuuauauuguaa

SEQ ID NO: 2573562 - RNA, 13 nt, Human
ugcauauccugag

SEQ ID NO: 2573563 - RNA, 17 nt, Human
ugcauauauacauauau

SEQ ID NO: 2573564 - RNA, 15 nt, Human
ugcuccucuccaggc

SEQ ID NO: 2573565 - RNA, 14 nt, Human
ugcuccucuccagg

SEQ ID NO: 2573566 - RNA, 16 nt, Human
ugcuccucuccaggca

SEQ ID NO: 2573567 - RNA, 17 nt, Human
ugcuccuuguuccuaga

SEQ ID NO: 2573568 - RNA, 16 nt, Human
ugcuccuuguuccuag

SEQ ID NO: 2573569 - RNA, 17 nt, Human
ugcuccucuccccagca

SEQ ID NO: 2573570 - RNA, 18 nt, Human
ugcuccuuucuuguuuua

SEQ ID NO: 2573571 - RNA, 14 nt, Human
ugcucgccccagca

SEQ ID NO: 2573572 - RNA, 16 nt, Human
ugcucgccccagcagg

SEQ ID NO: 2573573 - RNA, 23 nt, Human
ugcuccuuguuccuagaguagag

SEQ ID NO: 2573574 - RNA, 17 nt, Human
ugcucgagacacaguga

SEQ ID NO: 2573575 - RNA, 23 nt, Human
ugcucgauuauucccuguacaau

SEQ ID NO: 2573576 - RNA, 20 nt, Human
ugcucuaugugcuuguaaaa

SEQ ID NO: 2573577 - RNA, 20 nt, Human
ugcucuaucuugcucuguaa

SEQ ID NO: 2573578 - RNA, 14 nt, Human
ugcucuaucuugcu

SEQ ID NO: 2573579 - RNA, 21 nt, Human
ugcucuaucuugcucuguaau

SEQ ID NO: 2573580 - RNA, 12 nt, Human
ugcucuauugua

SEQ ID NO: 2573581 - RNA, 21 nt, Human
ugcucuauuguagcauuucuu

SEQ ID NO: 2573582 - RNA, 14 nt, Human
ugcucgcuguugcu

SEQ ID NO: 2573583 - RNA, 13 nt, Human
ugcucgcuguugc

SEQ ID NO: 2573584 - RNA, 13 nt, Human
ugcucgcccugcg

SEQ ID NO: 2573585 - RNA, 14 nt, Human
ugcucgcccugcgg

SEQ ID NO: 2573586 - RNA, 17 nt, Human
ugcucgcuguugcugaa

SEQ ID NO: 2573587 - RNA, 15 nt, Human
ugcucgcuguugcug

SEQ ID NO: 2573588 - RNA, 18 nt, Human
ugcucgcuguugcugaau

SEQ ID NO: 2573589 - RNA, 21 nt, Human
ugcucuccucuugccacugcc

SEQ ID NO: 2573590 - RNA, 18 nt, Human
ugcucuccucuugccacu

SEQ ID NO: 2573591 - RNA, 14 nt, Human
ugcucuccucuugc

SEQ ID NO: 2573592 - RNA, 14 nt, Human
ugcucuccccugcc

SEQ ID NO: 2573593 - RNA, 16 nt, Human
ugcucuccucuugcca

SEQ ID NO: 2573594 - RNA, 17 nt, Human
ugcucuccaagcccagu

SEQ ID NO: 2573595 - RNA, 19 nt, Human
ugcucuccaagucucagug

SEQ ID NO: 2573596 - RNA, 18 nt, Human
ugcucuccaagucucagu

SEQ ID NO: 2573597 - RNA, 20 nt, Human
ugcucuccaagucucagugg

SEQ ID NO: 2573598 - RNA, 12 nt, Human
ugcucuccccug

SEQ ID NO: 2573599 - RNA, 13 nt, Human
ugcucuccccugc

SEQ ID NO: 2573600 - RNA, 17 nt, Human
ugcucuccuuccuggag

SEQ ID NO: 2573601 - RNA, 12 nt, Human
ugcucuccuucc

SEQ ID NO: 2573602 - RNA, 22 nt, Human
ugcucuccucuugccacugccu

SEQ ID NO: 2573603 - RNA, 17 nt, Human
ugcugaaacaacaaaua

SEQ ID NO: 2573604 - RNA, 23 nt, Human
ugcucuccuuccuggagcccaga

SEQ ID NO: 2573605 - RNA, 18 nt, Human
ugcucuccuuccuggagc

SEQ ID NO: 2573606 - RNA, 15 nt, Human
ugcucuccccugccc

SEQ ID NO: 2573607 - RNA, 15 nt, Human
ugcugaaacaggaga

SEQ ID NO: 2573608 - RNA, 16 nt, Human
ugcugaaaccaagggg

SEQ ID NO: 2573609 - RNA, 17 nt, Human
ugcugaaacaggagaga

SEQ ID NO: 2573610 - RNA, 17 nt, Human
ugcugaaauuuuauaug

SEQ ID NO: 2573611 - RNA, 20 nt, Human
ugcugaaagcccaaguaggg

SEQ ID NO: 2573612 - RNA, 15 nt, Human
ugcugaacaaaaaau

SEQ ID NO: 2573613 - RNA, 18 nt, Human
ugcugaacaaaaaauaaa

SEQ ID NO: 2573614 - RNA, 19 nt, Human
ugcuaagcauuccaacuau

SEQ ID NO: 2573615 - RNA, 15 nt, Human
ugcuaagcauuccaa

SEQ ID NO: 2573616 - RNA, 16 nt, Human
ugcuaagaugcucuau

SEQ ID NO: 2573617 - RNA, 15 nt, Human
ugcuaagccccagca

SEQ ID NO: 2573618 - RNA, 22 nt, Human
ugcucaagaagacauggagacu

SEQ ID NO: 2573619 - RNA, 15 nt, Human
ugcucaagaagacau

SEQ ID NO: 2573620 - RNA, 14 nt, Human
ugcucaagaagaca

SEQ ID NO: 2573621 - RNA, 21 nt, Human
ugcucaauaaaugauucuuag

SEQ ID NO: 2573622 - RNA, 14 nt, Human
ugcucacaccccau

SEQ ID NO: 2573623 - RNA, 18 nt, Human
ugcucaaugacucucugg

SEQ ID NO: 2573624 - RNA, 16 nt, Human
ugcucacauaucuguc

SEQ ID NO: 2573625 - RNA, 15 nt, Human
ugcucacauaucugu

SEQ ID NO: 2573626 - RNA, 17 nt, Human
ugcucagagcaguguuu

SEQ ID NO: 2573627 - RNA, 16 nt, Human
ugcucagaccagcucu

SEQ ID NO: 2573628 - RNA, 13 nt, Human
ugcucacagucuc

SEQ ID NO: 2573629 - RNA, 15 nt, Human
ugcucacaccccauu

SEQ ID NO: 2573630 - RNA, 17 nt, Human
ugcucagaccagcucuu

SEQ ID NO: 2573631 - RNA, 13 nt, Human
ugcuccucuccag

SEQ ID NO: 2573632 - RNA, 12 nt, Human
ugcuccucucca

SEQ ID NO: 2573633 - RNA, 11 nt, Human
ugcuccucucc

SEQ ID NO: 2573634 - RNA, 14 nt, Human
ugcucagucucccu

SEQ ID NO: 2573635 - RNA, 23 nt, Human
ugcuccuccuuggugccuggccu

SEQ ID NO: 2573636 - RNA, 19 nt, Human
ugcucagugucuggcugca

SEQ ID NO: 2573637 - RNA, 14 nt, Human
ugcuccucucccca

SEQ ID NO: 2573638 - RNA, 16 nt, Human
ugcucagucucccuuu

SEQ ID NO: 2573639 - RNA, 17 nt, Human
ugcucaguaauuugagg

SEQ ID NO: 2573640 - RNA, 16 nt, Human
ugcucagggucaauuu

SEQ ID NO: 2573641 - RNA, 20 nt, Human
ugcucagggucaauuucuuu

SEQ ID NO: 2573642 - RNA, 17 nt, Human
ugcucagcccugacugg

SEQ ID NO: 2573643 - RNA, 13 nt, Human
ugcucagcccuga

SEQ ID NO: 2573644 - RNA, 22 nt, Human
ugcucagcccugacuggugcua

SEQ ID NO: 2573645 - RNA, 13 nt, Human
ugcucagcccugg

SEQ ID NO: 2573646 - RNA, 12 nt, Human
ugcucagcccug

SEQ ID NO: 2573647 - RNA, 11 nt, Human
ugcucagcccu

SEQ ID NO: 2573648 - RNA, 12 nt, Human
ugcucagcagcu

SEQ ID NO: 2573649 - RNA, 20 nt, Human
ugcucagcccuggaggugcc

SEQ ID NO: 2573650 - RNA, 16 nt, Human
ugcucagcccuggagg

SEQ ID NO: 2573651 - RNA, 15 nt, Human
ugcucagcccuggag

SEQ ID NO: 2573652 - RNA, 14 nt, Human
ugcucagcccugga

SEQ ID NO: 2573653 - RNA, 23 nt, Human
ugcucagcccuggaggugccagc

SEQ ID NO: 2573654 - RNA, 21 nt, Human
ugcucagcccuggaggugcca

SEQ ID NO: 2573655 - RNA, 19 nt, Human
ugcucagggaaaagcagcu

SEQ ID NO: 2573656 - RNA, 14 nt, Human
ugcucagggcugac

SEQ ID NO: 2573657 - RNA, 19 nt, Human
ugcucaggggcguguggcu

SEQ ID NO: 2573658 - RNA, 21 nt, Human
ugcucagggaaaagcagcucu

SEQ ID NO: 2573659 - RNA, 22 nt, Human
ugcucagggaaaagcagcucuc

SEQ ID NO: 2573660 - RNA, 14 nt, Human
ugcugaacagugga

SEQ ID NO: 2573661 - RNA, 19 nt, Human
ugcugaacauugcauauaa

SEQ ID NO: 2573662 - RNA, 21 nt, Human
ugcugaacaccuuguggaagc

SEQ ID NO: 2573663 - RNA, 16 nt, Human
ugcugaacaccuugug

SEQ ID NO: 2573664 - RNA, 20 nt, Human
ugcugaacaaaaaauaaaaa

SEQ ID NO: 2573665 - RNA, 21 nt, Human
ugcugaacauugcauauaacu

SEQ ID NO: 2573666 - RNA, 14 nt, Human
ugcugaagcugccu

SEQ ID NO: 2573667 - RNA, 12 nt, Human
ugcugaaggcuc

SEQ ID NO: 2573668 - RNA, 23 nt, Human
ugcugaaggaauaaauugcuccu

SEQ ID NO: 2573669 - RNA, 21 nt, Human
ugcugaaggcucgagcaugcc

SEQ ID NO: 2573670 - RNA, 13 nt, Human
ugcugaaggcucg

SEQ ID NO: 2573671 - RNA, 23 nt, Human
ugcugacagacacaggcccggcu

SEQ ID NO: 2573672 - RNA, 22 nt, Human
ugcugacagacacaggcccggc

SEQ ID NO: 2573673 - RNA, 18 nt, Human
ugcugauuuggugaccaa

SEQ ID NO: 2573674 - RNA, 18 nt, Human
ugcugauggugcaaugac

SEQ ID NO: 2573675 - RNA, 14 nt, Human
ugcugcaaaccuga

SEQ ID NO: 2573676 - RNA, 20 nt, Human
ugcugcaaaccugaccccug

SEQ ID NO: 2573677 - RNA, 13 nt, Human
ugcugcaaggccu

SEQ ID NO: 2573678 - RNA, 13 nt, Human
ugcugcaaaccug

SEQ ID NO: 2573679 - RNA, 17 nt, Human
ugcugauggugcaauga

SEQ ID NO: 2573680 - RNA, 15 nt, Human
ugcugauggugcaau

SEQ ID NO: 2573681 - RNA, 13 nt, Human
ugcugauggugca

SEQ ID NO: 2573682 - RNA, 16 nt, Human
ugcugacagcugcucc

SEQ ID NO: 2573683 - RNA, 17 nt, Human
ugcugacagcugcuccu

SEQ ID NO: 2573684 - RNA, 18 nt, Human
ugcugacagcugcuccua

SEQ ID NO: 2573685 - RNA, 14 nt, Human
ugcugacagcugcu

SEQ ID NO: 2573686 - RNA, 15 nt, Human
ugcugacagcugcuc

SEQ ID NO: 2573687 - RNA, 15 nt, Human
ugcugacagcugacc

SEQ ID NO: 2573688 - RNA, 15 nt, Human
ugcugcuuuccccug

SEQ ID NO: 2573689 - RNA, 20 nt, Human
ugcugcuuagacauaacaaa

SEQ ID NO: 2573690 - RNA, 14 nt, Human
ugcugcuguguuuu

SEQ ID NO: 2573691 - RNA, 13 nt, Human
ugcugcugucccu

SEQ ID NO: 2573692 - RNA, 19 nt, Human
ugcugcuuuccccuguggg

SEQ ID NO: 2573693 - RNA, 18 nt, Human
ugcugcuuuccccugugg

SEQ ID NO: 2573694 - RNA, 17 nt, Human
ugcugcuuuccccugug

SEQ ID NO: 2573695 - RNA, 16 nt, Human
ugcugcuuuccccugu

SEQ ID NO: 2573696 - RNA, 23 nt, Human
ugcugcuuuccccuguggggauc

SEQ ID NO: 2573697 - RNA, 21 nt, Human
ugcugcuuuccccugugggga

SEQ ID NO: 2573698 - RNA, 16 nt, Human
ugcuggaauucuaaca

SEQ ID NO: 2573699 - RNA, 17 nt, Human
ugcuggaauaaguucaa

SEQ ID NO: 2573700 - RNA, 23 nt, Human
ugcugcuuuuugagguggcacuu

SEQ ID NO: 2573701 - RNA, 22 nt, Human
ugcugcuuuuugagguggcacu

SEQ ID NO: 2573702 - RNA, 17 nt, Human
ugcugcuuuuccuuggg

SEQ ID NO: 2573703 - RNA, 20 nt, Human
ugcugcuuuuugagguggca

SEQ ID NO: 2573704 - RNA, 20 nt, Human
ugcugcuuuuccuuggggca

SEQ ID NO: 2573705 - RNA, 15 nt, Human
ugcugcuacuuaauu

SEQ ID NO: 2573706 - RNA, 13 nt, Human
ugcugcuggacag

SEQ ID NO: 2573707 - RNA, 23 nt, Human
ugcugcuggacaguaucacuguc

SEQ ID NO: 2573708 - RNA, 13 nt, Human
ugcugcuggcugg

SEQ ID NO: 2573709 - RNA, 23 nt, Human
ugcugcuacccucccugcugucc

SEQ ID NO: 2573710 - RNA, 22 nt, Human
ugcugcuacccucccugcuguc

SEQ ID NO: 2573711 - RNA, 17 nt, Human
ugcugcugcugcgcccu

SEQ ID NO: 2573712 - RNA, 21 nt, Human
ugcugcuacccucccugcugu

SEQ ID NO: 2573713 - RNA, 20 nt, Human
ugcugcuacccucccugcug

SEQ ID NO: 2573714 - RNA, 19 nt, Human
ugcugcuacccucccugcu

SEQ ID NO: 2573715 - RNA, 18 nt, Human
ugcugcuacccucccugc

SEQ ID NO: 2573716 - RNA, 17 nt, Human
ugcugcuacccucccug

SEQ ID NO: 2573717 - RNA, 15 nt, Human
ugcugcuacccuccc

SEQ ID NO: 2573718 - RNA, 14 nt, Human
ugcugcuacccucc

SEQ ID NO: 2573719 - RNA, 21 nt, Human
ugcugcuaaucuucagggcac

SEQ ID NO: 2573720 - RNA, 22 nt, Human
ugcugcuaaucuucagggcacu

SEQ ID NO: 2573721 - RNA, 17 nt, Human
ugcugcuaaucuucagg

SEQ ID NO: 2573722 - RNA, 14 nt, Human
ugcugcgugccugu

SEQ ID NO: 2573723 - RNA, 20 nt, Human
ugcugccuucuggauucuug

SEQ ID NO: 2573724 - RNA, 16 nt, Human
ugcugcgcccuuaccu

SEQ ID NO: 2573725 - RNA, 17 nt, Human
ugcugcgcccugggcuc

SEQ ID NO: 2573726 - RNA, 20 nt, Human
ugcugcgcccuuaccuuccc

SEQ ID NO: 2573727 - RNA, 15 nt, Human
ugcugcgcccuuccc

SEQ ID NO: 2573728 - RNA, 18 nt, Human
ugcugcaccaacccagcc

SEQ ID NO: 2573729 - RNA, 17 nt, Human
ugcugcaccaacccagc

SEQ ID NO: 2573730 - RNA, 14 nt, Human
ugcugcaccaaccc

SEQ ID NO: 2573731 - RNA, 23 nt, Human
ugcugcaaggccuuucugugugu

SEQ ID NO: 2573732 - RNA, 20 nt, Human
ugcugcaaggccuuucugug

SEQ ID NO: 2573733 - RNA, 15 nt, Human
ugcugcaaggccuuu

SEQ ID NO: 2573734 - RNA, 18 nt, Human
ugcugcaguugccaguca

SEQ ID NO: 2573735 - RNA, 23 nt, Human
ugcugcaguugccagucaccccg

SEQ ID NO: 2573736 - RNA, 15 nt, Human
ugcugcaugccuggu

SEQ ID NO: 2573737 - RNA, 19 nt, Human
ugcugcaccaacccagccg

SEQ ID NO: 2573738 - RNA, 21 nt, Human
ugccugucugucucuccaucu

SEQ ID NO: 2573739 - RNA, 14 nt, Human
ugccugucugaagc

SEQ ID NO: 2573740 - RNA, 18 nt, Human
ugccugucugucucucca

SEQ ID NO: 2573741 - RNA, 14 nt, Human
ugccugugaacuga

SEQ ID NO: 2573742 - RNA, 22 nt, Human
ugccugucuccuuugcaggcuc

SEQ ID NO: 2573743 - RNA, 23 nt, Human
ugccugucuccuuugcaggcuca

SEQ ID NO: 2573744 - RNA, 11 nt, Human
ugccugucucc

SEQ ID NO: 2573745 - RNA, 15 nt, Human
ugccuguagcaguga

SEQ ID NO: 2573746 - RNA, 13 nt, Human
ugccuguaguuag

SEQ ID NO: 2573747 - RNA, 22 nt, Human
ugccuguacucgcuugugcaga

SEQ ID NO: 2573748 - RNA, 19 nt, Human
ugccuguacucgcuugugc

SEQ ID NO: 2573749 - RNA, 18 nt, Human
ugccuguagcccacucug

SEQ ID NO: 2573750 - RNA, 20 nt, Human
ugccuguagcccacucugcu

SEQ ID NO: 2573751 - RNA, 23 nt, Human
ugccuguagcccacucugcucgc

SEQ ID NO: 2573752 - RNA, 15 nt, Human
ugccuguaaacauag

SEQ ID NO: 2573753 - RNA, 13 nt, Human
ugccuguaaacau

SEQ ID NO: 2573754 - RNA, 19 nt, Human
ugccuguaaucccagcacu

SEQ ID NO: 2573755 - RNA, 11 nt, Human
ugccuguaauc

SEQ ID NO: 2573756 - RNA, 15 nt, Human
ugccuguaacuugag

SEQ ID NO: 2573757 - RNA, 18 nt, Human
ugccuguaaucacagcua

SEQ ID NO: 2573758 - RNA, 16 nt, Human
ugccugguggcagcug

SEQ ID NO: 2573759 - RNA, 15 nt, Human
ugccugguggcagcu

SEQ ID NO: 2573760 - RNA, 14 nt, Human
ugccugguggcagc

SEQ ID NO: 2573761 - RNA, 23 nt, Human
ugccugagggccccucugcccag

SEQ ID NO: 2573762 - RNA, 22 nt, Human
ugccugagggccccucugccca

SEQ ID NO: 2573763 - RNA, 21 nt, Human
ugccugagggccccucugccc

SEQ ID NO: 2573764 - RNA, 20 nt, Human
ugccugagggccccucugcc

SEQ ID NO: 2573765 - RNA, 19 nt, Human
ugccugagggccccucugc

SEQ ID NO: 2573766 - RNA, 17 nt, Human
ugccugagggccccucu

SEQ ID NO: 2573767 - RNA, 16 nt, Human
ugccugagggccccuc

SEQ ID NO: 2573768 - RNA, 15 nt, Human
ugccugagggccccu

SEQ ID NO: 2573769 - RNA, 15 nt, Human
ugccuggcggggugg

SEQ ID NO: 2573770 - RNA, 19 nt, Human
ugccugagggcgaggggag

SEQ ID NO: 2573771 - RNA, 14 nt, Human
ugccugagaggcag

SEQ ID NO: 2573772 - RNA, 13 nt, Human
ugccugagaggca

SEQ ID NO: 2573773 - RNA, 23 nt, Human
ugccugacccuacuucuuuugcu

SEQ ID NO: 2573774 - RNA, 18 nt, Human
ugccugacauuuggagug

SEQ ID NO: 2573775 - RNA, 18 nt, Human
ugccugagaggcaggcau

SEQ ID NO: 2573776 - RNA, 17 nt, Human
ugccugagaggcaggca

SEQ ID NO: 2573777 - RNA, 16 nt, Human
ugccugagaggcaggc

SEQ ID NO: 2573778 - RNA, 15 nt, Human
ugccugagaggcagg

SEQ ID NO: 2573779 - RNA, 14 nt, Human
ugccugagggcccc

SEQ ID NO: 2573780 - RNA, 19 nt, Human
ugccugagaggcaggcaua

SEQ ID NO: 2573781 - RNA, 11 nt, Human
ugccugagcuu

SEQ ID NO: 2573782 - RNA, 21 nt, Human
ugccugggaucccucauccuc

SEQ ID NO: 2573783 - RNA, 15 nt, Human
ugccuggcucagagc

SEQ ID NO: 2573784 - RNA, 13 nt, Human
ugccuggcucaga

SEQ ID NO: 2573785 - RNA, 11 nt, Human
ugccuggcuca

SEQ ID NO: 2573786 - RNA, 22 nt, Human
ugccuggcuucgcaaaauguuu

SEQ ID NO: 2573787 - RNA, 16 nt, Human
ugccuggcucagagcc

SEQ ID NO: 2573788 - RNA, 14 nt, Human
ugccugggaaugua

SEQ ID NO: 2573789 - RNA, 18 nt, Human
ugccugggcagaaggaag

SEQ ID NO: 2573790 - RNA, 15 nt, Human
ugccugggaauguau

SEQ ID NO: 2573791 - RNA, 16 nt, Human
ugccugggaauguauu

SEQ ID NO: 2573792 - RNA, 19 nt, Human
ugccuggugcacugugucu

SEQ ID NO: 2573793 - RNA, 22 nt, Human
ugccugggaguuuuguauucau

SEQ ID NO: 2573794 - RNA, 22 nt, Human
ugccugaacauccuuccuuccc

SEQ ID NO: 2573795 - RNA, 16 nt, Human
ugccugaaccuuccau

SEQ ID NO: 2573796 - RNA, 13 nt, Human
ugccugaagaaca

SEQ ID NO: 2573797 - RNA, 21 nt, Human
ugccugaacauccuuccuucc

SEQ ID NO: 2573798 - RNA, 20 nt, Human
ugccugaacauccuuccuuc

SEQ ID NO: 2573799 - RNA, 17 nt, Human
ugccugaacauccuucc

SEQ ID NO: 2573800 - RNA, 14 nt, Human
ugccugaacauccu

SEQ ID NO: 2573801 - RNA, 13 nt, Human
ugccugaacaucc

SEQ ID NO: 2573802 - RNA, 18 nt, Human
ugccucuuuccuguuguu

SEQ ID NO: 2573803 - RNA, 16 nt, Human
ugccucuucugggagg

SEQ ID NO: 2573804 - RNA, 19 nt, Human
ugccucuucugggagggca

SEQ ID NO: 2573805 - RNA, 20 nt, Human
ugccucuucugggagggcag

SEQ ID NO: 2573806 - RNA, 21 nt, Human
ugccucuucugggagggcagc

SEQ ID NO: 2573807 - RNA, 16 nt, Human
ugccucuucugugggu

SEQ ID NO: 2573808 - RNA, 13 nt, Human
ugccucuucuggg

SEQ ID NO: 2573809 - RNA, 15 nt, Human
ugccucuuucaucca

SEQ ID NO: 2573810 - RNA, 17 nt, Human
ugccucuuucauccacu

SEQ ID NO: 2573811 - RNA, 16 nt, Human
ugccucuuucauccac

SEQ ID NO: 2573812 - RNA, 14 nt, Human
ugccucuuuccugu

SEQ ID NO: 2573813 - RNA, 9 nt, Human
ugccucucu

SEQ ID NO: 2573814 - RNA, 20 nt, Human
ugccucuccuuuguauauua

SEQ ID NO: 2573815 - RNA, 15 nt, Human
ugccucuucugggag

SEQ ID NO: 2573816 - RNA, 17 nt, Human
ugccucuccuuuguaua

SEQ ID NO: 2573817 - RNA, 16 nt, Human
ugccucuccuuuguau

SEQ ID NO: 2573818 - RNA, 18 nt, Human
ugccucucccuggcccuc

SEQ ID NO: 2573819 - RNA, 21 nt, Human
ugccucucaucaacugaauga

SEQ ID NO: 2573820 - RNA, 18 nt, Human
ugccucucaucaacugaa

SEQ ID NO: 2573821 - RNA, 13 nt, Human
ugccccuggcugg

SEQ ID NO: 2573822 - RNA, 15 nt, Human
ugccccucccugcuu

SEQ ID NO: 2573823 - RNA, 17 nt, Human
ugccccucccugcuuca

SEQ ID NO: 2573824 - RNA, 18 nt, Human
ugccccuggcagccccug

SEQ ID NO: 2573825 - RNA, 23 nt, Human
ugccucgaaacacagaaaccuuu

SEQ ID NO: 2573826 - RNA, 21 nt, Human
ugccccuucccaucucuuccu

SEQ ID NO: 2573827 - RNA, 19 nt, Human
ugccccuucccaucucuuc

SEQ ID NO: 2573828 - RNA, 18 nt, Human
ugccccuguucucuucca

SEQ ID NO: 2573829 - RNA, 14 nt, Human
ugccccuggcucug

SEQ ID NO: 2573830 - RNA, 19 nt, Human
ugccucgaacuggcugcaa

SEQ ID NO: 2573831 - RNA, 18 nt, Human
ugccucgaacuggcugca

SEQ ID NO: 2573832 - RNA, 20 nt, Human
ugccucgaacuggcugcaaa

SEQ ID NO: 2573833 - RNA, 17 nt, Human
ugccugugaacugaacu

SEQ ID NO: 2573834 - RNA, 18 nt, Human
ugccugugaacugaacuc

SEQ ID NO: 2573835 - RNA, 21 nt, Human
ugccugugaacugaacucuga

SEQ ID NO: 2573836 - RNA, 14 nt, Human
ugccugugaggcag

SEQ ID NO: 2573837 - RNA, 18 nt, Human
ugccugucuguuacacug

SEQ ID NO: 2573838 - RNA, 16 nt, Human
ugccugugaggcaggg

SEQ ID NO: 2573839 - RNA, 20 nt, Human
ugccuucgucuuucccaugg

SEQ ID NO: 2573840 - RNA, 16 nt, Human
ugccuucuacuuuuaa

SEQ ID NO: 2573841 - RNA, 15 nt, Human
ugccuucuaaaggug

SEQ ID NO: 2573842 - RNA, 23 nt, Human
ugccuucgcuucuugccucugug

SEQ ID NO: 2573843 - RNA, 22 nt, Human
ugccuucgcuucuugccucugu

SEQ ID NO: 2573844 - RNA, 21 nt, Human
ugccuucgcuucuugccucug

SEQ ID NO: 2573845 - RNA, 20 nt, Human
ugccuucgcuucuugccucu

SEQ ID NO: 2573846 - RNA, 17 nt, Human
ugccuucuucacccagc

SEQ ID NO: 2573847 - RNA, 13 nt, Human
ugccuucuucacc

SEQ ID NO: 2573848 - RNA, 15 nt, Human
ugccuucucaacucc

SEQ ID NO: 2573849 - RNA, 22 nt, Human
ugccuucuucuuuuugcuguug

SEQ ID NO: 2573850 - RNA, 21 nt, Human
ugccuucuucuuuuugcuguu

SEQ ID NO: 2573851 - RNA, 20 nt, Human
ugccuucuucuuuuugcugu

SEQ ID NO: 2573852 - RNA, 16 nt, Human
ugccuucuuuugauua

SEQ ID NO: 2573853 - RNA, 14 nt, Human
ugccuucuucaccc

SEQ ID NO: 2573854 - RNA, 16 nt, Human
ugccuucuaaaggugu

SEQ ID NO: 2573855 - RNA, 16 nt, Human
ugccuucuucacccag

SEQ ID NO: 2573856 - RNA, 21 nt, Human
ugccuucuucggggaacuccu

SEQ ID NO: 2573857 - RNA, 19 nt, Human
ugccuucuucuuuuugcug

SEQ ID NO: 2573858 - RNA, 12 nt, Human
ugccuucuucuu

SEQ ID NO: 2573859 - RNA, 22 nt, Human
ugccuucuucggggaacuccug

SEQ ID NO: 2573860 - RNA, 23 nt, Human
ugccuucuucggggaacuccugg

SEQ ID NO: 2573861 - RNA, 21 nt, Human
ugcgaucuggguucacugcaa

SEQ ID NO: 2573862 - RNA, 20 nt, Human
ugcgaucuggguucacugca

SEQ ID NO: 2573863 - RNA, 19 nt, Human
ugcgaucuggguucacugc

SEQ ID NO: 2573864 - RNA, 15 nt, Human
ugcgaucuggguuca

SEQ ID NO: 2573865 - RNA, 23 nt, Human
ugccuugaauauccccucccagu

SEQ ID NO: 2573866 - RNA, 22 nt, Human
ugcgaguauguguuugugugug

SEQ ID NO: 2573867 - RNA, 15 nt, Human
ugccuugaagccacu

SEQ ID NO: 2573868 - RNA, 20 nt, Human
ugcgagugcucauuucagga

SEQ ID NO: 2573869 - RNA, 13 nt, Human
ugcgagugugugc

SEQ ID NO: 2573870 - RNA, 17 nt, Human
ugcgagugugugcaugu

SEQ ID NO: 2573871 - RNA, 19 nt, Human
ugccuugaaccacuucccu

SEQ ID NO: 2573872 - RNA, 17 nt, Human
ugccuugaaccacuucc

SEQ ID NO: 2573873 - RNA, 15 nt, Human
ugccuugaaccacuu

SEQ ID NO: 2573874 - RNA, 21 nt, Human
ugccuugaaccacuucccuca

SEQ ID NO: 2573875 - RNA, 14 nt, Human
ugccuugaagccac

SEQ ID NO: 2573876 - RNA, 14 nt, Human
ugcgaucuggguuc

SEQ ID NO: 2573877 - RNA, 22 nt, Human
ugcgagugugugcaugugugug

SEQ ID NO: 2573878 - RNA, 19 nt, Human
ugcgagugugugcaugugu

SEQ ID NO: 2573879 - RNA, 21 nt, Human
ugcgagugugugcaugugugu

SEQ ID NO: 2573880 - RNA, 22 nt, Human
ugcgugacaauaaaacauuaau

SEQ ID NO: 2573881 - RNA, 17 nt, Human
ugcgugacaauaaaaca

SEQ ID NO: 2573882 - RNA, 15 nt, Human
ugcgugacaauaaaa

SEQ ID NO: 2573883 - RNA, 14 nt, Human
ugcgugacaauaaa

SEQ ID NO: 2573884 - RNA, 22 nt, Human
ugcgugaaacacaccaggcugu

SEQ ID NO: 2573885 - RNA, 22 nt, Human
ugcguccuccucaccucaugcc

SEQ ID NO: 2573886 - RNA, 19 nt, Human
ugcguccuccucaccucau

SEQ ID NO: 2573887 - RNA, 16 nt, Human
ugcguccuccucaccu

SEQ ID NO: 2573888 - RNA, 14 nt, Human
ugcguccuccucac

SEQ ID NO: 2573889 - RNA, 15 nt, Human
ugcgucuggaggggc

SEQ ID NO: 2573890 - RNA, 23 nt, Human
ugcguccuccucaccucaugccc

SEQ ID NO: 2573891 - RNA, 23 nt, Human
ugcgucuggaggggccccugcuu

SEQ ID NO: 2573892 - RNA, 22 nt, Human
ugcgucuggaggggccccugcu

SEQ ID NO: 2573893 - RNA, 21 nt, Human
ugcgucuggaggggccccugc

SEQ ID NO: 2573894 - RNA, 20 nt, Human
ugcgucuggaggggccccug

SEQ ID NO: 2573895 - RNA, 14 nt, Human
ugcgugaaacacac

SEQ ID NO: 2573896 - RNA, 16 nt, Human
ugcgaucuucagagca

SEQ ID NO: 2573897 - RNA, 19 nt, Human
ugcguccacgagcuguuua

SEQ ID NO: 2573898 - RNA, 22 nt, Human
ugcgccuacaggagugagcacu

SEQ ID NO: 2573899 - RNA, 16 nt, Human
ugcgccuacaggagug

SEQ ID NO: 2573900 - RNA, 14 nt, Human
ugcgccuacaggag

SEQ ID NO: 2573901 - RNA, 21 nt, Human
ugcuaaauuuucaguagggcu

SEQ ID NO: 2573902 - RNA, 18 nt, Human
ugcuaaauguaacagucu

SEQ ID NO: 2573903 - RNA, 17 nt, Human
ugcuaaauguaacaguc

SEQ ID NO: 2573904 - RNA, 16 nt, Human
ugcuaaauguaacagu

SEQ ID NO: 2573905 - RNA, 15 nt, Human
ugcuaaauguaacag

SEQ ID NO: 2573906 - RNA, 20 nt, Human
ugcuaaauguaacagucuga

SEQ ID NO: 2573907 - RNA, 19 nt, Human
ugcuaaauguaacagucug

SEQ ID NO: 2573908 - RNA, 13 nt, Human
ugcuaagaugcuc

SEQ ID NO: 2573909 - RNA, 16 nt, Human
ugcuaacaucuaaaaa

SEQ ID NO: 2573910 - RNA, 22 nt, Human
ugcuaagacucaguggggaggg

SEQ ID NO: 2573911 - RNA, 13 nt, Human
ugcuaacaucuaa

SEQ ID NO: 2573912 - RNA, 15 nt, Human
ugcuaaauuuucagu

SEQ ID NO: 2573913 - RNA, 15 nt, Human
ugcuaaaugugaaug

SEQ ID NO: 2573914 - RNA, 20 nt, Human
ugcuaaauggucgcccagga

SEQ ID NO: 2573915 - RNA, 21 nt, Human
ugcuaaauggucgcccaggag

SEQ ID NO: 2573916 - RNA, 14 nt, Human
ugcuaaauguaaca

SEQ ID NO: 2573917 - RNA, 11 nt, Human
ugcuaaaugua

SEQ ID NO: 2573918 - RNA, 22 nt, Human
ugcuaaauggucgcccaggaga

SEQ ID NO: 2573919 - RNA, 23 nt, Human
ugcuaaauaaaauuuguugcaua

SEQ ID NO: 2573920 - RNA, 22 nt, Human
ugcuaaauaaaauuuguugcau

SEQ ID NO: 2573921 - RNA, 21 nt, Human
ugcuaaauaaaauuuguugca

SEQ ID NO: 2573922 - RNA, 17 nt, Human
ugcuaaauaaaauuugu

SEQ ID NO: 2573923 - RNA, 22 nt, Human
ugcuaaagaaaaagucauccaa

SEQ ID NO: 2573924 - RNA, 21 nt, Human
ugcuaaagaaaaagucaucca

SEQ ID NO: 2573925 - RNA, 16 nt, Human
uguacaaggacagccc

SEQ ID NO: 2573926 - RNA, 20 nt, Human
uguacaaggacagccccucc

SEQ ID NO: 2573927 - RNA, 16 nt, Human
uguacaagaugaagga

SEQ ID NO: 2573928 - RNA, 23 nt, Human
uguacaaggacagccccuccucc

SEQ ID NO: 2573929 - RNA, 16 nt, Human
uguaauguuacugauc

SEQ ID NO: 2573930 - RNA, 17 nt, Human
uguaauguuacugauca

SEQ ID NO: 2573931 - RNA, 19 nt, Human
uguaauguuacugaucaug

SEQ ID NO: 2573932 - RNA, 22 nt, Human
uguaauguuacugaucaugcau

SEQ ID NO: 2573933 - RNA, 17 nt, Human
uguaauuaaguacuaug

SEQ ID NO: 2573934 - RNA, 17 nt, Human
uguacagagcccacgcc

SEQ ID NO: 2573935 - RNA, 16 nt, Human
uguacagagcccacgc

SEQ ID NO: 2573936 - RNA, 18 nt, Human
uguacaaugacuuuauug

SEQ ID NO: 2573937 - RNA, 17 nt, Human
uguacaauauuuaaaau

SEQ ID NO: 2573938 - RNA, 14 nt, Human
uguacaauauuuaa

SEQ ID NO: 2573939 - RNA, 15 nt, Human
uguacaauauuuaaa

SEQ ID NO: 2573940 - RNA, 13 nt, Human
uguacagagccca

SEQ ID NO: 2573941 - RNA, 22 nt, Human
uguacaauugaacuuaaauaaa

SEQ ID NO: 2573942 - RNA, 23 nt, Human
uguacaauugaacuuaaauaaau

SEQ ID NO: 2573943 - RNA, 16 nt, Human
uguaccgcaaugugac

SEQ ID NO: 2573944 - RNA, 22 nt, Human
uguacaguuuguuuacacacgu

SEQ ID NO: 2573945 - RNA, 17 nt, Human
uguacaguuuguuuaca

SEQ ID NO: 2573946 - RNA, 16 nt, Human
uguacaguuuguuuac

SEQ ID NO: 2573947 - RNA, 14 nt, Human
uguacaguuuguuu

SEQ ID NO: 2573948 - RNA, 14 nt, Human
uguacaguucaguu

SEQ ID NO: 2573949 - RNA, 17 nt, Human
uguacaguuauuuaugc

SEQ ID NO: 2573950 - RNA, 13 nt, Human
uguacaguuuguu

SEQ ID NO: 2573951 - RNA, 16 nt, Human
uguacaguuugcugua

SEQ ID NO: 2573952 - RNA, 20 nt, Human
uguacaguucaguuccucuu

SEQ ID NO: 2573953 - RNA, 15 nt, Human
uguacaguuugcugu

SEQ ID NO: 2573954 - RNA, 13 nt, Human
uguacaguguucu

SEQ ID NO: 2573955 - RNA, 20 nt, Human
uguacaguguucuguuuaau

SEQ ID NO: 2573956 - RNA, 16 nt, Human
uguacaguguucuguu

SEQ ID NO: 2573957 - RNA, 17 nt, Human
uguacaguguguaaagu

SEQ ID NO: 2573958 - RNA, 11 nt, Human
uguacaguguu

SEQ ID NO: 2573959 - RNA, 19 nt, Human
uguacaguguguaaagugu

SEQ ID NO: 2573960 - RNA, 18 nt, Human
uguacagagcccacgccc

SEQ ID NO: 2573961 - RNA, 21 nt, Human
uguacagucuuguauuaaguu

SEQ ID NO: 2573962 - RNA, 17 nt, Human
uguacagucuuguauua

SEQ ID NO: 2573963 - RNA, 21 nt, Human
uguaaguuucaggugacaugu

SEQ ID NO: 2573964 - RNA, 20 nt, Human
uguaaguuucaggugacaug

SEQ ID NO: 2573965 - RNA, 19 nt, Human
uguaaguuucaggugacau

SEQ ID NO: 2573966 - RNA, 18 nt, Human
uguaaguuucaggugaca

SEQ ID NO: 2573967 - RNA, 16 nt, Human
uguaaguuucagguga

SEQ ID NO: 2573968 - RNA, 15 nt, Human
uguaaguuucaggug

SEQ ID NO: 2573969 - RNA, 23 nt, Human
uguaaguuucaggugacauguga

SEQ ID NO: 2573970 - RNA, 20 nt, Human
uguaauaaaaaguauauguu

SEQ ID NO: 2573971 - RNA, 17 nt, Human
uguaauaaacuuuaaua

SEQ ID NO: 2573972 - RNA, 16 nt, Human
uguaauagaaaacuga

SEQ ID NO: 2573973 - RNA, 20 nt, Human
uguaauagaaaacugaaaau

SEQ ID NO: 2573974 - RNA, 18 nt, Human
uguaauagaaaacugaaa

SEQ ID NO: 2573975 - RNA, 15 nt, Human
uguaauaaacuuuaa

SEQ ID NO: 2573976 - RNA, 13 nt, Human
uguaauaaacuuu

SEQ ID NO: 2573977 - RNA, 12 nt, Human
uguaauaaauau

SEQ ID NO: 2573978 - RNA, 21 nt, Human
uggucacagcggaggugugga

SEQ ID NO: 2573979 - RNA, 15 nt, Human
uggucacagcggagg

SEQ ID NO: 2573980 - RNA, 14 nt, Human
uguaaguuucaggu

SEQ ID NO: 2573981 - RNA, 18 nt, Human
uggucacagccuccucug

SEQ ID NO: 2573982 - RNA, 17 nt, Human
uggucacagccuccucu

SEQ ID NO: 2573983 - RNA, 16 nt, Human
uggucacagccuccuc

SEQ ID NO: 2573984 - RNA, 15 nt, Human
uggucacagccuccu

SEQ ID NO: 2573985 - RNA, 14 nt, Human
uggucacagccucc

SEQ ID NO: 2573986 - RNA, 13 nt, Human
uggucacagccuc

SEQ ID NO: 2573987 - RNA, 19 nt, Human
ugguauuguauuuauucaa

SEQ ID NO: 2573988 - RNA, 22 nt, Human
uggucaagauuuugaaugcuuc

SEQ ID NO: 2573989 - RNA, 22 nt, Human
uggucaauccgaaguaugaggg

SEQ ID NO: 2573990 - RNA, 14 nt, Human
uggucacacacuga

SEQ ID NO: 2573991 - RNA, 15 nt, Human
uggucacacacugau

SEQ ID NO: 2573992 - RNA, 16 nt, Human
uggucacacacugaug

SEQ ID NO: 2573993 - RNA, 21 nt, Human
uguaaucuugaauuguaacug

SEQ ID NO: 2573994 - RNA, 23 nt, Human
uguaaugucaccaccuucccagc

SEQ ID NO: 2573995 - RNA, 14 nt, Human
uguaauguuacuga

SEQ ID NO: 2573996 - RNA, 13 nt, Human
uguaauguuacug

SEQ ID NO: 2573997 - RNA, 19 nt, Human
uguaaucucguuucaaaaa

SEQ ID NO: 2573998 - RNA, 15 nt, Human
uguaaucuugaauug

SEQ ID NO: 2573999 - RNA, 17 nt, Human
uguaaucccagcuacuu

SEQ ID NO: 2574000 - RNA, 16 nt, Human
uguaaucguuaugugu

SEQ ID NO: 2574001 - RNA, 18 nt, Human
uguaaucguuaugugugu

SEQ ID NO: 2574002 - RNA, 19 nt, Human
uguaaucguuaugugugua

SEQ ID NO: 2574003 - RNA, 18 nt, Human
uguaaucucguuucaaaa

SEQ ID NO: 2574004 - RNA, 17 nt, Human
uguaaucucguuucaaa

SEQ ID NO: 2574005 - RNA, 16 nt, Human
uguaaucuauguauau

SEQ ID NO: 2574006 - RNA, 21 nt, Human
uguaaucguuauguguguaua

SEQ ID NO: 2574007 - RNA, 17 nt, Human
uguaauauaaagauguu

SEQ ID NO: 2574008 - RNA, 18 nt, Human
uguaaucaauaaacgauu

SEQ ID NO: 2574009 - RNA, 16 nt, Human
uguaaucaauaaacga

SEQ ID NO: 2574010 - RNA, 14 nt, Human
uguaaucaauguuu

SEQ ID NO: 2574011 - RNA, 15 nt, Human
uguaaucaauaaacg

SEQ ID NO: 2574012 - RNA, 14 nt, Human
uguaaucaauaaac

SEQ ID NO: 2574013 - RNA, 13 nt, Human
uguaaucaauaaa

SEQ ID NO: 2574014 - RNA, 14 nt, Human
uguaaucacagcua

SEQ ID NO: 2574015 - RNA, 20 nt, Human
uguaaucaauguuucuucua

SEQ ID NO: 2574016 - RNA, 20 nt, Human
uguaaucccagcuacucagg

SEQ ID NO: 2574017 - RNA, 21 nt, Human
uguaaucccagcuacucagga

SEQ ID NO: 2574018 - RNA, 16 nt, Human
uguaauccgaaucucu

SEQ ID NO: 2574019 - RNA, 22 nt, Human
uguaaucccagcuacuugggag

SEQ ID NO: 2574020 - RNA, 23 nt, Human
uguaaucccagcuacucaggagg

SEQ ID NO: 2574021 - RNA, 20 nt, Human
uguaaucccagcuacucggg

SEQ ID NO: 2574022 - RNA, 22 nt, Human
uguagaugaaaaagcauguaca

SEQ ID NO: 2574023 - RNA, 15 nt, Human
uguagauucugugga

SEQ ID NO: 2574024 - RNA, 23 nt, Human
uguagaugaaaaagcauguacag

SEQ ID NO: 2574025 - RNA, 21 nt, Human
uguagaugaaaaagcauguac

SEQ ID NO: 2574026 - RNA, 20 nt, Human
uguagaugaaaaagcaugua

SEQ ID NO: 2574027 - RNA, 19 nt, Human
uguagaugaaaaagcaugu

SEQ ID NO: 2574028 - RNA, 13 nt, Human
uguagaugaaaaa

SEQ ID NO: 2574029 - RNA, 11 nt, Human
uguagaugaaa

SEQ ID NO: 2574030 - RNA, 19 nt, Human
uguacuguucugugucuuu

SEQ ID NO: 2574031 - RNA, 16 nt, Human
uguacuguucuguguc

SEQ ID NO: 2574032 - RNA, 22 nt, Human
uguagauauugugaaguacaua

SEQ ID NO: 2574033 - RNA, 18 nt, Human
uguagaucagagcagcag

SEQ ID NO: 2574034 - RNA, 19 nt, Human
uguagauauugugaaguac

SEQ ID NO: 2574035 - RNA, 21 nt, Human
uguagauauugugaaguacau

SEQ ID NO: 2574036 - RNA, 17 nt, Human
uguagcauuucuugaug

SEQ ID NO: 2574037 - RNA, 16 nt, Human
uguagcaucuucugga

SEQ ID NO: 2574038 - RNA, 23 nt, Human
uguagcagugagaaaaagcuccu

SEQ ID NO: 2574039 - RNA, 18 nt, Human
uguagcauuucuugaugu

SEQ ID NO: 2574040 - RNA, 10 nt, Human
uguagccaag

SEQ ID NO: 2574041 - RNA, 15 nt, Human
uguagauuuauuuca

SEQ ID NO: 2574042 - RNA, 16 nt, Human
uguagauuuauuucau

SEQ ID NO: 2574043 - RNA, 11 nt, Human
uguagcaguga

SEQ ID NO: 2574044 - RNA, 22 nt, Human
uguaccuuuugaggagccccag

SEQ ID NO: 2574045 - RNA, 15 nt, Human
uguacgucugacagg

SEQ ID NO: 2574046 - RNA, 23 nt, Human
uguaccuuuuaacaccugaugug

SEQ ID NO: 2574047 - RNA, 22 nt, Human
uguaccuuuuaacaccugaugu

SEQ ID NO: 2574048 - RNA, 21 nt, Human
uguaccuuuugaggagcccca

SEQ ID NO: 2574049 - RNA, 14 nt, Human
uguaccucugccuc

SEQ ID NO: 2574050 - RNA, 15 nt, Human
uguaccuuuuaacac

SEQ ID NO: 2574051 - RNA, 19 nt, Human
uguacugcauaugaaagga

SEQ ID NO: 2574052 - RNA, 23 nt, Human
uguacuguucucuucuugaacac

SEQ ID NO: 2574053 - RNA, 15 nt, Human
uguacuguucugugu

SEQ ID NO: 2574054 - RNA, 16 nt, Human
uguacuguaguuuuuc

SEQ ID NO: 2574055 - RNA, 18 nt, Human
uguacuguaaagagaccu

SEQ ID NO: 2574056 - RNA, 13 nt, Human
uguacuggggguu

SEQ ID NO: 2574057 - RNA, 12 nt, Human
uguacuguaguu

SEQ ID NO: 2574058 - RNA, 12 nt, Human
uguacugggggu

SEQ ID NO: 2574059 - RNA, 19 nt, Human
uguagcccccuggccucug

SEQ ID NO: 2574060 - RNA, 20 nt, Human
uguagcccccuggccucugu

SEQ ID NO: 2574061 - RNA, 18 nt, Human
uguagccccucuccugga

SEQ ID NO: 2574062 - RNA, 20 nt, Human
uguagccugugcauguaugu

SEQ ID NO: 2574063 - RNA, 16 nt, Human
uguagccugugcaugu

SEQ ID NO: 2574064 - RNA, 23 nt, Human
uguagccuggauauuauucuugu

SEQ ID NO: 2574065 - RNA, 15 nt, Human
uguagccuuccucca

SEQ ID NO: 2574066 - RNA, 22 nt, Human
uguagccugugcauguaugucu

SEQ ID NO: 2574067 - RNA, 15 nt, Human
uguagccugugcaug

SEQ ID NO: 2574068 - RNA, 14 nt, Human
uguagccugugcau

SEQ ID NO: 2574069 - RNA, 13 nt, Human
uguagccugugca

SEQ ID NO: 2574070 - RNA, 22 nt, Human
uguagccucgccgucugugaau

SEQ ID NO: 2574071 - RNA, 16 nt, Human
uguagcccacacuuga

SEQ ID NO: 2574072 - RNA, 14 nt, Human
uguagcccacacuu

SEQ ID NO: 2574073 - RNA, 16 nt, Human
uguagccaugggacca

SEQ ID NO: 2574074 - RNA, 15 nt, Human
uguagccaugggacc

SEQ ID NO: 2574075 - RNA, 11 nt, Human
uguagccaugg

SEQ ID NO: 2574076 - RNA, 22 nt, Human
uguagccaugaccuuacauuuc

SEQ ID NO: 2574077 - RNA, 16 nt, Human
uguagcccccuggccu

SEQ ID NO: 2574078 - RNA, 17 nt, Human
uguagcccccuggccuc

SEQ ID NO: 2574079 - RNA, 18 nt, Human
uguagcccccuggccucu

SEQ ID NO: 2574080 - RNA, 16 nt, Human
uguagcccacucugcu

SEQ ID NO: 2574081 - RNA, 17 nt, Human
uguagcccacucugcuc

SEQ ID NO: 2574082 - RNA, 22 nt, Human
uguagcccacucugcucgccuu

SEQ ID NO: 2574083 - RNA, 22 nt, Human
uguaguguuggagaagaacuga

SEQ ID NO: 2574084 - RNA, 15 nt, Human
uguaguuaggaaaua

SEQ ID NO: 2574085 - RNA, 23 nt, Human
uguaguuaggaaauaaaaccuuu

SEQ ID NO: 2574086 - RNA, 13 nt, Human
uguaguuaaugau

SEQ ID NO: 2574087 - RNA, 12 nt, Human
uguaguuaggaa

SEQ ID NO: 2574088 - RNA, 13 nt, Human
uguaguuaggaaa

SEQ ID NO: 2574089 - RNA, 14 nt, Human
uguaguuaggaaau

SEQ ID NO: 2574090 - RNA, 14 nt, Human
uguagcugguuucc

SEQ ID NO: 2574091 - RNA, 16 nt, Human
uguagccuugcccgga

SEQ ID NO: 2574092 - RNA, 17 nt, Human
uguagccuugcccggau

SEQ ID NO: 2574093 - RNA, 21 nt, Human
uguagccuuccuccacauccu

SEQ ID NO: 2574094 - RNA, 18 nt, Human
uguccccaccgcagacag

SEQ ID NO: 2574095 - RNA, 23 nt, Human
ugucccacccccacccccagcuc

SEQ ID NO: 2574096 - RNA, 22 nt, Human
ugucccaccucuucucuuccug

SEQ ID NO: 2574097 - RNA, 21 nt, Human
ugucccaccucuucucuuccu

SEQ ID NO: 2574098 - RNA, 13 nt, Human
ugucccaccucuu

SEQ ID NO: 2574099 - RNA, 12 nt, Human
ugucccaccucu

SEQ ID NO: 2574100 - RNA, 22 nt, Human
ugucccacccccacccccagcu

SEQ ID NO: 2574101 - RNA, 18 nt, Human
ugucccacccccaccccc

SEQ ID NO: 2574102 - RNA, 17 nt, Human
ugucccacccccacccc

SEQ ID NO: 2574103 - RNA, 18 nt, Human
uguccaugcgcucagggc

SEQ ID NO: 2574104 - RNA, 13 nt, Human
ugucccaccagcu

SEQ ID NO: 2574105 - RNA, 22 nt, Human
uguccccaccgcagacaggacc

SEQ ID NO: 2574106 - RNA, 19 nt, Human
uguccccaccgcagacagg

SEQ ID NO: 2574107 - RNA, 17 nt, Human
ugucccccagcucuggu

SEQ ID NO: 2574108 - RNA, 16 nt, Human
ugucccccagcucugg

SEQ ID NO: 2574109 - RNA, 15 nt, Human
ugucccccagcucug

SEQ ID NO: 2574110 - RNA, 13 nt, Human
ugucccccagcuc

SEQ ID NO: 2574111 - RNA, 23 nt, Human
ugucccaccucuucucuuccugu

SEQ ID NO: 2574112 - RNA, 13 nt, Human
uguccccaccgca

SEQ ID NO: 2574113 - RNA, 19 nt, Human
uguccccaguuugcagaaa

SEQ ID NO: 2574114 - RNA, 17 nt, Human
uguccccgacccuugcc

SEQ ID NO: 2574115 - RNA, 20 nt, Human
uguccuacccacccuccuuu

SEQ ID NO: 2574116 - RNA, 16 nt, Human
uguccccgacccuugc

SEQ ID NO: 2574117 - RNA, 20 nt, Human
ugucccccuaauauuaggga

SEQ ID NO: 2574118 - RNA, 18 nt, Human
ugucccccucuguccagg

SEQ ID NO: 2574119 - RNA, 12 nt, Human
uguccucagccu

SEQ ID NO: 2574120 - RNA, 13 nt, Human
uguccucagccuu

SEQ ID NO: 2574121 - RNA, 16 nt, Human
uguccucagccuugcc

SEQ ID NO: 2574122 - RNA, 17 nt, Human
uguccuacucuguguca

SEQ ID NO: 2574123 - RNA, 12 nt, Human
uguccuacucug

SEQ ID NO: 2574124 - RNA, 17 nt, Human
uguccaguucccagaag

SEQ ID NO: 2574125 - RNA, 23 nt, Human
uguccagugcccauuccucaccu

SEQ ID NO: 2574126 - RNA, 18 nt, Human
uguccagugcccauuccu

SEQ ID NO: 2574127 - RNA, 17 nt, Human
uguccagugcccauucc

SEQ ID NO: 2574128 - RNA, 16 nt, Human
uguccagugcccauuc

SEQ ID NO: 2574129 - RNA, 15 nt, Human
uguccagugcccauu

SEQ ID NO: 2574130 - RNA, 14 nt, Human
uguccagugcccau

SEQ ID NO: 2574131 - RNA, 13 nt, Human
uguccagugccca

SEQ ID NO: 2574132 - RNA, 13 nt, Human
uguccagggcccu

SEQ ID NO: 2574133 - RNA, 23 nt, Human
uguccaguggguagguuggacug

SEQ ID NO: 2574134 - RNA, 16 nt, Human
ugucccaacuuguaaa

SEQ ID NO: 2574135 - RNA, 14 nt, Human
ugucauuucauuuc

SEQ ID NO: 2574136 - RNA, 16 nt, Human
ugucauuugagcaggg

SEQ ID NO: 2574137 - RNA, 19 nt, Human
ugucauuugagcagggcuc

SEQ ID NO: 2574138 - RNA, 16 nt, Human
ugucauuucauuuccu

SEQ ID NO: 2574139 - RNA, 17 nt, Human
ugucauuucauuuccua

SEQ ID NO: 2574140 - RNA, 17 nt, Human
uguccagggcccugagc

SEQ ID NO: 2574141 - RNA, 19 nt, Human
uguccagggcccugagcuc

SEQ ID NO: 2574142 - RNA, 23 nt, Human
ugucaugccccccucaaaccucc

SEQ ID NO: 2574143 - RNA, 17 nt, Human
ugucaugccccccucaa

SEQ ID NO: 2574144 - RNA, 16 nt, Human
ugucaugccccccuca

SEQ ID NO: 2574145 - RNA, 15 nt, Human
ugucaugccccccuc

SEQ ID NO: 2574146 - RNA, 14 nt, Human
ugucaugccccccu

SEQ ID NO: 2574147 - RNA, 21 nt, Human
ugucaugaauucuuaugcuua

SEQ ID NO: 2574148 - RNA, 19 nt, Human
ugucaugaauucuuaugcu

SEQ ID NO: 2574149 - RNA, 16 nt, Human
ugucaugaauucuuau

SEQ ID NO: 2574150 - RNA, 16 nt, Human
ugucaugaacauguuc

SEQ ID NO: 2574151 - RNA, 12 nt, Human
ugucaugaacau

SEQ ID NO: 2574152 - RNA, 23 nt, Human
ugucaucuuucuucuauuuuauu

SEQ ID NO: 2574153 - RNA, 13 nt, Human
ugucauuaaaaua

SEQ ID NO: 2574154 - RNA, 16 nt, Human
ugucauuuauauagau

SEQ ID NO: 2574155 - RNA, 18 nt, Human
ugucauuaaaauaaauaa

SEQ ID NO: 2574156 - RNA, 13 nt, Human
ugucaccugaaga

SEQ ID NO: 2574157 - RNA, 22 nt, Human
ugucaccguggaccuuccugcc

SEQ ID NO: 2574158 - RNA, 21 nt, Human
ugucaccguggaccuuccugc

SEQ ID NO: 2574159 - RNA, 20 nt, Human
ugucaccguggaccuuccug

SEQ ID NO: 2574160 - RNA, 19 nt, Human
ugucaccguggaccuuccu

SEQ ID NO: 2574161 - RNA, 16 nt, Human
ugucaccgugagcagc

SEQ ID NO: 2574162 - RNA, 22 nt, Human
ugucaccgugagcagcuuugga

SEQ ID NO: 2574163 - RNA, 18 nt, Human
ugucaccguggaccuucc

SEQ ID NO: 2574164 - RNA, 23 nt, Human
ugucaccgugagcagcuuuggaa

SEQ ID NO: 2574165 - RNA, 14 nt, Human
ugucaccugugcuu

SEQ ID NO: 2574166 - RNA, 13 nt, Human
ugucaucugugca

SEQ ID NO: 2574167 - RNA, 16 nt, Human
ugucacgauugucauc

SEQ ID NO: 2574168 - RNA, 22 nt, Human
uguauaaaagggacugagaaau

SEQ ID NO: 2574169 - RNA, 15 nt, Human
uguaugauucccagc

SEQ ID NO: 2574170 - RNA, 13 nt, Human
uguaugauguguu

SEQ ID NO: 2574171 - RNA, 22 nt, Human
uguaguugcaauagaacagaga

SEQ ID NO: 2574172 - RNA, 20 nt, Human
uguaguugaacugauaguua

SEQ ID NO: 2574173 - RNA, 14 nt, Human
uguaguugaacuga

SEQ ID NO: 2574174 - RNA, 20 nt, Human
uguaguugcguggacucugc

SEQ ID NO: 2574175 - RNA, 15 nt, Human
uguaguugcguggac

SEQ ID NO: 2574176 - RNA, 19 nt, Human
uguaguucuugucugauug

SEQ ID NO: 2574177 - RNA, 21 nt, Human
uguaguugcguggacucugca

SEQ ID NO: 2574178 - RNA, 22 nt, Human
uguaguuuuaucacauguaugu

SEQ ID NO: 2574179 - RNA, 19 nt, Human
uguaguuuaccucuuuaaa

SEQ ID NO: 2574180 - RNA, 17 nt, Human
uguauaaaaaaaauagu

SEQ ID NO: 2574181 - RNA, 13 nt, Human
uguauaaaaauag

SEQ ID NO: 2574182 - RNA, 20 nt, Human
uguaguuuuaucacauguau

SEQ ID NO: 2574183 - RNA, 19 nt, Human
uguaguuuuucuucaacau

SEQ ID NO: 2574184 - RNA, 13 nt, Human
uguauucucugag

SEQ ID NO: 2574185 - RNA, 22 nt, Human
uguauucucuccuguaccucuu

SEQ ID NO: 2574186 - RNA, 14 nt, Human
uguauucucugagc

SEQ ID NO: 2574187 - RNA, 19 nt, Human
uguauucucugagcugugc

SEQ ID NO: 2574188 - RNA, 20 nt, Human
uguauucucugagcugugca

SEQ ID NO: 2574189 - RNA, 21 nt, Human
uguauucucugagcugugcag

SEQ ID NO: 2574190 - RNA, 18 nt, Human
uguaugauguguugugau

SEQ ID NO: 2574191 - RNA, 16 nt, Human
uguauucuuaaauuca

SEQ ID NO: 2574192 - RNA, 18 nt, Human
uguauucuuugauguuaa

SEQ ID NO: 2574193 - RNA, 17 nt, Human
uguauucuuugauguua

SEQ ID NO: 2574194 - RNA, 16 nt, Human
uguauucuuugauguu

SEQ ID NO: 2574195 - RNA, 21 nt, Human
uguauucuuaaauucauuuua

SEQ ID NO: 2574196 - RNA, 21 nt, Human
uguauucuuugauguuaacac

SEQ ID NO: 2574197 - RNA, 19 nt, Human
uguauucuuugauguuaac

SEQ ID NO: 2574198 - RNA, 22 nt, Human
uguauucuuugauguuaacaca

SEQ ID NO: 2574199 - RNA, 21 nt, Human
uguauugugucuuuugcauga

SEQ ID NO: 2574200 - RNA, 19 nt, Human
uguauugugucuuuugcau

SEQ ID NO: 2574201 - RNA, 18 nt, Human
uguauugugucuuuugca

SEQ ID NO: 2574202 - RNA, 15 nt, Human
uguauuguucccagu

SEQ ID NO: 2574203 - RNA, 19 nt, Human
uguauuguucccagugaca

SEQ ID NO: 2574204 - RNA, 20 nt, Human
uguauugugucuuuugcaug

SEQ ID NO: 2574205 - RNA, 12 nt, Human
uguauuguuccc

SEQ ID NO: 2574206 - RNA, 13 nt, Human
uguauuguuccca

SEQ ID NO: 2574207 - RNA, 14 nt, Human
uguauuguucccag

SEQ ID NO: 2574208 - RNA, 23 nt, Human
uguauuuccccaacauguaauaa

SEQ ID NO: 2574209 - RNA, 18 nt, Human
uguauuuauuuuccuccc

SEQ ID NO: 2574210 - RNA, 19 nt, Human
uguauuuauuuuccucccc

SEQ ID NO: 2574211 - RNA, 20 nt, Human
uguauuuauuuuccucccca

SEQ ID NO: 2574212 - RNA, 15 nt, Human
uguauuuccagugca

SEQ ID NO: 2574213 - RNA, 22 nt, Human
uguauuuuccaagugugcauau

SEQ ID NO: 2574214 - RNA, 21 nt, Human
uguauuuuccaagugugcaua

SEQ ID NO: 2574215 - RNA, 20 nt, Human
uguauuuuccaagugugcau

SEQ ID NO: 2574216 - RNA, 18 nt, Human
uguauuuuccaagugugc

SEQ ID NO: 2574217 - RNA, 17 nt, Human
uguauuuuccaagugug

SEQ ID NO: 2574218 - RNA, 12 nt, Human
uguauuuuccaa

SEQ ID NO: 2574219 - RNA, 10 nt, Human
uguauuuucc

SEQ ID NO: 2574220 - RNA, 22 nt, Human
uguauuuuauuuagacaagaga

SEQ ID NO: 2574221 - RNA, 21 nt, Human
uguauuuuauuguaacagaca

SEQ ID NO: 2574222 - RNA, 14 nt, Human
uguauuuuauugua

SEQ ID NO: 2574223 - RNA, 13 nt, Human
uguauuuuauugu

SEQ ID NO: 2574224 - RNA, 19 nt, Human
uguauuuuauuuagacaag

SEQ ID NO: 2574225 - RNA, 18 nt, Human
uguauuuuauuuagacaa

SEQ ID NO: 2574226 - RNA, 20 nt, Human
uguauuuauuuaaaagauuc

SEQ ID NO: 2574227 - RNA, 18 nt, Human
uguauuuauuuaaaagau

SEQ ID NO: 2574228 - RNA, 16 nt, Human
uguauuuauuuaaaag

SEQ ID NO: 2574229 - RNA, 20 nt, Human
uguauuuauuuaguauuuau

SEQ ID NO: 2574230 - RNA, 23 nt, Human
uguauuuauuccauauucaugua

SEQ ID NO: 2574231 - RNA, 14 nt, Human
uguauuuauuccau

SEQ ID NO: 2574232 - RNA, 22 nt, Human
uguauuuauucaauaaaguauu

SEQ ID NO: 2574233 - RNA, 15 nt, Human
uguauuuauuuaaaa

SEQ ID NO: 2574234 - RNA, 19 nt, Human
uguauuuauucaauaaagu

SEQ ID NO: 2574235 - RNA, 17 nt, Human
uguauuuauucaauaaa

SEQ ID NO: 2574236 - RNA, 14 nt, Human
uguauuuauucaau

SEQ ID NO: 2574237 - RNA, 13 nt, Human
uguauuuauucaa

SEQ ID NO: 2574238 - RNA, 17 nt, Human
uguauuuaugugugagg

SEQ ID NO: 2574239 - RNA, 13 nt, Human
uguauuuaaauau

SEQ ID NO: 2574240 - RNA, 21 nt, Human
ugucaccaccuucccagcucu

SEQ ID NO: 2574241 - RNA, 23 nt, Human
ugucaccaccuucccagcucucc

SEQ ID NO: 2574242 - RNA, 22 nt, Human
ugucacccuuaggccagcacca

SEQ ID NO: 2574243 - RNA, 22 nt, Human
ugucacccuccaccucuucacc

SEQ ID NO: 2574244 - RNA, 18 nt, Human
ugucacccuccaccucuu

SEQ ID NO: 2574245 - RNA, 18 nt, Human
ugucaccggauccugggu

SEQ ID NO: 2574246 - RNA, 19 nt, Human
ugucaccggauccugggug

SEQ ID NO: 2574247 - RNA, 16 nt, Human
ugucaccaccuuccca

SEQ ID NO: 2574248 - RNA, 18 nt, Human
ugucaccaccuucccagc

SEQ ID NO: 2574249 - RNA, 19 nt, Human
ugucaccaccuucccagcu

SEQ ID NO: 2574250 - RNA, 13 nt, Human
ugucacaccagcc

SEQ ID NO: 2574251 - RNA, 15 nt, Human
ugucacacagggcag

SEQ ID NO: 2574252 - RNA, 14 nt, Human
uguauuuuguauug

SEQ ID NO: 2574253 - RNA, 15 nt, Human
ugucacaccagccau

SEQ ID NO: 2574254 - RNA, 14 nt, Human
ugucacaccagcca

SEQ ID NO: 2574255 - RNA, 12 nt, Human
ugucacaggcag

SEQ ID NO: 2574256 - RNA, 17 nt, Human
ugucacacacuuuggcu

SEQ ID NO: 2574257 - RNA, 23 nt, Human
uguauuuuccaagugugcauauu

SEQ ID NO: 2574258 - RNA, 16 nt, Human
uguauuuucuuucucu

SEQ ID NO: 2574259 - RNA, 16 nt, Human
ugucuguagagggccc

SEQ ID NO: 2574260 - RNA, 21 nt, Human
ugucuguacacguguccugua

SEQ ID NO: 2574261 - RNA, 20 nt, Human
ugucuguacacguguccugu

SEQ ID NO: 2574262 - RNA, 19 nt, Human
ugucuguacacguguccug

SEQ ID NO: 2574263 - RNA, 22 nt, Human
ugucugguuuuaacaauuuccu

SEQ ID NO: 2574264 - RNA, 15 nt, Human
ugucuguacacgugu

SEQ ID NO: 2574265 - RNA, 13 nt, Human
ugucuguacacgu

SEQ ID NO: 2574266 - RNA, 21 nt, Human
ugucuuuccacuccuccuagc

SEQ ID NO: 2574267 - RNA, 13 nt, Human
ugucuuuccuaga

SEQ ID NO: 2574268 - RNA, 23 nt, Human
ugucuguagagggcccugguguu

SEQ ID NO: 2574269 - RNA, 21 nt, Human
ugucuguagagggcccuggug

SEQ ID NO: 2574270 - RNA, 20 nt, Human
ugucuguagagggcccuggu

SEQ ID NO: 2574271 - RNA, 19 nt, Human
ugucuguagagggcccugg

SEQ ID NO: 2574272 - RNA, 17 nt, Human
ugucuguagcuccucaa

SEQ ID NO: 2574273 - RNA, 23 nt, Human
ugucuguagcuccucaacucacc

SEQ ID NO: 2574274 - RNA, 21 nt, Human
ugucuuuucuugcaugaggcu

SEQ ID NO: 2574275 - RNA, 16 nt, Human
ugucuuuggacccuga

SEQ ID NO: 2574276 - RNA, 14 nt, Human
ugucuuuggacccu

SEQ ID NO: 2574277 - RNA, 12 nt, Human
ugucuuucugag

SEQ ID NO: 2574278 - RNA, 21 nt, Human
ugucugucccgggguccugug

SEQ ID NO: 2574279 - RNA, 16 nt, Human
ugucugucccgggguc

SEQ ID NO: 2574280 - RNA, 15 nt, Human
ugucuuucugagcac

SEQ ID NO: 2574281 - RNA, 13 nt, Human
ugugaaggacccu

SEQ ID NO: 2574282 - RNA, 14 nt, Human
ugugaaggacccuu

SEQ ID NO: 2574283 - RNA, 17 nt, Human
ugugaaaaugugugugu

SEQ ID NO: 2574284 - RNA, 18 nt, Human
ugugaaaaugguccagga

SEQ ID NO: 2574285 - RNA, 22 nt, Human
ugugaaaaugguccaggagaag

SEQ ID NO: 2574286 - RNA, 16 nt, Human
ugugaaaaugugugug

SEQ ID NO: 2574287 - RNA, 14 nt, Human
ugugaaaauggguu

SEQ ID NO: 2574288 - RNA, 13 nt, Human
ugugaaaaugggu

SEQ ID NO: 2574289 - RNA, 17 nt, Human
ugugaaaaucaaauaca

SEQ ID NO: 2574290 - RNA, 20 nt, Human
ugucuuuuucuggacugaag

SEQ ID NO: 2574291 - RNA, 23 nt, Human
ugucuuuucuugcaugaggcuag

SEQ ID NO: 2574292 - RNA, 13 nt, Human
ugucuuuugaaua

SEQ ID NO: 2574293 - RNA, 23 nt, Human
ugugaaaagaaaaaugagccugg

SEQ ID NO: 2574294 - RNA, 12 nt, Human
ugucuuuugcau

SEQ ID NO: 2574295 - RNA, 14 nt, Human
ugucuuuugaauau

SEQ ID NO: 2574296 - RNA, 14 nt, Human
ugucuuuugcauga

SEQ ID NO: 2574297 - RNA, 17 nt, Human
ugucuuuuucuggacug

SEQ ID NO: 2574298 - RNA, 23 nt, Human
ugucuuuuucuggacugaagccu

SEQ ID NO: 2574299 - RNA, 16 nt, Human
ugucugguuuuaacaa

SEQ ID NO: 2574300 - RNA, 15 nt, Human
ugucuggccaggccu

SEQ ID NO: 2574301 - RNA, 15 nt, Human
ugucugguuuuaaca

SEQ ID NO: 2574302 - RNA, 19 nt, Human
ugucugcuuucuccauugu

SEQ ID NO: 2574303 - RNA, 19 nt, Human
ugucuggauucccaggaug

SEQ ID NO: 2574304 - RNA, 15 nt, Human
ugucuggauucccag

SEQ ID NO: 2574305 - RNA, 19 nt, Human
ugucugaaggacacuuccu

SEQ ID NO: 2574306 - RNA, 18 nt, Human
ugucugaaggacacuucc

SEQ ID NO: 2574307 - RNA, 17 nt, Human
ugucugaaggacacuuc

SEQ ID NO: 2574308 - RNA, 16 nt, Human
ugucugaagucacugc

SEQ ID NO: 2574309 - RNA, 18 nt, Human
ugucugaagucacugcac

SEQ ID NO: 2574310 - RNA, 17 nt, Human
ugucugaagucacugca

SEQ ID NO: 2574311 - RNA, 23 nt, Human
ugucugaaggacacuuccugccu

SEQ ID NO: 2574312 - RNA, 22 nt, Human
ugucugaaggacacuuccugcc

SEQ ID NO: 2574313 - RNA, 19 nt, Human
ugucugaagucacugcaca

SEQ ID NO: 2574314 - RNA, 15 nt, Human
uguccugaccacccu

SEQ ID NO: 2574315 - RNA, 14 nt, Human
uguccugaccaccc

SEQ ID NO: 2574316 - RNA, 12 nt, Human
uguccugaccac

SEQ ID NO: 2574317 - RNA, 19 nt, Human
uguccucucuggcugggga

SEQ ID NO: 2574318 - RNA, 12 nt, Human
uguccuccuggu

SEQ ID NO: 2574319 - RNA, 19 nt, Human
uguccucuucugcaucuug

SEQ ID NO: 2574320 - RNA, 21 nt, Human
uguccuccugguggguccagg

SEQ ID NO: 2574321 - RNA, 23 nt, Human
uguccucuugcucaaaaaucugu

SEQ ID NO: 2574322 - RNA, 15 nt, Human
uguccucuugcucaa

SEQ ID NO: 2574323 - RNA, 23 nt, Human
uguccucuucugcaucuugggga

SEQ ID NO: 2574324 - RNA, 17 nt, Human
uguccucagccuugcca

SEQ ID NO: 2574325 - RNA, 20 nt, Human
uguccucagccuugccagag

SEQ ID NO: 2574326 - RNA, 21 nt, Human
uguccucagccuugccagaga

SEQ ID NO: 2574327 - RNA, 22 nt, Human
uguccucagccuugccagagau

SEQ ID NO: 2574328 - RNA, 14 nt, Human
uguccucagcuucu

SEQ ID NO: 2574329 - RNA, 14 nt, Human
uguccucagguggc

SEQ ID NO: 2574330 - RNA, 21 nt, Human
uguccuccucggaucaccgag

SEQ ID NO: 2574331 - RNA, 11 nt, Human
uguccuccucg

SEQ ID NO: 2574332 - RNA, 10 nt, Human
uguccuccuc

SEQ ID NO: 2574333 - RNA, 19 nt, Human
uguccucagguggccaugc

SEQ ID NO: 2574334 - RNA, 18 nt, Human
uguccucagguggccaug

SEQ ID NO: 2574335 - RNA, 15 nt, Human
ugugaucagaccaua

SEQ ID NO: 2574336 - RNA, 20 nt, Human
ugugcacaauucuguuuuag

SEQ ID NO: 2574337 - RNA, 17 nt, Human
ugugcacaucugugucu

SEQ ID NO: 2574338 - RNA, 20 nt, Human
ugugcacaucugugucuugu

SEQ ID NO: 2574339 - RNA, 13 nt, Human
ugugcacaucucu

SEQ ID NO: 2574340 - RNA, 14 nt, Human
ugugcacaucucug

SEQ ID NO: 2574341 - RNA, 15 nt, Human
ugugcacaucucugc

SEQ ID NO: 2574342 - RNA, 19 nt, Human
ugugcacaucucugcuuga

SEQ ID NO: 2574343 - RNA, 19 nt, Human
ugugcacacacaccacaca

SEQ ID NO: 2574344 - RNA, 22 nt, Human
ugugcacacacaccacacauac

SEQ ID NO: 2574345 - RNA, 15 nt, Human
ugugauauauaagug

SEQ ID NO: 2574346 - RNA, 14 nt, Human
ugugauauauaagu

SEQ ID NO: 2574347 - RNA, 13 nt, Human
ugugauauauaag

SEQ ID NO: 2574348 - RNA, 19 nt, Human
ugugaguuuaccuuguaua

SEQ ID NO: 2574349 - RNA, 15 nt, Human
ugugauauggagccc

SEQ ID NO: 2574350 - RNA, 16 nt, Human
ugugauauauaagugu

SEQ ID NO: 2574351 - RNA, 14 nt, Human
ugugauauuaacag

SEQ ID NO: 2574352 - RNA, 16 nt, Human
ugugauauaagugugu

SEQ ID NO: 2574353 - RNA, 21 nt, Human
ugugaguuuaccuuguauacu

SEQ ID NO: 2574354 - RNA, 16 nt, Human
ugugaguuuaaagcaa

SEQ ID NO: 2574355 - RNA, 16 nt, Human
ugugaguguaagugug

SEQ ID NO: 2574356 - RNA, 20 nt, Human
ugugaguguaagugugagua

SEQ ID NO: 2574357 - RNA, 20 nt, Human
ugugaguguguccaagugug

SEQ ID NO: 2574358 - RNA, 23 nt, Human
ugugaguguguccaagugugugu

SEQ ID NO: 2574359 - RNA, 14 nt, Human
ugugagugugugca

SEQ ID NO: 2574360 - RNA, 21 nt, Human
ugugagucaccaagcccaguu

SEQ ID NO: 2574361 - RNA, 19 nt, Human
ugugagucaccaagcccag

SEQ ID NO: 2574362 - RNA, 17 nt, Human
ugugagucaccaagccc

SEQ ID NO: 2574363 - RNA, 15 nt, Human
ugugagucaccaagc

SEQ ID NO: 2574364 - RNA, 14 nt, Human
ugugaggccagggc

SEQ ID NO: 2574365 - RNA, 15 nt, Human
ugugaggccagggca

SEQ ID NO: 2574366 - RNA, 16 nt, Human
ugugaggccagggcag

SEQ ID NO: 2574367 - RNA, 17 nt, Human
ugugaggccagggcaga

SEQ ID NO: 2574368 - RNA, 18 nt, Human
ugugaggccuggccaggc

SEQ ID NO: 2574369 - RNA, 14 nt, Human
ugugaggccuggcc

SEQ ID NO: 2574370 - RNA, 22 nt, Human
ugugaggccccuggacaagcag

SEQ ID NO: 2574371 - RNA, 14 nt, Human
ugugaggccccugg

SEQ ID NO: 2574372 - RNA, 22 nt, Human
ugugaggccagggcagagugag

SEQ ID NO: 2574373 - RNA, 13 nt, Human
ugugaggccccug

SEQ ID NO: 2574374 - RNA, 23 nt, Human
ugugaggcccaugguugagaaau

SEQ ID NO: 2574375 - RNA, 18 nt, Human
ugugaggaagccgcuggg

SEQ ID NO: 2574376 - RNA, 13 nt, Human
ugugaggaagccg

SEQ ID NO: 2574377 - RNA, 15 nt, Human
ugugaccaaugucuu

SEQ ID NO: 2574378 - RNA, 12 nt, Human
ugugaggcaggg

SEQ ID NO: 2574379 - RNA, 13 nt, Human
ugugaccaaguua

SEQ ID NO: 2574380 - RNA, 13 nt, Human
ugugaggccaggg

SEQ ID NO: 2574381 - RNA, 13 nt, Human
ugugaggcagggg

SEQ ID NO: 2574382 - RNA, 18 nt, Human
ugugaggcaggggcggag

SEQ ID NO: 2574383 - RNA, 14 nt, Human
ugugaggagcugcu

SEQ ID NO: 2574384 - RNA, 17 nt, Human
ugugaggagcugcuggc

SEQ ID NO: 2574385 - RNA, 18 nt, Human
ugugaggagcugcuggcu

SEQ ID NO: 2574386 - RNA, 20 nt, Human
ugugaggagcugcuggcuug

SEQ ID NO: 2574387 - RNA, 20 nt, Human
ugugaggaagccgcuggggc

SEQ ID NO: 2574388 - RNA, 12 nt, Human
ugugaggaagcc

SEQ ID NO: 2574389 - RNA, 16 nt, Human
ugugaccaaugucuug

SEQ ID NO: 2574390 - RNA, 13 nt, Human
ugugaggagcugc

SEQ ID NO: 2574391 - RNA, 15 nt, Human
ugugaaguuagaauu

SEQ ID NO: 2574392 - RNA, 14 nt, Human
ugugaaguuagaau

SEQ ID NO: 2574393 - RNA, 13 nt, Human
ugugaaguuagaa

SEQ ID NO: 2574394 - RNA, 18 nt, Human
ugugaaguguuaauacua

SEQ ID NO: 2574395 - RNA, 18 nt, Human
ugugaagugaaugaaaca

SEQ ID NO: 2574396 - RNA, 23 nt, Human
ugugaaguccuucaccucacuga

SEQ ID NO: 2574397 - RNA, 16 nt, Human
ugugaaugggaaaaga

SEQ ID NO: 2574398 - RNA, 22 nt, Human
ugugaauggauuggauuauuua

SEQ ID NO: 2574399 - RNA, 21 nt, Human
ugugaauguugugauguauuc

SEQ ID NO: 2574400 - RNA, 19 nt, Human
ugugaauggauuggauuau

SEQ ID NO: 2574401 - RNA, 20 nt, Human
ugugaaguuagaauuccuuc

SEQ ID NO: 2574402 - RNA, 13 nt, Human
ugugaauucagau

SEQ ID NO: 2574403 - RNA, 20 nt, Human
ugugaauuagcucacuuggu

SEQ ID NO: 2574404 - RNA, 14 nt, Human
ugugaauucagauu

SEQ ID NO: 2574405 - RNA, 18 nt, Human
ugugacauuuauauauug

SEQ ID NO: 2574406 - RNA, 17 nt, Human
ugugacauuuauauauu

SEQ ID NO: 2574407 - RNA, 18 nt, Human
ugugaauugccugcagag

SEQ ID NO: 2574408 - RNA, 15 nt, Human
ugugacauguuuuau

SEQ ID NO: 2574409 - RNA, 18 nt, Human
ugugcuauacugcauacu

SEQ ID NO: 2574410 - RNA, 20 nt, Human
ugugcuauacugcauacuuu

SEQ ID NO: 2574411 - RNA, 21 nt, Human
ugugcuauacugcauacuuuu

SEQ ID NO: 2574412 - RNA, 13 nt, Human
ugugcuagaugug

SEQ ID NO: 2574413 - RNA, 15 nt, Human
ugugcuacuuugccu

SEQ ID NO: 2574414 - RNA, 13 nt, Human
ugugcuauacugc

SEQ ID NO: 2574415 - RNA, 16 nt, Human
ugugcuacuuugccuu

SEQ ID NO: 2574416 - RNA, 18 nt, Human
ugugcucaggacucagaa

SEQ ID NO: 2574417 - RNA, 20 nt, Human
ugugcucaaaauuugaagaa

SEQ ID NO: 2574418 - RNA, 16 nt, Human
ugugcucaaaauuuga

SEQ ID NO: 2574419 - RNA, 20 nt, Human
ugugcuagggaaacuucccg

SEQ ID NO: 2574420 - RNA, 14 nt, Human
ugugcuaugaauuu

SEQ ID NO: 2574421 - RNA, 15 nt, Human
ugugcuaugaauuuu

SEQ ID NO: 2574422 - RNA, 19 nt, Human
ugugcuaguaauuggaaag

SEQ ID NO: 2574423 - RNA, 19 nt, Human
ugugcgccuacaggaguga

SEQ ID NO: 2574424 - RNA, 16 nt, Human
ugugccuuuugccauc

SEQ ID NO: 2574425 - RNA, 18 nt, Human
ugugccuuuuauagcuau

SEQ ID NO: 2574426 - RNA, 16 nt, Human
ugugccuuuuauagcu

SEQ ID NO: 2574427 - RNA, 14 nt, Human
ugugcgccuacagg

SEQ ID NO: 2574428 - RNA, 16 nt, Human
ugugcucaggagcccu

SEQ ID NO: 2574429 - RNA, 15 nt, Human
ugugcucaggagccc

SEQ ID NO: 2574430 - RNA, 17 nt, Human
ugugcucaggagcccug

SEQ ID NO: 2574431 - RNA, 14 nt, Human
ugugcuuguuaacu

SEQ ID NO: 2574432 - RNA, 14 nt, Human
ugugcuuguuuaca

SEQ ID NO: 2574433 - RNA, 23 nt, Human
ugugcuuguuuacagcacuacuc

SEQ ID NO: 2574434 - RNA, 14 nt, Human
ugugcuuuagcuug

SEQ ID NO: 2574435 - RNA, 13 nt, Human
ugugcuuuaugcu

SEQ ID NO: 2574436 - RNA, 17 nt, Human
ugugcuuuaugcugaaa

SEQ ID NO: 2574437 - RNA, 18 nt, Human
ugugcuuuaugcugaaac

SEQ ID NO: 2574438 - RNA, 20 nt, Human
ugugcuuuaugcugaaacag

SEQ ID NO: 2574439 - RNA, 16 nt, Human
ugugcuuuccagcuca

SEQ ID NO: 2574440 - RNA, 15 nt, Human
ugugcuuuccagcuc

SEQ ID NO: 2574441 - RNA, 14 nt, Human
ugugcuuuccagcu

SEQ ID NO: 2574442 - RNA, 19 nt, Human
ugugcuuuaugcugaaaca

SEQ ID NO: 2574443 - RNA, 20 nt, Human
ugugcuuugacucaccuguu

SEQ ID NO: 2574444 - RNA, 17 nt, Human
ugugcuuucuauuguac

SEQ ID NO: 2574445 - RNA, 15 nt, Human
ugugcuuucuauugu

SEQ ID NO: 2574446 - RNA, 11 nt, Human
ugugcuuucua

SEQ ID NO: 2574447 - RNA, 22 nt, Human
ugugcuuucccugaacugggac

SEQ ID NO: 2574448 - RNA, 16 nt, Human
ugugcuuucccugaac

SEQ ID NO: 2574449 - RNA, 20 nt, Human
ugugcuuuccagcucacccc

SEQ ID NO: 2574450 - RNA, 18 nt, Human
ugugcuuuccagcucacc

SEQ ID NO: 2574451 - RNA, 19 nt, Human
uguggaaauuaagaagaaa

SEQ ID NO: 2574452 - RNA, 17 nt, Human
ugugcuuugcauuccua

SEQ ID NO: 2574453 - RNA, 20 nt, Human
ugugcacaucucugcuugag

SEQ ID NO: 2574454 - RNA, 13 nt, Human
ugugcacaucuuc

SEQ ID NO: 2574455 - RNA, 21 nt, Human
ugugcacaucugugucuuguu

SEQ ID NO: 2574456 - RNA, 14 nt, Human
ugugcacguacaca

SEQ ID NO: 2574457 - RNA, 19 nt, Human
ugugcacguggcauguggc

SEQ ID NO: 2574458 - RNA, 12 nt, Human
ugugcacuaagg

SEQ ID NO: 2574459 - RNA, 13 nt, Human
ugugcacugccca

SEQ ID NO: 2574460 - RNA, 16 nt, Human
ugugcacuaaggggcc

SEQ ID NO: 2574461 - RNA, 17 nt, Human
ugugcacuaaggggccc

SEQ ID NO: 2574462 - RNA, 14 nt, Human
ugugcacugucacu

SEQ ID NO: 2574463 - RNA, 21 nt, Human
ugugcacugcccauggacagg

SEQ ID NO: 2574464 - RNA, 17 nt, Human
ugugcacugucacuuug

SEQ ID NO: 2574465 - RNA, 23 nt, Human
ugugcacuaaggggcccggccag

SEQ ID NO: 2574466 - RNA, 16 nt, Human
ugugcauuaucuagau

SEQ ID NO: 2574467 - RNA, 19 nt, Human
ugugcauuaucuagauacu

SEQ ID NO: 2574468 - RNA, 14 nt, Human
ugugcauuaucuag

SEQ ID NO: 2574469 - RNA, 16 nt, Human
ugugcagaaaacauug

SEQ ID NO: 2574470 - RNA, 15 nt, Human
ugugcagaaaacauu

SEQ ID NO: 2574471 - RNA, 14 nt, Human
ugugcagaaaacau

SEQ ID NO: 2574472 - RNA, 21 nt, Human
ugugcacugucacuuugcucu

SEQ ID NO: 2574473 - RNA, 19 nt, Human
ugugcagaaaacauuguuc

SEQ ID NO: 2574474 - RNA, 17 nt, Human
ugugcagaaaacauugu

SEQ ID NO: 2574475 - RNA, 18 nt, Human
ugugcagacucaauaaaa

SEQ ID NO: 2574476 - RNA, 19 nt, Human
ugugcagacucaauaaaau

SEQ ID NO: 2574477 - RNA, 15 nt, Human
ugugccuuuuauagc

SEQ ID NO: 2574478 - RNA, 14 nt, Human
ugugcauugcugug

SEQ ID NO: 2574479 - RNA, 16 nt, Human
ugugccuucuuuugau

SEQ ID NO: 2574480 - RNA, 17 nt, Human
ugugccuuggugugcug

SEQ ID NO: 2574481 - RNA, 23 nt, Human
ugugccuucgucuuucccauggg

SEQ ID NO: 2574482 - RNA, 14 nt, Human
ugugccuucgucuu

SEQ ID NO: 2574483 - RNA, 20 nt, Human
ugugcauuaucuagauacug

SEQ ID NO: 2574484 - RNA, 21 nt, Human
ugugcauuaucuagauacugu

SEQ ID NO: 2574485 - RNA, 23 nt, Human
ugugcauuaucuagauacuguau

SEQ ID NO: 2574486 - RNA, 23 nt, Human
ugugcauucuuuuaaaagacaag

SEQ ID NO: 2574487 - RNA, 22 nt, Human
ugugcauucuuuuaaaagacaa

SEQ ID NO: 2574488 - RNA, 21 nt, Human
ugugcauucuuuuaaaagaca

SEQ ID NO: 2574489 - RNA, 14 nt, Human
ugugcaugugugug

SEQ ID NO: 2574490 - RNA, 22 nt, Human
ugugcagacucaauaaaaucau

SEQ ID NO: 2574491 - RNA, 15 nt, Human
ugugcaugugugugc

SEQ ID NO: 2574492 - RNA, 23 nt, Human
uguguagccugugcauguauguc

SEQ ID NO: 2574493 - RNA, 15 nt, Human
uguguacauaacuga

SEQ ID NO: 2574494 - RNA, 14 nt, Human
uguguagccugugc

SEQ ID NO: 2574495 - RNA, 16 nt, Human
uguguagccugugcau

SEQ ID NO: 2574496 - RNA, 15 nt, Human
uguguagccugugca

SEQ ID NO: 2574497 - RNA, 12 nt, Human
uguguagggcgg

SEQ ID NO: 2574498 - RNA, 14 nt, Human
uguguagcuuugcu

SEQ ID NO: 2574499 - RNA, 17 nt, Human
uguguagcuuugcucuu

SEQ ID NO: 2574500 - RNA, 19 nt, Human
uguguaauuuaaaauugug

SEQ ID NO: 2574501 - RNA, 22 nt, Human
uguguaauuuaaaauugugaug

SEQ ID NO: 2574502 - RNA, 23 nt, Human
uguguaauuuaaaauugugaugu

SEQ ID NO: 2574503 - RNA, 16 nt, Human
uguguaauuuuguucu

SEQ ID NO: 2574504 - RNA, 14 nt, Human
uguguacaaagaaa

SEQ ID NO: 2574505 - RNA, 19 nt, Human
uguguacaaagaaauaaca

SEQ ID NO: 2574506 - RNA, 21 nt, Human
uguguacagaauucugcuacc

SEQ ID NO: 2574507 - RNA, 18 nt, Human
uguguacagaugaaugau

SEQ ID NO: 2574508 - RNA, 22 nt, Human
uguguacacgggacugacgcaa

SEQ ID NO: 2574509 - RNA, 23 nt, Human
uguguacagaauucugcuaccuc

SEQ ID NO: 2574510 - RNA, 10 nt, Human
uguguacagg

SEQ ID NO: 2574511 - RNA, 21 nt, Human
uguguacagaugaaugauaaa

SEQ ID NO: 2574512 - RNA, 19 nt, Human
uguguacaguguguaaagu

SEQ ID NO: 2574513 - RNA, 19 nt, Human
ugugggauguucagcacug

SEQ ID NO: 2574514 - RNA, 13 nt, Human
ugugggagggagc

SEQ ID NO: 2574515 - RNA, 22 nt, Human
ugugggauguucagcacugucc

SEQ ID NO: 2574516 - RNA, 21 nt, Human
ugugggagggagcagacagga

SEQ ID NO: 2574517 - RNA, 16 nt, Human
ugugggcaggaaguga

SEQ ID NO: 2574518 - RNA, 20 nt, Human
ugugggcgugagaccugccc

SEQ ID NO: 2574519 - RNA, 21 nt, Human
ugugggcgugagaccugcccc

SEQ ID NO: 2574520 - RNA, 19 nt, Human
ugugggccucaaggacuug

SEQ ID NO: 2574521 - RNA, 21 nt, Human
ugugggccucaaggacuugaa

SEQ ID NO: 2574522 - RNA, 21 nt, Human
uguguaauagaaaacugaaaa

SEQ ID NO: 2574523 - RNA, 15 nt, Human
uguguaaucaauaaa

SEQ ID NO: 2574524 - RNA, 22 nt, Human
ugugggcgugagaccugccccu

SEQ ID NO: 2574525 - RNA, 22 nt, Human
ugugggcuaguugggcuuccuc

SEQ ID NO: 2574526 - RNA, 11 nt, Human
uguguaauuua

SEQ ID NO: 2574527 - RNA, 18 nt, Human
uguguaauuuaaaauugu

SEQ ID NO: 2574528 - RNA, 23 nt, Human
uguguaaucauuucuugggcccu

SEQ ID NO: 2574529 - RNA, 20 nt, Human
uguguaaucaauaaacgauu

SEQ ID NO: 2574530 - RNA, 19 nt, Human
uguguaaucaauaaacgau

SEQ ID NO: 2574531 - RNA, 21 nt, Human
uguguaaucauuucuugggcc

SEQ ID NO: 2574532 - RNA, 22 nt, Human
uguguaaucauuucuugggccc

SEQ ID NO: 2574533 - RNA, 19 nt, Human
uguggaccacugcaugagc

SEQ ID NO: 2574534 - RNA, 17 nt, Human
uguggaccacugcauga

SEQ ID NO: 2574535 - RNA, 19 nt, Human
uguggacacagcucuucuc

SEQ ID NO: 2574536 - RNA, 16 nt, Human
uguggacuaaaagaua

SEQ ID NO: 2574537 - RNA, 15 nt, Human
uguggacuaaaagau

SEQ ID NO: 2574538 - RNA, 18 nt, Human
uguggccguuaucuggaa

SEQ ID NO: 2574539 - RNA, 10 nt, Human
uguggccuca

SEQ ID NO: 2574540 - RNA, 11 nt, Human
uguggccucag

SEQ ID NO: 2574541 - RNA, 18 nt, Human
uguggaaucuggagugag

SEQ ID NO: 2574542 - RNA, 17 nt, Human
uguggaaucuggaguga

SEQ ID NO: 2574543 - RNA, 15 nt, Human
uguggaagugugggu

SEQ ID NO: 2574544 - RNA, 18 nt, Human
uguggacacagcucuucu

SEQ ID NO: 2574545 - RNA, 14 nt, Human
uguggaagcaaaaa

SEQ ID NO: 2574546 - RNA, 14 nt, Human
uguggaagggacua

SEQ ID NO: 2574547 - RNA, 15 nt, Human
uguggaagggacuag

SEQ ID NO: 2574548 - RNA, 18 nt, Human
uguggaagggacuaggag

SEQ ID NO: 2574549 - RNA, 23 nt, Human
uguggcgcagcauauucaggaag

SEQ ID NO: 2574550 - RNA, 17 nt, Human
uguggccuguggccugu

SEQ ID NO: 2574551 - RNA, 18 nt, Human
uguggcgccgucuccagg

SEQ ID NO: 2574552 - RNA, 20 nt, Human
uguggccuuccauuuauaug

SEQ ID NO: 2574553 - RNA, 16 nt, Human
uguggccuguggccug

SEQ ID NO: 2574554 - RNA, 15 nt, Human
uguggccuguggccu

SEQ ID NO: 2574555 - RNA, 13 nt, Human
uguggccuguggc

SEQ ID NO: 2574556 - RNA, 16 nt, Human
uguggccugggccucc

SEQ ID NO: 2574557 - RNA, 17 nt, Human
uguggccugcacaguga

SEQ ID NO: 2574558 - RNA, 15 nt, Human
uguggccugggccuc

SEQ ID NO: 2574559 - RNA, 11 nt, Human
uguggccugca

SEQ ID NO: 2574560 - RNA, 13 nt, Human
uguggccucagaa

SEQ ID NO: 2574561 - RNA, 14 nt, Human
ugugggagugugua

SEQ ID NO: 2574562 - RNA, 15 nt, Human
ugugggaguguguaa

SEQ ID NO: 2574563 - RNA, 13 nt, Human
ugugggagcagcg

SEQ ID NO: 2574564 - RNA, 13 nt, Human
uguggcuccccuc

SEQ ID NO: 2574565 - RNA, 22 nt, Human
uguggcucacgugagagugucu

SEQ ID NO: 2574566 - RNA, 16 nt, Human
uguggcucacgugugu

SEQ ID NO: 2574567 - RNA, 10 nt, Human
uguggcucac

SEQ ID NO: 2574568 - RNA, 23 nt, Human
uguggcgccgucuccaggggcug

SEQ ID NO: 2574569 - RNA, 19 nt, Human
uguggcgccgucuccaggg

SEQ ID NO: 2574570 - RNA, 13 nt, Human
uguggcggugccu

SEQ ID NO: 2574571 - RNA, 17 nt, Human
uuaaaugucuaauguau

SEQ ID NO: 2574572 - RNA, 14 nt, Human
uuaaaugucuaaug

SEQ ID NO: 2574573 - RNA, 18 nt, Human
uuaaaugucuucuguauu

SEQ ID NO: 2574574 - RNA, 22 nt, Human
uuaaaugucuaauguauuuuau

SEQ ID NO: 2574575 - RNA, 19 nt, Human
uuaaaugucuaauguauuu

SEQ ID NO: 2574576 - RNA, 18 nt, Human
uuaaaugucuaauguauu

SEQ ID NO: 2574577 - RNA, 13 nt, Human
uuaaaugcccagc

SEQ ID NO: 2574578 - RNA, 12 nt, Human
uuaacuuuuaua

SEQ ID NO: 2574579 - RNA, 13 nt, Human
uuaacuuuuauaa

SEQ ID NO: 2574580 - RNA, 15 nt, Human
uuaacuugaguuuua

SEQ ID NO: 2574581 - RNA, 16 nt, Human
uuaacuuuaagacuga

SEQ ID NO: 2574582 - RNA, 22 nt, Human
uuaagauuuuucucaaaguuuu

SEQ ID NO: 2574583 - RNA, 20 nt, Human
uuaagauuuuucucaaaguu

SEQ ID NO: 2574584 - RNA, 17 nt, Human
uuaagauuuuucucaaa

SEQ ID NO: 2574585 - RNA, 16 nt, Human
uuaagauuuuucucaa

SEQ ID NO: 2574586 - RNA, 15 nt, Human
uuaagauuuuucuca

SEQ ID NO: 2574587 - RNA, 14 nt, Human
uuaagauuuuucuc

SEQ ID NO: 2574588 - RNA, 16 nt, Human
uuaagauaauuauaau

SEQ ID NO: 2574589 - RNA, 14 nt, Human
uuaagauaauuaua

SEQ ID NO: 2574590 - RNA, 21 nt, Human
uuaagauaauaguuuacaugu

SEQ ID NO: 2574591 - RNA, 14 nt, Human
uuaagauaugaugu

SEQ ID NO: 2574592 - RNA, 14 nt, Human
uuaagauggauucu

SEQ ID NO: 2574593 - RNA, 17 nt, Human
uuaagauggauucucag

SEQ ID NO: 2574594 - RNA, 18 nt, Human
uuaagauggauucucaga

SEQ ID NO: 2574595 - RNA, 21 nt, Human
uuaagauggauucucagauau

SEQ ID NO: 2574596 - RNA, 22 nt, Human
uuaagauggauucucagauauu

SEQ ID NO: 2574597 - RNA, 23 nt, Human
uuaagauggauucucagauauuu

SEQ ID NO: 2574598 - RNA, 19 nt, Human
uuaagauaauaauauaugu

SEQ ID NO: 2574599 - RNA, 21 nt, Human
uuaagagugggggagagcagg

SEQ ID NO: 2574600 - RNA, 12 nt, Human
uuaagagugaaa

SEQ ID NO: 2574601 - RNA, 20 nt, Human
uuaagaguagcaaguucuag

SEQ ID NO: 2574602 - RNA, 12 nt, Human
uuaagaguaaaa

SEQ ID NO: 2574603 - RNA, 14 nt, Human
uuaacuuuuauaaa

SEQ ID NO: 2574604 - RNA, 23 nt, Human
uuaacuuuaucacauuauuugca

SEQ ID NO: 2574605 - RNA, 18 nt, Human
uuaacuuuaucacauuau

SEQ ID NO: 2574606 - RNA, 16 nt, Human
uuaacuuuaaguuuca

SEQ ID NO: 2574607 - RNA, 18 nt, Human
uuaagccaucuugguaaa

SEQ ID NO: 2574608 - RNA, 21 nt, Human
uuaagccacuuaaaauguuca

SEQ ID NO: 2574609 - RNA, 13 nt, Human
uuaagcccugagg

SEQ ID NO: 2574610 - RNA, 16 nt, Human
uuaagccaucuuggua

SEQ ID NO: 2574611 - RNA, 19 nt, Human
uuaagccucauauuuaaag

SEQ ID NO: 2574612 - RNA, 23 nt, Human
uuaauaauaaauucccuggccuu

SEQ ID NO: 2574613 - RNA, 14 nt, Human
uuaauaauaaauuc

SEQ ID NO: 2574614 - RNA, 15 nt, Human
uuaauaaguuucacu

SEQ ID NO: 2574615 - RNA, 21 nt, Human
uuaauaacauuaccuuacugu

SEQ ID NO: 2574616 - RNA, 20 nt, Human
uuaauaacauuaccuuacug

SEQ ID NO: 2574617 - RNA, 17 nt, Human
uuaauaacauuaccuua

SEQ ID NO: 2574618 - RNA, 16 nt, Human
uuaauaacauuaccuu

SEQ ID NO: 2574619 - RNA, 15 nt, Human
uuaauaacauuaccu

SEQ ID NO: 2574620 - RNA, 13 nt, Human
uuaauaacauuac

SEQ ID NO: 2574621 - RNA, 14 nt, Human
uuaagcacuacaua

SEQ ID NO: 2574622 - RNA, 21 nt, Human
uuaagauuuuucucaaaguuu

SEQ ID NO: 2574623 - RNA, 15 nt, Human
uuaagcagaagcauu

SEQ ID NO: 2574624 - RNA, 22 nt, Human
uuaagcacuacauaaacugacu

SEQ ID NO: 2574625 - RNA, 20 nt, Human
uuaagcacuacauaaacuga

SEQ ID NO: 2574626 - RNA, 17 nt, Human
uuaagcacuacauaaac

SEQ ID NO: 2574627 - RNA, 16 nt, Human
uuaagcagaagcauua

SEQ ID NO: 2574628 - RNA, 13 nt, Human
uuaagcauuacca

SEQ ID NO: 2574629 - RNA, 18 nt, Human
uuaagcauuaccacucag

SEQ ID NO: 2574630 - RNA, 12 nt, Human
uuaagcauuguu

SEQ ID NO: 2574631 - RNA, 14 nt, Human
uuaagcauuguuug

SEQ ID NO: 2574632 - RNA, 19 nt, Human
uuaagcauuguuugcuuau

SEQ ID NO: 2574633 - RNA, 22 nt, Human
uuaagcauuguuugcuuauugu

SEQ ID NO: 2574634 - RNA, 23 nt, Human
uuaagcauuguuugcuuauuguu

SEQ ID NO: 2574635 - RNA, 20 nt, Human
uuaagcauuggguggguaaa

SEQ ID NO: 2574636 - RNA, 11 nt, Human
uuaauauuaaa

SEQ ID NO: 2574637 - RNA, 19 nt, Human
uuaauagaauauaauuauc

SEQ ID NO: 2574638 - RNA, 21 nt, Human
uuaauaauauacuuguggacu

SEQ ID NO: 2574639 - RNA, 24 nt, Human
uuaauaaucagcaagaauuugauc

SEQ ID NO: 2574640 - RNA, 18 nt, Human
uuaauaauauacuugugg

SEQ ID NO: 2574641 - RNA, 16 nt, Human
uuaauaauauacuugu

SEQ ID NO: 2574642 - RNA, 14 nt, Human
uuaauaauauacuu

SEQ ID NO: 2574643 - RNA, 17 nt, Human
uuaauaaguuucacuga

SEQ ID NO: 2574644 - RNA, 21 nt, Human
uuaauacucauccuuguauaa

SEQ ID NO: 2574645 - RNA, 20 nt, Human
uuaauacucauccuuguaua

SEQ ID NO: 2574646 - RNA, 22 nt, Human
uuaauacucauccuuguauaaa

SEQ ID NO: 2574647 - RNA, 15 nt, Human
uuaauaccacagcuu

SEQ ID NO: 2574648 - RNA, 15 nt, Human
uuaauacuaccuuga

SEQ ID NO: 2574649 - RNA, 17 nt, Human
uuaauacuaccuugaaa

SEQ ID NO: 2574650 - RNA, 19 nt, Human
uuaauacuauaaauaauau

SEQ ID NO: 2574651 - RNA, 20 nt, Human
uuacauuuguauaaaauaau

SEQ ID NO: 2574652 - RNA, 16 nt, Human
uuacauuguucaauua

SEQ ID NO: 2574653 - RNA, 16 nt, Human
uuacauuuccaaauga

SEQ ID NO: 2574654 - RNA, 17 nt, Human
uuacauuuccaaaugaa

SEQ ID NO: 2574655 - RNA, 12 nt, Human
uuacauuuuuaa

SEQ ID NO: 2574656 - RNA, 17 nt, Human
uuacauuuuuaagugcu

SEQ ID NO: 2574657 - RNA, 21 nt, Human
uuacagaaaguggugcucagu

SEQ ID NO: 2574658 - RNA, 20 nt, Human
uuacagaacacgcuuucaca

SEQ ID NO: 2574659 - RNA, 19 nt, Human
uuacauuauuaucaacaau

SEQ ID NO: 2574660 - RNA, 13 nt, Human
uuacauucaguug

SEQ ID NO: 2574661 - RNA, 13 nt, Human
uuacauucugaau

SEQ ID NO: 2574662 - RNA, 13 nt, Human
uuacauuguaaau

SEQ ID NO: 2574663 - RNA, 12 nt, Human
uuacauuguaaa

SEQ ID NO: 2574664 - RNA, 17 nt, Human
uuacauuguuugucugu

SEQ ID NO: 2574665 - RNA, 15 nt, Human
uuacauugucauuua

SEQ ID NO: 2574666 - RNA, 13 nt, Human
uuacauuguucaa

SEQ ID NO: 2574667 - RNA, 22 nt, Human
uuacagaaaguggugcucaguu

SEQ ID NO: 2574668 - RNA, 19 nt, Human
uuacagaaaguggugcuca

SEQ ID NO: 2574669 - RNA, 14 nt, Human
uuacagaaaguggu

SEQ ID NO: 2574670 - RNA, 15 nt, Human
uuacacuuacuguug

SEQ ID NO: 2574671 - RNA, 14 nt, Human
uuacacuuacuguu

SEQ ID NO: 2574672 - RNA, 23 nt, Human
uuacacuuuaugccggaugugcu

SEQ ID NO: 2574673 - RNA, 13 nt, Human
uuacacuuuaugc

SEQ ID NO: 2574674 - RNA, 20 nt, Human
uuacacuuuaugcacaaaau

SEQ ID NO: 2574675 - RNA, 15 nt, Human
uuacacucuuuguaa

SEQ ID NO: 2574676 - RNA, 22 nt, Human
uuacacuggaggagagaagaau

SEQ ID NO: 2574677 - RNA, 21 nt, Human
uuacacuggaggagagaagaa

SEQ ID NO: 2574678 - RNA, 13 nt, Human
uuacacugggaga

SEQ ID NO: 2574679 - RNA, 17 nt, Human
uuacacuguauuuguau

SEQ ID NO: 2574680 - RNA, 14 nt, Human
uuacacuguauuug

SEQ ID NO: 2574681 - RNA, 14 nt, Human
uuacacucuuugua

SEQ ID NO: 2574682 - RNA, 21 nt, Human
uuacaccagccucgucuucau

SEQ ID NO: 2574683 - RNA, 23 nt, Human
uuacacguggaggaaugcucccc

SEQ ID NO: 2574684 - RNA, 23 nt, Human
uuacacauuuuucagauauaaaa

SEQ ID NO: 2574685 - RNA, 17 nt, Human
uuacacauuuuucagau

SEQ ID NO: 2574686 - RNA, 22 nt, Human
uuacaacugccucgaaacacag

SEQ ID NO: 2574687 - RNA, 23 nt, Human
uuacaacugccucgaaacacaga

SEQ ID NO: 2574688 - RNA, 23 nt, Human
uuacacacgugcaauuuguuugu

SEQ ID NO: 2574689 - RNA, 19 nt, Human
uuacacacgugcaauuugu

SEQ ID NO: 2574690 - RNA, 17 nt, Human
uuacaagaaaaaaugaa

SEQ ID NO: 2574691 - RNA, 18 nt, Human
uuacacaucucagacccu

SEQ ID NO: 2574692 - RNA, 17 nt, Human
uuacacaucuucaacag

SEQ ID NO: 2574693 - RNA, 15 nt, Human
uuacacauuuuucag

SEQ ID NO: 2574694 - RNA, 14 nt, Human
uuaauuagugcuaa

SEQ ID NO: 2574695 - RNA, 13 nt, Human
uuaauuagugcua

SEQ ID NO: 2574696 - RNA, 16 nt, Human
uuaauuaccaaccugu

SEQ ID NO: 2574697 - RNA, 19 nt, Human
uuaauuagccagugaaaaa

SEQ ID NO: 2574698 - RNA, 19 nt, Human
uuaauuagggguugcuaag

SEQ ID NO: 2574699 - RNA, 20 nt, Human
uuaauuagggguugcuaaga

SEQ ID NO: 2574700 - RNA, 17 nt, Human
uuacaacagauuuguga

SEQ ID NO: 2574701 - RNA, 16 nt, Human
uuacaacagauuugug

SEQ ID NO: 2574702 - RNA, 15 nt, Human
uuacaacagauuugu

SEQ ID NO: 2574703 - RNA, 13 nt, Human
uuacaacagauuu

SEQ ID NO: 2574704 - RNA, 19 nt, Human
uuacaacagauuugugaac

SEQ ID NO: 2574705 - RNA, 18 nt, Human
uuacaacagauuugugaa

SEQ ID NO: 2574706 - RNA, 21 nt, Human
uuacaacagauuugugaacuc

SEQ ID NO: 2574707 - RNA, 14 nt, Human
uuaaugacacuugu

SEQ ID NO: 2574708 - RNA, 19 nt, Human
uuaaugacacuugucccca

SEQ ID NO: 2574709 - RNA, 23 nt, Human
uuaaugacacuuguccccaaauc

SEQ ID NO: 2574710 - RNA, 23 nt, Human
uuaaugaaguuugaauguuaaau

SEQ ID NO: 2574711 - RNA, 22 nt, Human
uuaaugaaguuugaauguuaaa

SEQ ID NO: 2574712 - RNA, 18 nt, Human
uuaaugaaguuugaaugu

SEQ ID NO: 2574713 - RNA, 15 nt, Human
uuaaugaaguuugaa

SEQ ID NO: 2574714 - RNA, 17 nt, Human
uuaaugaaguuugaaug

SEQ ID NO: 2574715 - RNA, 16 nt, Human
uuaaugaaguuugaau

SEQ ID NO: 2574716 - RNA, 22 nt, Human
uuaauuaaaacacaacaucuuu

SEQ ID NO: 2574717 - RNA, 16 nt, Human
uuaaugauaaguaaau

SEQ ID NO: 2574718 - RNA, 19 nt, Human
uuaaugacagagccagugg

SEQ ID NO: 2574719 - RNA, 14 nt, Human
uuaauuaaaugcuc

SEQ ID NO: 2574720 - RNA, 13 nt, Human
uuaauuaaaugca

SEQ ID NO: 2574721 - RNA, 20 nt, Human
uuaauuaaugaaauaucugu

SEQ ID NO: 2574722 - RNA, 16 nt, Human
uuaaaucugugaugau

SEQ ID NO: 2574723 - RNA, 15 nt, Human
uuaaaucugugauga

SEQ ID NO: 2574724 - RNA, 14 nt, Human
uuaaaucugugaug

SEQ ID NO: 2574725 - RNA, 21 nt, Human
uuaaaucuaugaaguauauaa

SEQ ID NO: 2574726 - RNA, 16 nt, Human
uuaaaucuaugaagua

SEQ ID NO: 2574727 - RNA, 16 nt, Human
uuaaaucucauugcuu

SEQ ID NO: 2574728 - RNA, 18 nt, Human
uuaaauauuucaagacau

SEQ ID NO: 2574729 - RNA, 20 nt, Human
uuaaaucccauucauaacuu

SEQ ID NO: 2574730 - RNA, 23 nt, Human
uuaaaugaaauuguaaaaccugu

SEQ ID NO: 2574731 - RNA, 14 nt, Human
uuaaaugaaauugu

SEQ ID NO: 2574732 - RNA, 15 nt, Human
uuaaaugaaagcaug

SEQ ID NO: 2574733 - RNA, 16 nt, Human
uuaaaugcccagcccc

SEQ ID NO: 2574734 - RNA, 15 nt, Human
uuaaaugcccagccc

SEQ ID NO: 2574735 - RNA, 14 nt, Human
uuaaaugcccagcc

SEQ ID NO: 2574736 - RNA, 11 nt, Human
uuaaaugcacc

SEQ ID NO: 2574737 - RNA, 12 nt, Human
uuaaaugagaag

SEQ ID NO: 2574738 - RNA, 23 nt, Human
uuaaaugagaaggaauuugaguu

SEQ ID NO: 2574739 - RNA, 18 nt, Human
uuaaagcagugcuucuca

SEQ ID NO: 2574740 - RNA, 22 nt, Human
uuaaagcagagggacuuuguau

SEQ ID NO: 2574741 - RNA, 15 nt, Human
uuaaagcauuuacuu

SEQ ID NO: 2574742 - RNA, 17 nt, Human
uuaaagcauuuacuuug

SEQ ID NO: 2574743 - RNA, 20 nt, Human
uuaaagcauuuacuuugaau

SEQ ID NO: 2574744 - RNA, 21 nt, Human
uuaaagcagagggacuuugua

SEQ ID NO: 2574745 - RNA, 15 nt, Human
uuaaagaaaacccac

SEQ ID NO: 2574746 - RNA, 22 nt, Human
uuaaauaucaguagaaacucua

SEQ ID NO: 2574747 - RNA, 22 nt, Human
uuaaauauuucaagacauuaaa

SEQ ID NO: 2574748 - RNA, 15 nt, Human
uuaaauauuucaaga

SEQ ID NO: 2574749 - RNA, 13 nt, Human
uuaaagccuccuc

SEQ ID NO: 2574750 - RNA, 21 nt, Human
uuaaauauguuagcaaagagu

SEQ ID NO: 2574751 - RNA, 17 nt, Human
uuaaauauuuacauaug

SEQ ID NO: 2574752 - RNA, 18 nt, Human
uuaaauauuuacauauga

SEQ ID NO: 2574753 - RNA, 14 nt, Human
uuaaauauuuacau

SEQ ID NO: 2574754 - RNA, 21 nt, Human
uuaaaaaaaacaaaaagaaca

SEQ ID NO: 2574755 - RNA, 19 nt, Human
uuaaaaaaaacaaaaagaa

SEQ ID NO: 2574756 - RNA, 19 nt, Human
uuaaaacugaagucugaaa

SEQ ID NO: 2574757 - RNA, 18 nt, Human
uuaaaacugaagucugaa

SEQ ID NO: 2574758 - RNA, 17 nt, Human
uuaaaacugaagucuga

SEQ ID NO: 2574759 - RNA, 16 nt, Human
uuaaaacugaagucug

SEQ ID NO: 2574760 - RNA, 22 nt, Human
uuaaaaaaaacaaaaagaacaa

SEQ ID NO: 2574761 - RNA, 14 nt, Human
uuaaaacugaaguc

SEQ ID NO: 2574762 - RNA, 18 nt, Human
uuaaaaaaaacaaaaaga

SEQ ID NO: 2574763 - RNA, 15 nt, Human
uuaaaaaaaacaaaa

SEQ ID NO: 2574764 - RNA, 14 nt, Human
uuaaaaaaaacaaa

SEQ ID NO: 2574765 - RNA, 19 nt, Human
uguuuuuguauuuuuaaug

SEQ ID NO: 2574766 - RNA, 16 nt, Human
uuaaaaaaaaaggcau

SEQ ID NO: 2574767 - RNA, 18 nt, Human
uuaaaaaaaaagaucugu

SEQ ID NO: 2574768 - RNA, 14 nt, Human
uuaaaacccaagug

SEQ ID NO: 2574769 - RNA, 20 nt, Human
uuaaaauaaaaauucugaau

SEQ ID NO: 2574770 - RNA, 22 nt, Human
uuaaaaguuucaaugugauucu

SEQ ID NO: 2574771 - RNA, 19 nt, Human
uuaaaaguuucaaugugau

SEQ ID NO: 2574772 - RNA, 16 nt, Human
uuaaaauaaaaauucu

SEQ ID NO: 2574773 - RNA, 12 nt, Human
uuaaaauaauau

SEQ ID NO: 2574774 - RNA, 20 nt, Human
uuaaaauaagcacugugcua

SEQ ID NO: 2574775 - RNA, 15 nt, Human
uuaaaauaacuagug

SEQ ID NO: 2574776 - RNA, 15 nt, Human
uuaaaacuuguaauu

SEQ ID NO: 2574777 - RNA, 21 nt, Human
uuaaaacugaagucugaaauu

SEQ ID NO: 2574778 - RNA, 20 nt, Human
uuaaaacugaagucugaaau

SEQ ID NO: 2574779 - RNA, 17 nt, Human
uuaaaaguuucaaugug

SEQ ID NO: 2574780 - RNA, 16 nt, Human
uuaaaaguuucaaugu

SEQ ID NO: 2574781 - RNA, 17 nt, Human
uuaaaaguugaauuuuu

SEQ ID NO: 2574782 - RNA, 14 nt, Human
uuaaaacuuuaauc

SEQ ID NO: 2574783 - RNA, 22 nt, Human
uuaaacuaggagaaccaaaucu

SEQ ID NO: 2574784 - RNA, 22 nt, Human
uuaaacuagcauaucugccuuu

SEQ ID NO: 2574785 - RNA, 21 nt, Human
uuaaacuagcauaucugccuu

SEQ ID NO: 2574786 - RNA, 14 nt, Human
uuaaacucagggac

SEQ ID NO: 2574787 - RNA, 13 nt, Human
uuaaacucaggga

SEQ ID NO: 2574788 - RNA, 23 nt, Human
uuaaacuagcauaucugccuuua

SEQ ID NO: 2574789 - RNA, 22 nt, Human
uuaaacuuaaucuaaauggaac

SEQ ID NO: 2574790 - RNA, 15 nt, Human
uuaaacuucucugaa

SEQ ID NO: 2574791 - RNA, 14 nt, Human
uuaaacuucucuga

SEQ ID NO: 2574792 - RNA, 18 nt, Human
uuaaacuucucugaaggg

SEQ ID NO: 2574793 - RNA, 17 nt, Human
uuaaacuucucugaagg

SEQ ID NO: 2574794 - RNA, 20 nt, Human
uuaaacuucucugaagggag

SEQ ID NO: 2574795 - RNA, 16 nt, Human
uuaaacguaugcaugu

SEQ ID NO: 2574796 - RNA, 23 nt, Human
uuaaacggauuauuuuuucagac

SEQ ID NO: 2574797 - RNA, 22 nt, Human
uuaaacggauuauuuuuucaga

SEQ ID NO: 2574798 - RNA, 18 nt, Human
uuaaaauacacacucaaa

SEQ ID NO: 2574799 - RNA, 19 nt, Human
uuaaacuagcauaucugcc

SEQ ID NO: 2574800 - RNA, 17 nt, Human
uuaaacuagcauaucug

SEQ ID NO: 2574801 - RNA, 20 nt, Human
uuaaacguaugcaugugaag

SEQ ID NO: 2574802 - RNA, 18 nt, Human
uuaaacguaugcauguga

SEQ ID NO: 2574803 - RNA, 14 nt, Human
uuaaacgugcagac

SEQ ID NO: 2574804 - RNA, 20 nt, Human
uuaaacuaaggcccucuuga

SEQ ID NO: 2574805 - RNA, 13 nt, Human
uuaaaaaaaaaga

SEQ ID NO: 2574806 - RNA, 22 nt, Human
uuaaaaaaaaaccugagcccca

SEQ ID NO: 2574807 - RNA, 15 nt, Human
uguuuuuguaaagug

SEQ ID NO: 2574808 - RNA, 12 nt, Human
uguuuuuguaaa

SEQ ID NO: 2574809 - RNA, 12 nt, Human
uguuuuucuggg

SEQ ID NO: 2574810 - RNA, 16 nt, Human
uguuuuugaaggcaga

SEQ ID NO: 2574811 - RNA, 18 nt, Human
uguuuuugaaggcagaaa

SEQ ID NO: 2574812 - RNA, 20 nt, Human
uguuuuugaaggcagaaagc

SEQ ID NO: 2574813 - RNA, 16 nt, Human
uguuuuugcacauguu

SEQ ID NO: 2574814 - RNA, 13 nt, Human
uguuuuugaaaua

SEQ ID NO: 2574815 - RNA, 16 nt, Human
uguuuuuaaaaaucau

SEQ ID NO: 2574816 - RNA, 22 nt, Human
uguuuuuacccauauccccucu

SEQ ID NO: 2574817 - RNA, 13 nt, Human
uguuuuuacccau

SEQ ID NO: 2574818 - RNA, 22 nt, Human
uguuuuuaagcuguuuccauag

SEQ ID NO: 2574819 - RNA, 20 nt, Human
uguuuuuaagcuguuuccau

SEQ ID NO: 2574820 - RNA, 17 nt, Human
uguuuuuaagcuguuuc

SEQ ID NO: 2574821 - RNA, 15 nt, Human
uguuuuuaagcuguu

SEQ ID NO: 2574822 - RNA, 22 nt, Human
uguuuuaaggaugcuuguacau

SEQ ID NO: 2574823 - RNA, 23 nt, Human
uguuuuaaggaugcuuguacaua

SEQ ID NO: 2574824 - RNA, 13 nt, Human
uguuuuaacaaaa

SEQ ID NO: 2574825 - RNA, 14 nt, Human
uguuuuaacaaaaa

SEQ ID NO: 2574826 - RNA, 19 nt, Human
uguuuuaaggaugcuugua

SEQ ID NO: 2574827 - RNA, 17 nt, Human
uguuuuaagaggcaggg

SEQ ID NO: 2574828 - RNA, 22 nt, Human
uguuuuaauuuaaacaccuccu

SEQ ID NO: 2574829 - RNA, 16 nt, Human
uguuuuaauuccauga

SEQ ID NO: 2574830 - RNA, 14 nt, Human
uguuuuaauuccau

SEQ ID NO: 2574831 - RNA, 23 nt, Human
uguuuuaauuuaaacaccuccuc

SEQ ID NO: 2574832 - RNA, 17 nt, Human
uguuuuuaaaaaucaua

SEQ ID NO: 2574833 - RNA, 20 nt, Human
uguuuuuaaaaaucauaaac

SEQ ID NO: 2574834 - RNA, 19 nt, Human
uguuuuuaaaaguuucaau

SEQ ID NO: 2574835 - RNA, 14 nt, Human
uguuuuuaagcugu

SEQ ID NO: 2574836 - RNA, 12 nt, Human
uguuuuuaacuc

SEQ ID NO: 2574837 - RNA, 14 nt, Human
uguuucugucagga

SEQ ID NO: 2574838 - RNA, 12 nt, Human
uguuuguguauu

SEQ ID NO: 2574839 - RNA, 15 nt, Human
uguuuguggccucag

SEQ ID NO: 2574840 - RNA, 13 nt, Human
uguuuguggccuc

SEQ ID NO: 2574841 - RNA, 14 nt, Human
uguuuguggccuca

SEQ ID NO: 2574842 - RNA, 13 nt, Human
uguuugugcuucu

SEQ ID NO: 2574843 - RNA, 12 nt, Human
uguuugugcuuc

SEQ ID NO: 2574844 - RNA, 15 nt, Human
uguuugugcuguggu

SEQ ID NO: 2574845 - RNA, 15 nt, Human
uguuugugcuucuaa

SEQ ID NO: 2574846 - RNA, 14 nt, Human
uguuugugcuucua

SEQ ID NO: 2574847 - RNA, 12 nt, Human
uguuuguggccu

SEQ ID NO: 2574848 - RNA, 16 nt, Human
uguuuuaagaggcagg

SEQ ID NO: 2574849 - RNA, 11 nt, Human
uguuuuaacaa

SEQ ID NO: 2574850 - RNA, 22 nt, Human
uguuuuaaauuuauuucaaaaa

SEQ ID NO: 2574851 - RNA, 15 nt, Human
uguuuguucaucugu

SEQ ID NO: 2574852 - RNA, 12 nt, Human
uguuuguuaugg

SEQ ID NO: 2574853 - RNA, 14 nt, Human
uguuuguguauuua

SEQ ID NO: 2574854 - RNA, 19 nt, Human
uguuugugcuucuaauauu

SEQ ID NO: 2574855 - RNA, 14 nt, Human
uguuugugugagag

SEQ ID NO: 2574856 - RNA, 13 nt, Human
uguuugugugugu

SEQ ID NO: 2574857 - RNA, 11 nt, Human
uguuugugugu

SEQ ID NO: 2574858 - RNA, 13 nt, Human
uguuuacuaggga

SEQ ID NO: 2574859 - RNA, 19 nt, Human
uguuuacuagggaucccuc

SEQ ID NO: 2574860 - RNA, 19 nt, Human
uguuuacuuaaagauuuau

SEQ ID NO: 2574861 - RNA, 18 nt, Human
uguuuacuuaaagauuua

SEQ ID NO: 2574862 - RNA, 17 nt, Human
uguuuacuuaaagauuu

SEQ ID NO: 2574863 - RNA, 16 nt, Human
uguuuacuuaaagauu

SEQ ID NO: 2574864 - RNA, 15 nt, Human
uguuuacuuaaagau

SEQ ID NO: 2574865 - RNA, 12 nt, Human
uguuuacugaaa

SEQ ID NO: 2574866 - RNA, 19 nt, Human
uguuuccauauuuuauagg

SEQ ID NO: 2574867 - RNA, 14 nt, Human
uguuucccauaauu

SEQ ID NO: 2574868 - RNA, 22 nt, Human
uguuucccauaauuuucuucau

SEQ ID NO: 2574869 - RNA, 23 nt, Human
uguuuacuuaaagauuuaucaaa

SEQ ID NO: 2574870 - RNA, 14 nt, Human
uguuuccucuaguu

SEQ ID NO: 2574871 - RNA, 20 nt, Human
uguuucccuuucacuggcau

SEQ ID NO: 2574872 - RNA, 23 nt, Human
uguuuccuagcacacacuuuugg

SEQ ID NO: 2574873 - RNA, 11 nt, Human
uguuuccugag

SEQ ID NO: 2574874 - RNA, 15 nt, Human
uguuuccuggcacug

SEQ ID NO: 2574875 - RNA, 21 nt, Human
uguuucugcaguagucucugu

SEQ ID NO: 2574876 - RNA, 22 nt, Human
uguuucugcaguagucucugug

SEQ ID NO: 2574877 - RNA, 12 nt, Human
uguuucugcagu

SEQ ID NO: 2574878 - RNA, 12 nt, Human
uguuucugacuc

SEQ ID NO: 2574879 - RNA, 19 nt, Human
uguuucugacucugagcua

SEQ ID NO: 2574880 - RNA, 16 nt, Human
uguuuccugcaggcca

SEQ ID NO: 2574881 - RNA, 23 nt, Human
uguguggguggauauaaauauau

SEQ ID NO: 2574882 - RNA, 21 nt, Human
uguguggguggauauaaauau

SEQ ID NO: 2574883 - RNA, 20 nt, Human
uguguggguggauauaaaua

SEQ ID NO: 2574884 - RNA, 16 nt, Human
ugugugggagugugua

SEQ ID NO: 2574885 - RNA, 13 nt, Human
ugugugggucuau

SEQ ID NO: 2574886 - RNA, 16 nt, Human
ugugugugaaugaaca

SEQ ID NO: 2574887 - RNA, 20 nt, Human
ugugugugaaugaacacucu

SEQ ID NO: 2574888 - RNA, 17 nt, Human
ugugugugaaaaugugu

SEQ ID NO: 2574889 - RNA, 16 nt, Human
ugugugucuuaauuau

SEQ ID NO: 2574890 - RNA, 22 nt, Human
uguguggguggauauaaauaua

SEQ ID NO: 2574891 - RNA, 22 nt, Human
ugugugucuaggcaggaccugu

SEQ ID NO: 2574892 - RNA, 16 nt, Human
uguguuuauugucaaa

SEQ ID NO: 2574893 - RNA, 15 nt, Human
uguguuucaaguuca

SEQ ID NO: 2574894 - RNA, 19 nt, Human
ugugugugcuuauguauga

SEQ ID NO: 2574895 - RNA, 20 nt, Human
ugugugugcuuauguaugag

SEQ ID NO: 2574896 - RNA, 19 nt, Human
uguguuuugcaagccagau

SEQ ID NO: 2574897 - RNA, 13 nt, Human
uguguuuugcaag

SEQ ID NO: 2574898 - RNA, 15 nt, Human
uguguuucuguauaa

SEQ ID NO: 2574899 - RNA, 20 nt, Human
uguguuucuaugugacaauu

SEQ ID NO: 2574900 - RNA, 13 nt, Human
uguguuucacuuu

SEQ ID NO: 2574901 - RNA, 12 nt, Human
uguguuuccaca

SEQ ID NO: 2574902 - RNA, 11 nt, Human
uguguuuccuu

SEQ ID NO: 2574903 - RNA, 15 nt, Human
uguguuuuucauaaa

SEQ ID NO: 2574904 - RNA, 15 nt, Human
uguguuuuuaauaaa

SEQ ID NO: 2574905 - RNA, 18 nt, Human
uguguuuuucauaaagca

SEQ ID NO: 2574906 - RNA, 20 nt, Human
uguguuuuuaauaaagacag

SEQ ID NO: 2574907 - RNA, 19 nt, Human
uguguuuuuauuguuaacu

SEQ ID NO: 2574908 - RNA, 14 nt, Human
uguguuuuuauugu

SEQ ID NO: 2574909 - RNA, 11 nt, Human
uguguaugugg

SEQ ID NO: 2574910 - RNA, 12 nt, Human
uguguauguggg

SEQ ID NO: 2574911 - RNA, 21 nt, Human
uguguaucguaaccagccaga

SEQ ID NO: 2574912 - RNA, 24 nt, Human
uguguauccauuaucauguguaau

SEQ ID NO: 2574913 - RNA, 23 nt, Human
uguguauccauuaucauguguaa

SEQ ID NO: 2574914 - RNA, 22 nt, Human
uguguauccauuaucaugugua

SEQ ID NO: 2574915 - RNA, 18 nt, Human
uguguaugcgugugugug

SEQ ID NO: 2574916 - RNA, 14 nt, Human
uguguaugggcaaa

SEQ ID NO: 2574917 - RNA, 22 nt, Human
ugugugaaagguacuucaaauc

SEQ ID NO: 2574918 - RNA, 21 nt, Human
ugugugaaagguacuucaaau

SEQ ID NO: 2574919 - RNA, 17 nt, Human
ugugugaugaacuuucu

SEQ ID NO: 2574920 - RNA, 16 nt, Human
ugugugaugaacuuuc

SEQ ID NO: 2574921 - RNA, 14 nt, Human
uguguaugugcgug

SEQ ID NO: 2574922 - RNA, 20 nt, Human
ugugugaaauaccagugugg

SEQ ID NO: 2574923 - RNA, 19 nt, Human
uguguaugugcgugugugc

SEQ ID NO: 2574924 - RNA, 23 nt, Human
ugugugaagaucacguuccuucc

SEQ ID NO: 2574925 - RNA, 13 nt, Human
ugugugcucucca

SEQ ID NO: 2574926 - RNA, 15 nt, Human
ugugugcuuauguau

SEQ ID NO: 2574927 - RNA, 22 nt, Human
ugugugcaccuuaccaacuuuc

SEQ ID NO: 2574928 - RNA, 17 nt, Human
ugugugcaccuuaccaa

SEQ ID NO: 2574929 - RNA, 22 nt, Human
ugugugcaacaggguauggacu

SEQ ID NO: 2574930 - RNA, 23 nt, Human
ugugugcaccuuaccaacuuucu

SEQ ID NO: 2574931 - RNA, 14 nt, Human
ugugugaugugcau

SEQ ID NO: 2574932 - RNA, 16 nt, Human
ugugugauugaaucug

SEQ ID NO: 2574933 - RNA, 15 nt, Human
ugugugauugacagc

SEQ ID NO: 2574934 - RNA, 18 nt, Human
ugugugauugacagcuuu

SEQ ID NO: 2574935 - RNA, 19 nt, Human
ugugugauugacagcuuug

SEQ ID NO: 2574936 - RNA, 21 nt, Human
ugugugauugacagcuuugcu

SEQ ID NO: 2574937 - RNA, 19 nt, Human
ugugugcacguacacacac

SEQ ID NO: 2574938 - RNA, 14 nt, Human
ugugugggagugug

SEQ ID NO: 2574939 - RNA, 15 nt, Human
ugugugggagugugu

SEQ ID NO: 2574940 - RNA, 11 nt, Human
uguguggccug

SEQ ID NO: 2574941 - RNA, 18 nt, Human
ugugugcucuucuucuuu

SEQ ID NO: 2574942 - RNA, 17 nt, Human
uguguggacucaagucc

SEQ ID NO: 2574943 - RNA, 19 nt, Human
uguguggacugugaugcca

SEQ ID NO: 2574944 - RNA, 16 nt, Human
uguguggacugugaug

SEQ ID NO: 2574945 - RNA, 21 nt, Human
uguuaaaagaugaaaauauuu

SEQ ID NO: 2574946 - RNA, 12 nt, Human
uguuaaaauaac

SEQ ID NO: 2574947 - RNA, 21 nt, Human
uguguuuuugcuaucacacag

SEQ ID NO: 2574948 - RNA, 13 nt, Human
uguguuuuugaaa

SEQ ID NO: 2574949 - RNA, 21 nt, Human
uguuacccaguaacucaucug

SEQ ID NO: 2574950 - RNA, 23 nt, Human
uguuaaaauguauucuuaaauuc

SEQ ID NO: 2574951 - RNA, 15 nt, Human
uguuaaaauguauuc

SEQ ID NO: 2574952 - RNA, 14 nt, Human
uguuaaaauaacua

SEQ ID NO: 2574953 - RNA, 16 nt, Human
uguuaccugaaaacac

SEQ ID NO: 2574954 - RNA, 22 nt, Human
uguuaccugaaaacacugugca

SEQ ID NO: 2574955 - RNA, 16 nt, Human
uguuaccuacuuugac

SEQ ID NO: 2574956 - RNA, 15 nt, Human
uguuaccugaaaaca

SEQ ID NO: 2574957 - RNA, 18 nt, Human
uguuacccuccuguaaau

SEQ ID NO: 2574958 - RNA, 20 nt, Human
uguuaccuaauuagagcaga

SEQ ID NO: 2574959 - RNA, 14 nt, Human
uguuacuaacuaaa

SEQ ID NO: 2574960 - RNA, 13 nt, Human
uguuacuaacuaa

SEQ ID NO: 2574961 - RNA, 17 nt, Human
uguuacuaaagaaaaua

SEQ ID NO: 2574962 - RNA, 21 nt, Human
uguuaccugaucaaugacaga

SEQ ID NO: 2574963 - RNA, 23 nt, Human
uguuaccugaaaacacugugcac

SEQ ID NO: 2574964 - RNA, 14 nt, Human
uguuacuaaguuuu

SEQ ID NO: 2574965 - RNA, 16 nt, Human
uguuacuaucugcuuu

SEQ ID NO: 2574966 - RNA, 18 nt, Human
uguuacuaacuaaacucu

SEQ ID NO: 2574967 - RNA, 17 nt, Human
uguuacuaacuaaacuc

SEQ ID NO: 2574968 - RNA, 15 nt, Human
uguuacuaucugcuu

SEQ ID NO: 2574969 - RNA, 17 nt, Human
uguuacucugguucuuu

SEQ ID NO: 2574970 - RNA, 15 nt, Human
uguuacucugguucu

SEQ ID NO: 2574971 - RNA, 13 nt, Human
uguuacucugguu

SEQ ID NO: 2574972 - RNA, 20 nt, Human
uguuacucugguucuuuguu

SEQ ID NO: 2574973 - RNA, 14 nt, Human
uguuacuguaauuc

SEQ ID NO: 2574974 - RNA, 14 nt, Human
uguuagcagacagg

SEQ ID NO: 2574975 - RNA, 12 nt, Human
uguuacuguaau

SEQ ID NO: 2574976 - RNA, 14 nt, Human
uguuacugaucaug

SEQ ID NO: 2574977 - RNA, 15 nt, Human
uguuacugaccagca

SEQ ID NO: 2574978 - RNA, 13 nt, Human
uguuacugaucau

SEQ ID NO: 2574979 - RNA, 20 nt, Human
uguuacugaucaugcauugu

SEQ ID NO: 2574980 - RNA, 16 nt, Human
uguuaggaaaauuuca

SEQ ID NO: 2574981 - RNA, 14 nt, Human
uguuagcuguuauu

SEQ ID NO: 2574982 - RNA, 17 nt, Human
uguuagccccauaauuu

SEQ ID NO: 2574983 - RNA, 17 nt, Human
uguucauaaauaaaguu

SEQ ID NO: 2574984 - RNA, 18 nt, Human
uguucagcuccagcucac

SEQ ID NO: 2574985 - RNA, 15 nt, Human
uguucauagcccagu

SEQ ID NO: 2574986 - RNA, 14 nt, Human
uguucauagcccag

SEQ ID NO: 2574987 - RNA, 18 nt, Human
uguucauagacccucuca

SEQ ID NO: 2574988 - RNA, 12 nt, Human
uguucauacauu

SEQ ID NO: 2574989 - RNA, 22 nt, Human
uguucagcuccagcucaccagc

SEQ ID NO: 2574990 - RNA, 21 nt, Human
uguucagcuccagcucaccag

SEQ ID NO: 2574991 - RNA, 17 nt, Human
uguucagcacugucccu

SEQ ID NO: 2574992 - RNA, 15 nt, Human
uguucagcacugucc

SEQ ID NO: 2574993 - RNA, 18 nt, Human
uguucagcacugucccuu

SEQ ID NO: 2574994 - RNA, 18 nt, Human
uguucagauugcuuugau

SEQ ID NO: 2574995 - RNA, 20 nt, Human
uguucagcuccagcucacca

SEQ ID NO: 2574996 - RNA, 19 nt, Human
uguuaguaugaggcauuug

SEQ ID NO: 2574997 - RNA, 20 nt, Human
uguuaguaugaggcauuugu

SEQ ID NO: 2574998 - RNA, 17 nt, Human
uguuaguaugaggcauu

SEQ ID NO: 2574999 - RNA, 21 nt, Human
uguuaggccuggcacaguguc

SEQ ID NO: 2575000 - RNA, 20 nt, Human
uguuaggccuggcacagugu

SEQ ID NO: 2575001 - RNA, 16 nt, Human
uguuaggccuggcaca

SEQ ID NO: 2575002 - RNA, 13 nt, Human
uguuaguaacaug

SEQ ID NO: 2575003 - RNA, 16 nt, Human
uguucacuuuuccucc

SEQ ID NO: 2575004 - RNA, 19 nt, Human
uguucacuuuuccucccuc

SEQ ID NO: 2575005 - RNA, 15 nt, Human
uguuagucauuugcu

SEQ ID NO: 2575006 - RNA, 17 nt, Human
uguucacuuuugacaaa

SEQ ID NO: 2575007 - RNA, 13 nt, Human
uguucacuguccc

SEQ ID NO: 2575008 - RNA, 18 nt, Human
uguucagaagguugcucu

SEQ ID NO: 2575009 - RNA, 14 nt, Human
uguucagcacuguc

SEQ ID NO: 2575010 - RNA, 13 nt, Human
uguucagcacugu

SEQ ID NO: 2575011 - RNA, 22 nt, Human
uguucagaagguugcucuagau

SEQ ID NO: 2575012 - RNA, 17 nt, Human
uguucagauugcuuuga

SEQ ID NO: 2575013 - RNA, 20 nt, Human
uguugacaugggacauuugc

SEQ ID NO: 2575014 - RNA, 16 nt, Human
uguugacaguucugaa

SEQ ID NO: 2575015 - RNA, 17 nt, Human
uguugacaguucauaug

SEQ ID NO: 2575016 - RNA, 16 nt, Human
uguugacacaggucuu

SEQ ID NO: 2575017 - RNA, 15 nt, Human
uguugaagccuuugu

SEQ ID NO: 2575018 - RNA, 13 nt, Human
uguugaauacuuu

SEQ ID NO: 2575019 - RNA, 18 nt, Human
uguugaauacuuuuuaca

SEQ ID NO: 2575020 - RNA, 22 nt, Human
uguugaaugcccacaggcaaau

SEQ ID NO: 2575021 - RNA, 22 nt, Human
uguugacuuauuuucucugugu

SEQ ID NO: 2575022 - RNA, 21 nt, Human
uguugacuuauuuucucugug

SEQ ID NO: 2575023 - RNA, 20 nt, Human
uguugacuuauuuucucugu

SEQ ID NO: 2575024 - RNA, 13 nt, Human
uguugacuuauuu

SEQ ID NO: 2575025 - RNA, 22 nt, Human
uguugagaaucccaaauuugau

SEQ ID NO: 2575026 - RNA, 18 nt, Human
uguugacgaagucucuuu

SEQ ID NO: 2575027 - RNA, 16 nt, Human
uguugacgaagucucu

SEQ ID NO: 2575028 - RNA, 19 nt, Human
uguugacauccaagcuucc

SEQ ID NO: 2575029 - RNA, 17 nt, Human
uguugacauccaagcuu

SEQ ID NO: 2575030 - RNA, 14 nt, Human
uguugacaugugcu

SEQ ID NO: 2575031 - RNA, 20 nt, Human
uguucuggcucuuccaggcu

SEQ ID NO: 2575032 - RNA, 17 nt, Human
uguucuggcucuuccag

SEQ ID NO: 2575033 - RNA, 21 nt, Human
uguucuggcucuuccaggcug

SEQ ID NO: 2575034 - RNA, 15 nt, Human
uguucugcuuuccuc

SEQ ID NO: 2575035 - RNA, 23 nt, Human
uguucuuucuggcuaugcauuug

SEQ ID NO: 2575036 - RNA, 13 nt, Human
uguucuuugggga

SEQ ID NO: 2575037 - RNA, 13 nt, Human
uguucuggcccuc

SEQ ID NO: 2575038 - RNA, 15 nt, Human
uguucuggcccucac

SEQ ID NO: 2575039 - RNA, 16 nt, Human
uguucuuuugucccag

SEQ ID NO: 2575040 - RNA, 23 nt, Human
uguugaaaaaaaaguuucagaga

SEQ ID NO: 2575041 - RNA, 17 nt, Human
uguucuuuuuauugaau

SEQ ID NO: 2575042 - RNA, 14 nt, Human
uguucuuuuuauug

SEQ ID NO: 2575043 - RNA, 15 nt, Human
uguucucucuucucc

SEQ ID NO: 2575044 - RNA, 16 nt, Human
uguucucucuucucca

SEQ ID NO: 2575045 - RNA, 15 nt, Human
uguucucucccaggg

SEQ ID NO: 2575046 - RNA, 20 nt, Human
uguucucuaucauuuaauaa

SEQ ID NO: 2575047 - RNA, 18 nt, Human
uguucucuaucauuuaau

SEQ ID NO: 2575048 - RNA, 15 nt, Human
uguucucuaucauuu

SEQ ID NO: 2575049 - RNA, 21 nt, Human
uguucuccuuuuccucucucc

SEQ ID NO: 2575050 - RNA, 21 nt, Human
uguucaucuguaacucuaaaa

SEQ ID NO: 2575051 - RNA, 15 nt, Human
uguucaucuguaacu

SEQ ID NO: 2575052 - RNA, 14 nt, Human
uguucaucuguaac

SEQ ID NO: 2575053 - RNA, 19 nt, Human
uguucaucccaugauguag

SEQ ID NO: 2575054 - RNA, 11 nt, Human
uguucauccca

SEQ ID NO: 2575055 - RNA, 20 nt, Human
uguucauagcccaguagacc

SEQ ID NO: 2575056 - RNA, 19 nt, Human
uguucauagcccaguagac

SEQ ID NO: 2575057 - RNA, 23 nt, Human
uguucauagcccaguagaccuug

SEQ ID NO: 2575058 - RNA, 19 nt, Human
uguucaucauccuaagcua

SEQ ID NO: 2575059 - RNA, 16 nt, Human
uguucucugcccucca

SEQ ID NO: 2575060 - RNA, 15 nt, Human
uguucucugcccucc

SEQ ID NO: 2575061 - RNA, 14 nt, Human
uguucucugcccuc

SEQ ID NO: 2575062 - RNA, 13 nt, Human
uguucucugcccu

SEQ ID NO: 2575063 - RNA, 16 nt, Human
uguucuggcucuucca

SEQ ID NO: 2575064 - RNA, 13 nt, Human
uguucuggcucuu

SEQ ID NO: 2575065 - RNA, 12 nt, Human
uguucuggcucu

SEQ ID NO: 2575066 - RNA, 17 nt, Human
uguuggagaagaacuga

SEQ ID NO: 2575067 - RNA, 16 nt, Human
uguuggagaagaacug

SEQ ID NO: 2575068 - RNA, 21 nt, Human
uguuggaaaagaauacagaaa

SEQ ID NO: 2575069 - RNA, 15 nt, Human
uguugauugcuaaau

SEQ ID NO: 2575070 - RNA, 14 nt, Human
uguugauugcuaaa

SEQ ID NO: 2575071 - RNA, 12 nt, Human
uguuggaaugaa

SEQ ID NO: 2575072 - RNA, 14 nt, Human
uguuggagaagaac

SEQ ID NO: 2575073 - RNA, 16 nt, Human
uguugaugcuuucguc

SEQ ID NO: 2575074 - RNA, 12 nt, Human
uguugaucccaa

SEQ ID NO: 2575075 - RNA, 16 nt, Human
uguugaucccaagaca

SEQ ID NO: 2575076 - RNA, 13 nt, Human
uguugauugcuaa

SEQ ID NO: 2575077 - RNA, 12 nt, Human
uguugauugcua

SEQ ID NO: 2575078 - RNA, 20 nt, Human
uguugauugcaggaauaagg

SEQ ID NO: 2575079 - RNA, 11 nt, Human
uguugauuauu

SEQ ID NO: 2575080 - RNA, 16 nt, Human
uguugauuauuagcca

SEQ ID NO: 2575081 - RNA, 16 nt, Human
uguuggccaggcuggu

SEQ ID NO: 2575082 - RNA, 15 nt, Human
uguuggccaggcugg

SEQ ID NO: 2575083 - RNA, 14 nt, Human
uguuggcagccucu

SEQ ID NO: 2575084 - RNA, 12 nt, Human
uguuggcaggcu

SEQ ID NO: 2575085 - RNA, 14 nt, Human
uguuggcagcauaa

SEQ ID NO: 2575086 - RNA, 15 nt, Human
uguuggccaaagcca

SEQ ID NO: 2575087 - RNA, 20 nt, Human
uguuggagaagaacugaaau

SEQ ID NO: 2575088 - RNA, 19 nt, Human
uguuggagaagaacugaaa

SEQ ID NO: 2575089 - RNA, 22 nt, Human
uguuggcacucacagaccugga

SEQ ID NO: 2575090 - RNA, 21 nt, Human
uguuggcacucacagaccugg

SEQ ID NO: 2575091 - RNA, 23 nt, Human
uguuggcacucacagaccuggag

SEQ ID NO: 2575092 - RNA, 15 nt, Human
uguuggcacucacag

SEQ ID NO: 2575093 - RNA, 19 nt, Human
uguuggcacauccuaugca

SEQ ID NO: 2575094 - RNA, 18 nt, Human
uguuggcacaugccugua

SEQ ID NO: 2575095 - RNA, 13 nt, Human
uguuggacccgcu

SEQ ID NO: 2575096 - RNA, 19 nt, Human
uguuggacccgcucuggac

SEQ ID NO: 2575097 - RNA, 18 nt, Human
uguuggacccgcucugga

SEQ ID NO: 2575098 - RNA, 18 nt, Human
uguuggcacauccuaugc

SEQ ID NO: 2575099 - RNA, 20 nt, Human
uguuggauuuuugucuugug

SEQ ID NO: 2575100 - RNA, 17 nt, Human
uguuuaaaaucauuucu

SEQ ID NO: 2575101 - RNA, 18 nt, Human
uguuuaaaaucauuucug

SEQ ID NO: 2575102 - RNA, 19 nt, Human
uguuggcugggggccucag

SEQ ID NO: 2575103 - RNA, 19 nt, Human
uguugggacugcuaaauaa

SEQ ID NO: 2575104 - RNA, 14 nt, Human
uguugggacugcua

SEQ ID NO: 2575105 - RNA, 19 nt, Human
uguugggaaacuuggcucg

SEQ ID NO: 2575106 - RNA, 22 nt, Human
uguuggcugggaacucaccugg

SEQ ID NO: 2575107 - RNA, 21 nt, Human
uguuggcagugagugagccug

SEQ ID NO: 2575108 - RNA, 21 nt, Human
uguuggcaggcuggccagucc

SEQ ID NO: 2575109 - RNA, 18 nt, Human
uguuggcaggcuggccag

SEQ ID NO: 2575110 - RNA, 15 nt, Human
uguuggcgagaggag

SEQ ID NO: 2575111 - RNA, 20 nt, Human
uguuggccuccggccucccc

SEQ ID NO: 2575112 - RNA, 20 nt, Human
uguuggcgagaggaggggcc

SEQ ID NO: 2575113 - RNA, 17 nt, Human
uguuggccuccggccuc

SEQ ID NO: 2575114 - RNA, 16 nt, Human
uguuggccuccggccu

SEQ ID NO: 2575115 - RNA, 15 nt, Human
uguuggccucugcaa

SEQ ID NO: 2575116 - RNA, 17 nt, Human
uguuggcugggggccuc

SEQ ID NO: 2575117 - RNA, 23 nt, Human
uguuggcguggggccuuugucag

SEQ ID NO: 2575118 - RNA, 15 nt, Human
uguuggcuaaugaag

SEQ ID NO: 2575119 - RNA, 19 nt, Human
uguuuaacuuaaucaauua

SEQ ID NO: 2575120 - RNA, 11 nt, Human
uguuuaaauau

SEQ ID NO: 2575121 - RNA, 22 nt, Human
uguuuaaauaaaguaucaugca

SEQ ID NO: 2575122 - RNA, 20 nt, Human
uguuuaaauaaaguaucaug

SEQ ID NO: 2575123 - RNA, 17 nt, Human
uguuuaaauaaaguauc

SEQ ID NO: 2575124 - RNA, 15 nt, Human
uguuuaaauaaagua

SEQ ID NO: 2575125 - RNA, 14 nt, Human
uguuuaaauaaagu

SEQ ID NO: 2575126 - RNA, 12 nt, Human
uguuuaagagac

SEQ ID NO: 2575127 - RNA, 21 nt, Human
uguuuaaagagagguuauaga

SEQ ID NO: 2575128 - RNA, 17 nt, Human
uguuuaaagagagguua

SEQ ID NO: 2575129 - RNA, 12 nt, Human
uguuuaaagaga

SEQ ID NO: 2575130 - RNA, 12 nt, Human
uguuuaaauaaa

SEQ ID NO: 2575131 - RNA, 14 nt, Human
uguuuacaucaguu

SEQ ID NO: 2575132 - RNA, 12 nt, Human
uguuuacauauc

SEQ ID NO: 2575133 - RNA, 21 nt, Human
uguuuacaucaguuuuaacga

SEQ ID NO: 2575134 - RNA, 12 nt, Human
uguuuacagugu

SEQ ID NO: 2575135 - RNA, 16 nt, Human
uguuuaauauugagaa

SEQ ID NO: 2575136 - RNA, 23 nt, Human
uguuuaauacucauccuuguaua

SEQ ID NO: 2575137 - RNA, 20 nt, Human
uguuuaauauugagaaagaa

SEQ ID NO: 2575138 - RNA, 14 nt, Human
uguuuaagaugggc

SEQ ID NO: 2575139 - RNA, 21 nt, Human
uguuuaaguguuguaaauauu

SEQ ID NO: 2575140 - RNA, 20 nt, Human
uguuuaacuuaaucaauuaa

SEQ ID NO: 2575141 - RNA, 13 nt, Human
agugauuaccagg

SEQ ID NO: 2575142 - RNA, 16 nt, Human
agugauguaccaugaa

SEQ ID NO: 2575143 - RNA, 19 nt, Human
agugaugucacuagggcag

SEQ ID NO: 2575144 - RNA, 20 nt, Human
agugauggguuaguggaugg

SEQ ID NO: 2575145 - RNA, 22 nt, Human
agugauccucccaccucagccu

SEQ ID NO: 2575146 - RNA, 20 nt, Human
agugauccucccaccucagc

SEQ ID NO: 2575147 - RNA, 19 nt, Human
agugauccucccaccucag

SEQ ID NO: 2575148 - RNA, 13 nt, Human
agugcuaagugug

SEQ ID NO: 2575149 - RNA, 20 nt, Human
agugcuaaaaaugggacuuc

SEQ ID NO: 2575150 - RNA, 16 nt, Human
agugcuaaaaauggga

SEQ ID NO: 2575151 - RNA, 14 nt, Human
agugcuaaaaaugg

SEQ ID NO: 2575152 - RNA, 22 nt, Human
agugcguguguagaguuaagaa

SEQ ID NO: 2575153 - RNA, 18 nt, Human
agugcguguguagaguua

SEQ ID NO: 2575154 - RNA, 16 nt, Human
agugcguguguagagu

SEQ ID NO: 2575155 - RNA, 13 nt, Human
agugcguguguag

SEQ ID NO: 2575156 - RNA, 15 nt, Human
agugcguccacgagc

SEQ ID NO: 2575157 - RNA, 14 nt, Human
agugcgugcucagu

SEQ ID NO: 2575158 - RNA, 15 nt, Human
agugcgaguaugugu

SEQ ID NO: 2575159 - RNA, 14 nt, Human
agugcgaguaugug

SEQ ID NO: 2575160 - RNA, 17 nt, Human
agugcgaguauguguuu

SEQ ID NO: 2575161 - RNA, 17 nt, Human
agugcgauucuggauaa

SEQ ID NO: 2575162 - RNA, 22 nt, Human
agugccuuggggaauuuccucu

SEQ ID NO: 2575163 - RNA, 21 nt, Human
agugccuuggggaauuuccuc

SEQ ID NO: 2575164 - RNA, 19 nt, Human
agugccuuccuguuuuuca

SEQ ID NO: 2575165 - RNA, 16 nt, Human
agugccuucuaaaggu

SEQ ID NO: 2575166 - RNA, 16 nt, Human
agugccuuccauaauu

SEQ ID NO: 2575167 - RNA, 20 nt, Human
agugccuucaauaaauggua

SEQ ID NO: 2575168 - RNA, 18 nt, Human
agugccuucaauaaaugg

SEQ ID NO: 2575169 - RNA, 13 nt, Human
agugccuuccaua

SEQ ID NO: 2575170 - RNA, 15 nt, Human
agugccuuccauaau

SEQ ID NO: 2575171 - RNA, 22 nt, Human
agugccuuauggaacacucuga

SEQ ID NO: 2575172 - RNA, 21 nt, Human
agugccuuauggaacacucug

SEQ ID NO: 2575173 - RNA, 20 nt, Human
agugccuuauggaacacucu

SEQ ID NO: 2575174 - RNA, 19 nt, Human
agugccuuauggaacacuc

SEQ ID NO: 2575175 - RNA, 18 nt, Human
agugccuuauggaacacu

SEQ ID NO: 2575176 - RNA, 20 nt, Human
agugauucuccugccucagc

SEQ ID NO: 2575177 - RNA, 18 nt, Human
agugauucuccugccuca

SEQ ID NO: 2575178 - RNA, 19 nt, Human
agugauucuccugccucag

SEQ ID NO: 2575179 - RNA, 19 nt, Human
agugacagaggcagcccca

SEQ ID NO: 2575180 - RNA, 16 nt, Human
agugacagaggcagcc

SEQ ID NO: 2575181 - RNA, 19 nt, Human
agugacagaguucacuaua

SEQ ID NO: 2575182 - RNA, 14 nt, Human
agugaaugcuggga

SEQ ID NO: 2575183 - RNA, 15 nt, Human
agugacagaguucac

SEQ ID NO: 2575184 - RNA, 16 nt, Human
agugaaugauucagug

SEQ ID NO: 2575185 - RNA, 17 nt, Human
agugaaugauucagugu

SEQ ID NO: 2575186 - RNA, 18 nt, Human
agugaaugcucaaguuuu

SEQ ID NO: 2575187 - RNA, 19 nt, Human
agugaaugauucaguguua

SEQ ID NO: 2575188 - RNA, 14 nt, Human
agugacagaggcag

SEQ ID NO: 2575189 - RNA, 13 nt, Human
agugaaugaaaca

SEQ ID NO: 2575190 - RNA, 13 nt, Human
agugaaugauuca

SEQ ID NO: 2575191 - RNA, 23 nt, Human
agugaaucuaaaagcuuuugcuu

SEQ ID NO: 2575192 - RNA, 17 nt, Human
agugaauaaaugucuug

SEQ ID NO: 2575193 - RNA, 14 nt, Human
agugaauaaauguc

SEQ ID NO: 2575194 - RNA, 14 nt, Human
aguaucaugcauuc

SEQ ID NO: 2575195 - RNA, 19 nt, Human
aguaucaugcccugugcaa

SEQ ID NO: 2575196 - RNA, 12 nt, Human
aguaucaugcau

SEQ ID NO: 2575197 - RNA, 11 nt, Human
aguaucaugca

SEQ ID NO: 2575198 - RNA, 15 nt, Human
aguaucaugcccugu

SEQ ID NO: 2575199 - RNA, 18 nt, Human
aguaucaggucucccacg

SEQ ID NO: 2575200 - RNA, 13 nt, Human
aguaucaugaagc

SEQ ID NO: 2575201 - RNA, 15 nt, Human
aguaucaggucuccc

SEQ ID NO: 2575202 - RNA, 15 nt, Human
aguaucaggccugcc

SEQ ID NO: 2575203 - RNA, 19 nt, Human
aguaucaauccuuguucag

SEQ ID NO: 2575204 - RNA, 13 nt, Human
aguaucacugucu

SEQ ID NO: 2575205 - RNA, 17 nt, Human
aguaucacugucuuucc

SEQ ID NO: 2575206 - RNA, 22 nt, Human
aguaucacugucuuuccuagau

SEQ ID NO: 2575207 - RNA, 23 nt, Human
aguaucaaauauuagaugugauu

SEQ ID NO: 2575208 - RNA, 22 nt, Human
aguaucaaauauuagaugugau

SEQ ID NO: 2575209 - RNA, 21 nt, Human
aguaucaaauauuagauguga

SEQ ID NO: 2575210 - RNA, 19 nt, Human
aguaucaaauauuagaugu

SEQ ID NO: 2575211 - RNA, 15 nt, Human
aguaucaaauauuag

SEQ ID NO: 2575212 - RNA, 18 nt, Human
aguauauuuucuuuuccu

SEQ ID NO: 2575213 - RNA, 19 nt, Human
aguauauuuucuuuuccuc

SEQ ID NO: 2575214 - RNA, 21 nt, Human
agucgaauuaauagcuuuuau

SEQ ID NO: 2575215 - RNA, 18 nt, Human
agucgaauuaauagcuuu

SEQ ID NO: 2575216 - RNA, 21 nt, Human
aguccuuuuuuuccaucuuua

SEQ ID NO: 2575217 - RNA, 16 nt, Human
aguccuuuuuuuccau

SEQ ID NO: 2575218 - RNA, 17 nt, Human
aguccuuuauguggaaa

SEQ ID NO: 2575219 - RNA, 16 nt, Human
agucgaggacagggag

SEQ ID NO: 2575220 - RNA, 18 nt, Human
aguccuugcuuggcugcu

SEQ ID NO: 2575221 - RNA, 13 nt, Human
aguccuugcuugg

SEQ ID NO: 2575222 - RNA, 14 nt, Human
aguccuuuaugugg

SEQ ID NO: 2575223 - RNA, 18 nt, Human
aguccuuaaacagggcau

SEQ ID NO: 2575224 - RNA, 17 nt, Human
aguccuuaaacagggca

SEQ ID NO: 2575225 - RNA, 16 nt, Human
aguccugugaauuucu

SEQ ID NO: 2575226 - RNA, 12 nt, Human
aguccuugcuug

SEQ ID NO: 2575227 - RNA, 18 nt, Human
aguccuugcaagaaucag

SEQ ID NO: 2575228 - RNA, 15 nt, Human
aguccuugcaagaau

SEQ ID NO: 2575229 - RNA, 23 nt, Human
agucugcaacuuuaagcagcucu

SEQ ID NO: 2575230 - RNA, 22 nt, Human
agucugcaaaaugaggaaugua

SEQ ID NO: 2575231 - RNA, 13 nt, Human
agucugcaaaaug

SEQ ID NO: 2575232 - RNA, 18 nt, Human
agucuggaaugcaguggu

SEQ ID NO: 2575233 - RNA, 19 nt, Human
agucgauagagcuguauua

SEQ ID NO: 2575234 - RNA, 20 nt, Human
agucugauucccaagcucug

SEQ ID NO: 2575235 - RNA, 22 nt, Human
agucugauucccaagcucugcu

SEQ ID NO: 2575236 - RNA, 21 nt, Human
agucugauucccaagcucugc

SEQ ID NO: 2575237 - RNA, 18 nt, Human
agucuggcccuuccuuuu

SEQ ID NO: 2575238 - RNA, 15 nt, Human
agucuggccaacauc

SEQ ID NO: 2575239 - RNA, 17 nt, Human
agucuggaucugggacc

SEQ ID NO: 2575240 - RNA, 13 nt, Human
agucuggaggggc

SEQ ID NO: 2575241 - RNA, 15 nt, Human
agucuggaucuggga

SEQ ID NO: 2575242 - RNA, 23 nt, Human
agucugcacaugcagcugcaccc

SEQ ID NO: 2575243 - RNA, 15 nt, Human
agucugcaagauucu

SEQ ID NO: 2575244 - RNA, 22 nt, Human
agucuggaggggcauggccagc

SEQ ID NO: 2575245 - RNA, 13 nt, Human
agugaauaaaugu

SEQ ID NO: 2575246 - RNA, 18 nt, Human
agucugugagauucauuc

SEQ ID NO: 2575247 - RNA, 18 nt, Human
agucugucucugucaugg

SEQ ID NO: 2575248 - RNA, 15 nt, Human
agucugucucuguca

SEQ ID NO: 2575249 - RNA, 14 nt, Human
agucugucucuguc

SEQ ID NO: 2575250 - RNA, 17 nt, Human
agucugucucaaaagaa

SEQ ID NO: 2575251 - RNA, 16 nt, Human
agucugggcugccggg

SEQ ID NO: 2575252 - RNA, 14 nt, Human
agucugggcugccg

SEQ ID NO: 2575253 - RNA, 17 nt, Human
agucuggcugagcccug

SEQ ID NO: 2575254 - RNA, 15 nt, Human
agucuggugaagcuc

SEQ ID NO: 2575255 - RNA, 17 nt, Human
agucuggugggaggacg

SEQ ID NO: 2575256 - RNA, 20 nt, Human
agucugguuucuagacuugu

SEQ ID NO: 2575257 - RNA, 13 nt, Human
agucugucaugaa

SEQ ID NO: 2575258 - RNA, 15 nt, Human
agucugguuucuaga

SEQ ID NO: 2575259 - RNA, 23 nt, Human
agucugucaugaacauguuccug

SEQ ID NO: 2575260 - RNA, 13 nt, Human
agucauuuaauaa

SEQ ID NO: 2575261 - RNA, 18 nt, Human
aguccuuaccagcagagc

SEQ ID NO: 2575262 - RNA, 16 nt, Human
aguccuuaccagcaga

SEQ ID NO: 2575263 - RNA, 23 nt, Human
aguccugugaauuucuucacugu

SEQ ID NO: 2575264 - RNA, 14 nt, Human
aguccugugaauuu

SEQ ID NO: 2575265 - RNA, 13 nt, Human
aguccugugaauu

SEQ ID NO: 2575266 - RNA, 21 nt, Human
aguccugugaaugccacugcc

SEQ ID NO: 2575267 - RNA, 20 nt, Human
aguccucuggguaggaauca

SEQ ID NO: 2575268 - RNA, 22 nt, Human
aguccugugaaugccacugccu

SEQ ID NO: 2575269 - RNA, 14 nt, Human
aguccucuuuucug

SEQ ID NO: 2575270 - RNA, 22 nt, Human
aguccuccccucacagccucug

SEQ ID NO: 2575271 - RNA, 21 nt, Human
aguccuccccucacagccucu

SEQ ID NO: 2575272 - RNA, 20 nt, Human
aguccuccccucacagccuc

SEQ ID NO: 2575273 - RNA, 22 nt, Human
agucauuugcugagcauguacu

SEQ ID NO: 2575274 - RNA, 19 nt, Human
agucauuugcugagcaugu

SEQ ID NO: 2575275 - RNA, 21 nt, Human
agucauuuuaacuuuaucaca

SEQ ID NO: 2575276 - RNA, 19 nt, Human
agucauuuuaacuuuauca

SEQ ID NO: 2575277 - RNA, 15 nt, Human
aguccucguagccau

SEQ ID NO: 2575278 - RNA, 17 nt, Human
aguccucguagccaucu

SEQ ID NO: 2575279 - RNA, 13 nt, Human
aguccucuccacc

SEQ ID NO: 2575280 - RNA, 23 nt, Human
aguccuccccucacagccucuga

SEQ ID NO: 2575281 - RNA, 21 nt, Human
aguccucguagccaucucucu

SEQ ID NO: 2575282 - RNA, 19 nt, Human
aguccucuccaccuagugg

SEQ ID NO: 2575283 - RNA, 14 nt, Human
aguccucuccaccu

SEQ ID NO: 2575284 - RNA, 12 nt, Human
aguccucugaau

SEQ ID NO: 2575285 - RNA, 22 nt, Human
aguccucuggauggcaccagag

SEQ ID NO: 2575286 - RNA, 21 nt, Human
aguccucuccaccuaguggcu

SEQ ID NO: 2575287 - RNA, 14 nt, Human
aguccucugaauga

SEQ ID NO: 2575288 - RNA, 22 nt, Human
aggggccagaggaacuguccag

SEQ ID NO: 2575289 - RNA, 17 nt, Human
aggggccagaggcucgu

SEQ ID NO: 2575290 - RNA, 12 nt, Human
aggggccagagg

SEQ ID NO: 2575291 - RNA, 13 nt, Human
aggggccagaggc

SEQ ID NO: 2575292 - RNA, 14 nt, Human
aggggccagaggcu

SEQ ID NO: 2575293 - RNA, 15 nt, Human
aggggccagaggcuc

SEQ ID NO: 2575294 - RNA, 23 nt, Human
aggggcauguauuggccuggagg

SEQ ID NO: 2575295 - RNA, 22 nt, Human
aggggcauguauuggccuggag

SEQ ID NO: 2575296 - RNA, 21 nt, Human
aggggcauguauuggccugga

SEQ ID NO: 2575297 - RNA, 20 nt, Human
aggggcauguauuggccugg

SEQ ID NO: 2575298 - RNA, 16 nt, Human
aguaaaauugccauau

SEQ ID NO: 2575299 - RNA, 14 nt, Human
aguaaaauugccau

SEQ ID NO: 2575300 - RNA, 21 nt, Human
aguaaaauugccauauugcac

SEQ ID NO: 2575301 - RNA, 20 nt, Human
aguaaaauugccauauugca

SEQ ID NO: 2575302 - RNA, 19 nt, Human
aguaaaauugccauauugc

SEQ ID NO: 2575303 - RNA, 17 nt, Human
aguaaaauugccauauu

SEQ ID NO: 2575304 - RNA, 23 nt, Human
aguaaaauugccauauugcacau

SEQ ID NO: 2575305 - RNA, 22 nt, Human
aguaaaauugccauauugcaca

SEQ ID NO: 2575306 - RNA, 13 nt, Human
aguaaagaaauga

SEQ ID NO: 2575307 - RNA, 15 nt, Human
aguaaagaaaugaca

SEQ ID NO: 2575308 - RNA, 12 nt, Human
aguaaagaaauu

SEQ ID NO: 2575309 - RNA, 14 nt, Human
aguaaacuauuuau

SEQ ID NO: 2575310 - RNA, 16 nt, Human
aguaaacuauuuaucu

SEQ ID NO: 2575311 - RNA, 19 nt, Human
aguauauaaugguuucaaa

SEQ ID NO: 2575312 - RNA, 17 nt, Human
aguacugcucuuguuuc

SEQ ID NO: 2575313 - RNA, 21 nt, Human
aguacuucuccacccugcucu

SEQ ID NO: 2575314 - RNA, 19 nt, Human
aguacuucuccacccugcu

SEQ ID NO: 2575315 - RNA, 20 nt, Human
aguacuucuccacccugcuc

SEQ ID NO: 2575316 - RNA, 17 nt, Human
aguauauuauguauuua

SEQ ID NO: 2575317 - RNA, 15 nt, Human
aguauauuauguauu

SEQ ID NO: 2575318 - RNA, 14 nt, Human
aguauauuauguau

SEQ ID NO: 2575319 - RNA, 14 nt, Human
aguauauuuauagu

SEQ ID NO: 2575320 - RNA, 18 nt, Human
aguauauuuauagucaca

SEQ ID NO: 2575321 - RNA, 13 nt, Human
aguauauuuucuu

SEQ ID NO: 2575322 - RNA, 22 nt, Human
aguauauugauccagaaagaaa

SEQ ID NO: 2575323 - RNA, 18 nt, Human
aguauaucuggacaagcc

SEQ ID NO: 2575324 - RNA, 16 nt, Human
aguauaucuggacaag

SEQ ID NO: 2575325 - RNA, 15 nt, Human
aguauaucuggacaa

SEQ ID NO: 2575326 - RNA, 13 nt, Human
aguauaucuggac

SEQ ID NO: 2575327 - RNA, 22 nt, Human
aguauaucuggacaagccaacu

SEQ ID NO: 2575328 - RNA, 14 nt, Human
aguaccuggaggag

SEQ ID NO: 2575329 - RNA, 13 nt, Human
aguaccuggagga

SEQ ID NO: 2575330 - RNA, 12 nt, Human
aguaccuggagg

SEQ ID NO: 2575331 - RNA, 15 nt, Human
aguaccuggaggagg

SEQ ID NO: 2575332 - RNA, 13 nt, Human
aguacucauacau

SEQ ID NO: 2575333 - RNA, 13 nt, Human
aguaccuuuguca

SEQ ID NO: 2575334 - RNA, 14 nt, Human
aguaccuuugucac

SEQ ID NO: 2575335 - RNA, 15 nt, Human
aguaccuuugucaca

SEQ ID NO: 2575336 - RNA, 15 nt, Human
aguacuggagaaaau

SEQ ID NO: 2575337 - RNA, 15 nt, Human
aguacuggcauggua

SEQ ID NO: 2575338 - RNA, 20 nt, Human
aguacuccugcaaaauuuua

SEQ ID NO: 2575339 - RNA, 21 nt, Human
aguacuccugcaaaauuuuau

SEQ ID NO: 2575340 - RNA, 15 nt, Human
aguacguuauuguug

SEQ ID NO: 2575341 - RNA, 13 nt, Human
aguacguuauugu

SEQ ID NO: 2575342 - RNA, 18 nt, Human
aguacgugcuaacaggcu

SEQ ID NO: 2575343 - RNA, 16 nt, Human
aguacuccugcaaaau

SEQ ID NO: 2575344 - RNA, 18 nt, Human
aguacuccugcaaaauuu

SEQ ID NO: 2575345 - RNA, 19 nt, Human
aguacuccugcaaaauuuu

SEQ ID NO: 2575346 - RNA, 18 nt, Human
aguaacgcgucuuccuga

SEQ ID NO: 2575347 - RNA, 17 nt, Human
aguaacgcgucuuccug

SEQ ID NO: 2575348 - RNA, 21 nt, Human
aguaaccuuuugcaccugcuc

SEQ ID NO: 2575349 - RNA, 12 nt, Human
aguaaccugggu

SEQ ID NO: 2575350 - RNA, 16 nt, Human
aguaacgcgucuuccu

SEQ ID NO: 2575351 - RNA, 22 nt, Human
aguaacgcgucuuccugagugg

SEQ ID NO: 2575352 - RNA, 19 nt, Human
aguaacgcgucuuccugag

SEQ ID NO: 2575353 - RNA, 14 nt, Human
aguaacuuaaguua

SEQ ID NO: 2575354 - RNA, 23 nt, Human
aguaaccuuuugcaccugcucuc

SEQ ID NO: 2575355 - RNA, 19 nt, Human
aguaacugccaucaagaug

SEQ ID NO: 2575356 - RNA, 14 nt, Human
aguaacucaucugu

SEQ ID NO: 2575357 - RNA, 14 nt, Human
aguaacugacaacu

SEQ ID NO: 2575358 - RNA, 13 nt, Human
aguaagaaaagug

SEQ ID NO: 2575359 - RNA, 19 nt, Human
aguaacuuuauguguaaau

SEQ ID NO: 2575360 - RNA, 20 nt, Human
aguaacuuuauguguaaaua

SEQ ID NO: 2575361 - RNA, 14 nt, Human
aguaccugaaaagu

SEQ ID NO: 2575362 - RNA, 17 nt, Human
aguaccugaaaaaaugc

SEQ ID NO: 2575363 - RNA, 15 nt, Human
aguaccugaaaagua

SEQ ID NO: 2575364 - RNA, 17 nt, Human
aguaacuuuauguguaa

SEQ ID NO: 2575365 - RNA, 16 nt, Human
aguaacuuuaugugua

SEQ ID NO: 2575366 - RNA, 14 nt, Human
aguaacuuuaugug

SEQ ID NO: 2575367 - RNA, 18 nt, Human
aguaacuuggcuuucauu

SEQ ID NO: 2575368 - RNA, 15 nt, Human
aguaacuuggcuuuc

SEQ ID NO: 2575369 - RNA, 14 nt, Human
aguaacuuggcuuu

SEQ ID NO: 2575370 - RNA, 17 nt, Human
aguaacuucuuauggaa

SEQ ID NO: 2575371 - RNA, 19 nt, Human
aguaacuucuuauggaauu

SEQ ID NO: 2575372 - RNA, 17 nt, Human
aguaacuuacuuaggug

SEQ ID NO: 2575373 - RNA, 14 nt, Human
aguaaagcuaaaau

SEQ ID NO: 2575374 - RNA, 18 nt, Human
aguaaagccguuguuuac

SEQ ID NO: 2575375 - RNA, 17 nt, Human
aguaaagccguuguuua

SEQ ID NO: 2575376 - RNA, 19 nt, Human
aguaaaggaguaagaaccu

SEQ ID NO: 2575377 - RNA, 17 nt, Human
aguaaagcuaaaaugau

SEQ ID NO: 2575378 - RNA, 13 nt, Human
aguaaagaaauuu

SEQ ID NO: 2575379 - RNA, 20 nt, Human
aguaaagaaauuuaaaagac

SEQ ID NO: 2575380 - RNA, 18 nt, Human
aguaaagugauaauuucu

SEQ ID NO: 2575381 - RNA, 19 nt, Human
aguaaagugauaauuucug

SEQ ID NO: 2575382 - RNA, 15 nt, Human
aguaaauaaauuguu

SEQ ID NO: 2575383 - RNA, 14 nt, Human
aguaaauaaauugu

SEQ ID NO: 2575384 - RNA, 18 nt, Human
aguaaauaaauuguuuga

SEQ ID NO: 2575385 - RNA, 16 nt, Human
aguaaauaaauuguuu

SEQ ID NO: 2575386 - RNA, 19 nt, Human
aguaaauaaauuguuugac

SEQ ID NO: 2575387 - RNA, 18 nt, Human
aguaaaugggggugcauu

SEQ ID NO: 2575388 - RNA, 19 nt, Human
aguaaaugggggugcauuu

SEQ ID NO: 2575389 - RNA, 20 nt, Human
aguaaaugggggugcauuug

SEQ ID NO: 2575390 - RNA, 21 nt, Human
aguaaaugggggugcauuuga

SEQ ID NO: 2575391 - RNA, 20 nt, Human
aguuguucaauaauaaauau

SEQ ID NO: 2575392 - RNA, 22 nt, Human
aguuguuagugugucuuagugu

SEQ ID NO: 2575393 - RNA, 17 nt, Human
aguuguuagugugucuu

SEQ ID NO: 2575394 - RNA, 19 nt, Human
aguugaaugacaacagaag

SEQ ID NO: 2575395 - RNA, 16 nt, Human
aguugaagcuaagauu

SEQ ID NO: 2575396 - RNA, 20 nt, Human
aguuaauuacauccucaugc

SEQ ID NO: 2575397 - RNA, 21 nt, Human
aguuaacgggugaauaauaaa

SEQ ID NO: 2575398 - RNA, 17 nt, Human
aguuaacgggugaauaa

SEQ ID NO: 2575399 - RNA, 13 nt, Human
aguuaacggguga

SEQ ID NO: 2575400 - RNA, 20 nt, Human
aguuaacaccuuuaaagugu

SEQ ID NO: 2575401 - RNA, 12 nt, Human
aguuaacagaga

SEQ ID NO: 2575402 - RNA, 17 nt, Human
aguuaacaaugauauau

SEQ ID NO: 2575403 - RNA, 16 nt, Human
aguuaacaaugauaua

SEQ ID NO: 2575404 - RNA, 13 nt, Human
aguuaacaaugau

SEQ ID NO: 2575405 - RNA, 14 nt, Human
aguuaaauuucugg

SEQ ID NO: 2575406 - RNA, 21 nt, Human
aguuaaauagaguauaugcac

SEQ ID NO: 2575407 - RNA, 15 nt, Human
aguguuuucugggau

SEQ ID NO: 2575408 - RNA, 23 nt, Human
aguuaaauagaguauaugcacuu

SEQ ID NO: 2575409 - RNA, 20 nt, Human
aguguuuuaagauaaauuau

SEQ ID NO: 2575410 - RNA, 18 nt, Human
aguguuuuggaauaaaau

SEQ ID NO: 2575411 - RNA, 13 nt, Human
aguguuuucuggg

SEQ ID NO: 2575412 - RNA, 17 nt, Human
agugcucauuucaggau

SEQ ID NO: 2575413 - RNA, 11 nt, Human
agugcucccuc

SEQ ID NO: 2575414 - RNA, 14 nt, Human
agugcucccucaca

SEQ ID NO: 2575415 - RNA, 17 nt, Human
agugcucccucacaugu

SEQ ID NO: 2575416 - RNA, 15 nt, Human
aguggcauggcucca

SEQ ID NO: 2575417 - RNA, 18 nt, Human
aguggcauggcuccaguc

SEQ ID NO: 2575418 - RNA, 20 nt, Human
aguggcauuggcagcaggug

SEQ ID NO: 2575419 - RNA, 18 nt, Human
aguggcauuggcagcagg

SEQ ID NO: 2575420 - RNA, 16 nt, Human
aguggcauuggcagca

SEQ ID NO: 2575421 - RNA, 15 nt, Human
aguguuucuguuauu

SEQ ID NO: 2575422 - RNA, 16 nt, Human
aguggcccccacagaa

SEQ ID NO: 2575423 - RNA, 21 nt, Human
aguguuucuguuauuaacaaa

SEQ ID NO: 2575424 - RNA, 21 nt, Human
aguguuuggguauauucauuu

SEQ ID NO: 2575425 - RNA, 14 nt, Human
aguggccacucagc

SEQ ID NO: 2575426 - RNA, 14 nt, Human
aguggccacuaagc

SEQ ID NO: 2575427 - RNA, 19 nt, Human
aguggccacuaagcagagg

SEQ ID NO: 2575428 - RNA, 20 nt, Human
aguggccacuaagcagagga

SEQ ID NO: 2575429 - RNA, 22 nt, Human
aguggccacuaagcagaggagg

SEQ ID NO: 2575430 - RNA, 21 nt, Human
aguuccacugagcuccaugug

SEQ ID NO: 2575431 - RNA, 15 nt, Human
aguuccacugagcuc

SEQ ID NO: 2575432 - RNA, 14 nt, Human
aguuccacugagcu

SEQ ID NO: 2575433 - RNA, 19 nt, Human
aguucuuugggccagacau

SEQ ID NO: 2575434 - RNA, 22 nt, Human
aguuccaugaagaccacaucca

SEQ ID NO: 2575435 - RNA, 19 nt, Human
aguucuuuguucauagccc

SEQ ID NO: 2575436 - RNA, 21 nt, Human
aguucuuugggccagacaugc

SEQ ID NO: 2575437 - RNA, 17 nt, Human
aguugaaaaacagcuga

SEQ ID NO: 2575438 - RNA, 17 nt, Human
aguugaagacagagcua

SEQ ID NO: 2575439 - RNA, 16 nt, Human
aguugaagacagagcu

SEQ ID NO: 2575440 - RNA, 22 nt, Human
aguucuuuguucauagcccagu

SEQ ID NO: 2575441 - RNA, 21 nt, Human
aguucuuuguucauagcccag

SEQ ID NO: 2575442 - RNA, 14 nt, Human
aguugaaaagacuc

SEQ ID NO: 2575443 - RNA, 18 nt, Human
aguugaaaaacagcugag

SEQ ID NO: 2575444 - RNA, 21 nt, Human
aguuccaccaucaagccacca

SEQ ID NO: 2575445 - RNA, 18 nt, Human
aguuccaccaucaagcca

SEQ ID NO: 2575446 - RNA, 17 nt, Human
aguucauccauucuauu

SEQ ID NO: 2575447 - RNA, 16 nt, Human
aguucauccaauccuc

SEQ ID NO: 2575448 - RNA, 18 nt, Human
aguucauccaauccucac

SEQ ID NO: 2575449 - RNA, 20 nt, Human
aguucauccaauccucacug

SEQ ID NO: 2575450 - RNA, 22 nt, Human
aguucauccaauccucacuggg

SEQ ID NO: 2575451 - RNA, 22 nt, Human
aguucauauguaccauguacau

SEQ ID NO: 2575452 - RNA, 18 nt, Human
aguucauauguaccaugu

SEQ ID NO: 2575453 - RNA, 20 nt, Human
aguucauauuccauauuuau

SEQ ID NO: 2575454 - RNA, 19 nt, Human
aguucauauuccauauuua

SEQ ID NO: 2575455 - RNA, 20 nt, Human
aguucauagggucucuucag

SEQ ID NO: 2575456 - RNA, 21 nt, Human
aguuacaacuuccuaauuuua

SEQ ID NO: 2575457 - RNA, 14 nt, Human
aguucauacccugu

SEQ ID NO: 2575458 - RNA, 19 nt, Human
aguuacacauuuuucagau

SEQ ID NO: 2575459 - RNA, 16 nt, Human
aguuacacauuuuuca

SEQ ID NO: 2575460 - RNA, 20 nt, Human
aguuacaaauugcuugaaag

SEQ ID NO: 2575461 - RNA, 13 nt, Human
aguuacacauuuu

SEQ ID NO: 2575462 - RNA, 17 nt, Human
aguuucugggaccucag

SEQ ID NO: 2575463 - RNA, 17 nt, Human
aguuucuguccugcugg

SEQ ID NO: 2575464 - RNA, 16 nt, Human
aguuucuggcccuggc

SEQ ID NO: 2575465 - RNA, 14 nt, Human
aguuucuuagcuuu

SEQ ID NO: 2575466 - RNA, 23 nt, Human
aguuucuguucuguggaaagugu

SEQ ID NO: 2575467 - RNA, 22 nt, Human
aguuucuguucuguggaaagug

SEQ ID NO: 2575468 - RNA, 21 nt, Human
aguuucuguucuguggaaagu

SEQ ID NO: 2575469 - RNA, 19 nt, Human
aguuucuguucuguggaaa

SEQ ID NO: 2575470 - RNA, 18 nt, Human
aguuucuguucuguggaa

SEQ ID NO: 2575471 - RNA, 17 nt, Human
aguuucuguucugugga

SEQ ID NO: 2575472 - RNA, 16 nt, Human
aguuucuguucugugg

SEQ ID NO: 2575473 - RNA, 15 nt, Human
aguuucuguucugug

SEQ ID NO: 2575474 - RNA, 13 nt, Human
aguuucuguucug

SEQ ID NO: 2575475 - RNA, 14 nt, Human
aguuugauuaaauu

SEQ ID NO: 2575476 - RNA, 17 nt, Human
aguuugauauuaaagga

SEQ ID NO: 2575477 - RNA, 16 nt, Human
aguuugagcugccuuc

SEQ ID NO: 2575478 - RNA, 15 nt, Human
aguuucuuagcuuuu

SEQ ID NO: 2575479 - RNA, 23 nt, Human
aguuugagcugccuucccuagcu

SEQ ID NO: 2575480 - RNA, 14 nt, Human
aguuugaggcugca

SEQ ID NO: 2575481 - RNA, 17 nt, Human
aguuugaggcugcagcg

SEQ ID NO: 2575482 - RNA, 13 nt, Human
aguuugccagaag

SEQ ID NO: 2575483 - RNA, 12 nt, Human
aguuugcccugg

SEQ ID NO: 2575484 - RNA, 21 nt, Human
aguuugcccugguuucacugg

SEQ ID NO: 2575485 - RNA, 20 nt, Human
aguuugcauuccugauauga

SEQ ID NO: 2575486 - RNA, 15 nt, Human
aguuugcauuccuga

SEQ ID NO: 2575487 - RNA, 22 nt, Human
aguuugcagaaaagcaccugcc

SEQ ID NO: 2575488 - RNA, 23 nt, Human
aguuugcagaaaagcaccugccg

SEQ ID NO: 2575489 - RNA, 11 nt, Human
aguuugcaguu

SEQ ID NO: 2575490 - RNA, 13 nt, Human
aguuugcagaaaa

SEQ ID NO: 2575491 - RNA, 14 nt, Human
aguuugcagaaaag

SEQ ID NO: 2575492 - RNA, 20 nt, Human
aguuugcagaaaagcaccug

SEQ ID NO: 2575493 - RNA, 21 nt, Human
aguuugcagaaaagcaccugc

SEQ ID NO: 2575494 - RNA, 16 nt, Human
auaaaagacagugaaa

SEQ ID NO: 2575495 - RNA, 15 nt, Human
auaaaagacagugaa

SEQ ID NO: 2575496 - RNA, 12 nt, Human
auaaaaauguuu

SEQ ID NO: 2575497 - RNA, 14 nt, Human
auaaaaauucugaa

SEQ ID NO: 2575498 - RNA, 15 nt, Human
auaaaaauucugaau

SEQ ID NO: 2575499 - RNA, 12 nt, Human
auaaaacaggua

SEQ ID NO: 2575500 - RNA, 18 nt, Human
auaaaacaggucaauaca

SEQ ID NO: 2575501 - RNA, 16 nt, Human
auaaaacaggucaaua

SEQ ID NO: 2575502 - RNA, 23 nt, Human
auaaaaauauuguguugugaaug

SEQ ID NO: 2575503 - RNA, 18 nt, Human
auaaaaagaucacuuucu

SEQ ID NO: 2575504 - RNA, 12 nt, Human
auaaaaauggau

SEQ ID NO: 2575505 - RNA, 18 nt, Human
auaaaaaauggugccuga

SEQ ID NO: 2575506 - RNA, 12 nt, Human
auaaaaaauggu

SEQ ID NO: 2575507 - RNA, 12 nt, Human
auaaaaaaugga

SEQ ID NO: 2575508 - RNA, 11 nt, Human
auaaaaaaugg

SEQ ID NO: 2575509 - RNA, 12 nt, Human
auaaaaacaaau

SEQ ID NO: 2575510 - RNA, 14 nt, Human
auaaaaagaucacu

SEQ ID NO: 2575511 - RNA, 20 nt, Human
auaaaaagacauucuuccaa

SEQ ID NO: 2575512 - RNA, 18 nt, Human
auaaaaacuaaauuguaa

SEQ ID NO: 2575513 - RNA, 22 nt, Human
auaaaaagaaaagauaaagaug

SEQ ID NO: 2575514 - RNA, 16 nt, Human
auaaaaacuaaauugu

SEQ ID NO: 2575515 - RNA, 12 nt, Human
auaaaaacuaaa

SEQ ID NO: 2575516 - RNA, 17 nt, Human
auaaaaaccaagaagau

SEQ ID NO: 2575517 - RNA, 21 nt, Human
auaaaaaauaaucuauuucua

SEQ ID NO: 2575518 - RNA, 17 nt, Human
auaaaaaaaagaaaaaa

SEQ ID NO: 2575519 - RNA, 18 nt, Human
auaaaaaaaagaaaaaag

SEQ ID NO: 2575520 - RNA, 23 nt, Human
aguuugcuagcagaaaucuagaa

SEQ ID NO: 2575521 - RNA, 19 nt, Human
auaaaaaaacaaucauuug

SEQ ID NO: 2575522 - RNA, 15 nt, Human
auaaaaaaaauaguu

SEQ ID NO: 2575523 - RNA, 17 nt, Human
auaaaaaaacaaucauu

SEQ ID NO: 2575524 - RNA, 14 nt, Human
auaaaaaaaauagu

SEQ ID NO: 2575525 - RNA, 13 nt, Human
auaaaaaaaagaa

SEQ ID NO: 2575526 - RNA, 14 nt, Human
auaaagaugaucua

SEQ ID NO: 2575527 - RNA, 11 nt, Human
auaaagaugau

SEQ ID NO: 2575528 - RNA, 19 nt, Human
auaaagaugaucuacucag

SEQ ID NO: 2575529 - RNA, 18 nt, Human
auaaagaucgcccccacc

SEQ ID NO: 2575530 - RNA, 13 nt, Human
auaaagaguuaga

SEQ ID NO: 2575531 - RNA, 21 nt, Human
auaaagagagaaaaacaaauu

SEQ ID NO: 2575532 - RNA, 21 nt, Human
auaaagaugagugagcaugcc

SEQ ID NO: 2575533 - RNA, 19 nt, Human
auaaagaucauguaaaagu

SEQ ID NO: 2575534 - RNA, 15 nt, Human
auaaagagagaaaaa

SEQ ID NO: 2575535 - RNA, 14 nt, Human
auaaagaccacuuu

SEQ ID NO: 2575536 - RNA, 14 nt, Human
auaaaacauuaaga

SEQ ID NO: 2575537 - RNA, 17 nt, Human
auaaaacauuaagaaaa

SEQ ID NO: 2575538 - RNA, 10 nt, Human
auaaaagaug

SEQ ID NO: 2575539 - RNA, 11 nt, Human
auaaagacagg

SEQ ID NO: 2575540 - RNA, 20 nt, Human
auaagugcuguauaaaauca

SEQ ID NO: 2575541 - RNA, 19 nt, Human
auaagugcuguauaaaauc

SEQ ID NO: 2575542 - RNA, 18 nt, Human
auaagugcuguauaaaau

SEQ ID NO: 2575543 - RNA, 17 nt, Human
auaagugcuguauaaaa

SEQ ID NO: 2575544 - RNA, 22 nt, Human
auaagugcuguauaaaaucagc

SEQ ID NO: 2575545 - RNA, 18 nt, Human
auaaguggaggcacuuua

SEQ ID NO: 2575546 - RNA, 19 nt, Human
auaaguaagaaaauauuuu

SEQ ID NO: 2575547 - RNA, 19 nt, Human
auaaguggaggcacuuuag

SEQ ID NO: 2575548 - RNA, 20 nt, Human
auaaguggaggcacuuuagg

SEQ ID NO: 2575549 - RNA, 12 nt, Human
auaauguuaaau

SEQ ID NO: 2575550 - RNA, 11 nt, Human
auaauguuaaa

SEQ ID NO: 2575551 - RNA, 10 nt, Human
auaauguuaa

SEQ ID NO: 2575552 - RNA, 12 nt, Human
auaaugugaagu

SEQ ID NO: 2575553 - RNA, 16 nt, Human
auaaugugaaguguua

SEQ ID NO: 2575554 - RNA, 16 nt, Human
auaagugcuguauaaa

SEQ ID NO: 2575555 - RNA, 15 nt, Human
auaagugcuguauaa

SEQ ID NO: 2575556 - RNA, 14 nt, Human
auaagugcuguaua

SEQ ID NO: 2575557 - RNA, 13 nt, Human
auaagugcuguau

SEQ ID NO: 2575558 - RNA, 18 nt, Human
auaaguaagaaaauauuu

SEQ ID NO: 2575559 - RNA, 17 nt, Human
auaaguaagaaaauauu

SEQ ID NO: 2575560 - RNA, 15 nt, Human
auaaguaagaaaaua

SEQ ID NO: 2575561 - RNA, 14 nt, Human
auaaguaagaaaau

SEQ ID NO: 2575562 - RNA, 17 nt, Human
auaaguaauucaagaaa

SEQ ID NO: 2575563 - RNA, 13 nt, Human
auaaguaaguuug

SEQ ID NO: 2575564 - RNA, 13 nt, Human
auaaguacugugu

SEQ ID NO: 2575565 - RNA, 16 nt, Human
auaaguacuguguaca

SEQ ID NO: 2575566 - RNA, 22 nt, Human
auacacauaauuaaagugucca

SEQ ID NO: 2575567 - RNA, 12 nt, Human
auacacauaauu

SEQ ID NO: 2575568 - RNA, 10 nt, Human
auacacauaa

SEQ ID NO: 2575569 - RNA, 14 nt, Human
auacacaggauccu

SEQ ID NO: 2575570 - RNA, 15 nt, Human
auacaccacuacauu

SEQ ID NO: 2575571 - RNA, 23 nt, Human
auacaaugcugugcccuaaagug

SEQ ID NO: 2575572 - RNA, 18 nt, Human
auacaauguauuuauuua

SEQ ID NO: 2575573 - RNA, 21 nt, Human
auacaauguauuuauuuaaaa

SEQ ID NO: 2575574 - RNA, 20 nt, Human
auacaauguauuuauuuaaa

SEQ ID NO: 2575575 - RNA, 15 nt, Human
auacaauucuacauu

SEQ ID NO: 2575576 - RNA, 22 nt, Human
auaauguuaaauuuguaaguuu

SEQ ID NO: 2575577 - RNA, 19 nt, Human
auaauguuaaauuuguaag

SEQ ID NO: 2575578 - RNA, 18 nt, Human
auaauguuaaauuuguaa

SEQ ID NO: 2575579 - RNA, 16 nt, Human
auaauguuaaauuugu

SEQ ID NO: 2575580 - RNA, 23 nt, Human
auaauguuaaauuuguaaguuuc

SEQ ID NO: 2575581 - RNA, 12 nt, Human
auaauguuaaca

SEQ ID NO: 2575582 - RNA, 15 nt, Human
auaagcucagaaucc

SEQ ID NO: 2575583 - RNA, 15 nt, Human
auaaguaaaugcuag

SEQ ID NO: 2575584 - RNA, 13 nt, Human
auaaguaagaaaa

SEQ ID NO: 2575585 - RNA, 12 nt, Human
auaaguaagaaa

SEQ ID NO: 2575586 - RNA, 23 nt, Human
auaagguuucguuucuguauaca

SEQ ID NO: 2575587 - RNA, 20 nt, Human
auaagguuucguuucuguau

SEQ ID NO: 2575588 - RNA, 19 nt, Human
auaagguuucguuucugua

SEQ ID NO: 2575589 - RNA, 17 nt, Human
auaagguuuaaaaagau

SEQ ID NO: 2575590 - RNA, 16 nt, Human
auaagcucagaaucca

SEQ ID NO: 2575591 - RNA, 18 nt, Human
auaagcggcguaaguuua

SEQ ID NO: 2575592 - RNA, 13 nt, Human
auaagcuaaagag

SEQ ID NO: 2575593 - RNA, 16 nt, Human
auaagcuaaagaggcu

SEQ ID NO: 2575594 - RNA, 17 nt, Human
auaagcuaaagaggcug

SEQ ID NO: 2575595 - RNA, 21 nt, Human
auaagcuaacaccagacagac

SEQ ID NO: 2575596 - RNA, 16 nt, Human
auacaccaauugauuu

SEQ ID NO: 2575597 - RNA, 23 nt, Human
auacacauaauuaaaguguccau

SEQ ID NO: 2575598 - RNA, 21 nt, Human
auacaccaccucacuccuguu

SEQ ID NO: 2575599 - RNA, 20 nt, Human
auacaccaccucacuccugu

SEQ ID NO: 2575600 - RNA, 17 nt, Human
auacaccacuacauucu

SEQ ID NO: 2575601 - RNA, 18 nt, Human
auacaccgggccuggaga

SEQ ID NO: 2575602 - RNA, 14 nt, Human
auacaccgggccug

SEQ ID NO: 2575603 - RNA, 17 nt, Human
auacaccagcauuccuu

SEQ ID NO: 2575604 - RNA, 18 nt, Human
auacaccagcauuccuuu

SEQ ID NO: 2575605 - RNA, 19 nt, Human
auacaccagagauaauaug

SEQ ID NO: 2575606 - RNA, 22 nt, Human
auacacuauuugugagcaaagg

SEQ ID NO: 2575607 - RNA, 21 nt, Human
auacacuaugaagauguuuca

SEQ ID NO: 2575608 - RNA, 17 nt, Human
auacacgagguaugagg

SEQ ID NO: 2575609 - RNA, 19 nt, Human
auacacuaauuccuuucua

SEQ ID NO: 2575610 - RNA, 21 nt, Human
auacacugaaguuaacagaga

SEQ ID NO: 2575611 - RNA, 18 nt, Human
auacuugaagggccagag

SEQ ID NO: 2575612 - RNA, 19 nt, Human
auacuugaagggccagagc

SEQ ID NO: 2575613 - RNA, 20 nt, Human
auacuugaagggccagagcc

SEQ ID NO: 2575614 - RNA, 21 nt, Human
auacuugaagggccagagcca

SEQ ID NO: 2575615 - RNA, 16 nt, Human
auacuugaagggccag

SEQ ID NO: 2575616 - RNA, 17 nt, Human
auacuugaagggccaga

SEQ ID NO: 2575617 - RNA, 16 nt, Human
auacuuuugcccuuug

SEQ ID NO: 2575618 - RNA, 19 nt, Human
auacuuuuuaaauguaaag

SEQ ID NO: 2575619 - RNA, 13 nt, Human
auacuuuuuacaa

SEQ ID NO: 2575620 - RNA, 20 nt, Human
auacuuuuuacaauuaaaaa

SEQ ID NO: 2575621 - RNA, 19 nt, Human
auacuuuuuucuuauuuaa

SEQ ID NO: 2575622 - RNA, 19 nt, Human
auagcaaauguuuugacau

SEQ ID NO: 2575623 - RNA, 22 nt, Human
auagcaaagcgacguuagucgu

SEQ ID NO: 2575624 - RNA, 16 nt, Human
auagcaacacucuaua

SEQ ID NO: 2575625 - RNA, 15 nt, Human
auacuuuuuuucaca

SEQ ID NO: 2575626 - RNA, 14 nt, Human
auacuuuuuuucac

SEQ ID NO: 2575627 - RNA, 21 nt, Human
auacuuuuuuuucuuuaaaaa

SEQ ID NO: 2575628 - RNA, 16 nt, Human
auagaaaaacccugcc

SEQ ID NO: 2575629 - RNA, 17 nt, Human
auagaaaacugaaaauc

SEQ ID NO: 2575630 - RNA, 17 nt, Human
auacugugcuggagcca

SEQ ID NO: 2575631 - RNA, 20 nt, Human
auacugugcuggagccacua

SEQ ID NO: 2575632 - RNA, 16 nt, Human
auacugugcuggagcc

SEQ ID NO: 2575633 - RNA, 21 nt, Human
auacugucgguuuuuuuuaaa

SEQ ID NO: 2575634 - RNA, 19 nt, Human
auacuugaaaauuaacaug

SEQ ID NO: 2575635 - RNA, 20 nt, Human
auacuguuugagguuuuuaa

SEQ ID NO: 2575636 - RNA, 21 nt, Human
auacuuaaauggaaaaaauga

SEQ ID NO: 2575637 - RNA, 12 nt, Human
auacuguuugag

SEQ ID NO: 2575638 - RNA, 16 nt, Human
auacuguuugagguuu

SEQ ID NO: 2575639 - RNA, 15 nt, Human
auacuguugugcgca

SEQ ID NO: 2575640 - RNA, 19 nt, Human
auacuguauuuuguauugu

SEQ ID NO: 2575641 - RNA, 17 nt, Human
auacugucucuuucaug

SEQ ID NO: 2575642 - RNA, 17 nt, Human
augaggcuugcugagag

SEQ ID NO: 2575643 - RNA, 15 nt, Human
augaggcuugcugag

SEQ ID NO: 2575644 - RNA, 18 nt, Human
augaggcuugcugagagg

SEQ ID NO: 2575645 - RNA, 23 nt, Human
aucuaggaagacuuuggaaagag

SEQ ID NO: 2575646 - RNA, 11 nt, Human
aucuaggauuu

SEQ ID NO: 2575647 - RNA, 19 nt, Human
aucuaggauuuuaagggaa

SEQ ID NO: 2575648 - RNA, 21 nt, Human
augaauacuguauuuuguauu

SEQ ID NO: 2575649 - RNA, 20 nt, Human
augaauacaaacaauggaaa

SEQ ID NO: 2575650 - RNA, 22 nt, Human
augaauaauuucccaauuagga

SEQ ID NO: 2575651 - RNA, 21 nt, Human
augaauacagggcaugcauuu

SEQ ID NO: 2575652 - RNA, 17 nt, Human
augaauaaagacaccua

SEQ ID NO: 2575653 - RNA, 23 nt, Human
augaaguuuuuuuuauacaggau

SEQ ID NO: 2575654 - RNA, 15 nt, Human
augaagcuuguguau

SEQ ID NO: 2575655 - RNA, 23 nt, Human
augaagcucaccuguugcuuaca

SEQ ID NO: 2575656 - RNA, 15 nt, Human
augaauaauuuccca

SEQ ID NO: 2575657 - RNA, 14 nt, Human
augaaguaauaugc

SEQ ID NO: 2575658 - RNA, 21 nt, Human
augaaguaauaugcacacauu

SEQ ID NO: 2575659 - RNA, 23 nt, Human
augaaguaauaugcacacauuuu

SEQ ID NO: 2575660 - RNA, 13 nt, Human
augaaguacucau

SEQ ID NO: 2575661 - RNA, 13 nt, Human
augaagcuugugu

SEQ ID NO: 2575662 - RNA, 15 nt, Human
augaagcuaccucaa

SEQ ID NO: 2575663 - RNA, 14 nt, Human
augaaagaaaggcc

SEQ ID NO: 2575664 - RNA, 23 nt, Human
augaagcauuuacuuuguguuca

SEQ ID NO: 2575665 - RNA, 16 nt, Human
augaagccuuagccag

SEQ ID NO: 2575666 - RNA, 14 nt, Human
augaagcuaccuca

SEQ ID NO: 2575667 - RNA, 12 nt, Human
augaagcccaag

SEQ ID NO: 2575668 - RNA, 15 nt, Human
augaagcccaaguga

SEQ ID NO: 2575669 - RNA, 17 nt, Human
augaagcccaagugaaa

SEQ ID NO: 2575670 - RNA, 16 nt, Human
augaagcccaauaaac

SEQ ID NO: 2575671 - RNA, 23 nt, Human
augaaaccuuauuuuuucccaaa

SEQ ID NO: 2575672 - RNA, 13 nt, Human
augaaacuuggau

SEQ ID NO: 2575673 - RNA, 22 nt, Human
augaaaccuuauuuuuucccaa

SEQ ID NO: 2575674 - RNA, 12 nt, Human
augaaagacugu

SEQ ID NO: 2575675 - RNA, 23 nt, Human
augaggccacugcugcuucucca

SEQ ID NO: 2575676 - RNA, 13 nt, Human
augaccuuacauu

SEQ ID NO: 2575677 - RNA, 13 nt, Human
augaggcuugcug

SEQ ID NO: 2575678 - RNA, 23 nt, Human
augaggccucuuggaccucugcu

SEQ ID NO: 2575679 - RNA, 22 nt, Human
augaggccucuuggaccucugc

SEQ ID NO: 2575680 - RNA, 21 nt, Human
augaggccucuuggaccucug

SEQ ID NO: 2575681 - RNA, 22 nt, Human
augaggcugcuuuccaaagcca

SEQ ID NO: 2575682 - RNA, 15 nt, Human
augaggccgcuagag

SEQ ID NO: 2575683 - RNA, 21 nt, Human
augaggccgcuagaggccuga

SEQ ID NO: 2575684 - RNA, 15 nt, Human
augaggccucuugga

SEQ ID NO: 2575685 - RNA, 18 nt, Human
augaggccucaguggacu

SEQ ID NO: 2575686 - RNA, 20 nt, Human
augagcuuuauguaauaaug

SEQ ID NO: 2575687 - RNA, 22 nt, Human
augagcuuuauguaauaaugug

SEQ ID NO: 2575688 - RNA, 18 nt, Human
augagcuuuauguaauaa

SEQ ID NO: 2575689 - RNA, 13 nt, Human
augagcuggaagg

SEQ ID NO: 2575690 - RNA, 12 nt, Human
augagcugaggg

SEQ ID NO: 2575691 - RNA, 13 nt, Human
augagcugagggg

SEQ ID NO: 2575692 - RNA, 16 nt, Human
augagcucuucauguu

SEQ ID NO: 2575693 - RNA, 21 nt, Human
augagcuggaaggagugagag

SEQ ID NO: 2575694 - RNA, 19 nt, Human
augagccucagcauccugg

SEQ ID NO: 2575695 - RNA, 21 nt, Human
augagccucagcauccuggca

SEQ ID NO: 2575696 - RNA, 11 nt, Human
augagccuggc

SEQ ID NO: 2575697 - RNA, 12 nt, Human
augagccuggca

SEQ ID NO: 2575698 - RNA, 18 nt, Human
augaccuuucaauaggaa

SEQ ID NO: 2575699 - RNA, 14 nt, Human
augaccuuacauuu

SEQ ID NO: 2575700 - RNA, 15 nt, Human
augaccuuucaauag

SEQ ID NO: 2575701 - RNA, 13 nt, Human
augaccuuucaau

SEQ ID NO: 2575702 - RNA, 16 nt, Human
augaccuuacauuucc

SEQ ID NO: 2575703 - RNA, 18 nt, Human
augaccuucuaggaagcu

SEQ ID NO: 2575704 - RNA, 17 nt, Human
augaccuucuaggaagc

SEQ ID NO: 2575705 - RNA, 13 nt, Human
augcauacacaca

SEQ ID NO: 2575706 - RNA, 14 nt, Human
augcauacacacac

SEQ ID NO: 2575707 - RNA, 15 nt, Human
augcauacacacaca

SEQ ID NO: 2575708 - RNA, 17 nt, Human
augcauacacacacaca

SEQ ID NO: 2575709 - RNA, 11 nt, Human
augcauacaca

SEQ ID NO: 2575710 - RNA, 12 nt, Human
augcauacacac

SEQ ID NO: 2575711 - RNA, 10 nt, Human
augcauacac

SEQ ID NO: 2575712 - RNA, 14 nt, Human
augcauaaaugcau

SEQ ID NO: 2575713 - RNA, 13 nt, Human
augcauauuguau

SEQ ID NO: 2575714 - RNA, 21 nt, Human
augcauacuucaaaaguauuu

SEQ ID NO: 2575715 - RNA, 22 nt, Human
augcauacuucaaaaguauuuu

SEQ ID NO: 2575716 - RNA, 16 nt, Human
augcauauuguauuac

SEQ ID NO: 2575717 - RNA, 15 nt, Human
augcauauuguauua

SEQ ID NO: 2575718 - RNA, 24 nt, Human
augcauauuauuuuauguugcaua

SEQ ID NO: 2575719 - RNA, 20 nt, Human
augcauacuucaaaaguauu

SEQ ID NO: 2575720 - RNA, 18 nt, Human
augcauacuucaaaagua

SEQ ID NO: 2575721 - RNA, 17 nt, Human
augcauacuucaaaagu

SEQ ID NO: 2575722 - RNA, 16 nt, Human
augcauacuucaaaag

SEQ ID NO: 2575723 - RNA, 20 nt, Human
augcauauuauuuuauguug

SEQ ID NO: 2575724 - RNA, 22 nt, Human
augcauacacacacacacacag

SEQ ID NO: 2575725 - RNA, 23 nt, Human
augcauacacacacacacacagc

SEQ ID NO: 2575726 - RNA, 15 nt, Human
augcauacuucaaaa

SEQ ID NO: 2575727 - RNA, 19 nt, Human
augcauccuuugcacuguc

SEQ ID NO: 2575728 - RNA, 14 nt, Human
augcaucuagauua

SEQ ID NO: 2575729 - RNA, 23 nt, Human
augcauccauuccucagggacag

SEQ ID NO: 2575730 - RNA, 14 nt, Human
augcauccauuccu

SEQ ID NO: 2575731 - RNA, 17 nt, Human
augcauccauuccucag

SEQ ID NO: 2575732 - RNA, 18 nt, Human
augcauccauuccucagg

SEQ ID NO: 2575733 - RNA, 22 nt, Human
augcauccauuccucagggaca

SEQ ID NO: 2575734 - RNA, 18 nt, Human
augcaucauucuuguuaa

SEQ ID NO: 2575735 - RNA, 17 nt, Human
augcauggugccccagg

SEQ ID NO: 2575736 - RNA, 18 nt, Human
augcauggugccccagga

SEQ ID NO: 2575737 - RNA, 19 nt, Human
augcauggugccccaggac

SEQ ID NO: 2575738 - RNA, 20 nt, Human
augcauggugccccaggacc

SEQ ID NO: 2575739 - RNA, 23 nt, Human
augcauggagggcugcccuguac

SEQ ID NO: 2575740 - RNA, 16 nt, Human
augcauggaaauuccc

SEQ ID NO: 2575741 - RNA, 16 nt, Human
augcauggugccccag

SEQ ID NO: 2575742 - RNA, 19 nt, Human
augcauggugcaguugaca

SEQ ID NO: 2575743 - RNA, 21 nt, Human
augccugguggcagcugcggu

SEQ ID NO: 2575744 - RNA, 23 nt, Human
augccuguacucgcuugugcaga

SEQ ID NO: 2575745 - RNA, 21 nt, Human
augccuguacucgcuugugca

SEQ ID NO: 2575746 - RNA, 16 nt, Human
augccuguccagccug

SEQ ID NO: 2575747 - RNA, 18 nt, Human
augccugguggcagcugc

SEQ ID NO: 2575748 - RNA, 19 nt, Human
augccugguggcagcugcg

SEQ ID NO: 2575749 - RNA, 14 nt, Human
augccugguggcag

SEQ ID NO: 2575750 - RNA, 13 nt, Human
augccugguggca

SEQ ID NO: 2575751 - RNA, 23 nt, Human
augcauggugcaguugacagcag

SEQ ID NO: 2575752 - RNA, 21 nt, Human
augcauggugccccaggacca

SEQ ID NO: 2575753 - RNA, 22 nt, Human
augcauggugccccaggaccag

SEQ ID NO: 2575754 - RNA, 16 nt, Human
augcauguccuguaaa

SEQ ID NO: 2575755 - RNA, 12 nt, Human
augccugguggc

SEQ ID NO: 2575756 - RNA, 11 nt, Human
augccuggugg

SEQ ID NO: 2575757 - RNA, 22 nt, Human
augcuucuucagagacuccugc

SEQ ID NO: 2575758 - RNA, 14 nt, Human
augcucuucugugg

SEQ ID NO: 2575759 - RNA, 21 nt, Human
augcuuuaggauguacaguua

SEQ ID NO: 2575760 - RNA, 20 nt, Human
augcuucuucagagacuccu

SEQ ID NO: 2575761 - RNA, 17 nt, Human
augcuucuucagagacu

SEQ ID NO: 2575762 - RNA, 14 nt, Human
augcuucuucagag

SEQ ID NO: 2575763 - RNA, 18 nt, Human
augcucugcauguuacau

SEQ ID NO: 2575764 - RNA, 19 nt, Human
augcucugcauguuacaua

SEQ ID NO: 2575765 - RNA, 16 nt, Human
augcucuuagaaaauu

SEQ ID NO: 2575766 - RNA, 13 nt, Human
augcucuucugug

SEQ ID NO: 2575767 - RNA, 23 nt, Human
augcucugugcgaggguuacuau

SEQ ID NO: 2575768 - RNA, 11 nt, Human
auggagccagc

SEQ ID NO: 2575769 - RNA, 23 nt, Human
auggagagcuggagccuggugcc

SEQ ID NO: 2575770 - RNA, 20 nt, Human
auggagauucaguuuucauu

SEQ ID NO: 2575771 - RNA, 22 nt, Human
auggagugacggucccacacug

SEQ ID NO: 2575772 - RNA, 11 nt, Human
auggagugacg

SEQ ID NO: 2575773 - RNA, 15 nt, Human
auggagccagcuccc

SEQ ID NO: 2575774 - RNA, 18 nt, Human
auggagccagcucccucu

SEQ ID NO: 2575775 - RNA, 13 nt, Human
auggagagcugga

SEQ ID NO: 2575776 - RNA, 19 nt, Human
auggagauucaguuuucau

SEQ ID NO: 2575777 - RNA, 23 nt, Human
auggagauagccccacaggaggu

SEQ ID NO: 2575778 - RNA, 20 nt, Human
auggagagcuagaacccggc

SEQ ID NO: 2575779 - RNA, 13 nt, Human
auggagagagggg

SEQ ID NO: 2575780 - RNA, 14 nt, Human
auggagagagggga

SEQ ID NO: 2575781 - RNA, 15 nt, Human
auggagagaggggaa

SEQ ID NO: 2575782 - RNA, 17 nt, Human
auggagagaggggaaua

SEQ ID NO: 2575783 - RNA, 21 nt, Human
augcuuugaaguacaauugug

SEQ ID NO: 2575784 - RNA, 18 nt, Human
auggagagaaaacagacc

SEQ ID NO: 2575785 - RNA, 16 nt, Human
augcuuugaucccuuc

SEQ ID NO: 2575786 - RNA, 21 nt, Human
augcuuucagauuaaaauugu

SEQ ID NO: 2575787 - RNA, 15 nt, Human
augcuuuccaaaacc

SEQ ID NO: 2575788 - RNA, 23 nt, Human
auggcuuccuggcaauagucaaa

SEQ ID NO: 2575789 - RNA, 14 nt, Human
auggcuucuaacaa

SEQ ID NO: 2575790 - RNA, 17 nt, Human
auggcuuccuccucccu

SEQ ID NO: 2575791 - RNA, 18 nt, Human
auggcuugccacagcucu

SEQ ID NO: 2575792 - RNA, 14 nt, Human
augggaaaagagau

SEQ ID NO: 2575793 - RNA, 19 nt, Human
auggaguggcaauauagaa

SEQ ID NO: 2575794 - RNA, 16 nt, Human
auggaguguacaagua

SEQ ID NO: 2575795 - RNA, 19 nt, Human
auggcuuccuccucccucc

SEQ ID NO: 2575796 - RNA, 21 nt, Human
auggaguuaacgggugaauaa

SEQ ID NO: 2575797 - RNA, 17 nt, Human
auggaguuaacggguga

SEQ ID NO: 2575798 - RNA, 15 nt, Human
auggaguucuugugc

SEQ ID NO: 2575799 - RNA, 18 nt, Human
auggaguguguauuguuc

SEQ ID NO: 2575800 - RNA, 21 nt, Human
auggaguguguauuguuccca

SEQ ID NO: 2575801 - RNA, 13 nt, Human
auggagagaaaac

SEQ ID NO: 2575802 - RNA, 14 nt, Human
augggaaagcauug

SEQ ID NO: 2575803 - RNA, 20 nt, Human
augggaaagcauuguaaaug

SEQ ID NO: 2575804 - RNA, 18 nt, Human
augggaaagccaccucuc

SEQ ID NO: 2575805 - RNA, 17 nt, Human
augggaaagccaccucu

SEQ ID NO: 2575806 - RNA, 23 nt, Human
augggaaagccaccucucccuca

SEQ ID NO: 2575807 - RNA, 13 nt, Human
augggaaaguauu

SEQ ID NO: 2575808 - RNA, 17 nt, Human
augggaaugagguggga

SEQ ID NO: 2575809 - RNA, 21 nt, Human
augggaaaguauucuguacuc

SEQ ID NO: 2575810 - RNA, 20 nt, Human
augggacauuugcucaugga

SEQ ID NO: 2575811 - RNA, 15 nt, Human
augggacagggagga

SEQ ID NO: 2575812 - RNA, 14 nt, Human
augggaauugugug

SEQ ID NO: 2575813 - RNA, 18 nt, Human
augggaaugaggugggag

SEQ ID NO: 2575814 - RNA, 15 nt, Human
augggaauuguguga

SEQ ID NO: 2575815 - RNA, 14 nt, Human
aucaaaagaaagaa

SEQ ID NO: 2575816 - RNA, 21 nt, Human
aucaaaacuuucuuuucugga

SEQ ID NO: 2575817 - RNA, 15 nt, Human
aucaaaacuuucuuu

SEQ ID NO: 2575818 - RNA, 16 nt, Human
aucaaaaauauuccau

SEQ ID NO: 2575819 - RNA, 15 nt, Human
auauuuuuuuguaga

SEQ ID NO: 2575820 - RNA, 18 nt, Human
auauuuuuuucuuuucuu

SEQ ID NO: 2575821 - RNA, 23 nt, Human
aucaaaagacaauucuuuauaca

SEQ ID NO: 2575822 - RNA, 21 nt, Human
aucaaaagacaauucuuuaua

SEQ ID NO: 2575823 - RNA, 24 nt, Human
aucaaaagguuaauaaaguaauua

SEQ ID NO: 2575824 - RNA, 22 nt, Human
aucaaacccggcgguccccucc

SEQ ID NO: 2575825 - RNA, 19 nt, Human
aucaaaagacaauucuuua

SEQ ID NO: 2575826 - RNA, 18 nt, Human
aucaaaagacaauucuuu

SEQ ID NO: 2575827 - RNA, 17 nt, Human
aucaaaagacaauucuu

SEQ ID NO: 2575828 - RNA, 16 nt, Human
aucaaaagacaauucu

SEQ ID NO: 2575829 - RNA, 15 nt, Human
aucaaaagacaauuc

SEQ ID NO: 2575830 - RNA, 14 nt, Human
aucaaaagacaauu

SEQ ID NO: 2575831 - RNA, 13 nt, Human
aucaaaagacaau

SEQ ID NO: 2575832 - RNA, 21 nt, Human
aucaaaaccuuucaaauauca

SEQ ID NO: 2575833 - RNA, 20 nt, Human
aucaaaagguuaauaaagua

SEQ ID NO: 2575834 - RNA, 18 nt, Human
aucaaagagagaaaauaa

SEQ ID NO: 2575835 - RNA, 12 nt, Human
aucaaaggacac

SEQ ID NO: 2575836 - RNA, 17 nt, Human
aucaaacugaagccaga

SEQ ID NO: 2575837 - RNA, 21 nt, Human
aucaaaggaaaauaguaaugu

SEQ ID NO: 2575838 - RNA, 19 nt, Human
aucaaagagguuuuaaaaa

SEQ ID NO: 2575839 - RNA, 14 nt, Human
aucaaacugaagcc

SEQ ID NO: 2575840 - RNA, 15 nt, Human
aucaaacugaagcca

SEQ ID NO: 2575841 - RNA, 16 nt, Human
aucaaacugaagccag

SEQ ID NO: 2575842 - RNA, 14 nt, Human
auagcacagacccu

SEQ ID NO: 2575843 - RNA, 19 nt, Human
auagcaagacacaucccua

SEQ ID NO: 2575844 - RNA, 17 nt, Human
auagcaagauugcuuaa

SEQ ID NO: 2575845 - RNA, 13 nt, Human
auagcaagugaau

SEQ ID NO: 2575846 - RNA, 19 nt, Human
auagcaagugaauuuuucu

SEQ ID NO: 2575847 - RNA, 22 nt, Human
auagcaagugaauuuuucucua

SEQ ID NO: 2575848 - RNA, 23 nt, Human
auagcaaauguuuugacaugaaa

SEQ ID NO: 2575849 - RNA, 22 nt, Human
auagcaauccauguuaguuuuu

SEQ ID NO: 2575850 - RNA, 22 nt, Human
aucuaggaagacuuuggaaaga

SEQ ID NO: 2575851 - RNA, 20 nt, Human
auccccauccuccagcuucu

SEQ ID NO: 2575852 - RNA, 15 nt, Human
auccccauccuccag

SEQ ID NO: 2575853 - RNA, 19 nt, Human
auccagggcucugaccagu

SEQ ID NO: 2575854 - RNA, 21 nt, Human
auccccaguaaaauugccaua

SEQ ID NO: 2575855 - RNA, 15 nt, Human
auccccaguaaaauu

SEQ ID NO: 2575856 - RNA, 18 nt, Human
auccagggaugccaucug

SEQ ID NO: 2575857 - RNA, 17 nt, Human
auccccccaucuugcuu

SEQ ID NO: 2575858 - RNA, 15 nt, Human
auccccccaucuugc

SEQ ID NO: 2575859 - RNA, 12 nt, Human
aucccccagccu

SEQ ID NO: 2575860 - RNA, 12 nt, Human
aucccccagacu

SEQ ID NO: 2575861 - RNA, 13 nt, Human
aucccccugcccu

SEQ ID NO: 2575862 - RNA, 12 nt, Human
aucccccugccc

SEQ ID NO: 2575863 - RNA, 14 nt, Human
auccccccucacca

SEQ ID NO: 2575864 - RNA, 17 nt, Human
auccccauccuccagcu

SEQ ID NO: 2575865 - RNA, 20 nt, Human
auccccccaucuugcuuccc

SEQ ID NO: 2575866 - RNA, 19 nt, Human
aucccccccaccucucccu

SEQ ID NO: 2575867 - RNA, 12 nt, Human
auccuugaagau

SEQ ID NO: 2575868 - RNA, 13 nt, Human
auccuucugccuu

SEQ ID NO: 2575869 - RNA, 11 nt, Human
auccuucugcc

SEQ ID NO: 2575870 - RNA, 22 nt, Human
auccuucuaguuucccacaaua

SEQ ID NO: 2575871 - RNA, 19 nt, Human
auccuucuaguuucccaca

SEQ ID NO: 2575872 - RNA, 17 nt, Human
auccuucuaguuuccca

SEQ ID NO: 2575873 - RNA, 13 nt, Human
auccuucuaguuu

SEQ ID NO: 2575874 - RNA, 12 nt, Human
auccuucuaguu

SEQ ID NO: 2575875 - RNA, 22 nt, Human
auccuuccuucccacccaucgc

SEQ ID NO: 2575876 - RNA, 16 nt, Human
auccuuccuucccacc

SEQ ID NO: 2575877 - RNA, 14 nt, Human
auccuuccuuccca

SEQ ID NO: 2575878 - RNA, 13 nt, Human
auccuuccuccca

SEQ ID NO: 2575879 - RNA, 11 nt, Human
auccuuccucc

SEQ ID NO: 2575880 - RNA, 18 nt, Human
aucccccuugccacccca

SEQ ID NO: 2575881 - RNA, 14 nt, Human
aucccccuugccac

SEQ ID NO: 2575882 - RNA, 15 nt, Human
aucccccugcccucg

SEQ ID NO: 2575883 - RNA, 14 nt, Human
aucccccugcccuc

SEQ ID NO: 2575884 - RNA, 17 nt, Human
auccuuccucacaccag

SEQ ID NO: 2575885 - RNA, 18 nt, Human
aucgaaucuacuaauucc

SEQ ID NO: 2575886 - RNA, 20 nt, Human
aucgaaucuacuaauuccac

SEQ ID NO: 2575887 - RNA, 14 nt, Human
aucgaccugccucg

SEQ ID NO: 2575888 - RNA, 21 nt, Human
aucgacuuguuuuugcacaug

SEQ ID NO: 2575889 - RNA, 23 nt, Human
aucgaaauaacaauguuaaggaa

SEQ ID NO: 2575890 - RNA, 19 nt, Human
aucgaaauaacaauguuaa

SEQ ID NO: 2575891 - RNA, 18 nt, Human
aucgaaauaacaauguua

SEQ ID NO: 2575892 - RNA, 17 nt, Human
aucgaaauaacaauguu

SEQ ID NO: 2575893 - RNA, 13 nt, Human
aucgaaauaacaa

SEQ ID NO: 2575894 - RNA, 22 nt, Human
aucgaaauaacaauguuaagga

SEQ ID NO: 2575895 - RNA, 20 nt, Human
aucgaaauaacaauguuaag

SEQ ID NO: 2575896 - RNA, 15 nt, Human
aucgaaccguuuuga

SEQ ID NO: 2575897 - RNA, 18 nt, Human
auccuuuuucuuuauaaa

SEQ ID NO: 2575898 - RNA, 12 nt, Human
auccagggacag

SEQ ID NO: 2575899 - RNA, 13 nt, Human
auccagggacaga

SEQ ID NO: 2575900 - RNA, 14 nt, Human
auccagggacagag

SEQ ID NO: 2575901 - RNA, 16 nt, Human
auccagggacagaggc

SEQ ID NO: 2575902 - RNA, 19 nt, Human
auccagggacagaggcccc

SEQ ID NO: 2575903 - RNA, 20 nt, Human
auccagggacagaggcccca

SEQ ID NO: 2575904 - RNA, 21 nt, Human
auccagggacagaggccccag

SEQ ID NO: 2575905 - RNA, 17 nt, Human
auccagccuggggucug

SEQ ID NO: 2575906 - RNA, 22 nt, Human
auccaggcagauccaggacuau

SEQ ID NO: 2575907 - RNA, 19 nt, Human
auccaggcagauccaggac

SEQ ID NO: 2575908 - RNA, 24 nt, Human
auccaggcagucgggggcuggccu

SEQ ID NO: 2575909 - RNA, 21 nt, Human
auccagccucuccccugauua

SEQ ID NO: 2575910 - RNA, 17 nt, Human
auccagccucuccccug

SEQ ID NO: 2575911 - RNA, 16 nt, Human
auccagccucuccccu

SEQ ID NO: 2575912 - RNA, 12 nt, Human
auccagccuggg

SEQ ID NO: 2575913 - RNA, 21 nt, Human
auccagcccugaguuccuagc

SEQ ID NO: 2575914 - RNA, 14 nt, Human
auccagccucuccc

SEQ ID NO: 2575915 - RNA, 19 nt, Human
auccagccggaggccagag

SEQ ID NO: 2575916 - RNA, 20 nt, Human
auccagaucauuccucagaa

SEQ ID NO: 2575917 - RNA, 12 nt, Human
auccacuuugca

SEQ ID NO: 2575918 - RNA, 22 nt, Human
auccagaguuuagaggaaaaaa

SEQ ID NO: 2575919 - RNA, 20 nt, Human
auccagauacacccaaagua

SEQ ID NO: 2575920 - RNA, 21 nt, Human
auccacugugccaugugccag

SEQ ID NO: 2575921 - RNA, 22 nt, Human
auccacucuacccucccacccc

SEQ ID NO: 2575922 - RNA, 23 nt, Human
auccacucuacccucccaccccc

SEQ ID NO: 2575923 - RNA, 23 nt, Human
auccacuuuaucuugaauaaugu

SEQ ID NO: 2575924 - RNA, 19 nt, Human
auccacucugccugcuuac

SEQ ID NO: 2575925 - RNA, 18 nt, Human
aucauccuuuccagcaug

SEQ ID NO: 2575926 - RNA, 13 nt, Human
aucauccuuucca

SEQ ID NO: 2575927 - RNA, 14 nt, Human
aucaucccagcugc

SEQ ID NO: 2575928 - RNA, 11 nt, Human
aucaaauacuu

SEQ ID NO: 2575929 - RNA, 12 nt, Human
aucauccuacug

SEQ ID NO: 2575930 - RNA, 21 nt, Human
aucaugaauuaguuuuauaug

SEQ ID NO: 2575931 - RNA, 20 nt, Human
aucaugacaaagacugagua

SEQ ID NO: 2575932 - RNA, 18 nt, Human
aucaaaguaggcaggacc

SEQ ID NO: 2575933 - RNA, 14 nt, Human
aucauccagaaguu

SEQ ID NO: 2575934 - RNA, 15 nt, Human
aucauccuaagcuau

SEQ ID NO: 2575935 - RNA, 20 nt, Human
aucauggaaugguuauaaaa

SEQ ID NO: 2575936 - RNA, 19 nt, Human
aucauggaaugguuauaaa

SEQ ID NO: 2575937 - RNA, 12 nt, Human
aucaugcccugu

SEQ ID NO: 2575938 - RNA, 22 nt, Human
aucaugcauuguugaggugguc

SEQ ID NO: 2575939 - RNA, 12 nt, Human
aucaugcauugu

SEQ ID NO: 2575940 - RNA, 13 nt, Human
aucaugcauuguu

SEQ ID NO: 2575941 - RNA, 14 nt, Human
aucaugcauuguug

SEQ ID NO: 2575942 - RNA, 21 nt, Human
aucaugcauuguugagguggu

SEQ ID NO: 2575943 - RNA, 21 nt, Human
aucaugcauguccuguaaagg

SEQ ID NO: 2575944 - RNA, 22 nt, Human
aucaugcaucuuacugaaggua

SEQ ID NO: 2575945 - RNA, 19 nt, Human
aucaugcaaaugcuguauu

SEQ ID NO: 2575946 - RNA, 16 nt, Human
aucauccuuuccagca

SEQ ID NO: 2575947 - RNA, 16 nt, Human
aucaucuauaaagaag

SEQ ID NO: 2575948 - RNA, 13 nt, Human
aucaugacauguu

SEQ ID NO: 2575949 - RNA, 23 nt, Human
aucaugagugaauaaaugucuug

SEQ ID NO: 2575950 - RNA, 18 nt, Human
aucaugacauguuauaua

SEQ ID NO: 2575951 - RNA, 16 nt, Human
aucaugacauguuaua

SEQ ID NO: 2575952 - RNA, 20 nt, Human
agauauaagugcuguauaaa

SEQ ID NO: 2575953 - RNA, 18 nt, Human
agauauaagugcuguaua

SEQ ID NO: 2575954 - RNA, 17 nt, Human
agauauaagugcuguau

SEQ ID NO: 2575955 - RNA, 16 nt, Human
agauauaagugcugua

SEQ ID NO: 2575956 - RNA, 22 nt, Human
agauauaagugcuguauaaaau

SEQ ID NO: 2575957 - RNA, 21 nt, Human
agauauaagugcuguauaaaa

SEQ ID NO: 2575958 - RNA, 23 nt, Human
agauauaagugcuguauaaaauc

SEQ ID NO: 2575959 - RNA, 13 nt, Human
agauauauaucau

SEQ ID NO: 2575960 - RNA, 17 nt, Human
agauaucugagggagga

SEQ ID NO: 2575961 - RNA, 21 nt, Human
agauaucugagggaggaggcc

SEQ ID NO: 2575962 - RNA, 17 nt, Human
agauaucuugaaaugaa

SEQ ID NO: 2575963 - RNA, 18 nt, Human
agauaugaacauauuguu

SEQ ID NO: 2575964 - RNA, 15 nt, Human
agauaugaguuguuu

SEQ ID NO: 2575965 - RNA, 16 nt, Human
agauaugauauguaaa

SEQ ID NO: 2575966 - RNA, 17 nt, Human
agauaugauauguaaac

SEQ ID NO: 2575967 - RNA, 20 nt, Human
agagggguacauuucccugu

SEQ ID NO: 2575968 - RNA, 23 nt, Human
agaggggguggccucccaacuca

SEQ ID NO: 2575969 - RNA, 22 nt, Human
agagggucuggagaagcaguga

SEQ ID NO: 2575970 - RNA, 12 nt, Human
agaguggccugg

SEQ ID NO: 2575971 - RNA, 13 nt, Human
agaguggccuggc

SEQ ID NO: 2575972 - RNA, 14 nt, Human
agaguggccuggcc

SEQ ID NO: 2575973 - RNA, 15 nt, Human
agaguggccuggcca

SEQ ID NO: 2575974 - RNA, 16 nt, Human
agaguggccuggccag

SEQ ID NO: 2575975 - RNA, 16 nt, Human
agagggguggagacug

SEQ ID NO: 2575976 - RNA, 19 nt, Human
agagggguacauuucccug

SEQ ID NO: 2575977 - RNA, 19 nt, Human
agagggguggagacugcuu

SEQ ID NO: 2575978 - RNA, 22 nt, Human
agagggugacaagauagagagc

SEQ ID NO: 2575979 - RNA, 18 nt, Human
agagggucuggagaagca

SEQ ID NO: 2575980 - RNA, 20 nt, Human
agagggucugaggaauccag

SEQ ID NO: 2575981 - RNA, 14 nt, Human
agaguggcuccucc

SEQ ID NO: 2575982 - RNA, 13 nt, Human
agaguggcuccuc

SEQ ID NO: 2575983 - RNA, 12 nt, Human
agaguggcuccu

SEQ ID NO: 2575984 - RNA, 17 nt, Human
agaguggccuggccagg

SEQ ID NO: 2575985 - RNA, 19 nt, Human
agaguggccuggccaggag

SEQ ID NO: 2575986 - RNA, 20 nt, Human
agagugggggagagcaggcu

SEQ ID NO: 2575987 - RNA, 18 nt, Human
agagugggggagagcagg

SEQ ID NO: 2575988 - RNA, 22 nt, Human
agaguggccuggccaggagcuc

SEQ ID NO: 2575989 - RNA, 19 nt, Human
agagugggguagguuggga

SEQ ID NO: 2575990 - RNA, 22 nt, Human
agagugggggagagcaggcugg

SEQ ID NO: 2575991 - RNA, 16 nt, Human
agaguggguuucacaa

SEQ ID NO: 2575992 - RNA, 15 nt, Human
agaguugaagacaga

SEQ ID NO: 2575993 - RNA, 14 nt, Human
agaguugaagacag

SEQ ID NO: 2575994 - RNA, 13 nt, Human
agauagaauuucc

SEQ ID NO: 2575995 - RNA, 16 nt, Human
agauagaauuuccaau

SEQ ID NO: 2575996 - RNA, 14 nt, Human
agauagagagcuau

SEQ ID NO: 2575997 - RNA, 13 nt, Human
agaguugagcucu

SEQ ID NO: 2575998 - RNA, 13 nt, Human
agauagaagaacu

SEQ ID NO: 2575999 - RNA, 14 nt, Human
agauagaagaacug

SEQ ID NO: 2576000 - RNA, 15 nt, Human
agauagaagaacugc

SEQ ID NO: 2576001 - RNA, 16 nt, Human
agauagaagaacugca

SEQ ID NO: 2576002 - RNA, 22 nt, Human
agaguguagaagcauuccuucu

SEQ ID NO: 2576003 - RNA, 12 nt, Human
agaguugaaccu

SEQ ID NO: 2576004 - RNA, 13 nt, Human
agaguugaaccua

SEQ ID NO: 2576005 - RNA, 13 nt, Human
agaguugaagaca

SEQ ID NO: 2576006 - RNA, 18 nt, Human
agaguguagaucagagca

SEQ ID NO: 2576007 - RNA, 18 nt, Human
agaguguagaagcauucc

SEQ ID NO: 2576008 - RNA, 17 nt, Human
agaguguagaagcauuc

SEQ ID NO: 2576009 - RNA, 16 nt, Human
agaguguagaagcauu

SEQ ID NO: 2576010 - RNA, 15 nt, Human
agaguguagaagcau

SEQ ID NO: 2576011 - RNA, 14 nt, Human
agaguguagaagca

SEQ ID NO: 2576012 - RNA, 13 nt, Human
agaguguagaagc

SEQ ID NO: 2576013 - RNA, 12 nt, Human
agaguguagaag

SEQ ID NO: 2576014 - RNA, 18 nt, Human
agagugguauuugcagac

SEQ ID NO: 2576015 - RNA, 15 nt, Human
agagugguauuugca

SEQ ID NO: 2576016 - RNA, 18 nt, Human
agaguggucuuucuggag

SEQ ID NO: 2576017 - RNA, 19 nt, Human
agauagccccacaggaggu

SEQ ID NO: 2576018 - RNA, 20 nt, Human
agauagccaaggccaaagga

SEQ ID NO: 2576019 - RNA, 20 nt, Human
agauagauaggucagugcaa

SEQ ID NO: 2576020 - RNA, 13 nt, Human
agauaggcucugc

SEQ ID NO: 2576021 - RNA, 14 nt, Human
agauaggcucugca

SEQ ID NO: 2576022 - RNA, 16 nt, Human
agauaggcucugcaca

SEQ ID NO: 2576023 - RNA, 15 nt, Human
agauauaagugcugu

SEQ ID NO: 2576024 - RNA, 13 nt, Human
agauauaagugcu

SEQ ID NO: 2576025 - RNA, 20 nt, Human
agauauaacuauugcccagg

SEQ ID NO: 2576026 - RNA, 17 nt, Human
agauauaaauggcuggu

SEQ ID NO: 2576027 - RNA, 15 nt, Human
agauauaaauggcug

SEQ ID NO: 2576028 - RNA, 23 nt, Human
agauaguuuugccagaacaguuu

SEQ ID NO: 2576029 - RNA, 21 nt, Human
agauaggcucugcacagaugg

SEQ ID NO: 2576030 - RNA, 22 nt, Human
agauaggcucugcacagaugga

SEQ ID NO: 2576031 - RNA, 15 nt, Human
agauauaaaagacug

SEQ ID NO: 2576032 - RNA, 13 nt, Human
agcaaacucugcu

SEQ ID NO: 2576033 - RNA, 23 nt, Human
agcaaaaugugaaugggaaaaga

SEQ ID NO: 2576034 - RNA, 15 nt, Human
agcaaaaugugaaug

SEQ ID NO: 2576035 - RNA, 14 nt, Human
agcaaaaugugaau

SEQ ID NO: 2576036 - RNA, 23 nt, Human
agcaaaauugauguguuuauuua

SEQ ID NO: 2576037 - RNA, 23 nt, Human
agcaaaauuuuuucucuaggaaa

SEQ ID NO: 2576038 - RNA, 15 nt, Human
agcaaacucugcugu

SEQ ID NO: 2576039 - RNA, 14 nt, Human
agcaaacucugcug

SEQ ID NO: 2576040 - RNA, 13 nt, Human
agcaaacucuuuu

SEQ ID NO: 2576041 - RNA, 17 nt, Human
agcaaacucuuuuccca

SEQ ID NO: 2576042 - RNA, 13 nt, Human
agcaaacuuggaa

SEQ ID NO: 2576043 - RNA, 16 nt, Human
agcaaagagugggcug

SEQ ID NO: 2576044 - RNA, 12 nt, Human
agcaaagagugg

SEQ ID NO: 2576045 - RNA, 17 nt, Human
agcaaagaucaaaauaa

SEQ ID NO: 2576046 - RNA, 15 nt, Human
agcaaagaucaaaau

SEQ ID NO: 2576047 - RNA, 14 nt, Human
agcaaagaucaaaa

SEQ ID NO: 2576048 - RNA, 13 nt, Human
agcaaagaucaaa

SEQ ID NO: 2576049 - RNA, 12 nt, Human
agcaaagaucaa

SEQ ID NO: 2576050 - RNA, 22 nt, Human
agcaaagagugggcugcaucug

SEQ ID NO: 2576051 - RNA, 20 nt, Human
agcaaagauaucucaucucu

SEQ ID NO: 2576052 - RNA, 15 nt, Human
agcaaagcaccagcu

SEQ ID NO: 2576053 - RNA, 22 nt, Human
agcaaagcaccagcuucuccag

SEQ ID NO: 2576054 - RNA, 20 nt, Human
agcaaagucuaaaguuuaca

SEQ ID NO: 2576055 - RNA, 15 nt, Human
agcaaagucuaaagu

SEQ ID NO: 2576056 - RNA, 14 nt, Human
agcaaagucuaaag

SEQ ID NO: 2576057 - RNA, 19 nt, Human
agcaaaggcugagaacacu

SEQ ID NO: 2576058 - RNA, 23 nt, Human
agcaaaggaguagaaagacagag

SEQ ID NO: 2576059 - RNA, 19 nt, Human
agcaaagccccaugcugga

SEQ ID NO: 2576060 - RNA, 11 nt, Human
agcaaauacau

SEQ ID NO: 2576061 - RNA, 23 nt, Human
agcaaagucuaaaguuuacagua

SEQ ID NO: 2576062 - RNA, 22 nt, Human
agcaaagucuaaaguuuacagu

SEQ ID NO: 2576063 - RNA, 19 nt, Human
agcaaauaaacuaggaaau

SEQ ID NO: 2576064 - RNA, 16 nt, Human
agcaaauuaauuggca

SEQ ID NO: 2576065 - RNA, 15 nt, Human
agcaaauuaauuggc

SEQ ID NO: 2576066 - RNA, 18 nt, Human
agcaaauguuucugcagu

SEQ ID NO: 2576067 - RNA, 17 nt, Human
agcaaauguuucugcag

SEQ ID NO: 2576068 - RNA, 16 nt, Human
agcaaauguuucugca

SEQ ID NO: 2576069 - RNA, 14 nt, Human
agcaaauguuucug

SEQ ID NO: 2576070 - RNA, 13 nt, Human
agcaaauguuucu

SEQ ID NO: 2576071 - RNA, 19 nt, Human
agcaaauucuguuuuucua

SEQ ID NO: 2576072 - RNA, 16 nt, Human
agcaaaucagaaacuu

SEQ ID NO: 2576073 - RNA, 17 nt, Human
agcaaauguuaugcaua

SEQ ID NO: 2576074 - RNA, 20 nt, Human
agcaaaucagaaacuuguga

SEQ ID NO: 2576075 - RNA, 12 nt, Human
agcaaauuuggg

SEQ ID NO: 2576076 - RNA, 11 nt, Human
agcaaauugau

SEQ ID NO: 2576077 - RNA, 22 nt, Human
agcaaauuaauuggcagcagau

SEQ ID NO: 2576078 - RNA, 21 nt, Human
agcaaauuaauuggcagcaga

SEQ ID NO: 2576079 - RNA, 19 nt, Human
agcaaauuaauuggcagca

SEQ ID NO: 2576080 - RNA, 13 nt, Human
agcaaacuaagcc

SEQ ID NO: 2576081 - RNA, 19 nt, Human
agcaaaauugauguguuua

SEQ ID NO: 2576082 - RNA, 13 nt, Human
agcaaaauugaug

SEQ ID NO: 2576083 - RNA, 14 nt, Human
agcaaaaucauuuu

SEQ ID NO: 2576084 - RNA, 14 nt, Human
agauugcugaaauu

SEQ ID NO: 2576085 - RNA, 15 nt, Human
agcaaaaucauuuua

SEQ ID NO: 2576086 - RNA, 13 nt, Human
agauugcauguga

SEQ ID NO: 2576087 - RNA, 15 nt, Human
agauugcaugugacu

SEQ ID NO: 2576088 - RNA, 16 nt, Human
agauugcaugugacuc

SEQ ID NO: 2576089 - RNA, 18 nt, Human
agauugcaugugacucug

SEQ ID NO: 2576090 - RNA, 19 nt, Human
agauugcaugugacucuga

SEQ ID NO: 2576091 - RNA, 23 nt, Human
agauugcaugugacucugaagcu

SEQ ID NO: 2576092 - RNA, 13 nt, Human
agauugcugaaau

SEQ ID NO: 2576093 - RNA, 22 nt, Human
agauugcaugugacucugaagc

SEQ ID NO: 2576094 - RNA, 21 nt, Human
agauugcgccauugcacucca

SEQ ID NO: 2576095 - RNA, 19 nt, Human
agauugcaacaggcugggc

SEQ ID NO: 2576096 - RNA, 17 nt, Human
agauugcaacaggcugg

SEQ ID NO: 2576097 - RNA, 16 nt, Human
agauugcaccacugca

SEQ ID NO: 2576098 - RNA, 16 nt, Human
agauucuuuccugagg

SEQ ID NO: 2576099 - RNA, 15 nt, Human
agauucuuuccugag

SEQ ID NO: 2576100 - RNA, 17 nt, Human
agauugacgacaagugc

SEQ ID NO: 2576101 - RNA, 18 nt, Human
agauucuuuccugaggcu

SEQ ID NO: 2576102 - RNA, 19 nt, Human
agauugagaaggagagaaa

SEQ ID NO: 2576103 - RNA, 18 nt, Human
agauugagaaggagagaa

SEQ ID NO: 2576104 - RNA, 17 nt, Human
agauugagaaggagaga

SEQ ID NO: 2576105 - RNA, 16 nt, Human
agauugagaaggagag

SEQ ID NO: 2576106 - RNA, 15 nt, Human
agauugacgacaagu

SEQ ID NO: 2576107 - RNA, 15 nt, Human
agauugagaaggaga

SEQ ID NO: 2576108 - RNA, 18 nt, Human
agauugagagaagagaca

SEQ ID NO: 2576109 - RNA, 19 nt, Human
agauugagagaagagacaa

SEQ ID NO: 2576110 - RNA, 22 nt, Human
agauugagaaguuuuguacaga

SEQ ID NO: 2576111 - RNA, 17 nt, Human
agauugagauguguuca

SEQ ID NO: 2576112 - RNA, 16 nt, Human
agauugcaacaggcug

SEQ ID NO: 2576113 - RNA, 22 nt, Human
agauugaggccugcccucaggg

SEQ ID NO: 2576114 - RNA, 19 nt, Human
agauugaggccugcccuca

SEQ ID NO: 2576115 - RNA, 13 nt, Human
agauugaggccug

SEQ ID NO: 2576116 - RNA, 18 nt, Human
agaugaaucaaugggaaa

SEQ ID NO: 2576117 - RNA, 13 nt, Human
agaugaaucaaug

SEQ ID NO: 2576118 - RNA, 23 nt, Human
agaucugacaugauuccuuccug

SEQ ID NO: 2576119 - RNA, 16 nt, Human
agaugaaugccgugga

SEQ ID NO: 2576120 - RNA, 18 nt, Human
agaugacaucugucuagg

SEQ ID NO: 2576121 - RNA, 22 nt, Human
agaugacauugcuaagaugcuc

SEQ ID NO: 2576122 - RNA, 21 nt, Human
agaugacauugcuaagaugcu

SEQ ID NO: 2576123 - RNA, 15 nt, Human
agaugacauugcuaa

SEQ ID NO: 2576124 - RNA, 11 nt, Human
agaugacaaaa

SEQ ID NO: 2576125 - RNA, 20 nt, Human
agauggcugugccucugccu

SEQ ID NO: 2576126 - RNA, 19 nt, Human
agauggcugugccucugcc

SEQ ID NO: 2576127 - RNA, 18 nt, Human
agauggcugugccucugc

SEQ ID NO: 2576128 - RNA, 17 nt, Human
agauggcugugccucug

SEQ ID NO: 2576129 - RNA, 19 nt, Human
agauggggucuguaaaauc

SEQ ID NO: 2576130 - RNA, 18 nt, Human
agauggggucuguaaaau

SEQ ID NO: 2576131 - RNA, 16 nt, Human
agauggggucuguaaa

SEQ ID NO: 2576132 - RNA, 22 nt, Human
agauggcugugccucugccugu

SEQ ID NO: 2576133 - RNA, 21 nt, Human
agauggcugugccucugccug

SEQ ID NO: 2576134 - RNA, 14 nt, Human
agauucuuuccuga

SEQ ID NO: 2576135 - RNA, 12 nt, Human
agauucuuuccc

SEQ ID NO: 2576136 - RNA, 19 nt, Human
agauucuacauauucuuua

SEQ ID NO: 2576137 - RNA, 23 nt, Human
agaugggucuggcugagcugaac

SEQ ID NO: 2576138 - RNA, 22 nt, Human
agaugggugcuuggaggaagga

SEQ ID NO: 2576139 - RNA, 20 nt, Human
agaugggugcuuggaggaag

SEQ ID NO: 2576140 - RNA, 22 nt, Human
agaugggucuggcugagcugaa

SEQ ID NO: 2576141 - RNA, 21 nt, Human
agaugggucuggcugagcuga

SEQ ID NO: 2576142 - RNA, 19 nt, Human
agaugggucuggcugagcu

SEQ ID NO: 2576143 - RNA, 17 nt, Human
agaugggucuggcugag

SEQ ID NO: 2576144 - RNA, 21 nt, Human
agaucugcagggggugugucu

SEQ ID NO: 2576145 - RNA, 21 nt, Human
agaucugacaugauuccuucc

SEQ ID NO: 2576146 - RNA, 23 nt, Human
agaucucugcuuuggaaaucaca

SEQ ID NO: 2576147 - RNA, 18 nt, Human
agaucucugcuuuggaaa

SEQ ID NO: 2576148 - RNA, 18 nt, Human
agcacugauuucacaaca

SEQ ID NO: 2576149 - RNA, 17 nt, Human
agcacugauuucacaac

SEQ ID NO: 2576150 - RNA, 13 nt, Human
agcacugauuuca

SEQ ID NO: 2576151 - RNA, 21 nt, Human
agcacugaggaagaacggggc

SEQ ID NO: 2576152 - RNA, 16 nt, Human
agcagccuggacccug

SEQ ID NO: 2576153 - RNA, 19 nt, Human
agcacugacuucuaaguaa

SEQ ID NO: 2576154 - RNA, 14 nt, Human
agcacugaggaaga

SEQ ID NO: 2576155 - RNA, 11 nt, Human
agcacugagga

SEQ ID NO: 2576156 - RNA, 10 nt, Human
agcacugagg

SEQ ID NO: 2576157 - RNA, 16 nt, Human
agcacugagcaaagca

SEQ ID NO: 2576158 - RNA, 21 nt, Human
agcacuacauaaacugacuuu

SEQ ID NO: 2576159 - RNA, 17 nt, Human
agcacuacauaaacuga

SEQ ID NO: 2576160 - RNA, 16 nt, Human
agcacuacauaaacug

SEQ ID NO: 2576161 - RNA, 16 nt, Human
agcacucacacaggac

SEQ ID NO: 2576162 - RNA, 14 nt, Human
agcacuauacagau

SEQ ID NO: 2576163 - RNA, 14 nt, Human
agcacucacacagg

SEQ ID NO: 2576164 - RNA, 17 nt, Human
agcacugacuucuaagu

SEQ ID NO: 2576165 - RNA, 20 nt, Human
agcacucccaagucuacaga

SEQ ID NO: 2576166 - RNA, 19 nt, Human
agcacucccaagucuacag

SEQ ID NO: 2576167 - RNA, 14 nt, Human
agcacucccaaguc

SEQ ID NO: 2576168 - RNA, 13 nt, Human
agcacucccaagu

SEQ ID NO: 2576169 - RNA, 21 nt, Human
agcacuccucgguacucccau

SEQ ID NO: 2576170 - RNA, 16 nt, Human
agcagugcaugcuguc

SEQ ID NO: 2576171 - RNA, 13 nt, Human
agcagugcaugcu

SEQ ID NO: 2576172 - RNA, 16 nt, Human
agcagccuuuaaugca

SEQ ID NO: 2576173 - RNA, 18 nt, Human
agcagccuuuaaugcauc

SEQ ID NO: 2576174 - RNA, 11 nt, Human
agcagcuacca

SEQ ID NO: 2576175 - RNA, 17 nt, Human
agcagcuaucucucagu

SEQ ID NO: 2576176 - RNA, 19 nt, Human
agcagcuaucucucaguga

SEQ ID NO: 2576177 - RNA, 15 nt, Human
agcagcucaaaggca

SEQ ID NO: 2576178 - RNA, 16 nt, Human
agcagcucaaaggcac

SEQ ID NO: 2576179 - RNA, 19 nt, Human
agcagcucaaaggcacagu

SEQ ID NO: 2576180 - RNA, 12 nt, Human
agcagcucaggc

SEQ ID NO: 2576181 - RNA, 13 nt, Human
agcagcucaggca

SEQ ID NO: 2576182 - RNA, 14 nt, Human
agcagcucaggcac

SEQ ID NO: 2576183 - RNA, 23 nt, Human
agcagccugagcaacucuugauu

SEQ ID NO: 2576184 - RNA, 20 nt, Human
agcagccuggacccugugga

SEQ ID NO: 2576185 - RNA, 19 nt, Human
agcagcguuucuaugacac

SEQ ID NO: 2576186 - RNA, 18 nt, Human
agcagcguuucuaugaca

SEQ ID NO: 2576187 - RNA, 13 nt, Human
agcagccuguggc

SEQ ID NO: 2576188 - RNA, 14 nt, Human
agcagccuguggca

SEQ ID NO: 2576189 - RNA, 21 nt, Human
agcaguggcugguccagggcu

SEQ ID NO: 2576190 - RNA, 19 nt, Human
agcaguggcugguccaggg

SEQ ID NO: 2576191 - RNA, 18 nt, Human
agcaguggcugguccagg

SEQ ID NO: 2576192 - RNA, 17 nt, Human
agcaguggcugguccag

SEQ ID NO: 2576193 - RNA, 16 nt, Human
agcaguggcuggucca

SEQ ID NO: 2576194 - RNA, 13 nt, Human
agcaguggcuggu

SEQ ID NO: 2576195 - RNA, 12 nt, Human
agcaguggcugg

SEQ ID NO: 2576196 - RNA, 11 nt, Human
agcaguggcug

SEQ ID NO: 2576197 - RNA, 22 nt, Human
agcaguggcugguccagggcua

SEQ ID NO: 2576198 - RNA, 14 nt, Human
agcagugggccugg

SEQ ID NO: 2576199 - RNA, 19 nt, Human
agcaguggacaccaggagu

SEQ ID NO: 2576200 - RNA, 14 nt, Human
agcagugcuucuca

SEQ ID NO: 2576201 - RNA, 15 nt, Human
agcagugcaggcaca

SEQ ID NO: 2576202 - RNA, 13 nt, Human
agcagugcaggca

SEQ ID NO: 2576203 - RNA, 12 nt, Human
agcaguggacac

SEQ ID NO: 2576204 - RNA, 15 nt, Human
agcaguggacaccag

SEQ ID NO: 2576205 - RNA, 17 nt, Human
agcagugcaugcugucc

SEQ ID NO: 2576206 - RNA, 20 nt, Human
agcagcucaaaggcacagug

SEQ ID NO: 2576207 - RNA, 21 nt, Human
agcagcucaggcacacuucuu

SEQ ID NO: 2576208 - RNA, 23 nt, Human
agcagugccuuccauaauuauga

SEQ ID NO: 2576209 - RNA, 15 nt, Human
agcaauuccaaccuu

SEQ ID NO: 2576210 - RNA, 14 nt, Human
agcaauuccaaccu

SEQ ID NO: 2576211 - RNA, 15 nt, Human
agcaauucuccugcc

SEQ ID NO: 2576212 - RNA, 17 nt, Human
agcaauucuccugccuc

SEQ ID NO: 2576213 - RNA, 18 nt, Human
agcaauucuccugccuca

SEQ ID NO: 2576214 - RNA, 19 nt, Human
agcaauucuccugccucag

SEQ ID NO: 2576215 - RNA, 20 nt, Human
agcaauucuccugccucagc

SEQ ID NO: 2576216 - RNA, 20 nt, Human
agcaauuuauacaauaucau

SEQ ID NO: 2576217 - RNA, 23 nt, Human
agcaauuuaauauuuugcacagu

SEQ ID NO: 2576218 - RNA, 21 nt, Human
agcaauuuuccuugaagccga

SEQ ID NO: 2576219 - RNA, 20 nt, Human
agcaauuuuccuugaagccg

SEQ ID NO: 2576220 - RNA, 19 nt, Human
agcaauuuuccuugaagcc

SEQ ID NO: 2576221 - RNA, 18 nt, Human
agcaauuuuccuugaagc

SEQ ID NO: 2576222 - RNA, 17 nt, Human
agcaauuuuccuugaag

SEQ ID NO: 2576223 - RNA, 16 nt, Human
agcaauuuuccuugaa

SEQ ID NO: 2576224 - RNA, 15 nt, Human
agcaauuuuccuuga

SEQ ID NO: 2576225 - RNA, 14 nt, Human
agcaauuuuccuug

SEQ ID NO: 2576226 - RNA, 13 nt, Human
agcaauuuuccuu

SEQ ID NO: 2576227 - RNA, 12 nt, Human
agcaauuuuccu

SEQ ID NO: 2576228 - RNA, 24 nt, Human
agcaauuuaauauuuugcacaguu

SEQ ID NO: 2576229 - RNA, 21 nt, Human
agcaauuucgccguugaagag

SEQ ID NO: 2576230 - RNA, 22 nt, Human
agcaauuucgccguugaagagg

SEQ ID NO: 2576231 - RNA, 21 nt, Human
agcacagacccugcccugugg

SEQ ID NO: 2576232 - RNA, 15 nt, Human
agcacagagaagaca

SEQ ID NO: 2576233 - RNA, 14 nt, Human
agcaauuuucgaac

SEQ ID NO: 2576234 - RNA, 12 nt, Human
agcacagagagg

SEQ ID NO: 2576235 - RNA, 17 nt, Human
agcacuacucugugcca

SEQ ID NO: 2576236 - RNA, 20 nt, Human
agcacuaaggugugcucuga

SEQ ID NO: 2576237 - RNA, 17 nt, Human
agcacagagaagacaaa

SEQ ID NO: 2576238 - RNA, 23 nt, Human
agcacagagagggggccaccucc

SEQ ID NO: 2576239 - RNA, 21 nt, Human
agcacagagagggggccaccu

SEQ ID NO: 2576240 - RNA, 20 nt, Human
agcacagagagggggccacc

SEQ ID NO: 2576241 - RNA, 19 nt, Human
agcacagagagggggccac

SEQ ID NO: 2576242 - RNA, 16 nt, Human
agcaucuaugugagac

SEQ ID NO: 2576243 - RNA, 15 nt, Human
agcaucuaucucauc

SEQ ID NO: 2576244 - RNA, 20 nt, Human
agcaucucagccuaccauga

SEQ ID NO: 2576245 - RNA, 14 nt, Human
agcaucucaugagu

SEQ ID NO: 2576246 - RNA, 13 nt, Human
agcaucggaggga

SEQ ID NO: 2576247 - RNA, 17 nt, Human
agccaacuauggccugu

SEQ ID NO: 2576248 - RNA, 21 nt, Human
agccaacgacaaagccaaacu

SEQ ID NO: 2576249 - RNA, 19 nt, Human
agccaacuuggcuuucccg

SEQ ID NO: 2576250 - RNA, 14 nt, Human
agccaacuuggcuu

SEQ ID NO: 2576251 - RNA, 21 nt, Human
agccaacugcugcuuuuugag

SEQ ID NO: 2576252 - RNA, 14 nt, Human
agccaacugcugcu

SEQ ID NO: 2576253 - RNA, 13 nt, Human
agccaacugcugc

SEQ ID NO: 2576254 - RNA, 12 nt, Human
agccaacuccau

SEQ ID NO: 2576255 - RNA, 19 nt, Human
agccaacuuguaaauacac

SEQ ID NO: 2576256 - RNA, 18 nt, Human
agccaacuuguaaauaca

SEQ ID NO: 2576257 - RNA, 15 nt, Human
agccaacuuguaaau

SEQ ID NO: 2576258 - RNA, 20 nt, Human
agccaacuuggcuuucccgg

SEQ ID NO: 2576259 - RNA, 20 nt, Human
agccaacuuguaaauacacc

SEQ ID NO: 2576260 - RNA, 15 nt, Human
agccaacuuuugcau

SEQ ID NO: 2576261 - RNA, 13 nt, Human
agcaucugcuaau

SEQ ID NO: 2576262 - RNA, 19 nt, Human
agcaucucuugaggccagg

SEQ ID NO: 2576263 - RNA, 22 nt, Human
agcaucucuugaggccaggagu

SEQ ID NO: 2576264 - RNA, 13 nt, Human
agcaucucccagu

SEQ ID NO: 2576265 - RNA, 20 nt, Human
agcaucucccucacugaaac

SEQ ID NO: 2576266 - RNA, 22 nt, Human
agcaucucccucacugaaacca

SEQ ID NO: 2576267 - RNA, 17 nt, Human
agcaucucuugaggcca

SEQ ID NO: 2576268 - RNA, 22 nt, Human
agccagauuucacucuccuugg

SEQ ID NO: 2576269 - RNA, 20 nt, Human
agccagauuucacucuccuu

SEQ ID NO: 2576270 - RNA, 17 nt, Human
agccagauuucacucuc

SEQ ID NO: 2576271 - RNA, 14 nt, Human
agccagauuucacu

SEQ ID NO: 2576272 - RNA, 21 nt, Human
agccaagggaaccuguguccg

SEQ ID NO: 2576273 - RNA, 20 nt, Human
agccaagggaaccugugucc

SEQ ID NO: 2576274 - RNA, 19 nt, Human
agccaagggaaccuguguc

SEQ ID NO: 2576275 - RNA, 17 nt, Human
agccaagggaaccugug

SEQ ID NO: 2576276 - RNA, 14 nt, Human
agccaagaggcugc

SEQ ID NO: 2576277 - RNA, 16 nt, Human
agccaagggaaccugu

SEQ ID NO: 2576278 - RNA, 15 nt, Human
agccaagaggcugca

SEQ ID NO: 2576279 - RNA, 18 nt, Human
agccaaggguucagagac

SEQ ID NO: 2576280 - RNA, 15 nt, Human
agccaagggccucuu

SEQ ID NO: 2576281 - RNA, 22 nt, Human
agccaaggguucagagacucag

SEQ ID NO: 2576282 - RNA, 19 nt, Human
agccaaggugggcugagcc

SEQ ID NO: 2576283 - RNA, 20 nt, Human
agccaaggugggcugagccc

SEQ ID NO: 2576284 - RNA, 22 nt, Human
agccauuuguuggggcaguggu

SEQ ID NO: 2576285 - RNA, 18 nt, Human
agccauuuguuggggcag

SEQ ID NO: 2576286 - RNA, 17 nt, Human
agccauuuguuggggca

SEQ ID NO: 2576287 - RNA, 22 nt, Human
agccaagguuuuauaaggcuga

SEQ ID NO: 2576288 - RNA, 16 nt, Human
agccauuuugugaaug

SEQ ID NO: 2576289 - RNA, 15 nt, Human
agccauuuugugaau

SEQ ID NO: 2576290 - RNA, 14 nt, Human
agccauuuugugaa

SEQ ID NO: 2576291 - RNA, 20 nt, Human
agccauuuuggggggccccc

SEQ ID NO: 2576292 - RNA, 19 nt, Human
agccauuuugugaauggau

SEQ ID NO: 2576293 - RNA, 17 nt, Human
agccauuuugugaaugg

SEQ ID NO: 2576294 - RNA, 17 nt, Human
agcccaaaccaccagaa

SEQ ID NO: 2576295 - RNA, 19 nt, Human
agcccaaaccaccagaagc

SEQ ID NO: 2576296 - RNA, 20 nt, Human
agcccaaaccaccagaagcc

SEQ ID NO: 2576297 - RNA, 22 nt, Human
agcccaaaccaccagaagccca

SEQ ID NO: 2576298 - RNA, 21 nt, Human
agccagcaggcucucaggcca

SEQ ID NO: 2576299 - RNA, 22 nt, Human
agccagcaggcucucaggccag

SEQ ID NO: 2576300 - RNA, 23 nt, Human
agccagcaggcucucaggccagc

SEQ ID NO: 2576301 - RNA, 22 nt, Human
agccaaggugggcugagcccug

SEQ ID NO: 2576302 - RNA, 23 nt, Human
agccaaggugggcugagcccugg

SEQ ID NO: 2576303 - RNA, 19 nt, Human
agcccacgcccccacuggu

SEQ ID NO: 2576304 - RNA, 18 nt, Human
agcccacgcccccacugg

SEQ ID NO: 2576305 - RNA, 17 nt, Human
agcccacgcccccacug

SEQ ID NO: 2576306 - RNA, 21 nt, Human
agcccacccuccugucuuccc

SEQ ID NO: 2576307 - RNA, 23 nt, Human
agcccacccuccugucuucccag

SEQ ID NO: 2576308 - RNA, 19 nt, Human
agcccacccuccugucuuc

SEQ ID NO: 2576309 - RNA, 18 nt, Human
agcccacccuccugucuu

SEQ ID NO: 2576310 - RNA, 17 nt, Human
agcccacccuccugucu

SEQ ID NO: 2576311 - RNA, 16 nt, Human
agcccacccuccuguc

SEQ ID NO: 2576312 - RNA, 13 nt, Human
agcccaccuuggc

SEQ ID NO: 2576313 - RNA, 23 nt, Human
agcccaccccucaacaccucugc

SEQ ID NO: 2576314 - RNA, 13 nt, Human
agcccaaagaagg

SEQ ID NO: 2576315 - RNA, 15 nt, Human
agcccacccuccugu

SEQ ID NO: 2576316 - RNA, 14 nt, Human
agcccacccuccug

SEQ ID NO: 2576317 - RNA, 13 nt, Human
agcccacccuccu

SEQ ID NO: 2576318 - RNA, 20 nt, Human
agaagucaugaagcccaagu

SEQ ID NO: 2576319 - RNA, 14 nt, Human
agaagucacacagu

SEQ ID NO: 2576320 - RNA, 22 nt, Human
agaauccuggcccucuguguug

SEQ ID NO: 2576321 - RNA, 20 nt, Human
agaauccuggcccucugugu

SEQ ID NO: 2576322 - RNA, 21 nt, Human
agaauccuaggcuccacccca

SEQ ID NO: 2576323 - RNA, 15 nt, Human
agaagucuuagacuu

SEQ ID NO: 2576324 - RNA, 17 nt, Human
agaagucuuagauguau

SEQ ID NO: 2576325 - RNA, 19 nt, Human
agaagucuuagauguauau

SEQ ID NO: 2576326 - RNA, 17 nt, Human
agaagucaaaguaaaac

SEQ ID NO: 2576327 - RNA, 23 nt, Human
agaagggcuagaaccuggagagc

SEQ ID NO: 2576328 - RNA, 21 nt, Human
agaagggcuagaaccuggaga

SEQ ID NO: 2576329 - RNA, 14 nt, Human
agaagggcuagaac

SEQ ID NO: 2576330 - RNA, 13 nt, Human
agaagggcuagaa

SEQ ID NO: 2576331 - RNA, 21 nt, Human
agaagggcuagaaccuggagg

SEQ ID NO: 2576332 - RNA, 21 nt, Human
agaagggauggauuccaaccc

SEQ ID NO: 2576333 - RNA, 19 nt, Human
agaagggccaguccugccu

SEQ ID NO: 2576334 - RNA, 20 nt, Human
agaagggccaguccugccug

SEQ ID NO: 2576335 - RNA, 14 nt, Human
agaagggagaagaa

SEQ ID NO: 2576336 - RNA, 19 nt, Human
agaagaugaauacaaacaa

SEQ ID NO: 2576337 - RNA, 14 nt, Human
agaagaugaauaca

SEQ ID NO: 2576338 - RNA, 16 nt, Human
agaagaugaucagacc

SEQ ID NO: 2576339 - RNA, 13 nt, Human
agaagaugaauac

SEQ ID NO: 2576340 - RNA, 18 nt, Human
agaagaugaaugagcaaa

SEQ ID NO: 2576341 - RNA, 11 nt, Human
agaagggaggc

SEQ ID NO: 2576342 - RNA, 14 nt, Human
agaagggagaagga

SEQ ID NO: 2576343 - RNA, 15 nt, Human
agaagggagaagaaa

SEQ ID NO: 2576344 - RNA, 17 nt, Human
agaagaugaucagaccu

SEQ ID NO: 2576345 - RNA, 13 nt, Human
agaagggagaagg

SEQ ID NO: 2576346 - RNA, 16 nt, Human
agaagggagaagaaag

SEQ ID NO: 2576347 - RNA, 20 nt, Human
agaagagcuguucacagcca

SEQ ID NO: 2576348 - RNA, 16 nt, Human
agaagauccuacccca

SEQ ID NO: 2576349 - RNA, 18 nt, Human
agaagauccuaaaacaaa

SEQ ID NO: 2576350 - RNA, 17 nt, Human
agaagauccuaaaacaa

SEQ ID NO: 2576351 - RNA, 14 nt, Human
agaagauccccuca

SEQ ID NO: 2576352 - RNA, 13 nt, Human
agaagauccccuc

SEQ ID NO: 2576353 - RNA, 23 nt, Human
agaagaucacgcuccccgccugu

SEQ ID NO: 2576354 - RNA, 19 nt, Human
agaagaucacgcuccccgc

SEQ ID NO: 2576355 - RNA, 22 nt, Human
agaagauauuagucuuggggca

SEQ ID NO: 2576356 - RNA, 20 nt, Human
agaagagccggagccuccag

SEQ ID NO: 2576357 - RNA, 23 nt, Human
agaagagaaugcacaaacagagg

SEQ ID NO: 2576358 - RNA, 15 nt, Human
agaagagaaugcaca

SEQ ID NO: 2576359 - RNA, 13 nt, Human
agaagagcuguuc

SEQ ID NO: 2576360 - RNA, 22 nt, Human
agaagagaauauuagcuuuacu

SEQ ID NO: 2576361 - RNA, 21 nt, Human
agaagacugcauuauauuuau

SEQ ID NO: 2576362 - RNA, 18 nt, Human
agaaccaguuucaggugu

SEQ ID NO: 2576363 - RNA, 22 nt, Human
agaaccaucccuauuuuguauu

SEQ ID NO: 2576364 - RNA, 16 nt, Human
agaaccagucccccca

SEQ ID NO: 2576365 - RNA, 19 nt, Human
agaaccaguccccccaccc

SEQ ID NO: 2576366 - RNA, 20 nt, Human
agaaccaguccccccacccu

SEQ ID NO: 2576367 - RNA, 20 nt, Human
agaaccaggcaacuugggaa

SEQ ID NO: 2576368 - RNA, 13 nt, Human
agaaccacuauga

SEQ ID NO: 2576369 - RNA, 16 nt, Human
agaaccaaaucuggaa

SEQ ID NO: 2576370 - RNA, 13 nt, Human
agaaccaaaucug

SEQ ID NO: 2576371 - RNA, 18 nt, Human
agaaccaaaucuggaagc

SEQ ID NO: 2576372 - RNA, 16 nt, Human
agaaccaagaagggcu

SEQ ID NO: 2576373 - RNA, 17 nt, Human
agaaccaggcaacuugg

SEQ ID NO: 2576374 - RNA, 21 nt, Human
agaaccaaaaagaggcuaugu

SEQ ID NO: 2576375 - RNA, 20 nt, Human
agaaccaaaaguuuuccuga

SEQ ID NO: 2576376 - RNA, 18 nt, Human
agaaccaaaaguuuuccu

SEQ ID NO: 2576377 - RNA, 16 nt, Human
agaacauuuuaauuca

SEQ ID NO: 2576378 - RNA, 13 nt, Human
agaacauuuuaau

SEQ ID NO: 2576379 - RNA, 18 nt, Human
agaaugcucuuuacuuca

SEQ ID NO: 2576380 - RNA, 12 nt, Human
agaaugaggcug

SEQ ID NO: 2576381 - RNA, 13 nt, Human
agaaugaggcugc

SEQ ID NO: 2576382 - RNA, 14 nt, Human
agaaugaggcugcu

SEQ ID NO: 2576383 - RNA, 20 nt, Human
agaaugaggcugcuuuccaa

SEQ ID NO: 2576384 - RNA, 23 nt, Human
agaaugcacaaacagaggccgcc

SEQ ID NO: 2576385 - RNA, 17 nt, Human
agaaugaggaggaagga

SEQ ID NO: 2576386 - RNA, 16 nt, Human
agaaugagggccaaga

SEQ ID NO: 2576387 - RNA, 16 nt, Human
agaaugaaagggccca

SEQ ID NO: 2576388 - RNA, 21 nt, Human
agaaugaaagaguaaaggaaa

SEQ ID NO: 2576389 - RNA, 21 nt, Human
agaaugagccuacgcugaaga

SEQ ID NO: 2576390 - RNA, 15 nt, Human
agaaugaaagcuccu

SEQ ID NO: 2576391 - RNA, 12 nt, Human
agaaugagccuc

SEQ ID NO: 2576392 - RNA, 13 nt, Human
agaaugaggagga

SEQ ID NO: 2576393 - RNA, 16 nt, Human
agaaugaggaggaagg

SEQ ID NO: 2576394 - RNA, 19 nt, Human
agaaucuuuauugagaaag

SEQ ID NO: 2576395 - RNA, 18 nt, Human
agaaucuuuauugagaaa

SEQ ID NO: 2576396 - RNA, 17 nt, Human
agaaucuuuauugagaa

SEQ ID NO: 2576397 - RNA, 16 nt, Human
agaaucuuuauugaga

SEQ ID NO: 2576398 - RNA, 23 nt, Human
agaaucuuuagagaaguauacau

SEQ ID NO: 2576399 - RNA, 14 nt, Human
agaaucuuuagaga

SEQ ID NO: 2576400 - RNA, 19 nt, Human
agaaugaaagaguaaagga

SEQ ID NO: 2576401 - RNA, 12 nt, Human
agaaugaaagag

SEQ ID NO: 2576402 - RNA, 17 nt, Human
agaaugaaaauuguaug

SEQ ID NO: 2576403 - RNA, 16 nt, Human
agaaugaaaacucauu

SEQ ID NO: 2576404 - RNA, 24 nt, Human
agaaucuuuauugagaaagagcac

SEQ ID NO: 2576405 - RNA, 21 nt, Human
agaaucuuuauugagaaagag

SEQ ID NO: 2576406 - RNA, 17 nt, Human
agaaucucaaauaacua

SEQ ID NO: 2576407 - RNA, 16 nt, Human
agaaucuaaagccagu

SEQ ID NO: 2576408 - RNA, 17 nt, Human
agaaucuacccaaagga

SEQ ID NO: 2576409 - RNA, 15 nt, Human
agaaucuaaagccag

SEQ ID NO: 2576410 - RNA, 19 nt, Human
agaaucuguuucccagcag

SEQ ID NO: 2576411 - RNA, 16 nt, Human
agaaucuggagagcua

SEQ ID NO: 2576412 - RNA, 13 nt, Human
agaaucuggagag

SEQ ID NO: 2576413 - RNA, 18 nt, Human
agaaucuauauuuaacaa

SEQ ID NO: 2576414 - RNA, 19 nt, Human
agaaucuacccaaaggaua

SEQ ID NO: 2576415 - RNA, 15 nt, Human
agaacaaugugcuau

SEQ ID NO: 2576416 - RNA, 21 nt, Human
agaacaauauugacuuugucu

SEQ ID NO: 2576417 - RNA, 20 nt, Human
agaacaauauugacuuuguc

SEQ ID NO: 2576418 - RNA, 21 nt, Human
agaacacagaaagccuaucaa

SEQ ID NO: 2576419 - RNA, 19 nt, Human
agaacacagaaagccuauc

SEQ ID NO: 2576420 - RNA, 16 nt, Human
agaacacaaggucauu

SEQ ID NO: 2576421 - RNA, 20 nt, Human
agaacaaagugagacagucc

SEQ ID NO: 2576422 - RNA, 17 nt, Human
agaacaaccaaaaucuu

SEQ ID NO: 2576423 - RNA, 17 nt, Human
agaacaagguaguuuuu

SEQ ID NO: 2576424 - RNA, 19 nt, Human
agaacaagguaguuuuuac

SEQ ID NO: 2576425 - RNA, 19 nt, Human
agaacaauauugacuuugu

SEQ ID NO: 2576426 - RNA, 17 nt, Human
agaacaauauugacuuu

SEQ ID NO: 2576427 - RNA, 14 nt, Human
agaacacuaaccug

SEQ ID NO: 2576428 - RNA, 13 nt, Human
agaacacuaaccu

SEQ ID NO: 2576429 - RNA, 12 nt, Human
agaacacuaacc

SEQ ID NO: 2576430 - RNA, 14 nt, Human
agaacacgcuuuca

SEQ ID NO: 2576431 - RNA, 15 nt, Human
agaacacccucuaaa

SEQ ID NO: 2576432 - RNA, 21 nt, Human
agaacacagccgauucaccug

SEQ ID NO: 2576433 - RNA, 19 nt, Human
agaacagauaaucagugug

SEQ ID NO: 2576434 - RNA, 14 nt, Human
agaacacugugaaa

SEQ ID NO: 2576435 - RNA, 17 nt, Human
agaacaucccuccuggg

SEQ ID NO: 2576436 - RNA, 13 nt, Human
agaacaucccucc

SEQ ID NO: 2576437 - RNA, 14 nt, Human
agaacauggacuug

SEQ ID NO: 2576438 - RNA, 20 nt, Human
agaacaucuguauacccucu

SEQ ID NO: 2576439 - RNA, 18 nt, Human
agaacaucccugccagcu

SEQ ID NO: 2576440 - RNA, 19 nt, Human
agaacaucccugccagcuc

SEQ ID NO: 2576441 - RNA, 20 nt, Human
agaacaucauuagaacaaag

SEQ ID NO: 2576442 - RNA, 18 nt, Human
agaacaucauuagaacaa

SEQ ID NO: 2576443 - RNA, 16 nt, Human
agaacaucauuagaac

SEQ ID NO: 2576444 - RNA, 15 nt, Human
agaacaucauuagaa

SEQ ID NO: 2576445 - RNA, 15 nt, Human
agaacauccaaggag

SEQ ID NO: 2576446 - RNA, 18 nt, Human
agaacauccaaggagaaa

SEQ ID NO: 2576447 - RNA, 16 nt, Human
agaacaucccugccag

SEQ ID NO: 2576448 - RNA, 17 nt, Human
agaacaucccugccagc

SEQ ID NO: 2576449 - RNA, 18 nt, Human
agaaccaaaaagaggcua

SEQ ID NO: 2576450 - RNA, 17 nt, Human
agaaccaaaaagaggcu

SEQ ID NO: 2576451 - RNA, 22 nt, Human
agaacaugugagagguuugacu

SEQ ID NO: 2576452 - RNA, 13 nt, Human
agaacaugugaga

SEQ ID NO: 2576453 - RNA, 16 nt, Human
agaacauggacuugua

SEQ ID NO: 2576454 - RNA, 18 nt, Human
agaacaucuguccuguga

SEQ ID NO: 2576455 - RNA, 19 nt, Human
agaacauggacuuguauau

SEQ ID NO: 2576456 - RNA, 17 nt, Human
agaacacugugaaaaca

SEQ ID NO: 2576457 - RNA, 23 nt, Human
agaacagcaggguagucugguuu

SEQ ID NO: 2576458 - RNA, 13 nt, Human
agaacagcagagg

SEQ ID NO: 2576459 - RNA, 18 nt, Human
agaacagccgcuccuguc

SEQ ID NO: 2576460 - RNA, 19 nt, Human
agaacagccgcuccugucu

SEQ ID NO: 2576461 - RNA, 20 nt, Human
agaacagccgcuccugucug

SEQ ID NO: 2576462 - RNA, 18 nt, Human
agaacagcuucagguuau

SEQ ID NO: 2576463 - RNA, 16 nt, Human
agaacagcuucagguu

SEQ ID NO: 2576464 - RNA, 14 nt, Human
agaacagcuucagg

SEQ ID NO: 2576465 - RNA, 13 nt, Human
agaacagcuucag

SEQ ID NO: 2576466 - RNA, 22 nt, Human
agaacagcuucagguuaucgaa

SEQ ID NO: 2576467 - RNA, 16 nt, Human
agaacaggcaagugaa

SEQ ID NO: 2576468 - RNA, 12 nt, Human
agaacagcuuca

SEQ ID NO: 2576469 - RNA, 18 nt, Human
agaacagcagagguucuu

SEQ ID NO: 2576470 - RNA, 22 nt, Human
agaacagccgcuccugucugcc

SEQ ID NO: 2576471 - RNA, 23 nt, Human
agaacagccgcuccugucugcca

SEQ ID NO: 2576472 - RNA, 22 nt, Human
agaacagugauuaccagggacu

SEQ ID NO: 2576473 - RNA, 13 nt, Human
agaacaguaaaca

SEQ ID NO: 2576474 - RNA, 17 nt, Human
agaacaguuuguacaga

SEQ ID NO: 2576475 - RNA, 15 nt, Human
agaacaguuuguaca

SEQ ID NO: 2576476 - RNA, 14 nt, Human
agaacaguaaacau

SEQ ID NO: 2576477 - RNA, 21 nt, Human
agaacagugcuugccacagag

SEQ ID NO: 2576478 - RNA, 14 nt, Human
agaacaucauuaga

SEQ ID NO: 2576479 - RNA, 11 nt, Human
agaacauagaa

SEQ ID NO: 2576480 - RNA, 16 nt, Human
agacucuuuggacacu

SEQ ID NO: 2576481 - RNA, 20 nt, Human
agagaagugacagggaagcu

SEQ ID NO: 2576482 - RNA, 18 nt, Human
agagaagugacagggaag

SEQ ID NO: 2576483 - RNA, 17 nt, Human
agagaagugacagggaa

SEQ ID NO: 2576484 - RNA, 15 nt, Human
agagaagugacaggg

SEQ ID NO: 2576485 - RNA, 14 nt, Human
agagaagugacagg

SEQ ID NO: 2576486 - RNA, 14 nt, Human
agagaagugccccu

SEQ ID NO: 2576487 - RNA, 15 nt, Human
agagaagugccccug

SEQ ID NO: 2576488 - RNA, 17 nt, Human
agagaagugccccugcu

SEQ ID NO: 2576489 - RNA, 18 nt, Human
agagaagugccccugcug

SEQ ID NO: 2576490 - RNA, 19 nt, Human
agagagaugggagcuccuc

SEQ ID NO: 2576491 - RNA, 18 nt, Human
agagagaugggagcuccu

SEQ ID NO: 2576492 - RNA, 17 nt, Human
agagagaugggagcucc

SEQ ID NO: 2576493 - RNA, 21 nt, Human
agagagaucaaauggaaagga

SEQ ID NO: 2576494 - RNA, 13 nt, Human
agagaauauuuua

SEQ ID NO: 2576495 - RNA, 15 nt, Human
agagaaucaacauuu

SEQ ID NO: 2576496 - RNA, 12 nt, Human
agagaaucaaca

SEQ ID NO: 2576497 - RNA, 22 nt, Human
agagaauauuagcuuuacuguu

SEQ ID NO: 2576498 - RNA, 14 nt, Human
agagaaauaugaag

SEQ ID NO: 2576499 - RNA, 14 nt, Human
agagaaauauggaa

SEQ ID NO: 2576500 - RNA, 16 nt, Human
agagaaguauuauaaa

SEQ ID NO: 2576501 - RNA, 18 nt, Human
agagaaguauacauaagu

SEQ ID NO: 2576502 - RNA, 22 nt, Human
agagaaccucacgcaccuccca

SEQ ID NO: 2576503 - RNA, 17 nt, Human
agagaaccgagcaaaga

SEQ ID NO: 2576504 - RNA, 15 nt, Human
agagaaccgagcaaa

SEQ ID NO: 2576505 - RNA, 21 nt, Human
agagaaccgagcaaagaucaa

SEQ ID NO: 2576506 - RNA, 20 nt, Human
agagaaccgagcaaagauca

SEQ ID NO: 2576507 - RNA, 20 nt, Human
agagaaccucacgcaccucc

SEQ ID NO: 2576508 - RNA, 18 nt, Human
agagaaacaauaaagaga

SEQ ID NO: 2576509 - RNA, 14 nt, Human
agagaaagaagaga

SEQ ID NO: 2576510 - RNA, 24 nt, Human
agagaaagugggugagaugcugga

SEQ ID NO: 2576511 - RNA, 19 nt, Human
agagaaagugauuucuaga

SEQ ID NO: 2576512 - RNA, 18 nt, Human
agagaaagugauuucuag

SEQ ID NO: 2576513 - RNA, 16 nt, Human
agagaaagaaaaugaa

SEQ ID NO: 2576514 - RNA, 15 nt, Human
agagaaagaaaauga

SEQ ID NO: 2576515 - RNA, 21 nt, Human
agacucuuuuuguaccuggug

SEQ ID NO: 2576516 - RNA, 15 nt, Human
agacucuuugcauau

SEQ ID NO: 2576517 - RNA, 22 nt, Human
agacucuuuuuguaccugguga

SEQ ID NO: 2576518 - RNA, 17 nt, Human
agacugaacauguacac

SEQ ID NO: 2576519 - RNA, 23 nt, Human
agacucuuuuuguaccuggugac

SEQ ID NO: 2576520 - RNA, 18 nt, Human
agacugaacuuaccguga

SEQ ID NO: 2576521 - RNA, 12 nt, Human
agacugaccaau

SEQ ID NO: 2576522 - RNA, 20 nt, Human
agagaaaauaaaaaguuaaa

SEQ ID NO: 2576523 - RNA, 19 nt, Human
agagaaaauaaaaaguuaa

SEQ ID NO: 2576524 - RNA, 18 nt, Human
agagaaaauaaaaaguua

SEQ ID NO: 2576525 - RNA, 19 nt, Human
agagccugcaggugcugcu

SEQ ID NO: 2576526 - RNA, 18 nt, Human
agagccugcaggugcugc

SEQ ID NO: 2576527 - RNA, 17 nt, Human
agagccugcaggugcug

SEQ ID NO: 2576528 - RNA, 17 nt, Human
agagccugccuggagcg

SEQ ID NO: 2576529 - RNA, 16 nt, Human
agagccugccuggagc

SEQ ID NO: 2576530 - RNA, 15 nt, Human
agagccugccuggag

SEQ ID NO: 2576531 - RNA, 13 nt, Human
agagccugcuccc

SEQ ID NO: 2576532 - RNA, 15 nt, Human
agagccugcuccccc

SEQ ID NO: 2576533 - RNA, 16 nt, Human
agagccugcuccccca

SEQ ID NO: 2576534 - RNA, 18 nt, Human
agagccugcucccccacc

SEQ ID NO: 2576535 - RNA, 11 nt, Human
agagccugcug

SEQ ID NO: 2576536 - RNA, 19 nt, Human
agagccugcucccccaccc

SEQ ID NO: 2576537 - RNA, 20 nt, Human
agagccugcucccccacccc

SEQ ID NO: 2576538 - RNA, 12 nt, Human
agagccugcugc

SEQ ID NO: 2576539 - RNA, 13 nt, Human
agagccugaggga

SEQ ID NO: 2576540 - RNA, 14 nt, Human
agagccugagggau

SEQ ID NO: 2576541 - RNA, 11 nt, Human
agagccugagg

SEQ ID NO: 2576542 - RNA, 14 nt, Human
agagcccagcucca

SEQ ID NO: 2576543 - RNA, 12 nt, Human
agagcccagcuc

SEQ ID NO: 2576544 - RNA, 13 nt, Human
agagcccagcucc

SEQ ID NO: 2576545 - RNA, 17 nt, Human
agagcccacgcccccac

SEQ ID NO: 2576546 - RNA, 20 nt, Human
agagcccagagguaacagaa

SEQ ID NO: 2576547 - RNA, 16 nt, Human
agagcccagagguaac

SEQ ID NO: 2576548 - RNA, 14 nt, Human
agagcccagaggua

SEQ ID NO: 2576549 - RNA, 24 nt, Human
agagcccagagguaacagaacagc

SEQ ID NO: 2576550 - RNA, 22 nt, Human
agagcccagagguaacagaaca

SEQ ID NO: 2576551 - RNA, 21 nt, Human
agagcccagcagggccucaaa

SEQ ID NO: 2576552 - RNA, 14 nt, Human
agagcccagccauu

SEQ ID NO: 2576553 - RNA, 19 nt, Human
agagagcaagacgcugugc

SEQ ID NO: 2576554 - RNA, 11 nt, Human
agagagcaaga

SEQ ID NO: 2576555 - RNA, 23 nt, Human
agagagcaagacgcugugcugcc

SEQ ID NO: 2576556 - RNA, 14 nt, Human
agagagauguuuug

SEQ ID NO: 2576557 - RNA, 17 nt, Human
agagaggagaggagaga

SEQ ID NO: 2576558 - RNA, 13 nt, Human
agagaggagucag

SEQ ID NO: 2576559 - RNA, 20 nt, Human
agagaggagucagagagaau

SEQ ID NO: 2576560 - RNA, 18 nt, Human
agagcccacgcccccacu

SEQ ID NO: 2576561 - RNA, 17 nt, Human
agagaggaguucaauga

SEQ ID NO: 2576562 - RNA, 15 nt, Human
agagaggaguucaau

SEQ ID NO: 2576563 - RNA, 14 nt, Human
agagaggaguucaa

SEQ ID NO: 2576564 - RNA, 13 nt, Human
agagaggaguuca

SEQ ID NO: 2576565 - RNA, 21 nt, Human
agagaggaguucaaugaucua

SEQ ID NO: 2576566 - RNA, 18 nt, Human
agagaggaguucaaugau

SEQ ID NO: 2576567 - RNA, 13 nt, Human
agagaggcagaga

SEQ ID NO: 2576568 - RNA, 16 nt, Human
agagaggcagagagcg

SEQ ID NO: 2576569 - RNA, 15 nt, Human
agagaggcagagagc

SEQ ID NO: 2576570 - RNA, 14 nt, Human
agagaggcagagag

SEQ ID NO: 2576571 - RNA, 16 nt, Human
agacaaaaacagccuc

SEQ ID NO: 2576572 - RNA, 15 nt, Human
agaauuuugagcagg

SEQ ID NO: 2576573 - RNA, 20 nt, Human
agaauuuucagaccccagcg

SEQ ID NO: 2576574 - RNA, 21 nt, Human
agaauuuucagaccccagcgg

SEQ ID NO: 2576575 - RNA, 19 nt, Human
agacaaggaaaaaauaaca

SEQ ID NO: 2576576 - RNA, 14 nt, Human
agacaagcaacagg

SEQ ID NO: 2576577 - RNA, 17 nt, Human
agacaaaaacagccuca

SEQ ID NO: 2576578 - RNA, 22 nt, Human
agacaaaaacagccucacagaa

SEQ ID NO: 2576579 - RNA, 17 nt, Human
agacaagccuggccuac

SEQ ID NO: 2576580 - RNA, 13 nt, Human
agacaagcugcaa

SEQ ID NO: 2576581 - RNA, 16 nt, Human
agacaagguagcccug

SEQ ID NO: 2576582 - RNA, 23 nt, Human
agacaaugacuuacuguacauga

SEQ ID NO: 2576583 - RNA, 20 nt, Human
agacaaugugaaaagaaaaa

SEQ ID NO: 2576584 - RNA, 18 nt, Human
agacaauucuuuauacaa

SEQ ID NO: 2576585 - RNA, 14 nt, Human
agacaauucuuuau

SEQ ID NO: 2576586 - RNA, 22 nt, Human
agacaauucuuuauacaacagu

SEQ ID NO: 2576587 - RNA, 13 nt, Human
agacaauucuuua

SEQ ID NO: 2576588 - RNA, 19 nt, Human
agacgcugugcugcccugc

SEQ ID NO: 2576589 - RNA, 18 nt, Human
agacgcugugcugcccug

SEQ ID NO: 2576590 - RNA, 23 nt, Human
agacgaggcccucgggcccagcc

SEQ ID NO: 2576591 - RNA, 22 nt, Human
agacgaggcccucgggcccagc

SEQ ID NO: 2576592 - RNA, 20 nt, Human
agacgaggcccucgggccca

SEQ ID NO: 2576593 - RNA, 17 nt, Human
agacgaggcccucgggc

SEQ ID NO: 2576594 - RNA, 13 nt, Human
agacgaggcccuc

SEQ ID NO: 2576595 - RNA, 15 nt, Human
agacgagaggacgag

SEQ ID NO: 2576596 - RNA, 21 nt, Human
agacgacaaggaaaggcaaau

SEQ ID NO: 2576597 - RNA, 17 nt, Human
agacgcugugcugcccu

SEQ ID NO: 2576598 - RNA, 23 nt, Human
agacuagaauucuagugcugcug

SEQ ID NO: 2576599 - RNA, 22 nt, Human
agacuagaauucuagugcugcu

SEQ ID NO: 2576600 - RNA, 20 nt, Human
agacgcugugcugcccugcc

SEQ ID NO: 2576601 - RNA, 16 nt, Human
agacuagauugccuuu

SEQ ID NO: 2576602 - RNA, 19 nt, Human
agacuagauugccuuuguu

SEQ ID NO: 2576603 - RNA, 22 nt, Human
agacuaguuuuuauuccuugug

SEQ ID NO: 2576604 - RNA, 15 nt, Human
agacuaucagcccaa

SEQ ID NO: 2576605 - RNA, 17 nt, Human
agacuauauuguacaca

SEQ ID NO: 2576606 - RNA, 23 nt, Human
agacagcccgggcucugccuccc

SEQ ID NO: 2576607 - RNA, 22 nt, Human
agacagcccgggcucugccucc

SEQ ID NO: 2576608 - RNA, 14 nt, Human
agacaauuuauuau

SEQ ID NO: 2576609 - RNA, 21 nt, Human
agacagcccgggcucugccuc

SEQ ID NO: 2576610 - RNA, 24 nt, Human
agaccacgcccguccugccugugg

SEQ ID NO: 2576611 - RNA, 23 nt, Human
agaccacgcccguccugccugug

SEQ ID NO: 2576612 - RNA, 21 nt, Human
agaccacgcccguccugccug

SEQ ID NO: 2576613 - RNA, 20 nt, Human
agaccacgcccguccugccu

SEQ ID NO: 2576614 - RNA, 16 nt, Human
agaccaccccgccugc

SEQ ID NO: 2576615 - RNA, 19 nt, Human
agaccacgcccguccugcc

SEQ ID NO: 2576616 - RNA, 14 nt, Human
agaccaccccgccu

SEQ ID NO: 2576617 - RNA, 20 nt, Human
agacagccuguaucuugggg

SEQ ID NO: 2576618 - RNA, 11 nt, Human
agacagccugu

SEQ ID NO: 2576619 - RNA, 13 nt, Human
agacagcccucca

SEQ ID NO: 2576620 - RNA, 23 nt, Human
agaccaucccugaaggccccgcc

SEQ ID NO: 2576621 - RNA, 14 nt, Human
agaccacguuucua

SEQ ID NO: 2576622 - RNA, 17 nt, Human
agaccaugcagagcgcc

SEQ ID NO: 2576623 - RNA, 16 nt, Human
agaccaugcagagcgc

SEQ ID NO: 2576624 - RNA, 18 nt, Human
agacgaaacauuuguucu

SEQ ID NO: 2576625 - RNA, 17 nt, Human
agaccuuuucaacuugg

SEQ ID NO: 2576626 - RNA, 12 nt, Human
agaccuuuucaa

SEQ ID NO: 2576627 - RNA, 22 nt, Human
agaccuuguucacacucucaca

SEQ ID NO: 2576628 - RNA, 20 nt, Human
agaccuuugaggauaucaaa

SEQ ID NO: 2576629 - RNA, 21 nt, Human
agaccuuguucacacucucac

SEQ ID NO: 2576630 - RNA, 16 nt, Human
aggcagaaaauugcac

SEQ ID NO: 2576631 - RNA, 20 nt, Human
aggcacuuuagggcuguaaa

SEQ ID NO: 2576632 - RNA, 14 nt, Human
aggcagaaagcaaa

SEQ ID NO: 2576633 - RNA, 16 nt, Human
aggcagaaagcaaaau

SEQ ID NO: 2576634 - RNA, 19 nt, Human
aggcagaaagcaaaauuau

SEQ ID NO: 2576635 - RNA, 22 nt, Human
aggcacuuuagggcuguaaaau

SEQ ID NO: 2576636 - RNA, 20 nt, Human
aggcagagguugcagugagc

SEQ ID NO: 2576637 - RNA, 13 nt, Human
aggcagauacagg

SEQ ID NO: 2576638 - RNA, 22 nt, Human
aggcagaacucaucuagguaaa

SEQ ID NO: 2576639 - RNA, 21 nt, Human
aggcagaagaauugaacccag

SEQ ID NO: 2576640 - RNA, 15 nt, Human
aggcagaagaauuga

SEQ ID NO: 2576641 - RNA, 16 nt, Human
aggcagccaggccaca

SEQ ID NO: 2576642 - RNA, 15 nt, Human
aggcagccaggccac

SEQ ID NO: 2576643 - RNA, 14 nt, Human
aggcagccaggcca

SEQ ID NO: 2576644 - RNA, 15 nt, Human
aggcagauccaggac

SEQ ID NO: 2576645 - RNA, 16 nt, Human
aggcagauccaggacu

SEQ ID NO: 2576646 - RNA, 11 nt, Human
aggcagaucca

SEQ ID NO: 2576647 - RNA, 23 nt, Human
aggccaggcccucugcccacucc

SEQ ID NO: 2576648 - RNA, 19 nt, Human
aggccaggcccucugccca

SEQ ID NO: 2576649 - RNA, 18 nt, Human
aggccaggcccucugccc

SEQ ID NO: 2576650 - RNA, 17 nt, Human
aggccaggcccucugcc

SEQ ID NO: 2576651 - RNA, 16 nt, Human
aggccaggcccucugc

SEQ ID NO: 2576652 - RNA, 16 nt, Human
aggccagcugcuuggg

SEQ ID NO: 2576653 - RNA, 14 nt, Human
aggccagcugcuug

SEQ ID NO: 2576654 - RNA, 13 nt, Human
aggccagcugcuu

SEQ ID NO: 2576655 - RNA, 23 nt, Human
aggccaugggcacuguggguaga

SEQ ID NO: 2576656 - RNA, 19 nt, Human
aggccagggggccaguccc

SEQ ID NO: 2576657 - RNA, 23 nt, Human
aggccagggggccagucccugag

SEQ ID NO: 2576658 - RNA, 12 nt, Human
aggccaggccgg

SEQ ID NO: 2576659 - RNA, 18 nt, Human
aggcauugcacagggaga

SEQ ID NO: 2576660 - RNA, 11 nt, Human
aggccaggcuc

SEQ ID NO: 2576661 - RNA, 13 nt, Human
aggccagggcaga

SEQ ID NO: 2576662 - RNA, 15 nt, Human
aggccagggcagagu

SEQ ID NO: 2576663 - RNA, 12 nt, Human
aggccaggcucc

SEQ ID NO: 2576664 - RNA, 17 nt, Human
aggccaggcuccuuccu

SEQ ID NO: 2576665 - RNA, 22 nt, Human
aggccaggcuccuuccugucuu

SEQ ID NO: 2576666 - RNA, 17 nt, Human
aggcccucugcccacuc

SEQ ID NO: 2576667 - RNA, 17 nt, Human
aggccaugggccuccug

SEQ ID NO: 2576668 - RNA, 16 nt, Human
aggccaugggccuccu

SEQ ID NO: 2576669 - RNA, 14 nt, Human
aggccaugggccuc

SEQ ID NO: 2576670 - RNA, 22 nt, Human
aggcauguucucugaggacacu

SEQ ID NO: 2576671 - RNA, 20 nt, Human
aggcauguucucugaggaca

SEQ ID NO: 2576672 - RNA, 21 nt, Human
aggcauuccccaggaggccag

SEQ ID NO: 2576673 - RNA, 22 nt, Human
aggcauuaaauuuuagcaaaga

SEQ ID NO: 2576674 - RNA, 14 nt, Human
aggcauuaaauuuu

SEQ ID NO: 2576675 - RNA, 15 nt, Human
aggcaugccugugug

SEQ ID NO: 2576676 - RNA, 23 nt, Human
aggcauuccccaggaggccagcc

SEQ ID NO: 2576677 - RNA, 22 nt, Human
aggcauuccccaggaggccagc

SEQ ID NO: 2576678 - RNA, 12 nt, Human
aggccagcugcu

SEQ ID NO: 2576679 - RNA, 13 nt, Human
aggcauuccagcu

SEQ ID NO: 2576680 - RNA, 12 nt, Human
aggcauucaagu

SEQ ID NO: 2576681 - RNA, 24 nt, Human
aggcauuccagcuccuccgugcuu

SEQ ID NO: 2576682 - RNA, 13 nt, Human
aggcauucucuga

SEQ ID NO: 2576683 - RNA, 17 nt, Human
aggcaucgcaauguaag

SEQ ID NO: 2576684 - RNA, 11 nt, Human
aggcaugaagg

SEQ ID NO: 2576685 - RNA, 14 nt, Human
aggcaucugcaccc

SEQ ID NO: 2576686 - RNA, 15 nt, Human
aggcaugagggauca

SEQ ID NO: 2576687 - RNA, 23 nt, Human
aggcaugagggaucacagggccc

SEQ ID NO: 2576688 - RNA, 19 nt, Human
aggcaucugugggcauggu

SEQ ID NO: 2576689 - RNA, 24 nt, Human
aggcaugugaugagaggaaaucac

SEQ ID NO: 2576690 - RNA, 23 nt, Human
aggcaugugaugagaggaaauca

SEQ ID NO: 2576691 - RNA, 12 nt, Human
aggcauguucuc

SEQ ID NO: 2576692 - RNA, 20 nt, Human
aggcaugagggaucacaggg

SEQ ID NO: 2576693 - RNA, 22 nt, Human
aggcaugagggaucacagggcc

SEQ ID NO: 2576694 - RNA, 13 nt, Human
aggcaugccugug

SEQ ID NO: 2576695 - RNA, 14 nt, Human
aggcaugccugugu

SEQ ID NO: 2576696 - RNA, 22 nt, Human
aggcaugugccacccacccaac

SEQ ID NO: 2576697 - RNA, 21 nt, Human
aggaugugauauauaagugua

SEQ ID NO: 2576698 - RNA, 18 nt, Human
aggaugugauauauaagu

SEQ ID NO: 2576699 - RNA, 20 nt, Human
aggaugugauuguggaaugg

SEQ ID NO: 2576700 - RNA, 15 nt, Human
aggaugugugcaugu

SEQ ID NO: 2576701 - RNA, 21 nt, Human
aggaugugggggaagaccugg

SEQ ID NO: 2576702 - RNA, 16 nt, Human
aggaugugugcaugug

SEQ ID NO: 2576703 - RNA, 14 nt, Human
aggaugugugcaug

SEQ ID NO: 2576704 - RNA, 19 nt, Human
aggaugggggcuggccucu

SEQ ID NO: 2576705 - RNA, 17 nt, Human
aggaugggaaggaggga

SEQ ID NO: 2576706 - RNA, 11 nt, Human
aggaugggcuc

SEQ ID NO: 2576707 - RNA, 12 nt, Human
aggaugggaagg

SEQ ID NO: 2576708 - RNA, 17 nt, Human
aggauggccuggccagg

SEQ ID NO: 2576709 - RNA, 16 nt, Human
aggauggccuggccag

SEQ ID NO: 2576710 - RNA, 13 nt, Human
aggauggccuggc

SEQ ID NO: 2576711 - RNA, 20 nt, Human
aggauggccagugucugucc

SEQ ID NO: 2576712 - RNA, 23 nt, Human
aggauggccuggccagggccugg

SEQ ID NO: 2576713 - RNA, 22 nt, Human
aggauggccuggccagggccug

SEQ ID NO: 2576714 - RNA, 18 nt, Human
aggauggcuuugaaugcg

SEQ ID NO: 2576715 - RNA, 14 nt, Human
aggaugugauauau

SEQ ID NO: 2576716 - RNA, 13 nt, Human
aggaugucugggc

SEQ ID NO: 2576717 - RNA, 19 nt, Human
aggaugucacucagaugga

SEQ ID NO: 2576718 - RNA, 22 nt, Human
aggaugggucugguuugcagag

SEQ ID NO: 2576719 - RNA, 14 nt, Human
aggaggucucuaag

SEQ ID NO: 2576720 - RNA, 18 nt, Human
aggaggguuagggagggg

SEQ ID NO: 2576721 - RNA, 14 nt, Human
aggagggcagcaga

SEQ ID NO: 2576722 - RNA, 20 nt, Human
aggagggcccuaccugauug

SEQ ID NO: 2576723 - RNA, 18 nt, Human
aggagggucaggaaggau

SEQ ID NO: 2576724 - RNA, 17 nt, Human
aggagggcgugacucac

SEQ ID NO: 2576725 - RNA, 22 nt, Human
aggagggcgugacucacccaag

SEQ ID NO: 2576726 - RNA, 20 nt, Human
aggagggcaagggccaugcu

SEQ ID NO: 2576727 - RNA, 16 nt, Human
aggagggcaagggcca

SEQ ID NO: 2576728 - RNA, 19 nt, Human
aggagggaugcugccugag

SEQ ID NO: 2576729 - RNA, 15 nt, Human
aggagggagggggcu

SEQ ID NO: 2576730 - RNA, 16 nt, Human
aggagagccagcccuc

SEQ ID NO: 2576731 - RNA, 23 nt, Human
aggagggagguauucgugcagca

SEQ ID NO: 2576732 - RNA, 14 nt, Human
aggagagccagccc

SEQ ID NO: 2576733 - RNA, 15 nt, Human
aggagagccagcccu

SEQ ID NO: 2576734 - RNA, 12 nt, Human
aggagagccugc

SEQ ID NO: 2576735 - RNA, 13 nt, Human
aggagagccugcu

SEQ ID NO: 2576736 - RNA, 14 nt, Human
aggagagccugcug

SEQ ID NO: 2576737 - RNA, 15 nt, Human
aggagagccugcugc

SEQ ID NO: 2576738 - RNA, 16 nt, Human
aggagagccugcugca

SEQ ID NO: 2576739 - RNA, 18 nt, Human
aggagagccugcugcaug

SEQ ID NO: 2576740 - RNA, 13 nt, Human
aggaaguagagga

SEQ ID NO: 2576741 - RNA, 19 nt, Human
aggaaguacuggagaaaau

SEQ ID NO: 2576742 - RNA, 18 nt, Human
aggagacaguucaagaaa

SEQ ID NO: 2576743 - RNA, 14 nt, Human
aggagaccaaggcg

SEQ ID NO: 2576744 - RNA, 18 nt, Human
aggaagguuuucuccacu

SEQ ID NO: 2576745 - RNA, 14 nt, Human
aggaagguuuucuc

SEQ ID NO: 2576746 - RNA, 14 nt, Human
aggagagaguugaa

SEQ ID NO: 2576747 - RNA, 12 nt, Human
aggagagcagcg

SEQ ID NO: 2576748 - RNA, 11 nt, Human
aggagagcagc

SEQ ID NO: 2576749 - RNA, 12 nt, Human
aggagagccaga

SEQ ID NO: 2576750 - RNA, 23 nt, Human
aggagagccagagaagugacagg

SEQ ID NO: 2576751 - RNA, 21 nt, Human
aggagagccagagaagugaca

SEQ ID NO: 2576752 - RNA, 15 nt, Human
aggagagccagagaa

SEQ ID NO: 2576753 - RNA, 14 nt, Human
aggagagccagaga

SEQ ID NO: 2576754 - RNA, 16 nt, Human
aggagagcccuucauu

SEQ ID NO: 2576755 - RNA, 13 nt, Human
aggagacucaccu

SEQ ID NO: 2576756 - RNA, 14 nt, Human
aggagacucaccuc

SEQ ID NO: 2576757 - RNA, 15 nt, Human
aggagacucaccucu

SEQ ID NO: 2576758 - RNA, 16 nt, Human
aggagacucaccucug

SEQ ID NO: 2576759 - RNA, 17 nt, Human
aggagacucaccucugc

SEQ ID NO: 2576760 - RNA, 18 nt, Human
aggagacucaccucugcc

SEQ ID NO: 2576761 - RNA, 19 nt, Human
aggagacucaccucugccu

SEQ ID NO: 2576762 - RNA, 21 nt, Human
aggagacucaccucugccuca

SEQ ID NO: 2576763 - RNA, 21 nt, Human
aggagaccuggcacuggaugc

SEQ ID NO: 2576764 - RNA, 11 nt, Human
aggagacucac

SEQ ID NO: 2576765 - RNA, 17 nt, Human
aggagaccaaggcggga

SEQ ID NO: 2576766 - RNA, 14 nt, Human
aggagacccacagg

SEQ ID NO: 2576767 - RNA, 20 nt, Human
aggaguaaucuguguacaaa

SEQ ID NO: 2576768 - RNA, 23 nt, Human
aggagguuuggggucugccacca

SEQ ID NO: 2576769 - RNA, 14 nt, Human
aggagguuuggaug

SEQ ID NO: 2576770 - RNA, 18 nt, Human
aggagguuuaggucaaga

SEQ ID NO: 2576771 - RNA, 24 nt, Human
aggagucugcacaugcagcugcac

SEQ ID NO: 2576772 - RNA, 18 nt, Human
aggaguacaggugaagca

SEQ ID NO: 2576773 - RNA, 21 nt, Human
aggaguaaucuguguacaaag

SEQ ID NO: 2576774 - RNA, 12 nt, Human
aggagugagcac

SEQ ID NO: 2576775 - RNA, 15 nt, Human
aggaggugccaacag

SEQ ID NO: 2576776 - RNA, 14 nt, Human
aggaggugagggau

SEQ ID NO: 2576777 - RNA, 13 nt, Human
aggaggugaggga

SEQ ID NO: 2576778 - RNA, 15 nt, Human
aggaggucucuaaga

SEQ ID NO: 2576779 - RNA, 20 nt, Human
aggagguggaggcugcagug

SEQ ID NO: 2576780 - RNA, 16 nt, Human
aggaggugccaacagu

SEQ ID NO: 2576781 - RNA, 20 nt, Human
aggagguggagguugcagug

SEQ ID NO: 2576782 - RNA, 14 nt, Human
aggagguggcagcc

SEQ ID NO: 2576783 - RNA, 17 nt, Human
aggagguggcagcccug

SEQ ID NO: 2576784 - RNA, 18 nt, Human
aggagguggcagcccugu

SEQ ID NO: 2576785 - RNA, 20 nt, Human
aggagguggcagcccuguag

SEQ ID NO: 2576786 - RNA, 21 nt, Human
aggagguggcagcccuguagg

SEQ ID NO: 2576787 - RNA, 23 nt, Human
aggagguggcagcccuguaggga

SEQ ID NO: 2576788 - RNA, 22 nt, Human
aggagugaggaaggcaggaaga

SEQ ID NO: 2576789 - RNA, 12 nt, Human
aggagugaggaa

SEQ ID NO: 2576790 - RNA, 21 nt, Human
aggagugagaucauuuucuua

SEQ ID NO: 2576791 - RNA, 14 nt, Human
aggagugagaucau

SEQ ID NO: 2576792 - RNA, 17 nt, Human
aggagugagaggggaca

SEQ ID NO: 2576793 - RNA, 23 nt, Human
aggagugaaaccuuuagggcagc

SEQ ID NO: 2576794 - RNA, 22 nt, Human
aggagugaaaccuuuagggcag

SEQ ID NO: 2576795 - RNA, 14 nt, Human
aggagugagcacua

SEQ ID NO: 2576796 - RNA, 19 nt, Human
aggaguuccuaaccagccu

SEQ ID NO: 2576797 - RNA, 20 nt, Human
aggaguuccuugaucuguau

SEQ ID NO: 2576798 - RNA, 16 nt, Human
aggaguucgagaccag

SEQ ID NO: 2576799 - RNA, 21 nt, Human
aggaguucgagaccagccugg

SEQ ID NO: 2576800 - RNA, 19 nt, Human
aggaguucaaugaucuagg

SEQ ID NO: 2576801 - RNA, 18 nt, Human
aggaguggaggaggccug

SEQ ID NO: 2576802 - RNA, 18 nt, Human
aggaguucaaugaucuag

SEQ ID NO: 2576803 - RNA, 23 nt, Human
aggaguucagggucauagcaugc

SEQ ID NO: 2576804 - RNA, 19 nt, Human
aggauggccagugucuguc

SEQ ID NO: 2576805 - RNA, 18 nt, Human
aggauggccagugucugu

SEQ ID NO: 2576806 - RNA, 16 nt, Human
aggauggccagugucu

SEQ ID NO: 2576807 - RNA, 19 nt, Human
aggauggaggggugguccu

SEQ ID NO: 2576808 - RNA, 15 nt, Human
aggauggccaguguc

SEQ ID NO: 2576809 - RNA, 19 nt, Human
aggaguuucgagguagagu

SEQ ID NO: 2576810 - RNA, 12 nt, Human
aggauggagggg

SEQ ID NO: 2576811 - RNA, 21 nt, Human
aggaguugcuguuuguuugac

SEQ ID NO: 2576812 - RNA, 14 nt, Human
aggaguugcuguuu

SEQ ID NO: 2576813 - RNA, 18 nt, Human
aggaguuucguuuucaaa

SEQ ID NO: 2576814 - RNA, 22 nt, Human
aggaguucgagaccagccuggc

SEQ ID NO: 2576815 - RNA, 16 nt, Human
aggaguucgaggcugc

SEQ ID NO: 2576816 - RNA, 17 nt, Human
aggaguucgaggcugca

SEQ ID NO: 2576817 - RNA, 14 nt, Human
agggacugagaaau

SEQ ID NO: 2576818 - RNA, 13 nt, Human
agggacugagaaa

SEQ ID NO: 2576819 - RNA, 15 nt, Human
agggacugagaaauu

SEQ ID NO: 2576820 - RNA, 22 nt, Human
agggacucugaagccucuggga

SEQ ID NO: 2576821 - RNA, 14 nt, Human
agggacugaagcca

SEQ ID NO: 2576822 - RNA, 17 nt, Human
agggacugagaaauuua

SEQ ID NO: 2576823 - RNA, 18 nt, Human
agggauggcggguggggg

SEQ ID NO: 2576824 - RNA, 19 nt, Human
agggauggccguuggccac

SEQ ID NO: 2576825 - RNA, 15 nt, Human
agggauggccguugg

SEQ ID NO: 2576826 - RNA, 17 nt, Human
agggauggauuccaacc

SEQ ID NO: 2576827 - RNA, 16 nt, Human
agggauggauuccaac

SEQ ID NO: 2576828 - RNA, 18 nt, Human
agggauggacugaugcuu

SEQ ID NO: 2576829 - RNA, 20 nt, Human
agggauuagggagagaagau

SEQ ID NO: 2576830 - RNA, 13 nt, Human
agggauggcgggu

SEQ ID NO: 2576831 - RNA, 19 nt, Human
agggauucaggcugcuugg

SEQ ID NO: 2576832 - RNA, 16 nt, Human
agggauucaggcugcu

SEQ ID NO: 2576833 - RNA, 18 nt, Human
agggauucaggcugcuug

SEQ ID NO: 2576834 - RNA, 18 nt, Human
agggauucacaucugcau

SEQ ID NO: 2576835 - RNA, 13 nt, Human
agggauggugccc

SEQ ID NO: 2576836 - RNA, 14 nt, Human
agggauucaggcug

SEQ ID NO: 2576837 - RNA, 15 nt, Human
agggauucaggcugc

SEQ ID NO: 2576838 - RNA, 15 nt, Human
agggaugcauggaga

SEQ ID NO: 2576839 - RNA, 18 nt, Human
agggaugaugccacacca

SEQ ID NO: 2576840 - RNA, 16 nt, Human
agggaugaugccacac

SEQ ID NO: 2576841 - RNA, 19 nt, Human
agggaugaggugcugggag

SEQ ID NO: 2576842 - RNA, 23 nt, Human
agggaugaggugcugggagggau

SEQ ID NO: 2576843 - RNA, 15 nt, Human
agggaugcccuggag

SEQ ID NO: 2576844 - RNA, 17 nt, Human
agggaugcccuggaggu

SEQ ID NO: 2576845 - RNA, 19 nt, Human
agggaugcccuggaggugg

SEQ ID NO: 2576846 - RNA, 20 nt, Human
agggaugcccuggagguggc

SEQ ID NO: 2576847 - RNA, 18 nt, Human
agggaugccaucuguggg

SEQ ID NO: 2576848 - RNA, 17 nt, Human
agggauggacugaugcu

SEQ ID NO: 2576849 - RNA, 13 nt, Human
agggauggacuga

SEQ ID NO: 2576850 - RNA, 21 nt, Human
agggaugcccuggagguggcu

SEQ ID NO: 2576851 - RNA, 15 nt, Human
agggauggaaaagga

SEQ ID NO: 2576852 - RNA, 22 nt, Human
agggauggaaaaggaagacuag

SEQ ID NO: 2576853 - RNA, 16 nt, Human
agggaugcugccugag

SEQ ID NO: 2576854 - RNA, 17 nt, Human
agggaugcugccugagu

SEQ ID NO: 2576855 - RNA, 18 nt, Human
agggaugcugccugaguc

SEQ ID NO: 2576856 - RNA, 19 nt, Human
agggaugcugccugaguca

SEQ ID NO: 2576857 - RNA, 19 nt, Human
agggaugagcauggagcug

SEQ ID NO: 2576858 - RNA, 18 nt, Human
agggaugaaggccucccu

SEQ ID NO: 2576859 - RNA, 22 nt, Human
agggaugacuaaaauauuuauu

SEQ ID NO: 2576860 - RNA, 21 nt, Human
agggaugagcauggagcuggc

SEQ ID NO: 2576861 - RNA, 20 nt, Human
agggaugagcauggagcugg

SEQ ID NO: 2576862 - RNA, 16 nt, Human
agggaugaggugcugg

SEQ ID NO: 2576863 - RNA, 17 nt, Human
agggaugaggugcuggg

SEQ ID NO: 2576864 - RNA, 17 nt, Human
agggaugaaagagaagg

SEQ ID NO: 2576865 - RNA, 22 nt, Human
agggaucuugcauucccagugg

SEQ ID NO: 2576866 - RNA, 15 nt, Human
agggaugacuaaaau

SEQ ID NO: 2576867 - RNA, 20 nt, Human
agggaucuugcauucccagu

SEQ ID NO: 2576868 - RNA, 19 nt, Human
agggaucuugcauucccag

SEQ ID NO: 2576869 - RNA, 22 nt, Human
agggaucugguccuacccaucc

SEQ ID NO: 2576870 - RNA, 22 nt, Human
agggaucccucaucugucccuc

SEQ ID NO: 2576871 - RNA, 18 nt, Human
agggcuagaaccuggcag

SEQ ID NO: 2576872 - RNA, 23 nt, Human
agggcuagaaccuggaggggcua

SEQ ID NO: 2576873 - RNA, 21 nt, Human
agggcuagaaccuggaggggc

SEQ ID NO: 2576874 - RNA, 22 nt, Human
agggcuagaaccuggagggcug

SEQ ID NO: 2576875 - RNA, 22 nt, Human
agggcuagaaccuggagggcua

SEQ ID NO: 2576876 - RNA, 18 nt, Human
agggcuagaaccuggagg

SEQ ID NO: 2576877 - RNA, 20 nt, Human
agggcuagaaccuggagagc

SEQ ID NO: 2576878 - RNA, 19 nt, Human
agggcuagaaccuggagag

SEQ ID NO: 2576879 - RNA, 19 nt, Human
agggcuagaaccuggagaa

SEQ ID NO: 2576880 - RNA, 18 nt, Human
agggcuagaaccuggaga

SEQ ID NO: 2576881 - RNA, 17 nt, Human
agggcuagaaccuggag

SEQ ID NO: 2576882 - RNA, 22 nt, Human
agggcuagaaccuggaagggcu

SEQ ID NO: 2576883 - RNA, 19 nt, Human
agggcuagaaccuggaagg

SEQ ID NO: 2576884 - RNA, 18 nt, Human
agggcuagaaccuggaag

SEQ ID NO: 2576885 - RNA, 17 nt, Human
agggcuagaaccuggaa

SEQ ID NO: 2576886 - RNA, 16 nt, Human
agggcuagaaccugga

SEQ ID NO: 2576887 - RNA, 17 nt, Human
agggcuacccugagcug

SEQ ID NO: 2576888 - RNA, 18 nt, Human
agggcuacccugagcuga

SEQ ID NO: 2576889 - RNA, 20 nt, Human
agggcuacccugagcugagg

SEQ ID NO: 2576890 - RNA, 21 nt, Human
agggcuacccugagcugaggc

SEQ ID NO: 2576891 - RNA, 22 nt, Human
agggcuagaaccuagaagggcu

SEQ ID NO: 2576892 - RNA, 21 nt, Human
agggcuagaaccuagaagggc

SEQ ID NO: 2576893 - RNA, 17 nt, Human
agggcuagaaccuagaa

SEQ ID NO: 2576894 - RNA, 21 nt, Human
agggcuacugcagcuuuacau

SEQ ID NO: 2576895 - RNA, 22 nt, Human
agggcuacccugagcugaggca

SEQ ID NO: 2576896 - RNA, 23 nt, Human
agggcuacccugagcugaggcag

SEQ ID NO: 2576897 - RNA, 24 nt, Human
agggcuagugacuugugucccaug

SEQ ID NO: 2576898 - RNA, 22 nt, Human
agggcuagugacuuguguccca

SEQ ID NO: 2576899 - RNA, 19 nt, Human
agggcuauagcucaggacc

SEQ ID NO: 2576900 - RNA, 18 nt, Human
agggcuagaaucuggaga

SEQ ID NO: 2576901 - RNA, 18 nt, Human
agggcuagaacuggagag

SEQ ID NO: 2576902 - RNA, 17 nt, Human
agggcuagaacuggaga

SEQ ID NO: 2576903 - RNA, 22 nt, Human
agggcuagaaccuguagagcua

SEQ ID NO: 2576904 - RNA, 16 nt, Human
agggcuagcaucccug

SEQ ID NO: 2576905 - RNA, 20 nt, Human
agggcuagaaucuggagagc

SEQ ID NO: 2576906 - RNA, 16 nt, Human
aggggcaucugccccu

SEQ ID NO: 2576907 - RNA, 17 nt, Human
aggggcaucugccccuc

SEQ ID NO: 2576908 - RNA, 19 nt, Human
aggggcaucugccccuccc

SEQ ID NO: 2576909 - RNA, 20 nt, Human
aggggcaucugccccucccc

SEQ ID NO: 2576910 - RNA, 21 nt, Human
aggggcaucugccccuccccc

SEQ ID NO: 2576911 - RNA, 22 nt, Human
aggggcaucugccccuccccca

SEQ ID NO: 2576912 - RNA, 18 nt, Human
aggggcauggccagcagc

SEQ ID NO: 2576913 - RNA, 19 nt, Human
aggggcauguauuggccug

SEQ ID NO: 2576914 - RNA, 18 nt, Human
agggccuggcucaggugg

SEQ ID NO: 2576915 - RNA, 12 nt, Human
agggauuugagg

SEQ ID NO: 2576916 - RNA, 16 nt, Human
agggauugcugccacu

SEQ ID NO: 2576917 - RNA, 15 nt, Human
agggcuacccugagc

SEQ ID NO: 2576918 - RNA, 19 nt, Human
agggcuacccucccccagg

SEQ ID NO: 2576919 - RNA, 14 nt, Human
agggcuaagagcua

SEQ ID NO: 2576920 - RNA, 21 nt, Human
agggcuaagagcuagcgcugc

SEQ ID NO: 2576921 - RNA, 22 nt, Human
agggcuaagagcuagcgcugcc

SEQ ID NO: 2576922 - RNA, 23 nt, Human
agggcuaagagcuagcgcugccg

SEQ ID NO: 2576923 - RNA, 14 nt, Human
agggcgugggagcg

SEQ ID NO: 2576924 - RNA, 13 nt, Human
agggcguggaggg

SEQ ID NO: 2576925 - RNA, 13 nt, Human
agggcuaagagcu

SEQ ID NO: 2576926 - RNA, 17 nt, Human
agggcgugacucaccca

SEQ ID NO: 2576927 - RNA, 19 nt, Human
agggcgugacucacccaag

SEQ ID NO: 2576928 - RNA, 19 nt, Human
agggcguggaaaggggcag

SEQ ID NO: 2576929 - RNA, 14 nt, Human
agggccuggcucag

SEQ ID NO: 2576930 - RNA, 13 nt, Human
agggccuggcuca

SEQ ID NO: 2576931 - RNA, 22 nt, Human
agggauuuggggcucagagugg

SEQ ID NO: 2576932 - RNA, 20 nt, Human
agggauucugguuccagggu

SEQ ID NO: 2576933 - RNA, 20 nt, Human
aggcccucugcccacucccu

SEQ ID NO: 2576934 - RNA, 19 nt, Human
aggcccucugcccacuccc

SEQ ID NO: 2576935 - RNA, 20 nt, Human
aggccagggucacugaaggc

SEQ ID NO: 2576936 - RNA, 23 nt, Human
aggccagggcuauagcucaggac

SEQ ID NO: 2576937 - RNA, 12 nt, Human
aggccaggguca

SEQ ID NO: 2576938 - RNA, 13 nt, Human
aggcugagccuca

SEQ ID NO: 2576939 - RNA, 19 nt, Human
aggcucuucuccccagagu

SEQ ID NO: 2576940 - RNA, 14 nt, Human
aggcugaggaaagg

SEQ ID NO: 2576941 - RNA, 11 nt, Human
aggcugagccu

SEQ ID NO: 2576942 - RNA, 13 nt, Human
aggcucuucuccu

SEQ ID NO: 2576943 - RNA, 11 nt, Human
aggcugaggac

SEQ ID NO: 2576944 - RNA, 15 nt, Human
aggcugaggaaaggc

SEQ ID NO: 2576945 - RNA, 18 nt, Human
aggcugaggaaaggccag

SEQ ID NO: 2576946 - RNA, 19 nt, Human
aggcugaggaaaggccagc

SEQ ID NO: 2576947 - RNA, 20 nt, Human
aggcugaggaaaggccagcu

SEQ ID NO: 2576948 - RNA, 13 nt, Human
aggcugaggacuu

SEQ ID NO: 2576949 - RNA, 18 nt, Human
aggcugaggcaagagaau

SEQ ID NO: 2576950 - RNA, 22 nt, Human
aggcugaggaaaggccagcugg

SEQ ID NO: 2576951 - RNA, 11 nt, Human
aggcugaggca

SEQ ID NO: 2576952 - RNA, 17 nt, Human
aggcuagcuucugcuuu

SEQ ID NO: 2576953 - RNA, 15 nt, Human
aggcuagcuucugcu

SEQ ID NO: 2576954 - RNA, 18 nt, Human
aggcuagcuucugcuuuu

SEQ ID NO: 2576955 - RNA, 13 nt, Human
aggcucugugcug

SEQ ID NO: 2576956 - RNA, 22 nt, Human
aggcucuggagcccacuguacu

SEQ ID NO: 2576957 - RNA, 22 nt, Human
aggcucuuagcagcuuccagau

SEQ ID NO: 2576958 - RNA, 19 nt, Human
aggcucuuagcagcuucca

SEQ ID NO: 2576959 - RNA, 18 nt, Human
aggcucuucuccccagag

SEQ ID NO: 2576960 - RNA, 17 nt, Human
aggcucuucuccccaga

SEQ ID NO: 2576961 - RNA, 16 nt, Human
aggcucuucuccccag

SEQ ID NO: 2576962 - RNA, 18 nt, Human
aggcucugugcugacccu

SEQ ID NO: 2576963 - RNA, 17 nt, Human
aggcucugugcugaccc

SEQ ID NO: 2576964 - RNA, 16 nt, Human
aggcucugugcugacc

SEQ ID NO: 2576965 - RNA, 22 nt, Human
aggcucugugcugacccuccug

SEQ ID NO: 2576966 - RNA, 21 nt, Human
aggcucugugcugacccuccu

SEQ ID NO: 2576967 - RNA, 23 nt, Human
aggcuguaucccaugagccucag

SEQ ID NO: 2576968 - RNA, 14 nt, Human
aggcugaggcagaa

SEQ ID NO: 2576969 - RNA, 21 nt, Human
aggcugcagucagucaugaug

SEQ ID NO: 2576970 - RNA, 17 nt, Human
aggcugcagugagccga

SEQ ID NO: 2576971 - RNA, 19 nt, Human
aggcugcagugagccgaga

SEQ ID NO: 2576972 - RNA, 12 nt, Human
aggcugucaauu

SEQ ID NO: 2576973 - RNA, 20 nt, Human
aggcuguucccauguagccc

SEQ ID NO: 2576974 - RNA, 19 nt, Human
aggcugucaauuacaggaa

SEQ ID NO: 2576975 - RNA, 17 nt, Human
aggcugccaaggccaga

SEQ ID NO: 2576976 - RNA, 24 nt, Human
aggcuguaucccaugagccucagc

SEQ ID NO: 2576977 - RNA, 17 nt, Human
agggacaggauaagagg

SEQ ID NO: 2576978 - RNA, 13 nt, Human
agggacauauuca

SEQ ID NO: 2576979 - RNA, 19 nt, Human
agggacauguuuugauaaa

SEQ ID NO: 2576980 - RNA, 15 nt, Human
agggacauauucauu

SEQ ID NO: 2576981 - RNA, 23 nt, Human
agggacauauucauuuggaaaua

SEQ ID NO: 2576982 - RNA, 24 nt, Human
agggacauguuuugauaaaguagu

SEQ ID NO: 2576983 - RNA, 22 nt, Human
agggacauguuuugauaaagua

SEQ ID NO: 2576984 - RNA, 20 nt, Human
agggacauguuuugauaaag

SEQ ID NO: 2576985 - RNA, 16 nt, Human
agggaccaacugggcc

SEQ ID NO: 2576986 - RNA, 17 nt, Human
agggaccaacugggccc

SEQ ID NO: 2576987 - RNA, 19 nt, Human
agggaccaacugggcccaa

SEQ ID NO: 2576988 - RNA, 14 nt, Human
agggaccaaggacc

SEQ ID NO: 2576989 - RNA, 18 nt, Human
agggaccaaggaccccuc

SEQ ID NO: 2576990 - RNA, 20 nt, Human
agggacucugaagccucugg

SEQ ID NO: 2576991 - RNA, 21 nt, Human
agggacucugaagccucuggg

SEQ ID NO: 2576992 - RNA, 19 nt, Human
agggaccaaggaccccuca

SEQ ID NO: 2576993 - RNA, 18 nt, Human
aggcuuaauaccugggug

SEQ ID NO: 2576994 - RNA, 14 nt, Human
aggcuuacacccac

SEQ ID NO: 2576995 - RNA, 18 nt, Human
agcuaaacggauuccaaa

SEQ ID NO: 2576996 - RNA, 17 nt, Human
agcuaaacggauuccaa

SEQ ID NO: 2576997 - RNA, 18 nt, Human
agcuaaauuacaauuguc

SEQ ID NO: 2576998 - RNA, 13 nt, Human
agcuaaauccuuu

SEQ ID NO: 2576999 - RNA, 13 nt, Human
agcuaaagaggcu

SEQ ID NO: 2577000 - RNA, 15 nt, Human
agcuaaagaggcuga

SEQ ID NO: 2577001 - RNA, 21 nt, Human
agcuaaagaggcugaaagagg

SEQ ID NO: 2577002 - RNA, 16 nt, Human
agcuaaagcccaaccu

SEQ ID NO: 2577003 - RNA, 19 nt, Human
agcuaacauggaaguacua

SEQ ID NO: 2577004 - RNA, 19 nt, Human
agcuaacacacagcuccca

SEQ ID NO: 2577005 - RNA, 18 nt, Human
agcuaacacacagcuccc

SEQ ID NO: 2577006 - RNA, 17 nt, Human
agcuaacacacagcucc

SEQ ID NO: 2577007 - RNA, 16 nt, Human
agcuaacacacagcuc

SEQ ID NO: 2577008 - RNA, 16 nt, Human
agcuaacacuggcccc

SEQ ID NO: 2577009 - RNA, 17 nt, Human
agcuaacacuggccccu

SEQ ID NO: 2577010 - RNA, 18 nt, Human
agcuaacacuggccccua

SEQ ID NO: 2577011 - RNA, 19 nt, Human
agcuaacacuggccccuag

SEQ ID NO: 2577012 - RNA, 17 nt, Human
agcuaacauuuuaaaua

SEQ ID NO: 2577013 - RNA, 20 nt, Human
agcuaacauggaaguacuau

SEQ ID NO: 2577014 - RNA, 12 nt, Human
agcuaagaaccu

SEQ ID NO: 2577015 - RNA, 13 nt, Human
agcuaagaaccug

SEQ ID NO: 2577016 - RNA, 19 nt, Human
agcuaagaaauaaaacugu

SEQ ID NO: 2577017 - RNA, 15 nt, Human
agcuaagaaauaaaa

SEQ ID NO: 2577018 - RNA, 13 nt, Human
agcuaagaaauaa

SEQ ID NO: 2577019 - RNA, 14 nt, Human
agcuaagaaaagau

SEQ ID NO: 2577020 - RNA, 23 nt, Human
agcuaacauuuuaaauaaaagaa

SEQ ID NO: 2577021 - RNA, 20 nt, Human
agcuaacauuuuaaauaaaa

SEQ ID NO: 2577022 - RNA, 18 nt, Human
agcuaacauuuuaaauaa

SEQ ID NO: 2577023 - RNA, 22 nt, Human
agcuaacauuuuaaauaaaaga

SEQ ID NO: 2577024 - RNA, 23 nt, Human
agcuaacccccuucuacugagcc

SEQ ID NO: 2577025 - RNA, 20 nt, Human
agcgaaugcuaggucucgga

SEQ ID NO: 2577026 - RNA, 16 nt, Human
agcgaacuugacaauu

SEQ ID NO: 2577027 - RNA, 12 nt, Human
agcgaagggagu

SEQ ID NO: 2577028 - RNA, 13 nt, Human
agcgaauuuuaaa

SEQ ID NO: 2577029 - RNA, 15 nt, Human
agcgaauuuuaaaag

SEQ ID NO: 2577030 - RNA, 16 nt, Human
agcgaauuuuaaaaga

SEQ ID NO: 2577031 - RNA, 13 nt, Human
agcgacagugaga

SEQ ID NO: 2577032 - RNA, 15 nt, Human
agcgacagugagacu

SEQ ID NO: 2577033 - RNA, 15 nt, Human
agcgacaaagaugau

SEQ ID NO: 2577034 - RNA, 14 nt, Human
agcgacaaagauga

SEQ ID NO: 2577035 - RNA, 15 nt, Human
agcgauucuucugcu

SEQ ID NO: 2577036 - RNA, 19 nt, Human
agcgauucuucugcuucag

SEQ ID NO: 2577037 - RNA, 17 nt, Human
agcgauucuucugcuuc

SEQ ID NO: 2577038 - RNA, 12 nt, Human
agcuacaaaugc

SEQ ID NO: 2577039 - RNA, 15 nt, Human
agcuaaugggacacu

SEQ ID NO: 2577040 - RNA, 14 nt, Human
agcuaaugggacac

SEQ ID NO: 2577041 - RNA, 13 nt, Human
agcuaaugggaca

SEQ ID NO: 2577042 - RNA, 17 nt, Human
agcuaaucuguagggcu

SEQ ID NO: 2577043 - RNA, 13 nt, Human
agcuaaucuguag

SEQ ID NO: 2577044 - RNA, 19 nt, Human
agcuaagugaaaaggucau

SEQ ID NO: 2577045 - RNA, 20 nt, Human
agcuaaucuguagggcugga

SEQ ID NO: 2577046 - RNA, 19 nt, Human
agcuaaucuguagggcugg

SEQ ID NO: 2577047 - RNA, 23 nt, Human
agcuaaucuguagggcuggaccu

SEQ ID NO: 2577048 - RNA, 17 nt, Human
agcuaagcuaggaauga

SEQ ID NO: 2577049 - RNA, 17 nt, Human
agcuaagaaccuggaac

SEQ ID NO: 2577050 - RNA, 14 nt, Human
agcuaagaaccugg

SEQ ID NO: 2577051 - RNA, 16 nt, Human
agcuaagaaccuggaa

SEQ ID NO: 2577052 - RNA, 18 nt, Human
agcuaagcuaggaaugaa

SEQ ID NO: 2577053 - RNA, 16 nt, Human
agcuaaggacauuucc

SEQ ID NO: 2577054 - RNA, 19 nt, Human
agcuaaggacauuucccag

SEQ ID NO: 2577055 - RNA, 21 nt, Human
agcucaccagccccagugccc

SEQ ID NO: 2577056 - RNA, 14 nt, Human
agcucaccagcccc

SEQ ID NO: 2577057 - RNA, 13 nt, Human
agcucaccagccc

SEQ ID NO: 2577058 - RNA, 13 nt, Human
agcuacaaaugca

SEQ ID NO: 2577059 - RNA, 21 nt, Human
agcucacaauaaaaauggcuc

SEQ ID NO: 2577060 - RNA, 20 nt, Human
agcucacaguuccucgcccu

SEQ ID NO: 2577061 - RNA, 16 nt, Human
agcucacacaugagau

SEQ ID NO: 2577062 - RNA, 22 nt, Human
agcuacaccuuucuccuuugua

SEQ ID NO: 2577063 - RNA, 21 nt, Human
agcuacaccuuucuccuuugu

SEQ ID NO: 2577064 - RNA, 18 nt, Human
agccuggcacagggcagu

SEQ ID NO: 2577065 - RNA, 17 nt, Human
agccuggcacagggcag

SEQ ID NO: 2577066 - RNA, 11 nt, Human
agccuggaggc

SEQ ID NO: 2577067 - RNA, 23 nt, Human
agccuggaggccgggugcucagg

SEQ ID NO: 2577068 - RNA, 12 nt, Human
agccuggccaga

SEQ ID NO: 2577069 - RNA, 13 nt, Human
agccuggccagac

SEQ ID NO: 2577070 - RNA, 20 nt, Human
agccuggcacagggcagugg

SEQ ID NO: 2577071 - RNA, 14 nt, Human
agccuggccaacau

SEQ ID NO: 2577072 - RNA, 14 nt, Human
agccuggagaagcu

SEQ ID NO: 2577073 - RNA, 13 nt, Human
agccuggagaagc

SEQ ID NO: 2577074 - RNA, 11 nt, Human
agccuggagaa

SEQ ID NO: 2577075 - RNA, 18 nt, Human
agccuggacccccagcuu

SEQ ID NO: 2577076 - RNA, 17 nt, Human
agccuggacccccagcu

SEQ ID NO: 2577077 - RNA, 16 nt, Human
agccuggacccccagc

SEQ ID NO: 2577078 - RNA, 21 nt, Human
agccuggaacaucaucaaggc

SEQ ID NO: 2577079 - RNA, 20 nt, Human
agccuggaacaucaucaagg

SEQ ID NO: 2577080 - RNA, 19 nt, Human
agccuggaacaucaucaag

SEQ ID NO: 2577081 - RNA, 15 nt, Human
agccuggacccccag

SEQ ID NO: 2577082 - RNA, 14 nt, Human
agccugcuuuuuaa

SEQ ID NO: 2577083 - RNA, 14 nt, Human
agccuggacccugu

SEQ ID NO: 2577084 - RNA, 17 nt, Human
agccugcugccugcuuu

SEQ ID NO: 2577085 - RNA, 11 nt, Human
agccugcugca

SEQ ID NO: 2577086 - RNA, 23 nt, Human
agccugcuggucacagccuccuc

SEQ ID NO: 2577087 - RNA, 22 nt, Human
agccugcuggucacagccuccu

SEQ ID NO: 2577088 - RNA, 21 nt, Human
agccugcuggucacagccucc

SEQ ID NO: 2577089 - RNA, 20 nt, Human
agccugcuggucacagccuc

SEQ ID NO: 2577090 - RNA, 18 nt, Human
agccugcuggcacccacc

SEQ ID NO: 2577091 - RNA, 11 nt, Human
agccugcuggc

SEQ ID NO: 2577092 - RNA, 17 nt, Human
agccugcuggcacccac

SEQ ID NO: 2577093 - RNA, 10 nt, Human
agccugcugg

SEQ ID NO: 2577094 - RNA, 12 nt, Human
agccugcugcau

SEQ ID NO: 2577095 - RNA, 17 nt, Human
agccuggcccagcuccc

SEQ ID NO: 2577096 - RNA, 16 nt, Human
agccuggcccagcucc

SEQ ID NO: 2577097 - RNA, 15 nt, Human
agccuggcccagcuc

SEQ ID NO: 2577098 - RNA, 14 nt, Human
agccuggcccagcu

SEQ ID NO: 2577099 - RNA, 18 nt, Human
agccuggcccagcucccc

SEQ ID NO: 2577100 - RNA, 16 nt, Human
agccuggccccauggu

SEQ ID NO: 2577101 - RNA, 17 nt, Human
agccuggccccaugguc

SEQ ID NO: 2577102 - RNA, 13 nt, Human
agccuggcccagc

SEQ ID NO: 2577103 - RNA, 12 nt, Human
agccuggcccag

SEQ ID NO: 2577104 - RNA, 17 nt, Human
agccuggccagccuaca

SEQ ID NO: 2577105 - RNA, 21 nt, Human
agccuggccagacacaggccc

SEQ ID NO: 2577106 - RNA, 22 nt, Human
agccuggccagacacaggcccu

SEQ ID NO: 2577107 - RNA, 14 nt, Human
agccuggccagaca

SEQ ID NO: 2577108 - RNA, 15 nt, Human
agccuggccagacac

SEQ ID NO: 2577109 - RNA, 16 nt, Human
agccuggccagacaca

SEQ ID NO: 2577110 - RNA, 18 nt, Human
agccuggccagacacagg

SEQ ID NO: 2577111 - RNA, 15 nt, Human
agccugggcaacaga

SEQ ID NO: 2577112 - RNA, 17 nt, Human
agccugggcaacagagc

SEQ ID NO: 2577113 - RNA, 18 nt, Human
agccugggcaacagagca

SEQ ID NO: 2577114 - RNA, 20 nt, Human
agccugggaggucaaggcug

SEQ ID NO: 2577115 - RNA, 18 nt, Human
agccugggcaaugugaua

SEQ ID NO: 2577116 - RNA, 20 nt, Human
agccugggcaacagagcaag

SEQ ID NO: 2577117 - RNA, 17 nt, Human
agccugggcagcauagc

SEQ ID NO: 2577118 - RNA, 20 nt, Human
agccugggcagcauagcaag

SEQ ID NO: 2577119 - RNA, 15 nt, Human
agccugggcagccag

SEQ ID NO: 2577120 - RNA, 16 nt, Human
agccuuuuucuaggcc

SEQ ID NO: 2577121 - RNA, 11 nt, Human
agccuuugaau

SEQ ID NO: 2577122 - RNA, 15 nt, Human
agccuuugccucccc

SEQ ID NO: 2577123 - RNA, 21 nt, Human
agccuuugaauaaaaaugcac

SEQ ID NO: 2577124 - RNA, 16 nt, Human
agccuuugccuccccg

SEQ ID NO: 2577125 - RNA, 18 nt, Human
agcgaaccaauauuugua

SEQ ID NO: 2577126 - RNA, 12 nt, Human
agcgaaacuccg

SEQ ID NO: 2577127 - RNA, 15 nt, Human
agccuuuaaugcauc

SEQ ID NO: 2577128 - RNA, 14 nt, Human
agccuuuaaugcau

SEQ ID NO: 2577129 - RNA, 23 nt, Human
agccuugugucuacagagaaccu

SEQ ID NO: 2577130 - RNA, 13 nt, Human
agccuuuaaugca

SEQ ID NO: 2577131 - RNA, 20 nt, Human
agccuugugucuacagagaa

SEQ ID NO: 2577132 - RNA, 17 nt, Human
agccugggcagccaggc

SEQ ID NO: 2577133 - RNA, 18 nt, Human
agccugggcagccaggcu

SEQ ID NO: 2577134 - RNA, 17 nt, Human
agccuugugucuacaga

SEQ ID NO: 2577135 - RNA, 14 nt, Human
agccuuuccauaag

SEQ ID NO: 2577136 - RNA, 22 nt, Human
agccuuuccauaaggaauguag

SEQ ID NO: 2577137 - RNA, 16 nt, Human
agccuuucucccaggc

SEQ ID NO: 2577138 - RNA, 23 nt, Human
agccuuuccauaaggaauguagc

SEQ ID NO: 2577139 - RNA, 15 nt, Human
agccuuucuuuugga

SEQ ID NO: 2577140 - RNA, 23 nt, Human
agcucaccagccccagugcccac

SEQ ID NO: 2577141 - RNA, 22 nt, Human
agcucaccagccccagugccca

SEQ ID NO: 2577142 - RNA, 17 nt, Human
agcucacccaauaaaca

SEQ ID NO: 2577143 - RNA, 21 nt, Human
agcucacaguuccucgcccug

SEQ ID NO: 2577144 - RNA, 23 nt, Human
agcucacaguuccucgcccuggg

SEQ ID NO: 2577145 - RNA, 20 nt, Human
agcuccucgagggcagggac

SEQ ID NO: 2577146 - RNA, 17 nt, Human
agcuccucgagggcagg

SEQ ID NO: 2577147 - RNA, 16 nt, Human
agcuccucuccccagc

SEQ ID NO: 2577148 - RNA, 17 nt, Human
agcuccucuccccagcc

SEQ ID NO: 2577149 - RNA, 18 nt, Human
agcuccucuccccagccc

SEQ ID NO: 2577150 - RNA, 19 nt, Human
agcuccucuccccagccca

SEQ ID NO: 2577151 - RNA, 20 nt, Human
agcuccucuccccagcccag

SEQ ID NO: 2577152 - RNA, 21 nt, Human
agcuccucuccccagcccaga

SEQ ID NO: 2577153 - RNA, 22 nt, Human
agcuccucuccccagcccagag

SEQ ID NO: 2577154 - RNA, 23 nt, Human
agcuccucuccccagcccagaga

SEQ ID NO: 2577155 - RNA, 18 nt, Human
agcuccucuccuggagga

SEQ ID NO: 2577156 - RNA, 17 nt, Human
agcuccucuccuggagg

SEQ ID NO: 2577157 - RNA, 16 nt, Human
agcuccucuccuggag

SEQ ID NO: 2577158 - RNA, 15 nt, Human
agcuccucuccugga

SEQ ID NO: 2577159 - RNA, 14 nt, Human
agcuccucuccugg

SEQ ID NO: 2577160 - RNA, 13 nt, Human
agcuccucuccug

SEQ ID NO: 2577161 - RNA, 24 nt, Human
agcuccucuccccagcccagagac

SEQ ID NO: 2577162 - RNA, 17 nt, Human
agcucuugugaggaaag

SEQ ID NO: 2577163 - RNA, 16 nt, Human
agcucuugugaggaaa

SEQ ID NO: 2577164 - RNA, 13 nt, Human
agcucuugugagg

SEQ ID NO: 2577165 - RNA, 12 nt, Human
agcucuugugag

SEQ ID NO: 2577166 - RNA, 21 nt, Human
agcucuugugaggaaagucau

SEQ ID NO: 2577167 - RNA, 12 nt, Human
agcucuuuccuc

SEQ ID NO: 2577168 - RNA, 23 nt, Human
agcucuugcuaaucagugucuca

SEQ ID NO: 2577169 - RNA, 13 nt, Human
agcucuuuccucc

SEQ ID NO: 2577170 - RNA, 15 nt, Human
agcucuuuccuccuu

SEQ ID NO: 2577171 - RNA, 17 nt, Human
agcucuuuccuccuucc

SEQ ID NO: 2577172 - RNA, 13 nt, Human
agcucuugcuaau

SEQ ID NO: 2577173 - RNA, 22 nt, Human
agcucuugcccuucccuguccc

SEQ ID NO: 2577174 - RNA, 21 nt, Human
agcucuugcccuucccugucc

SEQ ID NO: 2577175 - RNA, 19 nt, Human
agcucuugcccuucccugu

SEQ ID NO: 2577176 - RNA, 12 nt, Human
agcuccucuggg

SEQ ID NO: 2577177 - RNA, 14 nt, Human
agcuccucugggca

SEQ ID NO: 2577178 - RNA, 18 nt, Human
agcucuugcccuucccug

SEQ ID NO: 2577179 - RNA, 16 nt, Human
agcucuugcccuuccc

SEQ ID NO: 2577180 - RNA, 21 nt, Human
agcucuugcuaaucagugucu

SEQ ID NO: 2577181 - RNA, 20 nt, Human
agcucuugcuaaucaguguc

SEQ ID NO: 2577182 - RNA, 19 nt, Human
agcucuugcuaaucagugu

SEQ ID NO: 2577183 - RNA, 15 nt, Human
agcucuugcuaauca

SEQ ID NO: 2577184 - RNA, 16 nt, Human
agcucuuggcuccacu

SEQ ID NO: 2577185 - RNA, 15 nt, Human
agcugacuuuucugu

SEQ ID NO: 2577186 - RNA, 21 nt, Human
agcugacuuuucuguccgagc

SEQ ID NO: 2577187 - RNA, 22 nt, Human
agcugaccucuguuguccuccc

SEQ ID NO: 2577188 - RNA, 21 nt, Human
agcugaccucuguuguccucc

SEQ ID NO: 2577189 - RNA, 22 nt, Human
agcucuuuccuccuuccaugga

SEQ ID NO: 2577190 - RNA, 23 nt, Human
agcucuuuccuccuuccauggaa

SEQ ID NO: 2577191 - RNA, 22 nt, Human
agcucuuuggcagucuauaugu

SEQ ID NO: 2577192 - RNA, 17 nt, Human
agcugaccucuguuguc

SEQ ID NO: 2577193 - RNA, 19 nt, Human
agcugacgaacuuccaugg

SEQ ID NO: 2577194 - RNA, 14 nt, Human
agcugcugaaacaa

SEQ ID NO: 2577195 - RNA, 15 nt, Human
agcugcugaaacaac

SEQ ID NO: 2577196 - RNA, 16 nt, Human
agcugcugaaacaaca

SEQ ID NO: 2577197 - RNA, 20 nt, Human
agcugcugaaacaacaaaua

SEQ ID NO: 2577198 - RNA, 14 nt, Human
agcugccuucccua

SEQ ID NO: 2577199 - RNA, 13 nt, Human
agcugccuucccu

SEQ ID NO: 2577200 - RNA, 12 nt, Human
agcugccuuccc

SEQ ID NO: 2577201 - RNA, 10 nt, Human
agcugccuuc

SEQ ID NO: 2577202 - RNA, 19 nt, Human
agcugccuucccuagcuuu

SEQ ID NO: 2577203 - RNA, 18 nt, Human
agcugccuucccuagcuu

SEQ ID NO: 2577204 - RNA, 17 nt, Human
agcugccuucccuagcu

SEQ ID NO: 2577205 - RNA, 16 nt, Human
agcugccuucccuagc

SEQ ID NO: 2577206 - RNA, 14 nt, Human
agcugccuuggcuc

SEQ ID NO: 2577207 - RNA, 16 nt, Human
agcugccuuggcucag

SEQ ID NO: 2577208 - RNA, 17 nt, Human
agcugccuuggcucaga

SEQ ID NO: 2577209 - RNA, 19 nt, Human
agcugccuuggcucagaca

SEQ ID NO: 2577210 - RNA, 20 nt, Human
agcugccuuggcucagacau

SEQ ID NO: 2577211 - RNA, 17 nt, Human
agcugcgcuugcuuuuc

SEQ ID NO: 2577212 - RNA, 22 nt, Human
agcugccuugagccuuaaaacc

SEQ ID NO: 2577213 - RNA, 15 nt, Human
agcuggucccacuca

SEQ ID NO: 2577214 - RNA, 22 nt, Human
agcugguaguuaguagcauguu

SEQ ID NO: 2577215 - RNA, 19 nt, Human
agcugguaguuaguagcau

SEQ ID NO: 2577216 - RNA, 21 nt, Human
agcugguaguuaguagcaugu

SEQ ID NO: 2577217 - RNA, 14 nt, Human
agcuggguuggaaa

SEQ ID NO: 2577218 - RNA, 16 nt, Human
agcuggguuggaaaac

SEQ ID NO: 2577219 - RNA, 20 nt, Human
agcuggguuggaaaacagua

SEQ ID NO: 2577220 - RNA, 18 nt, Human
agcugcgcuugcuuuucu

SEQ ID NO: 2577221 - RNA, 20 nt, Human
agcugguaaucuugcucugc

SEQ ID NO: 2577222 - RNA, 15 nt, Human
agcugguaguuagua

SEQ ID NO: 2577223 - RNA, 15 nt, Human
agcugguuagaaaug

SEQ ID NO: 2577224 - RNA, 18 nt, Human
agcuggugucugauuguu

SEQ ID NO: 2577225 - RNA, 16 nt, Human
agcuggugguuucacg

SEQ ID NO: 2577226 - RNA, 14 nt, Human
agcuggugguuuca

SEQ ID NO: 2577227 - RNA, 12 nt, Human
agcuggugguuu

SEQ ID NO: 2577228 - RNA, 13 nt, Human
agcuggugggaag

SEQ ID NO: 2577229 - RNA, 15 nt, Human
agcuggugggaagcg

SEQ ID NO: 2577230 - RNA, 21 nt, Human
agcuggugguaucugaguuga

SEQ ID NO: 2577231 - RNA, 18 nt, Human
agcuguaugauucccagc

SEQ ID NO: 2577232 - RNA, 17 nt, Human
agcuguaugauucccag

SEQ ID NO: 2577233 - RNA, 19 nt, Human
agcuguauugaaucaugua

SEQ ID NO: 2577234 - RNA, 17 nt, Human
agcugguuagaaaugca

SEQ ID NO: 2577235 - RNA, 11 nt, Human
agcuguauuga

SEQ ID NO: 2577236 - RNA, 16 nt, Human
agcuguauugaaucau

SEQ ID NO: 2577237 - RNA, 15 nt, Human
agcuguauugaauca

SEQ ID NO: 2577238 - RNA, 15 nt, Human
aggaaguacuggaga

SEQ ID NO: 2577239 - RNA, 11 nt, Human
aggaaguacug

SEQ ID NO: 2577240 - RNA, 14 nt, Human
aggaaggugguggg

SEQ ID NO: 2577241 - RNA, 14 nt, Human
aggaagguucuggu

SEQ ID NO: 2577242 - RNA, 16 nt, Human
aggaagguucuggugu

SEQ ID NO: 2577243 - RNA, 21 nt, Human
aggaagguucuggugugaacu

SEQ ID NO: 2577244 - RNA, 16 nt, Human
aggaagguggauggcc

SEQ ID NO: 2577245 - RNA, 15 nt, Human
aggaagguggauggc

SEQ ID NO: 2577246 - RNA, 22 nt, Human
aggaagaacggggcucuucuca

SEQ ID NO: 2577247 - RNA, 18 nt, Human
aggaagaacggggcucuu

SEQ ID NO: 2577248 - RNA, 12 nt, Human
aggaagaacggg

SEQ ID NO: 2577249 - RNA, 21 nt, Human
aggaagaacacccucuaaaug

SEQ ID NO: 2577250 - RNA, 20 nt, Human
aggaagaagcuuaggcaggg

SEQ ID NO: 2577251 - RNA, 15 nt, Human
aggaagaauuuuaaa

SEQ ID NO: 2577252 - RNA, 18 nt, Human
aggaagaagcuuaggcag

SEQ ID NO: 2577253 - RNA, 17 nt, Human
aggaagaagcuuaggca

SEQ ID NO: 2577254 - RNA, 16 nt, Human
aggaagaagcuuaggc

SEQ ID NO: 2577255 - RNA, 14 nt, Human
aggaagguagaaau

SEQ ID NO: 2577256 - RNA, 20 nt, Human
aggaagaauuuuaaaaauga

SEQ ID NO: 2577257 - RNA, 17 nt, Human
aggaagaauuuuaaaaa

SEQ ID NO: 2577258 - RNA, 23 nt, Human
aggaagaauuuuaaaaaugaauc

SEQ ID NO: 2577259 - RNA, 12 nt, Human
aggaacacuccu

SEQ ID NO: 2577260 - RNA, 23 nt, Human
aggaacaaggcaaggcugucaau

SEQ ID NO: 2577261 - RNA, 23 nt, Human
aggaaaaccaagccguggcuucc

SEQ ID NO: 2577262 - RNA, 22 nt, Human
aggaaaaccaagccguggcuuc

SEQ ID NO: 2577263 - RNA, 21 nt, Human
aggaaaaccaagccguggcuu

SEQ ID NO: 2577264 - RNA, 20 nt, Human
aggaaaaccaagccguggcu

SEQ ID NO: 2577265 - RNA, 15 nt, Human
aggaacacuccuuca

SEQ ID NO: 2577266 - RNA, 13 nt, Human
aggaacagaagga

SEQ ID NO: 2577267 - RNA, 14 nt, Human
aggaacagaaggau

SEQ ID NO: 2577268 - RNA, 21 nt, Human
aggaacagaaggaugaaugag

SEQ ID NO: 2577269 - RNA, 21 nt, Human
aggaacagcuaugggagcccc

SEQ ID NO: 2577270 - RNA, 23 nt, Human
aggaacuuaaauaaugugaaacu

SEQ ID NO: 2577271 - RNA, 16 nt, Human
aggaacauaugaaaau

SEQ ID NO: 2577272 - RNA, 23 nt, Human
aggaacacccgacuccucaaaag

SEQ ID NO: 2577273 - RNA, 14 nt, Human
aggaacuuccaggu

SEQ ID NO: 2577274 - RNA, 15 nt, Human
aggaagaaaucacag

SEQ ID NO: 2577275 - RNA, 13 nt, Human
aggaagaaaucac

SEQ ID NO: 2577276 - RNA, 21 nt, Human
agcuuugugacuguauauaaa

SEQ ID NO: 2577277 - RNA, 12 nt, Human
agcuuuguucuu

SEQ ID NO: 2577278 - RNA, 18 nt, Human
agcuuuguucuucuuaaa

SEQ ID NO: 2577279 - RNA, 19 nt, Human
agcuuuguuucaaccaagu

SEQ ID NO: 2577280 - RNA, 22 nt, Human
agcuuuguuuguugucagcuga

SEQ ID NO: 2577281 - RNA, 21 nt, Human
agcuuuguuuguugucagcug

SEQ ID NO: 2577282 - RNA, 17 nt, Human
agcuuuuugucuuuucu

SEQ ID NO: 2577283 - RNA, 14 nt, Human
agcuuuuuucuuua

SEQ ID NO: 2577284 - RNA, 21 nt, Human
agcuuuuuuccuuaauccagc

SEQ ID NO: 2577285 - RNA, 18 nt, Human
agcuuuuuuacacaaaug

SEQ ID NO: 2577286 - RNA, 21 nt, Human
aggaaaaaaaucguccaggga

SEQ ID NO: 2577287 - RNA, 18 nt, Human
aggaaaaaauaacaauga

SEQ ID NO: 2577288 - RNA, 19 nt, Human
aggaaaaauguguaauuuu

SEQ ID NO: 2577289 - RNA, 15 nt, Human
aggaaaaauguguaa

SEQ ID NO: 2577290 - RNA, 13 nt, Human
aggaaaaacaggu

SEQ ID NO: 2577291 - RNA, 19 nt, Human
aggaaaaccaagccguggc

SEQ ID NO: 2577292 - RNA, 19 nt, Human
aggaaaaacacaagcaaaa

SEQ ID NO: 2577293 - RNA, 17 nt, Human
aggaaaaacacaagcaa

SEQ ID NO: 2577294 - RNA, 23 nt, Human
aggaaaaaauguuggauuuauaa

SEQ ID NO: 2577295 - RNA, 14 nt, Human
aggaaaaaaaugac

SEQ ID NO: 2577296 - RNA, 15 nt, Human
aggaaaaaaaugacu

SEQ ID NO: 2577297 - RNA, 22 nt, Human
aggaaaaaaaucguccagggag

SEQ ID NO: 2577298 - RNA, 14 nt, Human
acugauuuuuguga

SEQ ID NO: 2577299 - RNA, 19 nt, Human
acugauuuuuguaagacaa

SEQ ID NO: 2577300 - RNA, 18 nt, Human
acugauuuuuguaagaca

SEQ ID NO: 2577301 - RNA, 15 nt, Human
acugauuuuuguaag

SEQ ID NO: 2577302 - RNA, 15 nt, Human
acugauuuuugugau

SEQ ID NO: 2577303 - RNA, 23 nt, Human
acugaauuauaagaggcugauaa

SEQ ID NO: 2577304 - RNA, 19 nt, Human
acugaauuauaagaggcug

SEQ ID NO: 2577305 - RNA, 12 nt, Human
acugaauuucuu

SEQ ID NO: 2577306 - RNA, 13 nt, Human
acugaauuaauca

SEQ ID NO: 2577307 - RNA, 21 nt, Human
acugaauuaaucaucuauaaa

SEQ ID NO: 2577308 - RNA, 22 nt, Human
acugaauuaaugacagagccag

SEQ ID NO: 2577309 - RNA, 19 nt, Human
acucuaccagacuguguau

SEQ ID NO: 2577310 - RNA, 17 nt, Human
acucuacccauauuaca

SEQ ID NO: 2577311 - RNA, 19 nt, Human
acucuacccauauuacaga

SEQ ID NO: 2577312 - RNA, 13 nt, Human
acucuacccuccc

SEQ ID NO: 2577313 - RNA, 15 nt, Human
acucuacccucccac

SEQ ID NO: 2577314 - RNA, 16 nt, Human
acucuacccucccacc

SEQ ID NO: 2577315 - RNA, 18 nt, Human
acucuacccucccacccc

SEQ ID NO: 2577316 - RNA, 19 nt, Human
acucuacccucccaccccc

SEQ ID NO: 2577317 - RNA, 12 nt, Human
acugaaugaggu

SEQ ID NO: 2577318 - RNA, 20 nt, Human
acugaaugaggucagcaugu

SEQ ID NO: 2577319 - RNA, 23 nt, Human
acugaaugaaacccccacacaca

SEQ ID NO: 2577320 - RNA, 19 nt, Human
acugaauguuuauuccuug

SEQ ID NO: 2577321 - RNA, 16 nt, Human
acugaaugcucugugc

SEQ ID NO: 2577322 - RNA, 21 nt, Human
acugaaugccucaaugugacc

SEQ ID NO: 2577323 - RNA, 22 nt, Human
acugaaugcuucugacuucaua

SEQ ID NO: 2577324 - RNA, 18 nt, Human
acugacauuguuggccaa

SEQ ID NO: 2577325 - RNA, 17 nt, Human
acugacauuguuggcca

SEQ ID NO: 2577326 - RNA, 20 nt, Human
acugacaccuuugcaggcau

SEQ ID NO: 2577327 - RNA, 17 nt, Human
acugacaccuuugcagg

SEQ ID NO: 2577328 - RNA, 18 nt, Human
acugacauguggggccag

SEQ ID NO: 2577329 - RNA, 12 nt, Human
acugacaugugg

SEQ ID NO: 2577330 - RNA, 21 nt, Human
acugacaggcagccuggacau

SEQ ID NO: 2577331 - RNA, 18 nt, Human
acugacagccucccaccc

SEQ ID NO: 2577332 - RNA, 23 nt, Human
acugacacaaaaaguagauuaag

SEQ ID NO: 2577333 - RNA, 22 nt, Human
acugacacccauguuucucugg

SEQ ID NO: 2577334 - RNA, 21 nt, Human
acugacacccauguuucucug

SEQ ID NO: 2577335 - RNA, 16 nt, Human
acugacacccauguuu

SEQ ID NO: 2577336 - RNA, 23 nt, Human
acugaauuucuuuugccguuauu

SEQ ID NO: 2577337 - RNA, 17 nt, Human
acugaauuguccccagu

SEQ ID NO: 2577338 - RNA, 14 nt, Human
acugauuacugccu

SEQ ID NO: 2577339 - RNA, 22 nt, Human
acugauguuacaucacaguguu

SEQ ID NO: 2577340 - RNA, 21 nt, Human
acugauguuacaucacagugu

SEQ ID NO: 2577341 - RNA, 23 nt, Human
acugaugggcaacccccagccug

SEQ ID NO: 2577342 - RNA, 17 nt, Human
acugaucaugcauuguu

SEQ ID NO: 2577343 - RNA, 20 nt, Human
acugauguaugaggaauuuc

SEQ ID NO: 2577344 - RNA, 19 nt, Human
acugauaugggucuugaua

SEQ ID NO: 2577345 - RNA, 20 nt, Human
acugacaggcagccuggaca

SEQ ID NO: 2577346 - RNA, 22 nt, Human
acugacauguggggccagguca

SEQ ID NO: 2577347 - RNA, 17 nt, Human
acugauauauuuuacaa

SEQ ID NO: 2577348 - RNA, 16 nt, Human
acugauccagcccuga

SEQ ID NO: 2577349 - RNA, 17 nt, Human
acugauccagcccugag

SEQ ID NO: 2577350 - RNA, 15 nt, Human
acugaucaugcauug

SEQ ID NO: 2577351 - RNA, 16 nt, Human
acugaucaugcauugu

SEQ ID NO: 2577352 - RNA, 18 nt, Human
acugaucaugcauuguug

SEQ ID NO: 2577353 - RNA, 15 nt, Human
acugaucacaaaaac

SEQ ID NO: 2577354 - RNA, 20 nt, Human
acugauuuuuuuuuccuuca

SEQ ID NO: 2577355 - RNA, 19 nt, Human
acugauuuuuuuuuccuuc

SEQ ID NO: 2577356 - RNA, 18 nt, Human
acugauuuuuuuuuccuu

SEQ ID NO: 2577357 - RNA, 17 nt, Human
acugauuuuuuuuuccu

SEQ ID NO: 2577358 - RNA, 16 nt, Human
acugauuuuuuuuucc

SEQ ID NO: 2577359 - RNA, 14 nt, Human
acugauuuuuguaa

SEQ ID NO: 2577360 - RNA, 22 nt, Human
acugauuuuguuauuuuuauau

SEQ ID NO: 2577361 - RNA, 16 nt, Human
acugauuuggagauau

SEQ ID NO: 2577362 - RNA, 14 nt, Human
acugauuuccuuug

SEQ ID NO: 2577363 - RNA, 13 nt, Human
acugauuuccuuu

SEQ ID NO: 2577364 - RNA, 19 nt, Human
acucguuaauuuguagugu

SEQ ID NO: 2577365 - RNA, 14 nt, Human
acucguuaauuugu

SEQ ID NO: 2577366 - RNA, 19 nt, Human
acucuaaaagguucaggga

SEQ ID NO: 2577367 - RNA, 18 nt, Human
acucuaaaagguucaggg

SEQ ID NO: 2577368 - RNA, 16 nt, Human
acucuaaaagguucag

SEQ ID NO: 2577369 - RNA, 15 nt, Human
acucuaaaagguuca

SEQ ID NO: 2577370 - RNA, 21 nt, Human
acucuaaaagauccuuuuuaa

SEQ ID NO: 2577371 - RNA, 15 nt, Human
acucuaaaagauccu

SEQ ID NO: 2577372 - RNA, 14 nt, Human
acucuaaaagaucc

SEQ ID NO: 2577373 - RNA, 12 nt, Human
acucuaaaagau

SEQ ID NO: 2577374 - RNA, 19 nt, Human
acucuacauaauuuagagu

SEQ ID NO: 2577375 - RNA, 13 nt, Human
acucuacauaauu

SEQ ID NO: 2577376 - RNA, 14 nt, Human
acucuaccagacug

SEQ ID NO: 2577377 - RNA, 16 nt, Human
acucuacacugugaac

SEQ ID NO: 2577378 - RNA, 15 nt, Human
acucuacagaggcca

SEQ ID NO: 2577379 - RNA, 21 nt, Human
acuccguuggccacuccgaga

SEQ ID NO: 2577380 - RNA, 18 nt, Human
acuccguuggccacuccg

SEQ ID NO: 2577381 - RNA, 16 nt, Human
acuccgucucaaggaa

SEQ ID NO: 2577382 - RNA, 17 nt, Human
acuccguuggccacucc

SEQ ID NO: 2577383 - RNA, 15 nt, Human
acuccguuggccacu

SEQ ID NO: 2577384 - RNA, 22 nt, Human
acuccggguuugagauggacac

SEQ ID NO: 2577385 - RNA, 15 nt, Human
acuccgucucaagga

SEQ ID NO: 2577386 - RNA, 21 nt, Human
acuccggugugccugcagccc

SEQ ID NO: 2577387 - RNA, 19 nt, Human
acuccggugugccugcagc

SEQ ID NO: 2577388 - RNA, 20 nt, Human
acuccggugugccugcagcc

SEQ ID NO: 2577389 - RNA, 17 nt, Human
acuccggggagcgcccg

SEQ ID NO: 2577390 - RNA, 15 nt, Human
acuccggugugccug

SEQ ID NO: 2577391 - RNA, 16 nt, Human
acuccggugugccugc

SEQ ID NO: 2577392 - RNA, 23 nt, Human
acuccggccugaugacagagcga

SEQ ID NO: 2577393 - RNA, 19 nt, Human
acuccggccugaugacaga

SEQ ID NO: 2577394 - RNA, 15 nt, Human
acuccggcccuccua

SEQ ID NO: 2577395 - RNA, 18 nt, Human
acuccggagugagaagcu

SEQ ID NO: 2577396 - RNA, 14 nt, Human
acuccggcccuccu

SEQ ID NO: 2577397 - RNA, 16 nt, Human
acucccacacccaaga

SEQ ID NO: 2577398 - RNA, 19 nt, Human
acucccaagucuacagagu

SEQ ID NO: 2577399 - RNA, 23 nt, Human
acucccaaguaugggguucaaga

SEQ ID NO: 2577400 - RNA, 14 nt, Human
acucccaaguaugg

SEQ ID NO: 2577401 - RNA, 15 nt, Human
acucccaagcuggac

SEQ ID NO: 2577402 - RNA, 13 nt, Human
acuccaugagcac

SEQ ID NO: 2577403 - RNA, 17 nt, Human
acuccaugagaagccgu

SEQ ID NO: 2577404 - RNA, 21 nt, Human
acuccaugcuuagucacugcc

SEQ ID NO: 2577405 - RNA, 17 nt, Human
acuccaugagcacccca

SEQ ID NO: 2577406 - RNA, 22 nt, Human
acucccaucugugaaaggaaag

SEQ ID NO: 2577407 - RNA, 16 nt, Human
acucccacuucccuga

SEQ ID NO: 2577408 - RNA, 14 nt, Human
acucccacuucccu

SEQ ID NO: 2577409 - RNA, 20 nt, Human
acucccacuucccugacacu

SEQ ID NO: 2577410 - RNA, 17 nt, Human
acucccacuucccugac

SEQ ID NO: 2577411 - RNA, 17 nt, Human
acucccagacacccacc

SEQ ID NO: 2577412 - RNA, 13 nt, Human
acucccauuccug

SEQ ID NO: 2577413 - RNA, 16 nt, Human
acucccauuccugaag

SEQ ID NO: 2577414 - RNA, 20 nt, Human
acucccauuccugaagaacc

SEQ ID NO: 2577415 - RNA, 13 nt, Human
acucccaggcagc

SEQ ID NO: 2577416 - RNA, 22 nt, Human
acucccaguccaaauguccucc

SEQ ID NO: 2577417 - RNA, 21 nt, Human
acucccucgucgagcuggaug

SEQ ID NO: 2577418 - RNA, 18 nt, Human
acucccugccccccagcc

SEQ ID NO: 2577419 - RNA, 17 nt, Human
acucccuggcucucaga

SEQ ID NO: 2577420 - RNA, 13 nt, Human
acucccuucccau

SEQ ID NO: 2577421 - RNA, 18 nt, Human
acucccuggcucucagaa

SEQ ID NO: 2577422 - RNA, 15 nt, Human
acucccuucuaccug

SEQ ID NO: 2577423 - RNA, 23 nt, Human
acucccuucccaugacccaggcu

SEQ ID NO: 2577424 - RNA, 21 nt, Human
acucccuucccaugacccagg

SEQ ID NO: 2577425 - RNA, 15 nt, Human
acucccuucccauaa

SEQ ID NO: 2577426 - RNA, 22 nt, Human
acucccauuccugaagaaccag

SEQ ID NO: 2577427 - RNA, 15 nt, Human
acucccuccucaccu

SEQ ID NO: 2577428 - RNA, 13 nt, Human
acucccuccucac

SEQ ID NO: 2577429 - RNA, 16 nt, Human
acucccuccucaccuc

SEQ ID NO: 2577430 - RNA, 19 nt, Human
acucccuccucaccucugg

SEQ ID NO: 2577431 - RNA, 20 nt, Human
acucccuccucaccucugga

SEQ ID NO: 2577432 - RNA, 22 nt, Human
acucccuccucaccucuggacu

SEQ ID NO: 2577433 - RNA, 20 nt, Human
acucccuucuaccugccacu

SEQ ID NO: 2577434 - RNA, 19 nt, Human
acucccuucuaccugccac

SEQ ID NO: 2577435 - RNA, 18 nt, Human
acucccuucuaccugcca

SEQ ID NO: 2577436 - RNA, 17 nt, Human
acucccuucuaccugcc

SEQ ID NO: 2577437 - RNA, 23 nt, Human
acuccgagaggugggccagucug

SEQ ID NO: 2577438 - RNA, 22 nt, Human
acuccgagaggugggccagucu

SEQ ID NO: 2577439 - RNA, 14 nt, Human
acucccuuucaaca

SEQ ID NO: 2577440 - RNA, 14 nt, Human
acuccggagacagg

SEQ ID NO: 2577441 - RNA, 22 nt, Human
acuccgcuggagguggggccug

SEQ ID NO: 2577442 - RNA, 14 nt, Human
acuccgcuggaggu

SEQ ID NO: 2577443 - RNA, 23 nt, Human
acuccggagugagaagcuuugcc

SEQ ID NO: 2577444 - RNA, 16 nt, Human
acuccggagacagggu

SEQ ID NO: 2577445 - RNA, 15 nt, Human
acuccggagacaggg

SEQ ID NO: 2577446 - RNA, 13 nt, Human
acuccggcccucc

SEQ ID NO: 2577447 - RNA, 18 nt, Human
acugugcccugguggaga

SEQ ID NO: 2577448 - RNA, 17 nt, Human
acugugcccugguggag

SEQ ID NO: 2577449 - RNA, 15 nt, Human
acugugcccuggugg

SEQ ID NO: 2577450 - RNA, 14 nt, Human
acugugcccuggug

SEQ ID NO: 2577451 - RNA, 13 nt, Human
acugugcccuggu

SEQ ID NO: 2577452 - RNA, 12 nt, Human
acugugcccugg

SEQ ID NO: 2577453 - RNA, 21 nt, Human
acugucuuuuuuucccuacca

SEQ ID NO: 2577454 - RNA, 18 nt, Human
acugugccaugugccagg

SEQ ID NO: 2577455 - RNA, 17 nt, Human
acugugccaugugccag

SEQ ID NO: 2577456 - RNA, 23 nt, Human
acugucuuuuuucuaaaguaaaa

SEQ ID NO: 2577457 - RNA, 22 nt, Human
acugucuuuuuucuaaaguaaa

SEQ ID NO: 2577458 - RNA, 16 nt, Human
acugugccaugugcca

SEQ ID NO: 2577459 - RNA, 14 nt, Human
acugucuuuccuag

SEQ ID NO: 2577460 - RNA, 22 nt, Human
acuguaacugugucaugauuca

SEQ ID NO: 2577461 - RNA, 16 nt, Human
acugugaagagaacca

SEQ ID NO: 2577462 - RNA, 18 nt, Human
acuguaaagaaagagaga

SEQ ID NO: 2577463 - RNA, 19 nt, Human
acuguaaagaaagagagaa

SEQ ID NO: 2577464 - RNA, 20 nt, Human
acuguaaagaaagagagaaa

SEQ ID NO: 2577465 - RNA, 21 nt, Human
acuguaaagaaagagagaaaa

SEQ ID NO: 2577466 - RNA, 22 nt, Human
acuguaaagaaagagagaaaau

SEQ ID NO: 2577467 - RNA, 23 nt, Human
acuguaaagaaagagagaaaaua

SEQ ID NO: 2577468 - RNA, 18 nt, Human
acuguaaauaaaaagaaa

SEQ ID NO: 2577469 - RNA, 13 nt, Human
acuguaacacuuu

SEQ ID NO: 2577470 - RNA, 10 nt, Human
acuguaacac

SEQ ID NO: 2577471 - RNA, 20 nt, Human
acuguaacacuuuacaaugu

SEQ ID NO: 2577472 - RNA, 23 nt, Human
acuguaaagagaccuaccucagg

SEQ ID NO: 2577473 - RNA, 17 nt, Human
acuguaaagagaccuac

SEQ ID NO: 2577474 - RNA, 16 nt, Human
acugucuuuuuucuaa

SEQ ID NO: 2577475 - RNA, 13 nt, Human
acuguaaagaaag

SEQ ID NO: 2577476 - RNA, 14 nt, Human
acuguaaagaaaga

SEQ ID NO: 2577477 - RNA, 15 nt, Human
acuguaaagaaagag

SEQ ID NO: 2577478 - RNA, 16 nt, Human
acuguaaagaaagaga

SEQ ID NO: 2577479 - RNA, 23 nt, Human
acuggugcuauaggcuggagaag

SEQ ID NO: 2577480 - RNA, 16 nt, Human
acuguaaaaugaaauu

SEQ ID NO: 2577481 - RNA, 17 nt, Human
acuguaaaauaauaacu

SEQ ID NO: 2577482 - RNA, 12 nt, Human
acugguggcccg

SEQ ID NO: 2577483 - RNA, 21 nt, Human
acuggugacugcgaucuucag

SEQ ID NO: 2577484 - RNA, 12 nt, Human
acuggugacugc

SEQ ID NO: 2577485 - RNA, 14 nt, Human
acuggugagcagac

SEQ ID NO: 2577486 - RNA, 16 nt, Human
acuggugagcagacug

SEQ ID NO: 2577487 - RNA, 14 nt, Human
acuggaguggagca

SEQ ID NO: 2577488 - RNA, 18 nt, Human
acuggagugcagggagga

SEQ ID NO: 2577489 - RNA, 17 nt, Human
acuggaguggagcauug

SEQ ID NO: 2577490 - RNA, 16 nt, Human
acuggagguugaagcc

SEQ ID NO: 2577491 - RNA, 23 nt, Human
acuggaggucacauucaggaaga

SEQ ID NO: 2577492 - RNA, 21 nt, Human
acuggaggucacauucaggaa

SEQ ID NO: 2577493 - RNA, 20 nt, Human
acuggaggucacauucagga

SEQ ID NO: 2577494 - RNA, 19 nt, Human
acuggaggucacauucagg

SEQ ID NO: 2577495 - RNA, 14 nt, Human
acuggaggucacau

SEQ ID NO: 2577496 - RNA, 21 nt, Human
acuggaggggacgcugguaga

SEQ ID NO: 2577497 - RNA, 22 nt, Human
acuggaggggacgcugguagag

SEQ ID NO: 2577498 - RNA, 18 nt, Human
acuggagguugaagccaa

SEQ ID NO: 2577499 - RNA, 17 nt, Human
acuggagguugaagcca

SEQ ID NO: 2577500 - RNA, 19 nt, Human
acuggagguugaagccaag

SEQ ID NO: 2577501 - RNA, 12 nt, Human
acuggaguccag

SEQ ID NO: 2577502 - RNA, 17 nt, Human
acuggagugcagggagg

SEQ ID NO: 2577503 - RNA, 13 nt, Human
acuggagugcagg

SEQ ID NO: 2577504 - RNA, 17 nt, Human
acuggaguccagucucu

SEQ ID NO: 2577505 - RNA, 15 nt, Human
acuggaaaggggaga

SEQ ID NO: 2577506 - RNA, 17 nt, Human
acuggaaaggggagagc

SEQ ID NO: 2577507 - RNA, 16 nt, Human
acugccuacugcaucg

SEQ ID NO: 2577508 - RNA, 14 nt, Human
acugccuacugcau

SEQ ID NO: 2577509 - RNA, 15 nt, Human
acugccuauuuuaau

SEQ ID NO: 2577510 - RNA, 23 nt, Human
acuggaaaggggagagccugcug

SEQ ID NO: 2577511 - RNA, 22 nt, Human
acuggaaaggggagagccugcu

SEQ ID NO: 2577512 - RNA, 21 nt, Human
acuggaaaggggagagccugc

SEQ ID NO: 2577513 - RNA, 20 nt, Human
acuggaaaggggagagccug

SEQ ID NO: 2577514 - RNA, 12 nt, Human
acuggaacucuc

SEQ ID NO: 2577515 - RNA, 20 nt, Human
acuggaggagagaagaauga

SEQ ID NO: 2577516 - RNA, 18 nt, Human
acuggaggagagaagaau

SEQ ID NO: 2577517 - RNA, 17 nt, Human
acuggaggagagaagaa

SEQ ID NO: 2577518 - RNA, 16 nt, Human
acuggagcccaggagu

SEQ ID NO: 2577519 - RNA, 16 nt, Human
acuggaggagagaaga

SEQ ID NO: 2577520 - RNA, 16 nt, Human
acuggaaccagggaga

SEQ ID NO: 2577521 - RNA, 15 nt, Human
acuggaaccagggag

SEQ ID NO: 2577522 - RNA, 11 nt, Human
acuggagcccc

SEQ ID NO: 2577523 - RNA, 14 nt, Human
acugccaugccagc

SEQ ID NO: 2577524 - RNA, 21 nt, Human
acugccauggaggcacacagc

SEQ ID NO: 2577525 - RNA, 18 nt, Human
acugccauggaggcacac

SEQ ID NO: 2577526 - RNA, 15 nt, Human
acugccuaagcccuc

SEQ ID NO: 2577527 - RNA, 14 nt, Human
acugccuaagcccu

SEQ ID NO: 2577528 - RNA, 19 nt, Human
acugccgaccgaggcugga

SEQ ID NO: 2577529 - RNA, 18 nt, Human
acugccgaccgaggcugg

SEQ ID NO: 2577530 - RNA, 22 nt, Human
acugccgcaagucugcagcccg

SEQ ID NO: 2577531 - RNA, 22 nt, Human
acugccgaccgaggcuggagcu

SEQ ID NO: 2577532 - RNA, 23 nt, Human
acugccgaccgaggcuggagcug

SEQ ID NO: 2577533 - RNA, 19 nt, Human
acugcccaggccugccugu

SEQ ID NO: 2577534 - RNA, 14 nt, Human
acugcccacccccu

SEQ ID NO: 2577535 - RNA, 13 nt, Human
acugcccaccccc

SEQ ID NO: 2577536 - RNA, 19 nt, Human
acugcccaaagugcuucca

SEQ ID NO: 2577537 - RNA, 14 nt, Human
acugcccaaagugc

SEQ ID NO: 2577538 - RNA, 16 nt, Human
acugcccacccccuca

SEQ ID NO: 2577539 - RNA, 15 nt, Human
acugcccacccccuc

SEQ ID NO: 2577540 - RNA, 17 nt, Human
acugcccacccccucaa

SEQ ID NO: 2577541 - RNA, 15 nt, Human
acuguuucaaacuuu

SEQ ID NO: 2577542 - RNA, 18 nt, Human
acuguuucaaacuuuacu

SEQ ID NO: 2577543 - RNA, 19 nt, Human
acuguuucaaacuuuacua

SEQ ID NO: 2577544 - RNA, 12 nt, Human
acuguuucucug

SEQ ID NO: 2577545 - RNA, 13 nt, Human
acuguuuuuaccc

SEQ ID NO: 2577546 - RNA, 14 nt, Human
acuguuuuuuccug

SEQ ID NO: 2577547 - RNA, 23 nt, Human
acuguuuuuacccauauccccuc

SEQ ID NO: 2577548 - RNA, 21 nt, Human
acuguuuuuacccauaucccc

SEQ ID NO: 2577549 - RNA, 17 nt, Human
acuguuuuuacccauau

SEQ ID NO: 2577550 - RNA, 16 nt, Human
acuguuuuuacccaua

SEQ ID NO: 2577551 - RNA, 15 nt, Human
acuguuuuuacccau

SEQ ID NO: 2577552 - RNA, 14 nt, Human
acuguuuuuaccca

SEQ ID NO: 2577553 - RNA, 23 nt, Human
acuguuuuucagggagguggcug

SEQ ID NO: 2577554 - RNA, 18 nt, Human
acuucaaauccuugaaga

SEQ ID NO: 2577555 - RNA, 17 nt, Human
acuucaaauccuugaag

SEQ ID NO: 2577556 - RNA, 22 nt, Human
acuuaaaaaugguuuaaauggu

SEQ ID NO: 2577557 - RNA, 18 nt, Human
acuuaaaaauguaaauau

SEQ ID NO: 2577558 - RNA, 17 nt, Human
acuuaaaaauguaaaua

SEQ ID NO: 2577559 - RNA, 16 nt, Human
acuuaaaaauguaaau

SEQ ID NO: 2577560 - RNA, 14 nt, Human
acuuaaaaauguaa

SEQ ID NO: 2577561 - RNA, 23 nt, Human
acuuaaaaauguaaauauucuau

SEQ ID NO: 2577562 - RNA, 19 nt, Human
acuuaaaaauguaaauauu

SEQ ID NO: 2577563 - RNA, 17 nt, Human
acuguuuuuuccugagc

SEQ ID NO: 2577564 - RNA, 18 nt, Human
acuguuuuuuccugagcu

SEQ ID NO: 2577565 - RNA, 19 nt, Human
acuguuuuuuccugagcuu

SEQ ID NO: 2577566 - RNA, 13 nt, Human
acuuaaaaaaaug

SEQ ID NO: 2577567 - RNA, 14 nt, Human
acuuaaaaaaauga

SEQ ID NO: 2577568 - RNA, 15 nt, Human
acuuaaaaaaaugac

SEQ ID NO: 2577569 - RNA, 16 nt, Human
acuuaaaaaaaugaca

SEQ ID NO: 2577570 - RNA, 17 nt, Human
acuuaaaaaaaugacag

SEQ ID NO: 2577571 - RNA, 22 nt, Human
acuuaaaaaaaugacagauguu

SEQ ID NO: 2577572 - RNA, 13 nt, Human
acuuaaaaaacuu

SEQ ID NO: 2577573 - RNA, 23 nt, Human
acuuaaaaaacuuguaaaugcug

SEQ ID NO: 2577574 - RNA, 14 nt, Human
acuuaaaaaauguc

SEQ ID NO: 2577575 - RNA, 17 nt, Human
acuuguauauuuguaca

SEQ ID NO: 2577576 - RNA, 16 nt, Human
acuuguauauuuguac

SEQ ID NO: 2577577 - RNA, 14 nt, Human
acuuguacaaaaua

SEQ ID NO: 2577578 - RNA, 18 nt, Human
acuuguacaaaauaaaca

SEQ ID NO: 2577579 - RNA, 20 nt, Human
acuuguacaaaauaaacaaa

SEQ ID NO: 2577580 - RNA, 18 nt, Human
acuuguaauuuuuuuaau

SEQ ID NO: 2577581 - RNA, 14 nt, Human
acuuggucaccagc

SEQ ID NO: 2577582 - RNA, 17 nt, Human
acuuguagggaugccuu

SEQ ID NO: 2577583 - RNA, 15 nt, Human
acuuguauauuugua

SEQ ID NO: 2577584 - RNA, 14 nt, Human
acuuguauauuugu

SEQ ID NO: 2577585 - RNA, 14 nt, Human
acuugaaaauuaac

SEQ ID NO: 2577586 - RNA, 12 nt, Human
acuugaaaauua

SEQ ID NO: 2577587 - RNA, 20 nt, Human
acuucuuuugcucuuagcug

SEQ ID NO: 2577588 - RNA, 13 nt, Human
acuuggucuguga

SEQ ID NO: 2577589 - RNA, 15 nt, Human
acuugggucuucccu

SEQ ID NO: 2577590 - RNA, 23 nt, Human
acuuggggggcugaggugggagg

SEQ ID NO: 2577591 - RNA, 20 nt, Human
acuucuugaaggugcugacg

SEQ ID NO: 2577592 - RNA, 17 nt, Human
acuucagagagcuggua

SEQ ID NO: 2577593 - RNA, 18 nt, Human
acuucagagagcugguag

SEQ ID NO: 2577594 - RNA, 20 nt, Human
acuucagagagcugguaguu

SEQ ID NO: 2577595 - RNA, 21 nt, Human
acuucagacauagaauuaaca

SEQ ID NO: 2577596 - RNA, 13 nt, Human
acuucagacugaa

SEQ ID NO: 2577597 - RNA, 19 nt, Human
acuucagacugaacaugua

SEQ ID NO: 2577598 - RNA, 15 nt, Human
acuucagagagcugg

SEQ ID NO: 2577599 - RNA, 16 nt, Human
acuucagagagcuggu

SEQ ID NO: 2577600 - RNA, 16 nt, Human
acuucaaacugagauc

SEQ ID NO: 2577601 - RNA, 22 nt, Human
acuucuuggcuuggugaggaaa

SEQ ID NO: 2577602 - RNA, 22 nt, Human
accuuggcaccagacacccagg

SEQ ID NO: 2577603 - RNA, 19 nt, Human
accuuggacauccuccucc

SEQ ID NO: 2577604 - RNA, 18 nt, Human
accuuggacauccuccuc

SEQ ID NO: 2577605 - RNA, 19 nt, Human
accuugcuuugauggaaua

SEQ ID NO: 2577606 - RNA, 14 nt, Human
accuuggcaccaga

SEQ ID NO: 2577607 - RNA, 16 nt, Human
accuuggcaccagaca

SEQ ID NO: 2577608 - RNA, 17 nt, Human
accuuggcaccagacac

SEQ ID NO: 2577609 - RNA, 18 nt, Human
accuuggcaccagacacc

SEQ ID NO: 2577610 - RNA, 23 nt, Human
accucugccugaagucacacagu

SEQ ID NO: 2577611 - RNA, 20 nt, Human
accucugccugaagucacac

SEQ ID NO: 2577612 - RNA, 12 nt, Human
accucugccuga

SEQ ID NO: 2577613 - RNA, 20 nt, Human
accucugccucagaaaacaa

SEQ ID NO: 2577614 - RNA, 19 nt, Human
accugccaggaagccagca

SEQ ID NO: 2577615 - RNA, 17 nt, Human
accucuguucaguguaa

SEQ ID NO: 2577616 - RNA, 18 nt, Human
accucuguucaguguaaa

SEQ ID NO: 2577617 - RNA, 19 nt, Human
accucuguucaguguaaau

SEQ ID NO: 2577618 - RNA, 22 nt, Human
accucuguucaguguaaauagu

SEQ ID NO: 2577619 - RNA, 12 nt, Human
accucugugugc

SEQ ID NO: 2577620 - RNA, 11 nt, Human
accucugugug

SEQ ID NO: 2577621 - RNA, 14 nt, Human
accucuguucagug

SEQ ID NO: 2577622 - RNA, 15 nt, Human
accucuguucagugu

SEQ ID NO: 2577623 - RNA, 15 nt, Human
accucugugugcucc

SEQ ID NO: 2577624 - RNA, 19 nt, Human
accucugugaccucaggca

SEQ ID NO: 2577625 - RNA, 18 nt, Human
accucugugaccucaggc

SEQ ID NO: 2577626 - RNA, 17 nt, Human
accucugugaccucagg

SEQ ID NO: 2577627 - RNA, 16 nt, Human
accucugugaccucag

SEQ ID NO: 2577628 - RNA, 15 nt, Human
accucugugaccuca

SEQ ID NO: 2577629 - RNA, 14 nt, Human
accucugugaccuc

SEQ ID NO: 2577630 - RNA, 22 nt, Human
accucugucuuggcuuucaugu

SEQ ID NO: 2577631 - RNA, 19 nt, Human
accucugucuuggcuuuca

SEQ ID NO: 2577632 - RNA, 22 nt, Human
accugccaggaagccagcaggc

SEQ ID NO: 2577633 - RNA, 21 nt, Human
accugccaggaagccagcagg

SEQ ID NO: 2577634 - RNA, 23 nt, Human
accugccaggaagccagcaggcu

SEQ ID NO: 2577635 - RNA, 18 nt, Human
accugcccccuucuccca

SEQ ID NO: 2577636 - RNA, 13 nt, Human
accugccaggcag

SEQ ID NO: 2577637 - RNA, 16 nt, Human
accucuguuguccucc

SEQ ID NO: 2577638 - RNA, 14 nt, Human
accucuguuguccu

SEQ ID NO: 2577639 - RNA, 19 nt, Human
accugcccccuucucccac

SEQ ID NO: 2577640 - RNA, 20 nt, Human
accugcccccuucucccaca

SEQ ID NO: 2577641 - RNA, 22 nt, Human
accugcccccuucucccacacu

SEQ ID NO: 2577642 - RNA, 23 nt, Human
accugcccccuucucccacacug

SEQ ID NO: 2577643 - RNA, 15 nt, Human
accugccccucaacu

SEQ ID NO: 2577644 - RNA, 12 nt, Human
accugccccuca

SEQ ID NO: 2577645 - RNA, 20 nt, Human
accugccccucaacucuccu

SEQ ID NO: 2577646 - RNA, 16 nt, Human
accugccccgcccagc

SEQ ID NO: 2577647 - RNA, 17 nt, Human
accugccccgcccagcu

SEQ ID NO: 2577648 - RNA, 15 nt, Human
accuguaacuuuugu

SEQ ID NO: 2577649 - RNA, 23 nt, Human
accugccccgcccagcugcaccu

SEQ ID NO: 2577650 - RNA, 17 nt, Human
accuguaacuuuuguaa

SEQ ID NO: 2577651 - RNA, 19 nt, Human
accugugcuucgggcccuu

SEQ ID NO: 2577652 - RNA, 22 nt, Human
accugugcuucgggcccuuccc

SEQ ID NO: 2577653 - RNA, 15 nt, Human
accugugccucggcu

SEQ ID NO: 2577654 - RNA, 16 nt, Human
accugugccucggcuu

SEQ ID NO: 2577655 - RNA, 23 nt, Human
accugugcuucgggcccuuccca

SEQ ID NO: 2577656 - RNA, 19 nt, Human
accugugaugaggggagga

SEQ ID NO: 2577657 - RNA, 17 nt, Human
accuguggccaaguucu

SEQ ID NO: 2577658 - RNA, 18 nt, Human
accuguaauaaauaugag

SEQ ID NO: 2577659 - RNA, 17 nt, Human
accuguaauaaauauga

SEQ ID NO: 2577660 - RNA, 16 nt, Human
accuguaauaaauaug

SEQ ID NO: 2577661 - RNA, 15 nt, Human
accuguaauaaauau

SEQ ID NO: 2577662 - RNA, 13 nt, Human
accuguaauaaau

SEQ ID NO: 2577663 - RNA, 20 nt, Human
accuguaacuuuuguaaaua

SEQ ID NO: 2577664 - RNA, 23 nt, Human
accuguaauaaauaugagugcca

SEQ ID NO: 2577665 - RNA, 21 nt, Human
accuguaauaaauaugagugc

SEQ ID NO: 2577666 - RNA, 11 nt, Human
accuguaauca

SEQ ID NO: 2577667 - RNA, 15 nt, Human
accuguaaucccagc

SEQ ID NO: 2577668 - RNA, 14 nt, Human
accuguaaucccag

SEQ ID NO: 2577669 - RNA, 18 nt, Human
accugugaguuuaaagca

SEQ ID NO: 2577670 - RNA, 14 nt, Human
accugugccucggc

SEQ ID NO: 2577671 - RNA, 19 nt, Human
accugugaguuuaaagcaa

SEQ ID NO: 2577672 - RNA, 19 nt, Human
accuguaaucccagcuacu

SEQ ID NO: 2577673 - RNA, 16 nt, Human
accuguaaucccagca

SEQ ID NO: 2577674 - RNA, 19 nt, Human
accuguaaucccagcacuu

SEQ ID NO: 2577675 - RNA, 14 nt, Human
acguggagagcugg

SEQ ID NO: 2577676 - RNA, 17 nt, Human
acguggacguuuuuaau

SEQ ID NO: 2577677 - RNA, 15 nt, Human
acguggagagcuggu

SEQ ID NO: 2577678 - RNA, 16 nt, Human
acguggagagcuggug

SEQ ID NO: 2577679 - RNA, 18 nt, Human
acguggagagcuggugcc

SEQ ID NO: 2577680 - RNA, 19 nt, Human
acguggagagcuggugccc

SEQ ID NO: 2577681 - RNA, 22 nt, Human
acgugccuuuugcaccccuccc

SEQ ID NO: 2577682 - RNA, 21 nt, Human
acgugccuuuugcaccccucc

SEQ ID NO: 2577683 - RNA, 20 nt, Human
acgugccuuuugcaccccuc

SEQ ID NO: 2577684 - RNA, 13 nt, Human
acgugccaggccc

SEQ ID NO: 2577685 - RNA, 14 nt, Human
acgugccaggcccg

SEQ ID NO: 2577686 - RNA, 18 nt, Human
acgugccaggcccggggc

SEQ ID NO: 2577687 - RNA, 19 nt, Human
acgugccaggcccggggcu

SEQ ID NO: 2577688 - RNA, 19 nt, Human
acgugccuuuugcaccccu

SEQ ID NO: 2577689 - RNA, 17 nt, Human
acgugccuuuugcaccc

SEQ ID NO: 2577690 - RNA, 15 nt, Human
acgugccuuuugcac

SEQ ID NO: 2577691 - RNA, 21 nt, Human
acgugccaggcccggggcugg

SEQ ID NO: 2577692 - RNA, 23 nt, Human
acuaaugccuuacucuucuugaa

SEQ ID NO: 2577693 - RNA, 24 nt, Human
acuaaugccuuacucuucuugaaa

SEQ ID NO: 2577694 - RNA, 19 nt, Human
acuaaugccuuacucuucu

SEQ ID NO: 2577695 - RNA, 18 nt, Human
acuaauggggcggugaga

SEQ ID NO: 2577696 - RNA, 23 nt, Human
acgcagcccugcuuugggcugcc

SEQ ID NO: 2577697 - RNA, 22 nt, Human
acgcagcccugcuuugggcugc

SEQ ID NO: 2577698 - RNA, 24 nt, Human
acgcagcccuagagccugccugga

SEQ ID NO: 2577699 - RNA, 23 nt, Human
acgcagcccuagagccugccugg

SEQ ID NO: 2577700 - RNA, 22 nt, Human
acgcagcccuagagccugccug

SEQ ID NO: 2577701 - RNA, 21 nt, Human
acgcagcccuagagccugccu

SEQ ID NO: 2577702 - RNA, 12 nt, Human
acgcagcccugc

SEQ ID NO: 2577703 - RNA, 14 nt, Human
acgcaccugccuca

SEQ ID NO: 2577704 - RNA, 15 nt, Human
acgcaccugccucag

SEQ ID NO: 2577705 - RNA, 13 nt, Human
acgcaccucccau

SEQ ID NO: 2577706 - RNA, 15 nt, Human
acgcaccucccaucc

SEQ ID NO: 2577707 - RNA, 14 nt, Human
acgcagcccuagag

SEQ ID NO: 2577708 - RNA, 20 nt, Human
acgcagcccuagagccugcc

SEQ ID NO: 2577709 - RNA, 19 nt, Human
acgcagcccuagagccugc

SEQ ID NO: 2577710 - RNA, 18 nt, Human
acgcagcccuagagccug

SEQ ID NO: 2577711 - RNA, 19 nt, Human
acgcaccucccauccuaau

SEQ ID NO: 2577712 - RNA, 19 nt, Human
acgcugugcugcccugccc

SEQ ID NO: 2577713 - RNA, 22 nt, Human
acgcugugcugcccugcccacc

SEQ ID NO: 2577714 - RNA, 13 nt, Human
acgcuucugaaug

SEQ ID NO: 2577715 - RNA, 12 nt, Human
acgcuucugaau

SEQ ID NO: 2577716 - RNA, 22 nt, Human
acgcuucugaaugcugcuacuu

SEQ ID NO: 2577717 - RNA, 18 nt, Human
acgcuucugaaugcugcu

SEQ ID NO: 2577718 - RNA, 18 nt, Human
acgcuugcguaugucugu

SEQ ID NO: 2577719 - RNA, 17 nt, Human
acgcaggaacucccagc

SEQ ID NO: 2577720 - RNA, 16 nt, Human
acgcaggaacucccag

SEQ ID NO: 2577721 - RNA, 15 nt, Human
acgcugugggcaggu

SEQ ID NO: 2577722 - RNA, 21 nt, Human
acgcuuaaaggugucuuccuc

SEQ ID NO: 2577723 - RNA, 14 nt, Human
acgcugugggcagg

SEQ ID NO: 2577724 - RNA, 23 nt, Human
acgucuuccuucugccugagcuu

SEQ ID NO: 2577725 - RNA, 15 nt, Human
acgcuugcucauuuu

SEQ ID NO: 2577726 - RNA, 12 nt, Human
acgucuucuaaa

SEQ ID NO: 2577727 - RNA, 22 nt, Human
acgugcauugugcuucuuucuu

SEQ ID NO: 2577728 - RNA, 13 nt, Human
acgucugugccau

SEQ ID NO: 2577729 - RNA, 12 nt, Human
acgucugugcca

SEQ ID NO: 2577730 - RNA, 20 nt, Human
acgcuugcguaugucuguua

SEQ ID NO: 2577731 - RNA, 13 nt, Human
acgcuucuucuuu

SEQ ID NO: 2577732 - RNA, 19 nt, Human
acggaauaguuggcuagga

SEQ ID NO: 2577733 - RNA, 17 nt, Human
acggacacucaaaagcu

SEQ ID NO: 2577734 - RNA, 16 nt, Human
acggacacccccucgc

SEQ ID NO: 2577735 - RNA, 15 nt, Human
acggacacccccucg

SEQ ID NO: 2577736 - RNA, 20 nt, Human
acgauuucuguuuagauaau

SEQ ID NO: 2577737 - RNA, 23 nt, Human
acgauuucuguuuagauaauaca

SEQ ID NO: 2577738 - RNA, 19 nt, Human
acgauuucuguuuagauaa

SEQ ID NO: 2577739 - RNA, 17 nt, Human
acgcacagccaaggacu

SEQ ID NO: 2577740 - RNA, 15 nt, Human
acgcacagccaagga

SEQ ID NO: 2577741 - RNA, 14 nt, Human
acgcaccacaucuc

SEQ ID NO: 2577742 - RNA, 22 nt, Human
acgcacacguacuuaaaugaaa

SEQ ID NO: 2577743 - RNA, 21 nt, Human
acgcacacacacacacaggag

SEQ ID NO: 2577744 - RNA, 14 nt, Human
acgcacacacacaa

SEQ ID NO: 2577745 - RNA, 18 nt, Human
acgcacacacacacacag

SEQ ID NO: 2577746 - RNA, 19 nt, Human
acgcacacacacacacagg

SEQ ID NO: 2577747 - RNA, 20 nt, Human
acgcacacacacacacagga

SEQ ID NO: 2577748 - RNA, 21 nt, Human
acgcaaagggcugaaagccau

SEQ ID NO: 2577749 - RNA, 13 nt, Human
acgcacacacaca

SEQ ID NO: 2577750 - RNA, 12 nt, Human
acgcacacacac

SEQ ID NO: 2577751 - RNA, 17 nt, Human
acgcaaagggcugaaag

SEQ ID NO: 2577752 - RNA, 12 nt, Human
acccucaugcug

SEQ ID NO: 2577753 - RNA, 23 nt, Human
acccucaucaccaacgucugugc

SEQ ID NO: 2577754 - RNA, 18 nt, Human
acccuggcacccagggug

SEQ ID NO: 2577755 - RNA, 15 nt, Human
acccuggcauuaugu

SEQ ID NO: 2577756 - RNA, 23 nt, Human
acccuggcacuauaauguaagcu

SEQ ID NO: 2577757 - RNA, 13 nt, Human
acccuggagccca

SEQ ID NO: 2577758 - RNA, 16 nt, Human
acccuggaucaguccu

SEQ ID NO: 2577759 - RNA, 13 nt, Human
acccucaugcugu

SEQ ID NO: 2577760 - RNA, 15 nt, Human
acccucaggacaaug

SEQ ID NO: 2577761 - RNA, 22 nt, Human
acccucagcaccccuuccaugu

SEQ ID NO: 2577762 - RNA, 19 nt, Human
acccucagcaccccuucca

SEQ ID NO: 2577763 - RNA, 18 nt, Human
acccucagcaccccuucc

SEQ ID NO: 2577764 - RNA, 17 nt, Human
acccucagcaccccuuc

SEQ ID NO: 2577765 - RNA, 16 nt, Human
acccucagcaccccuu

SEQ ID NO: 2577766 - RNA, 14 nt, Human
acccucagcacccc

SEQ ID NO: 2577767 - RNA, 18 nt, Human
acccucagagccaccccu

SEQ ID NO: 2577768 - RNA, 13 nt, Human
acccucaggcagg

SEQ ID NO: 2577769 - RNA, 14 nt, Human
acccucaggcaggu

SEQ ID NO: 2577770 - RNA, 13 nt, Human
acccucaucacca

SEQ ID NO: 2577771 - RNA, 19 nt, Human
acccucaggcauaggccug

SEQ ID NO: 2577772 - RNA, 20 nt, Human
acccucaggcauaggccugg

SEQ ID NO: 2577773 - RNA, 22 nt, Human
acccucaggcauaggccugggu

SEQ ID NO: 2577774 - RNA, 23 nt, Human
acccucaggcauaggccugggug

SEQ ID NO: 2577775 - RNA, 15 nt, Human
acccucaggcaggug

SEQ ID NO: 2577776 - RNA, 16 nt, Human
acccucaggcaggugg

SEQ ID NO: 2577777 - RNA, 16 nt, Human
acccugugauggggcc

SEQ ID NO: 2577778 - RNA, 23 nt, Human
acccugucuguagagggcccugg

SEQ ID NO: 2577779 - RNA, 22 nt, Human
acccugucuguagagggcccug

SEQ ID NO: 2577780 - RNA, 14 nt, Human
acccugucucuacu

SEQ ID NO: 2577781 - RNA, 22 nt, Human
acccugucccccagcucuggug

SEQ ID NO: 2577782 - RNA, 21 nt, Human
acccugucucuuaaagaaaaa

SEQ ID NO: 2577783 - RNA, 21 nt, Human
acccugucucuacuaaaaaua

SEQ ID NO: 2577784 - RNA, 19 nt, Human
acccugucccccagcucug

SEQ ID NO: 2577785 - RNA, 16 nt, Human
acccugucccccagcu

SEQ ID NO: 2577786 - RNA, 14 nt, Human
acccugucccccag

SEQ ID NO: 2577787 - RNA, 21 nt, Human
acccugucccccagcucuggu

SEQ ID NO: 2577788 - RNA, 20 nt, Human
acccugucccccagcucugg

SEQ ID NO: 2577789 - RNA, 11 nt, Human
acccugucucu

SEQ ID NO: 2577790 - RNA, 20 nt, Human
acccugggugggcucugugc

SEQ ID NO: 2577791 - RNA, 19 nt, Human
acccugggugggcucugug

SEQ ID NO: 2577792 - RNA, 18 nt, Human
acccugggugggcucugu

SEQ ID NO: 2577793 - RNA, 22 nt, Human
acccuggggccuggaccugccu

SEQ ID NO: 2577794 - RNA, 18 nt, Human
acccuggugguugcuguu

SEQ ID NO: 2577795 - RNA, 19 nt, Human
acccuggugguugcuguuu

SEQ ID NO: 2577796 - RNA, 15 nt, Human
acccuggugggccaa

SEQ ID NO: 2577797 - RNA, 17 nt, Human
acccuggugguugcugu

SEQ ID NO: 2577798 - RNA, 19 nt, Human
acccuguccaaacugccua

SEQ ID NO: 2577799 - RNA, 20 nt, Human
acccuguauauagcccagcc

SEQ ID NO: 2577800 - RNA, 22 nt, Human
acccuguacuguucugugucuu

SEQ ID NO: 2577801 - RNA, 20 nt, Human
acccuguacuguucuguguc

SEQ ID NO: 2577802 - RNA, 18 nt, Human
acccuguauauagcccag

SEQ ID NO: 2577803 - RNA, 15 nt, Human
acccuguauauagcc

SEQ ID NO: 2577804 - RNA, 20 nt, Human
acccugggcucugugggcug

SEQ ID NO: 2577805 - RNA, 13 nt, Human
acccuggggccug

SEQ ID NO: 2577806 - RNA, 19 nt, Human
acccuggggccuggaccug

SEQ ID NO: 2577807 - RNA, 18 nt, Human
acccuggggccuggaccu

SEQ ID NO: 2577808 - RNA, 17 nt, Human
acccuggggccuggacc

SEQ ID NO: 2577809 - RNA, 16 nt, Human
acccuggggagaaagu

SEQ ID NO: 2577810 - RNA, 19 nt, Human
acccugggcucugugggcu

SEQ ID NO: 2577811 - RNA, 18 nt, Human
acccugggcucugugggc

SEQ ID NO: 2577812 - RNA, 17 nt, Human
acccugggcucuguggg

SEQ ID NO: 2577813 - RNA, 21 nt, Human
acccugggcucugggagcagc

SEQ ID NO: 2577814 - RNA, 20 nt, Human
acccugggcucugggagcag

SEQ ID NO: 2577815 - RNA, 19 nt, Human
acccugggcucugggagca

SEQ ID NO: 2577816 - RNA, 20 nt, Human
acccugggcccugggcugga

SEQ ID NO: 2577817 - RNA, 18 nt, Human
acccugggcccugggcug

SEQ ID NO: 2577818 - RNA, 22 nt, Human
acccugggcccugggcuggaau

SEQ ID NO: 2577819 - RNA, 18 nt, Human
acccuggccgaguccaag

SEQ ID NO: 2577820 - RNA, 21 nt, Human
acccuggccgaguccaagcug

SEQ ID NO: 2577821 - RNA, 19 nt, Human
acccuggccgcccccugcc

SEQ ID NO: 2577822 - RNA, 17 nt, Human
acccuggccgcccccug

SEQ ID NO: 2577823 - RNA, 16 nt, Human
acccuggccgcccccu

SEQ ID NO: 2577824 - RNA, 22 nt, Human
acccuggccgaguccaagcugg

SEQ ID NO: 2577825 - RNA, 17 nt, Human
acccugggcccugggcu

SEQ ID NO: 2577826 - RNA, 15 nt, Human
acccugggcccuggg

SEQ ID NO: 2577827 - RNA, 14 nt, Human
acccugggcccugg

SEQ ID NO: 2577828 - RNA, 12 nt, Human
acccugggaccu

SEQ ID NO: 2577829 - RNA, 23 nt, Human
acccugggaccuaggggcgccgc

SEQ ID NO: 2577830 - RNA, 22 nt, Human
acccuggccgcccccugccccc

SEQ ID NO: 2577831 - RNA, 23 nt, Human
acccuauauuuugcauaguacca

SEQ ID NO: 2577832 - RNA, 21 nt, Human
acccuaguucuaccucaggca

SEQ ID NO: 2577833 - RNA, 16 nt, Human
acccuaguuucccuga

SEQ ID NO: 2577834 - RNA, 15 nt, Human
acccuaguucuaccu

SEQ ID NO: 2577835 - RNA, 22 nt, Human
acccuagucccuuccccucccu

SEQ ID NO: 2577836 - RNA, 13 nt, Human
acccuauugcugc

SEQ ID NO: 2577837 - RNA, 17 nt, Human
acccuauauguaguaua

SEQ ID NO: 2577838 - RNA, 15 nt, Human
acccucacacuggga

SEQ ID NO: 2577839 - RNA, 21 nt, Human
acccucaaccucuucuggcuc

SEQ ID NO: 2577840 - RNA, 21 nt, Human
acccucagaaacacuggggcu

SEQ ID NO: 2577841 - RNA, 18 nt, Human
acccucagaaacacuggg

SEQ ID NO: 2577842 - RNA, 11 nt, Human
acccucagagc

SEQ ID NO: 2577843 - RNA, 14 nt, Human
acccuauugcugcu

SEQ ID NO: 2577844 - RNA, 19 nt, Human
acccuauugcugcuugagg

SEQ ID NO: 2577845 - RNA, 22 nt, Human
acccguucugcuggccuggauc

SEQ ID NO: 2577846 - RNA, 20 nt, Human
acccguucugcuggccugga

SEQ ID NO: 2577847 - RNA, 18 nt, Human
acccguucugcuggccug

SEQ ID NO: 2577848 - RNA, 13 nt, Human
acccguucaacuu

SEQ ID NO: 2577849 - RNA, 21 nt, Human
acccguucaacuuuuccuuug

SEQ ID NO: 2577850 - RNA, 16 nt, Human
acccguucacauuuuu

SEQ ID NO: 2577851 - RNA, 16 nt, Human
acccuaaaucuugacu

SEQ ID NO: 2577852 - RNA, 23 nt, Human
acccguucugcuggccuggaucu

SEQ ID NO: 2577853 - RNA, 19 nt, Human
acccuaaaaagcagagcuu

SEQ ID NO: 2577854 - RNA, 19 nt, Human
acccuagccauuccuggua

SEQ ID NO: 2577855 - RNA, 17 nt, Human
acccuagccauuccugg

SEQ ID NO: 2577856 - RNA, 16 nt, Human
acccuagccauuccug

SEQ ID NO: 2577857 - RNA, 23 nt, Human
acccuagccauuccugguaccca

SEQ ID NO: 2577858 - RNA, 18 nt, Human
acccuacuucuuuugcuc

SEQ ID NO: 2577859 - RNA, 14 nt, Human
acccuacuucuuuu

SEQ ID NO: 2577860 - RNA, 13 nt, Human
acccuaccuguuc

SEQ ID NO: 2577861 - RNA, 15 nt, Human
acccuaccccaccac

SEQ ID NO: 2577862 - RNA, 16 nt, Human
acccuaccugugccug

SEQ ID NO: 2577863 - RNA, 17 nt, Human
acccuaccugugccuga

SEQ ID NO: 2577864 - RNA, 13 nt, Human
acccuaccugugc

SEQ ID NO: 2577865 - RNA, 16 nt, Human
acccuaagccuccuuu

SEQ ID NO: 2577866 - RNA, 14 nt, Human
acccuaccccacca

SEQ ID NO: 2577867 - RNA, 16 nt, Human
acccuaagacuccucg

SEQ ID NO: 2577868 - RNA, 22 nt, Human
acccuaaggucauuaccacagg

SEQ ID NO: 2577869 - RNA, 21 nt, Human
accucaggugauccacccacc

SEQ ID NO: 2577870 - RNA, 20 nt, Human
accucaggugauccacccac

SEQ ID NO: 2577871 - RNA, 11 nt, Human
accucaggccu

SEQ ID NO: 2577872 - RNA, 17 nt, Human
accucaggcagcucaag

SEQ ID NO: 2577873 - RNA, 16 nt, Human
accucaggcagcucaa

SEQ ID NO: 2577874 - RNA, 12 nt, Human
accucaggcagg

SEQ ID NO: 2577875 - RNA, 15 nt, Human
accucaggcaggaag

SEQ ID NO: 2577876 - RNA, 23 nt, Human
accucaugcccacccccugcccu

SEQ ID NO: 2577877 - RNA, 20 nt, Human
accucaugcccacccccugc

SEQ ID NO: 2577878 - RNA, 16 nt, Human
accucaugcccacccc

SEQ ID NO: 2577879 - RNA, 13 nt, Human
accucaugcccac

SEQ ID NO: 2577880 - RNA, 21 nt, Human
accucaugcaucuccaccugc

SEQ ID NO: 2577881 - RNA, 20 nt, Human
accucaugcaucuccaccug

SEQ ID NO: 2577882 - RNA, 19 nt, Human
accucaugcaucuccaccu

SEQ ID NO: 2577883 - RNA, 18 nt, Human
accucaugcaucuccacc

SEQ ID NO: 2577884 - RNA, 16 nt, Human
accucaugcaucucca

SEQ ID NO: 2577885 - RNA, 18 nt, Human
accucagucaguauuguu

SEQ ID NO: 2577886 - RNA, 17 nt, Human
accucagucaguauugu

SEQ ID NO: 2577887 - RNA, 22 nt, Human
accucagucaguauuguuuugg

SEQ ID NO: 2577888 - RNA, 15 nt, Human
accucaucuucuuca

SEQ ID NO: 2577889 - RNA, 19 nt, Human
accucagguugcugguugc

SEQ ID NO: 2577890 - RNA, 17 nt, Human
accucagguugcugguu

SEQ ID NO: 2577891 - RNA, 16 nt, Human
accucagguugcuggu

SEQ ID NO: 2577892 - RNA, 15 nt, Human
accucagguugcugg

SEQ ID NO: 2577893 - RNA, 15 nt, Human
accucagucaguauu

SEQ ID NO: 2577894 - RNA, 13 nt, Human
accucaggccagg

SEQ ID NO: 2577895 - RNA, 20 nt, Human
accucaggccaggugcagug

SEQ ID NO: 2577896 - RNA, 14 nt, Human
accucagguugcug

SEQ ID NO: 2577897 - RNA, 23 nt, Human
accucaggcacuagccuuuggcu

SEQ ID NO: 2577898 - RNA, 21 nt, Human
accucaggccaggugcagugg

SEQ ID NO: 2577899 - RNA, 14 nt, Human
accucagccuggcc

SEQ ID NO: 2577900 - RNA, 15 nt, Human
accucagccuggcca

SEQ ID NO: 2577901 - RNA, 16 nt, Human
accucagccuggccag

SEQ ID NO: 2577902 - RNA, 17 nt, Human
accucagccuggccaga

SEQ ID NO: 2577903 - RNA, 19 nt, Human
accucagccuggccagaca

SEQ ID NO: 2577904 - RNA, 20 nt, Human
accucagccuggccagacac

SEQ ID NO: 2577905 - RNA, 21 nt, Human
accucagccuggccagacaca

SEQ ID NO: 2577906 - RNA, 13 nt, Human
accucagccuggc

SEQ ID NO: 2577907 - RNA, 18 nt, Human
accguggaggaggaaggc

SEQ ID NO: 2577908 - RNA, 15 nt, Human
accucagccuccugu

SEQ ID NO: 2577909 - RNA, 22 nt, Human
accguggaggaggaaggcaaga

SEQ ID NO: 2577910 - RNA, 15 nt, Human
accguggaggaggaa

SEQ ID NO: 2577911 - RNA, 18 nt, Human
accguggaccuuccugcc

SEQ ID NO: 2577912 - RNA, 11 nt, Human
accucagccug

SEQ ID NO: 2577913 - RNA, 15 nt, Human
accucagcugcuucu

SEQ ID NO: 2577914 - RNA, 23 nt, Human
accucagcucugggagaggauuu

SEQ ID NO: 2577915 - RNA, 22 nt, Human
accucagcucugggagaggauu

SEQ ID NO: 2577916 - RNA, 18 nt, Human
accucagcucugggagag

SEQ ID NO: 2577917 - RNA, 17 nt, Human
accucagcucugggaga

SEQ ID NO: 2577918 - RNA, 15 nt, Human
accucagcucuggga

SEQ ID NO: 2577919 - RNA, 14 nt, Human
accucagcucuggg

SEQ ID NO: 2577920 - RNA, 19 nt, Human
accucaggcacuagccuuu

SEQ ID NO: 2577921 - RNA, 18 nt, Human
accucaggcacuagccuu

SEQ ID NO: 2577922 - RNA, 17 nt, Human
accucaggcacuagccu

SEQ ID NO: 2577923 - RNA, 13 nt, Human
accucagcugcuu

SEQ ID NO: 2577924 - RNA, 15 nt, Human
accucaggcagcuca

SEQ ID NO: 2577925 - RNA, 12 nt, Human
accucaggcagc

SEQ ID NO: 2577926 - RNA, 12 nt, Human
accucagccugu

SEQ ID NO: 2577927 - RNA, 16 nt, Human
accucagccugugcug

SEQ ID NO: 2577928 - RNA, 17 nt, Human
accucagccugugcugc

SEQ ID NO: 2577929 - RNA, 18 nt, Human
accucagccugugcugcc

SEQ ID NO: 2577930 - RNA, 19 nt, Human
accucagccugugcugccc

SEQ ID NO: 2577931 - RNA, 20 nt, Human
accucagccuuccccuugcc

SEQ ID NO: 2577932 - RNA, 12 nt, Human
accucagcucug

SEQ ID NO: 2577933 - RNA, 14 nt, Human
accucagccuugga

SEQ ID NO: 2577934 - RNA, 21 nt, Human
acccugugauggggcccugcc

SEQ ID NO: 2577935 - RNA, 20 nt, Human
acccugugauggggcccugc

SEQ ID NO: 2577936 - RNA, 19 nt, Human
acccugugauggggcccug

SEQ ID NO: 2577937 - RNA, 17 nt, Human
acccugugauggggccc

SEQ ID NO: 2577938 - RNA, 16 nt, Human
accgggcacucagaag

SEQ ID NO: 2577939 - RNA, 20 nt, Human
accgggccacagagaaagua

SEQ ID NO: 2577940 - RNA, 14 nt, Human
accgggcacucaga

SEQ ID NO: 2577941 - RNA, 12 nt, Human
accgggcacuca

SEQ ID NO: 2577942 - RNA, 11 nt, Human
accucagccuc

SEQ ID NO: 2577943 - RNA, 12 nt, Human
accucagccucc

SEQ ID NO: 2577944 - RNA, 23 nt, Human
accgugaggccagagacacaagc

SEQ ID NO: 2577945 - RNA, 19 nt, Human
accgugccuggccacgccc

SEQ ID NO: 2577946 - RNA, 17 nt, Human
accguggaccuuccugc

SEQ ID NO: 2577947 - RNA, 22 nt, Human
accggggagcccccgccccgcc

SEQ ID NO: 2577948 - RNA, 21 nt, Human
acccugugacauggugccuga

SEQ ID NO: 2577949 - RNA, 19 nt, Human
acccugugacauggugccu

SEQ ID NO: 2577950 - RNA, 19 nt, Human
accggcuuuaccaaaccgc

SEQ ID NO: 2577951 - RNA, 16 nt, Human
accgggccgcuagaug

SEQ ID NO: 2577952 - RNA, 22 nt, Human
accgggccaguaucuauauaug

SEQ ID NO: 2577953 - RNA, 21 nt, Human
accgggcugggagcucugcag

SEQ ID NO: 2577954 - RNA, 18 nt, Human
accgugaggccagagaca

SEQ ID NO: 2577955 - RNA, 23 nt, Human
accgggcugggagcucugcagag

SEQ ID NO: 2577956 - RNA, 14 nt, Human
accuccacagcuuc

SEQ ID NO: 2577957 - RNA, 19 nt, Human
accuccaaaacuccugccc

SEQ ID NO: 2577958 - RNA, 17 nt, Human
accucauugacaagaac

SEQ ID NO: 2577959 - RNA, 22 nt, Human
accucaugcccacccccugccc

SEQ ID NO: 2577960 - RNA, 21 nt, Human
accucaugcccacccccugcc

SEQ ID NO: 2577961 - RNA, 21 nt, Human
accuccaaaacuccugccccu

SEQ ID NO: 2577962 - RNA, 20 nt, Human
accuccaaaacuccugcccc

SEQ ID NO: 2577963 - RNA, 11 nt, Human
accuccacagc

SEQ ID NO: 2577964 - RNA, 12 nt, Human
accuccacagcu

SEQ ID NO: 2577965 - RNA, 13 nt, Human
accuccacagcuu

SEQ ID NO: 2577966 - RNA, 19 nt, Human
acagcugagagacuuuuaa

SEQ ID NO: 2577967 - RNA, 16 nt, Human
acagcugagagacuuu

SEQ ID NO: 2577968 - RNA, 15 nt, Human
acagcugagagacuu

SEQ ID NO: 2577969 - RNA, 16 nt, Human
acagcugaauuaucua

SEQ ID NO: 2577970 - RNA, 20 nt, Human
acagcucuucuccaggcugu

SEQ ID NO: 2577971 - RNA, 19 nt, Human
acagcucuucuccaggcug

SEQ ID NO: 2577972 - RNA, 17 nt, Human
acaggcaaugcuggcug

SEQ ID NO: 2577973 - RNA, 14 nt, Human
acaggcacccacca

SEQ ID NO: 2577974 - RNA, 16 nt, Human
acaggcaaugcuggcu

SEQ ID NO: 2577975 - RNA, 15 nt, Human
acaggcaaugcuggc

SEQ ID NO: 2577976 - RNA, 22 nt, Human
acaggaugguucccuugaugaa

SEQ ID NO: 2577977 - RNA, 24 nt, Human
acaggaugguucccuugaugaaga

SEQ ID NO: 2577978 - RNA, 18 nt, Human
acagcugagcacauucug

SEQ ID NO: 2577979 - RNA, 22 nt, Human
acagcugagagacuuuuaauca

SEQ ID NO: 2577980 - RNA, 15 nt, Human
acaggauuagacagu

SEQ ID NO: 2577981 - RNA, 23 nt, Human
acagugcugucugaucugugcuu

SEQ ID NO: 2577982 - RNA, 22 nt, Human
acagugcugucugaucugugcu

SEQ ID NO: 2577983 - RNA, 14 nt, Human
acagugcugucuga

SEQ ID NO: 2577984 - RNA, 24 nt, Human
acagugaugcugugcuaugaauuu

SEQ ID NO: 2577985 - RNA, 11 nt, Human
acagugccugc

SEQ ID NO: 2577986 - RNA, 22 nt, Human
acagugaucuccauauguuaca

SEQ ID NO: 2577987 - RNA, 13 nt, Human
acagugccugcug

SEQ ID NO: 2577988 - RNA, 14 nt, Human
acagugccugcuga

SEQ ID NO: 2577989 - RNA, 14 nt, Human
acagugccugggaa

SEQ ID NO: 2577990 - RNA, 16 nt, Human
acagugcuaaaaaugg

SEQ ID NO: 2577991 - RNA, 14 nt, Human
acagugcuaaaaau

SEQ ID NO: 2577992 - RNA, 21 nt, Human
acagugccuucaauaaauggu

SEQ ID NO: 2577993 - RNA, 20 nt, Human
acagugccuucaauaaaugg

SEQ ID NO: 2577994 - RNA, 18 nt, Human
acagugccugggaaugua

SEQ ID NO: 2577995 - RNA, 20 nt, Human
acagugccugggaauguauu

SEQ ID NO: 2577996 - RNA, 17 nt, Human
acagugccuucaauaaa

SEQ ID NO: 2577997 - RNA, 21 nt, Human
acagugccugggaauguauua

SEQ ID NO: 2577998 - RNA, 14 nt, Human
acagugcuucagcc

SEQ ID NO: 2577999 - RNA, 15 nt, Human
acagugcuucagccu

SEQ ID NO: 2578000 - RNA, 17 nt, Human
acagugcuucagccuga

SEQ ID NO: 2578001 - RNA, 18 nt, Human
acagugcuucagccugag

SEQ ID NO: 2578002 - RNA, 20 nt, Human
acagugcuucagccugaggc

SEQ ID NO: 2578003 - RNA, 21 nt, Human
acagugcuucagccugaggcu

SEQ ID NO: 2578004 - RNA, 21 nt, Human
acagugcuugccacagagcgg

SEQ ID NO: 2578005 - RNA, 20 nt, Human
acagugcuugccacagagcg

SEQ ID NO: 2578006 - RNA, 22 nt, Human
acagugcuucagccugaggcug

SEQ ID NO: 2578007 - RNA, 17 nt, Human
acaguggauugcauuuc

SEQ ID NO: 2578008 - RNA, 18 nt, Human
acaguggaauauaaggaa

SEQ ID NO: 2578009 - RNA, 18 nt, Human
acagugcaucucagccca

SEQ ID NO: 2578010 - RNA, 17 nt, Human
acagugcaucucagccc

SEQ ID NO: 2578011 - RNA, 15 nt, Human
acagugcaucucagc

SEQ ID NO: 2578012 - RNA, 15 nt, Human
acagugaucuccaua

SEQ ID NO: 2578013 - RNA, 18 nt, Human
acagugaucuccauaugu

SEQ ID NO: 2578014 - RNA, 19 nt, Human
acagugaucuccauauguu

SEQ ID NO: 2578015 - RNA, 21 nt, Human
acagugaucuccauauguuac

SEQ ID NO: 2578016 - RNA, 19 nt, Human
acagugauuaccagggacu

SEQ ID NO: 2578017 - RNA, 13 nt, Human
acagugcaucuca

SEQ ID NO: 2578018 - RNA, 23 nt, Human
acaggcacccaccaucaugucug

SEQ ID NO: 2578019 - RNA, 14 nt, Human
acaggcaccgagaa

SEQ ID NO: 2578020 - RNA, 17 nt, Human
acaggcaccgagaaugu

SEQ ID NO: 2578021 - RNA, 20 nt, Human
acaggcaccgagaauguugu

SEQ ID NO: 2578022 - RNA, 21 nt, Human
acaggcaccgagaauguugua

SEQ ID NO: 2578023 - RNA, 14 nt, Human
acagugaucuccau

SEQ ID NO: 2578024 - RNA, 17 nt, Human
acagugggagccagggc

SEQ ID NO: 2578025 - RNA, 16 nt, Human
acagugggagccaggg

SEQ ID NO: 2578026 - RNA, 15 nt, Human
acagugggagccagg

SEQ ID NO: 2578027 - RNA, 14 nt, Human
acagugggagccag

SEQ ID NO: 2578028 - RNA, 15 nt, Human
acagugggaaauauu

SEQ ID NO: 2578029 - RNA, 13 nt, Human
acagugggagcca

SEQ ID NO: 2578030 - RNA, 14 nt, Human
acagugggaaauau

SEQ ID NO: 2578031 - RNA, 12 nt, Human
acagugggaaau

SEQ ID NO: 2578032 - RNA, 21 nt, Human
acaguggcucacgccuguaau

SEQ ID NO: 2578033 - RNA, 19 nt, Human
acauuuguauaaaauaauu

SEQ ID NO: 2578034 - RNA, 16 nt, Human
acauuuguauaaaaua

SEQ ID NO: 2578035 - RNA, 16 nt, Human
acauuugcucauggaa

SEQ ID NO: 2578036 - RNA, 15 nt, Human
acauuugcucaugga

SEQ ID NO: 2578037 - RNA, 21 nt, Human
acauuuguauaaaauaauuuu

SEQ ID NO: 2578038 - RNA, 15 nt, Human
acauuugccuugcug

SEQ ID NO: 2578039 - RNA, 14 nt, Human
acauuugccuugcu

SEQ ID NO: 2578040 - RNA, 17 nt, Human
accaacccuguuuccug

SEQ ID NO: 2578041 - RNA, 16 nt, Human
accaacccuguuuccu

SEQ ID NO: 2578042 - RNA, 14 nt, Human
accaacccuguuuc

SEQ ID NO: 2578043 - RNA, 17 nt, Human
accaacgucugugccau

SEQ ID NO: 2578044 - RNA, 14 nt, Human
accaacgucugugc

SEQ ID NO: 2578045 - RNA, 19 nt, Human
acauuucuuugugcuuugg

SEQ ID NO: 2578046 - RNA, 13 nt, Human
acauuugccuugc

SEQ ID NO: 2578047 - RNA, 23 nt, Human
acauuucuuagacuacauuuaga

SEQ ID NO: 2578048 - RNA, 16 nt, Human
accacgcuggaccuug

SEQ ID NO: 2578049 - RNA, 14 nt, Human
accacgcuggaccu

SEQ ID NO: 2578050 - RNA, 18 nt, Human
accacgcuggaccuugaa

SEQ ID NO: 2578051 - RNA, 18 nt, Human
accaccccgccugcccuc

SEQ ID NO: 2578052 - RNA, 16 nt, Human
accacgcuggggucug

SEQ ID NO: 2578053 - RNA, 14 nt, Human
accaccccccacuc

SEQ ID NO: 2578054 - RNA, 20 nt, Human
accaccccagcugcuccccu

SEQ ID NO: 2578055 - RNA, 22 nt, Human
accaccccagcugcuccccucc

SEQ ID NO: 2578056 - RNA, 13 nt, Human
accacguuucuaa

SEQ ID NO: 2578057 - RNA, 14 nt, Human
accacguuucuaaa

SEQ ID NO: 2578058 - RNA, 14 nt, Human
accacguccagcug

SEQ ID NO: 2578059 - RNA, 22 nt, Human
accacggccacuggccaucucc

SEQ ID NO: 2578060 - RNA, 18 nt, Human
accacggccacuggccau

SEQ ID NO: 2578061 - RNA, 17 nt, Human
accacgucugucuucac

SEQ ID NO: 2578062 - RNA, 14 nt, Human
accacggccacugg

SEQ ID NO: 2578063 - RNA, 21 nt, Human
accacggacguuuccaucagg

SEQ ID NO: 2578064 - RNA, 20 nt, Human
accacggacguuuccaucag

SEQ ID NO: 2578065 - RNA, 15 nt, Human
accaccccccacucu

SEQ ID NO: 2578066 - RNA, 14 nt, Human
accacggaaaagag

SEQ ID NO: 2578067 - RNA, 18 nt, Human
accacggaaaagagcgca

SEQ ID NO: 2578068 - RNA, 18 nt, Human
accaagccguggcuuccc

SEQ ID NO: 2578069 - RNA, 17 nt, Human
accaagccguggcuucc

SEQ ID NO: 2578070 - RNA, 16 nt, Human
accaagccguggcuuc

SEQ ID NO: 2578071 - RNA, 15 nt, Human
accaagccguggcuu

SEQ ID NO: 2578072 - RNA, 21 nt, Human
accaacgucugugccauuuug

SEQ ID NO: 2578073 - RNA, 14 nt, Human
accaagccguggcu

SEQ ID NO: 2578074 - RNA, 13 nt, Human
accaaccugacca

SEQ ID NO: 2578075 - RNA, 18 nt, Human
accaagccuggucagccc

SEQ ID NO: 2578076 - RNA, 13 nt, Human
accaccagaagcc

SEQ ID NO: 2578077 - RNA, 15 nt, Human
accaccagaagccca

SEQ ID NO: 2578078 - RNA, 16 nt, Human
accaccagaagcccag

SEQ ID NO: 2578079 - RNA, 17 nt, Human
accaccagaagcccaga

SEQ ID NO: 2578080 - RNA, 19 nt, Human
accaacccuguuuccugag

SEQ ID NO: 2578081 - RNA, 23 nt, Human
accacccacucuccucugccuca

SEQ ID NO: 2578082 - RNA, 19 nt, Human
accaccccagcugcucccc

SEQ ID NO: 2578083 - RNA, 16 nt, Human
accagagcugccaccu

SEQ ID NO: 2578084 - RNA, 14 nt, Human
accagagcugccac

SEQ ID NO: 2578085 - RNA, 13 nt, Human
accagagcugcca

SEQ ID NO: 2578086 - RNA, 12 nt, Human
accagagcugcc

SEQ ID NO: 2578087 - RNA, 23 nt, Human
accacgugcuacccccaugcugg

SEQ ID NO: 2578088 - RNA, 18 nt, Human
accacgucugucuucaca

SEQ ID NO: 2578089 - RNA, 22 nt, Human
acauguuuugauaaaguaguaa

SEQ ID NO: 2578090 - RNA, 23 nt, Human
acauguuuugauaaaguaguaaa

SEQ ID NO: 2578091 - RNA, 18 nt, Human
acauguguagccugugca

SEQ ID NO: 2578092 - RNA, 17 nt, Human
acauguguagccugugc

SEQ ID NO: 2578093 - RNA, 20 nt, Human
acauguguuaaguauuuuca

SEQ ID NO: 2578094 - RNA, 20 nt, Human
acauguguagccugugcaug

SEQ ID NO: 2578095 - RNA, 17 nt, Human
acauguguuggcagccu

SEQ ID NO: 2578096 - RNA, 17 nt, Human
acauguuuuagacaaau

SEQ ID NO: 2578097 - RNA, 20 nt, Human
acauguuuuagacaaauacu

SEQ ID NO: 2578098 - RNA, 21 nt, Human
acauguguuuuaauuccaaua

SEQ ID NO: 2578099 - RNA, 12 nt, Human
acauguguuuua

SEQ ID NO: 2578100 - RNA, 22 nt, Human
acauguuuuagacaaauacuca

SEQ ID NO: 2578101 - RNA, 21 nt, Human
acauguuuuagacaaauacuc

SEQ ID NO: 2578102 - RNA, 23 nt, Human
acauguuuuagacaaauacucau

SEQ ID NO: 2578103 - RNA, 21 nt, Human
acauguuuugauaaaguagua

SEQ ID NO: 2578104 - RNA, 20 nt, Human
acauguuuugauaaaguagu

SEQ ID NO: 2578105 - RNA, 18 nt, Human
acauguuuugauaaagua

SEQ ID NO: 2578106 - RNA, 17 nt, Human
acauguuuugauaaagu

SEQ ID NO: 2578107 - RNA, 15 nt, Human
acauguuuugauaaa

SEQ ID NO: 2578108 - RNA, 13 nt, Human
acauguuuugaua

SEQ ID NO: 2578109 - RNA, 19 nt, Human
acauguuuuucuucucccu

SEQ ID NO: 2578110 - RNA, 15 nt, Human
acauccaaagcagac

SEQ ID NO: 2578111 - RNA, 16 nt, Human
acauccaaagcagaca

SEQ ID NO: 2578112 - RNA, 17 nt, Human
acauccaaagcagacag

SEQ ID NO: 2578113 - RNA, 18 nt, Human
acauccaaagcagacagc

SEQ ID NO: 2578114 - RNA, 21 nt, Human
acauccaaaauaguuaagaca

SEQ ID NO: 2578115 - RNA, 21 nt, Human
acauacaccuaugucauuuca

SEQ ID NO: 2578116 - RNA, 23 nt, Human
acauaaucuucugccuucucaug

SEQ ID NO: 2578117 - RNA, 14 nt, Human
acauaagaccauaa

SEQ ID NO: 2578118 - RNA, 22 nt, Human
acauaacguuuuuccuuuaaaa

SEQ ID NO: 2578119 - RNA, 16 nt, Human
acauacaauuccaaac

SEQ ID NO: 2578120 - RNA, 16 nt, Human
acauacacacauaugu

SEQ ID NO: 2578121 - RNA, 13 nt, Human
acauacaccagca

SEQ ID NO: 2578122 - RNA, 14 nt, Human
acauacaccagcau

SEQ ID NO: 2578123 - RNA, 15 nt, Human
acauacaccagcauu

SEQ ID NO: 2578124 - RNA, 20 nt, Human
acauacaggaagguagaaau

SEQ ID NO: 2578125 - RNA, 19 nt, Human
acauaaguuuaggauaaaa

SEQ ID NO: 2578126 - RNA, 21 nt, Human
acauaaguaauucaagaaaac

SEQ ID NO: 2578127 - RNA, 20 nt, Human
acauaaguauuuaauucaug

SEQ ID NO: 2578128 - RNA, 23 nt, Human
acauaacguuuuuccuuuaaaaa

SEQ ID NO: 2578129 - RNA, 12 nt, Human
acauaacugaaa

SEQ ID NO: 2578130 - RNA, 20 nt, Human
acauaacugaaaaugugcua

SEQ ID NO: 2578131 - RNA, 20 nt, Human
acauaaguaauucaagaaaa

SEQ ID NO: 2578132 - RNA, 21 nt, Human
acauaacguuuuuccuuuaaa

SEQ ID NO: 2578133 - RNA, 20 nt, Human
acauaacguuuuuccuuuaa

SEQ ID NO: 2578134 - RNA, 18 nt, Human
acauaacguuuuuccuuu

SEQ ID NO: 2578135 - RNA, 16 nt, Human
acauaacguuuuuccu

SEQ ID NO: 2578136 - RNA, 15 nt, Human
acauaacguuuuucc

SEQ ID NO: 2578137 - RNA, 14 nt, Human
acauaacguuuuuc

SEQ ID NO: 2578138 - RNA, 18 nt, Human
acaugcagcccaugccca

SEQ ID NO: 2578139 - RNA, 15 nt, Human
acaugcagcccaugc

SEQ ID NO: 2578140 - RNA, 17 nt, Human
acaugcagcccaugccc

SEQ ID NO: 2578141 - RNA, 20 nt, Human
acaugccucucucaggccaa

SEQ ID NO: 2578142 - RNA, 21 nt, Human
acaugccugccccaaacaaau

SEQ ID NO: 2578143 - RNA, 15 nt, Human
acaugccugccccaa

SEQ ID NO: 2578144 - RNA, 22 nt, Human
acaugcgggcugggcagcuguu

SEQ ID NO: 2578145 - RNA, 21 nt, Human
acaugcgggcugggcagcugu

SEQ ID NO: 2578146 - RNA, 19 nt, Human
acaugcgggcugggcagcu

SEQ ID NO: 2578147 - RNA, 17 nt, Human
acaugcgggcugggcag

SEQ ID NO: 2578148 - RNA, 17 nt, Human
acaugcggagaacaaau

SEQ ID NO: 2578149 - RNA, 22 nt, Human
acaugccugccccaaacaaaua

SEQ ID NO: 2578150 - RNA, 16 nt, Human
acaugcgggcugggca

SEQ ID NO: 2578151 - RNA, 14 nt, Human
acaugcgggcuggg

SEQ ID NO: 2578152 - RNA, 23 nt, Human
acaugcggagaacaaaugugaag

SEQ ID NO: 2578153 - RNA, 17 nt, Human
acaugcgguagccagca

SEQ ID NO: 2578154 - RNA, 19 nt, Human
acaugugccgaaugugcag

SEQ ID NO: 2578155 - RNA, 17 nt, Human
acaugugccgaaugugc

SEQ ID NO: 2578156 - RNA, 22 nt, Human
acaugugccagggcaaugauga

SEQ ID NO: 2578157 - RNA, 18 nt, Human
acauguggggccagguca

SEQ ID NO: 2578158 - RNA, 16 nt, Human
acauguggggccaggu

SEQ ID NO: 2578159 - RNA, 18 nt, Human
acauguggaaagugaauu

SEQ ID NO: 2578160 - RNA, 20 nt, Human
acaugugccgaaugugcagg

SEQ ID NO: 2578161 - RNA, 19 nt, Human
acauguggaaagugaauuu

SEQ ID NO: 2578162 - RNA, 16 nt, Human
acaugugugcgugugc

SEQ ID NO: 2578163 - RNA, 15 nt, Human
acauguggugggaca

SEQ ID NO: 2578164 - RNA, 23 nt, Human
acauguggugggacagggaccca

SEQ ID NO: 2578165 - RNA, 16 nt, Human
acaugugguuuauaga

SEQ ID NO: 2578166 - RNA, 13 nt, Human
acaugugguuuau

SEQ ID NO: 2578167 - RNA, 15 nt, Human
acaucccugccagcu

SEQ ID NO: 2578168 - RNA, 18 nt, Human
acaucccgggacgcagca

SEQ ID NO: 2578169 - RNA, 23 nt, Human
acaucccuacaaaaaauuagaaa

SEQ ID NO: 2578170 - RNA, 16 nt, Human
acaucccugccagcuc

SEQ ID NO: 2578171 - RNA, 17 nt, Human
acaucccugccagcucu

SEQ ID NO: 2578172 - RNA, 19 nt, Human
acauccaaagcagacagcu

SEQ ID NO: 2578173 - RNA, 18 nt, Human
acaucccauguaacagaa

SEQ ID NO: 2578174 - RNA, 16 nt, Human
acaucccauguaacag

SEQ ID NO: 2578175 - RNA, 20 nt, Human
acaucccauguaacagaaag

SEQ ID NO: 2578176 - RNA, 16 nt, Human
acaucccauugcccug

SEQ ID NO: 2578177 - RNA, 17 nt, Human
acaucccauugcccugg

SEQ ID NO: 2578178 - RNA, 18 nt, Human
acaucccauugcccuggu

SEQ ID NO: 2578179 - RNA, 14 nt, Human
acauccccacccuu

SEQ ID NO: 2578180 - RNA, 18 nt, Human
acauccccccgccaaaag

SEQ ID NO: 2578181 - RNA, 13 nt, Human
acaugcacgugug

SEQ ID NO: 2578182 - RNA, 18 nt, Human
acaugcacuuggcugcau

SEQ ID NO: 2578183 - RNA, 22 nt, Human
acaugcacuuggcugcauaaau

SEQ ID NO: 2578184 - RNA, 18 nt, Human
acaugcacucagcucuug

SEQ ID NO: 2578185 - RNA, 17 nt, Human
acaugcacuaugaggaa

SEQ ID NO: 2578186 - RNA, 16 nt, Human
acaugcacuaugagga

SEQ ID NO: 2578187 - RNA, 17 nt, Human
acaugcacucagcucuu

SEQ ID NO: 2578188 - RNA, 13 nt, Human
aauuuccucuauu

SEQ ID NO: 2578189 - RNA, 11 nt, Human
aauuguaauag

SEQ ID NO: 2578190 - RNA, 15 nt, Human
aauuguauagagaua

SEQ ID NO: 2578191 - RNA, 13 nt, Human
aauuguauagaga

SEQ ID NO: 2578192 - RNA, 19 nt, Human
aauuguauaacagguuauu

SEQ ID NO: 2578193 - RNA, 18 nt, Human
aauuguauaacagguuau

SEQ ID NO: 2578194 - RNA, 17 nt, Human
aauuguauaacagguua

SEQ ID NO: 2578195 - RNA, 16 nt, Human
aauuguauaacagguu

SEQ ID NO: 2578196 - RNA, 15 nt, Human
aauuguauaacaggu

SEQ ID NO: 2578197 - RNA, 22 nt, Human
aauuucauaccuaucaucuuaa

SEQ ID NO: 2578198 - RNA, 14 nt, Human
aauuguacauauuu

SEQ ID NO: 2578199 - RNA, 21 nt, Human
aauuguacauauuuguggaau

SEQ ID NO: 2578200 - RNA, 15 nt, Human
aauuguacauauuug

SEQ ID NO: 2578201 - RNA, 14 nt, Human
aauuguauaacagg

SEQ ID NO: 2578202 - RNA, 13 nt, Human
aauuguauaacag

SEQ ID NO: 2578203 - RNA, 18 nt, Human
aauuguaggggugugugu

SEQ ID NO: 2578204 - RNA, 22 nt, Human
aauuuccccaacagugugaagu

SEQ ID NO: 2578205 - RNA, 21 nt, Human
aauuuccccaacagugugaag

SEQ ID NO: 2578206 - RNA, 20 nt, Human
aauuuccccaacagugugaa

SEQ ID NO: 2578207 - RNA, 19 nt, Human
aauuuccccaacaguguga

SEQ ID NO: 2578208 - RNA, 18 nt, Human
aauuuccccaacagugug

SEQ ID NO: 2578209 - RNA, 17 nt, Human
aauuuccccaacagugu

SEQ ID NO: 2578210 - RNA, 15 nt, Human
aauuuccccaacagu

SEQ ID NO: 2578211 - RNA, 14 nt, Human
aauuuccccaacag

SEQ ID NO: 2578212 - RNA, 16 nt, Human
aauuucccaggacccu

SEQ ID NO: 2578213 - RNA, 17 nt, Human
aauuucccaggacccug

SEQ ID NO: 2578214 - RNA, 21 nt, Human
aauuucccaggacccugaagg

SEQ ID NO: 2578215 - RNA, 22 nt, Human
aauuucccaggacccugaaggg

SEQ ID NO: 2578216 - RNA, 22 nt, Human
aauuucccacaccguguaaacc

SEQ ID NO: 2578217 - RNA, 12 nt, Human
aauuucccagga

SEQ ID NO: 2578218 - RNA, 14 nt, Human
aauuucccaggacc

SEQ ID NO: 2578219 - RNA, 15 nt, Human
aauuucccaggaccc

SEQ ID NO: 2578220 - RNA, 15 nt, Human
aauuuccagagaaga

SEQ ID NO: 2578221 - RNA, 15 nt, Human
aauuuccaguaccuu

SEQ ID NO: 2578222 - RNA, 17 nt, Human
aauuuccaguaccuuug

SEQ ID NO: 2578223 - RNA, 20 nt, Human
aauuuccaguaccuuuguca

SEQ ID NO: 2578224 - RNA, 24 nt, Human
aauuuccagugagcuuaucaugcu

SEQ ID NO: 2578225 - RNA, 19 nt, Human
aauuucccaauuaggaagu

SEQ ID NO: 2578226 - RNA, 17 nt, Human
aauuucccaaagcagug

SEQ ID NO: 2578227 - RNA, 15 nt, Human
aauuucccaaagcag

SEQ ID NO: 2578228 - RNA, 18 nt, Human
aauuucauaugcuguaua

SEQ ID NO: 2578229 - RNA, 16 nt, Human
aauuucauaugcugua

SEQ ID NO: 2578230 - RNA, 21 nt, Human
aauuuccacaaaaucugucca

SEQ ID NO: 2578231 - RNA, 11 nt, Human
aauuuccagag

SEQ ID NO: 2578232 - RNA, 19 nt, Human
aauucugucacucaccacu

SEQ ID NO: 2578233 - RNA, 22 nt, Human
aauucuguacugauuuuuguaa

SEQ ID NO: 2578234 - RNA, 21 nt, Human
aauucuguacauagccuauau

SEQ ID NO: 2578235 - RNA, 20 nt, Human
aauucuguacauagccuaua

SEQ ID NO: 2578236 - RNA, 21 nt, Human
aauucuguuuuagguuaaaaa

SEQ ID NO: 2578237 - RNA, 12 nt, Human
aauucuguuuua

SEQ ID NO: 2578238 - RNA, 16 nt, Human
aauucuguuucuugag

SEQ ID NO: 2578239 - RNA, 12 nt, Human
aauucuguuucu

SEQ ID NO: 2578240 - RNA, 13 nt, Human
aauucuguuucuu

SEQ ID NO: 2578241 - RNA, 10 nt, Human
aauucugaau

SEQ ID NO: 2578242 - RNA, 21 nt, Human
aauucugagaaaacuucuuuu

SEQ ID NO: 2578243 - RNA, 20 nt, Human
aauucugcaauguuuuccuu

SEQ ID NO: 2578244 - RNA, 19 nt, Human
aauucugcaauguuuuccu

SEQ ID NO: 2578245 - RNA, 19 nt, Human
aauucuguacauagccuau

SEQ ID NO: 2578246 - RNA, 17 nt, Human
aauucuguacauagccu

SEQ ID NO: 2578247 - RNA, 12 nt, Human
aauucuguacau

SEQ ID NO: 2578248 - RNA, 12 nt, Human
aauucuguaaau

SEQ ID NO: 2578249 - RNA, 19 nt, Human
aauucugcuaccucacugg

SEQ ID NO: 2578250 - RNA, 15 nt, Human
aauucugcuaccuca

SEQ ID NO: 2578251 - RNA, 16 nt, Human
aauucugcuaccucac

SEQ ID NO: 2578252 - RNA, 11 nt, Human
aauuggcagca

SEQ ID NO: 2578253 - RNA, 22 nt, Human
aauuggcagcagauuuuaggaa

SEQ ID NO: 2578254 - RNA, 14 nt, Human
aauuggcagcagau

SEQ ID NO: 2578255 - RNA, 18 nt, Human
aauuggcauguguauguu

SEQ ID NO: 2578256 - RNA, 21 nt, Human
aauugggagcuugggaaugga

SEQ ID NO: 2578257 - RNA, 22 nt, Human
aauuguaaggaaugauuaauua

SEQ ID NO: 2578258 - RNA, 14 nt, Human
aauucuguuuuucu

SEQ ID NO: 2578259 - RNA, 18 nt, Human
aauucuguuuuucuaggc

SEQ ID NO: 2578260 - RNA, 16 nt, Human
aauuggaggaaagcaa

SEQ ID NO: 2578261 - RNA, 14 nt, Human
aauucuuaaaauau

SEQ ID NO: 2578262 - RNA, 15 nt, Human
aauucuccugccuca

SEQ ID NO: 2578263 - RNA, 16 nt, Human
aauucuccugccucag

SEQ ID NO: 2578264 - RNA, 13 nt, Human
aauucuccuggag

SEQ ID NO: 2578265 - RNA, 12 nt, Human
aauucuccugga

SEQ ID NO: 2578266 - RNA, 15 nt, Human
aauucuccuggaggu

SEQ ID NO: 2578267 - RNA, 14 nt, Human
aauucuccugccuc

SEQ ID NO: 2578268 - RNA, 21 nt, Human
aauucucauuugucacacacu

SEQ ID NO: 2578269 - RNA, 15 nt, Human
aauucucuaguuuga

SEQ ID NO: 2578270 - RNA, 17 nt, Human
aauucucuaguuugauu

SEQ ID NO: 2578271 - RNA, 14 nt, Human
aauucucuuucaaa

SEQ ID NO: 2578272 - RNA, 15 nt, Human
aauucucuuauccaa

SEQ ID NO: 2578273 - RNA, 21 nt, Human
aauucucaugugauccuuuua

SEQ ID NO: 2578274 - RNA, 20 nt, Human
aauucucaugugauccuuuu

SEQ ID NO: 2578275 - RNA, 19 nt, Human
aauucucaugugauccuuu

SEQ ID NO: 2578276 - RNA, 16 nt, Human
aauucucaugugaucc

SEQ ID NO: 2578277 - RNA, 13 nt, Human
aauucucauguga

SEQ ID NO: 2578278 - RNA, 22 nt, Human
aauucucaaccuaccaccccuu

SEQ ID NO: 2578279 - RNA, 17 nt, Human
aauucucaaccuaccac

SEQ ID NO: 2578280 - RNA, 14 nt, Human
aauucuauuugcug

SEQ ID NO: 2578281 - RNA, 19 nt, Human
aauucucagaaucucaaau

SEQ ID NO: 2578282 - RNA, 22 nt, Human
aauucuauaaggccauaaaaca

SEQ ID NO: 2578283 - RNA, 21 nt, Human
aauucuagugcugcugaagau

SEQ ID NO: 2578284 - RNA, 18 nt, Human
aauucuagugcugcugaa

SEQ ID NO: 2578285 - RNA, 16 nt, Human
aauucuauaaggccau

SEQ ID NO: 2578286 - RNA, 17 nt, Human
aauucuagugcugcuga

SEQ ID NO: 2578287 - RNA, 16 nt, Human
aauucuagugcugcug

SEQ ID NO: 2578288 - RNA, 12 nt, Human
aauucuagugcu

SEQ ID NO: 2578289 - RNA, 23 nt, Human
aauucuaggcaucccaggggacc

SEQ ID NO: 2578290 - RNA, 22 nt, Human
aauucuagcuuugagcuuaaga

SEQ ID NO: 2578291 - RNA, 15 nt, Human
aauucuacauuguca

SEQ ID NO: 2578292 - RNA, 14 nt, Human
aauucuacuuugag

SEQ ID NO: 2578293 - RNA, 23 nt, Human
aauucgaaccaggaaauggaacc

SEQ ID NO: 2578294 - RNA, 13 nt, Human
aauucuaaaugaa

SEQ ID NO: 2578295 - RNA, 19 nt, Human
aauucuaaaugaauguuua

SEQ ID NO: 2578296 - RNA, 14 nt, Human
aauucuaacuuuuu

SEQ ID NO: 2578297 - RNA, 19 nt, Human
aauuauagaugggaaugaa

SEQ ID NO: 2578298 - RNA, 15 nt, Human
aauuauagaugggaa

SEQ ID NO: 2578299 - RNA, 19 nt, Human
aauuauacccccugcaaag

SEQ ID NO: 2578300 - RNA, 20 nt, Human
aauuauacuggagaagucuu

SEQ ID NO: 2578301 - RNA, 22 nt, Human
aauuauagugauguaaucuuga

SEQ ID NO: 2578302 - RNA, 21 nt, Human
aauuauauagguugugcaaau

SEQ ID NO: 2578303 - RNA, 20 nt, Human
aauuauauagguugugcaaa

SEQ ID NO: 2578304 - RNA, 22 nt, Human
aauuauaucaguccucuuucaa

SEQ ID NO: 2578305 - RNA, 18 nt, Human
aauuauguauguuuacau

SEQ ID NO: 2578306 - RNA, 16 nt, Human
aauuauguauguuuac

SEQ ID NO: 2578307 - RNA, 15 nt, Human
aauuauguauguuua

SEQ ID NO: 2578308 - RNA, 19 nt, Human
aauuaugccuuuuuugauc

SEQ ID NO: 2578309 - RNA, 13 nt, Human
aauuaugacaguu

SEQ ID NO: 2578310 - RNA, 17 nt, Human
aauuaugccuuuuuuga

SEQ ID NO: 2578311 - RNA, 22 nt, Human
aauuaucuauacauaucuuuau

SEQ ID NO: 2578312 - RNA, 12 nt, Human
aauuaugacagu

SEQ ID NO: 2578313 - RNA, 15 nt, Human
aauuaugacaguuau

SEQ ID NO: 2578314 - RNA, 21 nt, Human
aauuccuguagcaucuucugg

SEQ ID NO: 2578315 - RNA, 21 nt, Human
aauuauguauguuuacauauc

SEQ ID NO: 2578316 - RNA, 17 nt, Human
aauuccucuuugcuuug

SEQ ID NO: 2578317 - RNA, 18 nt, Human
aauuccucuuugcuuugc

SEQ ID NO: 2578318 - RNA, 19 nt, Human
aauuccucuuugcuuugcu

SEQ ID NO: 2578319 - RNA, 11 nt, Human
aauuccugggc

SEQ ID NO: 2578320 - RNA, 15 nt, Human
aauucggugugcacc

SEQ ID NO: 2578321 - RNA, 18 nt, Human
aauucgcugcaaccuguu

SEQ ID NO: 2578322 - RNA, 14 nt, Human
aauucgaccugauu

SEQ ID NO: 2578323 - RNA, 15 nt, Human
aauucgaaccaggaa

SEQ ID NO: 2578324 - RNA, 19 nt, Human
aauuccuuuucuaacucuc

SEQ ID NO: 2578325 - RNA, 13 nt, Human
aauuccuuagcuu

SEQ ID NO: 2578326 - RNA, 23 nt, Human
aauuccuuagcuuagaccucagc

SEQ ID NO: 2578327 - RNA, 16 nt, Human
aauuccuucaggguga

SEQ ID NO: 2578328 - RNA, 17 nt, Human
aauuccuguagcaucuu

SEQ ID NO: 2578329 - RNA, 23 nt, Human
aauuccuucagggugaugccagg

SEQ ID NO: 2578330 - RNA, 21 nt, Human
aauuccuuggcaugccuucca

SEQ ID NO: 2578331 - RNA, 19 nt, Human
aauuaugaguuauuuuuau

SEQ ID NO: 2578332 - RNA, 15 nt, Human
aauuauccagaguuu

SEQ ID NO: 2578333 - RNA, 15 nt, Human
aauuaucggaagcag

SEQ ID NO: 2578334 - RNA, 17 nt, Human
aauuaucggaagcagug

SEQ ID NO: 2578335 - RNA, 20 nt, Human
aauuaucggaagcagugccu

SEQ ID NO: 2578336 - RNA, 21 nt, Human
aauuaucggaagcagugccuu

SEQ ID NO: 2578337 - RNA, 17 nt, Human
aauuaucgggaacagug

SEQ ID NO: 2578338 - RNA, 19 nt, Human
aauuaucgggaacaguguu

SEQ ID NO: 2578339 - RNA, 20 nt, Human
aauuaucgggaacaguguuu

SEQ ID NO: 2578340 - RNA, 23 nt, Human
aauuaucgggaacaguguuuccc

SEQ ID NO: 2578341 - RNA, 14 nt, Human
aauuaucuauacau

SEQ ID NO: 2578342 - RNA, 16 nt, Human
aauuaucuauacauau

SEQ ID NO: 2578343 - RNA, 18 nt, Human
acaaacaauggaaacuga

SEQ ID NO: 2578344 - RNA, 15 nt, Human
acaaacaccucccag

SEQ ID NO: 2578345 - RNA, 20 nt, Human
acaaacaauggaaacugaau

SEQ ID NO: 2578346 - RNA, 19 nt, Human
acaaacaugugguuaaugc

SEQ ID NO: 2578347 - RNA, 13 nt, Human
acaaacagcucag

SEQ ID NO: 2578348 - RNA, 19 nt, Human
acaaacauauuuguuaaau

SEQ ID NO: 2578349 - RNA, 14 nt, Human
acaaacaucacucu

SEQ ID NO: 2578350 - RNA, 22 nt, Human
acaaacauauuuguuaaauauu

SEQ ID NO: 2578351 - RNA, 16 nt, Human
acaacauuaaaacaau

SEQ ID NO: 2578352 - RNA, 22 nt, Human
acaacauguauaauauuuuuaa

SEQ ID NO: 2578353 - RNA, 14 nt, Human
acaacauguauaau

SEQ ID NO: 2578354 - RNA, 14 nt, Human
acaaccauuccaga

SEQ ID NO: 2578355 - RNA, 15 nt, Human
acaaccacuggucug

SEQ ID NO: 2578356 - RNA, 17 nt, Human
acaaccacucauucaaa

SEQ ID NO: 2578357 - RNA, 15 nt, Human
acaaccaccgcuccc

SEQ ID NO: 2578358 - RNA, 19 nt, Human
acaaccaccgcuccccagc

SEQ ID NO: 2578359 - RNA, 21 nt, Human
acaaccaccuaaucaggcuga

SEQ ID NO: 2578360 - RNA, 20 nt, Human
acaaccaccgcuccccagcc

SEQ ID NO: 2578361 - RNA, 18 nt, Human
acaaccaagcucucugca

SEQ ID NO: 2578362 - RNA, 13 nt, Human
acaaacuguaaau

SEQ ID NO: 2578363 - RNA, 20 nt, Human
acaaacucaccaucugugca

SEQ ID NO: 2578364 - RNA, 22 nt, Human
acaaacucucugaaccccuccc

SEQ ID NO: 2578365 - RNA, 22 nt, Human
acaaacuauuucuuauauaugu

SEQ ID NO: 2578366 - RNA, 16 nt, Human
acaaacuacauguaau

SEQ ID NO: 2578367 - RNA, 14 nt, Human
acaaacaugacccu

SEQ ID NO: 2578368 - RNA, 15 nt, Human
acaaacucucugaac

SEQ ID NO: 2578369 - RNA, 18 nt, Human
acaagggagagaccucau

SEQ ID NO: 2578370 - RNA, 19 nt, Human
acaaggcaaggcugucaau

SEQ ID NO: 2578371 - RNA, 17 nt, Human
acaaggcaaggcuguca

SEQ ID NO: 2578372 - RNA, 16 nt, Human
acaaggcaaggcuguc

SEQ ID NO: 2578373 - RNA, 14 nt, Human
acaacugaguccuu

SEQ ID NO: 2578374 - RNA, 13 nt, Human
acaacugaguccu

SEQ ID NO: 2578375 - RNA, 12 nt, Human
acaacugagucc

SEQ ID NO: 2578376 - RNA, 19 nt, Human
acaacugaguccuuaaaca

SEQ ID NO: 2578377 - RNA, 21 nt, Human
acaacugccucgaaacacaga

SEQ ID NO: 2578378 - RNA, 20 nt, Human
acaacuccuagggccacuga

SEQ ID NO: 2578379 - RNA, 20 nt, Human
acaacuggaauaguuuuuuu

SEQ ID NO: 2578380 - RNA, 19 nt, Human
acaacuggaauaguuuuuu

SEQ ID NO: 2578381 - RNA, 22 nt, Human
acaacugccucgaaacacagaa

SEQ ID NO: 2578382 - RNA, 14 nt, Human
acaacuuaaauaau

SEQ ID NO: 2578383 - RNA, 13 nt, Human
acaacuuaaguug

SEQ ID NO: 2578384 - RNA, 15 nt, Human
acaacuuaaauaaua

SEQ ID NO: 2578385 - RNA, 20 nt, Human
acaagguucccucugagaau

SEQ ID NO: 2578386 - RNA, 19 nt, Human
acaagguucccucugagaa

SEQ ID NO: 2578387 - RNA, 22 nt, Human
acaagguucuucccuuuuacau

SEQ ID NO: 2578388 - RNA, 13 nt, Human
acaagguucuucc

SEQ ID NO: 2578389 - RNA, 23 nt, Human
acaagguccucugucagucacag

SEQ ID NO: 2578390 - RNA, 18 nt, Human
acaaggguggcaucccag

SEQ ID NO: 2578391 - RNA, 22 nt, Human
acaagguagcccuggccagagg

SEQ ID NO: 2578392 - RNA, 17 nt, Human
acaagguccaagauacc

SEQ ID NO: 2578393 - RNA, 14 nt, Human
acaagguaguuuuu

SEQ ID NO: 2578394 - RNA, 21 nt, Human
acaagguaccccuuucuggcu

SEQ ID NO: 2578395 - RNA, 19 nt, Human
acaagggucuagggagaga

SEQ ID NO: 2578396 - RNA, 20 nt, Human
acaagggucuagggagagac

SEQ ID NO: 2578397 - RNA, 16 nt, Human
acaagguaguuuuuac

SEQ ID NO: 2578398 - RNA, 22 nt, Human
acaacuuaaguugguccuuuac

SEQ ID NO: 2578399 - RNA, 19 nt, Human
acaagggagagaccucauc

SEQ ID NO: 2578400 - RNA, 17 nt, Human
acaagggucuagggaga

SEQ ID NO: 2578401 - RNA, 18 nt, Human
acaagggucuagggagag

SEQ ID NO: 2578402 - RNA, 20 nt, Human
acaaguguauaucagaaaag

SEQ ID NO: 2578403 - RNA, 19 nt, Human
acaaguguauaucagaaaa

SEQ ID NO: 2578404 - RNA, 18 nt, Human
acaaguguauaucagaaa

SEQ ID NO: 2578405 - RNA, 15 nt, Human
acaaguuaaauaaau

SEQ ID NO: 2578406 - RNA, 14 nt, Human
acaagugcugaaca

SEQ ID NO: 2578407 - RNA, 13 nt, Human
acaagugcuggca

SEQ ID NO: 2578408 - RNA, 12 nt, Human
acaagugcuggc

SEQ ID NO: 2578409 - RNA, 15 nt, Human
acaaguggacucagg

SEQ ID NO: 2578410 - RNA, 18 nt, Human
acaaguggacucagggca

SEQ ID NO: 2578411 - RNA, 19 nt, Human
acaaguggacucagggcag

SEQ ID NO: 2578412 - RNA, 13 nt, Human
acaagugguggua

SEQ ID NO: 2578413 - RNA, 19 nt, Human
acacagccacacacacaga

SEQ ID NO: 2578414 - RNA, 20 nt, Human
acacagccacacacacagaa

SEQ ID NO: 2578415 - RNA, 21 nt, Human
acacagccacacacacagaaa

SEQ ID NO: 2578416 - RNA, 22 nt, Human
acacagccacacacacagaaaa

SEQ ID NO: 2578417 - RNA, 23 nt, Human
acacagccacacacacagaaaau

SEQ ID NO: 2578418 - RNA, 19 nt, Human
acacagccgauucaccuga

SEQ ID NO: 2578419 - RNA, 20 nt, Human
acacagccaggugccuugga

SEQ ID NO: 2578420 - RNA, 23 nt, Human
acacagccgauucaccugagcag

SEQ ID NO: 2578421 - RNA, 16 nt, Human
acacagcucuucucca

SEQ ID NO: 2578422 - RNA, 14 nt, Human
acacagcucuucuc

SEQ ID NO: 2578423 - RNA, 13 nt, Human
acacagccacaca

SEQ ID NO: 2578424 - RNA, 14 nt, Human
acacagccacacac

SEQ ID NO: 2578425 - RNA, 15 nt, Human
acacagccacacaca

SEQ ID NO: 2578426 - RNA, 18 nt, Human
acacagccacacacacag

SEQ ID NO: 2578427 - RNA, 11 nt, Human
acacagccaca

SEQ ID NO: 2578428 - RNA, 12 nt, Human
acacagccacac

SEQ ID NO: 2578429 - RNA, 21 nt, Human
acacagaaaauauacuguaaa

SEQ ID NO: 2578430 - RNA, 22 nt, Human
acacagaaaauauacuguaaag

SEQ ID NO: 2578431 - RNA, 23 nt, Human
acacagaaaauauacuguaaaga

SEQ ID NO: 2578432 - RNA, 18 nt, Human
acacagaaaauguugaga

SEQ ID NO: 2578433 - RNA, 19 nt, Human
acacagaaaauguugagaa

SEQ ID NO: 2578434 - RNA, 22 nt, Human
acacagcagcuucaccagagca

SEQ ID NO: 2578435 - RNA, 14 nt, Human
acacagcaugugua

SEQ ID NO: 2578436 - RNA, 15 nt, Human
acacagcauguguau

SEQ ID NO: 2578437 - RNA, 13 nt, Human
acacagaaaauau

SEQ ID NO: 2578438 - RNA, 14 nt, Human
acacagaaaauaua

SEQ ID NO: 2578439 - RNA, 15 nt, Human
acacagaaaauauac

SEQ ID NO: 2578440 - RNA, 16 nt, Human
acacagaaaauauacu

SEQ ID NO: 2578441 - RNA, 17 nt, Human
acacagaaaauauacug

SEQ ID NO: 2578442 - RNA, 18 nt, Human
acacagaaaauauacugu

SEQ ID NO: 2578443 - RNA, 19 nt, Human
acacagaaaauauacugua

SEQ ID NO: 2578444 - RNA, 20 nt, Human
acacagaaaauauacuguaa

SEQ ID NO: 2578445 - RNA, 11 nt, Human
acacagaaaau

SEQ ID NO: 2578446 - RNA, 12 nt, Human
acacagaaaaua

SEQ ID NO: 2578447 - RNA, 19 nt, Human
acacacuuuuuaagaaaua

SEQ ID NO: 2578448 - RNA, 14 nt, Human
acacacuuuuuaag

SEQ ID NO: 2578449 - RNA, 15 nt, Human
acaccaauauucaua

SEQ ID NO: 2578450 - RNA, 13 nt, Human
acaccagagccca

SEQ ID NO: 2578451 - RNA, 23 nt, Human
acaccagagcccaccuuggcuca

SEQ ID NO: 2578452 - RNA, 18 nt, Human
acaccagagcccaccuug

SEQ ID NO: 2578453 - RNA, 22 nt, Human
acaccaagcugugccacccugg

SEQ ID NO: 2578454 - RNA, 21 nt, Human
acaccaagcugugccacccug

SEQ ID NO: 2578455 - RNA, 20 nt, Human
acaccaagcugugccacccu

SEQ ID NO: 2578456 - RNA, 18 nt, Human
acaccaagcugugccacc

SEQ ID NO: 2578457 - RNA, 17 nt, Human
acaccaagcugugccac

SEQ ID NO: 2578458 - RNA, 16 nt, Human
acaccaagcugugcca

SEQ ID NO: 2578459 - RNA, 16 nt, Human
acaccaagcagcaaca

SEQ ID NO: 2578460 - RNA, 13 nt, Human
acaccaagcagca

SEQ ID NO: 2578461 - RNA, 18 nt, Human
acaccaagcacagcagcc

SEQ ID NO: 2578462 - RNA, 19 nt, Human
acaccaagcacagcagccu

SEQ ID NO: 2578463 - RNA, 20 nt, Human
acaccaagcacagcagccug

SEQ ID NO: 2578464 - RNA, 21 nt, Human
acaccaagcacagcagccugg

SEQ ID NO: 2578465 - RNA, 14 nt, Human
acaccaagcacagc

SEQ ID NO: 2578466 - RNA, 16 nt, Human
acaccaagcacagcag

SEQ ID NO: 2578467 - RNA, 18 nt, Human
acacagcucuucuccagg

SEQ ID NO: 2578468 - RNA, 12 nt, Human
acacguguccug

SEQ ID NO: 2578469 - RNA, 20 nt, Human
acacguggaggaaugcuccc

SEQ ID NO: 2578470 - RNA, 21 nt, Human
acacguggaggaaugcucccc

SEQ ID NO: 2578471 - RNA, 22 nt, Human
acacguggaggaaugcuccccc

SEQ ID NO: 2578472 - RNA, 24 nt, Human
acacguggaggaaugcucccccau

SEQ ID NO: 2578473 - RNA, 22 nt, Human
acacgccugcaaacgcugccug

SEQ ID NO: 2578474 - RNA, 20 nt, Human
acacgcacgcacacacacaa

SEQ ID NO: 2578475 - RNA, 23 nt, Human
acacguacuuaaaugaaagcaug

SEQ ID NO: 2578476 - RNA, 14 nt, Human
acacguccacccca

SEQ ID NO: 2578477 - RNA, 13 nt, Human
acacgugagaauc

SEQ ID NO: 2578478 - RNA, 17 nt, Human
acacgucugacccucuc

SEQ ID NO: 2578479 - RNA, 19 nt, Human
acacgucugacccucucca

SEQ ID NO: 2578480 - RNA, 21 nt, Human
acacgugagaaucccuggcaa

SEQ ID NO: 2578481 - RNA, 16 nt, Human
acacgugagaaucccu

SEQ ID NO: 2578482 - RNA, 23 nt, Human
acacgugcaauuuguuugugcuu

SEQ ID NO: 2578483 - RNA, 17 nt, Human
acacguggaggaaugcu

SEQ ID NO: 2578484 - RNA, 14 nt, Human
acacgcaccugccu

SEQ ID NO: 2578485 - RNA, 16 nt, Human
acacgcaccugccuca

SEQ ID NO: 2578486 - RNA, 14 nt, Human
acacgcacgcacac

SEQ ID NO: 2578487 - RNA, 13 nt, Human
acacgcacgcaca

SEQ ID NO: 2578488 - RNA, 17 nt, Human
acacgcaccugccucag

SEQ ID NO: 2578489 - RNA, 13 nt, Human
acacgcaccugcc

SEQ ID NO: 2578490 - RNA, 12 nt, Human
acaccagccagg

SEQ ID NO: 2578491 - RNA, 19 nt, Human
acaccagcauuccuuuuga

SEQ ID NO: 2578492 - RNA, 14 nt, Human
acaccagcauuccu

SEQ ID NO: 2578493 - RNA, 16 nt, Human
acaccagcauuccuuu

SEQ ID NO: 2578494 - RNA, 19 nt, Human
acacgccuuguucuuggcc

SEQ ID NO: 2578495 - RNA, 18 nt, Human
acacgcacgcacacacac

SEQ ID NO: 2578496 - RNA, 17 nt, Human
acacgcacgcacacaca

SEQ ID NO: 2578497 - RNA, 16 nt, Human
acacgcacgcacacac

SEQ ID NO: 2578498 - RNA, 15 nt, Human
acacgcacgcacaca

SEQ ID NO: 2578499 - RNA, 19 nt, Human
acacgcaggaacucccagc

SEQ ID NO: 2578500 - RNA, 18 nt, Human
aauaaagaguuagaauga

SEQ ID NO: 2578501 - RNA, 15 nt, Human
aauaaagaguuagaa

SEQ ID NO: 2578502 - RNA, 14 nt, Human
aauaaagaucaugu

SEQ ID NO: 2578503 - RNA, 19 nt, Human
aauaaagaucauguaaaag

SEQ ID NO: 2578504 - RNA, 15 nt, Human
aauaaagcaauuuuc

SEQ ID NO: 2578505 - RNA, 13 nt, Human
aauaaagcaauuu

SEQ ID NO: 2578506 - RNA, 12 nt, Human
aauaaagcaauu

SEQ ID NO: 2578507 - RNA, 20 nt, Human
aauaaagaucauguaaaagu

SEQ ID NO: 2578508 - RNA, 13 nt, Human
aauaaagaaauug

SEQ ID NO: 2578509 - RNA, 12 nt, Human
aauaaagacagg

SEQ ID NO: 2578510 - RNA, 11 nt, Human
aauaaagacag

SEQ ID NO: 2578511 - RNA, 17 nt, Human
aauaaugugaaacugga

SEQ ID NO: 2578512 - RNA, 22 nt, Human
aauaaugugaaacuggauuaaa

SEQ ID NO: 2578513 - RNA, 14 nt, Human
aauaaagcagcguu

SEQ ID NO: 2578514 - RNA, 22 nt, Human
aauaaagcaauuuuccuugaag

SEQ ID NO: 2578515 - RNA, 18 nt, Human
aauaaagcaauuuuccuu

SEQ ID NO: 2578516 - RNA, 17 nt, Human
aauaaagcaauuuuccu

SEQ ID NO: 2578517 - RNA, 16 nt, Human
aauaaagcaauuuucc

SEQ ID NO: 2578518 - RNA, 24 nt, Human
aauaaagcaauuuuccuugaagcc

SEQ ID NO: 2578519 - RNA, 23 nt, Human
aauaaagcaauuuuccuugaagc

SEQ ID NO: 2578520 - RNA, 11 nt, Human
aauaaagcccu

SEQ ID NO: 2578521 - RNA, 19 nt, Human
aauaauguuaacauggaca

SEQ ID NO: 2578522 - RNA, 15 nt, Human
aauaaugugaaucau

SEQ ID NO: 2578523 - RNA, 12 nt, Human
aauaaacuuuuu

SEQ ID NO: 2578524 - RNA, 20 nt, Human
aauaaacuuuuuuuugagaa

SEQ ID NO: 2578525 - RNA, 17 nt, Human
aauaaacuuuuuuuuga

SEQ ID NO: 2578526 - RNA, 22 nt, Human
aauaaacuuagaauaaaauugu

SEQ ID NO: 2578527 - RNA, 13 nt, Human
aauaaacuuuaau

SEQ ID NO: 2578528 - RNA, 19 nt, Human
aauaaacacucuugaaaaa

SEQ ID NO: 2578529 - RNA, 13 nt, Human
aauaaacacugug

SEQ ID NO: 2578530 - RNA, 12 nt, Human
aauaaacacugu

SEQ ID NO: 2578531 - RNA, 12 nt, Human
aauaaacaggag

SEQ ID NO: 2578532 - RNA, 13 nt, Human
aauaaacauccuu

SEQ ID NO: 2578533 - RNA, 23 nt, Human
aauaaacauccuucaagaacucu

SEQ ID NO: 2578534 - RNA, 16 nt, Human
aauaaacacucuugaa

SEQ ID NO: 2578535 - RNA, 11 nt, Human
aauaaacacuc

SEQ ID NO: 2578536 - RNA, 23 nt, Human
aaguuuaaggaauaugggagaaa

SEQ ID NO: 2578537 - RNA, 10 nt, Human
aauaaacacu

SEQ ID NO: 2578538 - RNA, 17 nt, Human
aaguuguuugucaucuu

SEQ ID NO: 2578539 - RNA, 22 nt, Human
aaguuguuugagaaauuaagua

SEQ ID NO: 2578540 - RNA, 21 nt, Human
aaguuguuugagaaauuaagu

SEQ ID NO: 2578541 - RNA, 15 nt, Human
aaguuguuugagaaa

SEQ ID NO: 2578542 - RNA, 14 nt, Human
aaguuuaaggaaua

SEQ ID NO: 2578543 - RNA, 15 nt, Human
aaguuuaaggaauau

SEQ ID NO: 2578544 - RNA, 13 nt, Human
aaguuguuugcau

SEQ ID NO: 2578545 - RNA, 17 nt, Human
aaguuuaaagcucgaaa

SEQ ID NO: 2578546 - RNA, 23 nt, Human
aaguugguccuuuacacucaggc

SEQ ID NO: 2578547 - RNA, 12 nt, Human
aagugcugggau

SEQ ID NO: 2578548 - RNA, 17 nt, Human
aaguggacucagggcag

SEQ ID NO: 2578549 - RNA, 22 nt, Human
aaguggaccuuaggccuuccuc

SEQ ID NO: 2578550 - RNA, 20 nt, Human
aaguggaccaggacaggacc

SEQ ID NO: 2578551 - RNA, 20 nt, Human
aaguggacuggccccugggu

SEQ ID NO: 2578552 - RNA, 16 nt, Human
aaguggaggcacuuua

SEQ ID NO: 2578553 - RNA, 18 nt, Human
aaguggacuggccccugg

SEQ ID NO: 2578554 - RNA, 23 nt, Human
aaguggacucuuugguggcuuug

SEQ ID NO: 2578555 - RNA, 20 nt, Human
aaguggaccuugagaccaca

SEQ ID NO: 2578556 - RNA, 23 nt, Human
aaguugaauugaggggauuaaua

SEQ ID NO: 2578557 - RNA, 18 nt, Human
aaguugaagcuaagauuu

SEQ ID NO: 2578558 - RNA, 21 nt, Human
aaguugaauggccugccuuga

SEQ ID NO: 2578559 - RNA, 14 nt, Human
aaguggcugcugac

SEQ ID NO: 2578560 - RNA, 20 nt, Human
aaguugaaagaguccuauuu

SEQ ID NO: 2578561 - RNA, 17 nt, Human
aaguugaaauuaaccau

SEQ ID NO: 2578562 - RNA, 12 nt, Human
aaguggcugcug

SEQ ID NO: 2578563 - RNA, 17 nt, Human
aaguugaagcuaagauu

SEQ ID NO: 2578564 - RNA, 14 nt, Human
aaguggccucuuug

SEQ ID NO: 2578565 - RNA, 17 nt, Human
aaguggccucuuugucu

SEQ ID NO: 2578566 - RNA, 22 nt, Human
aaguggccucuuugucuaaaac

SEQ ID NO: 2578567 - RNA, 13 nt, Human
aaguggccucuuu

SEQ ID NO: 2578568 - RNA, 22 nt, Human
aagugcugcauuuaaaagauac

SEQ ID NO: 2578569 - RNA, 23 nt, Human
aagugcuggcaaccacuaagaau

SEQ ID NO: 2578570 - RNA, 21 nt, Human
aagugcuggcaccaccaggca

SEQ ID NO: 2578571 - RNA, 22 nt, Human
aagugcuggcaaccacuaagaa

SEQ ID NO: 2578572 - RNA, 23 nt, Human
aaucaccgaaaacguggcugcuu

SEQ ID NO: 2578573 - RNA, 16 nt, Human
aaucacgcuuuccuga

SEQ ID NO: 2578574 - RNA, 21 nt, Human
aaucaccgaaaacguggcugc

SEQ ID NO: 2578575 - RNA, 22 nt, Human
aaucaaugcuauaacuauguug

SEQ ID NO: 2578576 - RNA, 17 nt, Human
aaucaaugucacuuaaa

SEQ ID NO: 2578577 - RNA, 22 nt, Human
aauauuaaugccuuuaaaguau

SEQ ID NO: 2578578 - RNA, 15 nt, Human
aauauuaaugccuuu

SEQ ID NO: 2578579 - RNA, 21 nt, Human
aauauuuuuuuguagaugaaa

SEQ ID NO: 2578580 - RNA, 17 nt, Human
aauauuuuuuuguagau

SEQ ID NO: 2578581 - RNA, 18 nt, Human
aauauuuuuucuuuucua

SEQ ID NO: 2578582 - RNA, 10 nt, Human
aaucaaaacu

SEQ ID NO: 2578583 - RNA, 18 nt, Human
aaucaaaacucuccuaca

SEQ ID NO: 2578584 - RNA, 16 nt, Human
aaucaaagcaaugcau

SEQ ID NO: 2578585 - RNA, 16 nt, Human
aaucaaagacauggaa

SEQ ID NO: 2578586 - RNA, 20 nt, Human
aaucaaaauaacgccccaga

SEQ ID NO: 2578587 - RNA, 13 nt, Human
aaucaaaauaugu

SEQ ID NO: 2578588 - RNA, 19 nt, Human
aaucaauacacuaguuguu

SEQ ID NO: 2578589 - RNA, 20 nt, Human
aaucaauacacuaguuguuu

SEQ ID NO: 2578590 - RNA, 18 nt, Human
aaucaauacacuaguugu

SEQ ID NO: 2578591 - RNA, 14 nt, Human
aaucaauacacuag

SEQ ID NO: 2578592 - RNA, 12 nt, Human
aaucaauaauau

SEQ ID NO: 2578593 - RNA, 16 nt, Human
aaucaauaaacgauuu

SEQ ID NO: 2578594 - RNA, 22 nt, Human
aaucaaagcaaugcauuuugga

SEQ ID NO: 2578595 - RNA, 18 nt, Human
aaucaaagcaaugcauuu

SEQ ID NO: 2578596 - RNA, 23 nt, Human
aaucaaguuggcuucuaaucaaa

SEQ ID NO: 2578597 - RNA, 13 nt, Human
aaucaauaaacga

SEQ ID NO: 2578598 - RNA, 17 nt, Human
aauauauaaauauauau

SEQ ID NO: 2578599 - RNA, 13 nt, Human
aauauauaaauau

SEQ ID NO: 2578600 - RNA, 11 nt, Human
aauauauaaau

SEQ ID NO: 2578601 - RNA, 21 nt, Human
aauauauaaaaagaaaagaua

SEQ ID NO: 2578602 - RNA, 19 nt, Human
aauauauauaaauauauau

SEQ ID NO: 2578603 - RNA, 15 nt, Human
aauauauauaaauaa

SEQ ID NO: 2578604 - RNA, 13 nt, Human
aauauauauaaau

SEQ ID NO: 2578605 - RNA, 15 nt, Human
aauauauauaaaccu

SEQ ID NO: 2578606 - RNA, 14 nt, Human
aauauauauaaacc

SEQ ID NO: 2578607 - RNA, 13 nt, Human
aauauauauaaac

SEQ ID NO: 2578608 - RNA, 12 nt, Human
aauauauauaaa

SEQ ID NO: 2578609 - RNA, 14 nt, Human
aauauauaaauaua

SEQ ID NO: 2578610 - RNA, 23 nt, Human
aauauguggaguucaucuugaau

SEQ ID NO: 2578611 - RNA, 13 nt, Human
aauauguccuggg

SEQ ID NO: 2578612 - RNA, 14 nt, Human
aauauauauauccu

SEQ ID NO: 2578613 - RNA, 21 nt, Human
aauauauauauauauaaaaua

SEQ ID NO: 2578614 - RNA, 19 nt, Human
aauauauauauauauaaaa

SEQ ID NO: 2578615 - RNA, 18 nt, Human
aauauauauauauauaaa

SEQ ID NO: 2578616 - RNA, 16 nt, Human
aauauauauaaauaaa

SEQ ID NO: 2578617 - RNA, 22 nt, Human
aauauauauauauauaaaauaa

SEQ ID NO: 2578618 - RNA, 12 nt, Human
aauauguccugg

SEQ ID NO: 2578619 - RNA, 21 nt, Human
aauauguuaaccucaguguca

SEQ ID NO: 2578620 - RNA, 16 nt, Human
aauauguuagcaaaga

SEQ ID NO: 2578621 - RNA, 22 nt, Human
aauauguuaaccucagugucau

SEQ ID NO: 2578622 - RNA, 20 nt, Human
aauauguucuuuaaaaauau

SEQ ID NO: 2578623 - RNA, 19 nt, Human
aauauuaaauacagacacu

SEQ ID NO: 2578624 - RNA, 17 nt, Human
aauauuaaauacagaca

SEQ ID NO: 2578625 - RNA, 16 nt, Human
aauauuaaauacagac

SEQ ID NO: 2578626 - RNA, 14 nt, Human
aauauuaaauacag

SEQ ID NO: 2578627 - RNA, 13 nt, Human
aauauuaaauaca

SEQ ID NO: 2578628 - RNA, 22 nt, Human
aauauguugaugaaaaauagca

SEQ ID NO: 2578629 - RNA, 22 nt, Human
aauauuaaauacagacacuaag

SEQ ID NO: 2578630 - RNA, 20 nt, Human
aauauuaaauacagacacua

SEQ ID NO: 2578631 - RNA, 13 nt, Human
aauauuaaaucug

SEQ ID NO: 2578632 - RNA, 21 nt, Human
aauauuaaaucugcuggaguu

SEQ ID NO: 2578633 - RNA, 13 nt, Human
aauauuaagaaag

SEQ ID NO: 2578634 - RNA, 22 nt, Human
aaucucaccccaucccacaccc

SEQ ID NO: 2578635 - RNA, 22 nt, Human
aaucucagagguagggcugcca

SEQ ID NO: 2578636 - RNA, 23 nt, Human
aaucucagagguagggcugccac

SEQ ID NO: 2578637 - RNA, 22 nt, Human
aaucucagcaaugauuacucuu

SEQ ID NO: 2578638 - RNA, 16 nt, Human
aaucucaauauuucag

SEQ ID NO: 2578639 - RNA, 17 nt, Human
aaucucaauucuucccu

SEQ ID NO: 2578640 - RNA, 13 nt, Human
aaucucaccccau

SEQ ID NO: 2578641 - RNA, 13 nt, Human
aaucugacccagu

SEQ ID NO: 2578642 - RNA, 14 nt, Human
aaucugacccagug

SEQ ID NO: 2578643 - RNA, 15 nt, Human
aaucugacccagugc

SEQ ID NO: 2578644 - RNA, 17 nt, Human
aaucugacccagugccc

SEQ ID NO: 2578645 - RNA, 12 nt, Human
aaucugacccag

SEQ ID NO: 2578646 - RNA, 17 nt, Human
aaucugaggccuccucu

SEQ ID NO: 2578647 - RNA, 19 nt, Human
aaucugauuggacauuuuc

SEQ ID NO: 2578648 - RNA, 18 nt, Human
aaucugauuggacauuuu

SEQ ID NO: 2578649 - RNA, 17 nt, Human
aaucugauggcuucucc

SEQ ID NO: 2578650 - RNA, 16 nt, Human
aaugaagcuuguguau

SEQ ID NO: 2578651 - RNA, 15 nt, Human
aaugaagcuugugua

SEQ ID NO: 2578652 - RNA, 14 nt, Human
aaugaagcuugugu

SEQ ID NO: 2578653 - RNA, 12 nt, Human
aaugaagcuugu

SEQ ID NO: 2578654 - RNA, 22 nt, Human
aaugaagcagcuuuaaacaaau

SEQ ID NO: 2578655 - RNA, 19 nt, Human
aaugaagcagcuuuaaaca

SEQ ID NO: 2578656 - RNA, 15 nt, Human
aaugaagccuuagcc

SEQ ID NO: 2578657 - RNA, 22 nt, Human
aaugaagcuuguguauccauua

SEQ ID NO: 2578658 - RNA, 19 nt, Human
aaugaagcuuguguaucca

SEQ ID NO: 2578659 - RNA, 17 nt, Human
aaugaagcuuguguauc

SEQ ID NO: 2578660 - RNA, 18 nt, Human
aaugaaguuugaauguua

SEQ ID NO: 2578661 - RNA, 17 nt, Human
aaugaaguuugaauguu

SEQ ID NO: 2578662 - RNA, 14 nt, Human
aaugaagcaaugcu

SEQ ID NO: 2578663 - RNA, 17 nt, Human
aaugaaagcaugucuca

SEQ ID NO: 2578664 - RNA, 15 nt, Human
aaugaaagcaugugg

SEQ ID NO: 2578665 - RNA, 17 nt, Human
aaugaagcagcuuuaaa

SEQ ID NO: 2578666 - RNA, 15 nt, Human
aaugaagcagcuuua

SEQ ID NO: 2578667 - RNA, 19 nt, Human
aaugaaagaguaaaggaaa

SEQ ID NO: 2578668 - RNA, 21 nt, Human
aaugaaagacuguacaaagua

SEQ ID NO: 2578669 - RNA, 18 nt, Human
aaugaaagacuguacaaa

SEQ ID NO: 2578670 - RNA, 20 nt, Human
aaugaaagacuguacaaagu

SEQ ID NO: 2578671 - RNA, 20 nt, Human
aaugaauacuuuauaaagga

SEQ ID NO: 2578672 - RNA, 22 nt, Human
aaugaaguuugaauguuaaaua

SEQ ID NO: 2578673 - RNA, 21 nt, Human
aaugaaguuugaauguuaaau

SEQ ID NO: 2578674 - RNA, 20 nt, Human
aaugaaguuugaauguuaaa

SEQ ID NO: 2578675 - RNA, 19 nt, Human
aaugaaguuugaauguuaa

SEQ ID NO: 2578676 - RNA, 15 nt, Human
aaugaauaauaauua

SEQ ID NO: 2578677 - RNA, 16 nt, Human
aaugaauaauuuccca

SEQ ID NO: 2578678 - RNA, 21 nt, Human
aaugaauaauaauuauccaga

SEQ ID NO: 2578679 - RNA, 20 nt, Human
aaugauguauguugaagccu

SEQ ID NO: 2578680 - RNA, 18 nt, Human
aaugauggcaauuuugua

SEQ ID NO: 2578681 - RNA, 19 nt, Human
aaugauggcaauuuuguaa

SEQ ID NO: 2578682 - RNA, 20 nt, Human
aaugaugccaugaggaacaa

SEQ ID NO: 2578683 - RNA, 14 nt, Human
aaugauggcaauuu

SEQ ID NO: 2578684 - RNA, 17 nt, Human
aaugauggcaauuuugu

SEQ ID NO: 2578685 - RNA, 22 nt, Human
aaugauggacccaaugcacaca

SEQ ID NO: 2578686 - RNA, 15 nt, Human
aaugauggacccaau

SEQ ID NO: 2578687 - RNA, 22 nt, Human
aagccagugacuccaggagagg

SEQ ID NO: 2578688 - RNA, 17 nt, Human
aagccagugcggcaggu

SEQ ID NO: 2578689 - RNA, 18 nt, Human
aagccagugacuccagga

SEQ ID NO: 2578690 - RNA, 17 nt, Human
aagccagugacuccagg

SEQ ID NO: 2578691 - RNA, 21 nt, Human
aagccaggagcaaauguuucu

SEQ ID NO: 2578692 - RNA, 18 nt, Human
aagccaggagcaaauguu

SEQ ID NO: 2578693 - RNA, 24 nt, Human
aagccaggaauuucccaggacccu

SEQ ID NO: 2578694 - RNA, 21 nt, Human
aagccaggcagguagccaggg

SEQ ID NO: 2578695 - RNA, 22 nt, Human
aagauacagccugcaaguggua

SEQ ID NO: 2578696 - RNA, 16 nt, Human
aagauaauaauauaug

SEQ ID NO: 2578697 - RNA, 23 nt, Human
aagccaggaauuucccaggaccc

SEQ ID NO: 2578698 - RNA, 17 nt, Human
aagauacaguuacucag

SEQ ID NO: 2578699 - RNA, 20 nt, Human
aagauacagaacucuuucaa

SEQ ID NO: 2578700 - RNA, 22 nt, Human
aagauacagaacucuuucaaaa

SEQ ID NO: 2578701 - RNA, 12 nt, Human
aagauaauuaua

SEQ ID NO: 2578702 - RNA, 15 nt, Human
aagauaauaauauau

SEQ ID NO: 2578703 - RNA, 19 nt, Human
aagauaauauuaaggaaga

SEQ ID NO: 2578704 - RNA, 21 nt, Human
aagauaauauuaaggaagaca

SEQ ID NO: 2578705 - RNA, 14 nt, Human
aagauaaaugugcu

SEQ ID NO: 2578706 - RNA, 19 nt, Human
aagauaacaagaucuuuca

SEQ ID NO: 2578707 - RNA, 20 nt, Human
aagauaacaagaucuuucag

SEQ ID NO: 2578708 - RNA, 21 nt, Human
aagauaacaagaucuuucagg

SEQ ID NO: 2578709 - RNA, 21 nt, Human
aagauaaguguauuuuucaau

SEQ ID NO: 2578710 - RNA, 15 nt, Human
aagauaacuugagca

SEQ ID NO: 2578711 - RNA, 22 nt, Human
aagauaacaagaucuuucagga

SEQ ID NO: 2578712 - RNA, 10 nt, Human
aagccuuugu

SEQ ID NO: 2578713 - RNA, 15 nt, Human
aagccuuuccauaag

SEQ ID NO: 2578714 - RNA, 14 nt, Human
aagccuuuccauaa

SEQ ID NO: 2578715 - RNA, 16 nt, Human
aagccuuuuuccccaa

SEQ ID NO: 2578716 - RNA, 18 nt, Human
aagcgaucacuuccuaua

SEQ ID NO: 2578717 - RNA, 18 nt, Human
aagcgaggucaacagaga

SEQ ID NO: 2578718 - RNA, 14 nt, Human
aagcgauucuccug

SEQ ID NO: 2578719 - RNA, 20 nt, Human
aagcgaugaauuuggagacu

SEQ ID NO: 2578720 - RNA, 21 nt, Human
aagcgaugaauuuggagacuc

SEQ ID NO: 2578721 - RNA, 14 nt, Human
aagcggcuggcagc

SEQ ID NO: 2578722 - RNA, 15 nt, Human
aagcgugagccacug

SEQ ID NO: 2578723 - RNA, 23 nt, Human
aagcgugaaggccgagaagcaag

SEQ ID NO: 2578724 - RNA, 22 nt, Human
aagcuacugugugugugaauga

SEQ ID NO: 2578725 - RNA, 19 nt, Human
aagcuacugugugugugaa

SEQ ID NO: 2578726 - RNA, 16 nt, Human
aagcuagaaccuggag

SEQ ID NO: 2578727 - RNA, 17 nt, Human
aagcgugagacgccacc

SEQ ID NO: 2578728 - RNA, 23 nt, Human
aagcuacugugugugugaaugaa

SEQ ID NO: 2578729 - RNA, 13 nt, Human
aagcuagaaauga

SEQ ID NO: 2578730 - RNA, 22 nt, Human
aaggcaggugccuccaggugug

SEQ ID NO: 2578731 - RNA, 19 nt, Human
aaggcauaucagucucuga

SEQ ID NO: 2578732 - RNA, 13 nt, Human
aagcugcacccuc

SEQ ID NO: 2578733 - RNA, 19 nt, Human
aagcugcacccucaggcag

SEQ ID NO: 2578734 - RNA, 12 nt, Human
aaggacuugaaa

SEQ ID NO: 2578735 - RNA, 17 nt, Human
aaggacuugaaagcauc

SEQ ID NO: 2578736 - RNA, 19 nt, Human
aaggacuugaaagcaucca

SEQ ID NO: 2578737 - RNA, 22 nt, Human
aaggacuugaaagcauccaugu

SEQ ID NO: 2578738 - RNA, 10 nt, Human
aagcuagaau

SEQ ID NO: 2578739 - RNA, 19 nt, Human
aagcuagaaggccacaugu

SEQ ID NO: 2578740 - RNA, 17 nt, Human
aagcuagaaggccacau

SEQ ID NO: 2578741 - RNA, 17 nt, Human
aagcuagaaccuggagg

SEQ ID NO: 2578742 - RNA, 20 nt, Human
aagcugcaaaucagccaugu

SEQ ID NO: 2578743 - RNA, 15 nt, Human
aaggcaaggcuguca

SEQ ID NO: 2578744 - RNA, 21 nt, Human
aaggcaagaggggguggaggg

SEQ ID NO: 2578745 - RNA, 19 nt, Human
aaggcagggagggccuggg

SEQ ID NO: 2578746 - RNA, 22 nt, Human
aaggcagggagggccugggccc

SEQ ID NO: 2578747 - RNA, 20 nt, Human
aaggcaggugccuccaggug

SEQ ID NO: 2578748 - RNA, 17 nt, Human
aaggcaggugccuccag

SEQ ID NO: 2578749 - RNA, 16 nt, Human
aaggcaggugccucca

SEQ ID NO: 2578750 - RNA, 14 nt, Human
aaggcaggugccuc

SEQ ID NO: 2578751 - RNA, 17 nt, Human
aaggacuugacuugcaa

SEQ ID NO: 2578752 - RNA, 15 nt, Human
aaggagaaggaagga

SEQ ID NO: 2578753 - RNA, 19 nt, Human
aaggagaaacagagacagg

SEQ ID NO: 2578754 - RNA, 18 nt, Human
aaggcaaauguguacaug

SEQ ID NO: 2578755 - RNA, 13 nt, Human
aaggcaaggcugu

SEQ ID NO: 2578756 - RNA, 18 nt, Human
aaggcaagcacuuguggg

SEQ ID NO: 2578757 - RNA, 19 nt, Human
aaggcaagaggggguggag

SEQ ID NO: 2578758 - RNA, 13 nt, Human
aaggcaagagggg

SEQ ID NO: 2578759 - RNA, 15 nt, Human
aagaccacguuucua

SEQ ID NO: 2578760 - RNA, 17 nt, Human
aagaccacguuucuaaa

SEQ ID NO: 2578761 - RNA, 18 nt, Human
aagacauuuauacucuuu

SEQ ID NO: 2578762 - RNA, 14 nt, Human
aagacauugucaau

SEQ ID NO: 2578763 - RNA, 19 nt, Human
aagacaugcacuaugagga

SEQ ID NO: 2578764 - RNA, 21 nt, Human
aagacaugauuuccuugaaug

SEQ ID NO: 2578765 - RNA, 18 nt, Human
aagaccaccacuucgaaa

SEQ ID NO: 2578766 - RNA, 19 nt, Human
aagaccaccaccucagagu

SEQ ID NO: 2578767 - RNA, 16 nt, Human
aagaccaccaccucag

SEQ ID NO: 2578768 - RNA, 17 nt, Human
aagaccacaaaaauuga

SEQ ID NO: 2578769 - RNA, 17 nt, Human
aagacauugucaauaaa

SEQ ID NO: 2578770 - RNA, 12 nt, Human
aagacuuuucuu

SEQ ID NO: 2578771 - RNA, 21 nt, Human
aagacuuuuccaacccucauc

SEQ ID NO: 2578772 - RNA, 19 nt, Human
aagacuuuucuuucagcca

SEQ ID NO: 2578773 - RNA, 13 nt, Human
aagagaaaaaaua

SEQ ID NO: 2578774 - RNA, 14 nt, Human
aagacaugauuucc

SEQ ID NO: 2578775 - RNA, 15 nt, Human
aagacaugauuuccu

SEQ ID NO: 2578776 - RNA, 16 nt, Human
aagacaugauuuccuu

SEQ ID NO: 2578777 - RNA, 20 nt, Human
aagacaugauuuccuugaau

SEQ ID NO: 2578778 - RNA, 15 nt, Human
aagacaugaauauga

SEQ ID NO: 2578779 - RNA, 13 nt, Human
aagacaugaacca

SEQ ID NO: 2578780 - RNA, 18 nt, Human
aagacaugaaugcacacu

SEQ ID NO: 2578781 - RNA, 21 nt, Human
aagacauccauaaagaagcaa

SEQ ID NO: 2578782 - RNA, 17 nt, Human
aagacauccauaaagaa

SEQ ID NO: 2578783 - RNA, 23 nt, Human
aagacauacuccuuccaucaaau

SEQ ID NO: 2578784 - RNA, 22 nt, Human
aagacauaacguuuuuccuuua

SEQ ID NO: 2578785 - RNA, 21 nt, Human
aagacauaacguuuuuccuuu

SEQ ID NO: 2578786 - RNA, 20 nt, Human
aagacauaacguuuuuccuu

SEQ ID NO: 2578787 - RNA, 19 nt, Human
aagacauaacguuuuuccu

SEQ ID NO: 2578788 - RNA, 18 nt, Human
aagacauaacguuuuucc

SEQ ID NO: 2578789 - RNA, 14 nt, Human
aagacauaacguuu

SEQ ID NO: 2578790 - RNA, 16 nt, Human
aagacagaugccccag

SEQ ID NO: 2578791 - RNA, 17 nt, Human
aagacagaugccccaga

SEQ ID NO: 2578792 - RNA, 20 nt, Human
aagacagaugccccagagcu

SEQ ID NO: 2578793 - RNA, 22 nt, Human
aagacagaugccccagagcugu

SEQ ID NO: 2578794 - RNA, 23 nt, Human
aagacaccagagcagaugcagag

SEQ ID NO: 2578795 - RNA, 13 nt, Human
aagacagaagccu

SEQ ID NO: 2578796 - RNA, 12 nt, Human
aagacagaagcc

SEQ ID NO: 2578797 - RNA, 23 nt, Human
aagacagauacuccuccaagguu

SEQ ID NO: 2578798 - RNA, 12 nt, Human
aagacagagucu

SEQ ID NO: 2578799 - RNA, 16 nt, Human
aagacagagcugggau

SEQ ID NO: 2578800 - RNA, 15 nt, Human
aagacagagcuggga

SEQ ID NO: 2578801 - RNA, 21 nt, Human
aagagaggaguucaaugaucu

SEQ ID NO: 2578802 - RNA, 20 nt, Human
aagagaggaguucaaugauc

SEQ ID NO: 2578803 - RNA, 19 nt, Human
aagagaggaguucaaugau

SEQ ID NO: 2578804 - RNA, 18 nt, Human
aagagaggaguucaauga

SEQ ID NO: 2578805 - RNA, 17 nt, Human
aagagaggaguucaaug

SEQ ID NO: 2578806 - RNA, 16 nt, Human
aagagaggaguucaau

SEQ ID NO: 2578807 - RNA, 15 nt, Human
aagagaggaguucaa

SEQ ID NO: 2578808 - RNA, 14 nt, Human
aagagaggaguuca

SEQ ID NO: 2578809 - RNA, 16 nt, Human
aagagagaaaauaaaa

SEQ ID NO: 2578810 - RNA, 17 nt, Human
aagagagaaaauaaaaa

SEQ ID NO: 2578811 - RNA, 11 nt, Human
aagagaggagu

SEQ ID NO: 2578812 - RNA, 19 nt, Human
aagagaggagaggagagag

SEQ ID NO: 2578813 - RNA, 18 nt, Human
aagagagaaaauaaaaag

SEQ ID NO: 2578814 - RNA, 21 nt, Human
aagagauauuuuaaaaugaga

SEQ ID NO: 2578815 - RNA, 20 nt, Human
aagagauauuuuaaaaugag

SEQ ID NO: 2578816 - RNA, 12 nt, Human
aagagauauuuu

SEQ ID NO: 2578817 - RNA, 11 nt, Human
aagagagguua

SEQ ID NO: 2578818 - RNA, 22 nt, Human
aagagaggaguucaaugaucua

SEQ ID NO: 2578819 - RNA, 20 nt, Human
aagagagucauaaaccuuaa

SEQ ID NO: 2578820 - RNA, 14 nt, Human
aagagagucauaaa

SEQ ID NO: 2578821 - RNA, 12 nt, Human
aagagagaaaaa

SEQ ID NO: 2578822 - RNA, 18 nt, Human
aagagacuggagcaucug

SEQ ID NO: 2578823 - RNA, 14 nt, Human
aagagacuggagca

SEQ ID NO: 2578824 - RNA, 16 nt, Human
aagagacucuggccuc

SEQ ID NO: 2578825 - RNA, 15 nt, Human
aagagacucuggccu

SEQ ID NO: 2578826 - RNA, 18 nt, Human
aagagaccuaccucaggu

SEQ ID NO: 2578827 - RNA, 17 nt, Human
aagagaccuaccucagg

SEQ ID NO: 2578828 - RNA, 16 nt, Human
aagagaccuaccucag

SEQ ID NO: 2578829 - RNA, 21 nt, Human
aagagaccuaccucagguugc

SEQ ID NO: 2578830 - RNA, 18 nt, Human
aagagaaagugauuucua

SEQ ID NO: 2578831 - RNA, 22 nt, Human
aagagacagucaccccaggacu

SEQ ID NO: 2578832 - RNA, 18 nt, Human
aagagagaaaacuuauuu

SEQ ID NO: 2578833 - RNA, 16 nt, Human
aagagagaaaaacaaa

SEQ ID NO: 2578834 - RNA, 12 nt, Human
aagagagaaaau

SEQ ID NO: 2578835 - RNA, 13 nt, Human
aagagagaaaaua

SEQ ID NO: 2578836 - RNA, 15 nt, Human
aagagagaaaauaaa

SEQ ID NO: 2578837 - RNA, 14 nt, Human
aagagagaaaauaa

SEQ ID NO: 2578838 - RNA, 14 nt, Human
aagagaaaagaaaa

SEQ ID NO: 2578839 - RNA, 15 nt, Human
aagagaaaagaaaaa

SEQ ID NO: 2578840 - RNA, 16 nt, Human
aagagaaaagaaaaaa

SEQ ID NO: 2578841 - RNA, 12 nt, Human
aagagaaaagaa

SEQ ID NO: 2578842 - RNA, 13 nt, Human
aagagaaaagaaa

SEQ ID NO: 2578843 - RNA, 11 nt, Human
aagagaaaaga

SEQ ID NO: 2578844 - RNA, 22 nt, Human
aagagaaaaaaaguuugccaga

SEQ ID NO: 2578845 - RNA, 17 nt, Human
aagacuuuuccaacccu

SEQ ID NO: 2578846 - RNA, 12 nt, Human
aagaccagacua

SEQ ID NO: 2578847 - RNA, 22 nt, Human
aagaaccaaaaguuuuccugag

SEQ ID NO: 2578848 - RNA, 11 nt, Human
aagaacaugug

SEQ ID NO: 2578849 - RNA, 17 nt, Human
aagaaccagucccccca

SEQ ID NO: 2578850 - RNA, 20 nt, Human
aagaaccaguccccccaccc

SEQ ID NO: 2578851 - RNA, 17 nt, Human
aagaacggggcucuucu

SEQ ID NO: 2578852 - RNA, 14 nt, Human
aagaaccuggaacu

SEQ ID NO: 2578853 - RNA, 23 nt, Human
aagaacggggcucuucucauuuc

SEQ ID NO: 2578854 - RNA, 22 nt, Human
aagaacggggcucuucucauuu

SEQ ID NO: 2578855 - RNA, 21 nt, Human
aagaacggggcucuucucauu

SEQ ID NO: 2578856 - RNA, 18 nt, Human
aagaacggggcucuucuc

SEQ ID NO: 2578857 - RNA, 21 nt, Human
aagaacuacaaacaaaauuuc

SEQ ID NO: 2578858 - RNA, 20 nt, Human
aagaacuacaaacaaaauuu

SEQ ID NO: 2578859 - RNA, 14 nt, Human
aagaacuagcauaa

SEQ ID NO: 2578860 - RNA, 20 nt, Human
aacgcaggcccccaggugcc

SEQ ID NO: 2578861 - RNA, 16 nt, Human
aacgcagcccugcuuu

SEQ ID NO: 2578862 - RNA, 12 nt, Human
aacgcagcccug

SEQ ID NO: 2578863 - RNA, 22 nt, Human
aagaacauggacuuguauauuu

SEQ ID NO: 2578864 - RNA, 21 nt, Human
aagaacauggacuuguauauu

SEQ ID NO: 2578865 - RNA, 19 nt, Human
aagaacauggacuuguaua

SEQ ID NO: 2578866 - RNA, 18 nt, Human
aagaacauggacuuguau

SEQ ID NO: 2578867 - RNA, 17 nt, Human
aacgccuccccugcccc

SEQ ID NO: 2578868 - RNA, 22 nt, Human
aacgccccagauaccagccccu

SEQ ID NO: 2578869 - RNA, 18 nt, Human
aacgccuccccugcccca

SEQ ID NO: 2578870 - RNA, 23 nt, Human
aacgcauggaguguguauuguuc

SEQ ID NO: 2578871 - RNA, 21 nt, Human
aacgcauggaguguguauugu

SEQ ID NO: 2578872 - RNA, 22 nt, Human
aacgcauggaguguguauuguu

SEQ ID NO: 2578873 - RNA, 18 nt, Human
aacgcauggaguguguau

SEQ ID NO: 2578874 - RNA, 13 nt, Human
aacgcauggagug

SEQ ID NO: 2578875 - RNA, 13 nt, Human
aagaacugaaauc

SEQ ID NO: 2578876 - RNA, 12 nt, Human
aagaacugaaau

SEQ ID NO: 2578877 - RNA, 11 nt, Human
aagaacugaaa

SEQ ID NO: 2578878 - RNA, 23 nt, Human
aagaacuauaugugaauccucuu

SEQ ID NO: 2578879 - RNA, 15 nt, Human
aagaacugaaaucau

SEQ ID NO: 2578880 - RNA, 22 nt, Human
aagaacugcaggcccuggccuc

SEQ ID NO: 2578881 - RNA, 18 nt, Human
aagaacugcaggcccugg

SEQ ID NO: 2578882 - RNA, 12 nt, Human
aagaacugcuuu

SEQ ID NO: 2578883 - RNA, 23 nt, Human
aagaacugcaggcccuggccucc

SEQ ID NO: 2578884 - RNA, 20 nt, Human
aagaacuguguuucaaguuc

SEQ ID NO: 2578885 - RNA, 15 nt, Human
aagaacuugcaugga

SEQ ID NO: 2578886 - RNA, 19 nt, Human
aagaagaccagacugugga

SEQ ID NO: 2578887 - RNA, 17 nt, Human
aagaagacauguuuuag

SEQ ID NO: 2578888 - RNA, 15 nt, Human
aagaagacauguuuu

SEQ ID NO: 2578889 - RNA, 14 nt, Human
aagaagacauguuu

SEQ ID NO: 2578890 - RNA, 21 nt, Human
aagaagaccagacuguggaga

SEQ ID NO: 2578891 - RNA, 12 nt, Human
aagacaacauua

SEQ ID NO: 2578892 - RNA, 20 nt, Human
aagaagacugcauuauauuu

SEQ ID NO: 2578893 - RNA, 21 nt, Human
aagacaaggaaaaaauaacaa

SEQ ID NO: 2578894 - RNA, 15 nt, Human
aagaagaacuugcau

SEQ ID NO: 2578895 - RNA, 13 nt, Human
aagaagaagggca

SEQ ID NO: 2578896 - RNA, 21 nt, Human
aagaagaaaauugcugugccu

SEQ ID NO: 2578897 - RNA, 16 nt, Human
aagaagaaacgucuau

SEQ ID NO: 2578898 - RNA, 15 nt, Human
aagaagacugcauua

SEQ ID NO: 2578899 - RNA, 12 nt, Human
aagaagacauga

SEQ ID NO: 2578900 - RNA, 13 nt, Human
aagaagacauguu

SEQ ID NO: 2578901 - RNA, 17 nt, Human
aagaagacauggagacu

SEQ ID NO: 2578902 - RNA, 16 nt, Human
aagaagacaugaacca

SEQ ID NO: 2578903 - RNA, 15 nt, Human
aagacaagacuucag

SEQ ID NO: 2578904 - RNA, 13 nt, Human
aagacaagcugca

SEQ ID NO: 2578905 - RNA, 13 nt, Human
aagacaauauaau

SEQ ID NO: 2578906 - RNA, 16 nt, Human
aagacaauccauguaa

SEQ ID NO: 2578907 - RNA, 15 nt, Human
aagacaacauuaaaa

SEQ ID NO: 2578908 - RNA, 21 nt, Human
aagacaacauuaaaacaauau

SEQ ID NO: 2578909 - RNA, 22 nt, Human
aagacaaugacuuacuguacau

SEQ ID NO: 2578910 - RNA, 19 nt, Human
aagacaaugugaaaagaaa

SEQ ID NO: 2578911 - RNA, 22 nt, Human
aagacaccagagcagaugcaga

SEQ ID NO: 2578912 - RNA, 21 nt, Human
aagacaccagagcagaugcag

SEQ ID NO: 2578913 - RNA, 20 nt, Human
aagacaccagagcagaugca

SEQ ID NO: 2578914 - RNA, 16 nt, Human
aagacaccagagcaga

SEQ ID NO: 2578915 - RNA, 15 nt, Human
aagacaccagagcag

SEQ ID NO: 2578916 - RNA, 14 nt, Human
aagacaccagagca

SEQ ID NO: 2578917 - RNA, 13 nt, Human
aagacaccagagc

SEQ ID NO: 2578918 - RNA, 14 nt, Human
aagacacugaaaua

SEQ ID NO: 2578919 - RNA, 21 nt, Human
aagacacugaaauauacacac

SEQ ID NO: 2578920 - RNA, 22 nt, Human
aagacacugaaauauacacaca

SEQ ID NO: 2578921 - RNA, 20 nt, Human
aagacaaugugaaaagaaaa

SEQ ID NO: 2578922 - RNA, 19 nt, Human
aagacaauucuuuauacaa

SEQ ID NO: 2578923 - RNA, 15 nt, Human
aagacaauucuuuau

SEQ ID NO: 2578924 - RNA, 12 nt, Human
aagacaauucuu

SEQ ID NO: 2578925 - RNA, 11 nt, Human
aagacaauucu

SEQ ID NO: 2578926 - RNA, 23 nt, Human
aagacaauggcuuacuccaggag

SEQ ID NO: 2578927 - RNA, 19 nt, Human
aagaguugagugauagagc

SEQ ID NO: 2578928 - RNA, 23 nt, Human
aagaguucuuaaggauugugaua

SEQ ID NO: 2578929 - RNA, 13 nt, Human
aagaguguagaag

SEQ ID NO: 2578930 - RNA, 12 nt, Human
aagaguguagaa

SEQ ID NO: 2578931 - RNA, 15 nt, Human
aagaguguacugggg

SEQ ID NO: 2578932 - RNA, 14 nt, Human
aagaguguacuggg

SEQ ID NO: 2578933 - RNA, 13 nt, Human
aagaguguacugg

SEQ ID NO: 2578934 - RNA, 18 nt, Human
aagaguguagaagcauuc

SEQ ID NO: 2578935 - RNA, 16 nt, Human
aagaguguagaagcau

SEQ ID NO: 2578936 - RNA, 15 nt, Human
aagaguguagaagca

SEQ ID NO: 2578937 - RNA, 14 nt, Human
aagaguguagaagc

SEQ ID NO: 2578938 - RNA, 19 nt, Human
aagaguguagaucagagca

SEQ ID NO: 2578939 - RNA, 22 nt, Human
aagaguguagaagcauuccuuc

SEQ ID NO: 2578940 - RNA, 23 nt, Human
aagaguguccuaggaguauccuc

SEQ ID NO: 2578941 - RNA, 20 nt, Human
aagaguaggaagacuuugga

SEQ ID NO: 2578942 - RNA, 16 nt, Human
aagaguaguaauagag

SEQ ID NO: 2578943 - RNA, 19 nt, Human
aagaguaguugauguugca

SEQ ID NO: 2578944 - RNA, 23 nt, Human
aagaguaguugauguugcauuuu

SEQ ID NO: 2578945 - RNA, 22 nt, Human
aagaguaguugauguugcauuu

SEQ ID NO: 2578946 - RNA, 15 nt, Human
aagaguccucugaau

SEQ ID NO: 2578947 - RNA, 16 nt, Human
aaauggccauuugcuu

SEQ ID NO: 2578948 - RNA, 13 nt, Human
aaauggccauuug

SEQ ID NO: 2578949 - RNA, 20 nt, Human
aaauguuauuuuuuaauuau

SEQ ID NO: 2578950 - RNA, 21 nt, Human
aaauguuauuuuuuaauuauu

SEQ ID NO: 2578951 - RNA, 22 nt, Human
aaauguugacaugggacauuug

SEQ ID NO: 2578952 - RNA, 17 nt, Human
aaauguucaucaaugaa

SEQ ID NO: 2578953 - RNA, 15 nt, Human
aaauguucagaaggu

SEQ ID NO: 2578954 - RNA, 21 nt, Human
aaauguucagaagguugcucu

SEQ ID NO: 2578955 - RNA, 13 nt, Human
aaauguucacuuu

SEQ ID NO: 2578956 - RNA, 16 nt, Human
aaauguucacuuuuga

SEQ ID NO: 2578957 - RNA, 13 nt, Human
aaauguucaucaa

SEQ ID NO: 2578958 - RNA, 14 nt, Human
aaauucuguuucuu

SEQ ID NO: 2578959 - RNA, 15 nt, Human
aaauucuguuucuug

SEQ ID NO: 2578960 - RNA, 21 nt, Human
aaauguuuuucugccagggag

SEQ ID NO: 2578961 - RNA, 23 nt, Human
aaauguuuuucugccagggagcu

SEQ ID NO: 2578962 - RNA, 13 nt, Human
aaauucuguuucu

SEQ ID NO: 2578963 - RNA, 17 nt, Human
aaauguuuuucuaugua

SEQ ID NO: 2578964 - RNA, 16 nt, Human
aaauguuuuucugcca

SEQ ID NO: 2578965 - RNA, 23 nt, Human
aaauguugacaugggacauuugc

SEQ ID NO: 2578966 - RNA, 18 nt, Human
aaauguuggauuuauaaa

SEQ ID NO: 2578967 - RNA, 19 nt, Human
aaauguugagaaucccaaa

SEQ ID NO: 2578968 - RNA, 23 nt, Human
aaauguugaauaaaaauauguac

SEQ ID NO: 2578969 - RNA, 21 nt, Human
aaauguuggauuuauaaaugc

SEQ ID NO: 2578970 - RNA, 20 nt, Human
aaauguuggauuuauaaaug

SEQ ID NO: 2578971 - RNA, 19 nt, Human
aaauguuggauuuauaaau

SEQ ID NO: 2578972 - RNA, 18 nt, Human
aaauguuuuagcaauuua

SEQ ID NO: 2578973 - RNA, 13 nt, Human
aaagccuguuccc

SEQ ID NO: 2578974 - RNA, 17 nt, Human
aaagccuguauucucaa

SEQ ID NO: 2578975 - RNA, 20 nt, Human
aaaggaugcccaaagaugca

SEQ ID NO: 2578976 - RNA, 19 nt, Human
aaaggaugugauauauaag

SEQ ID NO: 2578977 - RNA, 17 nt, Human
aaaggaugugauauaua

SEQ ID NO: 2578978 - RNA, 14 nt, Human
aaaggaugugauau

SEQ ID NO: 2578979 - RNA, 12 nt, Human
aaaggaugugau

SEQ ID NO: 2578980 - RNA, 14 nt, Human
aaaggaugcacaga

SEQ ID NO: 2578981 - RNA, 20 nt, Human
aaagccuguuccccucacug

SEQ ID NO: 2578982 - RNA, 19 nt, Human
aaaggauguaaacagugcc

SEQ ID NO: 2578983 - RNA, 20 nt, Human
aaaggauguaaacagugccu

SEQ ID NO: 2578984 - RNA, 21 nt, Human
aaaggauguaaacagugccug

SEQ ID NO: 2578985 - RNA, 23 nt, Human
aaaggaugugauauauaagugua

SEQ ID NO: 2578986 - RNA, 13 nt, Human
aaaggaugugauu

SEQ ID NO: 2578987 - RNA, 18 nt, Human
aaaggauucauguggaau

SEQ ID NO: 2578988 - RNA, 16 nt, Human
aaaggauguugguguu

SEQ ID NO: 2578989 - RNA, 23 nt, Human
aaaucucaaauuuggauugcuaa

SEQ ID NO: 2578990 - RNA, 18 nt, Human
aaaucucaauauuucaga

SEQ ID NO: 2578991 - RNA, 17 nt, Human
aaauauuuuuuuguaga

SEQ ID NO: 2578992 - RNA, 22 nt, Human
aaauauuuuuuauauauacagu

SEQ ID NO: 2578993 - RNA, 21 nt, Human
aaauauuuuuucuuuucuauu

SEQ ID NO: 2578994 - RNA, 22 nt, Human
aaauauuuuuggucauuguaau

SEQ ID NO: 2578995 - RNA, 23 nt, Human
aaauauuuuuauagauuugaccu

SEQ ID NO: 2578996 - RNA, 12 nt, Human
aaauauuuuugg

SEQ ID NO: 2578997 - RNA, 21 nt, Human
aaauauuuuuuuguagaugaa

SEQ ID NO: 2578998 - RNA, 20 nt, Human
aaauauuuuuuuguagauga

SEQ ID NO: 2578999 - RNA, 14 nt, Human
aaaucuuuuugcuu

SEQ ID NO: 2579000 - RNA, 13 nt, Human
aaaucuuuuugcu

SEQ ID NO: 2579001 - RNA, 23 nt, Human
aaaucuuucuuucuuagaaauuu

SEQ ID NO: 2579002 - RNA, 22 nt, Human
aaaucuuuuaaaaauucaaaug

SEQ ID NO: 2579003 - RNA, 22 nt, Human
aaaucuuucuuucuuagaaauu

SEQ ID NO: 2579004 - RNA, 22 nt, Human
aaaucucagaauuccuuuucua

SEQ ID NO: 2579005 - RNA, 15 nt, Human
aaaucucagcaauga

SEQ ID NO: 2579006 - RNA, 16 nt, Human
aaaucucaauucuucc

SEQ ID NO: 2579007 - RNA, 17 nt, Human
aaaucucaccccauccc

SEQ ID NO: 2579008 - RNA, 14 nt, Human
aaaucuuuucuauu

SEQ ID NO: 2579009 - RNA, 11 nt, Human
aaaucuuuuac

SEQ ID NO: 2579010 - RNA, 18 nt, Human
aaaucuuuuagucauuau

SEQ ID NO: 2579011 - RNA, 20 nt, Human
aaaugcugcgcccuucccca

SEQ ID NO: 2579012 - RNA, 19 nt, Human
aaaugcuguaacuuucuga

SEQ ID NO: 2579013 - RNA, 21 nt, Human
aaaugcugcgcccuuccccag

SEQ ID NO: 2579014 - RNA, 22 nt, Human
aaaugcugguuuuucaguuuuc

SEQ ID NO: 2579015 - RNA, 19 nt, Human
aaaugcuuugugugauuga

SEQ ID NO: 2579016 - RNA, 22 nt, Human
aaauggagguccuucugcugga

SEQ ID NO: 2579017 - RNA, 13 nt, Human
aaauggauacugg

SEQ ID NO: 2579018 - RNA, 21 nt, Human
aaaugcuuuaaaaacuauuua

SEQ ID NO: 2579019 - RNA, 19 nt, Human
aaaugcuuuaaaaacuauu

SEQ ID NO: 2579020 - RNA, 18 nt, Human
aaaugcuuuaugcaaacc

SEQ ID NO: 2579021 - RNA, 22 nt, Human
aaaugcuuuaaaaacuauuuaa

SEQ ID NO: 2579022 - RNA, 19 nt, Human
aaauagaguauaugcacuu

SEQ ID NO: 2579023 - RNA, 17 nt, Human
aaauagaguauaugcac

SEQ ID NO: 2579024 - RNA, 15 nt, Human
aaauagcauguauug

SEQ ID NO: 2579025 - RNA, 14 nt, Human
aaauagcauguauu

SEQ ID NO: 2579026 - RNA, 18 nt, Human
aaauagcauguauugugu

SEQ ID NO: 2579027 - RNA, 16 nt, Human
aaauagcauguauugu

SEQ ID NO: 2579028 - RNA, 21 nt, Human
aaauagcauguauugugucuu

SEQ ID NO: 2579029 - RNA, 12 nt, Human
aaauauuuaaga

SEQ ID NO: 2579030 - RNA, 21 nt, Human
aaauagauaagaguagaaacu

SEQ ID NO: 2579031 - RNA, 16 nt, Human
aaauagcaauccuaaa

SEQ ID NO: 2579032 - RNA, 19 nt, Human
aaauagaguuugcuauuag

SEQ ID NO: 2579033 - RNA, 10 nt, Human
aaauauuuau

SEQ ID NO: 2579034 - RNA, 19 nt, Human
aaauauuuauaaaacuucu

SEQ ID NO: 2579035 - RNA, 12 nt, Human
aaauauuuaucu

SEQ ID NO: 2579036 - RNA, 15 nt, Human
aaauauuuacauaug

SEQ ID NO: 2579037 - RNA, 17 nt, Human
aaauauuuacauaugaa

SEQ ID NO: 2579038 - RNA, 19 nt, Human
aaauauuuacauaugaaau

SEQ ID NO: 2579039 - RNA, 16 nt, Human
aaauauuuagcaaaua

SEQ ID NO: 2579040 - RNA, 21 nt, Human
aaauauuuacauaugaaauuu

SEQ ID NO: 2579041 - RNA, 21 nt, Human
aaauauuuauuuuaauaaugu

SEQ ID NO: 2579042 - RNA, 15 nt, Human
aaauauuuauuuauu

SEQ ID NO: 2579043 - RNA, 15 nt, Human
aaauauuuauguaaa

SEQ ID NO: 2579044 - RNA, 13 nt, Human
aaauauuucaaga

SEQ ID NO: 2579045 - RNA, 12 nt, Human
aaauauuucaag

SEQ ID NO: 2579046 - RNA, 14 nt, Human
aaauauuucaagac

SEQ ID NO: 2579047 - RNA, 12 nt, Human
aaauauuuccuu

SEQ ID NO: 2579048 - RNA, 22 nt, Human
aaauauuuugaaucaauaauau

SEQ ID NO: 2579049 - RNA, 22 nt, Human
aaauauuuguacauaguuauuu

SEQ ID NO: 2579050 - RNA, 14 nt, Human
aaauauuuguacau

SEQ ID NO: 2579051 - RNA, 15 nt, Human
aaauauuuguacaua

SEQ ID NO: 2579052 - RNA, 12 nt, Human
aaauauuuggag

SEQ ID NO: 2579053 - RNA, 14 nt, Human
aaauauuuccuuaa

SEQ ID NO: 2579054 - RNA, 15 nt, Human
aaauauuuuuauaga

SEQ ID NO: 2579055 - RNA, 14 nt, Human
aaauauuuuuagua

SEQ ID NO: 2579056 - RNA, 22 nt, Human
aaauauuuugucuaaaaugccu

SEQ ID NO: 2579057 - RNA, 17 nt, Human
aaauauuuugucuaaaa

SEQ ID NO: 2579058 - RNA, 16 nt, Human
aaauauuuugucuaaa

SEQ ID NO: 2579059 - RNA, 15 nt, Human
aaauauuuugucuaa

SEQ ID NO: 2579060 - RNA, 14 nt, Human
aaauauuuugucua

SEQ ID NO: 2579061 - RNA, 12 nt, Human
aaauauuuuguc

SEQ ID NO: 2579062 - RNA, 16 nt, Human
aaauauuuugcuaguu

SEQ ID NO: 2579063 - RNA, 12 nt, Human
aaccuuuuuaaa

SEQ ID NO: 2579064 - RNA, 23 nt, Human
aaccuuuugagugccuuacacaa

SEQ ID NO: 2579065 - RNA, 16 nt, Human
aaccuuuugagugccu

SEQ ID NO: 2579066 - RNA, 18 nt, Human
aaccuuuguuugcaucug

SEQ ID NO: 2579067 - RNA, 15 nt, Human
aaccuaaaaaagaua

SEQ ID NO: 2579068 - RNA, 14 nt, Human
aaccuaaaaaagau

SEQ ID NO: 2579069 - RNA, 13 nt, Human
aaccuaaaaaaga

SEQ ID NO: 2579070 - RNA, 22 nt, Human
aaccguuauuauaauuguauca

SEQ ID NO: 2579071 - RNA, 17 nt, Human
aaccguuuugaagcuac

SEQ ID NO: 2579072 - RNA, 18 nt, Human
aaccguuuugaagcuacu

SEQ ID NO: 2579073 - RNA, 21 nt, Human
aaccuaaaauaauugguucuu

SEQ ID NO: 2579074 - RNA, 16 nt, Human
aaccuaaaaaagauau

SEQ ID NO: 2579075 - RNA, 20 nt, Human
aaccuaaaauaauugguucu

SEQ ID NO: 2579076 - RNA, 15 nt, Human
aaccguuauuauaau

SEQ ID NO: 2579077 - RNA, 16 nt, Human
aaccgucuguuaugcu

SEQ ID NO: 2579078 - RNA, 18 nt, Human
aaccgucuguuaugcugu

SEQ ID NO: 2579079 - RNA, 22 nt, Human
aaccgucuguuaugcugugaca

SEQ ID NO: 2579080 - RNA, 21 nt, Human
aacccuccuaucaccuccccu

SEQ ID NO: 2579081 - RNA, 21 nt, Human
aacccucucaggugaccaaaa

SEQ ID NO: 2579082 - RNA, 15 nt, Human
aaccgucaauaggca

SEQ ID NO: 2579083 - RNA, 23 nt, Human
aaccggggagcccccgccccgcc

SEQ ID NO: 2579084 - RNA, 16 nt, Human
aacccucccucagccc

SEQ ID NO: 2579085 - RNA, 17 nt, Human
aacccucccucagcccc

SEQ ID NO: 2579086 - RNA, 18 nt, Human
aacccucccucagccccu

SEQ ID NO: 2579087 - RNA, 19 nt, Human
aacccucccucagccccuc

SEQ ID NO: 2579088 - RNA, 20 nt, Human
aacccucccucagccccucu

SEQ ID NO: 2579089 - RNA, 21 nt, Human
aacccucccucagccccucuu

SEQ ID NO: 2579090 - RNA, 23 nt, Human
aacccucccucagccccucuugc

SEQ ID NO: 2579091 - RNA, 19 nt, Human
aacccuccuaucaccuccc

SEQ ID NO: 2579092 - RNA, 12 nt, Human
aacccucagagc

SEQ ID NO: 2579093 - RNA, 19 nt, Human
aacccucagagccaccccu

SEQ ID NO: 2579094 - RNA, 13 nt, Human
aacccucccucag

SEQ ID NO: 2579095 - RNA, 14 nt, Human
aacccucccucagc

SEQ ID NO: 2579096 - RNA, 15 nt, Human
aacccucccucagcc

SEQ ID NO: 2579097 - RNA, 23 nt, Human
aacauggccuuugcuugaaagaa

SEQ ID NO: 2579098 - RNA, 20 nt, Human
aacauggagaaacccugucu

SEQ ID NO: 2579099 - RNA, 23 nt, Human
aacaugggguuggcugggcccag

SEQ ID NO: 2579100 - RNA, 20 nt, Human
aacaugguuacaaucauugc

SEQ ID NO: 2579101 - RNA, 18 nt, Human
aacauggugucuggauuc

SEQ ID NO: 2579102 - RNA, 22 nt, Human
aacaugguaaacgcugucccua

SEQ ID NO: 2579103 - RNA, 23 nt, Human
aaauucuucuccacuuucuagcc

SEQ ID NO: 2579104 - RNA, 15 nt, Human
aaauucuugcaaagu

SEQ ID NO: 2579105 - RNA, 23 nt, Human
aaauucuucugaacucaaacuga

SEQ ID NO: 2579106 - RNA, 20 nt, Human
aacagccgcuccugucugcc

SEQ ID NO: 2579107 - RNA, 21 nt, Human
aacagccgcuccugucugcca

SEQ ID NO: 2579108 - RNA, 22 nt, Human
aacagccgucagccaaauguaa

SEQ ID NO: 2579109 - RNA, 13 nt, Human
aacagccucacag

SEQ ID NO: 2579110 - RNA, 14 nt, Human
aacagccucacaga

SEQ ID NO: 2579111 - RNA, 14 nt, Human
aacaggcaagugaa

SEQ ID NO: 2579112 - RNA, 11 nt, Human
aacaggcccag

SEQ ID NO: 2579113 - RNA, 11 nt, Human
aacaggcagau

SEQ ID NO: 2579114 - RNA, 16 nt, Human
aacagcauugcuuucu

SEQ ID NO: 2579115 - RNA, 20 nt, Human
aacagcauugcuuucugaaa

SEQ ID NO: 2579116 - RNA, 15 nt, Human
aacagccaacaggug

SEQ ID NO: 2579117 - RNA, 17 nt, Human
aacagcauugcuuucug

SEQ ID NO: 2579118 - RNA, 16 nt, Human
aacagccaacaggugg

SEQ ID NO: 2579119 - RNA, 18 nt, Human
aacagccacuacauuacu

SEQ ID NO: 2579120 - RNA, 23 nt, Human
aacaggcccagcauugcugguuc

SEQ ID NO: 2579121 - RNA, 13 nt, Human
aacaggcccagca

SEQ ID NO: 2579122 - RNA, 12 nt, Human
aacaggcccagc

SEQ ID NO: 2579123 - RNA, 18 nt, Human
aacaggcuacucuccucg

SEQ ID NO: 2579124 - RNA, 20 nt, Human
aacaggcucaauauuccuga

SEQ ID NO: 2579125 - RNA, 22 nt, Human
aacaucuguccugugaaagacu

SEQ ID NO: 2579126 - RNA, 15 nt, Human
aacaucuuuucuugc

SEQ ID NO: 2579127 - RNA, 11 nt, Human
aacaucuuuuc

SEQ ID NO: 2579128 - RNA, 21 nt, Human
aacaggcucaauauuccugaa

SEQ ID NO: 2579129 - RNA, 22 nt, Human
aacauggccuuugcuugaaaga

SEQ ID NO: 2579130 - RNA, 18 nt, Human
aacauggacuuguauauu

SEQ ID NO: 2579131 - RNA, 16 nt, Human
aacauggacuuguaua

SEQ ID NO: 2579132 - RNA, 15 nt, Human
aacauggacuuguau

SEQ ID NO: 2579133 - RNA, 21 nt, Human
aacaugaggggacauuuuggu

SEQ ID NO: 2579134 - RNA, 20 nt, Human
aacauggacuuguauauuug

SEQ ID NO: 2579135 - RNA, 19 nt, Human
aacauggacuuguauauuu

SEQ ID NO: 2579136 - RNA, 23 nt, Human
aacauggacuuguauauuuguac

SEQ ID NO: 2579137 - RNA, 19 nt, Human
aacauggagaaacccuguc

SEQ ID NO: 2579138 - RNA, 20 nt, Human
aacaugacccuaaaucuuga

SEQ ID NO: 2579139 - RNA, 18 nt, Human
aacaugaggggacauuuu

SEQ ID NO: 2579140 - RNA, 21 nt, Human
aacaugaagucguugugaggg

SEQ ID NO: 2579141 - RNA, 17 nt, Human
aaagaucaaaauaaaaa

SEQ ID NO: 2579142 - RNA, 16 nt, Human
aaagaucaaaauaaaa

SEQ ID NO: 2579143 - RNA, 15 nt, Human
aaagaucaaaauaaa

SEQ ID NO: 2579144 - RNA, 14 nt, Human
aaagaucaaaauaa

SEQ ID NO: 2579145 - RNA, 22 nt, Human
aaagaucacuuguuguuuuacu

SEQ ID NO: 2579146 - RNA, 20 nt, Human
aaagaucaaaauaaaaagug

SEQ ID NO: 2579147 - RNA, 15 nt, Human
aaagaucauguaaaa

SEQ ID NO: 2579148 - RNA, 18 nt, Human
aaagaucuguccucagcc

SEQ ID NO: 2579149 - RNA, 19 nt, Human
aaagaucuguccucagccu

SEQ ID NO: 2579150 - RNA, 20 nt, Human
aaagaucuguccucagccuu

SEQ ID NO: 2579151 - RNA, 16 nt, Human
aaagaucuguuuugaa

SEQ ID NO: 2579152 - RNA, 21 nt, Human
aaagaucuguccucagccuug

SEQ ID NO: 2579153 - RNA, 13 nt, Human
aaagaucuguuuu

SEQ ID NO: 2579154 - RNA, 10 nt, Human
aaagaaaaaa

SEQ ID NO: 2579155 - RNA, 17 nt, Human
aaacuuuuuuuugagaa

SEQ ID NO: 2579156 - RNA, 16 nt, Human
aaagaaaaaaaaagaa

SEQ ID NO: 2579157 - RNA, 13 nt, Human
aaagaaaaaaaau

SEQ ID NO: 2579158 - RNA, 18 nt, Human
aaagaaaaaaaagaaagc

SEQ ID NO: 2579159 - RNA, 18 nt, Human
aaagaaaaaagagaaaag

SEQ ID NO: 2579160 - RNA, 20 nt, Human
aaagauauuuugcuuuguga

SEQ ID NO: 2579161 - RNA, 16 nt, Human
aaagauauuuuuaucu

SEQ ID NO: 2579162 - RNA, 18 nt, Human
aaagaaaaaauaauugau

SEQ ID NO: 2579163 - RNA, 15 nt, Human
aaagcauuguaaaug

SEQ ID NO: 2579164 - RNA, 17 nt, Human
aaagcauuguaaaugug

SEQ ID NO: 2579165 - RNA, 14 nt, Human
aaagcauguacagu

SEQ ID NO: 2579166 - RNA, 13 nt, Human
aaagcauguacag

SEQ ID NO: 2579167 - RNA, 12 nt, Human
aaagcauguaca

SEQ ID NO: 2579168 - RNA, 11 nt, Human
aaagcauguac

SEQ ID NO: 2579169 - RNA, 21 nt, Human
aaagcauguacaguguucugu

SEQ ID NO: 2579170 - RNA, 22 nt, Human
aaagcauucaauuuauucaaga

SEQ ID NO: 2579171 - RNA, 16 nt, Human
aaagcauguacagugu

SEQ ID NO: 2579172 - RNA, 15 nt, Human
aaagcauguacagug

SEQ ID NO: 2579173 - RNA, 13 nt, Human
aaagcaugucuca

SEQ ID NO: 2579174 - RNA, 18 nt, Human
aaagccugggugacauuu

SEQ ID NO: 2579175 - RNA, 17 nt, Human
aaagccugggugacauu

SEQ ID NO: 2579176 - RNA, 24 nt, Human
aaagccucugugucacuggcugcc

SEQ ID NO: 2579177 - RNA, 18 nt, Human
aaagccugcaauuucaua

SEQ ID NO: 2579178 - RNA, 21 nt, Human
aaagccucugugucacuggcu

SEQ ID NO: 2579179 - RNA, 13 nt, Human
aaagccucugugu

SEQ ID NO: 2579180 - RNA, 16 nt, Human
aaagccucugcugcca

SEQ ID NO: 2579181 - RNA, 13 nt, Human
aaagccugcaauu

SEQ ID NO: 2579182 - RNA, 17 nt, Human
aaagccagugacuccag

SEQ ID NO: 2579183 - RNA, 19 nt, Human
aaagccagugacuccagga

SEQ ID NO: 2579184 - RNA, 18 nt, Human
aaagcauuccaacaaagg

SEQ ID NO: 2579185 - RNA, 16 nt, Human
aaacccagcucugguc

SEQ ID NO: 2579186 - RNA, 12 nt, Human
aaacccagcucu

SEQ ID NO: 2579187 - RNA, 23 nt, Human
aaacccaccuuguuggagccugc

SEQ ID NO: 2579188 - RNA, 15 nt, Human
aaaccgccaaggcug

SEQ ID NO: 2579189 - RNA, 16 nt, Human
aaaccgccaaggcugg

SEQ ID NO: 2579190 - RNA, 19 nt, Human
aaacucuguugcaagugca

SEQ ID NO: 2579191 - RNA, 22 nt, Human
aaacucugggaaauaagagaga

SEQ ID NO: 2579192 - RNA, 23 nt, Human
aaaccgccagcgaacuugacaau

SEQ ID NO: 2579193 - RNA, 12 nt, Human
aaacccagagag

SEQ ID NO: 2579194 - RNA, 15 nt, Human
aaacccagacugaac

SEQ ID NO: 2579195 - RNA, 11 nt, Human
aaacccagaga

SEQ ID NO: 2579196 - RNA, 23 nt, Human
aaacugauuuuuuuuuccuucag

SEQ ID NO: 2579197 - RNA, 22 nt, Human
aaacugauuuuuuuuuccuuca

SEQ ID NO: 2579198 - RNA, 12 nt, Human
aaacucuuaaaa

SEQ ID NO: 2579199 - RNA, 23 nt, Human
aaacucuuaaaacccaagugccu

SEQ ID NO: 2579200 - RNA, 9 nt, Human
aaagaaaaa

SEQ ID NO: 2579201 - RNA, 11 nt, Human
aaagaaaaaaa

SEQ ID NO: 2579202 - RNA, 15 nt, Human
aaacugcacugucaa

SEQ ID NO: 2579203 - RNA, 15 nt, Human
aaacucuuaucucag

SEQ ID NO: 2579204 - RNA, 13 nt, Human
aaacucuuaucuc

SEQ ID NO: 2579205 - RNA, 20 nt, Human
aaacucuguugcaagugcaa

SEQ ID NO: 2579206 - RNA, 16 nt, Human
aaacucuuaucucagu

SEQ ID NO: 2579207 - RNA, 12 nt, Human
aaaccagggagc

SEQ ID NO: 2579208 - RNA, 15 nt, Human
aaaccauaaacuuca

SEQ ID NO: 2579209 - RNA, 13 nt, Human
aaaccauaaacuu

SEQ ID NO: 2579210 - RNA, 15 nt, Human
aaacccaauccaaau

SEQ ID NO: 2579211 - RNA, 19 nt, Human
aaaccaguguuagggaagg

SEQ ID NO: 2579212 - RNA, 19 nt, Human
aaaccaguguagccuugcc

SEQ ID NO: 2579213 - RNA, 18 nt, Human
aaaaucucaaauuucuaa

SEQ ID NO: 2579214 - RNA, 15 nt, Human
aaaaucucaaauuuc

SEQ ID NO: 2579215 - RNA, 16 nt, Human
aaaaucucaaauuucu

SEQ ID NO: 2579216 - RNA, 21 nt, Human
aaaaucauuucugcaucagcu

SEQ ID NO: 2579217 - RNA, 21 nt, Human
aaaaucuaccuucuguaguuu

SEQ ID NO: 2579218 - RNA, 20 nt, Human
aaaaucuaccuucuguaguu

SEQ ID NO: 2579219 - RNA, 18 nt, Human
aaaaucuaccuucuguag

SEQ ID NO: 2579220 - RNA, 17 nt, Human
aaaaucuaccuucugua

SEQ ID NO: 2579221 - RNA, 20 nt, Human
aaaaucuauuuuguaacuuu

SEQ ID NO: 2579222 - RNA, 11 nt, Human
aaaaucauuuc

SEQ ID NO: 2579223 - RNA, 12 nt, Human
aaaaucauuucu

SEQ ID NO: 2579224 - RNA, 10 nt, Human
aaaaucauuu

SEQ ID NO: 2579225 - RNA, 22 nt, Human
aaaaucagccaauuauguuaaa

SEQ ID NO: 2579226 - RNA, 24 nt, Human
aaaaucagccaauuauguuaaacu

SEQ ID NO: 2579227 - RNA, 22 nt, Human
aaaaucauugauugucagcuac

SEQ ID NO: 2579228 - RNA, 21 nt, Human
aaaaucagccaauuauguuaa

SEQ ID NO: 2579229 - RNA, 16 nt, Human
aaaauaaaacuuuuua

SEQ ID NO: 2579230 - RNA, 13 nt, Human
aaaaucagccugc

SEQ ID NO: 2579231 - RNA, 17 nt, Human
aaaaucagccugcucca

SEQ ID NO: 2579232 - RNA, 21 nt, Human
aaaaucagccugcuccagcug

SEQ ID NO: 2579233 - RNA, 16 nt, Human
aaaauaaaaaguuaaa

SEQ ID NO: 2579234 - RNA, 19 nt, Human
aaaauaaaaaguuaaaaag

SEQ ID NO: 2579235 - RNA, 13 nt, Human
aaaauaaaaaugg

SEQ ID NO: 2579236 - RNA, 15 nt, Human
aaaauaaaaaguuaa

SEQ ID NO: 2579237 - RNA, 14 nt, Human
aaaauaaaaaguua

SEQ ID NO: 2579238 - RNA, 22 nt, Human
aaaauaaaacauuuuaaaugga

SEQ ID NO: 2579239 - RNA, 16 nt, Human
aaaauaaaacauuuua

SEQ ID NO: 2579240 - RNA, 15 nt, Human
aaaauaaaacauuuu

SEQ ID NO: 2579241 - RNA, 14 nt, Human
aaaauaaaacauuu

SEQ ID NO: 2579242 - RNA, 13 nt, Human
aaaauaaaacauu

SEQ ID NO: 2579243 - RNA, 18 nt, Human
aaaauaaaaauaaauuca

SEQ ID NO: 2579244 - RNA, 14 nt, Human
aaaauaaaacuuuu

SEQ ID NO: 2579245 - RNA, 23 nt, Human
aaaaguuggguuuucuccauuca

SEQ ID NO: 2579246 - RNA, 17 nt, Human
aaaagugacacagcagc

SEQ ID NO: 2579247 - RNA, 15 nt, Human
aaaagugacacagca

SEQ ID NO: 2579248 - RNA, 14 nt, Human
aaaagugacacagc

SEQ ID NO: 2579249 - RNA, 13 nt, Human
aaaagugacacag

SEQ ID NO: 2579250 - RNA, 23 nt, Human
aaaagucuucacucucugaagau

SEQ ID NO: 2579251 - RNA, 19 nt, Human
aaaagucuucacucucuga

SEQ ID NO: 2579252 - RNA, 15 nt, Human
aaaagucaaaaggug

SEQ ID NO: 2579253 - RNA, 19 nt, Human
aaaagucagacugcuggga

SEQ ID NO: 2579254 - RNA, 23 nt, Human
aaaagaucuguuuugaaggcaaa

SEQ ID NO: 2579255 - RNA, 14 nt, Human
aaaagauauaagug

SEQ ID NO: 2579256 - RNA, 13 nt, Human
aaaagauauaagu

SEQ ID NO: 2579257 - RNA, 12 nt, Human
aaaagauauaag

SEQ ID NO: 2579258 - RNA, 20 nt, Human
aaaagauacgacuuuauuuu

SEQ ID NO: 2579259 - RNA, 17 nt, Human
aaaagauaaauauuaua

SEQ ID NO: 2579260 - RNA, 23 nt, Human
aaaagauauaagugcuguauaaa

SEQ ID NO: 2579261 - RNA, 19 nt, Human
aaaagauauaagugcugua

SEQ ID NO: 2579262 - RNA, 18 nt, Human
aaaagauauaagugcugu

SEQ ID NO: 2579263 - RNA, 15 nt, Human
aaaagauauaagugc

SEQ ID NO: 2579264 - RNA, 22 nt, Human
aaaagauauauuaaaaauauaa

SEQ ID NO: 2579265 - RNA, 21 nt, Human
aaaagauauauuaaaaauaua

SEQ ID NO: 2579266 - RNA, 16 nt, Human
aaaagauauauuaaaa

SEQ ID NO: 2579267 - RNA, 11 nt, Human
aaaagauauau

SEQ ID NO: 2579268 - RNA, 16 nt, Human
aaaagauccuuuuuaa

SEQ ID NO: 2579269 - RNA, 13 nt, Human
aaaagaucgcagu

SEQ ID NO: 2579270 - RNA, 16 nt, Human
aaaagagauauuuuaa

SEQ ID NO: 2579271 - RNA, 14 nt, Human
aaaagagauauuuu

SEQ ID NO: 2579272 - RNA, 21 nt, Human
aaaagagagaaaacuuauuug

SEQ ID NO: 2579273 - RNA, 19 nt, Human
aaaagagagaaaacuuauu

SEQ ID NO: 2579274 - RNA, 16 nt, Human
aaaagagaugaugaaa

SEQ ID NO: 2579275 - RNA, 19 nt, Human
aaaagagaugaugaaaaua

SEQ ID NO: 2579276 - RNA, 13 nt, Human
aaaagagaaaaga

SEQ ID NO: 2579277 - RNA, 14 nt, Human
aaaagagaaaagaa

SEQ ID NO: 2579278 - RNA, 16 nt, Human
aaaagagaaaagaaaa

SEQ ID NO: 2579279 - RNA, 16 nt, Human
aaaagacucaguguuc

SEQ ID NO: 2579280 - RNA, 20 nt, Human
aaaagauaaagaugaucuac

SEQ ID NO: 2579281 - RNA, 18 nt, Human
aaaagauaaagaugaucu

SEQ ID NO: 2579282 - RNA, 17 nt, Human
aaaagauaaagaugauc

SEQ ID NO: 2579283 - RNA, 14 nt, Human
aaaagauaaagaug

SEQ ID NO: 2579284 - RNA, 14 nt, Human
aaaagauaaauauu

SEQ ID NO: 2579285 - RNA, 13 nt, Human
aaaagauaaagau

SEQ ID NO: 2579286 - RNA, 17 nt, Human
aaaagagguuuuucuua

SEQ ID NO: 2579287 - RNA, 21 nt, Human
aaaagagguuuuucuuaaaua

SEQ ID NO: 2579288 - RNA, 22 nt, Human
aaaagagguuuuucuuaaauaa

SEQ ID NO: 2579289 - RNA, 16 nt, Human
aaaagagauuucaaga

SEQ ID NO: 2579290 - RNA, 19 nt, Human
aaaagagauggccugagaa

SEQ ID NO: 2579291 - RNA, 21 nt, Human
aaaagagauauuuuaaaauga

SEQ ID NO: 2579292 - RNA, 22 nt, Human
aaaagaggaaagaaugaaagag

SEQ ID NO: 2579293 - RNA, 14 nt, Human
aaaagagauuucaa

SEQ ID NO: 2579294 - RNA, 12 nt, Human
aaaagagggggg

SEQ ID NO: 2579295 - RNA, 15 nt, Human
aaaagaggggcuggg

SEQ ID NO: 2579296 - RNA, 17 nt, Human
aaaagaaagaaaaucag

SEQ ID NO: 2579297 - RNA, 15 nt, Human
aaaagaaaauaaaaa

SEQ ID NO: 2579298 - RNA, 16 nt, Human
aaaagaaaagucaagg

SEQ ID NO: 2579299 - RNA, 14 nt, Human
aaaagaaaauaaaa

SEQ ID NO: 2579300 - RNA, 22 nt, Human
aaaagaaaaaaaaagaaaaaag

SEQ ID NO: 2579301 - RNA, 12 nt, Human
aaaagaauauuu

SEQ ID NO: 2579302 - RNA, 11 nt, Human
aaaagaaggaa

SEQ ID NO: 2579303 - RNA, 16 nt, Human
aaaagaacaguaaaca

SEQ ID NO: 2579304 - RNA, 17 nt, Human
aaaagaacacuagaguc

SEQ ID NO: 2579305 - RNA, 10 nt, Human
aaaagaaagc

SEQ ID NO: 2579306 - RNA, 17 nt, Human
aaaagaacaauauugac

SEQ ID NO: 2579307 - RNA, 20 nt, Human
aaaagacaaggaaaaaauaa

SEQ ID NO: 2579308 - RNA, 13 nt, Human
aaaagaauauuuu

SEQ ID NO: 2579309 - RNA, 13 nt, Human
aaaagaaggaaaa

SEQ ID NO: 2579310 - RNA, 16 nt, Human
aaaagaauacagaaag

SEQ ID NO: 2579311 - RNA, 11 nt, Human
aaaagaaugau

SEQ ID NO: 2579312 - RNA, 19 nt, Human
aaaagacaauucuuuauac

SEQ ID NO: 2579313 - RNA, 14 nt, Human
aaaagacaauucuu

SEQ ID NO: 2579314 - RNA, 13 nt, Human
aaaagacaauucu

SEQ ID NO: 2579315 - RNA, 20 nt, Human
aaaagaaugggcaguuacau

SEQ ID NO: 2579316 - RNA, 16 nt, Human
aaaagaaugggcaguu

SEQ ID NO: 2579317 - RNA, 13 nt, Human
aaaagacuccaaa

SEQ ID NO: 2579318 - RNA, 13 nt, Human
aaaagaccagacu

SEQ ID NO: 2579319 - RNA, 13 nt, Human
aaaagacagggcu

SEQ ID NO: 2579320 - RNA, 15 nt, Human
aaaacagacucaggu

SEQ ID NO: 2579321 - RNA, 16 nt, Human
aaaacagcauugcuuu

SEQ ID NO: 2579322 - RNA, 20 nt, Human
aaaacagcauugcuuucuga

SEQ ID NO: 2579323 - RNA, 18 nt, Human
aaaacagccucacagaag

SEQ ID NO: 2579324 - RNA, 13 nt, Human
aaaacuuuucuca

SEQ ID NO: 2579325 - RNA, 11 nt, Human
aaaacuuugga

SEQ ID NO: 2579326 - RNA, 20 nt, Human
aaaacuuuccucgccugaca

SEQ ID NO: 2579327 - RNA, 16 nt, Human
aaaagaaaaaaaaaga

SEQ ID NO: 2579328 - RNA, 17 nt, Human
aaaagaaaaaaaaagaa

SEQ ID NO: 2579329 - RNA, 18 nt, Human
aaaagaaaaaaaaagaaa

SEQ ID NO: 2579330 - RNA, 19 nt, Human
aaaagaaaaaaaaagaaaa

SEQ ID NO: 2579331 - RNA, 11 nt, Human
aaaagaaaaag

SEQ ID NO: 2579332 - RNA, 9 nt, Human
aaaagaaaa

SEQ ID NO: 2579333 - RNA, 11 nt, Human
aaaagaaaaaa

SEQ ID NO: 2579334 - RNA, 12 nt, Human
aaaagaaaaaaa

SEQ ID NO: 2579335 - RNA, 15 nt, Human
aaaacuuuucucaga

SEQ ID NO: 2579336 - RNA, 17 nt, Human
aaaacuuuuuauauuuu

SEQ ID NO: 2579337 - RNA, 20 nt, Human
aaaacuuuuuauauuuuaua

SEQ ID NO: 2579338 - RNA, 19 nt, Human
aaaacacuguucucugccc

SEQ ID NO: 2579339 - RNA, 13 nt, Human
aaaacacugugca

SEQ ID NO: 2579340 - RNA, 21 nt, Human
aaaacacuaaaaauaaaaaug

SEQ ID NO: 2579341 - RNA, 22 nt, Human
aaaacaccuagcuuuauucuuc

SEQ ID NO: 2579342 - RNA, 22 nt, Human
aaaacagaacaucauuagaaca

SEQ ID NO: 2579343 - RNA, 21 nt, Human
aaaacagaacaucauuagaac

SEQ ID NO: 2579344 - RNA, 18 nt, Human
aaaacagaacaucauuag

SEQ ID NO: 2579345 - RNA, 17 nt, Human
aaaacagacacuggcau

SEQ ID NO: 2579346 - RNA, 13 nt, Human
aaaacagaagccu

SEQ ID NO: 2579347 - RNA, 18 nt, Human
aaaacacugccaucuuag

SEQ ID NO: 2579348 - RNA, 14 nt, Human
aaaacacuaguuuu

SEQ ID NO: 2579349 - RNA, 17 nt, Human
aaaacacauuuuucuua

SEQ ID NO: 2579350 - RNA, 15 nt, Human
aaaacaccuagcuuu

SEQ ID NO: 2579351 - RNA, 14 nt, Human
cugcauuuaaaaga

SEQ ID NO: 2579352 - RNA, 13 nt, Human
cugcauuggcuuu

SEQ ID NO: 2579353 - RNA, 17 nt, Human
cugcccuuaccugccag

SEQ ID NO: 2579354 - RNA, 16 nt, Human
cugcccuuaccugcca

SEQ ID NO: 2579355 - RNA, 12 nt, Human
cugcccuuaccu

SEQ ID NO: 2579356 - RNA, 21 nt, Human
cugcccuguuguguauagaug

SEQ ID NO: 2579357 - RNA, 19 nt, Human
cugcccuguuguguauaga

SEQ ID NO: 2579358 - RNA, 19 nt, Human
cugccccuccucucugccc

SEQ ID NO: 2579359 - RNA, 19 nt, Human
cugcccugugggcccccaa

SEQ ID NO: 2579360 - RNA, 17 nt, Human
cugccccuccucucugc

SEQ ID NO: 2579361 - RNA, 18 nt, Human
cugccccuccucucugcc

SEQ ID NO: 2579362 - RNA, 17 nt, Human
cugccccucccuucaac

SEQ ID NO: 2579363 - RNA, 14 nt, Human
cugccccucccuuc

SEQ ID NO: 2579364 - RNA, 13 nt, Human
cugccccucccuu

SEQ ID NO: 2579365 - RNA, 22 nt, Human
cugccccgugcagacuggaggg

SEQ ID NO: 2579366 - RNA, 18 nt, Human
cugccccgugcagacugg

SEQ ID NO: 2579367 - RNA, 19 nt, Human
cugccccgugcagacugga

SEQ ID NO: 2579368 - RNA, 19 nt, Human
cugccauccagguucagcu

SEQ ID NO: 2579369 - RNA, 18 nt, Human
cugccauccagguucagc

SEQ ID NO: 2579370 - RNA, 16 nt, Human
cugccauccagguuca

SEQ ID NO: 2579371 - RNA, 16 nt, Human
cugccauauucuguug

SEQ ID NO: 2579372 - RNA, 18 nt, Human
cugcccccacuuccuguu

SEQ ID NO: 2579373 - RNA, 16 nt, Human
cugcccccacuuccug

SEQ ID NO: 2579374 - RNA, 14 nt, Human
cugcccccacuucc

SEQ ID NO: 2579375 - RNA, 21 nt, Human
cugcccccacgagggucagga

SEQ ID NO: 2579376 - RNA, 12 nt, Human
cugcccccacga

SEQ ID NO: 2579377 - RNA, 15 nt, Human
cugcccccaccccgg

SEQ ID NO: 2579378 - RNA, 16 nt, Human
cugcccccagccccgg

SEQ ID NO: 2579379 - RNA, 17 nt, Human
cugccauccagggaugc

SEQ ID NO: 2579380 - RNA, 15 nt, Human
cugcccccaaauaag

SEQ ID NO: 2579381 - RNA, 14 nt, Human
cugcccccaaauaa

SEQ ID NO: 2579382 - RNA, 22 nt, Human
cugccccauuuauccaccucca

SEQ ID NO: 2579383 - RNA, 21 nt, Human
cugccccauuuauccaccucc

SEQ ID NO: 2579384 - RNA, 22 nt, Human
cugcccccaccacggccacugg

SEQ ID NO: 2579385 - RNA, 22 nt, Human
cugcccccaaauaagaagggau

SEQ ID NO: 2579386 - RNA, 19 nt, Human
cugcccccaccacggccac

SEQ ID NO: 2579387 - RNA, 18 nt, Human
cugccccgcccccagucc

SEQ ID NO: 2579388 - RNA, 17 nt, Human
cugccccgcccccaguc

SEQ ID NO: 2579389 - RNA, 16 nt, Human
cugccccgcccccagu

SEQ ID NO: 2579390 - RNA, 14 nt, Human
cugccccgccccca

SEQ ID NO: 2579391 - RNA, 23 nt, Human
cugccccggggaggggcgcucgc

SEQ ID NO: 2579392 - RNA, 23 nt, Human
cugccccgcccccaguccccacc

SEQ ID NO: 2579393 - RNA, 18 nt, Human
cugccccgucaccaucuc

SEQ ID NO: 2579394 - RNA, 19 nt, Human
cugccccgucaccaucuca

SEQ ID NO: 2579395 - RNA, 21 nt, Human
cugccccgucaccaucucagg

SEQ ID NO: 2579396 - RNA, 23 nt, Human
cugccccgucaccaucucaggcc

SEQ ID NO: 2579397 - RNA, 22 nt, Human
cugccccgucucaugaggggcc

SEQ ID NO: 2579398 - RNA, 15 nt, Human
cugccccgugcagac

SEQ ID NO: 2579399 - RNA, 17 nt, Human
cugccccgugcagacug

SEQ ID NO: 2579400 - RNA, 22 nt, Human
cugcccccuucucccacacugc

SEQ ID NO: 2579401 - RNA, 23 nt, Human
cugcccccuucucccacacugcu

SEQ ID NO: 2579402 - RNA, 15 nt, Human
cugccccgcccagcu

SEQ ID NO: 2579403 - RNA, 16 nt, Human
cugccccgcccagcug

SEQ ID NO: 2579404 - RNA, 17 nt, Human
cugccccgcccagcugc

SEQ ID NO: 2579405 - RNA, 18 nt, Human
cugcccccggcccccugg

SEQ ID NO: 2579406 - RNA, 17 nt, Human
cugcccccggcccccug

SEQ ID NO: 2579407 - RNA, 16 nt, Human
cugcccccggcccccu

SEQ ID NO: 2579408 - RNA, 16 nt, Human
cugcccccaggacugg

SEQ ID NO: 2579409 - RNA, 15 nt, Human
cugcccccaggacug

SEQ ID NO: 2579410 - RNA, 14 nt, Human
cugcccccaggacu

SEQ ID NO: 2579411 - RNA, 13 nt, Human
cugcccccaggac

SEQ ID NO: 2579412 - RNA, 18 nt, Human
cugcccccaggacugggc

SEQ ID NO: 2579413 - RNA, 17 nt, Human
cugcccccaggacuggg

SEQ ID NO: 2579414 - RNA, 12 nt, Human
cugccccccagc

SEQ ID NO: 2579415 - RNA, 19 nt, Human
cugcccccaggacugggcc

SEQ ID NO: 2579416 - RNA, 19 nt, Human
cugccccccagccucuggc

SEQ ID NO: 2579417 - RNA, 16 nt, Human
cugccccccagccucu

SEQ ID NO: 2579418 - RNA, 13 nt, Human
cugccccccagcc

SEQ ID NO: 2579419 - RNA, 21 nt, Human
cugccccccagccucuggcau

SEQ ID NO: 2579420 - RNA, 23 nt, Human
cugcccccagcucuucuccccag

SEQ ID NO: 2579421 - RNA, 23 nt, Human
cugccauaaaacauuaagaaaau

SEQ ID NO: 2579422 - RNA, 22 nt, Human
cugccauaaaacauuaagaaaa

SEQ ID NO: 2579423 - RNA, 20 nt, Human
cugccauaaaacauuaagaa

SEQ ID NO: 2579424 - RNA, 13 nt, Human
cugccauaaaaca

SEQ ID NO: 2579425 - RNA, 12 nt, Human
cugccaguuuug

SEQ ID NO: 2579426 - RNA, 13 nt, Human
cugccaguuuugu

SEQ ID NO: 2579427 - RNA, 15 nt, Human
cugccaguguggaac

SEQ ID NO: 2579428 - RNA, 23 nt, Human
cugccagugccuuaccuccugcc

SEQ ID NO: 2579429 - RNA, 21 nt, Human
cugccagugccuuaccuccug

SEQ ID NO: 2579430 - RNA, 22 nt, Human
cugccagugccuuaccuccugc

SEQ ID NO: 2579431 - RNA, 21 nt, Human
cugccagugacagacaggcuc

SEQ ID NO: 2579432 - RNA, 19 nt, Human
cugccagugacagacaggc

SEQ ID NO: 2579433 - RNA, 23 nt, Human
cugccagugacagacaggcucuu

SEQ ID NO: 2579434 - RNA, 12 nt, Human
cugccagugccu

SEQ ID NO: 2579435 - RNA, 13 nt, Human
cugccagugccuu

SEQ ID NO: 2579436 - RNA, 14 nt, Human
cugccagugccuua

SEQ ID NO: 2579437 - RNA, 17 nt, Human
cugccagugccuuaccu

SEQ ID NO: 2579438 - RNA, 18 nt, Human
cugccagugccuuaccuc

SEQ ID NO: 2579439 - RNA, 20 nt, Human
cugccagugccuuaccuccu

SEQ ID NO: 2579440 - RNA, 17 nt, Human
cugccagucccccugcc

SEQ ID NO: 2579441 - RNA, 21 nt, Human
cugccagucccccugccccag

SEQ ID NO: 2579442 - RNA, 20 nt, Human
cugccagucccccugcccca

SEQ ID NO: 2579443 - RNA, 16 nt, Human
cugccagugacagaca

SEQ ID NO: 2579444 - RNA, 12 nt, Human
cugccagugaca

SEQ ID NO: 2579445 - RNA, 21 nt, Human
cugccaguccuagcugcacag

SEQ ID NO: 2579446 - RNA, 18 nt, Human
cugccaguccuagcugca

SEQ ID NO: 2579447 - RNA, 18 nt, Human
cugccagucucacugugg

SEQ ID NO: 2579448 - RNA, 17 nt, Human
cugccaguccuagcugc

SEQ ID NO: 2579449 - RNA, 16 nt, Human
cugccaguccuagcug

SEQ ID NO: 2579450 - RNA, 22 nt, Human
cugccagucccccugccccagg

SEQ ID NO: 2579451 - RNA, 22 nt, Human
cugccagggacagagggggugg

SEQ ID NO: 2579452 - RNA, 20 nt, Human
cugccagggacagagggggu

SEQ ID NO: 2579453 - RNA, 17 nt, Human
cugcauuuaaaagauac

SEQ ID NO: 2579454 - RNA, 18 nt, Human
cugcauuuaaaagauaca

SEQ ID NO: 2579455 - RNA, 23 nt, Human
cugccagggacagaggggguggc

SEQ ID NO: 2579456 - RNA, 19 nt, Human
cugccagggagacagagcu

SEQ ID NO: 2579457 - RNA, 18 nt, Human
cugccagggagacagagc

SEQ ID NO: 2579458 - RNA, 17 nt, Human
cugccagggagacagag

SEQ ID NO: 2579459 - RNA, 16 nt, Human
cugccagggagacaga

SEQ ID NO: 2579460 - RNA, 12 nt, Human
cugccagggagc

SEQ ID NO: 2579461 - RNA, 13 nt, Human
cugccagggagcu

SEQ ID NO: 2579462 - RNA, 11 nt, Human
cugccagggca

SEQ ID NO: 2579463 - RNA, 12 nt, Human
cugccagggcag

SEQ ID NO: 2579464 - RNA, 13 nt, Human
cugccagggcagg

SEQ ID NO: 2579465 - RNA, 15 nt, Human
cugccagggcagggc

SEQ ID NO: 2579466 - RNA, 16 nt, Human
cugccagggcagggcc

SEQ ID NO: 2579467 - RNA, 23 nt, Human
cugccagggagacagagcucaca

SEQ ID NO: 2579468 - RNA, 11 nt, Human
cugccagggcc

SEQ ID NO: 2579469 - RNA, 21 nt, Human
cugcaaccugauugugucucu

SEQ ID NO: 2579470 - RNA, 19 nt, Human
cugcaaccugauugugucu

SEQ ID NO: 2579471 - RNA, 14 nt, Human
cugcaaccugauug

SEQ ID NO: 2579472 - RNA, 22 nt, Human
cugcaaccuccgccucuugggu

SEQ ID NO: 2579473 - RNA, 15 nt, Human
cugcaaaugucauca

SEQ ID NO: 2579474 - RNA, 12 nt, Human
cugcaacaggcu

SEQ ID NO: 2579475 - RNA, 20 nt, Human
cugcaaccuccgccucuugg

SEQ ID NO: 2579476 - RNA, 16 nt, Human
cugcaaauccuugugg

SEQ ID NO: 2579477 - RNA, 19 nt, Human
cugcaaauccuugugggaa

SEQ ID NO: 2579478 - RNA, 21 nt, Human
cugcaaaucagccaugugcug

SEQ ID NO: 2579479 - RNA, 17 nt, Human
cugcaaccuucgccacc

SEQ ID NO: 2579480 - RNA, 19 nt, Human
cugcaaccuucgccaccug

SEQ ID NO: 2579481 - RNA, 20 nt, Human
cugcaaccuucgccaccugg

SEQ ID NO: 2579482 - RNA, 22 nt, Human
cugcaaccuucgccaccugggu

SEQ ID NO: 2579483 - RNA, 22 nt, Human
cugcaaccugauugugucucuu

SEQ ID NO: 2579484 - RNA, 13 nt, Human
cugcaaccuccgc

SEQ ID NO: 2579485 - RNA, 15 nt, Human
cugcaaccuguugau

SEQ ID NO: 2579486 - RNA, 20 nt, Human
cugcaacuuuaagcagcucu

SEQ ID NO: 2579487 - RNA, 19 nt, Human
cugcaacuuuaagcagcuc

SEQ ID NO: 2579488 - RNA, 17 nt, Human
cugcaacuuuaagcagc

SEQ ID NO: 2579489 - RNA, 17 nt, Human
cugcaacggcuuagacu

SEQ ID NO: 2579490 - RNA, 19 nt, Human
cugcaacuuguaaaugugg

SEQ ID NO: 2579491 - RNA, 18 nt, Human
cugcaagaauugaagcag

SEQ ID NO: 2579492 - RNA, 23 nt, Human
cugcaacucaaggacuuugcagc

SEQ ID NO: 2579493 - RNA, 15 nt, Human
cugcaacucaaggac

SEQ ID NO: 2579494 - RNA, 14 nt, Human
cugcaacuucugcc

SEQ ID NO: 2579495 - RNA, 18 nt, Human
cugcaacuuguaaaugug

SEQ ID NO: 2579496 - RNA, 15 nt, Human
cugcaacuucugccu

SEQ ID NO: 2579497 - RNA, 16 nt, Human
cugcaagggcucccca

SEQ ID NO: 2579498 - RNA, 22 nt, Human
cugcaagggcagaacacuaacc

SEQ ID NO: 2579499 - RNA, 20 nt, Human
cugcaaggccuuucugugug

SEQ ID NO: 2579500 - RNA, 18 nt, Human
cugcaaggccuuucugug

SEQ ID NO: 2579501 - RNA, 22 nt, Human
cugcaagggcuccccacugccu

SEQ ID NO: 2579502 - RNA, 17 nt, Human
cugcaagggcuccccac

SEQ ID NO: 2579503 - RNA, 17 nt, Human
cugcaaggucuuugguu

SEQ ID NO: 2579504 - RNA, 17 nt, Human
cugcaaggccuuucugu

SEQ ID NO: 2579505 - RNA, 16 nt, Human
cugcaaggccuuucug

SEQ ID NO: 2579506 - RNA, 13 nt, Human
cugcaaggccuuu

SEQ ID NO: 2579507 - RNA, 13 nt, Human
cugcaagccugcg

SEQ ID NO: 2579508 - RNA, 14 nt, Human
cugcaagccugcgu

SEQ ID NO: 2579509 - RNA, 12 nt, Human
cugcaagggagu

SEQ ID NO: 2579510 - RNA, 20 nt, Human
cugcaagaauugaagcagga

SEQ ID NO: 2579511 - RNA, 21 nt, Human
cugcaacuuuaagcagcucuu

SEQ ID NO: 2579512 - RNA, 21 nt, Human
cugcaagaaaaugauguguac

SEQ ID NO: 2579513 - RNA, 13 nt, Human
cugcaagagccuu

SEQ ID NO: 2579514 - RNA, 14 nt, Human
cugcaagagccuug

SEQ ID NO: 2579515 - RNA, 15 nt, Human
cugcaagagccuugg

SEQ ID NO: 2579516 - RNA, 17 nt, Human
cugcaagagccuuggug

SEQ ID NO: 2579517 - RNA, 18 nt, Human
cugcaagagccuuggugu

SEQ ID NO: 2579518 - RNA, 19 nt, Human
cugcaagagccuugguguc

SEQ ID NO: 2579519 - RNA, 23 nt, Human
cugcaagagccuugguguccacc

SEQ ID NO: 2579520 - RNA, 19 nt, Human
cugcaagauucugaaacau

SEQ ID NO: 2579521 - RNA, 21 nt, Human
cugcaagagccuuggugucca

SEQ ID NO: 2579522 - RNA, 12 nt, Human
cugcaagccugc

SEQ ID NO: 2579523 - RNA, 19 nt, Human
cugcaagccgacuacaccu

SEQ ID NO: 2579524 - RNA, 19 nt, Human
cugcaagcagggcucugcc

SEQ ID NO: 2579525 - RNA, 18 nt, Human
cugcaagcagggcucugc

SEQ ID NO: 2579526 - RNA, 14 nt, Human
cugcaagcagggcu

SEQ ID NO: 2579527 - RNA, 20 nt, Human
cugcaagauucugaaacauu

SEQ ID NO: 2579528 - RNA, 20 nt, Human
cugcaagcacaucugcauuu

SEQ ID NO: 2579529 - RNA, 23 nt, Human
cugcaccgggccacagagaaagu

SEQ ID NO: 2579530 - RNA, 21 nt, Human
cugcaagucagaggauggcca

SEQ ID NO: 2579531 - RNA, 19 nt, Human
cugcaagucagaggauggc

SEQ ID NO: 2579532 - RNA, 16 nt, Human
cugcaagucagaggau

SEQ ID NO: 2579533 - RNA, 15 nt, Human
cugcaagucagagga

SEQ ID NO: 2579534 - RNA, 20 nt, Human
cugcaccgggccacagagaa

SEQ ID NO: 2579535 - RNA, 18 nt, Human
cugcaagguuuaggcugg

SEQ ID NO: 2579536 - RNA, 20 nt, Human
cugcaagguuuaggcuggug

SEQ ID NO: 2579537 - RNA, 22 nt, Human
cugcaagguuuaggcugguggc

SEQ ID NO: 2579538 - RNA, 23 nt, Human
cugcaagguuuaggcugguggcc

SEQ ID NO: 2579539 - RNA, 14 nt, Human
cugcaagucagagg

SEQ ID NO: 2579540 - RNA, 13 nt, Human
cugcaagucagag

SEQ ID NO: 2579541 - RNA, 12 nt, Human
cugcaagucaga

SEQ ID NO: 2579542 - RNA, 21 nt, Human
cugcaccuccccccacugcag

SEQ ID NO: 2579543 - RNA, 22 nt, Human
cugcaccuccccccacugcagg

SEQ ID NO: 2579544 - RNA, 13 nt, Human
cugcaccugccag

SEQ ID NO: 2579545 - RNA, 16 nt, Human
cugcaccugccagccu

SEQ ID NO: 2579546 - RNA, 17 nt, Human
cugcaccugccagccug

SEQ ID NO: 2579547 - RNA, 18 nt, Human
cugcaccugccagccugg

SEQ ID NO: 2579548 - RNA, 19 nt, Human
cugcaccugccagccuggc

SEQ ID NO: 2579549 - RNA, 14 nt, Human
cugcaccugugcag

SEQ ID NO: 2579550 - RNA, 13 nt, Human
cugcaccugugca

SEQ ID NO: 2579551 - RNA, 20 nt, Human
cugcaccugccagccuggcu

SEQ ID NO: 2579552 - RNA, 17 nt, Human
cugcaccuccccccacu

SEQ ID NO: 2579553 - RNA, 18 nt, Human
cugcaccuccccccacug

SEQ ID NO: 2579554 - RNA, 19 nt, Human
cugcaccuccccccacugc

SEQ ID NO: 2579555 - RNA, 20 nt, Human
cugcaccuccccccacugca

SEQ ID NO: 2579556 - RNA, 11 nt, Human
cugcaccuccc

SEQ ID NO: 2579557 - RNA, 14 nt, Human
cugcaccucccccc

SEQ ID NO: 2579558 - RNA, 17 nt, Human
cugcaccguacugugga

SEQ ID NO: 2579559 - RNA, 22 nt, Human
cugcaaaggguaucaggugcug

SEQ ID NO: 2579560 - RNA, 14 nt, Human
cugcaaaggacaga

SEQ ID NO: 2579561 - RNA, 16 nt, Human
cugcaaaggacagauc

SEQ ID NO: 2579562 - RNA, 15 nt, Human
cugcaaaggaaauac

SEQ ID NO: 2579563 - RNA, 23 nt, Human
cugcaaaggacagauccagggac

SEQ ID NO: 2579564 - RNA, 13 nt, Human
cugcaaaggacug

SEQ ID NO: 2579565 - RNA, 22 nt, Human
cugcaaaggacuguuuuuuccu

SEQ ID NO: 2579566 - RNA, 23 nt, Human
cugcaaagguaauaauacagcca

SEQ ID NO: 2579567 - RNA, 16 nt, Human
cugaugguacaggaaa

SEQ ID NO: 2579568 - RNA, 17 nt, Human
cugcaaagcccagcuug

SEQ ID NO: 2579569 - RNA, 18 nt, Human
cugcaaagcccagcuuga

SEQ ID NO: 2579570 - RNA, 21 nt, Human
cugcaaaggguaucaggugcu

SEQ ID NO: 2579571 - RNA, 23 nt, Human
cugaugggcaacccccagccugc

SEQ ID NO: 2579572 - RNA, 22 nt, Human
cugaugggcaacccccagccug

SEQ ID NO: 2579573 - RNA, 24 nt, Human
cugaugggcaacccccagccugcu

SEQ ID NO: 2579574 - RNA, 18 nt, Human
cugauggcuucuccaggg

SEQ ID NO: 2579575 - RNA, 12 nt, Human
cugauggcuucu

SEQ ID NO: 2579576 - RNA, 19 nt, Human
cugauggcuucuccagggu

SEQ ID NO: 2579577 - RNA, 22 nt, Human
cugauggcaggauggccuggcc

SEQ ID NO: 2579578 - RNA, 19 nt, Human
cugauggcaggauggccug

SEQ ID NO: 2579579 - RNA, 17 nt, Human
cugauggcaggauggcc

SEQ ID NO: 2579580 - RNA, 16 nt, Human
cugauggcaggauggc

SEQ ID NO: 2579581 - RNA, 22 nt, Human
cugauggcacuuagcuaucaga

SEQ ID NO: 2579582 - RNA, 21 nt, Human
cugaugggcaacccccagccu

SEQ ID NO: 2579583 - RNA, 18 nt, Human
cugaugggcaacccccag

SEQ ID NO: 2579584 - RNA, 19 nt, Human
cugaugcuucuucagagac

SEQ ID NO: 2579585 - RNA, 18 nt, Human
cugaugcuucuucagaga

SEQ ID NO: 2579586 - RNA, 20 nt, Human
cugaugcuucuucagagacu

SEQ ID NO: 2579587 - RNA, 15 nt, Human
cugauggaccuguca

SEQ ID NO: 2579588 - RNA, 14 nt, Human
cugauggacaagga

SEQ ID NO: 2579589 - RNA, 18 nt, Human
cugaugcuuuuagcucaa

SEQ ID NO: 2579590 - RNA, 22 nt, Human
cugaugcuuugcuucaaaucca

SEQ ID NO: 2579591 - RNA, 17 nt, Human
cugaugcuuugcuucaa

SEQ ID NO: 2579592 - RNA, 17 nt, Human
cugaugcuucuucagag

SEQ ID NO: 2579593 - RNA, 16 nt, Human
cugaugcuucuucaga

SEQ ID NO: 2579594 - RNA, 19 nt, Human
cugaugcugggcugggugc

SEQ ID NO: 2579595 - RNA, 18 nt, Human
cugaugcugggcugggug

SEQ ID NO: 2579596 - RNA, 17 nt, Human
cugaugcugggcugggu

SEQ ID NO: 2579597 - RNA, 16 nt, Human
cugaugcugggcuggg

SEQ ID NO: 2579598 - RNA, 15 nt, Human
cugaugcugggcugg

SEQ ID NO: 2579599 - RNA, 14 nt, Human
cugaugcugggcug

SEQ ID NO: 2579600 - RNA, 13 nt, Human
cugaugcugggcu

SEQ ID NO: 2579601 - RNA, 12 nt, Human
cugaugcugaca

SEQ ID NO: 2579602 - RNA, 14 nt, Human
cugaugcugccccu

SEQ ID NO: 2579603 - RNA, 23 nt, Human
cugaugcucccuccccugcccug

SEQ ID NO: 2579604 - RNA, 24 nt, Human
cugaugcucccuccccugcccugg

SEQ ID NO: 2579605 - RNA, 19 nt, Human
cugaugccaaguuguuuga

SEQ ID NO: 2579606 - RNA, 23 nt, Human
cugaugcagucacguggaggagc

SEQ ID NO: 2579607 - RNA, 20 nt, Human
cugaugauuuguuuuuguau

SEQ ID NO: 2579608 - RNA, 17 nt, Human
cugaugaugugccuggg

SEQ ID NO: 2579609 - RNA, 20 nt, Human
cugaugauuucuugaaaagg

SEQ ID NO: 2579610 - RNA, 12 nt, Human
cugaugcucccu

SEQ ID NO: 2579611 - RNA, 14 nt, Human
cugaugcucccucc

SEQ ID NO: 2579612 - RNA, 15 nt, Human
cugaugcucccuccc

SEQ ID NO: 2579613 - RNA, 17 nt, Human
cugaugcucccuccccu

SEQ ID NO: 2579614 - RNA, 18 nt, Human
cugaugcucccuccccug

SEQ ID NO: 2579615 - RNA, 19 nt, Human
cugaugcucccuccccugc

SEQ ID NO: 2579616 - RNA, 21 nt, Human
cugaugcucccuccccugccc

SEQ ID NO: 2579617 - RNA, 22 nt, Human
cugaugcucccuccccugcccu

SEQ ID NO: 2579618 - RNA, 14 nt, Human
cucuuaugggcugg

SEQ ID NO: 2579619 - RNA, 23 nt, Human
cucuuaucucagucaugcauaaa

SEQ ID NO: 2579620 - RNA, 22 nt, Human
cucuuaucucagucaugcauaa

SEQ ID NO: 2579621 - RNA, 21 nt, Human
cucuuaucucagucaugcaua

SEQ ID NO: 2579622 - RNA, 15 nt, Human
cucuuaucucaguca

SEQ ID NO: 2579623 - RNA, 11 nt, Human
cucuuaucuca

SEQ ID NO: 2579624 - RNA, 22 nt, Human
cucuuauagaauauuuauuacc

SEQ ID NO: 2579625 - RNA, 15 nt, Human
cucuuaugggcuggg

SEQ ID NO: 2579626 - RNA, 15 nt, Human
cugaugacagagcga

SEQ ID NO: 2579627 - RNA, 16 nt, Human
cugaugacagagcgag

SEQ ID NO: 2579628 - RNA, 16 nt, Human
cucuuauucaguaaaa

SEQ ID NO: 2579629 - RNA, 17 nt, Human
cugaugacagagcgaga

SEQ ID NO: 2579630 - RNA, 23 nt, Human
cugcacuauagccuaggugacag

SEQ ID NO: 2579631 - RNA, 22 nt, Human
cugcacuauagccuaggugaca

SEQ ID NO: 2579632 - RNA, 20 nt, Human
cugcacuacuccucugcagu

SEQ ID NO: 2579633 - RNA, 19 nt, Human
cugcacuacuccucugcag

SEQ ID NO: 2579634 - RNA, 14 nt, Human
cugcacuacugaca

SEQ ID NO: 2579635 - RNA, 16 nt, Human
cugcacuacugacaug

SEQ ID NO: 2579636 - RNA, 23 nt, Human
cugcacuacuccucugcagugcc

SEQ ID NO: 2579637 - RNA, 13 nt, Human
cugcacuccagcc

SEQ ID NO: 2579638 - RNA, 17 nt, Human
cugcacuccagccugag

SEQ ID NO: 2579639 - RNA, 20 nt, Human
cugcacuccagccugagcga

SEQ ID NO: 2579640 - RNA, 16 nt, Human
cugcacuccagccuga

SEQ ID NO: 2579641 - RNA, 15 nt, Human
cugcacuccagccug

SEQ ID NO: 2579642 - RNA, 22 nt, Human
cugcacgaauggaagaggcacc

SEQ ID NO: 2579643 - RNA, 18 nt, Human
cugcacggugggccuugc

SEQ ID NO: 2579644 - RNA, 20 nt, Human
cugcacggugggccuugcug

SEQ ID NO: 2579645 - RNA, 19 nt, Human
cugcacggugggccuugcu

SEQ ID NO: 2579646 - RNA, 12 nt, Human
cugcacgucaug

SEQ ID NO: 2579647 - RNA, 18 nt, Human
cugcacuacuccucugca

SEQ ID NO: 2579648 - RNA, 16 nt, Human
cugcacuacuccucug

SEQ ID NO: 2579649 - RNA, 16 nt, Human
cugcacuaauuugaug

SEQ ID NO: 2579650 - RNA, 20 nt, Human
cugcacuauagccuagguga

SEQ ID NO: 2579651 - RNA, 18 nt, Human
cugcacuauagccuaggu

SEQ ID NO: 2579652 - RNA, 17 nt, Human
cugcacuauagccuagg

SEQ ID NO: 2579653 - RNA, 16 nt, Human
cugcacuauagccuag

SEQ ID NO: 2579654 - RNA, 18 nt, Human
cugcagccuccuccugac

SEQ ID NO: 2579655 - RNA, 17 nt, Human
cugcagccuccuccuga

SEQ ID NO: 2579656 - RNA, 16 nt, Human
cugcagccuccuccug

SEQ ID NO: 2579657 - RNA, 13 nt, Human
cugcagccuccuc

SEQ ID NO: 2579658 - RNA, 18 nt, Human
cugcagccuccuucuccu

SEQ ID NO: 2579659 - RNA, 20 nt, Human
cugcagccuccuccugacca

SEQ ID NO: 2579660 - RNA, 11 nt, Human
cugcagccugg

SEQ ID NO: 2579661 - RNA, 14 nt, Human
cugcagccuggagg

SEQ ID NO: 2579662 - RNA, 15 nt, Human
cugcagccuggaggc

SEQ ID NO: 2579663 - RNA, 21 nt, Human
cugcagcugaccucuguuguc

SEQ ID NO: 2579664 - RNA, 12 nt, Human
cugcagcugacc

SEQ ID NO: 2579665 - RNA, 23 nt, Human
cugcagcuguuuuaguuaaauuu

SEQ ID NO: 2579666 - RNA, 14 nt, Human
cugcagcugaccuc

SEQ ID NO: 2579667 - RNA, 13 nt, Human
cugcagcugaccu

SEQ ID NO: 2579668 - RNA, 17 nt, Human
cugcagcucacccagcc

SEQ ID NO: 2579669 - RNA, 20 nt, Human
cugcagccuggaggccgggu

SEQ ID NO: 2579670 - RNA, 18 nt, Human
cugcagccuuugccuccc

SEQ ID NO: 2579671 - RNA, 20 nt, Human
cugcagccuuugccuccccg

SEQ ID NO: 2579672 - RNA, 20 nt, Human
cugcagcggccacacuguac

SEQ ID NO: 2579673 - RNA, 23 nt, Human
cugcagccucaaccuccugggcu

SEQ ID NO: 2579674 - RNA, 19 nt, Human
cugcacuccagccugggug

SEQ ID NO: 2579675 - RNA, 24 nt, Human
cugcagccucaaccuccugggcua

SEQ ID NO: 2579676 - RNA, 20 nt, Human
cugcacuccagccugggcga

SEQ ID NO: 2579677 - RNA, 18 nt, Human
cugcacuccagccugggu

SEQ ID NO: 2579678 - RNA, 14 nt, Human
cugcacucaagcuu

SEQ ID NO: 2579679 - RNA, 14 nt, Human
cugcacuccagccu

SEQ ID NO: 2579680 - RNA, 18 nt, Human
cugcacuccagccugggc

SEQ ID NO: 2579681 - RNA, 19 nt, Human
cugcacuccagccugggcg

SEQ ID NO: 2579682 - RNA, 16 nt, Human
cugcacuccagccugg

SEQ ID NO: 2579683 - RNA, 17 nt, Human
cugcacuccagccuggg

SEQ ID NO: 2579684 - RNA, 20 nt, Human
cugcaggcagccaggccaca

SEQ ID NO: 2579685 - RNA, 19 nt, Human
cugcaggcagccaggccac

SEQ ID NO: 2579686 - RNA, 18 nt, Human
cugcaggcagccaggcca

SEQ ID NO: 2579687 - RNA, 17 nt, Human
cugcaggcagccaggcc

SEQ ID NO: 2579688 - RNA, 16 nt, Human
cugcaggcagccaggc

SEQ ID NO: 2579689 - RNA, 15 nt, Human
cugcaggcagccagg

SEQ ID NO: 2579690 - RNA, 14 nt, Human
cugcaggcagccag

SEQ ID NO: 2579691 - RNA, 13 nt, Human
cugcaggcagcca

SEQ ID NO: 2579692 - RNA, 21 nt, Human
cugcagcuuuacaugcaauuu

SEQ ID NO: 2579693 - RNA, 14 nt, Human
cugcagcuuuacau

SEQ ID NO: 2579694 - RNA, 12 nt, Human
cugcagcuuuac

SEQ ID NO: 2579695 - RNA, 17 nt, Human
cugcaggaaauggcugu

SEQ ID NO: 2579696 - RNA, 17 nt, Human
cugcagcuguuuuaguu

SEQ ID NO: 2579697 - RNA, 12 nt, Human
cugcagcuuugu

SEQ ID NO: 2579698 - RNA, 14 nt, Human
cugcaggaccugcc

SEQ ID NO: 2579699 - RNA, 15 nt, Human
cugcaggaccugccu

SEQ ID NO: 2579700 - RNA, 16 nt, Human
cugcaggaccugccug

SEQ ID NO: 2579701 - RNA, 17 nt, Human
cugcaggaccugccugu

SEQ ID NO: 2579702 - RNA, 18 nt, Human
cugcaggaccugccugua

SEQ ID NO: 2579703 - RNA, 21 nt, Human
cugcaggaccugccuguagcc

SEQ ID NO: 2579704 - RNA, 20 nt, Human
cugcaggcaccuuaguggcu

SEQ ID NO: 2579705 - RNA, 12 nt, Human
cugcaggcaccu

SEQ ID NO: 2579706 - RNA, 21 nt, Human
cugcaggauugauuaugcaga

SEQ ID NO: 2579707 - RNA, 20 nt, Human
cugcaggauugauuaugcag

SEQ ID NO: 2579708 - RNA, 22 nt, Human
cugcaggaccugccuguagccc

SEQ ID NO: 2579709 - RNA, 19 nt, Human
cugcaggacuugagaagac

SEQ ID NO: 2579710 - RNA, 23 nt, Human
cugcaggacuugagaagaccuca

SEQ ID NO: 2579711 - RNA, 16 nt, Human
cugcaggaguuaaaaa

SEQ ID NO: 2579712 - RNA, 19 nt, Human
cugcaggcccuggccuccc

SEQ ID NO: 2579713 - RNA, 18 nt, Human
cugcaggcccuggccucc

SEQ ID NO: 2579714 - RNA, 17 nt, Human
cugcaggcccuggccuc

SEQ ID NO: 2579715 - RNA, 16 nt, Human
cugcaggcccuggccu

SEQ ID NO: 2579716 - RNA, 15 nt, Human
cugcaggcccuggcc

SEQ ID NO: 2579717 - RNA, 14 nt, Human
cugcaggcccuggc

SEQ ID NO: 2579718 - RNA, 13 nt, Human
cugcaggcccugg

SEQ ID NO: 2579719 - RNA, 22 nt, Human
cugcaggccccgcuuguccagc

SEQ ID NO: 2579720 - RNA, 23 nt, Human
cugcaggccccgcuuguccagcg

SEQ ID NO: 2579721 - RNA, 15 nt, Human
cugcaggcagacacg

SEQ ID NO: 2579722 - RNA, 14 nt, Human
cugcaggcagacac

SEQ ID NO: 2579723 - RNA, 13 nt, Human
cugcaggcagaca

SEQ ID NO: 2579724 - RNA, 12 nt, Human
cugcaggcagac

SEQ ID NO: 2579725 - RNA, 17 nt, Human
cugcaggcagacacgga

SEQ ID NO: 2579726 - RNA, 11 nt, Human
cugcaggcagg

SEQ ID NO: 2579727 - RNA, 12 nt, Human
cugcaggcaggg

SEQ ID NO: 2579728 - RNA, 15 nt, Human
cugcaggccaagagc

SEQ ID NO: 2579729 - RNA, 19 nt, Human
cugcaggccaagagcagag

SEQ ID NO: 2579730 - RNA, 21 nt, Human
cugcaggccaagagcagaggc

SEQ ID NO: 2579731 - RNA, 17 nt, Human
cugcaggcaucacagcu

SEQ ID NO: 2579732 - RNA, 11 nt, Human
cugcaggcccc

SEQ ID NO: 2579733 - RNA, 14 nt, Human
cugcaggccccgcu

SEQ ID NO: 2579734 - RNA, 20 nt, Human
cugcaggccccgcuugucca

SEQ ID NO: 2579735 - RNA, 18 nt, Human
cugcaggccaggccagcu

SEQ ID NO: 2579736 - RNA, 23 nt, Human
cugcaggccaggccagcugccuc

SEQ ID NO: 2579737 - RNA, 22 nt, Human
cugcaggccaagagcagaggca

SEQ ID NO: 2579738 - RNA, 23 nt, Human
cugcaggccaagagcagaggcag

SEQ ID NO: 2579739 - RNA, 24 nt, Human
cugcaggccaagagcagaggcagc

SEQ ID NO: 2579740 - RNA, 17 nt, Human
cugcaggccaggccagc

SEQ ID NO: 2579741 - RNA, 19 nt, Human
cuggugcuauaggcuggag

SEQ ID NO: 2579742 - RNA, 21 nt, Human
cuggugcuauaggcuggagaa

SEQ ID NO: 2579743 - RNA, 20 nt, Human
cuggugcuauaggcuggaga

SEQ ID NO: 2579744 - RNA, 22 nt, Human
cuggugcuauaggcuggagaag

SEQ ID NO: 2579745 - RNA, 23 nt, Human
cuggugcccuaaccucugaguca

SEQ ID NO: 2579746 - RNA, 21 nt, Human
cuggugccucaccccuugcca

SEQ ID NO: 2579747 - RNA, 12 nt, Human
cuggugccucac

SEQ ID NO: 2579748 - RNA, 17 nt, Human
cuggugccagccuuccu

SEQ ID NO: 2579749 - RNA, 14 nt, Human
cuggugccagccuu

SEQ ID NO: 2579750 - RNA, 13 nt, Human
cuggugccagccu

SEQ ID NO: 2579751 - RNA, 20 nt, Human
cuggugcccuaaccucugag

SEQ ID NO: 2579752 - RNA, 21 nt, Human
cuggugccagccuuccucugc

SEQ ID NO: 2579753 - RNA, 14 nt, Human
cuggugcccggaga

SEQ ID NO: 2579754 - RNA, 15 nt, Human
cuggguguggcgcag

SEQ ID NO: 2579755 - RNA, 12 nt, Human
cuggugcagugg

SEQ ID NO: 2579756 - RNA, 15 nt, Human
cuggugccaauuuca

SEQ ID NO: 2579757 - RNA, 16 nt, Human
cuggugccaauuucaa

SEQ ID NO: 2579758 - RNA, 18 nt, Human
cuggugccaauuucaagu

SEQ ID NO: 2579759 - RNA, 20 nt, Human
cuggugccaauuucaaguuc

SEQ ID NO: 2579760 - RNA, 14 nt, Human
cuggugcauuacag

SEQ ID NO: 2579761 - RNA, 15 nt, Human
cuggugcauuacaga

SEQ ID NO: 2579762 - RNA, 16 nt, Human
cuggugcauuacagag

SEQ ID NO: 2579763 - RNA, 17 nt, Human
cuggugcauuacagaga

SEQ ID NO: 2579764 - RNA, 18 nt, Human
cuggugcauuacagagag

SEQ ID NO: 2579765 - RNA, 19 nt, Human
cuggugcauuacagagagg

SEQ ID NO: 2579766 - RNA, 14 nt, Human
cuggguguggcgca

SEQ ID NO: 2579767 - RNA, 19 nt, Human
cuggguggucugcaggcag

SEQ ID NO: 2579768 - RNA, 21 nt, Human
cuggguggucugcaggcaggg

SEQ ID NO: 2579769 - RNA, 21 nt, Human
cuggguggcaccagcagccug

SEQ ID NO: 2579770 - RNA, 16 nt, Human
cugggugguacccucu

SEQ ID NO: 2579771 - RNA, 19 nt, Human
cugggugguacccucugga

SEQ ID NO: 2579772 - RNA, 15 nt, Human
cugggugcuggcugc

SEQ ID NO: 2579773 - RNA, 13 nt, Human
cuggguggucugc

SEQ ID NO: 2579774 - RNA, 20 nt, Human
cugggcagcuaccauuuccc

SEQ ID NO: 2579775 - RNA, 11 nt, Human
cugggcagcua

SEQ ID NO: 2579776 - RNA, 17 nt, Human
cugggcagccaggcugc

SEQ ID NO: 2579777 - RNA, 15 nt, Human
cugggcagccaggcu

SEQ ID NO: 2579778 - RNA, 16 nt, Human
cugggcagccaggcug

SEQ ID NO: 2579779 - RNA, 18 nt, Human
cugggcagccaggcugcc

SEQ ID NO: 2579780 - RNA, 20 nt, Human
cugggcagaggaaagcaaag

SEQ ID NO: 2579781 - RNA, 17 nt, Human
cugggcagcauagcaag

SEQ ID NO: 2579782 - RNA, 18 nt, Human
cugggcagcauagcaaga

SEQ ID NO: 2579783 - RNA, 16 nt, Human
cugggcagaggaaagc

SEQ ID NO: 2579784 - RNA, 13 nt, Human
cugggcagaggaa

SEQ ID NO: 2579785 - RNA, 12 nt, Human
cugggcagagga

SEQ ID NO: 2579786 - RNA, 18 nt, Human
cugggcaucuguucuggu

SEQ ID NO: 2579787 - RNA, 17 nt, Human
cugggcaucuguucugg

SEQ ID NO: 2579788 - RNA, 15 nt, Human
cugggcaucuguucu

SEQ ID NO: 2579789 - RNA, 14 nt, Human
cugggcaucuguuc

SEQ ID NO: 2579790 - RNA, 15 nt, Human
cugggcauccucagg

SEQ ID NO: 2579791 - RNA, 23 nt, Human
cugggcauagaugcaggugagcc

SEQ ID NO: 2579792 - RNA, 16 nt, Human
cugggcauagaugcag

SEQ ID NO: 2579793 - RNA, 17 nt, Human
cugggcaggacucagcu

SEQ ID NO: 2579794 - RNA, 20 nt, Human
cugggcagguuggugggggc

SEQ ID NO: 2579795 - RNA, 21 nt, Human
cugggcagcuguuagagucca

SEQ ID NO: 2579796 - RNA, 12 nt, Human
cugggcauugcu

SEQ ID NO: 2579797 - RNA, 13 nt, Human
cugggcauugcuu

SEQ ID NO: 2579798 - RNA, 20 nt, Human
cugggccauucuccacagca

SEQ ID NO: 2579799 - RNA, 21 nt, Human
cugggccauucuccacagcaa

SEQ ID NO: 2579800 - RNA, 19 nt, Human
cugggccauucuccacagc

SEQ ID NO: 2579801 - RNA, 17 nt, Human
cugggcccaacccuguc

SEQ ID NO: 2579802 - RNA, 14 nt, Human
cugggcccaacccu

SEQ ID NO: 2579803 - RNA, 22 nt, Human
cugggccauucuccacagcaac

SEQ ID NO: 2579804 - RNA, 19 nt, Human
cugggcccaacccugucug

SEQ ID NO: 2579805 - RNA, 18 nt, Human
cugggcccaacccugucu

SEQ ID NO: 2579806 - RNA, 23 nt, Human
cuggggacggggggccccaguca

SEQ ID NO: 2579807 - RNA, 22 nt, Human
cuggggacggggggccccaguc

SEQ ID NO: 2579808 - RNA, 19 nt, Human
cuggggacggggggcccca

SEQ ID NO: 2579809 - RNA, 17 nt, Human
cuggggacggggggccc

SEQ ID NO: 2579810 - RNA, 22 nt, Human
cuggggaccugguacccuccug

SEQ ID NO: 2579811 - RNA, 20 nt, Human
cuggggaccugguacccucc

SEQ ID NO: 2579812 - RNA, 14 nt, Human
cugggcccagaagg

SEQ ID NO: 2579813 - RNA, 23 nt, Human
cugggcccagaagguugugauga

SEQ ID NO: 2579814 - RNA, 16 nt, Human
cuggggacagcaaggg

SEQ ID NO: 2579815 - RNA, 13 nt, Human
cuggggagaaagu

SEQ ID NO: 2579816 - RNA, 20 nt, Human
cuggggccucggagccucau

SEQ ID NO: 2579817 - RNA, 18 nt, Human
cuggggccuggaccugcc

SEQ ID NO: 2579818 - RNA, 19 nt, Human
cuggggccuggaccugccu

SEQ ID NO: 2579819 - RNA, 17 nt, Human
cuggggccuggaccugc

SEQ ID NO: 2579820 - RNA, 16 nt, Human
cuggggccuggaccug

SEQ ID NO: 2579821 - RNA, 23 nt, Human
cuggggccucggagccucauccg

SEQ ID NO: 2579822 - RNA, 14 nt, Human
cuggggccuggacc

SEQ ID NO: 2579823 - RNA, 12 nt, Human
cuggggccucuu

SEQ ID NO: 2579824 - RNA, 18 nt, Human
cuggguggcaccagcagc

SEQ ID NO: 2579825 - RNA, 20 nt, Human
cuggguggcaccagcagccu

SEQ ID NO: 2579826 - RNA, 19 nt, Human
cugggugcgaccccaucug

SEQ ID NO: 2579827 - RNA, 21 nt, Human
cugggugcccaagcucagaag

SEQ ID NO: 2579828 - RNA, 20 nt, Human
cugggugcccaagcucagaa

SEQ ID NO: 2579829 - RNA, 20 nt, Human
cugggugcaugaucuugagc

SEQ ID NO: 2579830 - RNA, 22 nt, Human
cugggugcgaccccaucugccc

SEQ ID NO: 2579831 - RNA, 21 nt, Human
cugggugcgaccccaucugcc

SEQ ID NO: 2579832 - RNA, 23 nt, Human
cugggugcgaccccaucugccca

SEQ ID NO: 2579833 - RNA, 14 nt, Human
cugggugcucccua

SEQ ID NO: 2579834 - RNA, 23 nt, Human
cuggguggacauggccccuguga

SEQ ID NO: 2579835 - RNA, 15 nt, Human
cugggugcucccuac

SEQ ID NO: 2579836 - RNA, 18 nt, Human
cuggggcgggccccucau

SEQ ID NO: 2579837 - RNA, 15 nt, Human
cuggggcgggccccu

SEQ ID NO: 2579838 - RNA, 16 nt, Human
cuggggcguggggagg

SEQ ID NO: 2579839 - RNA, 16 nt, Human
cugggucuuucauggg

SEQ ID NO: 2579840 - RNA, 15 nt, Human
cuggggcguggggag

SEQ ID NO: 2579841 - RNA, 14 nt, Human
cuggggcgugggga

SEQ ID NO: 2579842 - RNA, 22 nt, Human
cugggugacagagcaagacucu

SEQ ID NO: 2579843 - RNA, 13 nt, Human
cugggugacagag

SEQ ID NO: 2579844 - RNA, 21 nt, Human
cugggugccccguccacggcu

SEQ ID NO: 2579845 - RNA, 14 nt, Human
cugggugacauuug

SEQ ID NO: 2579846 - RNA, 23 nt, Human
cugggugacagagcaagacucug

SEQ ID NO: 2579847 - RNA, 17 nt, Human
cugggugacagagugag

SEQ ID NO: 2579848 - RNA, 18 nt, Human
cugggagaaauugacaga

SEQ ID NO: 2579849 - RNA, 14 nt, Human
cuggcccugccuuc

SEQ ID NO: 2579850 - RNA, 12 nt, Human
cuggcccugccu

SEQ ID NO: 2579851 - RNA, 12 nt, Human
cuggcccuuccu

SEQ ID NO: 2579852 - RNA, 13 nt, Human
cuggcccugugcc

SEQ ID NO: 2579853 - RNA, 12 nt, Human
cuggcccuggcu

SEQ ID NO: 2579854 - RNA, 17 nt, Human
cuggccgaggguccugg

SEQ ID NO: 2579855 - RNA, 21 nt, Human
cuggccgaggguccuggcucc

SEQ ID NO: 2579856 - RNA, 23 nt, Human
cuggcuagaggccagccccaccc

SEQ ID NO: 2579857 - RNA, 19 nt, Human
cuggccgaggguccuggcu

SEQ ID NO: 2579858 - RNA, 20 nt, Human
cuggccgaggguccuggcuc

SEQ ID NO: 2579859 - RNA, 13 nt, Human
cuggcuaugcauu

SEQ ID NO: 2579860 - RNA, 14 nt, Human
cuggcuaugcauuu

SEQ ID NO: 2579861 - RNA, 22 nt, Human
cuggcuagaguccucacuccca

SEQ ID NO: 2579862 - RNA, 20 nt, Human
cuggcuagaguccucacucc

SEQ ID NO: 2579863 - RNA, 21 nt, Human
cuggcuagaguccucacuccc

SEQ ID NO: 2579864 - RNA, 16 nt, Human
cuggcuagaguccuca

SEQ ID NO: 2579865 - RNA, 17 nt, Human
cuggcuagaguccucac

SEQ ID NO: 2579866 - RNA, 18 nt, Human
cuggcuagaguccucacu

SEQ ID NO: 2579867 - RNA, 19 nt, Human
cuggcuagaguccucacuc

SEQ ID NO: 2579868 - RNA, 15 nt, Human
cuggcuaugcauuug

SEQ ID NO: 2579869 - RNA, 16 nt, Human
cuggcuaugcauuuga

SEQ ID NO: 2579870 - RNA, 22 nt, Human
cuggcuaugcauuugaaaauuu

SEQ ID NO: 2579871 - RNA, 22 nt, Human
cugggagaaccaaaaagaggcu

SEQ ID NO: 2579872 - RNA, 17 nt, Human
cugggagaaaugaaaaa

SEQ ID NO: 2579873 - RNA, 18 nt, Human
cugggacuugcaaaaagg

SEQ ID NO: 2579874 - RNA, 21 nt, Human
cugggacguggcucagccagc

SEQ ID NO: 2579875 - RNA, 23 nt, Human
cugggacguggcucagccagcac

SEQ ID NO: 2579876 - RNA, 16 nt, Human
cugggagaaaugaaaa

SEQ ID NO: 2579877 - RNA, 16 nt, Human
cugggacuacaggcac

SEQ ID NO: 2579878 - RNA, 15 nt, Human
cugggacuacaggca

SEQ ID NO: 2579879 - RNA, 13 nt, Human
cugggacuacagg

SEQ ID NO: 2579880 - RNA, 18 nt, Human
cugggacguggcucagcc

SEQ ID NO: 2579881 - RNA, 16 nt, Human
cugggaccacgugaga

SEQ ID NO: 2579882 - RNA, 20 nt, Human
cugggacguggcucagccag

SEQ ID NO: 2579883 - RNA, 14 nt, Human
cugggaccacguga

SEQ ID NO: 2579884 - RNA, 22 nt, Human
cugggaccacagguucaugcca

SEQ ID NO: 2579885 - RNA, 22 nt, Human
cugggacaugggaaaggggaag

SEQ ID NO: 2579886 - RNA, 18 nt, Human
cugggacaugggaaaggg

SEQ ID NO: 2579887 - RNA, 14 nt, Human
cugggacaugggaa

SEQ ID NO: 2579888 - RNA, 12 nt, Human
cuggcuccucaa

SEQ ID NO: 2579889 - RNA, 20 nt, Human
cuggcuccguccaggagccu

SEQ ID NO: 2579890 - RNA, 23 nt, Human
cuggcucccucuuggucuuccca

SEQ ID NO: 2579891 - RNA, 24 nt, Human
cuggcucccucuuggucuucccag

SEQ ID NO: 2579892 - RNA, 14 nt, Human
cuggcuccugaggg

SEQ ID NO: 2579893 - RNA, 15 nt, Human
cuggcuccugagggg

SEQ ID NO: 2579894 - RNA, 16 nt, Human
cuggcuccugaggggc

SEQ ID NO: 2579895 - RNA, 17 nt, Human
cuggcuccugaggggca

SEQ ID NO: 2579896 - RNA, 22 nt, Human
cuggcucccucuuggucuuccc

SEQ ID NO: 2579897 - RNA, 15 nt, Human
cugcugucucagccu

SEQ ID NO: 2579898 - RNA, 14 nt, Human
cugcugucucagcc

SEQ ID NO: 2579899 - RNA, 20 nt, Human
cugcugucuaaccugugacc

SEQ ID NO: 2579900 - RNA, 20 nt, Human
cugcuuaacuucacauauug

SEQ ID NO: 2579901 - RNA, 14 nt, Human
cugcugugugccuu

SEQ ID NO: 2579902 - RNA, 22 nt, Human
cugcugugauuccacuacaccu

SEQ ID NO: 2579903 - RNA, 16 nt, Human
cugcugugauuccacu

SEQ ID NO: 2579904 - RNA, 19 nt, Human
cugcugugcugugcccaag

SEQ ID NO: 2579905 - RNA, 23 nt, Human
cugcugugaauuuguguaaggau

SEQ ID NO: 2579906 - RNA, 16 nt, Human
cugcugaaggcucauu

SEQ ID NO: 2579907 - RNA, 14 nt, Human
cugcucacauaucu

SEQ ID NO: 2579908 - RNA, 19 nt, Human
cugcucacuaccuccucag

SEQ ID NO: 2579909 - RNA, 16 nt, Human
cugcucacuaccuccu

SEQ ID NO: 2579910 - RNA, 12 nt, Human
cugcugaaggcu

SEQ ID NO: 2579911 - RNA, 19 nt, Human
cugcucacauaucugucau

SEQ ID NO: 2579912 - RNA, 16 nt, Human
cugcucacauaucugu

SEQ ID NO: 2579913 - RNA, 14 nt, Human
cugcugaaggcucg

SEQ ID NO: 2579914 - RNA, 13 nt, Human
cugcugaaggcuc

SEQ ID NO: 2579915 - RNA, 15 nt, Human
cugcugaaggcucga

SEQ ID NO: 2579916 - RNA, 12 nt, Human
cugcugacagug

SEQ ID NO: 2579917 - RNA, 21 nt, Human
cugcucacuaccuccucaggg

SEQ ID NO: 2579918 - RNA, 20 nt, Human
cugcucacuaccuccucagg

SEQ ID NO: 2579919 - RNA, 11 nt, Human
cugcugacagu

SEQ ID NO: 2579920 - RNA, 19 nt, Human
cugcugagucccaggcuga

SEQ ID NO: 2579921 - RNA, 23 nt, Human
cugcugagucccaggcugagccu

SEQ ID NO: 2579922 - RNA, 15 nt, Human
cugcugacaguguug

SEQ ID NO: 2579923 - RNA, 13 nt, Human
cugcugacagugu

SEQ ID NO: 2579924 - RNA, 20 nt, Human
cuggaugauggucuucagcc

SEQ ID NO: 2579925 - RNA, 22 nt, Human
cuggaugcagccucacaguccu

SEQ ID NO: 2579926 - RNA, 23 nt, Human
cuggaugaagauucuccugugcu

SEQ ID NO: 2579927 - RNA, 13 nt, Human
cuggaugaagauu

SEQ ID NO: 2579928 - RNA, 13 nt, Human
cuggaugaaauuu

SEQ ID NO: 2579929 - RNA, 22 nt, Human
cuggaugaaauaacuccuucuu

SEQ ID NO: 2579930 - RNA, 13 nt, Human
cuggaugagacuu

SEQ ID NO: 2579931 - RNA, 14 nt, Human
cuggaugcauuucu

SEQ ID NO: 2579932 - RNA, 18 nt, Human
cuggauggagcccaggcg

SEQ ID NO: 2579933 - RNA, 17 nt, Human
cuggauggagcccaggc

SEQ ID NO: 2579934 - RNA, 16 nt, Human
cuggauggagcccagg

SEQ ID NO: 2579935 - RNA, 15 nt, Human
cuggauggagcccag

SEQ ID NO: 2579936 - RNA, 11 nt, Human
cuggauggagc

SEQ ID NO: 2579937 - RNA, 16 nt, Human
cuggaugcuccuucca

SEQ ID NO: 2579938 - RNA, 23 nt, Human
cuggauggagcccaggcgggagc

SEQ ID NO: 2579939 - RNA, 17 nt, Human
cuggaguucugguuccu

SEQ ID NO: 2579940 - RNA, 16 nt, Human
cuggaguucugguucc

SEQ ID NO: 2579941 - RNA, 15 nt, Human
cuggaguugaucugg

SEQ ID NO: 2579942 - RNA, 16 nt, Human
cuggaguugaucugga

SEQ ID NO: 2579943 - RNA, 17 nt, Human
cuggaguugaucuggaa

SEQ ID NO: 2579944 - RNA, 15 nt, Human
cuggaucuccccacu

SEQ ID NO: 2579945 - RNA, 14 nt, Human
cuggaucugugagg

SEQ ID NO: 2579946 - RNA, 23 nt, Human
cuggaucuccucaaguccccaag

SEQ ID NO: 2579947 - RNA, 20 nt, Human
cuggaucugggacccuuucc

SEQ ID NO: 2579948 - RNA, 21 nt, Human
cuggaucugggacccuuuccu

SEQ ID NO: 2579949 - RNA, 21 nt, Human
cuggagacagccccagagcag

SEQ ID NO: 2579950 - RNA, 20 nt, Human
cuggagacagccccagagca

SEQ ID NO: 2579951 - RNA, 19 nt, Human
cuggagacagccccagagc

SEQ ID NO: 2579952 - RNA, 17 nt, Human
cuggagacagccccaga

SEQ ID NO: 2579953 - RNA, 16 nt, Human
cuggagacagccccag

SEQ ID NO: 2579954 - RNA, 15 nt, Human
cuggagacagcccca

SEQ ID NO: 2579955 - RNA, 14 nt, Human
cuggagacagcccc

SEQ ID NO: 2579956 - RNA, 13 nt, Human
cuggagacagccc

SEQ ID NO: 2579957 - RNA, 15 nt, Human
cuggaguucugguuc

SEQ ID NO: 2579958 - RNA, 13 nt, Human
cuggagaagcuga

SEQ ID NO: 2579959 - RNA, 22 nt, Human
cuggagaagcucccaggaacaa

SEQ ID NO: 2579960 - RNA, 20 nt, Human
cuggagaagcucccaggaac

SEQ ID NO: 2579961 - RNA, 19 nt, Human
cuggagaagcucccaggaa

SEQ ID NO: 2579962 - RNA, 15 nt, Human
cuggagaagcuccca

SEQ ID NO: 2579963 - RNA, 19 nt, Human
cuggagaagcucacccaau

SEQ ID NO: 2579964 - RNA, 18 nt, Human
cuggagaagcucacccaa

SEQ ID NO: 2579965 - RNA, 21 nt, Human
cuggagaagcagugagccgca

SEQ ID NO: 2579966 - RNA, 17 nt, Human
cuggagaagcugaugcu

SEQ ID NO: 2579967 - RNA, 15 nt, Human
cuggagaagcugaug

SEQ ID NO: 2579968 - RNA, 19 nt, Human
cuggagaagcugaugcuuu

SEQ ID NO: 2579969 - RNA, 22 nt, Human
cuggagaagucuuagacuugaa

SEQ ID NO: 2579970 - RNA, 11 nt, Human
cuggagacagc

SEQ ID NO: 2579971 - RNA, 23 nt, Human
cuggacugugugcucaggagccc

SEQ ID NO: 2579972 - RNA, 23 nt, Human
cugcuuaucaauaaaccuguuug

SEQ ID NO: 2579973 - RNA, 13 nt, Human
cuggacuugagcu

SEQ ID NO: 2579974 - RNA, 16 nt, Human
cuggagaagagaggag

SEQ ID NO: 2579975 - RNA, 18 nt, Human
cugcuuaggagagaccga

SEQ ID NO: 2579976 - RNA, 15 nt, Human
cuggacuugagcuug

SEQ ID NO: 2579977 - RNA, 19 nt, Human
cuggagaagagaggagagg

SEQ ID NO: 2579978 - RNA, 18 nt, Human
cuggagaagagaggagag

SEQ ID NO: 2579979 - RNA, 20 nt, Human
cuggagaagagaggagagga

SEQ ID NO: 2579980 - RNA, 14 nt, Human
cuggagaagcagug

SEQ ID NO: 2579981 - RNA, 22 nt, Human
cuggacugugugcucaggagcc

SEQ ID NO: 2579982 - RNA, 19 nt, Human
cuggacugugugcucagga

SEQ ID NO: 2579983 - RNA, 23 nt, Human
cugcuuaccagauaaugcuacuu

SEQ ID NO: 2579984 - RNA, 22 nt, Human
cugcuuacaauucccugcuguc

SEQ ID NO: 2579985 - RNA, 20 nt, Human
cugcuuagaauccaaacuug

SEQ ID NO: 2579986 - RNA, 16 nt, Human
cugcuuaggagagacc

SEQ ID NO: 2579987 - RNA, 15 nt, Human
cugcuuaggagagac

SEQ ID NO: 2579988 - RNA, 20 nt, Human
cugcuuacaauucccugcug

SEQ ID NO: 2579989 - RNA, 18 nt, Human
cugcuuacaauucccugc

SEQ ID NO: 2579990 - RNA, 14 nt, Human
cugcuuaaugaaaa

SEQ ID NO: 2579991 - RNA, 14 nt, Human
cuguugcugccuca

SEQ ID NO: 2579992 - RNA, 15 nt, Human
cuguugcugccucau

SEQ ID NO: 2579993 - RNA, 16 nt, Human
cuguugcugccucaug

SEQ ID NO: 2579994 - RNA, 17 nt, Human
cuguugcugccucaugc

SEQ ID NO: 2579995 - RNA, 15 nt, Human
cuguugcuuacaauu

SEQ ID NO: 2579996 - RNA, 19 nt, Human
cuuaccucggugccuuccu

SEQ ID NO: 2579997 - RNA, 21 nt, Human
cuuaccucggugccuuccucu

SEQ ID NO: 2579998 - RNA, 19 nt, Human
cuuagauguauauauuucc

SEQ ID NO: 2579999 - RNA, 13 nt, Human
cuuaccugccagg

SEQ ID NO: 2580000 - RNA, 17 nt, Human
cuuaccuccugcccagg

SEQ ID NO: 2580001 - RNA, 18 nt, Human
cuuaccuccugcccagga

SEQ ID NO: 2580002 - RNA, 19 nt, Human
cuuaccuccugcccaggag

SEQ ID NO: 2580003 - RNA, 20 nt, Human
cuuaccuccugcccaggaga

SEQ ID NO: 2580004 - RNA, 15 nt, Human
cuuaccucuuccgga

SEQ ID NO: 2580005 - RNA, 20 nt, Human
cuuagauuagcucuggacca

SEQ ID NO: 2580006 - RNA, 18 nt, Human
cuuagauuagcucuggac

SEQ ID NO: 2580007 - RNA, 17 nt, Human
cuuagauuagcucugga

SEQ ID NO: 2580008 - RNA, 16 nt, Human
cuuagauuagcucugg

SEQ ID NO: 2580009 - RNA, 21 nt, Human
cuuagauuagcucuggaccag

SEQ ID NO: 2580010 - RNA, 14 nt, Human
cuuagauguucuaa

SEQ ID NO: 2580011 - RNA, 18 nt, Human
cuuagauguucuaagucu

SEQ ID NO: 2580012 - RNA, 20 nt, Human
cuuagauguuccaguaaucu

SEQ ID NO: 2580013 - RNA, 13 nt, Human
cuuaccucuuccg

SEQ ID NO: 2580014 - RNA, 21 nt, Human
cuuagcacuaccacuccugcc

SEQ ID NO: 2580015 - RNA, 14 nt, Human
cuuagcagaugcug

SEQ ID NO: 2580016 - RNA, 16 nt, Human
cuuagcagcuaucucu

SEQ ID NO: 2580017 - RNA, 18 nt, Human
cuuaccuaccacaugcca

SEQ ID NO: 2580018 - RNA, 22 nt, Human
cuuaccuaaacagauauaaaug

SEQ ID NO: 2580019 - RNA, 20 nt, Human
cuuaccgugagcgacaaaga

SEQ ID NO: 2580020 - RNA, 19 nt, Human
cuuaccuaaacagauauaa

SEQ ID NO: 2580021 - RNA, 18 nt, Human
cuuaccuaaacagauaua

SEQ ID NO: 2580022 - RNA, 17 nt, Human
cuuacccucaccuguca

SEQ ID NO: 2580023 - RNA, 16 nt, Human
cuuacagccucugacu

SEQ ID NO: 2580024 - RNA, 20 nt, Human
cuuaccccuuagccucccug

SEQ ID NO: 2580025 - RNA, 15 nt, Human
cuuacccuuagggag

SEQ ID NO: 2580026 - RNA, 13 nt, Human
cuuaccucggugc

SEQ ID NO: 2580027 - RNA, 13 nt, Human
cuuaccuccugcc

SEQ ID NO: 2580028 - RNA, 21 nt, Human
cuuaccuaaacagauauaaau

SEQ ID NO: 2580029 - RNA, 14 nt, Human
cuuaccuccugccc

SEQ ID NO: 2580030 - RNA, 15 nt, Human
cuuaccuccugccca

SEQ ID NO: 2580031 - RNA, 16 nt, Human
cuuaccuccugcccag

SEQ ID NO: 2580032 - RNA, 18 nt, Human
cuuacccucauguucuua

SEQ ID NO: 2580033 - RNA, 19 nt, Human
cuuacccucauguucuuaa

SEQ ID NO: 2580034 - RNA, 17 nt, Human
cuuacccucauguucuu

SEQ ID NO: 2580035 - RNA, 14 nt, Human
cuuacagcugggug

SEQ ID NO: 2580036 - RNA, 23 nt, Human
cuuacccaucugcaccccccugg

SEQ ID NO: 2580037 - RNA, 15 nt, Human
cuuacagccucugac

SEQ ID NO: 2580038 - RNA, 20 nt, Human
cuguugggccaggagccucc

SEQ ID NO: 2580039 - RNA, 17 nt, Human
cuguugggccaggagcc

SEQ ID NO: 2580040 - RNA, 16 nt, Human
cuguugggccaggagc

SEQ ID NO: 2580041 - RNA, 22 nt, Human
cuguuggacccgcucuggacca

SEQ ID NO: 2580042 - RNA, 19 nt, Human
cuguuggacccgcucugga

SEQ ID NO: 2580043 - RNA, 18 nt, Human
cuguuggacccgcucugg

SEQ ID NO: 2580044 - RNA, 16 nt, Human
cuguugcuuacaauuu

SEQ ID NO: 2580045 - RNA, 19 nt, Human
cuguuggauuuguuuaaaa

SEQ ID NO: 2580046 - RNA, 20 nt, Human
cuguuggacccgcucuggac

SEQ ID NO: 2580047 - RNA, 22 nt, Human
cuguuggauuuguuuaaaagga

SEQ ID NO: 2580048 - RNA, 18 nt, Human
cuguugggguggguauaa

SEQ ID NO: 2580049 - RNA, 17 nt, Human
cuguugggguggguaua

SEQ ID NO: 2580050 - RNA, 20 nt, Human
cuuaaaauauuccugcauuu

SEQ ID NO: 2580051 - RNA, 18 nt, Human
cuuaaaauauuccugcau

SEQ ID NO: 2580052 - RNA, 24 nt, Human
cuuaaaauguucacuuuugacaaa

SEQ ID NO: 2580053 - RNA, 14 nt, Human
cuuaaaauauuuua

SEQ ID NO: 2580054 - RNA, 17 nt, Human
cuuaaaauauauuucag

SEQ ID NO: 2580055 - RNA, 13 nt, Human
cuuaaaauauuuu

SEQ ID NO: 2580056 - RNA, 16 nt, Human
cuuaaagauuuaucaa

SEQ ID NO: 2580057 - RNA, 20 nt, Human
cuuaaagauuuaucaaauca

SEQ ID NO: 2580058 - RNA, 19 nt, Human
cuuaaagauuuaucaaauc

SEQ ID NO: 2580059 - RNA, 13 nt, Human
cuuaaacaaaaau

SEQ ID NO: 2580060 - RNA, 19 nt, Human
cuuaaacaaaaauuaaaau

SEQ ID NO: 2580061 - RNA, 20 nt, Human
cuuaaaggcaccaucuaaua

SEQ ID NO: 2580062 - RNA, 23 nt, Human
cuuaaaggcugugguaguacucc

SEQ ID NO: 2580063 - RNA, 18 nt, Human
cuuaaagcugccuguagu

SEQ ID NO: 2580064 - RNA, 23 nt, Human
cuuaaagcugccuguaguuagga

SEQ ID NO: 2580065 - RNA, 14 nt, Human
cuuaaagucaguaa

SEQ ID NO: 2580066 - RNA, 21 nt, Human
cuuaaaggugucuuccuccca

SEQ ID NO: 2580067 - RNA, 16 nt, Human
cuuaaaggugucuucc

SEQ ID NO: 2580068 - RNA, 18 nt, Human
cuuaaaggugucuuccuc

SEQ ID NO: 2580069 - RNA, 21 nt, Human
cuuaaaggcugugguaguacu

SEQ ID NO: 2580070 - RNA, 13 nt, Human
cuuacacaauggu

SEQ ID NO: 2580071 - RNA, 19 nt, Human
cuuacacaucucagacccu

SEQ ID NO: 2580072 - RNA, 13 nt, Human
cuuacacacaaaa

SEQ ID NO: 2580073 - RNA, 11 nt, Human
cuuacacccac

SEQ ID NO: 2580074 - RNA, 17 nt, Human
cuuacacuuacuguugu

SEQ ID NO: 2580075 - RNA, 20 nt, Human
cuuacacccacaguggaaag

SEQ ID NO: 2580076 - RNA, 14 nt, Human
cuguucagcuccag

SEQ ID NO: 2580077 - RNA, 16 nt, Human
cugugucuguguuuua

SEQ ID NO: 2580078 - RNA, 13 nt, Human
cuguucagcucca

SEQ ID NO: 2580079 - RNA, 22 nt, Human
cuguucagcuacucccacuccc

SEQ ID NO: 2580080 - RNA, 19 nt, Human
cugugucuugcaauggcag

SEQ ID NO: 2580081 - RNA, 16 nt, Human
cugugucuugcaaugg

SEQ ID NO: 2580082 - RNA, 15 nt, Human
cuguucacucuacuu

SEQ ID NO: 2580083 - RNA, 17 nt, Human
cuguucacuuuuccucc

SEQ ID NO: 2580084 - RNA, 18 nt, Human
cuguucacuuuuccuccc

SEQ ID NO: 2580085 - RNA, 16 nt, Human
cuguucacuuuuccuc

SEQ ID NO: 2580086 - RNA, 13 nt, Human
cugugucuguguu

SEQ ID NO: 2580087 - RNA, 23 nt, Human
cugugacauggugccugagaggc

SEQ ID NO: 2580088 - RNA, 22 nt, Human
cugugacauggugccugagagg

SEQ ID NO: 2580089 - RNA, 21 nt, Human
cugugacauggugccugagag

SEQ ID NO: 2580090 - RNA, 20 nt, Human
cugugacauggugccugaga

SEQ ID NO: 2580091 - RNA, 19 nt, Human
cugugacauggugccugag

SEQ ID NO: 2580092 - RNA, 18 nt, Human
cugugacauggugccuga

SEQ ID NO: 2580093 - RNA, 17 nt, Human
cugugacauggugccug

SEQ ID NO: 2580094 - RNA, 16 nt, Human
cugugacauggugccu

SEQ ID NO: 2580095 - RNA, 13 nt, Human
cugugacauguaa

SEQ ID NO: 2580096 - RNA, 24 nt, Human
cugugacauggugccugagaggca

SEQ ID NO: 2580097 - RNA, 15 nt, Human
cugugaccaaugucu

SEQ ID NO: 2580098 - RNA, 16 nt, Human
cugugaccaaugucuu

SEQ ID NO: 2580099 - RNA, 17 nt, Human
cugugaccaaugucuug

SEQ ID NO: 2580100 - RNA, 14 nt, Human
cugugaccagcacu

SEQ ID NO: 2580101 - RNA, 18 nt, Human
cugugaccaggaaggaag

SEQ ID NO: 2580102 - RNA, 23 nt, Human
cugugaccaggaaggaagucagc

SEQ ID NO: 2580103 - RNA, 16 nt, Human
cugugcgugaaacaca

SEQ ID NO: 2580104 - RNA, 14 nt, Human
cugugcgugaaaca

SEQ ID NO: 2580105 - RNA, 17 nt, Human
cugugcguuacuaauug

SEQ ID NO: 2580106 - RNA, 17 nt, Human
cugugcuacuuugccuu

SEQ ID NO: 2580107 - RNA, 16 nt, Human
cugugcuacuuugccu

SEQ ID NO: 2580108 - RNA, 14 nt, Human
cugugcuacuuugc

SEQ ID NO: 2580109 - RNA, 18 nt, Human
cugugcuaauaacagugc

SEQ ID NO: 2580110 - RNA, 21 nt, Human
cugugcuagggaaacuucccg

SEQ ID NO: 2580111 - RNA, 18 nt, Human
cugugcuacuuugccuuu

SEQ ID NO: 2580112 - RNA, 13 nt, Human
cugugcuaugaau

SEQ ID NO: 2580113 - RNA, 12 nt, Human
cugugcucagga

SEQ ID NO: 2580114 - RNA, 15 nt, Human
cugugcucaggacuc

SEQ ID NO: 2580115 - RNA, 16 nt, Human
cugugcucaggacuca

SEQ ID NO: 2580116 - RNA, 22 nt, Human
cugugcuagggaaacuucccgu

SEQ ID NO: 2580117 - RNA, 15 nt, Human
cugugcuaugaauuu

SEQ ID NO: 2580118 - RNA, 16 nt, Human
cugugcuaugaauuuu

SEQ ID NO: 2580119 - RNA, 22 nt, Human
cugugacuucagcucuguuuua

SEQ ID NO: 2580120 - RNA, 16 nt, Human
cugugacuucuccagg

SEQ ID NO: 2580121 - RNA, 14 nt, Human
cugugacugauguu

SEQ ID NO: 2580122 - RNA, 12 nt, Human
cugugagacagu

SEQ ID NO: 2580123 - RNA, 21 nt, Human
cugugacuucuccaggucuca

SEQ ID NO: 2580124 - RNA, 19 nt, Human
cugugagacagugggaaau

SEQ ID NO: 2580125 - RNA, 15 nt, Human
cugugagacaguggg

SEQ ID NO: 2580126 - RNA, 14 nt, Human
cugugagaccccca

SEQ ID NO: 2580127 - RNA, 13 nt, Human
cugugaccugugg

SEQ ID NO: 2580128 - RNA, 14 nt, Human
cugugaccuguggg

SEQ ID NO: 2580129 - RNA, 15 nt, Human
cugugaccugugggg

SEQ ID NO: 2580130 - RNA, 23 nt, Human
cugugaccagucugacccuuaca

SEQ ID NO: 2580131 - RNA, 20 nt, Human
cugugaccagcacugucuca

SEQ ID NO: 2580132 - RNA, 17 nt, Human
cugugacuucagcucug

SEQ ID NO: 2580133 - RNA, 14 nt, Human
cugugacucuuuuu

SEQ ID NO: 2580134 - RNA, 16 nt, Human
cugugaccugugggga

SEQ ID NO: 2580135 - RNA, 22 nt, Human
cugugcugagucugaaggcugg

SEQ ID NO: 2580136 - RNA, 20 nt, Human
cugugcugagucugaaggcu

SEQ ID NO: 2580137 - RNA, 11 nt, Human
cugugcugccc

SEQ ID NO: 2580138 - RNA, 20 nt, Human
cugugcugcccgucuucagc

SEQ ID NO: 2580139 - RNA, 22 nt, Human
cugugcugcccgucuucagccu

SEQ ID NO: 2580140 - RNA, 20 nt, Human
cuguguacauaacugaaaau

SEQ ID NO: 2580141 - RNA, 22 nt, Human
cuguguacauaacugaaaaugu

SEQ ID NO: 2580142 - RNA, 17 nt, Human
cuguguacauaacugaa

SEQ ID NO: 2580143 - RNA, 19 nt, Human
cuguguacauaacugaaaa

SEQ ID NO: 2580144 - RNA, 16 nt, Human
cuguguacaaagaaau

SEQ ID NO: 2580145 - RNA, 15 nt, Human
cuguguacaaagaaa

SEQ ID NO: 2580146 - RNA, 21 nt, Human
cuguguacagaauucugcuac

SEQ ID NO: 2580147 - RNA, 14 nt, Human
cuguguacaaagaa

SEQ ID NO: 2580148 - RNA, 19 nt, Human
cuguguaaucauuucuugg

SEQ ID NO: 2580149 - RNA, 22 nt, Human
cuguguaacagcuccuugggag

SEQ ID NO: 2580150 - RNA, 18 nt, Human
cuguguaacagcuccuug

SEQ ID NO: 2580151 - RNA, 19 nt, Human
cuguguaacagcuccuugg

SEQ ID NO: 2580152 - RNA, 19 nt, Human
cugugucagguggggcagc

SEQ ID NO: 2580153 - RNA, 20 nt, Human
cugugucagcauagaaguaa

SEQ ID NO: 2580154 - RNA, 21 nt, Human
cugugucagguggggcagcuu

SEQ ID NO: 2580155 - RNA, 19 nt, Human
cugugucucccuucauccu

SEQ ID NO: 2580156 - RNA, 14 nt, Human
cugugucucccuuc

SEQ ID NO: 2580157 - RNA, 14 nt, Human
cugugucuugcaau

SEQ ID NO: 2580158 - RNA, 17 nt, Human
cugugucucuuuucucu

SEQ ID NO: 2580159 - RNA, 22 nt, Human
cuuccaugucggccucuaaccc

SEQ ID NO: 2580160 - RNA, 18 nt, Human
cuuccaugucggccucua

SEQ ID NO: 2580161 - RNA, 19 nt, Human
cuuccauggcccucauuaa

SEQ ID NO: 2580162 - RNA, 14 nt, Human
cuuccauguggaga

SEQ ID NO: 2580163 - RNA, 12 nt, Human
cuuccaugugga

SEQ ID NO: 2580164 - RNA, 20 nt, Human
cuuccaugucgccucugcau

SEQ ID NO: 2580165 - RNA, 19 nt, Human
cuuccaugucgccucugca

SEQ ID NO: 2580166 - RNA, 18 nt, Human
cuuccaugucgccucugc

SEQ ID NO: 2580167 - RNA, 17 nt, Human
cuuccaugucgccucug

SEQ ID NO: 2580168 - RNA, 20 nt, Human
cuuccagugaggcucugccc

SEQ ID NO: 2580169 - RNA, 19 nt, Human
cuuccagugaggcucugcc

SEQ ID NO: 2580170 - RNA, 17 nt, Human
cuuccagugaggcucug

SEQ ID NO: 2580171 - RNA, 18 nt, Human
cuuccagugaggcucugc

SEQ ID NO: 2580172 - RNA, 17 nt, Human
cuuccauggacuuuguu

SEQ ID NO: 2580173 - RNA, 16 nt, Human
cuuccauggacuuugu

SEQ ID NO: 2580174 - RNA, 16 nt, Human
cuuccauggcccucau

SEQ ID NO: 2580175 - RNA, 21 nt, Human
cuuccaugagaacagcagggu

SEQ ID NO: 2580176 - RNA, 14 nt, Human
cuuccaugauucua

SEQ ID NO: 2580177 - RNA, 17 nt, Human
cuuccaugauucuauuu

SEQ ID NO: 2580178 - RNA, 16 nt, Human
cuuccaugucgccucu

SEQ ID NO: 2580179 - RNA, 15 nt, Human
cuuccaugucgccuc

SEQ ID NO: 2580180 - RNA, 19 nt, Human
cuucaucucccaccuagca

SEQ ID NO: 2580181 - RNA, 20 nt, Human
cuucaucucccaccuagcag

SEQ ID NO: 2580182 - RNA, 17 nt, Human
cuucaucuccagggagu

SEQ ID NO: 2580183 - RNA, 13 nt, Human
cuucaucuccagg

SEQ ID NO: 2580184 - RNA, 13 nt, Human
cuucaucucccac

SEQ ID NO: 2580185 - RNA, 22 nt, Human
cuucaucucccaaagugcuggg

SEQ ID NO: 2580186 - RNA, 16 nt, Human
cuucauccuccucaga

SEQ ID NO: 2580187 - RNA, 11 nt, Human
cuucauccucu

SEQ ID NO: 2580188 - RNA, 15 nt, Human
cuucaucgaaucuac

SEQ ID NO: 2580189 - RNA, 17 nt, Human
cuucaucgaaucuacua

SEQ ID NO: 2580190 - RNA, 19 nt, Human
cuucaucguggggcucuca

SEQ ID NO: 2580191 - RNA, 23 nt, Human
cuucaugcugucuacacuaagag

SEQ ID NO: 2580192 - RNA, 17 nt, Human
cuucaugcucagcccug

SEQ ID NO: 2580193 - RNA, 19 nt, Human
cuucaugcucagcccugac

SEQ ID NO: 2580194 - RNA, 21 nt, Human
cuucaugcauggaaauucccu

SEQ ID NO: 2580195 - RNA, 23 nt, Human
cuucaugcauggaaauucccuuc

SEQ ID NO: 2580196 - RNA, 15 nt, Human
cuucaugccagcuac

SEQ ID NO: 2580197 - RNA, 14 nt, Human
cuucaugccagcua

SEQ ID NO: 2580198 - RNA, 16 nt, Human
cuucaugccagcuacu

SEQ ID NO: 2580199 - RNA, 15 nt, Human
cuucaugcucagccc

SEQ ID NO: 2580200 - RNA, 23 nt, Human
cuucagagacuccugcaggcagc

SEQ ID NO: 2580201 - RNA, 17 nt, Human
cuucaguuaagccuuug

SEQ ID NO: 2580202 - RNA, 17 nt, Human
cuucaguguauggaaau

SEQ ID NO: 2580203 - RNA, 13 nt, Human
cuucagugggaga

SEQ ID NO: 2580204 - RNA, 15 nt, Human
cuucagugggagaaa

SEQ ID NO: 2580205 - RNA, 18 nt, Human
cuucaguggcagcugcuu

SEQ ID NO: 2580206 - RNA, 13 nt, Human
cuucaucccucug

SEQ ID NO: 2580207 - RNA, 20 nt, Human
cuucaguguauggaaauaaa

SEQ ID NO: 2580208 - RNA, 18 nt, Human
cuucaguuaagccuuugg

SEQ ID NO: 2580209 - RNA, 15 nt, Human
cuucauccuccucag

SEQ ID NO: 2580210 - RNA, 19 nt, Human
cuucauccggcagccugga

SEQ ID NO: 2580211 - RNA, 17 nt, Human
cuucaucccacaaucuu

SEQ ID NO: 2580212 - RNA, 18 nt, Human
cuucagugggagaaaaca

SEQ ID NO: 2580213 - RNA, 22 nt, Human
cuucagagacuccugcaggcag

SEQ ID NO: 2580214 - RNA, 21 nt, Human
cuucagagacuccugcaggca

SEQ ID NO: 2580215 - RNA, 16 nt, Human
cuucagagacuccugc

SEQ ID NO: 2580216 - RNA, 19 nt, Human
cuucagacuuugcuuccca

SEQ ID NO: 2580217 - RNA, 18 nt, Human
cuucagacuuugcuuccc

SEQ ID NO: 2580218 - RNA, 20 nt, Human
cuucagacagagaggacugu

SEQ ID NO: 2580219 - RNA, 15 nt, Human
cuucagacuuugcuu

SEQ ID NO: 2580220 - RNA, 14 nt, Human
cuucagacuuugcu

SEQ ID NO: 2580221 - RNA, 21 nt, Human
cuucacuuuaauucucaugug

SEQ ID NO: 2580222 - RNA, 16 nt, Human
cuucacuuuaauucuc

SEQ ID NO: 2580223 - RNA, 15 nt, Human
cuucacuuuaauucu

SEQ ID NO: 2580224 - RNA, 14 nt, Human
cuucacuucuccca

SEQ ID NO: 2580225 - RNA, 13 nt, Human
cuucacuucuccc

SEQ ID NO: 2580226 - RNA, 15 nt, Human
cuucacuucugacca

SEQ ID NO: 2580227 - RNA, 16 nt, Human
cuucacuucugaccac

SEQ ID NO: 2580228 - RNA, 17 nt, Human
cuucacuucugaccaca

SEQ ID NO: 2580229 - RNA, 19 nt, Human
cuucacuucugaccacacu

SEQ ID NO: 2580230 - RNA, 21 nt, Human
cuucacuucugaccacacuuc

SEQ ID NO: 2580231 - RNA, 11 nt, Human
cuucagacaua

SEQ ID NO: 2580232 - RNA, 16 nt, Human
cuucagaaugugauuu

SEQ ID NO: 2580233 - RNA, 20 nt, Human
cuucagaaagugugcuuuau

SEQ ID NO: 2580234 - RNA, 19 nt, Human
cuucagacagagaggacug

SEQ ID NO: 2580235 - RNA, 19 nt, Human
cuucagacacaaaagucca

SEQ ID NO: 2580236 - RNA, 17 nt, Human
cuucagaagacacugca

SEQ ID NO: 2580237 - RNA, 18 nt, Human
cuuauugcccacgcugga

SEQ ID NO: 2580238 - RNA, 11 nt, Human
cuuauuagaac

SEQ ID NO: 2580239 - RNA, 17 nt, Human
cuuauuagaacaggcaa

SEQ ID NO: 2580240 - RNA, 14 nt, Human
cuucaccuuugucc

SEQ ID NO: 2580241 - RNA, 15 nt, Human
cuucaccucacugaa

SEQ ID NO: 2580242 - RNA, 20 nt, Human
cuucaccuuuguccccaccg

SEQ ID NO: 2580243 - RNA, 17 nt, Human
cuucaccuuugucccca

SEQ ID NO: 2580244 - RNA, 21 nt, Human
cuucaccugauucaacuaaaa

SEQ ID NO: 2580245 - RNA, 18 nt, Human
cuucaccugauucaacua

SEQ ID NO: 2580246 - RNA, 20 nt, Human
cuucaccugauucaacuaaa

SEQ ID NO: 2580247 - RNA, 18 nt, Human
cuucacuguccuccaagc

SEQ ID NO: 2580248 - RNA, 21 nt, Human
cuucacuguccuccaagccag

SEQ ID NO: 2580249 - RNA, 19 nt, Human
cuucacuguugaaaauuau

SEQ ID NO: 2580250 - RNA, 18 nt, Human
cuucacuguugaaaauua

SEQ ID NO: 2580251 - RNA, 16 nt, Human
cuucacuguugaaaau

SEQ ID NO: 2580252 - RNA, 15 nt, Human
cuucacuguugaaaa

SEQ ID NO: 2580253 - RNA, 17 nt, Human
cuucacuguccuccaag

SEQ ID NO: 2580254 - RNA, 18 nt, Human
cuuagcagggaaacagcu

SEQ ID NO: 2580255 - RNA, 17 nt, Human
cuuagcagcuuccagau

SEQ ID NO: 2580256 - RNA, 16 nt, Human
cuuagcagcuuccaga

SEQ ID NO: 2580257 - RNA, 15 nt, Human
cuuagcagcuuccag

SEQ ID NO: 2580258 - RNA, 22 nt, Human
cuuagcagcuaucucucaguga

SEQ ID NO: 2580259 - RNA, 23 nt, Human
cuuagcagcuaucucucagugaa

SEQ ID NO: 2580260 - RNA, 21 nt, Human
cuuagcagggaaacagcuaau

SEQ ID NO: 2580261 - RNA, 14 nt, Human
cuuagcaggagagg

SEQ ID NO: 2580262 - RNA, 13 nt, Human
cuuagcaggagag

SEQ ID NO: 2580263 - RNA, 18 nt, Human
cuuagcagcuuccagauu

SEQ ID NO: 2580264 - RNA, 22 nt, Human
cuuagcaggagaggagagccag

SEQ ID NO: 2580265 - RNA, 21 nt, Human
cuuagcaggagaggagagcca

SEQ ID NO: 2580266 - RNA, 16 nt, Human
cuuauggaauugauuu

SEQ ID NO: 2580267 - RNA, 17 nt, Human
cuuauggaauugauuug

SEQ ID NO: 2580268 - RNA, 19 nt, Human
cuuauggaauugauuugca

SEQ ID NO: 2580269 - RNA, 20 nt, Human
cuuauggaauugauuugcau

SEQ ID NO: 2580270 - RNA, 21 nt, Human
cuuauggaauugauuugcauu

SEQ ID NO: 2580271 - RNA, 23 nt, Human
cuuauggaauugauuugcauuga

SEQ ID NO: 2580272 - RNA, 21 nt, Human
cuuaugggcuggguucuaccc

SEQ ID NO: 2580273 - RNA, 14 nt, Human
cuuaugggcugggu

SEQ ID NO: 2580274 - RNA, 14 nt, Human
cuuauggaauugau

SEQ ID NO: 2580275 - RNA, 21 nt, Human
cuuauggaacacucugagacu

SEQ ID NO: 2580276 - RNA, 23 nt, Human
cuuaugggcuggguucuacccag

SEQ ID NO: 2580277 - RNA, 22 nt, Human
cuuaugggcuggguucuaccca

SEQ ID NO: 2580278 - RNA, 19 nt, Human
cuuauguagcaggaaauaa

SEQ ID NO: 2580279 - RNA, 18 nt, Human
cuuauuaaaguucuguaa

SEQ ID NO: 2580280 - RNA, 14 nt, Human
cuuauuaaaguucu

SEQ ID NO: 2580281 - RNA, 13 nt, Human
cuuauuaaaguuc

SEQ ID NO: 2580282 - RNA, 13 nt, Human
cuuauugcccacg

SEQ ID NO: 2580283 - RNA, 12 nt, Human
cuuauugcccac

SEQ ID NO: 2580284 - RNA, 18 nt, Human
cuuggccaguuaucccuu

SEQ ID NO: 2580285 - RNA, 22 nt, Human
cuuggccagaagggggccauga

SEQ ID NO: 2580286 - RNA, 17 nt, Human
cuuggcaugccuuccag

SEQ ID NO: 2580287 - RNA, 20 nt, Human
cuuggcaugccuuccagcac

SEQ ID NO: 2580288 - RNA, 17 nt, Human
cuuggccaagcagggag

SEQ ID NO: 2580289 - RNA, 15 nt, Human
cuuggccaagcaggg

SEQ ID NO: 2580290 - RNA, 17 nt, Human
cuuggccagaagggggc

SEQ ID NO: 2580291 - RNA, 14 nt, Human
cuugcucugcaccc

SEQ ID NO: 2580292 - RNA, 13 nt, Human
cuugcucugcacc

SEQ ID NO: 2580293 - RNA, 22 nt, Human
cuugcucucuggccuuuuccua

SEQ ID NO: 2580294 - RNA, 19 nt, Human
cuuggcaucacagggcaga

SEQ ID NO: 2580295 - RNA, 20 nt, Human
cuuggcaucacagggcagag

SEQ ID NO: 2580296 - RNA, 22 nt, Human
cuuggcaucacagggcagagcc

SEQ ID NO: 2580297 - RNA, 16 nt, Human
cuuggcaucagcuggc

SEQ ID NO: 2580298 - RNA, 14 nt, Human
cuugcucugcaggc

SEQ ID NO: 2580299 - RNA, 17 nt, Human
cuuggcaucagcuggcg

SEQ ID NO: 2580300 - RNA, 16 nt, Human
cuuggcaugccuucca

SEQ ID NO: 2580301 - RNA, 12 nt, Human
cuugcucugcug

SEQ ID NO: 2580302 - RNA, 15 nt, Human
cuugcucucuggccu

SEQ ID NO: 2580303 - RNA, 20 nt, Human
cuugcucucccucuucucaa

SEQ ID NO: 2580304 - RNA, 17 nt, Human
cuugcucucccucuucu

SEQ ID NO: 2580305 - RNA, 15 nt, Human
cuugcucucccucuu

SEQ ID NO: 2580306 - RNA, 20 nt, Human
cuugcucuccccugcccugc

SEQ ID NO: 2580307 - RNA, 14 nt, Human
cuugcucucccucu

SEQ ID NO: 2580308 - RNA, 20 nt, Human
cuugcucgcuguaaaaucuu

SEQ ID NO: 2580309 - RNA, 16 nt, Human
cuugccugcacaaacu

SEQ ID NO: 2580310 - RNA, 14 nt, Human
cuugccugauauaa

SEQ ID NO: 2580311 - RNA, 22 nt, Human
cuugccugaacauccuuccuuc

SEQ ID NO: 2580312 - RNA, 20 nt, Human
cuugccugaacauccuuccu

SEQ ID NO: 2580313 - RNA, 18 nt, Human
cuugccugaacauccuuc

SEQ ID NO: 2580314 - RNA, 17 nt, Human
cuugccugaacauccuu

SEQ ID NO: 2580315 - RNA, 19 nt, Human
cuugcucuccccugcccug

SEQ ID NO: 2580316 - RNA, 18 nt, Human
cuugccucuuccuugaag

SEQ ID NO: 2580317 - RNA, 16 nt, Human
cuugccucuuccuuga

SEQ ID NO: 2580318 - RNA, 13 nt, Human
cuugccucuuccu

SEQ ID NO: 2580319 - RNA, 12 nt, Human
cuugccucuucc

SEQ ID NO: 2580320 - RNA, 20 nt, Human
cuugccucugugcugugugu

SEQ ID NO: 2580321 - RNA, 19 nt, Human
cuugccucugugcugugug

SEQ ID NO: 2580322 - RNA, 16 nt, Human
cuugccucugugcugu

SEQ ID NO: 2580323 - RNA, 15 nt, Human
cuugccucugugcug

SEQ ID NO: 2580324 - RNA, 14 nt, Human
cuugccucugugcu

SEQ ID NO: 2580325 - RNA, 13 nt, Human
cuugccucugugc

SEQ ID NO: 2580326 - RNA, 23 nt, Human
cuugccucuguccccuucucuca

SEQ ID NO: 2580327 - RNA, 19 nt, Human
cuugccucuguccccuucu

SEQ ID NO: 2580328 - RNA, 15 nt, Human
cuugccucaaugcca

SEQ ID NO: 2580329 - RNA, 16 nt, Human
cuugccuagggccugg

SEQ ID NO: 2580330 - RNA, 18 nt, Human
cuugccuagggccugguc

SEQ ID NO: 2580331 - RNA, 19 nt, Human
cuugccuagggccuggucc

SEQ ID NO: 2580332 - RNA, 20 nt, Human
cuugccuagggccuggucca

SEQ ID NO: 2580333 - RNA, 20 nt, Human
cuugccgucuaccugagggg

SEQ ID NO: 2580334 - RNA, 12 nt, Human
cuugacagggca

SEQ ID NO: 2580335 - RNA, 23 nt, Human
cuugccgucuaccugaggggccu

SEQ ID NO: 2580336 - RNA, 14 nt, Human
cuugccuagggccu

SEQ ID NO: 2580337 - RNA, 18 nt, Human
cuugaauccuagggccug

SEQ ID NO: 2580338 - RNA, 14 nt, Human
cuugaauccuaggg

SEQ ID NO: 2580339 - RNA, 14 nt, Human
cuugacaacaucug

SEQ ID NO: 2580340 - RNA, 22 nt, Human
cuugacaaagucaagccacaug

SEQ ID NO: 2580341 - RNA, 23 nt, Human
cuugaaugaugccaugaggaaca

SEQ ID NO: 2580342 - RNA, 15 nt, Human
cuugacaccugcuga

SEQ ID NO: 2580343 - RNA, 13 nt, Human
cuugacaccugcu

SEQ ID NO: 2580344 - RNA, 17 nt, Human
cuugacagaacacuguc

SEQ ID NO: 2580345 - RNA, 16 nt, Human
cuugacagaacacugu

SEQ ID NO: 2580346 - RNA, 22 nt, Human
cuugacaccugcugagaaaaca

SEQ ID NO: 2580347 - RNA, 14 nt, Human
cuugacagaacacu

SEQ ID NO: 2580348 - RNA, 22 nt, Human
cuucuucagagacuccugcagg

SEQ ID NO: 2580349 - RNA, 18 nt, Human
cuucuucagagacuccug

SEQ ID NO: 2580350 - RNA, 22 nt, Human
cuucugacgugccuuuugcacc

SEQ ID NO: 2580351 - RNA, 13 nt, Human
cuucugacugcug

SEQ ID NO: 2580352 - RNA, 21 nt, Human
cuucugacugcugauucuccc

SEQ ID NO: 2580353 - RNA, 20 nt, Human
cuucugacgugccuuuugca

SEQ ID NO: 2580354 - RNA, 19 nt, Human
cuucugacgugccuuuugc

SEQ ID NO: 2580355 - RNA, 20 nt, Human
cuucuguuuuauaauuuugu

SEQ ID NO: 2580356 - RNA, 15 nt, Human
cuucuguuuuauaau

SEQ ID NO: 2580357 - RNA, 16 nt, Human
cuucugagcuauuuca

SEQ ID NO: 2580358 - RNA, 17 nt, Human
cuucugagcuauuucau

SEQ ID NO: 2580359 - RNA, 18 nt, Human
cuucugacuuaagugugc

SEQ ID NO: 2580360 - RNA, 21 nt, Human
cuucuucagagacuccugcag

SEQ ID NO: 2580361 - RNA, 20 nt, Human
cuucuucagagacuccugca

SEQ ID NO: 2580362 - RNA, 18 nt, Human
cuucugagcuauuucauc

SEQ ID NO: 2580363 - RNA, 20 nt, Human
cuucugagcuauuucaucua

SEQ ID NO: 2580364 - RNA, 19 nt, Human
cuucuuaaaguauucuucu

SEQ ID NO: 2580365 - RNA, 14 nt, Human
cuucuuaaaguauu

SEQ ID NO: 2580366 - RNA, 15 nt, Human
cuucuguuuucuguu

SEQ ID NO: 2580367 - RNA, 14 nt, Human
cuucuguuuucugu

SEQ ID NO: 2580368 - RNA, 17 nt, Human
cuucuguuuucuguuuc

SEQ ID NO: 2580369 - RNA, 13 nt, Human
cuucuuaaagagu

SEQ ID NO: 2580370 - RNA, 20 nt, Human
cuugaaugaugccaugagga

SEQ ID NO: 2580371 - RNA, 22 nt, Human
cuugaauauccccucccaguca

SEQ ID NO: 2580372 - RNA, 22 nt, Human
cuugaaguuguuacuaacuaaa

SEQ ID NO: 2580373 - RNA, 10 nt, Human
cuugaaguug

SEQ ID NO: 2580374 - RNA, 23 nt, Human
cuuuucaacuuggcuuccuuucu

SEQ ID NO: 2580375 - RNA, 22 nt, Human
cuuuucaaauagggucuaacuc

SEQ ID NO: 2580376 - RNA, 15 nt, Human
cuuuucaaaacauuu

SEQ ID NO: 2580377 - RNA, 13 nt, Human
cuuuuauugucag

SEQ ID NO: 2580378 - RNA, 21 nt, Human
cuuuuagggagagucauauuu

SEQ ID NO: 2580379 - RNA, 20 nt, Human
cuuuggucuacacugugcug

SEQ ID NO: 2580380 - RNA, 14 nt, Human
cuuugguagaaaag

SEQ ID NO: 2580381 - RNA, 17 nt, Human
cuuugguggagauaaag

SEQ ID NO: 2580382 - RNA, 20 nt, Human
cuuuuacugaagccuuucuu

SEQ ID NO: 2580383 - RNA, 16 nt, Human
cuuuggucuacacugu

SEQ ID NO: 2580384 - RNA, 22 nt, Human
cuuuggguuaagcauuaccacu

SEQ ID NO: 2580385 - RNA, 20 nt, Human
cuuuggguuaagcauuacca

SEQ ID NO: 2580386 - RNA, 17 nt, Human
cuuuggguuaagcauua

SEQ ID NO: 2580387 - RNA, 22 nt, Human
cuuugguacauggccaguguga

SEQ ID NO: 2580388 - RNA, 17 nt, Human
cuuugggguuuuuuaau

SEQ ID NO: 2580389 - RNA, 17 nt, Human
cuuuggggucagccagg

SEQ ID NO: 2580390 - RNA, 21 nt, Human
cuuuggggucagccagggcca

SEQ ID NO: 2580391 - RNA, 21 nt, Human
cuuuggguaccuauuuucauu

SEQ ID NO: 2580392 - RNA, 18 nt, Human
cuuuggguaccuauuuuc

SEQ ID NO: 2580393 - RNA, 22 nt, Human
cuuuggguaccuauuuucauug

SEQ ID NO: 2580394 - RNA, 21 nt, Human
cuuuggggcuuuuacaccagu

SEQ ID NO: 2580395 - RNA, 20 nt, Human
cuuuggggcuuuuacaccag

SEQ ID NO: 2580396 - RNA, 15 nt, Human
cuuuuauaaacuuua

SEQ ID NO: 2580397 - RNA, 20 nt, Human
cuuuuagggagagucauauu

SEQ ID NO: 2580398 - RNA, 16 nt, Human
cuuuuagggagaguca

SEQ ID NO: 2580399 - RNA, 17 nt, Human
cuuuuaggacccuuccc

SEQ ID NO: 2580400 - RNA, 18 nt, Human
cuuuuaggccaaaaaaau

SEQ ID NO: 2580401 - RNA, 17 nt, Human
cuuugguggcuuugcau

SEQ ID NO: 2580402 - RNA, 14 nt, Human
cuuugguggcuuug

SEQ ID NO: 2580403 - RNA, 18 nt, Human
cuuugguggcuuugcauu

SEQ ID NO: 2580404 - RNA, 15 nt, Human
cuuuuagaaauacug

SEQ ID NO: 2580405 - RNA, 19 nt, Human
cuuuuagaaauacugcaag

SEQ ID NO: 2580406 - RNA, 21 nt, Human
cuuuuagaaauacugcaagaa

SEQ ID NO: 2580407 - RNA, 23 nt, Human
cuuuuagaaauacugcaagaaaa

SEQ ID NO: 2580408 - RNA, 16 nt, Human
cuuuuaggccaaaaaa

SEQ ID NO: 2580409 - RNA, 22 nt, Human
cuuuuagcucaaacguggcuuu

SEQ ID NO: 2580410 - RNA, 13 nt, Human
cuuuuagccuagu

SEQ ID NO: 2580411 - RNA, 16 nt, Human
cuuuuauaaacuuuac

SEQ ID NO: 2580412 - RNA, 18 nt, Human
cuuuuauaaacuuuaccu

SEQ ID NO: 2580413 - RNA, 21 nt, Human
cuuuuauuguauaaacuauca

SEQ ID NO: 2580414 - RNA, 14 nt, Human
cuuuuauaaacuuu

SEQ ID NO: 2580415 - RNA, 19 nt, Human
cuuuuauuuagcaccaggg

SEQ ID NO: 2580416 - RNA, 17 nt, Human
cuuuuauuucuuaaaca

SEQ ID NO: 2580417 - RNA, 15 nt, Human
cuuucgcacagcagu

SEQ ID NO: 2580418 - RNA, 21 nt, Human
cuuucgacuugcauuuuugca

SEQ ID NO: 2580419 - RNA, 15 nt, Human
cuuucguacauuggc

SEQ ID NO: 2580420 - RNA, 22 nt, Human
cuuucggggagaggcugaggac

SEQ ID NO: 2580421 - RNA, 17 nt, Human
cuuuccuuuuuuaaaaa

SEQ ID NO: 2580422 - RNA, 18 nt, Human
cuuuccuuuuuuaaaaau

SEQ ID NO: 2580423 - RNA, 20 nt, Human
cuuucgacuugcauuuuugc

SEQ ID NO: 2580424 - RNA, 21 nt, Human
cuuuccuuuccccagcccagg

SEQ ID NO: 2580425 - RNA, 20 nt, Human
cuuuccuuuccccagcccag

SEQ ID NO: 2580426 - RNA, 17 nt, Human
cuuucuaguucagcugc

SEQ ID NO: 2580427 - RNA, 23 nt, Human
cuuucuaguggucuuuguaagag

SEQ ID NO: 2580428 - RNA, 22 nt, Human
cuuucuaguggucuuuguaaga

SEQ ID NO: 2580429 - RNA, 21 nt, Human
cuuucuaguggucuuuguaag

SEQ ID NO: 2580430 - RNA, 18 nt, Human
cuuucuaguucagcugcc

SEQ ID NO: 2580431 - RNA, 14 nt, Human
cuuucuaucauuuu

SEQ ID NO: 2580432 - RNA, 12 nt, Human
cuuucuaucauu

SEQ ID NO: 2580433 - RNA, 16 nt, Human
cuuucuauccucugua

SEQ ID NO: 2580434 - RNA, 18 nt, Human
cuuucuaaacaagauuuu

SEQ ID NO: 2580435 - RNA, 19 nt, Human
cuuucguuuguuuguuuca

SEQ ID NO: 2580436 - RNA, 14 nt, Human
cuuucuagcuguug

SEQ ID NO: 2580437 - RNA, 20 nt, Human
cuuucuaguggucuuuguaa

SEQ ID NO: 2580438 - RNA, 19 nt, Human
cuuucuaguggucuuugua

SEQ ID NO: 2580439 - RNA, 18 nt, Human
cuuucuaguggucuuugu

SEQ ID NO: 2580440 - RNA, 16 nt, Human
cuuucuaguggucuuu

SEQ ID NO: 2580441 - RNA, 21 nt, Human
cuuucuaguccuauucuauug

SEQ ID NO: 2580442 - RNA, 20 nt, Human
cuuucuaguccuauucuauu

SEQ ID NO: 2580443 - RNA, 23 nt, Human
cuuucuagcuguugagcuguuuu

SEQ ID NO: 2580444 - RNA, 19 nt, Human
cuuucuccccugcccccag

SEQ ID NO: 2580445 - RNA, 18 nt, Human
cuuucuccccugccccca

SEQ ID NO: 2580446 - RNA, 14 nt, Human
cuuucuccccugcc

SEQ ID NO: 2580447 - RNA, 21 nt, Human
cuuucucccaggccaggcucc

SEQ ID NO: 2580448 - RNA, 17 nt, Human
cuuucuauccucuguaa

SEQ ID NO: 2580449 - RNA, 13 nt, Human
cuuucucccaggc

SEQ ID NO: 2580450 - RNA, 15 nt, Human
cuuucuauuccaaag

SEQ ID NO: 2580451 - RNA, 19 nt, Human
cuuucucccaggccaggcu

SEQ ID NO: 2580452 - RNA, 20 nt, Human
cuuucucccaggccaggcuc

SEQ ID NO: 2580453 - RNA, 23 nt, Human
cuuucuccccugcccccaggacu

SEQ ID NO: 2580454 - RNA, 22 nt, Human
cuuucuccccugcccccaggac

SEQ ID NO: 2580455 - RNA, 24 nt, Human
cuuucuccccugcccccaggacug

SEQ ID NO: 2580456 - RNA, 15 nt, Human
cuuucuccuuagucu

SEQ ID NO: 2580457 - RNA, 20 nt, Human
cuuucuccuuagucuucuca

SEQ ID NO: 2580458 - RNA, 21 nt, Human
cuuucuccuuagucuucucau

SEQ ID NO: 2580459 - RNA, 23 nt, Human
cuuucuccuuagucuucucauag

SEQ ID NO: 2580460 - RNA, 18 nt, Human
cuuucucgauuuuaucuu

SEQ ID NO: 2580461 - RNA, 23 nt, Human
cuuucuccuuuguacuuugugcu

SEQ ID NO: 2580462 - RNA, 22 nt, Human
cuuugacgccaucccagcccca

SEQ ID NO: 2580463 - RNA, 21 nt, Human
cuuugacgccaucccagcccc

SEQ ID NO: 2580464 - RNA, 19 nt, Human
cuuugacgccaucccagcc

SEQ ID NO: 2580465 - RNA, 18 nt, Human
cuuugacgccaucccagc

SEQ ID NO: 2580466 - RNA, 13 nt, Human
cuuucucuacuuu

SEQ ID NO: 2580467 - RNA, 16 nt, Human
cuuugagguggaagag

SEQ ID NO: 2580468 - RNA, 17 nt, Human
cuuugagguggaagagg

SEQ ID NO: 2580469 - RNA, 13 nt, Human
cuuugaggaaacc

SEQ ID NO: 2580470 - RNA, 14 nt, Human
cuuugagguggaag

SEQ ID NO: 2580471 - RNA, 20 nt, Human
cuuugagauagaagaacugc

SEQ ID NO: 2580472 - RNA, 19 nt, Human
cuuucucgauuuuaucuuu

SEQ ID NO: 2580473 - RNA, 21 nt, Human
cuuugagcccacaaagccuua

SEQ ID NO: 2580474 - RNA, 16 nt, Human
cuuugagcuuaagaau

SEQ ID NO: 2580475 - RNA, 21 nt, Human
cuuugauguuaacacauuuug

SEQ ID NO: 2580476 - RNA, 20 nt, Human
cuuugauguuaacacauuuu

SEQ ID NO: 2580477 - RNA, 23 nt, Human
cuuugauguuaacacauuuugua

SEQ ID NO: 2580478 - RNA, 16 nt, Human
cuuugauuaauccaga

SEQ ID NO: 2580479 - RNA, 20 nt, Human
cuuugauuaaagacuccagu

SEQ ID NO: 2580480 - RNA, 17 nt, Human
cuuugauuaauccagaa

SEQ ID NO: 2580481 - RNA, 12 nt, Human
cuuugauucaua

SEQ ID NO: 2580482 - RNA, 19 nt, Human
cuuugauucauaguaacuu

SEQ ID NO: 2580483 - RNA, 13 nt, Human
cuuugauucuccu

SEQ ID NO: 2580484 - RNA, 21 nt, Human
cuuugauucauaguaacuucu

SEQ ID NO: 2580485 - RNA, 14 nt, Human
cuuugauucuccuu

SEQ ID NO: 2580486 - RNA, 19 nt, Human
cuuugauguuaacacauuu

SEQ ID NO: 2580487 - RNA, 16 nt, Human
cuuugauaauguuaaa

SEQ ID NO: 2580488 - RNA, 18 nt, Human
cuuugauguuaacacauu

SEQ ID NO: 2580489 - RNA, 15 nt, Human
cuuugauaauguuaa

SEQ ID NO: 2580490 - RNA, 14 nt, Human
cuuugauaauguua

SEQ ID NO: 2580491 - RNA, 13 nt, Human
cuuugauaauguu

SEQ ID NO: 2580492 - RNA, 18 nt, Human
cuuugauaaaauaaauga

SEQ ID NO: 2580493 - RNA, 17 nt, Human
cuuugauaaaauaaaug

SEQ ID NO: 2580494 - RNA, 14 nt, Human
cuuugauaaaauaa

SEQ ID NO: 2580495 - RNA, 21 nt, Human
cuuugagugcaguccugauca

SEQ ID NO: 2580496 - RNA, 16 nt, Human
cuuugaguuuccucag

SEQ ID NO: 2580497 - RNA, 17 nt, Human
cuuugaguuuccucagg

SEQ ID NO: 2580498 - RNA, 18 nt, Human
cuuugaguuuccucaggc

SEQ ID NO: 2580499 - RNA, 19 nt, Human
cuuugaguuuccucaggcu

SEQ ID NO: 2580500 - RNA, 22 nt, Human
cuuugaguuuccucaggcugcu

SEQ ID NO: 2580501 - RNA, 21 nt, Human
cuuugagugucuuaauuaaaa

SEQ ID NO: 2580502 - RNA, 22 nt, Human
cuuugagguggaagagggcugc

SEQ ID NO: 2580503 - RNA, 13 nt, Human
cuuugagugaucc

SEQ ID NO: 2580504 - RNA, 19 nt, Human
cuuucagauacaugguugu

SEQ ID NO: 2580505 - RNA, 20 nt, Human
cuuucagauaacuguuauuu

SEQ ID NO: 2580506 - RNA, 16 nt, Human
cuugugaggaaaguca

SEQ ID NO: 2580507 - RNA, 13 nt, Human
cuugugaggaaag

SEQ ID NO: 2580508 - RNA, 23 nt, Human
cuugugaggaaagucauuggcuu

SEQ ID NO: 2580509 - RNA, 19 nt, Human
cuugugaggaaagucauug

SEQ ID NO: 2580510 - RNA, 17 nt, Human
cuugugaggaaagucau

SEQ ID NO: 2580511 - RNA, 15 nt, Human
cuugugauuauuuau

SEQ ID NO: 2580512 - RNA, 17 nt, Human
cuugugauuauuuauua

SEQ ID NO: 2580513 - RNA, 23 nt, Human
cuugugcacccucuaucccaaua

SEQ ID NO: 2580514 - RNA, 20 nt, Human
cuugugcacccucuauccca

SEQ ID NO: 2580515 - RNA, 13 nt, Human
cuuguggacacag

SEQ ID NO: 2580516 - RNA, 15 nt, Human
cuuguggacacagcu

SEQ ID NO: 2580517 - RNA, 14 nt, Human
cuuguggacacagc

SEQ ID NO: 2580518 - RNA, 16 nt, Human
cuuuaaaguaugaauc

SEQ ID NO: 2580519 - RNA, 15 nt, Human
cuuuaaaucugugau

SEQ ID NO: 2580520 - RNA, 22 nt, Human
cuuuaaaguaugaaucuaugcc

SEQ ID NO: 2580521 - RNA, 22 nt, Human
cuuucaauaggaaaaacugauu

SEQ ID NO: 2580522 - RNA, 21 nt, Human
cuuucaauaggaaaaacugau

SEQ ID NO: 2580523 - RNA, 20 nt, Human
cuuucaauaggaaaaacuga

SEQ ID NO: 2580524 - RNA, 21 nt, Human
cuuuacacauucggcucccug

SEQ ID NO: 2580525 - RNA, 22 nt, Human
cuuuacacaucagucacaaguu

SEQ ID NO: 2580526 - RNA, 23 nt, Human
cuuuacacauucggcucccugga

SEQ ID NO: 2580527 - RNA, 16 nt, Human
cuuucacuauuuccuu

SEQ ID NO: 2580528 - RNA, 21 nt, Human
cuuucacuauuuccuuuauaa

SEQ ID NO: 2580529 - RNA, 15 nt, Human
cuuuacacucaggcu

SEQ ID NO: 2580530 - RNA, 22 nt, Human
cuuucacuauuuccuuuauaau

SEQ ID NO: 2580531 - RNA, 18 nt, Human
cuuuaauaucaucaguau

SEQ ID NO: 2580532 - RNA, 19 nt, Human
cuuuaauaucaucaguauu

SEQ ID NO: 2580533 - RNA, 21 nt, Human
cuuuaauaucaucaguauuga

SEQ ID NO: 2580534 - RNA, 14 nt, Human
cuuuaaucuucagu

SEQ ID NO: 2580535 - RNA, 17 nt, Human
cuuuaagugcacaacau

SEQ ID NO: 2580536 - RNA, 17 nt, Human
cuuuaaguuucaggaua

SEQ ID NO: 2580537 - RNA, 12 nt, Human
cuuuaauauaaa

SEQ ID NO: 2580538 - RNA, 22 nt, Human
cuuuaaucuucaguuuuaucuu

SEQ ID NO: 2580539 - RNA, 17 nt, Human
cuuuaaucuucaguuuu

SEQ ID NO: 2580540 - RNA, 21 nt, Human
cuuuaaucuucaguuuuaucu

SEQ ID NO: 2580541 - RNA, 21 nt, Human
cuuuaauuuuuuuaaccaaag

SEQ ID NO: 2580542 - RNA, 20 nt, Human
cuuuaauuuuuuuaaccaaa

SEQ ID NO: 2580543 - RNA, 23 nt, Human
cuuuaauuuuuuuaaccaaaggu

SEQ ID NO: 2580544 - RNA, 19 nt, Human
cuuuacaauguucauccca

SEQ ID NO: 2580545 - RNA, 17 nt, Human
gcacuccccugcugggu

SEQ ID NO: 2580546 - RNA, 23 nt, Human
gcacucacccaugugccaaggug

SEQ ID NO: 2580547 - RNA, 20 nt, Human
gcacucacccaugugccaag

SEQ ID NO: 2580548 - RNA, 19 nt, Human
gcacucacccaugugccaa

SEQ ID NO: 2580549 - RNA, 20 nt, Human
gcacucacagaccuggagcc

SEQ ID NO: 2580550 - RNA, 17 nt, Human
gcacucagaagacacug

SEQ ID NO: 2580551 - RNA, 16 nt, Human
gcacucagaagacacu

SEQ ID NO: 2580552 - RNA, 13 nt, Human
gcacucagaagac

SEQ ID NO: 2580553 - RNA, 22 nt, Human
gcacuccccugcuggguguggc

SEQ ID NO: 2580554 - RNA, 16 nt, Human
gcacuccccugcuggg

SEQ ID NO: 2580555 - RNA, 23 nt, Human
gcacucccuugguggcaagagcc

SEQ ID NO: 2580556 - RNA, 17 nt, Human
gcacuccggccugauga

SEQ ID NO: 2580557 - RNA, 14 nt, Human
gcacuccggaggua

SEQ ID NO: 2580558 - RNA, 14 nt, Human
gcacuugcaucugu

SEQ ID NO: 2580559 - RNA, 18 nt, Human
gcacuuggacucuugcuc

SEQ ID NO: 2580560 - RNA, 20 nt, Human
gcacuccucgguacucccau

SEQ ID NO: 2580561 - RNA, 19 nt, Human
gcacuccucgguacuccca

SEQ ID NO: 2580562 - RNA, 16 nt, Human
gcacucacagaccugg

SEQ ID NO: 2580563 - RNA, 19 nt, Human
gcacucacagaccuggagc

SEQ ID NO: 2580564 - RNA, 17 nt, Human
gcacucacagaccugga

SEQ ID NO: 2580565 - RNA, 17 nt, Human
gcacucacccaugugcc

SEQ ID NO: 2580566 - RNA, 22 nt, Human
gcacaucagcacgauuucuguu

SEQ ID NO: 2580567 - RNA, 23 nt, Human
gcacaucagcacgauuucuguuu

SEQ ID NO: 2580568 - RNA, 14 nt, Human
gcaccgggccacag

SEQ ID NO: 2580569 - RNA, 20 nt, Human
gcacauccuaugcaauauau

SEQ ID NO: 2580570 - RNA, 17 nt, Human
gcacauccuaugcaaua

SEQ ID NO: 2580571 - RNA, 15 nt, Human
gcaccuaccaucagg

SEQ ID NO: 2580572 - RNA, 22 nt, Human
gcaccuaccaccacgcccggcu

SEQ ID NO: 2580573 - RNA, 21 nt, Human
gcaccuaccaccacgcccggc

SEQ ID NO: 2580574 - RNA, 23 nt, Human
gcaccgggccacagagaaaguac

SEQ ID NO: 2580575 - RNA, 16 nt, Human
gcaccuaguccaguga

SEQ ID NO: 2580576 - RNA, 23 nt, Human
gcaccuaccaucagggacaggau

SEQ ID NO: 2580577 - RNA, 20 nt, Human
gcaccuaccaucagggacag

SEQ ID NO: 2580578 - RNA, 19 nt, Human
gcaccuaccaucagggaca

SEQ ID NO: 2580579 - RNA, 17 nt, Human
gcaccuaccaucaggga

SEQ ID NO: 2580580 - RNA, 14 nt, Human
gcaccuacuuacau

SEQ ID NO: 2580581 - RNA, 21 nt, Human
gcaccuacuacaucgcccucc

SEQ ID NO: 2580582 - RNA, 23 nt, Human
gcaccuacuacaucgcccuccac

SEQ ID NO: 2580583 - RNA, 17 nt, Human
gcaccuauagucccagc

SEQ ID NO: 2580584 - RNA, 18 nt, Human
gcaccuauagucccagcu

SEQ ID NO: 2580585 - RNA, 21 nt, Human
gcaccucacagaaaugagauc

SEQ ID NO: 2580586 - RNA, 21 nt, Human
gcaccuauagucccagcuacu

SEQ ID NO: 2580587 - RNA, 15 nt, Human
gauuuuuuuuucaua

SEQ ID NO: 2580588 - RNA, 19 nt, Human
gauuuuuugcauuccugac

SEQ ID NO: 2580589 - RNA, 14 nt, Human
gauuuuuuucugag

SEQ ID NO: 2580590 - RNA, 21 nt, Human
gcacagugcaucucagcccac

SEQ ID NO: 2580591 - RNA, 20 nt, Human
gcacagugcaucucagccca

SEQ ID NO: 2580592 - RNA, 19 nt, Human
gcacagugcaucucagccc

SEQ ID NO: 2580593 - RNA, 20 nt, Human
gcacaguguuaaaugaaauu

SEQ ID NO: 2580594 - RNA, 17 nt, Human
gcacaguguuaaaugaa

SEQ ID NO: 2580595 - RNA, 23 nt, Human
gcacagugucugggcugacuggg

SEQ ID NO: 2580596 - RNA, 21 nt, Human
gcacagugucugggcugacug

SEQ ID NO: 2580597 - RNA, 19 nt, Human
gcacagugucugggcugac

SEQ ID NO: 2580598 - RNA, 18 nt, Human
gcacagugucugggcuga

SEQ ID NO: 2580599 - RNA, 17 nt, Human
gcacagugucugggcug

SEQ ID NO: 2580600 - RNA, 15 nt, Human
gcacagugucugggc

SEQ ID NO: 2580601 - RNA, 22 nt, Human
gcacagugguggcagggccuag

SEQ ID NO: 2580602 - RNA, 18 nt, Human
gcacagugguggcagggc

SEQ ID NO: 2580603 - RNA, 17 nt, Human
gcacagugguggcaggg

SEQ ID NO: 2580604 - RNA, 16 nt, Human
gcacagugguggcagg

SEQ ID NO: 2580605 - RNA, 14 nt, Human
gcacagugccugca

SEQ ID NO: 2580606 - RNA, 20 nt, Human
gcacaguuuucugagaaaga

SEQ ID NO: 2580607 - RNA, 22 nt, Human
gcacaguuuucugagaaagacu

SEQ ID NO: 2580608 - RNA, 23 nt, Human
gcacaguuuucugagaaagacua

SEQ ID NO: 2580609 - RNA, 23 nt, Human
gcacaguuuucuggcuggagccu

SEQ ID NO: 2580610 - RNA, 15 nt, Human
gcacaguucaugguu

SEQ ID NO: 2580611 - RNA, 21 nt, Human
gcacauagcuaucaagugugc

SEQ ID NO: 2580612 - RNA, 17 nt, Human
gcacaauauugaacuuu

SEQ ID NO: 2580613 - RNA, 20 nt, Human
gcacaauaguaaccugggua

SEQ ID NO: 2580614 - RNA, 15 nt, Human
gcacaauaguaaccu

SEQ ID NO: 2580615 - RNA, 14 nt, Human
gcacacauuuuuua

SEQ ID NO: 2580616 - RNA, 20 nt, Human
gcacaauauugaacuuuuuu

SEQ ID NO: 2580617 - RNA, 19 nt, Human
gcacaauauugaacuuuuu

SEQ ID NO: 2580618 - RNA, 18 nt, Human
gcacacccacucagcucc

SEQ ID NO: 2580619 - RNA, 15 nt, Human
gcacacccagguuug

SEQ ID NO: 2580620 - RNA, 17 nt, Human
gcacacccacucagcuc

SEQ ID NO: 2580621 - RNA, 14 nt, Human
gcacaccgggcacu

SEQ ID NO: 2580622 - RNA, 16 nt, Human
gcacaauaaaaauguu

SEQ ID NO: 2580623 - RNA, 17 nt, Human
gcacaauaaaaauguuu

SEQ ID NO: 2580624 - RNA, 19 nt, Human
gcacaaggcugaccaagag

SEQ ID NO: 2580625 - RNA, 14 nt, Human
gcaauauguaaaua

SEQ ID NO: 2580626 - RNA, 21 nt, Human
gcaauauuaaugccuuuaaag

SEQ ID NO: 2580627 - RNA, 22 nt, Human
gcacaagcugcacccucaggca

SEQ ID NO: 2580628 - RNA, 20 nt, Human
gcaaguauuagaauaccaca

SEQ ID NO: 2580629 - RNA, 18 nt, Human
gcaagucagaauagaaau

SEQ ID NO: 2580630 - RNA, 23 nt, Human
gcaauauaucuaaauugaauaau

SEQ ID NO: 2580631 - RNA, 17 nt, Human
gcaauauaucuaaauug

SEQ ID NO: 2580632 - RNA, 17 nt, Human
gcaauauagaaacacga

SEQ ID NO: 2580633 - RNA, 20 nt, Human
gcaaguucuagagaagaggc

SEQ ID NO: 2580634 - RNA, 17 nt, Human
gcaauagugggcccucc

SEQ ID NO: 2580635 - RNA, 13 nt, Human
gcaauaguguguu

SEQ ID NO: 2580636 - RNA, 14 nt, Human
gcaauauagaaaca

SEQ ID NO: 2580637 - RNA, 17 nt, Human
gcaauaguguguucuga

SEQ ID NO: 2580638 - RNA, 20 nt, Human
gcaauaguguguucugauua

SEQ ID NO: 2580639 - RNA, 22 nt, Human
gcaauagucaaauugugugaaa

SEQ ID NO: 2580640 - RNA, 17 nt, Human
gcaaguucuagagaaga

SEQ ID NO: 2580641 - RNA, 19 nt, Human
gcaagugugugcaugugug

SEQ ID NO: 2580642 - RNA, 21 nt, Human
gcaagugugugcaugugugcg

SEQ ID NO: 2580643 - RNA, 22 nt, Human
gcaagugugugcaugugugcga

SEQ ID NO: 2580644 - RNA, 23 nt, Human
gcaaguguguaugugcgugugug

SEQ ID NO: 2580645 - RNA, 12 nt, Human
gcaagugugugc

SEQ ID NO: 2580646 - RNA, 13 nt, Human
gcaagugugugca

SEQ ID NO: 2580647 - RNA, 23 nt, Human
gcaagugugugcacaugugugcg

SEQ ID NO: 2580648 - RNA, 20 nt, Human
gcaagugauugggacagagg

SEQ ID NO: 2580649 - RNA, 19 nt, Human
gcaagugauugggacagag

SEQ ID NO: 2580650 - RNA, 21 nt, Human
gcaaguguaugcacgugugca

SEQ ID NO: 2580651 - RNA, 15 nt, Human
gcaagugucugugug

SEQ ID NO: 2580652 - RNA, 16 nt, Human
gcaagugucugugugc

SEQ ID NO: 2580653 - RNA, 17 nt, Human
gcaagugucugugugca

SEQ ID NO: 2580654 - RNA, 17 nt, Human
gcaagucauggcugugc

SEQ ID NO: 2580655 - RNA, 20 nt, Human
gcaagucccugacucucugu

SEQ ID NO: 2580656 - RNA, 22 nt, Human
gcaagucccugacucucuguga

SEQ ID NO: 2580657 - RNA, 23 nt, Human
gcaagucagaggauggccagugu

SEQ ID NO: 2580658 - RNA, 21 nt, Human
gcaagucagaggauggccagu

SEQ ID NO: 2580659 - RNA, 19 nt, Human
gcaagucagaggauggcca

SEQ ID NO: 2580660 - RNA, 15 nt, Human
gcaagucagaggaug

SEQ ID NO: 2580661 - RNA, 24 nt, Human
gcaagucagaggauggccaguguc

SEQ ID NO: 2580662 - RNA, 12 nt, Human
gcaagucaggac

SEQ ID NO: 2580663 - RNA, 13 nt, Human
gcaagucaggguu

SEQ ID NO: 2580664 - RNA, 16 nt, Human
gaugaucuuuaaaaua

SEQ ID NO: 2580665 - RNA, 21 nt, Human
gaugaucuaggaagacuuugg

SEQ ID NO: 2580666 - RNA, 15 nt, Human
gaugaucuaggaaga

SEQ ID NO: 2580667 - RNA, 18 nt, Human
gaugauacaagauuagaa

SEQ ID NO: 2580668 - RNA, 16 nt, Human
gaugagugagcaugcc

SEQ ID NO: 2580669 - RNA, 14 nt, Human
gaugaggggaggaa

SEQ ID NO: 2580670 - RNA, 14 nt, Human
gaugaggugcuggg

SEQ ID NO: 2580671 - RNA, 16 nt, Human
gaugaggugcugggag

SEQ ID NO: 2580672 - RNA, 17 nt, Human
gaugaggugcugggagg

SEQ ID NO: 2580673 - RNA, 20 nt, Human
gaugaguccccugugagauu

SEQ ID NO: 2580674 - RNA, 19 nt, Human
gaugaggugcugggaggga

SEQ ID NO: 2580675 - RNA, 17 nt, Human
gauguagaggagaaacu

SEQ ID NO: 2580676 - RNA, 18 nt, Human
gauguagaggagaaacug

SEQ ID NO: 2580677 - RNA, 18 nt, Human
gauguagccaugaccuua

SEQ ID NO: 2580678 - RNA, 15 nt, Human
gauguagauuuauuu

SEQ ID NO: 2580679 - RNA, 17 nt, Human
gauguagauuuauuuca

SEQ ID NO: 2580680 - RNA, 14 nt, Human
gauguagauuuauu

SEQ ID NO: 2580681 - RNA, 19 nt, Human
gauguaaacagugccugcu

SEQ ID NO: 2580682 - RNA, 20 nt, Human
gauguaaacagugccugcug

SEQ ID NO: 2580683 - RNA, 21 nt, Human
gauguaaacagugccugcuga

SEQ ID NO: 2580684 - RNA, 19 nt, Human
gauggagcccaggcgggag

SEQ ID NO: 2580685 - RNA, 17 nt, Human
gauggagcccaggcggg

SEQ ID NO: 2580686 - RNA, 14 nt, Human
gauggagcccaggc

SEQ ID NO: 2580687 - RNA, 20 nt, Human
gauggagccagcucugcauu

SEQ ID NO: 2580688 - RNA, 17 nt, Human
gaugguucguucuguuu

SEQ ID NO: 2580689 - RNA, 22 nt, Human
gauggagcccaggcgggagcgg

SEQ ID NO: 2580690 - RNA, 16 nt, Human
gauggagcgcaccugc

SEQ ID NO: 2580691 - RNA, 22 nt, Human
gaugguucccuugaugaagaag

SEQ ID NO: 2580692 - RNA, 16 nt, Human
gauguaaacagugccu

SEQ ID NO: 2580693 - RNA, 18 nt, Human
gauguaaaagacuuuuuu

SEQ ID NO: 2580694 - RNA, 19 nt, Human
gaugcugauguucagugua

SEQ ID NO: 2580695 - RNA, 18 nt, Human
gaugcugauguucagugu

SEQ ID NO: 2580696 - RNA, 17 nt, Human
gaugcugauguucagug

SEQ ID NO: 2580697 - RNA, 16 nt, Human
gaugcugauguucagu

SEQ ID NO: 2580698 - RNA, 15 nt, Human
gaugcugauguucag

SEQ ID NO: 2580699 - RNA, 21 nt, Human
gaugaucuacucagaaauuuu

SEQ ID NO: 2580700 - RNA, 13 nt, Human
gaugcugauguuc

SEQ ID NO: 2580701 - RNA, 15 nt, Human
gaugaucuacucaga

SEQ ID NO: 2580702 - RNA, 21 nt, Human
gaugauacaagauuagaagcu

SEQ ID NO: 2580703 - RNA, 13 nt, Human
gaugcugccccuc

SEQ ID NO: 2580704 - RNA, 12 nt, Human
gaugcugccuga

SEQ ID NO: 2580705 - RNA, 12 nt, Human
gaugcugccccu

SEQ ID NO: 2580706 - RNA, 23 nt, Human
gaugcugccagggcgccaucgcc

SEQ ID NO: 2580707 - RNA, 14 nt, Human
gaugcuggagaaga

SEQ ID NO: 2580708 - RNA, 15 nt, Human
gaugcugcuuucccc

SEQ ID NO: 2580709 - RNA, 12 nt, Human
gaugcugcuuuc

SEQ ID NO: 2580710 - RNA, 11 nt, Human
gaugcugcuuu

SEQ ID NO: 2580711 - RNA, 14 nt, Human
gaugcugccugagu

SEQ ID NO: 2580712 - RNA, 16 nt, Human
gaugcugccugaguca

SEQ ID NO: 2580713 - RNA, 23 nt, Human
gauggagacugguccugugugca

SEQ ID NO: 2580714 - RNA, 22 nt, Human
gauggagacugguccugugugc

SEQ ID NO: 2580715 - RNA, 14 nt, Human
gauggagagagggg

SEQ ID NO: 2580716 - RNA, 15 nt, Human
gauggagagagggga

SEQ ID NO: 2580717 - RNA, 22 nt, Human
gauggagcagagcaagucugca

SEQ ID NO: 2580718 - RNA, 16 nt, Human
gauggagagaggggaa

SEQ ID NO: 2580719 - RNA, 22 nt, Human
gauggagacuccaugagaagcc

SEQ ID NO: 2580720 - RNA, 21 nt, Human
gaugcuggagaagagaggaga

SEQ ID NO: 2580721 - RNA, 20 nt, Human
gaugcuggagaagagaggag

SEQ ID NO: 2580722 - RNA, 19 nt, Human
gaugcuggagaagagagga

SEQ ID NO: 2580723 - RNA, 16 nt, Human
gaugcuggagaagaga

SEQ ID NO: 2580724 - RNA, 15 nt, Human
gaugcuggagagguu

SEQ ID NO: 2580725 - RNA, 14 nt, Human
gaugcuggagaggu

SEQ ID NO: 2580726 - RNA, 16 nt, Human
gaugcuggagagguua

SEQ ID NO: 2580727 - RNA, 14 nt, Human
gaugcuggaugcuc

SEQ ID NO: 2580728 - RNA, 16 nt, Human
gaugcuggaugcuccu

SEQ ID NO: 2580729 - RNA, 12 nt, Human
gauggacagacu

SEQ ID NO: 2580730 - RNA, 16 nt, Human
gaucugcucagcccug

SEQ ID NO: 2580731 - RNA, 15 nt, Human
gaucugcucagcccu

SEQ ID NO: 2580732 - RNA, 14 nt, Human
gaucugcucagccc

SEQ ID NO: 2580733 - RNA, 13 nt, Human
gaucugcucagcc

SEQ ID NO: 2580734 - RNA, 20 nt, Human
gaucugcucagcccuggagg

SEQ ID NO: 2580735 - RNA, 19 nt, Human
gaucugcucagcccuggag

SEQ ID NO: 2580736 - RNA, 18 nt, Human
gaucugcucagcccugga

SEQ ID NO: 2580737 - RNA, 17 nt, Human
gaucugcucagcccugg

SEQ ID NO: 2580738 - RNA, 21 nt, Human
gaucugcucagcccuggaggu

SEQ ID NO: 2580739 - RNA, 21 nt, Human
gauguauguugaagccuuugu

SEQ ID NO: 2580740 - RNA, 19 nt, Human
gauguaugcagcuaucugg

SEQ ID NO: 2580741 - RNA, 15 nt, Human
gaugucacagggcca

SEQ ID NO: 2580742 - RNA, 13 nt, Human
gaugucacagggc

SEQ ID NO: 2580743 - RNA, 18 nt, Human
gaugucaauuucuguguu

SEQ ID NO: 2580744 - RNA, 15 nt, Human
gaugucaauuucugu

SEQ ID NO: 2580745 - RNA, 18 nt, Human
gauguauuuuuguacccu

SEQ ID NO: 2580746 - RNA, 20 nt, Human
gauguauguugaagccuuug

SEQ ID NO: 2580747 - RNA, 18 nt, Human
gauguauccaugggggca

SEQ ID NO: 2580748 - RNA, 17 nt, Human
gauguaggcauucugga

SEQ ID NO: 2580749 - RNA, 19 nt, Human
gauguaggguaaggugccu

SEQ ID NO: 2580750 - RNA, 20 nt, Human
gauguaggguaaggugccuu

SEQ ID NO: 2580751 - RNA, 21 nt, Human
gauguaggguaaggugccuuc

SEQ ID NO: 2580752 - RNA, 14 nt, Human
gauuauauuaugaa

SEQ ID NO: 2580753 - RNA, 20 nt, Human
gauuauagauuggagccacc

SEQ ID NO: 2580754 - RNA, 13 nt, Human
gauuauacagaau

SEQ ID NO: 2580755 - RNA, 14 nt, Human
gauuauggagcuuu

SEQ ID NO: 2580756 - RNA, 20 nt, Human
gauuauaggcaccuaccacc

SEQ ID NO: 2580757 - RNA, 21 nt, Human
gauuauaguugugggugggag

SEQ ID NO: 2580758 - RNA, 13 nt, Human
gauuauucagugu

SEQ ID NO: 2580759 - RNA, 14 nt, Human
gauuauucaguguc

SEQ ID NO: 2580760 - RNA, 19 nt, Human
gauuauucauuuaaaauga

SEQ ID NO: 2580761 - RNA, 16 nt, Human
gauuauucauuuaaaa

SEQ ID NO: 2580762 - RNA, 15 nt, Human
gauuauucauuuaaa

SEQ ID NO: 2580763 - RNA, 14 nt, Human
gauuauucauuuaa

SEQ ID NO: 2580764 - RNA, 13 nt, Human
gauuauucauuua

SEQ ID NO: 2580765 - RNA, 15 nt, Human
gauuauucaguguca

SEQ ID NO: 2580766 - RNA, 12 nt, Human
gauuauuggaaa

SEQ ID NO: 2580767 - RNA, 19 nt, Human
gauuauucugauuccacuu

SEQ ID NO: 2580768 - RNA, 17 nt, Human
gauuauucugauuccac

SEQ ID NO: 2580769 - RNA, 21 nt, Human
gauuauucauuuaaaaugauu

SEQ ID NO: 2580770 - RNA, 20 nt, Human
gauuauucauuuaaaaugau

SEQ ID NO: 2580771 - RNA, 22 nt, Human
gauuauucauuuaaaaugauua

SEQ ID NO: 2580772 - RNA, 23 nt, Human
gauuauucccuguacaauauuua

SEQ ID NO: 2580773 - RNA, 17 nt, Human
gauucuccugccucagc

SEQ ID NO: 2580774 - RNA, 15 nt, Human
gauucuccugccuca

SEQ ID NO: 2580775 - RNA, 14 nt, Human
gauucugagagcug

SEQ ID NO: 2580776 - RNA, 15 nt, Human
gauucugcaguaaau

SEQ ID NO: 2580777 - RNA, 16 nt, Human
gauucugcaguaaauc

SEQ ID NO: 2580778 - RNA, 18 nt, Human
gauucuccugccucagcc

SEQ ID NO: 2580779 - RNA, 15 nt, Human
gauuuaccacuugug

SEQ ID NO: 2580780 - RNA, 23 nt, Human
gauucuuauguagcaggaaauaa

SEQ ID NO: 2580781 - RNA, 14 nt, Human
gauucuuccaucug

SEQ ID NO: 2580782 - RNA, 16 nt, Human
gauuuacaguuucaaa

SEQ ID NO: 2580783 - RNA, 17 nt, Human
gauucuuccucccuccc

SEQ ID NO: 2580784 - RNA, 18 nt, Human
gauucuuccucccucccu

SEQ ID NO: 2580785 - RNA, 19 nt, Human
gauucuggauaaagccacu

SEQ ID NO: 2580786 - RNA, 17 nt, Human
gauucuggauaaagcca

SEQ ID NO: 2580787 - RNA, 13 nt, Human
gauucugcuuuua

SEQ ID NO: 2580788 - RNA, 18 nt, Human
gauucugcaguaaaucuu

SEQ ID NO: 2580789 - RNA, 19 nt, Human
gauucugcaguaaaucuuu

SEQ ID NO: 2580790 - RNA, 21 nt, Human
gauucugcaguaaaucuuuua

SEQ ID NO: 2580791 - RNA, 22 nt, Human
gauucugguuccagggucccuc

SEQ ID NO: 2580792 - RNA, 16 nt, Human
gauucuucaaaagcau

SEQ ID NO: 2580793 - RNA, 17 nt, Human
gauucugguuccagggu

SEQ ID NO: 2580794 - RNA, 22 nt, Human
gauucugggaggaagcagguug

SEQ ID NO: 2580795 - RNA, 22 nt, Human
gauucuggauaaagccacugaa

SEQ ID NO: 2580796 - RNA, 15 nt, Human
gauucugggaggaag

SEQ ID NO: 2580797 - RNA, 20 nt, Human
gauuuuuuacagcugccugc

SEQ ID NO: 2580798 - RNA, 15 nt, Human
gauuuaucaaaucag

SEQ ID NO: 2580799 - RNA, 14 nt, Human
gauuuaucaaauca

SEQ ID NO: 2580800 - RNA, 13 nt, Human
gauuuaucaaauc

SEQ ID NO: 2580801 - RNA, 12 nt, Human
gauuuaucaaau

SEQ ID NO: 2580802 - RNA, 21 nt, Human
gauuuauaguuuguacaugca

SEQ ID NO: 2580803 - RNA, 20 nt, Human
gauuuauaguuuguacaugc

SEQ ID NO: 2580804 - RNA, 17 nt, Human
gauuuauaguuuguaca

SEQ ID NO: 2580805 - RNA, 16 nt, Human
gauuuaccacuugugu

SEQ ID NO: 2580806 - RNA, 15 nt, Human
gauuuacgcucauug

SEQ ID NO: 2580807 - RNA, 20 nt, Human
gauuuaccuguuuucgcacc

SEQ ID NO: 2580808 - RNA, 22 nt, Human
gauuuacaguuucaaaaacugu

SEQ ID NO: 2580809 - RNA, 22 nt, Human
gauuuaguguuuuuaccucugu

SEQ ID NO: 2580810 - RNA, 13 nt, Human
gauuuauaaaugc

SEQ ID NO: 2580811 - RNA, 18 nt, Human
gauuuauaaaugcuauuu

SEQ ID NO: 2580812 - RNA, 15 nt, Human
gauuuagaacuguau

SEQ ID NO: 2580813 - RNA, 20 nt, Human
gauuuaggagaagccaggaa

SEQ ID NO: 2580814 - RNA, 22 nt, Human
gauuuagugaaagcuagagaua

SEQ ID NO: 2580815 - RNA, 21 nt, Human
gauuuaguguuuuuaccucug

SEQ ID NO: 2580816 - RNA, 16 nt, Human
gagcugcuggcuugca

SEQ ID NO: 2580817 - RNA, 21 nt, Human
gagcugcuggcuugcagugcg

SEQ ID NO: 2580818 - RNA, 21 nt, Human
gagcugccuuggcucagacau

SEQ ID NO: 2580819 - RNA, 22 nt, Human
gagcugccuuggcucagacaug

SEQ ID NO: 2580820 - RNA, 18 nt, Human
gagcugcuauagccuggg

SEQ ID NO: 2580821 - RNA, 20 nt, Human
gagcugcuauagccuggggu

SEQ ID NO: 2580822 - RNA, 13 nt, Human
gagcugcucacua

SEQ ID NO: 2580823 - RNA, 21 nt, Human
gagcugcuauagccuggggug

SEQ ID NO: 2580824 - RNA, 24 nt, Human
gagcugcucugaauuaguccuugc

SEQ ID NO: 2580825 - RNA, 14 nt, Human
gagcugcucugaau

SEQ ID NO: 2580826 - RNA, 16 nt, Human
gagcugcucuggaaaa

SEQ ID NO: 2580827 - RNA, 14 nt, Human
gagcugcugcccug

SEQ ID NO: 2580828 - RNA, 13 nt, Human
gagcugcugcccu

SEQ ID NO: 2580829 - RNA, 12 nt, Human
gagcugcuggcu

SEQ ID NO: 2580830 - RNA, 20 nt, Human
gagccuuccaggggugggac

SEQ ID NO: 2580831 - RNA, 22 nt, Human
gagcgccgugaguucucagggc

SEQ ID NO: 2580832 - RNA, 21 nt, Human
gagcgccgugaguucucaggg

SEQ ID NO: 2580833 - RNA, 23 nt, Human
gagcgccuccauccaaggccagg

SEQ ID NO: 2580834 - RNA, 19 nt, Human
gagcgccuccauccaaggc

SEQ ID NO: 2580835 - RNA, 15 nt, Human
gagcugccuuggcuc

SEQ ID NO: 2580836 - RNA, 18 nt, Human
gagcugccuuggcucaga

SEQ ID NO: 2580837 - RNA, 21 nt, Human
gagcgcccacuagacccacug

SEQ ID NO: 2580838 - RNA, 20 nt, Human
gagcgcaccugcccccuggu

SEQ ID NO: 2580839 - RNA, 17 nt, Human
gagcgcccgcgcccgcg

SEQ ID NO: 2580840 - RNA, 12 nt, Human
gagcgccccucc

SEQ ID NO: 2580841 - RNA, 16 nt, Human
gagcgcaucaggccug

SEQ ID NO: 2580842 - RNA, 23 nt, Human
gagccuuccaggggugggacacc

SEQ ID NO: 2580843 - RNA, 13 nt, Human
gagccuugaacuu

SEQ ID NO: 2580844 - RNA, 22 nt, Human
gagccuucugaggacauuccaa

SEQ ID NO: 2580845 - RNA, 18 nt, Human
gagcgcaccugcccccug

SEQ ID NO: 2580846 - RNA, 17 nt, Human
gaggggccuaggccuca

SEQ ID NO: 2580847 - RNA, 19 nt, Human
gaggggccuaggccucagc

SEQ ID NO: 2580848 - RNA, 22 nt, Human
gaggggccuaggccucagccag

SEQ ID NO: 2580849 - RNA, 23 nt, Human
gaggggccuaggccucagccaga

SEQ ID NO: 2580850 - RNA, 21 nt, Human
gaggggcccguugucucccug

SEQ ID NO: 2580851 - RNA, 17 nt, Human
gaggggcccgcuugccu

SEQ ID NO: 2580852 - RNA, 14 nt, Human
gaggggccccugcu

SEQ ID NO: 2580853 - RNA, 22 nt, Human
gaggggccccugcuucuccagc

SEQ ID NO: 2580854 - RNA, 13 nt, Human
gaggggcccgagc

SEQ ID NO: 2580855 - RNA, 14 nt, Human
gaggggccucaggu

SEQ ID NO: 2580856 - RNA, 18 nt, Human
gaggcugcagccaggcca

SEQ ID NO: 2580857 - RNA, 20 nt, Human
gaggcugaggcuggcacagg

SEQ ID NO: 2580858 - RNA, 16 nt, Human
gaggcugaggcuggca

SEQ ID NO: 2580859 - RNA, 19 nt, Human
gaggcugaggcuggcacag

SEQ ID NO: 2580860 - RNA, 15 nt, Human
gaggcugaggcuggc

SEQ ID NO: 2580861 - RNA, 12 nt, Human
gaggcugaggcg

SEQ ID NO: 2580862 - RNA, 13 nt, Human
gagggcugcccug

SEQ ID NO: 2580863 - RNA, 20 nt, Human
gaggcugcagaaggccaaga

SEQ ID NO: 2580864 - RNA, 21 nt, Human
gagggcuggaaucuggagagc

SEQ ID NO: 2580865 - RNA, 20 nt, Human
gagggcuggaaucuggagag

SEQ ID NO: 2580866 - RNA, 19 nt, Human
gagggcuggaaucuggaga

SEQ ID NO: 2580867 - RNA, 18 nt, Human
gagggcuggaaucuggag

SEQ ID NO: 2580868 - RNA, 13 nt, Human
gagggcuggaauc

SEQ ID NO: 2580869 - RNA, 15 nt, Human
gagggcuggaaucug

SEQ ID NO: 2580870 - RNA, 13 nt, Human
gaggggcaggcug

SEQ ID NO: 2580871 - RNA, 23 nt, Human
gaggggcaggcccugcacugucc

SEQ ID NO: 2580872 - RNA, 17 nt, Human
gaggggcaggcccugca

SEQ ID NO: 2580873 - RNA, 15 nt, Human
gaggggcaggcccug

SEQ ID NO: 2580874 - RNA, 14 nt, Human
gaggggcaggcccu

SEQ ID NO: 2580875 - RNA, 13 nt, Human
gaggggcaggccc

SEQ ID NO: 2580876 - RNA, 16 nt, Human
gaggggcagcccuugc

SEQ ID NO: 2580877 - RNA, 16 nt, Human
gaggggcaggcugaca

SEQ ID NO: 2580878 - RNA, 14 nt, Human
gaggggcaggcuga

SEQ ID NO: 2580879 - RNA, 17 nt, Human
gaggggcaucugccccu

SEQ ID NO: 2580880 - RNA, 22 nt, Human
gaggggcaucugccccuccccc

SEQ ID NO: 2580881 - RNA, 15 nt, Human
gaggggcagguaaac

SEQ ID NO: 2580882 - RNA, 19 nt, Human
gaggggcauggccagcagc

SEQ ID NO: 2580883 - RNA, 22 nt, Human
gaggcuagugugguguuuccug

SEQ ID NO: 2580884 - RNA, 19 nt, Human
gaggccagagacacaagcc

SEQ ID NO: 2580885 - RNA, 14 nt, Human
gaggccagagacac

SEQ ID NO: 2580886 - RNA, 13 nt, Human
gaggccagagaca

SEQ ID NO: 2580887 - RNA, 20 nt, Human
gaggccaccucuccaagggc

SEQ ID NO: 2580888 - RNA, 17 nt, Human
gaggccaccucuccaag

SEQ ID NO: 2580889 - RNA, 16 nt, Human
gaggccaccucuccaa

SEQ ID NO: 2580890 - RNA, 10 nt, Human
gaggccaccu

SEQ ID NO: 2580891 - RNA, 23 nt, Human
gaggccacaugagucccaguggg

SEQ ID NO: 2580892 - RNA, 15 nt, Human
gaggccaccucucca

SEQ ID NO: 2580893 - RNA, 14 nt, Human
gaggccaccucucc

SEQ ID NO: 2580894 - RNA, 12 nt, Human
gaggccaccucu

SEQ ID NO: 2580895 - RNA, 15 nt, Human
gaggccaagugcagg

SEQ ID NO: 2580896 - RNA, 18 nt, Human
gaggccacacucagcaca

SEQ ID NO: 2580897 - RNA, 21 nt, Human
gaggccacacucagcacaagg

SEQ ID NO: 2580898 - RNA, 22 nt, Human
gaggccacaugagucccagugg

SEQ ID NO: 2580899 - RNA, 17 nt, Human
gaggccacaugaguccc

SEQ ID NO: 2580900 - RNA, 16 nt, Human
gaggccacaugagucc

SEQ ID NO: 2580901 - RNA, 17 nt, Human
gaggccaagugcaggcu

SEQ ID NO: 2580902 - RNA, 19 nt, Human
gaggcuccacuuggucugu

SEQ ID NO: 2580903 - RNA, 18 nt, Human
gaggcuccacuuggucug

SEQ ID NO: 2580904 - RNA, 10 nt, Human
gaggcucagg

SEQ ID NO: 2580905 - RNA, 20 nt, Human
gaggcuauuauuuucacugu

SEQ ID NO: 2580906 - RNA, 21 nt, Human
gaggcuagaaccaagaagggc

SEQ ID NO: 2580907 - RNA, 18 nt, Human
gaggccaccucuccaagg

SEQ ID NO: 2580908 - RNA, 18 nt, Human
gaggcuacuguaaggcaa

SEQ ID NO: 2580909 - RNA, 12 nt, Human
gaggcucagguc

SEQ ID NO: 2580910 - RNA, 14 nt, Human
gaggcugaggcaga

SEQ ID NO: 2580911 - RNA, 23 nt, Human
gaggcuccacuuggucugugaga

SEQ ID NO: 2580912 - RNA, 19 nt, Human
gaggcugaggccuggacuu

SEQ ID NO: 2580913 - RNA, 18 nt, Human
gaggcugaggccuggacu

SEQ ID NO: 2580914 - RNA, 16 nt, Human
gaggcugaggccugga

SEQ ID NO: 2580915 - RNA, 14 nt, Human
gaggcugaggccug

SEQ ID NO: 2580916 - RNA, 16 nt, Human
gaggcugaggcagaag

SEQ ID NO: 2580917 - RNA, 18 nt, Human
gaggcugaggcagaagaa

SEQ ID NO: 2580918 - RNA, 16 nt, Human
gaggcugaggcaggag

SEQ ID NO: 2580919 - RNA, 17 nt, Human
gaggcugaggcaggagg

SEQ ID NO: 2580920 - RNA, 14 nt, Human
gaggcagggucuca

SEQ ID NO: 2580921 - RNA, 15 nt, Human
gaggcaggggcggag

SEQ ID NO: 2580922 - RNA, 23 nt, Human
gaggcagggccuugcccagagau

SEQ ID NO: 2580923 - RNA, 14 nt, Human
gaggcaggggcgga

SEQ ID NO: 2580924 - RNA, 22 nt, Human
gaggcagggccuugcccagaga

SEQ ID NO: 2580925 - RNA, 15 nt, Human
gaggacgcucucugg

SEQ ID NO: 2580926 - RNA, 22 nt, Human
gaggacgagcgauugaggugua

SEQ ID NO: 2580927 - RNA, 19 nt, Human
gaggaccuuaucugugcgu

SEQ ID NO: 2580928 - RNA, 15 nt, Human
gaggaccuuaucugu

SEQ ID NO: 2580929 - RNA, 13 nt, Human
gaggcaggucccc

SEQ ID NO: 2580930 - RNA, 16 nt, Human
gaggcagguccccaga

SEQ ID NO: 2580931 - RNA, 12 nt, Human
gaggcagguccc

SEQ ID NO: 2580932 - RNA, 15 nt, Human
gaggcagggucucac

SEQ ID NO: 2580933 - RNA, 17 nt, Human
gaggccaaggugggagg

SEQ ID NO: 2580934 - RNA, 22 nt, Human
gaggccaaggugggaggauugc

SEQ ID NO: 2580935 - RNA, 22 nt, Human
gaggcagugggucccacuuccc

SEQ ID NO: 2580936 - RNA, 19 nt, Human
gaggcagugggucccacuu

SEQ ID NO: 2580937 - RNA, 14 nt, Human
gaggcagugggucc

SEQ ID NO: 2580938 - RNA, 13 nt, Human
gaggcagggucag

SEQ ID NO: 2580939 - RNA, 13 nt, Human
gaggucuaaucua

SEQ ID NO: 2580940 - RNA, 23 nt, Human
gaggucgguagguucagccaagg

SEQ ID NO: 2580941 - RNA, 22 nt, Human
gaggucgguagguucagccaag

SEQ ID NO: 2580942 - RNA, 21 nt, Human
gaggucgguagguucagccaa

SEQ ID NO: 2580943 - RNA, 22 nt, Human
gaggucgaccccaaagccccuu

SEQ ID NO: 2580944 - RNA, 20 nt, Human
gaggucgggaguucgagacc

SEQ ID NO: 2580945 - RNA, 15 nt, Human
gaggucgaggcagga

SEQ ID NO: 2580946 - RNA, 15 nt, Human
gaggugaaagggagc

SEQ ID NO: 2580947 - RNA, 19 nt, Human
gaggucuuuugacaugugg

SEQ ID NO: 2580948 - RNA, 15 nt, Human
gaggucucuugaggg

SEQ ID NO: 2580949 - RNA, 22 nt, Human
gaggucuuuugacauguggaaa

SEQ ID NO: 2580950 - RNA, 20 nt, Human
gaggucucgcugaugcuggg

SEQ ID NO: 2580951 - RNA, 17 nt, Human
gaggucucgcugaugcu

SEQ ID NO: 2580952 - RNA, 23 nt, Human
gaggucucgcugaugcugggcug

SEQ ID NO: 2580953 - RNA, 22 nt, Human
gaggucucgcugaugcugggcu

SEQ ID NO: 2580954 - RNA, 16 nt, Human
gaggucucugccggcu

SEQ ID NO: 2580955 - RNA, 14 nt, Human
gaggucucuugagg

SEQ ID NO: 2580956 - RNA, 23 nt, Human
gaggugaccccagguuucuaugu

SEQ ID NO: 2580957 - RNA, 16 nt, Human
gaggugaaagggagcu

SEQ ID NO: 2580958 - RNA, 18 nt, Human
gagugacagaggcagccc

SEQ ID NO: 2580959 - RNA, 15 nt, Human
gagucccaaggaaag

SEQ ID NO: 2580960 - RNA, 16 nt, Human
gagucccaaggaaagc

SEQ ID NO: 2580961 - RNA, 16 nt, Human
gaguccauucucccag

SEQ ID NO: 2580962 - RNA, 15 nt, Human
gaguccauucuccca

SEQ ID NO: 2580963 - RNA, 18 nt, Human
gagucagguuugggguuc

SEQ ID NO: 2580964 - RNA, 18 nt, Human
gaguccauucucccaggu

SEQ ID NO: 2580965 - RNA, 17 nt, Human
gaguccauucucccagg

SEQ ID NO: 2580966 - RNA, 14 nt, Human
gagucccaaggaaa

SEQ ID NO: 2580967 - RNA, 12 nt, Human
gagucccaccuu

SEQ ID NO: 2580968 - RNA, 22 nt, Human
gagucagaaguuucugccgcag

SEQ ID NO: 2580969 - RNA, 22 nt, Human
gagucagacauuuuaagauggu

SEQ ID NO: 2580970 - RNA, 11 nt, Human
gagucagccuu

SEQ ID NO: 2580971 - RNA, 18 nt, Human
gagucagggagagcugaa

SEQ ID NO: 2580972 - RNA, 17 nt, Human
gagucagggaccccugc

SEQ ID NO: 2580973 - RNA, 18 nt, Human
gagucagggaccccugcc

SEQ ID NO: 2580974 - RNA, 22 nt, Human
gagucagggaccccugcccuug

SEQ ID NO: 2580975 - RNA, 20 nt, Human
gaggugcuuaagcagaagca

SEQ ID NO: 2580976 - RNA, 16 nt, Human
gagguggaagaaggga

SEQ ID NO: 2580977 - RNA, 15 nt, Human
gagguggaagaaggg

SEQ ID NO: 2580978 - RNA, 13 nt, Human
gagguggaagaag

SEQ ID NO: 2580979 - RNA, 22 nt, Human
gaggugcuuaagcagaagcauu

SEQ ID NO: 2580980 - RNA, 17 nt, Human
gagguggaagagggcug

SEQ ID NO: 2580981 - RNA, 20 nt, Human
gagguggaagagggcugcaa

SEQ ID NO: 2580982 - RNA, 16 nt, Human
gagucaccaagcccag

SEQ ID NO: 2580983 - RNA, 15 nt, Human
gagucaccaagccca

SEQ ID NO: 2580984 - RNA, 18 nt, Human
gagguggaagaagggaga

SEQ ID NO: 2580985 - RNA, 17 nt, Human
gagguggaagaagggag

SEQ ID NO: 2580986 - RNA, 19 nt, Human
gagguggaagaagggagaa

SEQ ID NO: 2580987 - RNA, 15 nt, Human
gagguggaagcccuc

SEQ ID NO: 2580988 - RNA, 17 nt, Human
gagucaccaagcccagu

SEQ ID NO: 2580989 - RNA, 20 nt, Human
gagguggaagcccuccuucc

SEQ ID NO: 2580990 - RNA, 14 nt, Human
gagucaccaggaau

SEQ ID NO: 2580991 - RNA, 20 nt, Human
gagucacccaugaagacagg

SEQ ID NO: 2580992 - RNA, 17 nt, Human
gaguugaucuggaaccc

SEQ ID NO: 2580993 - RNA, 19 nt, Human
gaguugaucuggaacccag

SEQ ID NO: 2580994 - RNA, 20 nt, Human
gaguugaucuggaacccaga

SEQ ID NO: 2580995 - RNA, 21 nt, Human
gaguugaucuggaacccagac

SEQ ID NO: 2580996 - RNA, 15 nt, Human
gaguugauucagcuc

SEQ ID NO: 2580997 - RNA, 16 nt, Human
gaguugauucagcucu

SEQ ID NO: 2580998 - RNA, 17 nt, Human
gaguugauucagcucug

SEQ ID NO: 2580999 - RNA, 19 nt, Human
gaguggcaggggacaggag

SEQ ID NO: 2581000 - RNA, 16 nt, Human
gaguggcaggggacag

SEQ ID NO: 2581001 - RNA, 14 nt, Human
gaguggcaggggac

SEQ ID NO: 2581002 - RNA, 23 nt, Human
gaguggcaggggacaggagucca

SEQ ID NO: 2581003 - RNA, 14 nt, Human
gaguugaucuggaa

SEQ ID NO: 2581004 - RNA, 16 nt, Human
gaguugaucuggaacc

SEQ ID NO: 2581005 - RNA, 17 nt, Human
gaguggaucuccaagga

SEQ ID NO: 2581006 - RNA, 16 nt, Human
gaguggaucuccaagg

SEQ ID NO: 2581007 - RNA, 22 nt, Human
gaguggaucuccaaggaccagg

SEQ ID NO: 2581008 - RNA, 19 nt, Human
gaguggaucuccaaggacc

SEQ ID NO: 2581009 - RNA, 18 nt, Human
gaguggaugauguuucgu

SEQ ID NO: 2581010 - RNA, 20 nt, Human
gagugacagaggcagcccca

SEQ ID NO: 2581011 - RNA, 18 nt, Human
gagugacggucccacacu

SEQ ID NO: 2581012 - RNA, 15 nt, Human
gagugacggucccac

SEQ ID NO: 2581013 - RNA, 19 nt, Human
gagugacaguggauugcau

SEQ ID NO: 2581014 - RNA, 20 nt, Human
gaguccauucucccagguac

SEQ ID NO: 2581015 - RNA, 18 nt, Human
gagucccaaggaaagccc

SEQ ID NO: 2581016 - RNA, 15 nt, Human
gagugacucgagggu

SEQ ID NO: 2581017 - RNA, 18 nt, Human
gagugacucgaggguugg

SEQ ID NO: 2581018 - RNA, 20 nt, Human
gagugacggucccacacugg

SEQ ID NO: 2581019 - RNA, 19 nt, Human
gagugauagucuuuugcuu

SEQ ID NO: 2581020 - RNA, 19 nt, Human
gagugaguguggcuccccu

SEQ ID NO: 2581021 - RNA, 23 nt, Human
gagugcagccguuugagaagaaa

SEQ ID NO: 2581022 - RNA, 16 nt, Human
gagugcagccguuuga

SEQ ID NO: 2581023 - RNA, 18 nt, Human
gaguggaguggaagaaga

SEQ ID NO: 2581024 - RNA, 18 nt, Human
gaguggaggaggccuggg

SEQ ID NO: 2581025 - RNA, 17 nt, Human
gaguggaggaggccugg

SEQ ID NO: 2581026 - RNA, 19 nt, Human
gaguggagguuaaggcuga

SEQ ID NO: 2581027 - RNA, 19 nt, Human
gagugcaaugacacagucu

SEQ ID NO: 2581028 - RNA, 22 nt, Human
gagugauacaacuucaagugca

SEQ ID NO: 2581029 - RNA, 16 nt, Human
gagugcaacaguagca

SEQ ID NO: 2581030 - RNA, 21 nt, Human
gagugcaagccccugcuccag

SEQ ID NO: 2581031 - RNA, 16 nt, Human
gaguuuaaauuguaau

SEQ ID NO: 2581032 - RNA, 13 nt, Human
gaguuuaaagcaa

SEQ ID NO: 2581033 - RNA, 18 nt, Human
gaguugcugcaaaccuga

SEQ ID NO: 2581034 - RNA, 14 nt, Human
gaguugaugucucc

SEQ ID NO: 2581035 - RNA, 18 nt, Human
gaguugauucagcucugc

SEQ ID NO: 2581036 - RNA, 22 nt, Human
gaguuguuacauuuuuaagugc

SEQ ID NO: 2581037 - RNA, 15 nt, Human
gaguuguugcccugg

SEQ ID NO: 2581038 - RNA, 16 nt, Human
gaguuguuuucagacu

SEQ ID NO: 2581039 - RNA, 22 nt, Human
gaguuguuuucagacucagacu

SEQ ID NO: 2581040 - RNA, 19 nt, Human
gaagcagaauaaagcaauu

SEQ ID NO: 2581041 - RNA, 18 nt, Human
gaagcagaauaaagcaau

SEQ ID NO: 2581042 - RNA, 17 nt, Human
gaagcagaauaaagcaa

SEQ ID NO: 2581043 - RNA, 16 nt, Human
gaagcagaauaaagca

SEQ ID NO: 2581044 - RNA, 15 nt, Human
gaagcagaauaaagc

SEQ ID NO: 2581045 - RNA, 14 nt, Human
gaagcagaauaaag

SEQ ID NO: 2581046 - RNA, 13 nt, Human
gaagcagaauaaa

SEQ ID NO: 2581047 - RNA, 12 nt, Human
gaagcagaauaa

SEQ ID NO: 2581048 - RNA, 23 nt, Human
gaagcacuuugggauucuuucca

SEQ ID NO: 2581049 - RNA, 22 nt, Human
gaagcagaauaaagcaauuuuc

SEQ ID NO: 2581050 - RNA, 23 nt, Human
gaagcagaauaaagcaauuuucc

SEQ ID NO: 2581051 - RNA, 21 nt, Human
gaagcagaauaaagcaauuuu

SEQ ID NO: 2581052 - RNA, 20 nt, Human
gaagcagaauaaagcaauuu

SEQ ID NO: 2581053 - RNA, 15 nt, Human
gaagcagaggaagga

SEQ ID NO: 2581054 - RNA, 21 nt, Human
gaagcagaugcaaagaggcaa

SEQ ID NO: 2581055 - RNA, 19 nt, Human
gaagcagaugcaaagaggc

SEQ ID NO: 2581056 - RNA, 20 nt, Human
gaagcagaugcaaagaggca

SEQ ID NO: 2581057 - RNA, 22 nt, Human
gaagacaaugacuuacuguaca

SEQ ID NO: 2581058 - RNA, 23 nt, Human
gaagacaaugugaaaagaaaaau

SEQ ID NO: 2581059 - RNA, 16 nt, Human
gaagacaaugacuuac

SEQ ID NO: 2581060 - RNA, 17 nt, Human
gaagaauuuucagaccc

SEQ ID NO: 2581061 - RNA, 20 nt, Human
gaagaauuuucagaccccag

SEQ ID NO: 2581062 - RNA, 21 nt, Human
gaagaauuuucagaccccagc

SEQ ID NO: 2581063 - RNA, 12 nt, Human
gaagacacagac

SEQ ID NO: 2581064 - RNA, 21 nt, Human
gaagacacagacugcgauuug

SEQ ID NO: 2581065 - RNA, 17 nt, Human
gaagacaccagagcaga

SEQ ID NO: 2581066 - RNA, 16 nt, Human
gaagacaccagagcag

SEQ ID NO: 2581067 - RNA, 15 nt, Human
gaagacaccagagca

SEQ ID NO: 2581068 - RNA, 14 nt, Human
gaagacaccagagc

SEQ ID NO: 2581069 - RNA, 23 nt, Human
gaagauuuugaaauuuuuauuaa

SEQ ID NO: 2581070 - RNA, 14 nt, Human
gaagcaaaauuuuu

SEQ ID NO: 2581071 - RNA, 21 nt, Human
gaagacaccagagcagaugca

SEQ ID NO: 2581072 - RNA, 18 nt, Human
gaagacaccagagcagau

SEQ ID NO: 2581073 - RNA, 22 nt, Human
gaagacaccagagcagaugcag

SEQ ID NO: 2581074 - RNA, 13 nt, Human
gaagcaaacacau

SEQ ID NO: 2581075 - RNA, 15 nt, Human
gaagcaaacacauua

SEQ ID NO: 2581076 - RNA, 20 nt, Human
gaagcacaugccucucucag

SEQ ID NO: 2581077 - RNA, 17 nt, Human
gaagcacaugccucucu

SEQ ID NO: 2581078 - RNA, 15 nt, Human
gaagcacaugccucu

SEQ ID NO: 2581079 - RNA, 18 nt, Human
gaagcaauaaagaagagu

SEQ ID NO: 2581080 - RNA, 19 nt, Human
gaagcaauaaagaagagug

SEQ ID NO: 2581081 - RNA, 16 nt, Human
gaagcaacagaaaaaa

SEQ ID NO: 2581082 - RNA, 20 nt, Human
gaagcaaugcuucaucccuu

SEQ ID NO: 2581083 - RNA, 16 nt, Human
gaagcaacgaagggaa

SEQ ID NO: 2581084 - RNA, 23 nt, Human
gaagcaacccaaauguucaucaa

SEQ ID NO: 2581085 - RNA, 17 nt, Human
gaagcaaacuaagcccc

SEQ ID NO: 2581086 - RNA, 16 nt, Human
gaagcaaagcaccagc

SEQ ID NO: 2581087 - RNA, 17 nt, Human
gaagcaaacacauuaag

SEQ ID NO: 2581088 - RNA, 16 nt, Human
gaacucuggcuuccag

SEQ ID NO: 2581089 - RNA, 13 nt, Human
gaacugaaaucau

SEQ ID NO: 2581090 - RNA, 14 nt, Human
gaacugaaaucaua

SEQ ID NO: 2581091 - RNA, 22 nt, Human
gaacuccuugauuuuagccuuc

SEQ ID NO: 2581092 - RNA, 20 nt, Human
gaacuccugggcucaagcag

SEQ ID NO: 2581093 - RNA, 20 nt, Human
gaacucugacaacagacuuc

SEQ ID NO: 2581094 - RNA, 17 nt, Human
gaacucucuccacccua

SEQ ID NO: 2581095 - RNA, 20 nt, Human
gaaccgcagaagccucccca

SEQ ID NO: 2581096 - RNA, 21 nt, Human
gaaccgcagaagccuccccag

SEQ ID NO: 2581097 - RNA, 15 nt, Human
gaacuccuggccuca

SEQ ID NO: 2581098 - RNA, 15 nt, Human
gaacuccuugauuuu

SEQ ID NO: 2581099 - RNA, 14 nt, Human
gaacuccugggcuc

SEQ ID NO: 2581100 - RNA, 18 nt, Human
gaaccgaggggcucagga

SEQ ID NO: 2581101 - RNA, 21 nt, Human
gaaccgaggggcucaggaaaa

SEQ ID NO: 2581102 - RNA, 23 nt, Human
gaaccgagcaaagaucaaaauaa

SEQ ID NO: 2581103 - RNA, 21 nt, Human
gaaccgagcaaagaucaaaau

SEQ ID NO: 2581104 - RNA, 19 nt, Human
gaaccgagcaaagaucaaa

SEQ ID NO: 2581105 - RNA, 23 nt, Human
gaacccuuuuggcccccgagcug

SEQ ID NO: 2581106 - RNA, 17 nt, Human
gaacccuuggcuugccc

SEQ ID NO: 2581107 - RNA, 18 nt, Human
gaacccuuggcuugccca

SEQ ID NO: 2581108 - RNA, 20 nt, Human
gaacccuuggcuugcccacg

SEQ ID NO: 2581109 - RNA, 21 nt, Human
gaacccuuggcuugcccacgu

SEQ ID NO: 2581110 - RNA, 23 nt, Human
gaacccugugcugguguccugac

SEQ ID NO: 2581111 - RNA, 17 nt, Human
gaacccuuuuggccccc

SEQ ID NO: 2581112 - RNA, 18 nt, Human
gaacccuuuuggcccccg

SEQ ID NO: 2581113 - RNA, 19 nt, Human
gaacccuuuuggcccccga

SEQ ID NO: 2581114 - RNA, 17 nt, Human
gaaccgagcaaagauca

SEQ ID NO: 2581115 - RNA, 17 nt, Human
gaacccugugcuggugu

SEQ ID NO: 2581116 - RNA, 14 nt, Human
gaacccugugcugg

SEQ ID NO: 2581117 - RNA, 19 nt, Human
gaacccugcguggggacag

SEQ ID NO: 2581118 - RNA, 12 nt, Human
gaacccuuggcu

SEQ ID NO: 2581119 - RNA, 16 nt, Human
gaacccuuggcuugcc

SEQ ID NO: 2581120 - RNA, 18 nt, Human
gaacccugcguggggaca

SEQ ID NO: 2581121 - RNA, 13 nt, Human
gaacccugugcug

SEQ ID NO: 2581122 - RNA, 12 nt, Human
gaagaauuccag

SEQ ID NO: 2581123 - RNA, 14 nt, Human
gaagaaugaacaaa

SEQ ID NO: 2581124 - RNA, 23 nt, Human
gaagaauugaacccaggaggugg

SEQ ID NO: 2581125 - RNA, 18 nt, Human
gaagaauugaacccagga

SEQ ID NO: 2581126 - RNA, 19 nt, Human
gaagaauugaacccaggag

SEQ ID NO: 2581127 - RNA, 20 nt, Human
gaagaauugaacccaggagg

SEQ ID NO: 2581128 - RNA, 13 nt, Human
gaagaauuuuaaa

SEQ ID NO: 2581129 - RNA, 12 nt, Human
gaagaauuuuaa

SEQ ID NO: 2581130 - RNA, 14 nt, Human
gaagaauuuguuau

SEQ ID NO: 2581131 - RNA, 13 nt, Human
gaagaauuuguua

SEQ ID NO: 2581132 - RNA, 15 nt, Human
gaagaauuuuaaaaa

SEQ ID NO: 2581133 - RNA, 14 nt, Human
gaagaauuuuaaaa

SEQ ID NO: 2581134 - RNA, 23 nt, Human
gaagaauuuuaaaaaugaauccu

SEQ ID NO: 2581135 - RNA, 15 nt, Human
gaagaauuuucagac

SEQ ID NO: 2581136 - RNA, 14 nt, Human
gaagaauauucagg

SEQ ID NO: 2581137 - RNA, 19 nt, Human
gaagaauacaaacauauuu

SEQ ID NO: 2581138 - RNA, 17 nt, Human
gaagaauauucaggacu

SEQ ID NO: 2581139 - RNA, 20 nt, Human
gaagaaucuguuucccagca

SEQ ID NO: 2581140 - RNA, 19 nt, Human
gaagaauauucaggacuua

SEQ ID NO: 2581141 - RNA, 12 nt, Human
gaacuggcugca

SEQ ID NO: 2581142 - RNA, 11 nt, Human
gaacuggcugc

SEQ ID NO: 2581143 - RNA, 17 nt, Human
gaacugaaguuucacau

SEQ ID NO: 2581144 - RNA, 12 nt, Human
gaacugaacuca

SEQ ID NO: 2581145 - RNA, 17 nt, Human
gaacugagcuccucugg

SEQ ID NO: 2581146 - RNA, 19 nt, Human
gaacugagcuccucugggc

SEQ ID NO: 2581147 - RNA, 17 nt, Human
gaacugccucuuuccug
